(19) United States
(12) Patent Application Publication
(10) Pub. No.: US 2022/0218752 A1
(43) Pub. Date: Jul. 14, 2022

(54) LOCKR-MEDIATED RECRUITMENT OF CAR T CELLS

(71) Applicants: University of Washington, Seattle, WA (US); FRED HUTCHINSON CANCER RESEARCH CENTER, Seattle, WA (US)

(72) Inventors: David BAKER, Seattle, WA (US); Scott BOYKEN, Seattle, WA (US); Marc Joseph LAJOIE, Seattle, WA (US); Robert A. LANGAN, Seattle, WA (US); Stanley R. RIDDELL, Seattle, WA (US); Alexander SALTER, Seattle, WA (US)

(21) Appl. No.: 17/610,083

(22) PCT Filed: May 18, 2020
(86) PCT No.: PCT/US2020/033463

§ 371 Date: Nov. 9, 2021

Related U.S. Application Data
(60) Provisional application No. 62/964,024, filed on Jan. 21, 2020.
(60) Provisional application No. 62/848,840, filed on May 16, 2019.

(51) Int. Cl. A61K 35/17; C12N 15/86; C12N 5/0783; C12N 15/62; A61K 38/17; C07K 14/47; C07K 14/725; C07K 14/705; C07K 14/005

(52) U.S. Cl. CPC A61K 35/17; C12N 15/86; C12N 5/0636; C12N 15/625; A61K 38/1774; C07K 14/4747; C07K 2319/30; C07K 14/70596; C07K 14/005; C12N 2740/15043; C12N 2800/107; C12N 2510/00; C12N 2501/2302; C07K 14/7051

(57) ABSTRACT

Disclosed are protein switches that can sequester bioactive peptides and/or binding domains, holding them in an inactive (“off”) state, until combined with a second designed polypeptide called the key, which induces a conformational change that activates (“on”) the bioactive peptide or binding domain only when the protein switch components are co/localized when bound to their targets, components of such protein switches, and their use.

### CROSS REFERENCE

[0001] This application claims priority to U.S. Provisional Patent Application Ser. Nos. 62/848,840 filed May 16, 2019 and 62/964,024 filed Jan. 21, 2020, each incorporated by reference herein in its entirety.

### FEDERAL FUNDING STATEMENT

[0002] This invention was made with government support under Grant No. CHE-1629214 awarded by the National Science Foundation, Grant No. HDTRA1-18-1-0001 awarded by the Defense Threat Reduction Agency, and Grant No. R01 CA114536 awarded by the National Institutes of Health. The government has certain rights in the invention.

### REFERENCE TO SEQUENCE LISTING SUBMITTED ELECTRONICALLY VIA EFS-WEB

[0003] This application contains a Sequence Listing submitted as an electronic text file named “19-852-PCT_Sequence-Listing_ST25.txt”, having a size in bytes of 32 MB, and created on May 14, 2020. The information contained in this electronic file is hereby incorporated by reference in its entirety pursuant to 37 CFR § 1.52(e)(5).

### BACKGROUND

[0004] Biology is adept at integrating multiple signals to control function; however, natural systems are highly evolved for specific functions that make them difficult to repurpose. Engineering systems that can integrate combinations of binding events and predictively respond remains an outstanding challenge. Such a system would be particularly useful for targeting cells based on recognition of a combination of surface markers: most mammalian cell types differ from other tissues only in the combinations of markers present on their surfaces.

### SUMMARY

[0005] In one aspect, the disclosure provides methods of increasing selectivity of a cell for a chimeric antigen receptor (CAR) T cell therapy comprising

[0006] (a) contacting cells with a first cage polypeptide fused to a first binding domain, wherein the first cage polypeptide comprises (i) a structural region and (ii) a latch region further comprising one or more bioactive peptides, wherein the structural region interacts with the latch region to prevent activity of the one or more bioactive peptides in the absence of colocalization with a key polypeptide and wherein the first binding domain is capable of binding to a first cell moiety present on or within a cell; and

[0007] (b) contacting the cell with a first key polypeptide fused to a second binding domain, wherein upon colocalization with the first cage polypeptide, the first key polypeptide is capable of binding to the cage structural region to activate the one or more bioactive peptides, wherein the second binding domain is capable of binding to a second cell moiety present on or within the cell,

[0008] wherein the first cell moiety and the second cell moiety are different or the same.

[0009] In another aspect, the disclosure provides methods of increasing selectivity of cells that are interacting with each other for a chimeric antigen receptor T cell therapy comprising:

[0010] (a) contacting two or more cells with a first cage polypeptide fused to a first binding domain, wherein the first cage polypeptide comprises (i) a structural region and (ii) a latch region further comprising one or more bioactive peptides, wherein the structural region interacts with the latch region to prevent activity of the one or more bioactive peptides in the absence of colocalization with a key polypeptide and wherein the first binding domain is capable of binding to a first cell moiety present on a synapse between the two or more cells; and

[0011] (b) contacting the two or more cells with a first key polypeptide fused to a second binding domain, wherein upon colocalization with the first cage polypeptide, the first key polypeptide is capable of binding to the cage structural region to activate the one or more bioactive peptides, wherein the second binding domain is capable of binding to a second cell moiety present on the synapse between the two or more cells,

[0012] wherein the first cell surface moiety and the second cell surface moiety are the same or different.

[0013] In a further aspect, the disclosure provides methods of targeting heterogeneous cells (more than two different cell types) for a chimeric antigen receptor T cell therapy, wherein a first cell moiety and a second cell moeity are present on the first cell and a first cell moiety and a third cell moiety are present on the second cell, comprising, comprising:

[0014] (a) contacting two or more cells with a first cage polypeptide fused to a first binding domain, wherein the first cage polypeptide comprises (i) a structural region and (ii) a latch region further comprising one or more bioactive peptides, and wherein the structural region interacts with the latch region to prevent activity of the one or more bioactive peptides in the absence of colocalization with a key polypeptide and wherein the first binding domain is capable of binding to a first cell moiety present on or within the two or more cells;

[0015] (b) contacting the two or more cells with a first key polypeptide fused to a second binding domain, wherein upon colocalization, the first key polypeptide is capable of binding to the cage structural region to activate the one or more bioactive peptides and wherein the second binding domain is capable of binding to a second cell moiety present on a cell that also comprises the first cell moiety, and

[0016] (c) contacting the two or more cells with a second key polypeptide fused to a third binding domain, wherein upon colocalization, the second key polypeptide is capable of binding to the cage structural region to activate the one or more bioactive peptides and wherein the third binding domain is capable of binding to a third cell moiety in a cell that comprises the first cell moiety,

[0017] wherein the first cell moiety, the second cell moiety, and the third cell moiety are different and the cell that comprises the second cell moiety and the cell that comprises the third cell moiety are different.

[0018] In one aspect, the disclosure provides methods of reducing off-target activity for a chimeric antigen receptor T cell therapy comprising

[0019] (a) contacting two or more cells with a first cage polypeptide fused to a first binding domain, wherein the first cage polypeptide comprises (i) a structural region and (ii) a latch region further comprising one or more bioactive peptides, and wherein the structural region interacts with the latch region to prevent activity of the one or more bioactive peptides in the absence of colocalization with a key polypeptide and wherein the first binding domain is capable of binding to a first cell moiety present on a cell;

[0020] (b) contacting the two or more cells with a first key polypeptide fused to a second binding domain, wherein upon colocalization, the first key polypeptide is capable of binding to the cage structural region to activate the one or more bioactive peptides and wherein the second binding domain is capable of binding to a second cell moiety present on a cell that also comprises the first cell moiety, and

[0021] (c) contacting the two or more cells with a decoy cage polypeptide fused to a third binding domain, wherein the decoy cage polypeptide comprises a decoy structural region, which upon colocalization with the key polypeptide and the first cage polypeptide, is capable of preferentially binding to the first key polypeptide and wherein the third binding domain is capable of binding to a third cell moiety in a cell that comprises the first cell moiety and the second cell moiety.

[0022] In another aspect, the disclosure provides protein complexes comprising (i) a first cage polypeptide fused to a first binding domain and (ii) a first key polypeptide fused to a second binding domain, wherein the first cage polypeptide comprises (i) a structural region and (ii) a latch region further comprising one or more bioactive peptides, wherein the first key polypeptide binds to the cage structural region, wherein the one or more bioactive peptides are activated, and wherein the first binding domain binds to a first cell moiety present on or within a cell or on a synapse of two interacting cells and the second binding domain binds to a second cell moiety present on or within the cell or on a synapse of the two interacting cells, wherein the first cell moiety and the second cell moiety are different or the same.

[0023] In a further aspect, the disclosure provides protein complexes comprising (i) a first key polypeptide fused to a first binding domain and (ii) a decoy cage polypeptide fused to a second binding domain, wherein the first key polypeptide binds to the decoy cage polypeptide, and wherein the first binding domain binds to a first cell moiety present on or within a cell or on a synapse of two interacting cells and the second binding domain binds to a second cell moiety present on or within the cell or on a synapse of the two interacting cells, wherein the first cell moiety and the second cell moiety are different or the same.

[0024] In one aspect, the disclosure provides compositions comprising

[0025] (a) a first cage polypeptide fused to a first binding domain or a polynucleotide encoding the same, wherein the first cage polypeptide comprises (i) a structural region and (ii) a latch region further comprising one or more bioactive peptides, wherein the structural region interacts with the latch region to prevent activity of the one or more bioactive peptides in the absence of colocalization with a key polypeptide and wherein the first binding domain is capable of binding to a first cell moiety present on or within a cell; and

[0026] (b) a first key polypeptide fused to a second binding domain or a polynucleotide encoding the same, wherein upon colocalization with the first cage polypeptide, the first key polypeptide is capable of binding to the cage structural region to activate the one or more bioactive peptides, wherein the second binding domain is capable of binding to a second cell moiety present on or within the cell,

[0027] wherein the first cell moiety and the second cell moiety are different or the same and wherein the cell is a target for a chimeric antigen receptor (CAR) T cell therapy.

[0028] In another aspect, the disclosure provides compositions comprising

[0029] (a) a first cage polypeptide comprising (i) a structural region, (ii) a latch region further comprising one or more bioactive peptides, and (iii) a first binding domain wherein the structural region interacts with the latch region to prevent activity of the one or more bioactive peptides;

[0030] (b) a first key polypeptide capable of binding to the cage structural region to activate the one or more bioactive peptides, wherein the key polypeptide comprises a second binding domain, wherein the first binding domain and the second binding domain bind to (i) different moieties on the surface of the same cell, (ii) the same moiety on the surface of the same cell, (iii) different moieties at the synapse between two cells that are in contact, or (iv) the same moiety at the synapse between two cells that are in contact; and

[0031] (c) cells comprising one or more chimeric antigen receptor(s) that bind to the one or more bioactive peptides when the one or more bioactive peptides are activated.

[0032] In a further aspect, the disclosure provides compositions comprising

[0033] (a) one or more expression vectors encoding and/or cells expressing:
[0034] (i) a first cage polypeptide comprising (i) a structural region, (ii) a latch region further comprising one or more bioactive peptides, and (iii) a first binding domain wherein the structural region interacts with the latch region to prevent activity of the one or more bioactive peptides; and
[0035] (ii) a first key polypeptide capable of binding to the cage structural region to activate the one or more bioactive peptides, wherein the key polypeptide comprises a second binding domain,

[0036] wherein the first binding domain and the second binding domain bind to (i) different moieties on the surface of the same cell, (ii) the same moiety on the surface of the same cell, (iii) different moieties at the synapse between two cells that are in contact, or (iv) the same moiety at the synapse between two cells that are in contact; and
[0037] (b) (i) cells comprising one or more chimeric antigen receptor(s) that bind to the one or more bioactive peptides when the one or more bioactive peptides are activated; and/or (ii) one or more fusion protein, nucleic acid, vector, and/or the cell of the disclosure.

[0038] In one aspect, the disclosure provides methods for cell targeting, comprising

[0039] (a) contacting a biological sample containing cells with
[0040] (i) a cage polypeptide comprising (i) a structural region, (ii) a latch region further comprising one or more bioactive peptides, and (iii) a first binding domain that targets a cell of interest, wherein the structural region interacts with the latch region to prevent activity of the one or more bioactive peptides; and
[0041] (ii) a key polypeptide comprising a second binding domain that targets the cell of interest, wherein the first binding domain and the second binding domain bind to (i) different moieties on the surface of the same cell, (ii) the same moiety on the surface of the same cell, (iii) different moieties at the synapse between two cells that are in contact, or (iv) the same moiety at the synapse between two cells that are in contact;

[0042] wherein the contacting occurs for a time and under conditions to promote binding of the cage polypeptide and the key polypeptide to the cell of interest, and to promote binding of the key polypeptide to the cage structural region to displace the latch region and activate the one or more bioactive peptides only when the cage polypeptide and the key polypeptide are co-localized to the cell of interest;

[0043] (b) contacting the biological sample with one or more effector molecule(s) under conditions to promote binding of the one or more effector molecules selected from the fusion proteins, nucleic acids, vectors, and/or cells of the disclosure under conditions to promote binding of the one or more effector molecules to the one or more activated bioactive peptides to produce an effector molecule-bioactive peptide complex; and

[0044] (c) optionally detecting the effector molecule-bioactive peptide complex, wherein the effector molecule-bioactive peptide complex provides a measure of the cell of interest in the biological sample.

[0045] In another aspect, the disclosure provides fusion proteins comprising:

[0046] (a) an extracellular binding domain;

[0047] (b) a transmembrane domain;

[0048] (c) an intracellular signaling component; and

[0049] (d) optionally, a selection marker.

### DESCRIPTION OF THE FIGURES

[0050] FIG. 1a-g. A de novo designed protein switch performs AND logic on the cell surface. a. The ability to compute logic operations on the surface of cells could increase targeting selectivity, provide flexibility for heterogeneous tissue, and avoid healthy tissue. b. Structure of new Cage design used to create Co-LOCKR; the x-ray crystal structure (white) matches the computational design model (green) with 1.1 Å RMSD across all backbone atoms. Cross-sections illustrate asymmetric packing of hydrophobic residues (red square) and an asymmetric hydrogen bond network (blue square). c. Schematic of colocalization-dependent protein switches tuned such that Cage and Key do not interact in solution but strongly interact when colocalized on a surface. Co-LOCKR subunits bind to a surface via a targeting domain. d. Flow cytometry discriminates Her2⁺/EGFR⁺ cells in a mixed population of K562 cells expressing Her2-eGFP, EGFR-iRFP, both, or neither. e. Schematic depicting ‘AND’ logic in which recruitment of an Effector protein occurs when Cage and Key are colocalized on the surface of the same cell. f. The mixed population of K562 cells from FIG. 1c was incubated with 111 nM Her2-targeted Cage, 111 nM EGFR-targeted Key, and 50 nM Bcl2-AF594. Bcl2 binding was only observed for the K562/Her2/EGFR cells. g. The mixed population of K562 cells from FIG. 1c was incubated with a dilution series of Her2-targeted Cage and EGFR-targeted Key. In addition, 50 nM Bcl2-AF594 was either co-incubated with Co-LOCKR (solid lines) or added after washing the cells (dashed lines). The gray shaded region of the plot represents colocalization-independent activation in which excess amounts of Cage and Key outcompete Cage-Key-Bcl2 complexes (formed in solution) from binding to the target cells. Bcl2 binding is reported relative to K562 cells incubated with 3000 nM Her2-targeted Cage, 3000 nM EGFR-targeted Key, and 50 nM Bcl2-AF594.

[0051] FIG. 2a-d. Tuning Co-LOCKR sensitivity. a. Design model of Co-LOCKR with the Bim functional peptide in yellow. Three buried hydrophobic amino acids were mutated to either Ala or Ser to weaken the Cage-Latch affinity, thereby favoring Cage-Key binding. b. Tuned Co-LOCKR variants exhibit greater colocalization-dependent activation than the unmutated parental variant. CL_C_{H}K_{E} variants recruiting Bcl2-AF594 were evaluated by flow cytometry using the mixed population of K562 cells from FIG. 1c. The data shown represent 12.3 nM CL_C_{H}K_{E}, and FIG. 9c shows the complete dilution series for each variant. c. Confocal microscopy of HEK293T cell lines shows that Co-LOCKR switches recruit Bcl2-AF680 Effector proteins only where Her2 and EGFR are colocalized. Each cell line was incubated with CL_C_{H}K_{E} (I269S Cage) and Bcl2-AF680 before imaging. NucBlue™ is a nuclear stain, eGFP indicates Her2 localization, mCherry™ indicates EGFR localization, AF680 indicates Bcl2 binding in response to Co-LOCKR activation, and white indicates the intersection of Her2-eGFP and EGFR-mCherry™ signal. Scale bars are 10 Uncropped versions of these images are included in FIG. 21a-c. d. Heat map showing the intensity of AF680 signal (Co-LOCKR activation) versus eGFP (Her2) and mCherry™ (EGFR) pixel intensity. Calculations were based on the uncropped 293T/Her2/EGFR image in FIG. 21a.

[0052] FIG. 3a-d. Co-LOCKR performs 2- and 3-input logic operations in mixed cell populations. a. Co-LOCKR was used to recruit Bcl2-AF594 for two populations of K562 cells expressing different combinations of Her2, EGFR, and EpCAM. Marker expression for each cell line and identity of the Cage and Key targeting domains are indicated below each bar plot. Red highlighting indicates the expected magnitude of Bcl2-AF594 signal based on relative antigen expression. b. Schematic of [Her2 AND either EGFR OR EpCAM] logic mechanism. c. [Ag₁ AND either Ag₂ OR Ag₃] logic combinations were used to recruit Bcl2-AF594. d. Schematic of [Her2 AND EpCAM NOT EGFR] logic mechanism. The Decoy acts as a sponge to sequester the Key, thereby preventing Cage activation. e. CL_C_{H}K_{Ep}D_{E} was used to recruit Bcl2-AF594. The parental Cage (left) was compared to the I287A Cage (right). The magnitude of signal for CL_C_{H}K_{Ep}D_{E} is reduced compared to the CL_C_{H}K_{Ep} likely because the Decoy competes for Key binding in solution; however, adequate signal remains to compute [Her2 AND EpCAM NOT EGFR] logic. For all panels, population 1 was [K562/EpCAM^{lo}, K562/EGFR/EpCAM^{lo}, K562/EpCAM^{lo}/Her2, and K562/EGFR/EpCAM^{lo}/Her2], and population 2 was [K562/EpCAM^{lo}, K562/EGFR/EpCAM^{lo}, K562/EpCAM^{hi}/Her2, and K562/EGFR/EpCAM^{hi}/Her2]. Error bars represent SEM of 6 independent replicates for K562 and K562/EGFR and 3 independent replicates for all others.

[0053] FIG. 4a-i. Co-LOCKR directs CAR T cell specificity using 2- and 3-input logic operations. a,d,g. Mean IFN-γ concentration in cell supernatants 24 hours after co-culture of Cage, Key, and K562 cells with CAR T cells. Marker expression for each cell line and identity of the Cage and Key targeting domains are indicated below each bar plot. Red highlighting indicates the expected magnitude of signal based on the target cell's relative antigen expression. Error bars represent SEM of n=4 (a) or 3 (d,g) healthy T cell donors. AND/NOT logic is demonstrated with EpCAM^{lo} target K562 cells because T cell effector function was leaky for EpCAM^{hi} target cells (see FIG. 515a). b,e,h. CAR T cell proliferation in response to [Her2 AND EpCAM] (c), [Her2 AND EGFR OR EpCAM] (e), or [Her2 AND EpCAM NOT EGER] (h) logic. Bar plots are the percent of T cells that have undergone at least one cell division by 72 hours after co-culture of CAR T cells, Cage, Key, and target K562 cells. Histograms show flow cytometric analysis of CFSE dye dilution gated on CD8⁺ lymphocytes. The data are representative of n=3 biological replicates with healthy T cell donors. c,f,i. CAR T cell cytotoxicity against mixed populations of target Raji cells expressing combinations of Her2, EpCAM, and EGFR. Line graphs show mean frequency of Raji target cells after 0 or 48 hours of co-culture with CAR T cells. n=4 (c,f) or 3 (1) healthy donors. Arrows indicate cell lines targeted by Co-LOCKR.

[0054] FIG. 5a-c. Computational design of Co-LOCKR. a. Overview of how LOCKRa was designed in Langan et al. (9). An existing homotrimer (10) was connected into a single polypeptide chain, and the Cage/Latch interface was tuned so that Key binding would induce activation. b. Computational design of Co-LOCKR. All side chains were removed from the LOCKRa backbone except for the residues involved in the existing hydrogen bond networks and the Cage-Latch interface. A new Rosetta design run searched for asymmetric hydrogen bond networks and then asymmetrically designed the core and surface residues. The resulting helical bundle was shortened so as to reduce aggregation, and the Cage-Latch and Cage-Key interfaces were tuned to achieve colocalization dependence. Decoys were created by redesigning the Co-LOCKR Cage to remove the Bim functional peptide and tuning their affinity for the Key. c. Cross-sections of LOCKRa and Co-LOCKR showing core redesign to replace C3 symmetric hydrophobic packing with a new hydrogen bond network (left) or asymmetric hydrophobic packing (right). d. LOCKRa and Co-LOCKR share 60.8% sequence identity (pairwise sequence identity performed using Geneious software, global alignment with free end gaps).

[0055] FIG. 6. Redesign of LOCKR Cage reduces aggregation. The Langan et al. (9) LOCKRa Cage and asymLOCKR (top) and three new variants of the Co-LOCKR Cage (bottom) with 0, 7, or 10 residues deleted from the C-terminus of their latch were evaluated by Size Exclusion Chromatography using a Superdex™ 75 Increase 10/300 GL column (GE).

[0056] FIG. 7a-c. The Co-LOCKR system is controlled by a thermodynamic mechanism based on reversible protein-protein interactions. Co-localizing Cage and Key on the same surface results in a large increase in local concentration, shifting the binding equilibrium. According to the thermodynamic mechanism, a complex can form in solution (a) or on a surface (b). Our flow cytometry data shows that any pre-complexed Co-LOCKR that occurs in solution does not lead to appreciable staining of single-antigen target cells. c. Colocalization shifts the response curve to the left so that activation can occur at lower concentrations of Co-LOCKR proteins.

[0057] FIG. 8a-b. The strengths of Cages and Decoys can be tuned by modulating the Cage-Latch, Cage-Key, Decoy-Latch, and Decoy-Key interfaces. Residues involved in the Cage-Latch and Cage-Key interface are colored orange. Bim is shown in magenta. We rationally reduced the affinity of these interfaces by replacing large hydrophobic amino acids with small hydrobophic amino acids or serine. a. Side view of the Cage in an ‘off’ conformation. b. Side view of the Key. c. Cross-section of the Cage in an ‘off’ conformation.

[0058] FIG. 9a-e. Mutations in the Cage-Latch interface can predictably tune the sensitivity of Co-LOCKR switches. a. Design model of Co-LOCKR with the Bim functional peptide in yellow. Three buried hydrophobic amino acids were mutated to either Ala or Ser to weaken the Cage-Latch affinity, thereby favoring Cage-Key binding. This panel is reproduced from FIG. 2a. b. Colocalization-independent activation was evaluated using biolayer interferometry (Octet). A dilution series of CL_C_{H}K_{E} was evaluated for binding to biotinylated Bcl2 immobilized on a streptavidin Octet tip. More disruptive mutations increased the sensitivity of the switch. c. Tuned Co-LOCKR variants exhibit greater colocalization-dependent activation sensitivity and responsiveness than the parental Co-LOCKR variant. Dilution series of CL_C_{H}K_{E} variants were evaluated by flow cytometry using the mixed population of K562 cells from FIG. 1c. Bcl2-AF594 was recruited to K562/Her2/EGFR cells (solid lines), with minimal binding to K562, K562/Her2, and K562/EGFR cells (dotted lines represent maximum off-target binding signal). More disruptive mutations increased the sensitivity of the switch, and the I269S variant exhibited the greatest switch activation. On-target binding peaked at ˜37 nM for the parental variant and ˜12 nM for the mutated variants. d. Switch activation of the I269S variant was enhanced for low CL_C_{H}K_{E} concentrations by incubating cells in larger volumes prior to flow cytometry. e. On-target but not off-target switch activation increased when 2 nM of the CL_C_{H}K_{E} I269S variant was incubated with target cells in larger incubation volumes.

[0059] FIG. 10a-c. Co-LOCKR variants were evaluated for colocalization-dependent activation in a mixed population of K562 cells expressing Her2-eGFP, EGFR-iRFP, both, or neither. Co-LOCKR Cage variants and Keys were mixed, serially diluted, and evaluated for on-target activation (a), off-target activation (b), and specificity (on-target/max off-target, c) as measured by Bcl2-AF594 binding. Variant 1269S had the highest on-target activation, the parental Cage had the lowest off-target activation, and variant I287A had the best fold targeting specificity. On-target binding peaked at ˜37 nM Cage and Key for the parental variant and ˜12 nM Cage and Key for the tuned variants. Each bar represents a single data point.

[0060] FIG. 11a-b. Expression levels of EGFR, EpCAM, and Her2 on K562 and Raji tumor cells. Flow cytometric analysis of EGFR (red), EpCAM (blue), and Her2 (green) expression on the indicated K562 (a) or Raji (b) cell lines. All antibodies were used in the PE channel to permit quantitation of the number of surface molecules using Quantibrite beads.

[0061] FIG. 12a-c. Co-LOCKR ‘AND’ logic distinguishes cancer cell lines based on their combinations of surface antigens. a. Targeting domains directly fused to Bim were used to measure relative expression of Her2, EGFR, and EpCAM based on Bcl2-AF594. b. Co-LOCKR distinguished A431 (Her2^{low}/EGFR^{high}/EpCAM^{low}) and SKBR3 (Her2^{high}/EGFR^{low}/EpCAM^{low}) based on their endogenous levels of antigen expression. K562/Her2/EGFR/EpCAM^{KO} cells were used as a specificity control. Co-LOCKR activation was measured by Bcl2-AF594 recruitment. c. Consistent with a stoichiometric mechanism of activation, Co-LOCKR signal is limited by amount of lesser-expressed surface antigen. Furthermore, activation signal is higher when one of the antigens is expressed at high levels compared to when both antigens are expressed at low levels. This suggests that Co-LOCKR can act as a thresholding gate to avoid cells with low antigen expression. Indeed, this may account for the preferential targeting of K562 cells expressing high levels of EpCAM in FIG. 3a. The vertical axis is Bcl2-AF594 recruitment by Co-LOCKR, and the horizontal axis is Bcl2-AF594 recruitment by Bim-DARPin targeted to the lesser-expressed antigen in the logical operation.

[0062] FIG. 13. Using scFvs for Co-LOCKR targeting in a mixed population of K562 cells expressing Her2-eGFP, EGFR-iRFP, both, or neither. Cage_I269S targeted against Her2 via a Anti-Her2 scFv was combined with Key targeted against EGFR via a Cetuximab scFv. This mixture was serially diluted and evaluated for the ability to specifically target K562 cells co-expressing Her2 and EGFR as measured by Bcl2-AF594 binding. The solid line was unwashed, and the dashed line was washed within 30 minutes of analysis.

[0063] FIG. 14a-b. Tuning Cage and Decoy variants to perform [Her2 AND EpCAM NOT EGFR] logic. a. Cages with strong Cage-Latch interfaces exhibit weak ‘AND’ activation and tight ‘NOT’ deactivation, whereas cages with weak Cage-Latch interfaces exhibit strong ‘AND’ activation and leaky ‘NOT’ deactivation. These results show that Cage activity can be tuned for a desired biological function. For example, variants I287A, I287S, and 1269S exhibit greater sensitivity for [Her2 AND EpCAM^{low}] while minimally compromising leakiness in the presence of EGFR, whereas the parental Cage exhibits better deactivation for [Her2 AND EpCAM^{low} NOT EGFR]. b. Decoys can be tuned to reduce the leakiness of ‘NOT’ deactivation. Decoy variants with destabilizing mutations or truncations to weaken the latch were evaluated for the ability to perform [Her2 AND EpCAM NOT EGFR] logic on a mixed population of cells: K562/EpCAM^{low} (gray), K562/EGFR/EpCAM^{low} (yellow), K562/Her2/EpCAM^{high} (purple), and K562/Her2/EpCAM^{high}/EGFR (brown). The strongest Decoys (e.g., G24) exhibit minimal leakiness, but reduce targeting of K562/Her2/EpCAM^{high}, likely due co-localization-independent Key binding; the weakest Decoys (e.g., Box1C1) exhibit the highest targeting of K562/Her2/EpCAM^{high} along with substantial leakiness on K562/Her2/EpCAM^{high}/EGFR. Each bar represents n=1 sample.

[0064] FIG. 15a-d. Tuning Cage and Decoy variants to perform [Her2 AND EpCAM NOT EGFR] logic. Different Key and Cage concentrations were tested against 0 nM, 5 nM, or 20 nM of either EGFR_Decoy1 or EGFR_Decoy_G31. The purple “On-target” line corresponds to the desired AND signal for K562/EpCAM^{hi}/Her2 in the absence of Decoy, and the brown “Off-target” line corresponds to the undesired AND signal for K562/EGFR/EpCAM^{hi}/Her2 that the Decoy must abrogate. Using 5 nM EGFR_Decoy_G31 as the NOT gate enhances on-target binding signal, while minimally increasing undesired targeting of K562/EGFR/EpCAM^{hi}/Her2. These results are consistent with the hypothesis that Decoy-Key binding in solution should be minimized to preserve Co-LOCKR signal. a. 5 nM Key_EpCAM, 5 nM Her2_Cage. b. 5 nM Key_EpCAM, 5 nM Her2_Cage_I287A. c. 20 nM Key_EpCAM, 20 nM Her2_Cage. The original condition described in FIG. 3e is annotated. d. 20 nM Key_EpCAM 20 nM Her2_Cage_I287A.

[0065] Figure S16a-h. Tuning Co-LOCKR for selective CAR T cell tumor targeting. a. Schematic of a Bim-specific Bcl2 CAR. b. CAR T cell culture methods and flow cytometric analysis of HA tag (CAR expression) and EGFRt (transduction marker) on expanded CAR T cells. Plot is gated on CD8⁺ singlet lymphocytes and is representative of n=4 healthy T cell donors. c. Mean IFN-γ concentrations in supernatant 24 hours after co-culture of CAR T cells and Bim-expressing K562 cells (K562/Bim). Error bars represent SEM for n=2 healthy T cell donors. d,e. IFN-γ concentrations in cell supernatant 24 hours after co-culture of Cage, Key, and Raji cells with CAR T cells (n=1 healthy T cell donor). Responsiveness was tuned by mutating residues in the latch (d) or by deleting the N-terminal three (N3) or seven (N7) amino acids, or the C-terminal seven (C7) amino acids of the Key (e). Marker expression for each cell line and identity of the Cage and Key targeting domains are indicated below each plot. Red highlighting indicates the expected magnitude of signal based on the target cell's relative antigen expression. f. Schematic of cell killing assay in which four Raji cell lines are labeled with Cell Trace dyes and combined together with CAR T cells ±Cage and Key proteins. g. Flow cytometric analysis of cell killing after 48 hours. Plots show all CD5⁻ cells; frequencies of events within a given gate are indicated. h. T cell cytotoxicity was analyzed in a 4-hour Chromium release assay at various effector to target (E:T) ratios.

[0066] Figure S17. Co-LOCKR can perform ‘AND’ logic for CAR T cell targeting across a 10-fold concentration range. Her2_Cage and Key_N3_EpCAM concentrations were varied from 0 nM to 80 nM. Using 40 nM or 80 nM Co-LOCKR results in undesired targeting of K562/Her2/EpCAM^{KO} cells. Alternatively, using Cage and Key at <5 nM led to poor targeting of K562/Her2/EpCAM^{lo} but not K562/Her2/EpCAM^{hi}. Graphs show mean IFN-γ production from n=2 experiments performed with unique T cell donors (error bars are SEM)

[0067] Figure S18a-h. Co-LOCKR enables ‘AND’ and ‘OR’ logic-gated CAR T cell targeting. a,b. Mean IFN-γ concentration in cell supernatants 24 hours after co-culture of Cage, Key, and Raji (a), tumor cell lines (b) or K562 (c) cells with CAR T cells. Error bars represent SEM of n=4 healthy T cell donors. Marker expression for each cell line and identity of the Cage and Key targeting domains are indicated below each bar plot. Red highlighting indicates the expected magnitude of signal based on the target cell's relative antigen expression. d. CAR T cell proliferation in response to [Her2 AND EGFR] logic. Bar plots show the percent of T cells that have undergone at least one cell division 72 hours after co-culture of CAR T cells, Cage, Key, and target K562 cells. Histograms show flow cytometric analysis of CFSE dye dilution gated on CD8⁺ lymphocytes, and the data are representative of n=3 biological replicates with healthy T cell donors. e. CAR T cell cytotoxicity against mixed populations of Raji cells expressing combinations of Her2 and EGFR. Line graphs show mean frequency of Raji target cells after 0 or 48 hours of co-culture with CAR T cells (n=4 healthy T cell donors; solid lines=with Cage and Key, dotted lines=without Cage and Key). Arrows indicate cell lines targeted by Co-LOCKR. f. Mean frequency of live T cells in the mixed population of CART cells and Raji cells as in e. Error bars represent SEM of n=2 or 4 healthy blood donors. g. Mean IFN-γ concentration in cell supernatants 24 hours after co-culture of Cage, Keys, and K562 cells with CAR T cells as in c. Error bars represent SEM of n=3 healthy T cell donors. h. CAR T cell cytotoxicity against mixed populations of Raji cells expressing combinations of Her2, EGFR, and EpCAM in response to [Ag₁ AND either Ag₂ OR Ag₃] logic as in e. n=4 healthy T cell donors. Two distinct mixed Raji populations with five cell lines each were created because it was difficult to simultaneously distinguish all six cell lines based on Cell Trace staining. Arrows indicate cell lines targeted by Co-LOCKR.

[0068] Figure S19a-c. Co-LOCKR ‘NOT’ logic-gated CAR T cell targeting requires that Key antigen is expressed at a lower level than Decoy antigen. a. Mean IFN-γ concentration in cell supernatants 24 hours after co-culture of Cage, Key, and K562 cells with CAR T cells. Error bars represent SEM of n=3 healthy T cell donors. Marker expression for each cell line and identity of the Cage and Key targeting domains are indicated below each bar plot. Red highlighting indicates the expected magnitude of signal based on the target cell's relative antigen expression. b. CART cell proliferation in response to [Ag₁ AND Ag₂ NOT Ag₃] logic. Histograms show flow cytometric analysis of CFSE dye dilution 72 hours after co-culture of Cage, Key, ±Decoy and target K562 cells with CAR T cells. Plots are gated on CD8⁺ lymphocytes, and the data are representative of n=3 biological replicates with healthy T cell donors. Two histograms are copied from FIG. 4h for reference. c. Bar plots show the percent of T cells that have undergone at least one cell division in the corresponding panel of b.

[0069] FIG. 20a-c. Uncropped confocal microscopy images of Co-LOCKR targeting HEK293T cells expressing Her2 and EGFR. a. The uncropped 293T/Her2/EGFR image used to generate FIG. 2c-d (green is Her2-eGFP, red is EGFR-mCherry, blue is Bcl2-AF680). b. The uncropped 293T/Her2/EGFR image pseudocolored as in FIG. 2c (white is the intersection of Her2-eGFP and EGFR-mCherry™, blue is NucBlue™, and magenta is Bcl2-AF680). The scale bar for the top panel is 20 μm and for the bottom panel is 10 μm. c. The uncropped images of all cell lines and staining conditions evaluated by confocal microscopy. The scale bars are 20 μm.

[0070] FIG. 21. DARPin binder affinity measured by flow cytometry. Anti-Her2 or anti-EGFR DARPins with N-terminal fusions to Bim were pre-complexed with Bcl2-AF594 and serially diluted 3-fold from 300 nM down to 0.4 nM. This dilution series was used to label a mixed population of K562 cells expressing Her2-eGFP, EGFR-iRFP, both, or neither for one hour at room temperature in a 50 μl incubation volume. The cells were then washed in PBS supplemented with 0.1% bovine serum albumin and analyzed on an LSRII flow cytometer. The apparent Kd of the DARPins was roughly 10 nM, consistent with the hypothesis Co-LOCKR activation is limited by DARPin binding affinity.

[0071] FIG. 22. Tuning the responsiveness of the Cage can enhance CAR T cell effector function against target cells exhibiting lower antigen expression. Bcl2 CAR T cells, and Co-LOCKR components (20 nM Cage and 20 nM Key_N3_EGFR) were combined with each Raji target cell line and IFN-γ production was evaluated via ELISA. Her2-Cage resulted in poor IFN-γ production against Raji target cells expressing low levels of Her2 and EGFR antigens. Her2_Cage_I269S, which was shown to result in greater activation in FIG. 2, resulted in higher levels of IFN-γ production against the same Raji target cells expressing low levels of Her2 and EGFR antigens. These results show that Co-LOCKR can be turned to target Effector function to target cells expressing different levels of target antigen.

### DETAILED DESCRIPTION

[0072] The compositions disclosed herein, also referred to as “Co-LOCKR systems” in the examples that follow, comprise of at least one cage polypeptide and at least one key polypeptide that may be used, for example, as proximity-activated de novo protein switches that perform ‘AND’, ‘OR’, and ‘NOT’ Boolean logic operations and combinations thereof in response to precise combinations of protein-binding events. The switches activate via a onformational change only when all logic conditions are met. The system is demonstrated in the examples to provide for ultraspecific targeting of mammalian cells that are distinguished in a complex cell population only by their precise combination of surface markers. An ‘AND’ gate may be achieved by targeting the cage polypeptide to one antigen and the key polypeptide to a different antigen. A ‘thresholding’ gate may be achieved by targeting the cage polypeptide and key polypeptide to the same antigen (this could be either with binding domains that bind to the same epitope or a different epitope on the same antigen). An ‘OR’ gate may be achieved by targeting the cage polypeptide or the key polypeptide to two different antigens. A ‘NOT’ gate may be achieved by supplementing a decoy cage polypeptide that sequesters the key polypeptide and prevents it from interacting with the cage polypeptide. Additional cage polypeptides, key polypeptides, and decoy cage polypeptides can be included to establish the desired logical operation (e.g., antigen 1 AND antigen 2 NOT antigen 3, antigen 1 AND either antigen 2 OR antigen 3).

[0073] Targeting specificity has been a long-standing problem in biomedicine. Despite the long-standing goal to target therapeutic agents against specific cell types, general solutions for targeting precise combinations of antigens that unambiguously identify the desired cell type are lacking. Natural systems capable of multiple-input integration are hard-coded to specific biological outputs that are difficult to modularly reassign. The methods, compositions, and polypeptides disclosed herein are modular because they comprised of de novo designed polypeptides that integrate the co-localization of two target antigens so as to conditionally expose a bioactive peptide that can recruit arbitrary effector functions. Before this work, it was not possible to produce a system that can integrate the co-localization of two or more antigens on the surface of a target cell so as to conditionally expose a bioactive peptide that can modularly recruit arbitrary effector functions. Furthermore, it was not previously possible to design such de novo proteins that can sequester a bioactive peptide in an inactive confirmation until they are co-localized. Finally, it was not previously possible to tune the sensitivity of a protein actuator to recruit the appropriate amount of effector molecule(s).

[0074] The compositions, fusion proteins, and methods disclosed herein can be used, for example, to specifically target cells of interest such as CART cells. As described in the examples that follow, the methods, fusion proteins, and compositions have been used for ultra-specific CAR T cell targeting, and directing CAR T cell cytotoxicity against certain cells within a complex milieu. The methods disclosed herein compute logic on a single cell expressing precise combinations of antigens in cis, specifically directing cytotoxicity against target cells without harming neighboring off-target cells that only provide a subset of the target antigens (FIG. 4c, f, i). ‘OR’ and ‘NOT’ logic have never been described for CAR T cells in combination with ‘AND’ logic. For example, the ability to implement complex logic (e.g., [Ag₁ AND either Ag₂ OR Ag₃] (FIG. 3c) and [Ag₁ AND Ag₂ NOT Ag₃] (FIG. 3d, FIG. 4g-i)) disclosed herein cannot be achieved with existing technologies.

[0075] The methods may comprise use of the fusion proteins, nucleic acids, vectors, cells, and/or compositions of any embodiment or combination of embodiments disclosed herein. In various embodiments, the method comprises the use of AND, OR, and/or NOT logic gates, using any embodiment or combination of embodiments as described in detail above and in the examples.

### I. Definition

[0076] All references cited are herein incorporated by reference in their entirety. As used herein, the singular forms “a”, “an” and “the” include plural referents unless the context clearly dictates otherwise.

[0077] As used herein, the amino acid residues are abbreviated as follows: alanine (Ala; A), asparagine (Asn; N), aspartic acid (Asp; D), arginine (Arg; R), cysteine (Cys; C), glutamic acid (Glu; E), glutamine (Gln; Q), glycine (Gly; G), histidine (His; H), isoleucine (Ile; I), leucine (Leu; L), lysine (Lys; K), methionine (Met; M), phenylalanine (Phe; F), proline (Pro; P), serine (Ser; S), threonine (Thr; T), tryptophan (Trp; W), tyrosine (Tyr; Y), and valine (Val; V).

[0078] All embodiments of any aspect of the disclosure can be used in combination, unless the context clearly dictates otherwise.

[0079] The description of embodiments of the disclosure is not intended to be exhaustive or to limit the disclosure to the precise form disclosed. While the specific embodiments of, and examples for, the disclosure are described herein for illustrative purposes, various equivalent modifications are possible within the scope of the disclosure, as those skilled in the relevant art will recognize.

[0080] The “cage polypeptides” as used herein can comprise a helical bundle comprising between 2 and 7 alpha-helices. In various embodiments, the helical bundle comprises 3-7, 4-7, 5-7, 6-7, 2-6, 3-6, 4-6, 5-6, 2-5, 3-5, 4-5, 2-4, 3-4, 2-3, 2, 3, 4, 5, 6, or 7 alpha helices.

[0081] Design of the helical bundle cage polypeptides of the disclosure may be carried out by any suitable means. In one non-limiting embodiment, a BundleGridSampler™ in the Rosetta™ program may be used to generate backbone geometry based on the Crick expression for a coiled-coil and allows efficient, parallel sampling of a regular grid of coiled-coil expression parameter values, which correspond to a continuum of peptide backbone conformations. This may be supplemented by design for hydrogen bond networks using any suitable means, followed by Rosetta™ sidechain design. In a further non-limiting embodiment, best scoring designs, based on total score, number of unsatisfied hydrogen bonds, and lack of voids in the core of the protein may be selected for helical bundle cage polypeptide design.

[0082] Each alpha helix may be of any suitable length and amino acid composition as appropriate for an intended use. In one embodiment, each helix is independently 18 to 60 amino acids in length. In various embodiments, each helix is independently between 18-60, 18-55, 18-50, 18-45, 22-60, 22-55, 22-50, 22-45, 25-60, 25-55, 25-50, 25-45, 28-60, 28-55, 28-50, 28-45, 32-60, 32-55, 32-50, 32-45, 35-60, 35-55, 35-50, 35-45, 38-60, 38-55, 38-50, 38-45, 40-60, 40-58, 40-55, 40-50, or 40-45 amino acids in length.

[0083] As used throughout the present application, the term “polypeptide” is used in its broadest sense to refer to a sequence of subunit amino acids. The polypeptides of the invention may comprise L-amino acids+glycine, D-amino acids+glycine (which are resistant to L-amino acid-specific proteases in vivo), or a combination of D- and L-amino acids+glycine. The polypeptides described herein may be chemically synthesized or recombinantly expressed. The polypeptides may be linked to other compounds to promote an increased half-life in vivo, such as by PEGylation, HESylation, PASylation, glycosylation, or may be produced as an Fc-fusion or in deimmunized variants. Such linkage can be covalent or non-covalent as is understood by those of skill in the art.

[0084] The term “linker” as used herein can be used to link one polypeptide, e.g., a structural region, to another polypeptide, e.g., a latch region. In some aspects, a polypeptide disclosed herein comprises a linker. In some aspects, the linker comprises one or more amino acids, e.g., an amino acid linker or a peptide linker. In some aspects, the linker connects a first alpha helix to a second alpha helix. The amino acid linkers connecting each alpha helix can be of any suitable length or amino acid composition as appropriate for an intended use. In one non-limiting embodiment, each amino acid linker is independently between 2 and 10 amino acids in length, not including any further functional sequences that may be fused to the linker. In various non-limiting embodiments, each amino acid linker is independently 3-10, 4-10, 5-10, 6-10, 7-10, 8-10, 9-10, 2-9, 3-9, 4-9, 5-9, 6-9, 7-9, 8-9, 2-8, 3-8, 4-8, 5-8, 6-8, 7-8, 2-7, 3-7, 4-7, 5-7, 6-7, 2-6, 3-6, 4-6, 5-6, 2-5, 3-5, 4-5, 2-4, 3-4, 2-3, 2, 3, 4, 5, 6, 7, 8, 9, or 10 amino acids in length. In all embodiments, the linkers may be structured or flexible (e.g. poly-GS). These linkers may encode further functional sequences, including but not limited to protease cleavage sites or one half of a split intein system.

[0085] In some aspects, one or more of the cage polypeptides and the key polypeptides further comprises a linker connecting the cage or key polypeptide and the one or more binding domains. In some aspects, the cage polypeptide comprises a linker connecting the cage polypeptide to the binding domain. In some aspects, the key polypeptide comprises a linker connecting the key polypeptide to the binding domain. Any linker known in the art may be used. In some aspects, the linker comprises one or more amino acids. In some aspects, the linker is cleavable. In some aspect, the linker is any linker disclosed herein.

[0086] The cage polypeptides include a region, termed the “latch region”, which may be used for insertion of a bioactive peptide. The cage polypeptide thus comprises a latch region and a structural region (i.e.: the remainder of the cage polypeptide that is not the latch region). When the latch region is modified to include one or more bioactive peptides, the structural region of the cage polypeptide interacts with the latch region to prevent activity of the bioactive peptide. Upon activation by key polypeptide after the cage and key polypeptides are co-localized while the binding domains are bound to their targets (as described below), the latch region dissociates from its interaction with the structural region to expose the bioactive peptide, allowing the peptide to function.

[0087] The latch region may be present near either terminus of the cage polypeptide. In one embodiment, the latch region is placed at the C-terminal helix so as to position the bioactive peptide for maximum burial of the functional residues that need to be sequestered to maintain the bioactive peptide in an inactive state while simultaneously burying hydrophobic residues and promoting solvent exposure/compensatory hydrogen bonds of polar residues. In various embodiments, the latch region may comprise a part or all of a single alpha helix in the cage polypeptide at the N-terminal or C-terminal portions. In various other embodiments, the latch region may comprise a part or all of a first, second, third, fourth, fifth, sixth, or seventh alpha helix in the cage polypeptide. In other embodiments, the latch region may comprise all or part of two or more different alpha helices in the cage polypeptide; for example, a C-terminal part of one alpha helix and an N-terminal portion of the next alpha helix, all of two consecutive alpha helices, etc.

[0088] As used herein, a “bioactive peptide” is any peptide of any length or amino acid composition that is capable of selectively binding to a defined target (i.e.: capable of binding to an “effector” polypeptide). Such bioactive peptides may comprise peptides of all three types of secondary structure in an inactive conformation: alpha helix, beta strand, and loop. The polypeptides of this aspect can be used to control the activity of a wide range of functional peptides. The ability to harness these biological functions with tight, inducible control is useful, for example, in engineering cells (inducible activation of function, engineering complex logic behavior and circuits, etc.), developing sensors, developing inducible protein-based therapeutics, and creating new biomaterials. Any suitable bioactive peptides and binding domains may be used in the compositions of the disclosure, as appropriate for an intended use. In one embodiment of the compositions of any embodiment or combination of embodiments of the disclosure, the one or more bioactive peptides may comprise one or more bioactive peptide selected from the group consisting of SEQ ID NO:60, 62-64, 66, 27052, 27053, and 27059-27093.

[0089] As used herein, the term “chimeric antigen receptor” (CAR) refers to a fusion protein comprising two or more distinct domains that are linked together in an arrangement that does not occur naturally, can function as a receptor when expressed on the surface of a cell, and comprises: an extracellular component comprising an binding domain specific for an antigen, such as the bioactive peptides as contemplated herein; an optional extracellular spacer domain to optimize binding; a hydrophobic portion or transmembrane domain; and an intracellular component comprising an intracellular activation domain (e.g., an immunoreceptor tyrosine-based activation motif (ITAM)-containing T cell activating motif), an intracellular costimulatory domain, or both. In certain embodiments, an intracellular signaling component of a CAR has an ITAM-containing T cell activating domain (e.g., CD3ζ) and an intracellular costimulatory domain (e.g., CD28, 41BB). In certain embodiments, a CAR is synthesized as a single polypeptide chain or is encoded by a nucleic acid molecule as a single chain polypeptide.

[0090] As used herein, an “immunoreceptor tyrosine-based activation motif (ITAM) T cell activating domain” refers to an intracellular signaling domain or functional portion thereof which is naturally or endogenously present on an immune cell receptor or a cell surface marker and contains at least one immunoreceptor tyrosine-based activation motif (ITAM). ITAM refers to a conserved motif of YXXL/I-X_{6.8}-YXXL/I, wherein X is any amino acid (i.e., a same or different amino acid over the length of the ITAM). In certain embodiments, an ITAM signaling domain contains one, two, three, four, or more ITAMs. An ITAM signaling domain may initiate T cell activation signaling following antigen binding or ligand engagement. ITAM-signaling domains include, for example, intracellular signaling domains of CD3γ, CD3δ, CD3ε, CD3ζCD79a, CD79b, gamma chain of FcεRI or FcγRI, FcRγ2a, FcRγ2b1, FcRγ2a1, FcRγ2b2, FcRγ3a, FcRγ3b, FcRβ1, FcεR), Natural Killer cell receptor proteins (e.g., DAP12), CD5, CD16a, CD16b, CD22, CD23, CD32, CD64, CD79a, CD79b, CD89, CD278, and CD66d. Exemplary amino acid sequences of these ITAM sequences and those from viruses (e.g., BLV gp30; EBV LMP2A) are described in Paul, Fundamental Immunology 307 (Wolters Kluwer; Lippincott; Wilkins & Wilkins; Seventh Ed., 2008). These ITAMs and functional fragments and variants thereof are also contemplated for use in the presently disclosed chimeric antigen receptor fusion proteins and host cells, and are hereby incorporated by reference.

[0091] As used herein, a “costimulatory signaling domain” refers to an intracellular signaling domain, or functional portion thereof, of a costimulatory molecule, which, when activated in conjunction with a primary or classic (e.g., ITAM-driven) activation signal (provided by, for example a CD3ζ intracellular signaling domain), promotes or enhances a T cell response, such as T cell activation, cytokine production, proliferation, differentiation, survival, effector function, or combinations thereof. Costimulatory signaling domains include, for example, CD28, CD40L, GITR, NKG2C, CARD1, CD2, CD7, CD27, CD30, CD40, CD54 (ICAM), CD83, CD134 (OX-40), CD137 (4-1BB), CD150 (SLAMF1), CD152 (CTLA4), CD223 (LAG3), CD226, CD270 (HVEM), CD273 (PD-L2), CD274 (PD-L1), CD278 (ICOS), DAP10, LAT, LFA-1, LIGHT, SLP76, TRIM, ZAP70, CD5, BAFF-R, SLAMF7, NKp80, CD160, B7-H3, a ligand that specifically binds with CD83, or any combination thereof.

[0092] An extracellular component of a fusion protein optionally comprises an extracellular, non-signaling spacer or linker region, which, for example, can position the binding domain away from the host cell (e.g., T cell) surface to enable proper cell/cell contact, antigen binding and activation (Patel et al., Gene Therapy 6: 412-419 (1999)). An extracellular spacer region of a fusion binding protein is generally located between a hydrophobic portion or transmembrane domain and the extracellular binding domain. Spacer region length may be varied to maximize antigen recognition (e.g., tumor recognition) based on the selected target molecule, selected binding epitope, or antigen-binding domain size and affinity (see, e.g., Guest et al., J. Immunother. 28:203-11 (2005); PCT Publication No. WO 2014/031687). In certain embodiments, a spacer region comprises an immunoglobulin hinge region. An immunoglobulin hinge region may be a wild-type immunoglobulin hinge region or an altered wild-type immunoglobulin hinge region. In certain embodiments, an immunoglobulin hinge region is a human immunoglobulin hinge region. An immunoglobulin hinge region may be an IgG, IgA, IgD, IgE, or IgM hinge region. An IgG hinge region may be an IgG1, IgG2, IgG3, or IgG4 hinge region. An exemplary altered IgG4 hinge region is described in PCT Publication No. WO 2014/031687, which hinge region, including the amino acid sequence thereof, is incorporated herein by reference in its entirety. In certain embodiments, an altered IgG4 hinge region comprises an amino acid sequence as set forth in SEQ ID NO:12. Other examples of hinge regions used in the fusion binding proteins described herein include the hinge region present in the extracellular regions of type 1 membrane proteins, such as CD8a, CD4, CD28 and CD7, which may be wild-type or variants thereof.

[0093] In certain embodiments, an extracellular spacer region comprises all or a portion of an Fc domain selected from: a CH1 domain, a CH2 domain, a CH3 domain, a CH4 domain, or any combination thereof (see, e.g., PCT Publication WO 2014/031687, which spacers are incorporated herein by reference in their entirety). The Fc domain or portion thereof may be wildtype of altered (e.g., to reduce antibody effector function). In certain embodiments, the extracellular component comprises an immunoglobulin hinge region, a CH2 domain, a CH3 domain, or any combination thereof disposed between the binding domain and the hydrophobic portion. In certain embodiments, the extracellular component comprises an IgG1 hinge region, an IgG1 CH2 domain, and an IgG1 CH3 domain. In further embodiments, the IgG1 CH2 domain comprises (i) a N297Q mutation, (ii) substitution of the first six amino acids (APEFLG) with APPVA, or both of (i) and (ii). In certain embodiments, the immunoglobulin hinge region, Fc domain or portion thereof, or both are human.

[0094] As used herein, a “hinge region” or a “hinge” refers to (a) an immunoglobulin hinge sequence (made up of, for example, upper and core regions of an immunoglobulin hinge) or a functional fragment or variant thereof, (b) a type II C-lectin interdomain (stalk) region or a functional fragment or variant thereof, or (c) a cluster of differentiation (CD) molecule stalk region or a functional variant thereof. As used herein, a “wild-type immunoglobulin hinge region” refers to a naturally occurring upper and middle hinge amino acid sequences interposed between and connecting the CH1 and CH2 domains (for IgG, IgA, and IgD) or interposed between and connecting the CH1 and CH3 domains (for IgE and IgM) found in the heavy chain of an antibody.

[0095] A “transmembrane domain”, as used herein, is a portion of a transmembrane protein that contains a hydrophobic portion that can insert into or span a cell membrane. Transmembrane components or domains have a three-dimensional structure that is thermodynamically stable in a cell membrane and generally range in length from about 15 amino acids to about 30 amino acids. The structure of a transmembrane component or domain may comprise an alpha helix, a beta barrel, a beta sheet, a beta helix, or any combination thereof. In certain embodiments, a transmembrane component or domain comprises or is derived from a known transmembrane protein (e.g., a CD4 transmembrane domain, a CD8 transmembrane domain, a CD27 transmembrane domain, a CD28 transmembrane domain, or any combination thereof).

[0096] A “hydrophobic portion,” as used herein, means any amino acid sequence having a three-dimensional structure that is thermodynamically stable in a cell membrane, and generally ranges in length from about 15 amino acids to about 30 amino acids. The structure of a hydrophobic domain may comprise an alpha helix, a beta barrel, a beta sheet, a beta helix, or any combination thereof. In certain embodiments, a hydrophobic portion is a transmembrane domain, for example, a transmembrane domain derived from a CD8, CD28, or CD27 molecule.

[0097] An “effector” is any molecule, nucleic acid, protein, nucleoprotein complex, or cell that carries out a biological activity upon interaction with the bioactive peptide. Exemplary biological activities can include binding, recruitment of fluorophores, recruitment of toxins, recruitment of immunomodulators, proteolysis, enzymatic activity, release of signaling proteins (e.g., cytokines, chemokine), induction of cell death, induction of cell differentiation, nuclear import/export, ubiquitination, and fluorophore/chromophore maturation.

### II. Composition of Disclosure

[0098] The present disclosure is directed to a chimeric antigen receptor T cell therapy system that can improve a target cell specificity in vitro, in vivo, or ex vivo. In particular, the system can be within a tumor microenvironment in which a CAR T cell therapy to specifically target a tumor cell is needed. In some aspects, the present composition is capable of increasing selectivity of a cell for a chimeric antigen receptor (CAR) T cell therapy. In some aspects, the composition of the present disclosure is capable of increasing selectivity of cells that are interacting with each other for a chimeric antigen receptor T cell therapy. In some aspects, the present composition is capable of targeting heterogeneous cells (more than two different cell types) for a chimeric antigen receptor T cell therapy, wherein a first cell moiety and a second cell moeity are present on the first cell and a first cell moiety and a third cell moiety are present on the second cell. In some aspects, the composition is also capable of reducing off-target activity for a chimeric antigen receptor T cell therapy. Therefore, in some aspects, the present composition can prepare a subject in need of a CAR T cell therapy so that the subject can respond better to the therapy, the efficacy of the therapy is increased, and/or a toxicity due to non specific binding (or leakiness) is reduced.

[0099] Ag1 AND Ag2

[0100] In some aspects, the present disclosure is capable of increasing selectivity of a cell that comprises at least two different cell markers (moieties Ag1 AND Ag2) for CAR T cell therapy. By targeting cells that express two different moieties, cells that comprises only one of the moieties (Ag1 OR Ag2) can be de-selected. In some aspects, a composition of the present disclosure comprises:

[0101] (a) a polynucleotide encoding a first cage polypeptide fused to a first binding domain, wherein the first cage polypeptide comprises (i) a structural region and (ii) a latch region further comprising one or more bioactive peptides, wherein the structural region interacts with the latch region to prevent activity of the one or more bioactive peptides in the absence of colocalization with a key polypeptide and wherein the first binding domain is capable of binding to a first cell moiety present on or within a cell; and

[0102] (b) a polynucleotide encoding a first key polypeptide fused to a second binding domain, wherein upon colocalization with the first cage polypeptide, the first key polypeptide is capable of binding to the cage structural region to activate the one or more bioactive peptides, wherein the second binding domain is capable of binding to a second cell moiety present on or within the cell,

[0103] wherein the first cell moiety and the second cell moiety are different or the same and wherein the cell is used for or targeted in a chimeric antigen receptor (CAR) T cell therapy. In some aspects, the polynucleotide encoding the cage polypeptide and the polynucleotide encoding the key polypeptide is on the same vector or on different vectors.

[0104] In some aspects, a composition of the present disclosure comprises:

[0105] (a) a first cage polypeptide fused to a first binding domain, wherein the first cage polypeptide comprises (i) a structural region and (ii) a latch region further comprising one or more bioactive peptides, wherein the structural region interacts with the latch region to prevent activity of the one or more bioactive peptides in the absence of colocalization with a key polypeptide and wherein the first binding domain is capable of binding to a first cell moiety present on or within a cell; and

[0106] (b) a first key polypeptide fused to a second binding domain, wherein upon colocalization with the first cage polypeptide, the first key polypeptide is capable of binding to the cage structural region to activate the one or more bioactive peptides, wherein the second binding domain is capable of binding to a second cell moiety present on or within the cell,

[0107] wherein the first cell moiety and the second cell moiety are different or the same and wherein the cell is used for or targeted in a chimeric antigen receptor (CAR) T cell therapy.

[0108] For the one or more bioactive peptides are to be activated (e.g., exposed to an effector molecule or capable of transduce its signal downstream), a functional cage polypeptide and a key polypeptide need to be colocalized. The mere expression of the functional cage polypeptide and a key polypeptide is not sufficient. For example, in some aspects, binding of a functional cage polypeptide, e.g., a first cage polypeptide, to a key polypeptide in solution is less efficient to activate the one or more bioactive peptides than binding of the cage and key polypeptides after colocalization. In some aspects, therefore, the colocalization of the first cage polypeptide and the key polypeptide increases selective targeting of a cell that highly expresses the cell moiety.

[0109] In some aspects, the colocalization of the first cage polypeptide and the first key polypeptide increases the local concentration of the first cage polypeptide and the first key polypeptide and shifts the binding equilibrium in favor of complex formation between the first cage polypeptide and the first key polypeptide.

[0110] In order for two cell moieties to be close enough (e.g., in close proximity) to allow colocalization of a cage polypeptide binding the first cell moiety and a key polypeptide binding to the second cell moiety, the two cell moieties may be colocalized as a result of directly or indirectly forming a complex (e.g., two proteins in the same complex such as a Her2-EGFR heterodimer or CD3ζ in complex with LAT or Zap70; two DNA sequences located in close proximity on a chromosome; two RNA sequences located in close proximity on an mRNA). In this case at least one molecule of the first moiety must be colocalized with at least one molecule of the second moiety to result in colocalization. Alternatively, the two cell moieties may be colocalized by virtue of being expressed in sufficient numbers in the same subcellular compartment (e.g., two transmembrane proteins expressed in the cell membrane such as Her2 and EGFR, Her2 and EpCAM, etc. In some aspects, the cell expresses a first cell moiety and/or the second cell moiety at least about 100 copies per cell, at least about 200 copies per cell, at least about 500 copies per cell, at least about 1000 copies per cell, at least about 1500 copies per cell, at least about 2000 copies per cell, at least about 2500 copies per cell, at least about 3000 copies per cell, at least about 3500 copies per cell, at least about 4000 copies per cell, at least about 4500 copies per cell, at least about 5000 copies per cell, at least about 5500 copies per cell, at least about 6000 copies per cell, at least about 6500 copies per cell, or at least about 7000 copies per cell. In some aspects, the first cell moiety and/or the second cell moiety express about 500 to about 10,000 copies per cell, about 1000 to about 10,000 copies per cell, about 2000 to about 10,0000 copies per cell, about 3000 to about 10,000 copies per cell, about 4000 to about 10,000 copies per cell, about 5000 to about 10,000 copies per cell, about 1000 to about 9,000 copies per cell, about 2000 to about 9,0000 copies per cell, about 3000 to about 9,000 copies per cell, about 4000 to about 9,000 copies per cell, about 5000 to about 9,000 copies per cell, about 1000 to about 8,000 copies per cell, about 2000 to about 8,0000 copies per cell, about 3000 to about 8,000 copies per cell, about 4000 to about 8,000 copies per cell, about 5000 to about 8,000 copies per cell, about 1000 to about 7,000 copies per cell, about 2000 to about 7,0000 copies per cell, about 3000 to about 7,000 copies per cell, about 4000 to about 7,000 copies per cell, about 5000 to about 7,000 copies per cell, about 1000 to about 6,000 copies per cell, about 2000 to about 6,0000 copies per cell, about 3000 to about 6,000 copies per cell, about 4000 to about 6,000 copies per cell, about 5000 to about 6,000 copies per cell. In some aspects, the cell expresses a first cell moiety and/or the second cell moiety at least about 5000 copies up to about 6000 copies, up to about 7000 copies or up to about 8000 copies. In some aspects, the first cage polypeptide and the first key polypeptide are colocalized, thereby forming a complex and activating the one or more bioactive peptides.

[0111] In some aspects, the first cell moiety and the second cell moiety are present on the surface of the cell. In some aspects, the first cell moiety and the second cell moiety are present within the cytoplasm of the cell. In some aspects, the first cell moiety and the second cell moiety are present within the nucleus of the cell. In some aspects, the first cell moiety and the second cell moiety are present within the secretory pathway of the cell, including the endoplasmic reticulum (ER) and Golgi apparatus.

[0112] Ag1 and (Ag2 or Ag3)

[0113] The present disclosure can also target more than two cells at the same time by utilizing various cell markers. For instant, the disclosure can allow a therapy to target heterogenous cell types, more than two (Ag1 AND (Ag2 OR Ag3)), more than three (Ag1 AND (Ag2 OR Ag3 OR Ag4)), more than four (Ag1 AND (Ag2 OR Ag3 OR Ag 4 OR Ag5)), more than five (Ag1 AND (Ag2 OR Ag3 OR Ag 4 OR Ag5 OR Ag6)), etc. for a CAR T cell therapy. In some embodiments, (Ag1 OR Ag2) AND Ag3 can be accomplished by targeting multiple cage polypeptides to multiple cells at the same time with different binding domains and targeting one key polypeptide with a single binding domain to those same cells. In other embodiments, (Ag1 OR Ag2) AND (Ag3 OR Ag4) can be accomplished by targeting multiple cage polypeptides with multiple binding domains and multiple key polypeptides with multiple binding domains.

[0114] In some aspects, the composition comprises:

(a) a first cage polypeptide fused to a first binding domain or a polynucleotide encoding the same, wherein the first cage polypeptide comprises (i) a structural region and (ii) a latch region further comprising one or more bioactive peptides, wherein the structural region interacts with the latch region to prevent activity of the one or more bioactive peptides in the absence of colocalization with a key polypeptide and wherein the first binding domain is capable of binding to a first cell moiety present on or within a first cell (Cell Type I, e.g., cell expressing Ag1 AND Ag2);
(b) a first key polypeptide fused to a second binding domain or a polynucleotide encoding the same, wherein upon colocalization with the first cage polypeptide, the first key polypeptide is capable of binding to the cage structural region to activate the one or more bioactive peptides, wherein the second binding domain is capable of binding to a second cell moiety present on or within the first cell; and
(c) a second key polypeptide fused to a third binding domain or a polynucleotide encoding the same, wherein upon colocalization with the first cage polypeptide, the second key polypeptide is capable of binding to the cage structural region to activate the one or more bioactive peptides, wherein the third binding domain is capable of binding to a third cell moiety present on or within a second cell that also comprises the first cell moiety (Cell type II, e.g., cell expressing Ag1 AND Ag3), wherein the first cell moiety, the second cell moiety, and the third cell moiety are different, and wherein the cell is used for or targeted in a CAR T cell therapy.

[0115] In some aspects, the first key polypeptide comprises a third binding domain, wherein the second binding domain and/or the third binding domain bind to (i) different moieties than the first binding domain on the surface of the same cell, or (ii) different moieties than the first binding domain at the synapse between two cells that are in contact, wherein upon colocalization with the first cage polypeptide, the first key polypeptide is capable of binding to the cage structural region to activate the one or more bioactive peptides, wherein the third binding domain is capable of binding to a third cell moiety present on or within the cell that also comprises the first cell moiety, wherein the third cell moiety is different from the first cell moiety or the second cell moiety.

[0116] In some aspects, the compositions further comprise:

(d) at least a second cage polypeptide comprising (i) a second structural region, (ii) a second latch region further comprising one or more bioactive peptides, and (iii) a sixth binding domain, wherein the second structural region interacts with the second latch region to prevent activity of the one or more bioactive peptides,

[0117] wherein the first key and/or the second key polypeptide are capable of binding to the second structural region to activate the one or more bioactive peptides, and

[0118] wherein the sixth binding domain and/or the first binding domain bind to (i) different moieties than the second binding domain, third binding domain and/or fourth binding domain on the surface of the same cell, or (ii) different moieties than the second binding domain, third binding domain and/or fourth binding domain at the synapse between two cells that are in contact. Such compositions can be used, for example, to accomplish (Ag1 OR Ag2) AND Ag3 by targeting the two cage polypeptides with different binding domains to multiple cells at the same time and targeting one key polypeptide with a single binding domain to those same cells.

[0119] In some aspects, the composition can further comprise multiple key polypeptides, a fourth key polypeptide, a fifth key polypeptide, a sixth key polypeptide, or a seventh key polypeptide, to increase selectivity for the first cell and/or the second cell. For example the composition for the first cell can further comprise additional key polypeptides, a fourth key polypeptide, a fifth key polypeptide, a sixth key polypeptide, or a seventh key polypeptide, that can further increase the selectivity of the first cell. In some aspects, the composition for the second cell further comprises additional key polypeptides, a fourth key polypeptide, a fifth key polypeptide, a sixth key polypeptide, or a seventh key polypeptide, that can further increase the selectivity of the second cell. Each of the additional key polypeptides for the present disclosure can be fused to a binding domain, wherein upon colocalization with the first cage polypeptide, the third key polypeptide is capable of binding to the cage structural region to activate the one or more bioactive peptides, wherein the third binding domain is capable of binding to a cell moiety present on or within the cell that also comprises the first cell moiety. In some aspects, a single key polypeptide can be fused to two or more binding domains such that the same key polypeptide can be targeted to both Cell type I and Cell type II.

### (Ag1 and Ag2) not Ag3

[0120] The present disclosure can also direct a therapy to avoid normal (healthy) cells, but only target diseased cells, e.g., tumor cells by utilizing various cell markers, thereby reducing off-target cell specificity or toxicity. Therefore, the disclosure can allow a therapy to avoid targeting normal cell types that express unique cell markers. For example, if normal cells express Ag3 while the diseased cells don't, the composition for the present disclosure can be constructed to avoid the cells expressing Ag3.

[0121] In some aspects, the composition comprises:

(a) a first cage polypeptide fused to a first binding domain or a polynucleotide encoding the same, wherein the first cage polypeptide comprises (i) a structural region and (ii) a latch region further comprising one or more bioactive peptides, wherein the structural region interacts with the latch region to prevent activity of the one or more bioactive peptides in the absence of colocalization with a key polypeptide and wherein the first binding domain is capable of binding to a first cell moiety present on or within a cell;
(b) a first key polypeptide fused to a second binding domain or a polynucleotide encoding the same, wherein upon colocalization with the first cage polypeptide, the first key polypeptide is capable of binding to the cage structural region to activate the one or more bioactive peptides, wherein the second binding domain is capable of binding to a second cell moiety present on or within the cell; and
(c) one or more decoy cage polypeptide fused to one or more binding domains (“decoy binding domain”) or a polynucleotide encoding the same, wherein each decoy cage polypeptide comprises a decoy structural region, which upon colocalization with the first key polypeptide and the first cage polypeptide, is capable of preferentially binding to the first key polypeptide and wherein the each decoy binding domain is capable of binding to a cell moiety (“decoy cell moiety”) in the cell that comprises the second cell moiety. In some aspects, the decoy binding domain is capable of binding to a cell moiety (“decoy cell moiety”) in the cell that comprises the first cell moiety and the second cell moiety. In some aspects, the decoy cell moiety is present only on a healthy cell. In some aspects, the decoy cage polypeptide, upon colocalization with the first key polypeptide, binds to the first key polypeptide such that the first key polypeptide does not bind to the first cage polypeptide and wherein the one or more bioactive peptides in the first cage polypeptide are not activated.

[0122] Any first cage polypeptide can serve as a decoy polypeptide for any second cage polypeptide, provided that the first cage polypeptide has a higher affinity for the key polypeptide than does the second cage polypeptide.

[0123] The compositions and methods of all aspects described herein may comprise use of a single decoy cage polypeptide comprising multiple binding domains, or multiple decoy cage polypeptides each with one (or more) binding domains to avoid cells with different decoy cell moieties (e.g., 1 AND 2 NOT (3 OR 4) logic).

[0124] In some aspects, the binding affinity of the decoy cage polypeptide to a key polypeptide (e.g., K_{D}) is stronger (e.g., lower) than the binding affinity of the first cage polypeptide to a key polypeptide (e.g., K_{D}), e.g., by at least about 1.1 fold, at least about 1.5 fold, at least about 2 fold, at least about 3 fold, at least about 4 fold, at least about 5 fold, at least about 6 fold, at least about 7 fold, at least about 8 fold, at least about 9 fold, at least about 10 fold, at least about 20 fold, at least about 30 fold, at least about 40 fold, at least about 50 fold, at least about 60 fold, at least about 70 fold, at least about 80 fold, at least about 90 fold, at least about 100 fold, at least about 150 fold, at least about 200 fold, at least about 300 fold, at least about 400 fold, at least about 500 fold, at least about 600 fold, at least about 700 fold, at least about 800 fold, at least about 900 fold, or at least about 1000 fold. In some aspects, the decoy cage polypeptide comprises at least one alpha helix, at least two alpha helices, at least three alpha helices, at least four alpha helices, or at least five alpha helices. In some aspects, the decoy cage polypeptide further comprises a decoy latch region. In some aspects, the decoy latch region is not functional. In some aspects, the decoy latch region does not comprise any bioactive peptide. In some aspects, the decoy latch region is not present. In some aspects, the decoy latch region comprises a non-functional bioactive peptide. In some aspects, the decoy latch region comprises a functional bioactive peptide with a distinct biological function. By way of non-limiting example, the cage polypeptide may comprise a bioactive peptide with immunostimulatory function and the decoy cage polypeptide comprises a bioactive peptide with immunoinhibitory function.

[0125] Exemplary Co-LOCKR Systems

[0126] In a first aspect, the disclosure provides compositions comprising

[0127] (a) a first cage polypeptide comprising (i) a structural region, (ii) a latch region further comprising one or more bioactive peptides, and (iii) a first binding domain wherein the structural region interacts with the latch region to prevent activity of the one or more bioactive peptides;

[0128] (b) a first key polypeptide capable of binding to the cage structural region to activate the one or more bioactive peptides, wherein the key polypeptide comprises a second binding domain,

[0129] wherein the first binding domain and the second binding domain bind to (i) different moieties on the surface of the same cell, (ii) the same moiety on the surface of the same cell, (iii) different moieties at the synapse between two cells that are in contact, or (iv) the same moiety at the synapse between two cells that are in contact; and

[0130] (c) cells comprising one or more chimeric antigen receptor(s) that bind to the one or more bioactive peptides when the one or more bioactive peptides are activated.

[0131] In any of the embodiments described herein, the chimeric antigen receptor may further comprise a self-cleaving polypeptide, wherein a polynucleotide encoding the self-cleaving polypeptide is located between the polynucleotide encoding the fusion protein and the polynucleotide encoding the transduction marker. In certain embodiments, a self-cleaving polypeptide comprises a 2A peptide from porcine teschovirus-1 (P2A), Thosea asigna virus (T2A), equine rhinitis A virus (E2A), foot-and-mouth disease virus (F2A), or variant thereof. Further exemplary nucleic acid and amino acid sequences of 2A peptides are set forth in, for example, Kim et al. (PLOS One 6:e18556 (2011), which 2A nucleic acid and amino acid sequences are incorporated herein by reference in their entirety).

[0132] The cells may be any suitable cell comprising the chimeric antigen receptor, including but not limited to T cells.

[0133] As used herein, a “synapse” is a junction between two interacting cells, typically involving protein-protein contacts across the junction. An immunological synapse is the interface between an antigen-presenting cell or target cell and a lymphocyte such as a TB cell or Natural Killer cell. A neuronal synapse is a junction between two nerve cells, consisting of a minute gap across which impulses pass by diffusion of a neurotransmitter. This embodiment is particularly useful, for example, when detecting cells that are in contact with each other, but not cells that are not. For example, one could identify only T cells that are interacting with a specified target cell but avoid all non-interacting T cells.

[0134] Thus, in one embodiment the first binding domain and the second binding domain bind to (i) different moieties on the surface of the same cell, or (iii) different moieties at the synapse between two cells that are in contact. In this embodiment, the composition can be used to establish an AND gate.

[0135] In another embodiment, the first binding domain and the second binding domain bind to (ii) the same moiety on the surface of the same cell, or (iv) the same moiety at the synapse between two cells that are in contact. In this embodiment, the composition can be used to establish a thresholding gate.

[0136] In one embodiment, (c) the first key polypeptide comprises a third binding domain, wherein the second binding domain and/or the third binding domain bind to (i) different moieties than the first binding domain on the surface of the same cell, or (ii) different moieties than the first binding domain at the synapse between two cells that are in contact. In a further embodiment, the second binding domain and the third binding domain bind to different moieties on the surface of different cells. In these embodiments, the composition can be used to establish a 1 AND either 2 OR 3 logic gate, provided the moiety bound by the first binding domain is present on one of those cells.

[0137] In another embodiment, the composition further comprises (d) at least a second key polypeptide capable of binding to the first cage structural region, wherein the key polypeptide comprises a fourth binding domain, wherein the second binding domain and/or the fourth binding domain bind to (i) different moieties than the first binding domain on the surface of the same cell, or (ii) different moieties than the first binding domain at the synapse between two cells that are in contact. In one embodiment, the second binding domain and the fourth binding domain bind to (i) different moieties on the surface of the same cell, or (ii) different moieties at the synapse between two cells that are in contact. In a further embodiment, the second binding domain and the fourth binding domain bind to different moieties on the surface of different cells. In these embodiments, the composition can be used to establish a 1 AND either 2 OR 3 logic gate, provided the moiety bound by the first binding domain is present on one of those cells.

[0138] In a further embodiment, the first cage polypeptide further comprises a fifth binding domain, wherein the fifth binding domain and/or the first binding domain bind to (i) different moieties than the second binding domain, third binding domain and/or fourth binding domain on the surface of the same cell, or (ii) different moieties than the second binding domain, third binding domain and/or fourth binding domain at the synapse between two cells that are in contact. In one embodiment, the fifth binding domain and the first binding domain bind to (i) different moieties on the surface of the same cell, or (ii) different moieties at the synapse between two cells that are in contact. In this embodiment, the composition can be used to establish an OR logic gate, specifically the [(1 OR 5) AND (2 OR 3)] logic gate, based on the additional binding domain present on a single cage polypeptide.

[0139] In one embodiment, the composition further comprises (e) at least a second cage polypeptide comprising (i) a second structural region, (ii) a second latch region further comprising one or more bioactive peptides, and (iii) a sixth binding domain, wherein the second structural region interacts with the second latch region to prevent activity of the one or more bioactive peptides, wherein the first key and/or the second key polypeptide are capable of binding to the second structural region to activate the one or more bioactive peptides, and wherein the sixth binding domain and/or the first binding domain bind to (i) different moieties than the second binding domain, third binding domain and/or fourth binding domain on the surface of the same cell, or (ii) different moieties than the second binding domain, third binding domain and/or fourth binding domain at the synapse between two cells that are in contact. In one embodiment, the sixth binding domain and the first binding domain bind to (i) different moieties on the surface of different cells, or (ii) different moieties at the synapse between two cells that are in contact. In these embodiments, the composition can be used to establish an OR logic gate based on the additional binding domain present on a second cage polypeptide. In one such embodiment, there may be two separate but identical cage polypeptides be each attached to one different binding domain. In another such embodiment, the two cage polypeptides may be different cage polypeptides that both are activated by the same key polypeptide and are each attached to one different binding domain.

[0140] In another embodiment, the composition further comprises (f) a decoy cage polypeptide comprising (i) a decoy structural region, (ii) a decoy latch region optionally further comprising one or more bioactive peptides, and (iii) a seventh binding domain, wherein the decoy structural region interacts with the first key polypeptide and/or the second key polypeptide to prevent them from binding to the first and/or the second cage polypeptides, and wherein the seventh binding domain binds to a moiety on the surface of the same cell as the second binding domain, third binding domain, and/or fourth binding domain. In one embodiment, the seventh binding domain binds to a moiety that is present on the cell at an equal or higher level than the moieties to which the second binding domain, the third binding domain, and/or the fourth binding domain bind to. In this embodiment, the composition can be used to establish a NOT logic gate based on the decoy cage polypeptide binding to a different target on the same cell as the target of the key polypeptide. In this embodiment, the composition can be used, for example, to establish a 1 AND 2 NOT 7 logic, provided the moieties bound by the first and second binding domains are present the same cell. In one embodiment, the decoy cage polypeptide does not comprise a bioactive peptide. This embodiment can be used, for example, to establish a 3 AND 4 NOT 7 logic (provided that the moieties bound by the third and fourth binding domains are present on the same cell), or a 5 AND 6 NOT 7 logic (provided that the moieties bound by the fifth and sixth binding domains are present on the same cell. Such AND/NOT embodiments require at least one cage polypeptide, at least one key polypeptide, and at least one decoy cage polypeptide.

[0141] In one embodiment of all these embodiments of the composition, the first binding domain, the second binding domain, the third binding domain (when present), the fourth binding domain (when present), the fifth binding domain (when present), the sixth binding domain (when present), and/or the seventh binding domain (when present) comprise polypeptides capable of binding moieties present on the cell surface, including proteins, saccharides, and lipids. In one embodiment, the one or more binding proteins comprise cell surface protein binding polypeptides.

[0142] All of the compositions above are described as polypeptide compositions. The disclosure also provides compositions comprising expression vectors and/or cells that express the cage polypeptides and key polypeptides as described in the compositions above, and thus can be used for the same purposes (for example, in establishing the same logic gates as for the corresponding polypeptide compositions described above). Thus, in a fifth aspect, the disclosure provides compositions comprising:

[0143] (a) one or more expression vectors encoding and/or cells expressing:
[0144] (i) a first cage polypeptide comprising (i) a structural region, (ii) a latch region further comprising one or more bioactive peptides, and (iii) a first binding domain wherein the structural region interacts with the latch region to prevent activity of the one or more bioactive peptides; and
[0145] (ii) a first key polypeptide capable of binding to the cage structural region to activate the one or more bioactive peptides, wherein the key polypeptide comprises a second binding domain,

[0146] wherein the first binding domain and the second binding domain bind to (i) different moieties on the surface of the same cell, (ii) the same moiety on the surface of the same cell, (iii) different moieties at the synapse between two cells that are in contact, or (iv) the same moiety at the synapse between two cells that are in contact; and

[0147] (b) (i) cells comprising one or more chimeric antigen receptor(s) that bind to the one or more bioactive peptides when the one or more bioactive peptides are activated; and/or (ii) one or more the fusion protein, the nucleic acid encoding the fusion protein, the vector comprising the fusion protein encoding nucleic acid, and/or the cell comprising the fusion protein, the nucleic acid encoding the fusion protein, and/or the vector comprising the fusion protein encoding nucleic acid as described herein.

[0148] The one or more expression vectors may comprise a separate expression vector encoding each separate polypeptide, may comprise an expression vector encoding two or more of the separate polypeptides, or any combination thereof as suitable for an intended use. The expression vector may comprise any suitable expression vector that operatively links a nucleic acid coding region for the cited polypeptide(s) to any control sequences capable of effecting expression of the gene product. Similarly, the cells may be any prokaryotic or eukaryotic cell capable of expressing the recited polypeptide(s); the cells may comprise a single cell capable of expressing all of the recited polypeptides, separate cells capable of expressing each individual polypeptide, or any combination thereof.

[0149] In one embodiment the first key polypeptide comprises a third binding domain, wherein the second binding domain and/or the third binding domain bind to (i) different moieties than the first binding domain on the surface of the same cell, or (ii) different moieties than the first binding domain at the synapse between two cells that are in contact. In another embodiment, the second binding domain and the third binding domain bind to different moieties on the surface of different target cells.

[0150] In one embodiment, the composition further comprises (c) an expression vector encoding and/or a cell expressing at least a second key polypeptide capable of binding to the first cage structural region, wherein the key polypeptide comprises a fourth binding domain, wherein the second binding domain and/or the fourth binding domain bind to (i) different moieties than the first binding domain on the surface of the same cell, or (ii) different moieties than the first binding domain at the synapse between two cells that are in contact. In another embodiment wherein the second binding domain and the fourth binding domain bind to (i) different moieties on the surface of the same cell, or (ii) different moieties at the synapse between two cells that are in contact.

[0151] In another embodiment, the first cage polypeptide further comprises a fifth binding domain, wherein the fifth binding domain and/or the first binding domain bind to (i) different moieties than the second binding domain, third binding domain, and/or fourth binding domain on the surface of the same cell, or (ii) different moieties than the second binding domain, third binding domain, and/or fourth binding domain at the synapse between two cells that are in contact. In one embodiment, the fifth binding domain and the first binding domain bind to (i) different moieties on the surface of the same cell, or (ii) different moieties at the synapse between two cells that are in contact.

[0152] In a further embodiment, the composition further comprises (d) an expression vector encoding and/or a cell expressing at least a second cage polypeptide comprising (i) a second structural region, (ii) a second latch region further comprising one or more bioactive peptides, and (iii) a sixth binding domain, wherein the second structural region interacts with the second latch region to prevent activity of the one or more bioactive peptides,

[0153] wherein the first key and/or the second key polypeptide are capable of binding to the second structural region to activate the one or more bioactive peptides, and

[0154] wherein the sixth binding domain and/or the first binding domain bind to (i) different moieties than the second binding domain, third binding domain, and/or fourth binding domain on the surface of the same cell, or (ii) different moieties than the second binding domain, third binding domain, and/or fourth binding domain at the synapse between two cells that are in contact. In one embodiment, the sixth binding domain and the first binding domain bind to (i) different moieties on the surface of different cells, or (ii) different moieties at the synapse between two cells that are in contact.

[0155] In another embodiment, the composition further comprises (e) an expression vector encoding and/or a cell expressing a decoy cage polypeptide comprising (i) a decoy structural region, (ii) a decoy latch region optionally further comprising one or more bioactive peptides, and (iii) a seventh binding domain, wherein the decoy structural region interacts with the first key polypeptide and/or the second key polypeptide to prevent them from binding to the first and/or the second cage polypeptides, and wherein the seventh binding domain binds to a moiety on the surface of the same cell as the second binding domain, third binding domain, and/or fourth binding domain. In one embodiment, the seventh binding domain and the first binding domain and/or second binding domain bind to (i) different moieties on the surface of the same cell, or (ii) different moieties at the synapse between two cells that are in contact. In another embodiment, the seventh binding domain binds to a moiety that is present on the cell at an equal or higher level than the moieties to which the second binding domain, the third binding domain, and/or the fourth binding domain bind to.

[0156] In one embodiment of all of the compositions of the disclosure, the first binding domain, the second binding domain, the third binding domain (when present), the fourth binding domain (when present), the fifth binding domain (when present), the sixth binding domain (when present), and/or the seventh binding domain (when present) comprise polypeptides capable of binding moieties present on the cell surface, including proteins, saccharides, and lipids. In one embodiment, the one or more binding proteins comprise cell surface protein binding polypeptides.

[0157] In some embodiments, the compositions do not include an effector molecule, as the proximity-dependent binding even may be detectable without an effector protein. In one embodiment of the compositions of any embodiment of the of the disclosure, the effector molecule(s) is/are present. Any effector molecule suitable for an intended use may be used. In one embodiment, the effector molecule(s) are selected from the non-limiting group comprising Bcl2, GFP1-10, small molecules, antibodies, antibody drug conjugates, immunogenic peptides, proteases, T cell receptors, cytotoxic agents, fluorophores, fluorescent proteins, cell adhesion molecules, endocytic receptors, phagocytic receptors, magnetic beads, and gel filtration resin, and polypeptides having at least 40%, 45%, 50%, 55%, 60%, 65%, 70%, 75%, 80%, 85%, 90%, 91%, 92%, 93%, 94%, 95%, 96%, 97%, 98%, 99%, or 100% sequence to the amino acid sequence selected from the group consisting of SEQ ID NOS: 27,460-27,469.

[0158] Cage and Key Polypeptides

[0159] The polypeptides disclosed herein can be used as cage polypeptides that sequester a bioactive peptide in an inactive state (until activated by a key polypeptide binding to the cage polypeptide, as described herein), and wherein the binding domain can serve to target the polypeptide to the entity to which the binding domain binds. In one embodiment, the polypeptides are part of a “protein switch” (together with appropriate key polypeptide(s)), wherein the cage polypeptide and the key polypeptide comprise binding domains that bind to different targets, and the key polypeptide binds to the cage polypeptide and triggers activation of the bioactive peptide only when the different targets are closely associated so that the cage and key polypeptides are co-localized while bound to their targets.

[0160] In some aspects, the cage polypeptide comprises a helical bundle, comprising between 2 and 7 alpha-helices; wherein the helical bundle is fused to one or more binding domain; wherein the one or more binding domain and the helical bundle are not both present in the same naturally occurring polypeptide.

[0161] In each embodiment, the N-terminal and/or C-terminal 60 amino acids of each cage polypeptides may be optional, as the terminal 60 amino acid residues may comprise a latch region that can be modified, such as by replacing all or a portion of a latch with a bioactive peptide. In one embodiment, the N-terminal 60 amino acid residues are optional; in another embodiment, the C-terminal 60 amino acid residues are optional; in a further embodiment, each of the N-terminal 60 amino acid residues and the C-terminal 60 amino acid residues are optional. In one embodiment, these optional N-terminal and/or C-terminal 60 residues are not included in determining the percent sequence identity. In another embodiment, the optional residues may be included in determining percent sequence identity.

[0162] In some aspects, the first cage polypeptide comprises no more than 5 alpha helices, no more than 4 alpha helices, no more than 3 alpha helices, or no more than 2 alpha helices, wherein the structural region comprises at least one alpha helices and the latch region comprises at least one alpha helices. In some aspects, the structural region of the first cage polypeptide comprises one alpha helix. In some aspects, the structural region of the first cage polypeptide comprises two alpha helices. In some aspects, the structural region of the first cage polypeptide comprises three alpha helices.

[0163] In some aspects, the first cage polypeptide, the first key polypeptide, the second key polypeptide, and/or the decoy polypeptide are further modified to change (i) hydrophobicity, (ii) a hydrogen bond network, (iii) a binding affinity to each, and/or (iv) any combination thereof. In some aspects, the cage polypeptide and/or the key polypeptide are modified to reduce hydrophobicity. In some aspects, the latch region is mutated to reduce the hydrophobicity. For example, hydrophobic amino acids are known: glycine (Gly), alanine (Ala), valine (Val), leucine (Leu), isoleucine (Ile), proline (Pro), phenylalanine (Phe), methionine (Met), and tryptophan (Trp). In some aspects, one or more hydrophobic amino acids are replaced with a polar amino acid, e.g., serine (Ser), threonine (Thr), cysteine (Cys), asparagine (Asn), glutamine (Gln), and tyrosine (Tyr). In some aspects, an interface between the latch region and the structural region of the first cage polypeptide includes a hydrophobic amino acid to polar amino acid residue ratio of between 1:1 and 10:1, e.g., 1:1, 2:1, 3:1, 4:1, 5:1, 6:1, 7:1, 8:1, 9:1, or 10:1. In some aspects, an interface between the latch region and the structural region includes a hydrophobic amino acid to polar amino acid residue ratio of 1:1. In some aspects, an interface between the latch region and the structural region includes a hydrophobic amino acid to polar amino acid residue ratio of 2:1. In some aspects, an interface between the latch region and the structural region includes a hydrophobic amino acid to polar amino acid residue ratio of 3:1. In some aspects, an interface between the latch region and the structural region includes a hydrophobic amino acid to polar amino acid residue ratio of 4:1. In some aspects, an interface between the latch region and the structural region includes a hydrophobic amino acid to polar amino acid residue ratio of 5:1. In some aspects, an interface between the latch region and the structural region includes a hydrophobic amino acid to polar amino acid residue ratio of 6:1. In some aspects, an interface between the latch region and the structural region includes a hydrophobic amino acid to polar amino acid residue ratio of 7:1. In some aspects, an interface between the latch region and the structural region includes a hydrophobic amino acid to polar amino acid residue ratio of 8:1. In some aspects, an interface between the latch region and the structural region includes a hydrophobic amino acid to polar amino acid residue ratio of 9:1. In some aspects, an interface between the latch region and the structural region includes a hydrophobic amino acid to polar amino acid residue ratio of 10:1.

[0164] In some aspects, 1, 2, 3, or more large hydrophobic residues in the latch region, e.g., isoleucine, valine, or leucine, are mutated to serine, threonine, or a smaller hydrophobic amino acid residue, e.g., valine (if the starting amino acid is isoleucine or leucine) or alanine.

[0165] In some aspects, the first cage polypeptide comprises buried amino acid residues at the interface between the latch region and the structural region of the first cage polypeptide, wherein the buried amino acid residues at the interface have side chains comprising nitrogen or oxygen atoms involved in hydrogen bonding.

[0166] In another embodiment of the compositions of any aspect and embodiment of the disclosure, the first cage polypeptide, the second cage polypeptide, and/or the decoy cage polypeptide comprise:

[0167] (a) a polypeptide comprising an amino acid sequence at least 40%, 45%, 50%, 55%, 60%, 65%, 70%, 75%, 80%, 85%, 90%, 91%, 92%, 93%, 94%, 95%, 96%, 97%, 98%, 99%, or 100% identical to the amino acid sequence of a cage polypeptide disclosed herein, or selected from the group consisting SEQ IDS NOS: 27359-27392, 1-49, 51-52, 54-59, 61, 65, 67-14317, 27094-27117, 27120-27125, and 27278-27321 not including optional amino acid residues; or cage polypeptides listed in Table 7, Table 8, or Table 9, wherein the N-terminal and/or C-terminal 60 amino acids of the polypeptides are optional; and

[0168] (b) one or more first, fifth, sixth, or seventh binding domains.

[0169] In another embodiment, the first cage polypeptide, the second cage polypeptide, and/or the decoy cage polypeptide comprise:

[0170] (a) a polypeptide comprising an amino acid sequence at least 40%, 45%, 50%, 55%, 60%, 65%, 70%, 75%, 80%, 85%, 90%, 91%, 92%, 93%, 94%, 95%, 96%, 97%, 98%, 99%, or 100% identical to the amino acid sequence of a cage polypeptide disclosed herein, or selected from the group consisting SEQ IDS NOS: 27359-27392, not including optional amino acid residues; and

[0171] (b) one or more first, fifth, sixth, or seventh binding domains.

[0172] In one embodiment, the first cage polypeptide, the second cage polypeptide, and/or the decoy cage polypeptide comprise an amino acid sequence at least 40%, 45%, 50%, 55%, 60%, 65%, 70%, 75%, 80%, 85%, 90%, 91%, 92%, 93%, 94%, 95%, 96%, 97%, 98%, 99%, or 100% identical along its length to the amino acid sequence of a cage polypeptide disclosed herein, or selected from the group consisting SEQ IDS NOS: 27359-27392, including optional amino acid residues

[0173] In another embodiment, the first key polypeptide and/or the second key polypeptide comprise:

[0174] (a) a polypeptide comprising an amino acid sequence at least 40%, 45%, 50%, 55%, 60%, 65%, 70%, 75%, 80%, 85%, 90%, 91%, 92%, 93%, 94%, 95%, 96%, 97%, 98%, 99%, or 100% identical to the amino acid sequence selected from SEQ ID NOS: 27393-27398, 14318-26601, 26602-27015, 27016-27050, 27,322-27,358, and key polypeptides listed in Table 7, Table 8, and/or Table 9; and

[0175] (b) one or more second, third, or fourth binding domains.

[0176] In a further embodiment, the first key polypeptide and/or the second key polypeptide comprise:

[0177] (a) a polypeptide comprising an amino acid sequence at least 40%, 45%, 50%, 55%, 60%, 65%, 70%, 75%, 80%, 85%, 90%, 91%, 92%, 93%, 94%, 95%, 96%, 97%, 98%, 99%, or 100% identical to the amino acid sequence selected from the group consisting of SEQ ID NOS: 27393-27398, or SEQ ID NOS: 27394-27395, not including optional residues, or including optional residues; and

[0178] (b) one or more second, third, or fourth binding domains.

[0179] As disclosed herein, bioactive peptides to be sequestered by the polypeptides of the disclosure are located within the latch region. The latch region is denoted by brackets in the sequence of each cage polypeptide. The bioactive peptide may be added to the latch region without removing any residues of the latch region, or may replace one or more (1, 2, 3, 4, 5, 6, 7, 8, 9, 10, or more) amino acid residues in the cage scaffold latch region to produce the final polypeptide. Thus, the latch region may be significantly modified upon inclusion of the bioactive peptide. In one embodiment, the optional residues are not included in determining percent sequence identity. In another embodiment, the latch region residues may be included in determining percent sequence identity. In a further embodiment, each of the optional residues and the latch residues may are not included in determining percent sequence identity.

[0180] Exemplary cage and key polypeptides of the disclosure have been identified and subjected to mutational analysis. Furthermore, different designs starting from the same exemplary polypeptides yield different amino acid sequences while maintaining the same intended function. In various embodiments, a given amino acid can be replaced by a residue having similar physiochemical characteristics, e.g., substituting one aliphatic residue for another (such as Ile, Val, Leu, or Ala for one another), or substitution of one polar residue for another (such as between Lys and Arg; Glu and Asp; or Gln and Asn). Other such conservative substitutions, e.g., substitutions of entire regions having similar hydrophobicity characteristics, are known. Polypeptides comprising conservative amino acid substitutions can be tested in any one of the assays described herein to confirm that the desired activity is retained. Amino acids can be grouped according to similarities in the properties of their side chains (in A. L. Lehninger, in Biochemistry, second ed., pp. 73-75, Worth Publishers, New York (1975)): (1) non-polar: Ala (A), Val (V), Leu (L), Ile (I), Pro (P), Phe (F), Trp (W), Met (M); (2) uncharged polar: Gly (G), Ser (S), Thr (T), Cys (C), Tyr (Y), Asn (N), Gln (Q); (3) acidic: Asp (D), Glu (E); (4) basic: Lys (K), Arg (R), His (H). Alternatively, naturally occurring residues can be divided into groups based on common side-chain properties: (1) hydrophobic: Norleucine, Met, Ala, Val, Leu, Ile; (2) neutral hydrophilic: Cys, Ser, Thr, Asn, Gln; (3) acidic: Asp, Glu; (4) basic: His, Lys, Arg; (5) residues that influence chain orientation: Gly, Pro; (6) aromatic: Trp, Tyr, Phe. Non-conservative substitutions will entail exchanging a member of one of these classes for another class. Particular conservative substitutions include, for example; Ala into Gly or into Ser; Arg into Lys; Asn into Gln or into H is; Asp into Glu; Cys into Ser; Gln into Asn; Glu into Asp; Gly into Ala or into Pro; His into Asn or into Gln; Ile into Leu or into Val; Leu into Ile or into Val; Lys into Arg, into Gln or into Glu; Met into Leu, into Tyr or into Ile; Phe into Met, into Leu or into Tyr; Ser into Thr; Thr into Ser; Trp into Tyr; Tyr into Trp; and/or Phe into Val, into Ile or into Leu.

[0181] In one embodiment of cage polypeptides, interface residues between the latch and structural regions are primarily (i.e.: 50%, 60%, 70%, 75%, 80%, 85%, 90%, or greater) hydrophobic residues. In one embodiment, interface residues are primarily valine, leucine, isoleucine, and alanine residues. In a further embodiment an interface between a latch region and a structural region of the polypeptide includes a hydrophobic amino acid to polar amino acid residue ratio of between 1:1 and 10:1. The cage polypeptides may be “tuned” to modify strength of the interaction between the latch region and structural region as deemed appropriate for an intended use. In one embodiment 1, 2, 3, or more large hydrophobic residues in the latch region, including but not limited to isoleucine, valine or leucine, are mutated to serine, threonine, or a smaller hydrophobic amino acid residue including but not limited to valine (if the starting amino acid is isoleucine or leucine) or alanine. In this embodiment, the tuning weakens structural region-latch affinity. In another embodiment, buried amino acid residues at the interface have side chains comprising nitrogen or oxygen atoms involved in hydrogen bonding. Tuning can include increasing or decreasing the number of hydrogen bonds present at the interface. Based on the teachings herein, those of skill in the art will understand that such tuning may take any number of forms depending on the desired structural region-latch region affinity.

[0182] In one embodiment of the compositions of any embodiment or combination of embodiments of the disclosure, (i) the first cage polypeptide, the second cage polypeptide, and/or the decoy cage polypeptide; and (ii) the first and/or second key polypeptide, comprise at least one cage polypeptide and at least one key polypeptide comprising an amino acid sequence at least 40%, 45%, 50%, 55%, 60%, 65%, 70%, 75%, 80%, 85%, 90%, 91%, 92%, 93%, 94%, 95%, 96%, 97%, 98%, 99%, or 100% identical to the amino acid sequence of a cage polypeptide and a key polypeptide, respectively, in the same row or one of 7, 8, or 9 (i.e.: each cage polypeptide in row 2 column 1 of the table can be used with each key polypeptide in row 2 column 1 of the table, and so on), with the proviso that each cage polypeptide and each key polypeptide further comprise one or more binding domain.

[0183] In one embodiment, the first cage polypeptide, the second cage polypeptide, and/or the decoy cage polypeptide comprise:

[0184] (a) an amino acid sequence at least 40%, 45%, 50%, 55%, 60%, 65%, 70%, 75%, 80%, 85%, 90%, 91%, 92%, 93%, 94%, 95%, 96%, 97%, 98%, 99%, or 100% identical to the amino acid sequence selected from the non-limiting group consisting of SEQ ID NOS: 27359-27392, either including optional amino acid residues or not including optional amino acid residues; and

[0185] (b) a binding domain comprising an amino acid sequence at least 40%, 45%, 50%, 55%, 60%, 65%, 70%, 75%, 80%, 85%, 90%, 91%, 92%, 93%, 94%, 95%, 96%, 97%, 98%, 99%, or 100% identical to the amino acid sequence selected from the group consisting of SEQ ID NOS:27,399-27,403.

[0186] In another embodiment, the first key polypeptide and/or the second key polypeptide comprise:

[0187] (a) an amino acid sequence at least 40%, 45%, 50%, 55%, 60%, 65%, 70%, 75%, 80%, 85%, 90%, 91%, 92%, 93%, 94%, 95%, 96%, 97%, 98%, 99%, or 100% identical to the amino acid sequence selected from the group consisting of SEQ ID NOS: 27393-27398 or 27394-27395, either including optional amino acid residues or not including optional amino acid residues; and

[0188] (b) a binding domain comprising an amino acid sequence at least 40%, 45%, 50%, 55%, 60%, 65%, 70%, 75%, 80%, 85%, 90%, 91%, 92%, 93%, 94%, 95%, 96%, 97%, 98%, 99%, or 100% identical the amino acid sequence selected from the group consisting of SEQ ID NOS: 27,399-27,403.

[0189] In another embodiment, the first cage polypeptide, the second cage polypeptide, and/or the decoy cage polypeptide comprise an amino acid sequence at least 40%, 45%, 50%, 55%, 60%, 65%, 70%, 75%, 80%, 85%, 90%, 91%, 92%, 93%, 94%, 95%, 96%, 97%, 98%, 99%, or 100% identical to the amino acid sequence selected from the group consisting of SEQ ID NOS: 27404-27446. In another embodiment, the first key polypeptide and/or the second key polypeptide comprise an amino acid sequence at least 40%, 45%, 50%, 55%, 60%, 65%, 70%, 75%, 80%, 85%, 90%, 91%, 92%, 93%, 94%, 95%, 96%, 97%, 98%, 99%, or 100% identical to the amino acid sequence selected from the group consisting of SEQ ID NOS: 27448-27459. In a further embodiment, (i) the first cage polypeptide, the second cage polypeptide, and/or the decoy cage polypeptide comprise an amino acid sequence at least 40%, 45%, 50%, 55%, 60%, 65%, 70%, 75%, 80%, 85%, 90%, 91%, 92%, 93%, 94%, 95%, 96%, 97%, 98%, 99%, or 100% identical to the amino acid sequence selected from the group consisting of SEQ ID NOS: 27404-27446; and (ii) the first key polypeptide and/or the second key polypeptide comprise an amino acid sequence at least 40%, 45%, 50%, 55%, 60%, 65%, 70%, 75%, 80%, 85%, 90%, 91%, 92%, 93%, 94%, 95%, 96%, 97%, 98%, 99%, or 100% identical to the amino acid sequence selected from the group consisting of SEQ ID NOS: 27448-27459.

TABLE 1
Modular Co-LOCKR Cage domains and Decoy domains
(parentheses are optional sequences of which a portion can be deleted to
tune latch affinity)
(underlined amino acids can be changed to any other amino acid to tune
latch affinity)
(bold is bioactive peptide; other bioactive peptides can be substituted for
Bim or GFP11)
Versions without bioactive peptides are decoy cage polypeptides,
noting that any cage polypeptide can serve as a decoy polypeptide by
exclusion of the bioactive peptide, and any first cage polypeptide can
serve as a decoy polypeptide for any second cage polypeptide, provided that
the first cage polypeptide has a higher affinity for the key polypeptide
than does the second cage polypeptide.

>Cage_Bim_A
SEQ ID NO: 27359
SELARKLLEASTKLQRLNIRLAEALLEAIARLQELNLELVYLAVELTDPKRIRDEIKEVKDKSKEIIRRAEKEID
DAAKESEKILEEAREAISGSGSELAKLLLKAIAETQDLNLRAAKAFLEAAAKLQELNIRAVELLVKLTDPATIRE
ALEHAKRRSKEIIDEAERAIRAAKRESERIIEEARRLIEKGSGSGSELARELLRAHAQLQRLNLELLRELLRALA
QLQELNLDLLRLASELTDEIWIAQELRRIGDEF(NAYYADAERLIREAAAASEKISREAERLIR)
>Decoy_GFP11_A
SEQ ID NO: 27360
SELARKLLEASTKLQRLNIRLAEALLEAIARLQELNLELVYLAVELTDPKRIRDEIKEVKDKSKEIIRRAEKEID
DAAKESEKILEEAREAISGSGSELAKLLLKAIAETQDLNLRAAKAFLEAAAKLQELNIRAVELLVKLTDPATIRE
ALEHAKRRSKEIIDEAERAIRAAKRESERIIEEARRLIEKGSGSGSELARELLRAHAQLQRLNLELLRELLRALA
QLQELNLDLLRLASEL(RDHMVLHEYVNAAGITFNAYYADAERLIREAAAASEKISREAG)
>Decoy_GFP11_C
SEQ ID NO: 27361
SELARKLLEASTKLQRLNIRLAEALLEAIARLQELNLELVYLAVELTDPKRIRDEIKEVKDKSKEIIRRAEKEID
DAAKESEKILEEAREAISGSGSELAKLLLKAIAETQDLNLRAAKAFLEAAAKLQELNIRAVELLVKLTDPATIRE
ALEHAKRRSKEIIDEAERAIRAAKRESERIIEEARRLIEKGSGSGSELARELLRAHAQLQRLNLELLRELLRALA
QLQELNLDLLRLASEL(RDHMVLHEYVNAAGITFNAYYADAERLIREAAAASEKISREAERLIR)
>Decoy_AYYA_A
SEQ ID NO: 27362
SELARKLLEASTKLQRLNIRLAEALLEAIARLQELNLELVYLAVELTDPKRIRDEIKEVKDKSKEIIRRAEKEID
DAAKESEKILEEAREAISGSGSELAKLLLKAIAETQDLNLRAAKAFLEAAAKLQELNIRAVELLVKLTDPATIRE
ALEHAKRRSKEIIDEAERAIRAAKRESERIIEEARRLIEKGSGSGSELARELLRAHAQLQRLNLELLRELLRALA
QLQELNLDLLRLASEL(TDPDEARKAIARVKRESNAYYADAERLIREAAAASEKISREAERLIR)
>Decoy_AYYA_B
SEQ ID NO: 27363
SELARKLLEASTKLQRLNIRLAEALLEAIARLQELNLELVYLAVELTDPKRIRDEIKEVKDKSKEIIRRAEKEID
DAAKESEKILEEAREAISGSGSELAKLLLKAIAETQDLNLRAAKAFLEAAAKLQELNIRAVELLVKLTDPATIRE
ALEHAKRRSKEIIDEAERAIRAAKRESERIIEEARRLIEKGSGSGSELARELLRAHAQLQRLNLELLRELLRALA
QLQELNLDLLRLASELG(TDPDEARKAIARVKRESNAYYADAERLIREAAAASEKISREAERLIR)
>Decoy_GFP11_B
SEQ ID NO: 27364
SELARKLLEASTKLQRLNIRLAEALLEAIARLQELNLELVYLAVELTDPKRIRDEIKEVKDKSKEIIRRAEKEID
DAAKESEKILEEAREAISGSGSELAKLLLKAIAETQDLNLRAAKAFLEAAAKLQELNIRAVELLVKLTDPATIRE
ALEHAKRRSKEIIDEAERAIRAAKRESERIIEEARRLIEKGSGSGSELARELLRAHAQLQRLNLELLRELLRALA
QLQELNLDLLRLASEL(RDHMVLHEYVNAAGITFNAYYADAERLIREAAAASEKISREAG)
SEQ ID NO: 27365
SELARKLLEASTKLQRLNIRLAEALLEAIARLQELNLELVYLAVELTDPKRIRDEIKEVKDKSKEIIRRAEKEID
DAAKESEKILEEAREAISGSGSELAKLLLKAIAETQDLNLRAAKAFLEAAAKLQELNIRAVELLVKLTDPATIRE
ALEHAKRRSKEIIDEAERAIRAAKRESERIIEEARRLIEKGSGSGSELARELLRAHAQLQRLNLELLRELLRALA
QLQELNLDLLRLASEL(TDEIWIAQELRRIGDEFNAYYADAERLIREAAAASEKISREAERLAR)
SEQ ID NO: 27366
SELARKLLEASTKLQRLNIRLAEALLEAIARLQELNLELVYLAVELTDPKRIRDEIKEVKDKSKEIIRRAEKEID
DAAKESEKILEEAREAISGSGSELAKLLLKAIAETQDLNLRAAKAFLEAAAKLQELNIRAVELLVKLTDPATIRE
ALEHAKRRSKEIIDEAERAIRAAKRESERIIEEARRLIEKGSGSGSELARELLRAHAQLQRLNLELLRELLRALA
QLQELNLDLLRLASEL(TDEIWIAQELRRIGDEFNAYYADAERLSREAAAASEKISREAERLIR)
Anti-Her2-scFv_Cage_I269S Tuned Cage targeted to Her2 by anti-her2 scfv
SEQ ID NO: 27367
SELARKLLEASTKLQRLNIRLAEALLEAIARLQELNLELVYLAVELTDPKRIRDEIKEVKDKSKEIIRRAEKEID
DAAKESEKILEEAREAISGSGSELAKLLLKAIAETQDLNLRAAKAFLEAAAKLQELNIRAVELLVKLTDPATIRE
ALEHAKRRSKEIIDEAERAIRAAKRESERIIEEARRLIEKGSGSGSELARELLRAHAQLQRLNLELLRELLRALA
QLQELNLDLLRLASELTDEIWIAQELRRIGDEFNAYYADAERLSREAAAASEKISREAERLIR
SEQ ID NO: 27368
SELARKLLEASTKLQRLNIRLAEALLEAIARLQELNLELVYLAVELTDPKRIRDEIKEVKDKSKEIIRRAEKEID
DAAKESEKILEEAREAISGSGSELAKLLLKAIAETQDLNLRAAKAFLEAAAKLQELNIRAVELLVKLTDPATIRE
ALEHAKRRSKEIIDEAERAIRAAKRESERIIEEARRLIEKGSGSGSELARELLRAHAQLQRLNLELLRELLRALA
QLQELNLDLLRLASEL(TDEIWIAQELRRIGDEFNAYYADAERLIREAAAASEKISREAERLIR)
SEQ ID NO: 27369
SELARKLLEASTKLQRLNIRLAEALLEAIARLQELNLELVYLAVELTDPKRIRDEIKEVKDKSKEIIRRAEKEID
DAAKESEKILEEAREAISGSGSELAKLLLKAIAETQDLNLRAAKAFLEAAAKLQELNIRAVELLVKLTDPATIRE
ALEHAKRRSKEIIDEAERAIRAAKRESERIIEEARRLIEKGSGSGSELARELLRAHAQLQRLNLELLRELLRALA
QLQELNLDLLRLASEL(RDHMVLHEYVNAAGITFNAYYADAERLIREAAAASEKISREAER)
SEQ ID NO: 27370
SELARKLLEASTKLQRLNIRLAEALLEAIARLQELNLELVYLAVELTDPKRIRDEIKEVKDKSKEIIRRAEKEID
DAAKESEKILEEAREAISGSGSELAKLLLKAIAETQDLNLRAAKAFLEAAAKLQELNIRAVELLVKLTDPATIRE
ALEHAKRRSKEIIDEAERAIRAAKRESERIIEEARRLIEKGSGSGSELARELLRAHAQLQRLNLELLRELLRALA
QLQELNLDLLRLASEL(TDPDEARKAIARVKRESNAYYADAERLSREAAAASEKISREAERLIR)
SEQ ID NO: 27371
SELARKLLEASTKLQRLNIRLAEALLEAIARLQELNLELVYLAVELTDPKRIRDEIKEVKDKSKEIIRRAEKEID
DAAKESEKILEEAREAISGSGSELAKLLLKAIAETQDLNLRAAKAFLEAAAKLQELNIRAVELLVKLTDPATIRE
ALEHAKRRSKEIIDEAERAIRAAKRESERIIEEARRLIEKGSGSGSELARELLRAHAQLQRLNLELLRELLRALA
QLQELNLDLLRLASEL(TDPDEARKAIARVKRESNAYYADAERLIREAAAASEKISREAERLIR)
>Her2_Cage_I287S Tuned Cage targeted to Her2 by DARPin (I287S)
SEQ ID NO: 27372
SELARKLLEASTKLQRLNIRLAEALLEAIARLQELNLELVYLAVELTDPKRIRDEIKEVKDKSKEIIRRAEKEID
DAAKESEKILEEAREAISGSGSELAKLLLKAIAETQDLNLRAAKAFLEAAAKLQELNIRAVELLVKLTDPATIRE
ALEHAKRRSKEIIDEAERAIRAAKRESERIIEEARRLIEKGSGSGSELARELLRAHAQLQRLNLELLRELLRALA
QLQELNLDLLRLASEL(TDEIWIAQELRRIGDEFNAYYADAERLIREAAAASEKISREAERLSR)
>Her2_Cage_I269S_I287A Tuned Cage targeted to Her2 by DARPin (I269S, I287A)
SEQ ID NO: 27373
SELARKLLEASTKLQRLNIRLAEALLEAIARLQELNLELVYLAVELTDPKRIRDEIKEVKDKSKEIIRRAEKEID
DAAKESEKILEEAREAISGSGSELAKLLLKAIAETQDLNLRAAKAFLEAAAKLQELNIRAVELLVKLTDPATIRE
ALEHAKRRSKEIIDEAERAIRAAKRESERIIEEARRLIEKGSGSGSELARELLRAHAQLQRLNLELLRELLRALA
QLQELNLDLLRLASEL(TDEIWIAQELRRIGDEFNAYYADAERLSREAAAASEKISREAERLAR)
>Her2_Cage_I269S_I287S Tuned Cage targeted to Her2 by DARPin (I269S, I287A)
SEQ ID NO: 27374
SELARKLLEASTKLQRLNIRLAEALLEAIARLQELNLELVYLAVELTDPKRIRDEIKEVKDKSKEIIRRAEKEID
DAAKESEKILEEAREAISGSGSELAKLLLKAIAETQDLNLRAAKAFLEAAAKLQELNIRAVELLVKLTDPATIRE
ALEHAKRRSKEIIDEAERAIRAAKRESERIIEEARRLIEKGSGSGSELARELLRAHAQLQRLNLELLRELLRALA
QLQELNLDLLRLASEL(TDEIWIAQELRRIGDEFNAYYADAERLSREAAAASEKISREAERLSR)
>Her2_Cage_L209A_L216A Tuned Cage targeted to Her2 by DARPin (L209A)
SEQ ID NO: 27375
SELARKLLEASTKLQRLNIRLAEALLEAIARLQELNLELVYLAVELTDPKRIRDEIKEVKDKSKEIIRRAEKEID
DAAKESEKILEEAREAISGSGSELAKLLLKAIAETQDLNLRAAKAFLEAAAKLQELNIRAVELLVKLTDPATIRE
ALEHAKRRSKEIIDEAERAIRAAKRESERIIEEARRLIEKGSGSGSELARELLRAHAQLQRLNLELLRELLRALA
QLQELNLDLLRLASEL(TDEIWIAQELRRIGDEFNAYYADAERLIREAAAASEKISREAERLIR)
>EGFR_Decoyl Original decoy targeted to EGFR by DARPin (for NOT logic)
SEQ ID NO: 27376
SELARKLLEASTKLQRLNIRLAEALLEAIARLQELNLELVYLAVELTDPKRIRDEIKEVKDKSKEIIRRAEKEID
DAAKESEKILEEAREAISGSGSELAKLLLKAIAETQDLNLRAAKAFLEAAAKLQELNIRAVELLVKLTDPATIRE
ALEHAKRRSKEIIDEAERAIRAAKRESERIIEEARRLIEKGSGSGSELARELLRAHAQLQRLNLELLRELLRALA
QLQELNLDLLRLASEL(RDHMVLHEYVNAAGITFNAYYADAERLIREAAAASEKISREAG)
>EGFR_Decoy_G24 Tuned Decoy targeted to EGFR by DARPin
SEQ ID NO: 27377
SELARKLLEASTKLQRLNIRLAEALLEAIARLQELNLELVYLAVELTDPKRIRDEIKEVKDKSKEIIRRAEKEID
DAAKESEKILEEAREAISGSGSELAKLLLKAIAETQDLNLRAAKAFLEAAAKLQELNIRAVELLVKLTDPATIRE
ALEHAKRRSKEIIDEAERAIRAAKRESERIIEEARRLIEKGSGSGSELARELLRAHAQLQRLNLELLRELLRALA
QLQELNLDLLRLASEL(GRDHMVLHEYVNAAGITFNAYYADAERLIREAAAASEKISREAG)
>EGFR_Decoy_G25 Tuned Decoy targeted to EGFR by DARPin
SEQ ID NO: 27378
SELARKLLEASTKLQRLNIRLAEALLEAIARLQELNLELVYLAVELTDPKRIRDEIKEVKDKSKEIIRRAEKEID
DAAKESEKILEEAREAISGSGSELAKLLLKAIAETQDLNLRAAKAFLEAAAKLQELNIRAVELLVKLTDPATIRE
ALEHAKRRSKEIIDEAERAIRAAKRESERIIEEARRLIEKGSGSGSELARELLRAHAQLQRLNLELLRELLRALA
QLQELNLDLLRLASEL(RDHMVLHEYVNAAGITFNAYYADAERLSREAAAASEKISREAG)
>EGFR_Decoy_G33 Tuned Decoy targeted to EGFR by DARPin
SEQ ID NO: 27379
SELARKLLEASTKLQRLNIRLAEALLEAIARLQELNLELVYLAVELTDPKRIRDEIKEVKDKSKEIIRRAEKEID
DAAKESEKILEEAREAISGSGSELAKLLLKAIAETQDLNLRAAKAFLEAAAKLQELNIRAVELLVKLTDPATIRE
ALEHAKRRSKEIIDEAERAIRAAKRESERIIEEARRLIEKGSGSGSELARELLRAHAQLQRLNLELLRELLRALA
QLQELNLDLLRLASEL(GTDPDEARKAIARVKRESNAYYADAERLSREAAAASEKISREAG)
>EGFR_Decoy_G34 Tuned Decoy targeted to EGFR by DARPin
SEQ ID NO: 27380
SELARKLLEASTKLQRLNIRLAEALLEAIARLQELNLELVYLAVELTDPKRIRDEIKEVKDKSKEIIRRAEKEID
DAAKESEKILEEAREAISGSGSELAKLLLKAIAETQDLNLRAAKAFLEAAAKLQELNIRAVELLVKLTDPATIRE
ALEHAKRRSKEIIDEAERAIRAAKRESERIIEEARRLIEKGSGSGSELARELLRAHAQLQRLNLELLRELLRALA
QLQELNLDLLRLASEL(GTDPDEARKAIARVKRESNAYYADAERLSREAAAASEKISREAER)
>EGFR_Decoy_G35 Tuned Decoy targeted to EGFR by DARPin
SEQ ID NO: 27381
SELARKLLEASTKLQRLNIRLAEALLEAIARLQELNLELVYLAVELTDPKRIRDEIKEVKDKSKEIIRRAEKEID
DAAKESEKILEEAREAISGSGSELAKLLLKAIAETQDLNLRAAKAFLEAAAKLQELNIRAVELLVKLTDPATIRE
ALEHAKRRSKEIIDEAERAIRAAKRESERIIEEARRLIEKGSGSGSELARELLRAHAQLQRLNLELLRELLRALA
QLQELNLDLLRLASEL(GTDPDEARKAIARVKRESNAYYADAERLSREAAAASEKISREAERLI)
>EGFR_Decoy_G7(1A7) Tuned Decoy targeted to EGFR by DARPin
SEQ ID NO: 27382
SELARKLLEASTKLQRLNIRLAEALLEAIARLQELNLELVYLAVELTDPKRIRDEIKEVKDKSKEIIRRAEKEID
DAAKESEKILEEAREAISGSGSELAKLLLKAIAETQDLNLRAAKAFLEAAAKLQELNIRAVELLVKLTDPATIRE
ALEHAKRRSKEIIDEAERAIRAAKRESERIIEEARRLIEKGSGSGSELARELLRAHAQLQRLNLELLRELLRALA
QLQELNLDLLRLASEL(GTDPDEARKAIARVKRESNAYYADAERLSREAAAASEKISREAERLIR)
>EGFR_Decoy_Box1C1 Tuned Decoy targeted to EGFR by DARPin
SEQ ID NO: 27383
SELARKLLEASTKLQRLNIRLAEALLEAIARLQELNLELVYLAVELTDPKRIRDEIKEVKDKSKEIIRRAEKEID
DAAKESEKILEEAREAISGSGSELAKLLLKAIAETQDLNLRAAKAFLEAAAKLQELNIRAVELLVKLTDPATIRE
ALEHAKRRSKEIIDEAERAIRAAKRESERIIEEARRLIEKGSGSGSELARELLRAHAQLQRLNLELLRELLRALA
QLQELNLDLLRLASEL(GTDPDEARKAIARVKRESNAYYADAERLIREAAAASEKISREAERLIR)
>EGFR_Decoy3 Tuned Decoy targeted to EGFR by DARPin
SEQ ID NO: 27384
SELARKLLEASTKLQRLNIRLAEALLEAIARLQELNLELVYLAVELTDPKRIRDEIKEVKDKSKEIIRRAEKEID
DAAKESEKILEEAREAISGSGSELAKLLLKAIAETQDLNLRAAKAFLEAAAKLQELNIRAVELLVKLTDPATIRE
ALEHAKRRSKEIIDEAERAIRAAKRESERIIEEARRLIEKGSGSGSELARELLRAHAQLQRLNLELLRELLRALA
QLQELNLDLLRLASEL(GTDPDEARKAIARVKRESNAYYADAERLSREAAAASEKISREAERLAR)
>EGFR_Decoy5 Tuned Decoy targeted to EGFR by DARPin
SEQ ID NO: 27385
SELARKLLEASTKLQRLNIRLAEALLEAIARLQELNLELVYLAVELTDPKRIRDEIKEVKDKSKEIIRRAEKEID
DAAKESEKILEEAREAISGSGSELAKLLLKAIAETQDLNLRAAKAFLEAAAKLQELNIRAVELLVKLTDPATIRE
ALEHAKRRSKEIIDEAERAIRAAKRESERIIEEARRLIEKGSGSGSELARELLRAHAQLQRLNLELLRELLRALA
QLQELNLDLLRLASEL(GTDPDEARKAIARVKRESNAYYADAERLIREAAAASEKISREAERLAR)
>EGFR_Decoy7 Tuned Decoy targeted to EGFR by DARPin
SEQ ID NO: 27386
SELARKLLEASTKLQRLNIRLAEALLEAIARLQELNLELVYLAVELTDPKRIRDEIKEVKDKSKEIIRRAEKEID
DAAKESEKILEEAREAISGSGSELAKLLLKAIAETQDLNLRAAKAFLEAAAKLQELNIRAVELLVKLTDPATIRE
ALEHAKRRSKEIIDEAERAIRAAKRESERIIEEARRLIEKGSGSGSELARELLRAHAQLQRLNLELLRELLRALA
QLQELNLDLLRLASEL(TDPDEARKAIARVKRESNAYYADAERLSREAAAASEKISREAERLAR)
>EGFR_Decoy10 Tuned Decoy targeted to EGFR by DARPin
SEQ ID NO: 27387
SELARKLLEASTKLQRLNIRLAEALLEAIARLQELNLELVYLAVELTDPKRIRDEIKEVKDKSKEIIRRAEKEID
DAAKESEKILEEAREAISGSGSELAKLLLKAIAETQDLNLRAAKAFLEAAAKLQELNIRAVELLVKLTDPATIRE
ALEHAKRRSKEIIDEAERAIRAAKRESERIIEEARRLIEKGSGSGSELARELLRAHAQLQRLNLELLRELLRALA
QLQELNLDLLRLASEL(GSE(D/N)LYFQGSTDPDEARKAIARVKRESNAYYADAERLSREAAAASEKISREAER
LAR)
>EGFR_Decoy11 Tuned Decoy targeted to EGFR by DARPin
SEQ ID NO: 27388
SELARKLLEASTKLQRLNIRLAEALLEAIARLQELNLELVYLAVELTDPKRIRDEIKEVKDKSKEIIRRAEKEID
DAAKESEKILEEAREAISGSGSELAKLLLKAIAETQDLNLRAAKAFLEAAAKLQELNIRAVELLVKLTDPATIRE
ALEHAKRRSKEIIDEAERAIRAAKRESERIIEEARRLIEKGSGSGSELARELLRAHAQLQRLNLELLRELLRALA
QLQELNLDLLRLASEL(GSE(D/N)LYFQGSTDPDEARKAIARVKRESNAYYADAERLSREAAAASEKISREAER
LIR)
>EGFR_Decoy12 Tuned Decoy targeted to EGFR by DARPin
SEQ ID NO: 27389
SELARKLLEASTKLQRLNIRLAEALLEAIARLQELNLELVYLAVELTDPKRIRDEIKEVKDKSKEIIRRAEKEID
DAAKESEKILEEAREAISGSGSELAKLLLKAIAETQDLNLRAAKAFLEAAAKLQELNIRAVELLVKLTDPATIRE
ALEHAKRRSKEIIDEAERAIRAAKRESERIIEEARRLIEKGSGSGSELARELLRAHAQLQRLNLELLRELLRALA
QLQELNLDLLRLASEL(GSE(D/N)LYFQGSTDPDEARKAIARVKRESNAYYADAERLIREAAAASEKISREAER
LAR)
>EGFR_Decoy13 Tuned Decoy targeted to EGFR by DARPin
SEQ ID NO: 27390
SELARKLLEASTKLQRLNIRLAEALLEAIARLQELNLELVYLAVELTDPKRIRDEIKEVKDKSKEIIRRAEKEID
DAAKESEKILEEAREAISGSGSELAKLLLKAIAETQDLNLRAAKAFLEAAAKLQELNIRAVELLVKLTDPATIRE
ALEHAKRRSKEIIDEAERAIRAAKRESERIIEEARRLIEKGSGSGSELARELLRAHAQLQRLNLELLRELLRALA
QLQELNLDLLRLASEL(GSE(D/N)LYFQGSTDPDEARKAIARVKRESNAYYADAERLIREAAAASEKISREAER
LIR)
>EGFR_Decoy_G30 Tuned Decoy targeted to EGFR by DARPin
SEQ ID NO: 27391
SELARKLLEASTKLQRLNIRLAEALLEAIARLQELNLELVYLAVELTDPKRIRDEIKEVKDKSKEIIRRAEKEID
DAAKESEKILEEAREAISGSGSELAKLLLKAIAETQDLNLRAAKAFLEAAAKLQELNIRAVELLVKLTDPATIRE
ALEHAKRRSKEIIDEAERAIRAAKRESERIIEEARRLIEKGSGSGSELARELLRAHAQLQRLNLELLRELLRALA
QLQELNLDLLRLASEL(GTDPDEARKAIARVKRESNAYYADAERLSREAAAASEKISREAERLSR)
>EGFR_Decoy_G32 Tuned Decoy targeted to EGFR by DARPin
SEQ ID NO: 27392
SELARKLLEASTKLQRLNIRLAEALLEAIARLQELNLELVYLAVELTDPKRIRDEIKEVKDKSKEIIRRAEKEID
DAAKESEKILEEAREAISGSGSELAKLLLKAIAETQDLNLRAAKAFLEAAAKLQELNIRAVELLVKLTDPATIRE
ALEHAKRRSKEIIDEAERAIRAAKRESERIIEEARRLIEKGSGSGSELARELLRAHAQLQRLNLELLRELLRALA
QLQELNLDLLRLASEL(GTDPDEARKAIARVKRESNAYYADAERLSREAAAASEKISREAERLIR)

TABLE 2
Other exemplary cage polypeptides (see also SEQ ID NOS: 92-14317,
27094-27117, 27120-27125, 27,728-27321, and cage polypeptides listed in Table 7,
Table 8, and/or Table 9):

1) Exemplary reference cage polypeptides; latch regions denoted by brackets [ ]
6His-MBP-TEV, 6His-TEV, and flexible linker sequences are underlined text
fused functional domains (DARPins, componants of the split intein, and fluorescent
proteins) are bolded text
Functional peptide is italicized underlined text
Exemplary positions that have been mutated to any amino acid to tune responsiveness
are underlined bolded text. These positions are exemplary, and not an exhaustive list
of residues able to tune responsiveness.
C-terminal sequences that can be removed to tune responsiveness are contained
within brackets. A range from one (1) to all residues encompassed within the
brackets may be removed, starting from the C-terminus and removing successive
residues therein.
All sequences in parentheses are optional
>SB76L (SEQ ID NO: 1)
(MGSSHHHHHHSSGLVPRGSHM)SKEAVTKLQALNIKLAEKLLEALARLQELNIALVYLAVELTDPKRIADEIKKVKDKSKEI
VERAEEEIARAAAESKKILDEGSGSGSDAVAELQALNLKLAELLLEAIAKLQELNIKLVELLTKLTDPATIREAIRKVKEDSE
RIVAEAERLIAAAKAESERIIREGSGSGDPDVARLQELNIELARELLRAAAELQELNIKLVELASELTDP[DEARKAIARVKR
ESKRIVEDAERLIREAAAASEKISRE]
>SB76L_17 (SEQ ID NO: 2)
(MGSSHHHHHHSSGLVPRGSHM)GSKEAVTKLMALNLKLAEKLLEAIARLQELNIALVYLATELTDPERIREEIRKVKEESAR
IVEEAEEEIRRAAARSEDILREGSGSGSDAVAELQRLNLELAELLLRAAAKLQELNIDLVRLLTELTDPKTIRDAIERVKAES
ERIVREAERLIREAKADSERILREGSGSGDPDVARLQELFIELARELLEALARLQELNIDLVRLASELTDP[DTIRDAIRRVK
EESARIVEDARRLIKEAAEEAEKISRE]
>SB76L_18 (SEQ ID NO: 3)
(MGSSHHHHHHSSGLVPRGSHM)GSKRAVTELQKLNIELARKLLRALAELMELNIALVYLAVELTDPRRIREEIRKVKEKSDE
IVKRAEDEIRKAAAESEKILREGSGSGSDAVAELQRLNLELAKLLLEAIAKLQALNIDLVRLLTELTDPETIRRAIKRVKDES
ARIVEEAEKLIRAAKDKAREIIDKGSGSGDPDVARLQELNIELARELLEAAARLQELFIDLVRLASELTDP[DEARKAIERVK
REAERIVREAERLIREAKRASKEISDE]
>LOCKR_extend5 (SEQ ID NO: 4)
(MGSSHHHHHHSSGLVPRGSHM)KLLEAVTKLQALNIKLAEKLLEALARLQELNIALVYLAVELTDPKRIADEIKKVKDKSKE
IVERAEEEIARAAAESKKILDEAEEEGSGSGSELLLEAVAELQALNLKLAELLLEAIAKLQELNIKLVELLTKLTDPATIREA
IRKVKEDSERIVAEAERLIAAAKAESERIIREAERLAGSGSGSRELLRDVARLQELNIELARELLRAAAELQELNIKLVELAS
ELTDP[DEARKAIARVKRESKRIVEDAERLIREAAAASEKISREAERLI]
>LOCKR_extend9 (SEQ ID NO: 5)
(MGSSHHHHHHSSGLVPRGSHM)KLAEKLLEAVTKLQALNIKLAEKLLEALARLQELNIALVYLAVELTDPKRIADEIKKVKD
KSKEIVERAEEEIARAAAESKKILDEAEEEIARAGSGSGSLKLAELLLEAVAELQALNLKLAELLLEAIAKLQELNIKLVELL
TKLTDPATIREAIRKVKEDSERIVAEAERLIAAAKAESERIIREAERLIAAAAGSGSGSIELARELLRDVARLQELNIELARE
LLRAAAELQELNIKLVELASELTDP[DEARKAIARVKRESKRIVEDAERLIREAAAASEKISREAERLIREAA]
>LOCKR_extend18 (SEQ ID NO: 6)
(MGSSHHHHHHSSGLVPRGSHM)SKEAVTKLQALNIKLAEKLLEAVTKLQALNIKLAEKLLEALARLQELNIALVYLAVELTD
PKRIADEIKKVKDKSKEIVERAEEEIARAAAESKKILDEAEEEIARAAAESKKILDEGSGSGSDAVAELQALNLKLAELLLEA
VAELQALNLKLAELLLEAIAKLQELNIKLVELLTKLTDPATIREAIRKVKEDSERIVAEAERLIAAAKAESERIIREAERLIA
AAKAESERIIREGSGSGDPDVARLQELNIELARELLRDVARLQELNIELARELLRAAAELQELNIKLVELASELTDP[DEARK
AIARVKRESKRIVEDAERLIREAAAASEKISREAERLIREAAAASEKISRE]
>LOCKRb (SEQ ID NO: 7)
(MGSSHHHHHHSSGLVPRGSHM)SHAAVIKLSDLNIRLLDKLLQAVIKLTELNAELNRKLIEALQRLFDLNVALVHLAAELTD
PKRIADEIKKVKDKSKEIVERAEEEIARAAAESKKILDEAEEEIARAAAESKKILDEGSGSGSDAVAELQALNLKLAELLLEA
VAELQALNLKLAELLLEAIAKLQELNIKLVELLTKLTDPATIREAIRKVKEDSERIVAEAERLIAAAKAESERIIREAERLIA
AAKAESERIIREGSGSNDPQVAQNQETFIELARDALRLVAENQEAFIEVARLTLRAAALAQEVAIKAVEAASEGGSGSG[NKE
EIEKLAKEAREKLKKAEKEHKEIHDKLRKKNKKAREDLKKKADELRETNKRVN]
>LOCKRc (SEQ ID NO: 8)
(MGSSHHHHHHSSGLVPRGSHM)SLEAVLKLAELNLKLSDKLAEAVQKLAALLNKLLEKLSEALQRLFELNVALVTLAIELTD
PKRIADEIKKVKDKSKEIVERAEEEIARAAAESKKILDEAEEEIARAAAESKKILDEGSGSGSDAVAELQALNLKLAELLLEA
VAELQALNLKLAELLLEAIAKLQELNIKLVELLTKLTDPATIREAIRKVKEDSERIVAEAERLIAAAKAESERIIREAERLIA
AAKAESERIIREGSGSNDPLVARLQELLIEHARELLRLVATSQEIFIELARAFLANAAQLQEAAIKAVEAASENGSGSG[SSE
KVRRELKESLKENHKQNQKLLKDHKRAQEKLNRELEELKKKHKKTLDDIRRES]
>LOCKRd (SEQ ID NO: 9)
(MGSSHHHHHHSSGLVPRGSHM)SLEAVLKLFELNHKLSEKLLEAVLKLHALNQKLSQKLLEALARLLELNVALVELAIELTD
PKRIADEIKKVKDKSKEIVERAEEEIARAAAESKKILDEAEEEIARAAAESKKILDEGSGSGSDAVAELQALNLKLAELLLEA
VAELQALNLKLAELLLEAIAKLQELNIKLVELLTKLTDPATIREAIRKVKEDSERIVAEAERLIAAAKAESERIIREAERLIA
AAKAESERIIREGSGSGDPEVARLQEAFIEQAREILRNVAAAQEALIEQARRLLALAALAQEAAIKAVELASEHGSGSG[DTV
KRILEELRRRFEKLAKDLDDIARKLLEDHKKHNKELKDKQRKIKKEADDAARS]
>LOCKRe (SEQ ID NO: 10)
(MGSSHHHHHHSSGLVPRGSHM)SLEAVLKLQDLNSKLSEKLSEAQLKLQALNNKLLRKLLEALLRLQDLNQALVNLALQLTD
PKRIADEIKKVKDKSKEIVERAEEEIARAAAESKKILDEAEEEIARAAAESKKILDEGSGSGSDAVAELQALNLKLAELLLEA
VAELQALNLKLAELLLEAIAKLQELNIKLVELLTKLTDPATIREAIRKVKEDSERIVAEAERLIAAAKAESERIIREAERLIA
AAKAESERIIREGSGSGDPDVAKSQEHLIEHARELLRQVAKSQELFIELARQLLRLAAKSQELAIKAVELASEAGSGSG[DDV
ERRLRKANKESKKEAEELTEEAKKANEKTKEDSKELTKENRKTNKTIKDEARS]
>LOCKRf (SEQ ID NO: 11)
(MGSSHHHHHHSSGLVPRGSHM)SREAVEKLAELNHKLSHKLQQAQQKLQALNLKLLQKLLEALDRLQDLNNALVKLAQRLTD
PKRIADEIKKVKDKSKEIVERAEEEIARAAAESKKILDEAEEEIARAAAESKKILDEGSGSGSDAVAELQALNLKLAELLLEA
VAELQALNLKLAELLLEAIAKLQELNIKLVELLTKLTDPATIREAIRKVKEDSERIVAEAERLIAAAKAESERIIREAERLIA
AAKAESERIIREGSGSGDPDVARQQETLIEQARRLLRNVAESQELFIEAARTVLRLAAKLQEINIKQVELASEAGSGSG[DDE
ERRSEKTVQDAKREIKKVEDDLQRLNEEQKKKVKKQEDENQKTLKKHKDDARS]
>miniLOCKRa_1 (SEQ ID NO: 12)
(MGSSHHHHHHSSGLVPRGSHM)NKEDATEAQKKAIRAAEELLKDVTRIQERAIREAEKALERLARVQEEAIRRVYEAVESKN
KEELKKVKEEIEELLRRLKRELDELEREIRELLKEIKEKADRLEKEIRDLIERIRRDRNASDEVVTRLARLNEELIRELREDV
RRLAELNKELLRELERAARELARLNEKLLELADRVETE[EEARKAIARVKRESKRIVEDAERLIREAAAASEKISREAERLIR
EAAAASEKISRE]
>miniLOCKRa_2 (SEQ ID NO: 13)
(MGSSHHHHHHSSGLVPRGSHM)DERLKRLNERLADELDKDLERLLRLNEELARELTRAAEELRELNEKLVELAKKLQGGRSR
EVAERAEKEREKIRRKLEEIKKEIKEDADRIKKRADELRRRLEKTLEDAARELEKLKREPRTEELKRKATELQKEAIRRAEEL
LKEVTDVQRRAIERAEELLEKLARLQEEAIRTVYLLVELNKV[DRARKAIARVKRESKRIVEDAERLIREAAAASEKISREAE
RLIREAAAASEKISRE]
>miniLOCKRc_1 (SEQ ID NO: 14)
(MGSSHHHHHHSSGLVPRGSHM)LIERLTRLEKEHVRELKRLLDTSLEILRRLVEAFETNLRQLKEALKRALEAANLHNEEVE
EVLRKLEEDLRRLEEELRKTLDDVRKEVKRLKEELDKRIKEVEDELRKIKEKLKKGDKNEKRVLEEILRLAEDVLKKSDKLAK
DVQERARELNEILEELSRKLQELFERVVEEVTRNVPT[TERIEKVRRELKESLKENHKQNQKLLKDHKRAQEKLNRELEELKK
KHKKTLDDIRRES]
>miniLOCKRc_2 (SEQ ID NO: 15)
(MGSSHHHHHHSSGLVPRGSHM)SEERVLELAEEALRLSDEAAKEIQELARRLNEELEKLSKELQDLFERIVETVTRLIDADE
ETLKRAAEEIKKRLEDARKKAKEAADKAREELDRARKKLKELVDEIRKKAKDALEKAGADEELVARLLRLLEEHARELERLLR
TSARIIERLLDAFRRNLEQLKEAADKAVEAAEEAVRRVED[VRVWSEKVRRELKESLKENHKQNQKLLKDHKRAQEKLNRELE
ELKKKHKKTLDDIRRES]
>1fix-short-noBim-t0 (SEQ ID NO: 16)
(MGSHHHHHHGSGSENLYFQGSGG)SELARKLLEASTKLQRLNIRLARALLEAIARLQELNLELVYLAVELTDPKRIRDEIKE
VKDKSKEIIRRAEKEIDDAAKESEKILEEAREAISGSGSELAKLLLKAIAETQDLNLRAAKAFLEAAAKLQELNIRAVELLVK
LTDPATIREALEHAKRRSKEIIDEAERAIRAAKRESERIIEEARRLIEKGSGSGS[ELARELLRAHAQLQRLNLELLRELLRA
LAQLQELNLDLLRLASELTDPDEARKAIARVKRESKRIVEDAERLIREAAAASEKISREAERLIR]
>1fix-short-noBim(AYYA)-t0 (SEQ ID NO: 17)
(MGSHHHHHHGSGSENLYFQGSGG)SELARKLLEASTKLQRLNIRLARALLEAIARLQELNLELVYLAVELTDPKRIRDEIKE
VKDKSKEIIRRAEKEIDDAAKESEKILEEAREAISGSGSELAKLLLKAIAETQDLNLRAAKAFLEAAAKLQELNIRAVELLVK
LTDPATIREALEHAKRRSKEIIDEAERAIRAAKRESERIIEEARRLIEKGSGSGS[ELARELLRAHAQLQRLNLELLRELLRA
LAQLQELNLDLLRLASELTDPDEARKAIARVKRESNAYYADAERLIREAAAASEKISREAERLIR]
“(3) Functional LOCKR Cage designs with bioactive peptides encoded into the Latch”,
>aBc12LOCKR (SEQ ID NO: 18)
(MGSSHHHHHHSSGLVPRGSHM)GSKEAVTKLQALNIKLAEKLLEALARLQELNIALVYLAVELTDPKRIADEIKKVKDKSKE
IVERAEEEIARAAAESKKILDEGSGSGSDAVAELQALNLKLAELLLEAIAKLQELNIKLVELLTKLTDPATIREAIRKVKEDS
ERIVAEAERLIAAAKAESERIIREGSGSGDPDVARLQELNIELARELLRAAAELQELNIKLVELASELT(GSGSGSG)[DPKM
AQEL [symbol] DE [symbol] RAASLQI [symbol] GDAFYA [symbol] LRALAASEKLSKE]
>pBimLOCKR (SEQ ID NO: 19)
(MGSSHHHHHHSSGLVPRGSHM)KEAVTKLQALNIKLAEKLLEALARLQELNIALVYLAVELTDPKRIADEIKKVKDKSKEIV
ERAEEEIARAAAESKKILDEGSGSGSDAVAELQALNLKLAELLLEAIAKLQELNIKLVELLTKLTDPATIREAIRKVKEDSER
IVAEAERLIAAAKAESERIIREGSGSGDPDVARLQELNIELARELLRAAAELQELNIKLVELASEGSGSGS[EIAEALRAIGD
VFNESYRIVEDAERLIREAAAASEKISRE]
>BimLOCKR_extend5 (SEQ ID NO: 20)
(MGSSHHHHHHSSGLVPRGSHM)KLLEAVTKLQALNIKLAEKLLEALARLQELNIALVYLAVELTDPKRIADEIKKVKDKSKE
IVERAEEEIARAAAESKKILDEAEEEGSGSGSELLLEAVAELQALNLKLAELLLEAIAKLQELNIKLVELLTKLTDPATIREA
IRKVKEDSERIVAEAERLIAAAKAESERIIREAERLAGSGSGSRELLRDVARLQELNIELARELLRAAAELQELNIKLVELAS
ELTD[EIWIAQELRRIGDEFNAYYADAERLIREAAAASEKISREAERLI]
>BimLOCKR_extend9 (SEQ ID NO: 21)
(MGSSHHHHHHSSGLVPRGSHM)KLAEKLLEAVTKLQALNIKLAEKLLEALARLQELNIALVYLAVELTDPKRIADEIKKVKD
KSKEIVERAEEEIARAAAESKKILDEAEEEIARAGSGSGSLKLAELLLEAVAELQALNLKLAELLLEAIAKLQELNIKLVELL
TKLTDPATIREAIRKVKEDSERIVAEAERLIAAAKAESERIIREAERLIAAAAGSGSGSIELARELLRDVARLQELNIELARE
LLRAAAELQELNIKLVELASELTD[EIWIAQELRRIGDEFNAYYADAERLIREAAAASEKISREAERLIREAA]
>BimLOCKR_extend18 (SEQ ID NO: 22)
(MGSSHHHHHHSSGLVPRGSHM)SKEAVTKLQALNIKLAEKLLEAVTKLQALNIKLAEKLLEALARLQELNIALVYLAVELTD
PKRIADEIKKVKDKSKEIVERAEEEIARAAAESKKILDEAEEEIARAAAESKKILDEGSGSGSDAVAELQALNLKLAELLLEA
VAELQALNLKLAELLLEAIAKLQELNIKLVELLTKLTDPATIREAIRKVKEDSERIVAEAERLIAAAKAESERIIREAERLIA
AAKAESERIIREGSGSGDPDVARLQELNIELARELLRDVARLQELNIELARELLRAAAELQELNIKLVELASELTD[EIWIAQ
ELRRIGDEFNAYYADAERLIREAAAASEKISREAERLIREAAAASEKISRE]
>BimLOCKRb (SEQ ID NO: 23)
(MGSSHHHHHHSSGLVPRGSHM)SHAAVIKLSDLNIRLLDKLLQAVIKLTELNAELNRKLIEALQRLFDLNVALVHLAAELTD
PKRIADEIKKVKDKSKEIVERAEEEIARAAAESKKILDEAEEEIARAAAESKKILDEGSGSGSDAVAELQALNLKLAELLLEA
VAELQALNLKLAELLLEAIAKLQELNIKLVELLTKLTDPATIREAIRKVKEDSERIVAEAERLIAAAKAESERIIREAERLIA
AAKAESERIIREGSGSNDPQVAQNQETFIELARDALRLVAENQEAFIEVARLTLRAAALAQEVAIKAVEAASEGGSGSG[NEI
WIAQELRRIGDEFNAYYAEHKEIHDKLRKKNKKAREDLKKKADELRETNKRVN]
>BimLOCKRc (SEQ ID NO: 24)
(MGSSHHHHHHSSGLVPRGSHM)SLEAVLKLAELNLKLSDKLAEAVQKLAALLNKLLEKLSEALQRLFELNVALVTLAIELTD
PKRIADEIKKVKDKSKEIVERAEEEIARAAAESKKILDEAEEEIARAAAESKKILDEGSGSGSDAVAELQALNLKLAELLLEA
VAELQALNLKLAELLLEAIAKLQELNIKLVELLTKLTDPATIREAIRKVKEDSERIVAEAERLIAAAKAESERIIREAERLIA
AAKAESERIIREGSGSNDPLVARLQELLIEHARELLRLVATSQEIFIELARAFLANAAQLQEAAIKAVEAASENGSG[EIWIA
QELRRIGDEFNAYYAQNQKLLKDHKRAQEKLNRELEELKKKHKKTLDDIRRES]
>BimLOCKRd (SEQ ID NO: 25)
(MGSSHHHHHHSSGLVPRGSHM)SLEAVLKLFELNHKLSEKLLEAVLKLHALNQKLSQKLLEALARLLELNVALVELAIELTD
PKRIADEIKKVKDKSKEIVERAEEEIARAAAESKKILDEAEEEIARAAAESKKILDEGSGSGSDAVAELQALNLKLAELLLEA
VAELQALNLKLAELLLEAIAKLQELNIKLVELLTKLTDPATIREAIRKVKEDSERIVAEAERLIAAAKAESERIIREAERLIA
AAKAESERIIREGSGSGDPEVARLQEAFIEQAREILRNVAAAQEALIEQARRLLALAALAQEAAIKAVELASEHGSGS[EIWI
AQELRRIGDEFNAYYADLDDIARKLLEDHKKHNKELKDKQRKIKTIKDEARS]
>StrepLOCKRa_300 (SEQ ID NO: 26)
(MGSSHHHHHHSSGLVPRGSHM)SKEAVTKLQALNIKLAEKLLEAVTKLQALNIKLAEKLLEALARLQELNIALVYLAVELTD
PKRIADEIKKVKDKSKEIVERAEEEIARAAAESKKILDEAEEEIARAAAESKKILDEGSGSGSDAVAELQALNLKLAELLLEA
VAELQALNLKLAELLLEAIAKLQELNIKLVELLTKLTDPATIREAIRKVKEDSERIVAEAERLIAAAKAESERIIREAERLIA
AAKAESERIIREGSGSGDPDVARLQELNIELARELLRDVARLQELNIELARELLRAAAELQELNIKLVELAS(GG)[NWSHPQ
FEKKAIARVKRESKRIVEDAERLIREAAAASEKISREAERLIREAAAASEKISRE]
>strepLOCKRa_306 (SEQ ID NO: 27)
(MGSSHHHHHHSSGLVPRGSHM)SKEAVTKLQALNIKLAEKLLEAVTKLQALNIKLAEKLLEALARLQELNIALVYLAVELTD
PKRIADEIKKVKDKSKEIVERAEEEIARAAAESKKILDEAEEEIARAAAESKKILDEGSGSGSDAVAELQALNLKLAELLLEA
VAELQALNLKLAELLLEAIAKLQELNIKLVELLTKLTDPATIREAIRKVKEDSERIVAEAERLIAAAKAESERIIREAERLIA
AAKAESERIIREGSGSGDPDVARLQELNIELARELLRDVARLQELNIELARELLRAAAELQELNIKLVELASELTDPD[ENWS
HPQFEKRESKRIVEDAERLIREAAAASEKISREAERLIREAAAASEKISRE]
>strepLOCKRa_309 (SEQ ID NO: 28)
(MGSSHHHHHHSSGLVPRGSHM)SKEAVTKLQALNIKLAEKLLEAVTKLQALNIKLAEKLLEALARLQELNIALVYLAVELTD
PKRIADEIKKVKDKSKEIVERAEEEIARAAAESKKILDEAEEEIARAAAESKKILDEGSGSGSDAVAELQALNLKLAELLLEA
VAELQALNLKLAELLLEAIAKLQELNIKLVELLTKLTDPATIREAIRKVKEDSERIVAEAERLIAAAKAESERIIREAERLIA
AAKAESERIIREGSGSGDPDVARLQELNIELARELLRDVARLQELNIELARELLRAAAELQELNIKLVELASELTDPD[EARK
NWSHPQFEKKRIVEDAERLIREAAAASEKISREAERLIREAAAASEKISRE]
>strepLOCKRa_312 (SEQ ID NO: 29)
(MGSSHHHHHHSSGLVPRGSHM)SKEAVTKLQALNIKLAEKLLEAVTKLQALNIKLAEKLLEALARLQELNIALVYLAVELTD
PKRIADEIKKVKDKSKEIVERAEEEIARAAAESKKILDEAEEEIARAAAESKKILDEGSGSGSDAVAELQALNLKLAELLLEA
VAELQALNLKLAELLLEAIAKLQELNIKLVELLTKLTDPATIREAIRKVKEDSERIVAEAERLIAAAKAESERIIREAERLIA
AAKAESERIIREGSGSGDPDVARLQELNIELARELLRDVARLQELNIELARELLRAAAELQELNIKLVELASELTDPD[EARK
AIANWSHPQFEKVEDAERLIREAAAASEKISREAERLIREAAAASEKISRE]
>strepLOCKRa_313 (SEQ ID NO: 30)
(MGSSHHHHHHSSGLVPRGSHM)SKEAVTKLQALNIKLAEKLLEAVTKLQALNIKLAEKLLEALARLQELNIALVYLAVELTD
PKRIADEIKKVKDKSKEIVERAEEEIARAAAESKKILDEAEEEIARAAAESKKILDEGSGSGSDAVAELQALNLKLAELLLEA
VAELQALNLKLAELLLEAIAKLQELNIKLVELLTKLTDPATIREAIRKVKEDSERIVAEAERLIAAAKAESERIIREAERLIA
AAKAESERIIREGSGSGDPDVARLQELNIELARELLRDVARLQELNIELARELLRAAAELQELNIKLVELASELTDPD[EARK
AIARNWSHPQFEKEDAERLIREAAAASEKISREAERLIREAAAASEKISRE]
>strepLOCKRa_317 (SEQ ID NO: 31)
(MGSSHHHHHHSSGLVPRGSHM)SKEAVTKLQALNIKLAEKLLEAVTKLQALNIKLAEKLLEALARLQELNIALVYLAVELTD
PKRIADEIKKVKDKSKEIVERAEEEIARAAAESKKILDEAEEEIARAAAESKKILDEGSGSGSDAVAELQALNLKLAELLLEA
VAELQALNLKLAELLLEAIAKLQELNIKLVELLTKLTDPATIREAIRKVKEDSERIVAEAERLIAAAKAESERIIREAERLIA
AAKAESERIIREGSGSGDPDVARLQELNIELARELLRDVARLQELNIELARELLRAAAELQELNIKLVELASELTDPD[EARK
AIARVKRENWSHPQFEKRLIREAAAASEKISREAERLIREAAAASEKISRE]
>strepLOCKRa_320 (SEQ ID NO: 32)
(MGSSHHHHHHSSGLVPRGSHM)SKEAVTKLQALNIKLAEKLLEAVTKLQALNIKLAEKLLEALARLQELNIALVYLAVELTD
PKRIADEIKKVKDKSKEIVERAEEEIARAAAESKKILDEAEEEIARAAAESKKILDEGSGSGSDAVAELQALNLKLAELLLEA
VAELQALNLKLAELLLEAIAKLQELNIKLVELLTKLTDPATIREAIRKVKEDSERIVAEAERLIAAAKAESERIIREAERLIA
AAKAESERIIREGSGSGDPDVARLQELNIELARELLRDVARLQELNIELARELLRAAAELQELNIKLVELASELTDPD[EARK
AIARVKRESKRNWSHPQFEKREAAAASEKISREAERLIREAAAASEKISRE]
>strepLOCKRa_323 (SEQ ID NO: 33)
(MGSSHHHHHHSSGLVPRGSHM)SKEAVTKLQALNIKLAEKLLEAVTKLQALNIKLAEKLLEALARLQELNIALVYLAVELTD
PKRIADEIKKVKDKSKEIVERAEEEIARAAAESKKILDEAEEEIARAAAESKKILDEGSGSGSDAVAELQALNLKLAELLLEA
VAELQALNLKLAELLLEAIAKLQELNIKLVELLTKLTDPATIREAIRKVKEDSERIVAEAERLIAAAKAESERIIREAERLIA
AAKAESERIIREGSGSGDPDVARLQELNIELARELLRDVARLQELNIELARELLRAAAELQELNIKLVELASELTDPD[EARK
AIARVKRESKRIVENWSHPQFEKAAASEKISREAERLIREAAAASEKISRE]
>strepLOCKRa_329 (SEQ ID NO: 34)
(MGSSHHHHHHSSGLVPRGSHM)SKEAVTKLQALNIKLAEKLLEAVTKLQALNIKLAEKLLEALARLQELNIALVYLAVELTD
PKRIADEIKKVKDKSKEIVERAEEEIARAAAESKKILDEAEEEIARAAAESKKILDEGSGSGSDAVAELQALNLKLAELLLEA
VAELQALNLKLAELLLEAIAKLQELNIKLVELLTKLTDPATIREAIRKVKEDSERIVAEAERLIAAAKAESERIIREAERLIA
AAKAESERIIREGSGSGDPDVARLQELNIELARELLRDVARLQELNIELARELLRAAAELQELNIKLVELASELTDPD[EARK
AIARVKRESKRIVEDAERLINWSHPQFEKISREAERLIREAAAASEKISRE]
>SB13_LOCKR (SEQ ID NO: 35)
(MGSSHHHHHHSSGLVPRGSHM)GSKEAVTKLQALNIKLAEKLLEALARLQELNIALVYLAVELTDPKRIADEIKKVKDKSKE
IVERAEEEIARAAAESKKILDEGSGSGSDAVAELQALNLKLAELLLEAIAKLQELNIKLVELLTKLTDPATIREAIRKVKEDS
ERIVAEAERLIAAAKAESERIIREGSGSGDPDVARLQELNIELARELLRAAAELQELNIKLVELASEGSGSGSGYELRRALE
ELEKALRELEKSLDEL [symbol] RSLEEL [symbol] KNPSEDALVENNRLNVENNKIIVEVLRIIAEVLKINAKS]
>ZCX12_LOCKR (SEQ ID NO: 36)
(MGSSHHHHHHSSGLVPRGSHM)GSKEAVTKLQALNIKLAEKLLEALARLQELNIALVYLAVELTDPKRIADEIKKVKDKSKE
IVERAEEEIARAAAESKKILDEGSGSGSDAVAELQALNLKLAELLLEAIAKLQELNIKLVELLTKLTDPATIREAIRKVKEDS
ERIVAEAERLIAAAKAESERIIREGSGSGDPDVARLQELNIELARELLRAAAELQELNIKLVELASEGSGSGSGKKLVEEVE
RALRELLKTSEDLVRKV [symbol] KALRELLELIRRGGTKDKIEEKIRRVLEEIKRELERQKRKIEDVLRQIKEELYRS]
>SB13_LOCKR_extend18 (SEQ ID NO: 37)
(MGSSHHHHHHSSGLVPRGSHM)SKEAVTKLQALNIKLAEKLLEAVTKLQALNIKLAEKLLEALARLQELNIALVYLAVELTD
PKRIADEIKKVKDKSKEIVERAEEEIARAAAESKKILDEAEEEIARAAAESKKILDEGSGSGSDAVAELQALNLKLAELLLEA
VAELQALNLKLAELLLEAIAKLQELNIKLVELLTKLTDPATIREAIRKVKEDSERIVAEAERLIAAAKAESERIIREAERLIA
AAKAESERIIREGSGSGDPDVARLQELNIELARELLRDVARLQELNIELARELLRAAAELQELNIKLVELASEGSGSGSGYE
LRRALEELEKALRELKKSLDELERSLEELEKNPSEDALVENNRLNVENNKIIVEVLRIIAEVLKINAKS]
>ZCX12_LOCKR_extend18 (SEQ ID NO: 38)
(MGSSHHHHHHSSGLVPRGSHM)SKEAVTKLQALNIKLAEKLLEAVTKLQALNIKLAEKLLEALARLQELNIALVYLAVELTD
PKRIADEIKKVKDKSKEIVERAEEEIARAAAESKKILDEAEEEIARAAAESKKILDEGSGSGSDAVAELQALNLKLAELLLEA
VAELQALNLKLAELLLEAIAKLQELNIKLVELLTKLTDPATIREAIRKVKEDSERIVAEAERLIAAAKAESERIIREAERLIA
AAKAESERIIREGSGSGDPDVARLQELNIELARELLRDVARLQELNIELARELLRAAAELQELNIKLVELASEGSGSGSGKK
LVEEVERALRELLKTSEDLVRKVEKALRELLELIRRGGTKDKIEEKIRRVLEEIKRELERQKRKIEDVLRQIKEELYRS
>fretLOCKRa (SEQ ID NO: 39)
(GHHHHHHHHHHGVSKGEELFTGVVPILVELDGDVNGHKFSVSGEGEGDATYGKLTLKFICTTGKLPVPWPTLVTTLSWGVQC
FARYPDHMKQHDFFKSAMPEGYVQERTIFFKDDGNYKTRAEVKFEGDTLVNRIELKGIDFKEDGNILGHKLEYNYFSDNVYIT
ADKQKNGIKANFKIRHNIEDGGVQLADHYQQNTPIGDGPVLLPDNHYLSTQSKLSKDPNEKRDHMVLLEFVTAAGITLGMDEL
YKGSGCSLQGM)SKEAVTKLQALNIKLAEKLLEAVTKLQALNIKLAEKLLEALARLQELNIALVYLAVELTDPKRIADEIKKV
KDKSKEIVERAEEEIARAAAESKKILDEAEEEIARAAAESKKILDEGSGSGSDAVAELQALNLKLAELLLEAVAELQALNLKL
AELLLEAIAKLQELNIKLVELLTKLTDPATIREAIRKVKEDSERIVAEAERLIAAAKAESERIIREAERLIAAAKAESERIIR
EGSGSGDPDVARLQELNIELARELLRDVARLQELNIELARELLRAAAELQELNIKLVELASELTDPD[EARKAIARVKRESKR
IVEDAERLIREAAAASEKISREAERLIREAAAASEKISRE](VSKGEELFTGVVPILVELDGDVNGHKFSVSGEGEGDATYGK
LTLKLICTTGKLPVPWPTLVTTLGYGVQCFARYPDHMKQHDFFKSAMPEGYVQERTIFFKDDGNYKTRAEVKFEGDTLVNRIE
LKGIDFKEDGNILGHKLEYNYNSHNVYITADKQKNGIKANFKIRHNIEDGGVQLADHYQQNTPIGDGPVLLPDNHYLSYQSKL
SKDPNEKRDHMVLLEFVTAAGITLGMDELYK)
>fretLOCKRb (SEQ ID NO: 40)
(MGHHHHHHHHHHGVSKGEELFTGVVPILVELDGDVNGHKFSVSGEGEGDATYGKLTLKFICTTGKLPVPWPTLVTTLSWGVQ
CFARYPDHMKQHDFFKSAMPEGYVQERTIFFKDDGNYKTRAEVKFEGDTLVNRIELKGIDFKEDGNILGHKLEYNYFSDNVYI
TADKQKNGIKANFKIRHNIEDGGVQLADHYQQNTPIGDGPVLLPDNHYLSTQSKLSKDPNEKRDHMVLLEFVTAAGITLGMDE
LYKGSGCSLQGM)SHAAVIKLSDLNIRLLDKLLQAVIKLTELNAELNRKLIEALQRLFDLNVALVHLAAELTDPKRIADEIKK
VKDKSKEIVERAEEEIARAAAESKKILDEAEEEIARAAAESKKILDEGSGSGSDAVAELQALNLKLAELLLEAVAELQALNLK
LAELLLEAIAKLQELNIKLVELLTKLTDPATIREAIRKVKEDSERIVAEAERLIAAAKAESERIIREAERLIAAAKAESERII
REGSGSNDPQVAQNQETFIELARDALRLVAENQEAFIEVARLTLRAAALAQEVAIKAVEAASEGGSGSG[NKEEIEKLAKEAR
EKLKKAEKEHKEIHDKLRKKNKKAREDLKKKADELRETNKRVN](VSKGEELFTGVVPILVELDGDVNGHKFSVSGEGEGDAT
YGKLTLKLICTTGKLPVPWPTLVTTLGYGVQCFARYPDHMKQHDFFKSAMPEGYVQERTIFFKDDGNYKTRAEVKFEGDTLVN
RIELKGIDFKEDGNILGHKLEYNYNSHNVYITADKQKNGIKANFKIRHNIEDGGVQLADHYQQNTPIGDGPVLLPDNHYLSYQ
SKLSKDPNEKRDHMVLLEFVTAAGITLGMDELYK)
>fretLOCKRc (SEQ ID NO: 41)
(GHHHHHHHHHHGVSKGEELFTGVVPILVELDGDVNGHKFSVSGEGEGDATYGKLTLKFICTTGKLPVPWPTLVTTLSWGVQC
FARYPDHMKQHDFFKSAMPEGYVQERTIFFKDDGNYKTRAEVKFEGDTLVNRIELKGIDFKEDGNILGHKLEYNYFSDNVYIT
ADKQKNGIKANFKIRHNIEDGGVQLADHYQQNTPIGDGPVLLPDNHYLSTQSKLSKDPNEKRDHMVLLEFVTAAGITLGMDEL
YKGSGCSLQGM)SLEAVLKLAELNLKLSDKLAEAVQKLAALLNKLLEKLSEALQRLFELNVALVTLAIELTDPKRIADEIKKV
KDKSKEIVERAEEEIARAAAESKKILDEAEEEIARAAAESKKILDEGSGSGSDAVAELQALNLKLAELLLEAVAELQALNLKL
AELLLEAIAKLQELNIKLVELLTKLTDPATIREAIRKVKEDSERIVAEAERLIAAAKAESERIIREAERLIAAAKAESERIIR
EGSGSNDPLVARLQELLIEHARELLRLVATSQEIFIELARAFLANAAQLQEAAIKAVEAASENGSGSGS[SEKVRRELKESLK
ENHKQNQKLLKDHKRAQEKLNRELEELKKKHKKTLDDIRRES](VSKGEELFTGVVPILVELDGDVNGHKFSVSGEGEGDATY
GKLTLKLICTTGKLPVPWPTLVTTLGYGVQCFARYPDHMKQHDFFKSAMPEGYVQERTIFFKDDGNYKTRAEVKFEGDTLVNR
IELKGIDFKEDGNILGHKLEYNYNSHNVYITADKQKNGIKANFKIRHNIEDGGVQLADHYQQNTPIGDGPVLLPDNHYLSYQS
KLSKDPNEKRDHMVLLEFVTAAGITLGMDELYK)
>fretLOCKRd (SEQ ID NO: 42)
(GHHHHHHHHHHGVSKGEELFTGVVPILVELDGDVNGHKFSVSGEGEGDATYGKLTLKFICTTGKLPVPWPTLVTTLSWGVQC
FARYPDHMKQHDFFKSAMPEGYVQERTIFFKDDGNYKTRAEVKFEGDTLVNRIELKGIDFKEDGNILGHKLEYNYFSDNVYIT
ADKQKNGIKANFKIRHNIEDGGVQLADHYQQNTPIGDGPVLLPDNHYLSTQSKLSKDPNEKRDHMVLLEFVTAAGITLGMDEL
YKGSGCSLQGM)SLEAVLKLFELNHKLSEKLLEAVLKLHALNQKLSQKLLEALARLLELNVALVELAIELTDPKRIADEIKKV
KDKSKEIVERAEEEIARAAAESKKILDEAEEEIARAAAESKKILDEGSGSGSDAVAELQALNLKLAELLLEAVAELQALNLKL
AELLLEAIAKLQELNIKLVELLTKLTDPATIREAIRKVKEDSERIVAEAERLIAAAKAESERIIREAERLIAAAKAESERIIR
EGSGSGDPEVARLQEAFIEQAREILRNVAAAQEALIEQARRLLALAALAQEAAIKAVELASEHGSGSG[DTVKRILEELRRRF
EKLAKDLDDIARKLLEDHKKHNKELKDKQRKIKKEADDAARS](VSKGEELFTGVVPILVELDGDVNGHKFSVSGEGEGDATY
GKLTLKLICTTGKLPVPWPTLVTTLGYGVQCFARYPDHMKQHDFFKSAMPEGYVQERTIFFKDDGNYKTRAEVKFEGDTLVNR
IELKGIDFKEDGNILGHKLEYNYNSHNVYITADKQKNGIKANFKIRHNIEDGGVQLADHYQQNTPIGDGPVLLPDNHYLSYQS
KLSKDPNEKRDHMVLLEFVTAAGITLGMDELYK)
>tevLCCKR (SEQ ID NO: 43)
(MGSSHHHHHHSSGLVPRGSHM)SKEAVTKLQALNIKLAEKLLEAVTKLQALNIKLAEKLLEALARLQELNIALVYLAVELTD
PKRIADEIKKVKDKSKEIVERAEEEIARAAAESKKILDEAEEEIARAAAESKKILDEGSGSGSDAVAELQALNLKLAELLLEA
VAELQALNLKLAELLLEAIAKLQELNIKLVELLTKLTDPATIREAIRKVKEDSERIVAEAERLIAAAKAESERIIREAERLIA
AAKAESERIIREGSGSGDPDVARLQELNIELARELLRDVARLQELNIELARELLRAAAELQELNIKLVELASELTDPD[EARK
AIARVKRESKRIVEDAEENLYFQGAASEKISREAERLIREAAAASEKISRE]
>spyLCCKR (SEQ ID NO: 44)
(MGSSHHHHHHSSGLVPRGSHM)SKEAVTKLQALNIKLAEKLLEAVTKLQALNIKLAEKLLEALARLQELNIALVYLAVELTD
PKRIADEIKKVKDKSKEIVERAEEEIARAAAESKKILDEAEEEIARAAAESKKILDEGSGSGSDAVAELQALNLKLAELLLEA
VAELQALNLKLAELLLEAIAKLQELNIKLVELLTKLTDPATIREAIRKVKEDSERIVAEAERLIAAAKAESERIIREAERLIA
AAKAESERIIREGSGSGDPDVARLQELNIELARELLRDVARLQELNIELARELLRAAAELQELNIKLVELASELTDPD[EARA
HIVMVDAYKKRIVEDAERLIREAAAASEKISREAERLIREAAAASEKISRE]
>1_nesLOCKR (SEQ ID NO: 45)
SKEAVTKLQALNIKLAEKLLEAVTKLQALNIKLAEKLLEALARLQELNIALVYLAVELTDPKRIADEIKKVKDKSKEIVERAE
EEIARAAAESKKILDEAEEEIARAAAESKKILDEGSGSGSDAVAELQALNLKLAELLLEAVAELQALNLKLAELLLEAIAKLQ
ELNIKLVELLTKLTDPATIREAIRKVKEDSERIVAEAERLIAAAKAESERIIREAERLIAAAKAESERIIREGSGSGDPDVAR
LQELNIELARELLRDVARLQELNIELARELLRAAAELQELNIKLVELASELTDPD[EARKAIARVKRESKRIVEDLALKLAGL
DINSEKISREAERLIREAAAASEKISRE]
>2_nesLOCKR (SEQ ID NO: 46)
SKEAVTKLQALNIKLAEKLLEAVTKLQALNIKLAEKLLEALARLQELNIALVYLAVELTDPKRIADEIKKVKDKSKEIVERAE
EEIARAAAESKKILDEAEEEIARAAAESKKILDEGSGSGSDAVAELQALNLKLAELLLEAVAELQALNLKLAELLLEAIAKLQ
ELNIKLVELLTKLTDPATIREAIRKVKEDSERIVAEAERLIAAAKAESERIIREAERLIAAAKAESERIIREGSGSGDPDVAR
LQELNIELARELLRDVARLQELNIELARELLRAAAELQELNIKLVELASELTDPD[EARKAIARVKRESKRIVEDAERLIREL
AEKLAGLDINAERLIREAAAASEKISRE]
>3_nesLOCKR (SEQ ID NO: 47)
SKEAVTKLQALNIKLAEKLLEAVTKLQALNIKLAEKLLEALARLQELNIALVYLAVELTDPKRIADEIKKVKDKSKEIVERAE
EEIARAAAESKKILDEAEEEIARAAAESKKILDEGSGSGSDAVAELQALNLKLAELLLEAVAELQALNLKLAELLLEAIAKLQ
ELNIKLVELLTKLTDPATIREAIRKVKEDSERIVAEAERLIAAAKAESERIIREAERLIAAAKAESERIIREGSGSGDPDVAR
LQELNIELARELLRDVARLQELNIELARELLRAAAELQELNIKLVELASELTDPD[EARKAIARVKRESKELAEKLRAGLDLN
AAASEKISREAERLIREAAAASEKISRE]
>nlsLOCKR (SEQ ID NO: 48)
SKEAVTKLQALNIKLAEKLLEAVTKLQALNIKLAEKLLEALARLQELNIALVYLAVELTDPKRIADEIKKVKDKSKEIVERAE
EEIARAAAESKKILDEAEEEIARAAAESKKILDEGSGSGSDAVAELQALNLKLAELLLEAVAELQALNLKLAELLLEAIAKLQ
ELNIKLVELLTKLTDPATIREAIRKVKEDSERIVAEAERLIAAAKAESERIIREAERLIAAAKAESERIIREGSGSGDPDVAR
LQELNIELARELLRDVARLQELNIELARELLRAAAELQELNIKLVELASELTDPD[EARKAIARVKRESKAAARRARTSIREA
AAASEKISREAERLIREAAAASEKISRE]
>ezh2LOCKR (SEQ ID NO: 49)
(MGSSHHHHHHSSGLVPRGSHM)SKEAVTKLQALNIKLAEKLLEAVTKLQALNIKLAEKLLEALARLQELNIALVYLAVELTD
PKRIADEIKKVKDKSKEIVERAEEEIARAAAESKKILDEAEEEIARAAAESKKILDEGSGSGSDAVAELQALNLKLAELLLEA
VAELQALNLKLAELLLEAIAKLQELNIKLVELLTKLTDPATIREAIRKVKEDSERIVAEAERLIAAAKAESERIIREAERLIA
AAKAESERIIREGSGSGDPDVARLQELNIELARELLRDVARLQELNIELARELLRAAAELQELNIKLVELASELTDPD[EARK
AIARVKTMFSSNRQKILERTETLNQEWKQRRIQAERLIREAAAASEKISRE]
>1fix_VMAc_C_BIMlatcht9 (SEQ ID NO: 51)
(MGSHHHHHHGSGSENLYFQG)SKEAAKKLQDLNIELARKLLEASTKLQRLNIRLAEALLEAIARLQELNLELVYLAVELTDP
KRIRDEIKEVKDKSKEIIRRAEKEIDDAAKESKKILEEARKAIRDAAEESRKILEEGSGSGSDALDELQKLNLELAKLLLKAI
AETQDLNLRAAKAFLEAAAKLQELNIRAVELLVKLTDPATIRRALEHAKRRSKEIIDEAERAIRAAKRESERIIEEARRLIEK
AKEESERIIREGSGSGDPDIKKLQDLNIELARELLRAHAQLQRLNLELLRELLRALAQLQELNLDLLRLASELTGGSGGSGGS
(VLLNVLSKCAGSKKFRPAPAAAFARECRGFYFELQELKEDDYYGITLSDDSDHQFLLANQVVVHNC)GGSGGS[DEIWIAQE
LRRIGDEFNAYYADAERLIREAAAASEKISREAERLIREAA]
>sfGFP_VMAn_1fix_BIM_t0_latch (SEQ ID NO: 52)
(MGSHHHHHHGSGSENLYFQG)HMSKGEELFTGVVPILVELDGDVNGHKFSVRGEGEGDATNGKLTLKFICTTGKLPVPWPTL
VTTLTYGVQCFARYPDHMKQHDFFKSAMPEGYVQERTISFKDDGTYKTRAEVKFEGDTLVNRIELKGIDFKEDGNILGHKLEY
NFNSHNVYITADKQKNGIKANFKIRHNVEDGSVQLADHYQQNTPIGDGPVLLPDNHYLSTQSVLSKDPNEKRDHMVLLEFVTA
AGITHGMDELYKSGSGSGCFAKGTNVLMADGSIECIENIEVGNKVMGKDGRPREVIKLPRGRETMYSVVQKSQHRAHKSDSSR
EVPELLKFTCNATHELVVRTPRSVRRLSRTIKGVEYFEVITFEMGQKKAPDGRIVELVKEVSKSYPISEGPERANELVESYRK
ASNKAYFEWTIEARDLSLLGSHVRKATYQTYAPILYGGSGGSGGGGSGGSGSKEAAKKLQDLNIELARKLLEASTKLQRLNIR
LAEALLEAIARLQELNLELVYLAVELTDPKRIRDEIKEVKDKSKEIIRRAEKEIDDAAKESKKILEEARKAIRDAAEESRKIL
EEGSGSGSDALDELQKLNLELAKLLLKAIAETQDLNLRAAKAFLEAAAKLQELNIRAVELLVKLTDPATIRRALEHAKRRSKE
IIDEAERAIRAAKRESERIIEEARRLIEKAKEESERIIREGSGSGDPDIKKLQDLNIELARELLRAHAQLQRLNLELLRELLR
ALAQLQELNLDLLRLASELT[DEIWIAQELRRIGDEFNAYYADAERLSREAAAASEKISREAERSIREAAAASEKISRE]
Asymmetrized functional Cages encoding Bim and GFP11 (i.e.: bioactive peptides)
(6His-MBP-TEV, 6His-TEV, and flexible linker sequences are underlined text)
(Co-localization domain is bolded text)
(Functional peptide is italicized underlined text)
(Positions that can be mutated to any amino acid to tune responsiveness are
underlined bolded text)
(C-terminal sequences that can be removed to tune responsiveness are italicized
text)
(all sequences in parentheses are optional)
>1fix-long-BIM-t0 (SEQ ID NO: 54)
(MGSHHHHHHGSGSENLYFQG)SKEAAKKLQDLNIELARKLLEASTKLQRLNIRLAEALLEAIARLQELNLELVYLAVELTDP
KRIRDEIKEVKDKSKEIIRRAEKEIDDAAKESKKILEEARKAIRDAAEESRKILEEGSGSGSDALDELQKLNLELAKLLLKAI
AETQDLNLRAAKAFLEAAAKLQELNIRAVELLVKLTDPATIRRALEHAKRRSKEIIDEAERAIRAAKRESERIIEEARRLIEK
AKEESERIIREGSGSGDPDIKKLQDLNIELARELLRAHAQLQRLNLELLRELLRALAQLQELNLDLLRLASEL(TD[EIWIA]
ELRRIGDEFNAYYA)DAERLIREAAAASEKISREAERLIREAAAASEKISRE]
>1fix-long-GFP-t0 (SEQ ID NO: 55)
(MGSHHHHHHGSGSENLYFQG)SKEAAKKLQDLNIELARKLLEASTKLQRLNIRLAEALLEAIARLQELNLELVYLAVELTDP
KRIRDEIKEVKDKSKEIIRRAEKEIDDAAKESKKILEEARKAIRDAAEESRKILEEGSGSGSDALDELQKLNLELAKLLLKAI
AETQDLNLRAAKAFLEAAAKLQELNIRAVELLVKLTDPATIRRALEHAKRRSKEIIDEAERAIRAAKRESERIIEEARRLIEK
AKEESERIIREGSGSGDPDIKKLQDLNIELARELLRAHAQLQRLNLELLRELLRALAQLQELNLDLLRLASEL[(RDHMVLHE
YVNAAGITFNAYYA)DAERLIREAAAASEKISREAERLIREAAAASEKISRE]
>1fix-short-BIM-t0 (SEQ ID NO: 56)
(MGSHHHHHHGSGSENLYFQGSGG)SELARKLLEASTKLQRLNIRLARALLEAIARLQELNLELVYLAVELTDPKRIRDEIKE
VKDKSKEIIRRAEKEIDDAAKESEKILEEAREAISGSGSELAKLLLKAIAETQDLNLRAAKAFLEAAAKLQELNIRAVELLVK
LTDPATIREALEHAKRRSKEIIDEAERAIRAAKRESERIIEEARRLIEKGSGSGSELARELLRAHAQLQRLNLELLRELLRAL
AQLQELNLDLLRLASEL(TD[EIWIA]ELRRIGDEFNAYYA)DAERLIREAAAASEKISREAERLIR]
>1fix-short-GFP-t0 (SEQ ID NO: 57)
(MGSHHHHHHGSGSENLYFQGSGG)SELARKLLEASTKLQRLNIRLARALLEAIARLQELNLELVYLAVELTDPKRIRDEIKE
VKDKSKEIIRRAEKEIDDAAKESEKILEEAREAISGSGSELAKLLLKAIAETQDLNLRAAKAFLEAAAKLQELNIRAVELLVK
LTDPATIREALEHAKRRSKEIIDEAERAIRAAKRESERIIEEARRLIEKGSGSGSELARELLRAHAQLQRLNLELLRELLRAL
AQLQELNLDLLRLASEL[(RDHMVLHEYVNAAGITFNAYYA)DAERLIREAAAASEKISREAERLIR]
>Spycatcher-1fix-long-GFP-t0 (SEQ ID NO: 58)
(MGSHHHHHHGSGSENLYFQGS)AMVDTLSGLSSEQGQSGDMTIEEDSATHIKESKRDEDGKELAGATMELRDSSGETISTWI
SDGQVKDFYLYPGKYTFVETAAPDGYEVATAITFTVNEQGQVTVNGKATEGSGGSKEAAKKLQDLNIELARKLLEASTKLQRL
NIRLARALLEAIARLQELNLELVYLAVELTDPKRIRDEIKEVKDKSKEIIRRAEKEIDDAAKESKKILEEARKAIRDAAEESR
KILEEGSGSGSDALDELQKLNLELAKLLLKAIAETQDLNLRAAKAFLEAAAKLQELNIRAVELLVKLTDPATIRRALEHAKRR
SKEIIDEAERAIRAAKRESERIIEEARRLIEKAKEESERIIREGSGSGDPDIKKLQDLNIELARELLRAHAQLQRLNLELLRE
LLRALAQLQELNLDLLRLASEL[(RDHMVLHEYVNAAGITFNAYYA)DAERLIREAAAASEKISREAERLIREAAAASEKISR
E]
>Spycatcher-1fix-short-GFP-t0 (SEQ ID NO: 59)
(MGSHHHHHHGSGSENLYFQGS)AMVDTLSGLSSEQGQSGDMTIEEDSATHIKESKRDEDGKELAGATMELRDSSGETISTWI
SDGQVKDFYLYPGKYTFVETAAPDGYEVATAITFTVNEQGQVTVNGKATKGSGGSELARKLLEASTKLQRLNIRLAEALLEAI
ARLQELNLELVYLAVELTDPKRIRDEIKEVKDKSKEIIRRAEKEIDDAAKESEKILEEAREAISGSGSELAKLLLKAIAETQD
LNLRAAKAFLEAAAKLQELNIRAVELLVKLTDPATIREALEHAKRRSKEIIDEAERAIRAAKRESERIIEEARRLIEKGSGSG
SELARELLRAHAQLQRLNLELLRELLRALAQLQELNLDLLRLASEL[(RDHMVLHEYVNAAGITFNAYYA)DAERLIREAAAA
SEKISREAERLIR]
>1fix-latch_Mad1SID_t0_1 (SEQ ID NO: 61)
(MGSHHHHHHGSGSENLYFQG)SKEAAKKLQDLNIELARKLLEASTKLQRLNIRLAEALLEAIARLQELNLELVYLAVELTDP
KRIRDEIKEVKDKSKEIIRRAEKEIDDAAKESKKILEEARKAIRDAAEESRKILEEGSGSGSDALDELQKLNLELAKLLLKAI
AETQDLNLRAAKAFLEAAAKLQELNIRAVELLVKLTDPATIRRALEHAKRRSKEIIDEAERAIRAAKRESERIIEEARRLIEK
AKEESERIIREGSGSGDPDIKKLQDLNIELARELLRAHAQLQRLNLELLRELLRALAQLQELNLDLLRLASELT[(NIQMLLE
AADYLE)RESKRIVEDAERLIREAAAASEKISREAERSIREAAAASEKISRE]
>1fix-latch_Mad1SID_T0_2 (SEQ ID NO: 65)
(MGSHHHHHHGSGSENLYFQG)SKEAAKKLQDLNIELARKLLEASTKLQRLNIRLAEALLEAIARLQELNLELVYLAVELTDP
KRIRDEIKEVKDKSKEIIRRAEKEIDDAAKESKKILEEARKAIRDAAEESRKILEEGSGSGSDALDELQKLNLELAKLLLKAI
AETQDLNLRAAKAFLEAAAKLQELNIRAVELLVKLTDPATIRRALEHAKRRSKEIIDEAERAIRAAKRESERIIEEARRLIEK
AKEESERIIREGSGSGDPDIKKLQDLNIELARELLRAHAQLQRLNLELLRELLRALAQLQELNLDLLRLASELTDP[DEARK
(NIQMLLEAADYLE)EDAERLIREAAAASEKISREAERLIREAASEKISRE]
>1fix-short-Bim-t0-relooped (SEQ ID NO: 67)
[MDEARKAIARVKRESKRI(EIWIAQELRRIGDEFNAYYA)EAEKLAT]DELWHRLLEASTKLQRLNIRLARALLEAIARLQE
LNLELVYLAVELTDPKRIRDEIKEVKDKSKEIIRRAEKEIDDAAKESEKILEEAREAISGSGSELAKLLLKAIAETQDLNLRA
AKAFLEAAAKLQELNIRAVELLVKLTDPATIREALEHAKRRSKEIIDEAERAIRAAKRESERIIEEARRLIEKGSGSGSELAR
ELLRAHAQLQRLNLELLRELLRALAQLQELNLDLLRLASE
>1fix-short-spytag-t0_2 (SEQ ID NO: 68)
(MGSSHHHHHHSSGLVPRGSHM)SELARKLLEASTKLQRLNIRLARALLEAIARLQELNLELVYLAVELTDPKRIRDEIKEVK
DKSKEIIRRAEKEIDDAAKESEKILEEAREAISGSGSELAKLLLKAIAETQDLNLRAAKAFLEAAAKLQELNIRAVELLVKLT
DPATIREALEHAKRRSKEIIDEAERAIRAAKRESERIIEEARRLIEKGSGSGSELARELLRAHAQLQRLNLELLRELLRALAQ
LQELNLDLLRLASELTDPD[EAR(AHIVMVDAYK)KRIVEDAERLIREAAAASEKISREAERLIR]
>1fix-short-spytag-t0_8 (SEQ ID NO: 69)
(MGSSHHHHHHSSGLVPRGSHM)SELARKLLEASTKLQRLNIRLARALLEAIARLQELNLELVYLAVELTDPKRIRDEIKEVK
DKSKEIIRRAEKEIDDAAKESEKILEEAREAISGSGSELAKLLLKAIAETQDLNLRAAKAFLEAAAKLQELNIRAVELLVKLT
DPATIREALEHAKRRSKEIIDEAERAIRAAKRESERIIEEARRLIEKGSGSGSELARELLRAHAQLQRLNLELLRELLRALAQ
LQELNLDLLRLASELTDPD[EARKAIARVKRESK(AHIVMVDAYK)REAAAASEKISREAERLIR]
>1fix-short-TEV-t0_1 (SEQ ID NO: 70)
(MGSSHHHHHHSSGLVPRGSHM)SELARKLLEASTKLQRLNIRLARALLEAIARLQELNLELVYLAVELTDPKRIRDEIKEVK
DKSKEIIRRAEKEIDDAAKESEKILEEAREAISGSGSELAKLLLKAIAETQDLNLRAAKAFLEAAAKLQELNIRAVELLVKLT
DPATIREALEHAKRRSKEIIDEAERAIRAAKRESERIIEEARRLIEKGSGSGSELARELLRAHAQLQRLNLELLRELLRALAQ
LQELNLDLLRLASELTDP[DEAR(ENLYFQGS)ESKRIVEDAERLIREAAAASEKISREAERLIR]
>1fix-short-TEV-t0_6 (SEQ ID NO: 71)
(MGSSHHHHHHSSGLVPRGSHM)SELARKLLEASTKLQRLNIRLARALLEAIARLQELNLELVYLAVELTDPKRIRDEIKEVK
DKSKEIIRRAEKEIDDAAKESEKILEEAREAISGSGSELAKLLLKAIAETQDLNLRAAKAFLEAAAKLQELNIRAVELLVKLT
DPATIREALEHAKRRSKEIIDEAERAIRAAKRESERIIEEARRLIEKGSGSGSELARELLRAHAQLQRLNLELLRELLRALAQ
LQELNLDLLRLASELTDP[DEARKAIARVKRESKRIV(ENLYFQGS)EAAAASEKISREAERLIR]
>1fix-short-nanoBit-t0_1 (SEQ ID NO: 72)
(MGSSHHHHHHSSGLVPRGSHM)SELARKLLEASTKLQRLNIRLARALLEAIARLQELNLELVYLAVELTDPKRIRDEIKEVK
DKSKEIIRRAEKEIDDAAKESEKILEEAREAISGSGSELAKLLLKAIAETQDLNLRAAKAFLEAAAKLQELNIRAVELLVKLT
DPATIREALEHAKRRSKEIIDEAERAIRAAKRESERIIEEARRLIEKGSGSGSELARELLRAHAQLQRLNLELLRELLRALAQ
LQELNLDLLRLASELTDP[DEAR(VSGWRLFRKIS)RIVEDAERLIREAAAASEKISREAERLIR]
>1fix-short-nanoBit-t0_3 (SEQ ID NO: 73)
(MGSSHHHHHHSSGLVPRGSHM)SELARKLLEASTKLQRLNIRLARALLEAIARLQELNLELVYLAVELTDPKRIRDEIKEVK
DKSKEIIRRAEKEIDDAAKESEKILEEAREAISGSGSELAKLLLKAIAETQDLNLRAAKAFLEAAAKLQELNIRAVELLVKLT
DPATIREALEHAKRRSKEIIDEAERAIRAAKRESERIIEEARRLIEKGSGSGSELARELLRAHAQLQRLNLELLRELLRALAQ
LQELNLDLLRLASELTDP[DEARKAIARVKRESK(VSGWRLFKKIS)EAAAASEKISREAERLIR]
>1fix-short-RHIM-t0_8 (SEQ ID NO: 74)
(MGSSHHHHHHSSGLVPRGSHM)SELARKLLEASTKLQRLNIRLARALLEAIARLQELNLELVYLAVELTDPKRIRDEIKEVK
DKSKEIIRRAEKEIDDAAKESEKILEEAREAISGSGSELAKLLLKAIAETQDLNLRAAKAFLEAAAKLQELNIRAVELLVKLT
DPATIREALEHAKRRSKEIIDEAERAIRAAKRESERIIEEARRLIEKGSGSGSELARELLRAHAQLQRLNLELLRELLRALAQ
LQELNLDLLRLASELTDP[DEARKAI(IQIG)RESKRIVEDAERLIREAAAASEKIS(VQLG)RLIR]
>lfix-short-RHIM-t0_19 (SEQ ID NO: 75)
(MGSSHHHHHHSSGLVPRGSHM)SELARKLLEASTKLQRLNIRLARALLEAIARLQELNLELVYLAVELTDPKRIRDEIKEVK
DKSKEIIRRAEKEIDDAAKESEKILEEAREAISGSGSELAKLLLKAIAETQDLNLRAAKAFLEAAAKLQELNIRAVELLVKLT
DPATIREALEHAKRRSKEIIDEAERAIRAAKRESERIIEEARRLIEKGSGSGSELARELLRAHAQLQRLNLELLRELLRALAQ
LQELNLDLLRLASELTDP[DEARKAIARVKRESKRIV(IQIG)RLI(VQLG)AASEKISREAERLIR]
>1fix-short-RHIM-t0_22 (SEQ ID NO: 76)
(MGSSHHHHHHSSGLVPRGSHM)SELARKLLEASTKLQRLNIRLARALLEAIARLQELNLELVYLAVELTDPKRIRDEIKEVK
DKSKEIIRRAEKEIDDAAKESEKILEEAREAISGSGSELAKLLLKAIAETQDLNLRAAKAFLEAAAKLQELNIRAVELLVKLT
DPATIREALEHAKRRSKEIIDEAERAIRAAKRESERIIEEARRLIEKGSGSGSELARELLRAHAQLQRLNLELLRELLRALAQ
LQELNLDLLRLASELTDP[DEARKAIARVKRESKRIV(IQIG)RLIREAAAASEKIS(VQLG)RLIR]
>1fix-short-gcn4-t0_4 (SEQ ID NO: 77)
(MGSSHHHHHHSSGLVPRGSHM)SELARKLLEASTKLQRLNIRLARALLEAIARLQELNLELVYLAVELTDPKRIRDEIKEVK
DKSKEIIRRAEKEIDDAAKESEKILEEAREAISGSGSELAKLLLKAIAETQDLNLRAAKAFLEAAAKLQELNIRAVELLVKLT
DPATIREALEHAKRRSKEIIDEAERAIRAAKRESERIIEEARRLIEKGSGSGSELARELLRAHAQLQRLNLELLRELLRALAQ
LQELNLDLLRLASELTDP[DESVKE(LEDKVEELLSKNYHLENEVARLKKLVGER)SREAERLIR]
>1fix-short-ccDi-t0_6 (SEQ ID NO: 78)
(MGSSHHHHHHSSGLVPRGSHM)SELARKLLEASTKLQRLNIRLARALLEAIARLQELNLELVYLAVELTDPKRIRDEIKEVK
DKSKEIIRRAEKEIDDAAKESEKILEEAREAISGSGSELAKLLLKAIAETQDLNLRAAKAFLEAAAKLQELNIRAVELLVKLT
DPATIREALEHAKRRSKEIIDEAERAIRAAKRESERIIEEARRLIEKGSGSGSELARELLRAHAQLQRLNLELLRELLRALAQ
LQELNLDLLRLASELTDP[DEARKAIA(GEIAALKQEIAALKKENAALKWEIAALKQG)AERLIR]
>1fix-short-cc-a-t0_6 (SEQ ID NO: 79)
(MGSSHHHHHHSSGLVPRGSHM)SELARKLLEASTKLQRLNIRLARALLEAIARLQELNLELVYLAVELTDPKRIRDEIKEVK
DKSKEIIRRAEKEIDDAAKESEKILEEAREAISGSGSELAKLLLKAIAETQDLNLRAAKAFLEAAAKLQELNIRAVELLVKLT
DPATIREALEHAKRRSKEIIDEAERAIRAAKRESERIIEEARRLIEKGSGSGSELARELLRAHAQLQRLNLELLRELLRALAQ
LQELNLDLLRLASELTDP[DEARKAIARVKR(GLEQEIAALEKENAALEWEIAALEQGG)ERLIR]
>1fix-short-cc-b-t0_6 (SEQ ID NO: 80)
(MGSSHHHHHHSSGLVPRGSHM)SELARKLLEASTKLQRLNIRLARALLEAIARLQELNLELVYLAVELTDPKRIRDEIKEVK
DKSKEIIRRAEKEIDDAAKESEKILEEAREAISGSGSELAKLLLKAIAETQDLNLRAAKAFLEAAAKLQELNIRAVELLVKLT
DPATIREALEHAKRRSKEIIDEAERAIRAAKRESERIIEEARRLIEKGSGSGSELARELLRAHAQLQRLNLELLRELLRALAQ
LQELNLDLLRLASELTDP[DEARKAIARVKR(GLKQKIAALKYRNAALKEKIAALKQGG)ERLIR
STREPII-LOCKR functional Cages:
>STREPII-2plus1_LOCK_1 (SEQ ID NO: 81)
SRVEEIIEDLRRLLEEIRKENADSIRASKELLDRVKEINDTIIAELERLLKDIEKEVREKGSESEEVKKALRRVLEELEKLLR
RVAEINEEVLRRNSKLVEEDARRNAEVLKELKRLVEELMREIGDED[KVRKVAEVAEKVLRDIDKLDR(WSHPQFEK)TNGEI
SKLDEDTRRVAERVKKAIEDLAK]
>STREPII-2plus1_LOCK_2 (SEQ ID NO: 82)
[SEVDEIIADNERALDEVRREVEEIDKENAERLGE(WSHPQFEK)GDRLAKALEEIRK]GVRSRLVDELERAIREVEEVIRRV
LERVRRLIEEVSKIITDVLREVERLHEEVTKELRKVEDGNSREALDALRRLIEKVVEDSARLIKKVDEALKAVNKEIEDLSRE
VADLVRAVAEELDARVK
>STREPII-2plus1_LOCK_3 (SEQ ID NO: 83)
SSDEVLKEIEEIIRRLEAEVRRVNAEVNASTEDLAREVEEVLRATNELIEELERRVTGTEELKRVIDELRDRDRKVRRRVERV
IEESAKRDDESRKRLTRAVEKLRADLKKLADDGVPE[EALSKAIKDVRDIVKKVKDELKE(WSHPQFEK)VDRLSEELKEWLK
DVERVLKELTDKDR]
>STREPII-2plus1_LOCK_4C (SEQ ID NO: 84)
SDAEELLKRVADLLKASLESLEKILRDSKELMDRWRKKLEDLLRESEELVDRAEKILRRGGSDKEVLDKIAEEVRRTNDDSRR
LDEELHRLSRDTLRKLEENLRRTEKEVREMDKRAAERG[VDERVREELKKLLTRVE(WSHPQFEK)GDKKILKEAHKESKEVN
DRDRELLERLEESVR]
>STREPII-2plus1_LOCK_4N (SEQ ID NO: 85)
[SDAEELLKRVADLLKASLESLEKILRDSKELMDR(WSHPQFEK)LGESEELVDRAEKILRR]GGSDKEVLDKIAEEVRRTND
DSRRLDEELHRLSRDTLRKLEENLRRTEKEVREMDKRAAERGVDERVREELKKLLTRVEEEHRKVLETDKKILKEAHKESKEV
NDRDRELLERLEESVR
>STREPII-3plus1_LOCK1 (SEQ ID NO: 86)
SEAEDLLERVKRVLDELIEIVDRNHELNARVVETSARLVERLLEEVERALETLEREIPGRELLDKAIKDLRDVLRRVAEKVKR
SIEELKEVLEESRRVLEEVVRALAEVIDRVRRLVEKGVDLRDLIRELKRVLEEAVSLIERLVRLNTRAAEKDNESLRELVRAI
KEALKRAVDMVRADGL[DSRLVKKLDEIVKEVAKKLEDVVRANEEL(WSHPQFEK)GSSVARLREAVERVARDLEETAR]
>STREPII-3plus1_LOCK_2 (SEQ ID NO: 87)
[SDEERLEKVVKDVIEKVRRILEK(WSHPQFEK)GSELRRILEEWEKIIREVLDKVRR]GSGSADALVEVLEEILRLAEELSK
RVEEVLREILKLAKALSDELVKVLAEIVEAAKRISRDDELRKAVEDVARELEDLAAKDRKILDDVREALERIAKEDKDILREA
EETLRRLADEMRRSGVDERLLKRVVDILARLLELNATTIERLLRILEELLKLNKELAERVIRVLEKLLEEIKR
>STREPII-3plus1_LOCK_3 (SEQ ID NO: 88)
SVLETVKKALEDSSEKIERIVEEDERVAKESSDRIRRLVEEDKRVADEILDLIEKGGDTDTLAKLVEEWSRTSKKLLDDVLKL
HKDWSDDSRRLLEEILRVHEELIRAVKEILDRGGKPEEVVRELEKVLKESLDTLEEIIRRLDEANARTVKRVADVIRELEDAN
AKVLEEIERKGD[DKDAVIKVIEELIRANAAV(WSHPQFEK)GDLVRVNKTVWKELLRVNEKLARDLERVVK]
>STREPII-3plus1_LOCK_4 (SEQ ID NO: 89)
[SLVDELRKSLERNVRVSEEVARRLKEALGR(WSHPQFEK)GGDLIRLNEDVVRVVEKV]GVDESAIERVRRIIEELNRALDA
VLKKNEDLVRRLTELLDKLLEENRRLVEELDEDLKRRGGTEEVIDTILELIERSIERLKRLLDELLRIVREALKDNARVADEN
LKALKEILDELRKDGVSDEELKRVLEKAADLHARLKDAHRKLLEDLERIIRELKKKLDEVVEENKRSVDELKR
>STREPII-3plusl_LOCK_3-relooped (SEQ ID NO: 90)
[MKDAVIKVIEELIRANAAV(WSHPQFEK)GDLVRVNKTVWKELLRVNEKLARDLERAL]DERDVSAWETVKKALEDSSEKIE
RIVEEDERVAKESSDRIRRLVEEDKRVADEILDLIEKGGDTDTLAKLVEEWSRTSKKLLDDVLKLHKDWSDDSRRLLEEILRV
HEELIRAVKEILDRGGAPEEVVRELEKVLKESLDTLEEIIRRLDEANARTVKRVADVIRELEDANAKVLEEIERK
>STREPII-2plusl_LOCK_3-relooped (SEQ ID NO: 91)
[MEEAASKAIKDVRDIVKKVKDELKE(WSHPQFEK)VDRLSEELKEWLKDVERVLKELT]DREEASEEELKRVIDELRDRDRK
VRRRVERVIEESAKRDDESRKRLTRAVEKLRADLKKLSVEGASDEVLKEIEEIIRRLEAEVRRVNAEVNASTEDLAREVEEVL
RATNELIEELERR
>BimLOCKR_a_short_Nterm (SEQ ID NO: 27094)
[MDEARKAIARVKRESKRI(EIWIAQELRRIGDEFNAYYA)EAEKLATDEL]WHRLLEASTKLQRLNIRLARALLEAIARLQE
LNLELVYLAVELTDPKRIRDEIKEVKDKSKEIIRRAEKEIDDAAKESEKILEEAREAISGSGSELAKLLLKAIAETQDLNLRA
AKAFLEAAAKLQELNIRAVELLVKLTDPATIREALEHAKRRSKEIIDEAERAIRAAKRESERIIEEARRLIEKGSGSGSELAR
ELLRAHAQLQRLNLELLRELLRALAQLQELNLDLLRLASE
>BimLOCKR_g (SEQ ID NO: 27095)
[MSLVDEL(EIWIAQELRRIGDEFNAYYA)ALKRWVDVVRKVVEDLIRLNEDVVRVVEKV]GVDESAIERVRRIIEELNRALD
AVLKKNEDLVRRLTELLDKLLEENRRLVEELDEDLKRRGGTEEVIDTILELIERSIERLKRLLDELLRIVREALKDNARVADE
NLKALKEILDELRKDGVSDEELKRVLEKAADLHARLKDAHRKLLEDLERIIRELKKKLDEVVEENKRSVDELKR
>reloop_strepLOCKRh (SEQ ID NO: 27096)
[MKDAVIKVIEELIRANAAV(WSHPQFEK)GDLVRVNKTVWKELLRVNEKLARDLERALDEMDVSAWETVKKALEDSSEKIE
RIVEEDERVAKESSDRIRRLVEEDKRVADEILDLIEKGGDTDTLAKLVEEWSRTSKKLLDDVLKLHKDWSDDSRRLLEEILRV
HEELIRAVKEILDRGGAPEEVVRELEKVLKESLDTLEEIIRRLDEANARTVKRVADVIRELEDANAKVLEEIERK
>reloop_strepLOCKRi (SEQ ID NO: 27097)
[MEEAASKAIKDVRDIVKKVKDELKE(WSHPQFEK)VDRLSEELKEWLKDVERVLKELTDREEA]SEEELKRVIDELRDRDRK
VRRRVERVIEESAKRDDESRKRLTRAVEKLRADLKKLSVEGASDEVLKEIEEIIRRLEAEVRRVNAEVNASTEDLAREVEEVL
RATNELIEELERR
>spyLOCKRa_2 (SEQ ID NO: 27098)
MSELARKLLEASTKLQRLNIRLAEALLEAIARLQELNLELVYLAVELTDPKRIRDEIKEVKDKSKEIIRRAEKEIDDAAKESE
KILEEAREAISGSGSELAKLLLKAIAETQDLNLRAAKAFLEAAAKLQELNIRAVELLVKLTDPATIREALEHAKRRSKEIIDE
AERAIRAAKRESERIIEEARRLIEKGSGSGSELARELLRAHAQLQRLNLELLRELLRALAQLQELNLDLLRLASELTDP[DEA
R(AHIVMVDAYK)KRIVEDAERLIREAAAASEKISREAERLIR]
>spyLOCKRa_8 (SEQ ID NO: 27099)
MSELARKLLEASTKLQRLNIRLAEALLEAIARLQELNLELVYLAVELTDPKRIRDEIKEVKDKSKEIIRRAEKEIDDAAKESE
KILEEAREAISGSGSELAKLLLKAIAETQDLNLRAAKAFLEAAAKLQELNIRAVELLVKLTDPATIREALEHAKRRSKEIIDE
AERAIRAAKRESERIIEEARRLIEKGSGSGSELARELLRAHAQLQRLNLELLRELLRALAQLQELNLDLLRLASELTDPDEAR
KAIARVKRESK(AHIVMVDAYK)REAAAASEKISREAERLIR]
>tevLOCKRa_1 (SEQ ID NO: 27100)
MSELARKLLEASTKLQRLNIRLAEALLEAIARLQELNLELVYLAVELTDPKRIRDEIKEVKDKSKEIIRRAEKEIDDAAKESE
KILEEAREAISGSGSELAKLLLKAIAETQDLNLRAAKAFLEAAAKLQELNIRAVELLVKLTDPATIREALEHAKRRSKEIIDE
AERAIRAAKRESERIIEEARRLIEKGSGSGSELARELLRAHAQLQRLNLELLRELLRALAQLQELNLDLLRLASELTDP[DEA
R(ENLYFQGS)ESKRIVEDAERLIREAAAASEKISREAERLIR]
>tevLOCKRa_6 (SEQ ID NO: 27101)
MSELARKLLEASTKLQRLNIRLAEALLEAIARLQELNLELVYLAVELTDPKRIRDEIKEVKDKSKEIIRRAEKEIDDAAKESE
KILEEAREAISGSGSELAKLLLKAIAETQDLNLRAAKAFLEAAAKLQELNIRAVELLVKLTDPATIREALEHAKRRSKEIIDE
AERAIRAAKRESERIIEEARRLIEKGSGSGSELARELLRAHAQLQRLNLELLRELLRALAQLQELNLDLLRLASELTDP[DEA
RKAIARVKRESKRIV(ENLYFQGS)EAAAASEKISREAERLIR]
>lucLOCKRa_1 (SEQ ID NO: 27102)
MSELARKLLEASTKLQRLNIRLAEALLEAIARLQELNLELVYLAVELTDPKRIRDEIKEVKDKSKEIIRRAEKEIDDAAKESE
KILEEAREAISGSGSELAKLLLKAIAETQDLNLRAAKAFLEAAAKLQELNIRAVELLVKLTDPATIREALEHAKRRSKEIIDE
AERAIRAAKRESERIIEEARRLIEKGSGSGSELARELLRAHAQLQRLNLELLRELLRALAQLQELNLDLLRLASELTDP[DEA
R(VSGWRLFKKIS)RIVEDAERLIREAAAASEKISREAERLIR]
>lucLOCKRa_3 (SEQ ID NO: 27103)
MSELARKLLEASTKLQRLNIRLAEALLEAIARLQELNLELVYLAVELTDPKRIRDEIKEVKDKSKEIIRRAEKEIDDAAKESE
KILEEAREAISGSGSELAKLLLKAIAETQDLNLRAAKAFLEAAAKLQELNIRAVELLVKLTDPATIREALEHAKRRSKEIIDE
AERAIRAAKRESERIIEEARRLIEKGSGSGSELARELLRAHAQLQRLNLELLRELLRALAQLQELNLDLLRLASELTDP[DEA
RKAIARVKRESK(VSGWRLFKKIS)EAAAASEKISREAERLIR]
>rhimLOCKRa_8 (SEQ ID NO: 27104)
MSELARKLLEASTKLQRLNIRLAEALLEAIARLQELNLELVYLAVELTDPKRIRDEIKEVKDKSKEIIRRAEKEIDDAAKESE
KILEEAREAISGSGSELAKLLLKAIAETQDLNLRAAKAFLEAAAKLQELNIRAVELLVKLTDPATIREALEHAKRRSKEIIDE
AERAIRAAKRESERIIEEARRLIEKGSGSGSELARELLRAHAQLQRLNLELLRELLRALAQLQELNLDLLRLASELTDP[DEA
RKAI(IQIG)RESKRIVEDAERLIREAAAASEKIS(VQLG)RLIR]
>rhimLOCKRa_19 (SEQ ID NO: 27105)
MSELARKLLEASTKLQRLNIRLAEALLEAIARLQELNLELVYLAVELTDPKRIRDEIKEVKDKSKEIIRRAEKEIDDAAKESE
KILEEAREAISGSGSELAKLLLKAIAETQDLNLRAAKAFLEAAAKLQELNIRAVELLVKLTDPATIREALEHAKRRSKEIIDE
AERAIRAAKRESERIIEEARRLIEKGSGSGSELARELLRAHAQLQRLNLELLRELLRALAQLQELNLDLLRLASELTDP[DEA
RKAIARVKRESKRIV(IQIG)RLI(VQLG)AASEKISREAERLIR]
>rhimLOCKRa_22 (SEQ ID NO: 27106)
MSELARKLLEASTKLQRLNIRLAEALLEAIARLQELNLELVYLAVELTDPKRIRDEIKEVKDKSKEIIRRAEKEIDDAAKESE
KILEEAREAISGSGSELAKLLLKAIAETQDLNLRAAKAFLEAAAKLQELNIRAVELLVKLTDPATIREALEHAKRRSKEIIDE
AERAIRAAKRESERIIEEARRLIEKGSGSGSELARELLRAHAQLQRLNLELLRELLRALAQLQELNLDLLRLASELTDP[DEA
RKAIARVKRESKRIV(IQIG)RLIREAAAASEKIS(VQLG)RLIR]
>gcn4LOCKRa_4 (SEQ ID NO: 27107)
MSELARKLLEASTKLQRLNIRLAEALLEAIARLQELNLELVYLAVELTDPKRIRDEIKEVKDKSKEIIRRAEKEIDDAAKESE
KILEEAREAISGSGSELAKLLLKAIAETQDLNLRAAKAFLEAAAKLQELNIRAVELLVKLTDPATIREALEHAKRRSKEIIDE
AERAIRAAKRESERIIEEARRLIEKGSGSGSELARELLRAHAQLQRLNLELLRELLRALAQLQELNLDLLRLASELTDP[DES
VKE(LEDEVEELLSKNYHLENEVARLKKLVGER)SREAERLIR]
>cc-DiLOCKRa_6 (SEQ ID NO: 27108)
MSELARKLLEASTKLQRLNIRLAEALLEAIARLQELNLELVYLAVELTDPKRIRDEIKEVKDKSKEIIRRAEKEIDDAAKESE
KILEEAREAISGSGSELAKLLLKAIAETQDLNLRAAKAFLEAAAKLQELNIRAVELLVKLTDPATIREALEHAKRRSKEIIDE
AERAIRAAKRESERIIEEARRLIEKGSGSGSELARELLRAHAQLQRLNLELLRELLRALAQLQELNLDLLRLASELTDP[DEA
RKAIA(GEIAALKQEIAALKKENAALKWEIAALKQG)AERLIR]
>cc-aLOCKRa_6 (SEQ ID NO: 27109)
MSELARKLLEASTKLQRLNIRLAEALLEAIARLQELNLELVYLAVELTDPKRIRDEIKEVKDKSKEIIRRAEKEIDDAAKESE
KILEEAREAISGSGSELAKLLLKAIAETQDLNLRAAKAFLEAAAKLQELNIRAVELLVKLTDPATIREALEHAKRRSKEIIDE
AERAIRAAKRESERIIEEARRLIEKGSGSGSELARELLRAHAQLQRLNLELLRELLRALAQLQELNLDLLRLASELTDP[DEA
RKAIARVKR(GLEQEIAALEKENAALEWEIAALEQGG)ERLIR]
>cc-bLOCKRa_6 (SEQ ID NO: 27110)
MSELARKLLEASTKLQRLNIRLAEALLEAIARLQELNLELVYLAVELTDPKRIRDEIKEVKDKSKEIIRRAEKEIDDAAKESE
KILEEAREAISGSGSELAKLLLKAIAETQDLNLRAAKAFLEAAAKLQELNIRAVELLVKLTDPATIREALEHAKRRSKEIIDE
AERAIRAAKRESERIIEEARRLIEKGSGSGSELARELLRAHAQLQRLNLELLRELLRALAQLQELNLDLLRLASELTDP[DEA
RKAIARVKR(GLKQKIAALKYRNAALKKKIAALKQGG)ERLIR]
>tev-spyLOCKRa_short_40 (SEQ ID NO: 27111)
SELARKLLEASTKLQRLNIRLAEALLEAIARLQELNLELVYLAVELTDPKRIRDEIKEVKDKSKEIIRRAEKEIDDAAKESEK
ILEEAREAISGSGSELAKLLLKAIAETQDLNLRAAKAFLEAAAKLQELNIRAVELLVKLTDPATIREALEHAKRRSKEIIDEA
ERAIRAAKRESERIIEEARRLIEKGSGSGSELARELLRAHAQLQRLNLELLRELLRALAQLQELNLDLLRLASELTDP[DEAR
KAI(ENLYFQGS)RIVEDAE(AHIVMVDAYK)EKISREAERLIR]
>tev-spyLOCKRa_short_57 (SEQ ID NO: 27112)
SELARKLLEASTKLQRLNIRLAEALLEAIARLQELNLELVYLAVELTDPKRIRDEIKEVKDKSKEIIRRAEKEIDDAAKESEK
ILEEAREAISGSGSELAKLLLKAIAETQDLNLRAAKAFLEAAAKLQELNIRAVELLVKLTDPATIREALEHAKRRSKEIIDEA
ERAIRAAKRESERIIEEARRLIEKGSGSGSELARELLRAHAQLQRLNLELLRELLRALAQLQELNLDLLRLASELTDP[DEAR
KAIARV(ENLYFQGS)EDAERLIREA(AHIVMVDAYK)AERLIR]
>tev-spyLOCKRa_short_63 (SEQ ID NO: 27113)
SELARKLLEASTKLQRLNIRLAEALLEAIARLQELNLELVYLAVELTDPKRIRDEIKEVKDKSKEIIRRAEKEIDDAAKESEK
ILEEAREAISGSGSELAKLLLKAIAETQDLNLRAAKAFLEAAAKLQELNIRAVELLVKLTDPATIREALEHAKRRSKEIIDEA
ERAIRAAKRESERIIEEARRLIEKGSGSGSELARELLRAHAQLQRLNLELLRELLRALAQLQELNLDLLRLASELTDP[DEAR
KAIARVK(ENLYFQGS)DAERLIREA(AHIVMVDAYK)AERLIR]
>tev-spyLOCKRa_29 (SEQ ID NO: 27114)
SKEAAKKLQDLNIELARKLLEASTKLQRLNIRLAEALLEAIARLQELNLELVYLAVELTDPKRIRDEIKEVKDKSKEIIRRAE
KEIDDAAKESKKILEEARKAIRDAAEESRKILEEGSGSGSDALDELQKLNLELAKLLLKAIAETQDLNLRAAKAFLEAAAKLQ
ELNIRAVELLVKLTDPATIRRALEHAKRRSKEIIDEAERAIRAAKRESERIIERARRLIEKAKEESERIIREGSGSGDP[DIK
KLQDLNIELARELLRAHAQLQRLNLELLRELLRALAQLQELNLDLLRLASELTDPDEARKAIARVK(ENLYFQGS)DAERLIR
EAAAASE(AHIVMVDAYK)REAAAASEKISRE]
>tev-spyLOCKRa_32 (SEQ ID NO: 27115)
SKEAAKKLQDLNIELARKLLEASTKLQRLNIRLAEALLEAIARLQELNLELVYLAVELTDPKRIRDEIKEVKDKSKEIIRRAE
KEIDDAAKESKKILEEARKAIRDAAEESRKILEEGSGSGSDALDELQKLNLELAKLLLKAIAETQDLNLRAAKAFLEAAAKLQ
ELNIRAVELLVKLTDPATIRRALEHAKRRSKEIIDEAERAIRAAKRESERIIERARRLIEKAKEESERIIREGSGSGDP[DIK
KLQDLNIELARELLRAHAQLQRLNLELLRELLRALAQLQELNLDLLRLASELTDPDEARKAIARVK(ENLYFQGS)DAERLIR
EAAAASEKISREAE(AHIVMVDAYK)EKISRE]
>Bim-fretLOCKRa_short (SEQ ID NO: 27116)
(VSKGEELFTGVVPILVELDGDVNGHKFSVSGEGEGDATYGKLTLKFICTTGKLPVPWPTLVTTLSWGVQCFARYPDHMKQHD
FFKSAMPEGYVQERTIFFKDDGNYKTRAEVKFEGDTLVNRIELKGIDFKEDGNILGHKLEYNYFSDNVYITADKQKNGIKANF
KIRHNIEDGGVQLADHYQQNTPIGDGPVLLPDNHYLSTQSKLSKDPNEKRDHMVLLEFVTAAGITLE)LARKLLEASTKLQRL
NIRLARALLEAIARLQELNLELVYLAVELTDPKRIRDEIKEVKDKSKEIIRRAEKEIDDAAKESEKILEEAREAISGSGSELA
KLLLKAIAETQDLNLRAAKAFLEAAAKLQELNIRAVELLVKLTDPATIREALEHAKRRSKEIIDEAERAIRAAKRESERIIEE
ARRLIEKGSGSGSELARELLRAHAQLQRLNLELLRELLRALAQLQELNLDLLRLASELT[D(EIWIAQELRRIGDEFNAYYA)
DAERLIREAAAASEKISREAERLIR](VSKGEELFTGVVPILVELDGDVNGHKFSVSGEGEGDATYGKLTLKLICTTGKLPVP
WPTLVTTLGYGVQCFARYPDHMKQHDFFKSAMPEGYVQERTIFFKDDGNYKTRAEVKFEGDTLVNRIELKGIDFKEDGNILGH
KLEYNYNSHNVYITADKQKNGIKANFKIRHNIEDGGVQLADHYQQNTPIGDGPVLLPDNHYLSYQSKLSKDPNEKRDHMVLLE
FVTAAGITLGMDELYKGSGC)
>fretLOCKRa_short (SEQ ID NO: 27117)
(VSKGEELFTGVVPILVELDGDVNGHKFSVSGEGEGDATYGKLTLKFICTTGKLPVPWPTLVTTLSWGVQCFARYPDHMKQHD
FFKSAMPEGYVQERTIFFKDDGNYKTRAEVKFEGDTLVNRIELKGIDFKEDGNILGHKLEYNYFSDNVYITADKQKNGIKANF
KIRHNIEDGGVQLADHYQQNTPIGDGPVLLPDNHYLSTQSKLSKDPNEKRDHMVLLEFVTAAGITL)ELARKLLEASTKLQRL
NIRLARALLEAIARLQELNLELVYLAVELTDPKRIRDEIKEVKDKSKEIIRRAEKEIDDAAKESEKILEEAREAISGSGSELA
KLLLKAIAETQDLNLRAAKAFLEAAAKLQELNIRAVELLVKLTDPATIREALEHAKRRSKEIIDEAERAIRAAKRESERIIEE
ARRLIEKGSGSGSELARELLRAHAQLQRLNLELLRELLRALAQLQELNLDLLRLASELTDP[DEARKAIARVKRESNAYYADA
ERLIREAAAASEK](VSKGEELFTGVVPILVELDGDVNGHKFSVSGEGEGDATYGKLTLKLICTTGKLPVPWPTLVTTLGYGV
QCFARYPDHMKQHDFFKSAMPEGYVQERTIFFKDDGNYKTRAEVKFEGDTLVNRIELKGIDFKEDGNILGHKLEYNYNSHNVY
ITADKQKNGIKANFKIRHNIEDGGVQLADHYQQNTPIGDGPVLLPDNHYLSYQSKLSKDPNEKRDHMVLLEFVTAAGITLGMD
ELYKGSGC)
E18_KRAB_full (SEQ ID NO: 27120)
MSKEAVTKLQALNIKLAEKLLEAVTKLQALNIKLAEKLLEALARLQELNIALVYLAVELTDPKRIADEIKKVKDKSKEIVERA
EEEIARAAAESKKILDEAEEEIARAAAESKKILDEGSGSGSDAVAELQALNLKLAELLLEAVAELQALNLKLAELLLEAIAKL
QELNIKLVELLTKLTDPATIREAIRKVKEDSERIVAEAERLIAAAKAESERIIREAERLIAAAKAESERIIREGSGSGDPDVA
RLQELNIELARELLRDVARLQELNIELARELLRAAAELQELNIKLVELASELTGS[(RTLVTFEDVEVDFTREEWKLLDTAQQ
IVYRNVMLENYENLVSLGYG)SDEARKAIARVKRESKRIVEDAERLIREAAAASEKISREAERLIREAAAASEKISRE]
E18_KRAB_N13t (SEQ ID NO: 27121)
MSKEAVTKLQALNIKLAEKLLEAVTKLQALNIKLAEKLLEALARLQELNIALVYLAVELTDPKRIADEIKKVKDKSKEIVERA
EEEIARAAAESKKILDEAEEEIARAAAESKKILDEGSGSGSDAVAELQALNLKLAELLLEAVAELQALNLKLAELLLEAIAKL
QELNIKLVELLTKLTDPATIREAIRKVKEDSERIVAEAERLIAAAKAESERIIREAERLIAAAKAESERIIREGSGSGDPDVA
RLQELNIELARELLRDVARLQELNIELARELLRAAAELQELNIKLVELASELTGS[(RTLVTFKDVFVDFTREEWKLLDTAQQ
IVYRNVMLENYKNLVSLGY)GSSKRIVEDAERLIREAAAASEKISREAERLIREAAAASEKISRE]
E18_KRAB_C9t (SEQ ID NO: 27122)
MSKEAVTKLQALNIKLAEKLLEAVTKLQALNIKLAEKLLEALARLQELNIALVYLAVELTDPKRIADEIKKVKDKSKEIVERA
EEEIARAAAESKKILDEAEEEIARAAAESKKILDEGSGSGSDAVAELQALNLKLAELLLEAVAELQALNLKLAELLLEAIAKL
QELNIKLVELLTKLTDPATIREAIRKVKEDSERIVAEAERLIAAAKAESERIIREAERLIAAAKAESERIIREGSGSGDPDVA
RLQELNIELARELLRDVARLQELNIELARELLRAAAELQELNIKLVELASELTGS[(RTLVTFKDVFVDFTREEWKLLDTAQQ
IVYRNVMLENYKNLVSLGY)GSDEARKAIARVKRESKRIVEDAERLIREAAAASEKISREAERLIREAA]
E18_KRAB_Cterm1 (SEQ ID NO: 27123)
MSKEAVTKLQALNIKLAEKLLEAVTKLQALNIKLAEKLLEALARLQELNIALVYLAVELTDPKRIADEIKKVKDKSKEIVERA
EEEIARAAAESKKILDEAEEEIARAAAESKKILDEGSGSGSDAVAELQALNLKLAELLLEAVAELQALNLKLAELLLEAIAKL
QELNIKLVELLTKLTDPATIREAIRKVKEDSERIVAEAERLIAAAKAESERIIREAERLIAAAKAESERIIREGSGSGDPDVA
RLQELNIELARELLRDVARLQELNIELARELLRAAAELQELNIKLVELASELT[DEARKAIARVKRESKRIVEDAE(RTLVTF
KDVFVDFTREEWKLLDTAQQIVYRNVMLENYENLVSLGY)]
E18_KRAB_Cterm2 (SEQ ID NO: 27124)
MSKEAVTKLQALNIKLAEKLLEAVTKLQALNIKLAEKLLEALARLQELNIALVYLAVELTDPKRIADEIKKVKDKSKEIVERA
EEEIARAAAESKKILDEAEEEIARAAAESKKILDEGSGSGSDAVAELQALNLKLAELLLEAVAELQALNLKLAELLLEAIAKL
QELNIKLVELLTKLTDPATIREAIRKVKEDSERIVAEAERLIAAAKAESERIIREAERLIAAAKAESERIIREGSGSGDPDVA
RLQELNIELARELLRDVARLQELNIELARELLRAAAELQELNIKLVELASELT[DEARKAIARVKRESKRIVEDAERLI(RTL
VTFKDVFVDFTREEWKLLDIAQQIVYRNVMLENYKNLVSLGY)]
E18_KRAB_Cterm3 (SEQ ID NO: 27125)
MSKEAVTKLQALNIKLAEKLLEAVTKLQALNIKLAEKLLEALARLQELNIALVYLAVELTDPKRIADEIKKVKDKSKEIVERA
EEEIARAAAESKKILDEAEEEIARAAAESKKILDEGSGSGSDAVAELQALNLKLAELLLEAVAELQALNLKLAELLLEAIAKL
QELNIKLVELLTKLTDPATIREAIRKVKEDSERIVAEAERLIAAAKAESERIIREAERLIAAAKAESERIIREGSGSGDPDVA
RLQELNIELARELLRDVARLQELNIELARELLRAAAELQELNIKLVELASELT[DEARKAIARVKRESKRIVEDAERLIREAA
AASEKISRTLVTFKDVFVDFTREEWKLLDTAQQIVYRNVMLENYKNLVSLGY)]
>3plus1_Cage_Nterm_GFP11_668 (SEQ ID NO: 27,278)
DEAKELLDEIRKAVKESEDRLEKLLRDYEKELRRDHMVLHEYVNAAGITLEELRRGSLDAKELLKTLEDLLREVLEVARRVVE
TLKELNRRVLEVVREDIEANERLLRRVLDTLRRGGVDERRIKDLERLIRESLKKAEEVLREAAEKSREIVDEIREVLKRADEA
LKRIIKKIRETRGADALSRLLEELLRVVDDLIRVLKELIDKSRKVIEELLELLKRINEENLKVLAEIIK
>3plus1_Cage_Cterm_GFP11_668 (SEQ ID NO: 27,279)
DEAKELLDEIRKAVKESEDRLEKLLRDYEKELRRLEKELRDLKRRIEEKLEELRRGSLDAKELLKTLEDLLREVLEVARRVVE
TLKELNRRVLEVVREDIERNERLLRRVLDTLRRGGVDERRIKDLERLIRESLKKAEEVLREAAEKSREIVDEIREVLKRADEA
LKRIIKKIRETRGADADHMVLHEYVNAAGITIRVLKELIDKSRKVIEELLELLKRINEENLKVLAEIIK
>3plus1_Cage_Cterm_GFP11_668 (SEQ ID NO: 27,280)
DEAKELLDEIRKAVKESEDRLEKLLRDYEKELRRLEKELRDLKRRIEEKLEELRRGSLDAKELLKTLEDLLREVLEVARRVVE
TLKELNRRVLEVVREDIERNERLLRRVLDTLRRGGVDERRIKDLERLIRESLKKAEEVLREAAEKSREIVDEIREVLKRADEA
LKRIIKKIRETRGADARDHMVLHEYVNAAGITRVLKELIDKSRKVIEELLELLKRINEENLKVLAEIIK
>3plus1_Cage_Cterm_GFP11_668 (SEQ ID NO: 27,281)
DEAKELLDEIRKAVKESEDRLEKLLRDYEKELRRLEKELRDLKRRIEEKLEELRRGSLDAKELLKTLEDLLREVLEVARRVVE
TLKELNRRVLEVVREDIERNERLLRRVLDTLRRGGVDERRIKDLERLIRESLKKAEEVLREAAEKSREIVDEIREVLKRADEA
LKRIIKKIRETRGADALSRDHMVLHEYVNAAGITLKELIDKSRKVIEELLELLKRINEENLKVLAEIIK
>3plus1_Cage_Cterm_GFP11_668 (SEQ ID NO: 27,282)
DEAKELLDEIRKAVKESEDRLEKLLRDYEKELRRLEKELRDLKRRIEEKLEELRRGSLDAKELLKTLEDLLREVLEVARRVVE
TLKELNRRVLEVVREDIERNERLLRRVLDTLRRGGVDERRIKDLERLIRESLKKAEEVLREAAEKSREIVDEIREVLKRADEA
LKRIIKKIRDHMVLHEYVNAAGITLRVVDDLIRVLKELIDKSRKVIEELLELLKRINEENLKVLAEIIK
>3plus1_Cage_Nterm_GFP11_669 (SEQ ID NO: 27,283)
SEKEKLLKESEEEVRRLRRTLEELLRKYREVLERLRDHMVLHEYVNAAGITRLKEVLDRSGLDIDTIIKEVEDLLKTVLDRLR
ELLDKIARLTKEAIEVVREIIERIVRHAERVKDELRKGGADKRKLDRVDRLIKENTRHLKEILDRIEDLVRRSEKKLRDIIRE
VRRLIEELRKKAEEIKKDPDERLVKTLIEDVERVIKRILELITRVAEDNERVLERIIRELTDNLERHLKIVREIVK
>3plus1_Cage_Nterm_GFP11_670 (SEQ ID NO: 27,284)
SEKEDLARKLRKLVEELTREYEELVKKLERLIEEIERDHMVLHEYVNAAGITISEEVRKLGTDERVLKRLLERLRRIIEEDHE
LNTELLKRLLDLLKEILDTSRELLKRLLDILRKGVRDEEVLRDLERTLREVLEENERAIEEAERVLRKVLEDSERAVRDARRV
LAEVDKSPTGDEALRKLVELLVEVLRRLIRVNRELVKLLREVLERLLRILRESVKKLKRLIEKVIKDAT
>3plus1_Cage_Cterm_GFP11_670 (SEQ ID NO: 27,285)
SEKEDLARKLRKLVEELTREYEELVKKLERLIEEIEKVSEESVRKLEKLLREISEEVRKLGTDERVLKRLLERLRRIIEEDHE
LNTELLKRLLDLLKEILDTSRELLKRLLDILRKGVRDEEVLRDLERTLREVLEENERAIEEAERVLRKVLEDSERAVRDARRV
LAEVDKSPTGDEARDHMVLHEYVNAAGITRVNRELVKLLREVLERLLRILRESVKKLKRLIEKVIKDAT
>3plus1_Cage_Cterm_GFP11_670 (SEQ ID NO: 27,286)
SEKEDLARKLRKLVEELTREYEELVKKLERLIEEIEKVSEESVRKLEKLLREISEEVRKLGTDERVLKRLLERLRRIIEEDHE
LNTELLKRLLDLLKEILDTSRELLKRLLDILRKGVRDEEVLRDLERTLREVLEENERAIEEAERVLRKVLEDSERAVRDARRV
LAEVDKSPTGDERDHMVLHEYVNAAGITIRVNRELVKLLREVLERLLRILRESVKKLKRLIEKVIKDAT
>3plus1_Cage_Cterm_GFP11_670 (SEQ ID NO: 27,287)
SEKEDLARKLRKLVEELTREYEELVKKLERLIEEIEKVSEESVRKLEKLLREISEEVRKLGTDERVLKRLLERLRRIIEEDHE
LNTELLKRLLDLLKEILDTSRELLKRLLDILRKGVRDEEVLRDLERTLREVLEENERAIEEAERVLRKVLEDSERAVRDARRV
LAEVDKSPTGRDHMVLHEYVNAAGITRLIRVNRELVKLLREVLERLLRILRESVKKLKRLIEKVIKDAT
>3plus1_Cage_Nterm_GFP11_670 (SEQ ID NO: 27,288)
SEKEDLARKLRKLVEELTREYEELVKKLERLIEEIRDHMVLHEYVNAAGITEISEEVRKLGTDERVLKRLLERLRRIIEEDHE
LNTELLKRLLDLLKEILDTSRELLKRLLDILRKGVRDEEVLRDLERTLREVLEENERAIEEAERVLRKVLEDSERAVRDARRV
LAEVDKSPTGDEALRKLVELLVEVLRRLIRVNRELVKLLREVLERLLRILRESVKKLKRLIEKVIKDAT
>3plus1_Cage_Cterm_GFP11_670 (SEQ ID NO: 27,289)
SEKEDLARKLRKLVEELTREYEELVKKLERLIEEIEKVSEESVRKLEKLLREISEEVRKLGTDERVLKRLLERLRRIIEEDHE
LNTELLKRLLDLLKEILDTSRELLKRLLDILRKGVRDEEVLRDLERTLREVLEENERAIEEAERVLRKVLEDSERAVRDARRV
LAEVDKSPTRDHMVLHEYVNAAGITRRLIRVNRELVKLLREVLERLLRILRESVKKLKRLIEKVIKDAT
>3plus1_Cage_Nterm_GFP11_670 (SEQ ID NO: 27,290)
SEKEDLARKLRKLVEELTREYEELVKKLERLIERDHMVLHEYVNAAGITLREISEEVRKLGTDERVLKRLLERLRRIIEEDHE
LNTELLKRLLDLLKEILDTSRELLKRLLDILRKGVRDEEVLRDLERTLREVLEENERAIEEAERVLRKVLEDSERAVRDARRV
LAEVDKSPTGDEALRKLVELLVEVLRRLIRVNRELVKLLREVLERLLRILRESVKKLKRLIEKVIKDAT
>3plus1_Cage_Nterm_GFP11_670 (SEQ ID NO: 27,291)
SEKEDLARKLRKLVEELTREYEELVKKLERLIEEIEKRDHMVLHEYVNAAGITSEEVRKLGTDERVLKRLLERLRRIIEEDHE
LNTELLKRLLDLLKEILDTSRELLKRLLDILRKGVRDEEVLRDLERTLREVLEENERAIEEAERVLRKVLEDSERAVRDARRV
LAEVDKSPTGDEALRKLVELLVEVLRRLIRVNRELVKLLREVLERLLRILRESVKKLKRLIEKVIKDAT
>3plus1_Cage_Nterm_GFP11_670 (SEQ ID NO: 27,292)
SEKEDLARKLRKLVEELTREYEELVKKLERLIEEIEKVSEESRDHMVLHEYVNAAGITKLGTDERVLKRLLERLRRIIEEDHE
LNTELLKRLLDLLKEILDTSRELLKRLLDILRKGVRDEEVLRDLERTLREVLEENERAIEEAERVLRKVLEDSERAVRDARRV
LAEVDKSPTGDEALRKLVELLVEVLRRLIRVNRELVKLLREVLERLLRILRESVKKLKRLIEKVIKDAT
>3plus1_Cage_Nterm_GFP11_670 (SEQ ID NO: 27,293)
SEKEDLARKLRKLVEELTREYEELVKKLERLIEEIEKVSEESVRDHMVLHEYVNAAGITLGTDERVLKRLLERLRRIIEEDHE
LNTELLKRLLDLLKEILDTSRELLKRLLDILRKGVRDEEVLRDLERTLREVLEENERAIEEAERVLRKVLEDSERAVRDARRV
LAEVDKSPTGDEALRKLVELLVEVLRRLIRVNRELVKLLREVLERLLRILRESVKKLKRLIEKVIKDAT
>3plus1_Cage_Cterm_GFP11_671 (SEQ ID NO: 27,294)
SEEEDLLERVKRVLDELIEIVDRNHELNRRVVETSAALVERLLEEVERALETLEREIPGSSLLDKAIKDLRDVLRRVKEKVKR
SIEELKEVLEESRRVLEEVVRKLREVIDRVRRLVEKGVDLRDLIRELKRVLEEAVKLIERLVRLNTRAAEKDNESLRELVRAI
KEALKRAVDAVRKGGLDSRAVKKLDRDHMVLHEYVNAAGITNEELWRALVELNKESVRRLREIVERVARDLEETAR
>3plus1_Cage_Cterm_GFP11_671 (SEQ ID NO: 27,295)
SEEEDLLERVKRVLDELIEIVDRNHELNRRVVETSAALVERLLEEVERALETLEREIPGSSLLDKAIKDLRDVLRRVKEKVKR
SIEELKEVLEESRRVLEEVVRKLREVIDRVRRLVEKGVDLRDLIRELKRVLEEAVKLIERLVRLNTRAAEKDNESLRELVRAI
KEALKRAVDAVRKGGLDSRARDHMVLHEYVNAAGITDVVRRNEELWRALVELNKESVRRLREIVERVARDLEETAR
>3plus1_Cage_Cterm_GFP11_671 (SEQ ID NO: 27,296)
SEEEDLLERVKRVLDELIEIVDRNHELNRRVVETSAALVERLLEEVERALETLEREIPGSSLLDKAIKDLRDVLRRVKEKVKR
SIEELKEVLEESRRVLEEVVRKLREVIDRVRRLVEKGVDLRDLIRELKRVLEEAVKLIERLVRLNTRAAEKDNESLRELVRAI
KEALKRAVDAVRKGGLDSRRDHMVLHEYVNAAGITEDVVRRNEELWRALVELNKESVRRLREIVERVARDLEETAR
>3plus1_Cage_Cterm_GFP11_671 (SEQ ID NO: 27,297)
SEEEDLLERVKRVLDELIEIVDRNHELNRRVVETSAALVERLLEEVERALETLEREIPGSSLLDKAIKDLRDVLRRVKEKVKR
SIEELKEVLEESRRVLEEVVRKLREVIDRVRRLVEKGVDLRDLIRELKRVLEEAVKLIERLVRLNTRAAEKDNESLRELVRAI
KEALKRAVDAVRKGGLRDHMVLHEYVNAAGITKKLEDVVRRNEELWRALVELNKESVRRLREIVERVARDLEETAR
>3plus1_Cage_Cterm_GFP11_672 (SEQ ID NO: 27,298)
DETEEVIKKIAKLIDELIETLKKIVEDSAKLIKELIDLLEEIIKRSADLIRELEKVSKRGDRDRLKKLIDRMRRETERALEEL
RRVIEELKEATERALKTIEDLIREIEEAIRRELGDEDLAREILEVIRRILELLREDMELNLRALEEILRLLEEVIKLNKDAID
EILELLKRDHMVLHEYVNAAGITESKKLVRDVVEEAKRLLKENRDSTRKIIEDIRRLLRKIEDSTR
>3plus1_Cage_Cterm_GFP11_672 (SEQ ID NO: 27,299)
DETEEVIKKIAKLIDELIETLKKIVEDSAKLIKELIDLLEEIIKRSADLIRELEKVSKRGDRDRLKKLIDRMRRETERALEEL
RRVIEELKEATERALKTIEDLIREIEEAIRRELGDEDLAREILEVIRRILELLREDMELNLRALEEILRLLEEVIKLNKDAID
EILELLKGRDHMVLHEYVNAAGITSKKLVRDVVEEAKRLLKENRDSTRKIIEDIRRLLRKIEDSTR
>3plus1_Cage_Nterm_GFP11_67>3 (SEQ ID NO: 27,300)
SKEETLRKEAEDLLRRLEELTRRLEKKARELLERAKKLSRDLARDHMVLHEYVNAAGITEELIKVLEEVAKTSIDLNKEVIDV
IRRVIEESLELNKRVLDVLRRVLDIAARKGRDKKAIRDVVREAARVIKEVIDEDEKVNRDLKRVIERVIDDDRKALERLRKAV
EEVASRGDDEAAKRLVEELLKAVTDLSRKNKRILEELLKAIETLSDENKKILTEILDALRRLVEKIEK
>3plus1_Cage_Nterm_GFP11_67>3 (SEQ ID NO: 27,301)
SKEETLRKEAEDLLRRLEELTRRLEKKARELLERAKKLSRRDHMVLHEYVNAAGITGVPEELIKVLEEVAKTSIDLNKEVIDV
IRRVIEESLELNKRVLDVLRRVLDIAARKGRDKKAIRDVVREAARVIKEVIDEDEKVNRDLKRVIERVIDDDRKALERLRKAV
EEVASRGDDEAAKRLVEELLKAVTDLSRKNKRILEELLKAIETLSDENKKILTEILDALRRLVEKIEK
>3plus1_Cage_Cterm_GFP11_67>3 (SEQ ID NO: 27,302)
SKEETLRKEAEDLLRRLEELTRRLEKKARELLERAKKLSRDLAEELKRLLKELREKGVPEELIKVLEEVAKTSIDLNKEVIDV
IRRVIEESLELNKRVLDVLRRVLDIAARKGRDKKAIRDVVREAARVIKEVIDEDEKVNRDLKRVIERVIDDDRKALERLRKAV
EEVASRGDDEARDHMVLHEYVNAAGITRKNKRILEELLKAIETLSDENKKILTEILDALRRLVEKIEK
>3plus1_Cage_Nterm_GFP11_67>3 (SEQ ID NO: 27,303)
SKEETLRKEAEDLLRRLEELTRRLEKKARELLERARDHMVLHEYVNAAGITELREKGVPEELIKVLEEVAKTSIDLNKEVIDV
IRRVIEESLELNKRVLDVLRRVLDIAARKGRDKKAIRDVVREAARVIKEVIDEDEKVNRDLKRVIERVIDDDRKALERLRKAV
EEVASRGDDEAAKRLVEELLKAVTDLSRKNKRILEELLKAIETLSDENKKILTEILDALRRLVEKIEK
>3plus1_Cage_Nterm_GFP11_67>3 (SEQ ID NO: 27,304)
SKEETLRKEAEDLLRRLEELTRRLEKKARELLERAKKLSRDHMVLHEYVNAAGITKGVPEELIKVLEEVAKTSIDLNKEVIDV
IRRVIEESLELNKRVLDVLRRVLDIAARKGRDKKAIRDVVREAARVIKEVIDEDEKVNRDLKRVIERVIDDDRKALERLRKAV
EEVASRGDDEAAKRLVEELLKAVTDLSRKNKRILEELLKAIETLSDENKKILTEILDALRRLVEKIEK
>3plus1_Cage_Nterm_GFP11_67>3 (SEQ ID NO: 27,305)
SKEETLRKEAEDLLRRLEELTRRLEKKARELLERAKKLRDHMVLHEYVNAAGITEKGVPEELIKVLEEVAKTSIDLNKEVIDV
IRRVIEESLELNKRVLDVLRRVLDIAARKGRDKKAIRDVVREAARVIKEVIDEDEKVNRDLKRVIERVIDDDRKALERLRKAV
EEVASRGDDEAAKRLVEELLKAVTDLSRKNKRILEELLKAIETLSDENKKILTEILDALRRLVEKIEK
>3plus1_Cage_Nterm_GFP11_67>3 (SEQ ID NO: 27,306)
SKEETLRKEAEDLLRRLEELTRRLEKKARELLERAKKLSRDLRDHMVLHEYVNAAGITPEELIKVLEEVAKTSIDLNKEVIDV
IRRVIEESLELNKRVLDVLRRVLDIAARKGRDKKAIRDVVREAARVIKEVIDEDEKVNRDLKRVIERVIDDDRKALERLRKAV
EEVASRGDDEAAKRLVEELLKAVTDLSRKNKRILEELLKAIETLSDENKKILTEILDALRRLVEKIEK
>3plus1_Cage_Nterm_GFP11_674 (SEQ ID NO: 27,307)
SEREEVKEKLDRLLEEVEKTVRELKREHDELLKEVEKLVRDLKRDHMVLHEYVNAAGITKEILDVIREHVRTNKEILDRVLEV
VEEHLRRNKEILDKLLDDIRKVVEDAKRILGIGDDETLRRAVRRILEELRKLVEDIRKKVKDSLETLERALEEAEERIRRSLE
DLKRVLKEAKDKTKDKDRLDKVEELVKKLLEDTKRTVDRVRELVRKILKKSRETLEELERLIEKILRELEKDAR
>3plus1_Cage_Cterm_GFP11_674 (SEQ ID NO: 27,308)
SEREEVKEKLDRLLEEVEKTVRELKREHDELLKEVEKLVRDLKKEHDELLKKVKDDGVPKEILDVIREHVRTNKEILDRVLEV
VEEHLRRNKEILDKLLDDIRKVVEDAKRILGIGDDETLRRAVRRILEELRKLVEDIRKKVKDSLETLERALEEAEERIRRSLE
DLKRVLKEAKDKTKDKDRDHMVLHEYVNAAGITKRTVDRVRELVRKILKKSRETLEELERLIEKILRELEKDAR
>3plus1_Cage_Nterm_GFP11_675 (SEQ ID NO: 27,309)
SERETVKRRLEELLKEVKRTLDKLKEEHDRLLEDVRRVVEELRDHMVLHEYVNAAGITPEELLRVIAKVLETNKRILDDLLRV
VKKHVDLNKEILDRILEMIKEIVERVKRVLGDGDEKTLRDKIRDIIRRLEDAAREAEERVRRSLEELKKAVEKIRKKIEDSLR
ELEEALKRVRDKEEDDKRLEDISRLVKRLLDESRRVLRELEETIRKRAEESKRVLEEVKRLVEKLIRELRKEAE
>3plus1_Cage_Nterm_GFP11_676 (SEQ ID NO: 27,310)
SEDEIIKKIIEDLRRVLKEVEEIHKEVEERLDKRDHMVLHEYVNAAGITDRVLDEVKRIGDVETVLRLAIEAVRRALEIVRKV
TEDLIRVVRKLLEIVDAVNKRVKKAVEDVLKLLRDTLKGSKDVERVLDEARRLLEKLHRDSRRILKRIAELLDELKELSERIL
ERIKRLLEEVERRGSDDERLLEELIEELKDLIRRHIELLRRLIERLKELLKKHIEDLRRLLEEIEKLLEEARK
>3plus1_Cage_Nterm_GFP11_677 (SEQ ID NO: 27,311)
SREEVLRELEEVIEDNRRLLEELIEKSKKVLDESLKLIDELLRRDHMVLHEYVNAAGITSKGDDEETARRIVTKIRKELEDVL
DEVRRIVKEILDRDRRVAEDLKRVVDENLEKLKKVLDELDKKLGDRRLVEILRDIVRLLIEINERALRELLKLHEEHTRIVAE
LLRELERVVEELRRLVELIARGEISEDDLKRVVDEVEKKLRELKRRYKEALERIKEKIKELKDRYERAVREVVAELRKTTK
>3plus1_Cage_Cterm_GFP11_677 (SEQ ID NO: 27,312)
SREEVLRELEEVIEDNRRLLEELIEKSKKVLDESLKLIDELLRRLEEVLERVLRLLEELSKGDDEETARRIVTKIRKELEDVL
DEVRRIVKEILDRDRRVAEDLKRVVDENLEKLKKVLDELDKKLGDRRLVEILRDIVRLLIEINERALRELLKLHEEHTRIVAE
LLRELERVVEELRRLVELIARGEISEDDRDHMVLHEYVNAAGITRRYKEALERIKEKIKELKDRYERAVREVVAELRKTTK
>3plus1_Cage_Cterm_GFP11_677 (SEQ ID NO: 27,313)
SREEVLRELEEVIEDNRRLLEELIEKSKKVLDESLKLIDELLRRLEEVLERVLRLLEELSKGDDEETARRIVTKIRKELEDVL
DEVRRIVKEILDRDRRVAEDLKRVVDENLEKLKKVLDELDKKLGDRRLVEILRDIVRLLIEINERALRELLKLHEEHTRIVAE
LLRELERVVEELRRLVELIARGERDHMVLHEYVNAAGITLRELKRRYKEALERIKEKIKELKDRYERAVREVVAELRKTTK
>3plus1_Cage_Nterm_GFP11_678 (SEQ ID NO: 27,314)
SKAEEIAEKLDRLLEENRRALEEITTRLDDLLRRDHMVLHEYVNAAGITLDDLRRGGIREELLKRIADVIRDIMRLLKELHDH
TAEVIKTIKKLLKELHDINKEIIERLKRLKDGNVPKEELLKRVEELVRTSARLTTEVLKTVEKLIRDDKRLSEEILKRVKELI
EELKRGVDSERVKEILERILRVVEEAVRLNEESLRRILDVVRKAVKLDRESLKKILDVVEEAVR
>3plus1_Cage_Cterm_GFP11_678 (SEQ ID NO: 27,315)
SKAEEIAEKLDRLLEENRRALEEITTRLDDLLRRNKDALRKVMEKLKRLLDDLRRGGIREELLKRIADVIRDIMRLLKELHDH
TAEVIKTIKKLLKELHDINKEIIERLKRLKDGNVPKEELLKRVEELVRTSARLTTEVLKTVEKLIRDDKRLSEEILKRVKELI
EELRDHMVLHEYVNAAGITLRVVEEAVRLNEESLRRILDVVRKAVKLDRESLKKILDVVEEAVR
>3plus1_Cage_Nterm_GFP11_678 (SEQ ID NO: 27,316)
SKAEEIAEKLDRLLEENRRALEEITTRLDDLLRRNKDRDHMVLHEYVNAAGITRRGGIREELLKRIADVIRDIMRLLKELHDH
TAEVIKTIKKLLKELHDINKEIIERLKRLKDGNVPKEELLKRVEELVRTSARLTTEVLKTVEKLIRDDKRLSEEILKRVKELI
EELKRGVDSERVKEILERILRVVEEAVRLNEESLRRILDVVRKAVKLDRESLKKILDVVEEAVR
>3plus1_Cage_Cterm_GFP11_678 (SEQ ID NO: 27,317)
SKAEEIAEKLDRLLEENRRALEEITTRLDDLLRRNKDALRKVMEKLKRLLDDLRRGGIREELLKRIADVIRDIMRLLKELHDH
TAEVIKTIKKLLKELHDINKEIIERLKRLKDGNVPKEELLKRVEELVRTSARLTTEVLKTVEKLIRDDKRLSEEILKRVKELI
EELKRGRDHMVLHEYVNAAGITVEEAVRLNEESLRRILDVVRKAVKLDRESLKKILDVVEEAVR
>3plus1_Cage_Nterm_GFP11_678 (SEQ ID NO: 27,318)
SKAEEIAEKLDRLLEENRRALEEITTRLDDLLRRNKRDHMVLHEYVNAAGITLRRGGIREELLKRIADVIRDIMRLLKELHDH
TAEVIKTIKKLLKELHDINKEIIERLKRLKDGNVPKEELLKRVEELVRTSARLTTEVLKTVEKLIRDDKRLSEEILKRVKELI
EELKRGVDSERVKEILERILRVVEEAVRLNEESLRRILDVVRKAVKLDRESLKKILDVVEEAVR
>3plus1_Cage_Nterm_GFP11_678 (SEQ ID NO: 27,319)
SKAEEIAEKLDRLLEENRRALEEITTRLDDLLRRNKDALRDHMVLHEYVNAAGITGGIREELLKRIADVIRDIMRLLKELHDH
TAEVIKTIKKLLKELHDINKEIIERLKRLKDGNVPKEELLKRVEELVRTSARLTTEVLKTVEKLIRDDKRLSEEILKRVKELI
EELKRGVDSERVKEILERILRVVEEAVRLNEESLRRILDVVRKAVKLDRESLKKILDVVEEAVR
>3plus1_Cage_Cterm_GFP11_679 (SEQ ID NO: 27,320)
SRVEELKKLIEDILRISREVVERIKRVAEDIHRINRRVLDDLRKLIEDILRTVEEILARKVGDTEIAERLRDTIARVVDEIAK
LLEEHEKRSRELLEEIRKLLEDILRRSERAVEEIRELLKKGVSTKDVLRIIEEILREHLELLERVVRRIEEILRELLKTIEEI
VKRIKEILEELKEVLKRGRVKDDEVERDHMVLHEYVNAAGITYRRLLEEIKRKLEEILRRVEELHRRLRRKLEEIDR
>3plus1_Cage_Nterm_GFP11_679 (SEQ ID NO: 27,321)
SRVEELKKLIEDILRISREVVERIKRVAEDIHRINRRVRDHMVLHEYVNAAGITEILARKVGDTEIAERLRDTIARVVDEIAK
LLEEHEKRSRELLEEIRKLLEDILRRSERAVEEIRELLKKGVSTKDVLRIIEEILREHLELLERVVRRIEEILRELLKTIEEI
VKRIKEILEELKEVLKRGRVKDDEVEREIRRVKEDLDRILEEYRRLLEEIKRKLEEILRRVEELHRRLRRKLEEIDR
>SB76L (SEQ ID NO: 1)
(MGSSHHHHHHSSGLVPRGSHM)SKEAVIKLQALNIKLAEKLLEALARLQELNIALVYLAVELTDPKRIADEIKK
VKDKSKEIVERAEEEIARAAAESKKILDEGSGSGSDAVAELQALNLKLAELLLEAIAKLQELNIKLVELLTKLID
PATIREAIRKVKEDSERIVAEAERLIAAAKAESERIIREGSGSGDPDVARLQELNIELARELLRAAAELQELNIK
LVELASELTDP[DEARKAIARVKRESKRIVEDAERLIREAAAASEKISRE]
>SB76L_17 (SEQ ID NO: 2)
(MGSSHHHHHHSSGLVPRGSHM)GSKEAVIKLMALNLKLAEKLLEAIARLQELNIALVYLATELTDPERIREEIR
KVKEESARIVEEAEEEIRRAAARSEDILREGSGSGSDAVAELQRLNLELAELLLRAAAKLQELNIDLVRLLTELT
DPKTIRDAIERVKAESERIVREAERLIREAKADSERILREGSGSGDPDVARLQELFIELARELLEALARLQELNI
DLVRLASELTDP[DTIRDAIRRVKEESARIVEDARRLIKEAAEEAEKISRE]
>SB76L_18 (SEQ ID NO: 3)
(MGSSHHHHHHSSGLVPRGSHM)GSKRAVTELQKLNIELARKLLRALAELMELNIALVYLAVELTDPRRIREEIR
KVKEKSDEIVKRAEDEIRKAAAESEKILREGSGSGSDAVAELQRLNLELAKLLLEAIAKLQALNIDLVRLLTELT
DPETIRRAIKRVKDESARIVEEAEKLIRAAKDKAREIIDKGSGSGDPDVARLQELNIELARELLEAAARLQELFI
DLVRLASELTDP[DEARKAIERVKREAERIVREAERLIREAKRASKEISDE]
>LOCKR_extend5 (SEQ ID NO: 4)
(MGSSHHHHHHSSGLVPRGSHM)KLLEAVIKLQALNIKLAEKLLEALARLQELNIALVYLAVELTDPKRIADEIK
KVKDKSKEIVERAEEEIARAAAESKKILDEAEEEGSGSGSELLLEAVAELQALNLKLAELLLEAIAKLQELNIKL
VELLTKLTDPATIREAIRKVKEDSERIVAEAERLIAAAKAESERIIREAERLAGSGSGSRELLRDVARLQELNIE
LARELLRAAAELQELNIKLVELASELTDP[DEARKAIARVKRESKRIVEDAERLIREAAAASEKISREAERLI]
>LOCKR_extend9 (SEQ ID NO: 5)
(MGSSHHHHHHSSGLVPRGSHM)KLAEKLLEAVIKLQALNIKLAEKLLEALARLQELNIALVYLAVELTDPKRIA
DEIKKVKDKSKEIVERAEEEIARAAAESKKILDEAEEEIARAGSGSGSLKLAELLLEAVAELQALNLKLAELLLE
AIAKLQELNIKLVELLTKLTDPATIREAIRKVKEDSERIVAEAERLIAAAKAESERIIREAERLIAAAAGSGSGS
IELARELLRDVARLQELNIELARELLRAAAELQELNIKLVELASELTDP[DEARKAIARVKRESKRIVEDAERLI
REAAAASEKISREAERLIREAA]
>LOCKR_extend18 (SEQ ID NO: 6)
(MGSSHHHHHHSSGLVPRGSHM)SKEAVIKLQALNIKLAEKLLEAVIKLQALNIKLAEKLLEALARLQELNIALV
YLAVELTDPKRIADEIKKVKDKSKEIVERAEEEIARAAAESKKILDEAEEEIARAAAESKKILDEGSGSGSDAVA
ELQALNLKLAELLLEAVAELQALNLKLAELLLEAIAKLQELNIKLVELLTKLTDPATIREAIRKVKEDSERIVAE
AERLIAAAKAESERIIREAERLIAAAKAESERIIREGSGSGDPDVARLQELNIELARELLRDVARLQELNIELAR
ELLRAAAELQELNIKLVELASELTDP[DEARKAIARVKRESKRIVEDAERLIREAAAASEKISREAERLIREAAA
ASEKISRE]
>LOCKRb (SEQ ID NO: 7)
(MGSSHHHHHHSSGLVPRGSHM)SHAAVIKLSDLNIRLLDKLLQAVIKLTELNAELNRKLIEALQRLFDLNVALV
HLAAELTDPKRIADEIKKVKDKSKEIVERAEEEIARAAAESKKILDEAEEEIARAAAESKKILDEGSGSGSDAVA
ELQALNLKLAELLLEAVAELQALNLKLAELLLEAIAKLQELNIKLVELLTKLTDPATIREAIRKVKEDSERIVAE
AERLIAAAKAESERIIREAERLIAAAKAESERIIREGSGSNDPQVAQNQETFIELARDALRLVAENQEAFIEVAR
LTLRAAALAQEVAIKAVEAASEGGSGSG[NKEEIEKLAKEAREKLKKAEKEHKEIHDKLRKKNKKAREDLKKKAD
ELRETNKRVN]
>LOCKRc (SEQ ID NO: 8)
(MGSSHHHHHHSSGLVPRGSHM)SLEAVLKLAELNLKLSDKLAEAVQKLAALLNKLLEKLSEALQRLFELNVALV
TLAIELTDPKRIADEIKKVKDKSKEIVERAEEEIARAAAESKKILDEAEEEIARAAAESKKILDEGSGSGSDAVA
ELQALNLKLAELLLEAVAELQALNLKLAELLLEAIAKLQELNIKLVELLTKLTDPATIREAIRKVKEDSERIVAE
AERLIAAAKAESERIIREAERLIAAAKAESERIIREGSGSNDPLVARLQELLIEHARELLRLVATSQEIFIELAR
AFLANAAQLQEAAIKAVEAASENGSGSG[SSEKVRRELKESLKENHKQNQKLLKDHKRAQEKLNRELEELKKKHK
KTLDDIRRES]
>LOCKRd (SEQ ID NO: 9)
(MGSSHHHHHHSSGLVPRGSHM)SLEAVLKLFELNHKLSEKLLEAVLKLHALNQKLSQKLLEALARLLELNVALV
ELAIELTDPKRIADEIKKVKDKSKEIVERAEEEIARAAAESKKILDEAEEEIARAAAESKKILDEGSGSGSDAVA
ELQALNLKLAELLLEAVAELQALNLKLAELLLEAIAKLQELNIKLVELLTKLTDPATIREAIRKVKEDSERIVAE
AERLIAAAKAESERIIREAERLIAAAKAESERIIREGSGSGDPEVARLQEAFIEQAREILRNVAAAQEALIEQAR
RLLALAALAQEAAIKAVELASEHGSGSG[DTVKRILEELRRRFEKLAKDLDDIARKLLEDHKKHNKELKDKQRKI
KKEADDAARS]
>LOCKRe (SEQ ID NO: 10)
(MGSSHHHHHHSSGLVPRGSHM)SLEAVLKLQDLNSKLSEKLSEAQLKLQALNNKLLRKLLEALLRLQDLNQALV
NLALQLTDPKRIADEIKKVKDKSKEIVERAEEEIARAAAESKKILDEAEEEIARAAAESKKILDEGSGSGSDAVA
ELQALNLKLAELLLEAVAELQALNLKLAELLLEAIAKLQELNIKLVELLTKLTDPATIREAIRKVKEDSERIVAE
AERLIAAAKAESERIIREAERLIAAAKAESERIIREGSGSGDPDVAKSQEHLIEHARELLRQVAKSQELFIELAR
QLLRLAAKSQELAIKAVELASEAGSGSG[DDVERRLRKANKESKKEAEELTEEAKKANEKTKEDSKELTKENRKT
NKTIKDEARS]
>LOCKRf (SEQ ID NO: 11)
(MGSSHHHHHHSSGLVPRGSHM)SREAVEKLAELNHKLSHKLQQAQQKLQALNLKLLQKLLEALDRLQDLNNALV
KLAQRLTDPKRIADEIKKVKDKSKEIVERAEEEIARAAAESKKILDEAEEEIARAAAESKKILDEGSGSGSDAVA
ELQALNLKLAELLLEAVAELQALNLKLAELLLEAIAKLQELNIKLVELLTKLTDPATIREAIRKVKEDSERIVAE
AERLIAAAKAESERIIREAERLIAAAKAESERIIREGSGSGDPDVARQQETLIEQARRLLRNVAESQELFIEAAR
TVLRLAAKLQEINIKQVELASEAGSGSG[DDEERRSEKTVQDAKREIKKVEDDLQRLNEEQKKKVKKQEDENQKT
LKKHKDDARS]
>miniLOCKRa_1 (SEQ ID NO: 12)
(MGSSHHHHHHSSGLVPRGSHM)NKEDATEAQKKAIRAAEELLKDVTRIQERAIREAEKALERLARVQEEAIRRV
YEAVESKNKEELKKVKEEIEELLRRLKRELDELEREIRELLKEIKEKADRLEKEIRDLIERIRRDRNASDEVVIR
LARLNEELIRELREDVRRLAELNKELLRELERAARELARLNEKLLELADRVETE[EEARKAIARVKRESKRIVED
AERLIREAAAASEKISREAERLIREAAAASEKISRE]
>miniLOCKRa_2 (SEQ ID NO: 13)
(MGSSHHHHHHSSGLVPRGSHM)DERLKRLNERLADELDKDLERLLRLNEELARELTRAAEELRELNEKLVELAK
KLQGGRSREVAERAEKEREKIRRKLEEIKKEIKEDADRIKKRADELRRRLEKTLEDAARELEKLKREPRTEELKR
KATELQKEAIRRAEELLKEVIDVQRRAIERAEELLEKLARLQEEAIRTVYLLVELNKV[DRARKAIARVKRESKR
IVEDAERLIREAAAASEKISREAERLIREAAAASEKISRE]
>miniLOCKRc_1 (SEQ ID NO: 14)
(MGSSHHHHHHSSGLVPRGSHM)LIERLTRLEKEHVRELKRLLDTSLEILRRLVEAFETNLRQLKEALKRALEAA
NLHNEEVEEVLRKLEEDLRRLEEELRKILDDVRKEVKRLKEELDKRIKEVEDELRKIKEKLKKGDKNEKRVLEEI
LRLAEDVLKKSDKLAKDVQERARELNEILEELSRKLQELFERVVEEVIRNVPT[TERIEKVRRELKESLKENHKQ
NQKLLKDHKRAQEKLNRELEELKKKHKKTLDDIRRES]
>miniLOCKRc 2 (SEQ ID NO: 15)
(MGSSHHHHHHSSGLVPRGSHM)SEERVLELAEEALRLSDEAAKEIQELARRLNEELEKLSKELQDLFERIVETV
TRLIDADEETLKRAAEEIKKRLEDARKKAKEAADKAREELDRARKKLKELVDEIRKKAKDALEKAGADEELVARL
LRLLEEHARELERLLRTSARIIERLLDAFRRNLEQLKEAADKAVEAAEEAVRRVED[VRVWSEKVRRELKESLKE
NHKQNQKLLKDHKRAQEKLNRELEELKKKHKKTLDDIRRES]
>1fix-short-noBim-t0 (SEQ ID NO: 16)
(MGSHHHHHHGSGSENLYFQGSGG)SELARKLLEASTKLQRLNIRLAEALLEAIARLQELNLELVYLAVELTDPK
RIRDEIKEVKDKSKEIIRRAEKEIDDAAKESEKILEEAREAISGSGSELAKLLLKAIAETQDLNLRAAKAFLEAA
AKLQELNIRAVELLVKLTDPATIREALEHAKRRSKEIIDEAERAIRAAKRESERIIEEARRLIEKGSGSGS[ELA
RELLRAHAQLQRLNLELLRELLRALAQLQELNLDLLRLASELTDPDEARKAIARVKRESKRIVEDAERLIREAAA
ASEKISREAERLIR]
>1fix-short-noBim(AYYA)-t0 (SEQ ID NO: 17)
(MGSHHHHHHGSGSENLYFQGSGG)SELARKLLEASTKLQRLNIRLAEALLEAIARLQELNLELVYLAVELTDPK
RIRDEIKEVKDKSKEIIRRAEKEIDDAAKESEKILEEAREAISGSGSELAKLLLKAIAETQDLNLRAAKAFLEAA
AKLQELNIRAVELLVKLTDPATIREALEHAKRRSKEIIDEAERAIRAAKRESERIIEEARRLIEKGSGSGS[ELA
RELLRAHAQLQRLNLELLRELLRALAQLQELNLDLLRLASELTDPDEARKAIARVKRESNAYYADAERLIREAAA
ASEKISREAERLIR]
“(3) Functional LOCKR Cage designs with bioactive peptides encoded into the Latch”,
>aBc12LOCKR (SEQ ID NO: 18)
(MGSSHHHHHHSSGLVPRGSHM)GSKEAVIKLQALNIKLAEKLLEALARLQELNIALVYLAVELTDPKRIADEIK
KVKDKSKEIVERAEEEIARAAAESKKILDEGSGSGSDAVAELQALNLKLAELLLEAIAKLQELNIKLVELLTKLT
DPATIREAIRKVKEDSERIVAEAERLIAAAKAESERIIREGSGSGDPDVARLQELNIELARELLRAAAELQELNI
KLVELASELT(GSGSGSG)[DPKMAQEL [symbol] DK [symbol] RAASLQI [symbol] GDAFYA [symbol] LRALAASEKLSKE]
>pBimLOCKR (SEQ ID NO: 19)
(MGSSHHHHHHSSGLVPRGSHM)KEAVIKLQALNIKLAEKLLEALARLQELNIALVYLAVELTDPKRIADEIKKV
KDKSKEIVERAEEEIARAAAESKKILDEGSGSGSDAVAELQALNLKLAELLLEAIAKLQELNIKLVELLTKLTDP
ATIREAIRKVKEDSERIVAEAERLIAAAKAESERIIREGSGSGDPDVARLQELNIELARELLRAAAELQELNIKL
VELASEGSGSGS[EIAEALRAIGDVFNESYRIVEDAERLIREAAAASEKISRE]
>BimLOCKR_extend5 (SEQ ID NO: 20)
(MGSSHHHHHHSSGLVPRGSHM)KLLEAVIKLQALNIKLAEKLLEALARLQELNIALVYLAVELTDPKRIADEIK
KVKDKSKEIVERAEEEIARAAAESKKILDEAEEEGSGSGSELLLEAVAELQALNLKLAELLLEAIAKLQELNIKL
VELLTKLTDPATIREAIRKVKEDSERIVAEAERLIAAAKAESERIIREAERLAGSGSGSRELLRDVARLQELNIE
LARELLRAAAELQELNIKLVELASELTD[EIWIAQELRRIGDEFNAYYADAERLIREAAAASEKISREAERLI]
>BimLOCKR_extend9 (SEQ ID NO: 21)
(MGSSHHHHHHSSGLVPRGSHM)KLAEKLLEAVIKLQALNIKLAEKLLEALARLQELNIALVYLAVELTDPKRIA
DEIKKVKDKSKEIVERAEEEIARAAAESKKILDEAEEEIARAGSGSGSLKLAELLLEAVAELQALNLKLAELLLE
AIAKLQELNIKLVELLTKLTDPATIREAIRKVKEDSERIVAEAERLIAAAKAESERIIREAERLIAAAAGSGSGS
IELARELLRDVARLQELNIELARELLRAAAELQELNIKLVELASELTD[EIWIAQELRRIGDEFNAYYADAERLI
REAAAASEKISREAERLIREAA]
>BimLOCKR_extend18 (SEQ ID NO: 22)
(MGSSHHHHHHSSGLVPRGSHM)SKEAVIKLQALNIKLAEKLLEAVIKLQALNIKLAEKLLEALARLQELNIALV
YLAVELTDPKRIADEIKKVKDKSKEIVERAEEEIARAAAESKKILDEAEEEIARAAAESKKILDEGSGSGSDAVA
ELQALNLKLAELLLEAVAELQALNLKLAELLLEAIAKLQELNIKLVELLTKLTDPATIREAIRKVKEDSERIVAE
AERLIAAAKAESERIIREAERLIAAAKAESERIIREGSGSGDPDVARLQELNIELARELLRDVARLQELNIELAR
ELLRAAAELQELNIKLVELASELTD[EIWIAQELRRIGDEFNAYYADAERLIREAAAASEKISREAERLIREAAA
ASEKISRE]
>BimLOCKRb (SEQ ID NO: 23)
(MGSSHHHHHHSSGLVPRGSHM)SHAAVIKLSDLNIRLLDKLLQAVIKLTELNAELNRKLIEALQRLFDLNVALV
HLAAELTDPKRIADEIKKVKDKSKEIVERAEEEIARAAAESKKILDEAEEEIARAAAESKKILDEGSGSGSDAVA
ELQALNLKLAELLLEAVAELQALNLKLAELLLEAIAKLQELNIKLVELLTKLTDPATIREAIRKVKEDSERIVAE
AERLIAAAKAESERIIREAERLIAAAKAESERIIREGSGSNDPQVAQNQETFIELARDALRLVAENQEAFIEVAR
LTLRAAALAQEVAIKAVEAASEGGSGSG[NEIWIAQELRRIGDEFNAYYAEHKEIHDKLRKKNKKAREDLKKKAD
ELRETNKRVN]
>BimLOCKRc (SEQ ID NO: 24)
(MGSSHHHHHHSSGLVPRGSHM)SLEAVLKLAELNLKLSDKLAEAVQKLAALLNKLLEKLSEALQRLFELNVALV
TLAIELTDPKRIADEIKKVKDKSKEIVERAEEEIARAAAESKKILDEAEEEIARAAAESKKILDEGSGSGSDAVA
ELQALNLKLAELLLEAVAELQALNLKLAELLLEAIAKLQELNIKLVELLTKLTDPATIREAIRKVKEDSERIVAE
AERLIAAAKAESERIIREAERLIAAAKAESERIIREGSGSNDPLVARLQELLIEHARELLRLVATSQEIFIELAR
AFLANAAQLQEAAIKAVEAASENGSG[EIWIAQELRRIGDEFNAYYAQNQKLLKDHKRAQEKLNRELEELKKKHK
KTLDDIRRES]
>BimLOCKRd (SEQ ID NO: 25)
(MGSSHHHHHHSSGLVPRGSHM)SLEAVLKLFELNHKLSEKLLEAVLKLHALNQKLSQKLLEALARLLELNVALV
ELAIELTDPKRIADEIKKVKDKSKEIVERAEEEIARAAAESKKILDEAEEEIARAAAESKKILDEGSGSGSDAVA
ELQALNLKLAELLLEAVAELQALNLKLAELLLEAIAKLQELNIKLVELLTKLTDPATIREAIRKVKEDSERIVAE
AERLIAAAKAESERIIREAERLIAAAKAESERIIREGSGSGDPEVARLQEAFIEQAREILRNVAAAQEALIEQAR
RLLALAALAQEAAIKAVELASEHGSGS[EIWIAQELRRIGDEFNAYYADLDDIARKLLEDHKKHNKELKDKQRKI
KTIKDEARS]
>StrepLOCKRa_300 (SEQ ID NO: 26)
(MGSSHHHHHHSSGLVPRGSHM)SKEAVIKLQALNIKLAEKLLEAVIKLQALNIKLAEKLLEALARLQELNIALV
YLAVELTDPKRIADEIKKVKDKSKEIVERAEEEIARAAAESKKILDEAEEEIARAAAESKKILDEGSGSGSDAVA
ELQALNLKLAELLLEAVAELQALNLKLAELLLEAIAKLQELNIKLVELLTKLTDPATIREAIRKVKEDSERIVAE
AERLIAAAKAESERIIREAERLIAAAKAESERIIREGSGSGDPDVARLQELNIELARELLRDVARLQELNIELAR
ELLRAAAELQELNIKLVELAS(GG)[NWSHPQFEKKAIARVKRESKRIVEDAERLIREAAAASEKISREAERLIR
EAAAASEKISRE]
>strepLOCKRa_306 (SEQ ID NO: 27)
(MGSSHHHHHHSSGLVPRGSHM)SKEAVIKLQALNIKLAEKLLEAVIKLQALNIKLAEKLLEALARLQELNIALV
YLAVELTDPKRIADEIKKVKDKSKEIVERAEEEIARAAAESKKILDEAEEEIARAAAESKKILDEGSGSGSDAVA
ELQALNLKLAELLLEAVAELQALNLKLAELLLEAIAKLQELNIKLVELLTKLTDPATIREAIRKVKEDSERIVAE
AERLIAAAKAESERIIREAERLIAAAKAESERIIREGSGSGDPDVARLQELNIELARELLRDVARLQELNIELAR
ELLRAAAELQELNIKLVELASELTDPD[ENWSHPQFEKRESKRIVEDAERLIREAAAASEKISREAERLIREAAA
ASEKISRE]
>strepLOCKRa_309 (SEQ ID NO: 28)
(MGSSHHHHHHSSGLVPRGSHM)SKEAVIKLQALNIKLAEKLLEAVIKLQALNIKLAEKLLEALARLQELNIALV
YLAVELTDPKRIADEIKKVKDKSKEIVERAEEEIARAAAESKKILDEAEEEIARAAAESKKILDEGSGSGSDAVA
ELQALNLKLAELLLEAVAELQALNLKLAELLLEAIAKLQELNIKLVELLTKLTDPATIREAIRKVKEDSERIVAE
AERLIAAAKAESERIIREAERLIAAAKAESERIIREGSGSGDPDVARLQELNIELARELLRDVARLQELNIELAR
ELLRAAAELQELNIKLVELASELTDPD[EARKNWSHPQFEKRIVEDAERLIREAAAASEKISREAERLIREAAA
ASEKISRE]
>strepLOCKRa_312 (SEQ ID NO: 29)
(MGSSHHHHHHSSGLVPRGSHM)SKEAVIKLQALNIKLAEKLLEAVIKLQALNIKLAEKLLEALARLQELNIALV
YLAVELTDPKRIADEIKKVKDKSKEIVERAEEEIARAAAESKKILDEAEEEIARAAAESKKILDEGSGSGSDAVA
ELQALNLKLAELLLEAVAELQALNLKLAELLLEAIAKLQELNIKLVELLTKLTDPATIREAIRKVKEDSERIVAE
AERLIAAAKAESERIIREAERLIAAAKAESERIIREGSGSGDPDVARLQELNIELARELLRDVARLQELNIELAR
ELLRAAAELQELNIKLVELASELTDPD[EARKAIANWSHPQFEKVEDAERLIREAAAASEKISREAERLIREAAA
ASEKISRE]
>strepLOCKRa_313 (SEQ ID NO: 30)
(MGSSHHHHHHSSGLVPRGSHM)SKEAVIKLQALNIKLAEKLLEAVIKLQALNIKLAEKLLEALARLQELNIALV
YLAVELTDPKRIADEIKKVKDKSKEIVERAEEEIARAAAESKKILDEAEEEIARAAAESKKILDEGSGSGSDAVA
ELQALNLKLAELLLEAVAELQALNLKLAELLLEAIAKLQELNIKLVELLTKLTDPATIREAIRKVKEDSERIVAE
AERLIAAAKAESERIIREAERLIAAAKAESERIIREGSGSGDPDVARLQELNIELARELLRDVARLQELNIELAR
ELLRAAAELQELNIKLVELASELTDPD[EARKAIARNWSHPQFEKEDAERLIREAAAASEKISREAERLIREAAA
ASEKISRE]
>strepLOCKRa_317 (SEQ ID NO: 31)
(MGSSHHHHHHSSGLVPRGSHM)SKEAVIKLQALNIKLAEKLLEAVIKLQALNIKLAEKLLEALARLQELNIALV
YLAVELTDPKRIADEIKKVKDKSKEIVERAEEEIARAAAESKKILDEAEEEIARAAAESKKILDEGSGSGSDAVA
ELQALNLKLAELLLEAVAELQALNLKLAELLLEAIAKLQELNIKLVELLTKLTDPATIREAIRKVKEDSERIVAE
AERLIAAAKAESERIIREAERLIAAAKAESERIIREGSGSGDPDVARLQELNIELARELLRDVARLQELNIELAR
ELLRAAAELQELNIKLVELASELTDPD[EARKAIARVKRENWSHPQFEKRLIREAAAASEKISREAERLIREAAA
ASEKISRE]
>strepLOCKRa_320 (SEQ ID NO: 32)
(MGSSHHHHHHSSGLVPRGSHM)SKEAVIKLQALNIKLAEKLLEAVIKLQALNIKLAEKLLEALARLQELNIALV
YLAVELTDPKRIADEIKKVKDKSKEIVERAEEEIARAAAESKKILDEAEEEIARAAAESKKILDEGSGSGSDAVA
ELQALNLKLAELLLEAVAELQALNLKLAELLLEAIAKLQELNIKLVELLTKLTDPATIREAIRKVKEDSERIVAE
AERLIAAAKAESERIIREAERLIAAAKAESERIIREGSGSGDPDVARLQELNIELARELLRDVARLQELNIELAR
ELLRAAAELQELNIKLVELASELTDPD[EARKAIARVKRESKRNWSHPQFEKREAAAASEKISREAERLIREAAA
ASEKISRE]
>strepLOCKRa_323 (SEQ ID NO: 33)
(MGSSHHHHHHSSGLVPRGSHM)SKEAVIKLQALNIKLAEKLLEAVIKLQALNIKLAEKLLEALARLQELNIALV
YLAVELTDPKRIADEIKKVKDKSKEIVERAEEEIARAAAESKKILDEAEEEIARAAAESKKILDEGSGSGSDAVA
ELQALNLKLAELLLEAVAELQALNLKLAELLLEAIAKLQELNIKLVELLTKLTDPATIREAIRKVKEDSERIVAE
AERLIAAAKAESERIIREAERLIAAAKAESERIIREGSGSGDPDVARLQELNIELARELLRDVARLQELNIELAR
ELLRAAAELQELNIKLVELASELTDPD[EARKAIARVKRESKRIVENWSHPQFEKAAASEKISREAERLIREAAA
ASEKISRE]
>strepLOCKRa_329 (SEQ ID NO: 34)
(MGSSHHHHHHSSGLVPRGSHM)SKEAVIKLQALNIKLAEKLLEAVIKLQALNIKLAEKLLEALARLQELNIALV
YLAVELTDPKRIADEIKKVKDKSKEIVERAEEEIARAAAESKKILDEAEEEIARAAAESKKILDEGSGSGSDAVA
ELQALNLKLAELLLEAVAELQALNLKLAELLLEAIAKLQELNIKLVELLTKLTDPATIREAIRKVKEDSERIVAE
AERLIAAAKAESERIIREAERLIAAAKAESERIIREGSGSGDPDVARLQELNIELARELLRDVARLQELNIELAR
ELLRAAAELQELNIKLVELASELTDPD[EARKAIARVKRESKRIVEDAERLINWSHPQFEKISREAERLIREAAA
ASEKISRE]
>SB13_LOCKR (SEQ ID NO: 35)
(MGSSHHHHHHSSGLVPRGSHM)GSKEAVIKLQALNIKLAEKLLEALARLQELNIALVYLAVELTDPKRIADEIK
KVKDKSKEIVERAEEEIARAAAESKKILDEGSGSGSDAVAELQALNLKLAELLLEAIAKLQELNIKLVELLTKLT
DPATIREAIRKVKEDSERIVAEAERLIAAAKAESERIIREGSGSGDPDVARLQELNIELARELLRAAAELQELNI
KLVELASEGSGSGSG[YELRRALEELEKALRELKKSLDEL [symbol] RSLEEL [symbol] KNPSEDALVENNRLNVENNKIIVEVLR
IIAEVLEINAKS]
>ZCX12_LOCKR (SEQ ID NO: 36)
(MGSSHHHHHHSSGLVPRGSHM)GSKEAVIKLQALNIKLAEKLLEALARLQELNIALVYLAVELTDPKRIADEIK
KVKDKSKEIVERAEEEIARAAAESKKILDEGSGSGSDAVAELQALNLKLAELLLEAIAKLQELNIKLVELLTKLT
DPATIREAIRKVKEDSERIVAEAERLIAAAKAESERIIREGSGSGDPDVARLQELNIELARELLRAAAELQELNI
KLVELASEGSGSGSG[KKLVEEVERALRELLKTSEDLVRKV [symbol] KALRELLELIRRGGTKDKIEERIRRVLEEIKRE
LERQKRKIEDVLRQIKEELYRS]
>SB13_LOCKR_extend18 (SEQ ID NO: 37)
(MGSSHHHHHHSSGLVPRGSHM)SKEAVIKLQALNIKLAEKLLEAVIKLQALNIKLAEKLLEALARLQELNIALV
YLAVELTDPKRIADEIKKVKDKSKEIVERAEEEIARAAAESKKILDEAEEEIARAAAESKKILDEGSGSGSDAVA
ELQALNLKLAELLLEAVAELQALNLKLAELLLEAIAKLQELNIKLVELLTKLTDPATIREAIRKVKEDSERIVAE
AERLIAAAKAESERIIREAERLIAAAKAESERIIREGSGSGDPDVARLQELNIELARELLRDVARLQELNIELAR
ELLRAAAELQELNIKLVELASEGSGSGSG[YELRRALEELEKALRELKKSLDELERSLEELEKNPSEDALVENNR
LNVENNKIIVEVLRIIAEVLEINAKS]
>ZCX12_LOCKR_extend18 (SEQ ID NO: 38)
(MGSSHHHHHHSSGLVPRGSHM)SKEAVIKLQALNIKLAEKLLEAVIKLQALNIKLAEKLLEALARLQELNIALV
YLAVELTDPKRIADEIKKVKDKSKEIVERAEEEIARAAAESKKILDEAEEEIARAAAESKKILDEGSGSGSDAVA
ELQALNLKLAELLLEAVAELQALNLKLAELLLEAIAKLQELNIKLVELLTKLTDPATIREAIRKVKEDSERIVAE
AERLIAAAKAESERIIREAERLIAAAKAESERIIREGSGSGDPDVARLQELNIELARELLRDVARLQELNIELAR
ELLRAAAELQELNIKLVELASEGSGSGSG[KKLVEEVERALRELLKTSEDLVRKVERALRELLELIRRGGTKDKI
EEKIRRVLEEIKRELERQKRKIEDVLRQIKEELYRS
>fretLOCKRa (SEQ ID NO: 39)
(GHHHHHHHHHHGVSKGEELFTGVVPILVELDGDVNGHKFSVSGEGEGDATYGKLTLKFICTTGKLPVPWPTLVT
TLSWGVQCFARYPDHMKQHDFFKSAMPEGYVQERTIFFKDDGNYKTRAEVKFEGDTLVNRIELKGIDFKEDGNIL
GHKLEYNYFSDNVYITADKQKNGIKANFKIRHNIEDGGVQLADHYQQNTPIGDGPVLLPDNHYLSTQSKLSKDPN
EKRDHMVLLEFVTAAGITLGMDELYKGSGCSLQGM)SKEAVTKLQALNIKLAEKLLEAVTKLQALNIKLAEKLLE
ALARLQELNIALVYLAVELTDPKRIADEIKKVKDKSKEIVERAEEEIARAAAESKKILDEAEEEIARAAAESKKI
LDEGSGSGSDAVAELQALNLKLAELLLEAVAELQALNLKLAELLLEAIAKLQELNIKLVELLTKLTDPATIREAI
RKVKEDSERIVAEAERLIAAAKAESERIIREAERLIAAAKAESERIIREGSGSGDPDVARLQELNIELARELLRD
VARLQELNIELARELLRAAAELQELNIKLVELASELTDPD[EARKAIARVKRESKRIVEDAERLIREAAAASEKI
SREAERLIREAAAASEKISRE](VSKGEELFTGVVPILVELDGDVNGHKFSVSGEGEGDATYGKLTLKLICTTGK
LPVPWPTLVTTLGYGVQCFARYPDHMKQHDFFKSAMPEGYVQERTIFFKDDGNYKTRAEVKFEGDTLVNRIELKG
IDFKEDGNILGHKLEYNYNSHNVYITADKQKNGIKANFKIRHNIEDGGVQLADHYQQNTPIGDGPVLLPDNHYLS
YQSKLSKDPNEKRDHMVLLEFVTAAGITLGMDELYK)
>fretLOCKRb (SEQ ID NO: 40)
(MGHHHHHHHHHHGVSKGEELFTGVVPILVELDGDVNGHKFSVSGEGEGDATYGKLTLKFICTTGKLPVPWPTLV
TTLSWGVQCFARYPDHMKQHDFFKSAMPEGYVQERTIFFKDDGNYKTRAEVKFEGDTLVNRIELKGIDFKEDGNI
LGHKLEYNYFSDNVYITADKQKNGIKANFKIRHNIEDGGVQLADHYQQNTPIGDGPVLLPDNHYLSTQSKLSKDP
NEKRDHMVLLEFVTAAGITLGMDELYKGSGCSLQGM)SHAAVIKLSDLNIRLLDKLLQAVIKLTELNAELNRKLI
EALQRLFDLNVALVHLAAELTDPKRIADEIKKVKDKSKEIVERAEEEIARAAAESKKILDEAEEEIARAAAESKK
ILDEGSGSGSDAVAELQALNLKLAELLLEAVAELQALNLKLAELLLEAIAKLQELNIKLVELLTKLTDPATIREA
IRKVKEDSERIVAEAERLIAAAKAESERIIREAERLIAAAKAESERIIREGSGSNDPQVAQNQETFIELARDALR
LVAENQEAFIEVARLTLRAAALAQEVAIKAVEAASEGGSGSG[NKEEIEKLAKEAREKLKKAEKEHKEIHDKLRK
KNKKAREDLKKKADELRETNKRVN](VSKGEELFTGVVPILVELDGDVNGHKFSVSGEGEGDATYGKLTLKLICT
TGKLPVPWPTLVTTLGYGVQCFARYPDHMKQHDFFKSAMPEGYVQERTIFFKDDGNYKTRAEVKFEGDTLVNRIE
LKGIDEKEDGNILGHKLEYNYNSHNVYITADKQKNGIKANFKIRHNIEDGGVQLADHYQQNTPIGDGPVLLPDNH
YLSYQSKLSKDPNEKRDHMVLLEFVTAAGITLGMDELYK)
>fretLOCKRc (SEQ ID NO: 41)
(GHHHHHHHHHHGVSKGEELFTGVVPILVELDGDVNGHKFSVSGEGEGDATYGKLTLKFICTTGKLPVPWPTLVT
TLSWGVQCFARYPDHMKQHDFFKSAMPEGYVQERTIFFKDDGNYKTRAEVKFEGDTLVNRIELKGIDEKEDGNIL
GHKLEYNYFSDNVYITADKQKNGIKANFKIRHNIEDGGVQLADHYQQNTPIGDGPVLLPDNHYLSTQSKLSKDPN
EKRDHMVLLEFVTAAGITLGMDELYKGSGCSLQGM)SLEAVLKLAELNLKLSDKLAEAVQKLAALLNKLLEKLSE
ALQRLFELNVALVTLAIELTDPKRIADEIKKVKDKSKEIVERAEEEIARAAAESKKILDEAEEEIARAAAESKKI
LDEGSGSGSDAVAELQALNLKLAELLLEAVAELQALNLKLAELLLEAIAKLQELNIKLVELLTKLTDPATIREAI
RKVKEDSERIVAEAERLIAAAKAESERIIREAERLIAAAKAESERIIREGSGSNDPLVARLQELLIEHARELLRL
VATSQEIFIELARAFLANAAQLQEAAIKAVEAASENGSGSGS[SEKVRRELKESLKENHKQNQKLLKDHKRAQEK
LNRELEELKKKHKKTLDDIRRES](VSKGEELFTGVVPILVELDGDVNGHKFSVSGEGEGDATYGKLTLKLICTT
GKLPVPWPTLVTTLGYGVQCFARYPDHMKQHDFFKSAMPEGYVQERTIFFKDDGNYKTRAEVKFEGDTLVNRIEL
KGIDFKEDGNILGHKLEYNYNSHNVYITADKQKNGIKANFKIRHNIEDGGVQLADHYQQNTPIGDGPVLLPDNHY
LSYQSKLSKDPNEKRDHMVLLEFVTAAGITLGMDELYK)
>fretLOCKRd (SEQ ID NO: 42)
(GHHHHHHHHHHGVSKGEELFTGVVPILVELDGDVNGHKFSVSGEGEGDATYGKLTLKFICTTGKLPVPWPTLVT
TLSWGVQCFARYPDHMKQHDFFKSAMPEGYVQERTIFFKDDGNYKTRAEVKFEGDTLVNRIELKGIDFKEDGNIL
GHKLEYNYFSDNVYITADKQKNGIKANFKIRHNIEDGGVQLADHYQQNTPIGDGPVLLPDNHYLSTQSKLSKDPN
EKRDHMVLLEFVTAAGITLGMDELYKGSGCSLQGM)SLEAVLKLFELNHKLSEKLLEAVLKLHALNQKLSQKLLE
ALARLLELNVALVELAIELTDPKRIADEIKKVKDKSKEIVERAEEEIARAAAESKKILDEAEEEIARAAAESKKI
LDEGSGSGSDAVAELQALNLKLAELLLEAVAELQALNLKLAELLLEAIAKLQELNIKLVELLTKLTDPATIREAI
RKVKEDSERIVAEAERLIAAAKAESERIIREAERLIAAAKAESERIIREGSGSGDPEVARLQEAFIEQAREILRN
VAAAQEALIEQARRLLALAALAQEAAIKAVELASEHGSGSG[DTVKRILEELRRRFEKLAKDLDDIARKLLEDHK
KHNKELKDKQRKIKKEADDAARS](VSKGEELFTGVVPILVELDGDVNGHKFSVSGEGEGDATYGKLTLKLICTT
GKLPVPWPTLVTTLGYGVQCFARYPDHMKQHDFFKSAMPEGYVQERTIFFKDDGNYKTRAEVKFEGDTLVNRIEL
KGIDFKEDGNILGHKLEYNYNSHNVYITADKQKNGIKANFKIRHNIEDGGVQLADHYQQNTPIGDGPVLLPDNHY
LSYQSKLSKDPNEKRDHMVLLEFVTAAGITLGMDELYK)
>tevLOCKR (SEQ ID NO: 43)
(MGSSHHHHHHSSGLVPRGSHM)SKEAVTKLQALNIKLAEKLLEAVTKLQALNIKLAEKLLEALARLQELNIALV
YLAVELTDPKRIADEIKKVKDKSKEIVERAEEEIARAAAESKKILDEAEEEIARAAAESKKILDEGSGSGSDAVA
ELQALNLKLAELLLEAVAELQALNLKLAELLLEAIAKLQELNIKLVELLTKLTDPATIREAIRKVKEDSERIVAE
AERLIAAAKAESERIIREAERLIAAAKAESERIIREGSGSGDPDVARLQELNIELARELLRDVARLQELNIELAR
ELLRAAAELQELNIKLVELASELTDPD[EARKAIARVKRESKRIVEDAEENLYFQGAASEKISREAERLIREAAA
ASEKISRE]
>spyLOCKR (SEQ ID NO: 44)
(MGSSHHHHHHSSGLVPRGSHM)SKEAVIKLQALNIKLAEKLLEAVIKLQALNIKLAEKLLEALARLQELNIALV
YLAVELTDPKRIADEIKKVKDKSKEIVERAEEEIARAAAESKKILDEAEEEIARAAAESKKILDEGSGSGSDAVA
ELQALNLKLAELLLEAVAELQALNLKLAELLLEAIAKLQELNIKLVELLTKLTDPATIREAIRKVKEDSERIVAE
AERLIAAAKAESERIIREAERLIAAAKAESERIIREGSGSGDPDVARLQELNIELARELLRDVARLQELNIELAR
ELLRAAAELQELNIKLVELASELTDPD[EARAHIVMVDAYKKRIVEDAERLIREAAAASEKISREAERLIREAAA
ASEKISRE]
>1_nesLOCKR (SEQ ID NO: 45)
SKEAVTKLQALNIKLAEKLLEAVTKLQALNIKLAEKLLEALARLQELNIALVYLAVELTDPKRIADEIKKVKDKS
KEIVERAEEEIARAAAESKKILDEAEEEIARAAAESKKILDEGSGSGSDAVAELQALNLKLAELLLEAVAELQAL
NLKLAELLLEAIAKLQELNIKLVELLTKLTDPATIREAIRKVKEDSERIVAEAERLIAAAKAESERIIREAERLI
AAAKAESERIIREGSGSGDPDVARLQELNIELARELLRDVARLQELNIELARELLRAAAELQELNIKLVELASEL
TDPD[EARKAIARVKRESKRIVEDLALKLAGLDINSEKISREAERLIREAAAASEKISRE]
>2_nesLOCKR (SEQ ID NO: 46)
SKEAVTKLQALNIKLAEKLLEAVTKLQALNIKLAEKLLEALARLQELNIALVYLAVELTDPKRIADEIKKVKDKS
KEIVERAEEEIARAAAESKKILDEAEEEIARAAAESKKILDEGSGSGSDAVAELQALNLKLAELLLEAVAELQAL
NLKLAELLLEAIAKLQELNIKLVELLTKLTDPATIREAIRKVKEDSERIVAEAERLIAAAKAESERIIREAERLI
AAAKAESERIIREGSGSGDPDVARLQELNIELARELLRDVARLQELNIELARELLRAAAELQELNIKLVELASEL
TDPD[EARKAIARVKRESKRIVEDAERLIRELAEKLAGLDINAERLIREAAAASEKISRE]
>3_nesLOCKR (SEQ ID NO: 47)
SKEAVTKLQALNIKLAEKLLEAVTKLQALNIKLAEKLLEALARLQELNIALVYLAVELTDPKRIADEIKKVKDKS
KEIVERAEEEIARAAAESKKILDEAEEEIARAAAESKKILDEGSGSGSDAVAELQALNLKLAELLLEAVAELQAL
NLKLAELLLEAIAKLQELNIKLVELLTKLTDPATIREAIRKVKEDSERIVAEAERLIAAAKAESERIIREAERLI
AAAKAESERIIREGSGSGDPDVARLQELNIELARELLRDVARLQELNIELARELLRAAAELQELNIKLVELASEL
TDPD[EARKAIARVKRESKELAEKLRAGLDLNAAASEKISREAERLIREAAAASEKISRE]
>nlsLOCKR (SEQ ID NO: 48)
SKEAVTKLQALNIKLAEKLLEAVTKLQALNIKLAEKLLEALARLQELNIALVYLAVELTDPKRIADEIKKVKDKS
KEIVERAEEEIARAAAESKKILDEAEEEIARAAAESKKILDEGSGSGSDAVAELQALNLKLAELLLEAVAELQAL
NLKLAELLLEAIAKLQELNIKLVELLTKLTDPATIREAIRKVKEDSERIVAEAERLIAAAKAESERIIREAERLI
AAAKAESERIIREGSGSGDPDVARLQELNIELARELLRDVARLQELNIELARELLRAAAELQELNIKLVELASEL
TDPD[EARKAIARVKRESKAAAKRARTSIREAAAASEKISREAERLIREAAAASEKISRE]
>ezh2LOCKR (SEQ ID NO: 49)
(MGSSHHHHHHSSGLVPRGSHM)SKEAVTKLQALNIKLAEKLLEAVTKLQALNIKLAEKLLEALARLQELNIALV
YLAVELTDPKRIADEIKKVKDKSKEIVERAEEEIARAAAESKKILDEAEEEIARAAAESKKILDEGSGSGSDAVA
ELQALNLKLAELLLEAVAELQALNLKLAELLLEAIAKLQELNIKLVELLTKLTDPATIREAIRKVKEDSERIVAE
AERLIAAAKAESERIIREAERLIAAAKAESERIIREGSGSGDPDVARLQELNIELARELLRDVARLQELNIELAR
ELLRAAAELQELNIKLVELASELTDPD[EARKAIARVKTMFSSNRQKILERTETLNQEWKQRRIQAERLIREAAA
ASEKISRE]
>1fix_VMAc_C_BIMlatcht9 (SEQ ID NO: 51)
(MGSHHHHHHGSGSENLYFQG)SKEAAKKLQDLNIELARKLLEASTKLQRLNIRLAEALLEAIARLQELNLELVY
LAVELTDPKRIRDEIKEVKDKSKEIIRRAEKEIDDAAKESKKILEEARKAIRDAAEESRKILEEGSGSGSDALDE
LQKLNLELAKLLLKAIAETQDLNLRAAKAFLEAAAKLQELNIRAVELLVKLTDPATIRRALEHAKRRSKEIIDEA
ERAIRAAKRESERIIEEARRLIEKAKEESERIIREGSGSGDPDIKKLQDLNIELARELLRAHAQLQRLNLELLRE
LLRALAQLQELNLDLLRLASELTGGSGGSGGS(VLLNVLSKCAGSKKFRPAPAAAFARECRGFYFELQELKEDDY
YGITLSDDSDHQFLLANQVVVHNC)GGSGGS[DEIWIAQELRRIGDEFNAYYADAERLIREAAAASEKISREAER
LIREAA]
>sfGFP_VMAn_1fix_BIM_t0_latch (SEQ ID NO: 52)
(MGSHHHHHHGSGSENLYFQG)HMSKGEELFTGVVPILVELDGDVNGHKFSVRGEGEGDATNGKLILKFICTTGK
LPVPWPTLVTTLTYGVQCFARYPDHMKQHDFFKSAMPEGYVQERTISFKDDGTYKTRAEVKFEGDTLVNRIELKG
IDFKEDGNILGHKLEYNFNSHNVYITADKQKNGIKANFKIRHNVEDGSVQLADHYQQNTPIGDGPVLLPDNHYLS
TQSVLSKDPNEKRDHMVLLEFVTAAGITHGMDELYKSGSGSGCFAKGTNVLMADGSIECIENIEVGNKVMGKDGR
PREVIKLPRGRETMYSVVQKSQHRAHKSDSSREVPELLKFTCNATHELVVRTPRSVRRLSRTIKGVEYFEVITFE
MGQKKAPDGRIVELVKEVSKSYPISEGPERANELVESYRKASNKAYFEWTIEARDLSLLGSHVRKATYQTYAPIL
YGGSGGSGGGGSGGSGSKEAAKKLQDLNIELARKLLEASTKLQRLNIRLAEALLEAIARLQELNLELVYLAVELT
DPKRIRDEIKEVKDKSKEIIRRAEKEIDDAAKESKKILEEARKAIRDAAEESRKILEEGSGSGSDALDELQKLNL
ELAKLLLKAIAETQDLNLRAAKAFLEAAAKLQELNIRAVELLVKLTDPATIRRALEHAKRRSKEIIDEAERAIRA
AKRESERIIEEARRLIEKAKEESERIIREGSGSGDPDIKKLQDLNIELARELLRAHAQLQRLNLELLRELLRALA
QLQELNLDLLRLASELT[DEIWIAQELRRIGDEFNAYYADAERLSREAAAASEKISREAERSIREAAAASEKISR
E]
Asymmetrized functional Cages encoding Bim and GFP11 (i.e.: bioactive
peptides)
(6His-MBP-TEV, 6His-TEV, and flexible linker sequences are underlined text)
(Co-localization domain is bolded text)
(Functional peptide is italicized underlined text)
(Positions that can be mutated to any amino acid to tune responsiveness are
underlined bolded text)
(C-terminal sequences that can be removed to tune responsiveness are
italicized text)
(all sequences in parentheses are optional)
>1fix-long-BIM-t0 (SEQ ID NO: 54)
(MGSHHHHHHGSGSENLYFQG)SKEAAKKLQDLNIELARKLLEASTKLQRLNIRLAEALLEAIARLQELNLELVY
LAVELTDPKRIRDEIKEVKDKSKEIIRRAEKEIDDAAKESKKILEEARKAIRDAAEESRKILEEGSGSGSDALDE
LQKLNLELAKLLLKAIAETQDLNLRAAKAFLEAAAKLQELNIRAVELLVKLTDPATIRRALEHAKRRSKEIIDEA
ERAIRAAKRESERIIEEARRLIEKAKEESERIIREGSGSGDPDIKKLQDLNIELARELLRAHAQLQRLNLELLRE
LLRALAQLQELNLDLLRLASEL(TD[EIWIAQELRRIGDEFNAYYA)DAERLIREAAAASEKISREAERLIREAA
AASEKISRE]
>1fix-long-GFP-t0 (SEQ ID NO: 55)
(MGSHHHHHHGSGSENLYFQG)SKEAAKKLQDLNIELARKLLEASTKLQRLNIRLAEALLEAIARLQELNLELVY
LAVELTDPKRIRDEIKEVKDKSKEIIRRAEKEIDDAAKESKKILEEARKAIRDAAEESRKILEEGSGSGSDALDE
LQKLNLELAKLLLKAIAETQDLNLRAAKAFLEAAAKLQELNIRAVELLVKLTDPATIRRALEHAKRRSKEIIDEA
ERAIRAAKRESERIIEEARRLIEKAKEESERIIREGSGSGDPDIKKLQDLNIELARELLRAHAQLQRLNLELLRE
LLRALAQLQELNLDLLRLASEL[(RDHMVLHEYVNAAGITFNAYYA)DAERLIREAAAASEKISREAERLIREAA
AASEKISRE]
>1fix-short-BIM-t0 (SEQ ID NO: 56)
(MGSHHHHHHGSGSENLYFQGSGG)SELARKLLEASTKLQRLNIRLAEALLEAIARLQELNLELVYLAVELTDPK
RIRDEIKEVKDKSKEIIRRAEKEIDDAAKESEKILEEAREAISGSGSELAKLLLKAIAETQDLNLRAAKAFLEAA
AKLQELNIRAVELLVKLTDPATIREALEHAKRRSKEIIDEAERAIRAAKRESERIIEEARRLIEKGSGSGSELAR
ELLRAHAQLQRLNLELLRELLRALAQLQELNLDLLRLASEL(TD[EIWIAQELRRIGDEFNAYYA)DAERLIREA
AAASEKISREAERLIR]
>1fix-short-GFP-t0 (SEQ ID NO: 57)
(MGSHHHHHHGSGSENLYFQGSGG)SELARKLLEASTKLQRLNIRLAEALLEAIARLQELNLELVYLAVELTDPK
RIRDEIKEVKDKSKEIIRRAEKEIDDAAKESEKILEEAREAISGSGSELAKLLLKAIAETQDLNLRAAKAFLEAA
AKLQELNIRAVELLVKLTDPATIREALEHAKRRSKEIIDEAERAIRAAKRESERIIEEARRLIEKGSGSGSELAR
ELLRAHAQLQRLNLELLRELLRALAQLQELNLDLLRLASEL[(RDHMVLHEYVNAAGITFNAYYA)DAERLIREA
AAASEKISREAERLIR]
>Spycatcher-1fix-long-GFP-t0 (SEQ ID NO: 58)
(MGSHHHHHHGSGSENLYFQGS)AMVDTLSGLSSEQGQSGDMTIEEDSATHIKFSKRDEDGKELAGATMELRDSS
GKTISTWISDGQVKDFYLYPGKYTFVETAAPDGYEVATAITFTVNEQGQVTVNGKATKGSGGSKEAAKKLQDLNI
ELARKLLEASTKLQRLNIRLAEALLEAIARLQELNLELVYLAVELTDPKRIRDEIKEVKDKSKEIIRRAEKEIDD
AAKESKKILEEARKAIRDAAEESRKILEEGSGSGSDALDELQKLNLELAKLLLKAIAETQDLNLRAAKAFLEAAA
KLQELNIRAVELLVKLTDPATIRRALEHAKRRSKEIIDEAERAIRAAKRESERIIEEARRLIEKAKEESERIIRE
GSGSGDPDIKKLQDLNIELARELLRAHAQLQRLNLELLRELLRALAQLQELNLDLLRLASEL[(RDHMVLHEYVN
AAGITFNAYYA)DAERLIREAAAASEKISREAERLIREAAAASEKISRE]
>Spycatcher-1fix-short-GFP-t0 (SEQ ID NO: 59)
(MGSHHHHHHGSGSENLYFQGS)AMVDTLSGLSSEQGQSGDMTIEEDSATHIKESKRDEDGKELAGATMELRDSS
GKTISTWISDGQVKDFYLYPGKYTFVETAAPDGYEVATAITFTVNEQGQVTVNGKATKGSGGSELARKLLEASTK
LQRLNIRLAEALLEAIARLQELNLELVYLAVELTDPKRIRDEIKEVKDKSKEIIRRAEKEIDDAAKESEKILEEA
REAISGSGSELAKLLLKAIAETQDLNLRAAKAFLEAAAKLQELNIRAVELLVKLTDPATIREALEHAKRRSKEII
DEAERAIRAAKRESERIIEEARRLIEKGSGSGSELARELLRAHAQLQRLNLELLRELLRALAQLQELNLDLLRLA
SEL[(RDHMVLHEYVNAAGITFNAYYA)DAERLIREAAAASEKISREAERLIR]
>1fix-latch_Mad1SID_t0_1 (SEQ ID NO: 61)
(MGSHHHHHHGSGSENLYFQG)SKEAAKKLQDLNIELARKLLEASTKLQRLNIRLAEALLEAIARLQELNLELVY
LAVELTDPKRIRDEIKEVKDKSKEIIRRAEKEIDDAAKESKKILEEARKAIRDAAEESRKILEEGSGSGSDALDE
LQKLNLELAKLLLKAIAETQDLNLRAAKAFLEAAAKLQELNIRAVELLVKLTDPATIRRALEHAKRRSKEIIDEA
ERAIRAAKRESERIIEEARRLIEKAKEESERIIREGSGSGDPDIKKLQDLNIELARELLRAHAQLQRLNLELLRE
LLRALAQLQELNLDLLRLASELT[(NIQMLLEAADYLE)RESKRIVEDAERLIREAAAASEKISREAERSIREAA
AASEKISRE]
>1fix-1atch_Mad1SID_T0_2 (SEQ ID NO: 65)
(MGSHHHHHHGSGSENLYFQG)SKEAAKKLQDLNIELARKLLEASTKLQRLNIRLAEALLEAIARLQELNLELVY
LAVELTDPKRIRDEIKEVKDKSKEIIRRAEKEIDDAAKESKKILEEARKAIRDAAEESRKILEEGSGSGSDALDE
LQKLNLELAKLLLKAIAETQDLNLRAAKAFLEAAAKLQELNIRAVELLVKLTDPATIRRALEHAKRRSKEIIDEA
ERAIRAAKRESERIIEEARRLIEKAKEESERIIREGSGSGDPDIKKLQDLNIELARELLRAHAQLQRLNLELLRE
LLRALAQLQELNLDLLRLASELTDP[DEARK(NIQMLLEAADYLE)EDAERLIREAAAASEKISREAERLIREAA
SEKISRE]
>1fix-short-Bim-t0-relooped (SEQ ID NO: 67)
[MDEARKAIARVKRESKRI(EIWIAQELRRIGDEFNAYYA)EAEKLAT]DELWHRLLEASTKLQRLNIRLAEALL
EAIARLQELNLELVYLAVELTDPKRIRDEIKEVKDKSKEIIRRAEKEIDDAAKESEKILEEAREAISGSGSELAK
LLLKAIAETQDLNLRAAKAFLEAAAKLQELNIRAVELLVKLTDPATIREALEHAKRRSKEIIDEAERAIRAAKRE
SERIIEEARRLIEKGSGSGSELARELLRAHAQLQRLNLELLRELLRALAQLQELNLDLLRLASE
>1fix-short-spytag-t0_2 (SEQ ID NO: 68)
(MGSSHHHHHHSSGLVPRGSHM)SELARKLLEASTKLQRLNIRLAEALLEAIARLQELNLELVYLAVELTDPKRI
RDEIKEVKDKSKEIIRRAEKEIDDAAKESEKILEEAREAISGSGSELAKLLLKAIAETQDLNLRAAKAFLEAAAK
LQELNIRAVELLVKLTDPATIREALEHAKRRSKEIIDEAERAIRAAKRESERIIEEARRLIEKGSGSGSELAREL
LRAHAQLQRLNLELLRELLRALAQLQELNLDLLRLASELTDPD[EAR(AHIVMVDAYK)KRIVEDAERLIREAAA
ASEKISREAERLIR]
>1fix-short-spytag-t0_8 (SEQ ID NO: 69)
(MGSSHHHHHHSSGLVPRGSHM)SELARKLLEASTKLQRLNIRLAEALLEAIARLQELNLELVYLAVELTDPKRI
RDEIKEVKDKSKEIIRRAEKEIDDAAKESEKILEEAREAISGSGSELAKLLLKAIAETQDLNLRAAKAFLEAAAK
LQELNIRAVELLVKLTDPATIREALEHAKRRSKEIIDEAERAIRAAKRESERIIEEARRLIEKGSGSGSELAREL
LRAHAQLQRLNLELLRELLRALAQLQELNLDLLRLASELTDPD[EARKAIARVKRESK(AHIVMVDAYK)REAAA
ASEKISREAERLIR]
>1fix-short-TEV-t0_1 (SEQ ID NO: 70)
(MGSSHHHHHHSSGLVPRGSHM)SELARKLLEASTKLQRLNIRLAEALLEAIARLQELNLELVYLAVELTDPKRI
RDEIKEVKDKSKEIIRRAEKEIDDAAKESEKILEEAREAISGSGSELAKLLLKAIAETQDLNLRAAKAFLEAAAK
LQELNIRAVELLVKLTDPATIREALEHAKRRSKEIIDEAERAIRAAKRESERIIEEARRLIEKGSGSGSELAREL
LRAHAQLQRLNLELLRELLRALAQLQELNLDLLRLASELTDP[DEAR(ENLYFQGS)ESKRIVEDAERLIREAAA
ASEKISREAERLIR]
>1fix-short-TEV-t0_6 (SEQ ID NO: 71)
(MGSSHHHHHHSSGLVPRGSHM)SELARKLLEASTKLQRLNIRLAEALLEAIARLQELNLELVYLAVELTDPKRI
RDEIKEVKDKSKEIIRRAEKEIDDAAKESEKILEEAREAISGSGSELAKLLLKAIAETQDLNLRAAKAFLEAAAK
LQELNIRAVELLVKLTDPATIREALEHAKRRSKEIIDEAERAIRAAKRESERIIEEARRLIEKGSGSGSELAREL
LRAHAQLQRLNLELLRELLRALAQLQELNLDLLRLASELTDP[DEARKAIARVKRESKRIV(ENLYFQGS)EAAA
ASEKISREAERLIR]
>1fix-short-nanoBit-t0_1 (SEQ ID NO: 72)
(MGSSHHHHHHSSGLVPRGSHM)SELARKLLEASTKLQRLNIRLAEALLEAIARLQELNLELVYLAVELTDPKRI
RDEIKEVKDKSKEIIRRAEKEIDDAAKESEKILEEAREAISGSGSELAKLLLKAIAETQDLNLRAAKAFLEAAAK
LQELNIRAVELLVKLTDPATIREALEHAKRRSKEIIDEAERAIRAAKRESERIIEEARRLIEKGSGSGSELAREL
LRAHAQLQRLNLELLRELLRALAQLQELNLDLLRLASELTDP[DEAR(VSGWRLFKKIS)RIVEDAERLIREAAA
ASEKISREAERLIR]
>1fix-short-nanoBit-t0_3 (SEQ ID NO: 73)
(MGSSHHHHHHSSGLVPRGSHM)SELARKLLEASTKLQRLNIRLAEALLEAIARLQELNLELVYLAVELTDPKRI
RDEIKEVKDKSKEIIRRAEKEIDDAAKESEKILEEAREAISGSGSELAKLLLKAIAETQDLNLRAAKAFLEAAAK
LQELNIRAVELLVKLTDPATIREALEHAKRRSKEIIDEAERAIRAAKRESERIIEEARRLIEKGSGSGSELAREL
LRAHAQLQRLNLELLRELLRALAQLQELNLDLLRLASELTDP[DEARKAIARVKRESK(VSGWRLFKKIS)EAAA
ASEKISREAERLIR]
>1fix-short-RHIM-t0_8 (SEQ ID NO: 74)
(MGSSHHHHHHSSGLVPRGSHM)SELARKLLEASTKLQRLNIRLAEALLEAIARLQELNLELVYLAVELTDPKRI
RDEIKEVKDKSKEIIRRAEKEIDDAAKESEKILEEAREAISGSGSELAKLLLKAIAETQDLNLRAAKAFLEAAAK
LQELNIRAVELLVKLTDPATIREALEHAKRRSKEIIDEAERAIRAAKRESERIIEEARRLIEKGSGSGSELAREL
LRAHAQLQRLNLELLRELLRALAQLQELNLDLLRLASELTDP[DEARKAI(IQIG)RESKRIVEDAERLIREAAA
ASEKIS(VQLG)RLIR]
>1fix-short-RHIM-t0_19 (SEQ ID NO: 75)
(MGSSHHHHHHSSGLVPRGSHM)SELARKLLEASTKLQRLNIRLAEALLEAIARLQELNLELVYLAVELTDPKRI
RDEIKEVKDKSKEIIRRAEKEIDDAAKESEKILEEAREAISGSGSELAKLLLKAIAETQDLNLRAAKAFLEAAAK
LQELNIRAVELLVKLTDPATIREALEHAKRRSKEIIDEAERAIRAAKRESERIIEEARRLIEKGSGSGSELAREL
LRAHAQLQRLNLELLRELLRALAQLQELNLDLLRLASELTDP[DEARKAIARVKRESKRIV(IQIG)RLI
(VQLG)AASEKISREAERLIR]
>1fix-short-RHIM-t0_22 (SEQ ID NO: 76)
(MGSSHHHHHHSSGLVPRGSHM)SELARKLLEASTKLQRLNIRLAEALLEAIARLQELNLELVYLAVELTDPKRI
RDEIKEVKDKSKEIIRRAEKEIDDAAKESEKILEEAREAISGSGSELAKLLLKAIAETQDLNLRAAKAFLEAAAK
LQELNIRAVELLVKLTDPATIREALEHAKRRSKEIIDEAERAIRAAKRESERIIEEARRLIEKGSGSGSELAREL
LRAHAQLQRLNLELLRELLRALAQLQELNLDLLRLASELTDP[DEARKAIARVKRESKRIV(IQIG)RLIREAAA
ASEKIS(VQLG)RLIR]
>1fix-short-gcn4-t0_4 (SEQ ID NO: 77)
(MGSSHHHHHHSSGLVPRGSHM)SELARKLLEASTKLQRLNIRLAEALLEAIARLQELNLELVYLAVELTDPKRI
RDEIKEVKDKSKEIIRRAEKEIDDAAKESEKILEEAREAISGSGSELAKLLLKAIAETQDLNLRAAKAFLEAAAK
LQELNIRAVELLVKLTDPATIREALEHAKRRSKEIIDEAERAIRAAKRESERIIEEARRLIEKGSGSGSELAREL
LRAHAQLQRLNLELLRELLRALAQLQELNLDLLRLASELTDP[DESVKE(LEDKVEELLSKNYHLENEVARLKKL
VGER)SREAERLIR]
>1fix-short-ccDi-t0_6 (SEQ ID NO: 78)
(MGSSHHHHHHSSGLVPRGSHM)SELARKLLEASTKLQRLNIRLAEALLEAIARLQELNLELVYLAVELTDPKRI
RDEIKEVKDKSKEIIRRAEKEIDDAAKESEKILEEAREAISGSGSELAKLLLKAIAETQDLNLRAAKAFLEAAAK
LQELNIRAVELLVKLTDPATIREALEHAKRRSKEIIDEAERAIRAAKRESERIIEEARRLIEKGSGSGSELAREL
LRAHAQLQRLNLELLRELLRALAQLQELNLDLLRLASELTDP[DEARKAIA(GEIAALKQEIAALKKENAALKWE
IAALKQG)AERLIR]
>1fix-short-cc-a-t0_6 (SEQ ID NO: 79)
(MGSSHHHHHHSSGLVPRGSHM)SELARKLLEASTKLQRLNIRLAEALLEAIARLQELNLELVYLAVELTDPKRI
RDEIKEVKDKSKEIIRRAEKEIDDAAKESEKILEEAREAISGSGSELAKLLLKAIAETQDLNLRAAKAFLEAAAK
LQELNIRAVELLVKLTDPATIREALEHAKRRSKEIIDEAERAIRAAKRESERIIEEARRLIEKGSGSGSELAREL
LRAHAQLQRLNLELLRELLRALAQLQELNLDLLRLASELTDP[DEARKAIARVKR(GLEQEIAALEKENAALEWE
IAALEQGG)ERLIR]
>1fix-short-cc-b-t0_6 (SEQ ID NO: 80)
(MGSSHHHHHHSSGLVPRGSHM)SELARKLLEASTKLQRLNIRLAEALLEAIARLQELNLELVYLAVELTDPKRI
RDEIKEVKDKSKEIIRRAEKEIDDAAKESEKILEEAREAISGSGSELAKLLLKAIAETQDLNLRAAKAFLEAAAK
LQELNIRAVELLVKLTDPATIREALEHAKRRSKEIIDEAERAIRAAKRESERIIEEARRLIEKGSGSGSELAREL
LRAHAQLQRLNLELLRELLRALAQLQELNLDLLRLASELTDP[DEARKAIARVKR(GLKQKIAALKYKNAALKKK
IAALKQGG)ERLIR
STREPII-LOCKR functional Cages:
>STREPII-2plus1_LOCK_1 (SEQ ID NO: 81)
SRVEEIIEDLRRLLEEIRKENADSIRASKELLDRVKEINDTIIAELERLLKDIEKEVREKGSESEEVKKALRRVL
EELEKLLRRVAEINEEVLRRNSKLVEEDARRNAEVLKELKRLVEELMREIGDED[KVRKVAEVAEKVLRDIDKLD
R(WSHPQFEK)TNGEISKLDEDIRRVAERVKKAIEDLAK]
>STREPII-2plus1_LOCK_2 (SEQ ID NO: 82)
[SEVDEIIADNERALDEVRREVEEIDKENAERLGE(WSHPQFEK)GDRLAKALEEIRK]GVRSRLVDELERAIRE
VEEVIRRVLERVRRLIEEVSKIITDVLREVERLHEEVTKELRKVEDGNSREALDALRRLIEKVVEDSARLIKKVD
EALKAVNKEIEDLSREVADLVRAVAEELDARVK
>STREPII-2plus1_LOCK_3 (SEQ ID NO: 83)
SSDEVLKEIEEIIRRLEAEVRRVNAEVNASTEDLAREVEEVLRATNELIEELERRVIGTEELKRVIDELRDRDRK
VRRRVERVIEESAKRDDESRKRLTRAVEKLRADLKKLADDGVPE[EALSKAIKDVRDIVKKVKDELKE(WSHPQF
EK)VDRLSEELKEWLKDVERVLKELTDKDR]
>STREPII-2plus1_LOCK_4C (SEQ ID NO: 84)
SDAEELLKRVADLLKASLESLEKILRDSKELMDRWRKKLEDLLRESEELVDRAEKILRRGGSDKEVLDKIAEEVR
RTNDDSRRLDEELHRLSRDTLRKLEENLRRTEKEVREMDKRAAERG[VDERVREELKKLLTRVE(WSHPQFEK)G
DKKILKEAHKESKEVNDRDRELLERLEESVR]
>STREPII-2plus1_LOCK_4N (SEQ ID NO: 85)
[SDAEELLKRVADLLKASLESLEKILRDSKELMDR(WSHPQFEK)LGESEELVDRAEKILRR]GGSDKEVLDKIA
EEVRRTNDDSRRLDEELHRLSRDTLRKLEENLRRTEKEVREMDKRAAERGVDERVREELKKLLTRVEEEHRKVLE
TDKKILKEAHKESKEVNDRDRELLERLEESVR
>STREPII-3plus1_LOCK_1 (SEQ ID NO: 86)
SEAEDLLERVKRVLDELIEIVDRNHELNARVVETSARLVERLLEEVERALETLEREIPGRELLDKAIKDLRDVLR
RVAEKVKRSIEELKEVLEESRRVLEEVVRALAEVIDRVRRLVEKGVDLRDLIRELKRVLEEAVSLIERLVRLNIR
AAEKDNESLRELVRAIKEALKRAVDMVRADGL[DSRLVKKLDEIVKEVAKKLEDVVRANEEL(WSHPQFEK)GSS
VARLREAVERVARDLEETAR]
>STREPII-3plus1_LOCK_2 (SEQ ID NO: 87)
[SDEERLEKVVKDVIEKVRRILEK(WSHPQFEK)GSELRRILEEWEKIIREVLDKVRR]GSGSADALVEVLEEIL
RLAEELSKRVEEVLREILKLAKALSDELVKVLAEIVEAAKRISRDDELRKAVEDVARELEDLAAKDRKILDDVRE
ALERIAKEDKDILREAEETLRRLADEMRRSGVDERLLKRVVDILARLLELNATTIERLLRILEELLKLNKELAER
VIRVLEKLLEEIKR
>STREPII-3plus1_LOCK_3 (SEQ ID NO: 88)
SVLETVKKALEDSSEKIERIVEEDERVAKESSDRIRRLVEEDKRVADEILDLIEKGGDIDTLAKLVEEWSRTSKK
LLDDVLKLHKDWSDDSRRLLEEILRVHEELIRAVKEILDRGGKPEEVVRELEKVLKESLDTLEEIIRRLDEANAR
TVKRVADVIRELEDANAKVLEEIERKGD[DKDAVIKVIEELIRANAAV(WSHPQFEK)GDLVRVNKTVWKELLRV
NEKLARDLERVVK]
>STREPII-3plus1_LOCK_4 (SEQ ID NO: 89)
[SLVDELRKSLERNVRVSEEVARRLKEALGR(WSHPQFEK)GGDLIRLNEDVVRVVEKV]GVDESAIERVRRIIE
ELNRALDAVLKKNEDLVRRLTELLDKLLEENRRLVEELDEDLKRRGGTEEVIDTILELIERSIERLKRLLDELLR
IVREALKDNARVADENLKALKEILDELRKDGVSDEELKRVLEKAADLHARLKDAHRKLLEDLERIIRELKKKLDE
VVEENKRSVDELKR
>STREPII-3plus1_LOCK_3-relooped (SEQ ID NO: 90)
[MKDAVIKVIEELIRANAAV(WSHPQFEK)GDLVRVNKTVWKELLRVNEKLARDLERAL]DERDVSAWETVKKAL
EDSSEKIERIVEEDERVAKESSDRIRRLVEEDKRVADEILDLIEKGGDTDTLAKLVEEWSRTSKKLLDDVLKLHK
DWSDDSRRLLEEILRVHEELIRAVKEILDRGGAPEEVVRELEKVLKESLDTLEEIIRRLDEANARTVKRVADVIR
ELEDANAKVLEEIERK
>STREPII-2plus1_LOCK_3-relooped (SEQ ID NO: 91)
[MEEAASKAIKDVRDIVKKVKDELKE(WSHPQFEK)VDRLSEELKEWLKDVERVLKELT]DREEASEEELKRVID
ELRDRDRKVRRRVERVIEESAKRDDESRKRLTRAVEKLRADLKKLSVEGASDEVLKEIEEIIRRLEAEVRRVNAE
VNASTEDLAREVEEVLRATNELIEELERR
>BimLOCKR a_short_Nterm (SEQ ID NO: 27094)
[MDEARKAIARVKRESKRI(EIWIAQELRRIGDEFNAYYA)EAEKLATDEL]WHRLLEASTKLQRLNIRLAEALL
EAIARLQELNLELVYLAVELTDPKRIRDEIKEVKDKSKEIIRRAEKEIDDAAKESEKILEEAREAISGSGSELAK
LLLKAIAETQDLNLRAAKAFLEAAAKLQELNIRAVELLVKLTDPATIREALEHAKRRSKEIIDEAERAIRAAKRE
SERIIEEARRLIEKGSGSGSELARELLRAHAQLQRLNLELLRELLRALAQLQELNLDLLRLASE
>BimLOCKR_g (SEQ ID NO: 27095)
[MSLVDEL(EIWIAQELRRIGDEFNAYYA)ALKRWVDVVRKVVEDLIRLNEDVVRVVEKV]GVDESAIERVRRII
EELNRALDAVLKKNEDLVRRLTELLDKLLEENRRLVEELDEDLKRRGGTEEVIDTILELIERSIERLKRLLDELL
RIVREALKDNARVADENLKALKEILDELRKDGVSDEELKRVLEKAADLHARLKDAHRKLLEDLERIIRELKKKLD
EVVEENKRSVDELKR
>reloop_strepLOCKRh (SEQ ID NO: 27096)
[MKDAVIKVIEELIRANAAV(WSHPQFEK)GDLVRVNKTVWKELLRVNEKLARDLERALDER]DVSAWETVKKAL
EDSSEKIERIVEEDERVAKESSDRIRRLVEEDKRVADEILDLIEKGGDTDTLAKLVEEWSRTSKKLLDDVLKLHK
DWSDDSRRLLEEILRVHEELIRAVKEILDRGGAPEEVVRELEKVLKESLDTLEEIIRRLDEANARTVKRVADVIR
ELEDANAKVLEEIERK
>reloop_strepLOCKRi (SEQ ID NO: 27097)
[MEEAASKAIKDVRDIVKKVKDELKE(WSHPQFEK)VDRLSEELKEWLKDVERVLKELTDREEA]SEEELKRVID
ELRDRDRKVRRRVERVIEESAKRDDESRKRLTRAVEKLRADLKKLSVEGASDEVLKEIEEIIRRLEAEVRRVNAE
VNASTEDLAREVEEVLRATNELIEELERR
>spyLOCKRa_2 (SEQ ID NO: 27098)
MSELARKLLEASTKLQRLNIRLAEALLEAIARLQELNLELVYLAVELTDPKRIRDEIKEVKDKSKEIIRPAEKEI
DDAAKESEKILEEAREAISGSGSELAKLLLKAIAETQDLNLRAAKAFLEAAAKLQELNIRAVELLVKLTDPATIR
EALEHAKRRSKEIIDEAERAIRAAKRESERIIEEARRLIEKGSGSGSELARELLRAHAQLQRLNLELLRELLRAL
AQLQELNLDLLRLASELTDP[DEAR(AHIVMVDAYK)KRIVEDAERLIREAAAASEKISREAERLIR]
>spyLOCKRa_8 (SEQ ID NO: 27099)
MSELARKLLEASTKLQRLNIRLAEALLEAIARLQELNLELVYLAVELTDPKRIRDEIKEVKDKSKEIIRRAEKEI
DDAAKESEKILEEAREAISGSGSELAKLLLKAIAETQDLNLRAAKAFLEAAAKLQELNIRAVELLVKLTDPATIR
EALEHAKRRSKEIIDEAERAIRAAKRESERIIEEARRLIEKGSGSGSELARELLRAHAQLQRLNLELLRELLRAL
AQLQELNLDLLRLASELTDPDEARKAIARVKRESK(AHIVMVDAYK)REAAAASEKISREAERLIR]
>tevLOCKRa_1 (SEQ ID NO: 27100)
MSELARKLLEASTKLQRLNIRLAEALLEAIARLQELNLELVYLAVELTDPKRIRDEIKEVKDKSKEIIRRAEKEI
DDAAKESEKILEEAREAISGSGSELAKLLLKAIAETQDLNLRAAKAFLEAAAKLQELNIRAVELLVKLTDPATIR
EALEHAKRRSKEIIDEAERAIRAAKRESERIIEEARRLIEKGSGSGSELARELLRAHAQLQRLNLELLRELLRAL
AQLQELNLDLLRLASELTDP[DEAR(ENLYFQGS)ESKRIVEDAERLIREAAAASEKISREAERLIR]
>tevLOCKRa_6 (SEQ ID NO: 27101)
MSELARKLLEASTKLQRLNIRLAEALLEAIARLQELNLELVYLAVELTDPKRIRDEIKEVKDKSKEIIRRAEKEI
DDAAKESEKILEEAREAISGSGSELAKLLLKAIAETQDLNLRAAKAFLEAAAKLQELNIRAVELLVKLTDPATIR
EALEHAKRRSKEIIDEAERAIRAAKRESERIIEEARRLIEKGSGSGSELARELLRAHAQLQRLNLELLRELLRAL
AQLQELNLDLLRLASELTDP[DEARKAIARVKRESKRIV(ENLYFQGS)EAAAASEKISREAERLIR]
>lucLOCKRa_1 (SEQ ID NO: 27102)
MSELARKLLEASTKLQRLNIRLAEALLEAIARLQELNLELVYLAVELTDPKRIRDEIKEVKDKSKEIIRRAEKEI
DDAAKESEKILEEAREAISGSGSELAKLLLKAIAETQDLNLRAAKAFLEAAAKLQELNIRAVELLVKLTDPATIR
EALEHAKRRSKEIIDEAERAIRAAKRESERIIEEARRLIEKGSGSGSELARELLRAHAQLQRLNLELLRELLRAL
AQLQELNLDLLRLASELTDP[DEAR(VSGWRLFKKIS)RIVEDAERLIREAAAASEKISREAERLIR]
>lucLOCKRa_3 (SEQ ID NO: 27103)
MSELARKLLEASTKLQRLNIRLAEALLEAIARLQELNLELVYLAVELTDPKRIRDEIKEVKDKSKEIIRRAEKEI
DDAAKESEKILEEAREAISGSGSELAKLLLKAIAETQDLNLRAAKAFLEAAAKLQELNIRAVELLVKLTDPATIR
EALEHAKRRSKEIIDEAERAIRAAKRESERIIEEARRLIEKGSGSGSELARELLRAHAQLQRLNLELLRELLRAL
AQLQELNLDLLRLASELTDP[DEARKAIARVKRESK(VSGWRLFKKIS)EAAAASEKISREAERLIR]
>rhimLOCKRa_8 (SEQ ID NO: 27104)
MSELARKLLEASTKLQRLNIRLAEALLEAIARLQELNLELVYLAVELTDPKRIRDEIKEVKDKSKEIIRRAEKEI
DDAAKESEKILEEAREAISGSGSELAKLLLKAIAETQDLNLRAAKAFLEAAAKLQELNIRAVELLVKLTDPATIR
EALEHAKRRSKEIIDEAERAIRAAKRESERIIEEARRLIEKGSGSGSELARELLRAHAQLQRLNLELLRELLRAL
AQLQELNLDLLRLASELTDP[DEARKAI(IQIG)RESKRIVEDAERLIREAAAASEKIS(VQLG)RLIR]
>rhimLOCKRa_19 (SEQ ID NO: 27105)
MSELARKLLEASTKLQRLNIRLAEALLEAIARLQELNLELVYLAVELTDPKRIRDEIKEVKDKSKEIIRRAEKEI
DDAAKESEKILEEAREAISGSGSELAKLLLKAIAETQDLNLRAAKAFLEAAAKLQELNIRAVELLVKLTDPATIR
EALEHAKRRSKEIIDEAERAIRAAKRESERIIEEARRLIEKGSGSGSELARELLRAHAQLQRLNLELLRELLRAL
AQLQELNLDLLRLASELTDP[DEARKAIARVKRESKRIV(IQIG)RLI(VQLG)AASEKISREAERLIR]
>rhimLOCKRa_22 (SEQ ID NO: 27106)
MSELARKLLEASTKLQRLNIRLAEALLEAIARLQELNLELVYLAVELTDPKRIRDEIKEVKDKSKEIIRRAEKEI
DDAAKESEKILEEAREAISGSGSELAKLLLKAIAETQDLNLRAAKAFLEAAAKLQELNIRAVELLVKLTDPATIR
EALEHAKRRSKEIIDEAERAIRAAKRESERIIEEARRLIEKGSGSGSELARELLRAHAQLQRLNLELLRELLRAL
AQLQELNLDLLRLASELTDP[DEARKAIARVKRESKRIV(IQIG)RLIREAAAASEKIS(VQLG)RLIR]
>gcn4LOCKRa_4 (SEQ ID NO: 27107)
MSELARKLLEASTKLQRLNIRLAEALLEAIARLQELNLELVYLAVELTDPKRIRDEIKEVKDKSKEIIRRAEKEI
DDAAKESEKILEEAREAISGSGSELAKLLLKAIAETQDLNLRAAKAFLEAAAKLQELNIRAVELLVKLTDPATIR
EALEHAKRRSKEIIDEAERAIRAAKRESERIIEEARRLIEKGSGSGSELARELLRAHAQLQRLNLELLRELLRAL
AQLQELNLDLLRLASELTDP[DESVKE(LEDKVEELLSKNYHLENEVARLKKLVGER)SREAERLIR]
>cc-DiLOCKRa_6 (SEQ ID NO: 27108)
MSELARKLLEASTKLQRLNIRLAEALLEAIARLQELNLELVYLAVELTDPKRIRDEIKEVKDKSKEIIRRAEKEI
DDAAKESEKILEEAREAISGSGSELAKLLLKAIAETQDLNLRAAKAFLEAAAKLQELNIRAVELLVKLTDPATIR
EALEHAKRRSKEIIDEAERAIRAAKRESERIIEEARRLIEKGSGSGSELARELLRAHAQLQRLNLELLRELLRAL
AQLQELNLDLLRLASELTDP[DEARKAIA(GEIAALKQEIAALKKENAALKWEIAALKQG)AERLIR]
>cc-aLOCKRa_6 (SEQ ID NO: 27109)
MSELARKLLEASTKLQRLNIRLAEALLEAIARLQELNLELVYLAVELTDPKRIRDEIKEVKDKSKEIIRRAEKEI
DDAAKESEKILEEAREAISGSGSELAKLLLKAIAETQDLNLRAAKAFLEAAAKLQELNIRAVELLVKLTDPATIR
EALEHAKRRSKEIIDEAERAIRAAKRESERIIEEARRLIEKGSGSGSELARELLRAHAQLQRLNLELLRELLRAL
AQLQELNLDLLRLASELTDP[DEARKAIARVKR(GLEQEIAALEKENAALEWEIAALEQGG)ERLIR]
>cc-bLOCKRa_6 (SEQ ID NO: 27110)
MSELARKLLEASTKLQRLNIRLAEALLEAIARLQELNLELVYLAVELTDPKRIRDEIKEVKDKSKEIIRRAEKEI
DDAAKESEKILEEAREAISGSGSELAKLLLKAIAETQDLNLRAAKAFLEAAAKLQELNIRAVELLVKLTDPATIR
EALEHAKRRSKEIIDEAERAIRAAKRESERIIEEARRLIEKGSGSGSELARELLRAHAQLQRLNLELLRELLRAL
AQLQELNLDLLRLASELTDP[DEARKAIARVKR(GLKQEIAALRYKNAALKKLIAALKQGG)ERLIR]
>tev-spyLOCKRa_short_40 (SEQ ID NO: 27111)
SELARKLLEASTKLQRLNIRLAEALLEAIARLQELNLELVYLAVELTDPKRIRDEIKEVKDKSKEIIRRAEKEID
DAAKESEKILEEAREAISGSGSELAKLLLKAIAETQDLNLRAAKAFLEAAAKLQELNIRAVELLVKLTDPATIRE
ALEHAKRRSKEIIDEAERAIRAAKRESERIIEEARRLIEKGSGSGSELARELLRAHAQLQRLNLELLRELLRALA
QLQELNLDLLRLASELTDP[DEARKAI(ENLYFQGS)RIVEDAE(AHIVMVDAYK)EKISREAERLIR]
>tev-spyLOCKRa_short_57 (SEQ ID NO: 27112)
SELARKLLEASTKLQRLNIRLAEALLEAIARLQELNLELVYLAVELTDPKRIRDEIKEVKDKSKEIIRRAEKEID
DAAKESEKILEEAREAISGSGSELAKLLLKAIAETQDLNLRAAKAFLEAAAKLQELNIRAVELLVKLTDPATIRE
ALEHAKRRSKEIIDEAERAIRAAKRESERIIEEARRLIEKGSGSGSELARELLRAHAQLQRLNLELLRELLRALA
QLQELNLDLLRLASELTDP[DEARKAIARV(ENLYFQGS)EDAERLIREA(AHIVMVDAYK)AERLIR]
>tev-spyLOCKRa_short_63 (SEQ ID NO: 27113)
SELARKLLEASTKLQRLNIRLAEALLEAIARLQELNLELVYLAVELTDPKRIRDEIKEVKDKSKEIIRRAEKEID
DAAKESEKILEEAREAISGSGSELAKLLLKAIAETQDLNLRAAKAFLEAAAKLQELNIRAVELLVKLTDPATIRE
ALEHAKRRSKEIIDEAERAIRAAKRESERIIEEARRLIEKGSGSGSELARELLRAHAQLQRLNLELLRELLRALA
QLQELNLDLLRLASELTDP[DEARKAIARVK(ENLYFQGS)DAERLIREA(AHIVMVDAYK)AERLIR]
>tev-spyLOCKRa_29 (SEQ ID NO: 27114)
SKEAAKKLQDLNIELARKLLEASTKLQRLNIRLAEALLEAIARLQELNLELVYLAVELTDPKRIRDEIKEVKDKS
KEIIRRAEKEIDDAAKESKKILEEARKAIRDAAEESRKILEEGSGSGSDALDELQKLNLELAKLLLKAIAETQDL
NLRAAKAFLEAAAKLQELNIRAVELLVKLTDPATIRRALEHAKRRSKEIIDEAERAIRAAKRESERIIEEARRLI
EKAKEESERIIREGSGSGDP[DIKKLQDLNIELARELLRAHAQLQRLNLELLRELLRALAQLQELNLDLLRLASE
LTDPDEARKAIARVK(ENLYFQGS)DAERLIREAAAASE(AHIVMVDAYK)REAAAASEKISRE]
>tev-spyLOCKRa_32 (SEQ ID NO: 27115)
SKEAAKKLQDLNIELARKLLEASTKLQRLNIRLAEALLEAIARLQELNLELVYLAVELTDPKRIRDEIKEVKDKS
KEIIRRAEKEIDDAAKESKKILEEARKAIRDAAEESRKILEEGSGSGSDALDELQKLNLELAKLLLKAIAETQDL
NLRAAKAFLEAAAKLQELNIRAVELLVKLTDPATIRRALEHAKRRSKEIIDEAERAIRAAKRESERIIEEARRLI
EKAKEESERIIREGSGSGDP[DIKKLQDLNIELARELLRAHAQLQRLNLELLRELLRALAQLQELNLDLLRLASE
LTDPDEARKAIARVK(ENLYFQGS)DAERLIREAAAASEKISREAE(AHIVMVDAYK)EKISRE]
>Bim-fretLOCKRa_short (SEQ ID NO: 27116)
(VSKGEELFTGVVPILVELDGDVNGHKFSVSGEGEGDATYGKLILKFICTTGKLPVPWPTLVTTLSWGVQCFARY
PDHMKQHDFFKSAMPEGYVQERTIFFKDDGNYKTRAEVKFEGDTLVNRIELKGIDFKEDGNILGHKLEYNYFSDN
VYITADKQKNGIKANFKIRHNIEDGGVQLADHYQQNTPIGDGPVLLPDNHYLSTQSKLSKDPNEKRDHMVLLEFV
TAAGITLE)LARKLLEASTKLQRLNIRLAEALLEAIARLQELNLELVYLAVELTDPKRIRDEIKEVKDKSKEIIR
RAEKEIDDAAKESEKILEEAREAISGSGSELAKLLLKAIAETQDLNLRAAKAFLEAAAKLQELNIRAVELLVKLT
DPATIREALEHAKRRSKEIIDEAERAIRAAKRESERIIEEARRLIEKGSGSGSELARELLRAHAQLQRLNLELLR
ELLRALAQLQELNLDLLRLASELT[D(EIWIAQELRRIGDEFNAYYA)DAERLIREAAAASEKISREAERLIR]
(VSKGEELFTGVVPILVELDGDVNGHKFSVSGEGEGDATYGKLILKLICTTGKLPVPWPTLVTTLGYGVQCFARYP
DHMKQHDFFKSAMPEGYVQERTIFFKDDGNYKTRAEVKFEGDTLVNRIELKGIDFKEDGNILGHKLEYNYNSHNV
YITADKQKNGIKANFKIRHNIEDGGVQLADHYQQNTPIGDGPVLLPDNHYLSYQSKLSKDPNEKRDHMVLLEFVT
AAGITLGMDELYKGSGC)
>fretLOCKRa_short (SEQ ID NO: 27117)
(VSKGEELFTGVVPILVELDGDVNGHKFSVSGEGEGDATYGKLTLKFICTTGKLPVPWPTLVTTLSWGVQCFARY
PDHMKQHDFFKSAMPEGYVQERTIFFKDDGNYKTRAEVKFEGDILVNRIELKGIDFKEDGNILGHKLEYNYFSDN
VYITADKQKNGIKANFKIRHNIEDGGVQLADHYQQNTPIGDGPVLLPDNHYLSTQSKLSKDPNEKRDHMVLLEFV
TAAGITL)ELARKLLEASTKLQRLNIRLAEALLEAIARLQELNLELVYLAVELTDPKRIRDEIKEVKDKSKEIIR
RAEKEIDDAAKESEKILEEAREAISGSGSELAKLLLKAIAETQDLNLRAAKAFLEAAAKLQELNIRAVELLVKLT
DPATIREALEHAKRRSKEIIDEAERAIRAAKRESERIIEEARRLIEKGSGSGSELARELLRAHAQLQRLNLELLR
ELLRALAQLQELNLDLLRLASELTDP[DEARKAIARVKRESNAYYADAERLIREAAAASEK](VSKGEELFTGVV
PILVELDGDVNGHKFSVSGEGEGDATYGKLTLKLICTTGKLPVPWPTLVTTLGYGVQCFARYPDHMKQHDFFKSA
MPEGYVQERTIFFKDDGNYKTRAEVKFEGDTLVNRIELKGIDFKEDGNILGHKLEYNYNSHNVYITADKQKNGIK
ANFKIRHNIEDGGVQLADHYQQNTPIGDGPVLLPDNHYLSYQSKLSKDPNEKRDHMVLLEFVTAAGITLGMDELY
KGSGC)
E18_KRAB_full (SEQ ID NO: 27120)
MSKEAVTKLQALNIKLAEKLLEAVTKLQALNIKLAEKLLEALARLQELNIALVYLAVELTDPKRIADEIKKVKDK
SKEIVERAEEEIARAAAESKKILDEAEEEIARAAAESKKILDEGSGSGSDAVAELQALNLKLAELLLEAVAELQA
LNLKLAELLLEAIAKLQELNIKLVELLTKLTDPATIREAIRKVKEDSERIVAEAERLIAAAKAESERIIREAERL
IAAAKAESERIIREGSGSGDPDVARLQELNIELARELLRDVARLQELNIELARELLRAAAELQELNIKLVELASE
LTGS[(RTLVTFKDVFVDFTREEWKLLDTAQQIVYRNVMLENYKNLVSLGYG)SDEARKAIARVKRESKRIVEDA
ERLIREAAAASEKISREAERLIREAAAASEKISRE]
E18_KRAB_N13t (SEQ ID NO: 27121)
MSKEAVTKLQALNIKLAEKLLEAVTKLQALNIKLAEKLLEALARLQELNIALVYLAVELTDPKRIADEIKKVKDK
SKEIVERAEEEIARAAAESKKILDEAEEEIARAAAESKKILDEGSGSGSDAVAELQALNLKLAELLLEAVAELQA
LNLKLAELLLEAIAKLQELNIKLVELLTKLTDPATIREAIRKVKEDSERIVAEAERLIAAAKAESERIIREAERL
IAAAKAESERIIREGSGSGDPDVARLQELNIELARELLRDVARLQELNIELARELLRAAAELQELNIKLVELASE
LTGS[(RTLVTFKDVFVDFTREEWKLLDTAQQIVYRNVMLENYKNLVSLGY)GSSKRIVEDAERLIREAAAASEK
ISREAERLIREAAAASEKISRE]
E18_KRAB_C9t (SEQ ID NO: 27122)
MSKEAVTKLQALNIKLAEKLLEAVTKLQALNIKLAEKLLEALARLQELNIALVYLAVELTDPKRIADEIKKVKDK
SKEIVERAEEEIARAAAESKKILDEAEEEIARAAAESKKILDEGSGSGSDAVAELQALNLKLAELLLEAVAELQA
LNLKLAELLLEAIAKLQELNIKLVELLTKLTDPATIREAIRKVKEDSERIVAEAERLIAAAKAESERIIREAERL
IAAAKAESERIIREGSGSGDPDVARLQELNIELARELLRDVARLQELNIELARELLRAAAELQELNIKLVELASE
LTGS[(RTLVTFKDVFVDFTREEWKLLDTAQQIVYRNVMLENYKNLVSLGY)GSDEARKAIARVKRESKRIVEDA
ERLIREAAAASEKISREAERLIREAA]
E18_KRAB_Cterm1 (SEQ ID NO: 27123)
MSKEAVTKLQALNIKLAEKLLEAVTKLQALNIKLAEKLLEALARLQELNIALVYLAVELTDPKRIADEIKKVKDK
SKEIVERAEEEIARAAAESKKILDEAEEEIARAAAESKKILDEGSGSGSDAVAELQALNLKLAELLLEAVAELQA
LNLKLAELLLEAIAKLQELNIKLVELLTKLTDPATIREAIRKVKEDSERIVAEAERLIAAAKAESERIIREAERL
IAAAKAESERIIREGSGSGDPDVARLQELNIELARELLRDVARLQELNIELARELLRAAAELQELNIKLVELASE
LT[DEARKAIARVKRESKRIVEDAE(RTLVTFKDVFVDFTREEWKLLDTAQQIVYRNVMLENYKNLVSLGY)]
E18_KRAB_Cterm2 (SEQ ID NO: 27124)
MSKEAVTKLQALNIKLAEKLLEAVTKLQALNIKLAEKLLEALARLQELNIALVYLAVELTDPKRIADEIKKVKDK
SKEIVERAEEEIARAAAESKKILDEAEEEIARAAAESKKILDEGSGSGSDAVAELQALNLKLAELLLEAVAELQA
LNLKLAELLLEAIAKLQELNIKLVELLTKLTDPATIREAIRKVKEDSERIVAEAERLIAAAKAESERIIREAERL
IAAAKAESERIIREGSGSGDPDVARLQELNIELARELLRDVARLQELNIELARELLRAAAELQELNIKLVELASE
LT[DEARKAIARVKRESKRIVEDAERLI(RTLVTFKDVFVDFTREEWKLLDTAQQIVYRNVMLENYKNLVSLGY)]
E18_KRAB_Cterm3 (SEQ ID NO: 27125)
MSKEAVTKLQALNIKLAEKLLEAVTKLQALNIKLAEKLLEALARLQELNIALVYLAVELTDPKRIADEIKKVKDK
SKEIVERAEEEIARAAAESKKILDEAEEEIARAAAESKKILDEGSGSGSDAVAELQALNLKLAELLLEAVAELQA
LNLKLAELLLEAIAKLQELNIKLVELLTKLTDPATIREAIRKVKEDSERIVAEAERLIAAAKAESERIIREAERL
IAAAKAESERIIREGSGSGDPDVARLQELNIELARELLRDVARLQELNIELARELLRAAAELQELNIKLVELASE
LT[DEARKAIARVKRESKRIVEDAERLIREAAAASEKISRTLVTFKDVFVDFTREEWKLLDTAQQIVYRNVMLEN
YKNLVSLGY)]
>3plus1_Cage_Nterm_GFP11_668 (SEQ ID NO: 27,278)
DEAKELLDEIRKAVKESEDRLEKLLRDYEKELRRDHMVLHEYVNAAGITLEELRRGSLDAKELLKTLEDLLREVL
EVARRVVETLKELNRRVLEVVREDIEANERLLRRVLDTLRRGGVDERRIKDLERLIRESLKKAEEVLREAAEKSR
EIVDEIREVLKRADEALKRIIKKIRETRGADALSRLLEELLRVVDDLIRVLKELIDKSRKVIEELLELLKRINEE
NLKVLAEIIK
>3plus1_Cage_Cterm_GFP11_668 (SEQ ID NO: 27,279)
DEAKELLDEIRKAVKESEDRLEKLLRDYEKELRRLEKELRDLKRRIEEKLEELRRGSLDAKELLKTLEDLLREVL
EVARRVVETLKELNRRVLEVVREDIERNERLLRRVLDTLRRGGVDERRIKDLERLIRESLKKAEEVLREAAEKSR
EIVDEIREVLKRADEALKRIIKKIRETRGADADHMVLHEYVNAAGITIRVLKELIDKSRKVIEELLELLKRINEE
NLKVLAEIIK
>3plus1_Cage_Cterm_GFP11_668 (SEQ ID NO: 27,280)
DEAKELLDEIRKAVKESEDRLEKLLRDYEKELRRLEKELRDLKRRIEEKLEELRRGSLDAKELLKTLEDLLREVL
EVARRVVETLKELNRRVLEVVREDIERNERLLRRVLDTLRRGGVDERRIKDLERLIRESLKKAEEVLREAAEKSR
EIVDEIREVLKRADEALKRIIKKIRETRGADARDHMVLHEYVNAAGITRVLKELIDKSRKVIEELLELLKRINEE
NLKVLAEIIK
>3plus1_Cage_Cterm_GFP11_668 (SEQ ID NO: 27,281)
DEAKELLDEIRKAVKESEDRLEKLLRDYEKELRRLEKELRDLKRRIEEKLEELRRGSLDAKELLKTLEDLLREVL
EVARRVVETLKELNRRVLEVVREDIERNERLLRRVLDTLRRGGVDERRIKDLERLIRESLKKAEEVLREAAEKSR
EIVDEIREVLKRADEALKRIIKKIRETRGADALSRDHMVLHEYVNAAGITLKELIDKSRKVIEELLELLKRINEE
NLKVLAEIIK
>3plus1_Cage_Cterm_GFP11_668 (SEQ ID NO: 27,282)
DEAKELLDEIRKAVKESEDRLEKLLRDYEKELRRLEKELRDLKRRIEEKLEELRRGSLDAKELLKTLEDLLREVL
EVARRVVETLKELNRRVLEVVREDIERNERLLRRVLDTLRRGGVDERRIKDLERLIRESLKKAEEVLREAAEKSR
EIVDEIREVLKRADEALKRIIKKIRDHMVLHEYVNAAGITLRVVDDLIRVLKELIDKSRKVIEELLELLKRINEE
NLKVLAEIIK
>3plus1_Cage_Nterm_GFP11_669 (SEQ ID NO: 27,283)
SEKEKLLKESEEEVRRLRRTLEELLRKYREVLERLRDHMVLHEYVNAAGITRLKEVLDRSGLDIDTIIKEVEDLL
KTVLDRLRELLDKIARLIKEAIEVVREIIERIVRHAERVKDELRKGGADKRKLDRVDRLIKENTRHLKEILDRIE
DLVRRSEKKLRDIIREVRRLIEELRKKAEEIKKDPDERLVKILIEDVERVIKRILELITRVAEDNERVLERIIRE
LTDNLERHLKIVREIVK
>3plus1_Cage_Nterm_GFP11_670 (SEQ ID NO: 27,284)
SEKEDLARKLRKLVEELTREYEELVKKLERLIEEIERDHMVLHEYVNAAGITISEEVRKLGTDERVLKRLLERLR
RIIEEDHELNTELLKRLLDLLKEILDTSRELLKRLLDILRKGVRDEEVLRDLERTLREVLEENERAIEEAERVLR
KVLEDSERAVRDARRVLAEVDKSPIGDEALRKLVELLVEVLRRLIRVNRELVKLLREVLERLLRILRESVKKLKR
LIEKVIKDAT
>3plus1_Cage_Cterm_GFP11_670 (SEQ ID NO: 27,285)
SEKEDLARKLRKLVEELTREYEELVKKLERLIEEIEKVSEESVRKLEKLLREISEEVRKLGTDERVLKRLLERLR
RIIEEDHELNTELLKRLLDLLKEILDTSRELLKRLLDILRKGVRDEEVLRDLERTLREVLEENERAIEEAERVLR
KVLEDSERAVRDARRVLAEVDKSPIGDEARDHMVLHEYVNAAGITRVNRELVKLLREVLERLLRILRESVKKLKR
LIEKVIKDAT
>3plus1_Cage_Cterm_GFP11_670 (SEQ ID NO: 27,286)
SEKEDLARKLRKLVEELTREYEELVKKLERLIEEIEKVSEESVRKLEKLLREISEEVRKLGTDERVLKRLLERLR
RIIEEDHELNTELLKRLLDLLKEILDTSRELLKRLLDILRKGVRDEEVLRDLERTLREVLEENERAIEEAERVLR
KVLEDSERAVRDARRVLAEVDKSPIGDERDHMVLHEYVNAAGITIRVNRELVKLLREVLERLLRILRESVKKLKR
LIEKVIKDAT
>3plus1_Cage_Cterm_GFP11_670 (SEQ ID NO: 27,287)
SEKEDLARKLRKLVEELTREYEELVKKLERLIEEIEKVSEESVRKLEKLLREISEEVRKLGTDERVLKRLLERLR
RIIEEDHELNTELLKRLLDLLKEILDTSRELLKRLLDILRKGVRDEEVLRDLERTLREVLEENERAIEEAERVLR
KVLEDSERAVRDARRVLAEVDKSPIGRDHMVLHEYVNAAGITRLIRVNRELVKLLREVLERLLRILRESVKKLKR
LIEKVIKDAT
>3plus1_Cage_Nterm_GFP11_670 (SEQ ID NO: 27,288)
SEKEDLARKLRKLVEELTREYEELVKKLERLIEEIRDHMVLHEYVNAAGITEISEEVRKLGTDERVLKRLLERLR
RIIEEDHELNTELLKRLLDLLKEILDTSRELLKRLLDILRKGVRDEEVLRDLERTLREVLEENERAIEEAERVLR
KVLEDSERAVRDARRVLAEVDKSPIGDEALRKLVELLVEVLRRLIRVNRELVKLLREVLERLLRILRESVKKLKR
LIEKVIKDAT
>3plus1_Cage_Cterm_GFP11_670 (SEQ ID NO: 27,289)
SEKEDLARKLRKLVEELTREYEELVKKLERLIEEIEKVSEESVRKLEKLLREISEEVRKLGTDERVLKRLLERLR
RIIEEDHELNTELLKRLLDLLKEILDTSRELLKRLLDILRKGVRDEEVLRDLERTLREVLEENERAIEEAERVLR
KVLEDSERAVRDARRVLAEVDKSPIRDHMVLHEYVNAAGITRRLIRVNRELVKLLREVLERLLRILRESVKKLKR
LIEKVIKDAT
>3plus1_Cage_Nterm_GFP11_670 (SEQ ID NO: 27,290)
SEKEDLARKLRKLVEELTREYEELVKKLERLIERDHMVLHEYVNAAGITLREISEEVRKLGTDERVLKRLLERLR
RIIEEDHELNTELLKRLLDLLKEILDTSRELLKRLLDILRKGVRDEEVLRDLERTLREVLEENERAIEEAERVLR
KVLEDSERAVRDARRVLAEVDKSPIGDEALRKLVELLVEVLRRLIRVNRELVKLLREVLERLLRILRESVKKLKR
LIEKVIKDAT
>3plus1_Cage_Nterm_GFP11_670 (SEQ ID NO: 27,291)
SEKEDLARKLRKLVEELTREYEELVKKLERLIEEIEKRDHMVLHEYVNAAGITSEEVRKLGTDERVLKRLLERLR
RIIEEDHELNTELLKRLLDLLKEILDTSRELLKRLLDILRKGVRDEEVLRDLERTLREVLEENERAIEEAERVLR
KVLEDSERAVRDARRVLAEVDKSPIGDEALRKLVELLVEVLRRLIRVNRELVKLLREVLERLLRILRESVKKLKR
LIEKVIKDAT
>3plus1_Cage_Nterm_GFP11_670 (SEQ ID NO: 27,292)
SEKEDLARKLRKLVEELTREYEELVKKLERLIEEIEKVSEESRDHMVLHEYVNAAGITKLGTDERVLKRLLERLR
RIIEEDHELNTELLKRLLDLLKEILDTSRELLKRLLDILRKGVRDEEVLRDLERTLREVLEENERAIEEAERVLR
KVLEDSERAVRDARRVLAEVDKSPIGDEALRKLVELLVEVLRRLIRVNRELVKLLREVLERLLRILRESVKKLKR
LIEKVIKDAT
>3plus1_Cage_Nterm_GFP11_670 (SEQ ID NO: 27,293)
SEKEDLARKLRKLVEELTREYEELVKKLERLIEEIEKVSEESVRDHMVLHEYVNAAGITLGTDERVLKRLLERLR
RIIEEDHELNTELLKRLLDLLKEILDTSRELLKRLLDILRKGVRDEEVLRDLERTLREVLEENERAIEEAERVLR
KVLEDSERAVRDARRVLAEVDKSPIGDEALRKLVELLVEVLRRLIRVNRELVKLLREVLERLLRILRESVKKLKR
LIEKVIKDAT
>3plus1_Cage_Cterm_GFP11_671 (SEQ ID NO: 27,294)
SEEEDLLERVKRVLDELIEIVDRNHELNRRVVETSAALVERLLEEVERALETLEREIPGSSLLDKAIKDLRDVLR
RVKEKVKRSIEELKEVLEESRRVLEEVVRKLREVIDRVRRLVEKGVDLRDLIRELKRVLEEAVKLIERLVRLNIR
AAEKDNESLRELVRAIKEALKRAVDAVRKGGLDSRAVKKLDRDHMVLHEYVNAAGITNEELWRALVELNKESVRR
LREIVERVARDLEETAR
>3plus1_Cage_Cterm_GFP11_671 (SEQ ID NO: 27,295)
SEEEDLLERVKRVLDELIEIVDRNHELNRRVVETSAALVERLLEEVERALETLEREIPGSSLLDKAIKDLRDVLR
RVKEKVKRSIEELKEVLEESRRVLEEVVRKLREVIDRVRRLVEKGVDLRDLIRELKRVLEEAVKLIERLVRLNIR
AAEKDNESLRELVRAIKEALKRAVDAVRKGGLDSRARDHMVLHEYVNAAGITDVVRRNEELWRALVELNKESVRR
LREIVERVARDLEETAR
>3plus1_Cage_Cterm_GFP11_671 (SEQ ID NO: 27,296)
SEEEDLLERVKRVLDELIEIVDRNHELNRRVVETSAALVERLLEEVERALETLEREIPGSSLLDKAIKDLRDVLR
RVKEKVKRSIEELKEVLEESRRVLEEVVRKLREVIDRVRRLVEKGVDLRDLIRELKRVLEEAVKLIERLVRLNIR
AAEKDNESLRELVRAIKEALKRAVDAVRKGGLDSRRDHMVLHEYVNAAGITEDVVRRNEELWRALVELNKESVRR
LREIVERVARDLEETAR
>3plus1_Cage_Cterm_GFP11_671 (SEQ ID NO: 27,297)
SEEEDLLERVKRVLDELIEIVDRNHELNRRVVETSAALVERLLEEVERALETLEREIPGSSLLDKAIKDLRDVLR
RVKEKVKRSIEELKEVLEESRRVLEEVVRKLREVIDRVRRLVEKGVDLRDLIRELKRVLEEAVKLIERLVRLNIR
AAEKDNESLRELVRAIKEALKRAVDAVRKGGLRDHMVLHEYVNAAGITKKLEDVVRRNEELWRALVELNKESVRR
LREIVERVARDLEETAR
>3plus1_Cage_Cterm_GFP11_672 (SEQ ID NO: 27,298)
DETEEVIKKIAKLIDELIETLKKIVEDSAKLIKELIDLLEEIIKRSADLIRELEKVSKRGDRDRLKKLIDRMRRE
TERALEELRRVIEELKEATERALKTIEDLIREIEEAIRRELGDEDLAREILEVIRRILELLREDMELNLRALEEI
LRLLEEVIKLNKDAIDEILELLKRDHMVLHEYVNAAGITESKKLVRDVVEEAKRLLKENRDSTRKIIEDIRRLLR
KIEDSTR
>3plus1_Cage_Cterm_GFP11_672 (SEQ ID NO: 27,299)
DETEEVIKKIAKLIDELIETLKKIVEDSAKLIKELIDLLEEIIKRSADLIRELEKVSKRGDRDRLKKLIDRMRRE
TERALEELRRVIEELKEATERALKTIEDLIREIEEAIRRELGDEDLAREILEVIRRILELLREDMELNLRALEEI
LRLLEEVIKLNKDAIDEILELLKGRDHMVLHEYVNAAGITSKKLVRDVVEEAKRLLKENRDSTRKIIEDIRRLLR
KIEDSTR
>3plus1_Cage_Nterm_GFP11_67>3 (SEQ ID NO: 27,300)
SKEETLRKEAEDLLRRLEELTRRLEKKARELLERAKKLSRDLARDHMVLHEYVNAAGITEELIKVLEEVAKTSID
LNKEVIDVIRRVIEESLELNKRVLDVLRRVLDIAARKGRDKKAIRDVVREAARVIKEVIDEDEKVNRDLKRVIER
VIDDDRKALERLRKAVEEVASRGDDEAAKRLVEELLKAVIDLSRKNKRILEELLKAIETLSDENKKILTEILDAL
RRLVEKIEK
>3plus1_Cage_Nterm_GFP11_67>3 (SEQ ID NO: 27,301)
SKEETLRKEAEDLLRRLEELTRRLEKKARELLERAKKLSRRDHMVLHEYVNAAGITGVPEELIKVLEEVAKTSID
LNKEVIDVIRRVIEESLELNKRVLDVLRRVLDIAARKGRDKKAIRDVVREAARVIKEVIDEDEKVNRDLKRVIER
VIDDDRKALERLRKAVEEVASRGDDEAAKRLVEELLKAVIDLSRKNKRILEELLKAIETLSDENKKILTEILDAL
RRLVEKIEK
>3plus1_Cage_Cterm_GFP11_67>3 (SEQ ID NO: 27,302)
SKEETLRKEAEDLLRRLEELTRRLEKKARELLERAKKLSRDLAEELKRLLKELREKGVPEELIKVLEEVAKTSID
LNKEVIDVIRRVIEESLELNKRVLDVLRRVLDIAARKGRDKKAIRDVVREAARVIKEVIDEDEKVNRDLKRVIER
VIDDDRKALERLRKAVEEVASRGDDEARDHMVLHEYVNAAGITRKNKRILEELLKAIETLSDENKKILTEILDAL
RRLVEKIEK
>3plus1_Cage_Nterm_GFP11_67>3 (SEQ ID NO: 27,303)
SKEETLRKEAEDLLRRLEELTRRLEKKARELLERARDHMVLHEYVNAAGITELREKGVPEELIKVLEEVAKTSID
LNKEVIDVIRRVIEESLELNKRVLDVLRRVLDIAARKGRDKKAIRDVVREAARVIKEVIDEDEKVNRDLKRVIER
VIDDDRKALERLRKAVEEVASRGDDEAAKRLVEELLKAVIDLSRKNKRILEELLKAIETLSDENKKILTEILDAL
RRLVEKIEK
>3plus1_Cage_Nterm_GFP11_67>3 (SEQ ID NO: 27,304)
SKEETLRKEAEDLLRRLEELTRRLEKKARELLERAKKLSRDHMVLHEYVNAAGITKGVPEELIKVLEEVAKTSID
LNKEVIDVIRRVIEESLELNKRVLDVLRRVLDIAARKGRDKKAIRDVVREAARVIKEVIDEDEKVNRDLKRVIER
VIDDDRKALERLRKAVEEVASRGDDEAAKRLVEELLKAVIDLSRKNKRILEELLKAIETLSDENKKILTEILDAL
RRLVEKIEK
>3plus1_Cage_Nterm_GFP11_67>3 (SEQ ID NO: 27,305)
SKEETLRKEAEDLLRRLEELTRRLEKKARELLERAKKLRDHMVLHEYVNAAGITEKGVPEELIKVLEEVAKTSID
LNKEVIDVIRRVIEESLELNKRVLDVLRRVLDIAARKGRDKKAIRDVVREAARVIKEVIDEDEKVNRDLKRVIER
VIDDDRKALERLRKAVEEVASRGDDEAAKRLVEELLKAVIDLSRKNKRILEELLKAIETLSDENKKILTEILDAL
RRLVEKIEK
>3plus1_Cage_Nterm_GFP11_67>3 (SEQ ID NO: 27,306)
SKEETLRKEAEDLLRRLEELTRRLEKKARELLERAKKLSRDLRDHMVLHEYVNAAGITPEELIKVLEEVAKTSID
LNKEVIDVIRRVIEESLELNKRVLDVLRRVLDIAARKGRDKKAIRDVVREAARVIKEVIDEDEKVNRDLKRVIER
VIDDDRKALERLRKAVEEVASRGDDEAAKRLVEELLKAVIDLSRKNKRILEELLKAIETLSDENKKILTEILDAL
RRLVEKIEK
>3plus1_Cage_Nterm_GFP11_674 (SEQ ID NO: 27,307)
SEREEVKEKLDRLLEEVEKTVRELKREHDELLKEVEKLVRDLKRDHMVLHEYVNAAGITKEILDVIREHVRINKE
ILDRVLEVVEEHLRRNKEILDKLLDDIRKVVEDAKRILGIGDDETLRRAVRRILEELRKLVEDIRKKVKDSLETL
ERALEEAEERIRRSLEDLKRVLKEAKDKIKDKDRLDKVEELVKKLLEDTKRTVDRVRELVRKILKKSRETLEELE
RLIEKILRELEKDAR
>3plus1_Cage_Cterm_GFP11_674 (SEQ ID NO: 27,308)
SEREEVKEKLDRLLEEVEKTVRELKREHDELLKEVEKLVRDLKKEHDELLKKVKDDGVPKEILDVIREHVRINKE
ILDRVLEVVEEHLRRNKEILDKLLDDIRKVVEDAKRILGIGDDETLRRAVRRILEELRKLVEDIRKKVKDSLETL
ERALEEAEERIRRSLEDLKRVLKEAKDKIKDKDRDHMVLHEYVNAAGITKRTVDRVRELVRKILKKSRETLEELE
RLIEKILRELEKDAR
>3plus1_Cage_Nterm_GFP11_675 (SEQ ID NO: 27,309)
SERETVKRRLEELLKEVKRILDKLKEEHDRLLEDVRRVVEELRDHMVLHEYVNAAGITPEELLRVIAKVLEINKR
ILDDLLRVVKKHVDLNKEILDRILEMIKEIVERVKRVLGDGDEKTLRDKIRDIIRRLEDAAREAEERVRRSLEEL
KKAVEKIRKKIEDSLRELEEALKRVRDKEEDDKRLEDISRLVKRLLDESRRVLRELEETIRKRAEESKRVLEEVK
RLVEKLIRELRKEAE
>3plus1_Cage_Nterm_GFP11_676 (SEQ ID NO: 27,310)
SEDEIIKKIIEDLRRVLKEVEEIHKEVEERLDKRDHMVLHEYVNAAGITDRVLDEVKRIGDVETVLRLAIEAVRR
ALEIVRKVIEDLIRVVRKLLEIVDAVNKRVKKAVEDVLKLLRDILKGSKDVERVLDEARRLLEKLHRDSRRILKR
IAELLDELKELSERILERIKRLLEEVERRGSDDERLLEELIEELKDLIRRHIELLRRLIERLKELLKKHIEDLRR
LLEEIEKLLEEARK
>3plus1_Cage_Nterm_GFP11_677 (SEQ ID NO: 27,311)
SREEVLRELEEVIEDNRRLLEELIEKSKKVLDESLKLIDELLRRDHMVLHEYVNAAGITSKGDDEETARRIVIKI
RKELEDVLDEVRRIVKEILDRDRRVAEDLKRVVDENLEKLKKVLDELDKKLGDRRLVEILRDIVRLLIEINERAL
RELLKLHEEHTRIVAELLRELERVVEELRRLVELIARGEISEDDLKRVVDEVEKKLRELKRRYKEALERIKEKIK
ELKDRYERAVREVVAELRKTTK
>3plus1_Cage_Cterm_GFP11_677 (SEQ ID NO: 27,312)
SREEVLRELEEVIEDNRRLLEELIEKSKKVLDESLKLIDELLRRLEEVLERVLRLLEELSKGDDEETARRIVIKI
RKELEDVLDEVRRIVKEILDRDRRVAEDLKRVVDENLEKLKKVLDELDKKLGDRRLVEILRDIVRLLIEINERAL
RELLKLHEEHTRIVAELLRELERVVEELRRLVELIARGEISEDDRDHMVLHEYVNAAGITRRYKEALERIKEKIK
ELKDRYERAVREVVAELRKTTK
>3plus1_Cage_Cterm_GFP11_677 (SEQ ID NO: 27,313)
SREEVLRELEEVIEDNRRLLEELIEKSKKVLDESLKLIDELLRRLEEVLERVLRLLEELSKGDDEETARRIVIKI
RKELEDVLDEVRRIVKEILDRDRRVAEDLKRVVDENLEKLKKVLDELDKKLGDRRLVEILRDIVRLLIEINERAL
RELLKLHEEHTRIVAELLRELERVVEELRRLVELIARGERDHMVLHEYVNAAGITLRELKRRYKEALERIKEKIK
ELKDRYERAVREVVAELRKTTK
>3plus1_Cage_Nterm_GFP11_678 (SEQ ID NO: 27,314)
SKAEEIAEKLDRLLEENRRALEEITTRLDDLLRRDHMVLHEYVNAAGITLDDLRRGGIREELLKRIADVIRDIMR
LLKELHDHTAEVIKTIKKLLKELHDINKEIIERLKRLKDGNVPKEELLKRVEELVRTSARLITEVLKTVEKLIRD
DKRLSEEILKRVKELIEELKRGVDSERVKEILERILRVVEEAVRLNEESLRRILDVVRKAVKLDRESLKKILDVV
EEAVR
>3plus1_Cage_Cterm_GFP11_678 (SEQ ID NO: 27,315)
SKAEEIAEKLDRLLEENRRALEEITTRLDDLLRRNKDALRKVMEKLKRLLDDLRRGGIREELLKRIADVIRDIMR
LLKELHDHTAEVIKTIKKLLKELHDINKEIIERLKRLKDGNVPKEELLKRVEELVRTSARLITEVLKTVEKLIRD
DKRLSEEILKRVKELIEELRDHMVLHEYVNAAGITLRVVEEAVRLNEESLRRILDVVRKAVKLDRESLKKILDVV
EEAVR
>3plus1_Cage_Nterm_GFP11_678 (SEQ ID NO: 27,316)
SKAEEIAEKLDRLLEENRRALEEITTRLDDLLRRNKDRDHMVLHEYVNAAGITRRGGIREELLKRIADVIRDIMR
LLKELHDHTAEVIKTIKKLLKELHDINKEIIERLKRLKDGNVPKEELLKRVEELVRTSARLITEVLKTVEKLIRD
DKRLSEEILKRVKELIEELKRGVDSERVKEILERILRVVEEAVRLNEESLRRILDVVRKAVKLDRESLKKILDVV
EEAVR
>3plus1_Cage_Cterm_GFP11_678 (SEQ ID NO: 27,317)
SKAEEIAEKLDRLLEENRRALEEITTRLDDLLRRNKDALRKVMEKLKRLLDDLRRGGIREELLKRIADVIRDIMR
LLKELHDHTAEVIKTIKKLLKELHDINKEIIERLKRLKDGNVPKEELLKRVEELVRTSARLITEVLKTVEKLIRD
DKRLSEEILKRVKELIEELKRGRDHMVLHEYVNAAGITVEEAVRLNEESLRRILDVVRKAVKLDRESLKKILDVV
EEAVR
>3plus1_Cage_Nterm_GFP11_678 (SEQ ID NO: 27,318)
SKAEEIAEKLDRLLEENRRALEEITTRLDDLLRRNKRDHMVLHEYVNAAGITLRRGGIREELLKRIADVIRDIMR
LLKELHDHTAEVIKTIKKLLKELHDINKEIIERLKRLKDGNVPKEELLKRVEELVRTSARLITEVLKTVEKLIRD
DKRLSEEILKRVKELIEELKRGVDSERVKEILERILRVVEEAVRLNEESLRRILDVVRKAVKLDRESLKKILDVV
EEAVR
>3plus1_Cage_Nterm_GFP11_678 (SEQ ID NO: 27,319)
SKAEEIAEKLDRLLEENRRALEEITTRLDDLLRRNKDALRDHMVLHEYVNAAGITGGIREELLKRIADVIRDIMR
LLKELHDHTAEVIKTIKKLLKELHDINKEIIERLKRLKDGNVPKEELLKRVEELVRTSARLITEVLKTVEKLIRD
DKRLSEEILKRVKELIEELKRGVDSERVKEILERILRVVEEAVRLNEESLRRILDVVRKAVKLDRESLKKILDVV
EEAVR
>3plus1_Cage_Cterm_GFP11_679 (SEQ ID NO: 27,320)
SRVEELKKLIEDILRISREVVERIKRVAEDIHRINRRVLDDLRKLIEDILRIVEEILARKVGDTEIAERLRDTIA
RVVDEIAKLLEEHEKRSRELLEEIRKLLEDILRRSERAVEEIRELLKKGVSTKDVLRIIEEILREHLELLERVVR
RIEEILRELLKTIEEIVKRIKEILEELKEVLKRGRVKDDEVERDHMVLHEYVNAAGITYRRLLEEIKRKLEEILR
RVEELHRRLRRKLEEIDR
>3plus1_Cage_Nterm_GFP11_679 (SEQ ID NO: 27,321)
SRVEELKKLIEDILRISREVVERIKRVAEDIHRINRRVRDHMVLHEYVNAAGITEILARKVGDTEIAERLRDTIA
RVVDEIAKLLEEHEKRSRELLEEIRKLLEDILRRSERAVEEIRELLKKGVSTKDVLRIIEEILREHLELLERVVR
RIEEILRELLKTIEEIVKRIKEILEELKEVLKRGRVKDDEVEREIRRVKEDLDRILEEYRRLLEEIKRKLEEILR
RVEELHRRLRRKLEEIDR

TABLE 3
Exemplary Bioactive peptides

GFP11 fluorescence peptide and binding peptide to GFP1-10: RDHMVLHEYVNAAGIT
(SEQ ID NO: 27052)
BIM binding peptide and apoptotic peptide to BCL-2: IxxxLRxIGDxFxxxY (SEQ
ID NO: 50), where x is any amino acid; in one embodiment, the peptide is
EIWIAQELRRIGDEFNAYYA (SEQ ID NO: 60)
Designed peptide for binding to BCL-2: KMAQELIDKVRAASLQINGDAFYAILRAL (SEQ
ID NO: 62)
StreptagII binding peptide to streptactin or an antibody: (N)WSHPQFEK (SEQ
ID NO: 63)
TEV protease cleavage site: ENLYFQ (G)-X (SEQ ID NO: 64), wherein (G) can
also be S, last position, -X can be anything except Proline
Thrombin protease cleavage site: LVPRGS (SEQ ID NO: 66)
Cathepsin cleavage site: RLVGFE (SEQ ID NO: 27053)
EZH2 binding peptide to recruit DNA-methylases:
TMFSSNRQKILERTETLNQEWKQRRIQ (SEQ ID NO: 27059)
MDM2 binding peptide to recruit p53: ETFSDLWKLL (SEQ ID NO: 27060)
CP5 binding peptide: GELDELVYLLDGPGYDPIHSDVVTRGGSHLFNF (SEQ ID NO: 27061)
9aaTAD1 for transcriptional activation: TMDDVYNYLFDD (SEQ ID NO: 27062)
9aaTAD2 for transcriptional activation: LLTGLFVQYLFDD (SEQ ID NO: 27063)
9aaTAD3 for transcriptional activation: DDAVVESFFSS (SEQ ID NO: 27064)
9aaTAD4 for transcriptional activation: GDFLSDLFD (SEQ ID NO: 27065)
9aaTAD5 for transcriptional activation: GDVLSDLVD (SEQ ID NO: 27066)
Mad1-SID - epigenetic modification: NIQMLLEAADYLE (SEQ ID NO: 27067)
Mad1-SID (3A mutant) - epigenetic modification: NIAMLLAAAAYLE (SEQ ID
NO: 27068)
RHIM Domain 1 from ZBP1: IQIG (SEQ ID NO: 27069)
RHIM Domain 2 from ZBP1: VQLG (SEQ ID NO: 27070)
nanoBit Split Luciferase: VSGWRLFKKIS (SEQ ID NO: 27071)
CC-A: GLEQEIAALEKENAALEWEIAALEQGG (SEQ ID NO: 27072)
CC-B: GLKQKIAALKYKNAALKKKIAALKQGG (SEQ ID NO: 27073)
GCN4: RMKQLEDKVEELLSKNYHLENEVARLKKLVGER (SEQ ID NO: 27074)
CC-Di: GEIAALKQEIAALKKENAALKWEIAALKQG (SEQ ID NO: 27075)
Membrane-disrupting/cell-penetrating peptides:
GALA for membrane disruption: WEAALAEALAEALAEHLAEALAEALEALAA (SEQ ID
NO: 27076)
Aurein 1.2: GLFDIIKKIAESF (SEQ ID NO: 27077)
Magainin-1: GIGKFLHSAGKFGKAFVGEIMKS (SEQ ID NO: 27078)
Magainin-2: GIGKFLHSAKKFGKAFVGEIMNS (SEQ ID NO: 27079)
Melittin: GIGAVLKVLTTGLPALISWIKRKRQQ (SEQ ID NO: 27080)
Mastoparan X: INWKGIAAMAKKLL (SEQ ID NO: 27081)
Cecropin A: KWKLFKKIEKVGQNIRDGIIKAGPAVAVVGQATQIAK (SEQ ID NO: 27082)
Cecropin P1: SWLSKTAKKLENSAKKRISEGIAIAIQGGPR (SEQ ID NO: 27083)
Citropin 1.1: GLFDVIKKVASVIGGL (SEQ ID NO: 27084)
Temporin-1Lb: NFLGTLINLAKKIL (SEQ ID NO: 27085)
HPV33 L2 peptide: SYFILRRRRKRFPYFFTDVRVAA (SEQ ID NO: 27086)
Adenovirus pVI membrane fusion domain: AFSWGSLWSGIKNFGSTVKNY (SEQ ID
NO: 27087)
Gamma-1 peptide from flock house virus: ASMWERVKSIIKSSLAAASNI (SEQ ID
NO: 27088)
Poliovirus 2B pore-forming peptide:
VTSTITEKLLKNLIKIISSLVIITRNYEDTTTVLATLALLGCDASPWQWL (SEQ ID NO: 27089)
Rhinovirus pore-forming peptide: IAQNPVENYIDEVLNEVLVVPNIN (SEQ ID
NO: 27090)
Influenza HA2 pore-forming peptide: FLGIAEAIDIGNGWEGMEFG (SEQ ID
NO: 27091)
Influenza HA2 derivative: GLFGAIAGFIENGWEGMIDG (SEQ ID NO: 27092)
HA-derived INF6: GLFGAIAGFIENGWEGMIDGWYG. (SEQ ID NO: 27093)

```
TABLE 4
Modular Co-LOCKR Key domains
  (parentheses are optional sequences of which a
portion can be deleted to tune Key affinity)
  (underlined amino acids can be changed to any
other amino acid to tune latch affinity)
```

>Key SEQ ID NO: 27393
(DEARKAIAR)VKRESKRIVEDAERLIREAAAASEKISR (EAERLIR)
>Key_B SEQ ID NO: 27394
DEAIARVKRESKRIVEDAERLIREAAAASEKISREAERLIR
>Key_C SEQ ID NO: 27395
DEVKRESKRIVEDAERLIREAAAASEKISREAERLIR
>Key_D SEQ ID NO: 27396
DEARKAIARVKRESKRIVEDAERLIREAAAASEKISREAER
>Key_E SEQ ID NO: 27397
DEARKAIARVKRESKRIVEDAERLIREAAAASEKISR
>Key_F SEQ ID NO: 27398
DEARKAIARVKRESKRIVEDAERLIREAAAASEKSSREAERLAR

[0190] In another embodiment, non-naturally occurring polypeptides comprising a polypeptide comprising an amino acid sequence at least 40%, 45%, 50%, 55%, 60%, 65%, 70%, 75%, 80%, 85%, 90%, 91%, 92%, 93%, 94%, 95%, 96%, 97%, 98%, 99%, or 100% identical to the amino acid sequence of a key polypeptide selected from the group consisting of SEQ ID NOS: 26602-27050, and 27,322 to 27,358, as detailed below.
[0191] Key sequences are normal text
[0192] 6His-MBP-TEV, 6His-TEV, and flexible linker sequences are underlined text sequence in bold, italics, are optional residues necessary for biotinylation of MBP_key
[0193] all sequences in parentheses are optional
[0194] Any number of consecutive amino acids from the N or C terminus in the non-optional key sequence may be removed to tune responsiveness

TABLE 5
Other Exemplary Key polypeptides without binding domains

>SB76_C-helix (SEQ ID NO: 27016)
DEARKAIARVKRESKRIVEDAERLIREAAAASEKIS
>SB76_C-helix-biotin (SEQ ID NO: 27017)
DEARKAIARVKRESKRIVEDAERLIREAAAASEKISGSGK-Biotin
>p5_MBP (SEQ ID NO: 27018)
(MDP)DEARKAIARVKRESKRIVEDAERLIREAAAASEKISREA(SSGLVPRGSHMKIEEGKLVIWINGDKGYNG
LAEVGKKFEKDTGIKVTVEHPDKLEEKFPQVAATGDGPDIIFWAHDRFGGYAQSGLLAEITPDKAFQDKLYPFTW
DAVRYNGKLIAYPIAVEALSLIYNKDLLPNPPKTWEEIPALDKELKAKGKSALMFNLQEPYFTWPLIAADGGYAF
KYENGKYDIKDVGVDNAGAKAGLTFLVDLIKNKHMNADTDYSIAEAAFNKGETAMTINGPWAWSNIDTSKVNYGV
TVLPTFKGQPSKPFVGVLSAGINAASPNKELAKEFLENYLLTDEGLEAVNKDKPLGAVALKSYEEELVKDPRIAA
TMENAQKGEIMPNIPQMSAFWYAVRTAVINAASGRQTVDEALKDAQTNSSGSGLNDIFEAQ [symbol] IEWHELEHHHHHH)
>p9_MBP (SEQ ID NO: 27019)
(MDP)DEARKAIARVKRESKRIVEDAERLIREAAAASEKISREAERLIREAA(SSGLVPRGSHMKIEEGKLVIWI
NGDKGYNGLAEVGKKFEKDTGIKVTVEHPDKLEEKFPQVAATGDGPDIIFWAHDREGGYAQSGLLAEITPDKAFQ
DKLYPFTWDAVRYNGKLIAYPIAVEALSLIYNKDLLPNPPKTWEEIPALDKELKAKGKSALMFNLQEPYFTWPLI
AADGGYAFKYENGKYDIKDVGVDNAGAKAGLTFLVDLIKNKHMNADTDYSIAEAAFNKGETAMTINGPWAWSNID
TSKVNYGVTVLPTFKGQPSKPFVGVLSAGINAASPNKELAKEFLENYLLTDEGLEAVNKDKPLGAVALKSYEEEL
VKDPRIAATMENAQKGEIMPNIPQMSAFWYAVRTAVINAASGRQTVDEALKDAQINSSGSGLNDIFEAQ [symbol] IEWHE
LEHHHHHH)
>p18_MBP (SEQ ID NO: 27020)
(MDP)DEARKAIARVKRESKRIVEDAERLIREAAAASEKISREAERLIREAAAASEKISRE(SSGLVPRGSHMKI
EEGKLVIWINGDKGYNGLAEVGKKFEKDTGIKVTVEHPDKLEEKFPQVAATGDGPDIIFWAHDRFGGYAQSGLLA
EITPDKAFQDKLYPFTWDAVRYNGKLIAYPIAVEALSLIYNKDLLPNPPKTWEEIPALDKELKAKGKSALMFNLQ
EPYFTWPLIAADGGYAFKYENGKYDIKDVGVDNAGAKAGLTFLVDLIKNKHMNADTDYSIAEAAFNKGETAMTIN
GPWAWSNIDTSKVNYGVTVLPTFKGQPSKPFVGVLSAGINAASPNKELAKEFLENYLLTDEGLEAVNKDKPLGAV
ALKSYEEELVKDPRIAATMENAQKGEIMPNIPQMSAFWYAVRTAVINAASGRQTVDEALKDAQTNSSGSGLNDIF
EAQ [symbol] IEWHELEHHHHHH)
>MBP_p18 (aka. p76) (SEQ ID NO: 27021)
(MGSSHHHHHHSSGLVPRGSHMKIEEGKLVIWINGDKGYNGLAEVGKKFEKDTGIKVTVEHPDKLEEKFPQVAAT
GDGPDIIFWAHDRFGGYAQSGLLAEITPDKAFQDKLYPFTWDAVRYNGKLIAYPIAVEALSLIYNKDLLPNPPKT
WEEIPALDKELKAKGKSALMFNLQEPYFTWPLIAADGGYAFKYENGKYDIKDVGVDNAGAKAGLIFLVDLIKNKH
MNADTDYSIAEAAFNKGETAMTINGPWAWSNIDTSKVNYGVTVLPTFKGQPSKPFVGVLSAGINAASPNKELAKE
FLENYLLTDEGLEAVNKDKPLGAVALKSYEEELVKDPRIAATMENAQKGEIMPNIPQMSAFWYAVRTAVINAASG
RQTVDEALKDAQTNSGSGSGENLYFQ)DEARKAIARVKRESKRIVEDAERLIREAAAASEKISRE(AERLIREAA
AASERISRE)
>key_b (SEQ ID NO: 27022)
(M)NKEEIEKLAKEAREKLKKAEKEHKEIHDKLRKKNKKAREDLKKKADELRETNKRVN(GSENLYFQGSGSGKI
EEGKLVIWINGDKGYNGLAEVGKKFEKDTGIKVTVEHPDKLEEKFPQVAATGDGPDIIFWAHDRFGGYAQSGLLA
EITPDKAFQDKLYPFTWDAVRYNGKLIAYPIAVEALSLIYNKDLLPNPPKTWEEIPALDKELKAKGKSALMFNLQ
EPYFTWPLIAADGGYAFKYENGKYDIKDVGVDNAGAKAGLTFLVDLIKNKHMNADTDYSIAEAAFNKGETAMTIN
GPWAWSNIDTSKVNYGVTVLPTFKGQPSKPFVGVLSAGINAASPNKELAKEFLENYLLTDEGLEAVNKDKPLGAV
ALKSYEEELVKDPRIAATMENAQKGEIMPNIPQMSAFWYAVRTAVINAASGRQTVDEALKDAQINLEHHHHHH)
>key_c (SEQ ID NO: 27023)
(M)SSEKVRRELKESLKENHKQNQKLLKDHKRAQEKLNRELEELKKKHKKTLDDIRRES(GSENLYFQGSGSGKI
EEGKLVIWINGDKGYNGLAEVGKKFEKDTGIKVTVEHPDKLEEKFPQVAATGDGPDIIFWAHDRFGGYAQSGLLA
EITPDKAFQDKLYPFTWDAVRYNGKLIAYPIAVEALSLIYNKDLLPNPPKTWEEIPALDKELKAKGKSALMENLQ
EPYFTWPLIAADGGYAFKYENGKYDIKDVGVDNAGAKAGLTFLVDLIKNKHMNADTDYSIAEAAFNKGETAMTIN
GPWAWSNIDTSKVNYGVTVLPTFKGQPSKPFVGVLSAGINAASPNKELAKEFLENYLLTDEGLEAVNKDKPLGAV
ALKSYEEELVKDPRIAATMENAQKGEIMPNIPQMSAFWYAVRTAVINAASGRQTVDEALKDAQTNLEHHHHHH)
>key_d (SEQ ID NO: 27024)
(M)DTVKRILEELRRRFEKLAKDLDDIARKLLEDHKKHNKELKDKQRKIKKEADDAARS(GSENLYFQGSGSGKI
EEGKLVIWINGDKGYNGLAEVGKKFEKDTGIKVTVEHPDKLEEKFPQVAATGDGPDIIFWAHDRFGGYAQSGLLA
EITPDKAFQDKLYPFTWDAVRYNGKLIAYPIAVEALSLIYNKDLLPNPPKTWEEIPALDKELKAKGKSALMFNLQ
EPYFTWPLIAADGGYAFKYENGKYDIKDVGVDNAGAKAGLTFLVDLIKNKHMNADTDYSIAEAAFNKGETAMTIN
GPWAWSNIDTSKVNYGVTVLPTFKGQPSKPFVGVLSAGINAASPNKELAKEFLENYLLTDEGLEAVNKDKPLGAV
ALKSYEEELVKDPRIAATMENAQKGEIMPNIPQMSAFWYAVRTAVINAASGRQTVDEALKDAQTNLEHHHHHH)
>key_e (SEQ ID NO: 27025)
(M)DDVERRLRKANKESKKEAEELTEEAKKANEKTKEDSKELTKENRKINKTIKDEARS(GSENLYFQGSGSGKI
EEGKLVIWINGDKGYNGLAEVGKKFEKDTGIKVTVEHPDKLEEKFPQVAATGDGPDIIFWAHDRFGGYAQSGLLA
EITPDKAFQDKLYPFTWDAVRYNGKLIAYPIAVEALSLIYNKDLLPNPPKTWEEIPALDKELKAKGKSALMFNLQ
EPYFTWPLIAADGGYAFKYENGKYDIKDVGVDNAGAKAGLTFLVDLIKNKHMNADTDYSIAEAAFNKGETAMTIN
GPWAWSNIDTSKVNYGVTVLPTFKGQPSKPFVGVLSAGINAASPNKELAKEFLENYLLTDEGLEAVNKDKPLGAV
ALKSYEEELVKDPRIAATMENAQKGEIMPNIPQMSAFWYAVRTAVINAASGRQTVDEALKDAQTNLEHHHHHH)
>key_f (SEQ ID NO: 27026)
(M)DDEERRSEKTVQDAKREIKKVEDDLQRLNEEQKKKVKKQEDENQKTLKKHKDDARS(GSENLYFQGSGSGKI
EEGKLVIWINGDKGYNGLAEVGKKFEKDTGIKVTVEHPDKLEEKFPQVAATGDGPDIIFWAHDRFGGYAQSGLLA
EITPDKAFQDKLYPFTWDAVRYNGKLIAYPIAVEALSLIYNKDLLPNPPKTWEEIPALDKELKAKGKSALMFNLQ
EPYFTWPLIAADGGYAFKYENGKYDIKDVGVDNAGAKAGLTFLVDLIKNKHMNADTDYSIAEAAFNKGETAMTIN
GPWAWSNIDTSKVNYGVTVLPTFKGQPSKPFVGVLSAGINAASPNKELAKEFLENYLLTDEGLEAVNKDKPLGAV
ALKSYEEELVKDPRIAATMENAQKGEIMPNIPQMSAFWYAVRTAVINAASGRQTVDEALKDAQTNLEHHHHHH)
Additional Keys:
Key sequences are normal text
(6His-MBP-TEV, 6His-TEV, and flexible linker sequences are underlined text)
(Co-localization domain is bolded text)
(Positions that can be mutated to any amino acid to tune responsiveness are
underlined bolded text. These are exemplary but not exhaustive.)
(Any number of consecutive amino acids from the N or C terminus in the
non-optional key sequence may be removed to tune responsiveness)
(all sequences in parentheses are optional)
>p76-long (SEQ ID NO: 27027)
(MGSSHHHHHHSSGLVPRGSHMKIEEGKLVIWINGDKGYNGLAEVGKKFEKDTGIKVTVEHPDKLEEKFPQVAAT
GDGPDIIFWAHDRFGGYAQSGLLAEITPDKAFQDKLYPFTWDAVRYNGKLIAYPIAVEALSLIYNKDLLPNPPKT
WEEIPALDKELKAKGKSALMFNLQEPYFTWPLIAADGGYAFKYENGKYDIKDVGVDNAGAKAGLTFLVDLIKNKH
MNADTDYSIAEAAFNKGETAMTINGPWAWSNIDTSKVNYGVTVLPTFKGQPSKPFVGVLSAGINAASPNKELAKE
FLENYLLTDEGLEAVNKDKPLGAVALKSYEEELVKDPRIAATMENAQKGEIMPNIPQMSAFWYAVRTAVINAASG
RQTVDEALKDAQTNSGSGSGENLYFQ)DEARKAIARVKRESKRIVEDAERLIREAAAASEKISREAERL [symbol] REAAA
ASEK [symbol] SRE
>p76-short (SEQ ID NO: 27028)
(MGSSHHHHHHSSGLVPRGSHMKIEEGKLVIWINGDKGYNGLAEVGKKFEKDTGIKVTVEHPDKLEEKFPQVAAT
GDGPDIIFWAHDRFGGYAQSGLLAEITPDKAFQDKLYPFTWDAVRYNGKLIAYPIAVEALSLIYNKDLLPNPPKT
WEEIPALDKELKAKGKSALMFNLQEPYFTWPLIAADGGYAFKYENGKYDIKDVGVDNAGAKAGLTFLVDLIKNKH
MNADTDYSIAEAAFNKGETAMTINGPWAWSNIDTSKVNYGVTVLPTFKGQPSKPFVGVLSAGINAASPNKELAKE
FLENYLLTDEGLEAVNKDKPLGAVALKSYEEELVKDPRIAATMENAQKGEIMPNIPQMSAFWYAVRTAVINAASG
RQTVDEALKDAQTNSGSGSGENLYFQ)DEARKAIARVKRESKRIVEDAERLIREAAAASEK [symbol] SREAERL [symbol] R
>k76-long (SEQ ID NO: 27029)
(MGSSHHHHHHSSGLVPRGSHMKIEEGKLVIWINGDKGYNGLAEVGKKFEKDTGIKVTVEHPDKLEEKFPQVAAT
GDGPDIIFWAHDRFGGYAQSGLLAEITPDKAFQDKLYPFTWDAVRYNGKLIAYPIAVEALSLIYNKDLLPNPPKT
WEEIPALDKELKAKGKSALMFNLQEPYFTWPLIAADGGYAFKYENGKYDIKDVGVDNAGAKAGLTFLVDLIKNKH
MNADTDYSIAEAAFNKGETAMTINGPWAWSNIDTSKVNYGVTVLPTFKGQPSKPFVGVLSAGINAASPNKELAKE
FLENYLLTDEGLEAVNKDKPLGAVALKSYEEELVKDPRIAATMENAQKGEIMPNIPQMSAFWYAVRTAVINAASG
RQTVDEALKDAQTNSGSGSGENLYFQ)DEARKAIARVKRESKRIVEDAERLIREAAQASEKISREAREL [symbol] ERAAQ
ASEK [symbol] SRE
>k76-short (SEQ ID NO: 27030)
(MGSSHHHHHHSSGLVPRGSHMKIEEGKLVIWINGDKGYNGLAEVGKKFEKDTGIKVTVEHPDKLEEKFPQVAAT
GDGPDIIFWAHDRFGGYAQSGLLAEITPDKAFQDKLYPFTWDAVRYNGKLIAYPIAVEALSLIYNKDLLPNPPKT
WEEIPALDKELKAKGKSALMFNLQEPYFTWPLIAADGGYAFKYENGKYDIKDVGVDNAGAKAGLTFLVDLIKNKH
MNADTDYSIAEAAFNKGETAMTINGPWAWSNIDTSKVNYGVTVLPTFKGQPSKPFVGVLSAGINAASPNKELAKE
FLENYLLTDEGLEAVNKDKPLGAVALKSYEEELVKDPRIAATMENAQKGEIMPNIPQMSAFWYAVRTAVINAASG
RQTVDEALKDAQTNSGSGSGENLYFQ)DEARKAIARVKRESKRIVEDAERLIREAAQASEK [symbol] SREAERL [symbol] R
>p76_GLISE (SEQ ID NO: 27031)
(MGSHHHHHHGSGSENLYFQGSGGS)DEARKAIARVKRESKRIVEDAEGLISEAAAASEKISREAERLIREAAAA
SEKISRE
>p76_GSSEKIS (SEQ ID NO: 27032)
(MGSHHHHHHGSGSENLYFQGSGGS)DEARKAIARVKRESKRIVEDAERLIREAAGSSEKISREAERLIREAAAA
SEKISRE
>p76_R26G (SEQ ID NO: 27033)
(MGSHHHHHHGSGSENLYFQGSGGS)DEARKAIARVKRESKRIVEDAERLIGEAAAASEKISREAERLIREAAAA
SEKISRE
>p76-short_E19G (SEQ ID NO: 27034)
(MGSHHHHHHGSGSENLYFQGSGGS)DEARKAIARVKRESKRIVGDAERLIREAAAASEKISREAERLIR
>p76-short_GLISE_E01_EGFR (SEQ ID NO: 27035)
(MGSHHHHHHGSGSENLYFQGSGGS)DEARKAIARVKRESKRIVEDAEGLISEAAAASEKISREAERLIR
>p76-short_AE_EGFR (SEQ ID NO: 27036)
(MGSHHHHHHGSGSENLYFQGSGGS)DEARKAIARVAEESKRIVEDAERLIREAAAASEKISREAERLIR
>p76-short_AAE_EGFR (SEQ ID NO: 27037)
(MGSHHHHHHGSGSENLYFQGSGGS)DEAAKAIARVAEESKRIVEDAERLIREAAAASEKISREAERLIR
>p76-short_EE_EGFR (SEQ ID NO: 27038)
(MGSHHHHHHGSGSENLYFQGSGGS)DEARKAIARVKRESKRIVEDAERLIREAAEASEEISREAERLIR
>p76-spytag (SEQ ID NO: 27039)
(MGSHHHHHHGSGSENLYFQGSGGSMKIEEGKLVIWINGDKGYNGLAEVGKKFEKDTGIKVTVEHPDKLEEKFPQ
VAATGDGPDIIFWAHDRFGGYAQSGLLAEITPDKAFQDKLYPFTWDAVRYNGKLIAYPIAVEALSLIYNKDLLPN
PPKTWEEIPALDKELKAKGKSALMFNLQEPYFTWPLIAADGGYAFKYENGKYDIKDVGVDNAGAKAGLTFLVDLI
KNKHMNADTDYSIAEAAFNKGETAMTINGPWAWSNIDTSKVNYGVTVLPTFKGQPSKPFVGVLSAGINAASPNKE
LAKEFLENYLLTDEGLEAVNKDKPLGAVALKSYEEELVKDPRIAATMENAQKGEIMPNIPQMSAFWYAVRTAVIN
AASGRQTVDEALKDAQTNSGSGSGENLYFQ)DEARKAIARVKRESKRIVEDAERLIREAAAASEKISREAERL [symbol] R
EAAAASEK [symbol] SRE(GGGSGSGSGSGKPGQASGS)AHIVMVDAYKPTK
>p76-short-spytag (SEQ ID NO: 27040)
(MGSHHHHHHGSGSENLYFQGSGGSMKIEEGKLVIWINGDKGYNGLAEVGKKFEKDTGIKVTVEHPDKLEEKFPQ
VAATGDGPDIIFWAHDRFGGYAQSGLLAEITPDKAFQDKLYPFTWDAVRYNGKLIAYPIAVEALSLIYNKDLLPN
PPKTWEEIPALDKELKAKGKSALMFNLQEPYFTWPLIAADGGYAFKYENGKYDIKDVGVDNAGAKAGLTFLVDLI
KNKHMNADTDYSIAEAAFNKGETAMTINGPWAWSNIDTSKVNYGVTVLPTFKGQPSKPFVGVLSAGINAASPNKE
LAKEFLENYLLTDEGLEAVNKDKPLGAVALKSYEEELVKDPRIAATMENAQKGEIMPNIPQMSAFWYAVRTAVIN
AASGRQTVDEALKDAQTNSGSGSGENLYFQ)DEARKAIARVKRESKRIVEDAERLIREAAAASEK [symbol] SREAERL [symbol] R
(GGGSGSGSGSGKPGQASGS)AHIVMVDAYKPTK
>sfGFP_VMAn_p18 (SEQ ID NO: 27041)
(MGSSHHHHHHSSGLVPRGSHMSKGEELFTGVVPILVELDGDVNGHKFSVRGEGEGDATNGKLTLKFICTTGKLP
VPWPTLVTTLTYGVQCFARYPDHMKQHDFFKSAMPEGYVQERTISFKDDGTYKTRAEVKFEGDTLVNRIELKGID
FKEDGNILGHKLEYNFNSHNVYITADKQKNGIKANFKIRHNVEDGSVQLADHYQQNTPIGDGPVLLPDNHYLSTQ
SVLSKDPNEKRDHMVLLEFVTAAGITHGMDELYKSGSGSGCFAKGTNVLMADGSIECIENIEVGNKVMGKDGRPR
EVIKLPRGRETMYSVVQKSQHRAHKSDSSREVPELLKFTCNATHELVVRTPRSVRRLSRTIKGVEYFEVITFEMG
QKKAPDGRIVELVKEVSKSYPISEGPERANELVESYRKASNKAYFEWTIEARDLSLLGSHVRKATYQTYAPILYG
GSGGS)DEARKAIARVKRESKRIVEDAERLIREAAAASEKISREAERLIREAAAASEKISRE
>p18_VMAc_mCherry (SEQ ID NO: 27042)
(MGSHHHHHHGSGSENLYFQGSG)DEARKAIARVKRESKRIVEDAERLIREAAAASEKISREAERLIREAAAASE
KISRE(GSGGSGSGGGVLLNVLSKCAGSKKFRPAPAAAFARECRGFYFELQELKEDDYYGITLSDDSDHQFLLAN
QVVVHNCGSGGSVSKGEEDNMAIIKEFMRFKVHMEGSVNGHEFEIEGEGEGRPYEGTQTAKLKVTKGGPLPFAWD
ILSPQFMYGSKAYVKHPADIPDYLKLSFPEGFKWERVMNFEDGGVVTVTQDSSLQDGEFIYKVKLRGTNFPSDGP
VMQKKTMGWEASSERMYPEDGALKGEIKQRLKLKDGGHYDAEVKTTYKAKKPVQLPGAYNVNIKLDITSHNEDYT
IVEQYERAEGRHSTGGMDELYK)
(Cognate Keys for 2plus1 and 3plus1 STREPII-LOCKR functional Cage designs):
>2plus1_KEY_100000.fasta alt_STREP_2plus1_1 (SEQ ID NO: 27043)
DKVRKVAEVAEKVLRDIDKLDRESKEAFRRTNGEISKLDEDTRRVAERVKKAIEDLAK
>2plus1_KEY_2 (SEQ ID NO: 27044)
SEVDEIIADNERALDEVRREVEEIDKENAERLKEWVEEAREILDRLAKALEEIR
>2plus1_KEY_3 (SEQ ID NO: 27045)
PEEALSKAIKDVRDIVKKVKDELKEWRDRNKELVDRLSEELKEWLKDVERVLKELTDKDR
>2plus1_KEY_4 (SEQ ID NO: 27046)
ERVREELKKLLTRVEEEHRKVLETDKKILKEAHKESKEVNDRDRELLERLEESVR
>3plus1_KEY_1 (SEQ ID NO: 27047)
SRLVKKLDEIVKEVAKKLEDVVRANEELWRKLVELNKESVARLREAVERVARDLEETAR
>3plus1_KEY_2 (SEQ ID NO: 27048)
DEERLEKVVKDVIEKVRRILEKWKKDIDKVVKELRRILEEWEKIIREVLDKVR
>3plus1_KEY_3 (SEQ ID NO: 27049)
KDAVIKVIEKLIRANAAVWDALLKINEDLVRVNKTVWKELLRVNEKLARDLERVVK
>3plus1_KEY_4 (SEQ ID NO: 27050)
SLVDELRKSLERNVRVSEEVARRLKEALKRWVDVVRKVVEDLIRLNEDVVRVVEK
SEQ ID NOs: 26,602-27,015:
>3plus1_GFP11_Key_Cterm_1 (SEQ ID NO: 26602)
SGSKEVLDILERAVEVVRRVIKALKEVLERHVDATREVIERVKRVNKRLLEAVREVVT
>3plus1_GFP11_Key_Cterm_2 (SEQ ID NO: 26603)
GVPEEIDRELKRVVEELRRLHEEIKERLDDVARRSEEELRRIIKKLKEVVKEIRKKLK
>3plus1_GFP11_Key_Cterm_3 (SEQ ID NO: 26604)
DLLRKLEEELRRIKEKLRKALEELEREHRELEKELDKLHDESRKEHERIEEELRR
>3plus1_GFP11_Key_Cterm_4 (SEQ ID NO: 26605)
DEDLLEKIKRVIREHIKALEKLARDLKEILRRHIEALKELARDLAEVIRKLLEDVKR
>3plus1_GFP11_Key_Cterm_5 (SEQ ID NO: 26606)
DLERLRRKVEELEDRLRRLLEKLARDSAELMRELERILDRYARESEELDRRLAE
>3plus1_GFP11_Key_Cterm_6 (SEQ ID NO: 26607)
DLEDILRKNLDRLRKLLERLREILRENLEALKKTLKRLEDVVREILEDLKRERK
>3plus1_GFP11_Key_Cterm_7 (SEQ ID NO: 26608)
DLERLRRKVEELEDRLRRLLEKLARDSAELMRELERILDRYARESEELDRRLAE
>3plus1_GFP11_Key_Cterm_8 (SEQ ID NO: 26609)
SGSKEVLDILERAVEVVRRVIKALKEVLERHVDATREVIERVKRVNKRLLEAVREVVT
>3plus1_GFP11_Key_Cterm_9 (SEQ ID NO: 26610)
DLERLRRKVEELEDRLRRLLEKLARDSAELMRELERILDRYARESEELDRRLAE
>3plus1_GFP11_Key_Cterm_10 (SEQ ID NO: 26611)
RLIEEVVRLLRENLDVVRRILEALAKLIKELLEALEEVLRRNKELIRELLRVLDEALK
>3plus1_GFP11_Key_Cterm_11 (SEQ ID NO: 26612)
DIVRAMEEVIRRLIEILRRDVELNLDVAKKLLELLKEDSKLNLDVARELLELLDR
>3plus1_GFP11_Key_Cterm_12 (SEQ ID NO: 26613)
DIVRAMEEVIRRLIEILRRDVELNLDVAKKLLELLKEDSKLNLDVARELLELLDR
>3plus1_GFP11_Key_Cterm_13 (SEQ ID NO: 26614)
RLIEEVVRLLRENLDVVRRILEALAKLIKELLEALEEVLRRNKELIRELLRVLDEALK
>3plus1_GFP11_Key_Cterm_14 (SEQ ID NO: 26615)
RLIEEVVRLLRENLDVVRRILEALAKLIKELLEALEEVLRRNKELIRELLRVLDEALK
>3plus1_GFP11_Key_Cterm_15 (SEQ ID NO: 26616)
DLLRKLEEELRRIKEKLRKALEELEREHRELEKELDKLHDESRKEHERIEEELRR
>3plus1_GFP11_Key_Cterm_16 (SEQ ID NO: 26617)
DLLRKLEEELRRIKEKLRKALEELEREHRELEKELDKLHDESRKEHERIEEELRR
>3plus1_GFP11_Key_Cterm_17 (SEQ ID NO: 26618)
ELAREVERVIKELLDKSKEILERIERAIDELLKVSEEILKLSEDASEELLKILREFAK
>3plus1_GFP11_Key_Cterm_18 (SEQ ID NO: 26619)
DVKDIIRTILEVARDLLRLLEEDSRTNSEVVKRLLDLLREDSKANSEVVKRLLDVLRE
>3plus1_GFP11_Key_Cterm_19 (SEQ ID NO: 26620)
DLERLRRKVEELEDRLRRLLEKLARDSAELMRELERILDRYARESEELDRRLAE
>3plus1_GFP11_Key_Cterm_20 (SEQ ID NO: 26621)
DLERLRRKVEELEDRLRRLLEKLARDSAELMRELERILDRYARESEELDRRLAE
>3plus1_GFP11_Key_Cterm_21 (SEQ ID NO: 26622)
RLIEEVVRLLRENLDVVRRILEALAKLIKELLEALEEVLRRNKELIRELLRVLDEALK
>3plus1_GFP11_Key_Cterm_22 (SEQ ID NO: 26623)
DLEDILRKNLDRLRKLLERLREILRENLEALKKTLKRLEDVVREILEDLKRERK
>3plus1_GFP11_Key_Cterm_23 (SEQ ID NO: 26624)
DLLRKLEEELRRIKEKLRKALEELEREHRELEKELDKLHDESRKEHERIEEELRR
>3plus1_GFP11_Key_Cterm_24 (SEQ ID NO: 26625)
DEDLLEKIKRVIREHIKALEKLARDLKEILRRHIEALKELARDLAEVIRKLLEDVKR
>3plus1_GFP11_Key_Cterm_25 (SEQ ID NO: 26626)
ELVRIAIEVLKRLLEIIEELVRLNNEILERLLKIVRELHKDNIKILEDLLRIIEEVLR
>3plus1_GFP11_Key_Cterm_26 (SEQ ID NO: 26627)
ELVRIAIEVLKRLLEIIEELVRLNNEILERLLKIVRELHKDNIKILEDLLRIIEEVLR
>3plus1_GFP11_Key_Cterm_27 (SEQ ID NO: 26628)
RLARLLKALADKLIRVLEEILKINEELNRKIIKFARENLERNRRVNKKVIEVLREAAR
>3plus1_GFP11_Key_Cterm_28 (SEQ ID NO: 26628)
DLERLRRKVEELEDRLRRLLEKLARDSAELMRELERILDRYARESEELDRRLAE
>3plus1_GFP11_Key_Cterm_29 (SEQ ID NO: 26630)
ELVRIAIEVLKRLLEIIEELVRLNNEILERLLKIVRELHKDNIKILEDLLRIIEEVLR
>3plus1_GFP11_Key_Cterm_30 (SEQ ID NO: 26631)
ELVRIAIEVLKRLLEIIEELVRLNNEILERLLKIVRELHKDNIKILEDLLRIIEEVLR
>3plus1_GFP11_Key_Cterm_31 (SEQ ID NO: 26632)
DIVRAMEEVIRRLIEILRRDVELNLDVAKKLLELLKEDSKLNLDVARELLELLDR
>3plus1_GFP11_Key_Cterm_32 (SEQ ID NO: 26633)
RKIAKIIEELKRLLEDLARDIRRVIEEAKRLLKEWRDRNKEVADTLKKLLEDLIRKIR
>3plus1_GFP11_Key_Cterm_33 (SEQ ID NO: 26634)
DLLRKLEEELRRIKEKLRKALEELEREHRELEKELDKLHDESRKEHERIEEELRR
>3plus1_GFP11_Key_Cterm_34 (SEQ ID NO: 26635)
DLLRKLEEELRRIKEKLRKALEELEREHRELEKELDKLHDESRKEHERIEEELRR
>3plus1_GFP11_Key_Cterm_35 (SEQ ID NO: 26636)
RKIAKIIEELKRLLEDLARDTRRVIEEAKRLLKEWRDRNKEVADTLKKLLEDLIRKIR
>3plus1_GFP11_Key_Cterm_36 (SEQ ID NO: 26637)
ELVRIAIEVLKRLLEIIEELVRLNNEILERLLKIVRELHKDNIKILEDLLRIIEEVLR
>3plus1_GFP11_Key_Cterm_37 (SEQ ID NO: 26638)
TVRRLREALKKLEDDLRKIERDAEREYKKLKDELEELTERYRREIRKLKEELKADRK
>3plus1_GFP11_Key_Cterm_38 (SEQ ID NO: 26639)
DEAERRRRELKDKLDRLREEHEEVKRRLEEELTRLRETHKKIEKELREALKRVRDRST
>3plus1_GFP11_Key_Cterm_39 (SEQ ID NO: 26640)
DEAERRRRELKDKLDRLREEHEEVKRRLEEELTRLRETHKKIEKELREALKRVRDRST
>3plus1_GFP11_Key_Cterm_40 (SEQ ID NO: 26641)
DLEDILRKNLDRLRKLLERLREILRENLEALKKTLKRLEDVVREILEDLKRERK
>3plus1_GFP11_Key_Cterm_41 (SEQ ID NO: 26642)
DLERLRRKVEELEDRLRRLLEKLARDSAELMRELERILDRYARESEELDRRLAE
>3plus1_GFP11_Key_Cterm_42 (SEQ ID NO: 26643)
DEAERRRRELKDKLDRLREEHEEVKRRLEEELTRLRETHKKIEKELREALKRVRDRST
>3plus1_GFP11_Key_Cterm_43 (SEQ ID NO: 26644)
DEAERRRRELKDKLDRLREEHEEVKRRLEEELTRLRETHKKIEKELREALKRVRDRST
>3plus1_GFP11_Key_Cterm_44 (SEQ ID NO: 26645)
DEAERRRRELKDKLDRLREEHEEVKRRLEEELTRLRETHKKIEKELREALKRVRDRST
>3plus1_GFP11_Key_Cterm_45 (SEQ ID NO: 26646)
DKAVEELEKALEEIKRRLKEVIDRYEDELRKLRKEYKEKIDKYERKLEEIERRERT
>3plus1_GFP11_Key_Cterm_46 (SEQ ID NO: 26647)
DVKRALEELVSRLRKLLEDVKKASEDIVREVERIVRELAKRSDEILKKLEDIVEKLRE
>3plus1_GFP11_Key_Cterm_47 (SEQ ID NO: 26648)
DVKRALEELVSRLRKLLEDVKKASEDIVREVERIVRELAKRSDEILKKLEDIVEKLRE
>3plus1_GFP11_Key_Cterm_48 (SEQ ID NO: 26649)
DEAERRRRELKDKLDRLREEHEEVKRRLEEELTRLRETHKKIEKELREALKRVRDRST
>3plus1_GFP11_Key_Cterm_49 (SEQ ID NO: 26650)
DVKRALEELVSRLRKLLEDVKKASEDIVREVERIVRELAKRSDEILKKLEDIVEKLRE
>3plus1_GFP11_Key_Cterm_50 (SEQ ID NO: 26651)
EVKRRLEEKERRIRTRYEELRRRLRKRVKDYEDKLREIEKKVRRDAERIEEELERAKK
>3plus1_GFP11_Key_Cterm_51 (SEQ ID NO: 26652)
DEAERRRRELKDKLDRLREEHEEVKRRLEEELTRLRETHKKIEKELREALKRVRDRST
>3plus1_GFP11_Key_Cterm_52 (SEQ ID NO: 26653)
KIAEEIERELEELRRMIKRLHEDLERKLKESEDELREIEARLEEKIRRLEEKLERKRR
>3plus1_GFP11_Key_Cterm_53 (SEQ ID NO: 26654)
KIAEEIERELEELRRMIKRLHEDLERKLKESEDELREIEARLEEKIRRLEEKLERKRR
>3plus1_GFP11_Key_Cterm_54 (SEQ ID NO: 26655)
DKAVEELEKALEEIKRRLKEVIDRYEDELRKLRKEYKEKIDKYERKLEEIERRERT
>3plus1_GFP11_Key_Cterm_55 (SEQ ID NO: 26656)
KIAEEIERELEELRRMIKRLHEDLERKLKESEDELREIEARLEEKIRRLEEKLERKRR
>3plus1_GFP11_Key_Cterm_56 (SEQ ID NO: 26657)
ELVRIAIEVLKRLLEIIEELVRLNNEILERLLKIVRELHKDNIKILEDLLRIIEEVLR
>3plus1_GFP11_Key_Cterm_57 (SEQ ID NO: 26658)
DEVEREIRRVKEDLDRILEEYRRLLEEIKRKLEEILRRVEELHRRLRRKLEEIDR
>3plus1_GFP11_Key_Cterm_58 (SEQ ID NO: 26659)
DVKRALEELVSRLRKLLEDVKKASEDIVREVERIVRELAKRSDEILKKLEDIVEKLRE
>3plus1_GFP11_Key_Cterm_59 (SEQ ID NO: 26660)
DEAERRRRELKDKLDRLREEHEEVKRRLEEELTRLRETHKKIEKELREALKRVRDRST
>3plus1_GFP11_Key_Cterm_60 (SEQ ID NO: 26661)
DEAERRRRELKDKLDRLREEHEEVKRRLEEELTRLRETHKKIEKELREALKRVRDRST
>3plus1_GFP11_Key_Cterm_61 (SEQ ID NO: 26662)
TLREVVRKVLEEAKRLLDELEEVHKRVKKELEDIIEENRRVVKRVRDELREIKRELDE
>3plus1_GFP11_Key_Cterm_62 (SEQ ID NO: 26663)
DVKRALEELVSRLRKLLEDVKKASEDIVREVERIVRELAKRSDEILKKLEDIVEKLRE
>3plus1_GFP11_Key_Cterm_63 (SEQ ID NO: 26664)
DVKRALEELVSRLRKLLEDVKKASEDIVREVERIVRELAKRSDEILKKLEDIVEKLRE
>3plus1_GFP11_Key_Cterm_64 (SEQ ID NO: 26665)
DEAERRRRELKDKLDRLREEHEEVKRRLEEELTRLRETHKKIEKELREALKRVRDRST
>3plus1_GFP11_Key_Cterm_65 (SEQ ID NO: 26666)
DEAERRRRELKDKLDRLREEHEEVKRRLEEELTRLRETHKKIEKELREALKRVRDRST
>3plus1_GFP11_Key_Cterm_66 (SEQ ID NO: 26667)
KIAEEIERELEELRRMIKRLHEDLERKLKESEDELREIEARLEEKIRRLEEKLERKRR
>3plus1_GFP11_Key_Cterm_67 (SEQ ID NO: 26668)
DVKRALEELVSRLRKLLEDVKKASEDIVREVERIVRELAKRSDEILKKLEDIVEKLRE
>3plus1_GFP11_Key_Nterm_68 (SEQ ID NO: 26669)
SEAERLADEVRKAVKKSEEDNETLVREVEKAVRELKKNNKTWVDEVRKLMKRLVDLLR
>3plus1_GFP11_Key_Nterm_69 (SEQ ID NO: 26670)
SEAERLADEVRKAVKKSEEDNETLVREVEKAVRELKKNNKTWVDEVRKLMKRLVDLLR
>3plus1_GFP11_Key_Nterm_70 (SEQ ID NO: 26671)
DKDKRLEELLKRLKELNDKTFEELERILEELKRANEASLREAERILEELRARIEGGNL
>3plus1_GFP11_Key_Nterm_71 (SEQ ID NO: 26672)
SEAEDLEELIKELAELLKDVIRKLEKINRRLVKILEDIIRRLKEISKEAEEELRKGTV
>3plus1_GFP11_Key_Nterm_72 (SEQ ID NO: 26673)
SDKEEIKRRVEKTARDLETEHDKIKKRLEDTVRDIKRELDELLEKYERVLRKIEKTLR
>3plus1_GFP11_Key_Nterm_73 (SEQ ID NO: 26674)
SEAEKIREALETNLRLLEELIKRLKEILDTHNELLRRVIETLERLLKELLELLEEGGL
>3plus1_GFP11_Key_Nterm_74 (SEQ ID NO: 26675)
SEAEKIREALETNLRLLEELIKRLKEILDTHNELLRRVIETLERLLKELLELLEEGGL
>3plus1_GFP11_Key_Nterm_75 (SEQ ID NO: 26676)
SKEERLREVAEKHKKDLEDIVKRVDEAAKETARRLEEILKRLEEVLKKILDDLEKGPD
>3plus1_GFP11_Key_Nterm_76 (SEQ ID NO: 26677)
SLEEITKRLLELVEENLARHEEILRELLELAKRLAKEDRDILEEVLKLIEELLKLLED
>3plus1_GFP11_Key_Nterm_77 (SEQ ID NO: 26678)
SKEETLKRLLDELEKRNRETVERLERLLKELEDRNRASLEELEAVLEELERKIEESGL
>3plus1_GFP11_Key_Nterm_78 (SEQ ID NO: 26679)
SKEETLKRLLDELEKRNRETVERLERLLKELEDRNRASLEELEAVLEELERKIEESGL
>3plus1_GFP11_Key_Nterm_79 (SEQ ID NO: 26680)
SKEETLKRLLDELEKRNRETVERLERLLKELEDRNRASLEELEAVLEELERKIEESGL
>3plus1_GFP11_Key_Nterm_80 (SEQ ID NO: 26681)
STREKAKKVLDTLRADNEDMKRVVEKILRALKRTNERAEKLAREITEEIKRILKEVGV
>3plus1_GFP11_Key_Nterm_81 (SEQ ID NO: 26682)
DAEEVVKRLADVLRENDETIRKVVEDLVRIAEENDRLWKKLVEDIAEILRRIVELLRR
>3plus1_GFP11_Key_Nterm_82 (SEQ ID NO: 26683)
SKEETLKRLLDELEKRNRETVERLERLLKELEDRNRASLEELEAVLEELERKIEESGL
>3plus1_GFP11_Key_Nterm_83 (SEQ ID NO: 26684)
STREKAKKVLDTLRADNEDMKRVVEKILRALKRTNERAEKLAREITEEIKRILKEVGV
>3plus1_GFP11_Key_Nterm_84 (SEQ ID NO: 26685)
SKEEEVEKVLRKWEEILRRLIEENKRANDKIRREYEELVKEIRRVLEEIKEVAERLGV
>3plus1_GFP11_Key_Nterm_85 (SEQ ID NO: 26686)
DREKSVRDIEEDLKRVLDKLRRRVETSKEELKKVLKADKENADELEKTLRDVVRELDR
>3plus1_GFP11_Key_Nterm_86 (SEQ ID NO: 26687)
SDKEEIKRRVEKTARDLETEHDKIKKRLEDTVRDIKRELDELLEKYERVLRKIEKTLR
>3plus1_GFP11_Key_Nterm_87 (SEQ ID NO: 26688)
STREKAKKVLDTLRADNEDMKRVVEKILRALKRTNERAEKLAREITEEIKRILKEVGV
>3plus1_GFP11_Key_Nterm_88 (SEQ ID NO: 26689)
SKDEELARLLEELVERWRKIVEDLERDHRRLVKEIRELVERIRKKLEELVDRIRKNGI
>3plus1_GFP11_Key_Nterm_89 (SEQ ID NO: 26690)
SEAERLADEVRKAVKKSEEDNETLVREVEKAVRELKKNNKTWVDEVRKLMKRLVDLLR
>3plus1_GFP11_Key_Nterm_90 (SEQ ID NO: 26691)
SKDEELARLLEELVERWRKIVEDLERDHRRLVKEIRELVERIRKKLEELVDRIRKNGI
>3plus1_GFP11_Key_Nterm_91 (SEQ ID NO: 26692)
KEIEETLKELEDLNREMVETNRRVLEETRRLNKETVDRVKATLDELAKMLKKLVDDVR
>3plus1_GFP11_Key_Nterm_92 (SEQ ID NO: 26693)
SEAERLADEVRKAVKKSEEDNETLVREVEKAVRELKKNNKTWVDEVRKLMKRLVDLLR
>3plus1_GFP11_Key_Nterm_93 (SEQ ID NO: 26694)
SKEETLKRLLDELEKRNRETVERLERLLKELEDRNRASLEELEAVLEELERKIEESGL
>3plus1_GFP11_Key_Nterm_94 (SEQ ID NO: 26695)
DKAEVLREALKLLKDLLEELIKIHEESLKRILDLIDTLVKVHEDALRALKELLERSGL
>3plus1_GFP11_Key_Nterm_95 (SEQ ID NO: 26696)
SKEEEVEKVLRKWEEILRRLIEENKRANDKIRREYEELVKEIRRVLEEIKEVAERLGV
>3plus1_GFP11_Key_Nterm_96 (SEQ ID NO: 26697)
SKEETLKRLLDELEKRNRETVERLERLLKELEDRNRASLEELEAVLEELERKIEESGL
>3plus1_GFP11_Key_Cterm_97 (SEQ ID NO: 26698)
SERVKEILERILRVVEEAVRLNEESLRRILDVVRKAVKLDRESLKKILDVVEEAVR
>3plus1_GFP11_Key_Cterm_98 (SEQ ID NO: 26699)
SERVKEILERILRVVEEAVRLNEESLRRILDVVRKAVKLDRESLKKILDVVEEAVR
>3plus1_GFP11_Key_Cterm_99 (SEQ ID NO: 26700)
DERRIAERIRELLRESKKLVRDVVEEAKRLLKENRDSTRKIIEDIRRLLRKIEDSTR
>3plus1_GFP11_Key_Cterm_100 (SEQ ID NO: 26701)
DALSRLLEELLRVVDDLIRVLKELIDKSRKVIEELLELLKRINEENLKVLAEIIK
>3plus1_GFP11_Key_Cterm_101 (SEQ ID NO: 26702)
DERRIAERIRELLRESKKLVRDVVEEAKRLLKENRDSTRKIIEDIRRLLRKIEDSTR
>3plus1_GFP11_Key_Cterm_102 (SEQ ID NO: 26703)
EALRKLVELLVEVLRRLIRVNRELVKLLREVLERLLRILRESVKKLKRLIEKVIKDAT
>3plus1_GFP11_Key_Cterm_103 (SEQ ID NO: 26704)
EALRKLVELLVEVLRRLIRVNRELVKLLREVLERLLRILRESVKKLKRLIEKVIKDAT
>3plus1_GFP11_Key_Cterm_104 (SEQ ID NO: 26705)
AAKRLVEELLKAVTDLSRKNKRILEELLKAIETLSDENKKILTEILDALRRLVEKIEK
>3plus1_GFP11_Key_Cterm_105 (SEQ ID NO: 26706)
EALRKLVELLVEVLRRLIRVNRELVKLLREVLERLLRILRESVKKLKRLIEKVIKDAT
>3plus1_GFP11_Key_Cterm_106 (SEQ ID NO: 26707)
EALRKLVELLVEVLRRLIRVNRELVKLLREVLERLLRILRESVKKLKRLIEKVIKDAT
>3plus1_GFP11_Key_Cterm_107 (SEQ ID NO: 26708)
DALSRLLEELLRVVDDLIRVLKELIDKSRKVIEELLELLKRINEENLKVLAEIIK
>3plus1_GFP11_Key_Cterm_108 (SEQ ID NO: 26709)
DALSRLLEELLRVVDDLIRVLKELIDKSRKVIEELLELLKRINEENLKVLAEIIK
>3plus1_GFP11_Key_Cterm_109 (SEQ ID NO: 26710)
RAVKKLDEIVKEVAKKLEDVVRANEELWRALVELNKESVRRLREIVERVARDLEETAR
>3plus1_GFP11_Key_Cterm_110 (SEQ ID NO: 26711)
DRLDKVEELVKKLLEDTKRTVDRVRELVRKILKKSRETLEELERLIEKILRELEKDAR
>3plus1_GFP11_Key_Cterm_111 (SEQ ID NO: 26712)
DALSRLLEELLRVVDDLIRVLKELIDKSRKVIEELLELLKRINEENLKVLAEIIK
>3plus1_GFP11_Key_Cterm_112 (SEQ ID NO: 26713)
RAVKKLDEIVKEVAKKLEDVVRANEELWRALVELNKESVRRLREIVERVARDLEETAR
>3plus1_GFP11_Key_Cterm_113 (SEQ ID NO: 26714)
RAVKKLDEIVKEVAKKLEDVVRANEELWRALVELNKESVRRLREIVERVARDLEETAR
>3plus1_GFP11_Key_Cterm_114 (SEQ ID NO: 26715)
SEDDLKRVVDEVEKKLRELKRRYAEALERIKEKIKELKDRYERAVREVVAELRKTTK
>3plus1_GFP11_Key_Cterm_115 (SEQ ID NO: 26716)
RAVKKLDEIVKEVAKKLEDVVRANEELWRALVELNKESVRRLREIVERVARDLEETAR
>3plus1_GFP11_Key_Cterm_116 (SEQ ID NO: 26717)
DEVEREIRRVKEDLDRILEEYRRLLEEIKRKLEEILRRVEELHRRLRRKLEEIDR
>3plus1_GFP11_Key_Cterm_117 (SEQ ID NO: 26718)
SEDDLKRVVDEVEKKLRELKRRYAEALERIKEKIKELKDRYERAVREVVAELRKTTK
>3plus1_GFP11_Key_Nterm_118 (SEQ ID NO: 26719)
DEAKELLDEIRKAVKESEDRLEKLLRDYEKELRRLEKELRDLKRRIEEKLEELRRGSL
>3plus1_GFP11_Key_Nterm_119 (SEQ ID NO: 26720)
SEKEDAARKLRKLVEELTREYEELVKKLERLIEEIEKVSEESVRKLEKLLAEISEEVR
>3plus1_GFP11_Key_Nterm_120 (SEQ ID NO: 26721)
SEDEIIKKIIEDLRRVLKEVEEIHKEVEERLDKVLKEAEEMHKEVLKELDRVLDEVKR
>3plus1_GFP11_Key_Nterm_121 (SEQ ID NO: 26722)
SKAEEIAEKLDRLLEENRRALEEITTRLDDLLRRNKDALRKVMEKLKRLLDDLRRGGI
>3plus1_GFP11_Key_Nterm_122 (SEQ ID NO: 26723)
SEKEKLLKESEEEVRRLRRTLEELLRKYREVLERLRKELREIEERVRDVVRRLKEVLD
>3plus1_GFP11_Key_Nterm_123 (SEQ ID NO: 26724)
SEKEDAARKLRKLVEELTREYEELVKKLERLIEEIEKVSEESVRKLEKLLAEISEEVR
>3plus1_GFP11_Key_Nterm_124 (SEQ ID NO: 26725)
SKEETLRKEAEDLLRRLEELTRRLEKKARELLERAKKLSRDLAEELKRLLKELREKGV
>3plus1_GFP11_Key_Nterm_125 (SEQ ID NO: 26726)
SEKEDAARKLRKLVEELTREYEELVKKLERLIEEIEKVSEESVRKLEKLLAEISEEVR
>3plus1_GFP11_Key_Nterm_126 (SEQ ID NO: 26727)
SKAEEIAEKLDRLLEENRRALEEITTRLDDLLRRNKDALRKVMEKLKRLLDDLRRGGI
>3plus1_GFP11_Key_Nterm_127 (SEQ ID NO: 26728)
SEKEDAARKLRKLVEELTREYEELVKKLERLIEEIEKVSEESVRKLEKLLAEISEEVR
>3plus1_GFP11_Key_Nterm_128 (SEQ ID NO: 26729)
SKAEEIAEKLDRLLEENRRALEEITTRLDDLLRRNKDALRKVMEKLKRLLDDLRRGGI
>3plus1_GFP11_Key_Nterm_129 (SEQ ID NO: 26730)
SKEETLRKEAEDLLRRLEELTRRLEKKARELLERAKKLSRDLAEELKRLLKELREKGV
>3plus1_GFP11_Key_Nterm_130 (SEQ ID NO: 26731)
SRVEELKKLIEDILRISREVVERIKRVAEDIHRINRRVLDDLRKLIEDILRTVEEILA
>3plus1_GFP11_Key_Nterm_131 (SEQ ID NO: 26732)
SKEETLRKEAEDLLRRLEELTRRLEKKARELLERAKKLSRDLAEELKRLLKELREKGV
>3plus1_GFP11_Key_Nterm_132 (SEQ ID NO: 26733)
SKAEEIAEKLDRLLEENRRALEEITTRLDDLLRRNKDALRKVMEKLKRLLDDLRRGGI
>3plus1_GFP11_Key_Nterm_133 (SEQ ID NO: 26734)
SKEETLRKEAEDLLRRLEELTRRLEKKARELLERAKKLSRDLAEELKRLLKELREKGV
>3plus1_GFP11_Key_Nterm_134 (SEQ ID NO: 26735)
SEKEDAARKLRKLVEELTREYEELVKKLERLIEEIEKVSEESVRKLEKLLAEISEEVR
>3plus1_GFP11_Key_Nterm_135 (SEQ ID NO: 26736)
SKEETLRKEAEDLLRRLEELTRRLEKKARELLERAKKLSRDLAEELKRLLKELREKGV
>3plus1_GFP11_Key_Nterm_136 (SEQ ID NO: 26737)
SERETVKRRLEELLKEVKRTLDKLKEEHDRLLEDVRRVVEELKREHDKLLKEVKDSGV
>3plus1_GFP11_Key_Nterm_137 (SEQ ID NO: 26738)
SEKEDAARKLRKLVEELTREYEELVKKLERLIEEIEKVSEESVRKLEKLLAEISEEVR
>3plus1_GFP11_Key_Nterm_138 (SEQ ID NO: 26739)
SKEETLRKEAEDLLRRLEELTRRLEKKARELLERAKKLSRDLAEELKRLLKELREKGV
>3plus1_GFP11_Key_Nterm_139 (SEQ ID NO: 26740)
KEREEVKEKLDRLLEEVEKTVRELKREHDELLKEVEKLVRDLKKEHDELLKKVKDDGV
>3plus1_GFP11_Key_Nterm_140 (SEQ ID NO: 26741)
SREEVLRELEEVIEDNRRLLEELIEKSKKVLDESLKLIDELLRRLEEVLERVLRLLEE
>2plus1_GFP11_Key_Cterm_1 (SEQ ID NO: 26742)
DEVVKRVRDLLDTVRRRNEKVNEDVKRMNDKLRRDNEDVIRRVEKLLRELEEKRRT
>2plus1_GFP11_Key_Cterm_2 (SEQ ID NO: 26743)
SEDSVERIARELERNLDDLARVLKESEDDLAEILRRLKEVLEESERDLERVEREVRK
>2plus1_GFP11_Key_Cterm_3 (SEQ ID NO: 26744)
SKELLEKAKAVVDEIKRLAEESLKRLEDLSRDHKRRAKELNDEIAKVVDELAKRAT
>2plus1_GFP11_Key_Cterm_4 (SEQ ID NO: 26745)
SKEKIDRIIRELERILEEAKKKHEDVLRRLEDSLRRVAELLKAALDRLREIVDRLRR
>2plus1_GFP11_Key_Cterm_5 (SEQ ID NO: 26746)
DEVVKRVRDLLDTVRRRNEKVNEDVKRMNDKLRRDNEDVIRRVEKLLRELEEKRRT
>2plus1_GFP11_Key_Cterm_6 (SEQ ID NO: 26747)
DIKTLLDRVRKLAEEDAERLDRLRRESEELNERVRRVDKKLLEEIRRKAKKVEDDIR
>2plus1_GFP11_Key_Cterm_7 (SEQ ID NO: 26748)
DAEILLRELEKLSRDNKELLKKIEKEIRDLIKEDKERNIELSERLRKLVEELKKKAT
>2plus1_GFP11_Key_Cterm_8 (SEQ ID NO: 26749)
DEVVKRVRDLLDTVRRRNEKVNEDVKRMNDKLRRDNEDVIRRVEKLLRELEEKRRT
>2plus1_GFP11_Key_Cterm_9 (SEQ ID NO: 26750)
DIKTLLDRVRKLAEEDAERLDRLRRESEELNERVRRVDKKLLEEIRRKAKKVEDDIR
>2plus1_GFP11_Key_Cterm_10 (SEQ ID NO: 26751)
SEELSAEVKKLLDEVRKALARHKDENDKLLKEIEDSLRRHKEENDRLLEKLKESTR
>2plus1_GFP11_Key_Cterm_11 (SEQ ID NO: 26752)
DADDVLARVEELAKRAHDENERLIREVEELVRAHNKRNKELVDEVKRLVEKVIEEER
>2plus1_GFP11_Key_Cterm_12 (SEQ ID NO: 26753)
SKEKIDRIIRELERILEEAKKKHEDVLRRLEDSLRRVAELLKAALDRLREIVDRLRR
>2plus1_GFP11_Key_Cterm_13 (SEQ ID NO: 26754)
DEVVKRVRDLLDTVRRRNEKVNEDVKRMNDKLRRDNEDVIRRVEKLLRELEEKRRT
>2plus1_GFP11_Key_Cterm_14 (SEQ ID NO: 26755)
SEELSAEVKKLLDEVRKALARHKDENDKLLKEIEDSLRRHKEENDRLLEKLKESTR
>2plus1_GFP11_Key_Cterm_15 (SEQ ID NO: 26756)
DAETVLRSAEDIVAKNRKLAEEVLRRVKKIVEENRKIASEVLDDVRKLVEDVLARAS
>2plus1_GFP11_Key_Cterm_16 (SEQ ID NO: 26757)
DADDVLARVEELAKRAHDENERLIREVEELVRAHNKRNKELVDEVKRLVEKVIEEER
>2plus1_GFP11_Key_Cterm_17 (SEQ ID NO: 26758)
SKEKIDRIIRELERILEEAKKKHEDVLRRLEDSLRRVAELLKAALDRLREIVDRLRR
>2plus1_GFP11_Key_Cterm_18 (SEQ ID NO: 26759)
DEEKLKDLIRKLRDILRRAAEAHKKLIDDARESLERAKREHEKLIDRLKKILEELER
>2plus1_GFP11_Key_Cterm_19 (SEQ ID NO: 26760)
DIKTLLDRVRKLAEEDAERLDRLRRESEELNERVRRVDKKLLEEIRRKAKKVEDDTR
>2plus1_GFP11_Key_Cterm_20 (SEQ ID NO: 26761)
DATRVIEEAKRILDEARKLNEETIRRSEELVRRIERVIEEIIKRSEKLLEDVARESK
>2plus1_GFP11_Key_Cterm_21 (SEQ ID NO: 26762)
SEELSAEVKKLLDEVRKALARHKDENDKLLKEIEDSLRRHKEENDRLLEKLKESTR
>2plus1_GFP11_Key_Cterm_22 (SEQ ID NO: 26763)
DAETVLRSAEDIVAKNRKLAEEVLRRVKKIVEENRKIASEVLDDVRKLVEDVLARAS
>2plus1_GFP11_Key_Cterm_23 (SEQ ID NO: 26764)
DADDVLARVEELAKRAHDENERLIREVEELVRAHNKRNKELVDEVKRLVEKVIEEER
>2plus1_GFP11_Key_Cterm_24 (SEQ ID NO: 26765)
SKELLEKAKAVVDEIKRLAEESLKRLEDLSRDHKRRAKELNDEIAKVVDELAKRAT
>2plus1_GFP11_Key_Cterm_25 (SEQ ID NO: 26766)
DEEVLKKLAEIVRRVKEENRKVNEEVEKRLRELEEENKKVIEDLKSTVEELVERLR
>2plus1_GFP11_Key_Cterm_26 (SEQ ID NO: 26767)
DEEVLKKLAEIVRRVKEENRKVNEEVEKRLRELEEENKKVIEDLKSTVEELVERLR
>2plus1_GFP11_Key_Cterm_27 (SEQ ID NO: 26768)
DKLLKEARDLIREIEKRLEELLKRVEKLTEDAKRDLERSNREHKELADRIKETAR
>2plus1_GFP11_Key_Cterm_28 (SEQ ID NO: 26769)
DKDSARELERIVKENAELAERVFREVEKIVRENTKLAEDSVRELKRLVEELKKRAK
>2plus1_GFP11_Key_Cterm_29 (SEQ ID NO: 26770)
SKEKIDRIIRELERILEEAKKKHEDVLRRLEDSLRRVAELLKAALDRLREIVDRLRR
>2plus1_GFP11_Key_Cterm_30 (SEQ ID NO: 26771)
DEEKLKDLIRKLRDILRRAAEAHKKLIDDARESLERAKREHEKLIDRLKKILEELER
>2plus1_GFP11_Key_Cterm_31 (SEQ ID NO: 26772)
DEVVKRVRDLLDTVRRRNEKVNEDVKRMNDKLRRDNEDVIRRVEKLLRELEEKRRT
>2plus1_GFP11_Key_Cterm_32 (SEQ ID NO: 26773)
DEEVLRTLEEIIRRLTKELEDVLREYERELRRLEEENKRVIDKTEEEIRRLADRLRR
>2plus1_GFP11_Key_Cterm_33 (SEQ ID NO: 26774)
DERILRELEERVKELEKEAREILKRSEDETDKLREKAERILEDLERANRRTMDEARR
>2plus1_GFP11_Key_Cterm_34 (SEQ ID NO: 26775)
SEELSAEVKKLLDEVRKALARHKDENDKLLKEIEDSLRRHKEENDRLLEKLKESTR
>2plus1_GFP11_Key_Cterm_35 (SEQ ID NO: 26776)
LPEEVLRELEELLKESEERIKRIEEEIKKIIDKSREDIKRVLEEIERLNAKAADDLRK
>2plus1_GFP11_Key_Cterm_36 (SEQ ID NO: 26777)
DADDVLARVEELAKRAHDENERLIREVEELVRAHNKRNKELVDEVKRLVEKVIEEER
>2plus1_GFP11_Key_Cterm_37 (SEQ ID NO: 26778)
DEEVLKKLAEIVRRVKEENRKVNEEVEKRLRELEEENKKVIEDLKSTVEELVERLR
>2plus1_GFP11_Key_Cterm_38 (SEQ ID NO: 26779)
DKLLKEARDLIREIEKRLEELLKRVEKLTEDAKRDLERSNREHKELADRIKETAR
>2plus1_GFP11_Key_Cterm_39 (SEQ ID NO: 26780)
DEEVLRTLEEIIRRLTKELEDVLREYERELRRLEEENKRVIDKTEEEIRRLADRLRR
>2plus1_GFP11_Key_Cterm_40 (SEQ ID NO: 26781)
DRRIEKVLKEIEEKIREVIKEWERVHREVEELLKRLIDENRKVLDEIRKLLEEKSK
>2plus1_GFP11_Key_Cterm_41 (SEQ ID NO: 26782)
DERILRELEERVKELEKEAREILKRSEDETDKLREKAERILEDLERANRRTMDEARR
>2plus1_GFP11_Key_Cterm_42 (SEQ ID NO: 26783)
SEELSAEVKKLLDEVRKALARHKDENDKLLKEIEDSLRRHKEENDRLLEKLKESTR
>2plus1_GFP11_Key_Cterm_43 (SEQ ID NO: 26784)
DEEVLKKLAEIVRRVKEENRKVNEEVEKRLRELEEENKKVIEDLKSTVEELVERLR
>2plus1_GFP11_Key_Cterm_44 (SEQ ID NO: 26785)
SKEKIDRIIRELERILEEAKKKHEDVLRRLEDSLRRVAELLKAALDRLREIVDRLRR
>2plus1_GFP11_Key_Cterm_45 (SEQ ID NO: 26786)
DRRIEKVLKEIEEKIREVIKEWERVHREVEELLKRLIDENRKVLDEIRKLLEEKSK
>2plus1_GFP11_Key_Cterm_46 (SEQ ID NO: 26787)
TLRELARSIRKLSAENKERLKELLRELKKLSDENKERIKKLLSDAEKIIEDVARRAK
>2plus1_GFP11_Key_Cterm_47 (SEQ ID NO: 26788)
DERILRELEERVKELEKEAREILKRSEDETDKLREKAERILEDLERANRRTMDEARR
>2plus1_GFP11_Key_Cterm_48 (SEQ ID NO: 26789)
EKLKELRDVIAEVAKRIDELDEYTRESIRRAKKEIERLNRETKKVIEEVVKRIEEERK
>2plus1_GFP11_Key_Cterm_49 (SEQ ID NO: 26790)
DERVREELKKLLTRVEEEHRKVLETDKKILKEAHKESKEVNDRDRELLERLEESVR
>2plus1_GFP11_Key_Cterm_50 (SEQ ID NO: 26791)
DADDVLARVEELAKRAHDENERLIREVEELVRAHNKRNKELVDEVKRLVEKVIEEER
>2plus1_GFP11_Key_Cterm_51 (SEQ ID NO: 26792)
TVKRLLDELRELLERLKRTIEELLKRNRDLLADAEEKARRLLEENRKLLKAARDTAT
>2plus1_GFP11_Key_Cterm_52 (SEQ ID NO: 26793)
DEEVLKKLAEIVRRVKEENRKVNEEVEKRLRELEEENKKVIEDLKSTVEELVERLR
>2plus1_GFP11_Key_Cterm_53 (SEQ ID NO: 26794)
SKEKIDRIIRELERILEEAKKKHEDVLRRLEDSLRRVAELLKAALDRLREIVDRLRR
>2plus1_GFP11_Key_Cterm_54 (SEQ ID NO: 26795)
DERILRELEERVKELEKEAREILKRSEDETDKLREKAERILEDLERANRRTMDEARR
>2plus1_GFP11_Key_Cterm_55 (SEQ ID NO: 26796)
DATRVIEEAKRILDEARKLNEETIRRSEELVRRIERVIEEIIKRSEKLLEDVARESK
>2plus1_GFP11_Key_Cterm_56 (SEQ ID NO: 26797)
EAAREIIKRLREVNKRTKEKLDELIKHSEEVLERVKRLIDELRKHSEEVLEDLRRRAK
>2plus1_GFP11_Key_Cterm_57 (SEQ ID NO: 26798)
EKLKELRDVIAEVAKRIDELDEYTRESIRRAKKEIERLNRETKKVIEEVVKRIEEERK
>2plus1_GFP11_Key_Cterm_58 (SEQ ID NO: 26799)
ELLRRIKKLLDEIKKAIEDSSREIKRLLEESERVMKRSSEDIKRTLDDTRRVVEEVRR
>2plus1_GFP11_Key_Cterm_59 (SEQ ID NO: 26800)
SKAIKDVRDIVKKVKDELKEWRDRNKELVDRLSEELKEWLKDVERVLKELTDKDR
>2plus1_GFP11_Key_Cterm_60 (SEQ ID NO: 26801)
DERVREELKKLLTRVEEEHRKVLETDKKILKEAHKESKEVNDRDRELLERLEESVR
>2plus1_GFP11_Key_Cterm_61 (SEQ ID NO: 26802)
DIDKLLKELRDLVEKIKKDLKELLERYEEIVRRIKELLKDLNREAEEVVRRLKEELR
>2plus1_GFP11_Key_Cterm_62 (SEQ ID NO: 26803)
DADDVLARVEELAKRAHDENERLIREVEELVRAHNKRNKELVDEVKRLVEKVIEEER
>2plus1_GFP11_Key_Cterm_63 (SEQ ID NO: 26804)
DEEVLKKLAEIVRRVKEENRKVNEEVEKRLRELEEENKKVIEDLKSTVEELVERLR
>2plus1_GFP11_Key_Cterm_64 (SEQ ID NO: 26805)
EREEELKEVADRVKEKLDRLNRENEKSSEELKRELDKINDENRETSERLKREIDETTR
>2plus1_GFP11_Key_Cterm_65 (SEQ ID NO: 26806)
SKEKIDRIIRELERILEEAKKKHEDVLRRLEDSLRRVAELLKAALDRLREIVDRLRR
>2plus1_GFP11_Key_Cterm_66 (SEQ ID NO: 26807)
SKEKIDRIIRELERILEEAKKKHEDVLRRLEDSLRRVAELLKAALDRLREIVDRLRR
>2plus1_GFP11_Key_Cterm_67 (SEQ ID NO: 26808)
TKDLLDENSKRSNEISREVKKDLERTVRENKKIVDEVAKALEDTVDKNRRIVEEVTT
>2plus1_GFP11_Key_Cterm_68 (SEQ ID NO: 26809)
DEVVKRVRDLLDTVRRRNEKVNEDVKRMNDKLRRDNEDVIRRVEKLLRELEEKRRT
>2plus1_GFP11_Key_Cterm_69 (SEQ ID NO: 26810)
DRRIEKVLKEIEEKIREVIKEWERVHREVEELLKRLIDENRKVLDEIRKLLEEKSK
>2plus1_GFP11_Key_Cterm_70 (SEQ ID NO: 26811)
ELLRRIKKLLDEIKKAIEDSSREIKRLLEESERVMKRSSEDIKRTLDDIRRVVEEVRR
>2plus1_GFP11_Key_Cterm_71 (SEQ ID NO: 26812)
SEELSAEVKKLLDEVRKALARHKDENDKLLKEIEDSLRRHKEENDRLLEKLKESTR
>2plus1_GFP11_Key_Cterm_72 (SEQ ID NO: 26813)
DIDKLLKELRDLVEKIKKDLKELLERYEEIVRRIKELLKDLNREAEEVVRRLKEELR
>2plus1_GFP11_Key_Cterm_73 (SEQ ID NO: 26814)
DADDVLARVEELAKRAHDENERLIREVEELVRAHNKRNKELVDEVKRLVEKVIEEER
>2plus1_GFP11_Key_Cterm_74 (SEQ ID NO: 26815)
DEEVLKKLAEIVRRVKEENRKVNEEVEKRLRELEEENKKVIEDLKSTVEELVERLR
>2plus1_GFP11_Key_Cterm_75 (SEQ ID NO: 26816)
DEEVLKKLAEIVRRVKEENRKVNEEVEKRLRELEEENKKVIEDLKSTVEELVERLR
>2plus1_GFP11_Key_Cterm_76 (SEQ ID NO: 26817)
SKEKIDRIIRELERILEEAKKKHEDVLRRLEDSLRRVAELLKAALDRLREIVDRLRR
>2plus1_GFP11_Key_Cterm_77 (SEQ ID NO: 26818)
SEELREELKKLERKIEKVAKEIHDHDKEVTERLEDLLRRITEHARKSDREIEETAR
>2plus1_GFP11_Key_Cterm_78 (SEQ ID NO: 26819)
DRRIEKVLKEIEEKIREVIKEWERVHREVEELLKRLIDENRKVLDEIRKLLEEKSK
>2plus1_GFP11_Key_Cterm_79 (SEQ ID NO: 26820)
DATRVIEEAKRILDEARKLNEETIRRSEELVRRIERVIEEIIKRSEKLLEDVARESK
>2plus1_GFP11_Key_Cterm_80 (SEQ ID NO: 26821)
EKLKELRDVIAEVAKRIDELDEYTRESIRRAKKEIERLNRETKKVIEEVVKRIEEERK
>2plus1_GFP11_Key_Cterm_81 (SEQ ID NO: 26822)
ELLRRIKKLLDEIKKAIEDSSREIKRLLEESERVMKRSSEDIKRILDDIRRVVEEVRR
>2plus1_GFP11_Key_Cterm_82 (SEQ ID NO: 26823)
DIDKLLKELRDLVEKIKKDLKELLERYEEIVRRIKELLKDLNREAEEVVRRLKEELR
>2plus1_GFP11_Key_Cterm_83 (SEQ ID NO: 26824)
EAKKKLDEVLERAKRTIDRLLETSDRSLEKVEADLRRLNEELDRSLERAERTIRELAK
>2plus1_GFP11_Key_Cterm_84 (SEQ ID NO: 26825)
DEEVLKKLAEIVRRVKEENRKVNEEVEKRLRELEEENKKVIEDLKSTVEELVERLR
>2plus1_GFP11_Key_Cterm_85 (SEQ ID NO: 26826)
DEEVLKKLAEIVRRVKEENRKVNEEVEKRLRELEEENKKVIEDLKSTVEELVERLR
>2plus1_GFP11_Key_Cterm_86 (SEQ ID NO: 26827)
DRRIEKVLKEIEEKIREVIKEWERVHREVEELLKRLIDENRKVLDEIRKLLEEKSK
>2plus1_GFP11_Key_Cterm_87 (SEQ ID NO: 26828)
DERILRELEERVKELEKEAREILKRSEDETDKLREKAERILEDLERANRRTMDEARR
>2plus1_GFP11_Key_Cterm_88 (SEQ ID NO: 26829)
DLKRVEERAREVSRRNEESMRRVKEDADRVSEANKEVLDRVREEVKRLIEEVRETLR
>2plus1_GFP11_Key_Cterm_89 (SEQ ID NO: 26830)
EKLKELRDVIAEVAKRIDELDEYTRESIRRAKKEIERLNRETKKVIEEVVKRIEEERK
>2plus1_GFP11_Key_Cterm_90 (SEQ ID NO: 26831)
ELLRRIKKLLDEIKKAIEDSSREIKRLLEESERVMKRSSEDIKRTLDDTRRVVEEVRR
>2plus1_GFP11_Key_Cterm_91 (SEQ ID NO: 26832)
ELLRRIKKLLDEIKKAIEDSSREIKRLLEESERVMKRSSEDIKRTLDDTRRVVEEVRR
>2plus1_GFP11_Key_Cterm_92 (SEQ ID NO: 26833)
LPEEVLRELEELLKESEERIKRIEEEIKKIIDKSREDIKRVLEEIERLNAKAADDLRK
>2plus1_GFP11_Key_Cterm_93 (SEQ ID NO: 26834)
EAKKKLDEVLERAKRTIDRLLETSDRSLEKVEADLRRLNEELDRSLERAERTIRELAK
>2plus1_GFP11_Key_Cterm_94 (SEQ ID NO: 26835)
DEEVLKKLAEIVRRVKEENRKVNEEVEKRLRELEEENKKVIEDLKSTVEELVERLR
>2plus1_GFP11_Key_Cterm_95 (SEQ ID NO: 26836)
DKLLKEARDLIREIEKRLEELLKRVEKLTEDAKRDLERSNREHKELADRIKETAR
>2plus1_GFP11_Key_Cterm_96 (SEQ ID NO: 26837)
DKLLKEARDLIREIEKRLEELLKRVEKLTEDAKRDLERSNREHKELADRIKETAR
>2plus1_GFP11_Key_Cterm_97 (SEQ ID NO: 26838)
DIVRKIERIVETIEREVRESVKKVEEIARDIRRKVDESVKNVEKLLRDVDKKARDRKK
>2plus1_GFP11_Key_Cterm_98 (SEQ ID NO: 26839)
DEIKRIVDEVRERLKRIVDENAKIVEDARRALEKIVKENEEILRRLKKELRELRK
>2plus1_GFP11_Key_Cterm_99 (SEQ ID NO: 26840)
DRRIEKVLKEIEEKIREVIKEWERVHREVEELLKRLIDENRKVLDEIRKLLEEKSK
>2plus1_GFP11_Key_Cterm_100 (SEQ ID NO: 26841)
DLKRVEERAREVSRRNEESMRRVKEDADRVSEANKEVLDRVREEVKRLIEEVRETLR
>2plus1_GFP11_Key_Cterm_101 (SEQ ID NO: 26842)
DATRVIEEAKRILDEARKLNEETIRRSEELVRRIERVIEEIIKRSEKLLEDVARESK
>2plus1_GFP11_Key_Cterm_102 (SEQ ID NO: 26843)
DAETIERVVRELLEENKEVLRKTEEAVKRSTETNKRLLEASKEVADRLRERIKEAAK
>2plus1_GFP11_Key_Cterm_103 (SEQ ID NO: 26844)
EKLKELRDVIAEVAKRIDELDEYTRESIRRAKKEIERLNRETKKVIEEVVKRIEEERK
>2plus1_GFP11_Key_Cterm_104 (SEQ ID NO: 26845)
ELLRRIKKLLDEIKKAIEDSSREIKRLLEESERVMKRSSEDIKRTLDDIRRVVEEVRR
>2plus1_GFP11_Key_Cterm_105 (SEQ ID NO: 26846)
DEVVERAERISEENKRRVEDVARKSKELVEDVRRHSEEVVRRVEELVKEVEERVR
>2plus1_GFP11_Key_Cterm_106 (SEQ ID NO: 26847)
EAKKKLDEVLERAKRTIDRLLETSDRSLEKVEADLRRLNEELDRSLERAERTIRELAK
>2plus1_GFP11_Key_Cterm_107 (SEQ ID NO: 26848)
TAERARETLKRLLDENRDRSKKVKEEIRRILEDLTRTTERVKREIAKLLKELEDTAR
>2plus1_GFP11_Key_Cterm_108 (SEQ ID NO: 26849)
EAVRRLKEILERLKEEVRRSLEELRKEVERLKKEVEDSLRELKKSLEEWVKSLEEATR
>2plus1_GFP11_Key_Cterm_109 (SEQ ID NO: 26850)
DERILRELEERVKELEKEAREILKRSEDETDKLREKAERILEDLERANRRTMDEARR
>2plus1_GFP11_Key_Cterm_110 (SEQ ID NO: 26851)
DATRVIEEAKRILDEARKLNEETIRRSEELVRRIERVIEEIIKRSEKLLEDVARESK
>2plus1_GFP11_Key_Cterm_111 (SEQ ID NO: 26852)
DKARKVAEVAEKVLRDIDKLDRESKEAFRATNEEIAKLDEDTARVAERVKKAIEDLAK
>2plus1_GFP11_Key_Cterm_112 (SEQ ID NO: 26853)
EKLKELRDVIAEVAKRIDELDEYTRESIRRAKKEIERLNRETKKVIEEVVKRIEEERK
>2plus1_GFP11_Key_Cterm_113 (SEQ ID NO: 26854)
ELLRRIKKLLDEIKKAIEDSSREIKRLLEESERVMKRSSEDIKRTLDDTRRVVEEVRR
>2plus1_GFP11_Key_Cterm_114 (SEQ ID NO: 26855)
DKVERVVREVEKLHEEDRKRLEESTRSVRKLLEELKRELEKSTRSVKALVDELRERVR
>2plus1_GFP11_Key_Cterm_115 (SEQ ID NO: 26856)
DEVVERAERISEENKRRVEDVARKSKELVEDVRRHSEEVVRRVEELVKEVEERVR
>2plus1_GFP11_Key_Cterm_116 (SEQ ID NO: 26857)
EAKKKLDEVLERAKRTIDRLLETSDRSLEKVEADLRRLNEELDRSLERAERTIRELAK
>2plus1_GFP11_Key_Cterm_117 (SEQ ID NO: 26858)
TAERARETLKRLLDENRDRSKKVKEEIRRILEDLTRTTERVKREIAKLLKELEDTAR
>2plus1_GFP11_Key_Cterm_118 (SEQ ID NO: 26859)
DERILRELEERVKELEKEAREILKRSEDETDKLREKAERILEDLERANRRTMDEARR
>2plus1_GFP11_Key_Cterm_119 (SEQ ID NO: 26860)
DERILRELEERVKELEKEAREILKRSEDETDKLREKAERILEDLERANRRTMDEARR
>2plus1_GFP11_Key_Cterm_120 (SEQ ID NO: 26861)
DLKRVEERAREVSRRNEESMRRVKEDADRVSEANKEVLDRVREEVKRLIEEVRETLR
>2plus1_GFP11_Key_Cterm_121 (SEQ ID NO: 26862)
DKARKVAEVAEKVLRDIDKLDRESKEAFRATNEEIAKLDEDTARVAERVKKAIEDLAK
>2plus1_GFP11_Key_Cterm_122 (SEQ ID NO: 26863)
ELLRRIKKLLDEIKKAIEDSSREIKRLLEESERVMKRSSEDIKRILDDTRRVVEEVRR
>2plus1_GFP11_Key_Cterm_123 (SEQ ID NO: 26864)
SKAIKDVRDIVKKVKDELKEWRDRNKELVDRLSEELKEWLKDVERVLKELTDKDR
>2plus1_GFP11_Key_Cterm_124 (SEQ ID NO: 26865)
DKVERVVREVEKLHEEDRKRLEESTRSVRKLLEELKRELEKSTRSVKALVDELRERVR
>2plus1_GFP11_Key_Cterm_125 (SEQ ID NO: 26866)
DIDKLLKELRDLVEKIKKDLKELLERYEEIVRRIKELLKDLNREAEEVVRRLKEELR
>2plus1_GFP11_Key_Cterm_126 (SEQ ID NO: 26867)
EAKKKLDEVLERAKRTIDRLLETSDRSLEKVEADLRRLNEELDRSLERAERTIRELAK
>2plus1_GFP11_Key_Cterm_127 (SEQ ID NO: 26868)
DKLLKEARDLIREIEKRLEELLKRVEKLTEDAKRDLERSNREHKELADRIKETAR
>2plus1_GFP11_Key_Cterm_128 (SEQ ID NO: 26869)
TAERARETLKRLLDENRDRSKKVKEEIRRILEDLTRTTERVKREIAKLLKELEDTAR
>2plus1_GFP11_Key_Cterm_129 (SEQ ID NO: 26870)
DEIKRIVDEVRERLKRIVDENAKIVEDARRALEKIVKENEEILRRLKKELRELRK
>2plus1_GFP11_Key_Cterm_130 (SEQ ID NO: 26871)
DRIEEELKRLIDTLREKNREVEKRARDSNRDLKRTNDEIAKEVRELIKKLREDLK
>2plus1_GFP11_Key_Cterm_131 (SEQ ID NO: 26872)
DERILRELEERVKELEKEAREILKRSEDETDKLREKAERILEDLERANRRTMDEARR
>2plus1_GFP11_Key_Cterm_132 (SEQ ID NO: 26873)
DAETIERVVRELLEENKEVLRKTEEAVKRSTEINKRLLEASKEVADRLRERIKEAAK
>2plus1_GFP11_Key_Cterm_133 (SEQ ID NO: 26874)
DKARKVAEVAEKVLRDIDKLDRESKEAFRATNEEIAKLDEDTARVAERVKKAIEDLAK
>2plus1_GFP11_Key_Cterm_134 (SEQ ID NO: 26875)
DKVERVVREVEKLHEEDRKRLEESTRSVRKLLEELKRELEKSTRSVKALVDELRERVR
>2plus1_GFP11_Key_Cterm_135 (SEQ ID NO: 26876)
DIERILRELEAVLKKLTDESERLNREVERVSRDTKKKSKELNEELKAVLDEVKRKAD
>2plus1_GFP11_Key_Cterm_136 (SEQ ID NO: 26877)
DEVVERAERISEENKRRVEDVARKSKELVEDVRRHSEEVVRRVEELVKEVEERVR
>2plus1_GFP11_Key_Cterm_137 (SEQ ID NO: 26878)
EAKKKLDEVLERAKRTIDRLLETSDRSLEKVEADLRRLNEELDRSLERAERTIRELAK
>2plus1_GFP11_Key_Cterm_138 (SEQ ID NO: 26879)
TAERARETLKRLLDENRDRSKKVKEEIRRILEDLTRTTERVKREIAKLLKELEDTAR
>2plus1_GFP11_Key_Cterm_139 (SEQ ID NO: 26880)
DEIKRIVDEVRERLKRIVDENAKIVEDARRALEKIVKENEEILRRLKKELRELRK
>2plus1_GFP11_Key_Cterm_140 (SEQ ID NO: 26881)
DRRIEKVLKEIEEKIREVIKEWERVHREVEELLKRLIDENRKVLDEIRKLLEEKSK
>2plus1_GFP11_Key_Cterm_141 (SEQ ID NO: 26882)
DLKRVEERAREVSRRNEESMRRVKEDADRVSEANKEVLDRVREEVKRLIEEVRETLR
>2plus1_GFP11_Key_Cterm_142 (SEQ ID NO: 26883)
DAETIERVVRELLEENKEVLRKTEEAVKRSTETNKRLLEASKEVADRLRERIKEAAK
>2plus1_GFP11_Key_Cterm_143 (SEQ ID NO: 26884)
DKARKVAEVAEKVLRDIDKLDRESKEAFRATNEEIAKLDEDTARVAERVKKAIEDLAK
>2plus1_GFP11_Key_Cterm_144 (SEQ ID NO: 26885)
ELLRRIKKLLDEIKKAIEDSSREIKRLLEESERVMKRSSEDIKRTLDDTRRVVEEVRR
>2plus1_GFP11_Key_Cterm_145 (SEQ ID NO: 26886)
DKVERVVREVEKLHEEDRKRLEESTRSVRKLLEELKRELEKSTRSVKALVDELRERVR
>2plus1_GFP11_Key_Cterm_146 (SEQ ID NO: 26887)
EAKKKLDEVLERAKRTIDRLLETSDRSLEKVEADLRRLNEELDRSLERAERTIRELAK
>2plus1_GFP11_Key_Cterm_147 (SEQ ID NO: 26888)
TAERARETLKRLLDENRDRSKKVKEEIRRILEDLTRTTERVKREIAKLLKELEDTAR
>2plus1_GFP11_Key_Cterm_148 (SEQ ID NO: 26889)
DEIKRIVDEVRERLKRIVDENAKIVEDARRALEKIVKENEEILRRLKKELRELRK
>2plus1_GFP11_Key_Cterm_149 (SEQ ID NO: 26890)
DKARKVAEVAEKVLRDIDKLDRESKEAFRATNEEIAKLDEDTARVAERVKKAIEDLAK
>2plus1_GFP11_Key_Cterm_150 (SEQ ID NO: 26891)
DEVTKVKKVADDVLAEIKKLDDETRRVIEDTNKKIADLDKATRDVVRKVLEEVKKLEK
>2plus1_GFP11_Key_Cterm_151 (SEQ ID NO: 26892)
DIDKLLKELRDLVEKIKKDLKELLERYEEIVRRIKELLKDLNREAEEVVRRLKEELR
>2plus1_GFP11_Key_Cterm_152 (SEQ ID NO: 26893)
TAERARETLKRLLDENRDRSKKVKEEIRRILEDLTRTTERVKREIAKLLKELEDTAR
>2plus1_GFP11_Key_Cterm_153 (SEQ ID NO: 26894)
DEIKRIVDEVRERLKRIVDENAKIVEDARRALEKIVKENEEILRRLKKELRELRK
>2plus1_GFP11_Key_Cterm_154 (SEQ ID NO: 26895)
RLVREVEDLVRRLVRRSEKSNEEVKRTVEELVRRMEESNDRVRDLVRRLVEELKRAVD
>2plus1_GFP11_Key_Cterm_155 (SEQ ID NO: 26896)
DKARKVAEVAEKVLRDIDKLDRESKEAFRATNEEIAKLDEDTARVAERVKKAIEDLAK
>2plus1_GFP11_Key_Cterm_156 (SEQ ID NO: 26897)
EAKKKLDEVLERAKRTIDRLLETSDRSLEKVEADLRRLNEELDRSLERAERTIRELAK
>2plus1_GFP11_Key_Cterm_157 (SEQ ID NO: 26898)
RLVREVEDLVRRLVRRSEKSNEEVKRTVEELVRRMEESNDRVRDLVRRLVEELKRAVD
>2plus1_GFP11_Key_Cterm_158 (SEQ ID NO: 26899)
DKARKVAEVAEKVLRDIDKLDRESKEAFRATNEEIAKLDEDTARVAERVKKAIEDLAK
>2plus1_GFP11_Key_Cterm_159 (SEQ ID NO: 26900)
DEVTKVKKVADDVLAEIKKLDDETRRVIEDTNKKIADLDKATRDVVRKVLEEVKKLEK
>2plus1_GFP11_Key_Cterm_160 (SEQ ID NO: 26901)
TAERARETLKRLLDENRDRSKKVKEEIRRILEDLTRTTERVKREIAKLLKELEDTAR
>2plus1_GFP11_Key_Cterm_161 (SEQ ID NO: 26902)
DLKRVEERAREVSRRNEESMRRVKEDADRVSEANKEVLDRVREEVKRLIEEVRETLR
>2plus1_GFP11_Key_Cterm_162 (SEQ ID NO: 26903)
DKARKVAEVAEKVLRDIDKLDRESKEAFRATNEEIAKLDEDTARVAERVKKAIEDLAK
>2plus1_GFP11_Key_Cterm_163 (SEQ ID NO: 26904)
DEVTKVKKVADDVLAEIKKLDDETRRVIEDTNKKIADLDKATRDVVRKVLEEVKKLEK
>2plus1_GFP11_Key_Cterm_164 (SEQ ID NO: 26905)
DKVERVVREVEKLHEEDRKRLEESTRSVRKLLEELKRELEKSTRSVKALVDELRERVR
>2plus1_GFP11_Key_Cterm_165 (SEQ ID NO: 26906)
EAKKKLDEVLERAKRTIDRLLETSDRSLEKVEADLRRLNEELDRSLERAERTIRELAK
>2plus1_GFP11_Key_Cterm_166 (SEQ ID NO: 26907)
TAERARETLKRLLDENRDRSKKVKEEIRRILEDLTRTTERVKREIAKLLKELEDTAR
>2plus1_GFP11_Key_Cterm_167 (SEQ ID NO: 26908)
TAERARETLKRLLDENRDRSKKVKEEIRRILEDLTRTTERVKREIAKLLKELEDTAR
>2plus1_GFP11_Key_Cterm_168 (SEQ ID NO: 26909)
DKARKVAEVAEKVLRDIDKLDRESKEAFRATNEEIAKLDEDTARVAERVKKAIEDLAK
>2plus1_GFP11_Key_Cterm_169 (SEQ ID NO: 26910)
DEVTKVKKVADDVLAEIKKLDDETRRVIEDTNKKIADLDKATRDVVRKVLEEVKKLEK
>2plus1_GFP11_Key_Cterm_170 (SEQ ID NO: 26911)
DKVERVVREVEKLHEEDRKRLEESTRSVRKLLEELKRELEKSTRSVKALVDELRERVR
>2plus1_GFP11_Key_Cterm_171 (SEQ ID NO: 26912)
TAERARETLKRLLDENRDRSKKVKEEIRRILEDLTRTTERVKREIAKLLKELEDTAR
>2plus1_GFP11_Key_Cterm_172 (SEQ ID NO: 26913)
DKARKVAEVAEKVLRDIDKLDRESKEAFRATNEEIAKLDEDTARVAERVKKAIEDLAK
>2plus1_GFP11_Key_Cterm_173 (SEQ ID NO: 26914)
RLVREVEDLVRRLVRRSEKSNEEVKRTVEELVRRMEESNDRVRDLVRRLVEELKRAVD
>2plus1_GFP11_Key_Nterm_174 (SEQ ID NO: 26915)
SESDEVIRDLARLLDELARHVDDSVRRMDEVVKRSTREADELAKRLDELVKEVEKKPG
>2plus1_GFP11_Key_Nterm_175 (SEQ ID NO: 26916)
SRAETVLKEVTDKIKKLADSSDELLRRNKENIDELKKSSEELLRRLTKAIEEIEKGSV
>2plus1_GFP11_Key_Nterm_176 (SEQ ID NO: 26917)
SVDEVLKEIEDALRRLKEEVERVLKENEDELRRLEEEVRRVLKEDEELLESLKRGVGE
>2plus1_GFP11_Key_Nterm_177 (SEQ ID NO: 26918)
SEVDEIIKELERLLAEIARENERIIRESRKLADEVRKRNEDAIRKLEELVARLADAVR
>2plus1_GFP11_Key_Nterm_178 (SEQ ID NO: 26919)
SEVDDVLRRLEELIKTLEDINAKSLEDIKKLIDDLAKILEDALRKHEKLIRELREAKK
>2plus1_GFP11_Key_Nterm_179 (SEQ ID NO: 26920)
SEVDDVLRRLEELIKTLEDINAKSLEDIKKLIDDLAKILEDALRKHEKLIRELREAKK
>2plus1_GFP11_Key_Nterm_180 (SEQ ID NO: 26921)
SRAETVLKEVTDKIKKLADSSDELLRRNKENIDELKKSSEELLRRLTKAIEEIEKGSV
>2plus1_GFP11_Key_Nterm_181 (SEQ ID NO: 26922)
KEVEDAVKELEDLLRANEDKTRSIVEDMRASNKDLEDHSRASEEEVRKLLDDLRRAGV
>2plus1_GFP11_Key_Nterm_182 (SEQ ID NO: 26923)
SEVDDVLRRLEELIKTLEDINAKSLEDIKKLIDDLAKILEDALRKHEKLIRELREAKK
>2plus1_GFP11_Key_Nterm_183 (SEQ ID NO: 26924)
SESDEVIRDLARLLDELARHVDDSVRRMDEVVKRSTREADELAKRLDELVKEVEKKPG
>2plus1_GFP11_Key_Nterm_184 (SEQ ID NO: 26925)
SESDDVIRKLRELLEELRTHVEKSIRDLRKILEDSTRHAKRSIEELERLLEEVRKKPG
>2plus1_GFP11_Key_Nterm_185 (SEQ ID NO: 26926)
SRAETVLKEVTDKIKKLADSSDELLRRNKENIDELKKSSEELLRRLTKAIEEIEKGSV
>2plus1_GFP11_Key_Nterm_186 (SEQ ID NO: 26927)
SEAEKAKETIDRLADRVRKLLEEIKRSLDDSRRKSKETVEENEKTLDRMRKEVDAAKR
>2plus1_GFP11_Key_Nterm_187 (SEQ ID NO: 26928)
SEAEKAKETIDRLADRVRKLLEEIKRSLDDSRRKSKETVEENEKTLDRMRKEVDAAKR
>2plus1_GFP11_Key_Nterm_188 (SEQ ID NO: 26929)
SEVEELIKRLAKVLKELVDKVRKVIEDTKELLERLKRRSEDHIRKLREVLKEAKDQPI
>2plus1_GFP11_Key_Nterm_189 (SEQ ID NO: 26930)
SELEEIEKKVRELTKRHRELVERVRKTVKELIETNRRLLETLTERIKRVLEEVRDLER
>2plus1_GFP11_Key_Nterm_190 (SEQ ID NO: 26931)
SSEERLRAVIEDLKRLAEESRKRHKELIDELAKAVERIERRHKKLLDEIKAVVDDIRR
>2plus1_GFP11_Key_Nterm_191 (SEQ ID NO: 26932)
DEIRKVVKEITDLLKASNDKNRKVVEEIRDLLRKSKKLADELVERLRALVEDLRRRID
>2plus1_GFP11_Key_Nterm_192 (SEQ ID NO: 26933)
STAETVAEEVERVLKHSDDLIKEVEDVNRRVEEEIKRVIRELEEENERLVAEVRKGVK
>2plus1_GFP11_Key_Nterm_193 (SEQ ID NO: 26934)
SEVDEIIKELERLLAEIARENERIIRESRKLADEVRKRNEDAIRKLEELVARLADAVR
>2plus1_GFP11_Key_Nterm_194 (SEQ ID NO: 26935)
SEIDEVLTRLRKISKDLNETSDRVNERARKIIDDIKKESKRVNDEAREIVERLKREID
>2plus1_GFP11_Key_Nterm_195 (SEQ ID NO: 26936)
SEDEDLDRVAEKLAREHKKSVEEIKRVLKSADEESKKLVRDTERVIEEIKREVEEARR
>2plus1_GFP11_Key_Nterm_196 (SEQ ID NO: 26937)
SSVEELLERLRRISEENKRRIEKLLREVEKVLRELKDRHRKLLKRVEEIIRKVKEEIK
>2plus1_GFP11_Key_Nterm_197 (SEQ ID NO: 26938)
SAADEVVERMKELVATVKRENDEVVKELKKLVKELEDDNRRVVEESKKSVEDLARRVG
>2plus1_GFP11_Key_Nterm_198 (SEQ ID NO: 26939)
SESDEVIRDLARLLDELARHVDDSVRRMDEVVKRSTREADELAKRLDELVKEVEKKPG
>2plus1_GFP11_Key_Nterm_199 (SEQ ID NO: 26940)
KEVEDAVKELEDLLRANEDKTRSIVEDMRASNKDLEDHSRASEEEVRKLLDDLRRAGV
>2plus1_GFP11_Key_Nterm_200 (SEQ ID NO: 26941)
DEIRKVVKEITDLLKASNDKNRKVVEEIRDLLRKSKKLADELVERLRALVEDLRRRID
>2plus1_GFP11_Key_Nterm_201 (SEQ ID NO: 26942)
SRVEEIIEDLRRLLEEIRKENEDSIRRSKELLDRVKEINDTIIAELERLLKDIEKEVR
>2plus1_GFP11_Key_Nterm_202 (SEQ ID NO: 26943)
SRVEEIIEDLRRLLEEIRKENEDSIRRSKELLDRVKEINDTIIAELERLLKDIEKEVR
>2plus1_GFP11_Key_Nterm_203 (SEQ ID NO: 26944)
SEVDDVLRRLEELIKTLEDINAKSLEDIKKLIDDLAKILEDALRKHEKLIRELREAKK
>2plus1_GFP11_Key_Nterm_204 (SEQ ID NO: 26945)
SKLEEVEKAVRKVIEDSRRVNEEVNRRSEEVVRELEKVHREVNDASRRVVEKARRVLK
>2plus1_GFP11_Key_Nterm_205 (SEQ ID NO: 26946)
SESDEVIRDLARLLDELARHVDDSVRRMDEVVKRSTREADELAKRLDELVKEVEKKPG
>2plus1_GFP11_Key_Nterm_206 (SEQ ID NO: 26947)
SESDEVIRDLARLLDELARHVDDSVRRMDEVVKRSTREADELAKRLDELVKEVEKKPG
>2plus1_GFP11_Key_Nterm_207 (SEQ ID NO: 26948)
SESDDVIRKLRELLEELRTHVEKSIRDLRKILEDSTRHAKRSIEELERLLEEVRKKPG
>2plus1_GFP11_Key_Nterm_208 (SEQ ID NO: 26949)
DEVRELLERNRRLLEEIKKTVKDLIRANEELLKRIEDDAKRLIDRNEELLDELEKGLS
>2plus1_GFP11_Key_Nterm_209 (SEQ ID NO: 26950)
DEIRKVVKEITDLLKASNDKNRKVVEEIRDLLRKSKKLADELVERLRALVEDLRRRID
>2plus1_GFP11_Key_Nterm_210 (SEQ ID NO: 26951)
SRAETVLKEVTDKIKKLADSSDELLRRNKENIDELKKSSEELLRRLTKAIEEIEKGSV
>2plus1_GFP11_Key_Nterm_211 (SEQ ID NO: 26952)
DEEEDLERAIKKLLDENRELLKRIAEELRRLLEELRRLTEESADRLRRLLKELKDRGV
>2plus1_GFP11_Key_Nterm_212 (SEQ ID NO: 26953)
DEIRKVVKEITDLLKASNDKNRKVVEEIRDLLRKSKKLADELVERLRALVEDLRRRID
>2plus1_GFP11_Key_Nterm_213 (SEQ ID NO: 26954)
SKEDRLREELKKLLARLAEEIERLKRALEESNKDLKRTIDASEKHLRDVNEDVKRGGV
>2plus1_GFP11_Key_Nterm_214 (SEQ ID NO: 26955)
SESDEVIRDLARLLDELARHVDDSVRRMDEVVKRSTREADELAKRLDELVKEVEKKPG
>2plus1_GFP11_Key_Nterm_215 (SEQ ID NO: 26956)
SESDEVIRDLARLLDELARHVDDSVRRMDEVVKRSTREADELAKRLDELVKEVEKKPG
>2plus1_GFP11_Key_Nterm_216 (SEQ ID NO: 26957)
SESDDVIRKLRELLEELRTHVEKSIRDLRKILEDSTRHAKRSIEELERLLEEVRKKPG
>2plus1_GFP11_Key_Nterm_217 (SEQ ID NO: 26958)
SRVEEIIEDLRRLLEEIRKENEDSIRRSKELLDRVKEINDTIIAELERLLKDIEKEVR
>2plus1_GFP11_Key_Nterm_218 (SEQ ID NO: 26959)
SEVDEIIKELERLLAEIARENERIIRESRKLADEVRKRNEDAIRKLEELVARLADAVR
>2plus1_GFP11_Key_Nterm_219 (SEQ ID NO: 26960)
SSVEELLERLRRISEENKRRIEKLLREVEKVLRELKDRHRKLLKRVEEIIRKVKEEIK
>2plus1_GFP11_Key_Nterm_220 (SEQ ID NO: 26961)
SELEEVLRRIEALVRKAHKENEDVLREIERLVRTAHRLNKKVDDDSAKIAEDLKRGGR
>2plus1_GFP11_Key_Nterm_221 (SEQ ID NO: 26962)
SESDEVIRDLARLLDELARHVDDSVRRMDEVVKRSTREADELAKRLDELVKEVEKKPG
>2plus1_GFP11_Key_Nterm_222 (SEQ ID NO: 26963)
SESDDVIRKLRELLEELRTHVEKSIRDLRKILEDSTRHAKRSIEELERLLEEVRKKPG
>2plus1_GFP11_Key_Nterm_223 (SEQ ID NO: 26964)
SRAETVLKEVTDKIKKLADSSDELLRRNKENIDELKKSSEELLRRLTKAIEEIEKGSV
>2plus1_GFP11_Key_Nterm_224 (SEQ ID NO: 26965)
DEVRELLERNRRLLEEIKKTVKDLIRANEELLKRIEDDAKRLIDRNEELLDELEKGLS
>2plus1_GFP11_Key_Nterm_225 (SEQ ID NO: 26966)
STEEVLDEIRKLHKILTEDIKRVLREIEELHRRTIEENKEVLDKIAEDYKRVIDDVRT
>2plus1_GFP11_Key_Nterm_226 (SEQ ID NO: 26967)
SEIEKILKEIEDLARRDEEVSKKIVEDIRRLAKEVEDTSRDIVRKIEELAKRVLDRLR
>2plus1_GFP11_Key_Nterm_227 (SEQ ID NO: 26968)
SEAERLEARARELLRANEELMDDLRAKAEELLKRNDRLVKEIEKKVREVLAAIEELKR
>2plus1_GFP11_Key_Nterm_228 (SEQ ID NO: 26969)
DDLERAREEVADLIRKHEEKTRRILEESRRLNERHRELSARILDEIRKLAERIEELIK
>2plus1_GFP11_Key_Nterm_229 (SEQ ID NO: 26970)
DEEEDLERAIKKLLDENRELLKRIAEELRRLLEELRRLTEESADRLRRLLKELKDRGV
>2plus1_GFP11_Key_Nterm_230 (SEQ ID NO: 26971)
DEIRKVVKEITDLLKASNDKNRKVVEEIRDLLRKSKKLADELVERLRALVEDLRRRID
>2plus1_GFP11_Key_Nterm_231 (SEQ ID NO: 26972)
DEIRKVVKEITDLLKASNDKNRKVVEEIRDLLRKSKKLADELVERLRALVEDLRRRID
>2plus1_GFP11_Key_Nterm_232 (SEQ ID NO: 26973)
STAETVEKKVEEVIRENEKSMRESEEKVDRSTKRIEDVLRRLEETIRKTSDDIAKGVK
>2plus1_GFP11_Key_Nterm_233 (SEQ ID NO: 26974)
SRVEEIIEDLRRLLEEIRKENEDSIRRSKELLDRVKEINDTIIAELERLLKDIEKEVR
>2plus1_GFP11_Key_Nterm_234 (SEQ ID NO: 26975)
SRVEEIIEDLRRLLEEIRKENEDSIRRSKELLDRVKEINDTIIAELERLLKDIEKEVR
>2plus1_GFP11_Key_Nterm_235 (SEQ ID NO: 26976)
REVEEMIKELEELLKDLKEKNERASKRNRELVRRLEEENKRVIEELKKLVKELEDLVR
>2plus1_GFP11_Key_Nterm_236 (SEQ ID NO: 26977)
SEVDDVLRRLEELIKTLEDINAKSLEDIKKLIDDLAKILEDALRKHEKLIRELREAKK
>2plus1_GFP11_Key_Nterm_237 (SEQ ID NO: 26978)
SKLEEVEKAVRKVIEDSRRVNEEVNRRSEEVVRELEKVHREVNDASRRVVEKARRVLK
>2plus1_GFP11_Key_Nterm_238 (SEQ ID NO: 26979)
DEVEDVLRKIEKILDDHRKRIEKNSRDMARIIDEHRRKVEENSREMKKLVDDLKKAVD
>2plus1_GFP11_Key_Nterm_239 (SEQ ID NO: 26980)
SSVEELLERLRRISEENKRRIEKLLREVEKVLRELKDRHRKLLKRVEEIIRKVKEEIK
>2plus1_GFP11_Key_Nterm_240 (SEQ ID NO: 26981)
DEVEKVLEEIKRALDDLRKKVEESKREIKEALKAVEKHTRDSDTANKRTLAEIERGVK
>2plus1_GFP11_Key_Nterm_241 (SEQ ID NO: 26982)
SESDEVIRDLARLLDELARHVDDSVRRMDEVVKRSTREADELAKRLDELVKEVEKKPG
>2plus1_GFP11_Key_Nterm_242 (SEQ ID NO: 26983)
KEVEDAVKELEDLLRANEDKTRSIVEDMRASNKDLEDHSRASEEEVRKLLDDLRRAGV
>2plus1_GFP11_Key_Nterm_243 (SEQ ID NO: 26984)
DEIRKVVKEITDLLKASNDKNRKVVEEIRDLLRKSKKLADELVERLRALVEDLRRRID
>2plus1_GFP11_Key_Nterm_244 (SEQ ID NO: 26985)
STAETVAEEVERVLKHSDDLIKEVEDVNRRVEEEIKRVIRELEEENERLVAEVRKGVK
>2plus1_GFP11_Key_Nterm_245 (SEQ ID NO: 26986)
SRVEEIIEDLRRLLEEIRKENEDSIRRSKELLDRVKEINDTIIAELERLLKDIEKEVR
>2plus1_GFP11_Key_Nterm_246 (SEQ ID NO: 26987)
SEVDEIIKELERLLAEIARENERIIRESRKLADEVRKRNEDAIRKLEELVARLADAVR
>2plus1_GFP11_Key_Nterm_247 (SEQ ID NO: 26988)
SEVDDVLRRLEELIKTLEDINAKSLEDIKKLIDDLAKILEDALRKHEKLIRELREAKK
>2plus1_GFP11_Key_Nterm_248 (SEQ ID NO: 26989)
SKLEEVEKAVRKVIEDSRRVNEEVNRRSEEVVRELEKVHREVNDASRRVVEKARRVLK
>2plus1_GFP11_Key_Nterm_249 (SEQ ID NO: 26990)
SAEEVKEELKRIATKLKEEIKENIRRLEESVEKIAKELAENIKRLEDILRDVKRGLRD
>2plus1_GFP11_Key_Nterm_250 (SEQ ID NO: 26991)
SDVDRVLEEIRKLLEDLKRHSEKVSEENEDLLRANTELNKRVSEDNERLLEELKRLRE
>2plus1_GFP11_Key_Nterm_251 (SEQ ID NO: 26992)
DEVEDVLRKIEKILDDHRKRIEKNSRDMARIIDEHRRKVEENSREMKKLVDDLKKAVD
>2plus1_GFP11_Key_Nterm_252 (SEQ ID NO: 26993)
SSVEELLERLRRISEENKRRIEKLLREVEKVLRELKDRHRKLLKRVEEIIRKVKEEIK
>2plus1_GFP11_Key_Nterm_253 (SEQ ID NO: 26994)
DREREVKKRLDEVRERIERLLRRVEEESRRVAEEIRRLIEEVRRRNKKVTEEIRELLK
>2plus1_GFP11_Key_Nterm_254 (SEQ ID NO: 26995)
SRAETVLKEVIDKIKKLADSSDELLRRNKENIDELKKSSEELLRRLTKAIEEIEKGSV
>2plus1_GFP11_Key_Nterm_255 (SEQ ID NO: 26996)
SEIEKILKEIEDLARRDEEVSKKIVEDIRRLAKEVEDTSRDIVRKIEELAKRVLDRLR
>2plus1_GFP11_Key_Nterm_256 (SEQ ID NO: 26997)
SEAEKAKETIDRLADRVRKLLEEIKRSLDDSRRKSKETVEENEKTLDRMRKEVDAAKR
>2plus1_GFP11_Key_Nterm_257 (SEQ ID NO: 26998)
SEVEELIKRLAKVLKELVDKVRKVIEDTKELLERLKRRSEDHIRKLREVLKEAKDQPI
>2plus1_GFP11_Key_Nterm_258 (SEQ ID NO: 26999)
DEIRKVVKEITDLLKASNDKNRKVVEEIRDLLRKSKKLADELVERLRALVEDLRRRID
>2plus1_GFP11_Key_Nterm_259 (SEQ ID NO: 27000)
DEIRKVVKEITDLLKASNDKNRKVVEEIRDLLRKSKKLADELVERLRALVEDLRRRID
>2plus1_GFP11_Key_Nterm_260 (SEQ ID NO: 27001)
STAETVEKKVEEVIRENEKSMRESEEKVDRSTKRIEDVLRRLEETIRKTSDDIAKGVK
>2plus1_GFP11_Key_Nterm_261 (SEQ ID NO: 27002)
SRVEEIIEDLRRLLEEIRKENEDSIRRSKELLDRVKEINDTIIAELERLLKDIEKEVR
>2plus1_GFP11_Key_Nterm_262 (SEQ ID NO: 27003)
REVEEMIKELEELLKDLKEKNERASKRNRELVRRLEEENKRVIEELKKLVKELEDLVR
>2plus1_GFP11_Key_Nterm_263 (SEQ ID NO: 27004)
DAVEEAEKLIRKVIADSEKLLRDLADLNAKSIRRSEKLVEDDRRANEDVIRKLEELRR
>2plus1_GFP11_Key_Nterm_264 (SEQ ID NO: 27004)
SEVDDVLRRLEELIKTLEDINAKSLEDIKKLIDDLAKILEDALRKHEKLIRELREAKK
>2plus1_GFP11_Key_Nterm_265 (SEQ ID NO: 27006)
SEIERVKKRLEELLAEVEESTRRLEERLKRLLEEAKRSSEEVEKELRRLLEAVRRGLS
>2plus1_GFP11_Key_Nterm_266 (SEQ ID NO: 27007)
SDVDRVLEEIRKLLEDLKRHSEKVSEENEDLLRANTELNKRVSEDNERLLEELKRLRE
>2plus1_GFP11_Key_Nterm_267 (SEQ ID NO: 27008)
DEVEDVLRKIEKILDDHRKRIEKNSRDMARIIDEHRRKVEENSREMKKLVDDLKKAVD
>2plus1_GFP11_Key_Nterm_268 (SEQ ID NO: 27009)
SESDEVIRDLARLLDELARHVDDSVRRMDEVVKRSTREADELAKRLDELVKEVEKKPG
>2plus1_GFP11_Key_Nterm_269 (SEQ ID NO: 27010)
SRAETVLKEVTDKIKKLADSSDELLRRNKENIDELKKSSEELLRRLTKAIEEIEKGSV
>2plus1_GFP11_Key_Nterm_270 (SEQ ID NO: 27011)
DEEEDLERAIKKLLDENRELLKRIAEELRRLLEELRRLTEESADRLRRLLKELKDRGV
>2plus1_GFP11_Key_Nterm_271 (SEQ ID NO: 27012)
DEIRKVVKEITDLLKASNDKNRKVVEEIRDLLRKSKKLADELVERLRALVEDLRRRID
>2plus1_GFP11_Key_Nterm_272 (SEQ ID NO: 27013)
DAVEEAEKLIRKVIADSEKLLRDLADLNAKSIRRSEKLVEDDRRANEDVIRKLEELRR
>2plus1_GFP11_Key_Nterm_273 (SEQ ID NO: 27014)
SEDEDLDRVAEKLAREHKKSVEEIKRVLKSADEESKKLVRDTERVIEEIKREVEEARR
>2plus1_GFP11_Key_Nterm_274 (SEQ ID NO: 27015)
SKEDRLREELKKLLARLAEEIERLKRALEESNKDLKRTIDASEKHLRDVNEDVKRGGV
>3plus1_Key_668_Nterm (SEQ ID NO: 27,322)
DEAKELLDEIRKAVKESEDRLEKLLRDYEKELRRLEKELRDLKRRIEEKLEELRRGSL
>3plus1_Key_668_Cterm (SEQ ID NO: 27,323)
RGADALSRLLEELLRVVDDLIRVLKELIDKSRKVIEELLELLKRINEENLKVLAEIIK
>3plus1_Key_668_Cterm (SEQ ID NO: 27,324)
SEKEKLLKESEEEVRRLRRTLEELLRKYREVLERLRKELREIEERVRDVVRRLKEVLD
>3plus1_Key_668_Cterm (SEQ ID NO: 27,325)
SEKEDAARKLRKLVEELTREYEELVKKLERLIEEIEKVSEESVRKLEKLLAEISEEVR
>3plus1_Key_668_Cterm (SEQ ID NO: 27,326)
EALRKLVELLVEVLRRLIRVNRELVKLLREVLERLLRILRESVKKLKRLIEKVIKDAT
>3plus1_Key_669_Nterm (SEQ ID NO: 27,327)
RAVKKLDEIVKEVAKKLEDVVRANEELWRALVELNKESVRRLREIVERVARDLEETAR
>3plus1_Key_670_Nterm (SEQ ID NO: 27,328)
SDERRIAERIRELLRESKKLVRDVVEEAKRLLKENRDSTRKIIEDIRRLLRKIEDSTR
>3plus1_Key_670_Cterm (SEQ ID NO: 27,329)
SKEETLRKEAEDLLRRLEELTRRLEKKARELLERAKKLSRDLAEELKRLLKELREKGV
>3plus1_Key_670_Cterm (SEQ ID NO: 27,330)
AAKRLVEELLKAVTDLSRKNKRILEELLKAIETLSDENKKILTEILDALRRLVEKIEK
>3plus1_Key_670_Cterm (SEQ ID NO: 27,331)
KEREEVKEKLDRLLEEVEKTVRELKREHDELLKEVEKLVRDLKKEHDELLKKVKDDGV
>3plus1_Key_670_Nterm (SEQ ID NO: 27,332)
DRLDKVEELVKKLLEDTKRTVDRVRELVRKILKKSRETLEELERLIEKILRELEKDAR
>3plus1_Key_670_Cterm (SEQ ID NO: 27,333)
SERETVKRRLEELLKEVKRTLDKLKEEHDRLLEDVRRVVEELKREHDKLLKEVKDSGV
>3plus1_Key_670_Nterm (SEQ ID NO: 27,334)
SEDEIIKKIIEDLRRVLKEVEEIHKEVEERLDKVLKEAEEMHKEVLKELDRVLDEVKR
>3plus1_Key_670_Nterm (SEQ ID NO: 27,335)
SREEVLRELEEVIEDNRRLLEELIEKSKKVLDESLKLIDELLRRLEEVLERVLRLLEE
>3plus1_Key_670_Nterm (SEQ ID NO: 27,336)
ISEDDLKRVVDEVEKKLRELKRRYAEALERIKEKIKELKDRYERAVREVVAELRKTTK
>3plus1_Key_670_Nterm (SEQ ID NO: 27,337)
SKAEEIAEKLDRLLEENRRALEEITTRLDDLLRRNKDALRKVMEKLKRLLDDLRRGGI
>3plus1_Key_671_Cterm (SEQ ID NO: 27,338)
VDSERVKEILERILRVVEEAVRLNEESLRRILDVVRKAVKLDRESLKKILDVVEEAVR
>3plus1_Key_671_Cterm (SEQ ID NO: 27,339)
VKDDEVEREIRRVKEDLDRILEEYRRLLEEIKRKLEEILRRVEELHRRLRRKLEEIDR
>3plus1_Key_671_Cterm (SEQ ID NO: 27,340)
SRVEELKKLIEDILRISREVVERIKRVAEDIHRINRRVLDDLRKLIEDILRTVEEILA
>3plus1_Key_671_Cterm (SEQ ID NO: 27,341)
RGADALSRLLEELLRVVDDLIRVLKELIDKSRKVIEELLELLKRINEENLKVLAEIIK
>3plus1_Key_672_Cterm (SEQ ID NO: 27,342)
RGADALSRLLEELLRVVDDLIRVLKELIDKSRKVIEELLELLKRINEENLKVLAEIIK
>3plus1_Key_67>3_Nterm (SEQ ID NO: 27,343)
EALRKLVELLVEVLRRLIRVNRELVKLLREVLERLLRILRESVKKLKRLIEKVIKDAT
>3plus1_Key_67>3_Cterm (SEQ ID NO: 27,344)
SEKEDAARKLRKLVEELTREYEELVKKLERLIEEIEKVSEESVRKLEKLLAEISEEVR
>3plus1_Key_67>3_Nterm (SEQ ID NO: 27,345)
SEKEDAARKLRKLVEELTREYEELVKKLERLIEEIEKVSEESVRKLEKLLAEISEEVR
>3plus1_Key_674_Nterm (SEQ ID NO: 27,346)
SEKEDAARKLRKLVEELTREYEELVKKLERLIEEIEKVSEESVRKLEKLLAEISEEVR
>3plus1_Key_674_Cterm (SEQ ID NO: 27,347)
RAVKKLDEIVKEVAKKLEDVVRANEELWRALVELNKESVRRLREIVERVARDLEETAR
>3plus1_Key_675_Nterm (SEQ ID NO: 27,348)
RAVKKLDEIVKEVAKKLEDVVRANEELWRALVELNKESVRRLREIVERVARDLEETAR
>3plus1_Key_676_Nterm (SEQ ID NO: 27,349)
RAVKKLDEIVKEVAKKLEDVVRANEELWRALVELNKESVRRLREIVERVARDLEETAR
>3plus1_Key_677_Nterm (SEQ ID NO: 27,350)
SDERRIAERIRELLRESKKLVRDVVEEAKRLLKENRDSTRKIIEDIRRLLRKIEDSTR
>3plus1_Key_677_Cterm (SEQ ID NO: 27,351)
SKEETLRKEAEDLLRRLEELTRRLEKKARELLERAKKLSRDLAEELKRLLKELREKGV
>3plus1_Key_678_Nterm (SEQ ID NO: 27,352)
SKEETLRKEAEDLLRRLEELTRRLEKKARELLERAKKLSRDLAEELKRLLKELREKGV
>3plus1_Key_678_Cterm (SEQ ID NO: 27,353)
SKEETLRKEAEDLLRRLEELTRRLEKKARELLERAKKLSRDLAEELKRLLKELREKGV
>3plus1_Key_678_Cterm (SEQ ID NO: 27,354)
ISEDDLKRVVDEVEKKLRELKRRYAEALERIKEKIKELKDRYERAVREVVAELRKTTK
>3plus1_Key_678_Nterm (SEQ ID NO: 27,355)
SKAEEIAEKLDRLLEENRRALEEITTRLDDLLRRNKDALRKVMEKLKRLLDDLRRGGI
>3plus1_Key_678_Nterm (SEQ ID NO: 27,356)
VDSERVKEILERILRVVEEAVRLNEESLRRILDVVRKAVKLDRESLKKILDVVEEAVR
>3plus1_Key_679_Cterm (SEQ ID NO: 27,357)
SKAEEIAEKLDRLLEENRRALEEITTRLDDLLRRNKDALRKVMEKLKRLLDDLRRGGI
>3plus1_Key_679_Nterm (SEQ ID NO: 27,358)
SKAEEIAEKLDRLLEENRRALEEITTRLDDLLRRNKDALRKVMEKLKRLLDDLRRGGI

TABLE 6

| Row | | |
|---|---|---|
| number | Cage (column 1) | Key (column 2) |
| 1 | SB76L (SEQ ID NO: 1), | SB76_C-helix (SEQ ID NO: 27016), |
| | SB76L_17 (SEQ ID NO: 2), | SB76_C-helix-biotin (SEQ ID NO: 27017), |
| | SB76L_18 (SEQ ID NO: 3), | p5_MBP (SEQ ID NO: 27018), |
| | LOCKR_extend5 (SEQ ID NO: 4), | p9_MBP (SEQ ID NO: 27019), |
| | LOCKR_extend9 (SEQ ID NO: 5), | p18_MBP (SEQ ID NO: 27020), |
| | LOCKR_extend18 (SEQ ID NO: 6), | p76-long (SEQ ID NO: 27027), |
| | miniLOCKRa_1 (SEQ ID NO: 12), | p76-short (SEQ ID NO: 27028), |
| | miniLOCKRa_2 (SEQ ID NO: 13), | k76-long (SEQ ID NO: 27029), |
| | aBcl2LOCKR (SEQ ID NO: 18), | k76-short (SEQ ID NO: 27030), |
| | pBimLOCKR (SEQ ID NO: 19), | p76_GLISE (SEQ ID NO: 27031), |
| | BimLOCKR_extend5 (SEQ ID NO: 20), | p76_GSSEKIS (SEQ ID NO: 27032), |
| | BimLOCKR_extend9 (SEQ ID NO: 21), | p76_R26G (SEQ ID NO: 27033), |
| | BimLOCKR_extend18 (SEQ ID NO: 22), | p76-short_E19G (SEQ ID NO: 27034), |
| | strepLOCKRa (all variants; SEQ ID NOs: 26-34), | p76-short_GLISE_E01_EGFR (SEQ ID NO: 27035), |
| | SB13_LOCKR (SEQ ID NO: 35), | p76-short_AE_EGFR (SEQ ID NO: 27036), |
| | SB13_LOCKR_extend18 (SEQ ID NO: 37), | p76-short_AAE_EGFR (SEQ ID NO: 27037), |
| | ZCX12_LOCKR (SEQ ID NO: 36), | p76-short_EE_EGFR (SEQ ID NO: 27038) |
| | ZCX12_LOCKR_extend18 (SEQ ID NO: 38), | |
| | fretLOCKRa (SEQ ID NO: 39), | |
| | 1fix-latch_Mad1SID_t0_1 (SEQ ID NO: 61), | |
| | 1fix-latch_Mad1SID_T0_2 (SEQ ID NO: 65), | |
| | 1fix-long-Bim-t0 (SEQ ID NO: 54), | |
| | 1fix-long-GFP-t0 (SEQ ID NO: 55), | |
| | 1fix-short-BIM-t0 (SEQ ID NO: 56), | |
| | 1fix-short-GFP-t0 (SEQ ID NO: 57), | |
| | 1fix-short-noBim-t0 (SEQ ID NO: 16), | |
| | 1fix-short-noBim(AYYA)-t0 (SEQ ID NO: 17), | |
| | 1fix-short-Bim-t0-relooped (SEQ ID NO: 67), | |
| | 1fix-short-spytag-t0_2 (SEQ ID NO: 68), | |
| | 1fix-short-spytag-t0_8 (SEQ ID NO: 69), | |
| | 1fix-short-TEV-t0_1 (SEQ ID NO: 70), | |
| | 1fix-short-TEV-t0_6 (SEQ ID NO: 71), | |
| | 1fix-short-nanoBit-t0_1 (SEQ ID NO: 72), | |
| | 1fix-short-nanoBit-t0_3 (SEQ ID NO: 73), | |
| | 1fix-short-RHIM-t0_8 (SEQ ID NO: 74), | |
| | 1fix-short-RHIM-t0_19 (SEQ ID NO: 75), | |
| | 1fix-short-RHIM-t0_22 (SEQ ID NO: 76), | |
| | 1fix-short-gcn4-t0_4 (SEQ ID NO: 77), | |
| | 1fix-short-ccDi-t0_6 (SEQ ID NO: 78), | |
| | 1fix-short-cc-a-t0_6 (SEQ ID NO: 79), | |
| | 1fix-short-cc-b-t0_6 (SEQ ID NO: 80) | |
| 2 | LOCKRb (SEQ ID NO: 7), | key_b (SEQ ID NO: 27022) |
| | BimLOCKRb (SEQ ID NO: 23), | |
| | fretLOCKRb (SEQ ID NO: 40) | |
| 3 | LOCKRc (SEQ ID NO: 8), | key_c (SEQ ID NO: 27023) |
| | miniLOCKRc_1 (SEQ ID NO: 14), | |
| | miniLOCKRc_2 (SEQ ID NO: 15), | |
| | BimLOCKRc (SEQ ID NO: 24), | |
| | fretLOCKRc (SEQ ID NO: 41) | |
| 4 | LOCKRd (SEQ ID NO: 9), | key_d (SEQ ID NO: 27024) |
| | BimLOCKRd (SEQ ID NO: 25), | |
| | fretLOCKRd (SEQ ID NO: 42) | |
| 5 | LOCKRe (SEQ ID NO: 10) | key_e (SEQ ID NO: 27025) |
| 6 | LOCKRf (SEQ ID NO: 11) | key_f (SEQ ID NO: 27026) |
| 7 | 1fix_VMAc_C_BIMlatcht9 (SEQ ID 51) | sfGFP_VMAn_p18 (SEQ ID NO: 27041) |
| | sfGFP_VMAn_1fix_BIM_t0_latch (SEQ ID NO: 52) | p18_VMAc_mCherry (SEQ ID NO: 27042) |
| | sfGFP_VMAn_1fix_BIM_t0_latch (SEQ ID NO: 53) | |
| 8 | Spycatcher-1fix-long-GFP-t0 (SEQ ID NO: 58), | p76-spytag (SEQ ID NO: 27039), |
| | Spycatcher-1fix-short-GFP-t0 (SEQ ID NO: 59) | p76-short-spytag (SEQ ID NO: 27040) |
| 9 | STREPII-2plus1_LOCK_1 (SEQ ID NO: 81) | 2plus1_Key_1 (SEQ ID NO: 27043) |
| 10 | STREPII-2plus1_LOCK_2 (SEQ ID NO: 82) | 2plus1_Key_2 (SEQ ID NO: 27044) |
| 11 | STREPII-2plus1_LOCK_3, (SEQ ID NO: 83) | 2plus1_Key_3 (SEQ ID NO: 27045) |
| | STREPII-2plus1_LOCK_3-relooped (SEQ ID NO: 91) | |
| 12 | STREPII-2plus1_LOCK_4C (SEQ ID NO: 84) | 2plus1_Key_4C (SEQ ID NO: 27046) |
| 13 | STREPII-3plus1_LOCK_1 (SEQ ID NO: 86) | 3plus1_Key_1 (SEQ ID NO: 27047) |
| 14 | STREPII-3plus1_LOCK_2 (SEQ ID NO: 87) | 3plus1_Key_2 (SEQ ID NO: 27048) |
| 15 | STREPII-3plus1_LOCK_3 (SEQ ID NO: 88), | 3plus1_Key_3 SEQ ID NO: 27049) |
| | STREPII-3plus1_LOCK_3-relooped (SEQ ID NO: 90) | |
| 16 | STREPII-3plus1_LOCK_4 (SEQ ID NO: 89) | 3plus1_Key_4 (SEQ ID NO: 27050) |

TABLE 7

| Cage Name | Cage Sequence | Key Name | Key Sequence |
|---|---|---|---|
| 2plus1_Cage_Cterm_2406 | SEVDEVVKEVEDLVRRNEELVEEVVRRVEKVVTDDRRLVEEVVREI | 2plus1_Key_Cterm_2406 | EKVLRKLEKVIREVRERSTRALRKVE |
| | RKIVKDVEDLARKLDKEELKRVLDEMRERIERLLEKLRRHSKKLDD | | EVIRRVREESERALRDLERVVKEVEK |
| | ELKRLLEELREHSRRVEKRLEDLLKELRERGVDEKVLRKLEKVIRE | | RMREAAR (SEQ ID NO: 27127) |
| | VRERSTRALRKVEEVIRRVREESERALRDLERVVKEVEKRMREAAR | | |
| | (SEQ ID NO: 27126) | | |
| 2plus1_Cage_Cterm_5398 | SVEELLRKLEEVLRKIREENERSLKELRDRAREIVKRNRETNRELE | 2plus1_Key_Cterm_5398 | EDIVRKIERIVETIEREVRESVKKVE |
| | EVIKELEKRLSGADKEKVEELVRRIRRIVERVVEEDRRTVEEIEKI | | EIARDIRRKVDESVKNVEKLLRDVDK |
| | AREVVKRDRDSADRVRRTVEDVLRKATGSEDIVRKIERIVETIERE | | KARDRKK (SEQ ID NO: 27129) |
| | VRESVKKVEEIARDIRRKVDESVKNVEKLLRDVDKKARDRKK (SEQ ID | | |
| | NO: 27128) | | |
| 2plus1_Cage_Cterm_5405 | SESDDVIRKLRELLEELRTHVEKSIRDLRKILEDSTRHAKRSIEEL | 2plus1_Key_Cterm_5405 | EEKLKDLIRKLRDILRRAAEAHKKLI |
| | ERLLEEVRKKPGDEEVRKTVEEISRRVAENVKRLEDLYRRMEEEVK | | DDARESLERAKREHEKLIDRLKKILE |
| | KNLDRLRKRVEDIIREVEEARKKGVDEEKLKDLIRKLRDILRRAAE | | ELER (SEQ ID NO: 27131) |
| | AHKKLIDDARESLERAKREHEKLIDRLKKILEELER (SEQ ID | | |
| | NO: 27130) | | |
| 2plus1_Cage_Cterm_5406 | DREREVKKRLDEVRERIERLLRRVEEESRRVAEEIRRLIEEVRRRN | 2plus1_Key_Cterm_5406 | EELREELKKLERKIEKVAKEIHDHDK |
| | KKVTEEIRELLKGLKDKEEVRRVLERLRKLNAESDELLERILERLR | | EVTERLEDLLRRITEHARKSDREIEE |
| | RLVEATNRLVKAIIEELRRLVEKIVREVPDSEELREELKKLERKIE | | TAR (SEQ ID NO: 27133) |
| | KVAKEIHDHDKEVTERLEDLLRRITEHARKSDREIEETAR (SEQ ID | | |
| | NO: 27132) | | |
| 2plus1_Cage_Cterm_5409 | SEAEELLKRLEDRAEEILRRLEEILRTSRKLAEDVLRELEKLLRES | 2plus1_Key_Cterm_5409 | KEVVDEIKRIVDEVRERLKRIVDENA |
| | ERRIREVLEELRGIKDKKELEDVIREVEKELDESLERSRELLKDVL | | KIVEDARRALEKIVKENEEILRRLKK |
| | KKLDDNLKESERLVEDIDRELAKILEDLKKAGVPKEVVDEIKRIVD | | ELRELRK (SEQ ID NO: 27135) |
| | EVRERLKRIVDENAKIVEDARRALEKIVKENEEILRRLKKELRELR | | |
| | K (SEQ ID NO: 27134) | | |
| 2plus1_Cage_Cterm_5410 | SRAETVLKEVTDKIKKLADSSDELLRRNKENIDELKKSSEELLRRL | 2plus1_Key_Cterm_5410 | DEVVKRVRDLLDTVRRRNEKVNEDVK |
| | TKAIEEIEKGSVDEETLEELIRRVEAELEAHHRELEKNSREDEKRN | | RMNDKLRRDNEDVIRRVEKLLRELEE |
| | RDHHAKLEEEMRRVEERLEREGIDDEVVKRVRDLLDTVRRRNEKVN | | KRRT (SEQ ID NO: 27137) |
| | EDVKRMNDKLRRDNEDVIRRVEKLLRELEEKRRT (SEQ ID | | |
| | NO: 27136) | | |
| 2plus1_Cage_Cterm_5413 | STEEVLDEIRKLHKTLTEDIKRVLREIEELHRRTIEENKEVLDKIA | 2plus1_Key_Cterm_5413 | AEELLRESKEAIKEVKRVLEELRKES |
| | EDYKRVIDDVRTKDTPNVEKLLKDLEKSAKENIEHNERTLREDDRV | | KRVVDETRKLSEENLEHSERVLRKVE |
| | LKEIRRRATELLKANEEMLRRIEEVARKGGVDAEELLRESKEAIKE | | EDLR (SEQ ID NO: 27139) |
| | VKRVLEELRKESKRVVDETRKLSEENLEHSERVLRKVEEDLR (SEQ ID | | |
| | NO: 27138) | | |
| 2plus1_Cage_5414_GFP11_Cterm | SEIEKILKEIEDLARRDEEVSKKIVEDIRRLAKEVEDTSRDIVRKI | 2plus1_Key_Cterm_5414 | EDSERLVREVEDLVRRLVRRSEKSNE |
| | EELAKRVLDRLRKDGSKEELEKEVREVVKTLEELVKDNHRLIRRAV | | EVKRTVEELVRRMEESNDRVRDLVRR |
| | EEMKRLVEENHRHSREVVKELEDLVRELRKGSGSEDSERDHMVLHE | | LVEELKRAVD (SEQ ID NO: 27141) |
| | YVNAAGITSEKSNEEVKRTVEELVRRMEESNDRVRDLVRRLVEELK | | |
| | RAVD (SEQ ID NO: 27140) | | |
| 2plus1_Cage_5414_GFP11_Cterm | SEIEKILKEIEDLARRDEEVSKKIVEDIRRLAKEVEDTSRDIVRKI | 2plus1_Key_Cterm_5414 | EDSERLVREVEDLVRRLVRRSEKSNE |
| | EELAKRVLDRLRKDGSKEELEKEVREVVKTLEELVKDNHRLIRRAV | | EVKRTVEELVRRMEESNDRVRDLVRR |
| | EEMKRLVEENHRHSREVVKELEDLVRELRKGSGSEDSERRDHMVLH | | LVEELKRAVD (SEQ ID NO: 27143) |
| | EYVNAAGITEKSNEEVKRTVEELVRRMEESNDRVRDLVRRLVEELK | | |
| | RAVD (SEQ ID NO: 27142) | | |
| 2plus1_Cage_5414_GFP11_Cterm | SEIEKILKEIEDLARRDEEVSKKIVEDIRRLAKEVEDTSRDIVRKI | 2plus1_Key_Cterm_5414 | EDSERLVREVEDLVRRLVRRSEKSNE |
| | EELAKRVLDRLRKDGSKEELEKEVREVVKTLEELVKDNHRLIRRAV | | EVKRTVEELVRRMEESNDRVRDLVRR |
| | EEMKRLVEENHRHSREVVKELEDLVRELRKGSGSEDSERLVREVRD | | LVEELKRAVD (SEQ ID NO: 27145) |
| | HMVLHEYVNAAGITEVKRTVEELVRRMEESNDRVRDLVRRLVEELK | | |
| | RAVD (SEQ ID NO: 27144) | | |
| 2plus1_Cage_Cterm_5421 | SVDEVLKEIEDALRRLKEEVERVLKENEDELRRLEEEVRRVLKEDE | 2plus1_Key_Cterm_5421 | EKAIRDVAKEIRDRLKELEEEIEEVT |
| | ELLESLKRGVGESDEVDRVVDEIAKLSAEILEKVKKVVKEIRDSLE | | RRNLKLLADVEEEIRRVHEKTRRLLE |
| | TVKRRVDDVVRRLKELLDEIKRGSDEKAIRDVAKEIRDRLKELEEE | | TVLRRAT (SEQ ID NO: 27147) |
| | IEEVTRRNLKLLADVEEEIRRVHEKTRRLLETVLRRAT (SEQ ID | | |
| | NO: 27146) | | |
| 2plus1_Cage_Cterm_5432 | DEIRKVVKEITDLLKASNDKNRKVVEEIRDLLRKSKKLADELVERL | 2plus1_Key_Cterm_5432 | SEDLKRVEERAREVSRRNEESMRRVK |
| | RALVEDLRRRIDKSGDKETAEDIVRRIIEELKRILKEIEDLARRIN | | EDADRVSEANKEVLDRVREEVKRLIE |
| | REIERLVEEVERDNRDVNRAIEELLKDIARRGGSEDLKRVEERARE | | EVRETLR (SEQ ID NO: 27149) |
| | VSRRNEESMRRVKEDADRVSEANKEVLDRVREEVKRLIEEVRETLR | | |
| | (SEQ ID NO: 27148) | | |
| 2plus1_Cage_Cterm_5435 | STAETVAEEVERVLKHSDDLIKEVEDVNRRVEEEIKRVIRELEEEN | 2plus1_Key_Cterm_5435 | EEAAREIIKRLREVNKRTKEKLDELI |
| | ERLVAEVRKGVKGEILAEIEKRLADNSEKVREVAERAKKLLEENTA | | KHSEEVLERVKRLIDELRKHSEEVLE |
| | RVKDILRESRKLVKDLLDEVRGTGSEEAAREIIKRLREVNKRIKEK | | DLRRRAK (SEQ ID NO: 27151) |
| | LDELIKHSEEVLERVKRLIDELRKHSEEVLEDLRRRAK (SEQ ID | | |
| | NO: 27150) | | |
| 2plus1_Cage_Cterm_5437 | DEVREVAERLRRLVDESRKRNEEVIKESEALVDRVRKTNEEVMKRL | 2plus1_Key_Cterm_5437 | AETIERVVRELLEENKEVLRKTEEAV |
| | RELIDKLEKDIRRSGDKETVEKIIREVLSAIDELLKRVERTNAEIS | | KRSTETNKRLLEASKEVADRLRERIK |
| | KENARLLDEVRKTNEEISRRLAKLLEDIRRGSGDAETIERVVRELL | | EAAK (SEQ ID NO: 27153) |
| | EENKEVLRKTEEAVKRSTETNKRLLEASKEVADRLRERIKEAAK | | |
| | (SEQ ID NO: 27152) | | |
| 2plus1_Cage_Cterm_5439 | SRVEEIIEDLRRLLEEIRKENEDSIRRSKELLDRVKEINDTIIAEL | 2plus1_Key_Cterm_5439 | EDKARKVAEVAEKVLRDIDKLDRESK |
| | ERLLKDIEKEVREKGSESEEVKKALRAVLEELEKLLRRVAEINEEV | | EAFRATNEEIAKLDEDTARVAERVKK |
| | LRRNSKLVEEDERRNREVLKELARLVEELIREIGDEDKARKVAEVA | | AIEDLAK (SEQ ID NO: 27155) |
| | EKVLRDIDKLDRESKEAFRATNEEIAKLDEDTARVAERVKKAIEDL | | |
| | AK (SEQ ID NO: 27154) | | |
| 2plus1_Cage_Cterm_5447 | SEADDVLKKLAETVKRIIERLKKLTDDSRRLVEEVHRRNDKLSKES | 2plus1_Key_Cterm_5447 | EELSAEVKKLLDEVRKALARHKDEND |
| | AEAVRKAEERGIDEKDVRKLLEDLKKKSEEVAERNKRILDTLREIS | | KLLKEIEDSLRRHKEENDRLLEKLKE |
| | KRAEDEVRKVLKELEKTLKELEDRRPDSEELSAEVKKLLDEVRKAL | | STR (SEQ ID NO: 27157) |
| | ARHKDENDKLLKEIEDSLRRHKEENDRLLEKLKESTR (SEQ ID | | |
| | NO: 27156) | | |
| 2plus1_Cage_Cterm_5456 | SAEELLREVAELVKRVDEDLRRLLEEVRASNEEVIRRLEEILKRIE | 2plus1_Key_Cterm_5465 | EETVKRLLDELRELLERLKRTIEELL |
| | EENRKVVEELRRGGVSEDLVRESKRLVDESRRVIEKLVKESADSVE | | KRNRDLLADAEEKARRLLEENRKLLK |
| | RTRETVDRLREELKRLVEEIAKMVKGGSSEETVKRLLDELRELLER | | AARDTAT (SEQ ID NO: 27159) |
| | LKRTIEELLKRNRDLLADAEEKARRLLEENRKLLKAARDTAT (SEQ ID | | |
| | NO: 27158) | | |
| 2plus1_Cage_Cterm_5470 | SKEDRLREELKKLLARLAEEIERLKRALEESNKDLKRTIDASEKHL | 2plus1_Key_Cterm_5470 | EEELDKLLKEARDLIREIEKRLEELL |
| | RDVNEDVKRGGVSEELLRELERSTAENKERAKELLKRHEDLVRKVE | | KRVEKLTEDAKRDLERSNREHKELAD |
| | KELADLLRRLEEIVARVDEALKRGISEEELDKLLKEARDLIREIEK | | RIKETAR (SEQ ID NO: 27161) |
| | RLEELLKRVEKLTEDAKRDLERSNREHKELADRIKETAR (SEQ ID | | |
| | NO: 27160) | | |
| 2plus1_Cage_Nterm_2406 | SEVDEVVKEVEDLVRRNEELVEEVVRRVEKVVTDDRRLVEEVVREI | 2plus1_Key_Nterm_2406 | SEVDEVVKEVEDLVRRNEELVEEVVR |
| | RKIVKDVEDLARKLDKEELKRVLDEMRERIERLLEKLRRHSKKLDD | | RVEKVVTDDRRLVEEVVREIRKIVKD |
| | ELKRLLEELREHSRRVEKRLEDLLKELRERGVDEKVLRKLEKVIRE | | VEDLARK (SEQ ID NO: 27163) |
| | VRERSTRALRKVEEVIRRVREESERALRDLERVVKEVEKRMREAAR | | |
| | (SEQ ID NO: 27162) | | |
| 2plus1_Cage_Nterm_5406 | DREREVKKRLDEVRERIERLLRRVEEESRRVAEEIRRLIEEVRRRN | 2plus1_Key_Nterm_5406 | DREREVKKRLDEVRERIERLLRRVEE |
| | KKVTEEIRELLKGLKDKEEVRRVLERLRKLNAESDELLERILERLR | | ESRRVAEEIRRLIEEVRRRNKKVTEE |
| | RLVEATNRLVKAIIEELRRLVEKIVREVPDSEELREELKKLERKIE | | IRELLKGL (SEQ ID NO: 27165) |
| | KVAKEIHDHDKEVTERLEDLLRRITEHARKSDREIEETAR (SEQ ID | | |
| | NO: 27164) | | |
| 2plus1_Cage_Nterm_5409 | SEAEELLKRLEDRAEEILRRLEEILRTSRKLAEDVLRELEKLLRES | 2plus1_Key_Nterm_5409 | SEAEELLKRLEDRAEEILRRLEEILR |
| | ERRIREVLEELRGIKDKKELEDVIREVEKELDESLERSRELLKDVL | | TSRKLAEDVLRELEKLLRESERRIRE |
| | KKLDDNLKESERLVEDIDRELAKILEDLKKAGVPKEVVDEIKRIVD | | VLEELRGI (SEQ ID NO: 27167) |
| | EVRERLKRIVDENAKIVEDARRALEKIVKENEEILRRLKKELRELR | | |
| | K (SEQ ID NO: 27166) | | |
| 2plus1_Cage_Nterm_5410 | SRAETVLKEVTDKIKKLADSSDELLRRNKENIDELKKSSEELLRRL | 2plus1_Key_Nterm_5410 | SRAETVLKEVTDKIKKLADSSDELLR |
| | TKAIEEIEKGSVDEETLEELIRRVEAELEAHHRELEKNSREDEKRN | | RNKENIDELKKSSEELLRRLTKAIEE |
| | RDHHAKLEEEMRRVEERLEREGIDDEVVKRVRDLLDTVRRRNEKVN | | IEKGS (SEQ ID NO: 27169) |
| | EDVKRMNDKLRRDNEDVIRRVEKLLRELEEKRRT (SEQ ID | | |
| | NO: 27168) | | |
| 2plus1_Cage_Nterm_5413 | STEEVLDEIRKLHKTLTEDIKRVLREIEELHRRTIEENKEVLDKIA | 2plus1_Key_Nterm_5413 | STEEVLDEIRKLHKTLTEDIKRVLRE |
| | EDYKRVIDDVRTKDTPNVEKLLKDLEKSAKENIEHNERTLREDDRV | | IEELHRRTIEENKEVLDKIAEDYKRV |
| | LKEIRRRATELLKANEEMLRRIEEVARKGGVDAEELLRESKEAIKE | | IDDVRTKD (SEQ ID NO: 27171) |
| | VKRVLEELRKESKRVVDETRKLSEENLEHSERVLRKVEEDLR (SEQ ID | | |
| | NO: 27170) | | |
| 2plus1_Cage_5414_GFP11_Nterm | SEIEKILKEIEDLARRDEEVSKKIVEDIRRLAKEVEDTSRRDHMVL | 2plus1_Key_Nterm_5414 | SEIEKILKEIEDLARRDEEVSKKIVE |
| | HEYVNAAGITLRKDGSKEELEKEVREVVKTLEELVKDNHRLIRRAV | | DIRRLAKEVEDTSRDIVRKIEELAKR |
| | EEMKRLVEENHRHSREVVKELEDLVRELRKGSGSEDSERLVREVED | | VLDRLRKD (SEQ ID NO: 27173) |
| | LVRRLVRRSEKSNEEVKRTVEELVRRMEESNDRVRDLVRRLVEELK | | |
| | RAVD (SEQ ID NO: 27172) | | |
| 2plus1_Cage_5414_GFP11_Nterm | SEIEKILKEIEDLARRDEEVSKKIVEDIRRLAKEVEDTSRDIRDHM | 2plus1_Key_Nterm_5414 | SEIEKILKEIEDLARRDEEVSKKIVE |
| | VLHEYVNAAGITKDGSKEELEKEVREVVKTLEELVKDNHRLIRRAV | | DIRRLAKEVEDTSRDIVRKIEELAKR |
| | EEMKRLVEENHRHSREVVKELEDLVRELRKGSGSEDSERLVREVED | | VLDRLRKD (SEQ ID NO: 27175) |
| | LVRRLVRRSEKSNEEVKRTVEELVRRMEESNDRVRDLVRRLVEELK | | |
| | RAVD (SEQ ID NO: 27174) | | |
| 2plus1_Cage_Nterm_5439 | SRVEEIIEDLRRLLEEIRKENEDSIRRSKELLDRVKEINDTIIAEL | 2plus1_Key_Nterm_5439 | SRVEEIIEDLRRLLEEIRKENEDSIR |
| | ERLLKDIEKEVREKGSESEEVKKALRAVLEELEKLLRRVAEINEEV | | RSKELLDRVKEINDTIIAELERLLKD |
| | LRRNSKLVEEDERRNREVLKELARLVEELIREIGDEDKARKVAEVA | | IEKEVREKG (SEQ ID NO: 27177) |
| | EKVLRDIDKLDRESKEAFRATNEEIAKLDEDTARVAERVKKAIEDL | | |
| | AK (SEQ ID NO: 27176) | | |
| 3plus_Cage_529_GFP11_Cterm | SEAEDLEELIKELAELLKDVIRKLEKINRRLVKILEDIIRRLKEIS | 3plus_Key_Cterm_529 | KDEAERRRRELKDKLDRLREEHEEVK |
| | KEAEEELRKGTVEDKDILRDLERRLREILEESDRLLEELKRRLEEI | | RRLEEELTRLRETHKKIEKELREALK |
| | LRKSKELLRRLEEVLREILKRAEEVKRSNLPKEELIKEIVKLLEEL | | RVRDRST (SEQ ID NO: 27179) |
| | LRVIEKILEDNIRLLEELVEVIKEILEKHLRLLEELVRVIERILRE | | |
| | VGKDKDEAERRDHMVLHEYVNAAGITEEVKRRLEEELTRLRETHKK | | |
| | IEKELREALKRVRDRST (SEQ ID NO: 27178) | | |
| 3plus1_Cage_Cterm_263 | SLVDELRKSLERNVRVSEEVARRLKEALKRWVDVVRKVVEDLIRLN | 3plus1_Key_Cterm_263 | DEELKRVLEKAADLHRRLKDRHRKLL |
| | EDVVRVVEKVTVDESAIERVRRIIEELNRKLDAVLKKNEDLVRRLT | | EDLERIIRELKKKLDEVVEENKRSVD |
| | ELLDKLLEENRRLVEELDEDLKRRGGTEEVIDTILELIERSIERLK | | ELKR (SEQ ID NO: 27181) |
| | RLLDELLRIVREALKDNKRVADENLKKLKEILDELRKDGVEDEELK | | |
| | RVLEKAADLHRRLKDRHRKLLEDLERIIRELKKKLDEVVEENKRSV | | |
| | DELKR (SEQ ID NO: 27180) | | |
| 3plus1_Cage_Cterm_494 | SKEDKARELEKRLRDNLKKLEEVVRELAEVLKRNLEKLRRLAEELL | 3plus1_Key_Cterm_494 | EDLVRDIRRELKELEERARKILRDDE |
| | RALKRLLDKLRAGGLPKDELEDLRREVEDVLRRLEDLLRKLKKAND | | RDLRALEKRIRDIIREDREELERLKE |
| | ESLIRLEELLRRAEEENRRVLTTLRELLRGNGDDRDLARLVARLVE | | RARK (SEQ ID NO: 27183) |
| | ANNRALEELLRLVAKNVEDNNRVLEELLRLVKELAKRLLGRIRDED | | |
| | LVRDIRRELKELEERARKILRDDERDLRALEKRIRDIIREDREELE | | |
| | RLKERARK (SEQ ID NO: 27182) | | |
| 3plus1_Cage_Cterm_500 | SEKEELKRLLDKLLKELKRLSDELKATIDKILKILKEVSEEVKRTA | 3plus1_Key_Cterm_500 | EDELRKVEEDLKRLEDKLKKLLEDYE |
| | DELLDAIRRGGVDEEVLREIKREIEEIEKKLRKVNKEIEDEIREIK | | KKVRELEETLDDLLRKYEETLRRLEK |
| | KKLDEVDDKITKEVEKIKEALDKGGVDAKEVIKALKEILKEHADVF | | ELEEAER (SEQ ID NO: 27185) |
| | EDVLRRLKEIIKRHRDVVKEVLEELRKILEKVAEVLKRQGRSEDEL | | |
| | RKVEEDLKRLEDKLKKLLEDYEKKVRELEETLDDLLRKYEETLRRL | | |
| | EKELEEAER (SEQ ID NO: 27184) | | |
| 3plus1_Cage_506_GFP11_Cterm | SAEETLRRITEESKRVLEEITKKYEDLERESREVLRKLREDLDRIK | 3plus1_Key_Cterm_506 | RERLARLLKALADKLIRVLEEILKIN |
| | RELEDVLTKGGDDKDEVLTVLEKVLDELLKLHRENLRVIKELLRKV | | EELNRKIIKFARENLERNRRVNKKVI |
| | LEVDRENLEVLKRLLEKARDLLRRSGRDEKDLKKLEDELRKVKEEL | | EVLREAAR (SEQ ID NO: 27187) |
| | EKKHEASKRDIEDLERELDKVTEEVERLLRKLKEELRRAAEGSDER | | |
| | DHMVLHEYVNAAGITTRVLEEILKINEELNRKIIKFARENLERNRR | | |
| | VNKKVIEVLREAAR (SEQ ID NO: 27186) | | |
| 3plus1_Cage_508_GFP11_Cterm | STEEILKRVKEILDELAKELRDIIRESLRTIEELLDELRRILEESE | 3plus1_Key_Cterm_508 | DEVKRRLEEKERRIRTRYEELRRRLR |
| | RTLEELVKTIKDGVKDSEELLRRLKRLLEDLRRAHEELLKRLKEAV | | KRVKDYEDKLREIEKKVRRDAERIEE |
| | DEHRDRLRKILEELERVLKELRKRIEELRRSGDRISEKDVLRKLEE | | ELERAKK (SEQ ID NO: 27189) |
| | VLRKALEILERLLKKIRESARELLKIIEEVLDANIKVMEEALKTIK | | |
| | ELLKDGRDHMVLHEYVNAAGITTRYEELRRRLRKRVKDYEDKLREI | | |
| | EKKVRRDAERIEEELERAKK (SEQ ID NO: 27188) | | |
| 3plus1_Cage_Cterm_510 | SEKEELLKLIKRVIELLKRVLEEHLRLVEDVIRRLKELLDSNEKIV | 3plus1_Key_Cterm_510 | EDLLRKAKKVITEVREKLKRNLEDVR |
| | REVIEDLKRLLDEVRGDKEELDRIKEKLEEVLERYKRRLEEIKRDL | | RVIEDVKRKSARILEEARRLIEEVER |
| | ERMLEDYKRELKRIEEDLRRVLEEVERIATRGEGPAEALIDKLRKI | | ELEKIRK (SEQ ID NO: 27191) |
| | LERALRELDKLSKKLDELLKKVLEELEKSNREIDKLLKDVLRRVEE | | |
| | GGASEDLLRKAKKVITEVREKLKRNLEDVRRVIEDVKRKSARILEE | | |
| | ARRLIEEVERELEKIRK (SEQ ID NO: 27190) | | |
| 3plus1_Cage_528_GFP11_Cterm | SEAEDLEELIKELAELLKDVIRKLEKINRRLVKILEDIIRRLKEIS | 3plus1_Key_Cterm_528 | KDEAERRRRELKDKLDRLREEHEEVK |
| | KEAEEELRKGTVEDKDILRDLERRLREILEESDRLLEELKRRLEEI | | RRLEEELTRLRETHKKIEKELREALK |
| | LRKSKELLRRLEEVLREILKRAEEVKRSNLPKEELIKEIVKLLEEL | | RVRDRST (SEQ ID NO: 27193) |
| | LRVIEKILEDNIRLLEELVEVIKEILEKHLRLLEELVRVIERILRE | | |
| | VGRDHMVLHEYVNAAGITLDRLREEHEEVKRRLEEELTRLRETHKK | | |
| | IEKELREALKRVRDRST (SEQ ID NO: 27192) | | |
| 3plus1_Cage_528_GFP11_Cterm | SEAEDLEELIKELAELLKDVIRKLEKINRRLVKILEDIIRRLKEIS | 3plus1_Key_Cterm_528 | KDEAERRRRELKDKLDRLREEHEEVK |
| | KEAEEELRKGTVEDKDILRDLERRLREILEESDRLLEELKRRLEEI | | RRLEEELTRLRETHKKIEKELREALK |
| | LRKSKELLRRLEEVLREILKRAEEVKRSNLPKEELIKEIVKLLEEL | | RVRDRST (SEQ ID NO: 27195) |
| | LRVIEKILEDNIRLLEELVEVIKEILEKHLRLLEELVRVIERILRE | | |
| | VGKDKRDHMVLHEYVNAAGITLREEHEEVKRRLEEELTRLRETHKK | | |
| | IEKELREALKRVRDRST (SEQ ID NO: 27194) | | |
| 3plus1_Cage_528_GFP11_Cterm | SEAEDLEELIKELAELLKDVIRKLEKINRRLVKILEDIIRRLKEIS | 3plus1_Key_Cterm_528 | KDEAERRRRELKDKLDRLREEHEEVK |
| | KEAEEELRKGTVEDKDILRDLERRLREILEESDRLLEELKRRLEEI | | RRLEEELTRLRETHKKIEKELREALK |
| | LRKSKELLRRLEEVLREILKRAEEVKRSNLPKEELIKEIVKLLEEL | | RVRDRST (SEQ ID NO: 27197) |
| | LRVIEKILEDNIRLLEELVEVIKEILEKHLRLLEELVRVIERILRE | | |
| | VGKDKDEAERDHMVLHEYVNAAGITHEEVKRRLEEELTRLRETHKK | | |
| | IEKELREALKRVRDRST (SEQ ID NO: 27196) | | |
| 3plus1_Cage_529_GFP11_Cterm | SEAEDLEELIKELAELLKDVIRKLEKINRRLVKILEDIIRRLKEIS | 3plus1_Key_Cterm_529 | KDEAERRRRELKDKLDRLREEHEEVK |
| | KEAEEELRKGTVEDKDILRDLERRLREILEESDRLLEELKRRLEEI | | RRLEEELTRLRETHKKIEKELREALK |
| | LRKSKELLRRLEEVLREILKRAEEVKRSNLPKEELIKEIVKLLEEL | | RVRDRST (SEQ ID NO: 27199) |
| | LRVIEKILEDNIRLLEELVEVIKEILEKHLRLLEELVRVIERILRE | | |
| | VGKRDHMVLHEYVNAAGITDRLREEHEEVKRRLEEELTRLRETHKK | | |
| | IEKELREALKRVRDRST (SEQ ID NO: 27198) | | |
| 3plus1_Cage_529_GFP11_Cterm | SEAEDLEELIKELAELLKDVIRKLEKINRRLVKILEDIIRRLKEIS | 3plus1_Key_Cterm_529 | KDEAERRRRELKDKLDRLREEHEEVK |
| | KEAEEELRKGTVEDKDILRDLERRLREILEESDRLLEELKRRLEEI | | RRLEEELTRLRETHKKIEKELREALK |
| | LRKSKELLRRLEEVLREILKRAEEVKRSNLPKEELIKEIVKLLEEL | | RVRDRST (SEQ ID NO: 27201) |
| | LRVIEKILEDNIRLLEELVEVIKEILEKHLRLLEELVRVIERILRE | | |
| | VGKDRDHMVLHEYVNAAGITRLREEHEEVKRRLEEELTRLRETHKK | | |
| | IEKELREALKRVRDRST (SEQ ID NO: 27200) | | |
| 3plus1_Cage_529_GFP11_Cterm | SEAEDLEELIKELAELLKDVIRKLEKINRRLVKILEDIIRRLKEIS | 3plus1_Key_Cterm_529 | KDEAERRRRELKDKLDRLREEHEEVK |
| | KEAEEELRKGTVEDKDILRDLERRLREILEESDRLLEELKRRLEEI | | RRLEEELTRLRETHKKIEKELREALK |
| | LRKSKELLRRLEEVLREILKRAEEVKRSNLPKEELIKEIVKLLEEL | | RVRDRST (SEQ ID NO: 27203) |
| | LRVIEKILEDNIRLLEELVEVIKEILEKHLRLLEELVRVIERILRE | | |
| | VGKDKDRDHMVLHEYVNAAGITREEHEEVKRRLEEELTRLRETHKK | | |
| | IEKELREALKRVRDRST (SEQ ID NO: 27202) | | |
| 3plus1_Cage_Cterm_530 | SDKEEIKRRVEKTARDLETEHDKIKKRLEDTVRDIKRELDELLEKY | 3plus1_Key_Cterm_530 | EKRLIEEVVRLLRENLDVVRRILEAL |
| | ERVLRKIEKTLREGDGDAIDLVDKLLETVKRLNEEVLRIVKKIADE | | AKLIKELLEALEEVLRRNKELIRELL |
| | LRRLVEEVLRVLRESNETLARLLEEGNVGDEVRERLEEVLRRTEEI | | RVLDEALK (SEQ ID NO: 27205) |
| | IKTLEEIVKRLLDELRRLVEELRRISKKLKDELDKIKEKGKDEKRL | | |
| | IEEVVRLLRENLDVVRRILEALAKLIKELLEALEEVLRRNKELIRE | | |
| | LLRVLDEALK (SEQ ID NO: 27204) | | |
| 3plus1_Cage_534_GFP11_Cterm | DEDRIIEEIARLLEELLRELLELIKKLIETNRRLNEEHERAVRELA | 3plus1_Key_Cterm_534 | EKIAEEIERELEELRRMIKRLHEDLE |
| | RLLEELLDRLVKKGISDEKLKRIRERLKRALDDLERLHREINKRLE | | RKLKESEDELREIEARLEEKIRRLEE |
| | DLVRELEKLVREILKELKDALEELRRASARAGGEEVLRRLEEIVKK | | KLERKRR (SEQ ID NO: 27207) |
| | LLDLVRRILERLKEIHKDNVRLLRELNERLTRIVEDLVRLIREILR | | |
| | EAGVDERDHMVLHEYVNAAGITIKRLHEDLERKLKESEDELREIEA | | |
| | RLEEKIRRLEEKLERKRR (SEQ ID NO: 27206) | | |
| 3plus1_Cage_534_GFP11_Cterm | DEDRIIEEIARLLEELLRELLELIKKLIETNRRLNEEHERAVRELA | 3plus1_Key_Cterm_534 | EKIAEEIERELEELRRMIKRLHEDLE |
| | RLLEELLDRLVKKGISDEKLKRIRERLKRALDDLERLHREINKRLE | | RKLKESEDELREIEARLEEKIRRLEE |
| | DLVRELEKLVREILKELKDALEELRRASARAGGEEVLRRLEEIVKK | | KLERKRR (SEQ ID NO: 27209) |
| | LLDLVRRILERLKEIHKDNVRLLRELNERLTRIVEDLVRLIREILR | | |
| | EAGVDEKIRDHMVLHEYVNAAGITRLHEDLERKLKESEDELREIEA | | |
| | RLEEKIRRLEEKLERKRR (SEQ ID NO: 27208) | | |
| 3plus1_Cage_534_GFP11_Cterm | DEDRIIEEIARLLEELLRELLELIKKLIETNRRLNEEHERAVRELA | 3plus1_Key_Cterm_534 | EKIAEEIERELEELRRMIKRLHEDLE |
| | RLLEELLDRLVKKGISDEKLKRIRERLKRALDDLERLHREINKRLE | | RKLKESEDELREIEARLEEKIRRLEE |
| | DLVRELEKLVREILKELKDALEELRRASARAGGEEVLRRLEEIVKK | | KLERKRR (SEQ ID NO: 27211) |
| | LLDLVRRILERLKEIHKDNVRLLRELNERLTRIVEDLVRLIREILR | | |
| | EAGVDEKIAEEIERDHMVLHEYVNAAGITLERKLKESEDELREIEA | | |
| | RLEEKIRRLEEKLERKRR (SEQ ID NO: 27210) | | |
| 3plus1_Cage_Cterm_539 | SEKEKLLKESEEEVRRLRRTLEELLRKYREVLERLRKELREIEERV | 3plus1_Key_Cterm_539 | ERLVKTLIEDVEAVIKRILELITRVA |
| | RDVVRRLKEVLDRKGLDIDTIIKEVEDLLKTVLDRLRELLDKIRRL | | EDNERVLERIIRELTDNLERHLKIVR |
| | TKEAIEVVREIIERIVRHAERVKDELRKEGGDKEKLDRVDRLIKEN | | EIVK (SEQ ID NO: 27213) |
| | TRHLKEILDRIEDLVRRSEKKLRDIIREVRRLIEELRKKAEEIKKG | | |
| | PDERLVKILIEDVEAVIKRILELITRVAEDNERVLERIIRELTDNL | | |
| | ERHLKIVREIVK (SEQ ID NO: 27212) | | |
| 3plus1_Cage_Cterm_548 | DKAEVLREALKLLKDLLEELIKIHEESLKRILDLIDTLVKVHEDAL | 3plus1_Key_Cterm_548 | EEIDRELKRVVEELRRLHEEIKERLD |
| | RALKELLERSGLDERELRKVERMATESLRTIAKLKEELRDLARRSL | | DVARRSEEELRRIIKKLKEVVKEIRK |
| | EKLREDLKRVDDILRKVEEKVRRTGPSEELIEELIRTIEKLLKEIV | | KLK (SEQ ID NO: 27215) |
| | RINEEVLKAVRELLKTLLKLSEDVVRRIEEILRKGGVPEEIDRELK | | |
| | RVVEELRRLHEEIKERLDDVARRSEEELRRIIKKLKEVVKEIRKKL | | |
| | K (SEQ ID NO: 27214) | | |
| 3plus1_Cage_Cterm_556 | SERELIERWLELHKEILRLIRELVERLLKLHREILDTIKKLIRELL | 3plus1_Key_Cterm_556 | DDERRTLTELLKRMEDILEKVERTLK |
| | ELLEDIARKLGLDKEAKDELREIAKRVEDKLEKLERESRKVEEDLK | | KLLDDSARMAEEVKKTLKELLERSEK |
| | RKLKELTDESDIVEKRVRDVVRRGTQSREEIAEELLRLDRKLLKAV | | VAEDVRK (SEQ ID NO: 27217) |
| | EELLKEILDLNKKLLDDVRAILEETRRVLEKLLDRVRRGERTDDER | | |
| | RTLTELLKRMEDILEKVERTLKKLLDDSARMAEEVKKTLKELLERS | | |
| | EKVAEDVRK (SEQ ID NO: 27216) | | |
| 3plus1_Cage_Cterm_560 | SKKELLEEVVRRAIELLKRHLEKLKRILEEIVRLLEEHLEKVERVL | 3plus1_Key_Cterm_560 | EDKLKEIEDELRRLLEELRRLDKAIK |
| | EAILSLLDDLLRRGGDERAIRTLEDVKRRLREILERLADENAKAIK | | DRLRELKKDLDEANRRIKETLKKLLR |
| | RLADLLDKLEKRNKEAIERLEEILEELKRVRRDEELLRVLETLLKI | | EVEK (SEQ ID NO: 27219) |
| | IEDILRENTKVLEDLLRLVEEILEANLRVVEELLRLAREILTEIVG | | |
| | DEDKLKEIEDELRRLLEELRRLDKAIKDRLRELKKDLDEANRRIKE | | |
| | TLKKLLREVEK (SEQ ID NO: 27218) | | |
| 3plus1_Cage_568_GFP11_Cterm | KEIEETLKELEDLNREMVETNRRVLEETRRLNKETVDRVKATLDEL | 3plus1_Key_Cterm_568 | KAVEELEKALEEIKRRLKEVIDRYED |
| | AKMLKKLVDDVRKGPTSEELKRLLAELEELLARVVRRVEELLKKST | | ELRKLRKEYKEKIDKYERKLEEIERR |
| | DLLERAVKDSADALRRSHEVLKEVASRVKRAKDEGLPREEVLRLLR | | ERT (SEQ ID NO: 27221) |
| | ELLERHAKVLKDIVRVSEKLLREHLKVLREIVEVLEELLERILKVI | | |
| | LDTTRDHMVLHEYVNAAGITKRRLKEVIDRYEDELRKLRKEYKEKI | | |
| | DKYERKLEEIERRERT (SEQ ID NO: 27220) | | |
| 3plus1_Cage_568_GFP11_Cterm | KEIEETLKELEDLNREMVETNRRVLEETRRLNKETVDRVKATLDEL | 3plus1_Key_Cterm_568 | KAVEELEKALEEIKRRLKEVIDRYED |
| | AKMLKKLVDDVRKGPTSEELKRLLAELEELLARVVRRVEELLKKST | | ELRKLRKEYKEKIDKYERKLEEIERR |
| | DLLERAVKDSADALRRSHEVLKEVASRVKRAKDEGLPREEVLRLLR | | ERT (SEQ ID NO: 27223) |
| | ELLERHAKVLKDIVRVSEKLLREHLKVLREIVEVLEELLERILKVI | | |
| | LDTTGGDRDHMVLHEYVNAAGITLKEVIDRYEDELRKLRKEYKEKI | | |
| | DKYERKLEEIERRERT (SEQ ID NO: 27222) | | |
| 3plus1_Cage_Cterm_572 | DEDELIRKLLEDLKDIVRKILELIERDLRDIERVVRRIVKVIRDDL | 3plus1_Key_Cterm_572 | SELADRIRKLIEDLERHTAKVLEDVK |
| | KKIKEVVDDIARGVPRTEELERVIKRIEELLRTSEEELDRILKEIE | | RAITELRKNSKDILEEVRKLIDELRK |
| | ELLRESRRRLEEVVSAVEELLRRVEEIVDKGRESKEDVIKLLREVV | | RIKEVED (SEQ ID NO: 27225) |
| | DDILRLVEEVVRTNLEIIKRILELIERVIRLNLSIIRDILRLLEGT | | |
| | VDSELADRIRKLIEDLERHTAKVLEDVKRAITELRKNSKDILEEVR | | |
| | KLIDELRKRIKEVED (SEQ ID NO: 27224) | | |
| 3plus1_Cage_Cterm_581 | SALETVKKLLEDSSEKIERIVEEDERVAKESSDRIRRLVEEDKRVA | 3plus1_Key_Cterm_581 | AEAVIKVIEKLIRANKRVWDALLKIN |
| | DEILDLIEKIGDTDTLLKLVEEWSRTSKKLLDDVLKLHKDWSDDSR | | EDLVRVNKTVWKELLRVNEKLARDLE |
| | RLLEEILRVHEELIRRVKEILDREGKPEEVVRELEKVLKESLDTLE | | RVVK (SEQ ID NO: 27227) |
| | EIIRRLDEANAATVKRVADVIRELEDINRKVLEEIKRGSDDAEAVI | | |
| | KVIEKLIRANKRVWDALLKINEDLVRVNKTVWKELLRVNEKLARDL | | |
| | ERVVK (SEQ ID NO: 27226) | | |
| 3plus1_Cage_Cterm_585 | SKEEKLKDDVRAVLEDLDRVLKELEKLSEDNLRELKRVLDRITDLH | 3plus1_Key_Cterm_585 | SKAAEDILRVLEKLVKVSREAIKLIL |
| | RRILDELRKGIGSEELLRRVEKVLKDNLDLLRKLVEEHKESSERDL | | ELSEHHVRVSTRIARLLLDVARKLAE |
| | KRVEDLVREIKEVLRKLLELEDRGTDIRKIEEEIERLLRKIRKAVE | | VIKEAER (SEQ ID NO: 27229) |
| | ESKDLNRRNSERIEEVARRSEELARRLLKEIRERGDSKAAEDILRV | | |
| | LEKLVKVSREAIKLILELSEHHVRVSTRIARLLLDVARKLAEVIKE | | |
| | AER (SEQ ID NO: 27228) | | |
| 3plus1_Cage_Cterm_587 | SEIEDVIRRLRKILEDLERVSEKLLREIKKILDEARRLNEEVIKEI | 3plus1_Key_Cterm_587 | IEDLVREVERLIKRIEDSLRELEKTV |
| | KRVLEDAVRVFRDGSGSKEELAKLVEELIRELAKLAKEVDEIHKRI | | RELLKRIKEASDKVREDVDRLIKELK |
| | VERLKALVEDAERIHRKIVETLEEIVRGVPSEELKRVVEAIVEVIK | | EAAD (SEQ ID NO: 27231) |
| | EHLKVLADVIRRIIKAIEENAETIKRVLEDIVRVLELVLRGEGSIE | | |
| | DLVREVERLIKRIEDSLRELEKTVRELLKRIKEASDKVREDVDRLI | | |
| | KELKEAAD (SEQ ID NO: 27230) | | |
| 3plus1_Cage_Cterm_605 | SREELLDRILEAIAKILEDLKRLIDENLARLEEVVRELERIIDRNL | 3plus1_Key_Cterm_605 | DEIIRKLDELLKEVEKVHKEVKDRIR |
| | KLIREILDELKKGSGSEEILEKIKKVDKELEDLIRRLLKKLEDLIR | | KLLEDHKRSLDEVKKKLERLLERAKE |
| | ETERRLREILKRIRDLLKEVKDRDKDLERLLEVLEEVLRVIAELAK | | VVEREKK (SEQ ID NO: 27233) |
| | ELLDSLRKVLKVVEEVLRLLNEVNKEVLDVIRELAKDGGSDEIIRK | | |
| | LDELLKEVEKVHKEVKDRIRKLLEDHKRSLDEVKKKLERLLERAKE | | |
| | VVEREKK (SEQ ID NO: 27232) | | |
| 3plus1_Cage_Cterm_607 | SEREELLERIKEILKRVKDKLDEDLKRLKEILEKLKEKADRDLEEL | 3plus1_Key_Cterm_607 | SETAVRAIIRVLEKHLEAVRRVLEEL |
| | RRRIEEVREKLERTGRTDELVKEVLDTVRRNLENLKRLVEDILRKL | | LKVLAEHLETVRELIERLKRVLEEAI |
| | EENVKNLTDLVREILKLITELIKRLEDGGLPKEVLDALRRVLEKLE | | EVVERVAR (SEQ ID NO: 27235) |
| | ELLREILERLKRSLEAVKRKIEELLKELERSLDELRRALERIRKEI | | |
| | GDSETAVRAIIRVLEKHLEAVRRVLEELLKVLAEHLETVRELIERL | | |
| | KRVLEEAIEVVERVAR (SEQ ID NO: 27234) | | |
| 3plus1_Cage_Cterm_610 | SLEEITKRLLELVEENLARHEEILRELLELAKRLAKEDRDILEEVL | 3plus1_Key_Cterm_610 | ERTLREVVRKVLEEAKRLLDELEEVH |
| | KLIEELLKLLEDNGSSEEDLKRLLKEVIEELRAVVKRVKDKWDEVV | | KRVKKELEDIIEENRRVVKRVRDELR |
| | KRIEDLVKKLKELHDDILRKLRELVRKIVTDISESGGEAEKVKRVV | | EIKRELDE (SEQ ID NO: 27237) |
| | EKILELVERLAKVVKESVEKLLEILRELAEVSKRVAEALLRLLEEL | | |
| | VRVIRIKDERTLREVVRKVLEEAKRLLDELEEVHKRVKKELEDIIE | | |
| | ENRRVVKRVRDELREIKRELDE (SEQ ID NO: 27236) | | |
| 3plus1_Cage_611_GFP11_Cterm | SLEEITKRLLELVEENLARHEEILRELLELAKRLAKEDRDILEEVL | 3plus1_Key_Cterm_611 | ERTLREVVRKVLEEAKRLLDELEEVH |
| | KLIEELLKLLEDNGSSEEDLKRLLKEVIEELRAVVKRVKDKWDEVV | | KRVKKELEDIIEENRRVVKRVRDELR |
| | KRIEDLVKKLKELHDDTLRKLRELVRKIVTDISESGGEAEKVKRVV | | EIKRELDE (SEQ ID NO: 27239) |
| | EKILELVERLAKVVKESVEKLLEILRELAEVSKRVAEALLRLLEEL | | |
| | VRVIRIKDERDHMVLHEYVNAAGITLLDELEEVHKRVKKELEDIIE | | |
| | ENRRVVKRVRDELREIKRELDE (SEQ ID NO: 27238) | | |
| 3plus1_Cage_Cterm_632 | SEKELVDDIRRILEEILRLLRSLLEEVIRLLEENEKLVRRHLKTVI | 3plus1_Key_Cterm_632 | DSLVREVEELIKRLEKHIDDLLKTSR |
| | DILRRVAKLLDENGIRTDEADRVLERLEKAHRELLEDYKRALEKIK | | DLVKRVLDLVDEVVKRVEDLVERVKE |
| | ETLERVLREAEEVVKKIDDALRKLGGSKEVLKRLLEELLRLVEKIA | | KIDT (SEQ ID NO: 27241) |
| | EEIKRLLSELVRVTEELVRTNKELLEEAVRVIRKEVGDDSLVREVE | | |
| | ELIKRLEKHIDDLLKTSRDLVKRVLDLVDEVVKRVEDLVERVKEKI | | |
| | DT (SEQ ID NO: 27240) | | |
| 3plus1_Cage_Cterm_641 | DEVEELLKRVRELLKASEELVRKILEDVKRLLERSIEEVEDLLRKV | 3plus1_Key_Cterm_641 | EDLIRDVDRVLKEIMDLLRDLVRRTK |
| | EELLKRLLDLVERGGSLDEILRELVRLLKEIVRKVLELNRKLVEDV | | ELLEELLRLLEELVRAHKELVRSILD |
| | IRIAKRLLELNAESVKEWDRILKLLRDGTGDKEELLKDAEEALEKY | | EIRK (SEQ ID NO: 27243) |
| | ERAVREILKELEEIIKEYVRRVEELLKELKDAVDKAKDEVRKGSGD | | |
| | EDLIRDVDRVLKEIMDLLRDLVRRTKELLEELLRLLEELVRAHKEL | | |
| | VRSILDEIRK (SEQ ID NO: 27242) | | |
| 3plus1_Cage_646_GFP11_Cterm | DAEEVVKRLADVLRENDETIRKVVEDLVRIAEENDRLWKKLVEDIA | 3plus1_Key_Cterm_646 | EDVKRALEELVSRLRKLLEDVKKASE |
| | EILRRIVELLRRGGVPEELLDRLAKVVKSIVEKAEKILERLNRVSK | | DIVREVERIVRELAKRSDEILKKLED |
| | AIAEKLKTIVDELNEVSKEIVKRAEDILRKGKDKETVLRALRTLVK | | IVEKLRE (SEQ ID NO: 27245) |
| | EYADLSKEVLERVERIVREYVKLSDEVVKSLAEIVEELIRIIEDLL | | |
| | RKGNRDHMVLHEYVNAAGITRKLLEDVKKASEDIVREVERIVRELA | | |
| | KRSDEILKKLEDIVEKLRE (SEQ ID NO: 27244) | | |
| 3plus1_Cage_646_GFP11_Cterm | DAEEVVKRLADVLRENDETIRKVVEDLVRIAEENDRLWKKLVEDIA | 3plus1_Key_Cterm_646 | EDVKRALEELVSRLRKLLEDVKKASE |
| | EILRRIVELLRRGGVPEELLDRLAKVVKSIVEKAEKILERLNRVSK | | DIVREVERIVRELAKRSDEILKKLED |
| | AIAEKLKTIVDELNEVSKEIVKRAEDILRKGKDKETVLRALRTLVK | | IVEKLRE (SEQ ID NO: 27247) |
| | EYADLSKEVLERVERIVREYVKLSDEVVKSLAEIVEELIRIIEDLL | | |
| | RKGNLDEDRDHMVLHEYVNAAGITEDVKKASEDIVREVERIVRELA | | |
| | KRSDEILKKLEDIVEKLRE (SEQ ID NO: 27246) | | |
| 3plus1_Cage_646_GFP11_Cterm | DAEEVVKRLADVLRENDETIRKVVEDLVRIAEENDRLWKKLVEDIA | 3plus1_Key_Cterm_646 | EDVKRALEELVSRLRKLLEDVKKASE |
| | EILRRIVELLRRGGVPEELLDRLAKVVKSIVEKAEKILERLNRVSK | | DIVREVERIVRELAKRSDEILKKLED |
| | AIAEKLKTIVDELNEVSKEIVKRAEDILRKGKDKETVLRALRTLVK | | IVEKLRE (SEQ ID NO: 27249) |
| | EYADLSKEVLERVERIVREYVKLSDEVVKSLAEIVEELIRIIEDLL | | |
| | RKGNLDEDVRDHMVLHEYVNAAGITDVKKASEDIVREVERIVRELA | | |
| | KRSDEILKKLEDIVEKLRE (SEQ ID NO: 27248) | | |
| 3plus1_Cage_647_GFP11_Cterm | DAEEVVKRLADVLRENDETIRKVVEDLVRIAEENDRLWKKLVEDIA | 3plus1_Key_Cterm_647 | EDVKRALEELVSRLRKLLEDVKKASE |
| | EILRRIVELLRRGGVPEELLDRLAKVVKSIVEKAEKILERLNRVSK | | DIVREVERIVRELAKRSDEILKKLED |
| | AIAEKLKTIVDELNEVSKEIVKRAEDILRKGKDKETVLRALRTLVK | | IVEKLRE (SEQ ID NO: 27251) |
| | EYADLSKEVLERVERIVREYVKLSDEVVKSLAEIVEELIRIIEDLL | | |
| | RKGNLRDHMVLHEYVNAAGITKLLEDVKKASEDIVREVERIVRELA | | |
| | KRSDEILKKLEDIVEKLRE (SEQ ID NO: 27250) | | |
| 3plus1_Cage_647_GFP11_Cterm | DAEEVVKRLADVLRENDETIRKVVEDLVRIAEENDRLWKKLVEDIA | 3plus1_Key_Cterm_647 | EDVKRALEELVSRLRKLLEDVKKASE |
| | EILRRIVELLRRGGVPEELLDRLAKVVKSIVEKAEKILERLNRVSK | | DIVREVERIVRELAKRSDEILKKLED |
| | AIAEKLKTIVDELNEVSKEIVKRAEDILRKGKDKETVLRALRTLVK | | IVEKLRE (SEQ ID NO: 27253) |
| | EYADLSKEVLERVERIVREYVKLSDEVVKSLAEIVEELIRIIEDLL | | |
| | RKGNLDEDVKRALERDHMVLHEYVNAAGITSEDIVREVERIVRELA | | |
| | KRSDEILKKLEDIVEKLRE (SEQ ID NO: 27252) | | |
| 3plus1_Cage_Cterm_647 | DAEEVVKRLADVLRENDETIRKVVEDLVRIAEENDRLWKKLVEDIA | 3plus1_Key_Cterm_647 | EDVKRALEELVSRLRKLLEDVKKASE |
| | EILRRIVELLRRGGVPEELLDRLAKVVKSIVEKAEKILERLNRVSK | | DIVREVERIVRELAKRSDEILKKLED |
| | AIAEKLKTIVDELNEVSKEIVKRAEDILRKGKDKETVLRALRTLVK | | IVEKLRE (SEQ ID NO: 27255) |
| | EYADLSKEVLERVERIVREYVKLSDEVVKSLAEIVEELIRIIEDLL | | |
| | RKGNLDEDVKRALEELVSRLRKLLEDVKKASEDIVREVERIVRELA | | |
| | KRSDEILKKLEDIVEKLRE (SEQ ID NO: 27254) | | |
| 3plus1_Cage_Cterm_653 | DEEETLRRLLERKVELAKEYLDVSKEVIDRTTKLLDEYLKTSKRIV | 3plus1_Key_Cterm_653 | SREALEEARRRLEELLRELNEITKDL |
| | DATVELLERGDLGPDELIKRLAEELERSLRELEEEIKRLKRELEES | | EAKLEKLLRDLNELTKALEEELKRLL |
| | LKKLKEIIDRLAEEAEKLLAVLKRGEGSEEEALRALASLVRELIEV | | DELKKRTD (SEQ ID NO: 27257) |
| | LRENDERLRDVLRRLIEALRKNNEILERVLRKLVRAAEERGRDESS | | |
| | REALEEARRRLEELLRELNEITKDLEAKLEKLLRDLNELTKALEEE | | |
| | LKRLLDELKKRTD (SEQ ID NO: 27256) | | |
| 3plus1_Cage_Cterm_658 | DEERIIKTLEDINAKLVEDIKRILDKVAELNERLADAIRKILEETK | 3plus1_Key_Cterm_658 | KDTLRTVEKLVEDVKRRLDKLLEDYK |
| | RILEATTRKVRKDGEISEELLRRLEEKLRKLLEDLERVLAEHEDES | | RLIEEVKKELDKLLKEYEDALREIKK |
| | RRILEEVERLLKRHADASKELLDRARSVARGVKSDKELVDRLKKLI | | RIDE (SEQ ID NO: 27259) |
| | DDSLESVRELIERLKELLDRLVKSVEDLIRTIKELLDRLVEVLREG | | |
| | VSDKDTLRTVEKLVEDVKRRLDKLLEDYKRLIEEVKKELDKLLKEY | | |
| | EDALREIKKRIDE (SEQ ID NO: 27258) | | |
| 3plus1_Cage_Cterm_660 | TEEEVVEDVKRVLDESHDDLRRLIETLTRVLRESLKRIKEALEELE | 3plus1_Key_Cterm_660 | REEVKRVLEEARDELRRLLEEYKAII |
| | RVLKKLLDLLEGGRDAREVLDEIRKVLERLREVIEELLRINKEVLR | | EELERELERLLREHREVIRRIKEEID |
| | ELERVIRELLKKNEDLARRVRSGVKSRLLEVLERLARESLELNRAI | | KSSK (SEQ ID NO: 27261) |
| | LEELRKLVEKSLRAVEKILKRLEEIVRKLLKLVEDGGPREEVKRVL | | |
| | EEARDELRRLLEEYKAIIEELERELERLLREHREVIRRIKEEIDKS | | |
| | SK (SEQ ID NO: 27260) | | |
| 3plus1_Cage_Nterm_263 | SLVDELRKSLERNVRVSEEVARRLKEALKRWVDVVRKVVEDLIRLN | 3plus1_Key_Nterm_263 | SLVDELRKSLERNVRVSEEVARRLKE |
| | EDVVRVVEKVTVDESAIERVRRIIEELNRKLDAVLKKNEDLVRRLT | | ALKRWVDVVRKVVEDLIRLNEDVVRV |
| | ELLDKLLEENRRLVEELDEDLKRRGGTEEVIDTILELIERSIERLK | | VEKV (SEQ ID NO: 27263) |
| | RLLDELLRIVREALKDNKRVADENLKKLKEILDELRKDGVEDEELK | | |
| | RVLEKAADLHRRLKDRHRKLLEDLERIIRELKKKLDEVVEENKRSV | | |
| | DELKR (SEQ ID NO: 27262) | | |
| 3plus1_Cage_Nterm_500 | SEKEELKRLLDKLLKELKRLSDELKATIDKILKILKEVSEEVKRTA | 3plus1_Key_Nterm_500 | SEKEELKRLLDKLLKELKRLSDELKA |
| | DELLDAIRRGGVDEEVLREIKREIEEIEKKLRKVNKEIEDEIREIK | | TIDKILKILKEVSEEVKRTADELLDA |
| | KKLDEVDDKITKEVEKIKEALDKGGVDAKEVIKALKEILKEHADVF | | IRRG (SEQ ID NO: 27265) |
| | EDVLRRLKEIIKRHRDVVKEVLEELRKILEKVAEVLKRQGRSEDEL | | |
| | RKVEEDLKRLEDKLKKLLEDYEKKVRELEETLDDLLRKYEETLRRL | | |
| | EKELEEAER (SEQ ID NO: 27264) | | |
| 3plus1_Cage_Nterm_510 | SEKEELLKLIKRVIELLKRVLEEHLRLVEDVIRRLKELLDSNEKIV | 3plus1_Key_Nterm_510 | SEKEELLKLIKRVIELLKRVLEEHLR |
| | REVIEDLKRLLDEVRGDKEELDRIKEKLEEVLERYKRRLEEIKRDL | | LVEDVIRRLKELLDSNEKIVREVIED |
| | ERMLEDYKRELKRIEEDLRRVLEEVERIATRGEGPAEALIDKLRKI | | LKRLLDEV (SEQ ID NO: 27267) |
| | LERALRELDKLSKKLDELLKKVLEELEKSNREIDKLLKDVLRRVEE | | |
| | GGASEDLLRKAKKVITEVREKLKRNLEDVRRVIEDVKRKSARILEE | | |
| | ARRLIEEVERELEKIRK (SEQ ID NO: 27266) | | |
| 3plus1_Cage_529_GFP11_Nterm | SEAEDLEELIKELAELLKDVIRKLEKINRRLVKILRDHMVLHEYVN | 3plus1_Key_Nterm_529 | SEAEDLEELIKELAELLKDVIRKLEK |
| | AAGITELRKGTVEDKDILRDLERRLREILEESDRLLEELKRRLEEI | | INRRLVKILEDIIRRLKEISKEAEEE |
| | LRKSKELLRRLEEVLREILKRAEEVKRSNLPKEELIKEIVKLLEEL | | LRKG (SEQ ID NO: 27269) |
| | LRVIEKILEDNIRLLEELVEVIKEILEKHLRLLEELVRVIERILRE | | |
| | VGKDKDEAERRRRELKDKLDRLREEHEEVKRRLEEELTRLRETHKK | | |
| | IEKELREALKRVRDRST (SEQ ID NO: 27268) | | |
| 3plus1_Cage_568_GFP11_Nterm | KEIEETLKELEDLNREMVETNRRVLEETRRLNKETVDRVKATRDHM | 3plus1_Key_Nterm_568 | KEIEETLKELEDLNREMVETNRRVLE |
| | VLHEYVNAAGITKGPTSEELKRLLAELEELLARVVRRVEELLKKST | | ETRRLNKETVDRVKATLDELAKMLKK |
| | DLLERAVKDSADALRRSHEVLKEVASRVKRAKDEGLPREEVLRLLR | | LVDDVRKG (SEQ ID NO: 27271) |
| | ELLERHAKVLKDIVRVSEKLLREHLKVLREIVEVLEELLERILKVI | | |
| | LDTTGGDKAVEELEKALEEIKRRLKEVIDRYEDELRKLRKEYKEKI | | |
| | DKYERKLEEIERRERT (SEQ ID NO: 27270) | | |
| 3plus1_Cage_Nterm_581 | SALETVKKLLEDSSEKIERIVEEDERVAKESSDRIRRLVEEDKRVA | 3plus1_Key_Nterm_581 | SALETVKKLLEDSSEKIERIVEEDER |
| | DEILDLIEKIGDTDTLLKLVEEWSRTSKKLLDDVLKLHKDWSDDSR | | VAKESSDRIRRLVEEDKRVADEILDL |
| | RLLEEILRVHEELIRRVKEILDREGKPEEVVRELEKVLKESLDTLE | | IEKI (SEQ ID NO: 27273) |
| | EIIRRLDEANAATVKRVADVIRELEDINRKVLEEIKRGSDDAEAVI | | |
| | KVIEKLIRANKRVWDALLKINEDLVRVNKTVWKELLRVNEKLARDL | | |
| | ERVVK (SEQ ID NO: 27272) | | |
| 3plus1_Cage_610_GFP11_Nterm | SLEEITKRLLELVEENLARHEEILRELLELAKRLAKRDHMVLHEYV | 3plus1_Key_Nterm_610 | SLEEITKRLLELVEENLARHEEILRE |
| | NAAGITLKLLEDNGSSEEDLKRLLKEVIEELRAVVKRVKDKWDEVV | | LLELAKRLAKEDRDILEEVLKLIEEL |
| | KRIEDLVKKLKELHDDTLRKLRELVRKIVTDISESGGEAEKVKRVV | | LKLLEDN (SEQ ID NO: 27275) |
| | EKILELVERLAKVVKESVEKLLEILRELAEVSKRVAEALLRLLEEL | | |
| | VRVIRIKDERTLREVVRKVLEEAKRLLDELEEVHKRVKKELEDIIE | | |
| | ENRRVVKRVRDELREIKRELDE (SEQ ID NO: 27274) | | |
| 3plus1_Cage_647_GFP11_Nterm | DAEEVVKRLADVLRENDETIRKVVEDLVRIAEENDRLWRDHMVLHE | 3plus1_Key_Nterm_647 | DAEEVVKRLADVLRENDETIRKVVED |
| | YVNAAGITLLRRGGVPEELLDRLAKVVKSIVEKAEKILERLNRVSK | | LVRIAEENDRLWKKLVEDIAEILRRI |
| | AIAEKLKTIVDELNEVSKEIVKRAEDILRKGKDKETVLRALRTLVK | | VELLRRG (SEQ ID NO: 27277) |
| | EYADLSKEVLERVERIVREYVKLSDEVVKSLAEIVEELIRIIEDLL | | |
| | RKGNLDEDVKRALEELVSRLRKLLEDVKKASEDIVREVERIVRELA | | |
| | KRSDEILKKLEDIVEKLRE (SEQ ID NO: 27276) | | |

TABLE 8

| Row | | |
|---|---|---|
| number | Cage (column 1) | Key (column 2) |
| 1 | LOCKR_extend18 (SEQ ID NO: 6), | p18_MBP |
| | | (SEQ ID NO: 27020), |
| | BimLOCKR_extend18 | p76-long |
| | (SEQ ID NO: 22),, | (SEQ ID NO: 27027), |
| | 1fix-long-Bim-t0 (SEQ ID NO: 54), | p76-short |
| | | (SEQ ID NO: 27028), |
| | 1fix-long-GFP-t0 (SEQ ID NO: 55), | |
| | 1fix-short-BIM-t0 (SEQ ID NO: 56), | |
| | 1fix-short-GFP-t0 (SEQ ID NO: 57), | |
| 2 | LOCKRb (SEQ ID NO: 7), | key_b |
| | | (SEQ ID NO: 27022) |
| 3 | LOCKRc (SEQ ID NO: 8), | key_c |
| | | (SEQ ID NO: 27023) |

TABLE 9

| Cage Name | Cage Sequence | Key Name | Key Sequence |
|---|---|---|---|
| 2plus1_Cage_ | SEVDEVVKEVEDLVRRNEELVEEVVRRVEKVVTDDRRLVEEVVREI | 2plus1_Key_ | EKVLRKLEKVIREVRERSTRALRKVE |
| Cterm_2406 | RKIVKDVEDLARKLDKEELKRVLDEMRERIERLLEKLRRHSKKLDD | Cterm_2406 | EVIRRVREESERALRDLERVVKEVEK |
| | ELKRLLEELREHSRRVEKRLEDLLKELRERGVDEKVLRKLEKVIRE | | RMREAAR (SEQ ID NO: 27127) |
| | VRERSTRALRKVEEVIRRVREESERALRDLERVVKEVEKRMREAAR | | |
| | (SEQ ID NO: 27126) | | |
| 2plus1_Cage_ | SVEELLRKLEEVLRKIREENERSLKELRDRAREIVKRNRETNRELE | 2plus1_Key_ | EDIVRKIERIVETIEREVRESVKKVE |
| Cterm_5398 | EVIKELEKRLSGADKEKVEELVRRIRRIVERVVEEDRRTVEEIEKI | Cterm_5398 | EIARDIRRKVDESVKNVEKLLRDVDK |
| | AREVVKRDRDSADRVRRIVEDVLRKATGSEDIVRKIERIVETIERE | | KARDRKK (SEQ ID NO: 27129) |
| | VRESVKKVEEIARDIRRKVDESVKNVEKLLRDVDKKARDRKK (SEQ | | |
| | ID NO: 27128) | | |
| 2plus1_Cage_ | SESDDVIRKLRELLEELRTHVEKSIRDLRKILEDSTRHAKRSIEEL | 2plus1_Key_ | EEKLKDLIRKLRDILRRAAEAHKKLI |
| Cterm_5405 | ERLLEEVRKKPGDEEVRKTVEEISRRVAENVKRLEDLYRRMEEEVK | Cterm_5405 | DDARESLERAKREHEKLIDRLKKILE |
| | KNLDRLRKRVEDIIREVEEARKKGVDEEKLKDLIRKLRDILRRAAE | | ELER (SEQ ID NO: 27131) |
| | AHKKLIDDARESLERAKREHEKLIDRLKKILEELER (SEQ ID | | |
| | NO: 27130) | | |
| 2plus1_Cage_ | DREREVKKRLDEVRERIERLLRRVEEESRRVAEEIRRLIEEVRRRN | 2plus1_Key_ | EELREELKKLERKIEKVAKEIHDHDK |
| Cterm_5406 | KKVTEEIRELLKGLKDKEEVRRVLERLRKLNAESDELLERILERLR | Cterm_5406 | EVTERLEDLLRRITEHARKSDREIEE |
| | RLVEATNRLVKAIIEELRRLVEKIVREVPDSEELREELKKLERKIE | | TAR (SEQ ID NO: 27133) |
| | KVAKEIHDHDKEVTERLEDLLRRITEHARKSDREIEETAR (SEQ | | |
| | ID NO: 27132) | | |
| 2plus1_Cage_ | SEAEELLKRLEDRAEEILRRLEEILRTSRKLAEDVLRELEKLLRES | 2plus1_Key_ | KEVVDEIKRIVDEVRERLKRIVDENA |
| Cterm_5409 | ERRIREVLEELRGIKDKKELEDVIREVEKELDESLERSRELLKDVL | Cterm_5409 | KIVEDARRALEKIVKENEEILRRLKK |
| | KKLDDNLKESERLVEDIDRELAKILEDLKKAGVPKEVVDEIKRIVD | | ELRELRK (SEQ ID NO: 27135) |
| | EVRERLKRIVDENAKIVEDARRALEKIVKENEEILRRLKKELRELR | | |
| | K (SEQ ID NO: 27134) | | |
| 2plus1_Cage_ | SEIEKILKEIEDLARRDEEVSKKIVEDIRRLAKEVEDTSRDIVRKI | 2plus1_Key_ | EDSERLVREVEDLVRRLVRRSEKSNE |
| 5414_GFP11_ | EELAKRVLDRLRKDGSKEELEKEVREVVKTLEELVKDNHRLIRRAV | Cterm_5414 | EVKRTVEELVRRMEESNDRVRDLVRR |
| Cterm_ | EEMKRLVEENHRHSREVVKELEDLVRELRKGSGSEDSERDHMVLHE | | LVEELKRAVD (SEQ ID |
| | YVNAAGITSEKSNEEVKRTVEELVRRMEESNDRVRDLVRRLVEELK | | NO: 27141) |
| | RAVD (SEQ ID NO: 27140) | | |
| 2plus1_Cage_ | SVDEVLKEIEDALRRLKEEVERVLKENEDELRRLEEEVRRVLKEDE | 2plus1_Key_ | EKAIRDVAKEIRDRLKELEEEIEEVT |
| Cterm_5421 | ELLESLKRGVGESDEVDRVVDEIAKLSAEILEKVKKVVKEIRDSLE | Cterm_5421 | RRNLKLLADVEEEIRRVHEKTRRLLE |
| | TVKRRVDDVVRRLKELLDEIKRGSDEKAIRDVAKEIRDRLKELEEE | | TVLRRAT (SEQ ID NO: 27147) |
| | IEEVIRRNLKLLADVEEEIRRVHEKTRRLLETVLRRAT (SEQ ID | | |
| | NO: 27146) | | |
| 2plus1_Cage_ | DEIRKVVKEITDLLKASNDKNRKVVEEIRDLLRKSKKLADELVERL | 2plus1_Key_ | SEDLKRVEERAREVSRRNEESMRRVK |
| Cterm_5432 | RALVEDLRRRIDKSGDKETAEDIVRRIIEELKRILKEIEDLARRIN | Cterm_5432 | EDADRVSEANKEVLDRVREEVKRLIE |
| | REIERLVEEVERDNRDVNRAIEELLKDIARRGGSEDLKRVEERARE | | EVRETLR (SEQ ID NO: 27149) |
| | VSRRNEESMRRVKEDADRVSEANKEVLDRVREEVKRLIEEVRETLR | | |
| | (SEQ ID NO: 27148) | | |
| 2plus1_Cage_ | STAETVAEEVERVLKHSDDLIKEVEDVNRRVEEEIKRVIRELEEEN | 2plus1_Key_ | EEAAREIIKRLREVNKRTKEKLDELI |
| Cterm_5435 | ERLVAEVRKGVKGEILAEIEKRLADNSEKVREVAERAKKLLEENTA | Cterm_5435 | KHSEEVLERVKRLIDELRKHSEEVLE |
| | RVKDILRESRKLVKDLLDEVRGIGSEEAAREIIKRLREVNKRIKEK | | DLRRRAK (SEQ ID NO: 27151) |
| | LDELIKHSEEVLERVKRLIDELRKHSEEVLEDLRRRAK (SEQ ID | | |
| | NO: 27150) | | |
| 2plus1_Cage_ | SRVEEIIEDLRRLLEEIRKENEDSIRRSKELLDRVKEINDTIIAEL | 2plus1_Key_ | EDKARKVAEVAEKVLRDIDKLDRESK |
| Cterm_5439 | ERLLKDIEKEVREKGSESEEVKKALRAVLEELEKLLRRVAEINEEV | Cterm_5439 | EAFRATNEEIAKLDEDTARVAERVKK |
| | LRRNSKLVEEDERRNREVLKELARLVEELIREIGDEDKARKVAEVA | | AIEDLAK (SEQ ID NO: 27155) |
| | EKVLRDIDKLDRESKEAFRATNEEIAKLDEDTARVAERVKKAIEDL | | |
| | AK (SEQ ID NO: 27154) | | |
| 2plus1_Cage_ | SEADDVLKKLAETVKRIIERLKKLTDDSRRLVEEVHRRNDKLSKES | 2plus1_Key_ | EELSAEVKKLLDEVRKALARHKDEND |
| Cterm_5447 | AEAVRKAEERGIDEKDVRKLLEDLKKKSEEVAERNKRILDTLREIS | Cterm_5447 | KLLKEIEDSLRRHKEENDRLLEKLKE |
| | KRAEDEVRKVLKELEKTLKELEDRRPDSEELSAEVKKLLDEVRKAL | | STR (SEQ ID NO: 27157) |
| | ARHKDENDKLLKEIEDSLRRHKEENDRLLEKLKESTR (SEQ ID | | |
| | NO: 27156) | | |
| 2plus1_Cage_ | SAEELLREVAELVKRVDEDLRRLLEEVRASNEEVIRRLEEILKRIE | 2plus1_Key_ | EETVKRLLDELRELLERLKRTIEELL |
| Cterm_5456 | EENRKVVEELRRGGVSEDLVRESKRLVDESRRVIEKLVKESADSVE | Cterm_5465 | KRNRDLLADAEEKARRLLEENRKLLK |
| | RTRETVDRLREELKRLVEEIAKMVKGGSSEETVKRLLDELRELLER | | AARDTAT (SEQ ID NO: 27159) |
| | LKRTIEELLKRNRDLLADAEEKARRLLEENRKLLKAARDTAT (SEQ | | |
| | ID NO: 27158) | | |
| 2plus1_Cage_ | SEVDEVVKEVEDLVRRNEELVEEVVRRVEKVVTDDRRLVEEVVREI | 2plus1_Key_ | SEVDEVVKEVEDLVRRNEELVEEVVR |
| Nterm_2406 | RKIVKDVEDLARKLDKEELKRVLDEMRERIERLLEKLRRHSKKLDD | Nterm_2406 | RVEKVVTDDRRLVEEVVREIRKIVKD |
| | ELKRLLEELREHSRRVEKRLEDLLKELRERGVDEKVLRKLEKVIRE | | VEDLARK (SEQ ID NO: 27163) |
| | VRERSTRALRKVEEVIRRVREESERALRDLERVVKEVEKRMREAAR | | |
| | (SEQ ID NO: 27162) | | |
| 2plus1_Cage_ | DREREVKKRLDEVRERIERLLRRVEEESRRVAEEIRRLIEEVRRRN | 2plus1_Key_ | DREREVKKRLDEVRERIERLLRRVEE |
| Nterm_5406 | KKVTEEIRELLKGLKDKEEVRRVLERLRKLNAESDELLERILERLR | Nterm_5406 | ESRRVAEEIRRLIEEVRRRNKKVTEE |
| | RLVEATNRLVKAIIEELRRLVEKIVREVPDSEELREELKKLERKIE | | IRELLKGL (SEQ ID NO: 27165) |
| | KVAKEIHDHDKEVTERLEDLLRRITEHARKSDREIEETAR(SEQ | | |
| | ID NO: 27164) | | |
| 2plus1_Cage_ | SEAEELLKRLEDRAEEILRRLEEILRTSRKLAEDVLRELEKLLRES | 2plus1_Key_ | SEAEELLKRLEDRAEEILRRLEEILR |
| Nterm_5409 | ERRIREVLEELRGIKDKKELEDVIREVEKELDESLERSRELLKDVL | Nterm_5409 | TSRKLAEDVLRELEKLLRESERRIRE |
| | KKLDDNLKESERLVEDIDRELAKILEDLKKAGVPKEVVDEIKRIVD | | VLEELRGI (SEQ ID NO: 27167) |
| | EVRERLKRIVDENAKIVEDARRALEKIVKENEEILRRLKKELRELR | | |
| | K (SEQ ID NO: 27166) | | |
| 3plus_Cage_ | SEAEDLEELIKELAELLKDVIRKLEKINRRLVKILEDIIRRLKEIS | 3plus_Key_ | KDEAERRRRELKDKLDRLREEHEEVK |
| 529_GFP11_ | KEAEEELRKGTVEDKDILRDLERRLREILEESDRLLEELKRRLEEI | Cterm_529 | RRLEEELTRLRETHKKIEKELREALK |
| Cterm | LRKSKELLRRLEEVLREILKRAEEVKRSNLPKEELIKEIVKLLEEL | | RVRDRST (SEQ ID NO: 27179) |
| | LRVIEKILEDNIRLLEELVEVIKEILEKHLRLLEELVRVIERILRE | | |
| | VGKDKDEAERRDHMVLHEYVNAAGITEEVKRRLEEELTRLRETHKK | | |
| | IEKELREALKRVRDRST (SEQ ID NO: 27178) | | |
| 3plus1_Cage_ | SEKEELKRLLDKLLKELKRLSDELKATIDKILKILKEVSEEVKRTA | 3plus1_Key_ | EDELRKVEEDLKRLEDKLKKLLEDYE |
| Cterm_500 | DELLDAIRRGGVDEEVLREIKREIEEIEKKLRKVNKEIEDEIREIK | Cterm_500 | KKVRELEETLDDLLRKYEETLRRLEK |
| | KKLDEVDDKITKEVEKIKEALDKGGVDAKEVIKALKEILKEHADVF | | ELEEAER (SEQ ID NO: 27185) |
| | EDVLRRLKEIIKRHRDVVKEVLEELRKILEKVAEVLKRQGRSEDEL | | |
| | RKVEEDLKRLEDKLKKLLEDYEKKVRELEETLDDLLRKYEETLRRL | | |
| | EKELEEAER (SEQ ID NO: 27184) | | |
| 3plus1_Cage_ | SEKEELLKLIKRVIELLKRVLEEHLRLVEDVIRRLKELLDSNEKIV | 3plus1_Key_ | EDLLRKAKKVITEVREKLKRNLEDVR |
| Cterm_510 | REVIEDLKRLLDEVRGDKEELDRIKEKLEEVLERYKRRLEEIKRDL | Cterm_510 | RVIEDVKRKSARILEEARRLIEEVER |
| | ERMLEDYKRELKRIEEDLRRVLEEVERIATRGEGPAEALIDKLRKI | | ELEKIRK (SEQ ID NO: 27191) |
| | LERALRELDKLSKKLDELLKKVLEELEKSNREIDKLLKDVLRRVEE | | |
| | GGASEDLLRKAKKVITEVREKLKRNLEDVRRVIEDVKRKSARILEE | | |
| | ARRLIEEVERELEKIRK (SEQ ID NO: 27190) | | |
| 3plus1_Cage_ | SEAEDLEELIKELAELLKDVIRKLEKINRRLVKILEDIIRRLKEIS | 3plus1_Key_ | KDEAERRRRELKDKLDRLREEHEEVK |
| 528_GFP11_ | KEAEEELRKGTVEDKDILRDLERRLREILEESDRLLEELKRRLEEI | Cterm_528 | RRLEEELTRLRETHKKIEKELREALK |
| Cterm | LRKSKELLRRLEEVLREILKRAEEVKRSNLPKEELIKEIVKLLEEL | | RVRDRST (SEQ ID NO: 27193) |
| | LRVIEKILEDNIRLLEELVEVIKEILEKHLRLLEELVRVIERILRE | | |
| | VGRDHMVLHEYVNAAGITLDRLREEHEEVKRRLEEELTRLRETHKK | | |
| | IEKELREALKRVRDRST (SEQ ID NO: 27192) | | |
| 3plus1_Cage_ | SEAEDLEELIKELAELLKDVIRKLEKINRRLVKILEDIIRRLKEIS | 3plus1_Key_ | KDEAERRRRELKDKLDRLREEHEEVK |
| 528_GFP11_ | KEAEEELRKGTVEDKDILRDLERRLREILEESDRLLEELKRRLEEI | Cterm_528 | RRLEEELTRLRETHKKIEKELREALK |
| Cterm_ | LRKSKELLRRLEEVLREILKRAEEVKRSNLPKEELIKEIVKLLEEL | | RVRDRST (SEQ ID NO: 27195) |
| | LRVIEKILEDNIRLLEELVEVIKEILEKHLRLLEELVRVIERILRE | | |
| | VGKDKRDHMVLHEYVNAAGITLREEHEEVKRRLEEELTRLRETHKK | | |
| | IEKELREALKRVRDRST (SEQ ID NO: 27194) | | |
| 3plus1_Cage_ | SEAEDLEELIKELAELLKDVIRKLEKINRRLVKILEDIIRRLKEIS | 3plus1_Key_ | KDEAERRRRELKDKLDRLREEHEEVK |
| 528_GFP11_ | KEAEEELRKGTVEDKDILRDLERRLREILEESDRLLEELKRRLEEI | Cterm_528 | RRLEEELTRLRETHKKIEKELREALK |
| Cterm | LRKSKELLRRLEEVLREILKRAEEVKRSNLPKEELIKEIVKLLEEL | | RVRDRST (SEQ ID NO: 27197) |
| | LRVIEKILEDNIRLLEELVEVIKEILEKHLRLLEELVRVIERILRE | | |
| | VGKDKDEAERDHMVLHEYVNAAGITHEEVKRRLEEELTRLRETHKK | | |
| | IEKELREALKRVRDRST (SEQ ID NO: 27196) | | |
| 3plus1_Cage_ | SEAEDLEELIKELAELLKDVIRKLEKINRRLVKILEDIIRRLKEIS | 3plus1_Key_ | KDEAERRRRELKDKLDRLREEHEEVK |
| 529_GFP11_ | KEAEEELRKGTVEDKDILRDLERRLREILEESDRLLEELKRRLEEI | Cterm_529 | RRLEEELTRLRETHKKIEKELREALK |
| Cterm | LRKSKELLRRLEEVLREILKRAEEVKRSNLPKEELIKEIVKLLEEL | | RVRDRST (SEQ ID NO: 27199) |
| | LRVIEKILEDNIRLLEELVEVIKEILEKHLRLLEELVRVIERILRE | | |
| | VGKRDHMVLHEYVNAAGITDRLREEHEEVKRRLEEELTRLRETHKK | | |
| | IEKELREALKRVRDRST (SEQ ID NO: 27198) | | |
| 3plus1_Cage_ | SEAEDLEELIKELAELLKDVIRKLEKINRRLVKILEDIIRRLKEIS | 3plus1_Key_ | KDEAERRRRELKDKLDRLREEHEEVK |
| 529_GFP11_ | KEAEEELRKGTVEDKDILRDLERRLREILEESDRLLEELKRRLEEI | Cterm_529 | RRLEEELTRLRETHKKIEKELREALK |
| Cterm | LRKSKELLRRLEEVLREILKRAEEVKRSNLPKEELIKEIVKLLEEL | | RVRDRST (SEQ ID NO: 27201) |
| | LRVIEKILEDNIRLLEELVEVIKEILEKHLRLLEELVRVIERILRE | | |
| | VGKDRDHMVLHEYVNAAGITRLREEHEEVKRRLEEELTRLRETHKK | | |
| | IEKELREALKRVRDRST (SEQ ID NO: 27200) | | |
| 3plus1_Cage_ | SEAEDLEELIKELAELLKDVIRKLEKINRRLVKILEDIIRRLKEIS | 3plus1_Key_ | KDEAERRRRELKDKLDRLREEHEEVK |
| 529_GFP11_ | KEAEEELRKGTVEDKDILRDLERRLREILEESDRLLEELKRRLEEI | Cterm_529 | RRLEEELTRLRETHKKIEKELREALK |
| Cterm | LRKSKELLRRLEEVLREILKRAEEVKRSNLPKEELIKEIVKLLEEL | | RVRDRST (SEQ ID NO: 27203) |
| | LRVIEKILEDNIRLLEELVEVIKEILEKHLRLLEELVRVIERILRE | | |
| | VGKDKDRDHMVLHEYVNAAGITREEHEEVKRRLEEELTRLRETHKK | | |
| | IEKELREALKRVRDRST (SEQ ID NO: 27202) | | |
| 3plus1_Cage_ | DEDRIIEEIARLLEELLRELLELIKKLIETNRRLNEEHERAVRELA | 3plus1_Key_ | EKIAEEIERELEELRRMIKRLHEDLE |
| 534_GFP11_ | RLLEELLDRLVKKGISDEKLKRIRERLKRALDDLERLHREINKRLE | Cterm_534 | RKLKESEDELREIEARLEEKIRRLEE |
| Cterm | DLVRELEKLVREILKELKDALEELRRASARAGGEEVLRRLEEIVKK | | KLERKRR (SEQ ID NO: 27207) |
| | LLDLVRRILERLKEIHKDNVRLLRELNERLTRIVEDLVRLIREILR | | |
| | EAGVDERDHMVLHEYVNAAGITIKRLHEDLERKLKESEDELREIEA | | |
| | RLEEKIRRLEEKLERKRR (SEQ ID NO: 27206) | | |
| 3plus1_Cage_ | DEDRIIEEIARLLEELLRELLELIKKLIETNRRLNEEHERAVRELA | 3plus1_Key_ | EKIAEEIERELEELRRMIKRLHEDLE |
| 534_GFP11_ | RLLEELLDRLVKKGISDEKLKRIRERLKRALDDLERLHREINKRLE | Cterm_534 | RKLKESEDELREIEARLEEKIRRLEE |
| Cterm | DLVRELEKLVREILKELKDALEELRRASARAGGEEVLRRLEEIVKK | | KLERKRR (SEQ ID NO: 27209) |
| | LLDLVRRILERLKEIHKDNVRLLRELNERLTRIVEDLVRLIREILR | | |
| | EAGVDEKIRDHMVLHEYVNAAGITRLHEDLERKLKESEDELREIEA | | |
| | RLEEKIRRLEEKLERKRR (SEQ ID NO: 27208) | | |
| 3plus1_Cage_ | DEDRIIEEIARLLEELLRELLELIKKLIETNRRLNEEHERAVRELA | 3plus1_Key_ | EKIAEEIERELEELRRMIKRLHEDLE |
| 534_GFP11_ | RLLEELLDRLVKKGISDEKLKRIRERLKRALDDLERLHREINKRLE | Cterm_534 | RKLKESEDELREIEARLEEKIRRLEE |
| Cterm | DLVRELEKLVREILKELKDALEELRRASARAGGEEVLRRLEEIVKK | | KLERKRR (SEQ ID NO: 27211) |
| | LLDLVRRILERLKEIHKDNVRLLRELNERLTRIVEDLVRLIREILR | | |
| | EAGVDEKIAEEIERDHMVLHEYVNAAGITLERKLKESEDELREIEA | | |
| | RLEEKIRRLEEKLERKRR (SEQ ID NO: 27210) | | |
| 3plus1_Cage_ | SEKEKLLKESEEEVRRLRRTLEELLRKYREVLERLRKELREIEERV | 3plus1_Key_ | ERLVKTLIEDVEAVIKRILELITRVA |
| Cterm_539 | RDVVRRLKEVLDRKGLDIDTIIKEVEDLLKTVLDRLRELLDKIRRL | Cterm_539 | EDNERVLERIIRELTDNLERHLKIVR |
| | TKEAIEVVREIIERIVRHAERVKDELRKEGGDKEKLDRVDRLIKEN | | EIVK (SEQ ID NO: 27213) |
| | TRHLKEILDRIEDLVRRSEKKLRDIIREVRRLIEELRKKAEEIKKG | | |
| | PDERLVKILIEDVEAVIKRILELITRVAEDNERVLERIIRELTDNL | | |
| | ERHLKIVREIVK (SEQ ID NO: 27212) | | |
| 3plus1_Cage_ | DKAEVLREALKLLKDLLEELIKIHEESLKRILDLIDTLVKVHEDAL | 3plus1_Key_ | EEIDRELKRVVEELRRLHEEIKERLD |
| Cterm_548 | RALKELLERSGLDERELRKVERMATESLRTIAKLKEELRDLARRSL | Cterm_548 | DVARRSEEELRRIIKKLKEVVKEIRK |
| | EKLREDLKRVDDILRKVEEKVRRTGPSEELIEELIRTIEKLLKEIV | | KLK (SEQ ID NO: 27215) |
| | RINEEVLKAVRELLKTLLKLSEDVVRRIEEILRKGGVPEEIDRELK | | |
| | RVVEELRRLHEEIKERLDDVARRSEEELRRIIKKLKEVVKEIRKKL | | |
| | K (SEQ ID NO: 27214) | | |
| 3plus1_Cage_ | SERELIERWLELHKEILRLIRELVERLLKLHREILDTIKKLIRELL | 3plus1_Key_ | DDERRILTELLKRMEDILEKVERTLK |
| Cterm_556 | ELLEDIARKLGLDKEAKDELREIAKRVEDKLEKLERESRKVEEDLK | Cterm_556 | KLLDDSARMAEEVKKTLKELLERSEK |
| | RKLKELTDESDIVEKRVRDVVRRGIQSREEIAEELLRLDRKLLKAV | | VAEDVRK (SEQ ID NO: 27217) |
| | EELLKEILDLNKKLLDDVRAILEETRRVLEKLLDRVRRGERTDDER | | |
| | RILTELLKRMEDILEKVERTLKKLLDDSARMAEEVKKILKELLERS | | |
| | EKVAEDVRK (SEQ ID NO: 27216) | | |
| 3plus1_Cage_ | SKKELLEEVVRRAIELLKRHLEKLKRILEEIVRLLEEHLEKVERVL | 3plus1_Key_ | EDKLKEIEDELRRLLEELRRLDKAIK |
| Cterm_560 | EAILSLLDDLLRRGGDERAIRTLEDVKRRLREILERLADENAKAIK | Cterm_560 | DRLRELKKDLDEANRRIKETLKKLLR |
| | RLADLLDKLEKRNKEAIERLEEILEELKRVRRDEELLRVLETLLKI | | EVEK (SEQ ID NO: 27219) |
| | IEDILRENTKVLEDLLRLVEEILEANLRVVEELLRLAREILTEIVG | | |
| | DEDKLKEIEDELRRLLEELRRLDKAIKDRLRELKKDLDEANRRIKE | | |
| | TLKKLLREVEK (SEQ ID NO: 27218) | | |
| 3plus1_Cage_ | KEIEETLKELEDLNREMVETNRRVLEETRRLNKETVDRVKATLDEL | 3plus1_Key_ | KAVEELEKALEEIKRRLKEVIDRYED |
| 568_GFP11_ | AKMLKKLVDDVRKGPTSEELKRLLAELEELLARVVRRVEELLKKST | Cterm_568 | ELRKLRKEYKEKIDKYERKLEEIERR |
| Cterm | DLLERAVKDSADALRRSHEVLKEVASRVKRAKDEGLPREEVLRLLR | | ERT (SEQ ID NO: 27221) |
| | ELLERHAKVLKDIVRVSEKLLREHLKVLREIVEVLEELLERILKVI | | |
| | LDTTRDHMVLHEYVNAAGITKRRLKEVIDRYEDELRKLRKEYKEKI | | |
| | DKYERKLEEIERRERT (SEQ ID NO: 27220) | | |
| 3plus1_Cage_ | KEIEETLKELEDLNREMVETNRRVLEETRRLNKETVDRVKATLDEL | 3plus1_Key_ | KAVEELEKALEEIKRRLKEVIDRYED |
| 568_GFP11 | AKMLKKLVDDVRKGPTSEELKRLLAELEELLARVVRRVEELLKKST | Cterm_568 | ELRKLRKEYKEKIDKYERKLEEIERR |
| Cterm | DLLERAVKDSADALRRSHEVLKEVASRVKRAKDEGLPREEVLRLLR | | ERT (SEQ ID NO: 27223) |
| | ELLERHAKVLKDIVRVSEKLLREHLKVLREIVEVLEELLERILKVI | | |
| | LDTTGGDRDHMVLHEYVNAAGITLKEVIDRYEDELRKLRKEYKEKI | | |
| | DKYERKLEEIERRERT (SEQ ID NO: 27222) | | |
| 3plus1_Cage_ | SALETVKKLLEDSSEKIERIVEEDERVAKESSDRIRRLVEEDKRVA | 3plus1_Key_ | AEAVIKVIEKLIRANKRVWDALLKIN |
| Cterm_581 | DEILDLIEKIGDIDILLKLVEEWSRTSKKLLDDVLKLHKDWSDDSR | Cterm_581 | EDLVRVNKTVWKELLRVNEKLARDLE |
| | RLLEEILRVHEELIRRVKEILDREGKPEEVVRELEKVLKESLDTLE | | RVVK (SEQ ID NO: 27227) |
| | EIIRRLDEANAATVKRVADVIRELEDINRKVLEEIKRGSDDAEAVI | | |
| | KVIEKLIRANKRVWDALLKINEDLVRVNKTVWKELLRVNEKLARDL | | |
| | ERVVK (SEQ ID NO: 27226) | | |
| 3plus1_Cage_ | SKEEKLKDDVRAVLEDLDRVLKELEKLSEDNLRELKRVLDRITDLH | 3plus1_Key_ | SKAAEDILRVLEKLVKVSREAIKLIL |
| Cterm_585 | RRILDELRKGIGSEELLRRVEKVLKDNLDLLRKLVEEHKESSERDL | Cterm_585 | ELSEHHVRVSTRIARLLLDVARKLAE |
| | KRVEDLVREIKEVLRKLLELEDRGTDIRKIEEEIERLLRKIRKAVE | | VIKEAER (SEQ ID NO: 27229) |
| | ESKDLNRRNSERIEEVARRSEELARRLLKEIRERGDSKAAEDILRV | | |
| | LEKLVKVSREAIKLILELSEHHVRVSTRIARLLLDVARKLAEVIKE | | |
| | AER (SEQ ID NO: 27228) | | |
| 3plus1_Cage_ | SEIEDVIRRLRKILEDLERVSEKLLREIKKILDEARRLNEEVIKEI | 3plus1_Key_ | IEDLVREVERLIKRIEDSLRELEKTV |
| Cterm_587 | KRVLEDAVRVFRDGSGSKEELAKLVEELIRELAKLAKEVDEIHKRI | Cterm_587 | RELLKRIKEASDKVREDVDRLIKELK |
| | VERLKALVEDAERIHRKIVETLEEIVRGVPSEELKRVVEAIVEVIK | | EAAD (SEQ ID NO: 27231) |
| | EHLKVLADVIRRIIKAIEENAETIKRVLEDIVRVLELVLRGEGSIE | | |
| | DLVREVERLIKRIEDSLRELEKTVRELLKRIKEASDKVREDVDRLI | | |
| | KELKEAAD (SEQ ID NO: 27230) | | |
| 3plus1_Cage_ | SREELLDRILEAIAKILEDLKRLIDENLARLEEVVRELERIIDRNL | 3plus1_Key_ | DEIIRKLDELLKEVEKVHKEVKDRIR |
| Cterm_605 | KLIREILDELKKGSGSEEILEKIKKVDKELEDLIRRLLKKLEDLIR | Cterm_605 | KLLEDHKRSLDEVKKKLERLLERAKE |
| | ETERRLREILKRIRDLLKEVKDRDKDLERLLEVLEEVLRVIAELAK | | VVEREKK (SEQ ID NO: 27233) |
| | ELLDSLRKVLKVVEEVLRLLNEVNKEVLDVIRELAKDGGSDEIIRK | | |
| | LDELLKEVEKVHKEVKDRIRKLLEDHKRSLDEVKKKLERLLERAKE | | |
| | VVEREKK (SEQ ID NO: 27232) | | |
| 3plus1_Cage_ | SEREELLERIKEILKRVKDKLDEDLKRLKEILEKLKEKADRDLEEL | 3plus1_Key_ | SETAVRAIIRVLEKHLEAVRRVLEEL |
| Cterm_607 | RRRIEEVREKLERTGRIDELVKEVLDTVRRNLENLKRLVEDILRKL | Cterm_607 | LKVLAEHLETVRELIERLKRVLEEAI |
| | EENVKNLTDLVREILKLITELIKRLEDGGLPKEVLDALRRVLEKLE | | EVVERVAR (SEQ ID NO: 27235) |
| | ELLREILERLKRSLEAVKRKIEELLKELERSLDELRRALERIRKEI | | |
| | GDSETAVRAIIRVLEKHLEAVRRVLEELLKVLAEHLETVRELIERL | | |
| | KRVLEEAIEVVERVAR (SEQ ID NO: 27234) | | |
| 3plus1_Cage_ | SLEEITKRLLELVEENLARHEEILRELLELAKRLAKEDRDILEEVL | 3plus1_Key_ | ERTLREVVRKVLEEAKRLLDELEEVH |
| 611_GFP11_ | KLIEELLKLLEDNGSSEEDLKRLLKEVIEELRAVVKRVKDKWDEVV | Cterm_611 | KRVKKELEDIIEENRRVVKRVRDELR |
| Cterm | KRIEDLVKKLKELHDDILRKLRELVRKIVIDISESGGEAEKVKRVV | | EIKRELDE (SEQ ID NO: 27239) |
| | EKILELVERLAKVVKESVEKLLEILRELAEVSKRVAEALLRLLEEL | | |
| | VRVIRIKDERDHMVLHEYVNAAGITLLDELEEVHKRVKKELEDIIE | | |
| | ENRRVVKRVRDELREIKRELDE (SEQ ID NO: 27238) | | |
| 3plus1_Cage_ | SEKELVDDIRRILEEILRLLRSLLEEVIRLLEENEKLVRRHLKTVI | 3plus1_Key_ | DSLVREVEELIKRLEKHIDDLLKTSR |
| Cterm_632 | DILRRVAKLLDENGIRTDEADRVLERLEKAHRELLEDYKRALEKIK | Cterm_632 | DLVKRVLDLVDEVVKRVEDLVERVKE |
| | ETLERVLREAEEVVKKIDDALRKLGGSKEVLKRLLEELLRLVEKIA | | KIDT (SEQ ID NO: 27241) |
| | EEIKRLLSELVRVIEELVRINKELLEEAVRVIRKEVGDDSLVREVE | | |
| | ELIKRLEKHIDDLLKTSRDLVKRVLDLVDEVVKRVEDLVERVKEKI | | |
| | DT (SEQ ID NO: 27240) | | |
| 3plus1_Cage_ | DAEEVVKRLADVLRENDETIRKVVEDLVRIAEENDRLWKKLVEDIA | 3plus1_Key_ | EDVKRALEELVSRLRKLLEDVKKASE |
| 646_GFP11_ | EILRRIVELLRRGGVPEELLDRLAKVVKSIVEKAEKILERLNRVSK | Cterm_646 | DIVREVERIVRELAKRSDEILKKLED |
| Cterm | AIAEKLKTIVDELNEVSKEIVKRAEDILRKGKDKETVLRALRTLVK | | IVEKLRE (SEQ ID NO: 27245) |
| | EYADLSKEVLERVERIVREYVKLSDEVVKSLAEIVEELIRIIEDLL | | |
| | RKGNRDHMVLHEYVNAAGITRKLLEDVKKASEDIVREVERIVRELA | | |
| | KRSDEILKKLEDIVEKLRE (SEQ ID NO: 27244) | | |
| 3plus1_Cage_ | DAEEVVKRLADVLRENDETIRKVVEDLVRIAEENDRLWKKLVEDIA | 3plus1_Key_ | EDVKRALEELVSRLRKLLEDVKKASE |
| 646_GFP11_ | EILRRIVELLRRGGVPEELLDRLAKVVKSIVEKAEKILERLNRVSK | Cterm_646 | DIVREVERIVRELAKRSDEILKKLED |
| Cterm | AIAEKLKTIVDELNEVSKEIVKRAEDILRKGKDKETVLRALRTLVK | | IVEKLRE (SEQ ID NO: 27247) |
| | EYADLSKEVLERVERIVREYVKLSDEVVKSLAEIVEELIRIIEDLL | | |
| | RKGNLDEDRDHMVLHEYVNAAGITEDVKKASEDIVREVERIVRELA | | |
| | KRSDEILKKLEDIVEKLRE (SEQ ID NO: 27246) | | |
| 3plus1_Cage_ | DAEEVVKRLADVLRENDETIRKVVEDLVRIAEENDRLWKKLVEDIA | 3plus1_Key_ | EDVKRALEELVSRLRKLLEDVKKASE |
| 646_GFP11_ | EILRRIVELLRRGGVPEELLDRLAKVVKSIVEKAEKILERLNRVSK | Cterm_646 | DIVREVERIVRELAKRSDEILKKLED |
| Cterm | AIAEKLKTIVDELNEVSKEIVKRAEDILRKGKDKETVLRALRTLVK | | IVEKLRE (SEQ ID NO: 27249) |
| | EYADLSKEVLERVERIVREYVKLSDEVVKSLAEIVEELIRIIEDLL | | |
| | RKGNLDEDVRDHMVLHEYVNAAGITDVKKASEDIVREVERIVRELA | | |
| | KRSDEILKKLEDIVEKLRE (SEQ ID NO: 27248) | | |
| 3plus1_Cage_ | DAEEVVKRLADVLRENDETIRKVVEDLVRIAEENDRLWKKLVEDIA | 3plus1_Key_ | EDVKRALEELVSRLRKLLEDVKKASE |
| 647_GFP11_ | EILRRIVELLRRGGVPEELLDRLAKVVKSIVEKAEKILERLNRVSK | Cterm_647 | DIVREVERIVRELAKRSDEILKKLED |
| Cterm | AIAEKLKTIVDELNEVSKEIVKRAEDILRKGKDKETVLRALRTLVK | | IVEKLRE (SEQ ID NO: 27251) |
| | EYADLSKEVLERVERIVREYVKLSDEVVKSLAEIVEELIRIIEDLL | | |
| | RKGNLRDHMVLHEYVNAAGITKLLEDVKKASEDIVREVERIVRELA | | |
| | KRSDEILKKLEDIVEKLRE (SEQ ID NO: 27250) | | |
| 3plus1_Cage_ | DAEEVVKRLADVLRENDETIRKVVEDLVRIAEENDRLWKKLVEDIA | 3plus1_Key_ | EDVKRALEELVSRLRKLLEDVKKASE |
| 647_GFP11_ | EILRRIVELLRRGGVPEELLDRLAKVVKSIVEKAEKILERLNRVSK | Cterm_647 | DIVREVERIVRELAKRSDEILKKLED |
| Cterm | AIAEKLKTIVDELNEVSKEIVKRAEDILRKGKDKETVLRALRTLVK | | IVEKLRE (SEQ ID NO: 27253) |
| | EYADLSKEVLERVERIVREYVKLSDEVVKSLAEIVEELIRIIEDLL | | |
| | RKGNLDEDVKRALERDHMVLHEYVNAAGITS EDIVREVERIVRELA | | |
| | KRSDEILKKLEDIVEKLRE (SEQ ID NO:27252) | | |
| 3plus1_Cage_ | DAEEVVKRLADVLRENDETIRKVVEDLVRIAEENDRLWKKLVEDIA | 3plus1_Key_ | EDVKRALEELVSRLRKLLEDVKKASE |
| Cterm_647 | EILRRIVELLRRGGVPEELLDRLAKVVKSIVEKAEKILERLNRVSK | Cterm_647 | DIVREVERIVRELAKRSDEILKKLED |
| | AIAEKLKTIVDELNEVSKEIVKRAEDILRKGKDKETVLRALRTLVK | | IVEKLRE (SEQ ID NO: 27255) |
| | EYADLSKEVLERVERIVREYVKLSDEVVKSLAEIVEELIRIIEDLL | | |
| | RKGNLDEDVKRALEELVSRLRKLLEDVKKASEDIVREVERIVRELA | | |
| | KRSDEILKKLEDIVEKLRE (SEQ ID NO: 27254) | | |
| 3plus1_Cage_ | DEEETLRRLLERKVELAKEYLDVSKEVIDRITKLLDEYLKISKRIV | 3plus1_Key_ | SREALEEARRRLEELLRELNEITKDL |
| Cterm_653 | DATVELLERGDLGPDELIKRLAEELERSLRELEEEIKRLKRELEES | Cterm_653 | EAKLEKLLRDLNELTKALEEELKRLL |
| | LKKLKEIIDRLAEEAEKLLAVLKRGEGSEEEALRALASLVRELIEV | | DELKKRTD (SEQ ID NO: 27257) |
| | LRENDERLRDVLRRLIEALRKNNEILERVLRKLVRAAEERGRDESS | | |
| | REALEEARRRLEELLRELNEITKDLEAKLEKLLRDLNELTKALEEE | | |
| | LKRLLDELKKRTD (SEQ ID NO: 27256) | | |
| 3plus1_Cage_ | DEERIIKTLEDINAKLVEDIKRILDKVAELNERLADAIRKILEETK | 3plus1_Key_ | KDTLRTVEKLVEDVKRRLDKLLEDYK |
| Cterm_658 | RILEATTRKVRKDGEISEELLRRLEEKLRKLLEDLERVLAEHEDES | Cterm_658 | RLIEEVKKELDKLLKEYEDALREIKK |
| | RRILEEVERLLKRHADASKELLDRARSVARGVKSDKELVDRLKKLI | | RIDE (SEQ ID NO: 27259) |
| | DDSLESVRELIERLKELLDRLVKSVEDLIRTIKELLDRLVEVLREG | | |
| | VSDKDILRIVEKLVEDVKRRLDKLLEDYKRLIEEVKKELDKLLKEY | | |
| | EDALREIKKRIDE (SEQ ID NO: 27258) | | |
| 3plus1_Cage_ | SLVDELRKSLERNVRVSEEVARRLKEALKRWVDVVRKVVEDLIRLN | 3plus1_Key_ | SLVDELRKSLERNVRVSEEVARRLKE |
| Nterm_263 | EDVVRVVEKVIVDESAIERVRRIIEELNRKLDAVLKKNEDLVRRLT | Nterm_263 | ALKRWVDVVRKVVEDLIRLNEDVVRV |
| | ELLDKLLEENRRLVEELDEDLKRRGGTEEVIDTILELIERSIERLK | | VEKV (SEQ ID NO: 27263) |
| | RLLDELLRIVREALKDNKRVADENLKKLKEILDELRKDGVEDEELK | | |
| | RVLEKAADLHRRLKDRHRKLLEDLERIIRELKKKLDEVVEENKRSV | | |
| | DELKR (SEQ ID NO: 27262) | | |
| 3plus1_Cage_ | DAEEVVKRLADVLRENDETIRKVVEDLVRIAEENDRLWRDHMVLHE | 3plus1_Key_ | DAEEVVKRLADVLRENDETIRKVVED |
| 647_GFP11_ | YVNAAGITLLRRGGVPEELLDRLAKVVKSIVEKAEKILERLNRVSK | Nterm_647 | LVRIAEENDRLWKKLVEDIAEILRRI |
| Nterm | AIAEKLKTIVDELNEVSKEIVKRAEDILRKGKDKETVLRALRTLVK | | VELLRRG (SEQ ID NO: 27277) |
| | EYADLSKEVLERVERIVREYVKLSDEVVKSLAEIVEELIRIIEDLL | | |
| | RKGNLDEDVKRALEELVSRLRKLLEDVKKASEDIVREVERIVRELA | | |
| | KRSDEILKKLEDIVEKLRE (SEQ ID NO: 27276) | | |

TABLE 10
Exemplary binding domains

>Her2_DARPin (SEQ ID NO: 27399)
DLGKKLLEAARAGQDDEVRILMANGADVNAKDEYGLTPLYLATAHGHLEIVEVLLKNGADVNAVDAIGFTPLHLA
AFIGHLEIAEVLLKHGADVNAQDKFGKTAFDISIGNGNEDLAEILQKLN
>EGER_DARPin (SEQ ID NO: 27400)
DLGKKLLEAARAGQDDEVRILMANGADVNADDTWGWTPLHLAAYQGHLEIVEVLLKNGADVNAYDYIGWTPLHLA
ADGHLEIVEVLLKNGADVNASDYIGDTPLHLAAHNGHLEIVEVLLKHGADVNAQDKEGKTAFDISIDNGNEDLAE
ILQKLN
>EpCAM_DARPin DARPin (SEQ ID NO: 27401)
DLGKKLLEAARAGQDDEVRILVANGADVNAYEGTTPLHLAAAHGRLEIVEVLLKNGADVNAQDVWGITPLHLAAY
NGHLEIVEVLLKYGADVNAHDTRGWTPLHLAAINGHLEIVEVLLKNVADVNAQDRSGKTPFDLAIDNGNEDIAEV
LQKAAKLN
>Anti-Her2 scFv (SEQ ID NO: 27402)
DIQMTQSPSSLSASVGDRVTITCRASQDVNTAVAWYQQKPGKAPKLLIYSASFLYSGVPSRFSGSRSGTDFTLTI
SSLQPEDFATYYCQQHYTTPPTFGQGTKVEIKGSTSGSGKPGSGEGSGEVQLVESGGGLVQPGGSLRLSCAASGF
NIKDTYTHWVRQAPGKGLEWVARTYPTNGYTRYADSVKGRETISADTSKNTAYLQMNSLRAEDTAVYYCSRWGGD
GFYAMDYWGQGTLVTVSS
>Anti-EGFR scFv (SEQ ID NO: 27403)
QVQLKQSGPGLVQPSQSLSITCTVSGFSLTNYGVHWVRQSPGKGLEWLGVIWSGGNTDYNTPFTSRLSINKDNSK
SQVFFKMNSLQSNDTAIYYCARALTYYDYEFAYWGQGTLVTVSAGGGGSGGGGSGGGGSDILLTQSPVILSVSPG
ERVSFSCRASQSIGTNIHWYQQRTNGSPRLLIKYASESISGIPSRFSGSGSGTDFTLSINSVESEDIADYYCQQN
NNWPTTFGAGTKLELKRT

TABLE 11
Exemplary cage polypeptides with binding domains
Co-LOCKR Cage proteins (These proteins may alternatively be used as Decoys
for effector proteins that do not interact with Bim)
(parentheses are optional sequences)

>Her2_Cage Original Cage targeted to Her2 by DARPin SEQ ID NO: 27404
(MGSHHHHHHGSGSENLYFQGSGGS)DLGKKLLEAARAGQDDEVRILMANGADVNAKDEYGLIPLYLATAHGHLE
IVEVLLKNGADVNAVDAIGFTPLHLAAFIGHLEIAEVLLKHGADVNAQDKEGKTAFDISIGNGNEDLAEILQKLN
(SGSGSGKPGQASGS)ELARKLLEASTKLQRLNIRLAEALLEAIARLQELNLELVYLAVELTDPKRIRDEIKEVK
DKSKEIIRRAEKEIDDAAKESEKILEEAREAISGSGSELAKLLLKAIAETQDLNLRAAKAFLEAAAKLQELNIRA
VELLVKLTDPATIREALEHAKRRSKEIIDEAERAIRAAKRESERIIEEARRLIEKGSGSGSELARELLRAHAQLQ
RLNLELLRELLRALAQLQELNLDLLRLASELTDEIWIAQELRRIGDEFNAYYADAERLIREAAAASEKISREAER
LIR
>EGER_Cage Original Cage targeted to EGFR by DARPin SEQ ID NO: 27405
(MGSHHHHHHGSGSENLYFQGSGGS)DLGKKLLEAARAGQDDEVRILMANGADVNADDIWGWIPLHLAAYQGHLE
IVEVLLKNGADVNAYDYIGWIPLHLAADGHLEIVEVLLKNGADVNASDYIGDTPLHLAAHNGHLEIVEVLLKHGA
DVNAQDKEGKTAFDISIDNGNEDLAEILQKLN(SGSGSGKPGQASGS)ELARKLLEASTKLQRLNIRLAEALLEA
IARLQELNLELVYLAVELTDPKRIRDEIKEVKDKSKEIIRRAEKEIDDAAKESEKILEEAREAISGSGSELAKLL
LKAIAETQDLNLRAAKAFLEAAAKLQELNIRAVELLVKLTDPATIREALEHAKRRSKEIIDEAERAIRAAKRESE
RIIEEARRLIEKGSGSGSELARELLRAHAQLQRLNLELLRELLRALAQLQELNLDLLRLASELTDEIWIAQELRR
IGDEFNAYYADAERLIREAAAASEKISREAERLIR
>EpCAM_Cage Original Cage targeted to EpCAM by DARPin SEQ ID NO: 27406
(MGSHHHHHHGSGSENLYFQGSGGS)DLGKKLLEAARAGQDDEVRILVANGADVNAYEGTTPLHLAAAHGRLEIV
EVLLKNGADVNAQDVWGITPLHLAAYNGHLEIVEVLLKYGADVNAHDTRGWTPLHLAAINGHLEIVEVLLKNVAD
VNAQDRSGKTPFDLAIDNGNEDIAEVLQKAAKLN(SGSGSGKPGQASGS)ELARKLLEASTKLQRLNIRLAEALL
EAIARLQELNLELVYLAVELTDPKRIRDEIKEVKDKSKEIIRRAEKEIDDAAKESEKILEEAREAISGSGSELAK
LLLKAIAETQDLNLRAAKAFLEAAAKLQELNIRAVELLVKLTDPATIREALEHAKRRSKEIIDEAERAIRAAKRE
SERIIEEARRLIEKGSGSGSELARELLRAHAQLQRLNLELLRELLRALAQLQELNLDLLRLASELTDEIWIAQEL
RRIGDEFNAYYADAERLIREAAAASEKISREAERLIR
>Her2_Cage_I287A Tuned Cage targeted to Her2 by DARPin (I287A) SEQ ID
NO: 27407
(MGSHHHHHHGSGSENLYFQGSGGS)DLGKKLLEAARAGQDDEVRILMANGADVNAKDEYGLIPLYLATAHGHLE
IVEVLLKNGADVNAVDAIGFTPLHLAAFIGHLEIAEVLLKHGADVNAQDKFGKTAFDISIGNGNEDLAEILQKLN
(SGSGSGKPGQASGS)ELARKLLEASTKLQRLNIRLAEALLEAIARLQELNLELVYLAVELTDPKRIRDEIKEVK
DKSKEIIRRAEKEIDDAAKESEKILEEAREAISGSGSELAKLLLKAIAETQDLNLRAAKAFLEAAAKLQELNIRA
VELLVKLTDPATIREALEHAKRRSKEIIDEAERAIRAAKRESERIIEEARRLIEKGSGSGSELARELLRAHAQLQ
RLNLELLRELLRALAQLQELNLDLLRLASELTDEIWIAQELRRIGDEFNAYYADAERLIREAAAASEKISREAER
LAR
>Her2_Cage_I287S Tuned Cage targeted to Her2 by DARPin (I287S) SEQ ID
NO: 27408
(MGSHHHHHHGSGSENLYFQGSGGS)DLGKKLLEAARAGQDDEVRILMANGADVNAKDEYGLIPLYLATAHGHLE
IVEVLLKNGADVNAVDAIGFTPLHLAAFIGHLEIAEVLLKHGADVNAQDKFGKTAFDISIGNGNEDLAEILQKLN
(SGSGSGKPGQASGS)ELARKLLEASTKLQRLNIRLAEALLEAIARLQELNLELVYLAVELTDPKRIRDEIKEVK
DKSKEIIRRAEKEIDDAAKESEKILEEAREAISGSGSELAKLLLKAIAETQDLNLRAAKAFLEAAAKLQELNIRA
VELLVKLTDPATIREALEHAKRRSKEIIDEAERAIRAAKRESERIIEEARRLIEKGSGSGSELARELLRAHAQLQ
RLNLELLRELLRALAQLQELNLDLLRLASELTDEIWIAQELRRIGDEFNAYYADAERLIREAAAASEKISREAER
LSR
>Her2_Cage_I269S Tuned Cage targeted to Her2 by DARPin (I269S) SEQ ID
NO: 27409
(MGSHHHHHHGSGSENLYFQGSGGS)DLGKKLLEAARAGQDDEVRILMANGADVNAKDEYGLIPLYLATAHGHLE
IVEVLLKNGADVNAVDAIGFTPLHLAAFIGHLEIAEVLLKHGADVNAQDKFGKTAFDISIGNGNEDLAEILQKLN
(SGSGSGKPGQASGS)ELARKLLEASTKLQRLNIRLAEALLEAIARLQELNLELVYLAVELTDPKRIRDEIKEVK
DKSKEIIRRAEKEIDDAAKESEKILEEAREAISGSGSELAKLLLKAIAETQDLNLRAAKAFLEAAAKLQELNIRA
VELLVKLTDPATIREALEHAKRRSKEIIDEAERAIRAAKRESERIIEEARRLIEKGSGSGSELARELLRAHAQLQ
RLNLELLRELLRALAQLQELNLDLLRLASELTDEIWIAQELRRIGDEFNAYYADAERLSREAAAASEKISREAER
LIR
>Her2_Cage_I269S_I287A Tuned Cage targeted to Her2 by DARPin (I269S,
I287A) SEQ ID NO: 27410
(MGSHHHHHHGSGSENLYFQGSGGS)DLGKKLLEAARAGQDDEVRILMANGADVNAKDEYGLIPLYLATAHGHLE
IVEVLLKNGADVNAVDAIGFTPLHLAAFIGHLEIAEVLLKHGADVNAQDKFGKTAFDISIGNGNEDLAEILQKLN
(SGSGSGKPGQASGS)ELARKLLEASTKLQRLNIRLAEALLEAIARLQELNLELVYLAVELTDPKRIRDEIKEVK
DKSKEIIRRAEKEIDDAAKESEKILEEAREAISGSGSELAKLLLKAIAETQDLNLRAAKAFLEAAAKLQELNIRA
VELLVKLTDPATIREALEHAKRRSKEIIDEAERAIRAAKRESERIIEEARRLIEKGSGSGSELARELLRAHAQLQ
RLNLELLRELLRALAQLQELNLDLLRLASELTDEIWIAQELRRIGDEFNAYYADAERLSREAAAASEKISREAER
LAR
>Her2_Cage_I269S_I287S Tuned Cage targeted to Her2 by DARPin (I269S,
I287A) SEQ ID NO: 27411
(MGSHHHHHHGSGSENLYFQGSGGS)DLGKKLLEAARAGQDDEVRILMANGADVNAKDEYGLIPLYLATAHGHLE
IVEVLLKNGADVNAVDAIGFTPLHLAAFIGHLEIAEVLLKHGADVNAQDKFGKTAFDISIGNGNEDLAEILQKLN
(SGSGSGKPGQASGS)ELARKLLEASTKLQRLNIRLAEALLEAIARLQELNLELVYLAVELTDPKRIRDEIKEVK
DKSKEIIRRAEKEIDDAAKESEKILEEAREAISGSGSELAKLLLKAIAETQDLNLRAAKAFLEAAAKLQELNIRA
VELLVKLTDPATIREALEHAKRRSKEIIDEAERAIRAAKRESERIIEEARRLIEKGSGSGSELARELLRAHAQLQ
RLNLELLRELLRALAQLQELNLDLLRLASELTDEIWIAQELRRIGDEFNAYYADAERLSREAAAASEKISREAER
LSR
>Her2_Cage_L209A Tuned Cage targeted to Her2 by DARPin (L209A) SEQ ID
NO: 27412
(MGSHHHHHHGSGSENLYFQGSGGS)DLGKKLLEAARAGQDDEVRILMANGADVNAKDEYGLIPLYLATAHGHLE
IVEVLLKNGADVNAVDAIGFTPLHLAAFIGHLEIAEVLLKHGADVNAQDKFGKTAFDISIGNGNEDLAEILQKLN
(SGSGSGKPGQASGS)ELARKLLEASTKLQRLNIRLAEALLEAIARLQELNLELVYLAVELTDPKRIRDEIKEVK
DKSKEIIRRAEKEIDDAAKESEKILEEAREAISGSGSELAKLLLKAIAETQDLNLRAAKAFLEAAAKLQELNIRA
VELLVKLTDPATIREALEHAKRRSKEIIDEAERAIRAAKRESERIIEEARRLIEKGSGSGSELARELLRAHAQAQ
RLNLELLRELLRALAQLQELNLDLLRLASELTDEIWIAQELRRIGDEFNAYYADAERLIREAAAASEKISREAER
LIR
>herceptin_Cage_I269S Tuned Cage targeted to Her2 by herceptin scEv SEQ
ID NO: 27413
(METDILLLWVLLLWVPGSTGDYKDEHHHHHHGGSENLYFQGSG)DIQMIQSPSSLSASVGDRVTITCRASQDVN
TAVAWYQQKPGKAPKLLIYSASFLYSGVPSRFSGSRSGTDFILTISSLQPEDFATYYCQQHYTTPPTEGQGTKVE
IKGSTSGSGKPGSGEGSGEVQLVESGGGLVQPGGSLRLSCAASGFNIKDIYIHWVRQAPGKGLEWVARIYPINGY
TRYADSVKGRFTISADTSKNTAYLQMNSLRAEDTAVYYCSRWGGDGFYAMDYWGQGTLVIVS(SGSGSGKPGQAS
GS)ELARKLLEASTKLQRLNIRLAEALLEAIARLQELNLELVYLAVELTDPKRIRDEIKEVKDKSKEIIRRAEKE
IDDAAKESEKILEEAREAISGSGSELAKLLLKAIAETQDLNLRAAKAFLEAAAKLQELNIRAVELLVKLTDPATI
REALEHAKRRSKEIIDEAERAIRAAKRESERIIEEARRLIEKGSGSGSELARELLRAHAQLQRLNLELLRELLRA
LAQLQELNLDLLRLASELTDEIWIAQELRRIGDEFNAYYADAERLSREAAAASEKISREAERLIR
>Her2_Cage_L209A_L216A Tuned Cage targeted to Her2 by DARPin (L209A) SEQ
ID NO: 27414
(MGSHHHHHHGSGSENLYFQGSGGS)DLGKKLLEAARAGQDDEVRILMANGADVNAKDEYGLIPLYLATAHGHLE
IVEVLLKNGADVNAVDAIGFTPLHLAAFIGHLEIAEVLLKHGADVNAQDKFGKTAFDISIGNGNEDLAEILQKLN
(SGSGSGKPGQASGS)ELARKLLEASTKLQRLNIRLAEALLEAIARLQELNLELVYLAVELTDPKRIRDEIKEVK
DKSKEIIRRAEKEIDDAAKESEKILEEAREAISGSGSELAKLLLKAIAETQDLNLRAAKAFLEAAAKLQELNIRA
VELLVKLTDPATIREALEHAKRRSKEIIDEAERAIRAAKRESERIIEEARRLIEKGSGSGSELARELLRAHAQAQ
RLNLEALRELLRALAQLQELNLDLLRLASELTDEIWIAQELRRIGDEFNAYYADAERLIREAAAASEKISREAER
LIR
>EGER_Cage_I269S Tuned Cage targeted to EGFR by DARPin (I269S) SEQ ID
NO: 27415
(MGSHHHHHHGSGSENLYFQGSGGS)DLGKKLLEAARAGQDDEVRILMANGADVNADDIWGWIPLHLAAYQGHLE
IVEVLLKNGADVNAYDYIGWIPLHLAADGHLEIVEVLLKNGADVNASDYIGDTPLHLAAHNGHLEIVEVLLKHGA
DVNAQDKFGKTAFDISIDNGNEDLAEILQKLN(SGSGSGKPGQASGS)ELARKLLEASTKLQRLNIRLAEALLEA
IARLQELNLELVYLAVELTDPKRIRDEIKEVKDKSKEIIRRAEKEIDDAAKESEKILEEAREAISGSGSELAKLL
LKAIAETQDLNLRAAKAFLEAAAKLQELNIRAVELLVKLTDPATIREALEHAKRRSKEIIDEAERAIRAAKRESE
RIIEEARRLIEKGSGSGSELARELLRAHAQLQRLNLELLRELLRALAQLQELNLDLLRLASELTDEIWIAQELRR
IGDEFNAYYADAERLSREAAAASEKISREAERLIR
>EGER_Cage_I287A Tuned Cage targeted to EGFR by DARPin (I287A) SEQ ID
NO: 27416
(MGSHHHHHHGSGSENLYFQGSGGS)DLGKKLLEAARAGQDDEVRILMANGADVNADDIWGWIPLHLAAYQGHLE
IVEVLLKNGADVNAYDYIGWIPLHLAADGHLEIVEVLLKNGADVNASDYIGDTPLHLAAHNGHLEIVEVLLKHGA
DVNAQDKFGKTAFDISIDNGNEDLAEILQKLN(SGSGSGKPGQASGS)ELARKLLEASTKLQRLNIRLAEALLEA
IARLQELNLELVYLAVELTDPKRIRDEIKEVKDKSKEIIRRAEKEIDDAAKESEKILEEAREAISGSGSELAKLL
LKAIAETQDLNLRAAKAFLEAAAKLQELNIRAVELLVKLTDPATIREALEHAKRRSKEIIDEAERAIRAAKRESE
RIIEEARRLIEKGSGSGSELARELLRAHAQLQRLNLELLRELLRALAQLQELNLDLLRLASELTDEIWIAQELRR
IGDEFNAYYADAERLIREAAAASEKISREAERLAR
>EGER_Cage_L209A Tuned Cage targeted to EGFR by DARPin (L209A) SEQ ID
NO: 27417
(MGSHHHHHHGSGSENLYFQGSGGS)DLGKKLLEAARAGQDDEVRILMANGADVNADDIWGWIPLHLAAYQGHLE
IVEVLLKNGADVNAYDYIGWIPLHLAADGHLEIVEVLLKNGADVNASDYIGDTPLHLAAHNGHLEIVEVLLKHGA
DVNAQDKFGKTAFDISIDNGNEDLAEILQKLN(SGSGSGKPGQASGS)ELARKLLEASTKLQRLNIRLAEALLEA
IARLQELNLELVYLAVELTDPKRIRDEIKEVKDKSKEIIRRAEKEIDDAAKESEKILEEAREAISGSGSELAKLL
LKAIAETQDLNLRAAKAFLEAAAKLQELNIRAVELLVKLTDPATIREALEHAKRRSKEIIDEAERAIRAAKRESE
RIIEEARRLIEKGSGSGSELARELLRAHAQAQRLNLELLRELLRALAQLQELNLDLLRLASELTDEIWIAQELRR
IGDEFNAYYADAERLIREAAAASEKISREAERLIR
>EGER_Cage_I269S long linker Tuned Cage targeted to EGFR by DARPin via
long linker (I269S) SEQ ID NO: 27418
(MGSHHHHHHGSGSENLYFQGSGGS)DLGKKLLEAARAGQDDEVRILVANGADVNAYFGTTPLHLAAAHGRLEIV
EVLLKNGADVNAQDVWGITPLHLAAYNGHLEIVEVLLKYGADVNAHDIRGWIPLHLAAINGHLEIVEVLLKNVAD
VNAQDRSGKTPFDLAIDNGNEDIAEVLQKAAKLN(SGSGSGSGSGSGSGSGSGSGSGSGSGSGSGSGSGSGSGSG
SGSGSGSGSGSGSGSGSGKPGQASGS)ELARKLLEASTKLQRLNIRLAEALLEAIARLQELNLELVYLAVELTDP
KRIRDEIKEVKDKSKEIIRRAEKEIDDAAKESEKILEEAREAISGSGSELAKLLLKAIAETQDLNLRAAKAFLEA
AAKLQELNIRAVELLVKLTDPATIREALEHAKRRSKEIIDEAERAIRAAKRESERIIEEARRLIEKGSGSGSELA
RELLRAHAQLQRLNLELLRELLRALAQLQELNLDLLRLASELTDEIWIAQELRRIGDEFNAYYADAERLSREAAA
ASEKISREAERLIR
>EpCAM_Cage_I269S Tuned Cage targeted to EpCAM by DARPin (I269S) SEQ ID
NO: 27419
(MGSHHHHHHGSGSENLYFQGSGGS)DLGKKLLEAARAGQDDEVRILVANGADVNAYFGTTPLHLAAAHGRLEIV
EVLLKNGADVNAQDVWGITPLHLAAYNGHLEIVEVLLKYGADVNAHDIRGWIPLHLAAINGHLEIVEVLLKNVAD
VNAQDRSGKTPFDLAIDNGNEDIAEVLQKAAKLN(SGSGSGKPGQASGS)ELARKLLEASTKLQRLNIRLAEALL
EAIARLQELNLELVYLAVELTDPKRIRDEIKEVKDKSKEIIRRAEKEIDDAAKESEKILEEAREAISGSGSELAK
LLLKAIAETQDLNLRAAKAFLEAAAKLQELNIRAVELLVKLTDPATIREALEHAKRRSKEIIDEAERAIRAAKRE
SERIIEEARRLIEKGSGSGSELARELLRAHAQLQRLNLELLRELLRALAQLQELNLDLLRLASELTDEIWIAQEL
RRIGDEFNAYYADAERLSREAAAASEKISREAERLIR
>EpCAM_Cage_I287A Tuned Cage targeted to EpCAM by DARPin (I287A) SEQ ID
NO: 27420
(MGSHHHHHHGSGSENLYFQGSGGS)DLGKKLLEAARAGQDDEVRILVANGADVNAYFGTTPLHLAAAHGRLEIV
EVLLKNGADVNAQDVWGITPLHLAAYNGHLEIVEVLLKYGADVNAHDIRGWIPLHLAAINGHLEIVEVLLKNVAD
VNAQDRSGKTPFDLAIDNGNEDIAEVLQKAAKLN(SGSGSGKPGQASGS)ELARKLLEASTKLQRLNIRLAEALL
EAIARLQELNLELVYLAVELTDPKRIRDEIKEVKDKSKEIIRRAEKEIDDAAKESEKILEEAREAISGSGSELAK
LLLKAIAETQDLNLRAAKAFLEAAAKLQELNIRAVELLVKLTDPATIREALEHAKRRSKEIIDEAERAIRAAKRE
SERIIEEARRLIEKGSGSGSELARELLRAHAQLQRLNLELLRELLRALAQLQELNLDLLRLASELTDEIWIAQEL
RRIGDEFNAYYADAERLIREAAAASEKISREAERLAR
>EpCAM_Cage_L209A Tuned Cage targeted to EpCAM by DARPin (L209A) SEQ ID
NO: 27421
(MGSHHHHHHGSGSENLYFQGSGGS)DLGKKLLEAARAGQDDEVRILVANGADVNAYFGTTPLHLAAAHGRLEIV
EVLLKNGADVNAQDVWGITPLHLAAYNGHLEIVEVLLKYGADVNAHDIRGWIPLHLAAINGHLEIVEVLLKNVAD
VNAQDRSGKTPFDLAIDNGNEDIAEVLQKAAKLN(SGSGSGKPGQASGS)ELARKLLEASTKLQRLNIRLAEALL
EAIARLQELNLELVYLAVELTDPKRIRDEIKEVKDKSKEIIRRAEKEIDDAAKESEKILEEAREAISGSGSELAK
LLLKAIAETQDLNLRAAKAFLEAAAKLQELNIRAVELLVKLTDPATIREALEHAKRRSKEIIDEAERAIRAAKRE
SERIIEEARRLIEKGSGSGSELARELLRAHAQAQRLNLELLRELLRALAQLQELNLDLLRLASELTDEIWIAQEL
RRIGDEFNAYYADAERLIREAAAASEKISREAERLIR
Co-LOCKR Decoy proteins (for ′NOT′ gates) (proteins containing
RDHMVLHEYVNAAGITF (SEQ ID No: 27447) may alternatively be used as Cage
proteins in cases when the effector protein interacts with GFP11)
>EGER_Decoyl Original decoy targeted to EGFR by DARPin (for NOT logic)
SEQ ID NO: 27422
(MGSHHHHHHGSGSENLYFQGSGGS)DLGKKLLEAARAGQDDEVRILMANGADVNADDIWGWIPLHLAAYQGHLE
IVEVLLKNGADVNAYDYIGWIPLHLAADGHLEIVEVLLKNGADVNASDYIGDTPLHLAAHNGHLEIVEVLLKHGA
DVNAQDKFGKTAFDISIDNGNEDLAEILQKLN(SGSGSGKPGQASGS)ELARKLLEASTKLQRLNIRLAEALLEA
IARLQELNLELVYLAVELTDPKRIRDEIKEVKDKSKEIIRRAEKEIDDAAKESEKILEEAREAISGSGSELAKLL
LKAIAETQDLNLRAAKAFLEAAAKLQELNIRAVELLVKLTDPATIREALEHAKRRSKEIIDEAERAIRAAKRESE
RIIEEARRLIEKGSGSGSELARELLRAHAQLQRLNLELLRELLRALAQLQELNLDLLRLASELRDHMVLHEYVNA
AGITFNAYYADAERLIREAAAASEKISREAG
>EGER_Decoy_G24 Tuned Decoy targeted to EGFR by DARPin SEQ ID NO: 27423
(MGSHHHHHHGSGSENLYFQGSGGS)DLGKKLLEAARAGQDDEVRILMANGADVNADDIWGWIPLHLAAYQGHLE
IVEVLLKNGADVNAYDYIGWIPLHLAADGHLEIVEVLLKNGADVNASDYIGDTPLHLAAHNGHLEIVEVLLKHGA
DVNAQDKFGKTAFDISIDNGNEDLAEILQKLN(SGSGSGKPGQASGS)ELARKLLEASTKLQRLNIRLAEALLEA
IARLQELNLELVYLAVELTDPKRIRDEIKEVKDKSKEIIRRAEKEIDDAAKESEKILEEAREAISGSGSELAKLL
LKAIAETQDLNLRAAKAFLEAAAKLQELNIRAVELLVKLTDPATIREALEHAKRRSKEIIDEAERAIRAAKRESE
RIIEEARRLIEKGSGSGSELARELLRAHAQLQRLNLELLRELLRALAQLQELNLDLLRLASELGRDHMVLHEYVN
AAGITFNAYYADAERLIREAAAASEKISREAG
>EGER_Decoy_G25 Tuned Decoy targeted to EGFR by DARPin SEQ ID NO: 27424
(MGSHHHHHHGSGSENLYFQGSGGS)DLGKKLLEAARAGQDDEVRILMANGADVNADDIWGWIPLHLAAYQGHLE
IVEVLLKNGADVNAYDYIGWIPLHLAADGHLEIVEVLLKNGADVNASDYIGDTPLHLAAHNGHLEIVEVLLKHGA
DVNAQDKFGKTAFDISIDNGNEDLAEILQKLN(SGSGSGKPGQASGS)ELARKLLEASTKLQRLNIRLAEALLEA
IARLQELNLELVYLAVELTDPKRIRDEIKEVKDKSKEIIRRAEKEIDDAAKESEKILEEAREAISGSGSELAKLL
LKAIAETQDLNLRAAKAFLEAAAKLQELNIRAVELLVKLTDPATIREALEHAKRRSKEIIDEAERAIRAAKRESE
RIIEEARRLIEKGSGSGSELARELLRAHAQLQRLNLELLRELLRALAQLQELNLDLLRLASELRDHMVLHEYVNA
AGITFNAYYADAERLSREAAAASEKISREAG
>EGER_Decoy_G26 Tuned Decoy targeted to EGFR by DARPin SEQ ID NO: 27425
(MGSHHHHHHGSGSENLYFQGSGGS)DLGKKLLEAARAGQDDEVRILMANGADVNADDIWGWIPLHLAAYQGHLE
IVEVLLKNGADVNAYDYIGWIPLHLAADGHLEIVEVLLKNGADVNASDYIGDTPLHLAAHNGHLEIVEVLLKHGA
DVNAQDKFGKTAFDISIDNGNEDLAEILQKLN(SGSGSGKPGQASGS)ELARKLLEASTKLQRLNIRLAEALLEA
IARLQELNLELVYLAVELTDPKRIRDEIKEVKDKSKEIIRRAEKEIDDAAKESEKILEEAREAISGSGSELAKLL
LKAIAETQDLNLRAAKAFLEAAAKLQELNIRAVELLVKLTDPATIREALEHAKRRSKEIIDEAERAIRAAKRESE
RIIEEARRLIEKGSGSGSELARELLRAHAQLQRLNLELLRELLRALAQLQELNLDLLRLASELRDHMVLHEYVNA
AGITFNAYYADAERLIREAAAASEKISREAER
>EGER_Decoy_G29 Tuned Decoy targeted to EGFR by DARPin SEQ ID NO: 27426
(MGSHHHHHHGSGSENLYFQGSGGS)DLGKKLLEAARAGQDDEVRILMANGADVNADDIWGWIPLHLAAYQGHLE
IVEVLLKNGADVNAYDYIGWIPLHLAADGHLEIVEVLLKNGADVNASDYIGDTPLHLAAHNGHLEIVEVLLKHGA
DVNAQDKFGKTAFDISIDNGNEDLAEILQKLN(SGSGSGKPGQASGS)ELARKLLEASTKLQRLNIRLAEALLEA
IARLQELNLELVYLAVELTDPKRIRDEIKEVKDKSKEIIRRAEKEIDDAAKESEKILEEAREAISGSGSELAKLL
LKAIAETQDLNLRAAKAFLEAAAKLQELNIRAVELLVKLTDPATIREALEHAKRRSKEIIDEAERAIRAAKRESE
RIIEEARRLIEKGSGSGSELARELLRAHAQLQRLNLELLRELLRALAQLQELNLDLLRLASELTDPDEARKAIAR
VKRESNAYYADAERLSREAAAASEKISREAERLIR
>EGER_Decoy_G31 Tuned Decoy targeted to EGFR by DARPin SEQ ID NO: 27427
(MGSHHHHHHGSGSENLYFQGSGGS)DLGKKLLEAARAGQDDEVRILMANGADVNADDIWGWIPLHLAAYQGHLE
IVEVLLKNGADVNAYDYIGWIPLHLAADGHLEIVEVLLKNGADVNASDYIGDTPLHLAAHNGHLEIVEVLLKHGA
DVNAQDKFGKTAFDISIDNGNEDLAEILQKLN(SGSGSGKPGQASGS)ELARKLLEASTKLQRLNIRLAEALLEA
IARLQELNLELVYLAVELTDPKRIRDEIKEVKDKSKEIIRRAEKEIDDAAKESEKILEEAREAISGSGSELAKLL
LKAIAETQDLNLRAAKAFLEAAAKLQELNIRAVELLVKLTDPATIREALEHAKRRSKEIIDEAERAIRAAKRESE
RIIEEARRLIEKGSGSGSELARELLRAHAQAQRLNLELLRELLRALAQLQELNLDLLRLASELGTDPDEARKAIA
RVKRESNAYYADAERLSREAAAASEKISREAERLIR
>EGER_Decoy_G33 Tuned Decoy targeted to EGFR by DARPin SEQ ID NO: 27428
(MGSHHHHHHGSGSENLYFQGSGGS)DLGKKLLEAARAGQDDEVRILMANGADVNADDIWGWIPLHLAAYQGHLE
IVEVLLKNGADVNAYDYIGWIPLHLAADGHLEIVEVLLKNGADVNASDYIGDTPLHLAAHNGHLEIVEVLLKHGA
DVNAQDKFGKTAFDISIDNGNEDLAEILQKLN(SGSGSGKPGQASGS)ELARKLLEASTKLQRLNIRLAEALLEA
IARLQELNLELVYLAVELTDPKRIRDEIKEVKDKSKEIIRRAEKEIDDAAKESEKILEEAREAISGSGSELAKLL
LKAIAETQDLNLRAAKAFLEAAAKLQELNIRAVELLVKLTDPATIREALEHAKRRSKEIIDEAERAIRAAKRESE
RIIEEARRLIEKGSGSGSELARELLRAHAQLQRLNLELLRELLRALAQLQELNLDLLRLASELGTDPDEARKAIA
RVKRESNAYYADAERLSREAAAASEKISREAG
>EGER_Decoy_G34 Tuned Decoy targeted to EGFR by DARPin SEQ ID NO: 27429
(MGSHHHHHHGSGSENLYFQGSGGS)DLGKKLLEAARAGQDDEVRILMANGADVNADDIWGWIPLHLAAYQGHLE
IVEVLLKNGADVNAYDYIGWIPLHLAADGHLEIVEVLLKNGADVNASDYIGDTPLHLAAHNGHLEIVEVLLKHGA
DVNAQDKFGKTAFDISIDNGNEDLAEILQKLN(SGSGSGKPGQASGS)ELARKLLEASTKLQRLNIRLAEALLEA
IARLQELNLELVYLAVELTDPKRIRDEIKEVKDKSKEIIRRAEKEIDDAAKESEKILEEAREAISGSGSELAKLL
LKAIAETQDLNLRAAKAFLEAAAKLQELNIRAVELLVKLTDPATIREALEHAKRRSKEIIDEAERAIRAAKRESE
RIIEEARRLIEKGSGSGSELARELLRAHAQLQRLNLELLRELLRALAQLQELNLDLLRLASELGTDPDEARKAIA
RVKRESNAYYADAERLSREAAAASEKISREAER
>EGER_Decoy_G35 Tuned Decoy targeted to EGFR by DARPin SEQ ID NO: 27430
(MGSHHHHHHGSGSENLYFQGSGGS)DLGKKLLEAARAGQDDEVRILMANGADVNADDIWGWIPLHLAAYQGHLE
IVEVLLKNGADVNAYDYIGWIPLHLAADGHLEIVEVLLKNGADVNASDYIGDTPLHLAAHNGHLEIVEVLLKHGA
DVNAQDKFGKTAFDISIDNGNEDLAEILQKLN(SGSGSGKPGQASGS)ELARKLLEASTKLQRLNIRLAEALLEA
IARLQELNLELVYLAVELTDPKRIRDEIKEVKDKSKEIIRRAEKEIDDAAKESEKILEEAREAISGSGSELAKLL
LKAIAETQDLNLRAAKAFLEAAAKLQELNIRAVELLVKLTDPATIREALEHAKRRSKEIIDEAERAIRAAKRESE
RIIEEARRLIEKGSGSGSELARELLRAHAQLQRLNLELLRELLRALAQLQELNLDLLRLASELGTDPDEARKAIA
RVKRESNAYYADAERLSREAAAASEKISREAERLI
>EGER_Decoy_G7(1A7) Tuned Decoy targeted to EGFR by DARPin SEQ ID
NO: 27431
(MGSHHHHHHGSGSENLYFQGSGGS)DLGKKLLEAARAGQDDEVRILMANGADVNADDIWGWIPLHLAAYQGHLE
IVEVLLKNGADVNAYDYIGWIPLHLAADGHLEIVEVLLKNGADVNASDYIGDTPLHLAAHNGHLEIVEVLLKHGA
DVNAQDKFGKTAFDISIDNGNEDLAEILQKLN(SGSGSGKPGQASGS)ELARKLLEASTKLQRLNIRLAEALLEA
IARLQELNLELVYLAVELTDPKRIRDEIKEVKDKSKEIIRRAEKEIDDAAKESEKILEEAREAISGSGSELAKLL
LKAIAETQDLNLRAAKAFLEAAAKLQELNIRAVELLVKLTDPATIREALEHAKRRSKEIIDEAERAIRAAKRESE
RIIEEARRLIEKGSGSGSELARELLRAHAQLQRLNLELLRELLRALAQLQELNLDLLRLASELGTDPDEARKAIA
RVKRESNAYYADAERLSREAAAASEKISREAERLIR
>EGER_Decoy_Box1C1 Tuned Decoy targeted to EGFR by DARPin SEQ ID
NO: 27432
(MGSHHHHHHGSGSENLYFQGSGGS)DLGKKLLEAARAGQDDEVRILMANGADVNADDIWGWIPLHLAAYQGHLE
IVEVLLKNGADVNAYDYIGWIPLHLAADGHLEIVEVLLKNGADVNASDYIGDTPLHLAAHNGHLEIVEVLLKHGA
DVNAQDKFGKTAFDISIDNGNEDLAEILQKLN(SGSGSGKPGQASGS)ELARKLLEASTKLQRLNIRLAEALLEA
IARLQELNLELVYLAVELTDPKRIRDEIKEVKDKSKEIIRRAEKEIDDAAKESEKILEEAREAISGSGSELAKLL
LKAIAETQDLNLRAAKAFLEAAAKLQELNIRAVELLVKLTDPATIREALEHAKRRSKEIIDEAERAIRAAKRESE
RIIEEARRLIEKGSGSGSELARELLRAHAQLQRLNLELLRELLRALAQLQELNLDLLRLASELGTDPDEARKAIA
RVKRESNAYYADAERLIREAAAASEKISREAERLIR
>EGER_Decoy3 Tuned Decoy targeted to EGFR by DARPin SEQ ID
NO: 27433
(MGSHHHHHHGSGSENLYFQGSGGS)DLGKKLLEAARAGQDDEVRILMANGADVNADDIWGWIPLHLAAYQGHLE
IVEVLLKNGADVNAYDYIGWIPLHLAADGHLEIVEVLLKNGADVNASDYIGDTPLHLAAHNGHLEIVEVLLKHGA
DVNAQDKFGKTAFDISIDNGNEDLAEILQKLN(SGSGSGKPGQASGS)ELARKLLEASTKLQRLNIRLAEALLEA
IARLQELNLELVYLAVELTDPKRIRDEIKEVKDKSKEIIRRAEKEIDDAAKESEKILEEAREAISGSGSELAKLL
LKAIAETQDLNLRAAKAFLEAAAKLQELNIRAVELLVKLTDPATIREALEHAKRRSKEIIDEAERAIRAAKRESE
RIIEEARRLIEKGSGSGSELARELLRAHAQLQRLNLELLRELLRALAQLQELNLDLLRLASELGTDPDEARKAIA
RVKRESNAYYADAERLSREAAAASEKISREAERLAR
>EGER_Decoy5 Tuned Decoy targeted to EGFR by DARPin SEQ ID NO: 27434
(MGSHHHHHHGSGSENLYFQGSGGS)DLGKKLLEAARAGQDDEVRILMANGADVNADDIWGWIPLHLAAYQGHLE
IVEVLLKNGADVNAYDYIGWIPLHLAADGHLEIVEVLLKNGADVNASDYIGDTPLHLAAHNGHLEIVEVLLKHGA
DVNAQDKFGKTAFDISIDNGNEDLAEILQKLN(SGSGSGKPGQASGS)ELARKLLEASTKLQRLNIRLAEALLEA
IARLQELNLELVYLAVELTDPKRIRDEIKEVKDKSKEIIRRAEKEIDDAAKESEKILEEAREAISGSGSELAKLL
LKAIAETQDLNLRAAKAFLEAAAKLQELNIRAVELLVKLTDPATIREALEHAKRRSKEIIDEAERAIRAAKRESE
RIIEEARRLIEKGSGSGSELARELLRAHAQLQRLNLELLRELLRALAQLQELNLDLLRLASELGTDPDEARKAIA
RVKRESNAYYADAERLIREAAAASEKISREAERLAR
>EGER_Decoy7 Tuned Decoy targeted to EGFR by DARPin SEQ ID
NO: 27435
(MGSHHHHHHGSGSENLYFQGSGGS)DLGKKLLEAARAGQDDEVRILMANGADVNADDIWGWIPLHLAAYQGHLE
IVEVLLKNGADVNAYDYIGWIPLHLAADGHLEIVEVLLKNGADVNASDYIGDTPLHLAAHNGHLEIVEVLLKHGA
DVNAQDKFGKTAFDISIDNGNEDLAEILQKLN(SGSGSGKPGQASGS)ELARKLLEASTKLQRLNIRLAEALLEA
IARLQELNLELVYLAVELTDPKRIRDEIKEVKDKSKEIIRRAEKEIDDAAKESEKILEEAREAISGSGSELAKLL
LKAIAETQDLNLRAAKAFLEAAAKLQELNIRAVELLVKLTDPATIREALEHAKRRSKEIIDEAERAIRAAKRESE
RIIEEARRLIEKGSGSGSELARELLRAHAQLQRLNLELLRELLRALAQLQELNLDLLRLASELTDPDEARKAIAR
VKRESNAYYADAERLSREAAAASEKISREAERLAR
>EGER_Decoy8 Tuned Decoy targeted to EGFR by DARPin SEQ ID NO: 27436
(MGSHHHHHHGSGSENLYFQGSGGS)DLGKKLLEAARAGQDDEVRILMANGADVNADDIWGWIPLHLAAYQGHLE
IVEVLLKNGADVNAYDYIGWIPLHLAADGHLEIVEVLLKNGADVNASDYIGDTPLHLAAHNGHLEIVEVLLKHGA
DVNAQDKFGKTAFDISIDNGNEDLAEILQKLN(SGSGSGKPGQASGS)ELARKLLEASTKLQRLNIRLAEALLEA
IARLQELNLELVYLAVELTDPKRIRDEIKEVKDKSKEIIRRAEKEIDDAAKESEKILEEAREAISGSGSELAKLL
LKAIAETQDLNLRAAKAFLEAAAKLQELNIRAVELLVKLTDPATIREALEHAKRRSKEIIDEAERAIRAAKRESE
RIIEEARRLIEKGSGSGSELARELLRAHAQLQRLNLELLRELLRALAQLQELNLDLLRLASELTDPDEARKAIAR
VKRESNAYYADAERLSREAAAASEKISREAERLIR
>EGER_Decoy9 Tuned Decoy targeted to EGFR by DARPin SEQ ID
NO: 27437
(MGSHHHHHHGSGSENLYFQGSGGS)DLGKKLLEAARAGQDDEVRILMANGADVNADDIWGWIPLHLAAYQGHLE
IVEVLLKNGADVNAYDYIGWIPLHLAADGHLEIVEVLLKNGADVNASDYIGDTPLHLAAHNGHLEIVEVLLKHGA
DVNAQDKFGKTAFDISIDNGNEDLAEILQKLN(SGSGSGKPGQASGS)ELARKLLEASTKLQRLNIRLAEALLEA
IARLQELNLELVYLAVELTDPKRIRDEIKEVKDKSKEIIRRAEKEIDDAAKESEKILEEAREAISGSGSELAKLL
LKAIAETQDLNLRAAKAFLEAAAKLQELNIRAVELLVKLTDPATIREALEHAKRRSKEIIDEAERAIRAAKRESE
RIIEEARRLIEKGSGSGSELARELLRAHAQLQRLNLELLRELLRALAQLQELNLDLLRLASELTDPDEARKAIAR
VKRESNAYYADAERLIREAAAASEKISREAERLIR
>EGER_Decoy10 Tuned Decoy targeted to EGFR by DARPin SEQ ID
NO: 27438
(MGSHHHHHHGSGSENLYFQGSGGS)DLGKKLLEAARAGQDDEVRILMANGADVNADDIWGWIPLHLAAYQGHLE
IVEVLLKNGADVNAYDYIGWIPLHLAADGHLEIVEVLLKNGADVNASDYIGDTPLHLAAHNGHLEIVEVLLKHGA
DVNAQDKFGKTAFDISIDNGNEDLAEILQKLN(SGSGSGKPGQASGS)ELARKLLEASTKLQRLNIRLAEALLEA
IARLQELNLELVYLAVELTDPKRIRDEIKEVKDKSKEIIRRAEKEIDDAAKESEKILEEAREAISGSGSELAKLL
LKAIAETQDLNLRAAKAFLEAAAKLQELNIRAVELLVKLTDPATIREALEHAKRRSKEIIDEAERAIRAAKRESE
RIIEEARRLIEKGSGSGSELARELLRAHAQLQRLNLELLRELLRALAQLQELNLDLLRLASELGSEDLYFQGSTD
PDEARKAIARVKRESNAYYADAERLSREAAAASEKISREAERLAR
>EGER_Decoy11 Tuned Decoy targeted to EGFR by DARPin SEQ ID
NO: 27439
(MGSHHHHHHGSGSENLYFQGSGGS)DLGKKLLEAARAGQDDEVRILMANGADVNADDIWGWIPLHLAAYQGHLE
IVEVLLKNGADVNAYDYIGWIPLHLAADGHLEIVEVLLKNGADVNASDYIGDTPLHLAAHNGHLEIVEVLLKHGA
DVNAQDKFGKTAFDISIDNGNEDLAEILQKLN(SGSGSGKPGQASGS)ELARKLLEASTKLQRLNIRLAEALLEA
IARLQELNLELVYLAVELTDPKRIRDEIKEVKDKSKEIIRRAEKEIDDAAKESEKILEEAREAISGSGSELAKLL
LKAIAETQDLNLRAAKAFLEAAAKLQELNIRAVELLVKLTDPATIREALEHAKRRSKEIIDEAERAIRAAKRESE
RIIEEARRLIEKGSGSGSELARELLRAHAQLQRLNLELLRELLRALAQLQELNLDLLRLASELGSEDLYFQGSTD
PDEARKAIARVKRESNAYYADAERLSREAAAASEKISREAERLIR
>EGER_Decoy12 Tuned Decoy targeted to EGFR by DARPin SEQ ID
NO: 27440
(MGSHHHHHHGSGSENLYFQGSGGS)DLGKKLLEAARAGQDDEVRILMANGADVNADDIWGWIPLHLAAYQGHLE
IVEVLLKNGADVNAYDYIGWIPLHLAADGHLEIVEVLLKNGADVNASDYIGDTPLHLAAHNGHLEIVEVLLKHGA
DVNAQDKFGKTAFDISIDNGNEDLAEILQKLN(SGSGSGKPGQASGS)ELARKLLEASTKLQRLNIRLAEALLEA
IARLQELNLELVYLAVELTDPKRIRDEIKEVKDKSKEIIRRAEKEIDDAAKESEKILEEAREAISGSGSELAKLL
LKAIAETQDLNLRAAKAFLEAAAKLQELNIRAVELLVKLTDPATIREALEHAKRRSKEIIDEAERAIRAAKRESE
RIIEEARRLIEKGSGSGSELARELLRAHAQLQRLNLELLRELLRALAQLQELNLDLLRLASELGSEDLYFQGSTD
PDEARKAIARVKRESNAYYADAERLIREAAAASEKISREAERLAR
>EGER_Decoy13 Tuned Decoy targeted to EGFR by DARPin SEQ ID
NO: 27441
(MGSHHHHHHGSGSENLYFQGSGGS)DLGKKLLEAARAGQDDEVRILMANGADVNADDIWGWIPLHLAAYQGHLE
IVEVLLKNGADVNAYDYIGWIPLHLAADGHLEIVEVLLKNGADVNASDYIGDTPLHLAAHNGHLEIVEVLLKHGA
DVNAQDKFGKTAFDISIDNGNEDLAEILQKLN(SGSGSGKPGQASGS)ELARKLLEASTKLQRLNIRLAEALLEA
IARLQELNLELVYLAVELTDPKRIRDEIKEVKDKSKEIIRRAEKEIDDAAKESEKILEEAREAISGSGSELAKLL
LKAIAETQDLNLRAAKAFLEAAAKLQELNIRAVELLVKLTDPATIREALEHAKRRSKEIIDEAERAIRAAKRESE
RIIEEARRLIEKGSGSGSELARELLRAHAQLQRLNLELLRELLRALAQLQELNLDLLRLASELGSEDLYFQGSTD
PDEARKAIARVKRESNAYYADAERLIREAAAASEKISREAERLIR
>EGER_Decoy14 Tuned Decoy targeted to EGFR by DARPin SEQ ID
NO: 27442
(MGSHHHHHHGSGSENLYFQGSGGS)DLGKKLLEAARAGQDDEVRILMANGADVNADDIWGWIPLHLAAYQGHLE
IVEVLLKNGADVNAYDYIGWIPLHLAADGHLEIVEVLLKNGADVNASDYIGDTPLHLAAHNGHLEIVEVLLKHGA
DVNAQDKFGKTAFDISIDNGNEDLAEILQKLN(SGSGSGKPGQASGS)ELARKLLEASTKLQRLNIRLAEALLEA
IARLQELNLELVYLAVELTDPKRIRDEIKEVKDKSKEIIRRAEKEIDDAAKESEKILEEAREAISGSGSELAKLL
LKAIAETQDLNLRAAKAFLEAAAKLQELNIRAVELLVKLTDPATIREALEHAKRRSKEIIDEAERAIRAAKRESE
RIIEEARRLIEKGSGSGSELARELLRAHAQLQRLNLELLRELLRALAQLQELNLDLLRLASELTDPDEARKAIAR
VKRESNAYYADAERLIREAAAASEKISREAERLIR
>EGER_Decoy_G27 Tuned Decoy targeted to EGFR by DARPin SEQ ID
NO: 27443
(MGSHHHHHHGSGSENLYFQGSGGS)DLGKKLLEAARAGQDDEVRILMANGADVNADDIWGWIPLHLAAYQGHLE
IVEVLLKNGADVNAYDYIGWIPLHLAADGHLEIVEVLLKNGADVNASDYIGDTPLHLAAHNGHLEIVEVLLKHGA
DVNAQDKFGKTAFDISIDNGNEDLAEILQKLN(SGSGSGKPGQASGS)ELARKLLEASTKLQRLNIRLAEALLEA
IARLQELNLELVYLAVELTDPKRIRDEIKEVKDKSKEIIRRAEKEIDDAAKESEKILEEAREAISGSGSELAKLL
LKAIAETQDLNLRAAKAFLEAAAKLQELNIRAVELLVKLTDPATIREALEHAKRRSKEIIDEAERAIRAAKRESE
RIIEEARRLIEKGSGSGSELARELLRAHAQLQRLNLELLRELLRALAQLQELNLDLLRLASELRDHMVLHEYVNA
AGITFNAYYADAERLIREAAAASEKISREAERLI
>EGER_Decoy_G28 Tuned Decoy targeted to EGFR by DARPin SEQ ID
NO: 27444
(MGSHHHHHHGSGSENLYFQGSGGS)DLGKKLLEAARAGQDDEVRILMANGADVNADDIWGWIPLHLAAYQGHLE
IVEVLLKNGADVNAYDYIGWIPLHLAADGHLEIVEVLLKNGADVNASDYIGDTPLHLAAHNGHLEIVEVLLKHGA
DVNAQDKFGKTAFDISIDNGNEDLAEILQKLN(SGSGSGKPGQASGS)ELARKLLEASTKLQRLNIRLAEALLEA
IARLQELNLELVYLAVELTDPKRIRDEIKEVKDKSKEIIRRAEKEIDDAAKESEKILEEAREAISGSGSELAKLL
LKAIAETQDLNLRAAKAFLEAAAKLQELNIRAVELLVKLTDPATIREALEHAKRRSKEIIDEAERAIRAAKRESE
RIIEEARRLIEKGSGSGSELARELLRAHAQLQRLNLELLRELLRALAQLQELNLDLLRLASELRDHMVLHEYVNA
AGITFNAYYADAERLIREAAAASEKISREAERLIR
>EGER_Decoy_G30 Tuned Decoy targeted to EGFR by DARPin SEQ ID
NO: 27445
(MGSHHHHHHGSGSENLYFQGSGGS)DLGKKLLEAARAGQDDEVRILMANGADVNADDIWGWIPLHLAAYQGHLE
IVEVLLKNGADVNAYDYIGWIPLHLAADGHLEIVEVLLKNGADVNASDYIGDTPLHLAAHNGHLEIVEVLLKHGA
DVNAQDKFGKTAFDISIDNGNEDLAEILQKLN(SGSGSGKPGQASGS)ELARKLLEASTKLQRLNIRLAEALLEA
IARLQELNLELVYLAVELTDPKRIRDEIKEVKDKSKEIIRRAEKEIDDAAKESEKILEEAREAISGSGSELAKLL
LKAIAETQDLNLRAAKAFLEAAAKLQELNIRAVELLVKLTDPATIREALEHAKRRSKEIIDEAERAIRAAKRESE
RIIEEARRLIEKGSGSGSELARELLRAHAQLQRLNLELLRELLRALAQLQELNLDLLRLASELGTDPDEARKAIA
RVKRESNAYYADAERLSREAAAASEKISREAERLSR
>EGER_Decoy_G32 Tuned Decoy targeted to EGFR by DARPin SEQ ID
NO: 27446
(MGSHHHHHHGSGSENLYFQGSGGS)DLGKKLLEAARAGQDDEVRILMANGADVNADDIWGWIPLHLAAYQGHLE
IVEVLLKNGADVNAYDYIGWIPLHLAADGHLEIVEVLLKNGADVNASDYIGDTPLHLAAHNGHLEIVEVLLKHGA
DVNAQDKFGKTAFDISIDNGNEDLAEILQKLN(SGSGSGKPGQASGS)ELARKLLEASTKLQRLNIRLAEALLEA
IARLQELNLELVYLAVELTDPKRIRDEIKEVKDKSKEIIRRAEKEIDDAAKESEKILEEAREAISGSGSELAKLL
LKAIAETQDLNLRAAKAFLEAAAKLQELNIRAVELLVKLTDPATIREALEHAKRRSKEIIDEAERAIRAAKRESE
RIIEEARRLIEKGSGSGSELARELLRAHAQLQRLNLEALRELLRALAQLQELNLDLLRLASELGTDPDEARKAIA
RVKRESNAYYADAERLSREAAAASEKISREAERLIR

TABLE 12
Co-LOCKR Key proteins

>HA_Key_Her2 HA-tagged original Key targeted to Her2 by DARPin SEQ ID
NO: 27448
(MGSHHHHHHGSGSENLYFQGSYPYDVPDYAGGS)DEARKAIARVKRESKRIVEDAERLIREAAAASEKISREAE
RLIR(GGGSGSGSGSGKPGQASGS)DLGKKLLEAARAGQDDEVRILMANGADVNAKDEYGLIPLYLATAHGHLEI
VEVLLKNGADVNAVDAIGFTPLHLAAFIGHLEIAEVLLKHGADVNAQDKEGKTAFDISIGNGNEDLAEILQKLN
>Key_EGFR Original Key targeted to EGFR by DARPin SEQ ID NO: 27449
(MGSHHHHHHGSGSENLYFQGSGGS)DEARKAIARVKRESKRIVEDAERLIREAAAASEKISREAERLIR(GGGS
GSGSGSGKPGQASGS)DLGKKLLEAARAGQDDEVRILMANGADVNADDIWGWIPLHLAAYQGHLEIVEVLLKNGA
DVNAYDYIGWTPLHLAADGHLEIVEVLLKNGADVNASDYIGDTPLHLAAHNGHLEIVEVLLKHGADVNAQDKEGK
TAFDISIDNGNEDLAEILQKLN
>Key_EpCAM Original Key targeted to EpCAM by DARPin SEQ ID NO: 27450
(MGSHHHHHHGSGSENLYFQGSGGS)DEARKAIARVKRESKRIVEDAERLIREAAAASEKISREAERLIR(GGGS
GSGSGSGKPGQASGS)DLGKKLLEAARAGQDDEVRILVANGADVNAYEGTTPLHLAAAHGRLEIVEVLLKNGADV
NAQDVWGITPLHLAAYNGHLEIVEVLLKYGADVNAHDIRGWIPLHLAAINGHLEIVEVLLKNVADVNAQDRSGKT
PFDLAIDNGNEDIAEVLQKAAKLN
>Key_N3_EpCAM Tuned Key targeted to EpCAM by DARPin (3 aa deletion near
N-term of Key) SEQ ID NO: 27451
(MGSHHHHHHGSGSENLYFQGSGGS)DEAIARVKRESKRIVEDAERLIREAAAASEKISREAERLIR(GGGSGSG
SGSGKPGQASGS)DLGKKLLEAARAGQDDEVRILVANGADVNAYEGTTPLHLAAAHGRLEIVEVLLKNGADVNAQ
DVWGITPLHLAAYNGHLEIVEVLLKYGADVNAHDIRGWIPLHLAAINGHLEIVEVLLKNVADVNAQDRSGKTPFD
LAIDNGNEDIAEVLQKAAKLN
>Key_N7_EpCAM Tuned Key targeted to EpCAM by DARPin (7 aa deletion near
N-term of Key) SEQ ID NO: 27452
(MGSHHHHHHGSGSENLYFQGSGGS)DEVKRESKRIVEDAERLIREAAAASEKISREAERLIR(GGGSGSGSGSG
KPGQASGS)DLGKKLLEAARAGQDDEVRILVANGADVNAYEGTTPLHLAAAHGRLEIVEVLLKNGADVNAQDVWG
ITPLHLAAYNGHLEIVEVLLKYGADVNAHDIRGWIPLHLAAINGHLEIVEVLLKNVADVNAQDRSGKTPFDLAID
NGNEDIAEVLQKAAKLN
>Key_T7_EpCAM Tuned Key targeted to EpCAM by DARPin (7 aa deletion near
C-term of Key) SEQ ID NO: 27453
(MGSHHHHHHGSGSENLYFQGSGGS)DEARKAIARVKRESKRIVEDAERLIREAAAASEKISR(GGGSGSGSGSG
KPGQASGS)DLGKKLLEAARAGQDDEVRILVANGADVNAYEGTTPLHLAAAHGRLEIVEVLLKNGADVNAQDVWG
ITPLHLAAYNGHLEIVEVLLKYGADVNAHDIRGWIPLHLAAINGHLEIVEVLLKNVADVNAQDRSGKTPFDLAID
NGNEDIAEVLQKAAKLN
>Key_N3_Her2 Tuned Key targeted to Her2 by DARPin (3 aa deletion near
N-term of Key) SEQ ID NO: 27454
(MGSHHHHHHGSGSENLYFQGSGGS)DEAIARVKRESKRIVEDAERLIREAAAASEKISREAERLIR(GGGSGSG
SGSGKPGQASGS)DLGKKLLEAARAGQDDEVRILMANGADVNAKDEYGLIPLYLATAHGHLEIVEVLLKNGADVN
AVDAIGFTPLHLAAFIGHLEIAEVLLKHGADVNAQDKEGKTAFDISIGNGNEDLAEILQKLN
>Key_N3_EGFR Tuned Key targeted to EGFR by DARPin (3 aa deletion near
N-term of Key) SEQ ID NO: 27455
(MGSHHHHHHGSGSENLYFQGSGGS)DEAIARVKRESKRIVEDAERLIREAAAASEKISREAERLIR(GGGSGSG
SGSGKPGQASGS)DLGKKLLEAARAGQDDEVRILMANGADVNADDIWGWIPLHLAAYQGHLEIVEVLLKNGADVN
AYDYIGWTPLHLAADGHLEIVEVLLKNGADVNASDYIGDTPLHLAAHNGHLEIVEVLLKHGADVNAQDKEGKTAF
DISIDNGNEDLAEILQKLN
>Key anti-EGFR-scFv Original Key targeted to EGFR by an anti-EGFR scFv
SEQ ID NO: 27456
(METDILLLWVLLLWVPGSTGDYKDEHHHHHHGGSENLYFQGSGS)DEARKAIARVKRESKRIVEDAERLIREAA
AASEKISREAERLIR(GGGSGSGSGSGKPGQASGS)QVQLKQSGPGLVQPSQSLSITCTVSGFSLTNYGVHWVRQ
SPGKGLEWLGVIWSGGNIDYNTPFTSRLSINKDNSKSQVFFKMNSLQSNDTAIYYCARALTYYDYEFAYWGQGIL
VIVSAGGGGSGGGGSGGGGSDILLTQSPVILSVSPGERVSFSCRASQSIGINIHWYQQRTNGSPRLLIKYASESI
SGIPSRFSGSGSGTDFILSINSVESEDIADYYCQQNNNWPTIFGAGTKLELKRT
>Key_T3_EpCAM Tuned Key targeted to EpCAM by DARPin (3 aa deletion near
C-term of Key) SEQ ID NO: 27457
(MGSHHHHHHGSGSENLYFQGSGGS)DEARKAIARVKRESKRIVEDAERLIREAAAASEKISREAER(GGGSGSG
SGSGKPGQASGS)DLGKKLLEAARAGQDDEVRILVANGADVNAYEGTTPLHLAAAHGRLEIVEVLLKNGADVNAQ
DVWGITPLHLAAYNGHLEIVEVLLKYGADVNAHDIRGWIPLHLAAINGHLEIVEVLLKNVADVNAQDRSGKTPFD
LAIDNGNEDIAEVLQKAAKLN
>Key_EpCAM_I35S_I43A Tuned Key targeted to EpCAM by DARPin (I35S, I43A)
SEQ ID NO: 27458
(MGSHHHHHHGSGSENLYFQGSGGS)DEARKAIARVKRESKRIVEDAERLIREAAAASEKSSREAERLAR(GGGS
GSGSGSGKPGQASGS)DLGKKLLEAARAGQDDEVRILVANGADVNAYFGTTPLHLAAAHGRLEIVEVLLKNGADV
NAQDVWGITPLHLAAYNGHLEIVEVLLKYGADVNAHDIRGWIPLHLAAINGHLEIVEVLLKNVADVNAQDRSGKT
PFDLAIDNGNEDIAEVLQKAAKLN
>Key_EGFR_EpCAM Key targets both EGFR and EpCAM SEQ ID NO: 27459
(MGSHHHHHHGSGSENLYFQGSGGS)DEARKAIARVKRESKRIVEDAERLIREAAAASEKISREAERLIR(GGGS
GSGSGSGKPGQASGS)DLGKKLLEAARAGQDDEVRILMANGADVNADDIWGWIPLHLAAYQGHLEIVEVLLKNGA
DVNAYDYIGWIPLHLAADGHLEIVEVLLKNGADVNASDYIGDTPLHLAAHNGHLEIVEVLLKHGADVNAQDKFGK
TAFDISIDNGNEDLAEILQKLN(GGGSGGGS)DLGKKLLEAARAGQDDEVRILVANGADVNAYFGTTPLHLAAAH
GRLEIVEVLLKNGADVNAQDVWGITPLHLAAYNGHLEIVEVLLKYGADVNAHDIRGWIPLHLAAINGHLEIVEVL
LKNVADVNAQDRSGKTPFDLAIDNGNEDIAEVLQKAAKLN

TABLE 13
Effector proteins

>Bcl2-cys (SEQ ID NO: 27460)
(MGSHHHHHHGSGSENLYFQGSGGS)AHAGRTGYDNREIVMKYIHYKLSQRGYEWDAGDVGAAPPGAAPAPGIFS
SQPGHTPHPAASRDPVARTSPLQTPAAPGAAAGPALSPVPPVVHLTLRQAGDDFSRRYRRDFAEMSSQLHLTPFT
ARGRFATVVEELFRDGVNWGRIVAFFEFGGVMCVESVNREMSPLVDNIALWMTEYLNRHLHTWIQDNGGWDAFVE
LYGPSMRGC
>GFP1-10 (SEQ ID NO: 27461)
(M)SKGEELFTGVVPILVELDGDVNGHKESVRGEGEGDATIGKLTLKFICTTGKLPVPWPTLVTTLTYGVQCFSR
YPDHMKRHDFFKSAMPEGYVQERTISFKDDGKYKTRAVVKFEGDTLVNRIELKGTDFKEDGNILGHKLEYNENSH
NVYITADKQKNGIKANFTVRHNVEDGSVQLADHYQQNTPIGDGPVLLPDNHYLSTQTVLSKDPNEK
>Bcl2_opt1 (SEQ ID NO: 27462)
AHAGRTGYDNREIVMKYIHYKLSQRGYEWDAGDDAEEGRTEAPEGTESEVVHLTLRQAGDDFSRRYRRDFAEMSS
QLHLTPFTARGRFATVVEELFRDGVNWGRIVAFFEFGGVMCVESVNREMSPLVDNIALWMTEYLNRHLHTWIQDN
GGWDAFVELYGPSMR
>Bcl2_opt2 (SEQ ID NO: 27463)
AHAGRTGYDNREIVMKYIHYKLSQRGYEWDAGDDAEEGSGSGSGTESEVVHLTLRQAGDDFSRRYRRDFAEMSSQ
LHLTPFTARGRFATVVEELFRDGVNWGRIVAFFEFGGVMCVESVNREMSPLVDNIALWMTEYLNRHLHTWIQDNG
GWDAFVELYGPSMR
>Bcl2_opt3 (SEQ ID NO: 27464)
AHAGRTGYDNREIVMKYIHYKLSQRGYEWDAGDDAEEGRTEAPEGTESEVVHQTLRQAGDDFERRYRRDFSDMSS
QLHLTPDTARGRFATVVEELFRDGVNWGRIVAFFEFGGVMCVESVNREMSPLVDRIADWMTEYLNRHLHPWIQDN
GGWDAFVELYGPSMR
>Bcl2_opt4 (SEQ ID NO: 27465)
AHAGRTGYDNREIVMKYIHYKLSQRGYEWDAGDDAEEGSGSGSGTESEVVHQTLRQAGDDFERRYRRDFSDMSSQ
LHLTPDTARQRFATVVEELFRDGVNWGRIVAFFEFGGVMCVESVNREMSPLVDRIADWMTEYLNRHLHPWIQDNG
GWDAFVELYGPSMR
>Bcl2_opt5 (SEQ ID NO: 27466)
AHAGRTGYDNREIVMKYIHYKLSQRGYEWDAGDDAEEGRTEAPEGTESEVVHQTLRQAGDDFERRYRRDFSDMSS
QLHLTPDTARQRFATVVEELFRDGVNWGRIVAFFEFGGVMAVEMVNRGGSPLVDRIADWMTEYLNRHLHPWIQDN
GGWDAFVELYGPSMR
>Bcl2_opt6 (SEQ ID NO: 27467)
AHAGRTGYDNREIVMKYIHYKLSQRGYEWDAGDDAEEGSGSGSGTESEVVHQTLRQAGDDFERRYRRDFSDMSSQ
LHLTPDTARQRFATVVEELFRDGVNWGRIVAFFEFGGVMAVEMVNRGGSPLVDRIADWMTEYLNRHLHPWIQDNG
GWDAFVELYGPSMR
>Bcl2_opt7 (SEQ ID NO: 27468)
AHAGRTGYDNREIVMKYIHYKLSQRGYEWDAGDDAEENRTEAPEGTESEVVHRALRDAGDDFERRYRRDFAEMSS
QLHLTPDTARQRFETVVEELFRDGVNWGRIVAFFEFGGVMCVESVNREMSPLVDNIAEWMTEYLNRHLHTWIQDN
GGWDAFVELYGPSMR
>Bcl2_opt8 (SEQ ID NO: 27469)
AHAGRTGYDNREIVRKYIHYKLSQRGYEWDAGDDAEEGSGSGSGTESEVVHRALRDAGDDFERRYRRDFAEMSSQ
LHLTPDTARQRFETVVEELFRDGVNWGRIVAFFEFGGVMCVECVNREMSPLVDNIAEWMTEYLNRHLHTWIQDNG
GWDAFVELYGPSMR

[0195] Nucleic Acids

[0196] The present disclosure provides one or more nucleic acids that encode a first cage polypeptide and/or one or more key polypeptides. In some aspects, the nucleic acid encoding a first cage polypeptide and the nucleic acid encoding a first key polypeptide are on the same vector. In some aspects, the nucleic acid encoding a first cage polypeptide and the nucleic acid encoding a first key polypeptide are on different vectors. In another aspect the disclosure provides nucleic acids encoding the fusion protein (e.g., chimeric antigen receptor) of any embodiment or combination of embodiments disclosed herein. The nucleic acids encoding a CAR can be on the same vector as the nucleic acid encoding the first cage polypeptide and/or one or more of the key polypeptides.

[0197] The nucleic acid sequence may comprise single stranded or double stranded RNA or DNA in genomic or cDNA form, or DNA-RNA hybrids, each of which may include chemically or biochemically modified, non-natural, or derivatized nucleotide bases. Such nucleic acid sequences may comprise additional sequences useful for promoting expression and/or purification of the encoded polypeptide, including but not limited to polyA sequences, modified Kozak sequences, and sequences encoding epitope tags, export signals, and secretory signals, nuclear localization signals, and plasma membrane localization signals. It will be apparent to those of skill in the art, based on the teachings herein, what nucleic acid sequences will encode the polypeptides of the disclosure.

[0198] In another aspect, the disclosure provides expression vectors comprising the nucleic acid of the disclosure operatively linked to a suitable control sequence. “Expression vector” includes vectors that operatively link a nucleic acid coding region or gene to any control sequences capable of effecting expression of the gene product. “Control sequences” operably linked to the nucleic acid sequences of the disclosure are nucleic acid sequences capable of effecting the expression of the nucleic acid molecules. The control sequences need not be contiguous with the nucleic acid sequences, so long as they function to direct the expression thereof. Thus, for example, intervening untranslated yet transcribed sequences can be present between a promoter sequence and the nucleic acid sequences and the promoter sequence can still be considered “operably linked” to the coding sequence. Other such control sequences include, but are not limited to, enhancers, introns, polyadenylation signals, termination signals, and ribosome binding sites. Such expression vectors can be of any type, including but not limited plasmid and viral-based expression vectors. The control sequence used to drive expression of the disclosed nucleic acid sequences in a mammalian system may be constitutive (driven by any of a variety of promoters, including but not limited to, CMV, SV40, RSV, actin, EF, EF1alpha, MND, MSCV) or inducible (driven by any of a number of inducible promoters including, but not limited to, tetracycline, ecdysone, steroid-responsive). The expression vector must be replicable in the host organisms either as an episome or by integration into host chromosomal DNA. In various embodiments, the expression vector may comprise a plasmid, viral-based vector, or any other suitable expression vector.

[0199] Cells In a further aspect, the disclosure provides host cells that comprise the nucleic acids, expression vectors (i.e.: episomal or chromosomally integrated), or polypeptides disclosed herein, wherein the host cells can be either prokaryotic or eukaryotic. The cells can be transiently or stably engineered to incorporate the expression vector of the disclosure, using techniques including but not limited to bacterial transformations, calcium phosphate co-precipitation, electroporation, or liposome mediated-, DEAE dextran mediated-, polycationic mediated-, or viral mediated transfection. In one embodiment, the viral vector comprises an adenoviral vector, a vaccinia viral vector, an AAV vector, a retroviral vector, a lentiviral vector, an alphaviral vector, or any combination thereof.

[0200] In one embodiment, the cells comprise T cells.

[0201] Chimeric Antigen Receptor T Cells

[0202] The present disclosure also provides a method of increasing tumor cell selectivity in a subject in need of a chimeric antigen receptor T cell therapy. In some aspects, the disclosure provides administering a CAR T cells. In some aspects, the CAR can be expressed as a fusion protein.

[0203] In another aspect, the disclosure provides CAR fusion proteins, comprising:

[0204] (a) an extracellular binding domain;

[0205] (b) a transmembrane domain;

[0206] (c) an intracellular signaling component; and

[0207] (d) optionally, a selection marker.

[0208] The fusion proteins can be used, for example, as a chimeric receptor antigen for use in generating cells, such as CAR-T cells, for use in the compositions of the disclosure described above. The fusion protein comprises an extracellular component comprising an binding domain specific for an antigen, such as the bioactive peptides as contemplated herein; an optional extracellular spacer domain to optimize binding; a transmembrane domain; and an intracellular signaling component comprising an intracellular activation domain (e.g., an immunoreceptor tyrosine-based activation motif (ITAM)-containing T cell activating motif), an intracellular costimulatory domain, or both. In certain embodiments, an intracellular signaling component of a CAR has an ITAM-containing T cell activating domain (e.g., CD3ζ) and an intracellular costimulatory domain (e.g., CD28, 41BB). In certain embodiments, a CAR is synthesized as a single polypeptide chain or is encoded by a nucleic acid molecule as a single chain polypeptide. In some aspects, the CARs useful for the present disclosure are capable of specifically binding to one or more bioactive peptides described elsewhere herein. In some aspects, the CARs of the present disclosure does not target a tumor antigen, but instead a bioactive peptide.

[0209] In any of the embodiments described herein, the chimeric antigen receptor may further comprise a self-cleaving polypeptide, wherein a polynucleotide encoding the self-cleaving polypeptide is located between the polynucleotide encoding the fusion protein and the polynucleotide encoding the transduction marker. In certain embodiments, a self-cleaving polypeptide comprises a 2A peptide from porcine teschovirus-1 (P2A), Thosea asigna virus (T2A), equine rhinitis A virus (E2A), foot-and-mouth disease virus (F2A), or variant thereof. Further exemplary nucleic acid and amino acid sequences of 2A peptides are set forth in, for example, Kim et al. (PLOS One 6:e18556 (2011), which 2A nucleic acid and amino acid sequences are incorporated herein by reference in their entirety).

[0210] In one embodiment, the extracellular component includes a binding domain specific to one or more bioactive molecule. In a further embodiment, the binding domain comprises a peptide, wherein the peptide may optionally be selected from the group consisting of Fab′, F(ab′)₂, Fab, Fv, rIgG, recombinant single chain Fv fragments (scFv), V_{H} single domains, bivalent or bispecific molecules, diabodies, triabodies, and tetrabodies; Bcl or a variant thereof; and computationally designed proteins. In another embodiment, the one or more bioactive molecule comprises one or more bioactive peptide. In exemplary embodiments, the one or more bioactive peptides comprise one or more bioactive peptide selected from the group consisting of SEQ ID NOS:60, 62-64, 66, 27052, 27053, and 27059-27093. In a further embodiment, the binding domain comprises a stabilized variant of human Bcl2.

[0211] In another embodiment, the fusion protein (e.g., chimeric antigen receptor) further comprises a selection marker. In non-limiting embodiments, the selection marker is a truncated EGFR (EGFRt), truncated low-affinity nerve growth factor (tNGFR), a truncated CD19 (tCD19), a truncated CD34 (tCD34), or any combination thereof. In another embodiment, the fusion protein further comprises a self-cleaving peptide. In non-limiting embodiments, the self-cleaving peptide is a 2A peptide from porcine teschovirus-1 (P2A), Thosea asigna virus (T2A), equine rhinitis A virus (E2A), foot-and-mouth disease virus (F2A), or variant thereof.

[0212] In one embodiment, the fusion protein (e.g., chimeric antigen receptor) comprises a stabilized variant of human Bcl2, a flexible extracellular spacer domain, CD28/CD3ζ signaling domains, and a truncated EGFR (EGFRt) selection marker linked by a T2A ribosomal skipping sequence. In a further embodiment, the fusion protein comprises an amino acid sequence at least 75%, 80%, 85%, 90%, 91%, 92%, 93%, 94%, 95%, 96%, 97%, 98%, 99%, or 100% to the amino acid sequence of SEQ ID NO: 27,489.

>Bcl2 CAR Co-LOCKR CAR T cell recruitment
SEQ ID NO: 27489
METDTLLLWVLLLWVPGSTGDYKDEYPYDVPDYAGSAHAGRTGYDNREI
VMKYIHYKLSQRGYEWDAGDDAEENRTEAPEGTESEVVHRALRDAGDDF
ERRYRRDFAEMSSQLHLTPDTARQRFETVVEELFRDGVNWGRIVAFFEF
GGVMCVESVNREMSPLVDNIAEWMTEYLNRHLHTWIQDNGGWDAFVELY
GPSMRGGGGSGGGGSESKYGPPCPPCPAPPVAGPSVFLFPPKPKDTLMI
SRTPEVTCVVVDVSQEDPEVQFNWYVDGVEVHNAKTKPREEQFQSTYRV
VSVLTVLHQDWLNGKEYKCKVSNKGLPSSIEKTISKAKGQPREPQVYTL
PPSQEEMTKNQVSLTCLVKGFYPSDIAVEWESNGQPENNYKTTPPVLDS
DGSFFLYSRLTVDKSRWQEGNVFSCSVMHEALHNHYTQKSLSLSLGKMF
WVLVVVGGVLACYSLLVTVAFTIFWVRSKRSRGGHSDYMNMTPRRPGPT
RKHYQPYAPPRDFAAYRSRVKFSRSADAPAYQQGQNQLYNELNLGRREE
YDVLDKRRGRDPEMGGKPRRKNPQEGLYNELQKDKMAEAYSEIGMKGER
RRGKGHDGLYQGLSTATKDTYDALHMQALPPRLEGGGEGRGSLLTCGDV
EENPGPRMLLLVTSLLLCELPHPAFLLIPRKVCNGIGIGEFKDSLSINA
TNIKHFKNCTSISGDLHILPVAFRGDSFTHTPPLDPQELDILKTVKEIT
GFLLIQAWPENRTDLHAFENLEIIRGRTKQHGQFSLAVVSLNITSLGLR
SLKEISDGDVIISGNKNLCYANTINWKKLFGTSGQKTKIISNRGENSCK
ATGQVCHALCSPEGCWGPEPRDCVSCRNVSRGRECVDKCNLLEGEPREF
VENSECIQCHPECLPQAMNITCTGRGPDNCIQCAHYIDGPHCVKTCPAG
VMGENNTLVWKYADAGHVCHLCHPNCTYGCTGPGLEGCPTNGPKIPSIA
TGMVGALLLLLVVALGIGLFM

[0213] In a further aspect, the disclosure provides methods of targeting an effector molecule to a cell comprising contacting a biological sample containing cells with the compositions, fusion proteins, nucleic acids, vectors, and/or the cells of any embodiment or combination of embodiments herein. In one embodiment, the methods further comprise contacting the cell with an effector molecule.

### Binding Domains/Cell Moieties

[0214] In another embodiment of the compositions of any embodiment or combination of embodiments of the disclosure, the first, second, third, fourth, fifth, sixth, and/or seventh binding domains are selected from the non-limiting group comprising an antigen-binding polypeptide directed against a cell surface moiety to be bound, including but not limited to Fab′, F(ab′)₂, Fab, Fv, rIgG, recombinant single chain Fv fragments (scFv), V_{H} single domains, bivalent or bispecific molecules, diabodies, triabodies, and tetrabodies; DARPins; nanobody; affibody; monobody; adnectin; alphabody; Albumin-binding domain; Adhiron; Affilin; Affimer; Affitin/Nanofitin; Anticalin; Armadillo repeat proteins; Atrimer/Tetranectin; Avimer/Maxibody; Centyrin; Fynomer; Kunitz domain; Obody/OB-fold; Pronectin; Repebody; and computationally designed proteins. In another embodiment, the first, second, third, fourth, fifth, sixth, and/or seventh binding domains bind to a cell surface protein on a cell selected from the non-limiting group comprising tumor cells, cancer cells, immune cells, leukocytes, lymphocytes, T cells, regulatory T cells, effector T cells, CD4+ effector T cells, CD8+ effector T cells, memory T cells, autoreactive T cells, exhausted T cells, natural killer T cells (NKT cells), B cells, dendritic cells, macrophages, NK cells, cardiac cells, lung cells, muscle cells, epithelial cells, pancreatic cells, skin cells, CNS cells, neurons, myocytes, skeletal muscle cells, smooth muscle cells, liver cells, kidney cells, bacterial cells, and yeast cells. In a further embodiment, the first, second, third, fourth, fifth, sixth, and/or seventh binding domains bind to a cell surface protein selected from the non-limiting group comprising Her2, EGFR, EpCAM, B7-H3, ROR1, GD2, GPC2, αvβ6, Her3, L1CAM, BCMA, GPCR5d, EGFRvIII, CD20, CD22, CD3, CD4, CD5, CD8, CD19, CD27, CD28, CD30, CD33, CD48, IL3RA, platelet tissue factor, CLEC12A, CD82, TNFRSF1B, ADGRE2, ITGB5, CD96, CCR1, PTPRJ, CD70, LILRB2, LTB4R, TLR2, LILRA2, ITGAX, CR1, EMC10, EMB, DAGLB, P2RY13, LILRB3, LILRB4, SLC30A1, LILRA6, SLC6A6, SEMA4A, TAG72, FRα, PMSA, Mesothelin, LIV-1, CEA, MUC1, PD1, BLIMP1, CTLA4, LAG3, TIM3, TIGIT, CD39, Nectin-4, a cancer marker, a healthy tissue marker, and a cardiac marker. In a further embodiment, the first, second, third, fourth, fifth, sixth, and/or seventh binding domains comprise a polypeptide having at least 40%, 45%, 50%, 55%, 60%, 65%, 70%, 75%, 80%, 85%, 90%, 91%, 92%, 93%, 94%, 95%, 96%, 97%, 98%, 99%, or 100% identity to the amino acid sequence selected from the group consisting of SEQ ID NOS: 27,399-27,403.

### III. Method of Disclosure

[0215] Some aspects of the present disclosure are directed to methods of increasing selectivity of a cell in vitro, ex vivo, or in vivo for a CAR T cell therapy. Other aspects of the present disclosure are directed to methods of increasing selectivity of cells that are interacting with each other in vitro, ex vivo, or in vivo for a CAR T cell therapy. Other aspects of the present disclosure are directed to methods of targeting heterogeneous cells (more than two different cell types) in vitro, ex vivo, or in vivo for a CAR T cell therapy. Other aspects of the present disclosure are directed to methods of reducing off-target activity in vitro, ex vivo, or in vivo for a CAR T cell therapy.

[0216] In some aspects, the present disclosure is directed to a method of increasing selectivity of a cell comprising expressing a first cage polypeptide disclosed herein and a first key polypeptide disclosed herein in vitro, in vivo, or ex vivo for a CAR T cell therapy. In some aspects, the present disclosure is directed to a method of increasing selectivity of a cell comprising adding a first cage polypeptide disclosed herein and a first key polypeptide disclosed herein in vitro, in vivo, or ex vivo for a CAR T cell therapy. The first cage polypeptide and one or more key polypeptides can be added to the cells in vitro, in vivo, or ex vivo together (concurrently) or separately. Some aspects of the present disclosure are directed to a method of increasing selectivity of a cell in vitro, ex vivo, or in vivo for a CAR T cell therapy comprising (a) contacting cells with (e.g. expressing or adding) a first cage polypeptide fused to a first binding domain, and (b) contacting ((e.g. expressing or adding) the cell with a first key polypeptide fused to a second binding domain. In some aspects, the first cage polypeptide comprises (i) a structural region and (ii) a latch region further comprising one or more bioactive peptides.

[0217] Some aspects of the present disclosure are directed to a method of increasing selectivity of cells that are interacting with each other in vitro, ex vivo, or in vivo for a CAR T cell therapy comprising: (a) contacting two or more cells with a first cage polypeptide fused to a first binding domain, wherein the first cage polypeptide comprises (i) a structural region and (ii) a latch region further comprising one or more bioactive peptides, wherein the structural region interacts with the latch region to prevent activity of the one or more bioactive peptides in the absence of colocalization with a key polypeptide and wherein the first binding domain is capable of binding to a first cell moiety present on a synapse between the two or more cells; and (b) contacting the two or more cells with a first key polypeptide fused to a second binding domain, wherein upon colocalization with the first cage polypeptide, the first key polypeptide is capable of binding to the cage structural region to activate the one or more bioactive peptides, wherein the second binding domain is capable of binding to a second cell moiety present on the synapse between the two or more cells.

[0218] In some aspects, the method further comprises contacting a second key polypeptide fused to a third binding domain with a synapse of two or more cells that also express a first cell moiety, wherein upon colocalization with the first cage polypeptide, the second key polypeptide is capable of binding to the cage structural region to activate the one or more bioactive peptides, wherein the third binding domain is capable of binding to a third cell moiety present on the synapse of the two or more cells.

[0219] In some aspects, the method further comprises contacting the two or more cells with one or more decoy cage polypeptide fused to one or more decoy binding domain with the two or more cells, wherein each decoy cage polypeptide comprises a decoy structural region, which upon colocalization with the first key polypeptide and the first cage polypeptide, is capable of preferentially binding to the first key polypeptide and wherein each decoy binding domain is capable of binding to a decoy cell moiety in the synapse of the two or more cells.

[0220] Some aspects of the disclosure are directed to a method of targeting heterogeneous cells (i.e., more than two different cell types) in vitro, ex vivo, or in vivo for a CAR T cell therapy, wherein a first cell moiety and a second cell moeity are present on the first cell and a first cell moiety and a third cell moiety are present on the second cell, comprising: (a) contacting two or more cells with a first cage polypeptide fused to a first binding domain, wherein the first cage polypeptide comprises (i) a structural region and (ii) a latch region further comprising one or more bioactive peptides, and wherein the structural region interacts with the latch region to prevent activity of the one or more bioactive peptides in the absence of colocalization with a key polypeptide and wherein the first binding domain is capable of binding to a first cell moiety present on or within the two or more cells; (b) contacting the two or more cells with a first key polypeptide fused to a second binding domain, wherein upon colocalization, the first key polypeptide is capable of binding to the cage structural region to activate the one or more bioactive peptides and wherein the second binding domain is capable of binding to a second cell moiety present on a cell that also comprises the first cell moiety, and (c) contacting the two or more cells with a second key polypeptide fused to a third binding domain, wherein upon colocalization, the second key polypeptide is capable of binding to the cage structural region to activate the one or more bioactive peptides and wherein the third binding domain is capable of binding to a third cell moiety in a cell that comprises the first cell moiety.

[0221] In some aspects, the method further comprises contacting the two or more cells for a CAR T cell therapy with one or more decoy cage polypeptide fused to one or more decoy binding domain, wherein each decoy cage polypeptide comprises a decoy structural region, which upon colocalization with the first key polypeptide, the second key polypeptide, and/or the first cage polypeptide, is capable of preferentially binding to the first key polypeptide or the second key polypeptide, and wherein each decoy binding domain is capable of binding to a decoy cell moiety in a cell that comprises the first cell moiety and the second cell moiety.

[0222] Some aspects of the present disclosure are directed to a method of reducing off-target activity in vitro, ex vivo, or in vivo for a CAR T cell therapy comprising (a) contacting two or more cells with a first cage polypeptide fused to a first binding domain, wherein the first cage polypeptide comprises (i) a structural region and (ii) a latch region further comprising one or more bioactive peptides, and wherein the structural region interacts with the latch region to prevent activity of the one or more bioactive peptides in the absence of colocalization with a key polypeptide and wherein the first binding domain is capable of binding to a first cell moiety present on a cell; (b) contacting the two or more cells with a first key polypeptide fused to a second binding domain, wherein upon colocalization, the first key polypeptide is capable of binding to the cage structural region to activate the one or more bioactive peptides and wherein the second binding domain is capable of binding to a second cell moiety present on a cell that also comprises the first cell moiety, and (c) contacting the two or more cells with a decoy cage polypeptide fused to a third binding domain, wherein the decoy cage polypeptide comprises a decoy structural region, which upon colocalization with the key polypeptide and the first cage polypeptide, is capable of preferentially binding to the first key polypeptide and wherein the third binding domain is capable of binding to a third cell moiety in a cell that comprises the first cell moiety and the second cell moiety. In some aspects, the third cell moiety is only present on a healthy cell.

[0223] As used herein, “contacting” refers to any means of bring a first element into contact with a second element. In some aspects, contacting includes directly adding a first element, e.g., a polypeptide, to second element, e.g., a cell, such as, for example, by adding a protein into a cell culture. In some aspects, contacting includes expressing the first element, e.g., a protein, by a nucleotide encoding the protein in the target cell or in a cell that is in the same culture as the target cell. In some aspects, the contacting of (a) the cell with a first cage polypeptide fused to a first binding domain, and (b) the contacting of the cell with a first key polypeptide fused to a second binding domain are performed concurrently. In some aspects, the contacting (a) is performed prior to the contacting (b). In some aspects, the contacting (b) is performed prior to the contacting (a). In some aspects, the contacting includes introducing a polynucleotide encoding a polypeptide (e.g., the first cage polypeptide, the first key polypeptide, the second key polypeptide, and the decoy cage polypeptide).

[0224] The method disclosed herein increases the selectivity of a cell for a target cell. In some aspects, the colocalization of the first cage polypeptide and the key polypeptide increases the selectivity of a cell that highly comprises the first cell moiety and the second cell moiety. In some aspects, the colocalization of the first cage polypeptide and the key polypeptide increases the selectivity of a cell that highly expresses the first and second cell moiety. In some aspects, the colocalization of the first cage polypeptide and the key polypeptide increases the selectivity of a cell that highly expresses the first and second cell moieties and a cell that highly expresses the first and third cell moieties.

[0225] In another embodiment, the disclosure provides methods for cell targeting, comprising

[0226] (a) contacting a biological sample containing cells with
[0227] (i) a cage polypeptide comprising (i) a structural region, (ii) a latch region further comprising one or more bioactive peptides, and (iii) a first binding domain that targets a cell of interest, wherein the structural region interacts with the latch region to prevent activity of the one or more bioactive peptides; and
[0228] (ii) a key polypeptide comprising a second binding domain that targets the cell of interest, wherein the first binding domain and the second binding domain bind to (i) different moieties on the surface of the same cell, (ii) the same moiety on the surface of the same cell, (iii) different moieties at the synapse between two cells that are in contact, or (iv) the same moiety at the synapse between two cells that are in contact;

[0229] wherein the contacting occurs for a time and under conditions to promote binding of the cage polypeptide and the key polypeptide to the cell of interest, and to promote binding of the key polypeptide to the cage structural region to displace the latch region and activate the one or more bioactive peptides only when the cage polypeptide and the key polypeptide are co-localized to the cell of interest;

[0230] (b) contacting the biological sample with one or more effector molecule(s) under conditions to promote binding of the one or more effector molecules selected from the fusion proteins, nucleic acids, vectors, and/or cells of any embodiment of the disclosure under conditions to promote binding of the one or more effector molecules to the one or more activated bioactive peptides to produce an effector molecule-bioactive peptide complex; and

[0231] (c) optionally detecting the effector molecule-bioactive peptide complex, wherein the effector molecule-bioactive peptide complex provides a measure of the cell of interest in the biological sample.

[0232] These methods can be used, for example, to specifically target cells of interest such as CAR T cells. As described in the examples that follow, the methods, fusion proteins, and compositions have been used for ultra-specific CAR T cell targeting, and directing CAR T cell cytotoxicity against certain cells within a complex milieu. In one embodiment, the biological sample is present within or obtained from a subject having a disease to be treated, and wherein the method serves to treat the disease. Such disease may include, for example, cancer, and the biological sample comprises tumor cells. In one such embodiment, step (a) of the method comprises intravenous infusion into the subject. In another embodiment, step (b) is carried out after step (a).

[0233] Other aspects of the disclosure are directed to methods of preparing a subject in need of a therapy comprising administering a composition disclosed herein. Some aspects of the disclosure are directed to methods of preparing a subject in need of a CAR T cell therapy comprising administering a cell disclosed herein.

[0234] Some aspects are directed to a method of treating a disease or condition in a subject in need thereof comprising administering an effector molecule to the subject, wherein the subject is further administered a composition disclosed herein together with administration of the effector molecule. In some aspects, the administering of the effector molecule administration of the effector kills the cell that comprises the first binding moiety and the second binding moiety, results in receptor signaling (e.g., cytokine) in the cell that comprises the first binding moiety and the second binding moiety; results in production of signaling molecules (e.g., cytokine, chemokine) nearby the cell that comprises the first binding moiety and the second binding moiety; or results in differentiation of the cell that comprises the first binding moiety and the second binding moiety. Any effector molecule disclosed herein can be used in the method. In some aspects, the effector molecule binds to the one or more bioactive peptides. In some aspects, the effector molecule comprises an antibody or antigen binding fragment thereof, T cell receptor, DARPin, bispecific or bivalent molecule, nanobody, affibody, monobody, adnectin, alphabody, albumin binding domain, adhiron, affilin, affimer, affitin/nanofitin; anticalin; armadillo repeat protein; atrimer/tetranectin; avimer/maxibody; centyrin; fynomer; Kunitz domain; obody/OB-fold; pronectin; repebody; a computationally designed protein; a protease, a ubiquitin ligase, a kinase, a phosphatase, and/or an effector that induces proteolysis; or any combination thereof. In certain aspects, the effector molecule comprises an antibody or antigen binding fragment thereof. In some aspects, the antigen binding portion thereof comprises a Fab′, F(ab′)₂, Fab, Fv, rIgG, recombinant single chain Fv fragment (scFv), and/or V_{H} single domain.

[0235] In some aspects, the effector molecule is a therapeutic cell. in some aspects, the therapeutic cell comprises a T cell, a stem cell, an NK cell, a B cell, or any combination thereof. In some aspects, the therapeutic cell comprises an immune cell. In some aspects, therapeutic cell comprises a T cell. In some aspects, therapeutic cell comprises a stem cell. In some aspects, the stem cell is an induced pluripotent stem cell. In some aspects, therapeutic cell comprises an NK cell.

### EXAMPLES

### Summary

[0236] Natural biological systems integrate multiple protein binding inputs through post-translational signaling cascades that are hardcoded to specialized functions; a synthetic system capable of integrating multiple binding inputs through conformational switching could be a general solution for predictively controlling diverse biological functions. We describe the computational design of proximity-activated de novo protein switches that perform ‘AND’, ‘OR’, and ‘NOT’ Boolean logic operations and combinations thereof in response to precise combinations of protein-binding events. The switches activate via a conformational change only when all logic conditions are met, and a high-resolution x-ray crystal structure confirms the design model. We demonstrate the utility of this system for ultraspecific targeting of mammalian cells that are distinguished in a complex cell population only by their precise combination of surface markers. We implement 2- and 3-input logic gates to redirect T cell specificity against tumor cells expressing precise combinations of surface antigens while avoiding off-target recognition of cells expressing single antigens or, in the case of ‘NOT’ logic, a unique third antigen. Our work shows that de novo designed proteins can perform computations on the surface of cells, integrating multiple distinct binding interactions into a single biological output.

[0237] We set out to design a generalizable protein system from scratch that is capable of performing complex logic in response to combinatorial binding events. We aimed for a modular system capable of computing combinations of Boolean logic operations (‘AND’, ‘OR’, and ‘NOT’) when the components are brought into close proximity and actuating a single binding interaction as output (FIG. 1a). Such a system would be broadly useful for modulating a wide range of cellular transactions in the nucleus, cytoplasm, and cell surface. Herein, we develop such a system and apply it to cellular targeting applications: we sought to distinguish cell subpopulations using Boolean logic to integrate multiple protein binding inputs into a single output biological function, taking advantage of the property that antigen binding at the cell surface increases the local concentration of the bound protein. For this system to be generally useful, the actuation must be modular and independent of target antigen identity.

[0238] We set out to design de novo protein switches for which the actuation domain is activated by the proximity of additional designed components. We designed protein switches that activate in solution: Latching Orthogonal Cage-Key pRotein (LOCKR) switches are composed of a structural “Cage” protein that uses a “Latch” domain to sequester a functional peptide in an inactive conformation until binding of a separate “Key” protein induces a conformational change that permits binding to an “Effector” protein. Cage, Key, and Effector bind in a three-way equilibrium, and the sensitivity of the switch can be tuned by adjusting the relative Cage-Latch and Cage-Key affinities. We designed new LOCKR proteins to be inert in solution and strongly activated only when the Cage and Key are colocalized. We designed new LOCKR switches with shorter helices, improved hydrophobic packing, and an additional hydrogen bond network to promote interaction specificity among the helices (FIG. 5a-c and the Computational Protein Design portion of the Methods section provide a detailed description of the design process). The new design was nearly 100% monomeric and showed substantially reduced aggregation compared to other exemplary LOCKR switches (FIG. 6a). The improved solution behavior of the new design enabled us to solve a 2.1 Å x-ray crystal structure, which closely matched the design model (FIG. 1b, Table 16) with 1.1 Å root mean squared deviation (RMSD) across all backbone atoms and 0.5 Å RMSD across all sidechain heavy atoms in the newly designed hydrogen bond network (FIG. 1b).

[0239] We used the new design as the starting point to develop colocalization-dependent LOCKR (Co-LOCKR) switches (FIG. 1c). To install an output function into Co-LOCKR, we chose the Bim-Bcl2 pair as a well-studied model system for peptide-protein binding (12). Bim was encoded into the Latch as a sequestered peptide; Bcl2 was used as the Effector. We then added targeting domains that recruit the Co-LOCKR Cage and Key to cells expressing target antigens. While the targeting domains should bind to any cell expressing their target antigens, only cells with both antigens should recruit both Cage and Key proteins, achieving colocalization-dependent activation (FIG. 1d-e). Co-LOCKR actuates via a thermodynamic mechanism based on reversible protein-protein interactions; therefore, complex formation can occur in solution (FIG. 7a) or on a surface (FIG. 7b), where Cage-Key colocalization increases local concentration and shifts the binding equilibrium in favor of complex formation (FIG. 7c). We demonstrate below the use of Co-LOCKR switches to regulate the recruitment of Effector proteins comprising a fluorophore or a chimeric antigen receptor (CAR).

[0240] To evaluate the ability of Co-LOCKR to target cells co-expressing a precise combination of surface antigens, we developed a mixed population flow cytometry assay by combining four K562 cell lines expressing Her2-eGFP, EGFR-iRFP, both, or neither (FIG. 1d). We used Designed Ankyrin Repeat Protein (DARPin) domains (13, 14) to target the Cage and Key to Her2 and EGFR, respectively. If the system functions as designed, only cells co-expressing both Her2 and EGFR should activate Co-LOCKR and bind Bcl2: the Cage contains the sequestered Bim peptide and the Key is required for its exposure. We refer to this Co-LOCKR configuration as CL_C_{H}K_{E}; in this nomenclature “CL” refers to Co-LOCKR, C_{H} indicates that the Cage is targeted to Her2, and K_{E} indicates that the Key is targeted to EGFR (Table 17). When the mixed population of cells was co-incubated with an equimolar dilution series of Cage and Key (3 μM to 1.4 nM) and washed before adding AlexaFluor™594-labeled Bcl2 (Bcl2-AF594), the expected sigmoidal binding curve was observed for the Her2/EGFR cells but not for cells expressing either protein alone (FIG. 1f). When the cells were co-incubated with Cage, Key, and Bcl2-AF594 together without washing, binding was likewise observed only for the Her2/EGFR cells, but Bcl2-AF594 signal peaked at 111 nM CL_C_{H}K_{E} and decreased at higher concentrations; free Cage and Key likely compete for binding to the limited number of surface Her2 and EGFR proteins with Cage-Key-Bcl2 formed in solution.

[0241] We next sought to tune the dynamic range of Co-LOCKR activation to increase colocalization-dependent activation sensitivity and responsiveness. Our initial design was intended to maximize Cage-Latch affinity so as to ensure colocalization-dependence, leading us to ask whether weakening the Cage-Latch affinity could enhance signal intensity without compromising the ability to compute logic. The sensitivity of previous LOCKR switches was tuned by shortening the Latch to produce a ‘toehold’, but this also promoted aggregation (FIG. 6b). We therefore focused on rationally designed mutations to tune the relative interaction affinities of the Co-LOCKR system to be colocalization-dependent (FIG. 8a-c). We mutated large, hydrophobic residues in the Latch region of the polypeptide of SEQ ID NO: 27359 (I287A, I287S, I269S) or Cage (L209A) to weaken Cage-Latch affinity (FIG. 2a). Biolayer interferometry indicated that increasingly disruptive mutations improved responsiveness (FIG. 9b), and flow cytometry showed that tuning the Cage-Latch interface enhanced colocalization-dependent activation: the tuned variants of CL_C_{H}K_{E} exhibited greater Bcl2-AF594 fluorescence on the same K562/Her2/EGFR cells (FIG. 2b, FIG. 9c). Colocalization-dependent activation occurred even at low nanomolar concentrations of CL_C_{H}K_{E}, likely limited by the number of LOCKR proteins available in small incubation volumes (FIG. 9d-e). Very little Effector binding was observed for cells expressing Her2 or EGFR alone, suggesting that Co-LOCKR avoids targeting nearby cells in trans. Of the switches tested, I269S exhibited the greatest activation (FIG. 10a), the parental Co-LOCKR design exhibited the lowest off-target activation (FIG. 10b), and I287A exhibited the highest fold specificity (FIG. 10c).

[0242] Co-localization dependent activation was also observed at the sub-cellular level by confocal microscopy. CL_C_{H}K_{E} recruited Bcl2-AF680 to the plasma membrane of HEK293T/Her2/EGFR cells but not HEK293T/Her2 or HEK293T/EGFR (FIG. 2c). There was a close correspondence between regions of the plasma membrane exhibiting colocalized Her2-eGFP and EGFR-iRFP signal with Co-LOCKR activation (FIG. 2c, column 6, quantified in FIG. 2d).

[0243] To assess the flexibility of Co-LOCKR, we attempted to specifically target alternative pairwise combinations of three cancer-associated antigens (Her2, EGFR, and EpCAM). Each of these antigens is expressed at differing levels by engineered K562 cell lines or human cancer cell lines (FIG. 11a, FIG. 12a). Using the I269S variant to maximize detection of low levels of antigen, we found that (1) Co-LOCKR could distinguish the correct pair of antigens in every case, and (2) the magnitude of Bcl2 binding corresponded with the expression level of the lower-expressed of the two target antigens (FIG. 3a, FIG. 12b-c), consistent with a stoichiometric binding mechanism for colocalization-dependent activation. Taken together, these results demonstrate the modularity of Co-LOCKR to target several antigens produced at a wide range of differing expression levels. While we chose DARPins as targeting domains so as to enable facile expression of Co-LOCKR variants, any binding domain can be substituted, including single chain variable fragments (FIG. 13).

[0244] A truly general technology for targeting any cell type in situ requires more complex logic comprising combinations of ‘AND’, ‘OR’, and ‘NOT’ operations. In principle, the colocalization-dependent activation mechanism of Co-LOCKR should be particularly well suited to accomplish this. ‘OR’ logic can potentially be achieved by adding a second Key fused to a binding domain targeting an alternative surface marker (FIG. 3b). ‘NOT’ logic can potentially be achieved by adding a Decoy protein fused to a binding domain targeting a surface marker to be avoided; the Decoy acts as a sponge to sequester the Key, thereby preventing Cage activation (FIG. 3d).

[0245] Using Her2, EGFR, and EpCAM as model antigens (Ag), we first explored [Ag₁ AND either Ag₂ OR Ag₃] logic on the surface of cells (FIG. 3b). To assess the composability of Co-LOCKR targeting, we tested all three combinations: [Her2 AND either EGFR OR EpCAM], [EGFR AND either Her2 OR EpCAM], and [EpCAM AND either Her2 OR EGFR]. In all cases, the correct cell sub-population was targeted at levels consistent with the limiting target antigen (FIG. 3c). For example, CL_C_{E}K_{H}K_{Ep} targeted cells expressing EGFR/EpCAM^{lo} 10-fold over background, Her2/EGFR/EpCAM^{lo} 59-fold over background, and Her2/EGFR/EpCAM^{hi} 56-fold above background, but exhibited minimal off-target activation on cells missing at least one antigen (middle panel of FIG. 3c).

[0246] We next explored [Ag₁ AND Ag₂ NOT Ag₃] logic using CL_C_{H}K_{Ep}D_{E} (D for Decoy) and the same set of model antigens (FIG. 3d). Consistent with the expected stoichiometric mechanism of activation, Ag₃ needed to be expressed at higher levels than Ag₂ so that an excess of the Decoy could sequester all molecules of the Key: targeting the Decoy to highly expressed EGFR completely abrogated activation by a Key targeted to low levels but not high levels of EpCAM. The Cage-Latch affinity (FIG. 3d, FIG. 14a) and Decoy-Key affinity (FIG. 14b, FIG. 15a-d) can be readily tuned to either minimize leakiness or maximize activation.

[0247] The ability to perform complex logic operations using Co-LOCKR affords a level of control and flexibility not reported by previous targeting technologies. Furthermore, the ability to tune responsiveness with rationally designed point mutations enables the rapid optimization of Co-LOCKR for a wide range of applications.

### Co-LOCKR Mediates Ultraspecific T Cell Targeting

[0248] CD19-targeted adoptively transferred chimeric antigen receptor-modified (CAR) T cells have achieved unprecedented clinical success for relapsed or refractory B cell malignancies (15, 16). However, most cancers lack a surface antigen like CD19 that is expressed only on the tumor and a dispensable normal cell lineage (B cells). Thus, cell-based immunotherapies require a flexible strategy to target precise combinations of surface markers that are not found together in vital, healthy cells. Boolean ‘AND’ logic would afford increased tumor selectivity, ‘OR’ logic would enable flexible targeting of heterogeneous tumors or cancers prone to antigen loss, and ‘NOT’ logic would help avoid off-target tissues that share similar expression profiles with the target cancer cells (FIG. 1a).

[0249] We explored whether Co-LOCKR could perform logic to restrict T cell targeting to cells expressing multiple specified antigens. We designed a Bcl2 CAR that targets Bim peptides displayed on the surface of a target cell; the CAR contains a stabilized variant of human Bcl2, a flexible extracellular spacer domain (17), CD28/CD3ζ signaling domains, and a truncated EGFR (EGFRt) selection marker (18) linked by a T2A ribosomal skipping sequence (FIG. 16a). The Bcl2 CAR functions as designed: purified CD8⁺ EGFRt⁺ Bcl2 CAR T cells efficiently recognized K562 cells stably expressing a surface-exposed Bim-GFP fusion protein (FIG. 16b-c).

[0250] With Bcl2 CAR T cells in hand, we first investigated whether the presence of Co-LOCKR proteins would permit T cell activation against target cells expressing the relevant target antigens. We functionally tested Co-LOCKR-mediated T cell targeting of Raji and K562 cells expressing Her2, EGFR, and EpCAM. Because the Raji cells expressed lower levels of transduced antigens than did the K562 cell lines (FIG. 117a-b), the Raji cells more stringently test Co-LOCKR sensitivity, whereas the K562 cells better assess specificity. To maximize the likelihood of T cell activation, we initially chose to evaluate CL_C_{H}K_{Ep} using the I269S Cage against a panel of Raji cells expressing Her2, EpCAM, both, or none. Although Raji/EpCAM/Her2 cells correctly induced IFN-γ release, we also observed leaky IFN-γ release with Raji/EpCAM and Raji/Her2 cells (FIG. 16d). In contrast, both CL_C_{H}K_{Ep} and CL_C_{Ep}K_{H} using the parental unmutated Cage promoted IFN-γ release only when co-cultured with Raji/EpCAM/Her2 cells, demonstrating that Co-LOCKR can be tuned for CAR T cell retargeting. By titrating the concentration of CL_C_{H}K_{Ep} to assess the impact on cytokine production, we found that CAR T effector function could be specifically targeted using between 2.5 nM to 20 nM of Co-LOCKR without causing unintended activation by off-target cells (FIG. 17).

[0251] Next, we assessed the ability of Co-LOCKR to direct CAR T cell cytotoxicity against specific subsets of cells within a complex milieu. Raji, Raji/EpCAM, Raji/Her2, and Raji/EpCAM/Her2 were differentially labeled with fluorescent Cell Trace dyes and mixed together with CAR T cells and CL_C_{H}K_{Ep} (FIG. 16f). We simultaneously measured killing of the four tumor cell lines in the mixed population using flow cytometry. After 48 hours, Raji/EpCAM/Her2 cells were preferentially killed, but a fraction of Raji/EpCAM cells were also targeted (FIG. 16g), suggesting that even the parental Cage and Key were too leaky for CAR T cell recruitment. We sought to overcome this basal activation by tuning the length of the Key (FIG. 16e). The combination of parental Cage and ΔN3 Key (three N-terminal amino acids deleted) selectively targeted Raji/EpCAM/Her2 and mitigated unintended killing of Raji/EpCAM and Raji/Her2 cells (FIG. 16f-g). We confirmed these results using a 4-hour Chromium release assay which showed that CL_C_{H}K_{Ep} specifically targeted Raji/EpCAM/Her2 cells and initiated rapid cell killing (FIG. 16h). Thus, Co-LOCKR can be used to restrict IFN-γ release and cell killing to only those tumor cells that express a specific pair of antigens. T cell cytotoxicity is highly sensitive, and we are aware of no other technology capable of rapidly targeting double-positive cells while sparing single-antigen cells in a mixed population.

[0252] After establishing that Co-LOCKR could selectively target Raji/EpCAM/Her2 cells, we turned to our K562 cell lines (FIG. 11a) as well as solid tumor lines (FIG. 12a) to more systematically evaluate Co-LOCKR ‘AND’ logic for additional tumor antigen pairs ([Her2 AND EpCAM], [Her2 AND EGFR]). Using the parental Cage and ΔN3 Key, we observed a positive association between antigen density and the magnitude of on-target CAR T cell IFN-γ production: Raji cells with low antigen density yielded modest IFN-γ (FIG. 18a), K562/Her2/EpCAM^{lo} and SKBR3 breast cancer cells yielded intermediate IFN-γ (FIG. 4a, FIG. 18b), and both K562/Her2/EpCAM^{hi} and K562/Her2/EGFR cells yielded high IFN-γ release for their respective Co-LOCKRs (FIG. 4a, FIG. 18c). For example, CL_C_{Ep}K_{H} induced IFN-γ release in response to Raji/Her2/EpCAM 3.9-fold above background, SKBR3 4.8-fold above background, K562/Her2/EpCAM^{lo} 16-fold above background, and K562/Her2/EpCAM^{hi} 51-fold above background, with minimal off-target cytokine release. Off-target IFN-γ production did not increase appreciably when the target cells expressed high levels of a single antigen.

[0253] Consistent with our earlier cytokine secretion results, CAR T cells proliferated only upon co-culture with target cells co-expressing the correct pair of antigens (FIG. 4b, FIG. 18d). To evaluate cell-specific killing, we returned to the Raji cell lines because the K562 cells expressed eGFP and iRFP, which complicated the use of fluorescent Cell Trace dyes. Our flow cytometry-based killing assay revealed ‘AND’ gate selective cytotoxicity with both CL_C_{H}K_{Ep} and CL_C_{Ep}K_{H} against Raji/EpCAM/Her2 without depleting single antigen-positive cells (FIG. 4c). A similar result was observed for both CL_C_{H}K_{E} and CL_C_{E}K_{H} against Raji/Her2/EGFR (FIG. 18e), although killing was less effective, likely due to the lower expression levels of EGFR compared to EpCAM in Raji/Her2/EGFR and Raji/EpCAM/Her2, respectively. We also did not observe fratricide of the EGFRt⁺ CAR T cells used in the experiment, which could have been targeted by the anti-EGFR DARPin binder of CL_C_{H}K_{E} or CL_C_{E}K_{H} (FIG. 18f).

[0254] Encouraged by robust ‘AND’ logic, we evaluated more complex operations involving combinations of ‘AND’ and either ‘OR’ or ‘NOT’ logic. CAR T cells co-cultured with ‘AND/OR’ Co-LOCKRs (CL_C_{H}K_{E}K_{Ep}, CL_C_{E}K_{H}K_{Ep}, and CL_C_{Ep}K_{H}K_{E}) each carried out [Ag₁ AND either Ag₂ OR Ag₃] logic with respect to IFN-γ production (FIG. 4d, FIG. 18g) and proliferation (FIG. 4e) against K562 cell lines, as well as selective killing in a mixed population of Raji cell lines (FIG. 4f, FIG. 18h). CART cells co-cultured with an ‘AND/NOT’ Co-LOCKR (CL_C_{H}K_{Ep}D_{E}) carried out [Her2 AND EpCAM NOT EGFR] logic, eliminating IFN-□ production and proliferation in the presence of K562/EGFR/Her2/EpCAM^{lo} cells (FIG. 4g-h). However, the NOT logic exhibited leaky cytokine production and proliferation when EpCAM was overexpressed (FIG. 19a-b) or when the Cage and Key specificities were reversed (CL_C_{Ep}K_{H}D_{E}, FIG. 4g-h). For Raji cells that expressed approximately two-fold more EpCAM than EGFR and 1.6-fold less Her2 than EGFR (Table S3), CL_C_{Ep}K_{H}D_{E} avoided cytotoxicity against Raji/EpCAM/Her2/EGFR cells while CL_C_{H}K_{Ep}D_{E} did not (FIG. 4i). These results support our earlier findings that Ag₃ in the ‘NOT’ operation must be expressed at higher levels than Ag₂: EGFR was expressed at sufficiently higher levels than EpCAM for K562/EGFR/Her2/EpCAM^{lo} cells and Her2 for Raji/EpCAM/Her2/EGFR cells (FIG. 11a-b). While these data indicate that careful tuning will likely be necessary for eventual therapeutic use, the ability of CL_C_{Ep}K_{H}D_{E} to perform [EpCAM AND Her2 NOT EGFR] logic redirecting CAR T cell cytolysis against Her2/EpCAM cells but not Her2/EpCAM/EGFR cells (right hand panel of FIG. 4i) demonstrates the power of Co-LOCKR for ultraspecific cell targeting.

[0255] By contrast, Co-LOCKR computes logic on a single cell expressing precise combinations of antigens in cis, specifically directing cytotoxicity against target cells without harming neighboring off-target cells that only provide a subset of the target antigens (FIG. 4c, f, i). ‘OR’ and ‘NOT’ logic combined with ‘AND’ logic have not been described for CAR T cells. The ability to implement complex logic (e.g., [Ag₁ AND either Ag₂ OR Ag₃] (FIG. 3c) and [Ag₁ AND Ag₂ NOT Ag₃] (FIG. 3d, FIG. 4g-i)) is unique to Co-LOCKR and cannot be achieved with existing technologies.

[0256] Our CAR T cell experiments demonstrate the potential for Co-LOCKR to mediate unprecedented targeting specificity.

[0257] Generally, the power of the Co-LOCKR system results from the integration of multiple coherent or competing inputs that determine the magnitude of a single response. The output signal—exposure of the functional peptide on the Latch—is increased by Key binding and countered by Decoy competition. In principle, there are no limits on the numbers of each molecule, allowing for arbitrarily complex logic operations. Although our present work has focused on describing the system and demonstrating its ability to improve T cell-based cancer immunotherapies in vitro, the Co-LOCKR system is powerful for engineering biology in any setting that requires proximity-based activation or specific targeting through calculations on the surface of cells.

### REFERENCES

[0258] 1. N. M. Daringer, R. M. Dudek, K. A. Schwarz, J. N. Leonard, Modular Extracellular Sensor Architecture for Engineering Mammalian Cell-based Devices. ACS Synth. Biol. 3, 892-902 (2014).
[0259] 2. L. Morsut et al., Engineering Customized Cell Sensing and Response Behaviors Using Synthetic Notch Receptors. Cell. 164, 780-791 (2016).
[0260] 3. N. H. Kipniss et al., Engineering cell sensing and responses using a GPCR-coupled CRISPR-Cas system. Nat. Commun. 8, 2212 (2017).
[0261] 4. Z. Eshhar, T. Waks, G. Gross, D. G. Schindler, Specific activation and targeting of cytotoxic lymphocytes through chimeric single chains consisting of antibody-binding domains and the gamma or zeta subunits of the immunoglobulin and T-cell receptors. Proc. Natl. Acad. Sci. U.S.A. 90, 720-4 (1993).
[0262] 5. S. Wilkie et al., Selective expansion of chimeric antigen receptor-targeted T-cells with potent effector function using interleukin-4. J. Biol. Chem. 285, 25538-44 (2010).
[0263] 6. M. E. Prosser, C. E. Brown, A. F. Shami, S. J. Forman, M. C. Jensen, Tumor PD-L1 co-stimulates primary human CD8+ cytotoxic T cells modified to express a PD1:CD28 chimeric receptor. Mol. Immunol. 51, 263-272 (2012).
[0264] 7. C. Sellmann et al., Balancing Selectivity and Efficacy of Bispecific Epidermal Growth Factor Receptor (EGFR)×c-MET Antibodies and Antibody-Drug Conjugates. J. Biol. Chem. 291, 25106-25119 (2016).
[0265] 8. Y. Mazor et al., Enhanced tumor-targeting selectivity by modulating bispecific antibody binding affinity and format valence. Sci. Rep. 7, 40098 (2017).
[0266] 9. R. A. Langan et al., De novo design of bioactive protein switches. Nature. 572, 205-210 (2019).
[0267] 10. S. E. Boyken et al., De novo design of protein homo-oligomers with modular hydrogen-bond network-mediated specificity. Science. 352, 680-7 (2016).
[0268] 11. A. Leaver-Fay et al., ROSETTA3: an object-oriented software suite for the simulation and design of macromolecules. Methods Enzymol. 487, 545-74 (2011).
[0269] 12. L. Delgado-Soler, M. Pinto, K. Tanaka-Gil, J. Rubio-Martinez, Molecular Determinants of Bim(BH3) Peptide Binding to Pro-Survival Proteins. J. Chem. Inf. Model. 52, 2107-2118 (2012).
[0270] 13. C. Zahnd et al., A Designed Ankyrin Repeat Protein Evolved to Picomolar Affinity to Her2. J. Mol. Biol. 369, 1015-1028 (2007).
[0271] 14. D. Steiner, P. Forrer, A. PlUckthun, Efficient Selection of DARPins with Sub-nanomolar Affinities using SRP Phage Display. J. Mol. Biol. 382, 1211-1227 (2008).
[0272] 15. M. Sadelain, I. Rivière, S. Riddell, Therapeutic T cell engineering. Nature. 545, 423-431 (2017).
[0273] 16. A. I. Salter, M. J. Pont, S. R. Riddell, Chimeric antigen receptor-modified T cells: CD19 and the road beyond. Blood. 131, 2621-2629 (2018).
[0274] 17. M. Hudecek et al., The Nonsignaling Extracellular Spacer Domain of Chimeric Antigen Receptors Is Decisive for In Vivo Antitumor Activity. Cancer Immunol. Res. 3, 125-135 (2015).
[0275] 18. X. Wang et al., A transgene-encoded cell surface polypeptide for selection, in vivo tracking, and ablation of engineered cells. Blood. 118, 1255 (2011).
[0276] 19. C. C. Kloss, M. Condomines, M. Cartellieri, M. Bachmann, M. Sadelain, Combinatorial antigen recognition with balanced signaling promotes selective tumor eradication by engineered T cells. Nat. Biotechnol. 31, 71-75 (2013).
[0277] 20. K. T. Roybal et al., Precision Tumor Recognition by T Cells With Combinatorial Antigen-Sensing Circuits. Cell. 164, 770-779 (2016).
[0278] 21. S. Srivastava et al., Logic-Gated ROR1 Chimeric Antigen Receptor Expression Rescues T Cell-Mediated Toxicity to Normal Tissues and Enables Selective Tumor Targeting. Cancer Cell. 35, 489-503.e8 (2019).
[0279] 22. J. H. Cho, J. J. Collins, W. W. Wong, Universal Chimeric Antigen Receptors for Multiplexed and Logical Control of T Cell Responses. Cell. 173, 1426-1438.ell (2018).
[0280] 23. E. Zah, M.-Y. Lin, A. Silva-Benedict, M. C. Jensen, Y. Y. Chen, T Cells Expressing CD19/CD20 Bispecific Chimeric Antigen Receptors Prevent Antigen Escape by Malignant B Cells. Cancer Immunol. Res. 4, 498-508 (2016).
[0281] 24. V. D. Fedorov, M. Themeli, M. Sadelain, Sci. Transl. Med., in press, doi:10.1126/scitranslmed.3006597.
[0282] 25. S. Tammana et al., 4-1BB and CD28 Signaling Plays a Synergistic Role in Redirecting Umbilical Cord Blood T Cells Against B-Cell Malignancies. Hum. Gene Ther. 21, 75-86 (2010).
[0283] 26. Y. Kagoya et al., A novel chimeric antigen receptor containing a JAK-STAT signaling domain mediates superior antitumor effects. Nat. Med. 24, 352-359 (2018).
[0284] 27. C. Sun et al., THEMIS-SHP1 Recruitment by 4-1BB Tunes LCK-Mediated Priming of Chimeric Antigen Receptor-Redirected T Cells. Cancer Cell. 37, 216-225.e6 (2020).
[0285] 28. B. Kuhlman, D. Baker, Native protein sequences are close to optimal for their structures. Proc. Natl. Acad. Sci. U.S.A. 97, 10383-8 (2000).
[0286] 29. S. J. Fleishman et al., RosettaScripts: A Scripting Language Interface to the Rosetta Macromolecular Modeling Suite. PLoS One. 6, e20161 (2011).
[0287] 30. J. W. Chico et al., α/β-Peptide Foldamers Targeting Intracellular Protein-Protein Interactions with Activity in Living Cells. J. Am. Chem. Soc. 137, 11365-11375 (2015).
[0288] 31. A. Goldenzweig et al., Automated Structure- and Sequence-Based Design of Proteins for High Bacterial Expression and Stability. Mol. Cell. 63, 337-346 (2016).
[0289] 32. D. G. Gibson, H. O. Smith, C. A. Hutchison, J. C. Venter, C. Merryman, Chemical synthesis of the mouse mitochondrial genome. Nat. Methods. 7, 901-3 (2010).
[0290] 33. N. Stefan et al., DARPins Recognizing the Tumor-Associated Antigen EpCAM Selected by Phage and Ribosome Display and Engineered for Multivalency. J. Mol. Biol. 413, 826-843 (2011).
[0291] 34. W. Kabsch, IUCr, XDS. Acta Crystallogr. Sect. D Biol. Crystallogr. 66, 125-132 (2010).
[0292] 35. A. J. McCoy et al., Phaser crystallographic software. J. Appl. Crystallogr. 40, 658-674 (2007).
[0293] 36. P. D. Adams et al., PHENIX: a comprehensive Python-based system for macromolecular structure solution. Acta Crystallogr. Sect. D Biol. Crystallogr. 66, 213-221 (2010).
[0294] 37. T. C. Terwilliger et al., Iterative model building, structure refinement and density modification with the PHENIX AutoBuild wizard. Acta Crystallogr. Sect. D Biol. Crystallogr. 64, 61-69 (2008).
[0295] 38. P. Emsley, K. Cowtan, IUCr, Coot: model-building tools for molecular graphics. Acta Crystallogr. Sect. D Biol. Crystallogr. 60, 2126-2132 (2004).
[0296] 39. I. W. Davis et al., MolProbity: all-atom contacts and structure validation for proteins and nucleic acids. Nucleic Acids Res. 35, W375-W383 (2007).
[0297] 40. A. D. Bandaranayake et al., Daedalus: a robust, turnkey platform for rapid production of decigram quantities of active recombinant proteins in human cell lines using novel lentiviral vectors. Nucleic Acids Res. 39, e143-e143 (2011).

### Methods

### Computational Protein Design

### Design of New LOCKR Switches

[0298] As a starting point, the backbone of LOCKRa (SEQ ID NO:6) was used as input coordinates to Rosetta protein design software. Latch residues, residues on the Cage making contacts to the Latch (defined by the InterfaceByVector ResidueSelector in Rosetta™), and existing hydrogen bond networks were held fixed to coordinates of their input rotamers while the remaining residue positions were redesigned as follows: first, additional hydrogen bond networks were designed using HBNet™; second, RosettaDesign™ calculations were performed to optimize hydrophobic packing while the new hydrogen bond networks were maintained using AtomPair restraints on the heavy atoms of each sidechain hydrogen bond. This design procedure produced a new asymmetric Cage scaffold dubbed asymLOCKR. We then created a shorter version of this design by truncating the helical bundle by 12 residues based on visual inspection, reconnecting the helices with SGSGS linkers, and mutating several surface-exposed Arg and Lys residues to Glu to reduce the pI (FIG. 1b). Finally, we encoded the Bim sequence into the Latch to convert these scaffolds into LOCKRs. The shorter version (SEQ ID NO: 27359) was used as the parental Co-LOCKR. The RosettaScripts™ XML, file used to perform these design calculations is provided below.

### Design to Tune Relative Cage-Latch-Key Affinities to Achieve Colocalization Dependent Activation

[0299] We rationally mutated large, hydrophobic residues in the Latch of SEQ ID NO: 27359 (I287A, I287S, I269S) or Cage (L209A) to Alanine or Serine to weaken the Cage-Latch interface and increase Co-LOCKR sensitivity. We deleted several amino acids at the N- or C-terminus of the Key so as to weaken the Cage-Key interface and decrease Co-LOCKR sensitivity/leakiness.

### Design to Optimize Bcl2

[0300] Native Bcl2 was redesigned to improve its solution behavior and stability. As a starting point, the C-terminal 32 residues of the transmembrane domain were deleted, and the long loop between residues 35-91 of Bcl2 was replaced with residues 35-50 of the homolog Bcl-xL, as described previously (30). Additional mutations were made using Rosetta™ and PROSS™ (31) to improve hydrophobic packing and stability. Additional surface mutations were made rationally to improve solubility and remove glycosylation sites.

### Experimental Methods

### Cloning and Assembly of Synthetic Genes and a Bim-Specific Chimeric Antigen Receptor

[0301] Synthetic genes were purchased as gBlocks™ from Integrated DNA Technologies (IDT). All primers for mutagenesis were ordered from IDT. Synthetic genes were amplified using Kapa HiFi Polymerase according to the manufacturer's protocols with primers incorporating the desired mutations. The resulting amplicons were isothermally assembled (32) into a BamHI/XhoI digest of pET21b and transformed into chemically competent E. coli XL1-Blue cells (Agilent) or E. coli Lemo21™ (DE3) cells (New England Biolabs). Co-LOCKR Cage and Key components were targeted to cells using DARPins specific for Her2 (13), EGFR (14), and EpCAM (33).

[0302] The chimeric antigen receptor contained a murine IgK signal peptide, mini-FLAG and hemagglutinin (HA) tags, optimized Bcl2 binder, modified IgG4 long spacer with 4/2NQ mutations (17), CD28 transmembrane domain, and CD28/CD3ζ signaling domains (Fig S12a). The CAR transgene was codon-optimized and isothermally assembled into a HIV7 lentiviral vector upstream of a T2A sequence and truncated epidermal growth factor receptor (EGFRt) and transformed into chemically competent E. coli Turbo cells (New England Biolabs). Monoclonal colonies were verified by Sanger sequencing.

### Bacterial Protein Expression and Purification

[0303] E. coli Lemo21™ (DE3) cells harboring a pET21 plasmid encoding the gene of interest were grown overnight (10-16 hours) in 3 ml Luria-Bertani (LB) medium supplemented with 50 μg ml⁻¹ carbenicillin with shaking at 225 rpm at 37° C. Starter culture were added to 500 ml Studier TBM-5052 autoinduction media supplemented with carbenicillin, grown at 37° C. for 4-7 hours, and then grown at 18° C. for an additional 18-24 hours. Cells were harvested by centrifugation at 5000 g and 4° C. for 15 minutes and resuspended in 20 ml lysis buffer (25 mM Tris pH 8.0 at room temperature, 300 mM NaCl, 20 mM Imidazole, 1 mg ml⁻¹ lysozyme (Sigma L6876, from chicken egg), 0.1 mg ml⁻¹ DNase I (Sigma, DN25, from bovine pancreas). Cells were lysed by microfluidization in the presence of 1 mM phenylmethanesulfonyl fluoride (PMSF). Lysates were clarified by centrifugation at 24,000 g at 4° C. for 30 minutes and passed through 2 ml of nickel-nitrilotriacetic acid agarose (Ni-NTA, Qiagen, 30250) pre-equilibrated in lysis buffer. Immobilized protein was washed twice with 15 column volumes (CV) of wash buffer (25 mM Tris pH 8.0 at room temperature, 300 mM NaCl, 40 mM Imidazole), washed once with 5 CV of high-salt wash buffer (25 mM Tris pH 8.0 at room temperature, 1 M NaCl, 40 mM Imidazole), washed once more with 15 CV of wash buffer, and then eluted with 10 ml of elution buffer (25 mM Tris pH 8.0 at room temperature, 300 mM NaCl, 250 mM Imidazole). The eluted proteins were then concentrated (Amicon® Ultra-15 Centrifugal Filter Units, 10 kDa NMWL) and further purified by FPLC gel filtration using a Superdex™ 75 Increase 10/300 GL (GE) size exclusion column in Tris Buffered Saline (TBS; 25 mM Tris pH 8.0 at room temperature, 150 mM NaCl). Fractions containing non-aggregated protein were pooled, concentrated, and supplemented with glycerol to a final concentration of 10% v/v before being quantitated by absorbance at 280 nm (Nanodrop™), aliquoted, and snap frozen in liquid nitrogen. Protein aliquots were stable at −80° C.

### X-Ray Crystallography

[0304] For crystallography screening, the hexahistidine tag was removed via TEV cleavage followed by Ni-NTA affinity chromatography prior to SEC/FPLC. Purified protein samples were concentrated to approximately 12 mg ml⁻¹ and screened using JCSG+ and JCSG Core I-IV screens (Qiagen) on a 5-position deck Mosquito crystallization robot (ttplabtech) with an active humidity chamber. Crystals were obtained after 2 to 14 days by sitting drop vapor diffusion with drop ratios of 1:1, 2:1 and 1:2 protein solution to reservoir solution. The condition that resulted in the crystals that were used for structure determination was 0.2M di-Sodium tartrate, 20% (w/v) PEG 3350 and no cryoprotectant added.

### X-Ray Data Collection and Structure Determination

[0305] Protein crystals were looped and flash-frozen in liquid nitrogen. Datasets were collected at the Advanced Light Source at Lawrence Berkeley National Laboratory with beamlines 8.2.1 and 8.2.2. Data sets were indexed and scaled using XDS (34) and phase information was obtained by molecular replacement (MR) using PHASER™ (35) from the Phenix™ software package (36); design models were used for the initial MR searches. Following MR, models were improved using Phenix.autobuild (37); efforts were made to reduce model bias by setting rebuild-in-place to false, and using simulated annealing and prime-and-switch phasing. Iterative rounds of manual building in COOT™ (38) and refinement in Phenix™ were used to produce the final models. Translational non-crystallographic symmetry was present in the data as report by Phenix.Xtriage, which complicated structure refinement and may explain the higher than expected R-values reported. RMSDs of bond lengths, angles and dihedrals from ideal geometries were calculated using Phenix™ (36). The overall quality of the final models was assessed using MOLPROBITY™ (39). Table 16 summarizes diffraction data and refinement statistics.

### Bcl2 Labeling

[0306] For BLI experiments, wild-type non-optimized Bcl2 with C-terminal Avi and 6×His-tags was enzymatically biotinylated using BirA according to manufacturer protocols (Avidity), purified by Ni-NTA, eluted into TBS, concentrated, snap frozen in liquid nitrogen, and stored at −80° C. For flow cytometry experiments, Bcl2 with a C-terminal cysteine was purified by Ni-NTA and gel filtration as described above with the addition of 0.5 mM TCEP to the buffers. All fractions containing monomeric Bcl2 were combined, concentrated to 100 in TBS supplemented with 2% glycerol and 1 mM TCEP, and labeled overnight at 4° C. with a 5-fold molar excess of Alexa Fluor™ 594 C₅ Maleimide (Invitrogen A10256) or Alexa Fluor™ 680 C₂ Maleimide (Invitrogen A20344). The labeling reaction was then dialyzed overnight into TBS supplemented with 10% glycerol and purified by gel filtration as described above. Fractions containing monomeric protein were pooled, concentrated, and supplemented with glycerol to a final concentration of 10% v/v before being quantitated by absorbance at 280 nm, aliquoted, and snap frozen in liquid nitrogen. Protein aliquots were stable at −80° C. After thawing, protein aliquots were stored at 4° C. for up to one week.

### Bio-Layer Interferometry (BLI)

[0307] BLI measurements were made on an Octet® RED96 System (ForteBio) with streptavidin (SA) coated biosensors and analyzed using ForteBio Data Analysis Software version 9.0.0.10. Assay buffer was HBS-EP+ Buffer (10 mM HEPES, 150 mM NaCl, 3 mM EDTA, 0.05% v/v Surfactant P20, 0.5% non-fat dry milk, pH 7.4 at room temperature). Biotinylated Bcl2 protein was loaded onto the SA tips using a programmed threshold of 0.5 nm. Baseline was obtained by dipping the loaded biosensors into HBS-EP+ buffer; association kinetics were observed by dipping loaded biosensors into wells containing a range of LOCKR Cage and Key concentrations. Dissociation kinetics were observed by dipping tips into the HBS-EP+ Buffer wells that were used to obtain baseline. For FIG. 2 and FIG. 9b-e, Cage and Key were diluted simultaneously to maintain a 1:1 stoichiometric ratio.

### Mammalian Protein Expression and Purification

[0308] The scFv-targeted Co-LOCKR proteins (anti-Her2_Cage_I269S and Key_cetuximab) were produced using the Daedalus system as previously described (40). Proteins were purified on a HisTrap™ FF Crude protein purification column (GE cat #17528601) followed by size exclusion chromatography (GE Superdex 200 10/300 GL) and eluted in Dulbecco's phosphate-buffered saline supplemented with 5% glycerol.

Acquisition of T Cells from Healthy Donors

[0309] Healthy individuals >18 years-old were enrolled in Institutional Review Board-approved studies for peripheral blood collection. Informed consent was obtained from all enrollees. Researchers were provided donor age, nondescript donor ID number, and were blinded to all other personally-identifiable information about study participants. Peripheral blood mononuclear cells (PBMC) were isolated by density gradient using Lymphocyte Separation Media (Corning). CD8⁺ T cells were isolated using the EasySep™ Human CD8⁺ T Cell Isolation Kit (StemCell Technologies) in accordance with manufacturer's instructions.

### Cell Culture

[0310] K562 (CCL-243), Raji (CCL-86), A431 (CRL-1555), and HEK293T (CRL-3216) cells were obtained from American Type Culture Collection (ATCC). 293T LentiX cells were purchased from Clontech. SKBR3 cells were a gift from David Hockenbery (Fred Hutchinson Cancer Research Center). K562 and Raji cells were cultured in RPMI-1640 (Gibco) supplemented with 5% fetal bovine serum (FBS), 1 mM L-glutamine, 25 mM HEPES, and 100 U ml⁻¹ penicillin/streptomycin. A431, SKBR3, HEK293T, and LentiX cells were cultured in DMEM high glucose (Gibco) supplemented with 10% FBS, 1 mM L-glutamine, 25 mM HEPES, 100 U ml⁻¹ penicillin/streptomycin, and 1 mM pyruvate. Primary human T cells were cultured in CTL medium consisting of RPMI-1640 supplemented with 10% human serum, 2 mM L-glutamine, 25 mM HEPES, 100 U ml⁻¹ penicillin/streptomycin and 50 μM β-mercaptoethanol. All cells were cultured at 37° C. and 5% CO₂, and tested bi-monthly for the absence of mycoplasma using MycoAlert™ Mycoplasma Detection Kit (Lonza).

### Generation of K562 and HEK293T Cell Lines

[0311] HEK293T or LentiX cells were transiently transfected with psPAX2 (Addgene Plasmid #12260), pMD2.G (Addgene Plasmid #12259) packaging plasmids as well as a lentiviral vector encoding either Her2-eGFP, EGFR-iRFP (for K562 cells), or EGFR-mCherry™™ (for HEK293T cells) using linear 25-kDa polyethyleneimine (PEI; Polysciences). Two days later, viral supernatant was concentrated by centrifugation at 8000 g for 18 hours and added to K562 cells or HEK293T with 4 μg ml⁻¹ Polybrene (Sigma). Flow cytometry indicated that the Her2-eGFP and EGFR-iRFP cell lines were transduced to 98%, and the Her2-eGFP/EGFR-iRFP cell line was transduced to 88%.

[0312] Because K562 cells endogenously expressed low levels of EpCAM, EpCAM knockout (KO) cell lines were generated by nucleofection with the Alt-R® CRISPR-Cas9 system (IDT). Pre-designed crRNAs specific for the human EpCAM gene (Hs.Cas9.EPCAM.1.AA and Hs.Cas9.EPCAM.1.AB, IDT) were reconstituted in Nuclease-Free Duplex Buffer, mixed with tracrRNA at equimolar concentrations, annealed by heating to 95° C. for 5 minutes, followed by slow cooling to room temperature. crRNA-tracrRNA duplexes were combined and complexed with S.p. Cas9 Nuclease V3 and Cas9 Electroporation Enhancer for 15 minutes at room temperature. RNP complexes were added to K562 cell lines and nucleofection was performed using a 4D Nucleofector mCherry™ (Lonza) using SF Cell Line Buffer and FF-120 program according to manufacturer's instructions. Four days later, cells that stained negative for EpCAM were FACS-sorted to greater than 99% purity.

[0313] EpCAM high K562 cell lines were generated by transducing Her2-eGFP, Her2-eGFP/EGFR-iRFP, and parental K562 cells with an EpCAM-expressing lentivirus that had been prepared by transiently transfecting LentiX cells with psPAX2, pMD2.G and a lentiviral vector encoding human EpCAM (UniProt: P16422, aa1-314) using CalPhos™ Mammalian Transfection Kit (Clontech). Two days after transfection, viral supernatant was filtered using a 0.45 μm PES syringe filter (Millipore) and added to the cell lines with 4 μg ml⁻¹ Polybrene. Five days later, transduced cells that stained high for EpCAM, EGFR, or Her2 were FACS-sorted to greater than 95% purity. Bim-eGFP-expressing K562 cells were generated in an identical manner using a lentivirus encoding a membrane-tethered Bim-eGFP fusion protein (mIgK signal peptide, GS linker, Bim peptide, SGSG linker, eGFP, PDGFR transmembrane domain), and FACS-sorted for eGFP expression five days after transduction.

### Generation of Raji Cell Lines

[0314] LentiX™ cells were transiently transfected with psPAX2, pMD2.G as well as a lentiviral vector encoding either human EGFR (UniProt: P00533, aa1-1210), EpCAM (UniProt: P16422, aa1-314), or Her2 (UniProt: P04626, aa1-1255) using CalPhos™ Mammalian Transfection Kit. Two days later, viral supernatant was filtered using a 0.45 μm PES syringe filter and added to Raji cells. Five days later, transduced cells that stained positive for EGFR, EpCAM, or Her2 were FACS-sorted to greater than 95% purity.

### Flow Cytometry and Cell Phenotyping

[0315] Cells were stained with a 1:100 dilution of fluorophore-conjugated monoclonal antibodies specific for human CD5 (UCHT2), CD8 (SK1), EGFR (AY13), EpCAM (9C4), HA1.1 (16B12), or Her2 (24D2) purchased from ThermoFisher or Biolegend. Cells were also stained with isotype control fluorophore-conjugated antibodies when appropriate. For sorting EGFRt⁺ CAR T cells, Cetuximab (anti-EGFR, Bristol-Myers Squibb) was biotinylated using the EZ-Link™ Sulfo-NHS-Biotin Kit (ThermoFisher) followed by cleanup with the Zeba™ Spin Desalting Column (ThermoFisher) and used to stain T cells in conjunction with streptavidin-allophycocyanin (ThermoFisher). For Bcl2-AF594 binding measurements, K562 cell lines were combined into mixed populations with equal numbers of each cell type. Because EpCAM was not tagged with a fluorescent protein, two distinct populations were evaluated for each logic operation in FIG. 3: a “Low EpCAM” population contained K562/EpCAM^{lo}, K562/Her2-eGFP/EpCAM^{lo}, K562/EGFR-iRFP/EpCAM^{lo}, and K562/EGFR-iRFP/EpCAM^{lo} and the “High EpCAM” population contained K562/EpCAM^{lo}, K562/Her2-eGFP/EpCAM^{hi}, K562/EGFR-iRFP/EpCAM^{lo}, and K562/EGFR-iRFP/EpCAM^{hi}. The cell mixtures were washed with flow buffer (20 mM Tris pH 8.0, 150 mM NaCl, 1 mM MgCl₂, 1 mM CaCl₂ and 1% BSA) and aliquoted into V-bottom plates with 200,000 cells/well. Samples were incubated for one hour at room temperature with Bcl2-AF594 at 50 nM and Cage, Key and/or Decoy at a final concentration of 20 nM unless stated otherwise. Samples were washed once in 150 μl flow buffer, and then resuspended in 150 μl flow buffer 15-30 minutes before analysis.

[0316] Data were acquired on a LSRII or FACSCelesta™ (BD Biosciences). K562, Raji, and human T cells were FACS-purified using a FACSAria II™ (BD Biosciences). The absolute number of EGFR, EpCAM, and Her2 molecules on the surface of K562 and Raji cells was determined using Quantibrite™ beads (BD Biosciences) according to manufacturer's protocols. All flow cytometry data were analyzed using FlowJo™ (Treestar).

### Confocal Microscopy

[0317] HEK293T cells were grown in ibidi μ-slide 8 well coverslips for 1 day at 37° C. and 5% CO2 (ibidi 80826). Cell staining and incubation were performed in DMEM, high glucose, HEPES, no phenol red (Gibco 21063029). Cell nuclei were stained with Invitrogen Molecular Probes NucBlue™ Live ReadyProbes™ Reagent according to manufacturer's instructions (Invitrogen R37605). Cells were incubated in culture medium containing 1% BSA, 20 nM Her2_Cage-I269S, 20 nM Key_EGFR, and 50 nM Bcl2-AF680 for 1-2 hours at 37° C. and 5% CO₂. Images were acquired on a Leica SP8X confocal microscope and analyzed in Fiji.

### Confocal Microscopy Heat Map Analysis

[0318] Red, green, and blue (RGB) pseudocolors were assigned to the mCherry™, eGFP, and AF680 channels, respectively, in Fiji. Using a custom python script (see supplement), the ImageIO Python library was used to read the RGB PNG files, the SciPy Python library was used to generate a bidimensional binned statistic from the pseudocolored pixel intensities, and the Matplotlib™ library was used to visualize the results as a heat map.

### Human T Cell Culture and Transduction

[0319] To prepare CAR T cells, LentiX™ cells were transiently transfected with the CAR vector, psPAX2 and pMD2.G. One day later (day 1), primary T cells were activated using Dynabeads™ Human T-Activator CD3/CD28 (ThermoFisher) at a 3:1 bead to T cell ratio and cultured in CTL supplemented with 50 U ml⁻¹ IL-2 (Prometheus). The next day (day 2), lentiviral supernatant was harvested from LentiX™ cells, filtered using a 0.45 μm PES filter, and added to activated T cells. Polybrene was added to reach a final concentration of 4.4 mg ml⁻¹, and cells were spinoculated at 800 g for 90 minutes at 32° C. Viral supernatant was replaced 8 hours later with fresh CTL medium supplemented with 50 IU ml⁻¹ IL-2. Half-media changes were then performed every 48 hours using CTL supplemented with 50 IU ml⁻¹ IL-2. Dynabeads were removed on day 6, CD8⁺EGFRt⁺ transduced T cells were FACS-sorted on day 9, and purified CD8⁺EGFRt⁺ cells were rapidly expanded using 30 ng ml⁻¹ purified OKT3, γ-irradiated LCL, and γ-irradiated allogeneic PBMC at a LCL to T cell ratio of 100:1 and a PBMC to T cell ratio of 600:1. 50 IU ml⁻¹ IL-2 was added on day 1, OKT3 was washed out on day 4, cultures were fed with fresh CTL medium supplemented with 50 IU ml⁻¹ IL-2 every 2-3 days and resting T cells were assayed 11-12 days after stimulation. Non-transduced T cells (CD8⁺EGFRt⁻ T cells that were not transduced with lentivirus) were cultured identically and used as negative controls for CAR T assays.

### T Cell Functional Assays

[0320] T cell cytokine secretion was measured by co-culturing 50,000 non-transduced or CAR T cells with 25,000 γ-irradiated (10,000 rad) K562 or Raji cell lines to reach a T cell to tumor cell ratio of 2:1. Cytokine concentrations in cellular supernatant after 24 hours were quantified by human IFN-γ ELISA (ThermoFisher). T cell proliferation was assessed by staining CAR T cells with a 0.2 μM solution of carboxyfluorescein succinimidyl ester (CFSE) (ThermoFisher) or 1 μM solution of Cell Trace Violet (ThermoFisher) prior to co-culture with K562 or Raji cell lines at a 2:1 T cell to tumor cell ratio. After 72 hours, cells were harvested, stained with fluorescently labeled anti-human CD8 antibody, washed once, and analyzed by flow cytometry. The frequency of divided cells was calculated by drawing a “% Undivided” gate on the undivided peak in negative control samples and then setting a “% Divided” that bordered the first “% Undivided” gate. Mixed population tumor cell killing was assessed by labeling various Raji cell lines with either 1 μM or 2 nM solutions of Cell Trace Far Red (ThermoFisher) or 1 μM or 5 nM solutions of Cell Trace Violet for 10 minutes at 37° C. Labeling was quenched using FBS and equal numbers of cells were combined to form mixed populations. 150,000 T cells and 150,000 Raji cells were distributed into a 48-well plate to reach a T cell to total tumor cell ratio of 1:1. Killing was quantified after 48 hours by harvesting all cells and performing surface staining with PE-Cy7 anti-human CD5 (to identify T cells) and Live/Dead Fixable Green Stain (ThermoFisher). For Chromium release assays, tumor cells were labeled with ⁵¹Cr (PerkinElmer) for 16 hours at 37° C., washed with RPMI, and plated with 1,000 ⁵¹Cr-labeled target cells per well. T cells were added in triplicate at various effector to target (E:T) ratios and incubated at 37° C., 5% CO₂ for four hours. Supernatants were then harvested for γ-counting, and specific lysis was calculated by comparing counts to standardized wells in which target cells were lysed with a NP40-based soap solution. Each Cage, Key, and/or Decoy protein was used at 20 nM unless otherwise specified.

### Statistical Analysis

[0321] Statistical analyses were performed using Prism™ (GraphPad). An ordinary one-way ANOVA test followed by Dunnett's post-hoc test was used to compare Co-LOCKR-induced targeting (FIG. 3a, c, e) and CAR T cell cytokine production (FIG. 4). For ‘AND’ targeting, the control group was set as the double-negative cell line; for ‘OR’ and ‘NOT’ targeting the control group was set as the triple-negative cell line. Only p-values meeting a statistically significant cutoff of alpha=0.05 are indicated on graphs. * denotes p<0.05, ** denotes p<0.01, *** denotes p<0.001, **** denotes p<0.0001.

TABLE 16
X-ray crystallography data collection and refinement statistics.

| Wavelength | 0.9999 | |
|---|---|---|
| Resolution range | 42.38-2.10 (2.18-2.10) | |
| Space group | P 1 21 1 | |
| Unit cell | 61.841 52.914 75.591 | |
| | 90 102.638 90 | |
| Total reflections | 123167 | (10501) |
| Unique reflections | 27650 | (2448) |
| Multiplicity | 4.5 | (4.3) |
| Completeness (%) | 85.21 | (69.05 |
| Mean I/sigma(I) | 4.93 | (0.92) |
| Wilson B-factor | 19.07 | |
| R-merge | 0.1749 | (1.117) |
| R-meas | 0.1993 | (1.276) |
| R-pim | 0.09414 | (0.6093) |
| CC1/2 | 0.996 | (0.671) |
| CC* | 0.999 | (0.896) |
| Reflections used in refinement | 23829 | (1892) |
| Reflections used for R-free | 1736 | (137) |
| R-work | 0.2574 | (0.3125) |
| R-free | 0.2881 | (0.2983) |
| CC (work) | 0.938 | (0.792) |
| CC (free) | 0.922 | (0.842) |

| | |
|---|---|
| Number of non-hydrogen atoms | 4467 |
| macromolecules | 4277 |
| solvent | 190 |
| Protein residues | 564 |
| RMS (bonds) | 0.005 |
| RMS (angles) | 0.89 |
| Ramachandran favored (%) | 99.10 |
| Ramachandran allowed (%) | 0.90 |
| Ramachandran outliers (%) | 0.0 |
| Rotamer outliers (%) | 1.29 |
| Clashscore | 10.5 |
| Average B-factor | 32.95 |
| macromolecules | 32.96 |
| solvent | 32.58 |

Statistics for the highest-resolution shell are shown in parentheses.

TABLE 17
Co-LOCKR logic.

| Co-LOCKR | Logic operation |
|---|---|
| CL_C_{H}K_{H} | H |
| CL_C_{E}K_{E} | E |
| CL_C_{Ep}K_{Ep} | Ep |
| CL_C_{H}K_{E} | H AND E |
| CL_C_{E}K_{H} | H AND E |
| CL_C_{H}K_{Ep} | H AND Ep |
| CL_C_{Ep}K_{H} | H AND Ep |
| CL_C_{E}K_{Ep} | E AND Ep |
| CL_C_{Ep}K_{E} | E AND Ep |
| CL_C_{H}K_{E}K_{Ep} | H AND either E OR Ep |
| CL_C_{E}K_{H}K_{Ep} | E AND either H OR Ep |
| CL_C_{Ep}K_{H}K_{E} | Ep AND either H OR E |
| CL_C_{H}K_{Ep}D_{E} | H AND Ep NOT E |
| CL_C_{Ep}K_{H}D_{E} | H AND Ep NOT E |

### #Custom Python Script for Confocal Microscopy Heat Map Analysis:

```
#!/usr/bin/env python3
# -*- coding: utf-8 -*-
″″″
Created on Thu Jun 6 13:47:38 2019
@author: audreyolshefsky
Heat map for co-LOCKR confocal RGB image pixel intensities.
Red is on the x-axis, green is on the y-axis, and blue is the heat.
″″″
import imageio
from scipy import stats
import matplotlib.pyplot as plt
def heatmap(image):
  im = imageio.imread(image)
  # copy of image data is quicker to access
  imcopy = im
  #print(imcopy.shape) #RGB shape is (1024, 1024, 3)
  pixel_list =[ ]
  counter = 0
  for y in range(imcopy.shape[0]):
    for x in range(imcopy.shape[1]):
      counter += 1
      #print(counter)
      color =tuple(imcopy[y][x])
      #r, g, b =color
      pixel_list.append(color)
r =[x[0]for x in pixel_list]
g =[x[1]for x in pixel_list]
b =[x[2]for x in pixel_list]
binned_data =stats.binned_statistic_2d(r, g, b)
im =plt.imshow(binned_data[0].T, cmap=′plasma′, origin=′lower′,
extent=[0, 255, 255])
cb = plt.colorbar( )
cb.set_label(′AF680 mean pixel intensity (Bcl2)′)
plt.xlabel(′mCherryTM pixel intensity (EGFR)′)
plt.ylabel(′eGFP pixel intensity (HER2)′)
plt.savefig(image [:-4]+′_heatmap.png′)
```

### #RosettaScripts XML Used to Design Co-LOCKR

```
# Rosetta XML script to redesign LOCKR to be more asymmetric
# Original scaffold was built from symmetric homotrimer (Boyken 2016)
# Scott Boyken and Marc Lajoie
<ROSETTASCRIPTS>
  <SCOREFXNS>
    <ScoreFunction name=″hard″ weights=″beta/>
  </SCOREFXNS>
  <RESIDUE_SELECTORS>
    <Index name=″latch″ resnums=″302-350″/>
    <Index name=″cage″ resnums=″1-301″/>
      #preserve original hydrogen bond networks
    <Index name=″HBNet″
resnums=″9,12,24,27,30,45,48,75,93,111,130,133,148,151,166,169,196,214,232,251,254,269,272,287,290,335,
339″/>
    <InterfaceByVector name=″switch_interface″grp1_selector=″latch″grp2_selector=″cage″/>
    <And name=″main_scaffold″>
      <Not selector=″switch_interface″/>
      <Not selector=″HBNe″t/>
      <Secondary Structure ss=″H″/>
    </And>
    <Not name=″no_design″selector=″main_scaffold/>
  </RESIDUE_SELECTORS>
  <TASKOPERATIONS>
      <OperateOnResidueSubset name=″repack_new″selector=″no_design″>
        <PreventRepackingRLT/>
      </OperateOnResidueSubset>
  </TASKOPERATIONS>
  <MOVERS>
    <SwitchChainOrder name=″rechain″chain_order=″12″/>
      #search for new hydrogen bond networks while preserving the original networks
    <HBNetStapleInterface scorefxn=″hard″ name=″hbnet″ design_residues=″HYNQST″
task_operations=″repack_new″ hb_threshold=″-0.5″ minimize=″true″ show_task=″true″ verbose=″true″
all_helical_interfaces=″true″ min_connectivity=″0.6″ min_helices_contacted_by_network=″2″
min_networks_per_pose=″1″ max_networks_per_pose=″3″ min_network_size=″3″ min_core_res=″2″
max_unsat=″3″ max_replicates_before_branch=″3″ use_aa_dependent_weights=″true″
write_network_pdbs=″true″write_cst_files=″false/>
    <MultiplePoseMover name=″switch_peptide_design_MPM″ max_input_poses=″100″>
      <ROSETTASCRIPTS>
        <SCOREFXNS>
        <ScoreFunction name=″hard″ weights=″beta″/>
        <ScoreFunction name=″hard_cart″ weights=″beta_cart″/>
        <ScoreFunction name=″soft_cst″ weights=″/home/sboyken/weights/beta_soft_rep_cst.wts″/>
        <ScoreFunction name=″hard_cst″weights=″beta_cst″/>
        <ScoreFunction name=″up_ele″weights=″beta″>
          <Reweight scoretype=″fa_elec″weight=″1.4″/>
          <Reweight scoretype=″hbond_sc″weight=″2.0″/>
        </ScoreFunction>
      </SCOREFXNS>
      <RESIDUE_SELECTORS>
        <Layer name=″hbnet_core″ select_core=″true″ core_cutoff=″3.6″/>
        <And name=″terminal_loop″>
          <Secondary Structure ss=″L″ include_terminal_loops=″true″ use_dssp=″true″/>
          <Index resnums=″1-15″/>
          <Chain chains=″A″/>
        </And>
        <Secondary Structure name=″loops″ use_dssp=″true″ ss=″L″/>
        <Not name=″not_redesign″ selector=″loops″/>
        <Layer name=″pick_core_and_boundary″ select_core=″true″ select_boundary=″true″
core_cutoff=″5.2″/>
        <Layer name=″pick_core_and_surface″ select_core=″true″ select_surface=″true″
core_cutoff=″5.2″/>
        <Layer name=″pick_surface_and_boundary″ select_surface=″true″ select_boundary=″true″
core_cutoff=″5.2″/>
        <Chain name=″chain_a″ chains=″A″/>
        <Layer name=″core″ select_core=″true″ core_cutoff=″5.2″/>
        <ResidueName name=″ala_and_mer residue_name3=″ALA,MET″I>
        <Not name=″not_ala_or_met″ selector=″ala_and_met″/>
        <!-- <ResiduePDBInfoHasLabel name=″hbnet_residues″ property=″HBNet″ /> -->
        <Index name=″latch″ resnums=″302-350″/>
        <Index name=″cage″ resnums=″1-301″/>
        <Index name=″HBNet″
resnums=″9,12,24,27,30,45,48,75,93,111,130,133,148,151,166,169,196,214,232,251,254,269,272,287,290,335,
339″/>
        <InterfaceByVector name=″switch_interface″ grp1_selector=″latch″ grp2_selector=″cage″/>
        # select all residues to not touch during design
        <And name=″main_scaffold″>
          <Not selector=″switch_interface″>
            # to repack HBNet res with AtomPair csts during design, comment this line out; use
″hbnet_task″
            # leave it in to make HBNet rotamers fixed
          <Not selector=″HBNet″/>
          <Secondary Structure ss=″H″/>
        </And>
        <Not name=″no_design″ selector=″main_scaffold″/>
      </RESIDUE_SELECTORS>
      <TASKOPERATIONS>
        <ConsensusLoopDesign name=″disallow_non_abego_aas″/>
        <LayerDesign name=″layer_all″ layer=″core_boundary_surface_Nterm_Cterm″
make_pymol_script=″0″ use_sidechain_neighbors=″True″ core=″4.2″>
          <core>
            Helix append=″M″ />
            <Helix exclude=″WY″ />
          </core>
          <boundary>
            <Helix exclude=″WMY″ />
          </boundary>
          <surface>
            <Helix append=″A″/>
          </surface>
        </LayerDesign>
        <OperateOnResidueSubset name=″loop_design″ selector=″not_redesign″>
          <PreventRepackingRLT/>
        </OperateOnResidueSubset>
        <OperateOnResidueSubset name=″repack_new″s elector=″no_design″>
          <PreventRepackingRLT/>
        </OperateOnResidueSubset>
        <OperateOnResidueSubset name=″design_core″ selector=″pick_surface_and_boundary″>
          <PreventRepackingRLT/>
        </OperateOnResidueSubset>
        <OperateOnResidueSubset name=″design_boundary″ selector=″pick_core_and_surface″>
          <PreventRepackingRLT/>
        </OperateOnResidueSubset>
        <OperateOnResidueSubset name=″design_surface″ selector=″pick_core_and_boundary″>
          <PreventRepackingRLT/>
        </OperateOnResidueSubset>
        <OperateOnResidueSubset name=″repack_not_ala_or_met″ selector=″not_ala_or_met″>
          <RestrictToRepackingRLT/>
        </OperateOnResidueSubset>
        <OperateOnResidueSubset name=″redesign_ala_met″ selector=″ala_and_met″>
          <RestrictAbsentCanonicalAASRLT aas=″AMIL VF″ />
        </OperateOnResidueSubset>
        <InitializeFromCommandline name=″init″/>
        <ConstrainHBondNetwork name=″hbnet_task″ />
        <IncludeCurrent name=″current″/>
        <LimitAromaChi2 name=″arochi″/>
        <ExtraRotamersGeneric name=″ex1_ex2″ ex1=″1″ ex2=″1″/>
        <ExtraRotamersGeneric name=″ex1″ ex1=″1″/>
        <RestrictAbsentCanonicalAAS name=″ala_only″ resnum=″0″ keep_aas=″A″/>
        <RestrictToRepacking name=″repack_only″/>
        BundleReporter name=bundle_filter scorefxn=hard/>
      </TASKOPERATIONS>
      <MOVERS>
        <PackRotamersMover name=″softpack_core″ scorefxn=″soft_cst″
task_operations=″layer_all,design_core,current,arochi,disallow_non_abego_aas,repack_new,hbnet_task″/>
        <PackRotamersMover name=″softpack_boundary″ scorefxn=″soft_cst″
task_operations=″layer_all,design_boundary,currentarochi,disallow_non_abego_aas,repack_new,hbnet_task″/>
        <PackRotamersMover name=″softpack_surface″ scorefxn=″soft_cst″
task_operations=″layer_all,design_surface,currentarochi,disallow_non_abego_aas,repack_new,hbnet_task″/>
        <PackRotamersMover name=″hardpack_core″ scorefxn=″hard_cst″
task_operations=″layer_all,design_core,current,arochi,exl_ex2,disallow_non_abego_aas,repack_new,hbnet_
task″/>
        <PackRotamersMover name=″hardpack_boundary″ scorefxn=″hard_cst″
task_operations=″layer_all,design_boundary,currentarochi,exl_ex2,disallow_non_abego_aas,repack_new,
hbnet_task″/>
        <PackRotamersMover name=″hardpack_surface″ scorefxn=″up_ele″
task_operations=″layer_all,design_surface,current,arochi,exl,disallow_non_abego_aas,repack_new,hbnet_task″
/>
        <PackRotamersMover name=″design_loops″ scorefxn=″hard_cst″
task_operations=″currentarochi,ex1_ex2,loop_design,layer_all,disallow_non_abego_aas,hbnet_task″/>
        <DumpPdb name=″dump1″ fname=″dump1.pdb″ scorefxn=″hard″/>
        ConnectChainsMover name=closer chain_connections=″[A+B],[B+A]″/>
        InterfaceAnalyzerMover name=interface_analyzer scorefxn=hard packstat=1 pack_separated=0 />
        <MinMover name=″hardmin_sconly″ scorefxn=″hard_cst″ chi=1″bb=″0″ bondangle=″0″
bondlength=″0″/>
      </MOVERS>
      <PROTOCOLS>
        <Add mover=″softpack_core″/>
        <Add mover=″softpack_boundary″/>
        <Add mover=″softpack_surface″/>
        <Add mover=″hardmin_sconly″/>
        <Add mover=″hardpack_core″/>
        <Add mover=″hardpack_boundary″/>
        <Add mover=″hardpack_surface″/>
      </PROTOCOLS>
    </ROSETTASCRIPTS>
  </MultiplePoseMover>
  <MultiplePoseMover name=″MPM_filters″>
    <ROSETTASCRIPTS>
      <SCOREFXNS>
        <ScoreFunction name=″hard_cst″weights=″beta_cst″/>
      </SCOREFXNS>
      <RESIDUE_SELECTORS>
        <Chain name=″peptide″chains=″B″/>
        <Chain name=″SB76_trunc″chains=″A″/>
        <InterfaceByVector name=″scaffold_interface″>
          <Chain chains=″A″/>
          <Not selector=″SB76_trunc″/>
        </InterfaceByVector>
      </RESIDUE_SELECTORS>
      <TASKOPERATIONS>
        <LayerDesign name=″layer_all″ layer=″core_boundary_surface_Nterm_Cterm″
make_pymol_script=″0″ use_sidechain_neighbors=″True″ core=″5.2″>
          <core>
            Helix append=″M″ />
              <Helix exclude=″WY″ />
          </core>
          <boundary>
            <Helix exclude=″DWMY″ />
          </boundary>
          <surface>
            <Helix append=″A″/>
          </surface>
        </LayerDesign>
      </TASKOPERATIONS>
      <FIL lERS>
        <PreProline name=″prepro″ use_statistical_potential=″0″ />
        <ScoreType name=″scorefilter″ scorefxn=″hard_cst″ score_type=″total_score″ threshold=″0.0″
confidence=″0″ />
        <EnzScore name=″cst_score″ score_type=″cstE″ scorefxn=″hard_cst″ whole_pose=″1″
energy_cutoff=″5″ confidence=″0″!>
        <BuriedUnsatHbonds name=″buns3″ scorefxn=″beta″ cutoff=″10″ print_out_info_to_pdb=″true″
use_hbnet_behavior=″true″ confidence=″0″/>
        <ResidueCount name=″ala_count″ max_residue_count=″15″ residue_types=″ALA″
residue_selector=″scaffold_interface″ confidence=″0″/>
      </FILTERS>
      <PROTOCOLS>
        <Add filter=″scorefilter″/>
        <Add filter=″cst_score″/>
        <Add filter=″ala_coune/>
        <Add filter=″buns3″/>
      </PROTOCOLS>
    </ROSETTASCRIPTS>
  </MultiplePoseMover>
</MOVERS>
<PROTOCOLS>
    <Add mover=″hbnet″/>
    <Add mover=″switch_peptide_design_MPM″/>
    <Add mover=″MPM_filters″/>
  </PROTOCOLS>
</ROSETTASCRIPTS>
```

### All Amino Acid Sequences

### Modular Sequences:

[0324] 1. Co-LOCKR is comprised of one or more Cage polypeptides, one or more Key polypeptides, and optionally one or more Decoy polypeptides, wherein
   [0325] a. The Cage polypeptide is comprised of one or more modular targeting moieties, one or more modular Co-LOCKR Cage domains, and optionally one or more modular Co-LOCKR linkers
   [0326] b. The Key polypeptide is comprised of one or more modular targeting moieties, one or more modular Co-LOCKR Key domains, and optionally one or more modular Co-LOCKR linkers
   [0327] c. The Decoy polypeptide is comprised of one or more modular targeting moieties, one or more modular Co-LOCKR Decoy domains, and optionally one or more modular Co-LOCKR linkers
      Modular targeting moieties: See Table 10

TABLE 14
Modular Co-LOCKR Linkers

>Linker1 YKDEHHHHHHGGSENLYFQGSG (SEQ ID NO: 27479)
>Linker2 GGGSGSGSGSGKPGQASGS(SEQ ID NO: 27480)
>Linker3 GSGSGKPGQASG (SEQ ID NO: 27481)
>Linker4 GGS (SEQ ID NO: 27482)
>Linker5 SGSGSGKPGQASGS (SEQ ID NO: 27483)
>Linker6 YPYDVPDYA (SEQ ID NO: 27484)
>Linker7 SGSG (SEQ ID NO: 27485)
>Linker8 NWSHPQFEK (SEQ ID NO: 27486)
>Linker9
SGSGSGSGSGSGSGSGSGSGSGSGSGSGSGSGSGSGSGSGSGSGSGSGSG
SGSGSGSGKPGQASGS (SEQ ID NO: 27487)
>Linker10 GGGGS (SEQ ID NO: 27488)

Modular Co-LOCKR Cage domains: See Table 1.
Co-LOCKR Cage and Decoy proteins: See Table 11.
Modular Co-LOCKR Key domains: See Table 4.
Co-LOCKR Key proteins: See Table 12.
Effector proteins: See Table 13.

TABLE 15
DARPin positive controls with N-terminal fusions
to Bim
Residues in parentheses are optional

>Bim_Her2 Her2 DARPin tagged with N-terminal Bim
peptide (SEQ ID NO: 27476)
(MGSHHHHHHGSGSENLYFQGS)TDEIWIAQELRRIGDEFNAYYASGSGD
LGKKLLEAARAGQDDEVRILMANGADVNAKDEYGLTPLYLATAHGHLEIV
EVLLKNGADVNAVDAIGFTPLHLAAFIGHLEIAEVLLKHGADVNAQDKFG
KTAFDISIGNGNEDLAEILQKLN
>Bim_EGFR EGFR DARPin tagged with N-terminal Bim
peptide (SEQ ID NO: 27477)
(MGSHHHHHHGSGSENLYFQGS)TDEIWIAQELRRIGDEFNAYYASGSGD
LGKKLLEAARAGQDDEVRILMANGADVNADDTWGWTPLHLAAYQGHLEIV
EVLLKNGADVNAYDYIGWTPLHLAADGHLEIVEVLLKNGADVNASDYIGD
TPLHLAAHNGHLEIVEVLLKHGADVNAQDKFGKTAFDISIDNGNEDLAEI
LQKLN
>Bim_EpCAM EpCAM DARPin tagged with N-terminal
Bim peptide (SEQ ID NO: 27478)
(MGSHHHHHHGSGSENLYFQGS)TDEIWIAQELRRIGDEFNAYYASGSGD
LGKKLLEAARAGQDDEVRILVANGADVNAYFGTTPLHLAAAHGRLEIVEV
LLKNGADVNAQDVWGITPLHLAAYNGHLEIVEVLLKYGADVNAHDTRGWT
PLHLAAINGHLEIVEVLLKNVADVNAQDRSGKTPFDLAIDNGNEDIAEVL
QKAAKLN

TABLE 16
Target proteins

>Her2-eGFP; hsHER2_ecd_tm-eGFP; Lentiviral transduction for making Her2+ K562 cells
(enhancedGFP+) (SEQ ID NO: 27470)
MELAALCRWGLLLALLPPGAASTQVCTGTDMKLRLPASPETHLDMLRHLYQGCQVVQGNLELTYLPTNASLSFLQDIQEVQGY
VLIAHNQVRQVPLQRLRIVRGTQLFEDNYALAVLDNGDPLNNTTPVTGASPGGLRELQLRSLTEILKGGVLIQRNPQLCYQDT
ILWKDIFHKNNQLALTLIDTNRSRACHPCSPMCKGSRCWGESSEDCQSLTRTVCAGGCARCKGPLPTDCCHEQCAAGCTGPKH
SDCLACLHFNHSGICELHCPALVTYNTDTFESMPNPEGRYTFGASCVTACPYNYLSTDVGSCTLVCPLHNQEVTAEDGTQRCE
KCSKPCARVCYGLGMEHLREVRAVTSANIQEFAGCKKIFGSLAFLPESFDGDPASNTAPLQPEQLQVFETLEEITGYLYISAW
PDSLPDLSVFQNLQVIRGRILHNGAYSLTLQGLGISWLGLRSLRELGSGLALIHHNTHLCFVHTVPWDQLFRNPHQALLHTAN
RPEDECVGEGLACHQLCARGHCWGPGPTQCVNCSQFLRGQECVEECRVLQGLPREYVNARHCLPCHPECQPQNGSVTCFGPEA
DQCVACAHYKDPPFCVARCPSGVKPDLSYMPIWKFPDEEGACQPCPINCTHSCVDLDDKGCPAEQRASPLTSIISAVVGILLV
VVLGVVFGILIKRRQQKGGTMVSKGEELFTGVVPILVELDGDVNGHKFSVSGEGEGDATYGKLTLKFICTTGKLPVPWPTLVT
TLTYGVQCFSRYPDHMKQHDFFKSAMPEGYVQERTIFFKDDGNYKTRAEVKFEGDTLVNRIELKGIDFKEDGNILGHKLEYNY
NSHNVYIMADKQKNGIKVNFKIRHNIEDGSVQLADHYQQNTPIGDGPVLLPDNHYLSTQSALSKDPNEKRDHMVLLEFVTAAG
ITLGMDELYK
>EGFR-iRFP; hsEGFR_ecd_tm-iRFP; Lentiviral transduction for making EGFR+ K562 cells
(infraredRFP+) (SEQ ID NO: 27471)
MRPSGTAGAALLALLAALCPASRALEEKKVCQGTSNKLTQLGTFEDHFLSLQRMFNNCEVVLGNLEITYVQRNYDLSFLKTIQ
EVAGYVLIALNTVERIPLENLQIIRGNMYYENSYALAVLSNYDANKTGLKELPMRNLQEILHGAVRFSNNPALCNVESIQWRD
IVSSDFLSNMSMDFQNHLGSCQKCDPSCPNGSCWGAGEENCQKLTKIICAQQCSGRCRGKSPSDCCHNQCAAGCTGPRESDCL
VCRKFRDEATCKDTCPPLMLYNPTTYQMDVNPEGKYSFGATCVKKCPRNYVVTDHGSCVRACGADSYEMEEDGVRKCKKCEGP
CRKVCNGIGIGEFKDSLSINATNIKHFKNCTSISGDLHILPVAFRGDSFTHTPPLDPQELDILKTVKEITGFLLIQAWPENRT
DLHAFENLEIIRGRTKQHGQFSLAVVSLNITSLGLRSLKEISDGDVIISGNKNLCYANTINWKKLFGTSGQKTKIISNRGENS
CKATGQVCHALCSPEGCWGPEPRDCVSCRNVSRGRECVDKCNLLEGEPREFVENSECIQCHPECLPQAMNITCTGRGPDNCIQ
CAHYIDGPHCVKTCPAGVMGENNTLVWKYADAGHVCHLCHPNCTYGCTGPGLEGCPTNGPKIPSIATGMVGALLLLLVVALGI
GLFMRRRHIVRKRGGTMAEGSVARQPDLLTCDDEPIHIPGAIQPHGLLLALAADMTIVAGSDNLPELTGLAIGALIGRSAADV
FDSETHNRLTIALAEPGAAVGAPITVGFTMRKDAGFIGSWHRHDQLIFLELEPPQRDVAEPQAFFRRTNSAIRRLQAAETLES
ACAAAAQEVRKITGFDRVMIYRFASDFSGEVIAEDRCAEVESKLGLHYPASTVPAQARRLYTINPVRIIPDINYRPVPVTPDL
NPVTGRPIDLSFAILRSVSPVHLEFMRNIGMHGTMSISILRGERLWGLIVCHHRTPYYVDLDGRQACELVAQVLAWQIGVMEE
>Bim-eGFPligand Lentiviral transduction for making K562 positive control target
cells with membrane-tethered Bim-eGFP (SEQ ID NO: 27472)
METDTLLLWVLLLWVPGSTGDGSEIWIAQELRRIGDEFNAYYASGSGMVSKGEELFTGVVPILVELDGDVNGHKFSVSGEGEG
DATYGKLTLKFICTTGKLPVPWPTLVTTLTYGVQCFSRYPDHMKQHDFFKSAMPEGYVQERTIFFKDDGNYKTRAEVKFEGDT
LVNRIELKGIDFKEDGNILGHKLEYNYNSHNVYIMADKQKNGIKVNFKIRHNIEDGSVQLADHYQQNTPIGDGPVLLPDNHYL
STQSALSKDPNEKRDHMVLLEFVTAAGITLGMDELYKNAVGQDTQEVIVVPHSLPFKVVVISAILALVVLTIISLIILIMLWQ
KKPR
>hsHer2 Lentiviral transduction for making Her2+ Raji cells (no fluorescent
protein) (SEQ ID NO: 27473)
[sequence omitted]
>hsEGFR Lentiviral transduction for making EGFR+ Raji cells (no fluorescent
protein) (SEQ ID NO: 27474)
MRPSGTAGAALLALLAALCPASRALEEKKVCQGTSNKLTQLGTFEDHFLSLQRMFNNCEVVLGNLEITYVQRNYDLSFLKTIQ
EVAGYVLIALNTVERIPLENLQIIRGNMYYENSYALAVLSNYDANKTGLKELPMRNLQEILHGAVRFSNNPALCNVESIQWRD
IVSSDFLSNMSMDFQNHLGSCQKCDPSCPNGSCWGAGEENCQKLTKIICAQQCSGRCRGKSPSDCCHNQCAAGCTGPRESDCL
VCRKFRDEATCKDTCPPLMLYNPTTYQMDVNPEGKYSFGATCVKKCPRNYVVTDHGSCVRACGADSYEMEEDGVRKCKKCEGP
CRKVCNGIGIGEFKDSLSINATNIKHFKNCTSISGDLHILPVAFRGDSFTHTPPLDPQELDILKTVKEITGFLLIQAWPENRT
DLHAFENLEIIRGRTKQHGQFSLAVVSLNITSLGLRSLKEISDGDVIISGNKNLCYANTINWKKLFGTSGQKTKIISNRGENS
CKATGQVCHALCSPEGCWGPEPRDCVSCRNVSRGRECVDKCNLLEGEPREFVENSECIQCHPECLPQAMNITCTGRGPDNCIQ
CAHYIDGPHCVKTCPAGVMGENNTLVWKYADAGHVCHLCHPNCTYGCTGPGLEGCPTNGPKIPSIATGMVGALLLLLVVALGI
GLFMRRRHIVRKRTLRRLLQERELVEPLTPSGEAPNQALLRILKETEFKKIKVLGSGAFGTVYKGLWIPEGEKVKIPVAIKEL
REATSPKANKEILDEAYVMASVDNPHVCRLLGICLTSTVQLITQLMPFGCLLDYVREHKDNIGSQYLLNWCVQTAKGMNYLED
RRLVHRDLAARNVLVKTPQHVKITDFGLAKLLGAEEKEYHAEGGKVPIKWMALESILHRIYTHQSDVWSYGVTVWELMTFGSK
PYDGIPASEISSILEKGERLPQPPICTIDVYMIMVKCWMIDADSRPKFRELIIEFSKMARDPQRYLVIQGDERMHLPSPTDSN
FYRALMDEEDMDDVVDADEYLIPQQGFFSSPSTSRTPLLSSLSATSNNSTVACIDRNGLQSCPIKEDSFLQRYSSDPTGALTE
DSIDDTFLPVPEYINQSVPKRPAGSVQNPVYHNQPLNPAPSRDPHYQDPHSTAVGNPEYLNTVQPTCVNSTFDSPAHWAQKGS
HQISLDNPDYQQDFFPKEAKPNGIFKGSTAENAEYLRVAPQSSEFIGA
>hsEpCAM Lentiviral transduction for making EpCAM+ K562 and Raji cells (no
fluorescent protein) (SEQ ID NO: 27475)
MAPPQVLAFGLLLAAATATFAAAQEECVCENYKLAVNCFVNNNRQCQCTSVGAQNTVICSKLAAKCLVMKAEMNGSKLGRRAK
PEGALQNNDGLYDPDCDESGLFKAKQCNGTSTCWCVNTAGVRRTDKDTEITCSERVRTYWIIIELKHKAREKPYDSKSLRTAL
QKEITTRYQLDPKFITSILYENNVITIDLVQNSSQKTQNDVDIADVAYYFEKDVKGESLFHSKKMDLTVNGEQLDLDPGQTLI
YYVDEKAPEFSMQGLKAGVIAVIVVVVIAVVAGIVVLVISRKKRMAKYEKAEIKEMGEMHRELNA

>Bcl2 CAR Co-LOCKR CAR T cell recruitment
SEQ ID NO: 27489
METDTLLLWVLLLWVPGSTGDYKDEYPYDVPDYAGSAHAGRTGYDNRE
IVMKYIHYKLSQRGYEWDAGDDAEENRTEAPEGTESEVVHRALRDAGD
DFERRYRRDFAEMSSQLHLTPDTARQRFETVVEELFRDGVNWGRIVAF
FEFGGVMCVESVNREMSPLVDNIAEWMTEYLNRHLHTWIQDNGGWDAF
VELYGPSMRGGGGSGGGGSESKYGPPCPPCPAPPVAGPSVFLFPPKPK
DTLMISRTPEVTCVVVDVSQEDPEVQFNWYVDGVEVHNAKTKPREEQF
QSTYRVVSVLTVLHQDWLNGKEYKCKVSNKGLPSSIEKTISKAKGQPR
EPQVYTLPPSQEEMTKNQVSLTCLVKGFYPSDIAVEWESNGQPENNYK
TTPPVLDSDGSFFLYSRLTVDKSRWQEGNVFSCSVMHEALHNHYTQKS
LSLSLGKMFWVLVVVGGVLACYSLLVTVAFTIFWVRSKRSRGGHSDYM
NMTPRRPGPTRKHYQPYAPPRDFAAYRSRVKFSRSADAPAYQQGQNQL
YNELNLGRREEYDVLDKRRGRDPEMGGKPRRKNPQEGLYNELQKDKMA
EAYSEIGMKGERRRGKGHDGLYQGLSTATKDTYDALHMQALPPRLEGG
GEGRGSLLTCGDVEENPGPRMLLLVTSLLLCELPHPAFLLIPRKVCNG
IGIGEFKDSLSINATNIKHFKNCTSISGDLHILPVAFRGDSFTHTPPL
DPQELDILKTVKEITGFLLIQAWPENRTDLHAFENLEIIRGRTKQHGQ
FSLAVVSLNITSLGLRSLKEISDGDVIISGNKNLCYANTINWKKLFGT
SGQKTKIISNRGENSCKATGQVCHALCSPEGCWGPEPRDCVSCRNVSR
GRECVDKCNLLEGEPREFVENSECIQCHPECLPQAMNITCTGRGPDNC
IQCAHYIDGPHCVKTCPAGVMGENNTLVWKYADAGHVCHLCHPNCTYG
CTGPGLEGCPTNGPKIPSIATGMVGALLLLLVVALGIGLFM

We claim:

1. A method of increasing selectivity of a cell for a chimeric antigen receptor (CAR) T cell therapy comprising
(a) contacting cells with a first cage polypeptide fused to a first binding domain, wherein the first cage polypeptide comprises (i) a structural region and (ii) a latch region further comprising one or more bioactive peptides, wherein the structural region interacts with the latch region to prevent activity of the one or more bioactive peptides in the absence of colocalization with a key polypeptide and wherein the first binding domain is capable of binding to a first cell moiety present on or within a cell; and
(b) contacting the cell with a first key polypeptide fused to a second binding domain, wherein upon colocalization with the first cage polypeptide, the first key polypeptide is capable of binding to the cage structural region to activate the one or more bioactive peptides, wherein the second binding domain is capable of binding to a second cell moiety present on or within the cell,
wherein the first cell moiety and the second cell moiety are different or the same.

2. The method of claim 1, wherein the first cell moiety and the second cell moiety are different.

3. The method of claim 1, wherein the first cell moiety and the second cell moiety are the same.

4. The method of claim 3, wherein the colocalization of the first cage polypeptide and the key polypeptide first key polypeptide increases selectivity of an effector toward a cell comprising the first cell moiety and the second cell moiety.

5. The method of any one of claims 1 to 4, wherein the contacting (a) and contacting (b) are performed concurrently or sequentially.

6. The method of any one of claims 1 to 5, wherein the first cell moiety and the second cell moiety are in close proximity to each other; optionally wherein:
(a) the first cell moiety and the second cell moiety are colocalized as a result of directly or indirectly forming a complex; and/or
(b) the first cell moiety and the second cell moiety are colocalized as a result of being expressed in sufficient numbers in the same subcellular compartment.

7. The method of any one of claims 1 to 5, wherein the first cell moiety and/or the second cell moiety are present at least about 500 copies per cell, at least about 1000 copies per cell, at least about 1500 copies per cell, at least about 2000 copies per cell, at least about 2500 copies per cell, at least about 3000 copies per cell, at least about 3500 copies per cell, at least about 4000 copies per cell, at least about 4500 copies per cell, at least about 5000 copies per cell, at least about 5500 copies per cell, at least about 6000 copies per cell, at least about 6500 copies per cell, or at least about 7000 copies per cell.

8. The method of any one of claims 1 to 7, further comprising allowing the first cage polypeptide and the first key polypeptide to colocalize, thereby forming a complex and activating the one or more bioactive peptides.

9. The method of any one of claims 1 to 8, wherein the first cell moiety and the second cell moiety are present on the surface of the cell.

10. The method of any one of claims 1 to 8, wherein the first cell moiety and the second cell moiety are present within the cytoplasm of the cell.

11. The method of any one of claims 1 to 8, wherein the first cell moiety and the second cell moiety are present within the nucleus of the cell.

12. The method of any one of claims 1 to 11, further comprising contacting the cells with a second key polypeptide fused to a third binding domain, wherein upon colocalization with the first cage polypeptide, the second key polypeptide is capable of binding to the cage structural region to activate the one or more bioactive peptides, wherein the third binding domain is capable of binding to a third cell moiety present on or within the cell that also comprises the first cell moiety and/or the second cell moiety, wherein the third cell moiety is different from the first cell moiety or the second cell moiety; and optionally, further comprising a third key polypeptide, a fourth key polypeptide, a fifth key polypeptide, a sixth key polypeptide, or a seventh key polypeptide, wherein one or more of the third, fourth, fifth, sixth, or seventh key polypeptides are fused to a binding domain, wherein the binding domain is capable of binding to a cell moiety present on or within the cell that comprises the first cell moiety.

13. The method of any one of claims 1-11, wherein
(i) the first key polypeptide comprises a third binding domain, wherein the second binding domain and/or the third binding domain bind to (i) different moieties than the first binding domain on the surface of the same cell, or (ii) different moieties than the first binding domain at the synapse between two cells that are in contact, wherein upon colocalization with the first cage polypeptide, the first key polypeptide is capable of binding to the cage structural region to activate the one or more bioactive peptides, wherein the third binding domain is capable of binding to a third cell moiety present on or within the cell that also comprises the first cell moiety, wherein the third cell moiety is different from the first cell moiety or the second cell moiety; and/or
(ii) further comprising contacting the cells with at least a second cage polypeptide comprising (A) a second structural region, (B) a second latch region further comprising one or more bioactive peptides, and (C) a sixth binding domain, wherein the second structural region interacts with the second latch region to prevent activity of the one or more bioactive peptides, wherein the first key and/or the second key polypeptide are capable of binding to the second structural region to activate the one or more bioactive peptides, and wherein the sixth binding domain and/or the first binding domain bind to (I) different moieties than the second binding domain, third binding domain and/or fourth binding domain on the surface of the same cell, or (II) different moieties than the second binding domain, third binding domain and/or fourth binding domain at the synapse between two cells that are in contact; wherein upon colocalization with the first cage or the second cage polypeptide, the first key polypeptide is capable of binding to the first cage or the second cage structural region to activate the one or more bioactive peptides.

14. The method of any one of claims 1 to 11, further comprising contacting a second key polypeptide fused to a third binding domain with the cells comprising a second cell that also comprises a first cell moiety, wherein upon colocalization with the first cage polypeptide, the second key polypeptide is capable of binding to the cage structural region to activate the one or more bioactive peptides, wherein the third binding domain is capable of binding to a third cell moiety present on or within the second cell.

15. The method of any one of claim 1 to 11 or 14, further comprising contacting the cells with a third key polypeptide fused to a fourth binding domain, wherein upon colocalization with the first cage polypeptide, the third key polypeptide is capable of binding to the cage structural region to activate the one or more bioactive peptides, wherein the third binding domain is capable of binding to a third cell moiety present on or within the cell that also comprises the first cell moiety, wherein the third cell moiety is different from the first cell moiety or the second cell moiety.

16. The method of claim 15, further comprising contacting the cells with a fourth key polypeptide, a fifth key polypeptide, a sixth key polypeptide, or a seventh key polypeptide, wherein one or more of the fourth, fifth, sixth, or seventh key polypeptides are fused to a binding domain, wherein the binding domain is capable of binding to a cell moiety present on or within the cell.

17. The method of any one of claims 1 to 16, further comprising contacting the cells with one or more decoy cage polypeptide fused to one or more binding domain (“decoy binding domain”), wherein each decoy cage polypeptide comprises a decoy structural region, which upon colocalization with the first key polypeptide and the first cage polypeptide, is capable of preferentially binding to the first key polypeptide and wherein each decoy binding domain is capable of binding to a cell moiety (“decoy cell moiety”) in the cell that comprises the first cell moiety and/or the second cell moiety.

18. The method of claim 17, wherein each decoy cell moiety is present only on a healthy cell.

19. The method of claim 17 or 18, wherein upon colocalization with the first key polypeptide, the decoy cage polypeptide binds to the first key polypeptide and wherein the one or more bioactive peptides in the first cage polypeptide are not activated.

20. A method of increasing selectivity of cells that are interacting with each other for a chimeric antigen receptor T cell therapy comprising:
(a) contacting two or more cells with a first cage polypeptide fused to a first binding domain, wherein the first cage polypeptide comprises (i) a structural region and (ii) a latch region further comprising one or more bioactive peptides, wherein the structural region interacts with the latch region to prevent activity of the one or more bioactive peptides in the absence of colocalization with a key polypeptide and wherein the first binding domain is capable of binding to a first cell moiety present on a synapse between the two or more cells; and
(b) contacting the two or more cells with a first key polypeptide fused to a second binding domain, wherein upon colocalization with the first cage polypeptide, the first key polypeptide is capable of binding to the cage structural region to activate the one or more bioactive peptides, wherein the second binding domain is capable of binding to a second cell moiety present on the synapse between the two or more cells,
wherein the first cell surface moiety and the second cell surface moiety are the same or different.

21. The method of claim 20, wherein the first cell moiety and the second cell moiety are in close proximity to each other.

22. The method of claim 20 or 21, further comprising allowing the first cage polypeptide and the first key polypeptide to colocalize, thereby forming a complex and activating the one or more bioactive peptides.

23. The method of any one of claims 20 to 22, wherein the first cell moiety and the second cell moiety are different or the same.

24. The method of any one of claims 20 to 23, wherein the contacting (a) and contacting (b) are performed concurrently or sequentially.

25. The method of any one of claims 20 to 24, further comprising contacting a second key polypeptide fused to a third binding domain with a synapse of two or more cells that also express a first cell moiety, wherein upon colocalization with the first cage polypeptide, the second key polypeptide is capable of binding to the cage structural region to activate the one or more bioactive peptides, wherein the third binding domain is capable of binding to a third cell moiety present on the synapse of the two or more cells.

26. The method of any one of claims 20 to 25, further comprising contacting the two or more cells with one or more decoy cage polypeptide fused to one or more decoy binding domain with the two or more cells, wherein each decoy cage polypeptide comprises a decoy structural region, which upon colocalization with the first key polypeptide and the first cage polypeptide, is capable of preferentially binding to the first key polypeptide and wherein each decoy binding domain is capable of binding to a decoy cell moiety in the synapse of the two or more cells.

27. A method of targeting heterogeneous cells (more than two different cell types) for a chimeric antigen receptor T cell therapy, wherein a first cell moiety and a second cell moeity are present on the first cell and a first cell moiety and a third cell moiety are present on the second cell, comprising:
(a) contacting two or more cells with a first cage polypeptide fused to a first binding domain, wherein the first cage polypeptide comprises (i) a structural region and (ii) a latch region further comprising one or more bioactive peptides, and wherein the structural region interacts with the latch region to prevent activity of the one or more bioactive peptides in the absence of colocalization with a key polypeptide and wherein the first binding domain is capable of binding to a first cell moiety present on or within the two or more cells;
(b) contacting the two or more cells with a first key polypeptide fused to a second binding domain, wherein upon colocalization, the first key polypeptide is capable of binding to the cage structural region to activate the one or more bioactive peptides and wherein the second binding domain is capable of binding to a second cell moiety present on a cell that also comprises the first cell moiety, and
(c) contacting the two or more cells with a second key polypeptide fused to a third binding domain, wherein upon colocalization, the second key polypeptide is capable of binding to the cage structural region to activate the one or more bioactive peptides and wherein the third binding domain is capable of binding to a third cell moiety in a cell that comprises the first cell moiety,
wherein the first cell moiety, the second cell moiety, and the third cell moiety are different and the cell that comprises the second cell moiety and the cell that comprises the third cell moiety are different.

28. The method of claim 27, wherein the first key polypeptide and the second key polypeptide are identical.

29. The method of claim 27, wherein the first key polypeptide and the second key polypeptide are not identical.

30. The method of any one of claims 27 to 29, further comprising contacting the two or more cells with one or more decoy cage polypeptide fused to one or more decoy binding domain, wherein each decoy cage polypeptide comprises a decoy structural region, which upon colocalization with the first key polypeptide, the second key polypeptide, and/or the first cage polypeptide, is capable of preferentially binding to the first key polypeptide or the second key polypeptide and wherein each decoy binding domain is capable of binding to a decoy cell moiety in a cell that comprises the first cell moiety and the second cell moiety.

31. A method of reducing off-target activity for a chimeric antigen receptor T cell therapy comprising
(a) contacting two or more cells with a first cage polypeptide fused to a first binding domain, wherein the first cage polypeptide comprises (i) a structural region and (ii) a latch region further comprising one or more bioactive peptides, and wherein the structural region interacts with the latch region to prevent activity of the one or more bioactive peptides in the absence of colocalization with a key polypeptide and wherein the first binding domain is capable of binding to a first cell moiety present on a cell;
(b) contacting the two or more cells with a first key polypeptide fused to a second binding domain, wherein upon colocalization, the first key polypeptide is capable of binding to the cage structural region to activate the one or more bioactive peptides and wherein the second binding domain is capable of binding to a second cell moiety present on a cell that also comprises the first cell moiety, and
(c) contacting the two or more cells with a decoy cage polypeptide fused to a third binding domain, wherein the decoy cage polypeptide comprises a decoy structural region, which upon colocalization with the key polypeptide and the first cage polypeptide, is capable of preferentially binding to the first key polypeptide and wherein the third binding domain is capable of binding to a third cell moiety in a cell that comprises the first cell moiety and the second cell moiety.

32. The method of claim 31, wherein the third cell moiety is only present on a healthy cell.

33. The method of any one of claims 1 to 32, wherein the first cage polypeptide comprises no more than 7 alpha helices, 6 alpha helices, 5 alpha helices, no more than 4 alpha helices, no more than 3 alpha helices, or no more than 2 alpha helices, wherein the structural region comprises at least one alpha helices and the latch region comprises at least one alpha helices.

34. The method of any one of claims 1 to 33, wherein the structural region of the first cage polypeptide comprises one alpha helix, two alpha helices, three alpha helices, four alpha helices, five alpha helices, or six alpha helices, and the latch region of the first key polypeptide comprises no more than one alpha helix.

35. The method of claims 17 to 19, and 26 to 34, wherein each decoy cage polypeptide comprises at least one alpha helix, at least two alpha helices, at least three alpha helices, at least four alpha helices, at least five alpha helices, at least six alpha helices, or at least seven alpha helices.

36. The method of any one of claims 17 to 19 and 26 to 35, wherein the binding affinity of the decoy cage polypeptide to a key polypeptide (e.g., K_{D}) is stronger (e.g., lower) than the binding affinity of the first cage polypeptide to a key polypeptide (e.g., K_{D}) by at least about 1.1 fold, at least about 1.5 fold, at least about 2 fold, at least about 3 fold, at least about 4 fold, at least about 5 fold, at least about 6 fold, at least about 7 fold, at least about 8 fold, at least about 9 fold, at least about 10 fold, at least about 20 fold, at least about 30 fold, at least about 40 fold, at least about 50 fold, at least about 60 fold, at least about 70 fold, at least about 80 fold, at least about 90 fold, at least about 100 fold, at least about 150 fold, at least about 200 fold, at least about 300 fold, at least about 400 fold, at least about 500 fold, at least about 600 fold, at least about 700 fold, at least about 800 fold, at least about 900 fold, or at least about 1000 fold.

37. The method of any one of claims 1 to 36, wherein the binding of the first cage polypeptide and the first key polypeptide in a solution is less efficient than the binding of the first cage polypeptide and the first key polypeptide when colocalized on or within the cell.

38. The method of any one of claims 1 to 37, wherein the colocalization of the first cage polypeptide and the first key polypeptide increases the local concentration of the first cage polypeptide and the first key polypeptide and shifts the binding equilibrium in favor of complex formation between the first cage polypeptide and the first key polypeptide.

39. The method of any one of claims 1 to 38, wherein the contacting includes introducing a polynucleotide encoding a polypeptide (e.g., the first cage polypeptide, the first key polypeptide, the second key polypeptide, and the decoy cage polypeptide).

40. The method of any one of claims 1 to 39, wherein the first cage polypeptide, the first key polypeptide, the second key polypeptide, and/or the decoy polypeptide are further modified to change (i) hydrophobicity, (ii) a hydrogen bond network, (iii) a binding affinity to each, and/or (iv) any combination thereof.

41. The method of any one of claims 1 to 40, wherein an interface between the latch region and the structural region of the first cage polypeptide includes a hydrophobic amino acid to polar amino acid residue ratio of between 1:1 and 10:1, e.g., 1:1, 2:1, 3:1, 4:1, 5:1, 6:1, 7:1, 8:1, 9:1, or 10:1.

42. The method of any one of claims 1 to 41, wherein the latch region is mutated to reduce the hydrophobicity.

43. The method of claim 42, wherein 1, 2, 3, or more large hydrophobic residues in the latch region, e.g., isoleucine, valine, or leucine, are mutated to serine, threonine, or a smaller hydrophobic amino acid residue, e.g., valine (if the starting amino acid is isoleucine or leucine) or alanine.

44. The method of any one of claims 1 to 43, wherein the first cage polypeptide comprises buried amino acid residues at the interface between the latch region and the structural region of the first cage polypeptide, wherein the buried amino acid residues at the interface have side chains comprising nitrogen or oxygen atoms involved in hydrogen bonding.

45. The method of any one of claims 1 to 44, wherein the cells that the first cell moiety and/or the second cell moiety are present on or within tumor cells.

46. The method of any one of claims 1 to 45, wherein one or more of the first, second, third, fourth, fifth, sixth, seventh, and/or decoy binding domains comprise an antibody or antigen binding portion thereof, Fab′, F(ab′)₂, Fab, Fv, rIgG, recombinant single chain Fv fragments (scFv), V_{H} single domains, bivalent or bispecific molecules, diabodies, triabodies, and tetrabodies, DARPins, nanobody, affibody, monobody, adnectin, alphabody, Albumin-binding domain, Adhiron, Affilin, Affimer, Affitin/Nanofitin, Anticalin, Armadillo repeat proteins, Atrimer/Tetranectin, Avimer/Maxibody, Centyrin, Fynomer, Kunitz domain, Obody/OB-fold, Pronectin, Repebody, computationally designed proteins, or any combination thereof.

47. The method of any one of claims 1 to 46, wherein one or more of the first, second, third, fourth, fifth, sixth, seventh, and/or decoy binding domains bind to a cell surface protein comprising Her2, EGFR, EpCAM, B7-H3, ROR1, GD2, GPC2, αvβ6, Her3, L1CAM, BCMA, GPCR5d, EGFRvIII, CD20, CD22, CD3, CD4, CD5, CD8, CD19, CD27, CD28, CD30, CD33, CD48, IL3RA, platelet tissue factor, CLEC12A, CD82, TNFRSF1B, ADGRE2, ITGB5, CD96, CCR1, PTPRJ, CD70, LILRB2, LTB4R, TLR2, LILRA2, ITGAX, CR1, EMC10, EMB, DAGLB, P2RY13, LILRB3, LILRB4, SLC30A1, LILRA6, SLC6A6, SEMA4A, TAG72, FRα, PMSA, Mesothelin, LIV-1, CEA, MUC1, PD1, BLIMP1, CTLA4, LAG3, TIM3, TIGIT, CD39, Nectin-4, a cancer marker, a healthy tissue marker, a cardiac marker, or any combination thereof.

48. The method of any one of claims 1 to 47, wherein one or more of the cage polypeptides and the key polypeptides further comprises a linker connecting the cage or key polypeptide and the one or more binding domains.

49. The method of any one of claims 1 to 49, further comprising administering a chimeric antigen receptor T cell to the cells.

50. The method of any one of claims 1 to 49, wherein the cells are present in vivo.

51. The method of any one of claims 1 to 49, wherein the cells are present in vitro or ex vivo.

52. The method of any one of claims 49 to 51, wherein the CAR T cell binds to the one or more bioactive peptides.

53. The method of claim 52, wherein the CAR T cell comprises an antibody or antigen binding fragment thereof, T cell receptor, DARPin, bispecific or bivalent molecule, nanobody, affibody, monobody, adnectin, alphabody, albumin binding domain, adhiron, affilin, affimer, affitin/nanofitin; anticalin; armadillo repeat protein; atrimer/tetranectin; avimer/maxibody; centyrin; fynomer; Kunitz domain; obody/OB-fold; pronectin; repebody; or computationally designed protein.

54. The method of claim 53, wherein the antigen binding portion thereof comprises a Fab′, F(ab′)₂, Fab, Fv, rIgG, recombinant single chain Fv fragment (scFv), and/or V_{H} single domain.

55. The method of any one of claims 49 to 54, wherein the administering kills the cell that comprises the first binding moiety and the second binding moiety.

56. A protein complex formed by any one of the methods 1 to 55.

57. A polynucleotide encoding the protein complex of claim 56.

58. A protein complex comprising (i) a first cage polypeptide fused to a first binding domain and (ii) a first key polypeptide fused to a second binding domain, wherein the first cage polypeptide comprises (i) a structural region and (ii) a latch region further comprising one or more bioactive peptides, wherein the first key polypeptide binds to the cage structural region, wherein the one or more bioactive peptides are activated, and wherein the first binding domain binds to a first cell moiety present on or within a cell or on a synapse of two interacting cells and the second binding domain binds to a second cell moiety present on or within the cell or on a synapse of the two interacting cells, wherein the first cell moiety and the second cell moiety are different or the same.

59. A protein complex comprising (i) a first key polypeptide fused to a first binding domain and (ii) a decoy cage polypeptide fused to a second binding domain, wherein the first key polypeptide binds to the decoy cage polypeptide, and wherein the first binding domain binds to a first cell moiety present on or within a cell or on a synapse of two interacting cells and the second binding domain binds to a second cell moiety present on or within the cell or on a synapse of the two interacting cells, wherein the first cell moiety and the second cell moiety are different or the same.

60. A composition comprising
(a) a first cage polypeptide fused to a first binding domain or a polynucleotide encoding the same, wherein the first cage polypeptide comprises (i) a structural region and (ii) a latch region further comprising one or more bioactive peptides, wherein the structural region interacts with the latch region to prevent activity of the one or more bioactive peptides in the absence of colocalization with a key polypeptide and wherein the first binding domain is capable of binding to a first cell moiety present on or within a cell; and
(b) a first key polypeptide fused to a second binding domain or a polynucleotide encoding the same, wherein upon colocalization with the first cage polypeptide, the first key polypeptide is capable of binding to the cage structural region to activate the one or more bioactive peptides, wherein the second binding domain is capable of binding to a second cell moiety present on or within the cell,
wherein the first cell moiety and the second cell moiety are different or the same and wherein the cell is a target for a chimeric antigen receptor (CAR) T cell therapy.

61. The composition of claim 60, wherein the first cell moiety and the second cell moiety are different.

62. The composition of claim 60, wherein the first cell moiety and the second cell moiety are the same.

63. The composition of claim 62, wherein the colocalization of the first cage polypeptide and the first key polypeptide increases selectivity of an effector toward a cell comprising the first cell moiety and the second cell moiety.

64. The composition of any one of claims 60 to 63, wherein the first cage polynucleotide and the first key polynucleotide are encoded on the same or different nucleic acid sequence.

65. The composition of any one of claims 60 to 64, wherein the first cell moiety and the second cell moiety are in close proximity to each other; optionally wherein:
(a) the first cell moiety and the second cell moiety are colocalized as a result of directly or indirectly forming a complex; or
(b) the first cell moiety and the second cell moiety are colocalized as a result of being present in sufficient numbers in the same subcellular compartment.

66. The composition of any one of claims 60 to 65, wherein the first cell moiety and/or the second cell moiety are present at least about 500 copies per cell, at least about 1000 copies per cell, at least about 1500 copies per cell, at least about 2000 copies per cell, at least about 2500 copies per cell, at least about 3000 copies per cell, at least about 3500 copies per cell, at least about 4000 copies per cell, at least about 4500 copies per cell, at least about 5000 copies per cell, at least about 5500 copies per cell, at least about 6000 copies per cell, at least about 6500 copies per cell, or at least about 7000 copies per cell.

67. The composition of any one of claims 60 to 66, wherein the first cage polypeptide and the first key polypeptide are colocalized, thereby forming a complex and activating the one or more bioactive peptides.

68. The composition of any one of claims 60 to 67, wherein the first cell moiety and the second cell moiety are present on the surface of the cell.

69. The composition of any one of claims 60 to 67, wherein the first cell moiety and the second cell moiety are present within the cytoplasm of the cell.

70. The composition of any one of claims 60 to 67, wherein the first cell moiety and the second cell moiety are present within the nucleus of the cell.

71. The composition of any one of claims 60 to 70, further comprising a second key polypeptide fused to a third binding domain or a polynucleotide encoding the same, wherein upon colocalization with the first cage polypeptide, the second key polypeptide is capable of binding to the cage structural region to activate the one or more bioactive peptides, wherein the third binding domain is capable of binding to a third cell moiety present on or within the cell that also comprises the first cell moiety and/or the second cell moiety, wherein the third cell moiety is different from the first cell moiety or the second cell moiety.

72. The composition of claim 71, further comprising a third key polypeptide, a fourth key polypeptide, a fifth key polypeptide, a sixth key polypeptide, or a seventh key polypeptide, or a polynucleotide encoding the same, wherein one or more of the third, fourth, fifth, sixth, or seventh key polypeptides are fused to a binding domain, and wherein the binding domain is capable of binding to a cell moiety present on or within the cell that comprises the first cell moiety, the second cell moiety, and/or the third cell moiety.

73. The composition of any one of claims 60 to 70, further comprising a second key polypeptide fused to a third binding domain or a polynucleotide encoding the same, wherein upon colocalization with the first cage polypeptide, the second key polypeptide is capable of binding to the cage structural region to activate the one or more bioactive peptides, and wherein the third binding domain is capable of binding to a third cell moiety expressed on or within a second cell that also expresses a first cell moiety.

74. The composition of any one of claim 60 to 70 or 73, further comprising a third key polypeptide fused to a fourth binding domain or a polynucleotide encoding the same, wherein upon colocalization with the first cage polypeptide, the third key polypeptide is capable of binding to the cage structural region to activate the one or more bioactive peptides, wherein the third binding domain is capable of binding to a third cell moiety expressed on or within the cell that also expresses the first cell moiety, and wherein the third cell moiety is different from the first cell moiety or the second cell moiety.

75. The composition of claim 74, further comprising a fourth key polypeptide, a fifth key polypeptide, a sixth key polypeptide, or a seventh key polypeptide, or a polynucleotide encoding the same, wherein one or more of the fourth, fifth, sixth, or seventh key polypeptides are fused to a binding domain, wherein the binding domain is capable of binding to a cell moiety present on or within the cell.

76. The composition of any one of claims 60 to 75, further comprising one or more decoy cage polypeptide fused to one or more binding domain (“decoy binding domain”) or a polynucleotide encoding the same, wherein each decoy cage polypeptide comprises a decoy structural region, which upon colocalization with the first key polypeptide and the first cage polypeptide, is capable of preferentially binding to the first key polypeptide and wherein each decoy binding domain is capable of binding to a cell moiety (“decoy cell moiety”) in the cell that comprises the first cell moiety and/or the second cell moiety.

77. The composition of claim 76, wherein each decoy cell moiety is present only on a healthy cell.

78. The composition of claim 76 or 77, wherein upon colocalization with the first key polypeptide, the decoy cage polypeptide binds to the first key polypeptide and wherein the one or more bioactive peptides in the first cage polypeptide are not activated.

79. The composition of any one of claims 60 to 78, wherein the first cage polypeptide comprises no more than 5 alpha helices, no more than 4 alpha helices, no more than 3 alpha helices, or no more than 2 alpha helices, wherein the structural region comprises at least one alpha helices and the latch region comprises at least one alpha helices.

80. The composition of any one of claims 60 to 79, wherein the structural region of the first cage polypeptide comprises one alpha helix, two alpha helices, or three alpha helices, and the latch region of the first key polypeptide comprises no more than one alpha helix.

81. The composition of claims 76 to 80, wherein the decoy cage polypeptide comprises at least one alpha helix, at least two alpha helices, at least three alpha helices, at least four alpha helices, or at least five alpha helices.

82. The composition of any one of claims 76 to 81, wherein the binding affinity of the decoy cage polypeptide to a key polypeptide (e.g., K_{D}) is stronger (e.g., lower) than the binding affinity of the first cage polypeptide to a key polypeptide (e.g., K_{D}) by at least about 1.1 fold, at least about 1.5 fold, at least about 2 fold, at least about 3 fold, at least about 4 fold, at least about 5 fold, at least about 6 fold, at least about 7 fold, at least about 8 fold, at least about 9 fold, at least about 10 fold, at least about 20 fold, at least about 30 fold, at least about 40 fold, at least about 50 fold, at least about 60 fold, at least about 70 fold, at least about 80 fold, at least about 90 fold, at least about 100 fold, at least about 150 fold, at least about 200 fold, at least about 300 fold, at least about 400 fold, at least about 500 fold, at least about 600 fold, at least about 700 fold, at least about 800 fold, at least about 900 fold, or at least about 1000 fold.

83. The composition of any one of claims 60 to 82, wherein the binding of the first cage polypeptide and the first key polypeptide in a solution is less efficient than the binding of the first cage polypeptide and the first key polypeptide when colocalized on or within the cell.

84. The composition of any one of claims 60 to 83, wherein the colocalization of the first cage polypeptide and the first key polypeptide increases the local concentration of the first cage polypeptide and the first key polypeptide and shifts the binding equilibrium in favor of complex formation between the first cage polypeptide and the first key polypeptide.

85. The composition of any one of claims 60 to 84, wherein the first cage polypeptide, the first key polypeptide, the second key polypeptide, and/or the decoy polypeptide are further modified to change (i) hydrophobicity, (ii) a hydrogen bond network, (iii) a binding affinity to each, and/or (iv) any combination thereof.

86. The composition of any one of claims 60 to 85, wherein an interface between the latch region and the structural region of the first cage polypeptide includes a hydrophobic amino acid to polar amino acid residue ratio of between 1:1 and 10:1, e.g., 1:1, 2:1, 3:1, 4:1, 5:1, 6:1, 7:1, 8:1, 9:1, or 10:1.

87. The composition of any one of claims 60 to 86, wherein the latch region is mutated to reduce the hydrophobicity.

88. The composition of claim 87, wherein 1, 2, 3, or more large hydrophobic residues in the latch region, e.g., isoleucine, valine, or leucine, are mutated to serine, threonine, or a smaller hydrophobic amino acid residue, e.g., valine (if the starting amino acid is isoleucine or leucine) or alanine.

89. The composition of any one of claims 60 to 88, wherein the first cage polypeptide comprises buried amino acid residues at the interface between the latch region and the structural region of the first cage polypeptide, wherein the buried amino acid residues at the interface have side chains comprising nitrogen or oxygen atoms involved in hydrogen bonding.

90. The composition of any one of claims 60 to 89, wherein the cells that the first cell moiety and/or the second cell moiety are present on or within tumor cells, cancer cells, immune cells, leukocytes, lymphocytes, T cells, regulatory T cells, effector T cells, CD4+ effector T cells, CD8+ effector T cells, memory T cells, autoreactive T cells, exhausted T cells, natural killer T cells (NKT cells), B cells, dendritic cells, macrophages, NK cells, cardiac cells, lung cells, muscle cells, epithelial cells, pancreatic cells, skin cells, CNS cells, neurons, myocytes, skeletal muscle cells, smooth muscle cells, liver cells, kidney cells, bacterial cells, yeast cells, or any combination thereof.

91. The composition of any one of claims 60 to 90, wherein one or more of the first, second, third, fourth, fifth, sixth, seventh, and/or decoy binding domains comprise an antibody or antigen binding portion thereof, Fab′, F(ab′)₂, Fab, Fv, rIgG, recombinant single chain Fv fragments (scFv), V_{H} single domains, bivalent or bispecific molecules, diabodies, triabodies, and tetrabodies, DARPins, nanobody, affibody, monobody, adnectin, alphabody, Albumin-binding domain, Adhiron, Affilin, Affimer, Affitin/Nanofitin, Anticalin, Armadillo repeat proteins, Atrimer/Tetranectin, Avimer/Maxibody, Centyrin, Fynomer, Kunitz domain, Obody/OB-fold, Pronectin, Repebody, computationally designed proteins, or any combination thereof.

92. The composition of any one of claims 60 to 91, wherein one or more of the first, second, third, fourth, fifth, sixth, seventh, and/or decoy binding domains bind to a cell surface protein comprising Her2, EGFR, EpCAM, B7-H3, ROR1, GD2, GPC2, αvβ6, Her3, L1CAM, BCMA, GPCR5d, EGFRvIII, CD20, CD22, CD3, CD4, CD5, CD8, CD19, CD27, CD28, CD30, CD33, CD48, IL3RA, platelet tissue factor, CLEC12A, CD82, TNFRSF1B, ADGRE2, ITGB5, CD96, CCR1, PTPRJ, CD70, LILRB2, LTB4R, TLR2, LILRA2, ITGAX, CR1, EMC10, EMB, DAGLB, P2RY13, LILRB3, LILRB4, SLC30A1, LILRA6, SLC6A6, SEMA4A, TAG72, FRα, PMSA, Mesothelin, LIV-1, CEA, MUC1, PD1, BLIMP1, CTLA4, LAG3, TIM3, TIGIT, CD39, Nectin-4, a cancer marker, a healthy tissue marker, a cardiac marker, or any combination thereof.

93. The composition of any one of claims 60 to 92, wherein one or more of the cage polypeptides and the key polypeptides further comprises a linker connecting the cage or key polypeptide and the one or more binding domains.

94. The composition of any one of claims 60 to 93, further comprising a chimeric antigen receptor T cell.

95. A cell comprising the composition of any one of claims 60 to 93.

96. The cell of claim 95, which is a tumor cell.

97. A method of preparing a subject in need thereof comprising administering the composition of any one of claims 60 to 93 to the subject.

98. The method of claim 97, wherein one or more cells of the subject exhibit activated one or more bioactive peptide.

99. A method of treating a disease or condition in a subject in need thereof comprising administering a chimeric antigen receptor T cell that binds to one or more bioactive peptides to the subject, wherein the subject is further administered the composition of any one of claims 60 and 93.

100. The method of claim 100, wherein the chimeric antigen receptor T cell comprises an antibody or antigen binding fragment thereof, T cell receptor, DARPin, bispecific or bivalent molecule, nanobody, affibody, monobody, adnectin, alphabody, albumin binding domain, adhiron, affilin, affimer, affitin/nanofitin; anticalin; armadillo repeat protein; atrimer/tetranectin; avimer/maxibody; centyrin; fynomer; Kunitz domain; obody/OB-fold; pronectin; repebody; or computationally designed protein.

101. The method of claim 100, wherein the antigen binding portion thereof comprises a Fab′, F(ab′)₂, Fab, Fv, rIgG, recombinant single chain Fv fragment (scFv), and/or V_{H} single domain.

102. The method of any one of claims 99 to 101, wherein the administering kills the cell that comprises the first binding moiety and the second binding moiety.

103. A composition comprising
(a) a first cage polypeptide comprising (i) a structural region, (ii) a latch region further comprising one or more bioactive peptides, and (iii) a first binding domain wherein the structural region interacts with the latch region to prevent activity of the one or more bioactive peptides;
(b) a first key polypeptide capable of binding to the cage structural region to activate the one or more bioactive peptides, wherein the key polypeptide comprises a second binding domain,
wherein the first binding domain and the second binding domain bind to (i) different moieties on the surface of the same cell, (ii) the same moiety on the surface of the same cell, (iii) different moieties at the synapse between two cells that are in contact, or (iv) the same moiety at the synapse between two cells that are in contact; and
(c) cells comprising one or more chimeric antigen receptor(s) that bind to the one or more bioactive peptides when the one or more bioactive peptides are activated.

104. The composition of claim 103, wherein the first key polypeptide comprises a third binding domain, wherein the second binding domain and/or the third binding domain bind to (i) different moieties than the first binding domain on the surface of the same cell, or (ii) different moieties than the first binding domain at the synapse between two cells that are in contact.

105. The composition of claim 104, wherein the second binding domain and the third binding domain bind to different moieties on the surface of different cells.

106. The composition of any one of claims 103-105, further comprising:
(d) at least a second key polypeptide capable of binding to the first cage structural region, wherein the key polypeptide comprises a fourth binding domain,
wherein the second binding domain and/or the fourth binding domain bind to (i) different moieties than the first binding domain on the surface of the same cell, or (ii) different moieties than the first binding domain at the synapse between two cells that are in contact.

107. The composition of claim 106, wherein the second binding domain and the fourth binding domain bind to (i) different moieties on the surface of the same cell, or (ii) different moieties at the synapse between two cells that are in contact; or wherein the second binding domain and the fourth binding domain bind to different moieties on the surface of different cells.

108. The composition of any one of claims 103-107, wherein the first cage polypeptide further comprises a fifth binding domain, wherein the fifth binding domain and/or the first binding domain bind to (i) different moieties than the second binding domain, third binding domain and/or fourth binding domain on the surface of the same cell, or (ii) different moieties than the second binding domain, third binding domain and/or fourth binding domain at the synapse between two cells that are in contact.

109. The composition of claim 108, wherein the fifth binding domain and the first binding domain bind to (i) different moieties on the surface of the same cell, or (ii) different moieties at the synapse between two cells that are in contact.

110. The composition of any one of claims 103-109, further comprising:
(e) at least a second cage polypeptide comprising (i) a second structural region, (ii) a second latch region further comprising one or more bioactive peptides, and (iii) a sixth binding domain, wherein the second structural region interacts with the second latch region to prevent activity of the one or more bioactive peptides,
wherein the first key and/or the second key polypeptide are capable of binding to the second structural region to activate the one or more bioactive peptides, and
wherein the sixth binding domain and/or the first binding domain bind to (i) different moieties than the second binding domain, third binding domain and/or fourth binding domain on the surface of the same cell, or (ii) different moieties than the second binding domain, third binding domain and/or fourth binding domain at the synapse between two cells that are in contact.

111. The composition of claim 110, wherein the sixth binding domain and the first binding domain bind to (i) different moieties on the surface of different cells, or (ii) different moieties at the synapse between two cells that are in contact.

112. The composition of any one of claims 103-111, further comprising:
(f) a decoy cage polypeptide comprising (i) a decoy structural region, (ii) a decoy latch region optionally further comprising one or more bioactive peptides, and (iii) a seventh binding domain, wherein the decoy structural region interacts with the first key polypeptide and/or the second key polypeptide to prevent them from binding to the first and/or the second cage polypeptides, and wherein the seventh binding domain binds to a moiety on the surface of the same cell as the second binding domain, third binding domain, and/or fourth binding domain.

113. The composition of claim 112, wherein the seventh binding domain and the first binding domain and/or second binding domain bind to (i) different moieties on the surface of the same cell, or (ii) different moieties at the synapse between two cells that are in contact.

114. The composition of claim 112 or 113, wherein the seventh binding domain binds to a moiety that is present on the cell at an equal or higher level than the moieties to which the second binding domain, the third binding domain, and/or the fourth binding domain bind to.

115. The composition of any one of claims 1-12, wherein the first binding domain, the second binding domain, the third binding domain (when present), the fourth binding domain (when present), the fifth binding domain (when present), the sixth binding domain (when present), and/or the seventh binding domain (when present) comprise polypeptides capable of binding moieties present on the cell surface, including proteins, saccharides, and lipids; or comprise cell surface protein binding polypeptides.

116. A composition comprising
(a) one or more expression vectors encoding and/or cells expressing:
(i) a first cage polypeptide comprising (i) a structural region, (ii) a latch region further comprising one or more bioactive peptides, and (iii) a first binding domain wherein the structural region interacts with the latch region to prevent activity of the one or more bioactive peptides; and
(ii) a first key polypeptide capable of binding to the cage structural region to activate the one or more bioactive peptides, wherein the key polypeptide comprises a second binding domain,
wherein the first binding domain and the second binding domain bind to (i) different moieties on the surface of the same cell, (ii) the same moiety on the surface of the same cell, (iii) different moieties at the synapse between two cells that are in contact, or (iv) the same moiety at the synapse between two cells that are in contact; and
(b) (i) cells comprising one or more chimeric antigen receptor(s) that bind to the one or more bioactive peptides when the one or more bioactive peptides are activated; and/or (ii) one or more fusion protein, nucleic acid, vector, and/or the cell of any one of claims 166-187

117. The composition of claim 116, wherein the first key polypeptide comprises a third binding domain, wherein the second binding domain and/or the third binding domain bind to (i) different moieties than the first binding domain on the surface of the same cell, or (ii) different moieties than the first binding domain at the synapse between two cells that are in contact.

118. The composition of claim 117, wherein the second binding domain and the third binding domain bind to different moieties on the surface of different target cells.

119. The composition of any one of claims 116-118, further comprising:
(c) an expression vector encoding and/or a cell expressing at least a second key polypeptide capable of binding to the first cage structural region, wherein the key polypeptide comprises a fourth binding domain,
wherein the second binding domain and/or the fourth binding domain bind to (i) different moieties than the first binding domain on the surface of the same cell, or (ii) different moieties than the first binding domain at the synapse between two cells that are in contact.

120. The composition of claim 119, wherein the second binding domain and the fourth binding domain bind to (i) different moieties on the surface of the same cell, or (ii) different moieties at the synapse between two cells that are in contact; or wherein the second binding domain and the fourth binding domain bind to different moieties on the surface of different cells.

121. The composition of any one of claims 116-120, wherein the first cage polypeptide further comprises a fifth binding domain, wherein the fifth binding domain and/or the first binding domain bind to (i) different moieties than the second binding domain, third binding domain, and/or fourth binding domain on the surface of the same cell, or (ii) different moieties than the second binding domain, third binding domain, and/or fourth binding domain at the synapse between two cells that are in contact.

122. The composition of claim 121, wherein the fifth binding domain and the first binding domain bind to (i) different moieties on the surface of the same cell, or (ii) different moieties at the synapse between two cells that are in contact.

123. The composition of any one of claims 116-122, further comprising:
(d) an expression vector encoding and/or a cell expressing at least a second cage polypeptide comprising (i) a second structural region, (ii) a second latch region further comprising one or more bioactive peptides, and (iii) a sixth binding domain, wherein the second structural region interacts with the second latch region to prevent activity of the one or more bioactive peptides,
wherein the first key and/or the second key polypeptide are capable of binding to the second structural region to activate the one or more bioactive peptides, and
wherein the sixth binding domain and/or the first binding domain bind to (i) different moieties than the second binding domain, third binding domain, and/or fourth binding domain on the surface of the same cell, or (ii) different moieties than the second binding domain, third binding domain, and/or fourth binding domain at the synapse between two cells that are in contact.

124. The composition of claim 123, wherein the sixth binding domain and the first binding domain bind to (i) different moieties on the surface of different cells, or (ii) different moieties at the synapse between two cells that are in contact.

125. The composition of any one of claims 116-124, further comprising:
(e) an expression vector encoding and/or a cell expressing a decoy cage polypeptide comprising (i) a decoy structural region, (ii) a decoy latch region optionally further comprising one or more bioactive peptides, and (iii) a seventh binding domain, wherein the decoy structural region interacts with the first key polypeptide and/or the second key polypeptide to prevent them from binding to the first and/or the second cage polypeptides, and wherein the seventh binding domain binds to a moiety on the surface of the same cell as the second binding domain, third binding domain, and/or fourth binding domain.

126. The composition of claim 125, wherein the seventh binding domain and the first binding domain and/or second binding domain bind to (i) different moieties on the surface of the same cell, or (ii) different moieties at the synapse between two cells that are in contact.

127. The composition of claim 125 or 126, wherein the seventh binding domain binds to a moiety that is present on the cell at an equal or higher level than the moieties to which the second binding domain, the third binding domain, and/or the fourth binding domain bind to.

128. The composition of any one of claims 116-127, wherein the first binding domain, the second binding domain, the third binding domain (when present), the fourth binding domain (when present), the fifth binding domain (when present), the sixth binding domain (when present), and/or the seventh binding domain (when present) comprise polypeptides capable of binding moieties present on the cell surface, including proteins, saccharides, and lipids; or comprise cell surface protein binding polypeptides.

129. The composition of any one of claims 103-128, further comprising one or more effector molecules.

130. The composition of claim 129, wherein the effector molecule(s) are selected from the non-limiting group comprising Bcl2, GFP1-10, small molecules, antibodies, antibody drug conjugates, immunogenic peptides, proteases, T cell receptors, cytotoxic agents, fluorophores, fluorescent proteins, cell adhesion molecules, endocytic receptors, phagocytic receptors, magnetic beads, and gel filtration resin, and polypeptides comprising an amino acid sequence at least 40%, 45%, 50%, 55%, 60%, 65%, 70%, 75%, 80%, 85%, 90%, 91%, 92%, 93%, 94%, 95%, 96%, 97%, 98%, 99%, or 100% identical to the amino acid sequence selected from the group consisting of SEQ ID NOS: 27460-27469.

131. The composition of any one of claims 102-130, wherein the first cage polypeptide, the second cage polypeptide, and/or the decoy cage polypeptide comprise:
(a) an amino acid sequence at least 40%, 45%, 50%, 55%, 60%, 65%, 70%, 75%, 80%, 85%, 90%, 91%, 92%, 93%, 94%, 95%, 96%, 97%, 98%, 99%, or 100% identical to the amino acid sequence of a cage polypeptide disclosed herein, or selected from the group consisting SEQ IDS NOS: 27359-27392, SEQ ID NOS: 1-49, 51-52, 54-59, 61, 65, 67-14317, 27094-27117, 27120-27125, 27278 to 27321 not including optional amino acid residues, or cage polypeptides listed in Table 7, Table 8, or Table 9, wherein the N-terminal and/or C-terminal 60 amino acids of the polypeptides are optional; and
(b) one or more first, fifth, sixth, or seventh binding domains.

132. The composition of any one of claims 103-131, wherein the first cage polypeptide, the second cage polypeptide, and/or the decoy cage polypeptide comprise:
(a) an amino acid sequence at least 40%, 45%, 50%, 55%, 60%, 65%, 70%, 75%, 80%, 85%, 90%, 91%, 92%, 93%, 94%, 95%, 96%, 97%, 98%, 99%, or 100% identical to the amino acid sequence of selected from the group consisting SEQ IDS NOS: 27359-27392, not including optional amino acid residues; and
(b) one or more first, fifth, sixth, or seventh binding domains.

133. The composition of any one of claims 103-131, wherein the first cage polypeptide, the second cage polypeptide, and/or the decoy cage polypeptide comprise:
(a) an amino acid sequence at least 40%, 45%, 50%, 55%, 60%, 65%, 70%, 75%, 80%, 85%, 90%, 91%, 92%, 93%, 94%, 95%, 96%, 97%, 98%, 99%, or 100% identical to the amino acid sequence selected from the group consisting SEQ IDS NOS: 27359-27392, including optional amino acid residues; and
(b) one or more first, fifth, sixth, or seventh binding domains.

134. The composition of any one of claims 103-133, wherein the first key polypeptide and/or the second key polypeptide comprise:
(a) a polypeptide comprising an amino acid sequence at least 40%, 45%, 50%, 55%, 60%, 65%, 70%, 75%, 80%, 85%, 90%, 91%, 92%, 93%, 94%, 95%, 96%, 97%, 98%, 99%, or 100% identical to the amino acid sequence selected from SEQ ID NOS:14318-26601, 26602-27015, 27016-27050, 27322 to 27358, and key polypeptides listed in Table 7, Table 8, and/or Table 9, and SEQ ID NOS: 27393-27398; and
(b) one or more second, third, or fourth binding domains.

135. The composition of any one of claims 103-133, wherein the first key polypeptide and/or the second key polypeptide comprise:
(a) a polypeptide comprising an amino acid sequence at least 40%, 45%, 50%, 55%, 60%, 65%, 70%, 75%, 80%, 85%, 90%, 91%, 92%, 93%, 94%, 95%, 96%, 97%, 98%, 99%, or 100% identical to the amino acid sequence selected from the group consisting of SEQ ID NOS: 27393-27398, not including optional residues; and
(b) one or more second, third, or fourth binding domains.

136. The composition of any one of claims 102-133, wherein the first key polypeptide and/or the second key polypeptide comprise:
(a) a polypeptide comprising an amino acid sequence at least 40%, 45%, 50%, 55%, 60%, 65%, 70%, 75%, 80%, 85%, 90%, 91%, 92%, 93%, 94%, 95%, 96%, 97%, 98%, 99%, or 100% identical to the amino acid sequence selected from the group consisting of SEQ ID NOS: 27393-27398, including optional residues; and
(b) one or more second, third, or fourth binding domains.

137. The composition of any one of claims 103-133, wherein the first key polypeptide and/or the second key polypeptide comprise:
(a) a polypeptide comprising an amino acid sequence at least 40%, 45%, 50%, 55%, 60%, 65%, 70%, 75%, 80%, 85%, 90%, 91%, 92%, 93%, 94%, 95%, 96%, 97%, 98%, 99%, or 100% identical to the amino acid sequence selected from the group consisting of SEQ ID NOS: 27394-27395; and
(b) one or more second, third, or fourth binding domains.

138. The composition of any one of claims 103-137, wherein the one or more bioactive peptides comprise one or more bioactive peptide selected from the group consisting of SEQ ID NOS:60, 62-64, 66, 27052, 27053, and 27059-27093.

139. The composition of any one of claims 103-138, wherein the first, second, third, fourth, fifth, sixth, and/or seventh binding domains are selected from the non-limiting group comprising an antigen-binding polypeptide directed against a cell surface moiety to be bound, including but not limited to Fab′, F(ab′)₂, Fab, Fv, rIgG, recombinant single chain Fv fragments (scFv), V_{H} single domains, bivalent or bispecific molecules, diabodies, triabodies, and tetrabodies; DARPins; nanobody; affibody; monobody; adnectin; alphabody; Albumin-binding domain; Adhiron; Affilin; Affimer; Affitin/Nanofitin; Anticalin; Armadillo repeat proteins; Atrimer/Tetranectin; Avimer/Maxibody; Centyrin; Fynomer; Kunitz domain; Obody/OB-fold; Pronectin; Repebody; and computationally designed proteins.

140. The composition of any one of claims 103-139, wherein the first, second, third, fourth, fifth, sixth, and/or seventh binding domains bind to a cell surface protein on a cell selected from the non-limiting group comprising tumor cells, cancer cells, immune cells, leukocytes, lymphocytes, T cells, regulatory T cells, effector T cells, CD4+ effector T cells, CD8+ effector T cells, memory T cells, autoreactive T cells, exhausted T cells, natural killer T cells (NKT cells), B cells, dendritic cells, macrophages, NK cells, cardiac cells, lung cells, muscle cells, epithelial cells, pancreatic cells, skin cells, CNS cells, neurons, myocytes, skeletal muscle cells, smooth muscle cells, liver cells, kidney cells, bacterial cells, and yeast cells.

141. The composition of any one of claims 103-140, wherein the first, second, third, fourth, fifth, sixth, and/or seventh binding domains bind to a cell surface protein selected from the non-limiting group comprising Her2, EGFR, EpCAM, B7-H3, ROR1, GD2, GPC2, αvβ6, Her3, L1CAM, BCMA, GPCR5d, EGFRvIII, CD20, CD22, CD3, CD4, CD5, CD8, CD19, CD27, CD28, CD30, CD33, CD48, IL3RA, platelet tissue factor, CLEC12A, CD82, TNFRSF1B, ADGRE2, ITGB5, CD96, CCR1, PTPRJ, CD70, LILRB2, LTB4R, TLR2, LILRA2, ITGAX, CR1, EMC10, EMB, DAGLB, P2RY13, LILRB3, LILRB4, SLC30A1, LILRA6, SLC6A6, SEMA4A, TAG72, FRα, PMSA, Mesothelin, LIV-1, CEA, MUC1, PD1, BLIMP1, CTLA4, LAG3, TIM3, TIGIT, CD39, Nectin-4, a cancer marker, a healthy tissue marker, and a cardiac marker.

142. The composition of any one of claims 103-141, wherein the first, second, third, fourth, fifth, sixth, and/or seventh binding domains comprise a an amino acid sequence at least 40%, 45%, 50%, 55%, 60%, 65%, 70%, 75%, 80%, 85%, 90%, 91%, 92%, 93%, 94%, 95%, 96%, 97%, 98%, 99%, or 100% identical to the amino acid sequence selected from the group consisting of SEQ ID NOS: 27399-27403.

143. The composition of any one of claims 103-142, wherein (i) the first cage polypeptide, the second cage polypeptide, and/or the decoy cage polypeptide; and (ii) the first and/or second key polypeptide, comprise at least one cage polypeptide and at least one key polypeptide comprising an amino acid sequence having at least 40%, 45%, 50%, 55%, 60%, 65%, 70%, 75%, 80%, 85%, 90%, 91%, 92%, 93%, 94%, 95%, 96%, 97%, 98%, 99%, or 100% identical to the amino acid sequence of a cage polypeptide and a key polypeptide, respectively, in the same row of Table 7, 8, or 9 (i.e.: each cage polypeptide in row 2 column 1 of the table can be used with each key polypeptide in row 2 column 1 of the table, and so on), with the proviso that each cage polypeptide and each key polypeptide comprises a binding domain.

144. The composition of any one of claims 103-142, wherein the first cage polypeptide, the second cage polypeptide, and/or the decoy cage polypeptide comprise:
(a) an amino acid sequence at least 40%, 45%, 50%, 55%, 60%, 65%, 70%, 75%, 80%, 85%, 90%, 91%, 92%, 93%, 94%, 95%, 96%, 97%, 98%, 99%, or 100% identical to the amino acid sequence selected from the non-limiting group consisting of SEQ ID NOS: 27359-27392, and
(b) a binding domain comprising an amino acid sequence at least 40%, 45%, 50%, 55%, 60%, 65%, 70%, 75%, 80%, 85%, 90%, 91%, 92%, 93%, 94%, 95%, 96%, 97%, 98%, 99%, or 100% identical to the amino acid sequence selected from the group consisting of SEQ ID NOS: 27399-27403.

145. The composition of claim 144, wherein the first cage polypeptide, the second cage polypeptide, and/or the decoy cage polypeptide comprise:
(a) an amino acid sequence at least 40%, 45%, 50%, 55%, 60%, 65%, 70%, 75%, 80%, 85%, 90%, 91%, 92%, 93%, 94%, 95%, 96%, 97%, 98%, 99%, or 100% identical to the amino acid sequence selected from the non-limiting group consisting of SEQ ID NOS: 27359-27392, including optional amino acid residues; and
(b) a binding domain comprising an amino acid sequence at least 40%, 45%, 50%, 55%, 60%, 65%, 70%, 75%, 80%, 85%, 90%, 91%, 92%, 93%, 94%, 95%, 96%, 97%, 98%, 99%, or 100% identical to the amino acid sequence selected from the group consisting of SEQ ID NOS: 27399-27403.

146. The composition of any one of claims 103-145, wherein the first key polypeptide and/or the second key polypeptide comprise:
(a) an amino acid sequence at least 40%, 45%, 50%, 55%, 60%, 65%, 70%, 75%, 80%, 85%, 90%, 91%, 92%, 93%, 94%, 95%, 96%, 97%, 98%, 99%, or 100% identical to the amino acid sequence selected from the group consisting of SEQ ID NOS: 27393-27398; and
(b) a binding domain comprising an amino acid sequence at least 40%, 45%, 50%, 55%, 60%, 65%, 70%, 75%, 80%, 85%, 90%, 91%, 92%, 93%, 94%, 95%, 96%, 97%, 98%, 99%, or 100% identical the amino acid sequence selected from the group consisting of SEQ ID NOS: 27399-27403.

147. The composition of claim 146, wherein the first key polypeptide and/or the second key polypeptide comprise:
(a) an amino acid sequence at least 40%, 45%, 50%, 55%, 60%, 65%, 70%, 75%, 80%, 85%, 90%, 91%, 92%, 93%, 94%, 95%, 96%, 97%, 98%, 99%, or 100% identical to the amino acid sequence selected from the group consisting of SEQ ID NOS: 27393-27398, including optional amino acid residues; and
(b) a binding domain comprising an amino acid sequence at least 40%, 45%, 50%, 55%, 60%, 65%, 70%, 75%, 80%, 85%, 90%, 91%, 92%, 93%, 94%, 95%, 96%, 97%, 98%, 99%, or 100% identical the amino acid sequence selected from the group consisting of SEQ ID NOS: 27399-27403.

148. The composition of claim 147, wherein the first key polypeptide and/or the second key polypeptide comprise:
(a) an amino acid sequence at least 40%, 45%, 50%, 55%, 60%, 65%, 70%, 75%, 80%, 85%, 90%, 91%, 92%, 93%, 94%, 95%, 96%, 97%, 98%, 99%, or 100% identical to the amino acid sequence selected from the group consisting of SEQ ID NOS: 27394-27395; and
(b) a binding domain comprising an amino acid sequence at least 40%, 45%, 50%, 55%, 60%, 65%, 70%, 75%, 80%, 85%, 90%, 91%, 92%, 93%, 94%, 95%, 96%, 97%, 98%, 99%, or 100% identical the amino acid sequence selected from the group consisting of SEQ ID NOS: 27399-27403.

149. The composition of any one of claims 103-148, wherein the first cage polypeptide, the second cage polypeptide, and/or the decoy cage polypeptide comprise an amino acid sequence at least 40%, 45%, 50%, 55%, 60%, 65%, 70%, 75%, 80%, 85%, 90%, 91%, 92%, 93%, 94%, 95%, 96%, 97%, 98%, 99%, or 100% identical to the amino acid sequence selected from the group consisting of SEQ ID NOS: 27404-27446.

150. The composition of any one of claims 103-149, wherein the first key polypeptide and/or the second key polypeptide comprise an amino acid sequence at least 40%, 45%, 50%, 55%, 60%, 65%, 70%, 75%, 80%, 85%, 90%, 91%, 92%, 93%, 94%, 95%, 96%, 97%, 98%, 99%, or 100% identical to the amino acid sequence selected from the group consisting of SEQ ID NOS: 27448-27459.

151. A method of targeting an effector molecule to a cell comprising contacting a biological sample containing cells with the compositions of any one of claims 1-48 and 86-89.

152. The method of claim 151, further comprising contacting the cell with an effector molecule.

153. A method for cell targeting, comprising
(a) contacting a biological sample containing cells with
(i) a cage polypeptide comprising (i) a structural region, (ii) a latch region further comprising one or more bioactive peptides, and (iii) a first binding domain that targets a cell of interest, wherein the structural region interacts with the latch region to prevent activity of the one or more bioactive peptides; and
(ii) a key polypeptide comprising a second binding domain that targets the cell of interest, wherein the first binding domain and the second binding domain bind to (i) different moieties on the surface of the same cell, (ii) the same moiety on the surface of the same cell, (iii) different moieties at the synapse between two cells that are in contact, or (iv) the same moiety at the synapse between two cells that are in contact;
wherein the contacting occurs for a time and under conditions to promote binding of the cage polypeptide and the key polypeptide to the cell of interest, and to promote binding of the key polypeptide to the cage structural region to displace the latch region and activate the one or more bioactive peptides only when the cage polypeptide and the key polypeptide are co-localized to the cell of interest;
(b) contacting the biological sample with one or more effector molecule(s) under conditions to promote binding of the one or more effector molecules selected from the fusion proteins, nucleic acids, vectors, and/or cells of any one of claims 64-85 under conditions to promote binding of the one or more effector molecules to the one or more activated bioactive peptides to produce an effector molecule-bioactive peptide complex; and
(c) optionally detecting the effector molecule-bioactive peptide complex, wherein the effector molecule-bioactive peptide complex provides a measure of the cell of interest in the biological sample.

154. The method of claim 153, wherein the biological sample is present within or obtained from a subject having a disease to be treated, and wherein the method serves to treat the disease.

155. The method of claim 154, wherein step (a) comprises intravenous infusion into the subject.

156. The method of any one of claims 153-155, wherein step (b) is carried out after step (a).

157. The method of any one of claims 153-156, wherein the detecting step is carried out.

158. The method of any one of claims 153-157, wherein the method comprises the use of the compositions of any one of claims 1-48 and 188-191.

159. The method of any one of claims 151-158, wherein the method comprises the use of AND, OR, and/or NOT logic, using any embodiment or combination of embodiments disclosed herein.

160. The method of any one of claims 151-159, wherein the method comprises use of AND logic.

161. The method of claim 160, wherein the method comprises use of the composition of any one of claim 102-105 or 116-118, or claims depending therefrom.

162. The method of any one of claims 151-160, wherein the method comprises use of OR logic.

163. The method of claim 162, wherein the method comprises use of the composition of any one of claim 106-111 or 119-124, or claims depending therefrom.

164. The method of any one of claims 151-163, wherein the method comprises use of NOT logic.

165. The method of claim 164, wherein the method comprises use of the composition of any one of claims 112-114 and 125-137, or claims depending therefrom.

166. A fusion protein comprising:
(a) an extracellular binding domain;
(b) a transmembrane domain;
(c) an intracellular signaling component; and
(d) optionally, a selection marker.

167. The fusion protein of claim 166, wherein the extracellular component includes a binding domain specific to one or more bioactive molecule.

168. The fusion protein of claim 167, wherein the binding domain comprises a peptide, wherein the peptide may optionally be selected from the group consisting of Fab′, F(ab′)₂, Fab, Fv, rIgG, recombinant single chain Fv fragments (scFv), V_{H} single domains, bivalent or bispecific molecules, diabodies, triabodies, and tetrabodies; Bcl or a variant thereof; and computationally designed proteins

169. The fusion protein of claim 167 or 168, wherein the one or more bioactive molecule comprises one or more bioactive peptide.

170. The fusion protein of claim 169, wherein the one or more bioactive peptides comprise one or more bioactive peptide selected from the group consisting of SEQ ID NOS:60, 62-64, 66, 27052, 27053, and 27059-27093.

171. The fusion protein of any one of claims 166-170, wherein the binding domain comprises a stabilized variant of human Bcl2.

172. The fusion protein of any one of claims 166-171, wherein the extracellular component, includes a flexible spacer or hinge region.

173. The fusion protein of any one of claims 166-172, wherein the intracellular signaling component comprises a costimulatory signaling domain.

174. The fusion protein of claim 173, wherein the costimulatory signaling domain is selected from the group consisting of CD27; CD28; 4-1BB; ICOS; OX40; CD30; LFA-1; CD2; CD7; LIGHT; NKG2C; B7-H3; GITR; BAFF-R; CD5; HVEM; CD160; LFA-1; SLAMF7; NKp80; ICAM-1; CD94; DAP12; a ligand that specifically binds with CD83; or any combination thereof.

175. The fusion protein of any one of claims 166-174, wherein the intracellular signaling component comprises an ITAM-signaling domain.

176. The fusion protein of claim 175, wherein the ITAM-signaling domain is CD3.

177. The fusion protein of any one of claims 166-176, further comprising a selection marker.

178. The fusion protein of claim 177, wherein the selection marker is a truncated EGFR (EGFRt), truncated low-affinity nerve growth factor (tNGFR), a truncated CD19 (tCD19), a truncated CD34 (tCD34), or any combination thereof.

179. The fusion protein of any one of claims 166-178, further comprising a self-cleaving peptide.

180. The fusion protein of claim 179, wherein the self-cleaving peptide is a 2A peptide from porcine teschovirus-1 (P2A), Thosea asigna virus (T2A), equine rhinitis A virus (E2A), foot-and-mouth disease virus (F2A), or variant thereof.

181. The fusion protein of any one of claims 166-179, comprising a stabilized variant of human Bcl2, a flexible extracellular spacer domain, CD28/CD3ζ signaling domains, and a truncated EGFR (EGFRt) selection marker linked by a T2A ribosomal skipping sequence.

182. The fusion protein of any one of claims 166-181, comprising an amino acid sequence at least 75%, 80%, 85%, 90%, 91%, 92%, 93%, 94%, 95%, 96%, 97%, 98%, 99%, or 100% the amino acid sequence of SEQ ID NO: 27489.

183. The fusion protein of any one of claims 166-181, comprising an amino acid sequence at least 85%, 90%, 91%, 92%, 93%, 94%, 95%, 96%, 97%, 98%, 99%, or 100% the amino acid sequence of SEQ ID NO: 27489.

184. A nucleic acid encoding the fusion protein of any one of claims 166-183.

185. A vector, including but not limited to an expression vector, comprising the nucleic acid of claim 184 operatively linked to a promoter.

186. The vector of claim 185, wherein the vector is a viral vector, including but not limited to an adenoviral vector, a vaccinia viral vector, an AAV vector, a retroviral vector, a lentiviral vector, an alphaviral vector, or any combination thereof.

187. A cell comprising the fusion protein of any one of claims 166-183, the nucleic acid of claim 184, and/or the vector of any one of claims 185-186, optionally wherein the nucleic acid and/or the expression vector are integrated into a cell chromosome, or optionally wherein the nucleic acid and/or the expression vector are episomal.

188. The composition of any one of claims 102-150, wherein an interface between a latch region and a structural region of the first cage polypeptide, the second cage polypeptide, and/or the decoy polypeptide includes a hydrophobic amino acid to polar amino acid residue ratio of between 1:1 and 10:1.

189. The composition of any one of claims 103-150 and 188, wherein 1, 2, 3, or more large hydrophobic residues in the latch region of the first cage polypeptide, the second cage polypeptide, and/or the decoy polypeptide, including but not limited to isoleucine, valine, or leucine, are mutated to serine, threonine, or a smaller hydrophobic amino acid residue including but not limited to valine (if the starting amino acid is isoleucine or leucine) or alanine.

190. The composition of any one of claims 103-150 and 188-189, wherein 1, 2, 3, or more large hydrophobic residues in the structural region of the first cage polypeptide, the second cage polypeptide, and/or the decoy polypeptide, including but not limited to isoleucine, valine, or leucine, are mutated to serine threonine, or a smaller hydrophobic amino acid residue including but not limited to valine (if the starting amino acid is isoleucine or leucine) or alanine.

191. The composition of any one of claims 103-150 and 188-190, comprising buried amino acid residues having side chains comprising nitrogen or oxygen atoms involved in hydrogen bonding at the interface between the latch domain and the structural domain of the first cage polypeptide, the second cage polypeptide, and/or the decoy polypeptide.

192. Use of the fusion proteins, nucleic acids, expression vectors, cells, and/or compositions of any one of claims 103-191 for any suitable purpose, including but not limited to those disclosed herein.

The application's sequence listing, which the Patent Office published only in electronic form, follows.

SEQUENCE LISTING (27489 sequences)

SEQ ID NO: 1 - protein, 272 aa, Artificial Sequence
  Synthetic
  MISC_FEATURE (1)..(21): optional
  MISC_FEATURE (244)..(244): X can be any residue
  MISC_FEATURE (259)..(259): X can be any residue
MGSSHHHHHHSSGLVPRGSHMSKEAVTKLQALNIKLAEKLLEALARLQELNIALVYLAVELTDPKRIADEIKKVKDKSKEIVERAEEEIARAAAESKKILDEGSGSGSDAVAELQALNLKLAELLLEAIAKLQELNIKLVELLTKLTDPATIREAIRKVKEDSERIVAEAERLIAAAKAESERIIREGSGSGDPDVARLQELNIELARELLRAAAELQELNIKLVELASELTDPDEARKAIARXKRESKRIVEDAERLXREAAAASEKISRE

SEQ ID NO: 2 - protein, 273 aa, Artificial Sequence
  Synthetic
  MISC_FEATURE (1)..(21): optional
MGSSHHHHHHSSGLVPRGSHMGSKEAVTKLMALNLKLAEKLLEAIARLQELNIALVYLATELTDPERIREEIRKVKEESARIVEEAEEEIRRAAARSEDILREGSGSGSDAVAELQRLNLELAELLLRAAAKLQELNIDLVRLLTELTDPKTIRDAIERVKAESERIVREAERLIREAKADSERILREGSGSGDPDVARLQELFIELARELLEALARLQELNIDLVRLASELTDPDTIRDAIRRVKEESARIVEDARRLIKEAAEEAEKISRE

SEQ ID NO: 3 - protein, 273 aa, Artificial Sequence
  Synthetic
  MISC_FEATURE (1)..(21): optional
MGSSHHHHHHSSGLVPRGSHMGSKRAVTELQKLNIELARKLLRALAELMELNIALVYLAVELTDPRRIREEIRKVKEKSDEIVKRAEDEIRKAAAESEKILREGSGSGSDAVAELQRLNLELAKLLLEAIAKLQALNIDLVRLLTELTDPETIRRAIKRVKDESARIVEEAEKLIRAAKDKAREIIDKGSGSGDPDVARLQELNIELARELLEAAARLQELFIDLVRLASELTDPDEARKAIERVKREAERIVREAERLIREAKRASKEISDE

SEQ ID NO: 4 - protein, 295 aa, Artificial Sequence
  Synthetic
  MISC_FEATURE (1)..(21): optional
MGSSHHHHHHSSGLVPRGSHMKLLEAVTKLQALNIKLAEKLLEALARLQELNIALVYLAVELTDPKRIADEIKKVKDKSKEIVERAEEEIARAAAESKKILDEAEEEGSGSGSELLLEAVAELQALNLKLAELLLEAIAKLQELNIKLVELLTKLTDPATIREAIRKVKEDSERIVAEAERLIAAAKAESERIIREAERLAGSGSGSRELLRDVARLQELNIELARELLRAAAELQELNIKLVELASELTDPDEARKAIARVKRESKRIVEDAERLIREAAAASEKISREAERLI

SEQ ID NO: 5 - protein, 319 aa, Artificial Sequence
  Synthetic
  MISC_FEATURE (1)..(21): optional
MGSSHHHHHHSSGLVPRGSHMKLAEKLLEAVTKLQALNIKLAEKLLEALARLQELNIALVYLAVELTDPKRIADEIKKVKDKSKEIVERAEEEIARAAAESKKILDEAEEEIARAGSGSGSLKLAELLLEAVAELQALNLKLAELLLEAIAKLQELNIKLVELLTKLTDPATIREAIRKVKEDSERIVAEAERLIAAAKAESERIIREAERLIAAAAGSGSGSIELARELLRDVARLQELNIELARELLRAAAELQELNIKLVELASELTDPDEARKAIARVKRESKRIVEDAERLIREAAAASEKISREAERLIREAA

SEQ ID NO: 6 - protein, 380 aa, Artificial Sequence
  Synthetic
  MISC_FEATURE (1)..(21): optional
MGSSHHHHHHSSGLVPRGSHMSKEAVTKLQALNIKLAEKLLEAVTKLQALNIKLAEKLLEALARLQELNIALVYLAVELTDPKRIADEIKKVKDKSKEIVERAEEEIARAAAESKKILDEAEEEIARAAAESKKILDEGSGSGSDAVAELQALNLKLAELLLEAVAELQALNLKLAELLLEAIAKLQELNIKLVELLTKLTDPATIREAIRKVKEDSERIVAEAERLIAAAKAESERIIREAERLIAAAKAESERIIREGSGSGDPDVARLQELNIELARELLRDVARLQELNIELARELLRAAAELQELNIKLVELASELTDPDEARKAIARVKRESKRIVEDAERLIREAAAASEKISREAERLIREAAAASEKISRE

SEQ ID NO: 7 - protein, 382 aa, Artificial Sequence
  Synthetic
  MISC_FEATURE (1)..(21): optional
MGSSHHHHHHSSGLVPRGSHMSHAAVIKLSDLNIRLLDKLLQAVIKLTELNAELNRKLIEALQRLFDLNVALVHLAAELTDPKRIADEIKKVKDKSKEIVERAEEEIARAAAESKKILDEAEEEIARAAAESKKILDEGSGSGSDAVAELQALNLKLAELLLEAVAELQALNLKLAELLLEAIAKLQELNIKLVELLTKLTDPATIREAIRKVKEDSERIVAEAERLIAAAKAESERIIREAERLIAAAKAESERIIREGSGSNDPQVAQNQETFIELARDALRLVAENQEAFIEVARLTLRAAALAQEVAIKAVEAASEGGSGSGNKEEIEKLAKEAREKLKKAEKEHKEIHDKLRKKNKKAREDLKKKADELRETNKRVN

SEQ ID NO: 8 - protein, 382 aa, Artificial Sequence
  Synthetic
  MISC_FEATURE (1)..(21): optional
MGSSHHHHHHSSGLVPRGSHMSLEAVLKLAELNLKLSDKLAEAVQKLAALLNKLLEKLSEALQRLFELNVALVTLAIELTDPKRIADEIKKVKDKSKEIVERAEEEIARAAAESKKILDEAEEEIARAAAESKKILDEGSGSGSDAVAELQALNLKLAELLLEAVAELQALNLKLAELLLEAIAKLQELNIKLVELLTKLTDPATIREAIRKVKEDSERIVAEAERLIAAAKAESERIIREAERLIAAAKAESERIIREGSGSNDPLVARLQELLIEHARELLRLVATSQEIFIELARAFLANAAQLQEAAIKAVEAASENGSGSGSSEKVRRELKESLKENHKQNQKLLKDHKRAQEKLNRELEELKKKHKKTLDDIRRES

SEQ ID NO: 9 - protein, 382 aa, Artificial Sequence
  Synthetic
  MISC_FEATURE (1)..(21): optional
MGSSHHHHHHSSGLVPRGSHMSLEAVLKLFELNHKLSEKLLEAVLKLHALNQKLSQKLLEALARLLELNVALVELAIELTDPKRIADEIKKVKDKSKEIVERAEEEIARAAAESKKILDEAEEEIARAAAESKKILDEGSGSGSDAVAELQALNLKLAELLLEAVAELQALNLKLAELLLEAIAKLQELNIKLVELLTKLTDPATIREAIRKVKEDSERIVAEAERLIAAAKAESERIIREAERLIAAAKAESERIIREGSGSGDPEVARLQEAFIEQAREILRNVAAAQEALIEQARRLLALAALAQEAAIKAVELASEHGSGSGDTVKRILEELRRRFEKLAKDLDDIARKLLEDHKKHNKELKDKQRKIKKEADDAARS

SEQ ID NO: 10 - protein, 382 aa, Artificial Sequence
  Synthetic
  MISC_FEATURE (1)..(21): optional
MGSSHHHHHHSSGLVPRGSHMSLEAVLKLQDLNSKLSEKLSEAQLKLQALNNKLLRKLLEALLRLQDLNQALVNLALQLTDPKRIADEIKKVKDKSKEIVERAEEEIARAAAESKKILDEAEEEIARAAAESKKILDEGSGSGSDAVAELQALNLKLAELLLEAVAELQALNLKLAELLLEAIAKLQELNIKLVELLTKLTDPATIREAIRKVKEDSERIVAEAERLIAAAKAESERIIREAERLIAAAKAESERIIREGSGSGDPDVAKSQEHLIEHARELLRQVAKSQELFIELARQLLRLAAKSQELAIKAVELASEAGSGSGDDVERRLRKANKESKKEAEELTEEAKKANEKTKEDSKELTKENRKTNKTIKDEARS

SEQ ID NO: 11 - protein, 382 aa, Artificial Sequence
  Synthetic
  MISC_FEATURE (1)..(21): optional
MGSSHHHHHHSSGLVPRGSHMSREAVEKLAELNHKLSHKLQQAQQKLQALNLKLLQKLLEALDRLQDLNNALVKLAQRLTDPKRIADEIKKVKDKSKEIVERAEEEIARAAAESKKILDEAEEEIARAAAESKKILDEGSGSGSDAVAELQALNLKLAELLLEAVAELQALNLKLAELLLEAIAKLQELNIKLVELLTKLTDPATIREAIRKVKEDSERIVAEAERLIAAAKAESERIIREAERLIAAAKAESERIIREGSGSGDPDVARQQETLIEQARRLLRNVAESQELFIEAARTVLRLAAKLQEINIKQVELASEAGSGSGDDEERRSEKTVQDAKREIKKVEDDLQRLNEEQKKKVKKQEDENQKTLKKHKDDARS

SEQ ID NO: 12 - protein, 258 aa, Artificial Sequence
  Synthetic
  MISC_FEATURE (1)..(21): optional
MGSSHHHHHHSSGLVPRGSHMNKEDATEAQKKAIRAAEELLKDVTRIQERAIREAEKALERLARVQEEAIRRVYEAVESKNKEELKKVKEEIEELLRRLKRELDELEREIRELLKEIKEKADRLEKEIRDLIERIRRDRNASDEVVTRLARLNEELIRELREDVRRLAELNKELLRELERAARELARLNEKLLELADRVETEEEARKAIARVKRESKRIVEDAERLIREAAAASEKISREAERLIREAAAASEKISRE

SEQ ID NO: 13 - protein, 262 aa, Artificial Sequence
  Synthetic
  MISC_FEATURE (1)..(21): optional
MGSSHHHHHHSSGLVPRGSHMDERLKRLNERLADELDKDLERLLRLNEELARELTRAAEELRELNEKLVELAKKLQGGRSREVAERAEKEREKIRRKLEEIKKEIKEDADRIKKRADELRRRLEKTLEDAARELEKLKREPRTEELKRKATELQKEAIRRAEELLKEVTDVQRRAIERAEELLEKLARLQEEAIRTVYLLVELNKVDRARKAIARVKRESKRIVEDAERLIREAAAASEKISREAERLIREAAAASEKISRE

SEQ ID NO: 14 - protein, 259 aa, Artificial Sequence
  Synthetic
  MISC_FEATURE (1)..(21): optional
MGSSHHHHHHSSGLVPRGSHMLIERLTRLEKEHVRELKRLLDTSLEILRRLVEAFETNLRQLKEALKRALEAANLHNEEVEEVLRKLEEDLRRLEEELRKTLDDVRKEVKRLKEELDKRIKEVEDELRKIKEKLKKGDKNEKRVLEEILRLAEDVLKKSDKLAKDVQERARELNEILEELSRKLQELFERVVEEVTRNVPTTERIEKVRRELKESLKENHKQNQKLLKDHKRAQEKLNRELEELKKKHKKTLDDIRRES

SEQ ID NO: 15 - protein, 263 aa, Artificial Sequence
  Synthetic
  MISC_FEATURE (1)..(21): optional
MGSSHHHHHHSSGLVPRGSHMSEERVLELAEEALRLSDEAAKEIQELARRLNEELEKLSKELQDLFERIVETVTRLIDADEETLKRAAEEIKKRLEDARKKAKEAADKAREELDRARKKLKELVDEIRKKAKDALEKAGADEELVARLLRLLEEHARELERLLRTSARIIERLLDAFRRNLEQLKEAADKAVEAAEEAVRRVEDVRVWSEKVRRELKESLKENHKQNQKLLKDHKRAQEKLNRELEELKKKHKKTLDDIRRES

SEQ ID NO: 16 - protein, 311 aa, Artificial Sequence
  Synthetic
  MISC_FEATURE (1)..(23): optional
MGSHHHHHHGSGSENLYFQGSGGSELARKLLEASTKLQRLNIRLAEALLEAIARLQELNLELVYLAVELTDPKRIRDEIKEVKDKSKEIIRRAEKEIDDAAKESEKILEEAREAISGSGSELAKLLLKAIAETQDLNLRAAKAFLEAAAKLQELNIRAVELLVKLTDPATIREALEHAKRRSKEIIDEAERAIRAAKRESERIIEEARRLIEKGSGSGSELARELLRAHAQLQRLNLELLRELLRALAQLQELNLDLLRLASELTDPDEARKAIARVKRESKRIVEDAERLIREAAAASEKISREAERLIR

SEQ ID NO: 17 - protein, 311 aa, Artificial Sequence
  Synthetic
  MISC_FEATURE (1)..(23): optional
MGSHHHHHHGSGSENLYFQGSGGSELARKLLEASTKLQRLNIRLAEALLEAIARLQELNLELVYLAVELTDPKRIRDEIKEVKDKSKEIIRRAEKEIDDAAKESEKILEEAREAISGSGSELAKLLLKAIAETQDLNLRAAKAFLEAAAKLQELNIRAVELLVKLTDPATIREALEHAKRRSKEIIDEAERAIRAAKRESERIIEEARRLIEKGSGSGSELARELLRAHAQLQRLNLELLRELLRALAQLQELNLDLLRLASELTDPDEARKAIARVKRESNAYYADAERLIREAAAASEKISREAERLIR

SEQ ID NO: 18 - protein, 280 aa, Artificial Sequence
  Synthetic
  MISC_FEATURE (1)..(21): optional
  MISC_FEATURE (234)..(240): optional
  MISC_FEATURE (249)..(249): X is any residue
  MISC_FEATURE (252)..(252): X is any residue
  MISC_FEATURE (260)..(260): X is any residue
MGSSHHHHHHSSGLVPRGSHMGSKEAVTKLQALNIKLAEKLLEALARLQELNIALVYLAVELTDPKRIADEIKKVKDKSKEIVERAEEEIARAAAESKKILDEGSGSGSDAVAELQALNLKLAELLLEAIAKLQELNIKLVELLTKLTDPATIREAIRKVKEDSERIVAEAERLIAAAKAESERIIREGSGSGDPDVARLQELNIELARELLRAAAELQELNIKLVELASELTGSGSGSGDPKMAQELXDKXRAASLQIXGDAFYAILRALAASEKLSKE

SEQ ID NO: 19 - protein, 275 aa, Artificial Sequence
  Synthetic
  MISC_FEATURE (1)..(21): optional
  MISC_FEATURE (247)..(247): X is any residue
  MISC_FEATURE (262)..(262): X is any residue
MGSSHHHHHHSSGLVPRGSHMKEAVTKLQALNIKLAEKLLEALARLQELNIALVYLAVELTDPKRIADEIKKVKDKSKEIVERAEEEIARAAAESKKILDEGSGSGSDAVAELQALNLKLAELLLEAIAKLQELNIKLVELLTKLTDPATIREAIRKVKEDSERIVAEAERLIAAAKAESERIIREGSGSGDPDVARLQELNIELARELLRAAAELQELNIKLVELASEGSGSGSEIAEALRAIGDXFNESYRIVEDAERLXREAAAASEKISRE

SEQ ID NO: 20 - protein, 295 aa, Artificial Sequence
  Synthetic
  MISC_FEATURE (1)..(21): optional
MGSSHHHHHHSSGLVPRGSHMKLLEAVTKLQALNIKLAEKLLEALARLQELNIALVYLAVELTDPKRIADEIKKVKDKSKEIVERAEEEIARAAAESKKILDEAEEEGSGSGSELLLEAVAELQALNLKLAELLLEAIAKLQELNIKLVELLTKLTDPATIREAIRKVKEDSERIVAEAERLIAAAKAESERIIREAERLAGSGSGSRELLRDVARLQELNIELARELLRAAAELQELNIKLVELASELTDEIWIAQELRRIGDEFNAYYADAERLIREAAAASEKISREAERLI

SEQ ID NO: 21 - protein, 319 aa, Artificial Sequence
  Synthetic
  MISC_FEATURE (1)..(21): optional
MGSSHHHHHHSSGLVPRGSHMKLAEKLLEAVTKLQALNIKLAEKLLEALARLQELNIALVYLAVELTDPKRIADEIKKVKDKSKEIVERAEEEIARAAAESKKILDEAEEEIARAGSGSGSLKLAELLLEAVAELQALNLKLAELLLEAIAKLQELNIKLVELLTKLTDPATIREAIRKVKEDSERIVAEAERLIAAAKAESERIIREAERLIAAAAGSGSGSIELARELLRDVARLQELNIELARELLRAAAELQELNIKLVELASELTDEIWIAQELRRIGDEFNAYYADAERLIREAAAASEKISREAERLIREAA

SEQ ID NO: 22 - protein, 380 aa, Artificial Sequence
  Synthetic
  MISC_FEATURE (1)..(21): optional
MGSSHHHHHHSSGLVPRGSHMSKEAVTKLQALNIKLAEKLLEAVTKLQALNIKLAEKLLEALARLQELNIALVYLAVELTDPKRIADEIKKVKDKSKEIVERAEEEIARAAAESKKILDEAEEEIARAAAESKKILDEGSGSGSDAVAELQALNLKLAELLLEAVAELQALNLKLAELLLEAIAKLQELNIKLVELLTKLTDPATIREAIRKVKEDSERIVAEAERLIAAAKAESERIIREAERLIAAAKAESERIIREGSGSGDPDVARLQELNIELARELLRDVARLQELNIELARELLRAAAELQELNIKLVELASELTDEIWIAQELRRIGDEFNAYYADAERLIREAAAASEKISREAERLIREAAAASEKISRE

SEQ ID NO: 23 - protein, 382 aa, Artificial Sequence
  Synthetic
  MISC_FEATURE (1)..(21): optional
MGSSHHHHHHSSGLVPRGSHMSHAAVIKLSDLNIRLLDKLLQAVIKLTELNAELNRKLIEALQRLFDLNVALVHLAAELTDPKRIADEIKKVKDKSKEIVERAEEEIARAAAESKKILDEAEEEIARAAAESKKILDEGSGSGSDAVAELQALNLKLAELLLEAVAELQALNLKLAELLLEAIAKLQELNIKLVELLTKLTDPATIREAIRKVKEDSERIVAEAERLIAAAKAESERIIREAERLIAAAKAESERIIREGSGSNDPQVAQNQETFIELARDALRLVAENQEAFIEVARLTLRAAALAQEVAIKAVEAASEGGSGSGNEIWIAQELRRIGDEFNAYYAEHKEIHDKLRKKNKKAREDLKKKADELRETNKRVN

SEQ ID NO: 24 - protein, 382 aa, Artificial Sequence
  Synthetic
  MISC_FEATURE (1)..(21): optional
MGSSHHHHHHSSGLVPRGSHMSLEAVLKLAELNLKLSDKLAEAVQKLAALLNKLLEKLSEALQRLFELNVALVTLAIELTDPKRIADEIKKVKDKSKEIVERAEEEIARAAAESKKILDEAEEEIARAAAESKKILDEGSGSGSDAVAELQALNLKLAELLLEAVAELQALNLKLAELLLEAIAKLQELNIKLVELLTKLTDPATIREAIRKVKEDSERIVAEAERLIAAAKAESERIIREAERLIAAAKAESERIIREGSGSNDPLVARLQELLIEHARELLRLVATSQEIFIELARAFLANAAQLQEAAIKAVEAASENGSGEIWIAQELRRIGDEFNAYYAQNQKLLKDHKRAQEKLNRELEELKKKHKKTLDDIRRES

SEQ ID NO: 25 - protein, 381 aa, Artificial Sequence
  Synthetic
  MISC_FEATURE (1)..(21): optional
MGSSHHHHHHSSGLVPRGSHMSLEAVLKLFELNHKLSEKLLEAVLKLHALNQKLSQKLLEALARLLELNVALVELAIELTDPKRIADEIKKVKDKSKEIVERAEEEIARAAAESKKILDEAEEEIARAAAESKKILDEGSGSGSDAVAELQALNLKLAELLLEAVAELQALNLKLAELLLEAIAKLQELNIKLVELLTKLTDPATIREAIRKVKEDSERIVAEAERLIAAAKAESERIIREAERLIAAAKAESERIIREGSGSGDPEVARLQEAFIEQAREILRNVAAAQEALIEQARRLLALAALAQEAAIKAVELASEHGSGSEIWIAQELRRIGDEFNAYYADLDDIARKLLEDHKKHNKELKDKQRKIKTIKDEARS

SEQ ID NO: 26 - protein, 382 aa, Artificial Sequence
  Synthetic
  MISC_FEATURE (1)..(21): optional
  MISC_FEATURE (320)..(321): optional
MGSSHHHHHHSSGLVPRGSHMSKEAVTKLQALNIKLAEKLLEAVTKLQALNIKLAEKLLEALARLQELNIALVYLAVELTDPKRIADEIKKVKDKSKEIVERAEEEIARAAAESKKILDEAEEEIARAAAESKKILDEGSGSGSDAVAELQALNLKLAELLLEAVAELQALNLKLAELLLEAIAKLQELNIKLVELLTKLTDPATIREAIRKVKEDSERIVAEAERLIAAAKAESERIIREAERLIAAAKAESERIIREGSGSGDPDVARLQELNIELARELLRDVARLQELNIELARELLRAAAELQELNIKLVELASGGNWSHPQFEKKAIARVKRESKRIVEDAERLIREAAAASEKISREAERLIREAAAASEKISRE

SEQ ID NO: 27 - protein, 380 aa, Artificial Sequence
  Synthetic
  MISC_FEATURE (1)..(21): optional
MGSSHHHHHHSSGLVPRGSHMSKEAVTKLQALNIKLAEKLLEAVTKLQALNIKLAEKLLEALARLQELNIALVYLAVELTDPKRIADEIKKVKDKSKEIVERAEEEIARAAAESKKILDEAEEEIARAAAESKKILDEGSGSGSDAVAELQALNLKLAELLLEAVAELQALNLKLAELLLEAIAKLQELNIKLVELLTKLTDPATIREAIRKVKEDSERIVAEAERLIAAAKAESERIIREAERLIAAAKAESERIIREGSGSGDPDVARLQELNIELARELLRDVARLQELNIELARELLRAAAELQELNIKLVELASELTDPDENWSHPQFEKRESKRIVEDAERLIREAAAASEKISREAERLIREAAAASEKISRE

SEQ ID NO: 28 - protein, 380 aa, Artificial Sequence
  Synthetic
  MISC_FEATURE (1)..(21): optional
MGSSHHHHHHSSGLVPRGSHMSKEAVTKLQALNIKLAEKLLEAVTKLQALNIKLAEKLLEALARLQELNIALVYLAVELTDPKRIADEIKKVKDKSKEIVERAEEEIARAAAESKKILDEAEEEIARAAAESKKILDEGSGSGSDAVAELQALNLKLAELLLEAVAELQALNLKLAELLLEAIAKLQELNIKLVELLTKLTDPATIREAIRKVKEDSERIVAEAERLIAAAKAESERIIREAERLIAAAKAESERIIREGSGSGDPDVARLQELNIELARELLRDVARLQELNIELARELLRAAAELQELNIKLVELASELTDPDEARKNWSHPQFEKKRIVEDAERLIREAAAASEKISREAERLIREAAAASEKISRE

SEQ ID NO: 29 - protein, 380 aa, Artificial Sequence
  Synthetic
  MISC_FEATURE (1)..(21): optional
MGSSHHHHHHSSGLVPRGSHMSKEAVTKLQALNIKLAEKLLEAVTKLQALNIKLAEKLLEALARLQELNIALVYLAVELTDPKRIADEIKKVKDKSKEIVERAEEEIARAAAESKKILDEAEEEIARAAAESKKILDEGSGSGSDAVAELQALNLKLAELLLEAVAELQALNLKLAELLLEAIAKLQELNIKLVELLTKLTDPATIREAIRKVKEDSERIVAEAERLIAAAKAESERIIREAERLIAAAKAESERIIREGSGSGDPDVARLQELNIELARELLRDVARLQELNIELARELLRAAAELQELNIKLVELASELTDPDEARKAIANWSHPQFEKVEDAERLIREAAAASEKISREAERLIREAAAASEKISRE

SEQ ID NO: 30 - protein, 380 aa, Artificial Sequence
  Synthetic
  MISC_FEATURE (1)..(21): optional
MGSSHHHHHHSSGLVPRGSHMSKEAVTKLQALNIKLAEKLLEAVTKLQALNIKLAEKLLEALARLQELNIALVYLAVELTDPKRIADEIKKVKDKSKEIVERAEEEIARAAAESKKILDEAEEEIARAAAESKKILDEGSGSGSDAVAELQALNLKLAELLLEAVAELQALNLKLAELLLEAIAKLQELNIKLVELLTKLTDPATIREAIRKVKEDSERIVAEAERLIAAAKAESERIIREAERLIAAAKAESERIIREGSGSGDPDVARLQELNIELARELLRDVARLQELNIELARELLRAAAELQELNIKLVELASELTDPDEARKAIARNWSHPQFEKEDAERLIREAAAASEKISREAERLIREAAAASEKISRE

SEQ ID NO: 31 - protein, 380 aa, Artificial Sequence
  Synthetic
  MISC_FEATURE (1)..(21): optional
MGSSHHHHHHSSGLVPRGSHMSKEAVTKLQALNIKLAEKLLEAVTKLQALNIKLAEKLLEALARLQELNIALVYLAVELTDPKRIADEIKKVKDKSKEIVERAEEEIARAAAESKKILDEAEEEIARAAAESKKILDEGSGSGSDAVAELQALNLKLAELLLEAVAELQALNLKLAELLLEAIAKLQELNIKLVELLTKLTDPATIREAIRKVKEDSERIVAEAERLIAAAKAESERIIREAERLIAAAKAESERIIREGSGSGDPDVARLQELNIELARELLRDVARLQELNIELARELLRAAAELQELNIKLVELASELTDPDEARKAIARVKRENWSHPQFEKRLIREAAAASEKISREAERLIREAAAASEKISRE

SEQ ID NO: 32 - protein, 380 aa, Artificial Sequence
  Synthetic
  MISC_FEATURE (1)..(21): optional
MGSSHHHHHHSSGLVPRGSHMSKEAVTKLQALNIKLAEKLLEAVTKLQALNIKLAEKLLEALARLQELNIALVYLAVELTDPKRIADEIKKVKDKSKEIVERAEEEIARAAAESKKILDEAEEEIARAAAESKKILDEGSGSGSDAVAELQALNLKLAELLLEAVAELQALNLKLAELLLEAIAKLQELNIKLVELLTKLTDPATIREAIRKVKEDSERIVAEAERLIAAAKAESERIIREAERLIAAAKAESERIIREGSGSGDPDVARLQELNIELARELLRDVARLQELNIELARELLRAAAELQELNIKLVELASELTDPDEARKAIARVKRESKRNWSHPQFEKREAAAASEKISREAERLIREAAAASEKISRE

SEQ ID NO: 33 - protein, 380 aa, Artificial Sequence
  Synthetic
  MISC_FEATURE (1)..(21): optional
MGSSHHHHHHSSGLVPRGSHMSKEAVTKLQALNIKLAEKLLEAVTKLQALNIKLAEKLLEALARLQELNIALVYLAVELTDPKRIADEIKKVKDKSKEIVERAEEEIARAAAESKKILDEAEEEIARAAAESKKILDEGSGSGSDAVAELQALNLKLAELLLEAVAELQALNLKLAELLLEAIAKLQELNIKLVELLTKLTDPATIREAIRKVKEDSERIVAEAERLIAAAKAESERIIREAERLIAAAKAESERIIREGSGSGDPDVARLQELNIELARELLRDVARLQELNIELARELLRAAAELQELNIKLVELASELTDPDEARKAIARVKRESKRIVENWSHPQFEKAAASEKISREAERLIREAAAASEKISRE

SEQ ID NO: 34 - protein, 380 aa, Artificial Sequence
  Synthetic
  MISC_FEATURE (1)..(21): optional
MGSSHHHHHHSSGLVPRGSHMSKEAVTKLQALNIKLAEKLLEAVTKLQALNIKLAEKLLEALARLQELNIALVYLAVELTDPKRIADEIKKVKDKSKEIVERAEEEIARAAAESKKILDEAEEEIARAAAESKKILDEGSGSGSDAVAELQALNLKLAELLLEAVAELQALNLKLAELLLEAIAKLQELNIKLVELLTKLTDPATIREAIRKVKEDSERIVAEAERLIAAAKAESERIIREAERLIAAAKAESERIIREGSGSGDPDVARLQELNIELARELLRDVARLQELNIELARELLRAAAELQELNIKLVELASELTDPDEARKAIARVKRESKRIVEDAERLINWSHPQFEKISREAERLIREAAAASEKISRE

SEQ ID NO: 35 - protein, 309 aa, Artificial Sequence
  Synthetic
  MISC_FEATURE (1)..(21): optional
  MISC_FEATURE (217)..(217): X is any residue
MGSSHHHHHHSSGLVPRGSHMGSKEAVTKLQALNIKLAEKLLEALARLQELNIALVYLAVELTDPKRIADEIKKVKDKSKEIVERAEEEIARAAAESKKILDEGSGSGSDAVAELQALNLKLAELLLEAIAKLQELNIKLVELLTKLTDPATIREAIRKVKEDSERIVAEAERLIAAAKAESERIIREGSGSGDPDVARLQELNIELARELLRAAAXLQELNIKLVELASEGSGSGSGYELRRALEELEKALRELKKSLDELERSLEELEKNPSEDALVENNRLNVENNKIIVEVLRIIAEVLKINAKS

SEQ ID NO: 36 - protein, 319 aa, Artificial Sequence
  Synthetic
  MISC_FEATURE (1)..(21): optional
MGSSHHHHHHSSGLVPRGSHMGSKEAVTKLQALNIKLAEKLLEALARLQELNIALVYLAVELTDPKRIADEIKKVKDKSKEIVERAEEEIARAAAESKKILDEGSGSGSDAVAELQALNLKLAELLLEAIAKLQELNIKLVELLTKLTDPATIREAIRKVKEDSERIVAEAERLIAAAKAESERIIREGSGSGDPDVARLQELNIELARELLRAAAELQELNIKLVELASEGSGSGSGKKLVEEVERALRELLKTSEDLVRKVEKALRELLELIRRGGTKDKIEEKIRRVLEEIKRELERQKRKIEDVLRQIKEELYRS

SEQ ID NO: 37 - protein, 398 aa, Artificial Sequence
  Synthetic
  MISC_FEATURE (1)..(21): optional
MGSSHHHHHHSSGLVPRGSHMSKEAVTKLQALNIKLAEKLLEAVTKLQALNIKLAEKLLEALARLQELNIALVYLAVELTDPKRIADEIKKVKDKSKEIVERAEEEIARAAAESKKILDEAEEEIARAAAESKKILDEGSGSGSDAVAELQALNLKLAELLLEAVAELQALNLKLAELLLEAIAKLQELNIKLVELLTKLTDPATIREAIRKVKEDSERIVAEAERLIAAAKAESERIIREAERLIAAAKAESERIIREGSGSGDPDVARLQELNIELARELLRDVARLQELNIELARELLRAAAELQELNIKLVELASEGSGSGSGYELRRALEELEKALRELKKSLDELERSLEELEKNPSEDALVENNRLNVENNKIIVEVLRIIAEVLKINAKS

SEQ ID NO: 38 - protein, 408 aa, Artificial Sequence
  Synthetic
  MISC_FEATURE (1)..(21): optional
MGSSHHHHHHSSGLVPRGSHMSKEAVTKLQALNIKLAEKLLEAVTKLQALNIKLAEKLLEALARLQELNIALVYLAVELTDPKRIADEIKKVKDKSKEIVERAEEEIARAAAESKKILDEAEEEIARAAAESKKILDEGSGSGSDAVAELQALNLKLAELLLEAVAELQALNLKLAELLLEAIAKLQELNIKLVELLTKLTDPATIREAIRKVKEDSERIVAEAERLIAAAKAESERIIREAERLIAAAKAESERIIREGSGSGDPDVARLQELNIELARELLRDVARLQELNIELARELLRAAAELQELNIKLVELASEGSGSGSGKKLVEEVERALRELLKTSEDLVRKVEKALRELLELIRRGGTKDKIEEKIRRVLEEIKRELERQKRKIEDVLRQIKEELYRS

SEQ ID NO: 39 - protein, 856 aa, Artificial Sequence
  Synthetic
  MISC_FEATURE (1)..(259): optional
  MISC_FEATURE (619)..(856): optional
GHHHHHHHHHHGVSKGEELFTGVVPILVELDGDVNGHKFSVSGEGEGDATYGKLTLKFICTTGKLPVPWPTLVTTLSWGVQCFARYPDHMKQHDFFKSAMPEGYVQERTIFFKDDGNYKTRAEVKFEGDTLVNRIELKGIDFKEDGNILGHKLEYNYFSDNVYITADKQKNGIKANFKIRHNIEDGGVQLADHYQQNTPIGDGPVLLPDNHYLSTQSKLSKDPNEKRDHMVLLEFVTAAGITLGMDELYKGSGCSLQGMSKEAVTKLQALNIKLAEKLLEAVTKLQALNIKLAEKLLEALARLQELNIALVYLAVELTDPKRIADEIKKVKDKSKEIVERAEEEIARAAAESKKILDEAEEEIARAAAESKKILDEGSGSGSDAVAELQALNLKLAELLLEAVAELQALNLKLAELLLEAIAKLQELNIKLVELLTKLTDPATIREAIRKVKEDSERIVAEAERLIAAAKAESERIIREAERLIAAAKAESERIIREGSGSGDPDVARLQELNIELARELLRDVARLQELNIELARELLRAAAELQELNIKLVELASELTDPDEARKAIARVKRESKRIVEDAERLIREAAAASEKISREAERLIREAAAASEKISREVSKGEELFTGVVPILVELDGDVNGHKFSVSGEGEGDATYGKLTLKLICTTGKLPVPWPTLVTTLGYGVQCFARYPDHMKQHDFFKSAMPEGYVQERTIFFKDDGNYKTRAEVKFEGDTLVNRIELKGIDFKEDGNILGHKLEYNYNSHNVYITADKQKNGIKANFKIRHNIEDGGVQLADHYQQNTPIGDGPVLLPDNHYLSYQSKLSKDPNEKRDHMVLLEFVTAAGITLGMDELYK

SEQ ID NO: 40 - protein, 859 aa, Artificial Sequence
  Synthetic
  MISC_FEATURE (1)..(260): optional
  MISC_FEATURE (622)..(859): optional
MGHHHHHHHHHHGVSKGEELFTGVVPILVELDGDVNGHKFSVSGEGEGDATYGKLTLKFICTTGKLPVPWPTLVTTLSWGVQCFARYPDHMKQHDFFKSAMPEGYVQERTIFFKDDGNYKTRAEVKFEGDTLVNRIELKGIDFKEDGNILGHKLEYNYFSDNVYITADKQKNGIKANFKIRHNIEDGGVQLADHYQQNTPIGDGPVLLPDNHYLSTQSKLSKDPNEKRDHMVLLEFVTAAGITLGMDELYKGSGCSLQGMSHAAVIKLSDLNIRLLDKLLQAVIKLTELNAELNRKLIEALQRLFDLNVALVHLAAELTDPKRIADEIKKVKDKSKEIVERAEEEIARAAAESKKILDEAEEEIARAAAESKKILDEGSGSGSDAVAELQALNLKLAELLLEAVAELQALNLKLAELLLEAIAKLQELNIKLVELLTKLTDPATIREAIRKVKEDSERIVAEAERLIAAAKAESERIIREAERLIAAAKAESERIIREGSGSNDPQVAQNQETFIELARDALRLVAENQEAFIEVARLTLRAAALAQEVAIKAVEAASEGGSGSGNKEEIEKLAKEAREKLKKAEKEHKEIHDKLRKKNKKAREDLKKKADELRETNKRVNVSKGEELFTGVVPILVELDGDVNGHKFSVSGEGEGDATYGKLTLKLICTTGKLPVPWPTLVTTLGYGVQCFARYPDHMKQHDFFKSAMPEGYVQERTIFFKDDGNYKTRAEVKFEGDTLVNRIELKGIDFKEDGNILGHKLEYNYNSHNVYITADKQKNGIKANFKIRHNIEDGGVQLADHYQQNTPIGDGPVLLPDNHYLSYQSKLSKDPNEKRDHMVLLEFVTAAGITLGMDELYK

SEQ ID NO: 41 - protein, 858 aa, Artificial Sequence
  Synthetic
  MISC_FEATURE (1)..(259): optional
  MISC_FEATURE (621)..(858): optional
GHHHHHHHHHHGVSKGEELFTGVVPILVELDGDVNGHKFSVSGEGEGDATYGKLTLKFICTTGKLPVPWPTLVTTLSWGVQCFARYPDHMKQHDFFKSAMPEGYVQERTIFFKDDGNYKTRAEVKFEGDTLVNRIELKGIDFKEDGNILGHKLEYNYFSDNVYITADKQKNGIKANFKIRHNIEDGGVQLADHYQQNTPIGDGPVLLPDNHYLSTQSKLSKDPNEKRDHMVLLEFVTAAGITLGMDELYKGSGCSLQGMSLEAVLKLAELNLKLSDKLAEAVQKLAALLNKLLEKLSEALQRLFELNVALVTLAIELTDPKRIADEIKKVKDKSKEIVERAEEEIARAAAESKKILDEAEEEIARAAAESKKILDEGSGSGSDAVAELQALNLKLAELLLEAVAELQALNLKLAELLLEAIAKLQELNIKLVELLTKLTDPATIREAIRKVKEDSERIVAEAERLIAAAKAESERIIREAERLIAAAKAESERIIREGSGSNDPLVARLQELLIEHARELLRLVATSQEIFIELARAFLANAAQLQEAAIKAVEAASENGSGSGSSEKVRRELKESLKENHKQNQKLLKDHKRAQEKLNRELEELKKKHKKTLDDIRRESVSKGEELFTGVVPILVELDGDVNGHKFSVSGEGEGDATYGKLTLKLICTTGKLPVPWPTLVTTLGYGVQCFARYPDHMKQHDFFKSAMPEGYVQERTIFFKDDGNYKTRAEVKFEGDTLVNRIELKGIDFKEDGNILGHKLEYNYNSHNVYITADKQKNGIKANFKIRHNIEDGGVQLADHYQQNTPIGDGPVLLPDNHYLSYQSKLSKDPNEKRDHMVLLEFVTAAGITLGMDELYK

SEQ ID NO: 42 - protein, 858 aa, Artificial Sequence
  Synthetic
  MISC_FEATURE (1)..(259): optional
  MISC_FEATURE (621)..(858): optional
GHHHHHHHHHHGVSKGEELFTGVVPILVELDGDVNGHKFSVSGEGEGDATYGKLTLKFICTTGKLPVPWPTLVTTLSWGVQCFARYPDHMKQHDFFKSAMPEGYVQERTIFFKDDGNYKTRAEVKFEGDTLVNRIELKGIDFKEDGNILGHKLEYNYFSDNVYITADKQKNGIKANFKIRHNIEDGGVQLADHYQQNTPIGDGPVLLPDNHYLSTQSKLSKDPNEKRDHMVLLEFVTAAGITLGMDELYKGSGCSLQGMSLEAVLKLFELNHKLSEKLLEAVLKLHALNQKLSQKLLEALARLLELNVALVELAIELTDPKRIADEIKKVKDKSKEIVERAEEEIARAAAESKKILDEAEEEIARAAAESKKILDEGSGSGSDAVAELQALNLKLAELLLEAVAELQALNLKLAELLLEAIAKLQELNIKLVELLTKLTDPATIREAIRKVKEDSERIVAEAERLIAAAKAESERIIREAERLIAAAKAESERIIREGSGSGDPEVARLQEAFIEQAREILRNVAAAQEALIEQARRLLALAALAQEAAIKAVELASEHGSGSGDTVKRILEELRRRFEKLAKDLDDIARKLLEDHKKHNKELKDKQRKIKKEADDAARSVSKGEELFTGVVPILVELDGDVNGHKFSVSGEGEGDATYGKLTLKLICTTGKLPVPWPTLVTTLGYGVQCFARYPDHMKQHDFFKSAMPEGYVQERTIFFKDDGNYKTRAEVKFEGDTLVNRIELKGIDFKEDGNILGHKLEYNYNSHNVYITADKQKNGIKANFKIRHNIEDGGVQLADHYQQNTPIGDGPVLLPDNHYLSYQSKLSKDPNEKRDHMVLLEFVTAAGITLGMDELYK

SEQ ID NO: 43 - protein, 380 aa, Artificial Sequence
  Synthetic
  MISC_FEATURE (1)..(21): optional
MGSSHHHHHHSSGLVPRGSHMSKEAVTKLQALNIKLAEKLLEAVTKLQALNIKLAEKLLEALARLQELNIALVYLAVELTDPKRIADEIKKVKDKSKEIVERAEEEIARAAAESKKILDEAEEEIARAAAESKKILDEGSGSGSDAVAELQALNLKLAELLLEAVAELQALNLKLAELLLEAIAKLQELNIKLVELLTKLTDPATIREAIRKVKEDSERIVAEAERLIAAAKAESERIIREAERLIAAAKAESERIIREGSGSGDPDVARLQELNIELARELLRDVARLQELNIELARELLRAAAELQELNIKLVELASELTDPDEARKAIARVKRESKRIVEDAEENLYFQGAASEKISREAERLIREAAAASEKISRE

SEQ ID NO: 44 - protein, 380 aa, Artificial Sequence
  Synthetic
  MISC_FEATURE (1)..(21): optional
MGSSHHHHHHSSGLVPRGSHMSKEAVTKLQALNIKLAEKLLEAVTKLQALNIKLAEKLLEALARLQELNIALVYLAVELTDPKRIADEIKKVKDKSKEIVERAEEEIARAAAESKKILDEAEEEIARAAAESKKILDEGSGSGSDAVAELQALNLKLAELLLEAVAELQALNLKLAELLLEAIAKLQELNIKLVELLTKLTDPATIREAIRKVKEDSERIVAEAERLIAAAKAESERIIREAERLIAAAKAESERIIREGSGSGDPDVARLQELNIELARELLRDVARLQELNIELARELLRAAAELQELNIKLVELASELTDPDEARAHIVMVDAYKKRIVEDAERLIREAAAASEKISREAERLIREAAAASEKISRE

SEQ ID NO: 45 - protein, 359 aa, Artificial Sequence
  Synthetic
SKEAVTKLQALNIKLAEKLLEAVTKLQALNIKLAEKLLEALARLQELNIALVYLAVELTDPKRIADEIKKVKDKSKEIVERAEEEIARAAAESKKILDEAEEEIARAAAESKKILDEGSGSGSDAVAELQALNLKLAELLLEAVAELQALNLKLAELLLEAIAKLQELNIKLVELLTKLTDPATIREAIRKVKEDSERIVAEAERLIAAAKAESERIIREAERLIAAAKAESERIIREGSGSGDPDVARLQELNIELARELLRDVARLQELNIELARELLRAAAELQELNIKLVELASELTDPDEARKAIARVKRESKRIVEDLALKLAGLDINSEKISREAERLIREAAAASEKISRE

SEQ ID NO: 46 - protein, 359 aa, Artificial Sequence
  Synthetic
SKEAVTKLQALNIKLAEKLLEAVTKLQALNIKLAEKLLEALARLQELNIALVYLAVELTDPKRIADEIKKVKDKSKEIVERAEEEIARAAAESKKILDEAEEEIARAAAESKKILDEGSGSGSDAVAELQALNLKLAELLLEAVAELQALNLKLAELLLEAIAKLQELNIKLVELLTKLTDPATIREAIRKVKEDSERIVAEAERLIAAAKAESERIIREAERLIAAAKAESERIIREGSGSGDPDVARLQELNIELARELLRDVARLQELNIELARELLRAAAELQELNIKLVELASELTDPDEARKAIARVKRESKRIVEDAERLIRELAEKLAGLDINAERLIREAAAASEKISRE

SEQ ID NO: 47 - protein, 359 aa, Artificial Sequence
  Synthetic
SKEAVTKLQALNIKLAEKLLEAVTKLQALNIKLAEKLLEALARLQELNIALVYLAVELTDPKRIADEIKKVKDKSKEIVERAEEEIARAAAESKKILDEAEEEIARAAAESKKILDEGSGSGSDAVAELQALNLKLAELLLEAVAELQALNLKLAELLLEAIAKLQELNIKLVELLTKLTDPATIREAIRKVKEDSERIVAEAERLIAAAKAESERIIREAERLIAAAKAESERIIREGSGSGDPDVARLQELNIELARELLRDVARLQELNIELARELLRAAAELQELNIKLVELASELTDPDEARKAIARVKRESKELAEKLRAGLDLNAAASEKISREAERLIREAAAASEKISRE

SEQ ID NO: 48 - protein, 359 aa, Artificial Sequence
  Synthetic
SKEAVTKLQALNIKLAEKLLEAVTKLQALNIKLAEKLLEALARLQELNIALVYLAVELTDPKRIADEIKKVKDKSKEIVERAEEEIARAAAESKKILDEAEEEIARAAAESKKILDEGSGSGSDAVAELQALNLKLAELLLEAVAELQALNLKLAELLLEAIAKLQELNIKLVELLTKLTDPATIREAIRKVKEDSERIVAEAERLIAAAKAESERIIREAERLIAAAKAESERIIREGSGSGDPDVARLQELNIELARELLRDVARLQELNIELARELLRAAAELQELNIKLVELASELTDPDEARKAIARVKRESKAAAKRARTSIREAAAASEKISREAERLIREAAAASEKISRE

SEQ ID NO: 49 - protein, 380 aa, Artificial Sequence
  Synthetic
  MISC_FEATURE (1)..(21): optional
MGSSHHHHHHSSGLVPRGSHMSKEAVTKLQALNIKLAEKLLEAVTKLQALNIKLAEKLLEALARLQELNIALVYLAVELTDPKRIADEIKKVKDKSKEIVERAEEEIARAAAESKKILDEAEEEIARAAAESKKILDEGSGSGSDAVAELQALNLKLAELLLEAVAELQALNLKLAELLLEAIAKLQELNIKLVELLTKLTDPATIREAIRKVKEDSERIVAEAERLIAAAKAESERIIREAERLIAAAKAESERIIREGSGSGDPDVARLQELNIELARELLRDVARLQELNIELARELLRAAAELQELNIKLVELASELTDPDEARKAIARVKTMFSSNRQKILERTETLNQEWKQRRIQAERLIREAAAASEKISRE

SEQ ID NO: 50 - protein, 16 aa, Artificial Sequence
  Synthetic
  MISC_FEATURE (2)..(4): X is any amino acid
  MISC_FEATURE (7)..(7): X is any amino acid
  MISC_FEATURE (11)..(11): X is any amino acid
  MISC_FEATURE (13)..(15): X is any amino acid
IXXXLRXIGDXFXXXY

SEQ ID NO: 51 - protein, 451 aa, Artificial Sequence
  Synthetic
  MISC_FEATURE (1)..(20): optional
  MISC_FEATURE (331)..(396): optional
MGSHHHHHHGSGSENLYFQGSKEAAKKLQDLNIELARKLLEASTKLQRLNIRLAEALLEAIARLQELNLELVYLAVELTDPKRIRDEIKEVKDKSKEIIRRAEKEIDDAAKESKKILEEARKAIRDAAEESRKILEEGSGSGSDALDELQKLNLELAKLLLKAIAETQDLNLRAAKAFLEAAAKLQELNIRAVELLVKLTDPATIRRALEHAKRRSKEIIDEAERAIRAAKRESERIIEEARRLIEKAKEESERIIREGSGSGDPDIKKLQDLNIELARELLRAHAQLQRLNLELLRELLRALAQLQELNLDLLRLASELTGGSGGSGGSVLLNVLSKCAGSKKFRPAPAAAFARECRGFYFELQELKEDDYYGITLSDDSDHQFLLANQVVVHNCGGSGGSDEIWIAQELRRIGDEFNAYYADAERLIREAAAASEKISREAERLIREAA

SEQ ID NO: 52 - protein, 823 aa, Artificial Sequence
  Synthetic
  MISC_FEATURE (1)..(20): optional
MGSHHHHHHGSGSENLYFQGHMSKGEELFTGVVPILVELDGDVNGHKFSVRGEGEGDATNGKLTLKFICTTGKLPVPWPTLVTTLTYGVQCFARYPDHMKQHDFFKSAMPEGYVQERTISFKDDGTYKTRAEVKFEGDTLVNRIELKGIDFKEDGNILGHKLEYNFNSHNVYITADKQKNGIKANFKIRHNVEDGSVQLADHYQQNTPIGDGPVLLPDNHYLSTQSVLSKDPNEKRDHMVLLEFVTAAGITHGMDELYKSGSGSGCFAKGTNVLMADGSIECIENIEVGNKVMGKDGRPREVIKLPRGRETMYSVVQKSQHRAHKSDSSREVPELLKFTCNATHELVVRTPRSVRRLSRTIKGVEYFEVITFEMGQKKAPDGRIVELVKEVSKSYPISEGPERANELVESYRKASNKAYFEWTIEARDLSLLGSHVRKATYQTYAPILYGGSGGSGGGGSGGSGSKEAAKKLQDLNIELARKLLEASTKLQRLNIRLAEALLEAIARLQELNLELVYLAVELTDPKRIRDEIKEVKDKSKEIIRRAEKEIDDAAKESKKILEEARKAIRDAAEESRKILEEGSGSGSDALDELQKLNLELAKLLLKAIAETQDLNLRAAKAFLEAAAKLQELNIRAVELLVKLTDPATIRRALEHAKRRSKEIIDEAERAIRAAKRESERIIEEARRLIEKAKEESERIIREGSGSGDPDIKKLQDLNIELARELLRAHAQLQRLNLELLRELLRALAQLQELNLDLLRLASELTDEIWIAQELRRIGDEFNAYYADAERLSREAAAASEKISREAERSIREAAAASEKISRE

SEQ ID NO: 53 - protein, 822 aa, Artificial Sequence
  Synthetic
  MISC_FEATURE (1)..(463): optional
MGSSHHHHHHSSGLVPRGSHMSKGEELFTGVVPILVELDGDVNGHKFSVRGEGEGDATNGKLTLKFICTTGKLPVPWPTLVTTLTYGVQCFARYPDHMKQHDFFKSAMPEGYVQERTISFKDDGTYKTRAEVKFEGDTLVNRIELKGIDFKEDGNILGHKLEYNFNSHNVYITADKQKNGIKANFKIRHNVEDGSVQLADHYQQNTPIGDGPVLLPDNHYLSTQSVLSKDPNEKRDHMVLLEFVTAAGITHGMDELYKSGSGSGCFAKGTNVLMADGSIECIENIEVGNKVMGKDGRPREVIKLPRGRETMYSVVQKSQHRAHKSDSSREVPELLKFTCNATHELVVRTPRSVRRLSRTIKGVEYFEVITFEMGQKKAPDGRIVELVKEVSKSYPISEGPERANELVESYRKASNKAYFEWTIEARDLSLLGSHVRKATYQTYAPILYGGSGGSGGGGSGGSGSKEAAKKLQDLNIELARKLLEASTKLQRLNIRLAEALLEAIARLQELNLELVYLAVELTDPKRIRDEIKEVKDKSKEIIRRAEKEIDDAAKESKKILEEARKAIRDAAEESRKILEEGSGSGSDALDELQKLNLELAKLLLKAIAETQDLNLRAAKAFLEAAAKLQELNIRAVELLVKLTDPATIRRALEHAKRRSKEIIDEAERAIRAAKRESERIIEEARRLIEKAKEESERIIREGSGSGDPDIKKLQDLNIELARELLRAHAQLQRLNLELLRELLRALAQLQELNLDLLRLASELTDEIWIAQELRRIGDEFNAYYADAERLSREAAAASEKISREAERSIREAAAASEKISRE

SEQ ID NO: 54 - protein, 379 aa, Artificial Sequence
  Synthetic
  MISC_FEATURE (1)..(20): optional
  MISC_FEATURE (321)..(342): optional
  misc_feature (348)..(348): Xaa can be any naturally occurring amino acid
  misc_feature (365)..(365): Xaa can be any naturally occurring amino acid
MGSHHHHHHGSGSENLYFQGSKEAAKKLQDLNIELARKLLEASTKLQRLNIRLAEALLEAIARLQELNLELVYLAVELTDPKRIRDEIKEVKDKSKEIIRRAEKEIDDAAKESKKILEEARKAIRDAAEESRKILEEGSGSGSDALDELQKLNLELAKLLLKAIAETQDLNLRAAKAFLEAAAKLQELNIRAVELLVKLTDPATIRRALEHAKRRSKEIIDEAERAIRAAKRESERIIEEARRLIEKAKEESERIIREGSGSGDPDIKKLQDLNIELARELLRAHAQLQRLNLELLRELLRALAQLQELNLDLLRLASELTDEIWIAQELRRIGDEFNAYYADAERLXREAAAASEKISREAERXIREAAAASEKISRE

SEQ ID NO: 55 - protein, 379 aa, Artificial Sequence
  Synthetic
  MISC_FEATURE (1)..(20): optional
  MISC_FEATURE (321)..(342): optional
  misc_feature (348)..(348): Xaa can be any naturally occurring amino acid
  misc_feature (365)..(365): Xaa can be any naturally occurring amino acid
MGSHHHHHHGSGSENLYFQGSKEAAKKLQDLNIELARKLLEASTKLQRLNIRLAEALLEAIARLQELNLELVYLAVELTDPKRIRDEIKEVKDKSKEIIRRAEKEIDDAAKESKKILEEARKAIRDAAEESRKILEEGSGSGSDALDELQKLNLELAKLLLKAIAETQDLNLRAAKAFLEAAAKLQELNIRAVELLVKLTDPATIRRALEHAKRRSKEIIDEAERAIRAAKRESERIIEEARRLIEKAKEESERIIREGSGSGDPDIKKLQDLNIELARELLRAHAQLQRLNLELLRELLRALAQLQELNLDLLRLASELRDHMVLHEYVNAAGITFNAYYADAERLXREAAAASEKISREAERXIREAAAASEKISRE

SEQ ID NO: 56 - protein, 311 aa, Artificial Sequence
  Synthetic
  MISC_FEATURE (1)..(22): optional
  MISC_FEATURE (265)..(286): optional
  misc_feature (295)..(295): Xaa can be any naturally occurring amino acid
  misc_feature (298)..(298): Xaa can be any naturally occurring amino acid
MGSHHHHHHGSGSENLYFQGSGGSELARKLLEASTKLQRLNIRLAEALLEAIARLQELNLELVYLAVELTDPKRIRDEIKEVKDKSKEIIRRAEKEIDDAAKESEKILEEAREAISGSGSELAKLLLKAIAETQDLNLRAAKAFLEAAAKLQELNIRAVELLVKLTDPATIREALEHAKRRSKEIIDEAERAIRAAKRESERIIEEARRLIEKGSGSGSELARELLRAHAQLQRLNLELLRELLRALAQLQELNLDLLRLASELTDEIWIAQELRRIGDEFNAYYADAERLIREXAAXSEKISREAERLIR

SEQ ID NO: 57 - protein, 311 aa, Artificial Sequence
  Synthetic
  MISC_FEATURE (1)..(22): optional
  MISC_FEATURE (265)..(286): optional
  misc_feature (295)..(295): Xaa can be any naturally occurring amino acid
  misc_feature (298)..(298): Xaa can be any naturally occurring amino acid
MGSHHHHHHGSGSENLYFQGSGGSELARKLLEASTKLQRLNIRLAEALLEAIARLQELNLELVYLAVELTDPKRIRDEIKEVKDKSKEIIRRAEKEIDDAAKESEKILEEAREAISGSGSELAKLLLKAIAETQDLNLRAAKAFLEAAAKLQELNIRAVELLVKLTDPATIREALEHAKRRSKEIIDEAERAIRAAKRESERIIEEARRLIEKGSGSGSELARELLRAHAQLQRLNLELLRELLRALAQLQELNLDLLRLASELRDHMVLHEYVNAAGITFNAYYADAERLIREXAAXSEKISREAERLIR

SEQ ID NO: 58 - protein, 494 aa, Artificial Sequence
  Synthetic
  MISC_FEATURE (1)..(21): optional
  MISC_FEATURE (436)..(457): optional
  misc_feature (463)..(463): Xaa can be any naturally occurring amino acid
  misc_feature (480)..(480): Xaa can be any naturally occurring amino acid
MGSHHHHHHGSGSENLYFQGSAMVDTLSGLSSEQGQSGDMTIEEDSATHIKFSKRDEDGKELAGATMELRDSSGKTISTWISDGQVKDFYLYPGKYTFVETAAPDGYEVATAITFTVNEQGQVTVNGKATKGSGGSKEAAKKLQDLNIELARKLLEASTKLQRLNIRLAEALLEAIARLQELNLELVYLAVELTDPKRIRDEIKEVKDKSKEIIRRAEKEIDDAAKESKKILEEARKAIRDAAEESRKILEEGSGSGSDALDELQKLNLELAKLLLKAIAETQDLNLRAAKAFLEAAAKLQELNIRAVELLVKLTDPATIRRALEHAKRRSKEIIDEAERAIRAAKRESERIIEEARRLIEKAKEESERIIREGSGSGDPDIKKLQDLNIELARELLRAHAQLQRLNLELLRELLRALAQLQELNLDLLRLASELRDHMVLHEYVNAAGITFNAYYADAERLXREAAAASEKISREAERXIREAAAASEKISRE

SEQ ID NO: 59 - protein, 423 aa, Artificial Sequence
  Synthetic
  MISC_FEATURE (1)..(21): optional
  MISC_FEATURE (377)..(398): optional
  misc_feature (407)..(407): Xaa can be any naturally occurring amino acid
  misc_feature (410)..(410): Xaa can be any naturally occurring amino acid
MGSHHHHHHGSGSENLYFQGSAMVDTLSGLSSEQGQSGDMTIEEDSATHIKFSKRDEDGKELAGATMELRDSSGKTISTWISDGQVKDFYLYPGKYTFVETAAPDGYEVATAITFTVNEQGQVTVNGKATKGSGGSELARKLLEASTKLQRLNIRLAEALLEAIARLQELNLELVYLAVELTDPKRIRDEIKEVKDKSKEIIRRAEKEIDDAAKESEKILEEAREAISGSGSELAKLLLKAIAETQDLNLRAAKAFLEAAAKLQELNIRAVELLVKLTDPATIREALEHAKRRSKEIIDEAERAIRAAKRESERIIEEARRLIEKGSGSGSELARELLRAHAQLQRLNLELLRELLRALAQLQELNLDLLRLASELRDHMVLHEYVNAAGITFNAYYADAERLIREXAAXSEKISREAERLIR

SEQ ID NO: 60 - protein, 20 aa, Artificial Sequence
  Synthetic
EIWIAQELRRIGDEFNAYYA

SEQ ID NO: 61 - protein, 379 aa, Artificial Sequence
  Synthetic
  MISC_FEATURE (1)..(20): optional
  MISC_FEATURE (322)..(334): optional
MGSHHHHHHGSGSENLYFQGSKEAAKKLQDLNIELARKLLEASTKLQRLNIRLAEALLEAIARLQELNLELVYLAVELTDPKRIRDEIKEVKDKSKEIIRRAEKEIDDAAKESKKILEEARKAIRDAAEESRKILEEGSGSGSDALDELQKLNLELAKLLLKAIAETQDLNLRAAKAFLEAAAKLQELNIRAVELLVKLTDPATIRRALEHAKRRSKEIIDEAERAIRAAKRESERIIEEARRLIEKAKEESERIIREGSGSGDPDIKKLQDLNIELARELLRAHAQLQRLNLELLRELLRALAQLQELNLDLLRLASELTNIQMLLEAADYLERESKRIVEDAERLIREAAAASEKISREAERSIREAAAASEKISRE

SEQ ID NO: 62 - protein, 29 aa, Artificial Sequence
  Synthetic
KMAQELIDKVRAASLQINGDAFYAILRAL

SEQ ID NO: 63 - protein, 9 aa, Artificial Sequence
  Synthetic
  MISC_FEATURE (1)..(1): optional
NWSHPQFEK

SEQ ID NO: 64 - protein, 8 aa, Artificial Sequence
  Synthetic
  MISC_FEATURE (7)..(7): X is G or S
  MISC_FEATURE (8)..(8): X is any amino acid, except P
ENLYFQXX

SEQ ID NO: 65 - protein, 377 aa, Artificial Sequence
  Synthetic
  MISC_FEATURE (1)..(20): optional
  MISC_FEATURE (329)..(341): optional
MGSHHHHHHGSGSENLYFQGSKEAAKKLQDLNIELARKLLEASTKLQRLNIRLAEALLEAIARLQELNLELVYLAVELTDPKRIRDEIKEVKDKSKEIIRRAEKEIDDAAKESKKILEEARKAIRDAAEESRKILEEGSGSGSDALDELQKLNLELAKLLLKAIAETQDLNLRAAKAFLEAAAKLQELNIRAVELLVKLTDPATIRRALEHAKRRSKEIIDEAERAIRAAKRESERIIEEARRLIEKAKEESERIIREGSGSGDPDIKKLQDLNIELARELLRAHAQLQRLNLELLRELLRALAQLQELNLDLLRLASELTDPDEARKNIQMLLEAADYLEEDAERLIREAAAASEKISREAERLIREAASEKISRE

SEQ ID NO: 66 - protein, 6 aa, Artificial Sequence
  Synthetic
LVPRGS

SEQ ID NO: 67 - protein, 285 aa, Artificial Sequence
  Synthetic
  MISC_FEATURE (19)..(38): optional
MDEARKAIARVKRESKRIEIWIAQELRRIGDEFNAYYAEAEKLATDELWHRLLEASTKLQRLNIRLAEALLEAIARLQELNLELVYLAVELTDPKRIRDEIKEVKDKSKEIIRRAEKEIDDAAKESEKILEEAREAISGSGSELAKLLLKAIAETQDLNLRAAKAFLEAAAKLQELNIRAVELLVKLTDPATIREALEHAKRRSKEIIDEAERAIRAAKRESERIIEEARRLIEKGSGSGSELARELLRAHAQLQRLNLELLRELLRALAQLQELNLDLLRLASE

SEQ ID NO: 68 - protein, 309 aa, Artificial Sequence
  Synthetic
  MISC_FEATURE (1)..(21): optional
  MISC_FEATURE (270)..(279): optional
MGSSHHHHHHSSGLVPRGSHMSELARKLLEASTKLQRLNIRLAEALLEAIARLQELNLELVYLAVELTDPKRIRDEIKEVKDKSKEIIRRAEKEIDDAAKESEKILEEAREAISGSGSELAKLLLKAIAETQDLNLRAAKAFLEAAAKLQELNIRAVELLVKLTDPATIREALEHAKRRSKEIIDEAERAIRAAKRESERIIEEARRLIEKGSGSGSELARELLRAHAQLQRLNLELLRELLRALAQLQELNLDLLRLASELTDPDEARAHIVMVDAYKKRIVEDAERLIREAAAASEKISREAERLIR

SEQ ID NO: 69 - protein, 309 aa, Artificial Sequence
  Synthetic
  MISC_FEATURE (1)..(21): optional
  MISC_FEATURE (281)..(290): optional
MGSSHHHHHHSSGLVPRGSHMSELARKLLEASTKLQRLNIRLAEALLEAIARLQELNLELVYLAVELTDPKRIRDEIKEVKDKSKEIIRRAEKEIDDAAKESEKILEEAREAISGSGSELAKLLLKAIAETQDLNLRAAKAFLEAAAKLQELNIRAVELLVKLTDPATIREALEHAKRRSKEIIDEAERAIRAAKRESERIIEEARRLIEKGSGSGSELARELLRAHAQLQRLNLELLRELLRALAQLQELNLDLLRLASELTDPDEARKAIARVKRESKAHIVMVDAYKREAAAASEKISREAERLIR

SEQ ID NO: 70 - protein, 309 aa, Artificial Sequence
  Synthetic
  MISC_FEATURE (1)..(21): optional
  MISC_FEATURE (270)..(277): optional
MGSSHHHHHHSSGLVPRGSHMSELARKLLEASTKLQRLNIRLAEALLEAIARLQELNLELVYLAVELTDPKRIRDEIKEVKDKSKEIIRRAEKEIDDAAKESEKILEEAREAISGSGSELAKLLLKAIAETQDLNLRAAKAFLEAAAKLQELNIRAVELLVKLTDPATIREALEHAKRRSKEIIDEAERAIRAAKRESERIIEEARRLIEKGSGSGSELARELLRAHAQLQRLNLELLRELLRALAQLQELNLDLLRLASELTDPDEARENLYFQGSESKRIVEDAERLIREAAAASEKISREAERLIR

SEQ ID NO: 71 - protein, 309 aa, Artificial Sequence
  Synthetic
  MISC_FEATURE (1)..(21): optional
  MISC_FEATURE (284)..(291): optional
MGSSHHHHHHSSGLVPRGSHMSELARKLLEASTKLQRLNIRLAEALLEAIARLQELNLELVYLAVELTDPKRIRDEIKEVKDKSKEIIRRAEKEIDDAAKESEKILEEAREAISGSGSELAKLLLKAIAETQDLNLRAAKAFLEAAAKLQELNIRAVELLVKLTDPATIREALEHAKRRSKEIIDEAERAIRAAKRESERIIEEARRLIEKGSGSGSELARELLRAHAQLQRLNLELLRELLRALAQLQELNLDLLRLASELTDPDEARKAIARVKRESKRIVENLYFQGSEAAAASEKISREAERLIR

SEQ ID NO: 72 - protein, 309 aa, Artificial Sequence
  Synthetic
  MISC_FEATURE (1)..(21): optional
  MISC_FEATURE (270)..(280): optional
MGSSHHHHHHSSGLVPRGSHMSELARKLLEASTKLQRLNIRLAEALLEAIARLQELNLELVYLAVELTDPKRIRDEIKEVKDKSKEIIRRAEKEIDDAAKESEKILEEAREAISGSGSELAKLLLKAIAETQDLNLRAAKAFLEAAAKLQELNIRAVELLVKLTDPATIREALEHAKRRSKEIIDEAERAIRAAKRESERIIEEARRLIEKGSGSGSELARELLRAHAQLQRLNLELLRELLRALAQLQELNLDLLRLASELTDPDEARVSGWRLFKKISRIVEDAERLIREAAAASEKISREAERLIR

SEQ ID NO: 73 - protein, 309 aa, Artificial Sequence
  Synthetic
  MISC_FEATURE (1)..(21): optional
  MISC_FEATURE (281)..(291): optional
MGSSHHHHHHSSGLVPRGSHMSELARKLLEASTKLQRLNIRLAEALLEAIARLQELNLELVYLAVELTDPKRIRDEIKEVKDKSKEIIRRAEKEIDDAAKESEKILEEAREAISGSGSELAKLLLKAIAETQDLNLRAAKAFLEAAAKLQELNIRAVELLVKLTDPATIREALEHAKRRSKEIIDEAERAIRAAKRESERIIEEARRLIEKGSGSGSELARELLRAHAQLQRLNLELLRELLRALAQLQELNLDLLRLASELTDPDEARKAIARVKRESKVSGWRLFKKISEAAAASEKISREAERLIR

SEQ ID NO: 74 - protein, 309 aa, Artificial Sequence
  Synthetic
  MISC_FEATURE (1)..(21): optional
  MISC_FEATURE (273)..(276): optional
  MISC_FEATURE (302)..(305): optional
MGSSHHHHHHSSGLVPRGSHMSELARKLLEASTKLQRLNIRLAEALLEAIARLQELNLELVYLAVELTDPKRIRDEIKEVKDKSKEIIRRAEKEIDDAAKESEKILEEAREAISGSGSELAKLLLKAIAETQDLNLRAAKAFLEAAAKLQELNIRAVELLVKLTDPATIREALEHAKRRSKEIIDEAERAIRAAKRESERIIEEARRLIEKGSGSGSELARELLRAHAQLQRLNLELLRELLRALAQLQELNLDLLRLASELTDPDEARKAIIQIGRESKRIVEDAERLIREAAAASEKISVQLGRLIR

SEQ ID NO: 75 - protein, 309 aa, Artificial Sequence
  Synthetic
  MISC_FEATURE (1)..(21): optional
  MISC_FEATURE (284)..(287): optional
  MISC_FEATURE (291)..(294): optional
MGSSHHHHHHSSGLVPRGSHMSELARKLLEASTKLQRLNIRLAEALLEAIARLQELNLELVYLAVELTDPKRIRDEIKEVKDKSKEIIRRAEKEIDDAAKESEKILEEAREAISGSGSELAKLLLKAIAETQDLNLRAAKAFLEAAAKLQELNIRAVELLVKLTDPATIREALEHAKRRSKEIIDEAERAIRAAKRESERIIEEARRLIEKGSGSGSELARELLRAHAQLQRLNLELLRELLRALAQLQELNLDLLRLASELTDPDEARKAIARVKRESKRIVIQIGRLIVQLGAASEKISREAERLIR

SEQ ID NO: 76 - protein, 309 aa, Artificial Sequence
  Synthetic
  MISC_FEATURE (1)..(21): optional
  MISC_FEATURE (284)..(287): optional
  MISC_FEATURE (302)..(305): optional
MGSSHHHHHHSSGLVPRGSHMSELARKLLEASTKLQRLNIRLAEALLEAIARLQELNLELVYLAVELTDPKRIRDEIKEVKDKSKEIIRRAEKEIDDAAKESEKILEEAREAISGSGSELAKLLLKAIAETQDLNLRAAKAFLEAAAKLQELNIRAVELLVKLTDPATIREALEHAKRRSKEIIDEAERAIRAAKRESERIIEEARRLIEKGSGSGSELARELLRAHAQLQRLNLELLRELLRALAQLQELNLDLLRLASELTDPDEARKAIARVKRESKRIVIQIGRLIREAAAASEKISVQLGRLIR

SEQ ID NO: 77 - protein, 309 aa, Artificial Sequence
  Synthetic
  MISC_FEATURE (1)..(21): optional
  MISC_FEATURE (272)..(300): optional
MGSSHHHHHHSSGLVPRGSHMSELARKLLEASTKLQRLNIRLAEALLEAIARLQELNLELVYLAVELTDPKRIRDEIKEVKDKSKEIIRRAEKEIDDAAKESEKILEEAREAISGSGSELAKLLLKAIAETQDLNLRAAKAFLEAAAKLQELNIRAVELLVKLTDPATIREALEHAKRRSKEIIDEAERAIRAAKRESERIIEEARRLIEKGSGSGSELARELLRAHAQLQRLNLELLRELLRALAQLQELNLDLLRLASELTDPDESVKELEDKVEELLSKNYHLENEVARLKKLVGERSREAERLIR

SEQ ID NO: 78 - protein, 309 aa, Artificial Sequence
  Synthetic
  MISC_FEATURE (1)..(21): optional
  MISC_FEATURE (274)..(303): optional
MGSSHHHHHHSSGLVPRGSHMSELARKLLEASTKLQRLNIRLAEALLEAIARLQELNLELVYLAVELTDPKRIRDEIKEVKDKSKEIIRRAEKEIDDAAKESEKILEEAREAISGSGSELAKLLLKAIAETQDLNLRAAKAFLEAAAKLQELNIRAVELLVKLTDPATIREALEHAKRRSKEIIDEAERAIRAAKRESERIIEEARRLIEKGSGSGSELARELLRAHAQLQRLNLELLRELLRALAQLQELNLDLLRLASELTDPDEARKAIAGEIAALKQEIAALKKENAALKWEIAALKQGAERLIR

SEQ ID NO: 79 - protein, 309 aa, Artificial Sequence
  Synthetic
  MISC_FEATURE (1)..(21): optional
  MISC_FEATURE (278)..(304): optional
MGSSHHHHHHSSGLVPRGSHMSELARKLLEASTKLQRLNIRLAEALLEAIARLQELNLELVYLAVELTDPKRIRDEIKEVKDKSKEIIRRAEKEIDDAAKESEKILEEAREAISGSGSELAKLLLKAIAETQDLNLRAAKAFLEAAAKLQELNIRAVELLVKLTDPATIREALEHAKRRSKEIIDEAERAIRAAKRESERIIEEARRLIEKGSGSGSELARELLRAHAQLQRLNLELLRELLRALAQLQELNLDLLRLASELTDPDEARKAIARVKRGLEQEIAALEKENAALEWEIAALEQGGERLIR

SEQ ID NO: 80 - protein, 309 aa, Artificial Sequence
  Synthetic
  MISC_FEATURE (1)..(21): optional
  MISC_FEATURE (278)..(304): optional
MGSSHHHHHHSSGLVPRGSHMSELARKLLEASTKLQRLNIRLAEALLEAIARLQELNLELVYLAVELTDPKRIRDEIKEVKDKSKEIIRRAEKEIDDAAKESEKILEEAREAISGSGSELAKLLLKAIAETQDLNLRAAKAFLEAAAKLQELNIRAVELLVKLTDPATIREALEHAKRRSKEIIDEAERAIRAAKRESERIIEEARRLIEKGSGSGSELARELLRAHAQLQRLNLELLRELLRALAQLQELNLDLLRLASELTDPDEARKAIARVKRGLKQKIAALKYKNAALKKKIAALKQGGERLIR

SEQ ID NO: 81 - protein, 186 aa, Artificial Sequence
  Synthetic
  MISC_FEATURE (151)..(158): optional
SRVEEIIEDLRRLLEEIRKENADSIRASKELLDRVKEINDTIIAELERLLKDIEKEVREKGSESEEVKKALRRVLEELEKLLRRVAEINEEVLRRNSKLVEEDARRNAEVLKELKRLVEELMREIGDEDKVRKVAEVAEKVLRDIDKLDRWSHPQFEKTNGEISKLDEDTRRVAERVKKAIEDLAK

SEQ ID NO: 82 - protein, 179 aa, Artificial Sequence
  Synthetic
  MISC_FEATURE (35)..(42): optional
SEVDEIIADNERALDEVRREVEEIDKENAERLGEWSHPQFEKGDRLAKALEEIRKGVRSRLVDELERAIREVEEVIRRVLERVRRLIEEVSKIITDVLREVERLHEEVTKELRKVEDGNSREALDALRRLIEKVVEDSARLIKKVDEALKAVNKEIEDLSREVADLVRAVAEELDARVK

SEQ ID NO: 83 - protein, 177 aa, Artificial Sequence
  Synthetic
  MISC_FEATURE (143)..(150): optional
SSDEVLKEIEEIIRRLEAEVRRVNAEVNASTEDLAREVEEVLRATNELIEELERRVTGTEELKRVIDELRDRDRKVRRRVERVIEESAKRDDESRKRLTRAVEKLRADLKKLADDGVPEEALSKAIKDVRDIVKKVKDELKEWSHPQFEKVDRLSEELKEWLKDVERVLKELTDKDR

SEQ ID NO: 84 - protein, 178 aa, Artificial Sequence
  Synthetic
  MISC_FEATURE (140)..(147): optional
SDAEELLKRVADLLKASLESLEKILRDSKELMDRWRKKLEDLLRESEELVDRAEKILRRGGSDKEVLDKIAEEVRRTNDDSRRLDEELHRLSRDTLRKLEENLRRTEKEVREMDKRAAERGVDERVREELKKLLTRVEWSHPQFEKGDKKILKEAHKESKEVNDRDRELLERLEESVR

SEQ ID NO: 85 - protein, 178 aa, Artificial Sequence
  Synthetic
  MISC_FEATURE (35)..(42): optional
SDAEELLKRVADLLKASLESLEKILRDSKELMDRWSHPQFEKLGESEELVDRAEKILRRGGSDKEVLDKIAEEVRRTNDDSRRLDEELHRLSRDTLRKLEENLRRTEKEVREMDKRAAERGVDERVREELKKLLTRVEEEHRKVLETDKKILKEAHKESKEVNDRDRELLERLEESVR

SEQ ID NO: 86 - protein, 242 aa, Artificial Sequence
  Synthetic
  MISC_FEATURE (212)..(219): optional
SEAEDLLERVKRVLDELIEIVDRNHELNARVVETSARLVERLLEEVERALETLEREIPGRELLDKAIKDLRDVLRRVAEKVKRSIEELKEVLEESRRVLEEVVRALAEVIDRVRRLVEKGVDLRDLIRELKRVLEEAVSLIERLVRLNTRAAEKDNESLRELVRAIKEALKRAVDMVRADGLDSRLVKKLDEIVKEVAKKLEDVVRANEELWSHPQFEKGSSVARLREAVERVARDLEETAR

SEQ ID NO: 87 - protein, 235 aa, Artificial Sequence
  Synthetic
  MISC_FEATURE (24)..(31): optional
SDEERLEKVVKDVIEKVRRILEKWSHPQFEKGSELRRILEEWEKIIREVLDKVRRGSGSADALVEVLEEILRLAEELSKRVEEVLREILKLAKALSDELVKVLAEIVEAAKRISRDDELRKAVEDVARELEDLAAKDRKILDDVREALERIAKEDKDILREAEETLRRLADEMRRSGVDERLLKRVVDILARLLELNATTIERLLRILEELLKLNKELAERVIRVLEKLLEEIKR

SEQ ID NO: 88 - protein, 235 aa, Artificial Sequence
  Synthetic
  MISC_FEATURE (198)..(205): optional
SVLETVKKALEDSSEKIERIVEEDERVAKESSDRIRRLVEEDKRVADEILDLIEKGGDTDTLAKLVEEWSRTSKKLLDDVLKLHKDWSDDSRRLLEEILRVHEELIRAVKEILDRGGKPEEVVRELEKVLKESLDTLEEIIRRLDEANARTVKRVADVIRELEDANAKVLEEIERKGDDKDAVIKVIEELIRANAAVWSHPQFEKGDLVRVNKTVWKELLRVNEKLARDLERVVK

SEQ ID NO: 89 - protein, 235 aa, Artificial Sequence
  Synthetic
  MISC_FEATURE (31)..(38): optional
SLVDELRKSLERNVRVSEEVARRLKEALGRWSHPQFEKGGDLIRLNEDVVRVVEKVGVDESAIERVRRIIEELNRALDAVLKKNEDLVRRLTELLDKLLEENRRLVEELDEDLKRRGGTEEVIDTILELIERSIERLKRLLDELLRIVREALKDNARVADENLKALKEILDELRKDGVSDEELKRVLEKAADLHARLKDAHRKLLEDLERIIRELKKKLDEVVEENKRSVDELKR

SEQ ID NO: 90 - protein, 237 aa, Artificial Sequence
  Synthetic
  MISC_FEATURE (20)..(27): optional
MKDAVIKVIEELIRANAAVWSHPQFEKGDLVRVNKTVWKELLRVNEKLARDLERALDERDVSAWETVKKALEDSSEKIERIVEEDERVAKESSDRIRRLVEEDKRVADEILDLIEKGGDTDTLAKLVEEWSRTSKKLLDDVLKLHKDWSDDSRRLLEEILRVHEELIRAVKEILDRGGAPEEVVRELEKVLKESLDTLEEIIRRLDEANARTVKRVADVIRELEDANAKVLEEIERK

SEQ ID NO: 91 - protein, 175 aa, Artificial Sequence
  Synthetic
  MISC_FEATURE (26)..(33): optional
MEEAASKAIKDVRDIVKKVKDELKEWSHPQFEKVDRLSEELKEWLKDVERVLKELTDREEASEEELKRVIDELRDRDRKVRRRVERVIEESAKRDDESRKRLTRAVEKLRADLKKLSVEGASDEVLKEIEEIIRRLEAEVRRVNAEVNASTEDLAREVEEVLRATNELIEELERR

SEQ ID NO: 92 - protein, 170 aa, Artificial Sequence
  Synthetic
SEVEDVVRKVEKLVRDLIKHVEENVRRVEEVVRKLIEEIKRIAEEITRIAEELAKEPGSEDLLRKLEKVLKEIDDKLKELEDRLRDMVRRSRESSEENERRLKRVEDEVRRDHMVLHEYVNAAGITKEVEKVNRESREVTRRVLEEAKEMLERVKKIVKEVIEKVRRVVK

SEQ ID NO: 93 - protein, 171 aa, Artificial Sequence
  Synthetic
SEKEKVIKEARELLERLRKRLKDVNDDVTRLLDELRKENEKSREDVEREVKRLEEEVPVEDVIRELKRRLEEVDKKNRDILETLKRELDEVSRRTREELEKLRKELEEVERDHMVLHEYVNAAGITRRRLERLVEENERVVKKILDEIRRSVEENKRIVDKVRKDLDERRK

SEQ ID NO: 94 - protein, 172 aa, Artificial Sequence
  Synthetic
SRAETVLKEVTDKIKKLADSSDELLRRNKENIDELKKSSEELLRRLTKAIEEIEKGSVDEETLEELIRRVEAELEAHHRELEKNSREDEKRNRDHHAKLEEEMRRVEERLERDHMVLHEYVNAAGITDTVRRRNEKVNEDVKRMNDKLRRDNEDVIRRVEKLLRELEEKRRT

SEQ ID NO: 95 - protein, 172 aa, Artificial Sequence
  Synthetic
SKEEELEKLLREHHEKIKRLKEESKRINDRIRRTVEELIKESEKINRDINDTVRKGDRDEEVIRRLLEDVRRKHEELRERLKRELDKVRERHKELLDRARRATEAVKERLDRDHMVLHEYVNAAGITERNLDDLARVLKESEDDLAEILRRLKEVLEESERDLERVEREVRK

SEQ ID NO: 96 - protein, 171 aa, Artificial Sequence
  Synthetic
SEKEKVIKEARELLERLRKRLKDVNDDVTRLLDELRKENEKSREDVEREVKRLEEEVPVEDVIRELKRRLEEVDKKNRDILETLKRELDEVSRRTREELEKLRKELEEVEKARDHMVLHEYVNAAGITRLERLVEENERVVKKILDEIRRSVEENKRIVDKVRKDLDERRK

SEQ ID NO: 97 - protein, 173 aa, Artificial Sequence
  Synthetic
STEDVLRKIKEDVKRVIDDNRRILDEVRRTSKRVLDDLRANLKHIAEEVERVLRGSDSEEVVRELAKILDEIREEHRRLIRTNEKVLEDIERDHRRISEELKRILDEVDELLRDHMVLHEYVNAAGITVDEIKRLAEESLKRLEDLSRDHKRRAKELNDEIAKVVDELAKRAT

SEQ ID NO: 98 - protein, 174 aa, Artificial Sequence
  Synthetic
SRDEKIRDILRRVLKEVRDSTKKVEEDLEDVHRRTEEELRKVKKRLDEVLKRVRDEGASEELKRRMEEVVRRIEELLKKLLKEDRDVVKEIRDKLDETRKEMEEVAERIKDKIRDHMVLHEYVNAAGITADRLIDLNRRIAEEVDKIVRDSIKKVEEIVTEVEKIVEKLIRDVR

SEQ ID NO: 99 - protein, 174 aa, Artificial Sequence
  Synthetic
SELEKVVKEVADLLRRNLEKSKRVLEEVRRRLEENLRESEKVHDDNRKTARRILELVREGKDKRDLTRLLEEDDKRVKEALDKSRENNERILKEVRRALRESEEDNRRILKEVRDHMVLHEYVNAAGITRESIERSRRFIEELEKIVEETLTESEKLARASSEITKTVLDEIRK

SEQ ID NO: 100 - protein, 171 aa, Artificial Sequence
  Synthetic
SEKEKVIKEARELLERLRKRLKDVNDDVTRLLDELRKENEKSREDVEREVKRLEEEVPVEDVIRELKRRLEEVDKKNRDILETLKRELDEVSRRTREELEKLRKELEEVEKAGRDHMVLHEYVNAAGITLERLVEENERVVKKILDEIRRSVEENKRIVDKVRKDLDERRK

SEQ ID NO: 101 - protein, 174 aa, Artificial Sequence
  Synthetic
SEIEELEKRIDELLKELRDLSRRIAEEVKRLLEELKKLSKDSEDKLRELLERLKRKGVPEEELRRVEEEVERVVRESRKLNKETEDELRRLLEEIKESNDRVEKRARELKKLLRDHMVLHEYVNAAGITVREDKERLKKVLKDARDLIKKDKDLNEKLSRELEKLVRELEERAR

SEQ ID NO: 102 - protein, 174 aa, Artificial Sequence
  Synthetic
DELRDVKRELDRLLRENEEIVERIAETVRRLLEELKKLTKELAEELRKLLEELRKRGVPEKELKEVADTLRKLLKDIERSNKEVEDRLRKLLEEIKESTDRLREELEEVEKLLRDHMVLHEYVNAAGITSRDNKRRMRRVLEEAKRLAKEDKERIDKIRKEIEELIKRLKDKAT

SEQ ID NO: 103 - protein, 174 aa, Artificial Sequence
  Synthetic
DEEEDLERRIKKLLDENRELLKRIAEELRRLLEELRRLTEESADRLRRLLKELKDRGVPEKDLRDVAEKVKKVLKESEDSNRDVKRKLEKLLRDLERSTERLEREARKVRKLLRDHMVLHEYVNAAGITSRDNKELLKKIEKEIRDLIKEDKERNRELSERLRKLVEELKKKAT

SEQ ID NO: 104 - protein, 174 aa, Artificial Sequence
  Synthetic
REIEEAAKDLDRLLEENKKLVKEVEEELRRLLKENRDLVKESEDRIRKLLEELRRRGVPEEELKEVEERARRVIEESRRSSKELEKRLRELLEELRRSTKELEDRLREIKKLLRDHMVLHEYVNAAGITSRENKEKIRKILEDVKKLSEDNKRRNEELSRRVKTLVDEIKKRAT

SEQ ID NO: 105 - protein, 174 aa, Artificial Sequence
  Synthetic
EELERILDKVRKVIEEVRKRLRDDLRTVEKVLKETEEVLRRAAERAKRALERVEEAARRGRDRREIKEELKKVLDDLRELLRALEEKNRRVNKENEDSLRKIEEDLRDVLRKLRDHMVLHEYVNAAGITLRTIREEVERVLRKSNELSTRIKKRIDDVLETLERLLKELDDKLR

SEQ ID NO: 106 - protein, 174 aa, Artificial Sequence
  Synthetic
SEEEVLREAAKTVEKLLDEIRRSLEKVSKRVEDSNRELKESLDRVRERVRELLEELRKNNVDRTLLEDVRRKLERIEERNEEMNDRSRRKLEELRERNRKILEDIRRTLEDLKRDHMVLHEYVNAAGITAKLVDEVDKENKRALRENEERVKTLNRENEEMLKRIEEEVRRATK

SEQ ID NO: 107 - protein, 174 aa, Artificial Sequence
  Synthetic
SESDEVIRDLARLLDELARHVDDSVRRMDEVVKRSTREADELAKRLDELVKEVEKKPGDERVERMVAEIERLVAEVLEELKKKYEKLKREVEENLRRLEETVRDIVEKARKVTRDHMVLHEYVNAAGITERILEEAKKKHEDVLRRLEDSLRRVAELLKAALDRLREIVDRLRR

SEQ ID NO: 108 - protein, 172 aa, Artificial Sequence
  Synthetic
SRAETVLKEVTDKIKKLADSSDELLRRNKENIDELKKSSEELLRRLTKAIEEIEKGSVDEETLEELIRRVEAELEAHHRELEKNSREDEKRNRDHHAKLEEEMRRVEERLERERDHMVLHEYVNAAGITVRRRNEKVNEDVKRMNDKLRRDNEDVIRRVEKLLRELEEKRRT

SEQ ID NO: 109 - protein, 174 aa, Artificial Sequence
  Synthetic
KEVEDAVKELEDLLRANEDKTRSIVEDMRASNKDLEDHSRASEEEVRKLLDDLRRAGVPRDSLKRLAEDVERVTRESRELLERVHRADRELIERLKESNERLRRAIEEIRKAIRDHMVLHEYVNAAGITAEEDAERLDRLRRESEELNERVRRVDKKLLEEIRRKAKKVEDDTR

SEQ ID NO: 110 - protein, 174 aa, Artificial Sequence
  Synthetic
DEEEDLERAIKKLLDENRELLKRIAEELRRLLEELRRLTEESADRLRRLLKELKDRGVPEEDLADVAEKVKKVLKESEDSNADVARKLEKLLRDLERSTERLEREARKVRKLLRDHMVLHEYVNAAGITSRDNKELLKKIEKEIRDLIKEDKERNIELSERLRKLVEELKKKAT

SEQ ID NO: 111 - protein, 174 aa, Artificial Sequence
  Synthetic
SEDETIRRIVRTVHEESRKSTEDVRREVERVLRESEEVVKKVKKKVDDVLKRVEETGISEELEERMRRIIREIREHLKDNLRRVREVIERIERKLEETERRDEKVLREIEKKIRRDHMVLHEYVNAAGITRDTIRENEEIAKEVREIVERSIKNLEEVAEEVERVVRELIEARR

SEQ ID NO: 112 - protein, 174 aa, Artificial Sequence
  Synthetic
SRDEKIRDILRRVLKEVRDSTKKVEEDLEDVHRRTEEELRKVKKRLDEVLKRVRDEGASEELKRRMEEVVRRIEELLKKLLKEDRDVVKEIRDKLDETRKEMEEVAERIKDKIRRDHMVLHEYVNAAGITDRLIDLNRRIAEEVDKIVRDSIKKVEEIVTEVEKIVEKLIRDVR

SEQ ID NO: 113 - protein, 173 aa, Artificial Sequence
  Synthetic
SLEELLEEARKTVERLIRESERVLRESEERVRRLIEELERVVRETRKRVKEVIERVEDEEALKELEKLLREDSKRVKEVLDDLRRDLERNKRRNEKVLRELEELLKRLEELVRERDHMVLHEYVNAAGITRVKEMLKRDEDTLREIERKVKEAVRDSERTLEEIEKRVTEEKT

SEQ ID NO: 114 - protein, 175 aa, Artificial Sequence
  Synthetic
SEKEDLERELEEVRRRVEESLRKNEEDVKRVRDELKKLLDENRKELERIRREVERANVDKRVLDEADRLLKELEDDHKKLEEDAKKALDELREEHKRLEETLRRMLKRIKEVLDRDHMVLHEYVNAAGITLRDIERVSRELNKKLEEIVRRLKKVSDELNRRIEEIAERVRRRRK

SEQ ID NO: 115 - protein, 175 aa, Artificial Sequence
  Synthetic
SEEDELRRLLKEVNERVERLLDEIRKELEKIAEELRDLLKKNEDKLREIKRRVEENRVDEEIKKDAERALTELKEEHERLDREAKKDLDRIRKELERLEEEHRRVSERIEEVLDRDHMVLHEYVNAAGITMERTRRVIEEIKKELRDILEKLRRVSEELNKKLDEILKRIEDRTR

SEQ ID NO: 116 - protein, 174 aa, Artificial Sequence
  Synthetic
DELRDVKRELDRLLRENEEIVERIAETVRRLLEELKKLTKELAEELRKLLEELRKRGVPEKELKEVADTLRKLLKDIERSNKEVEDRLRKLLEEIKESTDRLREELEEVEKLLRRDHMVLHEYVNAAGITRDNKRRMRRVLEEAKRLAKEDKERIDKIRKEIEELIKRLKDKAT

SEQ ID NO: 117 - protein, 174 aa, Artificial Sequence
  Synthetic
REIEEAAKDLDRLLEENKKLVKEVEEELRRLLKENRDLVKESEDRIRKLLEELRRRGVPEEELKEVEERARRVIEESRRSSKELEKRLRELLEELRRSTKELEDRLREIKKLLRRDHMVLHEYVNAAGITRENKEKIRKILEDVKKLSEDNKRRNEELSRRVKTLVDEIKKRAT

SEQ ID NO: 118 - protein, 175 aa, Artificial Sequence
  Synthetic
SEVDEVLREAKRIVDEVHKDNERATEESRRLVKKVHEENEEMVKDIERIVKEVKDANIDEKLVTEILKEIEEALKEAARRNKEVKDRLRELSRRVSERNREILEELKERLDRVRRDHMVLHEYVNAAGITLKRIEESLRRHRKENKRLLEELDRSLRELAKIVKEVLDEIRERTR

SEQ ID NO: 119 - skipped

SEQ ID NO: 120 - protein, 175 aa, Artificial Sequence
  Synthetic
SEMDDVLKKLAETVKRIIERLKKLTDDSRRLVEEVHRRNDKLSKESREAVRKAEERNIDEKDVRKLLEDLKKKSEEVAERNKRILDTLREISKRAEDEVRKVLKELEKTLKELERDHMVLHEYVNAAGITLDEVRKALKRHKDENDKLLKEIEDSLRRHKEENDRLLEKLKESTR

SEQ ID NO: 121 - protein, 172 aa, Artificial Sequence
  Synthetic
SRAETVLKEVTDKIKKLADSSDELLRRNKENIDELKKSSEELLRRLTKAIEEIEKGSVDEETLEELIRRVEAELEAHHRELEKNSREDEKRNRDHHAKLEEEMRRVEERLEREGRDHMVLHEYVNAAGITRRRNEKVNEDVKRMNDKLRRDNEDVIRRVEKLLRELEEKRRT

SEQ ID NO: 122 - protein, 174 aa, Artificial Sequence
  Synthetic
KEVEDAVKELEDLLRANEDKTRSIVEDMRASNKDLEDHSRASEEEVRKLLDDLRRAGVPRDSLKRLAEDVERVTRESRELLERVHRADRELIERLKESNERLRRAIEEIRKAIKRDHMVLHEYVNAAGITEEDAERLDRLRRESEELNERVRRVDKKLLEEIRRKAKKVEDDTR

SEQ ID NO: 123 - protein, 175 aa, Artificial Sequence
  Synthetic
SEADDVLKKLAETVKRIIERLKKLTDDSRRLVEEVHRRNDKLSKESAEAVRKAEERGIDEKDVRKLLEDLKKKSEEVAERNKRILDTLREISKRAEDEVRKVLKELEKTLKELERDHMVLHEYVNAAGITLDEVRKALARHKDENDKLLKEIEDSLRRHKEENDRLLEKLKESTR

SEQ ID NO: 124 - protein, 175 aa, Artificial Sequence
  Synthetic
SEIERVKKRLEELLAEVEESTRRLEERLKRLLEEAKRSSEEVEKELRRLLEAVRRGLSRDEKLVSELEARVKELLEDSRASLEELKKRVRKLAEDSARLLEEVKREVEKLKAKLRDHMVLHEYVNAAGITAKRAHDENERLIREVEELVRAHNKRNKELVDEVKRLVEKVIEEER

SEQ ID NO: 125 - protein, 174 aa, Artificial Sequence
  Synthetic
SRDEKIRDILRRVLKEVRDSTKKVEEDLEDVHRRTEEELRKVKKRLDEVLKRVRDEGASEELKRRMEEVVRRIEELLKKLLKEDRDVVKEIRDKLDETRKEMEEVAERIKDKIRRRDHMVLHEYVNAAGITRLIDLNRRIAEEVDKIVRDSIKKVEEIVTEVEKIVEKLIRDVR

SEQ ID NO: 126 - protein, 175 aa, Artificial Sequence
  Synthetic
SEKEDLERELEEVRRRVEESLRKNEEDVKRVRDELKKLLDENRKELERIRREVERANVDKRVLDEADRLLKELEDDHKKLEEDAKKALDELREEHKRLEETLRRMLKRIKEVLDRRDHMVLHEYVNAAGITRDIERVSRELNKKLEEIVRRLKKVSDELNRRIEEIAERVRRRRK

SEQ ID NO: 127 - protein, 174 aa, Artificial Sequence
  Synthetic
DEEEDLERRIKKLLDENRELLKRIAEELRRLLEELRRLTEESADRLRRLLKELKDRGVPEKDLRDVAEKVKKVLKESEDSNRDVKRKLEKLLRDLERSTERLEREARKVRKLLRDRDHMVLHEYVNAAGITDNKELLKKIEKEIRDLIKEDKERNRELSERLRKLVEELKKKAT

SEQ ID NO: 128 - protein, 175 aa, Artificial Sequence
  Synthetic
SEMDDVLKKLAETVKRIIERLKKLTDDSRRLVEEVHRRNDKLSKESREAVRKAEERNIDEKDVRKLLEDLKKKSEEVAERNKRILDTLREISKRAEDEVRKVLKELEKTLKELEDRDHMVLHEYVNAAGITDEVRKALKRHKDENDKLLKEIEDSLRRHKEENDRLLEKLKESTR

SEQ ID NO: 129 - protein, 174 aa, Artificial Sequence
  Synthetic
SEEEVLREAAKTVEKLLDEIRRSLEKVSKRVEDSNRELKESLDRVRERVRELLEELRKNNVDRTLLEDVRRKLERIEERNEEMNDRSRRKLEELRERNRKILEDIRRTLEDLKRRRDHMVLHEYVNAAGITLVDEVDKENKRALRENEERVKTLNRENEEMLKRIEEEVRRATK

SEQ ID NO: 130 - protein, 174 aa, Artificial Sequence
  Synthetic
SESDEVIRDLARLLDELARHVDDSVRRMDEVVKRSTREADELAKRLDELVKEVEKKPGDERVERMVAEIERLVAEVLEELKKKYEKLKREVEENLRRLEETVRDIVEKARKVTEKRDHMVLHEYVNAAGITILEEAKKKHEDVLRRLEDSLRRVAELLKAALDRLREIVDRLRR

SEQ ID NO: 131 - protein, 172 aa, Artificial Sequence
  Synthetic
SRAETVLKEVTDKIKKLADSSDELLRRNKENIDELKKSSEELLRRLTKAIEEIEKGSVDEETLEELIRRVEAELEAHHRELEKNSREDEKRNRDHHAKLEEEMRRVEERLEREGIRDHMVLHEYVNAAGITRRNEKVNEDVKRMNDKLRRDNEDVIRRVEKLLRELEEKRRT

SEQ ID NO: 132 - protein, 175 aa, Artificial Sequence
  Synthetic
SEADDVLKKLAETVKRIIERLKKLTDDSRRLVEEVHRRNDKLSKESAEAVRKAEERGIDEKDVRKLLEDLKKKSEEVAERNKRILDTLREISKRAEDEVRKVLKELEKTLKELEDRDHMVLHEYVNAAGITDEVRKALARHKDENDKLLKEIEDSLRRHKEENDRLLEKLKESTR

SEQ ID NO: 133 - protein, 174 aa, Artificial Sequence
  Synthetic
KELEDVIEEVKKLLKTVNEESRRVAEEVRKLIREVSEELTEVIRRVERLVEEVAKGVDSEEALDAVRKRIEELVRRVEEVNAASKRRIEELEDELRKVDEESRETIERLIDLLRRRDHMVLHEYVNAAGITKNRKLAEEVLRRVKKIVEENRKIASEVLDDVRKLVEDVLARAS

SEQ ID NO: 134 - protein, 175 aa, Artificial Sequence
  Synthetic
SEIERVKKRLEELLAEVEESTRRLEERLKRLLEEAKRSSEEVEKELRRLLEAVRRGLSRDEKLVSELEARVKELLEDSRASLEELKKRVRKLAEDSARLLEEVKREVEKLKAKLDRDHMVLHEYVNAAGITKRAHDENERLIREVEELVRAHNKRNKELVDEVKRLVEKVIEEER

SEQ ID NO: 135 - protein, 174 aa, Artificial Sequence
  Synthetic
SEDETIRRIVRTVHEESRKSTEDVRREVERVLRESEEVVKKVKKKVDDVLKRVEETGISEELEERMRRIIREIREHLKDNLRRVREVIERIERKLEETERRDEKVLREIEKKIRDGRDHMVLHEYVNAAGITTIRENEEIAKEVREIVERSIKNLEEVAEEVERVVRELIEARR

SEQ ID NO: 136 - protein, 174 aa, Artificial Sequence
  Synthetic
SRDEKIRDILRRVLKEVRDSTKKVEEDLEDVHRRTEEELRKVKKRLDEVLKRVRDEGASEELKRRMEEVVRRIEELLKKLLKEDRDVVKEIRDKLDETRKEMEEVAERIKDKIRRGRDHMVLHEYVNAAGITLIDLNRRIAEEVDKIVRDSIKKVEEIVTEVEKIVEKLIRDVR

SEQ ID NO: 137 - protein, 173 aa, Artificial Sequence
  Synthetic
SLEELLEEARKTVERLIRESERVLRESEERVRRLIEELERVVRETRKRVKEVIERVEDEEALKELEKLLREDSKRVKEVLDDLRRDLERNKRRNEKVLRELEELLKRLEELVREGVRDHMVLHEYVNAAGITKEMLKRDEDTLREIERKVKEAVRDSERTLEEIEKRVTEEKT

SEQ ID NO: 138 - protein, 175 aa, Artificial Sequence
  Synthetic
SEKEDLERELEEVRRRVEESLRKNEEDVKRVRDELKKLLDENRKELERIRREVERANVDKRVLDEADRLLKELEDDHKKLEEDAKKALDELREEHKRLEETLRRMLKRIKEVLDRERDHMVLHEYVNAAGITDIERVSRELNKKLEEIVRRLKKVSDELNRRIEEIAERVRRRRK

SEQ ID NO: 139 - protein, 177 aa, Artificial Sequence
  Synthetic
SAIEKVKEVVERVLETVRDSVRRSHEESKRLIDKVRKRLEEVREEVKELIERVRRKGIPERMVEKLERDLEELLKEIKDTIDRIEEELRTSNRRLKETNDEIAKRLEELLRELSRDRDHMVLHEYVNAAGITIRDLNKKNDDNVRRVKEVIDRAEKLVRDLLREIRKLIEKLIRDTE

SEQ ID NO: 140 - protein, 177 aa, Artificial Sequence
  Synthetic
SVLEEVRRRVEELLKTVKESVDRSHERSERLIEEVRESLKEVKRRVKELVERVREKGIPEDRVKRIEDKLREELERLERENRKIEEDLKRSNDELRRENERIAERLEELLRELSRDRDHMVLHEYVNAAGITIREANERNKRNLEDVERVIRELNKENERVLREVEKKIEKLIRETE

SEQ ID NO: 141 - protein, 174 aa, Artificial Sequence
  Synthetic
DELRDVKRELDRLLRENEEIVERIAETVRRLLEELKKLTKELAEELRKLLEELRKRGVPEKELKEVADTLRKLLKDIERSNKEVEDRLRKLLEEIKESTDRLREELEEVEKLLRGGRDHMVLHEYVNAAGITNKRRMRRVLEEAKRLAKEDKERIDKIRKEIEELIKRLKDKAT

SEQ ID NO: 142 - protein, 174 aa, Artificial Sequence
  Synthetic
REIEEAAKDLDRLLEENKKLVKEVEEELRRLLKENRDLVKESEDRIRKLLEELRRRGVPEEELKEVEERARRVIEESRRSSKELEKRLRELLEELRRSTKELEDRLREIKKLLRNGRDHMVLHEYVNAAGITNKEKIRKILEDVKKLSEDNKRRNEELSRRVKTLVDEIKKRAT

SEQ ID NO: 143 - protein, 177 aa, Artificial Sequence
  Synthetic
SEAEKVVEELKKLLREVEKKIRDHTEDVKRILEELERRLRKHSEEVRRTAKELKDKNSDDDTVRKVKEELDRSHEKLREELRKVAKELKESNEELERDLKRLVEEAEDRLRRLKDRRDHMVLHEYVNAAGITKRTLDKLLRENRETLKRIEDRLRELLEENRKLLEKIERELRERSR

SEQ ID NO: 144 - protein, 177 aa, Artificial Sequence
  Synthetic
DEVEDILRKVEEIVKKSITDARRLLKEAREIVEESIKTAEELLRRNEDIVRKLSEDVKRTTDEEKKKKLEEESRRVLEKTKRDLDRTKDDNRKALEKIRKRVKETEEENREVVDRVRDHMVLHEYVNAAGITVDDSVRVNREVLKRVEEVLEESKRVNEKVEEDVRRVHEEVRKEIK

SEQ ID NO: 145 - protein, 174 aa, Artificial Sequence
  Synthetic
SESDEVIRDLARLLDELARHVDDSVRRMDEVVKRSTREADELAKRLDELVKEVEKKPGDERVERMVAEIERLVAEVLEELKKKYEKLKREVEENLRRLEETVRDIVEKARKVTEKGRDHMVLHEYVNAAGITLEEAKKKHEDVLRRLEDSLRRVAELLKAALDRLREIVDRLRR

SEQ ID NO: 146 - protein, 174 aa, Artificial Sequence
  Synthetic
SESDDVIRKLRELLEELRTHVEKSIRDLRKILEDSTRHAKRSIEELERLLEEVRKKPGDEEVRKTVEEISRRVAENVKRLEDLYRRMEEEVKKNLDRLRKRVEDIIREVEEARKKGRDHMVLHEYVNAAGITLRRAAEAHKKLIDDARESLERAKREHEKLIDRLKKILEELER

SEQ ID NO: 147 - protein, 174 aa, Artificial Sequence
  Synthetic
KEVEDAVKELEDLLRANEDKTRSIVEDMRASNKDLEDHSRASEEEVRKLLDDLRRAGVPRDSLKRLAEDVERVTRESRELLERVHRADRELIERLKESNERLRRAIEEIRKAIKGGRDHMVLHEYVNAAGITDAERLDRLRRESEELNERVRRVDKKLLEEIRRKAKKVEDDTR

SEQ ID NO: 148 - protein, 176 aa, Artificial Sequence
  Synthetic
STAETVEKKVEEVIRENEKSMRESEEKVDRSTKRIEDVLRRLEETIRKTSDDIAKGVKGERVKEVLEENRRLLEEAKKLVDEVLETNKKLLEDDKRLNEEVSKTLKKLLEEIKSVDRDHMVLHEYVNAAGITDEARKLNEETIRRSEELVRRIERVIEEIIKRSEKLLEDVARESK

SEQ ID NO: 149 - protein, 175 aa, Artificial Sequence
  Synthetic
SEADDVLKKLAETVKRIIERLKKLTDDSRRLVEEVHRRNDKLSKESAEAVRKAEERGIDEKDVRKLLEDLKKKSEEVAERNKRILDTLREISKRAEDEVRKVLKELEKTLKELEDRRDHMVLHEYVNAAGITEVRKALARHKDENDKLLKEIEDSLRRHKEENDRLLEKLKESTR

SEQ ID NO: 150 - protein, 174 aa, Artificial Sequence
  Synthetic
KELEDVIEEVKKLLKTVNEESRRVAEEVRKLIREVSEELTEVIRRVERLVEEVAKGVDSEEALDAVRKRIEELVRRVEEVNAASKRRIEELEDELRKVDEESRETIERLIDLLRRGRDHMVLHEYVNAAGITNRKLAEEVLRRVKKIVEENRKIASEVLDDVRKLVEDVLARAS

SEQ ID NO: 151 - protein, 175 aa, Artificial Sequence
  Synthetic
SEIERVKKRLEELLAEVEESTRRLEERLKRLLEEAKRSSEEVEKELRRLLEAVRRGLSRDEKLVSELEARVKELLEDSRASLEELKKRVRKLAEDSARLLEEVKREVEKLKAKLDRRDHMVLHEYVNAAGITRAHDENERLIREVEELVRAHNKRNKELVDEVKRLVEKVIEEER

SEQ ID NO: 152 - protein, 173 aa, Artificial Sequence
  Synthetic
STEDVLRKIKEDVKRVIDDNRRILDEVRRTSKRVLDDLRANLKHIAEEVERVLRGSDSEEVVRELAKILDEIREEHRRLIRTNEKVLEDIERDHRRISEELKRILDEVDELLRGGKRDHMVLHEYVNAAGITKRLAEESLKRLEDLSRDHKRRAKELNDEIAKVVDELAKRAT

SEQ ID NO: 153 - protein, 177 aa, Artificial Sequence
  Synthetic
SEDEDLDRVAEKLAREHKKSVEEIKRVLKSADEESKKLVRDTERVIEEIKREVEEARRGNIDEELVERLKKKIEDILRTLEERHKKLIKELREILKRLSDESRRLAEETEKVLEDLRDHMVLHEYVNAAGITVRRVKEENRKVNEEVEKRLRELEEENKKVIEDLKSTVEELVERLR

SEQ ID NO: 154 - protein, 177 aa, Artificial Sequence; identical to SEQ ID NO: 153
  Synthetic

SEQ ID NO: 155 - protein, 177 aa, Artificial Sequence
  Synthetic
SKEDRLREELKKLLARLAEEIERLKRALEESNKDLKRTIDASEKHLRDVNEDVKRGGVSEELLRELERSTAENKERAKELLKRHEDLVRKVEKELADLLRRLEEIVARVDEALKRGRDHMVLHEYVNAAGITIREIEKRLEELLKRVEKLTEDAKRDLERSNREHKELADRIKETAR

SEQ ID NO: 156 - protein, 178 aa, Artificial Sequence
  Synthetic
DEVEKLLRDLEELDRDIERKVRELLKRNKEVLDDIEREVRRLEKELRRIIKEVADVIRKTTDKRTVDKLLKELEKILKEVLDRVRRLLEEAKESLDRSREEIERLLEESKTLVDEVRRDHMVLHEYVNAAGITRDLIERAKRETDRLLEEAERLMREVVDRVRKILEEAKRLIDEARR

SEQ ID NO: 157 - protein, 174 aa, Artificial Sequence
  Synthetic
SEDETIRRIVRTVHEESRKSTEDVRREVERVLRESEEVVKKVKKKVDDVLKRVEETGISEELEERMRRIIREIREHLKDNLRRVREVIERIERKLEETERRDEKVLREIEKKIRDGDRDHMVLHEYVNAAGITIRENEEIAKEVREIVERSIKNLEEVAEEVERVVRELIEARR

SEQ ID NO: 158 - protein, 174 aa, Artificial Sequence
  Synthetic
SRDEKIRDILRRVLKEVRDSTKKVEEDLEDVHRRTEEELRKVKKRLDEVLKRVRDEGASEELKRRMEEVVRRIEELLKKLLKEDRDVVKEIRDKLDETRKEMEEVAERIKDKIRRGDRDHMVLHEYVNAAGITIDLNRRIAEEVDKIVRDSIKKVEEIVTEVEKIVEKLIRDVR

SEQ ID NO: 159 - protein, 170 aa, Artificial Sequence
  Synthetic
SEVEDVVRKVEKLVRDLIKHVEENVRRVEEVVRKLIEEIKRIAEEITRIAEELAKEPGSEDLLRKLEKVLKEIDDKLKELEDRLRDMVRRSRESSEENERRLKRVEDEVRRNGISEERDHMVLHEYVNAAGITRESREVTRRVLEEAKEMLERVKKIVKEVIEKVRRVVK

SEQ ID NO: 160 - protein, 178 aa, Artificial Sequence
  Synthetic
DDLERVLKEIKKAADKIREDNKRTADKIRKRVKELDDETRDMLRRIRKLVKEIKERVRGREEARKVIEELKKLVDEVRKRNEKSIEELKKLLKEDRDLMRRVIEELEDLVRRLREEVRDHMVLHEYVNAAGITIRDLRRVLKETSDRVRELIDKHRRLSEEVEKDVKRLIDELKKKTD

SEQ ID NO: 161 - protein, 175 aa, Artificial Sequence
  Synthetic
SEKEDLERELEEVRRRVEESLRKNEEDVKRVRDELKKLLDENRKELERIRREVERANVDKRVLDEADRLLKELEDDHKKLEEDAKKALDELREEHKRLEETLRRMLKRIKEVLDRESRDHMVLHEYVNAAGITIERVSRELNKKLEEIVRRLKKVSDELNRRIEEIAERVRRRRK

SEQ ID NO: 162 - protein, 175 aa, Artificial Sequence
  Synthetic
SEEDELRRLLKEVNERVERLLDEIRKELEKIAEELRDLLKKNEDKLREIKRRVEENRVDEEIKKDAERALTELKEEHERLDREAKKDLDRIRKELERLEEEHRRVSERIEEVLDKESRDHMVLHEYVNAAGITTRRVIEEIKKELRDILEKLRRVSEELNKKLDEILKRIEDRTR

SEQ ID NO: 163 - protein, 178 aa, Artificial Sequence
  Synthetic
SSIERVEKEVRRLLRESDESLKRVMEEAKELIKSVRESTKRVEEDARDLLRKVVERTGDEREDLRRVLEELRKLIEDNRREDKRSEDELRKLIRDNKEENDRARREAEKLLEDLSRGRDHMVLHEYVNAAGITIEKLKEDDKRSLERIERIVRRNNELNKESVDRIRKIIKEMEERAD

SEQ ID NO: 164 - protein, 177 aa, Artificial Sequence
  Synthetic
SVIERVEEEMEKVIRDSERVTKEVEDRAREVHERSEKRIREVEETSRRVLEELRRAGVDKRILDELRKRIKDSREDLERINEELRRALRKLLEDSKRINEELRKTLEELRKRLERVDRDHMVLHEYVNAAGITEDSIRKLEELARRVDELVRESIERVDRNVEENKRLVREAIERRR

SEQ ID NO: 165 - protein, 177 aa, Artificial Sequence
  Synthetic
SEAEKVVEELKKLLREVEKKIRDHTEDVKRILEELERRLRKHSEEVRRTAKELKDKNSDDDTVRKVKEELDRSHEKLREELRKVAKELKESNEELERDLKRLVEEAEDRLRRLKDRVRDHMVLHEYVNAAGITRTLDKLLRENRETLKRIEDRLRELLEENRKLLEKIERELRERSR

SEQ ID NO: 166 - protein, 174 aa, Artificial Sequence
  Synthetic
EELERILDKVRKVIEEVRKRLRDDLRTVEKVLKETEEVLRRAAERAKRALERVEEAARRGRDRREIKEELKKVLDDLRELLRALEEKNRRVNKENEDSLRKIEEDLRDVLRKLEEEIRDHMVLHEYVNAAGITREEVERVLRKSNELSTRIKKRIDDVLETLERLLKELDDKLR

SEQ ID NO: 167 - protein, 178 aa, Artificial Sequence
  Synthetic
SKVEKLEEEIARLVERSRRLVEELKKEVTKVKEKVDEIVERSRRHVKKVVEKLRDIKRRGGSEEVLRRVTEELKKVLEDNRRVIEEVLRDLERILEELKRKAEEVTKRNRDDLKRLRRDHMVLHEYVNAAGITDRSEKELRTVLRDVTEDIKRIAEELKKALEDSTEIIRRAEDELRT

SEQ ID NO: 168 - protein, 177 aa, Artificial Sequence
  Synthetic
DEVEDILRKVEEIVKKSITDARRLLKEAREIVEESIKTAEELLRRNEDIVRKLSEDVKRTTDEEKKKKLEEESRRVLEKTKRDLDRTKDDNRKALEKIRKRVKETEEENREVVDRVRRDHMVLHEYVNAAGITDDSVRVNREVLKRVEEVLEESKRVNEKVEEDVRRVHEEVRKEIK

SEQ ID NO: 169 - protein, 175 aa, Artificial Sequence
  Synthetic
SEVDEVLREAKRIVDEVHKDNERATEESRRLVKKVHEENEEMVKDIERIVKEVKDANIDEKLVTEILKEIEEALKEAARRNKEVKDRLRELSRRVSERNREILEELKERLDRVRERRRDHMVLHEYVNAAGITIEESLRRHRKENKRLLEELDRSLRELAKIVKEVLDEIRERTR

SEQ ID NO: 170 - protein, 175 aa, Artificial Sequence
  Synthetic
SEMDDVLKKLAETVKRIIERLKKLTDDSRRLVEEVHRRNDKLSKESREAVRKAEERNIDEKDVRKLLEDLKKKSEEVAERNKRILDTLREISKRAEDEVRKVLKELEKTLKELEDRRRDHMVLHEYVNAAGITVRKALKRHKDENDKLLKEIEDSLRRHKEENDRLLEKLKESTR

SEQ ID NO: 171 - protein, 178 aa, Artificial Sequence
  Synthetic
SEEEKLKEVKDRIREVLRKLEEHTDKVKKEVEKVLRDIRRTTDELKKEVRAMLERLRRKKKDAEDLLRELEKIIEEIERELDRVLEENDKMAEEWKKLLDKVLDDNRKSIRDIEKELRDHMVLHEYVNAAGITLRDDEETNRDVVKKVREAVKKDADTNRKVIEEVKKVLEDAARRLD

SEQ ID NO: 172 - protein, 176 aa, Artificial Sequence
  Synthetic
REAEEAKEEVEELNRRNKKELDDARRRVDELDKRNKDRLKESSDRVKRLVEELERVKEEGRSDDRLREKIERMLKTSADELERLKEENKRALRDLAERLRELIERNRRKLEEITRRTRDHMVLHEYVNAAGITSIRELERVLEELAEKIDRSLKELDDVLRKNETDLKRVIEDLKR

SEQ ID NO: 173 - protein, 174 aa, Artificial Sequence
  Synthetic
SEEEVLREAAKTVEKLLDEIRRSLEKVSKRVEDSNRELKESLDRVRERVRELLEELRKNNVDRTLLEDVRRKLERIEERNEEMNDRSRRKLEELRERNRKILEDIRRTLEDLKRRQLRDHMVLHEYVNAAGITDEVDKENKRALRENEERVKTLNRENEEMLKRIEEEVRRATK

SEQ ID NO: 174 - protein, 178 aa, Artificial Sequence
  Synthetic
DAEELVRELEERIKRSHERLEELLREVKRLIERSHEELKRLNEEVLRELDRVLDEVAKRGSDSEELLRELEERVARIKERSKESYARSKESLDRAKEVLEELYRASKRSLEEFERELRDHMVLHEYVNAAGITVKENAELAERVFREVEKIVRENTKLAEDSVRELKRLVEELKKRAK

SEQ ID NO: 175 - protein, 174 aa, Artificial Sequence
  Synthetic
SESDEVIRDLARLLDELARHVDDSVRRMDEVVKRSTREADELAKRLDELVKEVEKKPGDERVERMVAEIERLVAEVLEELKKKYEKLKREVEENLRRLEETVRDIVEKARKVTEKGVRDHMVLHEYVNAAGITEEAKKKHEDVLRRLEDSLRRVAELLKAALDRLREIVDRLRR

SEQ ID NO: 176 - protein, 174 aa, Artificial Sequence
  Synthetic
SESDDVIRKLRELLEELRTHVEKSIRDLRKILEDSTRHAKRSIEELERLLEEVRKKPGDEEVRKTVEEISRRVAENVKRLEDLYRRMEEEVKKNLDRLRKRVEDIIREVEEARKKGVRDHMVLHEYVNAAGITRRAAEAHKKLIDDARESLERAKREHEKLIDRLKKILEELER

SEQ ID NO: 177 - protein, 172 aa, Artificial Sequence
  Synthetic
SRAETVLKEVTDKIKKLADSSDELLRRNKENIDELKKSSEELLRRLTKAIEEIEKGSVDEETLEELIRRVEAELEAHHRELEKNSREDEKRNRDHHAKLEEEMRRVEERLEREGIDDRDHMVLHEYVNAAGITNEKVNEDVKRMNDKLRRDNEDVIRRVEKLLRELEEKRRT

SEQ ID NO: 178 - protein, 178 aa, Artificial Sequence
  Synthetic
SEAEKAKETIDRLADRVRKLLEEIKRSLDDSRRKSKETVEENEKTLDRMRKEVDAAKRGSVSEEELERLIRKLKKTLDELRRRHEKLVEDLRRNLERIKRRLEELTREMRETLERLARDHMVLHEYVNAAGITRRLTKELEDVLREYERELRRLEEENKRVIDKTEEEIRRLADRLRR

SEQ ID NO: 179 - protein, 178 aa, Artificial Sequence
  Synthetic
DEARELVKELEDLIREITKTVRRLLEESEELIKRIDDAVDDLRRADEDLNREIKEEIEKGKSKESLEALIERLKESLERVKRTIEKLIRDLERLNEKLRRDVESLVAELEKILSKIKRDHMVLHEYVNAAGITKELEKEAREILKRSEDETDKLREKAERILEDLERANRRTMDEARR

SEQ ID NO: 180 - protein, 175 aa, Artificial Sequence
  Synthetic
SEADDVLKKLAETVKRIIERLKKLTDDSRRLVEEVHRRNDKLSKESAEAVRKAEERGIDEKDVRKLLEDLKKKSEEVAERNKRILDTLREISKRAEDEVRKVLKELEKTLKELEDRRRDHMVLHEYVNAAGITVRKALARHKDENDKLLKEIEDSLRRHKEENDRLLEKLKESTR

SEQ ID NO: 181 - protein, 175 aa, Artificial Sequence
  Synthetic
SEAEEIRRRLEEISRRSVEHLRKVLEEIKRISERSKRHLDRVLEENARRLEELAELLKRGGDKEELLADLKAVHDESRKVIEKNAEENDRALKAAKEVIDENRERNKRVLDEVRKGGRDHMVLHEYVNAAGITEERIKRIEEEIKKIIDKSREDIKRVLEEIERLNAKAADDLRK

SEQ ID NO: 182 - protein, 175 aa, Artificial Sequence
  Synthetic
SEIERVKKRLEELLAEVEESTRRLEERLKRLLEEAKRSSEEVEKELRRLLEAVRRGLSRDEKLVSELEARVKELLEDSRASLEELKKRVRKLAEDSARLLEEVKREVEKLKAKLDRGRDHMVLHEYVNAAGITAHDENERLIREVEELVRAHNKRNKELVDEVKRLVEKVIEEER

SEQ ID NO: 183 - protein, 177 aa, Artificial Sequence
  Synthetic
SEDEDLDRVAEKLAREHKKSVEEIKRVLKSADEESKKLVRDTERVIEEIKREVEEARRGNIDEELVERLKKKIEDILRTLEERHKKLIKELREILKRLSDESRRLAEETEKVLEDLERDHMVLHEYVNAAGITRRVKEENRKVNEEVEKRLRELEEENKKVIEDLKSTVEELVERLR

SEQ ID NO: 184 - protein, 177 aa, Artificial Sequence
  Synthetic
SKEDRLREELKKLLARLAEEIERLKRALEESNKDLKRTIDASEKHLRDVNEDVKRGGVSEELLRELERSTAENKERAKELLKRHEDLVRKVEKELADLLRRLEEIVARVDEALKRGIRDHMVLHEYVNAAGITREIEKRLEELLKRVEKLTEDAKRDLERSNREHKELADRIKETAR

SEQ ID NO: 185 - protein, 174 aa, Artificial Sequence
  Synthetic
SEDETIRRIVRTVHEESRKSTEDVRREVERVLRESEEVVKKVKKKVDDVLKRVEETGISEELEERMRRIIREIREHLKDNLRRVREVIERIERKLEETERRDEKVLREIEKKIRDGDGRDHMVLHEYVNAAGITRENEEIAKEVREIVERSIKNLEEVAEEVERVVRELIEARR

SEQ ID NO: 186 - skipped

SEQ ID NO: 187 - protein, 178 aa, Artificial Sequence
  Synthetic
DDLERVLKEIKKAADKIREDNKRTADKIRKRVKELDDETRDMLRRIRKLVKEIKERVRGREEARKVIEELKKLVDEVRKRNEKSIEELKKLLKEDRDLMRRVIEELEDLVRRLREEVRRDHMVLHEYVNAAGITRDLRRVLKETSDRVRELIDKHRRLSEEVEKDVKRLIDELKKKTD

SEQ ID NO: 188 - protein, 175 aa, Artificial Sequence
  Synthetic
SEKEDLERELEEVRRRVEESLRKNEEDVKRVRDELKKLLDENRKELERIRREVERANVDKRVLDEADRLLKELEDDHKKLEEDAKKALDELREEHKRLEETLRRMLKRIKEVLDRESDRDHMVLHEYVNAAGITERVSRELNKKLEEIVRRLKKVSDELNRRIEEIAERVRRRRK

SEQ ID NO: 189 - protein, 175 aa, Artificial Sequence
  Synthetic
SEEDELRRLLKEVNERVERLLDEIRKELEKIAEELRDLLKKNEDKLREIKRRVEENRVDEEIKKDAERALTELKEEHERLDREAKKDLDRIRKELERLEEEHRRVSERIEEVLDKESDRDHMVLHEYVNAAGITRRVIEEIKKELRDILEKLRRVSEELNKKLDEILKRIEDRTR

SEQ ID NO: 190 - protein, 174 aa, Artificial Sequence
  Synthetic
DELRDVKRELDRLLRENEEIVERIAETVRRLLEELKKLTKELAEELRKLLEELRKRGVPEKELKEVADTLRKLLKDIERSNKEVEDRLRKLLEEIKESTDRLREELEEVEKLLRGGKDRDHMVLHEYVNAAGITRRMRRVLEEAKRLAKEDKERIDKIRKEIEELIKRLKDKAT

SEQ ID NO: 191 - skipped

SEQ ID NO: 192 - protein, 178 aa, Artificial Sequence
  Synthetic
SSKDEIRRRVEEVVERSDEIVKRSREHVKTVVDELDRVVKELERKVREVVKKLDKIRKDGGSEETLKRVLDELREILKELKEEVKKVKRKLEKVVKENRDTIREVEERNRKILDELRKRDHMVLHEYVNAAGITKSEEKLRRVLKESEDIAKEAEDRLKTVLERVERIADEVLKRLTK

SEQ ID NO: 193 - protein, 178 aa, Artificial Sequence
  Synthetic
SKVEKLEEEIARLVERSRRLVEELKKEVTKVKEKVDEIVERSRRHVKKVVEKLRDIKRRGGSEEVLRRVTEELKKVLEDNRRVIEEVLRDLERILEELKRKAEEVTKRNRDDLKRLRDRDHMVLHEYVNAAGITRSEKELRTVLRDVTEDIKRIAEELKKALEDSTEIIRRAEDELRT

SEQ ID NO: 194 - protein, 175 aa, Artificial Sequence
  Synthetic
SEVDEVLREAKRIVDEVHKDNERATEESRRLVKKVHEENEEMVKDIERIVKEVKDANIDEKLVTEILKEIEEALKEAARRNKEVKDRLRELSRRVSERNREILEELKERLDRVRERRKRDHMVLHEYVNAAGITEESLRRHRKENKRLLEELDRSLRELAKIVKEVLDEIRERTR

SEQ ID NO: 195 - protein, 175 aa, Artificial Sequence
  Synthetic
SEMDDVLKKLAETVKRIIERLKKLTDDSRRLVEEVHRRNDKLSKESREAVRKAEERNIDEKDVRKLLEDLKKKSEEVAERNKRILDTLREISKRAEDEVRKVLKELEKTLKELEDRRPRDHMVLHEYVNAAGITRKALKRHKDENDKLLKEIEDSLRRHKEENDRLLEKLKESTR

SEQ ID NO: 196 - protein, 178 aa, Artificial Sequence
  Synthetic
SEEEKLKEVKDRIREVLRKLEEHTDKVKKEVEKVLRDIRRTTDELKKEVRAMLERLRRKKKDAEDLLRELEKIIEEIERELDRVLEENDKMAEEWKKLLDKVLDDNRKSIRDIEKELDRDHMVLHEYVNAAGITRDDEETNRDVVKKVREAVKKDADTNRKVIEEVKKVLEDAARRLD

SEQ ID NO: 197 - protein, 178 aa, Artificial Sequence
  Synthetic
KAAEEIRKKVEDYKRESEKILEEVEDHSRRSKETLKRLLDDLRRAVEELKRRLEELKRRPRTEEIAKRAEEAVRRAAERIKKVIDDVERHIRENAKELKRLLEEDREASRRLEDEIDKRDHMVLHEYVNAAGITRANEESERVLRELAERNKTALEEAERVLRRLKEEIEKVLRKLKK

SEQ ID NO: 198 - protein, 176 aa, Artificial Sequence
  Synthetic
REAEEAKEEVEELNRRNKKELDDARRRVDELDKRNKDRLKESSDRVKRLVEELERVKEEGRSDDRLREKIERMLKTSADELERLKEENKRALRDLAERLRELIERNRRKLEEITRRTVRDHMVLHEYVNAAGITIRELERVLEELAEKIDRSLKELDDVLRKNETDLKRVIEDLKR

SEQ ID NO: 199 - protein, 174 aa, Artificial Sequence
  Synthetic
SEEEVLREAAKTVEKLLDEIRRSLEKVSKRVEDSNRELKESLDRVRERVRELLEELRKNNVDRTLLEDVRRKLERIEERNEEMNDRSRRKLEELRERNRKILEDIRRTLEDLKRRQLPRDHMVLHEYVNAAGITEVDKENKRALRENEERVKTLNRENEEMLKRIEEEVRRATK

SEQ ID NO: 200 - skipped

SEQ ID NO: 201 - protein, 179 aa, Artificial Sequence
  Synthetic
RLEDEVRKMEKEVREEVKRLEDESRKVLEESRRNLDKLREESKRVLDTVRERIKDLRRRGLDERVLRELLKRVREVHERNRKLLDEVRRASEKVHEDNRRILEEVRKTVKDVVDKLRRRDHMVLHEYVNAAGITLEDVEREVKKSIEEVKEINRRLNEEVKKTIEEVKEIVKEVTERAK

SEQ ID NO: 202 - protein, 178 aa, Artificial Sequence
  Synthetic
SEAEKAKETIDRLADRVRKLLEEIKRSLDDSRRKSKETVEENEKTLDRMRKEVDAAKRGSVSEEELERLIRKLKKTLDELRRRHEKLVEDLRRNLERIKRRLEELTREMRETLERLARRDHMVLHEYVNAAGITRLTKELEDVLREYERELRRLEEENKRVIDKTEEEIRRLADRLRR

SEQ ID NO: 203 - protein, 179 aa, Artificial Sequence
  Synthetic
SEVEELIKRLAKVLKELVDKVRKVIEDTKELLERLKRRSEDHIRKLREVLKEAKDQPIDDEELKEILDRLRKTLEELEEELKKALEDDREEAKRLVDDARRVLKELEEEVREIRERRGRDHMVLHEYVNAAGITEEKIREVIKEWERVHREVEELLKRLIDENRKVLDEIRKLLEEKSK

SEQ ID NO: 204 - protein, 178 aa, Artificial Sequence
  Synthetic
DEARELVKELEDLIREITKTVRRLLEESEELIKRIDDAVDDLRRADEDLNREIKEEIEKGKSKESLEALIERLKESLERVKRTIEKLIRDLERLNEKLRRDVESLVAELEKILSKIKRRDHMVLHEYVNAAGITELEKEAREILKRSEDETDKLREKAERILEDLERANRRTMDEARR

SEQ ID NO: 205 - protein, 175 aa, Artificial Sequence
  Synthetic
SEADDVLKKLAETVKRIIERLKKLTDDSRRLVEEVHRRNDKLSKESAEAVRKAEERGIDEKDVRKLLEDLKKKSEEVAERNKRILDTLREISKRAEDEVRKVLKELEKTLKELEDRRPRDHMVLHEYVNAAGITRKALARHKDENDKLLKEIEDSLRRHKEENDRLLEKLKESTR

SEQ ID NO: 206 - protein, 177 aa, Artificial Sequence
  Synthetic
SEDEDLDRVAEKLAREHKKSVEEIKRVLKSADEESKKLVRDTERVIEEIKREVEEARRGNIDEELVERLKKKIEDILRTLEERHKKLIKELREILKRLSDESRRLAEETEKVLEDLERRDHMVLHEYVNAAGITRVKEENRKVNEEVEKRLRELEEENKKVIEDLKSTVEELVERLR

SEQ ID NO: 207 - protein, 177 aa, Artificial Sequence
  Synthetic
ELREDVERVVDEIRRLVEENVRRIDEVAKDIKRLADDNVRRVKELVRKIEEDIRRLKEEGVTEVVDELREEVRKLSEDNRRHSRELIERVKKLLKELEEHSRDLKRRVKELLEDLKRKGRDHMVLHEYVNAAGITERKSRDALRRLEEAIRRVRRESERVNRELDEVIKRVTEELKK

SEQ ID NO: 208 - protein, 174 aa, Artificial Sequence
  Synthetic
SELEKVVKEVADLLRRNLEKSKRVLEEVRRRLEENLRESEKVHDDNRKTARRILELVREGKDKRDLTRLLEEDDKRVKEALDKSRENNERILKEVRRALRESEEDNRRILKEVREKVDSRDHMVLHEYVNAAGITSRRFIEELEKIVEETLTESEKLARASSEITKTVLDEIRK

SEQ ID NO: 209 - protein, 175 aa, Artificial Sequence
  Synthetic
SEKEDLERELEEVRRRVEESLRKNEEDVKRVRDELKKLLDENRKELERIRREVERANVDKRVLDEADRLLKELEDDHKKLEEDAKKALDELREEHKRLEETLRRMLKRIKEVLDRESDKRDHMVLHEYVNAAGITRVSRELNKKLEEIVRRLKKVSDELNRRIEEIAERVRRRRK

SEQ ID NO: 210 - protein, 175 aa, Artificial Sequence
  Synthetic
SEEDELRRLLKEVNERVERLLDEIRKELEKIAEELRDLLKKNEDKLREIKRRVEENRVDEEIKKDAERALTELKEEHERLDREAKKDLDRIRKELERLEEEHRRVSERIEEVLDKESDKRDHMVLHEYVNAAGITRVIEEIKKELRDILEKLRRVSEELNKKLDEILKRIEDRTR

SEQ ID NO: 211 - protein, 177 aa, Artificial Sequence
  Synthetic
SAIEKVKEVVERVLETVRDSVRRSHEESKRLIDKVRKRLEEVREEVKELIERVRRKGIPERMVEKLERDLEELLKEIKDTIDRIEEELRTSNRRLKETNDEIAKRLEELLRELSRDRDKRDHMVLHEYVNAAGITLNKKNDDNVRRVKEVIDRAEKLVRDLLREIRKLIEKLIRDTE

SEQ ID NO: 212 - protein, 179 aa, Artificial Sequence
  Synthetic
SSKEVADELRKKAEKVLDELRKIIRELERKNEDSLRRTEEIVRRLEEEAERVLRDLVRTRGEDDRLVREVERLLRELKRRLEELIRRSEELIKRSREEVDRVIRTVEKLLEELDRLLRARDHMVLHEYVNAAGITEEIKDLARKLAKSSDDTVREDEKLVEELRKDVKRIVRKIKKDLE

SEQ ID NO: 213 - protein, 174 aa, Artificial Sequence
  Synthetic
DELRDVKRELDRLLRENEEIVERIAETVRRLLEELKKLTKELAEELRKLLEELRKRGVPEKELKEVADTLRKLLKDIERSNKEVEDRLRKLLEEIKESTDRLREELEEVEKLLRGGKDVRDHMVLHEYVNAAGITRMRRVLEEAKRLAKEDKERIDKIRKEIEELIKRLKDKAT

SEQ ID NO: 214 - protein, 174 aa, Artificial Sequence
  Synthetic
DEEEDLERRIKKLLDENRELLKRIAEELRRLLEELRRLTEESADRLRRLLKELKDRGVPEKDLRDVAEKVKKVLKESEDSNRDVKRKLEKLLRDLERSTERLEREARKVRKLLRDGKDIRDHMVLHEYVNAAGITLLKKIEKEIRDLIKEDKERNRELSERLRKLVEELKKKAT

SEQ ID NO: 215 - protein, 178 aa, Artificial Sequence
  Synthetic
SSKDEIRRRVEEVVERSDEIVKRSREHVKTVVDELDRVVKELERKVREVVKKLDKIRKDGGSEETLKRVLDELREILKELKEEVKKVKRKLEKVVKENRDTIREVEERNRKILDELRKRRDHMVLHEYVNAAGITSEEKLRRVLKESEDIAKEAEDRLKTVLERVERIADEVLKRLTK

SEQ ID NO: 216 - protein, 178 aa, Artificial Sequence
  Synthetic
SKVEKLEEEIARLVERSRRLVEELKKEVTKVKEKVDEIVERSRRHVKKVVEKLRDIKRRGGSEEVLRRVTEELKKVLEDNRRVIEEVLRDLERILEELKRKAEEVTKRNRDDLKRLRDSRDHMVLHEYVNAAGITSEKELRTVLRDVTEDIKRIAEELKKALEDSTEIIRRAEDELRT

SEQ ID NO: 217 - protein, 175 aa, Artificial Sequence
  Synthetic
SEVDEVLREAKRIVDEVHKDNERATEESRRLVKKVHEENEEMVKDIERIVKEVKDANIDEKLVTEILKEIEEALKEAARRNKEVKDRLRELSRRVSERNREILEELKERLDRVRERRKDRDHMVLHEYVNAAGITESLRRHRKENKRLLEELDRSLRELAKIVKEVLDEIRERTR

SEQ ID NO: 218 - protein, 175 aa, Artificial Sequence
  Synthetic
SEMDDVLKKLAETVKRIIERLKKLTDDSRRLVEEVHRRNDKLSKESREAVRKAEERNIDEKDVRKLLEDLKKKSEEVAERNKRILDTLREISKRAEDEVRKVLKELEKTLKELEDRRPDRDHMVLHEYVNAAGITKALKRHKDENDKLLKEIEDSLRRHKEENDRLLEKLKESTR

SEQ ID NO: 219 - protein, 178 aa, Artificial Sequence
  Synthetic
SEEEKLKEVKDRIREVLRKLEEHTDKVKKEVEKVLRDIRRTTDELKKEVRAMLERLRRKKKDAEDLLRELEKIIEEIERELDRVLEENDKMAEEWKKLLDKVLDDNRKSIRDIEKELDDRDHMVLHEYVNAAGITDDEETNRDVVKKVREAVKKDADTNRKVIEEVKKVLEDAARRLD

SEQ ID NO: 220 - protein, 179 aa, Artificial Sequence
  Synthetic
RLEDEVRKMEKEVREEVKRLEDESRKVLEESRRNLDKLREESKRVLDTVRERIKDLRRRGLDERVLRELLKRVREVHERNRKLLDEVRRASEKVHEDNRRILEEVRKTVKDVVDKLRRVRDHMVLHEYVNAAGITEDVEREVKKSIEEVKEINRRLNEEVKKTIEEVKEIVKEVTERAK

SEQ ID NO: 221 - protein, 174 aa, Artificial Sequence
  Synthetic
SESDEVIRDLARLLDELARHVDDSVRRMDEVVKRSTREADELAKRLDELVKEVEKKPGDERVERMVAEIERLVAEVLEELKKKYEKLKREVEENLRRLEETVRDIVEKARKVTEKGVSKRDHMVLHEYVNAAGITAKKKHEDVLRRLEDSLRRVAELLKAALDRLREIVDRLRR

SEQ ID NO: 222 - protein, 179 aa, Artificial Sequence
  Synthetic
SEVEELIKRLAKVLKELVDKVRKVIEDTKELLERLKRRSEDHIRKLREVLKEAKDQPIDDEELKEILDRLRKTLEELEEELKKALEDDREEAKRLVDDARRVLKELEEEVREIRERRGERDHMVLHEYVNAAGITEKIREVIKEWERVHREVEELLKRLIDENRKVLDEIRKLLEEKSK

SEQ ID NO: 223 - protein, 178 aa, Artificial Sequence
  Synthetic
DDAERILREMERLLEENKEISDEIAKELKRLLDENRKLSEDVVKALEDLLRDLERRSGVSEEVLKRVREVLERIKRELDRSDDELRKVAERILRDAERSNDELRKVIEEIEEELRGSRDRDHMVLHEYVNAAGITENKERLKELLRELKKLSDENKERIKKLLSDAEKIIEDVARRAK

SEQ ID NO: 224 - protein, 178 aa, Artificial Sequence
  Synthetic
DEARELVKELEDLIREITKTVRRLLEESEELIKRIDDAVDDLRRADEDLNREIKEEIEKGKSKESLEALIERLKESLERVKRTIEKLIRDLERLNEKLRRDVESLVAELEKILSKIKRGRDHMVLHEYVNAAGITLEKEAREILKRSEDETDKLREKAERILEDLERANRRTMDEARR

SEQ ID NO: 225 - protein, 180 aa, Artificial Sequence
  Synthetic
REVEEMIKELEELLKDLKEKNERASKRNRELVRRLEEENKRVIEELKKLVKELEDLVRSGEDEEVLREVLKRLEEVLERVRALNERVLEAIEKSLEEVKASNEAVKRRLKELLEEAERGRDHMVLHEYVNAAGITAKRIDELDEYTRESIRRAKKEIERLNRETKKVIEEVVKRIEEERK

SEQ ID NO: 226 - protein, 178 aa, Artificial Sequence
  Synthetic
SDAEELLKRVADLLKASLESLEKILRDSKELMDRWRKKLEDLLRESEELVDRAEKILRRGGSDKEVLDKIAEEVRRTNDDSRRLDEELHRLSRDTLRKLEENLRRTEKEVREMDKRAAERDHMVLHEYVNAAGITRVEEEHRKVLETDKKILKEAHKESKEVNDRDRELLERLEESVR

SEQ ID NO: 227 - protein, 175 aa, Artificial Sequence
  Synthetic
SEIERVKKRLEELLAEVEESTRRLEERLKRLLEEAKRSSEEVEKELRRLLEAVRRGLSRDEKLVSELEARVKELLEDSRASLEELKKRVRKLAEDSARLLEEVKREVEKLKAKLDRGGDRDHMVLHEYVNAAGITDENERLIREVEELVRAHNKRNKELVDEVKRLVEKVIEEER

SEQ ID NO: 228 - protein, 180 aa, Artificial Sequence
  Synthetic
SAEELLREVAELVKRVDEDLRRLLEEVRASNEEVIRRLEEILKRIEEENRKVVEELRRGGVSEDLVRESKRLVDESRRVIEKLVKESADSVERTRETVDRLREELKRLVEEIAKMVKGGRDHMVLHEYVNAAGITLERLKRTIEELLKRNRDLLADAEEKARRLLEENRKLLKAARDTAT

SEQ ID NO: 229 - protein, 177 aa, Artificial Sequence
  Synthetic
SEDEDLDRVAEKLAREHKKSVEEIKRVLKSADEESKKLVRDTERVIEEIKREVEEARRGNIDEELVERLKKKIEDILRTLEERHKKLIKELREILKRLSDESRRLAEETEKVLEDLERKRDHMVLHEYVNAAGITVKEENRKVNEEVEKRLRELEEENKKVIEDLKSTVEELVERLR

SEQ ID NO: 230 - protein, 181 aa, Artificial Sequence
  Synthetic
SEVERVLEDLRRLVRDVEEKLRRIIERDRRLVEEVERENRKTIRKIEELLRKVLEELKDISDKKTIERIVREIIKEARDLVRRNHERNREIVDESRRLVEELRRIVEEIIRRLRELLERVRDHMVLHEYVNAAGITEKRLRELLKELEKTSRDLKKRLEELDRELKALVEKVERDLEELRK

SEQ ID NO: 231 - protein, 177 aa, Artificial Sequence
  Synthetic
KEEEDLEREVKRLEDKVREDAKKLEEVVKTVEKLVRDDARRNEEVVKEVADRVRRLTERKLDEETLRKVKEDLKRTLERLKRENEKSLEELRDILRRLKKENDDTLKELRDELKRLTDSGRDHMVLHEYVNAAGITEEVSREVEKRLRRIIRELERVSKEVLDRLREIIEKLDRDAT

SEQ ID NO: 232 - protein, 174 aa, Artificial Sequence
  Synthetic
SEDETIRRIVRTVHEESRKSTEDVRREVERVLRESEEVVKKVKKKVDDVLKRVEETGISEELEERMRRIIREIREHLKDNLRRVREVIERIERKLEETERRDEKVLREIEKKIRDGDGRERDHMVLHEYVNAAGITNEEIAKEVREIVERSIKNLEEVAEEVERVVRELIEARR

SEQ ID NO: 233 - protein, 174 aa, Artificial Sequence
  Synthetic
SRDEKIRDILRRVLKEVRDSTKKVEEDLEDVHRRTEEELRKVKKRLDEVLKRVRDEGASEELKRRMEEVVRRIEELLKKLLKEDRDVVKEIRDKLDETRKEMEEVAERIKDKIRRGDGRERDHMVLHEYVNAAGITNRRIAEEVDKIVRDSIKKVEEIVTEVEKIVEKLIRDVR

SEQ ID NO: 234 - protein, 181 aa, Artificial Sequence
  Synthetic
DEERKLEKSLKDVEDTHRRLLEKNDEDLKELRKRVEDMLRRLEDALRRILEDIEEKLKRIEDDETLKRLRKRVKELLDEIRRRLERLEREVDKRLEEIKERNDRHHEEAKKELKRIRDKIRDHMVLHEYVNAAGITLRKVAEDLKRSNDEVKELAERLEETIRDLLRRIEEILKEIEERVR

SEQ ID NO: 235 - protein, 181 aa, Artificial Sequence
  Synthetic
DEEETLEDVLRELEERVEKLLRDLTRDLERVEKEHKELLKRNKEAIDEIEKRIEELLKRIEDDEKLRRLKEEVRKLVEESRERNKRHHKEVREVLERIRELLERLEKELRRALEEIRDKIRDHMVLHEYVNAAGITLRRAEEVIRDLERKVRKLERDIRENIKKNHREVREILRKIEEDVR

SEQ ID NO: 236 - protein, 175 aa, Artificial Sequence
  Synthetic
SEKEDLERELEEVRRRVEESLRKNEEDVKRVRDELKKLLDENRKELERIRREVERANVDKRVLDEADRLLKELEDDHKKLEEDAKKALDELREEHKRLEETLRRMLKRIKEVLDRESDKMRDHMVLHEYVNAAGITVSRELNKKLEEIVRRLKKVSDELNRRIEEIAERVRRRRK

SEQ ID NO: 237 - protein, 177 aa, Artificial Sequence
  Synthetic
SAIEKVKEVVERVLETVRDSVRRSHEESKRLIDKVRKRLEEVREEVKELIERVRRKGIPERMVEKLERDLEELLKEIKDTIDRIEEELRTSNRRLKETNDEIAKRLEELLRELSRDRDKDRDHMVLHEYVNAAGITNKKNDDNVRRVKEVIDRAEKLVRDLLREIRKLIEKLIRDTE

SEQ ID NO: 238 - protein, 178 aa, Artificial Sequence
  Synthetic
SSIERVEKEVRRLLRESDESLKRVMEEAKELIKSVRESTKRVEEDARDLLRKVVERTGDEREDLRRVLEELRKLIEDNRREDKRSEDELRKLIRDNKEENDRARREAEKLLEDLSRGRSERDHMVLHEYVNAAGITLKEDDKRSLERIERIVRRNNELNKESVDRIRKIIKEMEERAD

SEQ ID NO: 239 - protein, 174 aa, Artificial Sequence
  Synthetic
DELRDVKRELDRLLRENEEIVERIAETVRRLLEELKKLTKELAEELRKLLEELRKRGVPEKELKEVADTLRKLLKDIERSNKEVEDRLRKLLEEIKESTDRLREELEEVEKLLRGGKDVERDHMVLHEYVNAAGITMRRVLEEAKRLAKEDKERIDKIRKEIEELIKRLKDKAT

SEQ ID NO: 240 - protein, 174 aa, Artificial Sequence
  Synthetic
DEEEDLERRIKKLLDENRELLKRIAEELRRLLEELRRLTEESADRLRRLLKELKDRGVPEKDLRDVAEKVKKVLKESEDSNRDVKRKLEKLLRDLERSTERLEREARKVRKLLRDGKDIERDHMVLHEYVNAAGITLKKIEKEIRDLIKEDKERNRELSERLRKLVEELKKKAT

SEQ ID NO: 241 - protein, 178 aa, Artificial Sequence
  Synthetic
SKVEKLEEEIARLVERSRRLVEELKKEVTKVKEKVDEIVERSRRHVKKVVEKLRDIKRRGGSEEVLRRVTEELKKVLEDNRRVIEEVLRDLERILEELKRKAEEVTKRNRDDLKRLRDSGRDHMVLHEYVNAAGITEKELRTVLRDVTEDIKRIAEELKKALEDSTEIIRRAEDELRT

SEQ ID NO: 242 - protein, 177 aa, Artificial Sequence
  Synthetic
DEVEDILRKVEEIVKKSITDARRLLKEAREIVEESIKTAEELLRRNEDIVRKLSEDVKRTTDEEKKKKLEEESRRVLEKTKRDLDRTKDDNRKALEKIRKRVKETEEENREVVDRVRKAGRDHMVLHEYVNAAGITVRVNREVLKRVEEVLEESKRVNEKVEEDVRRVHEEVRKEIK

SEQ ID NO: 243 - protein, 178 aa, Artificial Sequence
  Synthetic
SEEEKLKEVKDRIREVLRKLEEHTDKVKKEVEKVLRDIRRTTDELKKEVRAMLERLRRKKKDAEDLLRELEKIIEEIERELDRVLEENDKMAEEWKKLLDKVLDDNRKSIRDIEKELDDRRDHMVLHEYVNAAGITDEETNRDVVKKVREAVKKDADTNRKVIEEVKKVLEDAARRLD

SEQ ID NO: 244 - protein, 176 aa, Artificial Sequence
  Synthetic
REAEEAKEEVEELNRRNKKELDDARRRVDELDKRNKDRLKESSDRVKRLVEELERVKEEGRSDDRLREKIERMLKTSADELERLKEENKRALRDLAERLRELIERNRRKLEEITRRTVPDRDHMVLHEYVNAAGITELERVLEELAEKIDRSLKELDDVLRKNETDLKRVIEDLKR

SEQ ID NO: 245 - protein, 179 aa, Artificial Sequence
  Synthetic
RLEDEVRKMEKEVREEVKRLEDESRKVLEESRRNLDKLREESKRVLDTVRERIKDLRRRGLDERVLRELLKRVREVHERNRKLLDEVRRASEKVHEDNRRILEEVRKTVKDVVDKLRRVDRDHMVLHEYVNAAGITDVEREVKKSIEEVKEINRRLNEEVKKTIEEVKEIVKEVTERAK

SEQ ID NO: 246 - protein, 174 aa, Artificial Sequence
  Synthetic
SESDEVIRDLARLLDELARHVDDSVRRMDEVVKRSTREADELAKRLDELVKEVEKKPGDERVERMVAEIERLVAEVLEELKKKYEKLKREVEENLRRLEETVRDIVEKARKVTEKGVSKERDHMVLHEYVNAAGITKKKHEDVLRRLEDSLRRVAELLKAALDRLREIVDRLRR

SEQ ID NO: 247 - protein, 178 aa, Artificial Sequence
  Synthetic
DEARELVKELEDLIREITKTVRRLLEESEELIKRIDDAVDDLRRADEDLNREIKEEIEKGKSKESLEALIERLKESLERVKRTIEKLIRDLERLNEKLRRDVESLVAELEKILSKIKRGGRDHMVLHEYVNAAGITEKEAREILKRSEDETDKLREKAERILEDLERANRRTMDEARR

SEQ ID NO: 248 - protein, 176 aa, Artificial Sequence
  Synthetic
STAETVEKKVEEVIRENEKSMRESEEKVDRSTKRIEDVLRRLEETIRKTSDDIAKGVKGERVKEVLEENRRLLEEAKKLVDEVLETNKKLLEDDKRLNEEVSKTLKKLLEEIKSVDTREDRDHMVLHEYVNAAGITKLNEETIRRSEELVRRIERVIEEIIKRSEKLLEDVARESK

SEQ ID NO: 249 - protein, 176 aa, Artificial Sequence
  Synthetic
STAETVAEEVERVLKHSDDLIKEVEDVNRRVEEEIKRVIRELEEENERLVAEVRKGVKGEILAEIEKRLADNSEKVREVAERAKKLLEENTARVKDILRESRKLVKDLLDEVRGTGSEEARDHMVLHEYVNAAGITEKLDELIKHSEEVLERVKRLIDELRKHSEEVLEDLRRRAK

SEQ ID NO: 250 - protein, 180 aa, Artificial Sequence
  Synthetic
REVEEMIKELEELLKDLKEKNERASKRNRELVRRLEEENKRVIEELKKLVKELEDLVRSGEDEEVLREVLKRLEEVLERVRALNERVLEAIEKSLEEVKASNEAVKRRLKELLEEAERGVRDHMVLHEYVNAAGITKRIDELDEYTRESIRRAKKEIERLNRETKKVIEEVVKRIEEERK

SEQ ID NO: 251 - protein, 181 aa, Artificial Sequence
  Synthetic
DAVEEAEKLIRKVIADSEKLLRDLADLNAKSIRRSEKLVEDDRRANEDVIRKLEELRRNGGSEEELRALLKEVEDTNRASHETNKRLLDEDRALNKEVHDRNEKLLRDIKRLVEEVAKGIRDHMVLHEYVNAAGITKKAIEDSSREIKRLLEESERVMKRSSEDIKRTLDDTRRVVEEVRR

SEQ ID NO: 252 - protein, 177 aa, Artificial Sequence
  Synthetic
SSDEVLKEIEEIIRRLEAEVRRVNAEVNASTEDLAREVEEVLRATNELIEELERRVTGTEELKRVIDELRDRDRKVRRRVERVIEESAKRDDESRKRLTRAVEKLRADLKKLADDGVPEERDHMVLHEYVNAAGITKDELKEWRDRNKELVDRLSEELKEWLKDVERVLKELTDKDR

SEQ ID NO: 253 - protein, 178 aa, Artificial Sequence
  Synthetic
SDAEELLKRVADLLKASLESLEKILRDSKELMDRWRKKLEDLLRESEELVDRAEKILRRGGSDKEVLDKIAEEVRRTNDDSRRLDEELHRLSRDTLRKLEENLRRTEKEVREMDKRAAERRDHMVLHEYVNAAGITVEEEHRKVLETDKKILKEAHKESKEVNDRDRELLERLEESVR

SEQ ID NO: 254 - protein, 181 aa, Artificial Sequence
  Synthetic
SEIETVRREIEKILDDLRRTVKRIEDEVRKIHEDLRRSLEDSKRNIEEILKDLERAARRDGLDKKVEDDMRKLVEDLKRKHDKLRADNEAVTKELKDRLKKLEDDLARAIEELRRRLDKGRDHMVLHEYVNAAGITVEKIKKDLKELLERYEEIVRRIKELLKDLNREAEEVVRRLKEELR

SEQ ID NO: 255 - protein, 175 aa, Artificial Sequence
  Synthetic
SEIERVKKRLEELLAEVEESTRRLEERLKRLLEEAKRSSEEVEKELRRLLEAVRRGLSRDEKLVSELEARVKELLEDSRASLEELKKRVRKLAEDSARLLEEVKREVEKLKAKLDRGGDARDHMVLHEYVNAAGITENERLIREVEELVRAHNKRNKELVDEVKRLVEKVIEEER

SEQ ID NO: 256 - protein, 177 aa, Artificial Sequence
  Synthetic
SEDEDLDRVAEKLAREHKKSVEEIKRVLKSADEESKKLVRDTERVIEEIKREVEEARRGNIDEELVERLKKKIEDILRTLEERHKKLIKELREILKRLSDESRRLAEETEKVLEDLERKGRDHMVLHEYVNAAGITKEENRKVNEEVEKRLRELEEENKKVIEDLKSTVEELVERLR

SEQ ID NO: 257 - protein, 180 aa, Artificial Sequence
  Synthetic
DEVEDVLRKIEKILDDHRKRIEKNSRDMARIIDEHRRKVEENSREMKKLVDDLKKAVDRGEGDEETAEDVKAKLEKSNRELEKHSEEVKRALDESNEDLRRHSEEVKERIERLVKKLREDRDHMVLHEYVNAAGITEKLDRLNRENEKSSEELKRELDKINDENRETSERLKREIDETTR

SEQ ID NO: 258 - protein, 182 aa, Artificial Sequence
  Synthetic
RVEDALRKLLDDVRRLVEEAERRLRTSNDKSRRLVEEAKRRLEESNERSEKLVRDVRRRIRDEDVKRVLEELLKRDHDVVRRVLERIDEMLERNSRLVKRVLEDIRRLLKRVREVVERIKRRDHMVLHEYVNAAGITIKTAKKIIEDVLRASEDTIRRLEEIIRKVEEDSKRIIEEIERAAR

SEQ ID NO: 259 - protein, 179 aa, Artificial Sequence
  Synthetic
STREDARRLVERVRKEVKRLLKKNSDLLREVTERVKTLNERNRRLLEEVEREAKRLKDSDERDVERLLDRARKLVKESEDLIRKLLKDLRELVRRSEKDIDELRKELKRLLDELRARATDKRDHMVLHEYVNAAGITIRELEENVKTSEKLIEDLIRELEKSVDESRKRVEELVKELRT

SEQ ID NO: 260 - protein, 174 aa, Artificial Sequence
  Synthetic
SELEKVVKEVADLLRRNLEKSKRVLEEVRRRLEENLRESEKVHDDNRKTARRILELVREGKDKRDLTRLLEEDDKRVKEALDKSRENNERILKEVRRALRESEEDNRRILKEVREKVDSRLRDHMVLHEYVNAAGITRFIEELEKIVEETLTESEKLARASSEITKTVLDEIRK

SEQ ID NO: 261 - protein, 181 aa, Artificial Sequence
  Synthetic
DEERKLEKSLKDVEDTHRRLLEKNDEDLKELRKRVEDMLRRLEDALRRILEDIEEKLKRIEDDETLKRLRKRVKELLDEIRRRLERLEREVDKRLEEIKERNDRHHEEAKKELKRIRDKIRRDHMVLHEYVNAAGITRKVAEDLKRSNDEVKELAERLEETIRDLLRRIEEILKEIEERVR

SEQ ID NO: 262 - protein, 175 aa, Artificial Sequence
  Synthetic
SEKEDLERELEEVRRRVEESLRKNEEDVKRVRDELKKLLDENRKELERIRREVERANVDKRVLDEADRLLKELEDDHKKLEEDAKKALDELREEHKRLEETLRRMLKRIKEVLDRESDKMERDHMVLHEYVNAAGITSRELNKKLEEIVRRLKKVSDELNRRIEEIAERVRRRRK

SEQ ID NO: 263 - protein, 177 aa, Artificial Sequence
  Synthetic
SVIERVEEEMEKVIRDSERVTKEVEDRAREVHERSEKRIREVEETSRRVLEELRRAGVDKRILDELRKRIKDSREDLERINEELRRALRKLLEDSKRINEELRKTLEELRKRLERVDDEEERDHMVLHEYVNAAGITRKLEELARRVDELVRESIERVDRNVEENKRLVREAIERRR

SEQ ID NO: 264 - protein, 179 aa, Artificial Sequence
  Synthetic
SSKEVADELRKKAEKVLDELRKIIRELERKNEDSLRRTEEIVRRLEEEAERVLRDLVRTRGEDDRLVREVERLLRELKRRLEELIRRSEELIKRSREEVDRVIRTVEKLLEELDRLLRANKRDHMVLHEYVNAAGITIKDLARKLAKSSDDTVREDEKLVEELRKDVKRIVRKIKKDLE

SEQ ID NO: 265 - protein, 174 aa, Artificial Sequence
  Synthetic
DELRDVKRELDRLLRENEEIVERIAETVRRLLEELKKLTKELAEELRKLLEELRKRGVPEKELKEVADTLRKLLKDIERSNKEVEDRLRKLLEEIKESTDRLREELEEVEKLLRGGKDVETRDHMVLHEYVNAAGITRRVLEEAKRLAKEDKERIDKIRKEIEELIKRLKDKAT

SEQ ID NO: 266 - protein, 182 aa, Artificial Sequence
  Synthetic
DEIETVLDEVRRLHEDAKRRLEEMIDEVRKLNEESVRELARVVEEVERLLRTVKEEVERAGLDKGKLEELEERLERVREDVERILREIKRRNEKTLEDSERILEENKERNRTVLKKLKELRRDHMVLHEYVNAAGITVEESRESVRRVLEKNRRVVEESKRLAEELLRRVKKVVDEIRKRVE

SEQ ID NO: 267 - protein, 178 aa, Artificial Sequence
  Synthetic
SKVEKLEEEIARLVERSRRLVEELKKEVTKVKEKVDEIVERSRRHVKKVVEKLRDIKRRGGSEEVLRRVTEELKKVLEDNRRVIEEVLRDLERILEELKRKAEEVTKRNRDDLKRLRDSGVRDHMVLHEYVNAAGITKELRTVLRDVTEDIKRIAEELKKALEDSTEIIRRAEDELRT

SEQ ID NO: 268 - protein, 182 aa, Artificial Sequence
  Synthetic
SDADRVAEELKKLVEDSRRENERVIEESKRLVKENEDRNRELIERLKKLVDKLRDILEKEKDKKTLDDIVREILERLKRLLEKVEDENRKSHEENKRLLEDVKRKNKRISDELKRLLEEIERDHMVLHEYVNAAGITLEENKRVMEKTEEVAKKSSEDIKRVADETRRRAEELLKEVDELRK

SEQ ID NO: 269 - protein, 179 aa, Artificial Sequence
  Synthetic
KDEETLKRLLEKAKEVVDRLKDENEKVTRDNHESVKKAKDANKRSNEKSERVARDAIRRVREAKEVVDTAEKLLRDNHEHSRDTVKKARELNETSRRHSERIVEKIEEILEEVERTLRENRRDHMVLHEYVNAAGITLEELSRENREAVKRISDEIKRLSDENAKDSERIIKEIDDRVR

SEQ ID NO: 270 - protein, 179 aa, Artificial Sequence
  Synthetic
REDERLEEIARKIKKVVDELVERNKKLTEDNHESVRRAEKRNRELSRELEEVAKRAIERIRSDKKVVDEVKKLLEDAKKHSKEVIDELRRLNEESKRSSEDTIRRMRKLLRELEETVKAKKRDHMVLHEYVNAAGITLEDLSRRNEEKVRRISEEIKKLSKDNERTIKEIIKEIEERVK

SEQ ID NO: 271 - protein, 178 aa, Artificial Sequence
  Synthetic
KAAEEIRKKVEDYKRESEKILEEVEDHSRRSKETLKRLLDDLRRAVEELKRRLEELKRRPRTEEIAKRAEEAVRRAAERIKKVIDDVERHIRENAKELKRLLEEDREASRRLEDEIDKEVKRDHMVLHEYVNAAGITEESERVLRELAERNKTALEEAERVLRRLKEEIEKVLRKLKK

SEQ ID NO: 272 - protein, 176 aa, Artificial Sequence
  Synthetic
REAEEAKEEVEELNRRNKKELDDARRRVDELDKRNKDRLKESSDRVKRLVEELERVKEEGRSDDRLREKIERMLKTSADELERLKEENKRALRDLAERLRELIERNRRKLEEITRRTVPDKRDHMVLHEYVNAAGITLERVLEELAEKIDRSLKELDDVLRKNETDLKRVIEDLKR

SEQ ID NO: 273 - protein, 182 aa, Artificial Sequence
  Synthetic
DLERRLDELLKRIEDRVRELVRTLEESLRELERRVREIIRRLEEHLRRIEKMVRDLKRANKPDKAVKDDVRRLRENADRLNKRVREELKKLREDVKRVNEDVKRELDKLAEEAKDMLRKLRRDHMVLHEYVNAAGITRRLLREIEEVSERHKREVDRLEREIEEVSREHKERVEKLLREIER

SEQ ID NO: 274 - protein, 179 aa, Artificial Sequence
  Synthetic
RLEDEVRKMEKEVREEVKRLEDESRKVLEESRRNLDKLREESKRVLDTVRERIKDLRRRGLDERVLRELLKRVREVHERNRKLLDEVRRASEKVHEDNRRILEEVRKTVKDVVDKLRRVDARDHMVLHEYVNAAGITVEREVKKSIEEVKEINRRLNEEVKKTIEEVKEIVKEVTERAK

SEQ ID NO: 275 - protein, 174 aa, Artificial Sequence
  Synthetic
SESDEVIRDLARLLDELARHVDDSVRRMDEVVKRSTREADELAKRLDELVKEVEKKPGDERVERMVAEIERLVAEVLEELKKKYEKLKREVEENLRRLEETVRDIVEKARKVTEKGVSKEKRDHMVLHEYVNAAGITKKHEDVLRRLEDSLRRVAELLKAALDRLREIVDRLRR

SEQ ID NO: 276 - protein, 174 aa, Artificial Sequence; identical to SEQ ID NO: 275
  Synthetic

SEQ ID NO: 277 - protein, 181 aa, Artificial Sequence
  Synthetic
SEVDEAVKNNEEDAKESRRVVEEAVKRDEDIARDIERAAREVVERDKEIVDEVRRGVKDEKKLREVVTLSKKIVDETKEIADRVLELSKRIVKETRDIAKRVLKLNDDSVKDVRRIAREGRRDHMVLHEYVNAAGITEISREVKKDLERTVRENKKIVDEVAKALEDTVDKNRRIVEEVTT

SEQ ID NO: 278 - protein, 172 aa, Artificial Sequence
  Synthetic
SRAETVLKEVTDKIKKLADSSDELLRRNKENIDELKKSSEELLRRLTKAIEEIEKGSVDEETLEELIRRVEAELEAHHRELEKNSREDEKRNRDHHAKLEEEMRRVEERLEREGIDDEVVKRDHMVLHEYVNAAGITNEDVKRMNDKLRRDNEDVIRRVEKLLRELEEKRRT

SEQ ID NO: 279 - protein, 179 aa, Artificial Sequence
  Synthetic
SEVEELIKRLAKVLKELVDKVRKVIEDTKELLERLKRRSEDHIRKLREVLKEAKDQPIDDEELKEILDRLRKTLEELEEELKKALEDDREEAKRLVDDARRVLKELEEEVREIRERRGESERDHMVLHEYVNAAGITIREVIKEWERVHREVEELLKRLIDENRKVLDEIRKLLEEKSK

SEQ ID NO: 280 - protein, 181 aa, Artificial Sequence
  Synthetic
DAVEEAEKLIRKVIADSEKLLRDLADLNAKSIRRSEKLVEDDRRANEDVIRKLEELRRNGGSEEELRALLKEVEDTNRASHETNKRLLDEDRALNKEVHDRNEKLLRDIKRLVEEVAKGIDRDHMVLHEYVNAAGITKAIEDSSREIKRLLEESERVMKRSSEDIKRTLDDTRRVVEEVRR

SEQ ID NO: 281 - protein, 175 aa, Artificial Sequence
  Synthetic
SEADDVLKKLAETVKRIIERLKKLTDDSRRLVEEVHRRNDKLSKESAEAVRKAEERGIDEKDVRKLLEDLKKKSEEVAERNKRILDTLREISKRAEDEVRKVLKELEKTLKELEDRRPDSERDHMVLHEYVNAAGITLARHKDENDKLLKEIEDSLRRHKEENDRLLEKLKESTR

SEQ ID NO: 282 - protein, 181 aa, Artificial Sequence
  Synthetic
SEIETVRREIEKILDDLRRTVKRIEDEVRKIHEDLRRSLEDSKRNIEEILKDLERAARRDGLDKKVEDDMRKLVEDLKRKHDKLRADNEAVTKELKDRLKKLEDDLARAIEELRRRLDKGLRDHMVLHEYVNAAGITEKIKKDLKELLERYEEIVRRIKELLKDLNREAEEVVRRLKEELR

SEQ ID NO: 283 - protein, 175 aa, Artificial Sequence
  Synthetic
SEIERVKKRLEELLAEVEESTRRLEERLKRLLEEAKRSSEEVEKELRRLLEAVRRGLSRDEKLVSELEARVKELLEDSRASLEELKKRVRKLAEDSARLLEEVKREVEKLKAKLDRGGDADRDHMVLHEYVNAAGITNERLIREVEELVRAHNKRNKELVDEVKRLVEKVIEEER

SEQ ID NO: 284 - protein, 177 aa, Artificial Sequence
  Synthetic
SEDEDLDRVAEKLAREHKKSVEEIKRVLKSADEESKKLVRDTERVIEEIKREVEEARRGNIDEELVERLKKKIEDILRTLEERHKKLIKELREILKRLSDESRRLAEETEKVLEDLERKGVRDHMVLHEYVNAAGITEENRKVNEEVEKRLRELEEENKKVIEDLKSTVEELVERLR

SEQ ID NO: 285 - protein, 177 aa, Artificial Sequence; identical to SEQ ID NO: 284
  Synthetic

SEQ ID NO: 286 - protein, 182 aa, Artificial Sequence
  Synthetic
RVEDALRKLLDDVRRLVEEAERRLRTSNDKSRRLVEEAKRRLEESNERSEKLVRDVRRRIRDEDVKRVLEELLKRDHDVVRRVLERIDEMLERNSRLVKRVLEDIRRLLKRVREVVERIKRVRDHMVLHEYVNAAGITKTAKKIIEDVLRASEDTIRRLEEIIRKVEEDSKRIIEEIERAAR

SEQ ID NO: 287 - protein, 183 aa, Artificial Sequence
  Synthetic
KVEKRLTDLLKTVADEVKRVEDELRETVRESKEVVDKSRRDLERTVEESEKTVKDAERRVSEDLVRRIRKVLDENREVNDRVVKEDERILEENERVNRKVVEKIRDILRKIEEVVRRAAEEIRDHMVLHEYVNAAGITLERLKEEADRVRERSKKILTDLKKSSEDVKRESERMLKKLEDEIR

SEQ ID NO: 288 - protein, 174 aa, Artificial Sequence
  Synthetic
SEDETIRRIVRTVHEESRKSTEDVRREVERVLRESEEVVKKVKKKVDDVLKRVEETGISEELEERMRRIIREIREHLKDNLRRVREVIERIERKLEETERRDEKVLREIEKKIRDGDGREEVRDHMVLHEYVNAAGITEIAKEVREIVERSIKNLEEVAEEVERVVRELIEARR

SEQ ID NO: 289 - protein, 178 aa, Artificial Sequence
  Synthetic
DDLERVLKEIKKAADKIREDNKRTADKIRKRVKELDDETRDMLRRIRKLVKEIKERVRGREEARKVIEELKKLVDEVRKRNEKSIEELKKLLKEDRDLMRRVIEELEDLVRRLREEVRDDEARDHMVLHEYVNAAGITRVLKETSDRVRELIDKHRRLSEEVEKDVKRLIDELKKKTD

SEQ ID NO: 290 - protein, 175 aa, Artificial Sequence
  Synthetic
SEKEDLERELEEVRRRVEESLRKNEEDVKRVRDELKKLLDENRKELERIRREVERANVDKRVLDEADRLLKELEDDHKKLEEDAKKALDELREEHKRLEETLRRMLKRIKEVLDRESDKMEERDHMVLHEYVNAAGITRELNKKLEEIVRRLKKVSDELNRRIEEIAERVRRRRK

SEQ ID NO: 291 - protein, 178 aa, Artificial Sequence
  Synthetic
SSIERVEKEVRRLLRESDESLKRVMEEAKELIKSVRESTKRVEEDARDLLRKVVERTGDEREDLRRVLEELRKLIEDNRREDKRSEDELRKLIRDNKEENDRARREAEKLLEDLSRGRSEEERDHMVLHEYVNAAGITEDDKRSLERIERIVRRNNELNKESVDRIRKIIKEMEERAD

SEQ ID NO: 292 - protein, 179 aa, Artificial Sequence
  Synthetic
SSKEVADELRKKAEKVLDELRKIIRELERKNEDSLRRTEEIVRRLEEEAERVLRDLVRTRGEDDRLVREVERLLRELKRRLEELIRRSEELIKRSREEVDRVIRTVEKLLEELDRLLRANKGRDHMVLHEYVNAAGITKDLARKLAKSSDDTVREDEKLVEELRKDVKRIVRKIKKDLE

SEQ ID NO: 293 - protein, 183 aa, Artificial Sequence
  Synthetic
KDAEDLERRVRELVEENNRVSKRLAEEVTRLVKENEDKVRELEKEVRDRAKELLDMKRRGEVREEEVKRVLREIEELLREITEHSKEVLKTIEKLLRDSLEHSRRVLEEIERLLETILRKSKRDHMVLHEYVNAAGITERSLRENEKVADELRKRAEKSLEDVKRVVDELRKIVDDVLKRVED

SEQ ID NO: 294 - protein, 183 aa, Artificial Sequence
  Synthetic
SEIEKLVEDVRKLVEDNLRHSEEVHRRNRRLIEENERKIDELEKRVRKLVEELRELAERGEIREEEARKVLEEIKRLLDEIRRHSEEVLKEIERTLKENLKHSEEVLRRIEERLEDIKRKDKRDHMVLHEYVNAAGITKRSLDESEKLNRESRKRVTRSLEKVDDLVRELEKLARKVLEEVKT

SEQ ID NO: 295 - protein, 174 aa, Artificial Sequence
  Synthetic
SEIEELEKRIDELLKELRDLSRRIAEEVKRLLEELKKLSKDSEDKLRELLERLKRKGVPEEELRRVEEEVERVVRESRKLNKETEDELRRLLEEIKESNDRVEKRARELKKLLRDGKDVEEVRDHMVLHEYVNAAGITKVLKDARDLIKKDKDLNEKLSRELEKLVRELEERAR

SEQ ID NO: 296 - protein, 174 aa, Artificial Sequence
  Synthetic
DELRDVKRELDRLLRENEEIVERIAETVRRLLEELKKLTKELAEELRKLLEELRKRGVPEKELKEVADTLRKLLKDIERSNKEVEDRLRKLLEEIKESTDRLREELEEVEKLLRGGKDVETVRDHMVLHEYVNAAGITRVLEEAKRLAKEDKERIDKIRKEIEELIKRLKDKAT

SEQ ID NO: 297 - protein, 174 aa, Artificial Sequence
  Synthetic
DEEEDLERRIKKLLDENRELLKRIAEELRRLLEELRRLTEESADRLRRLLKELKDRGVPEKDLRDVAEKVKKVLKESEDSNRDVKRKLEKLLRDLERSTERLEREARKVRKLLRDGKDIETLRDHMVLHEYVNAAGITKIEKEIRDLIKEDKERNRELSERLRKLVEELKKKAT

SEQ ID NO: 298 - protein, 177 aa, Artificial Sequence
  Synthetic
DEVEDILRKVEEIVKKSITDARRLLKEAREIVEESIKTAEELLRRNEDIVRKLSEDVKRTTDEEKKKKLEEESRRVLEKTKRDLDRTKDDNRKALEKIRKRVKETEEENREVVDRVRKAGVDRDHMVLHEYVNAAGITVNREVLKRVEEVLEESKRVNEKVEEDVRRVHEEVRKEIK

SEQ ID NO: 299 - protein, 182 aa, Artificial Sequence
  Synthetic
SDADRVAEELKKLVEDSRRENERVIEESKRLVKENEDRNRELIERLKKLVDKLRDILEKEKDKKTLDDIVREILERLKRLLEKVEDENRKSHEENKRLLEDVKRKNKRISDELKRLLEEIERRDHMVLHEYVNAAGITEENKRVMEKTEEVAKKSSEDIKRVADETRRRAEELLKEVDELRK

SEQ ID NO: 300 - protein, 175 aa, Artificial Sequence
  Synthetic
SEMDDVLKKLAETVKRIIERLKKLTDDSRRLVEEVHRRNDKLSKESREAVRKAEERNIDEKDVRKLLEDLKKKSEEVAERNKRILDTLREISKRAEDEVRKVLKELEKTLKELEDRRPDVRERDHMVLHEYVNAAGITKRHKDENDKLLKEIEDSLRRHKEENDRLLEKLKESTR

SEQ ID NO: 301 - protein, 183 aa, Artificial Sequence
  Synthetic
SEVDEVLERIKRLLERLAEHSDKVVRDIEKLLDDNRKENERLLDKLRRELKRLEEMRRRGDLREELLERVVREVEKEIRDIKRKNKRSVETVEKLVRDDRKELKRALEDVERLIRELETRLKRDHMVLHEYVNAAGITEKVIDELLKKTDEVLKRARETIEDLNRKLDKVLKEVRDKLDRLRD

SEQ ID NO: 302 - protein, 179 aa, Artificial Sequence
  Synthetic
KDEETLKRLLEKAKEVVDRLKDENEKVTRDNHESVKKAKDANKRSNEKSERVARDAIRRVREAKEVVDTAEKLLRDNHEHSRDTVKKARELNETSRRHSERIVEKIEEILEEVERTLRENRGRDHMVLHEYVNAAGITEELSRENREAVKRISDEIKRLSDENAKDSERIIKEIDDRVR

SEQ ID NO: 303 - protein, 179 aa, Artificial Sequence
  Synthetic
SDDETVTKLLKEAEKVVRELTKRNKELLRKNHESVREAKKRNEDLSRKLEEVVRRLIEEIREREDVVRELEKLLEDAKRHSERIVREMEDLNRKSKKHSKETVDRLKDLLRKVEETARARKGRDHMVLHEYVNAAGITEELTRRNEKRIEEISDEIRRLSDTNRREIERIREELRRRAK

SEQ ID NO: 304 - protein, 176 aa, Artificial Sequence
  Synthetic
REAEEAKEEVEELNRRNKKELDDARRRVDELDKRNKDRLKESSDRVKRLVEELERVKEEGRSDDRLREKIERMLKTSADELERLKEENKRALRDLAERLRELIERNRRKLEEITRRTVPDKDRDHMVLHEYVNAAGITERVLEELAEKIDRSLKELDDVLRKNETDLKRVIEDLKR

SEQ ID NO: 305 - protein, 182 aa, Artificial Sequence
  Synthetic
SELEKTLEDLKRHSEENKKKLEEDLRDMERNLKENKDRLKKILEEAEKTLKDLERRFREGDIDERELERVRRKMEEIKKRLDENVERNRRKAEDIKRKLDENVKRSEDRVKEIKEDIRRRVRRDHMVLHEYVNAAGITKENREIHERVKKALDDIVKELEELHERLKRRLEEILRRIAETVR

SEQ ID NO: 306 - protein, 179 aa, Artificial Sequence
  Synthetic
RLEDEVRKMEKEVREEVKRLEDESRKVLEESRRNLDKLREESKRVLDTVRERIKDLRRRGLDERVLRELLKRVREVHERNRKLLDEVRRASEKVHEDNRRILEEVRKTVKDVVDKLRRVDAKRDHMVLHEYVNAAGITEREVKKSIEEVKEINRRLNEEVKKTIEEVKEIVKEVTERAK

SEQ ID NO: 307 - protein, 183 aa, Artificial Sequence
  Synthetic
RVDERLDTVLKRVEETVRENKKKNDELLERSKENIDRLKKRLDDLLDKVRREAEKLKREVTKEEVKKIIDEVLKEIEDLLRTVKEELDRALERNREVVEETKRRIDRVLKEIEKLIRDVKRDRDHMVLHEYVNAAGITLKEVNDTSKDAERRLRETNERLNEIVKEVEKRIRELSEEVRKRVK

SEQ ID NO: 308 - protein, 183 aa, Artificial Sequence
  Synthetic
SVDERLDEVLERVKEDMDRNRRKNDESLREDEENVRRNKKETDESVKRVEERVRELKKRVKDERVKEFLDRVLEEIRKSAEEVKTIIDEVHKESEETVRRTKKIIEEVLRRIEELIRRVKKDRDHMVLHEYVNAAGITLKEVNKVSDEAHKRNKELNERVNRVNKEAHKRNEDLLREAERKVR

SEQ ID NO: 309 - protein, 183 aa, Artificial Sequence
  Synthetic
SIEDEIRKLKEDIKRVLDKVRRDNERLKERLDKVLEDIRRSSEDNNRKLEEVLKRIRDKPVDERLVRKVEEAVKRLKEHNEDSTRRVEEVIRRLKEESEESVRKTEKVARDLERELDEVLTRRDHMVLHEYVNAAGITLERLKREDKEVADRAEKLLREAEEHNKRSLDESRRVLEELDEEIR

SEQ ID NO: 310 - protein, 183 aa, Artificial Sequence
  Synthetic
SIREKIRELEERLEEVLRRIEENSERVLREAERVLKEIKDNSKRNNEKLERALEEIRKLPVEDELVRRVKELVERLKRHNKKSSEDVERVVRELKEELKRSSEEVKKAVDRLKEELEKVLRDRDHMVLHEYVNAAGITLRKLEEHNRRVVERLKRLLEELKKHNEDSLRKSEEVLRKLEEDAR

SEQ ID NO: 311 - protein, 182 aa, Artificial Sequence
  Synthetic
SIEDLVRELKKKVDEVAEDLRRKVREALERSRENIDRLKKHSEENLRRSEEVVDKLRKETREEEVKDILRRVLELSKRIVEESKEILDRVLELSKKVVDDIEEIIRRVEETVKEVLTRLSRVRDHMVLHEYVNAAGITREVTKLVEKLIRELEDINRKVNERNRRLAEESRKILDEVEKRVR

SEQ ID NO: 312 - protein, 174 aa, Artificial Sequence
  Synthetic
SESDEVIRDLARLLDELARHVDDSVRRMDEVVKRSTREADELAKRLDELVKEVEKKPGDERVERMVAEIERLVAEVLEELKKKYEKLKREVEENLRRLEETVRDIVEKARKVTEKGVSKEKIRDHMVLHEYVNAAGITKHEDVLRRLEDSLRRVAELLKAALDRLREIVDRLRR

SEQ ID NO: 313 - protein, 178 aa, Artificial Sequence
  Synthetic
DREREVKKRLDEVRERIERLLRRVEEESRRVAEEIRRLIEEVRRRNKKVTEEIRELLKGLKDKEEVRRVLERLRKLNAESDELLERILERLRRLVEATNRLVKAIIEELRRLVEKIVREVPDRDHMVLHEYVNAAGITKVAKEIHDHDKEVTERLEDLLRRITEHARKSDREIEETAR

SEQ ID NO: 314 - protein, 179 aa, Artificial Sequence
  Synthetic
SEVEELIKRLAKVLKELVDKVRKVIEDTKELLERLKRRSEDHIRKLREVLKEAKDQPIDDEELKEILDRLRKTLEELEEELKKALEDDREEAKRLVDDARRVLKELEEEVREIRERRGESEERDHMVLHEYVNAAGITREVIKEWERVHREVEELLKRLIDENRKVLDEIRKLLEEKSK

SEQ ID NO: 315 - protein, 176 aa, Artificial Sequence
  Synthetic
STAETVEKKVEEVIRENEKSMRESEEKVDRSTKRIEDVLRRLEETIRKTSDDIAKGVKGERVKEVLEENRRLLEEAKKLVDEVLETNKKLLEDDKRLNEEVSKTLKKLLEEIKSVDTREDATRDHMVLHEYVNAAGITNEETIRRSEELVRRIERVIEEIIKRSEKLLEDVARESK

SEQ ID NO: 316 - protein, 180 aa, Artificial Sequence
  Synthetic
REVEEMIKELEELLKDLKEKNERASKRNRELVRRLEEENKRVIEELKKLVKELEDLVRSGEDEEVLREVLKRLEEVLERVRALNERVLEAIEKSLEEVKASNEAVKRRLKELLEEAERGVDSRDHMVLHEYVNAAGITIDELDEYTRESIRRAKKEIERLNRETKKVIEEVVKRIEEERK

SEQ ID NO: 317 - protein, 181 aa, Artificial Sequence
  Synthetic
DAVEEAEKLIRKVIADSEKLLRDLADLNAKSIRRSEKLVEDDRRANEDVIRKLEELRRNGGSEEELRALLKEVEDTNRASHETNKRLLDEDRALNKEVHDRNEKLLRDIKRLVEEVAKGIDSRDHMVLHEYVNAAGITAIEDSSREIKRLLEESERVMKRSSEDIKRTLDDTRRVVEEVRR

SEQ ID NO: 318 - protein, 181 aa, Artificial Sequence
  Synthetic
SEIETVRREIEKILDDLRRTVKRIEDEVRKIHEDLRRSLEDSKRNIEEILKDLERAARRDGLDKKVEDDMRKLVEDLKRKHDKLRADNEAVTKELKDRLKKLEDDLARAIEELRRRLDKGLDRDHMVLHEYVNAAGITKIKKDLKELLERYEEIVRRIKELLKDLNREAEEVVRRLKEELR

SEQ ID NO: 319 - protein, 183 aa, Artificial Sequence
  Synthetic
SDVDRVLEEIRKLLEDLKRHSEKVSEENEDLLRANTELNKRVSEDNERLLEELKRLRERGGISEEDLKRALDRVRKTVETVKEENKRSLEDVRRTVETNKRKLERVVEEIKKLIEDAKRRGSRDHMVLHEYVNAAGITKRTIDRLLETSDRSLEKVEADLRRLNEELDRSLERAERTIRELAK

SEQ ID NO: 320 - protein, 177 aa, Artificial Sequence
  Synthetic
SEDEDLDRVAEKLAREHKKSVEEIKRVLKSADEESKKLVRDTERVIEEIKREVEEARRGNIDEELVERLKKKIEDILRTLEERHKKLIKELREILKRLSDESRRLAEETEKVLEDLERKGVDRDHMVLHEYVNAAGITENRKVNEEVEKRLRELEEENKKVIEDLKSTVEELVERLR

SEQ ID NO: 321 - protein, 177 aa, Artificial Sequence; identical to SEQ ID NO: 320
  Synthetic

SEQ ID NO: 322 - protein, 183 aa, Artificial Sequence
  Synthetic
KVEKRLTDLLKTVADEVKRVEDELRETVRESKEVVDKSRRDLERTVEESEKTVKDAERRVSEDLVRRIRKVLDENREVNDRVVKEDERILEENERVNRKVVEKIRDILRKIEEVVRRAAEEIRRDHMVLHEYVNAAGITERLKEEADRVRERSKKILTDLKKSSEDVKRESERMLKKLEDEIR

SEQ ID NO: 323 - protein, 184 aa, Artificial Sequence
  Synthetic
SLEEVIKTVRKLLEEVERRLREVVERAERMLEEVRRRTREVSEEAREMLKDVEKALRDKNVSEEIEEKLRKIKEELERDNEKVNRDNERSVETLRRLLDRVRKEVKDIAKELEERLKEVERKSRDHMVLHEYVNAAGITVKRLRELIEKLREEVEKIVDENRKTVEELRRRNEEIVRRLRREIE

SEQ ID NO: 324 - protein, 184 aa, Artificial Sequence
  Synthetic
KLDEVIEEIRKLLRRMEEELRRSVEEIDKLLREVRELLRESSEKVKELLRRVTEELKKRGVPEEVKERLDRLVETLRRLSEETLKELDKLVREVKELSKESLKRLRELVERLRRELEEIKKRGRDHMVLHEYVNAAGITIRELREIVKRNTEIAREVVERAKRIVEKNEKLLKDVVEEAKKIVK

SEQ ID NO: 325 - protein, 181 aa, Artificial Sequence
  Synthetic
SEVERVLEDLRRLVRDVEEKLRRIIERDRRLVEEVERENRKTIRKIEELLRKVLEELKDISDKKTIERIVREIIKEARDLVRRNHERNREIVDESRRLVEELRRIVEEIIRRLRELLERVKSGRDHMVLHEYVNAAGITLRELLKELEKTSRDLKKRLEELDRELKALVEKVERDLEELRK

SEQ ID NO: 326 - protein, 177 aa, Artificial Sequence
  Synthetic
KEEEDLEREVKRLEDKVREDAKKLEEVVKTVEKLVRDDARRNEEVVKEVADRVRRLTERKLDEETLRKVKEDLKRTLERLKRENEKSLEELRDILRRLKKENDDTLKELRDELKRLTDSGASERDHMVLHEYVNAAGITSREVEKRLRRIIRELERVSKEVLDRLREIIEKLDRDAT

SEQ ID NO: 327 - protein, 177 aa, Artificial Sequence
  Synthetic
ELREDVERVVDEIRRLVEENVRRIDEVAKDIKRLADDNVRRVKELVRKIEEDIRRLKEEGVTEVVDELREEVRKLSEDNRRHSRELIERVKKLLKELEEHSRDLKRRVKELLEDLKRKGVDERRDHMVLHEYVNAAGITRDALRRLEEAIRRVRRESERVNRELDEVIKRVTEELKK

SEQ ID NO: 328 - protein, 181 aa, Artificial Sequence
  Synthetic
DEERKLEKSLKDVEDTHRRLLEKNDEDLKELRKRVEDMLRRLEDALRRILEDIEEKLKRIEDDETLKRLRKRVKELLDEIRRRLERLEREVDKRLEEIKERNDRHHEEAKKELKRIRDKIRRDRDHMVLHEYVNAAGITVAEDLKRSNDEVKELAERLEETIRDLLRRIEEILKEIEERVR

SEQ ID NO: 329 - protein, 181 aa, Artificial Sequence
  Synthetic
DEEETLEDVLRELEERVEKLLRDLTRDLERVEKEHKELLKRNKEAIDEIEKRIEELLKRIEDDEKLRRLKEEVRKLVEESRERNKRHHKEVREVLERIRELLERLEKELRRALEEIRDKIRKDRDHMVLHEYVNAAGITAEEVIRDLERKVRKLERDIRENIKKNHREVREILRKIEEDVR

SEQ ID NO: 330 - protein, 175 aa, Artificial Sequence
  Synthetic
SEEDELRRLLKEVNERVERLLDEIRKELEKIAEELRDLLKKNEDKLREIKRRVEENRVDEEIKKDAERALTELKEEHERLDREAKKDLDRIRKELERLEEEHRRVSERIEEVLDKESDKTEDIRDHMVLHEYVNAAGITEIKKELRDILEKLRRVSEELNKKLDEILKRIEDRTR

SEQ ID NO: 331 - protein, 177 aa, Artificial Sequence
  Synthetic
SAIEKVKEVVERVLETVRDSVRRSHEESKRLIDKVRKRLEEVREEVKELIERVRRKGIPERMVEKLERDLEELLKEIKDTIDRIEEELRTSNRRLKETNDEIAKRLEELLRELSRDRDKDAVERDHMVLHEYVNAAGITNDDNVRRVKEVIDRAEKLVRDLLREIRKLIEKLIRDTE

SEQ ID NO: 332 - protein, 177 aa, Artificial Sequence
  Synthetic
SVLEEVRRRVEELLKTVKESVDRSHERSERLIEEVRESLKEVKRRVKELVERVREKGIPEDRVKRIEDKLREELERLERENRKIEEDLKRSNDELRRENERIAERLEELLRELSRDTNDKVARRDHMVLHEYVNAAGITNKRNLEDVERVIRELNKENERVLREVEKKIEKLIRETE

SEQ ID NO: 333 - protein, 179 aa, Artificial Sequence
  Synthetic
SSKEVADELRKKAEKVLDELRKIIRELERKNEDSLRRTEEIVRRLEEEAERVLRDLVRTRGEDDRLVREVERLLRELKRRLEELIRRSEELIKRSREEVDRVIRTVEKLLEELDRLLRANKGDRDHMVLHEYVNAAGITDLARKLAKSSDDTVREDEKLVEELRKDVKRIVRKIKKDLE

SEQ ID NO: 334 - protein, 183 aa, Artificial Sequence
  Synthetic
KDAEDLERRVRELVEENNRVSKRLAEEVTRLVKENEDKVRELEKEVRDRAKELLDMKRRGEVREEEVKRVLREIEELLREITEHSKEVLKTIEKLLRDSLEHSRRVLEEIERLLETILRKSKDRDHMVLHEYVNAAGITRSLRENEKVADELRKRAEKSLEDVKRVVDELRKIVDDVLKRVED

SEQ ID NO: 335 - protein, 183 aa, Artificial Sequence
  Synthetic
SEIEKLVEDVRKLVEDNLRHSEEVHRRNRRLIEENERKIDELEKRVRKLVEELRELAERGEIREEEARKVLEEIKRLLDEIRRHSEEVLKEIERTLKENLKHSEEVLRRIEERLEDIKRKDKDRDHMVLHEYVNAAGITRSLDESEKLNRESRKRVTRSLEKVDDLVRELEKLARKVLEEVKT

SEQ ID NO: 336 - protein, 181 aa, Artificial Sequence
  Synthetic
EEIERALREMRELSRTHKELVEKILRDIAELAKTHERINEDILRKIKKLIDEIADEIRKEDKKEELKRKIDELRRRAEELLKESKEHLKRLEDTVRELIERLKETLKKVEEDLKRILEKLEKSRDHMVLHEYVNAAGITNRELLKRVEDEVRRLIRKLEELNRRTEEEVKKLIKKLEDDLK

SEQ ID NO: 337 - protein, 174 aa, Artificial Sequence
  Synthetic
DEEEDLERRIKKLLDENRELLKRIAEELRRLLEELRRLTEESADRLRRLLKELKDRGVPEKDLRDVAEKVKKVLKESEDSNRDVKRKLEKLLRDLERSTERLEREARKVRKLLRDGKDIETLLRDHMVLHEYVNAAGITIEKEIRDLIKEDKERNRELSERLRKLVEELKKKAT

SEQ ID NO: 338 - protein, 178 aa, Artificial Sequence
  Synthetic
SSKDEIRRRVEEVVERSDEIVKRSREHVKTVVDELDRVVKELERKVREVVKKLDKIRKDGGSEETLKRVLDELREILKELKEEVKKVKRKLEKVVKENRDTIREVEERNRKILDELRKRGVEERDHMVLHEYVNAAGITLRRVLKESEDIAKEAEDRLKTVLERVERIADEVLKRLTK

SEQ ID NO: 339 - protein, 178 aa, Artificial Sequence
  Synthetic
SKVEKLEEEIARLVERSRRLVEELKKEVTKVKEKVDEIVERSRRHVKKVVEKLRDIKRRGGSEEVLRRVTEELKKVLEDNRRVIEEVLRDLERILEELKRKAEEVTKRNRDDLKRLRDSGVDERDHMVLHEYVNAAGITLRTVLRDVTEDIKRIAEELKKALEDSTEIIRRAEDELRT

SEQ ID NO: 340 - protein, 179 aa, Artificial Sequence
  Synthetic
REDERLEEIARKIKKVVDELVERNKKLTEDNHESVRRAEKRNRELSRELEEVAKRAIERIRSDKKVVDEVKKLLEDAKKHSKEVIDELRRLNEESKRSSEDTIRRMRKLLRELEETVKAKKGDRDHMVLHEYVNAAGITDLSRRNEEKVRRISEEIKKLSKDNERTIKEIIKEIEERVK

SEQ ID NO: 341 - protein, 184 aa, Artificial Sequence
  Synthetic
ELIKKARKDVEEVRERSERLVDELRKRNKKLADESRRLIDKLRKDVEKVLREIEDLLRKRRTKDVLKEIEDLVRELERELRRVVKESSDKVRKLIRENEKVVEESSRLFRDLVEKLRRVVEERRDHMVLHEYVNAAGITEDVNEKSERDVREINKESERVNEETEREVEDAIRKLREVLRRAKK

SEQ ID NO: 342 - protein, 176 aa, Artificial Sequence
  Synthetic
REAEEAKEEVEELNRRNKKELDDARRRVDELDKRNKDRLKESSDRVKRLVEELERVKEEGRSDDRLREKIERMLKTSADELERLKEENKRALRDLAERLRELIERNRRKLEEITRRTVPDKDVRDHMVLHEYVNAAGITRVLEELAEKIDRSLKELDDVLRKNETDLKRVIEDLKR

SEQ ID NO: 343 - protein, 174 aa, Artificial Sequence
  Synthetic
SEEEVLREAAKTVEKLLDEIRRSLEKVSKRVEDSNRELKESLDRVRERVRELLEELRKNNVDRTLLEDVRRKLERIEERNEEMNDRSRRKLEELRERNRKILEDIRRTLEDLKRRQLPKDDVERDHMVLHEYVNAAGITNKRALRENEERVKTLNRENEEMLKRIEEEVRRATK

SEQ ID NO: 344 - protein, 182 aa, Artificial Sequence
  Synthetic
SELEKTLEDLKRHSEENKKKLEEDLRDMERNLKENKDRLKKILEEAEKTLKDLERRFREGDIDERELERVRRKMEEIKKRLDENVERNRRKAEDIKRKLDENVKRSEDRVKEIKEDIRRRVRDRDHMVLHEYVNAAGITENREIHERVKKALDDIVKELEELHERLKRRLEEILRRIAETVR

SEQ ID NO: 345 - protein, 179 aa, Artificial Sequence
  Synthetic
RLEDEVRKMEKEVREEVKRLEDESRKVLEESRRNLDKLREESKRVLDTVRERIKDLRRRGLDERVLRELLKRVREVHERNRKLLDEVRRASEKVHEDNRRILEEVRKTVKDVVDKLRRVDAKVRDHMVLHEYVNAAGITREVKKSIEEVKEINRRLNEEVKKTIEEVKEIVKEVTERAK

SEQ ID NO: 346 - protein, 183 aa, Artificial Sequence
  Synthetic
RVDERLDTVLKRVEETVRENKKKNDELLERSKENIDRLKKRLDDLLDKVRREAEKLKREVTKEEVKKIIDEVLKEIEDLLRTVKEELDRALERNREVVEETKRRIDRVLKEIEKLIRDVKRDRRDHMVLHEYVNAAGITKEVNDTSKDAERRLRETNERLNEIVKEVEKRIRELSEEVRKRVK

SEQ ID NO: 347 - protein, 183 aa, Artificial Sequence
  Synthetic
SVDERLDEVLERVKEDMDRNRRKNDESLREDEENVRRNKKETDESVKRVEERVRELKKRVKDERVKEFLDRVLEEIRKSAEEVKTIIDEVHKESEETVRRTKKIIEEVLRRIEELIRRVKKDRRDHMVLHEYVNAAGITKEVNKVSDEAHKRNKELNERVNRVNKEAHKRNEDLLREAERKVR

SEQ ID NO: 348 - protein, 183 aa, Artificial Sequence
  Synthetic
SIEDEIRKLKEDIKRVLDKVRRDNERLKERLDKVLEDIRRSSEDNNRKLEEVLKRIRDKPVDERLVRKVEEAVKRLKEHNEDSTRRVEEVIRRLKEESEESVRKTEKVARDLERELDEVLTRGRDHMVLHEYVNAAGITERLKREDKEVADRAEKLLREAEEHNKRSLDESRRVLEELDEEIR

SEQ ID NO: 349 - protein, 183 aa, Artificial Sequence
  Synthetic
SIREKIRELEERLEEVLRRIEENSERVLREAERVLKEIKDNSKRNNEKLERALEEIRKLPVEDELVRRVKELVERLKRHNKKSSEDVERVVRELKEELKRSSEEVKKAVDRLKEELEKVLRDGRDHMVLHEYVNAAGITRKLEEHNRRVVERLKRLLEELKKHNEDSLRKSEEVLRKLEEDAR

SEQ ID NO: 350 - protein, 179 aa, Artificial Sequence
  Synthetic
SEVEELIKRLAKVLKELVDKVRKVIEDTKELLERLKRRSEDHIRKLREVLKEAKDQPIDDEELKEILDRLRKTLEELEEELKKALEDDREEAKRLVDDARRVLKELEEEVREIRERRGESEELRDHMVLHEYVNAAGITEVIKEWERVHREVEELLKRLIDENRKVLDEIRKLLEEKSK

SEQ ID NO: 351 - protein, 178 aa, Artificial Sequence
  Synthetic
DEARELVKELEDLIREITKTVRRLLEESEELIKRIDDAVDDLRRADEDLNREIKEEIEKGKSKESLEALIERLKESLERVKRTIEKLIRDLERLNEKLRRDVESLVAELEKILSKIKRGGLDERDHMVLHEYVNAAGITAREILKRSEDETDKLREKAERILEDLERANRRTMDEARR

SEQ ID NO: 352 - protein, 184 aa, Artificial Sequence
  Synthetic
DEIRKVVKEITDLLKASNDKNRKVVEEIRDLLRKSKKLADELVERLRALVEDLRRRIDKSGDKETAEDIVRRIIEELKRILKEIEDLARRINREIERLVEEVERDNRDVNRAIEELLKDIARRRDHMVLHEYVNAAGITSRRNEESMRRVKEDADRVSEANKEVLDRVREEVKRLIEEVRETLR

SEQ ID NO: 353 - protein, 180 aa, Artificial Sequence
  Synthetic
REVEEMIKELEELLKDLKEKNERASKRNRELVRRLEEENKRVIEELKKLVKELEDLVRSGEDEEVLREVLKRLEEVLERVRALNERVLEAIEKSLEEVKASNEAVKRRLKELLEEAERGVDSERDHMVLHEYVNAAGITDELDEYTRESIRRAKKEIERLNRETKKVIEEVVKRIEEERK

SEQ ID NO: 354 - protein, 181 aa, Artificial Sequence
  Synthetic
DAVEEAEKLIRKVIADSEKLLRDLADLNAKSIRRSEKLVEDDRRANEDVIRKLEELRRNGGSEEELRALLKEVEDTNRASHETNKRLLDEDRALNKEVHDRNEKLLRDIKRLVEEVAKGIDSERDHMVLHEYVNAAGITIEDSSREIKRLLEESERVMKRSSEDIKRTLDDTRRVVEEVRR

SEQ ID NO: 355 - protein, 181 aa, Artificial Sequence; identical to SEQ ID NO: 354
  Synthetic

SEQ ID NO: 356 - protein, 175 aa, Artificial Sequence
  Synthetic
SEAEEIRRRLEEISRRSVEHLRKVLEEIKRISERSKRHLDRVLEENARRLEELAELLKRGGDKEELLADLKAVHDESRKVIEKNAEENDRALKAAKEVIDENRERNKRVLDEVRKGGLPEEVLRDHMVLHEYVNAAGITIEEEIKKIIDKSREDIKRVLEEIERLNAKAADDLRK

SEQ ID NO: 357 - protein, 183 aa, Artificial Sequence
  Synthetic
SDVDRVLEEIRKLLEDLKRHSEKVSEENEDLLRANTELNKRVSEDNERLLEELKRLRERGGISEEDLKRALDRVRKTVETVKEENKRSLEDVRRTVETNKRKLERVVEEIKKLIEDAKRRGSGRDHMVLHEYVNAAGITRTIDRLLETSDRSLEKVEADLRRLNEELDRSLERAERTIRELAK

SEQ ID NO: 358 - protein, 177 aa, Artificial Sequence
  Synthetic
SEDEDLDRVAEKLAREHKKSVEEIKRVLKSADEESKKLVRDTERVIEEIKREVEEARRGNIDEELVERLKKKIEDILRTLEERHKKLIKELREILKRLSDESRRLAEETEKVLEDLERKGVDERDHMVLHEYVNAAGITNRKVNEEVEKRLRELEEENKKVIEDLKSTVEELVERLR

SEQ ID NO: 359 - protein, 177 aa, Artificial Sequence
  Synthetic
SKEDRLREELKKLLARLAEEIERLKRALEESNKDLKRTIDASEKHLRDVNEDVKRGGVSEELLRELERSTAENKERAKELLKRHEDLVRKVEKELADLLRRLEEIVARVDEALKRGISEEELDRDHMVLHEYVNAAGITLEELLKRVEKLTEDAKRDLERSNREHKELADRIKETAR

SEQ ID NO: 360 - protein, 177 aa, Artificial Sequence; identical to SEQ ID NO: 359
  Synthetic

SEQ ID NO: 361 - protein, 183 aa, Artificial Sequence
  Synthetic
KVEKRLTDLLKTVADEVKRVEDELRETVRESKEVVDKSRRDLERTVEESEKTVKDAERRVSEDLVRRIRKVLDENREVNDRVVKEDERILEENERVNRKVVEKIRDILRKIEEVVRRAAEEIRDRDHMVLHEYVNAAGITRLKEEADRVRERSKKILTDLKKSSEDVKRESERMLKKLEDEIR

SEQ ID NO: 362 - protein, 184 aa, Artificial Sequence
  Synthetic
KLDEVIEEIRKLLRRMEEELRRSVEEIDKLLREVRELLRESSEKVKELLRRVTEELKKRGVPEEVKERLDRLVETLRRLSEETLKELDKLVREVKELSKESLKRLRELVERLRRELEEIKKRGERDHMVLHEYVNAAGITRELREIVKRNTEIAREVVERAKRIVEKNEKLLKDVVEEAKKIVK

SEQ ID NO: 363 - protein, 181 aa, Artificial Sequence
  Synthetic
SEVERVLEDLRRLVRDVEEKLRRIIERDRRLVEEVERENRKTIRKIEELLRKVLEELKDISDKKTIERIVREIIKEARDLVRRNHERNREIVDESRRLVEELRRIVEEIIRRLRELLERVKSGERDHMVLHEYVNAAGITRELLKELEKTSRDLKKRLEELDRELKALVEKVERDLEELRK

SEQ ID NO: 364 - protein, 178 aa, Artificial Sequence
  Synthetic
DDLERVLKEIKKAADKIREDNKRTADKIRKRVKELDDETRDMLRRIRKLVKEIKERVRGREEARKVIEELKKLVDEVRKRNEKSIEELKKLLKEDRDLMRRVIEELEDLVRRLREEVRDDEALRRDHMVLHEYVNAAGITLKETSDRVRELIDKHRRLSEEVEKDVKRLIDELKKKTD

SEQ ID NO: 365 - protein, 181 aa, Artificial Sequence
  Synthetic
DEERKLEKSLKDVEDTHRRLLEKNDEDLKELRKRVEDMLRRLEDALRRILEDIEEKLKRIEDDETLKRLRKRVKELLDEIRRRLERLEREVDKRLEEIKERNDRHHEEAKKELKRIRDKIRRDGRDHMVLHEYVNAAGITAEDLKRSNDEVKELAERLEETIRDLLRRIEEILKEIEERVR

SEQ ID NO: 366 - protein, 175 aa, Artificial Sequence
  Synthetic
SEKEDLERELEEVRRRVEESLRKNEEDVKRVRDELKKLLDENRKELERIRREVERANVDKRVLDEADRLLKELEDDHKKLEEDAKKALDELREEHKRLEETLRRMLKRIKEVLDRESDKMEEIKRDHMVLHEYVNAAGITLNKKLEEIVRRLKKVSDELNRRIEEIAERVRRRRK

SEQ ID NO: 367 - protein, 177 aa, Artificial Sequence
  Synthetic
SAIEKVKEVVERVLETVRDSVRRSHEESKRLIDKVRKRLEEVREEVKELIERVRRKGIPERMVEKLERDLEELLKEIKDTIDRIEEELRTSNRRLKETNDEIAKRLEELLRELSRDRDKDAVEDRDHMVLHEYVNAAGITDDNVRRVKEVIDRAEKLVRDLLREIRKLIEKLIRDTE

SEQ ID NO: 368 - protein, 177 aa, Artificial Sequence
  Synthetic
SVLEEVRRRVEELLKTVKESVDRSHERSERLIEEVRESLKEVKRRVKELVERVREKGIPEDRVKRIEDKLREELERLERENRKIEEDLKRSNDELRRENERIAERLEELLRELSRDTNDKVARDRDHMVLHEYVNAAGITKRNLEDVERVIRELNKENERVLREVEKKIEKLIRETE

SEQ ID NO: 369 - protein, 177 aa, Artificial Sequence
  Synthetic
SVIERVEEEMEKVIRDSERVTKEVEDRAREVHERSEKRIREVEETSRRVLEELRRAGVDKRILDELRKRIKDSREDLERINEELRRALRKLLEDSKRINEELRKTLEELRKRLERVDDEEEVKKRDHMVLHEYVNAAGITEELARRVDELVRESIERVDRNVEENKRLVREAIERRR

SEQ ID NO: 370 - protein, 183 aa, Artificial Sequence
  Synthetic
SEIEKLVEDVRKLVEDNLRHSEEVHRRNRRLIEENERKIDELEKRVRKLVEELRELAERGEIREEEARKVLEEIKRLLDEIRRHSEEVLKEIERTLKENLKHSEEVLRRIEERLEDIKRKDKDSRDHMVLHEYVNAAGITSLDESEKLNRESRKRVTRSLEKVDDLVRELEKLARKVLEEVKT

SEQ ID NO: 371 - protein, 181 aa, Artificial Sequence
  Synthetic
EEIERALREMRELSRTHKELVEKILRDIAELAKTHERINEDILRKIKKLIDEIADEIRKEDKKEELKRKIDELRRRAEELLKESKEHLKRLEDTVRELIERLKETLKKVEEDLKRILEKLEKSRRDHMVLHEYVNAAGITRELLKRVEDEVRRLIRKLEELNRRTEEEVKKLIKKLEDDLK

SEQ ID NO: 372 - protein, 182 aa, Artificial Sequence
  Synthetic
DEIETVLDEVRRLHEDAKRRLEEMIDEVRKLNEESVRELARVVEEVERLLRTVKEEVERAGLDKGKLEELEERLERVREDVERILREIKRRNEKTLEDSERILEENKERNRTVLKKLKELRDRGRDHMVLHEYVNAAGITSRESVRRVLEKNRRVVEESKRLAEELLRRVKKVVDEIRKRVE

SEQ ID NO: 373 - protein, 182 aa, Artificial Sequence
  Synthetic
DELEEVVRRVRELSRTVKEELREVIERVRELSERVKKKLRKVLREVAELHREVMKRVRDSGLDKSKLEKLEDESRRVLDKSREILRKNEEDNRRLNKELEEILKKNEDDNEDVRRKVDEVTRKGRDHMVLHEYVNAAGITSRRSAKDALKRVEDRVRESDKSVRELLEENRKVVEDIKRRVD

SEQ ID NO: 374 - protein, 178 aa, Artificial Sequence
  Synthetic
SSKDEIRRRVEEVVERSDEIVKRSREHVKTVVDELDRVVKELERKVREVVKKLDKIRKDGGSEETLKRVLDELREILKELKEEVKKVKRKLEKVVKENRDTIREVEERNRKILDELRKRGVEERRDHMVLHEYVNAAGITRRVLKESEDIAKEAEDRLKTVLERVERIADEVLKRLTK

SEQ ID NO: 375 - protein, 182 aa, Artificial Sequence
  Synthetic
SDADRVAEELKKLVEDSRRENERVIEESKRLVKENEDRNRELIERLKKLVDKLRDILEKEKDKKTLDDIVREILERLKRLLEKVEDENRKSHEENKRLLEDVKRKNKRISDELKRLLEEIERRNRDHMVLHEYVNAAGITNKRVMEKTEEVAKKSSEDIKRVADETRRRAEELLKEVDELRK

SEQ ID NO: 376 - protein, 182 aa, Artificial Sequence
  Synthetic
DEVREVAERLRRLVDESRKRNEEVIKESEALVDRVRKTNEEVMKRLRELIDKLEKDIRRLKDKKTVEKIIREVLKKIDELLKRVERTNREISKENKRLLDEVRKTNEEISRRLKKLLEDIRRRNRDHMVLHEYVNAAGITNKEVLRKTEEMVKRSTETNKRLLERSKEVADRLRERIKEAAK

SEQ ID NO: 377 - protein, 175 aa, Artificial Sequence
  Synthetic
SEVDEVLREAKRIVDEVHKDNERATEESRRLVKKVHEENEEMVKDIERIVKEVKDANIDEKLVTEILKEIEEALKEAARRNKEVKDRLRELSRRVSERNREILEELKERLDRVRERRKDVKELERDHMVLHEYVNAAGITHRKENKRLLEELDRSLRELAKIVKEVLDEIRERTR

SEQ ID NO: 378 - protein, 185 aa, Artificial Sequence
  Synthetic
DDIERLKREIERLLKEAEKISRDNEERSKELLDRLRKLSEDNKRKIDKLVEELKRLADKIKDKEELTRRLKEVVDRVEKSVRDSERMLREVVREDEESVRRSKTKLEDLLRKVEELVRRLEKKVRDHMVLHEYVNAAGITKKKVDELKRKNDEVHRRSREEVKRLLEENRKLLEDLRRMVREITQ

SEQ ID NO: 379 - protein, 185 aa, Artificial Sequence
  Synthetic
SAEELLRTIEKRIEDNHRRLEEILEEIARLIEDMLRTDERIVREIKELLKEVLDRVRRAGVPEEVLERVRRELERLKKELEELRRRSEEKVKELKRRLEEIRRKLEEEHRDLRRKLEELRRDLGRDHMVLHEYVNAAGITLERSLREAEDLLRRVEEVIRTSKKESKDVLEKIERLLRDLERRTR

SEQ ID NO: 380 - protein, 182 aa, Artificial Sequence
  Synthetic
SELEKTLEDLKRHSEENKKKLEEDLRDMERNLKENKDRLKKILEEAEKTLKDLERRFREGDIDERELERVRRKMEEIKKRLDENVERNRRKAEDIKRKLDENVKRSEDRVKEIKEDIRRRVRDKRDHMVLHEYVNAAGITNREIHERVKKALDDIVKELEELHERLKRRLEEILRRIAETVR

SEQ ID NO: 381 - protein, 179 aa, Artificial Sequence
  Synthetic
RLEDEVRKMEKEVREEVKRLEDESRKVLEESRRNLDKLREESKRVLDTVRERIKDLRRRGLDERVLRELLKRVREVHERNRKLLDEVRRASEKVHEDNRRILEEVRKTVKDVVDKLRRVDAKVVRDHMVLHEYVNAAGITEVKKSIEEVKEINRRLNEEVKKTIEEVKEIVKEVTERAK

SEQ ID NO: 382 - protein, 183 aa, Artificial Sequence
  Synthetic
SIEDEIRKLKEDIKRVLDKVRRDNERLKERLDKVLEDIRRSSEDNNRKLEEVLKRIRDKPVDERLVRKVEEAVKRLKEHNEDSTRRVEEVIRRLKEESEESVRKTEKVARDLERELDEVLTRGGRDHMVLHEYVNAAGITRLKREDKEVADRAEKLLREAEEHNKRSLDESRRVLEELDEEIR

SEQ ID NO: 383 - protein, 183 aa, Artificial Sequence
  Synthetic
SIEERVRELMRDLERVLKEIREHSKRVIEEAKRVLEEIERNSERNNKELEEVLDEIRKRPVDETLVREVEEAVKKLKEHNKRSSDTVRDAVRKLVERLKESSDRATELVKDLKRKLEEVLRRGGRDHMVLHEYVNAAGITDLRRNNKEVVDRLKEVLERLKEHNRRSLDESRKVLRELKERIR

SEQ ID NO: 384 - protein, 180 aa, Artificial Sequence
  Synthetic
SVEELLRKLEEVLRKIREENERSLKELRDRAREIVKRNRETNRELEEVIKELEKRLSGADKEKVEELVRRIRRIVERVVEEDRRTVEEIEKIAREVVKRDRDSADRVRRTVEDVLRKATGSEDIRDHMVLHEYVNAAGITESVKKVEEIARDIRRKVDESVKNVEKLLRDVDKKARDRKK

SEQ ID NO: 385 - protein, 185 aa, Artificial Sequence
  Synthetic
SEAEELLKRLEDRAEEILRRLEEILRTSRKLAEDVLRELEKLLRESERRIREVLEELRGIKDKKELEDVIREVEKELDESLERSRELLKDVLKKLDDNLKESERLVEDIDRELAKILEDLKKAGRDHMVLHEYVNAAGITRERLKRIVDENAKIVEDARRALEKIVKENEEILRRLKKELRELRK

SEQ ID NO: 386 - protein, 179 aa, Artificial Sequence
  Synthetic
SEVEELIKRLAKVLKELVDKVRKVIEDTKELLERLKRRSEDHIRKLREVLKEAKDQPIDDEELKEILDRLRKTLEELEEELKKALEDDREEAKRLVDDARRVLKELEEEVREIRERRGESEELDRDHMVLHEYVNAAGITVIKEWERVHREVEELLKRLIDENRKVLDEIRKLLEEKSK

SEQ ID NO: 387 - protein, 184 aa, Artificial Sequence
  Synthetic
DEIRKVVKEITDLLKASNDKNRKVVEEIRDLLRKSKKLADELVERLRALVEDLRRRIDKSGDKETAEDIVRRIIEELKRILKEIEDLARRINREIERLVEEVERDNRDVNRAIEELLKDIARRGRDHMVLHEYVNAAGITRRNEESMRRVKEDADRVSEANKEVLDRVREEVKRLIEEVRETLR

SEQ ID NO: 388 - protein, 176 aa, Artificial Sequence
  Synthetic
STAETVEKKVEEVIRENEKSMRESEEKVDRSTKRIEDVLRRLEETIRKTSDDIAKGVKGERVKEVLEENRRLLEEAKKLVDEVLETNKKLLEDDKRLNEEVSKTLKKLLEEIKSVDTREDATRVRDHMVLHEYVNAAGITETIRRSEELVRRIERVIEEIIKRSEKLLEDVARESK

SEQ ID NO: 389 - protein, 182 aa, Artificial Sequence
  Synthetic
DEVREVAERLRRLVDESRKRNEEVIKESEALVDRVRKTNEEVMKRLRELIDKLEKDIRRSGDKETVEKIIREVLSAIDELLKRVERTNAEISKENARLLDEVRKTNEEISRRLAKLLEDIRRGSRDHMVLHEYVNAAGITNKEVLRKTEEAVKRSTETNKRLLEASKEVADRLRERIKEAAK

SEQ ID NO: 390 - protein, 180 aa, Artificial Sequence
  Synthetic
REVEEMIKELEELLKDLKEKNERASKRNRELVRRLEEENKRVIEELKKLVKELEDLVRSGEDEEVLREVLKRLEEVLERVRALNERVLEAIEKSLEEVKASNEAVKRRLKELLEEAERGVDSEKRDHMVLHEYVNAAGITELDEYTRESIRRAKKEIERLNRETKKVIEEVVKRIEEERK

SEQ ID NO: 391 - protein, 181 aa, Artificial Sequence
  Synthetic
DAVEEAEKLIRKVIADSEKLLRDLADLNAKSIRRSEKLVEDDRRANEDVIRKLEELRRNGGSEEELRALLKEVEDTNRASHETNKRLLDEDRALNKEVHDRNEKLLRDIKRLVEEVAKGIDSEERDHMVLHEYVNAAGITEDSSREIKRLLEESERVMKRSSEDIKRTLDDTRRVVEEVRR

SEQ ID NO: 392 - protein, 183 aa, Artificial Sequence
  Synthetic
SKLEEVEKAVRKVIEDSRRVNEEVNRRSEEVVRELEKVHREVNDASRRVVEKARRVLKGSGDERLAAEVERIIEEIRELNERDRKRVEEIRKEIEDLNRDLNRRSKESEDRLRKLLEDATRGGVRDHMVLHEYVNAAGITENKRRVEDVARKSKELVEDVRRHSEEVVRRVEELVKEVEERVR

SEQ ID NO: 393 - protein, 183 aa, Artificial Sequence
  Synthetic
SDVDRVLEEIRKLLEDLKRHSEKVSEENEDLLRANTELNKRVSEDNERLLEELKRLRERGGISEEDLKRALDRVRKTVETVKEENKRSLEDVRRTVETNKRKLERVVEEIKKLIEDAKRRGSGDRDHMVLHEYVNAAGITTIDRLLETSDRSLEKVEADLRRLNEELDRSLERAERTIRELAK

SEQ ID NO: 394 - protein, 185 aa, Artificial Sequence
  Synthetic
SSVEELLERLRRISEENKRRIEKLLREVEKVLRELKDRHRKLLKRVEEIIRKVKEEIKSGLPEEAVKRVLERVRERVKEVLEEADRLNDEMRRIVTEVEKELDKSDKEVEDAVRDILKKIEEGVRDHMVLHEYVNAAGITLDENRDRSKKVKEEIRRILEDLTRTTERVKREIAKLLKELEDTAR

SEQ ID NO: 395 - protein, 180 aa, Artificial Sequence
  Synthetic
SELEEVLRRIEALVRKAHKENEDVLREIERLVRTAHRLNKKVDDDSAKIAEDLKRGGREDKDKVEEALRRLRELYRRLEEENRRILREIEELVKELEKRNREILKELEDLVADAERKGSDGSEARDHMVLHEYVNAAGITRSLEELRKEVERLKKEVEDSLRELKKSLEEWVKSLEEATR

SEQ ID NO: 396 - protein, 186 aa, Artificial Sequence
  Synthetic
SAEDSIRELLERDERLLEEARKEAKRLNEENERLLERIEETVRRLLEEIKRLLDDIRKKIKGEKLREIEELVRRVKRTIEKLLEEVKKSVEDSSKRIEELLEAVERSVERTKEEIRRLLDEVRKDRDHMVLHEYVNAAGITHDENRRLVKEVIEEVEKLIRDNEKLAEDIEREIRRLLKELDEAAK

SEQ ID NO: 397 - protein, 182 aa, Artificial Sequence
  Synthetic
DEAEKLLKELRDLLEESRKDLERLLKELEDLLEESKRDLERLLEEITELLKRIKETVERRNEREKLEKLLRELKKVVERLKDNLKDNERRNKEAIERVRKKLKDNERENKKVIEDLRAKLKDLEERDHMVLHEYVNAAGITEEARKRLEEVEEKSKKIIDDARRALDRIDKELRRVVEETRK

SEQ ID NO: 398 - protein, 183 aa, Artificial Sequence
  Synthetic
KVEKRLTDLLKTVADEVKRVEDELRETVRESKEVVDKSRRDLERTVEESEKTVKDAERRVSEDLVRRIRKVLDENREVNDRVVKEDERILEENERVNRKVVEKIRDILRKIEEVVRRAAEEIRDERDHMVLHEYVNAAGITLKEEADRVRERSKKILTDLKKSSEDVKRESERMLKKLEDEIR

SEQ ID NO: 399 - protein, 181 aa, Artificial Sequence
  Synthetic
SEVERVLEDLRRLVRDVEEKLRRIIERDRRLVEEVERENRKTIRKIEELLRKVLEELKDISDKKTIERIVREIIKEARDLVRRNHERNREIVDESRRLVEELRRIVEEIIRRLRELLERVKSGELRDHMVLHEYVNAAGITELLKELEKTSRDLKKRLEELDRELKALVEKVERDLEELRK

SEQ ID NO: 400 - protein, 177 aa, Artificial Sequence
  Synthetic
KEEEDLEREVKRLEDKVREDAKKLEEVVKTVEKLVRDDARRNEEVVKEVADRVRRLTERKLDEETLRKVKEDLKRTLERLKRENEKSLEELRDILRRLKKENDDTLKELRDELKRLTDSGASEDVRDHMVLHEYVNAAGITEVEKRLRRIIRELERVSKEVLDRLREIIEKLDRDAT

SEQ ID NO: 401 - protein, 181 aa, Artificial Sequence
  Synthetic
DEERKLEKSLKDVEDTHRRLLEKNDEDLKELRKRVEDMLRRLEDALRRILEDIEEKLKRIEDDETLKRLRKRVKELLDEIRRRLERLEREVDKRLEEIKERNDRHHEEAKKELKRIRDKIRRDGARDHMVLHEYVNAAGITEDLKRSNDEVKELAERLEETIRDLLRRIEEILKEIEERVR

SEQ ID NO: 402 - protein, 177 aa, Artificial Sequence
  Synthetic
SVLEEVRRRVEELLKTVKESVDRSHERSERLIEEVRESLKEVKRRVKELVERVREKGIPEDRVKRIEDKLREELERLERENRKIEEDLKRSNDELRRENERIAERLEELLRELSRDTNDKVARDVRDHMVLHEYVNAAGITRNLEDVERVIRELNKENERVLREVEKKIEKLIRETE

SEQ ID NO: 403 - protein, 183 aa, Artificial Sequence
  Synthetic
KDAEDLERRVRELVEENNRVSKRLAEEVTRLVKENEDKVRELEKEVRDRAKELLDMKRRGEVREEEVKRVLREIEELLREITEHSKEVLKTIEKLLRDSLEHSRRVLEEIERLLETILRKSKDSERDHMVLHEYVNAAGITLRENEKVADELRKRAEKSLEDVKRVVDELRKIVDDVLKRVED

SEQ ID NO: 404 - protein, 183 aa, Artificial Sequence
  Synthetic
SEIEKLVEDVRKLVEDNLRHSEEVHRRNRRLIEENERKIDELEKRVRKLVEELRELAERGEIREEEARKVLEEIKRLLDEIRRHSEEVLKEIERTLKENLKHSEEVLRRIEERLEDIKRKDKDSERDHMVLHEYVNAAGITLDESEKLNRESRKRVTRSLEKVDDLVRELEKLARKVLEEVKT

SEQ ID NO: 405 - protein, 177 aa, Artificial Sequence
  Synthetic
REIEELRKEIETLIRENEELNRRSKETSEELIRRLKKLNRDVEEEVRRLVKDLRDRGAPEEDVRRAEERVKKLIEDNKRHSDEVAKTDKKLNEDSERHTRRVEERLRELLDRLSRSDKDEVVRRVRDHMVLHEYVNAAGITEVNETSRRLATRDAKHTRDVLREIKRLADEIRERTR

SEQ ID NO: 406 - protein, 181 aa, Artificial Sequence
  Synthetic
EEIERALREMRELSRTHKELVEKILRDIAELAKTHERINEDILRKIKKLIDEIADEIRKEDKKEELKRKIDELRRRAEELLKESKEHLKRLEDTVRELIERLKETLKKVEEDLKRILEKLEKSRERDHMVLHEYVNAAGITELLKRVEDEVRRLIRKLEELNRRTEEEVKKLIKKLEDDLK

SEQ ID NO: 407 - protein, 178 aa, Artificial Sequence
  Synthetic
SEIERIERENDRLNEENKKITEDIERELKRLLEENRELSRTIEEELERLLRELRKRNGGREEVLKEVEDRLRRIVEEIRRSDKRLEDIAREVKKRIRESDEELRRVSEEITRRLRKVRDEKTLRERDHMVLHEYVNAAGITKKLLDDLREVSKKNKEDLKRLLREVREVARKVKERAN

SEQ ID NO: 408 - protein, 182 aa, Artificial Sequence
  Synthetic
DEIETVLDEVRRLHEDAKRRLEEMIDEVRKLNEESVRELARVVEEVERLLRTVKEEVERAGLDKGKLEELEERLERVREDVERILREIKRRNEKTLEDSERILEENKERNRTVLKKLKELRDRGSRDHMVLHEYVNAAGITRESVRRVLEKNRRVVEESKRLAEELLRRVKKVVDEIRKRVE

SEQ ID NO: 409 - protein, 178 aa, Artificial Sequence
  Synthetic
SSKDEIRRRVEEVVERSDEIVKRSREHVKTVVDELDRVVKELERKVREVVKKLDKIRKDGGSEETLKRVLDELREILKELKEEVKKVKRKLEKVVKENRDTIREVEERNRKILDELRKRGVEERARDHMVLHEYVNAAGITRVLKESEDIAKEAEDRLKTVLERVERIADEVLKRLTK

SEQ ID NO: 410 - protein, 178 aa, Artificial Sequence
  Synthetic
SKVEKLEEEIARLVERSRRLVEELKKEVTKVKEKVDEIVERSRRHVKKVVEKLRDIKRRGGSEEVLRRVTEELKKVLEDNRRVIEEVLRDLERILEELKRKAEEVTKRNRDDLKRLRDSGVDEEVRDHMVLHEYVNAAGITTVLRDVTEDIKRIAEELKKALEDSTEIIRRAEDELRT

SEQ ID NO: 411 - protein, 177 aa, Artificial Sequence
  Synthetic
DEVEDILRKVEEIVKKSITDARRLLKEAREIVEESIKTAEELLRRNEDIVRKLSEDVKRTTDEEKKKKLEEESRRVLEKTKRDLDRTKDDNRKALEKIRKRVKETEEENREVVDRVRKAGVDKRVRDHMVLHEYVNAAGITEVLKRVEEVLEESKRVNEKVEEDVRRVHEEVRKEIK

SEQ ID NO: 412 - protein, 182 aa, Artificial Sequence
  Synthetic
SDADRVAEELKKLVEDSRRENERVIEESKRLVKENEDRNRELIERLKKLVDKLRDILEKEKDKKTLDDIVREILERLKRLLEKVEDENRKSHEENKRLLEDVKRKNKRISDELKRLLEEIERRNVRDHMVLHEYVNAAGITKRVMEKTEEVAKKSSEDIKRVADETRRRAEELLKEVDELRK

SEQ ID NO: 413 - protein, 186 aa, Artificial Sequence
  Synthetic
SEVDEVRKTLEDLLRRLDEENKDIIRRNKELLDDLDRKVREAIERLKRLLDELRKILEKLKDRETLTRIIEEIEKRARELIKRLRDEIRKIEEESKKSIEDSRKRNDEIRKRLEELIKDLRDKIKRDHMVLHEYVNAAGITREVIERLKEKNKRLEDDSRRVITELRKKLKDLEDRVREEIEELRK

SEQ ID NO: 414 - protein, 183 aa, Artificial Sequence
  Synthetic
SEVDEVLERIKRLLERLAEHSDKVVRDIEKLLDDNRKENERLLDKLRRELKRLEEMRRRGDLREELLERVVREVEKEIRDIKRKNKRSVETVEKLVRDDRKELKRALEDVERLIRELETRLKDKERDHMVLHEYVNAAGITIDELLKKTDEVLKRARETIEDLNRKLDKVLKEVRDKLDRLRD

SEQ ID NO: 415 - protein, 186 aa, Artificial Sequence
  Synthetic
KEVEDLERRVKEILDRMKRLIDENRKKIEKSIRELERLIDENRKEVERVKKELKDLKREGGDDARTLRERVRKIIEDVEEHSRRSTEEVRRIHKENKEHSERSSDEIRELLRRVEELIEEVKRRLRDHMVLHEYVNAAGITREVVRRAHETNERLVDRSRKAVEKAERTNRRLVEEIRKVAEEVRK

SEQ ID NO: 416 - protein, 178 aa, Artificial Sequence
  Synthetic
KAAEEIRKKVEDYKRESEKILEEVEDHSRRSKETLKRLLDDLRRAVEELKRRLEELKRRPRTEEIAKRAEEAVRRAAERIKKVIDDVERHIRENAKELKRLLEEDREASRRLEDEIDKEVKAREVRDHMVLHEYVNAAGITRVLRELAERNKTALEEAERVLRRLKEEIEKVLRKLKK

SEQ ID NO: 417 - protein, 185 aa, Artificial Sequence
  Synthetic
SAEELLRTIEKRIEDNHRRLEEILEEIARLIEDMLRTDERIVREIKELLKEVLDRVRRAGVPEEVLERVRRELERLKKELEELRRRSEEKVKELKRRLEEIRRKLEEEHRDLRRKLEELRRDLGDRDHMVLHEYVNAAGITERSLREAEDLLRRVEEVIRTSKKESKDVLEKIERLLRDLERRTR

SEQ ID NO: 418 - protein, 182 aa, Artificial Sequence
  Synthetic
SELEKTLEDLKRHSEENKKKLEEDLRDMERNLKENKDRLKKILEEAEKTLKDLERRFREGDIDERELERVRRKMEEIKKRLDENVERNRRKAEDIKRKLDENVKRSEDRVKEIKEDIRRRVRDKDRDHMVLHEYVNAAGITREIHERVKKALDDIVKELEELHERLKRRLEEILRRIAETVR

SEQ ID NO: 419 - protein, 186 aa, Artificial Sequence
  Synthetic
SEIEKLIEELRRELEKVKDELERSIEEMDRELDDVRRDSKRLVDEIKRELREVTERTKRGDRPEEVLRKELEDIKRKLRRILEEHHEKIRRIKEKLRRENKRVRDELKRIKDEIDEKVKDVRRKGRDHMVLHEYVNAAGITKRALEELLKKHTRVVERVEKALDELDKELERIVREAEKELDRREK

SEQ ID NO: 420 - protein, 179 aa, Artificial Sequence
  Synthetic
RLEDEVRKMEKEVREEVKRLEDESRKVLEESRRNLDKLREESKRVLDTVRERIKDLRRRGLDERVLRELLKRVREVHERNRKLLDEVRRASEKVHEDNRRILEEVRKTVKDVVDKLRRVDAKVVKRDHMVLHEYVNAAGITVKKSIEEVKEINRRLNEEVKKTIEEVKEIVKEVTERAK

SEQ ID NO: 421 - protein, 183 aa, Artificial Sequence
  Synthetic
SIEDEIRKLKEDIKRVLDKVRRDNERLKERLDKVLEDIRRSSEDNNRKLEEVLKRIRDKPVDERLVRKVEEAVKRLKEHNEDSTRRVEEVIRRLKEESEESVRKTEKVARDLERELDEVLTRGGERDHMVLHEYVNAAGITLKREDKEVADRAEKLLREAEEHNKRSLDESRRVLEELDEEIR

SEQ ID NO: 422 - protein, 183 aa, Artificial Sequence
  Synthetic
SIREKIRELEERLEEVLRRIEENSERVLREAERVLKEIKDNSKRNNEKLERALEEIRKLPVEDELVRRVKELVERLKRHNKKSSEDVERVVRELKEELKRSSEEVKKAVDRLKEELEKVLRDGGERDHMVLHEYVNAAGITLEEHNRRVVERLKRLLEELKKHNEDSLRKSEEVLRKLEEDAR

SEQ ID NO: 423 - protein, 183 aa, Artificial Sequence
  Synthetic
SIEDRIRELEKRLEKVLREIEEHSKKVVREAEKVLREIEENSRRNNKRLEEVLDEIRKRPVDETLVREVEEAVRRLKKHNKDSSDTARKLVEELKKELKESSDRVRKVVEELKDRLRKVLEKGGERDHMVLHEYVNAAGITLKEDNEDVVRRLKEVLKELRKHNKRSLDESEKVLRELRERIR

SEQ ID NO: 424 - protein, 178 aa, Artificial Sequence
  Synthetic
DEARELVKELEDLIREITKTVRRLLEESEELIKRIDDAVDDLRRADEDLNREIKEEIEKGKSKESLEALIERLKESLERVKRTIEKLIRDLERLNEKLRRDVESLVAELEKILSKIKRGGLDERIRDHMVLHEYVNAAGITEILKRSEDETDKLREKAERILEDLERANRRTMDEARR

SEQ ID NO: 425 - protein, 176 aa, Artificial Sequence
  Synthetic
STAETVEKKVEEVIRENEKSMRESEEKVDRSTKRIEDVLRRLEETIRKTSDDIAKGVKGERVKEVLEENRRLLEEAKKLVDEVLETNKKLLEDDKRLNEEVSKTLKKLLEEIKSVDTREDATRVIRDHMVLHEYVNAAGITTIRRSEELVRRIERVIEEIIKRSEKLLEDVARESK

SEQ ID NO: 426 - protein, 186 aa, Artificial Sequence
  Synthetic
SRVEEIIEDLRRLLEEIRKENEDSIRRSKELLDRVKEINDTIIAELERLLKDIEKEVREKGSESEEVKKALRAVLEELEKLLRRVAEINEEVLRRNSKLVEEDERRNREVLKELARLVEELIREIRDHMVLHEYVNAAGITLRDIDKLDRESKEAFRATNEEIAKLDEDTARVAERVKKAIEDLAK

SEQ ID NO: 427 - protein, 180 aa, Artificial Sequence
  Synthetic
REVEEMIKELEELLKDLKEKNERASKRNRELVRRLEEENKRVIEELKKLVKELEDLVRSGEDEEVLREVLKRLEEVLERVRALNERVLEAIEKSLEEVKASNEAVKRRLKELLEEAERGVDSEKLRDHMVLHEYVNAAGITLDEYTRESIRRAKKEIERLNRETKKVIEEVVKRIEEERK

SEQ ID NO: 428 - protein, 181 aa, Artificial Sequence
  Synthetic
DAVEEAEKLIRKVIADSEKLLRDLADLNAKSIRRSEKLVEDDRRANEDVIRKLEELRRNGGSEEELRALLKEVEDTNRASHETNKRLLDEDRALNKEVHDRNEKLLRDIKRLVEEVAKGIDSEELRDHMVLHEYVNAAGITDSSREIKRLLEESERVMKRSSEDIKRTLDDTRRVVEEVRR

SEQ ID NO: 429 - protein, 185 aa, Artificial Sequence
  Synthetic
SEIDEVLTRLRKISKDLNETSDRVNERARKIIDDIKKESKRVNDEAREIVERLKREIDKTRDRDVLRRILKEIEDVARRVKEINEELLARVEKVVREVEEINRELVKRSREAVEAVKRLLDRGVSRDHMVLHEYVNAAGITEEDRKRLEESTRSVRKLLEELKRELEKSTRSVKALVDELRERVR

SEQ ID NO: 430 - protein, 183 aa, Artificial Sequence
  Synthetic
SKLEEVEKAVRKVIEDSRRVNEEVNRRSEEVVRELEKVHREVNDASRRVVEKARRVLKGSGDERLAAEVERIIEEIRELNERDRKRVEEIRKEIEDLNRDLNRRSKESEDRLRKLLEDATRGGVTRDHMVLHEYVNAAGITNKRRVEDVARKSKELVEDVRRHSEEVVRRVEELVKEVEERVR

SEQ ID NO: 431 - protein, 183 aa, Artificial Sequence
  Synthetic
SDVDRVLEEIRKLLEDLKRHSEKVSEENEDLLRANTELNKRVSEDNERLLEELKRLRERGGISEEDLKRALDRVRKTVETVKEENKRSLEDVRRTVETNKRKLERVVEEIKKLIEDAKRRGSGDERDHMVLHEYVNAAGITIDRLLETSDRSLEKVEADLRRLNEELDRSLERAERTIRELAK

SEQ ID NO: 432 - protein, 185 aa, Artificial Sequence
  Synthetic
SSVEELLERLRRISEENKRRIEKLLREVEKVLRELKDRHRKLLKRVEEIIRKVKEEIKSGLPEEAVKRVLERVRERVKEVLEEADRLNDEMRRIVTEVEKELDKSDKEVEDAVRDILKKIEEGVRRDHMVLHEYVNAAGITDENRDRSKKVKEEIRRILEDLTRTTERVKREIAKLLKELEDTAR

SEQ ID NO: 433 - protein, 186 aa, Artificial Sequence
  Synthetic
SAEDSIRELLERDERLLEEARKEAKRLNEENERLLERIEETVRRLLEEIKRLLDDIRKKIKGEKLREIEELVRRVKRTIEKLLEEVKKSVEDSSKRIEELLEAVERSVERTKEEIRRLLDEVRKDRRDHMVLHEYVNAAGITDENRRLVKEVIEEVEKLIRDNEKLAEDIEREIRRLLKELDEAAK

SEQ ID NO: 434 - protein, 182 aa, Artificial Sequence
  Synthetic
DEAEKLLKELRDLLEESRKDLERLLKELEDLLEESKRDLERLLEEITELLKRIKETVERRNEREKLEKLLRELKKVVERLKDNLKDNERRNKEAIERVRKKLKDNERENKKVIEDLRAKLKDLEEVRDHMVLHEYVNAAGITEARKRLEEVEEKSKKIIDDARRALDRIDKELRRVVEETRK

SEQ ID NO: 435 - protein, 184 aa, Artificial Sequence
  Synthetic
SLEEVIKTVRKLLEEVERRLREVVERAERMLEEVRRRTREVSEEAREMLKDVEKALRDKNVSEEIEEKLRKIKEELERDNEKVNRDNERSVETLRRLLDRVRKEVKDIAKELEERLKEVERKSRDDRDHMVLHEYVNAAGITLRELIEKLREEVEKIVDENRKTVEELRRRNEEIVRRLRREIE

SEQ ID NO: 436 - protein, 184 aa, Artificial Sequence
  Synthetic
KLDEVIEEIRKLLRRMEEELRRSVEEIDKLLREVRELLRESSEKVKELLRRVTEELKKRGVPEEVKERLDRLVETLRRLSEETLKELDKLVREVKELSKESLKRLRELVERLRRELEEIKKRGEDERDHMVLHEYVNAAGITLREIVKRNTEIAREVVERAKRIVEKNEKLLKDVVEEAKKIVK

SEQ ID NO: 437 - protein, 187 aa, Artificial Sequence
  Synthetic
SEKERLKEELEKLSKEIEDILRDDKRSDDELRRRLRELLEKDRREDERLNEELKRMLEEARKRVSEDELRAIKKEIEDLNRRNEESLRAIEEKIKRLNDENRKSLEEIRRRLKRLVEEVDELRKRDRDHMVLHEYVNAAGITAEKLKRDIEDNNRKLRKVATELAKEIEDNSEKLREDAKRLSEKIK

SEQ ID NO: 438 - protein, 187 aa, Artificial Sequence
  Synthetic
DEEEELRKRLEKLSKEVRELLRRDEEEDRRLNRELEELLKDHERTVRDLSREVEDLLRKARRKVSEEELTRLRKKLRDLEEESKEALRELRRRVEELNKENKKSLDDLERRLKELEDRAREVEKRDRDHMVLHEYVNAAGITIRKLAEDLKRNTEDLRRVIKELAERLEELNKRLKREIRRLKEELR

SEQ ID NO: 439 - protein, 181 aa, Artificial Sequence
  Synthetic
DEERKLEKSLKDVEDTHRRLLEKNDEDLKELRKRVEDMLRRLEDALRRILEDIEEKLKRIEDDETLKRLRKRVKELLDEIRRRLERLEREVDKRLEEIKERNDRHHEEAKKELKRIRDKIRRDGADRDHMVLHEYVNAAGITDLKRSNDEVKELAERLEETIRDLLRRIEEILKEIEERVR

SEQ ID NO: 440 - protein, 179 aa, Artificial Sequence
  Synthetic
SSKEVADELRKKAEKVLDELRKIIRELERKNEDSLRRTEEIVRRLEEEAERVLRDLVRTRGEDDRLVREVERLLRELKRRLEELIRRSEELIKRSREEVDRVIRTVEKLLEELDRLLRANKGDIEDRDHMVLHEYVNAAGITRKLAKSSDDTVREDEKLVEELRKDVKRIVRKIKKDLE

SEQ ID NO: 441 - protein, 183 aa, Artificial Sequence
  Synthetic
SEIEKLVEDVRKLVEDNLRHSEEVHRRNRRLIEENERKIDELEKRVRKLVEELRELAERGEIREEEARKVLEEIKRLLDEIRRHSEEVLKEIERTLKENLKHSEEVLRRIEERLEDIKRKDKDSERRDHMVLHEYVNAAGITDESEKLNRESRKRVTRSLEKVDDLVRELEKLARKVLEEVKT

SEQ ID NO: 442 - protein, 182 aa, Artificial Sequence
  Synthetic
DEIETVLDEVRRLHEDAKRRLEEMIDEVRKLNEESVRELARVVEEVERLLRTVKEEVERAGLDKGKLEELEERLERVREDVERILREIKRRNEKTLEDSERILEENKERNRTVLKKLKELRDRGSDRDHMVLHEYVNAAGITESVRRVLEKNRRVVEESKRLAEELLRRVKKVVDEIRKRVE

SEQ ID NO: 443 - protein, 182 aa, Artificial Sequence
  Synthetic
SDADRVAEELKKLVEDSRRENERVIEESKRLVKENEDRNRELIERLKKLVDKLRDILEKEKDKKTLDDIVREILERLKRLLEKVEDENRKSHEENKRLLEDVKRKNKRISDELKRLLEEIERRNVDRDHMVLHEYVNAAGITRVMEKTEEVAKKSSEDIKRVADETRRRAEELLKEVDELRK

SEQ ID NO: 444 - protein, 186 aa, Artificial Sequence
  Synthetic
SEVDEVRKTLEDLLRRLDEENKDIIRRNKELLDDLDRKVREAIERLKRLLDELRKILEKLKDRETLTRIIEEIEKRARELIKRLRDEIRKIEEESKKSIEDSRKRNDEIRKRLEELIKDLRDKIKDRDHMVLHEYVNAAGITEVIERLKEKNKRLEDDSRRVITELRKKLKDLEDRVREEIEELRK

SEQ ID NO: 445 - protein, 183 aa, Artificial Sequence
  Synthetic
SEVDEVLERIKRLLERLAEHSDKVVRDIEKLLDDNRKENERLLDKLRRELKRLEEMRRRGDLREELLERVVREVEKEIRDIKRKNKRSVETVEKLVRDDRKELKRALEDVERLIRELETRLKDKEERDHMVLHEYVNAAGITDELLKKTDEVLKRARETIEDLNRKLDKVLKEVRDKLDRLRD

SEQ ID NO: 446 - protein, 184 aa, Artificial Sequence
  Synthetic
ELIKKARKDVEEVRERSERLVDELRKRNKKLADESRRLIDKLRKDVEKVLREIEDLLRKRRTKDVLKEIEDLVRELERELRRVVKESSDKVRKLIRENEKVVEESSRLFRDLVEKLRRVVEERNDKRDHMVLHEYVNAAGITNEKSERDVREINKESERVNEETEREVEDAIRKLREVLRRAKK

SEQ ID NO: 447 - protein, 179 aa, Artificial Sequence
  Synthetic
DEAEKAKRDSEKVVEDNRKMLEDSTRRAERLNEENKKELKKSTEEAEKILREIDETKRRGTDDEVVKDLIRRVEELLERSRKKLEDLTRDNERVLDESRRRLEKLIRDNERIVKDLTDRVVRVDEVRDHMVLHEYVNAAGITEVLRRNEEIIRRSIEDLERVLDRNRRELEDVIRRLKE

SEQ ID NO: 448 - protein, 179 aa, Artificial Sequence
  Synthetic
RLEDEVRKMEKEVREEVKRLEDESRKVLEESRRNLDKLREESKRVLDTVRERIKDLRRRGLDERVLRELLKRVREVHERNRKLLDEVRRASEKVHEDNRRILEEVRKTVKDVVDKLRRVDAKVVKERDHMVLHEYVNAAGITKKSIEEVKEINRRLNEEVKKTIEEVKEIVKEVTERAK

SEQ ID NO: 449 - protein, 183 aa, Artificial Sequence
  Synthetic
SIEDEIRKLKEDIKRVLDKVRRDNERLKERLDKVLEDIRRSSEDNNRKLEEVLKRIRDKPVDERLVRKVEEAVKRLKEHNEDSTRRVEEVIRRLKEESEESVRKTEKVARDLERELDEVLTRGGEERDHMVLHEYVNAAGITKREDKEVADRAEKLLREAEEHNKRSLDESRRVLEELDEEIR

SEQ ID NO: 450 - protein, 183 aa, Artificial Sequence
  Synthetic
SIREKIRELEERLEEVLRRIEENSERVLREAERVLKEIKDNSKRNNEKLERALEEIRKLPVEDELVRRVKELVERLKRHNKKSSEDVERVVRELKEELKRSSEEVKKAVDRLKEELEKVLRDGGERRDHMVLHEYVNAAGITEEHNRRVVERLKRLLEELKKHNEDSLRKSEEVLRKLEEDAR

SEQ ID NO: 451 - protein, 183 aa, Artificial Sequence
  Synthetic
SIEERVRELMRDLERVLKEIREHSKRVIEEAKRVLEEIERNSERNNKELEEVLDEIRKRPVDETLVREVEEAVKKLKEHNKRSSDTVRDAVRKLVERLKESSDRATELVKDLKRKLEEVLRRGGEKRDHMVLHEYVNAAGITRRNNKEVVDRLKEVLERLKEHNRRSLDESRKVLRELKERIR

SEQ ID NO: 452 - protein, 178 aa, Artificial Sequence
  Synthetic
DEARELVKELEDLIREITKTVRRLLEESEELIKRIDDAVDDLRRADEDLNREIKEEIEKGKSKESLEALIERLKESLERVKRTIEKLIRDLERLNEKLRRDVESLVAELEKILSKIKRGGLDERILRDHMVLHEYVNAAGITILKRSEDETDKLREKAERILEDLERANRRTMDEARR

SEQ ID NO: 453 - protein, 178 aa, Artificial Sequence; identical to SEQ ID NO: 452
  Synthetic

SEQ ID NO: 454 - protein, 184 aa, Artificial Sequence
  Synthetic
DEIRKVVKEITDLLKASNDKNRKVVEEIRDLLRKSKKLADELVERLRALVEDLRRRIDKSGDKETAEDIVRRIIEELKRILKEIEDLARRINREIERLVEEVERDNRDVNRAIEELLKDIARRGGSRDHMVLHEYVNAAGITNEESMRRVKEDADRVSEANKEVLDRVREEVKRLIEEVRETLR

SEQ ID NO: 455 - protein, 186 aa, Artificial Sequence
  Synthetic
SRVEEIIEDLRRLLEEIRKENEDSIRRSKELLDRVKEINDTIIAELERLLKDIEKEVREKGSESEEVKKALRAVLEELEKLLRRVAEINEEVLRRNSKLVEEDERRNREVLKELARLVEELIREIGRDHMVLHEYVNAAGITRDIDKLDRESKEAFRATNEEIAKLDEDTARVAERVKKAIEDLAK

SEQ ID NO: 456 - protein, 181 aa, Artificial Sequence
  Synthetic
DAVEEAEKLIRKVIADSEKLLRDLADLNAKSIRRSEKLVEDDRRANEDVIRKLEELRRNGGSEEELRALLKEVEDTNRASHETNKRLLDEDRALNKEVHDRNEKLLRDIKRLVEEVAKGIDSEELLRDHMVLHEYVNAAGITSSREIKRLLEESERVMKRSSEDIKRTLDDTRRVVEEVRR

SEQ ID NO: 457 - protein, 177 aa, Artificial Sequence
  Synthetic
SSDEVLKEIEEIIRRLEAEVRRVNAEVNASTEDLAREVEEVLRATNELIEELERRVTGTEELKRVIDELRDRDRKVRRRVERVIEESAKRDDESRKRLTRAVEKLRADLKKLADDGVPEEALSKAIRDHMVLHEYVNAAGITWRDRNKELVDRLSEELKEWLKDVERVLKELTDKDR

SEQ ID NO: 458 - protein, 185 aa, Artificial Sequence
  Synthetic
SEIDEVLTRLRKISKDLNETSDRVNERARKIIDDIKKESKRVNDEAREIVERLKREIDKTRDRDVLRRILKEIEDVARRVKEINEELLARVEKVVREVEEINRELVKRSREAVEAVKRLLDRGVSDRDHMVLHEYVNAAGITEDRKRLEESTRSVRKLLEELKRELEKSTRSVKALVDELRERVR

SEQ ID NO: 459 - protein, 181 aa, Artificial Sequence
  Synthetic
SEIETVRREIEKILDDLRRTVKRIEDEVRKIHEDLRRSLEDSKRNIEEILKDLERAARRDGLDKKVEDDMRKLVEDLKRKHDKLRADNEAVTKELKDRLKKLEDDLARAIEELRRRLDKGLDKEDIRDHMVLHEYVNAAGITDLKELLERYEEIVRRIKELLKDLNREAEEVVRRLKEELR

SEQ ID NO: 460 - protein, 183 aa, Artificial Sequence
  Synthetic
SDVDRVLEEIRKLLEDLKRHSEKVSEENEDLLRANTELNKRVSEDNERLLEELKRLRERGGISEEDLKRALDRVRKTVETVKEENKRSLEDVRRTVETNKRKLERVVEEIKKLIEDAKRRGSGDEERDHMVLHEYVNAAGITDRLLETSDRSLEKVEADLRRLNEELDRSLERAERTIRELAK

SEQ ID NO: 461 - protein, 177 aa, Artificial Sequence
  Synthetic
SKEDRLREELKKLLARLAEEIERLKRALEESNKDLKRTIDASEKHLRDVNEDVKRGGVSEELLRELERSTAENKERAKELLKRHEDLVRKVEKELADLLRRLEEIVARVDEALKRGISEEELDKLLRDHMVLHEYVNAAGITLLKRVEKLTEDAKRDLERSNREHKELADRIKETAR

SEQ ID NO: 462 - protein, 185 aa, Artificial Sequence
  Synthetic
SSVEELLERLRRISEENKRRIEKLLREVEKVLRELKDRHRKLLKRVEEIIRKVKEEIKSGLPEEAVKRVLERVRERVKEVLEEADRLNDEMRRIVTEVEKELDKSDKEVEDAVRDILKKIEEGVRDRDHMVLHEYVNAAGITENRDRSKKVKEEIRRILEDLTRTTERVKREIAKLLKELEDTAR

SEQ ID NO: 463 - protein, 186 aa, Artificial Sequence
  Synthetic
SAEDSIRELLERDERLLEEARKEAKRLNEENERLLERIEETVRRLLEEIKRLLDDIRKKIKGEKLREIEELVRRVKRTIEKLLEEVKKSVEDSSKRIEELLEAVERSVERTKEEIRRLLDEVRKDRKRDHMVLHEYVNAAGITENRRLVKEVIEEVEKLIRDNEKLAEDIEREIRRLLKELDEAAK

SEQ ID NO: 464 - protein, 182 aa, Artificial Sequence
  Synthetic
DEAEKLLKELRDLLEESRKDLERLLKELEDLLEESKRDLERLLEEITELLKRIKETVERRNEREKLEKLLRELKKVVERLKDNLKDNERRNKEAIERVRKKLKDNERENKKVIEDLRAKLKDLEEVKRDHMVLHEYVNAAGITARKRLEEVEEKSKKIIDDARRALDRIDKELRRVVEETRK

SEQ ID NO: 465 - protein, 182 aa, Artificial Sequence
  Synthetic
RVEDALRKLLDDVRRLVEEAERRLRTSNDKSRRLVEEAKRRLEESNERSEKLVRDVRRRIRDEDVKRVLEELLKRDHDVVRRVLERIDEMLERNSRLVKRVLEDIRRLLKRVREVVERIKRVRSKVVRDHMVLHEYVNAAGITIIEDVLRASEDTIRRLEEIIRKVEEDSKRIIEEIERAAR

SEQ ID NO: 466 - protein, 183 aa, Artificial Sequence
  Synthetic
KVEKRLTDLLKTVADEVKRVEDELRETVRESKEVVDKSRRDLERTVEESEKTVKDAERRVSEDLVRRIRKVLDENREVNDRVVKEDERILEENERVNRKVVEKIRDILRKIEEVVRRAAEEIRDEEVRDHMVLHEYVNAAGITEEADRVRERSKKILTDLKKSSEDVKRESERMLKKLEDEIR

SEQ ID NO: 467 - protein, 187 aa, Artificial Sequence
  Synthetic
SEKERLKEELEKLSKEIEDILRDDKRSDDELRRRLRELLEKDRREDERLNEELKRMLEEARKRVSEDELRAIKKEIEDLNRRNEESLRAIEEKIKRLNDENRKSLEEIRRRLKRLVEEVDELRKRDNRDHMVLHEYVNAAGITEKLKRDIEDNNRKLRKVATELAKEIEDNSEKLREDAKRLSEKIK

SEQ ID NO: 468 - protein, 187 aa, Artificial Sequence
  Synthetic
DEEEELRKRLEKLSKEVRELLRRDEEEDRRLNRELEELLKDHERTVRDLSREVEDLLRKARRKVSEEELTRLRKKLRDLEEESKEALRELRRRVEELNKENKKSLDDLERRLKELEDRAREVEKRDRRDHMVLHEYVNAAGITRKLAEDLKRNTEDLRRVIKELAERLEELNKRLKREIRRLKEELR

SEQ ID NO: 469 - protein, 181 aa, Artificial Sequence
  Synthetic
DEEETLEDVLRELEERVEKLLRDLTRDLERVEKEHKELLKRNKEAIDEIEKRIEELLKRIEDDEKLRRLKEEVRKLVEESRERNKRHHKEVREVLERIRELLERLEKELRRALEEIRDKIRKDGATDRDHMVLHEYVNAAGITIRDLERKVRKLERDIRENIKKNHREVREILRKIEEDVR

SEQ ID NO: 470 - protein, 183 aa, Artificial Sequence
  Synthetic
SEIEKLVEDVRKLVEDNLRHSEEVHRRNRRLIEENERKIDELEKRVRKLVEELRELAERGEIREEEARKVLEEIKRLLDEIRRHSEEVLKEIERTLKENLKHSEEVLRRIEERLEDIKRKDKDSERVRDHMVLHEYVNAAGITESEKLNRESRKRVTRSLEKVDDLVRELEKLARKVLEEVKT

SEQ ID NO: 471 - protein, 181 aa, Artificial Sequence
  Synthetic
EEIERALREMRELSRTHKELVEKILRDIAELAKTHERINEDILRKIKKLIDEIADEIRKEDKKEELKRKIDELRRRAEELLKESKEHLKRLEDTVRELIERLKETLKKVEEDLKRILEKLEKSRELDRDHMVLHEYVNAAGITLKRVEDEVRRLIRKLEELNRRTEEEVKKLIKKLEDDLK

SEQ ID NO: 472 - protein, 183 aa, Artificial Sequence
  Synthetic
SEVDEVLERIKRLLERLAEHSDKVVRDIEKLLDDNRKENERLLDKLRRELKRLEEMRRRGDLREELLERVVREVEKEIRDIKRKNKRSVETVEKLVRDDRKELKRALEDVERLIRELETRLKDKEELRDHMVLHEYVNAAGITELLKKTDEVLKRARETIEDLNRKLDKVLKEVRDKLDRLRD

SEQ ID NO: 473 - protein, 185 aa, Artificial Sequence
  Synthetic
DDIERLKREIERLLKEAEKISRDNEERSKELLDRLRKLSEDNKRKIDKLVEELKRLADKIKDKEELTRRLKEVVDRVEKSVRDSERMLREVVREDEESVRRSKTKLEDLLRKVEELVRRLEKKVTDERDHMVLHEYVNAAGITVDELKRKNDEVHRRSREEVKRLLEENRKLLEDLRRMVREITQ

SEQ ID NO: 474 - protein, 184 aa, Artificial Sequence
  Synthetic
ELIKKARKDVEEVRERSERLVDELRKRNKKLADESRRLIDKLRKDVEKVLREIEDLLRKRRTKDVLKEIEDLVRELERELRRVVKESSDKVRKLIRENEKVVEESSRLFRDLVEKLRRVVEERNDKKRDHMVLHEYVNAAGITEKSERDVREINKESERVNEETEREVEDAIRKLREVLRRAKK

SEQ ID NO: 475 - protein, 186 aa, Artificial Sequence
  Synthetic
KEVEDLERTVRTILKRMRELITRNEEEIRRSIEELKKLLKENKDTVRRILEEMKELKKEGGDDKKRLVEEIKRLLDELRENSKRSSDRAKEIHERNKRHSEESSRTIEKLLKELRDLVRDVERKLRDRDHMVLHEYVNAAGITVVREADERNKRLTKRSKEVLDEVHRANEEALKEVEEVVRRVTK

SEQ ID NO: 476 - protein, 178 aa, Artificial Sequence
  Synthetic
KAAEEIRKKVEDYKRESEKILEEVEDHSRRSKETLKRLLDDLRRAVEELKRRLEELKRRPRTEEIAKRAEEAVRRAAERIKKVIDDVERHIRENAKELKRLLEEDREASRRLEDEIDKEVKAREVADRDHMVLHEYVNAAGITLRELAERNKTALEEAERVLRRLKEEIEKVLRKLKK

SEQ ID NO: 477 - protein, 185 aa, Artificial Sequence
  Synthetic
SAEELLRTIEKRIEDNHRRLEEILEEIARLIEDMLRTDERIVREIKELLKEVLDRVRRAGVPEEVLERVRRELERLKKELEELRRRSEEKVKELKRRLEEIRRKLEEEHRDLRRKLEELRRDLGDKERDHMVLHEYVNAAGITSLREAEDLLRRVEEVIRTSKKESKDVLEKIERLLRDLERRTR

SEQ ID NO: 478 - protein, 182 aa, Artificial Sequence
  Synthetic
DLERRLDELLKRIEDRVRELVRTLEESLRELERRVREIIRRLEEHLRRIEKMVRDLKRANKPDKAVKDDVRRLRENADRLNKRVREELKKLREDVKRVNEDVKRELDKLAEEAKDMLRKLREAGIDERDHMVLHEYVNAAGITIEEVSERHKREVDRLEREIEEVSREHKERVEKLLREIER

SEQ ID NO: 479 - protein, 179 aa, Artificial Sequence
  Synthetic
RLEDEVRKMEKEVREEVKRLEDESRKVLEESRRNLDKLREESKRVLDTVRERIKDLRRRGLDERVLRELLKRVREVHERNRKLLDEVRRASEKVHEDNRRILEEVRKTVKDVVDKLRRVDAKVVKELRDHMVLHEYVNAAGITKSIEEVKEINRRLNEEVKKTIEEVKEIVKEVTERAK

SEQ ID NO: 480 - protein, 185 aa, Artificial Sequence
  Synthetic
SEAEELLKRLEDRAEEILRRLEEILRTSRKLAEDVLRELEKLLRESERRIREVLEELRGIKDKKELEDVIREVEKELDESLERSRELLKDVLKKLDDNLKESERLVEDIDRELAKILEDLKKAGVPKRDHMVLHEYVNAAGITLKRIVDENAKIVEDARRALEKIVKENEEILRRLKKELRELRK

SEQ ID NO: 481 - protein, 184 aa, Artificial Sequence
  Synthetic
DDLERAREEVADLIRKHEEKTRRILEESRRLNERHRELSARILDEIRKLAERIEELIKRERGKDELRRKVEDLEARVEDLIRRLEEHLRRVHDKDRRLIEDLRRHLKRVVEELKRLIDELRRGVPKERDHMVLHEYVNAAGITREKNREVEKRARDSNRDLKRTNDEIAKEVRELIKKLREDLK

SEQ ID NO: 482 - protein, 178 aa, Artificial Sequence
  Synthetic
DEARELVKELEDLIREITKTVRRLLEESEELIKRIDDAVDDLRRADEDLNREIKEEIEKGKSKESLEALIERLKESLERVKRTIEKLIRDLERLNEKLRRDVESLVAELEKILSKIKRGGLDERILRRDHMVLHEYVNAAGITLKRSEDETDKLREKAERILEDLERANRRTMDEARR

SEQ ID NO: 483 - protein, 182 aa, Artificial Sequence
  Synthetic
DEVREVAERLRRLVDESRKRNEEVIKESEALVDRVRKTNEEVMKRLRELIDKLEKDIRRSGDKETVEKIIREVLSAIDELLKRVERTNAEISKENARLLDEVRKTNEEISRRLAKLLEDIRRGSGDARDHMVLHEYVNAAGITVLRKTEEAVKRSTETNKRLLEASKEVADRLRERIKEAAK

SEQ ID NO: 484 - protein, 186 aa, Artificial Sequence
  Synthetic
SRVEEIIEDLRRLLEEIRKENEDSIRRSKELLDRVKEINDTIIAELERLLKDIEKEVREKGSESEEVKKALRAVLEELEKLLRRVAEINEEVLRRNSKLVEEDERRNREVLKELARLVEELIREIGDRDHMVLHEYVNAAGITDIDKLDRESKEAFRATNEEIAKLDEDTARVAERVKKAIEDLAK

SEQ ID NO: 485 - protein, 185 aa, Artificial Sequence
  Synthetic
SEIDEVLTRLRKISKDLNETSDRVNERARKIIDDIKKESKRVNDEAREIVERLKREIDKTRDRDVLRRILKEIEDVARRVKEINEELLARVEKVVREVEEINRELVKRSREAVEAVKRLLDRGVSDERDHMVLHEYVNAAGITDRKRLEESTRSVRKLLEELKRELEKSTRSVKALVDELRERVR

SEQ ID NO: 486 - protein, 178 aa, Artificial Sequence
  Synthetic
DAAERAKEKLDKILEDLRDVVRASKENLDRLHAENAETLERSKANLDRLLEKVKKDGVPEELLKELERIIRDLKRKHAKLLEDHRKIIEELKREHDRLLKEAEEIVRRIKDELEKGSDDERDIERILRDHMVLHEYVNAAGITLNREVERVSRDTKKKSKELNEELKAVLDEVKRKAD

SEQ ID NO: 487 - protein, 183 aa, Artificial Sequence
  Synthetic
SKLEEVEKAVRKVIEDSRRVNEEVNRRSEEVVRELEKVHREVNDASRRVVEKARRVLKGSGDERLAAEVERIIEEIRELNERDRKRVEEIRKEIEDLNRDLNRRSKESEDRLRKLLEDATRGGVTKERDHMVLHEYVNAAGITRRVEDVARKSKELVEDVRRHSEEVVRRVEELVKEVEERVR

SEQ ID NO: 488 - protein, 183 aa, Artificial Sequence
  Synthetic
SDVDRVLEEIRKLLEDLKRHSEKVSEENEDLLRANTELNKRVSEDNERLLEELKRLRERGGISEEDLKRALDRVRKTVETVKEENKRSLEDVRRTVETNKRKLERVVEEIKKLIEDAKRRGSGDEEARDHMVLHEYVNAAGITRLLETSDRSLEKVEADLRRLNEELDRSLERAERTIRELAK

SEQ ID NO: 489 - protein, 185 aa, Artificial Sequence
  Synthetic
SSVEELLERLRRISEENKRRIEKLLREVEKVLRELKDRHRKLLKRVEEIIRKVKEEIKSGLPEEAVKRVLERVRERVKEVLEEADRLNDEMRRIVTEVEKELDKSDKEVEDAVRDILKKIEEGVRDRRDHMVLHEYVNAAGITNRDRSKKVKEEIRRILEDLTRTTERVKREIAKLLKELEDTAR

SEQ ID NO: 490 - protein, 186 aa, Artificial Sequence
  Synthetic
SAEDSIRELLERDERLLEEARKEAKRLNEENERLLERIEETVRRLLEEIKRLLDDIRKKIKGEKLREIEELVRRVKRTIEKLLEEVKKSVEDSSKRIEELLEAVERSVERTKEEIRRLLDEVRKDRKERDHMVLHEYVNAAGITNRRLVKEVIEEVEKLIRDNEKLAEDIEREIRRLLKELDEAAK

SEQ ID NO: 491 - protein, 182 aa, Artificial Sequence
  Synthetic
RVEDALRKLLDDVRRLVEEAERRLRTSNDKSRRLVEEAKRRLEESNERSEKLVRDVRRRIRDEDVKRVLEELLKRDHDVVRRVLERIDEMLERNSRLVKRVLEDIRRLLKRVREVVERIKRVRSKVVERDHMVLHEYVNAAGITIEDVLRASEDTIRRLEEIIRKVEEDSKRIIEEIERAAR

SEQ ID NO: 492 - protein, 184 aa, Artificial Sequence
  Synthetic
SLEEVIKTVRKLLEEVERRLREVVERAERMLEEVRRRTREVSEEAREMLKDVEKALRDKNVSEEIEEKLRKIKEELERDNEKVNRDNERSVETLRRLLDRVRKEVKDIAKELEERLKEVERKSRDDRIRDHMVLHEYVNAAGITELIEKLREEVEKIVDENRKTVEELRRRNEEIVRRLRREIE

SEQ ID NO: 493 - protein, 179 aa, Artificial Sequence
  Synthetic
SSKEVADELRKKAEKVLDELRKIIRELERKNEDSLRRTEEIVRRLEEEAERVLRDLVRTRGEDDRLVREVERLLRELKRRLEELIRRSEELIKRSREEVDRVIRTVEKLLEELDRLLRANKGDIEDLRRDHMVLHEYVNAAGITLAKSSDDTVREDEKLVEELRKDVKRIVRKIKKDLE

SEQ ID NO: 494 - protein, 183 aa, Artificial Sequence
  Synthetic
SEIEKLVEDVRKLVEDNLRHSEEVHRRNRRLIEENERKIDELEKRVRKLVEELRELAERGEIREEEARKVLEEIKRLLDEIRRHSEEVLKEIERTLKENLKHSEEVLRRIEERLEDIKRKDKDSERVRRDHMVLHEYVNAAGITSEKLNRESRKRVTRSLEKVDDLVRELEKLARKVLEEVKT

SEQ ID NO: 495 - protein, 181 aa, Artificial Sequence
  Synthetic
EEIERALREMRELSRTHKELVEKILRDIAELAKTHERINEDILRKIKKLIDEIADEIRKEDKKEELKRKIDELRRRAEELLKESKEHLKRLEDTVRELIERLKETLKKVEEDLKRILEKLEKSRELDERDHMVLHEYVNAAGITKRVEDEVRRLIRKLEELNRRTEEEVKKLIKKLEDDLK

SEQ ID NO: 496 - protein, 186 aa, Artificial Sequence
  Synthetic
SEVDEVRKTLEDLLRRLDEENKDIIRRNKELLDDLDRKVREAIERLKRLLDELRKILEKLKDRETLTRIIEEIEKRARELIKRLRDEIRKIEEESKKSIEDSRKRNDEIRKRLEELIKDLRDKIKDSERDHMVLHEYVNAAGITIERLKEKNKRLEDDSRRVITELRKKLKDLEDRVREEIEELRK

SEQ ID NO: 497 - protein, 183 aa, Artificial Sequence
  Synthetic
SEVDEVLERIKRLLERLAEHSDKVVRDIEKLLDDNRKENERLLDKLRRELKRLEEMRRRGDLREELLERVVREVEKEIRDIKRKNKRSVETVEKLVRDDRKELKRALEDVERLIRELETRLKDKEELRRDHMVLHEYVNAAGITLLKKTDEVLKRARETIEDLNRKLDKVLKEVRDKLDRLRD

SEQ ID NO: 498 - protein, 185 aa, Artificial Sequence
  Synthetic
DDIERLKREIERLLKEAEKISRDNEERSKELLDRLRKLSEDNKRKIDKLVEELKRLADKIKDKEELTRRLKEVVDRVEKSVRDSERMLREVVREDEESVRRSKTKLEDLLRKVEELVRRLEKKVTDEKRDHMVLHEYVNAAGITDELKRKNDEVHRRSREEVKRLLEENRKLLEDLRRMVREITQ

SEQ ID NO: 499 - protein, 186 aa, Artificial Sequence
  Synthetic
KEVEDLERRVKEILDRMKRLIDENRKKIEKSIRELERLIDENRKEVERVKKELKDLKREGGDDARTLRERVRKIIEDVEEHSRRSTEEVRRIHKENKEHSERSSDEIRELLRRVEELIEEVKRRLRDKRDHMVLHEYVNAAGITVRRAHETNERLVDRSRKAVEKAERTNRRLVEEIRKVAEEVRK

SEQ ID NO: 500 - protein, 186 aa, Artificial Sequence
  Synthetic
DEIRELEERVRRILDELRRLVERNREVIERSIRELEKLLDRNRRKVEEILRRIDDLTRRGGDDKKTMLDDVRRLLREAEDHSRRSSETAKRIHRENEEHSKDSSRKVRKLIEELRELAKKVEKEITDERDHMVLHEYVNAAGITMREVDRANRELTKTSKKVLEDVDRTNRRLVKEVRDVVERARK

SEQ ID NO: 501 - protein, 186 aa, Artificial Sequence
  Synthetic
KEVEDLERTVRTILKRMRELITRNEEEIRRSIEELKKLLKENKDTVRRILEEMKELKKEGGDDKKRLVEEIKRLLDELRENSKRSSDRAKEIHERNKRHSEESSRTIEKLLKELRDLVRDVERKLRDERDHMVLHEYVNAAGITVREADERNKRLTKRSKEVLDEVHRANEEALKEVEEVVRRVTK

SEQ ID NO: 502 - protein, 179 aa, Artificial Sequence
  Synthetic
REAEEVERKVEELNRRNRKVLDDARKESEEVVRRNREFLRRLEERVRTILRELDKRKRDGTSEEVIKRLIDRVRKILEDIRRLVDELIKRNERIVEKLTRIVEELIRRNKKLLEDIRRELVKVDEVLRRDHMVLHEYVNAAGITLRELERIHRELIKELKEVLKRLEKDAKEVIERLRT

SEQ ID NO: 503 - protein, 186 aa, Artificial Sequence
  Synthetic
SEIEKLIEELRRELEKVKDELERSIEEMDRELDDVRRDSKRLVDEIKRELREVTERTKRGDRPEEVLRKELEDIKRKLRRILEEHHEKIRRIKEKLRRENKRVRDELKRIKDEIDEKVKDVRRKGADERDHMVLHEYVNAAGITLEELLKKHTRVVERVEKALDELDKELERIVREAEKELDRREK

SEQ ID NO: 504 - protein, 179 aa, Artificial Sequence
  Synthetic
RLEDEVRKMEKEVREEVKRLEDESRKVLEESRRNLDKLREESKRVLDTVRERIKDLRRRGLDERVLRELLKRVREVHERNRKLLDEVRRASEKVHEDNRRILEEVRKTVKDVVDKLRRVDAKVVKELIRDHMVLHEYVNAAGITSIEEVKEINRRLNEEVKKTIEEVKEIVKEVTERAK

SEQ ID NO: 505 - protein, 183 aa, Artificial Sequence
  Synthetic
SIEDEIRKLKEDIKRVLDKVRRDNERLKERLDKVLEDIRRSSEDNNRKLEEVLKRIRDKPVDERLVRKVEEAVKRLKEHNEDSTRRVEEVIRRLKEESEESVRKTEKVARDLERELDEVLTRGGEERVRDHMVLHEYVNAAGITEDKEVADRAEKLLREAEEHNKRSLDESRRVLEELDEEIR

SEQ ID NO: 506 - protein, 183 aa, Artificial Sequence
  Synthetic
SIREKIRELEERLEEVLRRIEENSERVLREAERVLKEIKDNSKRNNEKLERALEEIRKLPVEDELVRRVKELVERLKRHNKKSSEDVERVVRELKEELKRSSEEVKKAVDRLKEELEKVLRDGGEREVRDHMVLHEYVNAAGITHNRRVVERLKRLLEELKKHNEDSLRKSEEVLRKLEEDAR

SEQ ID NO: 507 - protein, 182 aa, Artificial Sequence
  Synthetic
SIEDLVRELKKKVDEVAEDLRRKVREALERSRENIDRLKKHSEENLRRSEEVVDKLRKETREEEVKDILRRVLELSKRIVEESKEILDRVLELSKKVVDDIEEIIRRVEETVKEVLTRLSRVDDKVVKRDHMVLHEYVNAAGITVEKLIRELEDINRKVNERNRRLAEESRKILDEVEKRVR

SEQ ID NO: 508 - protein, 185 aa, Artificial Sequence
  Synthetic
SEAEELLKRLEDRAEEILRRLEEILRTSRKLAEDVLRELEKLLRESERRIREVLEELRGIKDKKELEDVIREVEKELDESLERSRELLKDVLKKLDDNLKESERLVEDIDRELAKILEDLKKAGVPKERDHMVLHEYVNAAGITKRIVDENAKIVEDARRALEKIVKENEEILRRLKKELRELRK

SEQ ID NO: 509 - protein, 179 aa, Artificial Sequence
  Synthetic
SEVEELIKRLAKVLKELVDKVRKVIEDTKELLERLKRRSEDHIRKLREVLKEAKDQPIDDEELKEILDRLRKTLEELEEELKKALEDDREEAKRLVDDARRVLKELEEEVREIRERRGESEELDRRIERDHMVLHEYVNAAGITWERVHREVEELLKRLIDENRKVLDEIRKLLEEKSK

SEQ ID NO: 510 - protein, 184 aa, Artificial Sequence
  Synthetic
DEIRKVVKEITDLLKASNDKNRKVVEEIRDLLRKSKKLADELVERLRALVEDLRRRIDKSGDKETAEDIVRRIIEELKRILKEIEDLARRINREIERLVEEVERDNRDVNRAIEELLKDIARRGGSEDRDHMVLHEYVNAAGITESMRRVKEDADRVSEANKEVLDRVREEVKRLIEEVRETLR

SEQ ID NO: 511 - protein, 182 aa, Artificial Sequence
  Synthetic
DEVREVAERLRRLVDESRKRNEEVIKESEALVDRVRKTNEEVMKRLRELIDKLEKDIRRSGDKETVEKIIREVLSAIDELLKRVERTNAEISKENARLLDEVRKTNEEISRRLAKLLEDIRRGSGDAERDHMVLHEYVNAAGITLRKTEEAVKRSTETNKRLLEASKEVADRLRERIKEAAK

SEQ ID NO: 512 - protein, 186 aa, Artificial Sequence
  Synthetic
SRVEEIIEDLRRLLEEIRKENEDSIRRSKELLDRVKEINDTIIAELERLLKDIEKEVREKGSESEEVKKALRAVLEELEKLLRRVAEINEEVLRRNSKLVEEDERRNREVLKELARLVEELIREIGDERDHMVLHEYVNAAGITIDKLDRESKEAFRATNEEIAKLDEDTARVAERVKKAIEDLAK

SEQ ID NO: 513 - protein, 181 aa, Artificial Sequence
  Synthetic
DAVEEAEKLIRKVIADSEKLLRDLADLNAKSIRRSEKLVEDDRRANEDVIRKLEELRRNGGSEEELRALLKEVEDTNRASHETNKRLLDEDRALNKEVHDRNEKLLRDIKRLVEEVAKGIDSEELLRRRDHMVLHEYVNAAGITREIKRLLEESERVMKRSSEDIKRTLDDTRRVVEEVRR

SEQ ID NO: 514 - protein, 185 aa, Artificial Sequence
  Synthetic
SEIDEVLTRLRKISKDLNETSDRVNERARKIIDDIKKESKRVNDEAREIVERLKREIDKTRDRDVLRRILKEIEDVARRVKEINEELLARVEKVVREVEEINRELVKRSREAVEAVKRLLDRGVSDEDRDHMVLHEYVNAAGITRKRLEESTRSVRKLLEELKRELEKSTRSVKALVDELRERVR

SEQ ID NO: 515 - protein, 183 aa, Artificial Sequence
  Synthetic
SDVDRVLEEIRKLLEDLKRHSEKVSEENEDLLRANTELNKRVSEDNERLLEELKRLRERGGISEEDLKRALDRVRKTVETVKEENKRSLEDVRRTVETNKRKLERVVEEIKKLIEDAKRRGSGDEEAKRDHMVLHEYVNAAGITLLETSDRSLEKVEADLRRLNEELDRSLERAERTIRELAK

SEQ ID NO: 516 - protein, 185 aa, Artificial Sequence
  Synthetic
SSVEELLERLRRISEENKRRIEKLLREVEKVLRELKDRHRKLLKRVEEIIRKVKEEIKSGLPEEAVKRVLERVRERVKEVLEEADRLNDEMRRIVTEVEKELDKSDKEVEDAVRDILKKIEEGVRDRERDHMVLHEYVNAAGITRDRSKKVKEEIRRILEDLTRTTERVKREIAKLLKELEDTAR

SEQ ID NO: 517 - protein, 186 aa, Artificial Sequence
  Synthetic
SAEDSIRELLERDERLLEEARKEAKRLNEENERLLERIEETVRRLLEEIKRLLDDIRKKIKGEKLREIEELVRRVKRTIEKLLEEVKKSVEDSSKRIEELLEAVERSVERTKEEIRRLLDEVRKDRKEERDHMVLHEYVNAAGITRRLVKEVIEEVEKLIRDNEKLAEDIEREIRRLLKELDEAAK

SEQ ID NO: 518 - protein, 182 aa, Artificial Sequence
  Synthetic
DEAEKLLKELRDLLEESRKDLERLLKELEDLLEESKRDLERLLEEITELLKRIKETVERRNEREKLEKLLRELKKVVERLKDNLKDNERRNKEAIERVRKKLKDNERENKKVIEDLRAKLKDLEEVKRKRDHMVLHEYVNAAGITKRLEEVEEKSKKIIDDARRALDRIDKELRRVVEETRK

SEQ ID NO: 519 - protein, 182 aa, Artificial Sequence
  Synthetic
RVEDALRKLLDDVRRLVEEAERRLRTSNDKSRRLVEEAKRRLEESNERSEKLVRDVRRRIRDEDVKRVLEELLKRDHDVVRRVLERIDEMLERNSRLVKRVLEDIRRLLKRVREVVERIKRVRSKVVEERDHMVLHEYVNAAGITEDVLRASEDTIRRLEEIIRKVEEDSKRIIEEIERAAR

SEQ ID NO: 520 - protein, 183 aa, Artificial Sequence
  Synthetic
KVEKRLTDLLKTVADEVKRVEDELRETVRESKEVVDKSRRDLERTVEESEKTVKDAERRVSEDLVRRIRKVLDENREVNDRVVKEDERILEENERVNRKVVEKIRDILRKIEEVVRRAAEEIRDEEVVKRDHMVLHEYVNAAGITADRVRERSKKILTDLKKSSEDVKRESERMLKKLEDEIR

SEQ ID NO: 521 - protein, 181 aa, Artificial Sequence
  Synthetic
SEVERVLEDLRRLVRDVEEKLRRIIERDRRLVEEVERENRKTIRKIEELLRKVLEELKDISDKKTIERIVREIIKEARDLVRRNHERNREIVDESRRLVEELRRIVEEIIRRLRELLERVKSGELAERIRDHMVLHEYVNAAGITELEKTSRDLKKRLEELDRELKALVEKVERDLEELRK

SEQ ID NO: 522 - protein, 180 aa, Artificial Sequence
  Synthetic
STEEVLDEIRKLHKTLTEDIKRVLREIEELHRRTIEENKEVLDKIREDYKRVIDDVRTKDTPNVEKLLKDLEKSAKENEEHNERTLREDDRVLKEIRRRATELLKANEEMLRRIEEVMRAGKVDAEELLRDHMVLHEYVNAAGITLRKESKRVVDETRKLSEENLEHSERVLRKVEEDLR

SEQ ID NO: 523 - protein, 183 aa, Artificial Sequence
  Synthetic
SEIEKLVEDVRKLVEDNLRHSEEVHRRNRRLIEENERKIDELEKRVRKLVEELRELAERGEIREEEARKVLEEIKRLLDEIRRHSEEVLKEIERTLKENLKHSEEVLRRIEERLEDIKRKDKDSERVRTRDHMVLHEYVNAAGITEKLNRESRKRVTRSLEKVDDLVRELEKLARKVLEEVKT

SEQ ID NO: 524 - protein, 182 aa, Artificial Sequence
  Synthetic
DELEEVVRRVRELSRTVKEELREVIERVRELSERVKKKLRKVLREVAELHREVMKRVRDSGLDKSKLEKLEDESRRVLDKSREILRKNEEDNRRLNKELEEILKKNEDDNEDVRRKVDEVTRKGKDAEERDHMVLHEYVNAAGITKDALKRVEDRVRESDKSVRELLEENRKVVEDIKRRVD

SEQ ID NO: 525 - protein, 182 aa, Artificial Sequence
  Synthetic
SDADRVAEELKKLVEDSRRENERVIEESKRLVKENEDRNRELIERLKKLVDKLRDILEKEKDKKTLDDIVREILERLKRLLEKVEDENRKSHEENKRLLEDVKRKNKRISDELKRLLEEIERRNVDVDKRDHMVLHEYVNAAGITEKTEEVAKKSSEDIKRVADETRRRAEELLKEVDELRK

SEQ ID NO: 526 - protein, 184 aa, Artificial Sequence
  Synthetic
ELIKKARKDVEEVRERSERLVDELRKRNKKLADESRRLIDKLRKDVEKVLREIEDLLRKRRTKDVLKEIEDLVRELERELRRVVKESSDKVRKLIRENEKVVEESSRLFRDLVEKLRRVVEERNDKKLMRDHMVLHEYVNAAGITSERDVREINKESERVNEETEREVEDAIRKLREVLRRAKK

SEQ ID NO: 527 - protein, 186 aa, Artificial Sequence
  Synthetic
KEVEDLERRVKEILDRMKRLIDENRKKIEKSIRELERLIDENRKEVERVKKELKDLKREGGDDARTLRERVRKIIEDVEEHSRRSTEEVRRIHKENKEHSERSSDEIRELLRRVEELIEEVKRRLRDKERDHMVLHEYVNAAGITRRAHETNERLVDRSRKAVEKAERTNRRLVEEIRKVAEEVRK

SEQ ID NO: 528 - protein, 186 aa, Artificial Sequence
  Synthetic
DEIRELEERVRRILDELRRLVERNREVIERSIRELEKLLDRNRRKVEEILRRIDDLTRRGGDDKKTMLDDVRRLLREAEDHSRRSSETAKRIHRENEEHSKDSSRKVRKLIEELRELAKKVEKEITDERRDHMVLHEYVNAAGITREVDRANRELTKTSKKVLEDVDRTNRRLVKEVRDVVERARK

SEQ ID NO: 529 - protein, 186 aa, Artificial Sequence
  Synthetic
KEVEDLERTVRTILKRMRELITRNEEEIRRSIEELKKLLKENKDTVRRILEEMKELKKEGGDDKKRLVEEIKRLLDELRENSKRSSDRAKEIHERNKRHSEESSRTIEKLLKELRDLVRDVERKLRDEDRDHMVLHEYVNAAGITREADERNKRLTKRSKEVLDEVHRANEEALKEVEEVVRRVTK

SEQ ID NO: 530 - protein, 182 aa, Artificial Sequence
  Synthetic
DLERRLDELLKRIEDRVRELVRTLEESLRELERRVREIIRRLEEHLRRIEKMVRDLKRANKPDKAVKDDVRRLRENADRLNKRVREELKKLREDVKRVNEDVKRELDKLAEEAKDMLRKLREAGIDERVRDHMVLHEYVNAAGITEVSERHKREVDRLEREIEEVSREHKERVEKLLREIER

SEQ ID NO: 531 - protein, 182 aa, Artificial Sequence
  Synthetic
SELEKTLEDLKRHSEENKKKLEEDLRDMERNLKENKDRLKKILEEAEKTLKDLERRFREGDIDERELERVRRKMEEIKKRLDENVERNRRKAEDIKRKLDENVKRSEDRVKEIKEDIRRRVRDKDKAEERDHMVLHEYVNAAGITERVKKALDDIVKELEELHERLKRRLEEILRRIAETVR

SEQ ID NO: 532 - protein, 186 aa, Artificial Sequence
  Synthetic
SEIEKLIEELRRELEKVKDELERSIEEMDRELDDVRRDSKRLVDEIKRELREVTERTKRGDRPEEVLRKELEDIKRKLRRILEEHHEKIRRIKEKLRRENKRVRDELKRIKDEIDEKVKDVRRKGADEERDHMVLHEYVNAAGITEELLKKHTRVVERVEKALDELDKELERIVREAEKELDRREK

SEQ ID NO: 533 - protein, 183 aa, Artificial Sequence
  Synthetic
SIEDEIRKLKEDIKRVLDKVRRDNERLKERLDKVLEDIRRSSEDNNRKLEEVLKRIRDKPVDERLVRKVEEAVKRLKEHNEDSTRRVEEVIRRLKEESEESVRKTEKVARDLERELDEVLTRGGEERVRRDHMVLHEYVNAAGITDKEVADRAEKLLREAEEHNKRSLDESRRVLEELDEEIR

SEQ ID NO: 534 - protein, 183 aa, Artificial Sequence
  Synthetic
SIREKIRELEERLEEVLRRIEENSERVLREAERVLKEIKDNSKRNNEKLERALEEIRKLPVEDELVRRVKELVERLKRHNKKSSEDVERVVRELKEELKRSSEEVKKAVDRLKEELEKVLRDGGEREVDRDHMVLHEYVNAAGITNRRVVERLKRLLEELKKHNEDSLRKSEEVLRKLEEDAR

SEQ ID NO: 535 - protein, 185 aa, Artificial Sequence
  Synthetic
SEAEELLKRLEDRAEEILRRLEEILRTSRKLAEDVLRELEKLLRESERRIREVLEELRGIKDKKELEDVIREVEKELDESLERSRELLKDVLKKLDDNLKESERLVEDIDRELAKILEDLKKAGVPKEVRDHMVLHEYVNAAGITRIVDENAKIVEDARRALEKIVKENEEILRRLKKELRELRK

SEQ ID NO: 536 - protein, 186 aa, Artificial Sequence
  Synthetic
SRVEEIIEDLRRLLEEIRKENEDSIRRSKELLDRVKEINDTIIAELERLLKDIEKEVREKGSESEEVKKALRAVLEELEKLLRRVAEINEEVLRRNSKLVEEDERRNREVLKELARLVEELIREIGDEDRDHMVLHEYVNAAGITDKLDRESKEAFRATNEEIAKLDEDTARVAERVKKAIEDLAK

SEQ ID NO: 537 - protein, 186 aa, Artificial Sequence
  Synthetic
SEVDEIIKELERLLAEIARENERIIRESRKLADEVRKRNEDAIRKLEELVARLADAVRRKGSESEEVKKLIEDVLREIERLLKRIEEENREVVKRNSELVERVRAINEEILRRVAELVEKIARDIGDKDRDHMVLHEYVNAAGITKKLDDETRRVIEDTNKKIADLDKATRDVVRKVLEEVKKLEK

SEQ ID NO: 538 - protein, 181 aa, Artificial Sequence
  Synthetic
SEIETVRREIEKILDDLRRTVKRIEDEVRKIHEDLRRSLEDSKRNIEEILKDLERAARRDGLDKKVEDDMRKLVEDLKRKHDKLRADNEAVTKELKDRLKKLEDDLARAIEELRRRLDKGLDKEDIDKLRDHMVLHEYVNAAGITELLERYEEIVRRIKELLKDLNREAEEVVRRLKEELR

SEQ ID NO: 539 - protein, 185 aa, Artificial Sequence
  Synthetic
SSVEELLERLRRISEENKRRIEKLLREVEKVLRELKDRHRKLLKRVEEIIRKVKEEIKSGLPEEAVKRVLERVRERVKEVLEEADRLNDEMRRIVTEVEKELDKSDKEVEDAVRDILKKIEEGVRDRETRDHMVLHEYVNAAGITDRSKKVKEEIRRILEDLTRTTERVKREIAKLLKELEDTAR

SEQ ID NO: 540 - protein, 181 aa, Artificial Sequence
  Synthetic
SEVERVLEDLRRLVRDVEEKLRRIIERDRRLVEEVERENRKTIRKIEELLRKVLEELKDISDKKTIERIVREIIKEARDLVRRNHERNREIVDESRRLVEELRRIVEEIIRRLRELLERVKSGELAERIERDHMVLHEYVNAAGITLEKTSRDLKKRLEELDRELKALVEKVERDLEELRK

SEQ ID NO: 541 - protein, 187 aa, Artificial Sequence
  Synthetic
DEEEELRKRLEKLSKEVRELLRRDEEEDRRLNRELEELLKDHERTVRDLSREVEDLLRKARRKVSEEELTRLRKKLRDLEEESKEALRELRRRVEELNKENKKSLDDLERRLKELEDRAREVEKRDRREDRDHMVLHEYVNAAGITAEDLKRNTEDLRRVIKELAERLEELNKRLKREIRRLKEELR

SEQ ID NO: 542 - protein, 181 aa, Artificial Sequence
  Synthetic
DEERKLEKSLKDVEDTHRRLLEKNDEDLKELRKRVEDMLRRLEDALRRILEDIEEKLKRIEDDETLKRLRKRVKELLDEIRRRLERLEREVDKRLEEIKERNDRHHEEAKKELKRIRDKIRRDGADEKILRDHMVLHEYVNAAGITSNDEVKELAERLEETIRDLLRRIEEILKEIEERVR

SEQ ID NO: 543 - protein, 181 aa, Artificial Sequence
  Synthetic
EEIERALREMRELSRTHKELVEKILRDIAELAKTHERINEDILRKIKKLIDEIADEIRKEDKKEELKRKIDELRRRAEELLKESKEHLKRLEDTVRELIERLKETLKKVEEDLKRILEKLEKSRELDEIARDHMVLHEYVNAAGITVEDEVRRLIRKLEELNRRTEEEVKKLIKKLEDDLK

SEQ ID NO: 544 - protein, 182 aa, Artificial Sequence
  Synthetic
DELEEVVRRVRELSRTVKEELREVIERVRELSERVKKKLRKVLREVAELHREVMKRVRDSGLDKSKLEKLEDESRRVLDKSREILRKNEEDNRRLNKELEEILKKNEDDNEDVRRKVDEVTRKGKDAEEVRDHMVLHEYVNAAGITDALKRVEDRVRESDKSVRELLEENRKVVEDIKRRVD

SEQ ID NO: 545 - protein, 182 aa, Artificial Sequence
  Synthetic
SDADRVAEELKKLVEDSRRENERVIEESKRLVKENEDRNRELIERLKKLVDKLRDILEKEKDKKTLDDIVREILERLKRLLEKVEDENRKSHEENKRLLEDVKRKNKRISDELKRLLEEIERRNVDVDKVRDHMVLHEYVNAAGITKTEEVAKKSSEDIKRVADETRRRAEELLKEVDELRK

SEQ ID NO: 546 - protein, 183 aa, Artificial Sequence
  Synthetic
SEVDEVLERIKRLLERLAEHSDKVVRDIEKLLDDNRKENERLLDKLRRELKRLEEMRRRGDLREELLERVVREVEKEIRDIKRKNKRSVETVEKLVRDDRKELKRALEDVERLIRELETRLKDKEELRRKRDHMVLHEYVNAAGITKKTDEVLKRARETIEDLNRKLDKVLKEVRDKLDRLRD

SEQ ID NO: 547 - protein, 184 aa, Artificial Sequence
  Synthetic
ELIKKARKDVEEVRERSERLVDELRKRNKKLADESRRLIDKLRKDVEKVLREIEDLLRKRRTKDVLKEIEDLVRELERELRRVVKESSDKVRKLIRENEKVVEESSRLFRDLVEKLRRVVEERNDKKLMERDHMVLHEYVNAAGITERDVREINKESERVNEETEREVEDAIRKLREVLRRAKK

SEQ ID NO: 548 - protein, 186 aa, Artificial Sequence
  Synthetic
KEVEDLERTVRTILKRMRELITRNEEEIRRSIEELKKLLKENKDTVRRILEEMKELKKEGGDDKKRLVEEIKRLLDELRENSKRSSDRAKEIHERNKRHSEESSRTIEKLLKELRDLVRDVERKLRDEDARDHMVLHEYVNAAGITEADERNKRLTKRSKEVLDEVHRANEEALKEVEEVVRRVTK

SEQ ID NO: 549 - protein, 182 aa, Artificial Sequence
  Synthetic
SELEKTLEDLKRHSEENKKKLEEDLRDMERNLKENKDRLKKILEEAEKTLKDLERRFREGDIDERELERVRRKMEEIKKRLDENVERNRRKAEDIKRKLDENVKRSEDRVKEIKEDIRRRVRDKDKAEELRDHMVLHEYVNAAGITRVKKALDDIVKELEELHERLKRRLEEILRRIAETVR

SEQ ID NO: 550 - protein, 183 aa, Artificial Sequence
  Synthetic
RVDERLDTVLKRVEETVRENKKKNDELLERSKENIDRLKKRLDDLLDKVRREAEKLKREVTKEEVKKIIDEVLKEIEDLLRTVKEELDRALERNREVVEETKRRIDRVLKEIEKLIRDVKRDRKEEVVKERDHMVLHEYVNAAGITKDAERRLRETNERLNEIVKEVEKRIRELSEEVRKRVK

SEQ ID NO: 551 - protein, 183 aa, Artificial Sequence
  Synthetic
SVDERLDEVLERVKEDMDRNRRKNDESLREDEENVRRNKKETDESVKRVEERVRELKKRVKDERVKEFLDRVLEEIRKSAEEVKTIIDEVHKESEETVRRTKKIIEEVLRRIEELIRRVKKDRKEEVVKTRDHMVLHEYVNAAGITDEAHKRNKELNERVNRVNKEAHKRNEDLLREAERKVR

SEQ ID NO: 552 - protein, 183 aa, Artificial Sequence
  Synthetic
SIEERVRELMRDLERVLKEIREHSKRVIEEAKRVLEEIERNSERNNKELEEVLDEIRKRPVDETLVREVEEAVKKLKEHNKRSSDTVRDAVRKLVERLKESSDRATELVKDLKRKLEEVLRRGGEKELEERDHMVLHEYVNAAGITKEVVDRLKEVLERLKEHNRRSLDESRKVLRELKERIR

SEQ ID NO: 553 - protein, 185 aa, Artificial Sequence
  Synthetic
SEAEELLKRLEDRAEEILRRLEEILRTSRKLAEDVLRELEKLLRESERRIREVLEELRGIKDKKELEDVIREVEKELDESLERSRELLKDVLKKLDDNLKESERLVEDIDRELAKILEDLKKAGVPKEVVRDHMVLHEYVNAAGITIVDENAKIVEDARRALEKIVKENEEILRRLKKELRELRK

SEQ ID NO: 554 - protein, 188 aa, Artificial Sequence
  Synthetic
SEIEKILKEIEDLARRDEEVSKKIVEDIRRLAKEVEDTSRDIVRKIEELAKRVLDRLRKDGSKEELEKEVREVVKTLEELVKDNHRLIRRAVEEMKRLVEENHRHSREVVKELEDLVRELRKGSGSEDSERDHMVLHEYVNAAGITSEKSNEEVKRTVEELVRRMEESNDRVRDLVRRLVEELKRAVD

SEQ ID NO: 555 - protein, 186 aa, Artificial Sequence
  Synthetic
SRVEEIIEDLRRLLEEIRKENEDSIRRSKELLDRVKEINDTIIAELERLLKDIEKEVREKGSESEEVKKALRAVLEELEKLLRRVAEINEEVLRRNSKLVEEDERRNREVLKELARLVEELIREIGDEDKRDHMVLHEYVNAAGITKLDRESKEAFRATNEEIAKLDEDTARVAERVKKAIEDLAK

SEQ ID NO: 556 - protein, 183 aa, Artificial Sequence
  Synthetic
SDVDRVLEEIRKLLEDLKRHSEKVSEENEDLLRANTELNKRVSEDNERLLEELKRLRERGGISEEDLKRALDRVRKTVETVKEENKRSLEDVRRTVETNKRKLERVVEEIKKLIEDAKRRGSGDEEAKKKRDHMVLHEYVNAAGITETSDRSLEKVEADLRRLNEELDRSLERAERTIRELAK

SEQ ID NO: 557 - protein, 182 aa, Artificial Sequence
  Synthetic
RVEDALRKLLDDVRRLVEEAERRLRTSNDKSRRLVEEAKRRLEESNERSEKLVRDVRRRIRDEDVKRVLEELLKRDHDVVRRVLERIDEMLERNSRLVKRVLEDIRRLLKRVREVVERIKRVRSKVVEEVLRDHMVLHEYVNAAGITVLRASEDTIRRLEEIIRKVEEDSKRIIEEIERAAR

SEQ ID NO: 558 - protein, 183 aa, Artificial Sequence
  Synthetic
KVEKRLTDLLKTVADEVKRVEDELRETVRESKEVVDKSRRDLERTVEESEKTVKDAERRVSEDLVRRIRKVLDENREVNDRVVKEDERILEENERVNRKVVEKIRDILRKIEEVVRRAAEEIRDEEVVKKVRDHMVLHEYVNAAGITRVRERSKKILTDLKKSSEDVKRESERMLKKLEDEIR

SEQ ID NO: 559 - protein, 182 aa, Artificial Sequence
  Synthetic
SDADRVAEELKKLVEDSRRENERVIEESKRLVKENEDRNRELIERLKKLVDKLRDILEKEKDKKTLDDIVREILERLKRLLEKVEDENRKSHEENKRLLEDVKRKNKRISDELKRLLEEIERRNVDVDKVRRDHMVLHEYVNAAGITTEEVAKKSSEDIKRVADETRRRAEELLKEVDELRK

SEQ ID NO: 560 - protein, 186 aa, Artificial Sequence
  Synthetic
SEVDEVRKTLEDLLRRLDEENKDIIRRNKELLDDLDRKVREAIERLKRLLDELRKILEKLKDRETLTRIIEEIEKRARELIKRLRDEIRKIEEESKKSIEDSRKRNDEIRKRLEELIKDLRDKIKDSEELARDHMVLHEYVNAAGITLKEKNKRLEDDSRRVITELRKKLKDLEDRVREEIEELRK

SEQ ID NO: 561 - protein, 185 aa, Artificial Sequence
  Synthetic
SAEELLRTIEKRIEDNHRRLEEILEEIARLIEDMLRTDERIVREIKELLKEVLDRVRRAGVPEEVLERVRRELERLKKELEELRRRSEEKVKELKRRLEEIRRKLEEEHRDLRRKLEELRRDLGDKEEVVKRDHMVLHEYVNAAGITAEDLLRRVEEVIRTSKKESKDVLEKIERLLRDLERRTR

SEQ ID NO: 562 - protein, 183 aa, Artificial Sequence
  Synthetic
SIEDRIRELEKRLEKVLREIEEHSKKVVREAEKVLREIEENSRRNNKRLEEVLDEIRKRPVDETLVREVEEAVRRLKKHNKDSSDTARKLVEELKKELKESSDRVRKVVEELKDRLRKVLEKGGEEDVRKVRDHMVLHEYVNAAGITDVVRRLKEVLKELRKHNKRSLDESEKVLRELRERIR

SEQ ID NO: 563 - protein, 188 aa, Artificial Sequence
  Synthetic
SEIEKILKEIEDLARRDEEVSKKIVEDIRRLAKEVEDTSRDIVRKIEELAKRVLDRLRKDGSKEELEKEVREVVKTLEELVKDNHRLIRRAVEEMKRLVEENHRHSREVVKELEDLVRELRKGSGSEDSERRDHMVLHEYVNAAGITEKSNEEVKRTVEELVRRMEESNDRVRDLVRRLVEELKRAVD

SEQ ID NO: 564 - protein, 186 aa, Artificial Sequence
  Synthetic
SRVEEIIEDLRRLLEEIRKENEDSIRRSKELLDRVKEINDTIIAELERLLKDIEKEVREKGSESEEVKKALRAVLEELEKLLRRVAEINEEVLRRNSKLVEEDERRNREVLKELARLVEELIREIGDEDKARDHMVLHEYVNAAGITLDRESKEAFRATNEEIAKLDEDTARVAERVKKAIEDLAK

SEQ ID NO: 565 - protein, 186 aa, Artificial Sequence
  Synthetic
SEVDEIIKELERLLAEIARENERIIRESRKLADEVRKRNEDAIRKLEELVARLADAVRRKGSESEEVKKLIEDVLREIERLLKRIEEENREVVKRNSELVERVRAINEEILRRVAELVEKIARDIGDKDEVRDHMVLHEYVNAAGITLDDETRRVIEDTNKKIADLDKATRDVVRKVLEEVKKLEK

SEQ ID NO: 566 - protein, 185 aa, Artificial Sequence
  Synthetic
SSVEELLERLRRISEENKRRIEKLLREVEKVLRELKDRHRKLLKRVEEIIRKVKEEIKSGLPEEAVKRVLERVRERVKEVLEEADRLNDEMRRIVTEVEKELDKSDKEVEDAVRDILKKIEEGVRDRETAERDHMVLHEYVNAAGITSKKVKEEIRRILEDLTRTTERVKREIAKLLKELEDTAR

SEQ ID NO: 567 - protein, 186 aa, Artificial Sequence
  Synthetic
SAEDSIRELLERDERLLEEARKEAKRLNEENERLLERIEETVRRLLEEIKRLLDDIRKKIKGEKLREIEELVRRVKRTIEKLLEEVKKSVEDSSKRIEELLEAVERSVERTKEEIRRLLDEVRKDRKEELVKRDHMVLHEYVNAAGITVKEVIEEVEKLIRDNEKLAEDIEREIRRLLKELDEAAK

SEQ ID NO: 568 - protein, 183 aa, Artificial Sequence
  Synthetic
KVEKRLTDLLKTVADEVKRVEDELRETVRESKEVVDKSRRDLERTVEESEKTVKDAERRVSEDLVRRIRKVLDENREVNDRVVKEDERILEENERVNRKVVEKIRDILRKIEEVVRRAAEEIRDEEVVKKVERDHMVLHEYVNAAGITVRERSKKILTDLKKSSEDVKRESERMLKKLEDEIR

SEQ ID NO: 569 - protein, 186 aa, Artificial Sequence
  Synthetic
SEVDEVRKTLEDLLRRLDEENKDIIRRNKELLDDLDRKVREAIERLKRLLDELRKILEKLKDRETLTRIIEEIEKRARELIKRLRDEIRKIEEESKKSIEDSRKRNDEIRKRLEELIKDLRDKIKDSEELARRDHMVLHEYVNAAGITKEKNKRLEDDSRRVITELRKKLKDLEDRVREEIEELRK

SEQ ID NO: 570 - protein, 183 aa, Artificial Sequence
  Synthetic
SEVDEVLERIKRLLERLAEHSDKVVRDIEKLLDDNRKENERLLDKLRRELKRLEEMRRRGDLREELLERVVREVEKEIRDIKRKNKRSVETVEKLVRDDRKELKRALEDVERLIRELETRLKDKEELRRKLERDHMVLHEYVNAAGITTDEVLKRARETIEDLNRKLDKVLKEVRDKLDRLRD

SEQ ID NO: 571 - protein, 185 aa, Artificial Sequence
  Synthetic
DDIERLKREIERLLKEAEKISRDNEERSKELLDRLRKLSEDNKRKIDKLVEELKRLADKIKDKEELTRRLKEVVDRVEKSVRDSERMLREVVREDEESVRRSKTKLEDLLRKVEELVRRLEKKVTDEKVKRDRDHMVLHEYVNAAGITRKNDEVHRRSREEVKRLLEENRKLLEDLRRMVREITQ

SEQ ID NO: 572 - protein, 184 aa, Artificial Sequence
  Synthetic
ELIKKARKDVEEVRERSERLVDELRKRNKKLADESRRLIDKLRKDVEKVLREIEDLLRKRRTKDVLKEIEDLVRELERELRRVVKESSDKVRKLIRENEKVVEESSRLFRDLVEKLRRVVEERNDKKLMEEVRDHMVLHEYVNAAGITDVREINKESERVNEETEREVEDAIRKLREVLRRAKK

SEQ ID NO: 573 - protein, 184 aa, Artificial Sequence
  Synthetic
DEIRKVVKEITDLLKASNDKNRKVVEEIRDLLRKSKKLADELVERLRALVEDLRRRIDKSGDKETAEDIVRRIIEELKRILKEIEDLARRINREIERLVEEVERDNRDVNRAIEELLKDIARRGGSEDLKRVRDHMVLHEYVNAAGITRVKEDADRVSEANKEVLDRVREEVKRLIEEVRETLR

SEQ ID NO: 574 - protein, 186 aa, Artificial Sequence
  Synthetic
SRVEEIIEDLRRLLEEIRKENEDSIRRSKELLDRVKEINDTIIAELERLLKDIEKEVREKGSESEEVKKALRAVLEELEKLLRRVAEINEEVLRRNSKLVEEDERRNREVLKELARLVEELIREIGDEDKARRDHMVLHEYVNAAGITDRESKEAFRATNEEIAKLDEDTARVAERVKKAIEDLAK

SEQ ID NO: 575 - protein, 186 aa, Artificial Sequence
  Synthetic
SEVDEIIKELERLLAEIARENERIIRESRKLADEVRKRNEDAIRKLEELVARLADAVRRKGSESEEVKKLIEDVLREIERLLKRIEEENREVVKRNSELVERVRAINEEILRRVAELVEKIARDIGDKDEVTRDHMVLHEYVNAAGITDDETRRVIEDTNKKIADLDKATRDVVRKVLEEVKKLEK

SEQ ID NO: 576 - protein, 185 aa, Artificial Sequence
  Synthetic
SEIDEVLTRLRKISKDLNETSDRVNERARKIIDDIKKESKRVNDEAREIVERLKREIDKTRDRDVLRRILKEIEDVARRVKEINEELLARVEKVVREVEEINRELVKRSREAVEAVKRLLDRGVSDEDKVERRDHMVLHEYVNAAGITEESTRSVRKLLEELKRELEKSTRSVKALVDELRERVR

SEQ ID NO: 577 - protein, 183 aa, Artificial Sequence
  Synthetic
SDVDRVLEEIRKLLEDLKRHSEKVSEENEDLLRANTELNKRVSEDNERLLEELKRLRERGGISEEDLKRALDRVRKTVETVKEENKRSLEDVRRTVETNKRKLERVVEEIKKLIEDAKRRGSGDEEAKKKLDRDHMVLHEYVNAAGITSDRSLEKVEADLRRLNEELDRSLERAERTIRELAK

SEQ ID NO: 578 - protein, 187 aa, Artificial Sequence
  Synthetic
DEEEELRKRLEKLSKEVRELLRRDEEEDRRLNRELEELLKDHERTVRDLSREVEDLLRKARRKVSEEELTRLRKKLRDLEEESKEALRELRRRVEELNKENKKSLDDLERRLKELEDRAREVEKRDRREDELRRDHMVLHEYVNAAGITLKRNTEDLRRVIKELAERLEELNKRLKREIRRLKEELR

SEQ ID NO: 579 - protein, 184 aa, Artificial Sequence
  Synthetic
ELIKKARKDVEEVRERSERLVDELRKRNKKLADESRRLIDKLRKDVEKVLREIEDLLRKRRTKDVLKEIEDLVRELERELRRVVKESSDKVRKLIRENEKVVEESSRLFRDLVEKLRRVVEERNDKKLMEEVERDHMVLHEYVNAAGITVREINKESERVNEETEREVEDAIRKLREVLRRAKK

SEQ ID NO: 580 - protein, 186 aa, Artificial Sequence
  Synthetic
KEVEDLERTVRTILKRMRELITRNEEEIRRSIEELKKLLKENKDTVRRILEEMKELKKEGGDDKKRLVEEIKRLLDELRENSKRSSDRAKEIHERNKRHSEESSRTIEKLLKELRDLVRDVERKLRDEDAKRKRDHMVLHEYVNAAGITERNKRLTKRSKEVLDEVHRANEEALKEVEEVVRRVTK

SEQ ID NO: 581 - protein, 185 aa, Artificial Sequence
  Synthetic
SAEELLRTIEKRIEDNHRRLEEILEEIARLIEDMLRTDERIVREIKELLKEVLDRVRRAGVPEEVLERVRRELERLKKELEELRRRSEEKVKELKRRLEEIRRKLEEEHRDLRRKLEELRRDLGDKEEVVKKLRDHMVLHEYVNAAGITDLLRRVEEVIRTSKKESKDVLEKIERLLRDLERRTR

SEQ ID NO: 582 - protein, 185 aa, Artificial Sequence
  Synthetic
SSVEELLERLRRISEENKRRIEKLLREVEKVLRELKDRHRKLLKRVEEIIRKVKEEIKSGLPEEAVKRVLERVRERVKEVLEEADRLNDEMRRIVTEVEKELDKSDKEVEDAVRDILKKIEEGVRDRETAERARDHMVLHEYVNAAGITKVKEEIRRILEDLTRTTERVKREIAKLLKELEDTAR

SEQ ID NO: 583 - protein, 185 aa, Artificial Sequence; identical to SEQ ID NO: 582
  Synthetic

SEQ ID NO: 584 - protein, 186 aa, Artificial Sequence
  Synthetic
SAEDSIRELLERDERLLEEARKEAKRLNEENERLLERIEETVRRLLEEIKRLLDDIRKKIKGEKLREIEELVRRVKRTIEKLLEEVKKSVEDSSKRIEELLEAVERSVERTKEEIRRLLDEVRKDRKEELVKRVRDHMVLHEYVNAAGITEVIEEVEKLIRDNEKLAEDIEREIRRLLKELDEAAK

SEQ ID NO: 585 - protein, 185 aa, Artificial Sequence
  Synthetic
DDIERLKREIERLLKEAEKISRDNEERSKELLDRLRKLSEDNKRKIDKLVEELKRLADKIKDKEELTRRLKEVVDRVEKSVRDSERMLREVVREDEESVRRSKTKLEDLLRKVEELVRRLEKKVTDEKVKRDARRDHMVLHEYVNAAGITNDEVHRRSREEVKRLLEENRKLLEDLRRMVREITQ

SEQ ID NO: 586 - protein, 186 aa, Artificial Sequence
  Synthetic
SRVEEIIEDLRRLLEEIRKENEDSIRRSKELLDRVKEINDTIIAELERLLKDIEKEVREKGSESEEVKKALRAVLEELEKLLRRVAEINEEVLRRNSKLVEEDERRNREVLKELARLVEELIREIGDEDKARKVRDHMVLHEYVNAAGITESKEAFRATNEEIAKLDEDTARVAERVKKAIEDLAK

SEQ ID NO: 587 - protein, 186 aa, Artificial Sequence
  Synthetic
SEVDEIIKELERLLAEIARENERIIRESRKLADEVRKRNEDAIRKLEELVARLADAVRRKGSESEEVKKLIEDVLREIERLLKRIEEENREVVKRNSELVERVRAINEEILRRVAELVEKIARDIGDKDEVTKVRDHMVLHEYVNAAGITETRRVIEDTNKKIADLDKATRDVVRKVLEEVKKLEK

SEQ ID NO: 588 - protein, 185 aa, Artificial Sequence
  Synthetic
SEIDEVLTRLRKISKDLNETSDRVNERARKIIDDIKKESKRVNDEAREIVERLKREIDKTRDRDVLRRILKEIEDVARRVKEINEELLARVEKVVREVEEINRELVKRSREAVEAVKRLLDRGVSDEDKVERVVRDHMVLHEYVNAAGITSTRSVRKLLEELKRELEKSTRSVKALVDELRERVR

SEQ ID NO: 589 - protein, 185 aa, Artificial Sequence
  Synthetic
SSVEELLERLRRISEENKRRIEKLLREVEKVLRELKDRHRKLLKRVEEIIRKVKEEIKSGLPEEAVKRVLERVRERVKEVLEEADRLNDEMRRIVTEVEKELDKSDKEVEDAVRDILKKIEEGVRDRETAERARRDHMVLHEYVNAAGITVKEEIRRILEDLTRTTERVKREIAKLLKELEDTAR

SEQ ID NO: 590 - protein, 187 aa, Artificial Sequence
  Synthetic
SEKETVRDELRKLVETIRKLLEEDKESDKRLADRIRELNEENKEDTERLIRELEKVLEELRKKVSEDELRKLRKRIEDLRRRDEELNKRSREKLEDLNERNKDSLRRIEDELRKLVEEAREVEKRDNDEERLRKLRDHMVLHEYVNAAGITENNKRLRKAIKELLDELRKINKELREVIKKLLDDAR

SEQ ID NO: 591 - protein, 186 aa, Artificial Sequence
  Synthetic
DEIRELEERVRRILDELRRLVERNREVIERSIRELEKLLDRNRRKVEEILRRIDDLTRRGGDDKKTMLDDVRRLLREAEDHSRRSSETAKRIHRENEEHSKDSSRKVRKLIEELRELAKKVEKEITDERVKEAIKRDHMVLHEYVNAAGITNRELTKTSKKVLEDVDRTNRRLVKEVRDVVERARK

SEQ ID NO: 592 - protein, 186 aa, Artificial Sequence
  Synthetic
KEVEDLERTVRTILKRMRELITRNEEEIRRSIEELKKLLKENKDTVRRILEEMKELKKEGGDDKKRLVEEIKRLLDELRENSKRSSDRAKEIHERNKRHSEESSRTIEKLLKELRDLVRDVERKLRDEDAKRKLDRDHMVLHEYVNAAGITNKRLTKRSKEVLDEVHRANEEALKEVEEVVRRVTK

SEQ ID NO: 593 - protein, 186 aa, Artificial Sequence
  Synthetic
SRVEEIIEDLRRLLEEIRKENEDSIRRSKELLDRVKEINDTIIAELERLLKDIEKEVREKGSESEEVKKALRAVLEELEKLLRRVAEINEEVLRRNSKLVEEDERRNREVLKELARLVEELIREIGDEDKARKVARDHMVLHEYVNAAGITSKEAFRATNEEIAKLDEDTARVAERVKKAIEDLAK

SEQ ID NO: 594 - protein, 187 aa, Artificial Sequence
  Synthetic
DEEEELRKRLEKLSKEVRELLRRDEEEDRRLNRELEELLKDHERTVRDLSREVEDLLRKARRKVSEEELTRLRKKLRDLEEESKEALRELRRRVEELNKENKKSLDDLERRLKELEDRAREVEKRDRREDELRELLRDHMVLHEYVNAAGITNTEDLRRVIKELAERLEELNKRLKREIRRLKEELR

SEQ ID NO: 595 - protein, 188 aa, Artificial Sequence
  Synthetic
SEIEKILKEIEDLARRDEEVSKKIVEDIRRLAKEVEDTSRDIVRKIEELAKRVLDRLRKDGSKEELEKEVREVVKTLEELVKDNHRLIRRAVEEMKRLVEENHRHSREVVKELEDLVRELRKGSGSEDSERLVREVRDHMVLHEYVNAAGITEVKRTVEELVRRMEESNDRVRDLVRRLVEELKRAVD

SEQ ID NO: 596 - protein, 229 aa, Artificial Sequence
  Synthetic
SKEERLREVAEKHKKDLEDIVKRVDEAAKETARRLEEILKRLEEVLKKILDDLEKGPDDEKLKKVKKILKDIMDRLAELIKKILKLLKENLEKIKELLRRNLEISEELLKLAKGLSDRDVLETVRRVLEKLDEEWDRVLEDSRRIIETILRELDTLLREVEKLIKEIKRDHMVLHEYVNAAGITVEVVRRVIKALKEVLERHVDATREVIERVKRVNKRLLEAVREVVT

SEQ ID NO: 597 - protein, 229 aa, Artificial Sequence
  Synthetic
SKEERLREVAEKHKKDLEDIVKRVDEAAKETARRLEEILKRLEEVLKKILDDLEKGPDDEKLKKVKKILKDIMDRLAELIKKILKLLKENLEKIKELLRRNLEISEELLKLAKGLSDRDVLETVRRVLEKLDEEWDRVLEDSRRIIETILRELDTLLREVEKLIKEIKDRDHMVLHEYVNAAGITEVVRRVIKALKEVLERHVDATREVIERVKRVNKRLLEAVREVVT

SEQ ID NO: 598 - protein, 231 aa, Artificial Sequence
  Synthetic
DKAEVLREALKLLKDLLEELIKIHEESLKRILDLIDTLVKVHEDALRALKELLERSGLDERELRKVERMATESLRTIAKLKEELRDLARRSLEKLREDLKRVDDTLRKVEEKVRRTGPSEELIEELIRTIEKLLKEIVRINEEVLKAVRELLKTLLKLSEDVVRRIEEILRDHMVLHEYVNAAGITVEELRRLHEEIKERLDDVARRSEEELRRIIKKLKEVVKEIRKKLK

SEQ ID NO: 599 - protein, 231 aa, Artificial Sequence
  Synthetic
SKEEEVEKVLRKWEEILRRLIEENKRANDKIRREYEELVKEIRRVLEEIKEVAERLGVSEEVKRILEKLIKLLEDILEYEKENVERLIELNERILRELKKSVEELKALVTRVRRDGLPESEVRKLVEDVLRKNEELLKEAKKAWRDSIENLKRVLEEVAKLVKTVLREIERDHMVLHEYVNAAGITERLLRVAEEVIRRILKVNTELMRVDERSIRESLKAISEVLKVLDT

SEQ ID NO: 600 - protein, 231 aa, Artificial Sequence; identical to SEQ ID NO: 599
  Synthetic

SEQ ID NO: 601 - protein, 231 aa, Artificial Sequence
  Synthetic
SKDEELARLLEELVERWRKIVEDLERDHRRLVKEIRELVERIRKKLEELVDRIRKNGIDERIVRLIEEIAKIIEEVLKEIVKLVERAVRENVRVLRESVRLVAELVETLARLLRGSDERVTEAIKKVLDTSEDLIRRVIKVNEDILREIAKLVEEVLREAERILTEIKKERDHMVLHEYVNAAGITVDDVLRIIARILKLLRDLTRRLAEVAKAVHKLLEELLRKLKEDTR

SEQ ID NO: 602 - protein, 229 aa, Artificial Sequence
  Synthetic
SKEERLREVAEKHKKDLEDIVKRVDEAAKETARRLEEILKRLEEVLKKILDDLEKGPDDEKLKKVKKILKDIMDRLAELIKKILKLLKENLEKIKELLRRNLEISEELLKLAKGLSDRDVLETVRRVLEKLDEEWDRVLEDSRRIIETILRELDTLLREVEKLIKEIKDERDHMVLHEYVNAAGITVVRRVIKALKEVLERHVDATREVIERVKRVNKRLLEAVREVVT

SEQ ID NO: 603 - protein, 231 aa, Artificial Sequence
  Synthetic
DKAEVLREALKLLKDLLEELIKIHEESLKRILDLIDTLVKVHEDALRALKELLERSGLDERELRKVERMATESLRTIAKLKEELRDLARRSLEKLREDLKRVDDTLRKVEEKVRRTGPSEELIEELIRTIEKLLKEIVRINEEVLKAVRELLKTLLKLSEDVVRRIEEILRRDHMVLHEYVNAAGITEELRRLHEEIKERLDDVARRSEEELRRIIKKLKEVVKEIRKKLK

SEQ ID NO: 604 - protein, 231 aa, Artificial Sequence
  Synthetic
SKEEEVEKVLRKWEEILRRLIEENKRANDKIRREYEELVKEIRRVLEEIKEVAERLGVSEEVKRILEKLIKLLEDILEYEKENVERLIELNERILRELKKSVEELKALVTRVRRDGLPESEVRKLVEDVLRKNEELLKEAKKAWRDSIENLKRVLEEVAKLVKTVLREIEERDHMVLHEYVNAAGITRLLRVAEEVIRRILKVNTELMRVDERSIRESLKAISEVLKVLDT

SEQ ID NO: 605 - protein, 231 aa, Artificial Sequence; identical to SEQ ID NO: 604
  Synthetic

SEQ ID NO: 606 - protein, 229 aa, Artificial Sequence
  Synthetic
SKEERLREVAEKHKKDLEDIVKRVDEAAKETARRLEEILKRLEEVLKKILDDLEKGPDDEKLKKVKKILKDIMDRLAELIKKILKLLKENLEKIKELLRRNLEISEELLKLAKGLSDRDVLETVRRVLEKLDEEWDRVLEDSRRIIETILRELDTLLREVEKLIKEIKDEIRDHMVLHEYVNAAGITVRRVIKALKEVLERHVDATREVIERVKRVNKRLLEAVREVVT

SEQ ID NO: 607 - protein, 229 aa, Artificial Sequence; identical to SEQ ID NO: 606
  Synthetic

SEQ ID NO: 608 - protein, 231 aa, Artificial Sequence
  Synthetic
DKAEVLREALKLLKDLLEELIKIHEESLKRILDLIDTLVKVHEDALRALKELLERSGLDERELRKVERMATESLRTIAKLKEELRDLARRSLEKLREDLKRVDDTLRKVEEKVRRTGPSEELIEELIRTIEKLLKEIVRINEEVLKAVRELLKTLLKLSEDVVRRIEEILRKRDHMVLHEYVNAAGITELRRLHEEIKERLDDVARRSEEELRRIIKKLKEVVKEIRKKLK

SEQ ID NO: 609 - protein, 231 aa, Artificial Sequence; identical to SEQ ID NO: 608
  Synthetic

SEQ ID NO: 610 - protein, 231 aa, Artificial Sequence
  Synthetic
SKEEEVEKVLRKWEEILRRLIEENKRANDKIRREYEELVKEIRRVLEEIKEVAERLGVSEEVKRILEKLIKLLEDILEYEKENVERLIELNERILRELKKSVEELKALVTRVRRDGLPESEVRKLVEDVLRKNEELLKEAKKAWRDSIENLKRVLEEVAKLVKTVLREIEEKRDHMVLHEYVNAAGITLLRVAEEVIRRILKVNTELMRVDERSIRESLKAISEVLKVLDT

SEQ ID NO: 611 - protein, 231 aa, Artificial Sequence; identical to SEQ ID NO: 610
  Synthetic

SEQ ID NO: 612 - protein, 231 aa, Artificial Sequence
  Synthetic
SKDEELARLLEELVERWRKIVEDLERDHRRLVKEIRELVERIRKKLEELVDRIRKNGIDERIVRLIEEIAKIIEEVLKEIVKLVERAVRENVRVLRESVRLVAELVETLARLLRGSDERVTEAIKKVLDTSEDLIRRVIKVNEDILREIAKLVEEVLREAERILTEIKKEGDRDHMVLHEYVNAAGITDVLRIIARILKLLRDLTRRLAEVAKAVHKLLEELLRKLKEDTR

SEQ ID NO: 613 - protein, 229 aa, Artificial Sequence
  Synthetic
SKEERLREVAEKHKKDLEDIVKRVDEAAKETARRLEEILKRLEEVLKKILDDLEKGPDDEKLKKVKKILKDIMDRLAELIKKILKLLKENLEKIKELLRRNLEISEELLKLAKGLSDRDVLETVRRVLEKLDEEWDRVLEDSRRIIETILRELDTLLREVEKLIKEIKDEISRDHMVLHEYVNAAGITRRVIKALKEVLERHVDATREVIERVKRVNKRLLEAVREVVT

SEQ ID NO: 614 - protein, 229 aa, Artificial Sequence; identical to SEQ ID NO: 613
  Synthetic

SEQ ID NO: 615 - protein, 234 aa, Artificial Sequence
  Synthetic
SAKETIRKLIEENKDIIRKLAEKLKRLLEESERIAEEALRLIKELLERIERALRRVGSGIDEELLKELEKELARLEEELKEILDRVRDLHRRLAEEIRKILEESKKLNEELEDRLRKDGDVEELLELLERVHATDVRLLRELLKLLKKVHEDVVSLLERLLELLKRVLDRIVERDHMVLHEYVNAAGITEREIRRLAKRLKELSDRLEEKIRKIKRELDDLSARLREKIERTRK

SEQ ID NO: 616 - protein, 231 aa, Artificial Sequence
  Synthetic
DKAEVLREALKLLKDLLEELIKIHEESLKRILDLIDTLVKVHEDALRALKELLERSGLDERELRKVERMATESLRTIAKLKEELRDLARRSLEKLREDLKRVDDTLRKVEEKVRRTGPSEELIEELIRTIEKLLKEIVRINEEVLKAVRELLKTLLKLSEDVVRRIEEILRKGRDHMVLHEYVNAAGITLRRLHEEIKERLDDVARRSEEELRRIIKKLKEVVKEIRKKLK

SEQ ID NO: 617 - protein, 231 aa, Artificial Sequence; identical to SEQ ID NO: 616
  Synthetic

SEQ ID NO: 618 - protein, 231 aa, Artificial Sequence
  Synthetic
SKEEEVEKVLRKWEEILRRLIEENKRANDKIRREYEELVKEIRRVLEEIKEVAERLGVSEEVKRILEKLIKLLEDILEYEKENVERLIELNERILRELKKSVEELKALVTRVRRDGLPESEVRKLVEDVLRKNEELLKEAKKAWRDSIENLKRVLEEVAKLVKTVLREIEEKIRDHMVLHEYVNAAGITLRVAEEVIRRILKVNTELMRVDERSIRESLKAISEVLKVLDT

SEQ ID NO: 619 - protein, 231 aa, Artificial Sequence; identical to SEQ ID NO: 618
  Synthetic

SEQ ID NO: 620 - protein, 231 aa, Artificial Sequence
  Synthetic
SKDEELARLLEELVERWRKIVEDLERDHRRLVKEIRELVERIRKKLEELVDRIRKNGIDERIVRLIEEIAKIIEEVLKEIVKLVERAVRENVRVLRESVRLVAELVETLARLLRGSDERVTEAIKKVLDTSEDLIRRVIKVNEDILREIAKLVEEVLREAERILTEIKKEGDRRDHMVLHEYVNAAGITVLRIIARILKLLRDLTRRLAEVAKAVHKLLEELLRKLKEDTR

SEQ ID NO: 621 - protein, 229 aa, Artificial Sequence
  Synthetic
SKEERLREVAEKHKKDLEDIVKRVDEAAKETARRLEEILKRLEEVLKKILDDLEKGPDDEKLKKVKKILKDIMDRLAELIKKILKLLKENLEKIKELLRRNLEISEELLKLAKGLSDRDVLETVRRVLEKLDEEWDRVLEDSRRIIETILRELDTLLREVEKLIKEIKDEISGRDHMVLHEYVNAAGITRVIKALKEVLERHVDATREVIERVKRVNKRLLEAVREVVT

SEQ ID NO: 622 - protein, 234 aa, Artificial Sequence
  Synthetic
SAKETIRKLIEENKDIIRKLAEKLKRLLEESERIAEEALRLIKELLERIERALRRVGSGIDEELLKELEKELARLEEELKEILDRVRDLHRRLAEEIRKILEESKKLNEELEDRLRKDGDVEELLELLERVHATDVRLLRELLKLLKKVHEDVVSLLERLLELLKRVLDRIVEERDHMVLHEYVNAAGITREIRRLAKRLKELSDRLEEKIRKIKRELDDLSARLREKIERTRK

SEQ ID NO: 623 - protein, 234 aa, Artificial Sequence; identical to SEQ ID NO: 622
  Synthetic

SEQ ID NO: 624 - protein, 231 aa, Artificial Sequence
  Synthetic
DKAEVLREALKLLKDLLEELIKIHEESLKRILDLIDTLVKVHEDALRALKELLERSGLDERELRKVERMATESLRTIAKLKEELRDLARRSLEKLREDLKRVDDTLRKVEEKVRRTGPSEELIEELIRTIEKLLKEIVRINEEVLKAVRELLKTLLKLSEDVVRRIEEILRKGGRDHMVLHEYVNAAGITRRLHEEIKERLDDVARRSEEELRRIIKKLKEVVKEIRKKLK

SEQ ID NO: 625 - protein, 231 aa, Artificial Sequence; identical to SEQ ID NO: 624
  Synthetic

SEQ ID NO: 626 - protein, 231 aa, Artificial Sequence
  Synthetic
SKEEEVEKVLRKWEEILRRLIEENKRANDKIRREYEELVKEIRRVLEEIKEVAERLGVSEEVKRILEKLIKLLEDILEYEKENVERLIELNERILRELKKSVEELKALVTRVRRDGLPESEVRKLVEDVLRKNEELLKEAKKAWRDSIENLKRVLEEVAKLVKTVLREIEEKIDRDHMVLHEYVNAAGITRVAEEVIRRILKVNTELMRVDERSIRESLKAISEVLKVLDT

SEQ ID NO: 627 - protein, 231 aa, Artificial Sequence
  Synthetic
SKDEELARLLEELVERWRKIVEDLERDHRRLVKEIRELVERIRKKLEELVDRIRKNGIDERIVRLIEEIAKIIEEVLKEIVKLVERAVRENVRVLRESVRLVAELVETLARLLRGSDERVTEAIKKVLDTSEDLIRRVIKVNEDILREIAKLVEEVLREAERILTEIKKEGDRERDHMVLHEYVNAAGITLRIIARILKLLRDLTRRLAEVAKAVHKLLEELLRKLKEDTR

SEQ ID NO: 628 - protein, 229 aa, Artificial Sequence
  Synthetic
SKEERLREVAEKHKKDLEDIVKRVDEAAKETARRLEEILKRLEEVLKKILDDLEKGPDDEKLKKVKKILKDIMDRLAELIKKILKLLKENLEKIKELLRRNLEISEELLKLAKGLSDRDVLETVRRVLEKLDEEWDRVLEDSRRIIETILRELDTLLREVEKLIKEIKDEISGSRDHMVLHEYVNAAGITVIKALKEVLERHVDATREVIERVKRVNKRLLEAVREVVT

SEQ ID NO: 629 - protein, 234 aa, Artificial Sequence
  Synthetic
SAKETIRKLIEENKDIIRKLAEKLKRLLEESERIAEEALRLIKELLERIERALRRVGSGIDEELLKELEKELARLEEELKEILDRVRDLHRRLAEEIRKILEESKKLNEELEDRLRKDGDVEELLELLERVHATDVRLLRELLKLLKKVHEDVVSLLERLLELLKRVLDRIVEELRDHMVLHEYVNAAGITEIRRLAKRLKELSDRLEEKIRKIKRELDDLSARLREKIERTRK

SEQ ID NO: 630 - protein, 234 aa, Artificial Sequence; identical to SEQ ID NO: 629
  Synthetic

SEQ ID NO: 631 - protein, 231 aa, Artificial Sequence
  Synthetic
DKAEVLREALKLLKDLLEELIKIHEESLKRILDLIDTLVKVHEDALRALKELLERSGLDERELRKVERMATESLRTIAKLKEELRDLARRSLEKLREDLKRVDDTLRKVEEKVRRTGPSEELIEELIRTIEKLLKEIVRINEEVLKAVRELLKTLLKLSEDVVRRIEEILRKGGVRDHMVLHEYVNAAGITRLHEEIKERLDDVARRSEEELRRIIKKLKEVVKEIRKKLK

SEQ ID NO: 632 - protein, 231 aa, Artificial Sequence; identical to SEQ ID NO: 631
  Synthetic

SEQ ID NO: 633 - protein, 236 aa, Artificial Sequence
  Synthetic
STREKAKKVLDTLRADNEDMKRVVEKILRALKRTNERAEKLAREITEEIKRILKEVGVSEEALKEIEDTLKRVLEEIKRLLDESKKLLEDVEREIREILKTSEELLERIEREIETVGSDEKTLAEILKRLLELNEEMNRRLLKILRDLLRLNEEVIRRLLAVLERLLDALKEALDRDHMVLHEYVNAAGITRRIKEKLRKALEELEREHRELEKELDKLHDESRKEHERIEEELRR

SEQ ID NO: 634 - protein, 236 aa, Artificial Sequence; identical to SEQ ID NO: 633
  Synthetic

SEQ ID NO: 635 - protein, 231 aa, Artificial Sequence
  Synthetic
SKEEEVEKVLRKWEEILRRLIEENKRANDKIRREYEELVKEIRRVLEEIKEVAERLGVSEEVKRILEKLIKLLEDILEYEKENVERLIELNERILRELKKSVEELKALVTRVRRDGLPESEVRKLVEDVLRKNEELLKEAKKAWRDSIENLKRVLEEVAKLVKTVLREIEEKIDDRDHMVLHEYVNAAGITVAEEVIRRILKVNTELMRVDERSIRESLKAISEVLKVLDT

SEQ ID NO: 636 - protein, 231 aa, Artificial Sequence
  Synthetic
SKDEELARLLEELVERWRKIVEDLERDHRRLVKEIRELVERIRKKLEELVDRIRKNGIDERIVRLIEEIAKIIEEVLKEIVKLVERAVRENVRVLRESVRLVAELVETLARLLRGSDERVTEAIKKVLDTSEDLIRRVIKVNEDILREIAKLVEEVLREAERILTEIKKEGDREERDHMVLHEYVNAAGITRIIARILKLLRDLTRRLAEVAKAVHKLLEELLRKLKEDTR

SEQ ID NO: 637 - protein, 229 aa, Artificial Sequence
  Synthetic
SKEERLREVAEKHKKDLEDIVKRVDEAAKETARRLEEILKRLEEVLKKILDDLEKGPDDEKLKKVKKILKDIMDRLAELIKKILKLLKENLEKIKELLRRNLEISEELLKLAKGLSDRDVLETVRRVLEKLDEEWDRVLEDSRRIIETILRELDTLLREVEKLIKEIKDEISGSKRDHMVLHEYVNAAGITIKALKEVLERHVDATREVIERVKRVNKRLLEAVREVVT

SEQ ID NO: 638 - protein, 234 aa, Artificial Sequence
  Synthetic
SAKETIRKLIEENKDIIRKLAEKLKRLLEESERIAEEALRLIKELLERIERALRRVGSGIDEELLKELEKELARLEEELKEILDRVRDLHRRLAEEIRKILEESKKLNEELEDRLRKDGDVEELLELLERVHATDVRLLRELLKLLKKVHEDVVSLLERLLELLKRVLDRIVEELGRDHMVLHEYVNAAGITIRRLAKRLKELSDRLEEKIRKIKRELDDLSARLREKIERTRK

SEQ ID NO: 639 - protein, 234 aa, Artificial Sequence; identical to SEQ ID NO: 638
  Synthetic

SEQ ID NO: 640 - protein, 231 aa, Artificial Sequence
  Synthetic
DKAEVLREALKLLKDLLEELIKIHEESLKRILDLIDTLVKVHEDALRALKELLERSGLDERELRKVERMATESLRTIAKLKEELRDLARRSLEKLREDLKRVDDTLRKVEEKVRRTGPSEELIEELIRTIEKLLKEIVRINEEVLKAVRELLKTLLKLSEDVVRRIEEILRKGGVPRDHMVLHEYVNAAGITLHEEIKERLDDVARRSEEELRRIIKKLKEVVKEIRKKLK

SEQ ID NO: 641 - protein, 231 aa, Artificial Sequence; identical to SEQ ID NO: 640
  Synthetic

SEQ ID NO: 642 - protein, 236 aa, Artificial Sequence
  Synthetic
STREKAKKVLDTLRADNEDMKRVVEKILRALKRTNERAEKLAREITEEIKRILKEVGVSEEALKEIEDTLKRVLEEIKRLLDESKKLLEDVEREIREILKTSEELLERIEREIETVGSDEKTLAEILKRLLELNEEMNRRLLKILRDLLRLNEEVIRRLLAVLERLLDALKEALDRRDHMVLHEYVNAAGITRIKEKLRKALEELEREHRELEKELDKLHDESRKEHERIEEELRR

SEQ ID NO: 643 - protein, 236 aa, Artificial Sequence; identical to SEQ ID NO: 642
  Synthetic

SEQ ID NO: 644 - protein, 231 aa, Artificial Sequence
  Synthetic
SKEEEVEKVLRKWEEILRRLIEENKRANDKIRREYEELVKEIRRVLEEIKEVAERLGVSEEVKRILEKLIKLLEDILEYEKENVERLIELNERILRELKKSVEELKALVTRVRRDGLPESEVRKLVEDVLRKNEELLKEAKKAWRDSIENLKRVLEEVAKLVKTVLREIEEKIDDERDHMVLHEYVNAAGITAEEVIRRILKVNTELMRVDERSIRESLKAISEVLKVLDT

SEQ ID NO: 645 - protein, 231 aa, Artificial Sequence; identical to SEQ ID NO: 644
  Synthetic

SEQ ID NO: 646 - protein, 231 aa, Artificial Sequence
  Synthetic
SKDEELARLLEELVERWRKIVEDLERDHRRLVKEIRELVERIRKKLEELVDRIRKNGIDERIVRLIEEIAKIIEEVLKEIVKLVERAVRENVRVLRESVRLVAELVETLARLLRGSDERVTEAIKKVLDTSEDLIRRVIKVNEDILREIAKLVEEVLREAERILTEIKKEGDREEIRDHMVLHEYVNAAGITIIARILKLLRDLTRRLAEVAKAVHKLLEELLRKLKEDTR

SEQ ID NO: 647 - protein, 237 aa, Artificial Sequence
  Synthetic
REDEVLRDIERLLREIEEKIRRILEESTAELRKVEEEVKRIIERTKRELKAIKEDVERKGIDEELRKLLDEVLDKLTKLIERNKRSLERILELIKRIIDENLEVLRDIIRLLEELLKATKDNGVPKDEVIKLVEDVVRRIEELVTRVVARNEKLVKDLDDLAKKNVRENEELLREIRDHMVLHEYVNAAGITREHIKALEKLARDLKEILRRHIEALKELARDLAEVIRKLLEDVKR

SEQ ID NO: 648 - protein, 237 aa, Artificial Sequence; identical to SEQ ID NO: 647
  Synthetic

SEQ ID NO: 649 - protein, 234 aa, Artificial Sequence
  Synthetic
SAKETIRKLIEENKDIIRKLAEKLKRLLEESERIAEEALRLIKELLERIERALRRVGSGIDEELLKELEKELARLEEELKEILDRVRDLHRRLAEEIRKILEESKKLNEELEDRLRKDGDVEELLELLERVHATDVRLLRELLKLLKKVHEDVVSLLERLLELLKRVLDRIVEELGLRDHMVLHEYVNAAGITRRLAKRLKELSDRLEEKIRKIKRELDDLSARLREKIERTRK

SEQ ID NO: 650 - protein, 234 aa, Artificial Sequence; identical to SEQ ID NO: 649
  Synthetic

SEQ ID NO: 651 - protein, 238 aa, Artificial Sequence
  Synthetic
SEAEKIREALETNLRLLEELIKRLKEILDTHNELLRRVIETLERLLKELLELLEEGGLDEEVLREVKRLVDELRKEARRVLDEHEKLVRKIKKEAEDVARESEEIIKEVEDKLKGLDREELLERVRRVLKKSDDLIAELVRRALKILEELTRLLAELLKKVVEILRRIVELVERVLTRDHMVLHEYVNAAGITEELEDRLRRLLEKLARDSAELMRELERILDRYARESEELDRRLAE

SEQ ID NO: 652 - protein, 238 aa, Artificial Sequence; identical to SEQ ID NO: 651
  Synthetic

SEQ ID NO: 653 - protein, 238 aa, Artificial Sequence
  Synthetic
DADELLRRLAEEVERVIREAEDLLRRWKETIKKVLDDLKRLLDELKKRNEDVIRELTKTKGDEELAKLIKDLLDTNEKVNRDLLRLIKKLLKDAERVNRRLLELIEELLEELKRVAKDLGLREEADKKLRDIADRARKELEDYERRLKELLKTVEDALRKAEEDSRKLKRDVEELLERDHMVLHEYVNAAGITLDRLRKLLERLREILRENLEALKKTLKRLEDVVREILEDLKRERK

SEQ ID NO: 654 - protein, 238 aa, Artificial Sequence; identical to SEQ ID NO: 653
  Synthetic

SEQ ID NO: 655 - protein, 231 aa, Artificial Sequence
  Synthetic
DKAEVLREALKLLKDLLEELIKIHEESLKRILDLIDTLVKVHEDALRALKELLERSGLDERELRKVERMATESLRTIAKLKEELRDLARRSLEKLREDLKRVDDTLRKVEEKVRRTGPSEELIEELIRTIEKLLKEIVRINEEVLKAVRELLKTLLKLSEDVVRRIEEILRKGGVPERDHMVLHEYVNAAGITHEEIKERLDDVARRSEEELRRIIKKLKEVVKEIRKKLK

SEQ ID NO: 656 - protein, 236 aa, Artificial Sequence
  Synthetic
STREKAKKVLDTLRADNEDMKRVVEKILRALKRTNERAEKLAREITEEIKRILKEVGVSEEALKEIEDTLKRVLEEIKRLLDESKKLLEDVEREIREILKTSEELLERIEREIETVGSDEKTLAEILKRLLELNEEMNRRLLKILRDLLRLNEEVIRRLLAVLERLLDALKEALDRGRDHMVLHEYVNAAGITIKEKLRKALEELEREHRELEKELDKLHDESRKEHERIEEELRR

SEQ ID NO: 657 - protein, 236 aa, Artificial Sequence; identical to SEQ ID NO: 656
  Synthetic

SEQ ID NO: 658 - protein, 231 aa, Artificial Sequence
  Synthetic
SKEEEVEKVLRKWEEILRRLIEENKRANDKIRREYEELVKEIRRVLEEIKEVAERLGVSEEVKRILEKLIKLLEDILEYEKENVERLIELNERILRELKKSVEELKALVTRVRRDGLPESEVRKLVEDVLRKNEELLKEAKKAWRDSIENLKRVLEEVAKLVKTVLREIEEKIDDEDRDHMVLHEYVNAAGITEEVIRRILKVNTELMRVDERSIRESLKAISEVLKVLDT

SEQ ID NO: 659 - protein, 231 aa, Artificial Sequence
  Synthetic
SKDEELARLLEELVERWRKIVEDLERDHRRLVKEIRELVERIRKKLEELVDRIRKNGIDERIVRLIEEIAKIIEEVLKEIVKLVERAVRENVRVLRESVRLVAELVETLARLLRGSDERVTEAIKKVLDTSEDLIRRVIKVNEDILREIAKLVEEVLREAERILTEIKKEGDREEIRRDHMVLHEYVNAAGITIARILKLLRDLTRRLAEVAKAVHKLLEELLRKLKEDTR

SEQ ID NO: 660 - protein, 238 aa, Artificial Sequence
  Synthetic
SEIEDVIRRLRKILEDLERVSEKLLREIKKILDEARRLNEEVIKEIKRVLEDAVRVFRDGSGSKEELAKLVEELIRELAKLAKEVDEIHKRIVERLKALVEDAERIHRKIVETLEEIVRGVPSEELKRVVEAIVEVIKEHLKVLADVIRRIIKAIEENAETIKRVLEDIVRVLELVLRDHMVLHEYVNAAGITIKRIEDSLRELEKTVRELLKRIKEASDKVREDVDRLIKELKEAAD

SEQ ID NO: 661 - protein, 229 aa, Artificial Sequence
  Synthetic
SKEERLREVAEKHKKDLEDIVKRVDEAAKETARRLEEILKRLEEVLKKILDDLEKGPDDEKLKKVKKILKDIMDRLAELIKKILKLLKENLEKIKELLRRNLEISEELLKLAKGLSDRDVLETVRRVLEKLDEEWDRVLEDSRRIIETILRELDTLLREVEKLIKEIKDEISGSKEVRDHMVLHEYVNAAGITALKEVLERHVDATREVIERVKRVNKRLLEAVREVVT

SEQ ID NO: 662 - protein, 237 aa, Artificial Sequence
  Synthetic
REDEVLRDIERLLREIEEKIRRILEESTAELRKVEEEVKRIIERTKRELKAIKEDVERKGIDEELRKLLDEVLDKLTKLIERNKRSLERILELIKRIIDENLEVLRDIIRLLEELLKATKDNGVPKDEVIKLVEDVVRRIEELVTRVVARNEKLVKDLDDLAKKNVRENEELLREIDRDHMVLHEYVNAAGITEHIKALEKLARDLKEILRRHIEALKELARDLAEVIRKLLEDVKR

SEQ ID NO: 663 - protein, 237 aa, Artificial Sequence; identical to SEQ ID NO: 662
  Synthetic

SEQ ID NO: 664 - protein, 232 aa, Artificial Sequence
  Synthetic
SEKELVDDIRRILEEILRLLRSLLEEVIRLLEENEKLVRRHLKTVIDILRRVAKLLDENGIRTDEADRVLERLEKAHRELLEDYKRALEKIKETLERVLREAEEVVKKIDDALRKLGGSKEVLKRLLEELLRLVEKIAEEIKRLLSELVRVTEELVRTNKELLEEAVRVIRKEVGDDRDHMVLHEYVNAAGITIDDLLKTSRDLVKRVLDLVDEVVKRVEDLVERVKEKIDT

SEQ ID NO: 665 - protein, 239 aa, Artificial Sequence
  Synthetic
SDEELLERVERLLRELLDTNRRMLEEVEKELRRLLETNKKTLDDVRRLLKELLDVLETRGVKDEKRLRDIRRRLEEVVRRLDKLHRDIAEDLKRVKERLDRLHERIKRRLEEVVKELRDLKDRGVDERKVLERAAEVLRELLELLRESLEEIERIIRRLLELHKRSTEEAARALEELLRDHMVLHEYVNAAGITEDLLKEDKERLEKIARDIERDLERYARDLKRLEDELREDIERARR

SEQ ID NO: 666 - protein, 239 aa, Artificial Sequence; identical to SEQ ID NO: 665
  Synthetic

SEQ ID NO: 667 - protein, 234 aa, Artificial Sequence
  Synthetic
SAKETIRKLIEENKDIIRKLAEKLKRLLEESERIAEEALRLIKELLERIERALRRVGSGIDEELLKELEKELARLEEELKEILDRVRDLHRRLAEEIRKILEESKKLNEELEDRLRKDGDVEELLELLERVHATDVRLLRELLKLLKKVHEDVVSLLERLLELLKRVLDRIVEELGLSRDHMVLHEYVNAAGITRLAKRLKELSDRLEEKIRKIKRELDDLSARLREKIERTRK

SEQ ID NO: 668 - protein, 234 aa, Artificial Sequence; identical to SEQ ID NO: 667
  Synthetic

SEQ ID NO: 669 - protein, 238 aa, Artificial Sequence
  Synthetic
SKEDKARELEKRLRDNLKKLEEVVRELAEVLKRNLEKLRRLAEELLRALKRLLDKLRAGGLPKDELEDLRREVEDVLRRLEDLLRKLKKANDESLTRLEELLRRAEEENRRVLTTLRELLRGNGDDRDLARLVARLVEANNRALEELLRLVAKNVEDNNRVLEELLRLVKELAKRLLGRDHMVLHEYVNAAGITELEERARKILRDDERDLRALEKRIRDIIREDREELERLKERARK

SEQ ID NO: 670 - protein, 238 aa, Artificial Sequence
  Synthetic
SEAEKIREALETNLRLLEELIKRLKEILDTHNELLRRVIETLERLLKELLELLEEGGLDEEVLREVKRLVDELRKEARRVLDEHEKLVRKIKKEAEDVARESEEIIKEVEDKLKGLDREELLERVRRVLKKSDDLIAELVRRALKILEELTRLLAELLKKVVEILRRIVELVERVLTKRDHMVLHEYVNAAGITELEDRLRRLLEKLARDSAELMRELERILDRYARESEELDRRLAE

SEQ ID NO: 671 - protein, 238 aa, Artificial Sequence; identical to SEQ ID NO: 670
  Synthetic

SEQ ID NO: 672 - protein, 238 aa, Artificial Sequence
  Synthetic
DADELLRRLAEEVERVIREAEDLLRRWKETIKKVLDDLKRLLDELKKRNEDVIRELTKTKGDEELAKLIKDLLDTNEKVNRDLLRLIKKLLKDAERVNRRLLELIEELLEELKRVAKDLGLREEADKKLRDIADRARKELEDYERRLKELLKTVEDALRKAEEDSRKLKRDVEELLERRDHMVLHEYVNAAGITDRLRKLLERLREILRENLEALKKTLKRLEDVVREILEDLKRERK

SEQ ID NO: 673 - protein, 231 aa, Artificial Sequence
  Synthetic
DKAEVLREALKLLKDLLEELIKIHEESLKRILDLIDTLVKVHEDALRALKELLERSGLDERELRKVERMATESLRTIAKLKEELRDLARRSLEKLREDLKRVDDTLRKVEEKVRRTGPSEELIEELIRTIEKLLKEIVRINEEVLKAVRELLKTLLKLSEDVVRRIEEILRKGGVPEERDHMVLHEYVNAAGITEEIKERLDDVARRSEEELRRIIKKLKEVVKEIRKKLK

SEQ ID NO: 674 - protein, 231 aa, Artificial Sequence; identical to SEQ ID NO: 673
  Synthetic

SEQ ID NO: 675 - protein, 236 aa, Artificial Sequence
  Synthetic
STREKAKKVLDTLRADNEDMKRVVEKILRALKRTNERAEKLAREITEEIKRILKEVGVSEEALKEIEDTLKRVLEEIKRLLDESKKLLEDVEREIREILKTSEELLERIEREIETVGSDEKTLAEILKRLLELNEEMNRRLLKILRDLLRLNEEVIRRLLAVLERLLDALKEALDRGDRDHMVLHEYVNAAGITKEKLRKALEELEREHRELEKELDKLHDESRKEHERIEEELRR

SEQ ID NO: 676 - protein, 239 aa, Artificial Sequence
  Synthetic
SERELIERWLELHKEILRLIRELVERLLKLHREILDTIKKLIRELLELLEDIARKLGLDKEAKDELREIAKRVEDKLEKLERESRKVEEDLKRKLKELTDESDTVEKRVRDVVRRGTQSREEIAEELLRLDRKLLKAVEELLKEILDLNKKLLDDVRAILEETRRVLEKLLDRVRRGERDHMVLHEYVNAAGITEDILEKVERTLKKLLDDSARMAEEVKKTLKELLERSEKVAEDVRK

SEQ ID NO: 677 - protein, 231 aa, Artificial Sequence
  Synthetic
SKDEELARLLEELVERWRKIVEDLERDHRRLVKEIRELVERIRKKLEELVDRIRKNGIDERIVRLIEEIAKIIEEVLKEIVKLVERAVRENVRVLRESVRLVAELVETLARLLRGSDERVTEAIKKVLDTSEDLIRRVIKVNEDILREIAKLVEEVLREAERILTEIKKEGDREEIRRRDHMVLHEYVNAAGITARILKLLRDLTRRLAEVAKAVHKLLEELLRKLKEDTR

SEQ ID NO: 678 - protein, 238 aa, Artificial Sequence
  Synthetic
SEIEDVIRRLRKILEDLERVSEKLLREIKKILDEARRLNEEVIKEIKRVLEDAVRVFRDGSGSKEELAKLVEELIRELAKLAKEVDEIHKRIVERLKALVEDAERIHRKIVETLEEIVRGVPSEELKRVVEAIVEVIKEHLKVLADVIRRIIKAIEENAETIKRVLEDIVRVLELVLRRDHMVLHEYVNAAGITKRIEDSLRELEKTVRELLKRIKEASDKVREDVDRLIKELKEAAD

SEQ ID NO: 679 - protein, 238 aa, Artificial Sequence; identical to SEQ ID NO: 678
  Synthetic

SEQ ID NO: 680 - protein, 237 aa, Artificial Sequence
  Synthetic
KEKEDALKKLEDLARKSREDLERVLRKHKKILDKIEELLKRVLDEHKKIVDDILRKTGTESEILKELARLLREHHEALRRLIEELRRLLEEHHKILEDLAREHKRLLDELIKVVADGVDKDELERIIKELRERDKKLVDDLRKVSEDLLDAVRKLVEDLERISRELLRRVEELAKGIDRDHMVLHEYVNAAGITKSKEILERIERAIDELLKVSEEILKLSEDASEELLKILREFAK

SEQ ID NO: 681 - protein, 229 aa, Artificial Sequence
  Synthetic
SKEERLREVAEKHKKDLEDIVKRVDEAAKETARRLEEILKRLEEVLKKILDDLEKGPDDEKLKKVKKILKDIMDRLAELIKKILKLLKENLEKIKELLRRNLEISEELLKLAKGLSDRDVLETVRRVLEKLDEEWDRVLEDSRRIIETILRELDTLLREVEKLIKEIKDEISGSKEVLRDHMVLHEYVNAAGITLKEVLERHVDATREVIERVKRVNKRLLEAVREVVT

SEQ ID NO: 682 - protein, 237 aa, Artificial Sequence
  Synthetic
REDEVLRDIERLLREIEEKIRRILEESTAELRKVEEEVKRIIERTKRELKAIKEDVERKGIDEELRKLLDEVLDKLTKLIERNKRSLERILELIKRIIDENLEVLRDIIRLLEELLKATKDNGVPKDEVIKLVEDVVRRIEELVTRVVARNEKLVKDLDDLAKKNVRENEELLREIDRRDHMVLHEYVNAAGITHIKALEKLARDLKEILRRHIEALKELARDLAEVIRKLLEDVKR

SEQ ID NO: 683 - protein, 234 aa, Artificial Sequence
  Synthetic
SAKETIRKLIEENKDIIRKLAEKLKRLLEESERIAEEALRLIKELLERIERALRRVGSGIDEELLKELEKELARLEEELKEILDRVRDLHRRLAEEIRKILEESKKLNEELEDRLRKDGDVEELLELLERVHATDVRLLRELLKLLKKVHEDVVSLLERLLELLKRVLDRIVEELGLSDRDHMVLHEYVNAAGITLAKRLKELSDRLEEKIRKIKRELDDLSARLREKIERTRK

SEQ ID NO: 684 - protein, 238 aa, Artificial Sequence
  Synthetic
SEAEKIREALETNLRLLEELIKRLKEILDTHNELLRRVIETLERLLKELLELLEEGGLDEEVLREVKRLVDELRKEARRVLDEHEKLVRKIKKEAEDVARESEEIIKEVEDKLKGLDREELLERVRRVLKKSDDLIAELVRRALKILEELTRLLAELLKKVVEILRRIVELVERVLTKKRDHMVLHEYVNAAGITLEDRLRRLLEKLARDSAELMRELERILDRYARESEELDRRLAE

SEQ ID NO: 685 - protein, 238 aa, Artificial Sequence; identical to SEQ ID NO: 684
  Synthetic

SEQ ID NO: 686 - protein, 240 aa, Artificial Sequence
  Synthetic
SDKEEIKRRVEKTARDLETEHDKIKKRLEDTVRDIKRELDELLEKYERVLRKIEKTLREGDGDATDLVDKLLETVKRLNEEVLRTVKKIADELRRLVEEVLRVLRESNETLARLLEEGNVGDEVRERLEEVLRRTEEIIKTLEEIVKRLLDELRRLVEELRRISKKLKDELDKIKEKGKRDHMVLHEYVNAAGITLDVVRRILEALAKLIKELLEALEEVLRRNKELIRELLRVLDEALK

SEQ ID NO: 687 - protein, 240 aa, Artificial Sequence; identical to SEQ ID NO: 686
  Synthetic

SEQ ID NO: 688 - protein, 231 aa, Artificial Sequence
  Synthetic
DKAEVLREALKLLKDLLEELIKIHEESLKRILDLIDTLVKVHEDALRALKELLERSGLDERELRKVERMATESLRTIAKLKEELRDLARRSLEKLREDLKRVDDTLRKVEEKVRRTGPSEELIEELIRTIEKLLKEIVRINEEVLKAVRELLKTLLKLSEDVVRRIEEILRKGGVPEEIRDHMVLHEYVNAAGITEIKERLDDVARRSEEELRRIIKKLKEVVKEIRKKLK

SEQ ID NO: 689 - protein, 231 aa, Artificial Sequence; identical to SEQ ID NO: 688
  Synthetic

SEQ ID NO: 690 - protein, 236 aa, Artificial Sequence
  Synthetic
STREKAKKVLDTLRADNEDMKRVVEKILRALKRTNERAEKLAREITEEIKRILKEVGVSEEALKEIEDTLKRVLEEIKRLLDESKKLLEDVEREIREILKTSEELLERIEREIETVGSDEKTLAEILKRLLELNEEMNRRLLKILRDLLRLNEEVIRRLLAVLERLLDALKEALDRGDVRDHMVLHEYVNAAGITEKLRKALEELEREHRELEKELDKLHDESRKEHERIEEELRR

SEQ ID NO: 691 - protein, 236 aa, Artificial Sequence; identical to SEQ ID NO: 690
  Synthetic

SEQ ID NO: 692 - protein, 239 aa, Artificial Sequence
  Synthetic
SERELIERWLELHKEILRLIRELVERLLKLHREILDTIKKLIRELLELLEDIARKLGLDKEAKDELREIAKRVEDKLEKLERESRKVEEDLKRKLKELTDESDTVEKRVRDVVRRGTQSREEIAEELLRLDRKLLKAVEELLKEILDLNKKLLDDVRAILEETRRVLEKLLDRVRRGERRDHMVLHEYVNAAGITDILEKVERTLKKLLDDSARMAEEVKKTLKELLERSEKVAEDVRK

SEQ ID NO: 693 - protein, 237 aa, Artificial Sequence
  Synthetic
KEKEDALKKLEDLARKSREDLERVLRKHKKILDKIEELLKRVLDEHKKIVDDILRKTGTESEILKELARLLREHHEALRRLIEELRRLLEEHHKILEDLAREHKRLLDELIKVVADGVDKDELERIIKELRERDKKLVDDLRKVSEDLLDAVRKLVEDLERISRELLRRVEELAKGIDERDHMVLHEYVNAAGITSKEILERIERAIDELLKVSEEILKLSEDASEELLKILREFAK

SEQ ID NO: 694 - protein, 237 aa, Artificial Sequence; identical to SEQ ID NO: 693
  Synthetic

SEQ ID NO: 695 - protein, 240 aa, Artificial Sequence
  Synthetic
DREKSVRDIEEDLKRVLDKLRRRVETSKEELKKVLKADKENADELEKTLRDVVRELDRGIDSEVLRAVREIVKRLVEVVRRYNELSEKIIRDLVRVNDRVLELLKRIVKRLIDVVRELEKIGDKEKALRRLEEVVKEVKRRIEELLKELEDVHRELVKILEEVNEDLKRVATEVKEIIKRDHMVLHEYVNAAGITKRLLDNLKENTDRLKEVIDRNLADLRDLAEELRAVIERLLEDARR

SEQ ID NO: 696 - protein, 237 aa, Artificial Sequence
  Synthetic
REDEVLRDIERLLREIEEKIRRILEESTAELRKVEEEVKRIIERTKRELKAIKEDVERKGIDEELRKLLDEVLDKLTKLIERNKRSLERILELIKRIIDENLEVLRDIIRLLEELLKATKDNGVPKDEVIKLVEDVVRRIEELVTRVVARNEKLVKDLDDLAKKNVRENEELLREIDRGRDHMVLHEYVNAAGITIKALEKLARDLKEILRRHIEALKELARDLAEVIRKLLEDVKR

SEQ ID NO: 697 - protein, 237 aa, Artificial Sequence; identical to SEQ ID NO: 696
  Synthetic

SEQ ID NO: 698 - protein, 237 aa, Artificial Sequence
  Synthetic
SREDLLRSLAELIETILRKSSELLDRLLKLVREHSETSERLIRELKKILEDILKLIKGGISEDDVRRIVKEAKDELRRSVEEVKKSVDDLKEELKRSLREVRELVKSIADALEEIVRRSSGLGEVIKKLLELLRRLLEVHERTIRLLAELLERHLEVHEESIRLLLRLLEELLELVERKRDHMVLHEYVNAAGITLRDHKAKNDKILRDVEEVLRRHLEELARILKDVKKVLDEARK

SEQ ID NO: 699 - protein, 239 aa, Artificial Sequence
  Synthetic
SAEDLVRRVKDLVDKLEDKLRKVVRTNERLWEEIRKRLEELVRRNKELWDALVEKLKAGDKDKDELIEEAKSLEDESNALVEKLVRDIERVLAESNKLLDTLAKEIEEVLEEIVELVERGSGSDKEAREKLEDIKARLKEVLKKLREESKRIIDELRRLLEEYKRLVKEIRDRIEEVRKRDHMVLHEYVNAAGITKVLKELVEELEKLVRDHNRVVEEVVRELVELLSRAVEVIKEVVK

SEQ ID NO: 700 - protein, 240 aa, Artificial Sequence
  Synthetic
DKDKRLEELLKRLKELNDKTFEELERILEELKRANEASLREAERILEELRARIEGGNLDKRLAELLKKLLDDLKRLLEEYTRTNEELLKRLRELLERYRETNKKLLDLLRKLLDEARRTGTDEDLLRRLEDILRKYEDEVRRLLKELEDILREYEDTSRRLLEELERIAKEAAERVSRGRDHMVLHEYVNAAGITRDLLRLLEEDSRTNSEVVKRLLDLLREDSKANSEVVKRLLDVLRE

SEQ ID NO: 701 - protein, 240 aa, Artificial Sequence
  Synthetic
SKEETLKRLLDELEKRNRETVERLERLLKELEDRNRASLEELEAVLEELERKIEESGLSKELKDTLARILEELRKLLEEYFRKNEELLRLLRKLLDEYARTNEELLRLLEELLDTARRTGGDSELLKRLEDIAREYEKRVRRLLEKLKDILDKYRKTVEELVRKMEEILKEAKKTISRIRDHMVLHEYVNAAGITRRLIEILRRDVELNLDVAKKLLELLKEDSKLNLDVARELLELLDR

SEQ ID NO: 702 - protein, 240 aa, Artificial Sequence; identical to SEQ ID NO: 701
  Synthetic

SEQ ID NO: 703 - protein, 238 aa, Artificial Sequence
  Synthetic
EEDERLTKRVEEIKRENRELLRRLEEEVKELERKSEKIVRDLKEKVDRAKEKLDSGKGSTELLVEELEKLIREILKLSEDHNRTLEEVVRKIEDVLRANLERLKELVDEILKALKERGKGDSEELKRKVEKVARDYERLLRKLREVVKRILDESKRLDEELEERLKEVLKKLEELIKRGGRDHMVLHEYVNAAGITLKLVEKLIRRNLRLLEELLRLVREILRTSNEILEEILKDARR

SEQ ID NO: 704 - protein, 234 aa, Artificial Sequence
  Synthetic
SAKETIRKLIEENKDIIRKLAEKLKRLLEESERIAEEALRLIKELLERIERALRRVGSGIDEELLKELEKELARLEEELKEILDRVRDLHRRLAEEIRKILEESKKLNEELEDRLRKDGDVEELLELLERVHATDVRLLRELLKLLKKVHEDVVSLLERLLELLKRVLDRIVEELGLSDKRDHMVLHEYVNAAGITAKRLKELSDRLEEKIRKIKRELDDLSARLREKIERTRK

SEQ ID NO: 705 - protein, 234 aa, Artificial Sequence; identical to SEQ ID NO: 704
  Synthetic

SEQ ID NO: 706 - protein, 238 aa, Artificial Sequence
  Synthetic
SEAEKIREALETNLRLLEELIKRLKEILDTHNELLRRVIETLERLLKELLELLEEGGLDEEVLREVKRLVDELRKEARRVLDEHEKLVRKIKKEAEDVARESEEIIKEVEDKLKGLDREELLERVRRVLKKSDDLIAELVRRALKILEELTRLLAELLKKVVEILRRIVELVERVLTKKGRDHMVLHEYVNAAGITEDRLRRLLEKLARDSAELMRELERILDRYARESEELDRRLAE

SEQ ID NO: 707 - protein, 238 aa, Artificial Sequence; identical to SEQ ID NO: 706
  Synthetic

SEQ ID NO: 708 - protein, 240 aa, Artificial Sequence
  Synthetic
SDKEEIKRRVEKTARDLETEHDKIKKRLEDTVRDIKRELDELLEKYERVLRKIEKTLREGDGDATDLVDKLLETVKRLNEEVLRTVKKIADELRRLVEEVLRVLRESNETLARLLEEGNVGDEVRERLEEVLRRTEEIIKTLEEIVKRLLDELRRLVEELRRISKKLKDELDKIKEKGKDRDHMVLHEYVNAAGITDVVRRILEALAKLIKELLEALEEVLRRNKELIRELLRVLDEALK

SEQ ID NO: 709 - protein, 240 aa, Artificial Sequence; identical to SEQ ID NO: 708
  Synthetic

SEQ ID NO: 710 - protein, 238 aa, Artificial Sequence
  Synthetic
DADELLRRLAEEVERVIREAEDLLRRWKETIKKVLDDLKRLLDELKKRNEDVIRELTKTKGDEELAKLIKDLLDTNEKVNRDLLRLIKKLLKDAERVNRRLLELIEELLEELKRVAKDLGLREEADKKLRDIADRARKELEDYERRLKELLKTVEDALRKAEEDSRKLKRDVEELLERGRRDHMVLHEYVNAAGITLRKLLERLREILRENLEALKKTLKRLEDVVREILEDLKRERK

SEQ ID NO: 711 - protein, 238 aa, Artificial Sequence; identical to SEQ ID NO: 710
  Synthetic

SEQ ID NO: 712 - protein, 231 aa, Artificial Sequence
  Synthetic
DKAEVLREALKLLKDLLEELIKIHEESLKRILDLIDTLVKVHEDALRALKELLERSGLDERELRKVERMATESLRTIAKLKEELRDLARRSLEKLREDLKRVDDTLRKVEEKVRRTGPSEELIEELIRTIEKLLKEIVRINEEVLKAVRELLKTLLKLSEDVVRRIEEILRKGGVPEEIDRDHMVLHEYVNAAGITIKERLDDVARRSEEELRRIIKKLKEVVKEIRKKLK

SEQ ID NO: 713 - protein, 236 aa, Artificial Sequence
  Synthetic
STREKAKKVLDTLRADNEDMKRVVEKILRALKRTNERAEKLAREITEEIKRILKEVGVSEEALKEIEDTLKRVLEEIKRLLDESKKLLEDVEREIREILKTSEELLERIEREIETVGSDEKTLAEILKRLLELNEEMNRRLLKILRDLLRLNEEVIRRLLAVLERLLDALKEALDRGDVPRDHMVLHEYVNAAGITKLRKALEELEREHRELEKELDKLHDESRKEHERIEEELRR

SEQ ID NO: 714 - protein, 236 aa, Artificial Sequence; identical to SEQ ID NO: 713
  Synthetic

SEQ ID NO: 715 - protein, 239 aa, Artificial Sequence
  Synthetic
SERELIERWLELHKEILRLIRELVERLLKLHREILDTIKKLIRELLELLEDIARKLGLDKEAKDELREIAKRVEDKLEKLERESRKVEEDLKRKLKELTDESDTVEKRVRDVVRRGTQSREEIAEELLRLDRKLLKAVEELLKEILDLNKKLLDDVRAILEETRRVLEKLLDRVRRGERTRDHMVLHEYVNAAGITILEKVERTLKKLLDDSARMAEEVKKTLKELLERSEKVAEDVRK

SEQ ID NO: 716 - protein, 231 aa, Artificial Sequence
  Synthetic
SKEEEVEKVLRKWEEILRRLIEENKRANDKIRREYEELVKEIRRVLEEIKEVAERLGVSEEVKRILEKLIKLLEDILEYEKENVERLIELNERILRELKKSVEELKALVTRVRRDGLPESEVRKLVEDVLRKNEELLKEAKKAWRDSIENLKRVLEEVAKLVKTVLREIEEKIDDEDVVRRDHMVLHEYVNAAGITIRRILKVNTELMRVDERSIRESLKAISEVLKVLDT

SEQ ID NO: 717 - protein, 231 aa, Artificial Sequence; identical to SEQ ID NO: 716
  Synthetic

SEQ ID NO: 718 - protein, 231 aa, Artificial Sequence
  Synthetic
SKDEELARLLEELVERWRKIVEDLERDHRRLVKEIRELVERIRKKLEELVDRIRKNGIDERIVRLIEEIAKIIEEVLKEIVKLVERAVRENVRVLRESVRLVAELVETLARLLRGSDERVTEAIKKVLDTSEDLIRRVIKVNEDILREIAKLVEEVLREAERILTEIKKEGDREEIRRILRDHMVLHEYVNAAGITILKLLRDLTRRLAEVAKAVHKLLEELLRKLKEDTR

SEQ ID NO: 719 - protein, 238 aa, Artificial Sequence
  Synthetic
SEIEDVIRRLRKILEDLERVSEKLLREIKKILDEARRLNEEVIKEIKRVLEDAVRVFRDGSGSKEELAKLVEELIRELAKLAKEVDEIHKRIVERLKALVEDAERIHRKIVETLEEIVRGVPSEELKRVVEAIVEVIKEHLKVLADVIRRIIKAIEENAETIKRVLEDIVRVLELVLRGERDHMVLHEYVNAAGITIEDSLRELEKTVRELLKRIKEASDKVREDVDRLIKELKEAAD

SEQ ID NO: 720 - protein, 238 aa, Artificial Sequence; identical to SEQ ID NO: 719
  Synthetic

SEQ ID NO: 721 - protein, 237 aa, Artificial Sequence
  Synthetic
KEKEDALKKLEDLARKSREDLERVLRKHKKILDKIEELLKRVLDEHKKIVDDILRKTGTESEILKELARLLREHHEALRRLIEELRRLLEEHHKILEDLAREHKRLLDELIKVVADGVDKDELERIIKELRERDKKLVDDLRKVSEDLLDAVRKLVEDLERISRELLRRVEELAKGIDEERDHMVLHEYVNAAGITKEILERIERAIDELLKVSEEILKLSEDASEELLKILREFAK

SEQ ID NO: 722 - protein, 241 aa, Artificial Sequence
  Synthetic
SEKELLKEILDRIRELLEDDNRLLKRIVDEIRKLLEEWLRVHKEILERIKELLDRIGAPEDVIRELTRALKETEEDVDRVIRTLEKLLKEVLDAHEEVVRKLDRLLKEVERLVEGGDAEEVVRDLLRVVKEILDESKAVIDELARVVDEILKLLEEVDRKLAKVVKEILEDVLRGSGDDERDHMVLHEYVNAAGITLEDLARDTRRVIEEAKRLLKEWRDRNKEVADTLKKLLEDLIRKIR

SEQ ID NO: 723 - protein, 241 aa, Artificial Sequence; identical to SEQ ID NO: 722
  Synthetic

SEQ ID NO: 724 - protein, 240 aa, Artificial Sequence
  Synthetic
DREKSVRDIEEDLKRVLDKLRRRVETSKEELKKVLKADKENADELEKTLRDVVRELDRGIDSEVLRAVREIVKRLVEVVRRYNELSEKIIRDLVRVNDRVLELLKRIVKRLIDVVRELEKIGDKEKALRRLEEVVKEVKRRIEELLKELEDVHRELVKILEEVNEDLKRVATEVKEIIKTRDHMVLHEYVNAAGITRLLDNLKENTDRLKEVIDRNLADLRDLAEELRAVIERLLEDARR

SEQ ID NO: 725 - protein, 241 aa, Artificial Sequence
  Synthetic
SAEEAVEKLVRIARAIVKINEDLSREVVRILREIVRLNEETTRLLVEIAREVVKVVEDGGLSEDVVRKLRKLVKELEDLLKKSNDDIRKLVEDVARRLKESNDEIRRLVERLEELLKRGPGDEELLRLVEELTEELLRTHEEVVKALEKLTADLLELHRELLERVRRLTKRIEEELKRVGRDHMVLHEYVNAAGITEKVLDDSAKELEKLKRELERLLEESRRKLEKLKRDLERVLEETRR

SEQ ID NO: 726 - protein, 241 aa, Artificial Sequence; identical to SEQ ID NO: 725
  Synthetic

SEQ ID NO: 727 - protein, 237 aa, Artificial Sequence
  Synthetic
REDEVLRDIERLLREIEEKIRRILEESTAELRKVEEEVKRIIERTKRELKAIKEDVERKGIDEELRKLLDEVLDKLTKLIERNKRSLERILELIKRIIDENLEVLRDIIRLLEELLKATKDNGVPKDEVIKLVEDVVRRIEELVTRVVARNEKLVKDLDDLAKKNVRENEELLREIDRGLRDHMVLHEYVNAAGITKALEKLARDLKEILRRHIEALKELARDLAEVIRKLLEDVKR

SEQ ID NO: 728 - protein, 239 aa, Artificial Sequence
  Synthetic
SAEDLVRRVKDLVDKLEDKLRKVVRTNERLWEEIRKRLEELVRRNKELWDALVEKLKAGDKDKDELIEEAKSLEDESNALVEKLVRDIERVLAESNKLLDTLAKEIEEVLEEIVELVERGSGSDKEAREKLEDIKARLKEVLKKLREESKRIIDELRRLLEEYKRLVKEIRDRIEEVRKRRDHMVLHEYVNAAGITVLKELVEELEKLVRDHNRVVEEVVRELVELLSRAVEVIKEVVK

SEQ ID NO: 729 - protein, 240 aa, Artificial Sequence
  Synthetic
DKDKRLEELLKRLKELNDKTFEELERILEELKRANEASLREAERILEELRARIEGGNLDKRLAELLKKLLDDLKRLLEEYTRTNEELLKRLRELLERYRETNKKLLDLLRKLLDEARRTGTDEDLLRRLEDILRKYEDEVRRLLKELEDILREYEDTSRRLLEELERIAKEAAERVSRGSRDHMVLHEYVNAAGITDLLRLLEEDSRTNSEVVKRLLDLLREDSKANSEVVKRLLDVLRE

SEQ ID NO: 730 - protein, 240 aa, Artificial Sequence
  Synthetic
SKEETLKRLLDELEKRNRETVERLERLLKELEDRNRASLEELEAVLEELERKIEESGLSKELKDTLARILEELRKLLEEYFRKNEELLRLLRKLLDEYARTNEELLRLLEELLDTARRTGGDSELLKRLEDIAREYEKRVRRLLEKLKDILDKYRKTVEELVRKMEEILKEAKKTISRIGRDHMVLHEYVNAAGITRLIEILRRDVELNLDVAKKLLELLKEDSKLNLDVARELLELLDR

SEQ ID NO: 731 - protein, 241 aa, Artificial Sequence
  Synthetic
SADEALEELVRRLLEVLKTVLERTKELSRDDLRVVKEVLRIIEELVKRLLKVIRDGLDDADRVLEEVERVIREAKREVKRWEEVVRKVVEDSRRLIERVLAEVEEVIKEAKRLLDERKSGGSREVIEELLSLLREIVRHHKEVSDEHLKLSAELVKRILDVVEETLRLATEIVRRIKEGGRDHMVLHEYVNAAGITKRRVERLLEDIERLLAELEKLNEDVLRENKALLEDLERRVRERKK

SEQ ID NO: 732 - protein, 239 aa, Artificial Sequence
  Synthetic
SDEELLERVERLLRELLDTNRRMLEEVEKELRRLLETNKKTLDDVRRLLKELLDVLETRGVKDEKRLRDIRRRLEEVVRRLDKLHRDIAEDLKRVKERLDRLHERIKRRLEEVVKELRDLKDRGVDERKVLERAAEVLRELLELLRESLEEIERIIRRLLELHKRSTEEAARALEELLRGLRDHMVLHEYVNAAGITLKEDKERLEKIARDIERDLERYARDLKRLEDELREDIERARR

SEQ ID NO: 733 - protein, 239 aa, Artificial Sequence; identical to SEQ ID NO: 732
  Synthetic

SEQ ID NO: 734 - protein, 238 aa, Artificial Sequence
  Synthetic
SEAEKIREALETNLRLLEELIKRLKEILDTHNELLRRVIETLERLLKELLELLEEGGLDEEVLREVKRLVDELRKEARRVLDEHEKLVRKIKKEAEDVARESEEIIKEVEDKLKGLDREELLERVRRVLKKSDDLIAELVRRALKILEELTRLLAELLKKVVEILRRIVELVERVLTKKGARDHMVLHEYVNAAGITDRLRRLLEKLARDSAELMRELERILDRYARESEELDRRLAE

SEQ ID NO: 735 - protein, 238 aa, Artificial Sequence; identical to SEQ ID NO: 734
  Synthetic

SEQ ID NO: 736 - protein, 242 aa, Artificial Sequence
  Synthetic
SEKERLMRLLDKLKDLNRRLVERIKELLDKALELHKKLVKELRELLERLKELVERGGVPEELLTRIDELIKKLEDEARKISKEVKRLIDELKKRLEDIHREVDRLIRELKETLKGVTDKDELLRRVAEVLERIARLSEELIREVKEVLEKIVELSRELLKRVLDVLRRIAELLEDALRKGNRDHMVLHEYVNAAGITEDDLRKIERDAEREYKKLKDELEELTERYRREIRKLKEELKADRK

SEQ ID NO: 737 - protein, 242 aa, Artificial Sequence; identical to SEQ ID NO: 736
  Synthetic

SEQ ID NO: 738 - protein, 238 aa, Artificial Sequence
  Synthetic
DADELLRRLAEEVERVIREAEDLLRRWKETIKKVLDDLKRLLDELKKRNEDVIRELTKTKGDEELAKLIKDLLDTNEKVNRDLLRLIKKLLKDAERVNRRLLELIEELLEELKRVAKDLGLREEADKKLRDIADRARKELEDYERRLKELLKTVEDALRKAEEDSRKLKRDVEELLERGRLRDHMVLHEYVNAAGITRKLLERLREILRENLEALKKTLKRLEDVVREILEDLKRERK

SEQ ID NO: 739 - protein, 238 aa, Artificial Sequence; identical to SEQ ID NO: 738
  Synthetic

SEQ ID NO: 740 - protein, 236 aa, Artificial Sequence
  Synthetic
STREKAKKVLDTLRADNEDMKRVVEKILRALKRTNERAEKLAREITEEIKRILKEVGVSEEALKEIEDTLKRVLEEIKRLLDESKKLLEDVEREIREILKTSEELLERIEREIETVGSDEKTLAEILKRLLELNEEMNRRLLKILRDLLRLNEEVIRRLLAVLERLLDALKEALDRGDVPERDHMVLHEYVNAAGITLRKALEELEREHRELEKELDKLHDESRKEHERIEEELRR

SEQ ID NO: 741 - protein, 239 aa, Artificial Sequence
  Synthetic
SERELIERWLELHKEILRLIRELVERLLKLHREILDTIKKLIRELLELLEDIARKLGLDKEAKDELREIAKRVEDKLEKLERESRKVEEDLKRKLKELTDESDTVEKRVRDVVRRGTQSREEIAEELLRLDRKLLKAVEELLKEILDLNKKLLDDVRAILEETRRVLEKLLDRVRRGERTDRDHMVLHEYVNAAGITLEKVERTLKKLLDDSARMAEEVKKTLKELLERSEKVAEDVRK

SEQ ID NO: 742 - protein, 237 aa, Artificial Sequence
  Synthetic
KEKEDALKKLEDLARKSREDLERVLRKHKKILDKIEELLKRVLDEHKKIVDDILRKTGTESEILKELARLLREHHEALRRLIEELRRLLEEHHKILEDLAREHKRLLDELIKVVADGVDKDELERIIKELRERDKKLVDDLRKVSEDLLDAVRKLVEDLERISRELLRRVEELAKGIDEELRDHMVLHEYVNAAGITEILERIERAIDELLKVSEEILKLSEDASEELLKILREFAK

SEQ ID NO: 743 - protein, 237 aa, Artificial Sequence; identical to SEQ ID NO: 742
  Synthetic

SEQ ID NO: 744 - protein, 241 aa, Artificial Sequence
  Synthetic
SEKELLKEILDRIRELLEDDNRLLKRIVDEIRKLLEEWLRVHKEILERIKELLDRIGAPEDVIRELTRALKETEEDVDRVIRTLEKLLKEVLDAHEEVVRKLDRLLKEVERLVEGGDAEEVVRDLLRVVKEILDESKAVIDELARVVDEILKLLEEVDRKLAKVVKEILEDVLRGSGDDEDRDHMVLHEYVNAAGITEDLARDTRRVIEEAKRLLKEWRDRNKEVADTLKKLLEDLIRKIR

SEQ ID NO: 745 - protein, 240 aa, Artificial Sequence
  Synthetic
DREKSVRDIEEDLKRVLDKLRRRVETSKEELKKVLKADKENADELEKTLRDVVRELDRGIDSEVLRAVREIVKRLVEVVRRYNELSEKIIRDLVRVNDRVLELLKRIVKRLIDVVRELEKIGDKEKALRRLEEVVKEVKRRIEELLKELEDVHRELVKILEEVNEDLKRVATEVKEIIKTGRDHMVLHEYVNAAGITLLDNLKENTDRLKEVIDRNLADLRDLAEELRAVIERLLEDARR

SEQ ID NO: 746 - protein, 241 aa, Artificial Sequence
  Synthetic
SAEEAVEKLVRIARAIVKINEDLSREVVRILREIVRLNEETTRLLVEIAREVVKVVEDGGLSEDVVRKLRKLVKELEDLLKKSNDDIRKLVEDVARRLKESNDEIRRLVERLEELLKRGPGDEELLRLVEELTEELLRTHEEVVKALEKLTADLLELHRELLERVRRLTKRIEEELKRVGVRDHMVLHEYVNAAGITKVLDDSAKELEKLKRELERLLEESRRKLEKLKRDLERVLEETRR

SEQ ID NO: 747 - protein, 241 aa, Artificial Sequence; identical to SEQ ID NO: 746
  Synthetic

SEQ ID NO: 748 - protein, 239 aa, Artificial Sequence
  Synthetic
SAEDLVRRVKDLVDKLEDKLRKVVRTNERLWEEIRKRLEELVRRNKELWDALVEKLKAGDKDKDELIEEAKSLEDESNALVEKLVRDIERVLAESNKLLDTLAKEIEEVLEEIVELVERGSGSDKEAREKLEDIKARLKEVLKKLREESKRIIDELRRLLEEYKRLVKEIRDRIEEVRKRNRDHMVLHEYVNAAGITLKELVEELEKLVRDHNRVVEEVVRELVELLSRAVEVIKEVVK

SEQ ID NO: 749 - protein, 239 aa, Artificial Sequence; identical to SEQ ID NO: 748
  Synthetic

SEQ ID NO: 750 - protein, 240 aa, Artificial Sequence
  Synthetic
DKDKRLEELLKRLKELNDKTFEELERILEELKRANEASLREAERILEELRARIEGGNLDKRLAELLKKLLDDLKRLLEEYTRTNEELLKRLRELLERYRETNKKLLDLLRKLLDEARRTGTDEDLLRRLEDILRKYEDEVRRLLKELEDILREYEDTSRRLLEELERIAKEAAERVSRGSDRDHMVLHEYVNAAGITLLRLLEEDSRTNSEVVKRLLDLLREDSKANSEVVKRLLDVLRE

SEQ ID NO: 751 - protein, 240 aa, Artificial Sequence
  Synthetic
SKEETLKRLLDELEKRNRETVERLERLLKELEDRNRASLEELEAVLEELERKIEESGLSKELKDTLARILEELRKLLEEYFRKNEELLRLLRKLLDEYARTNEELLRLLEELLDTARRTGGDSELLKRLEDIAREYEKRVRRLLEKLKDILDKYRKTVEELVRKMEEILKEAKKTISRIGSRDHMVLHEYVNAAGITLIEILRRDVELNLDVAKKLLELLKEDSKLNLDVARELLELLDR

SEQ ID NO: 752 - protein, 240 aa, Artificial Sequence; identical to SEQ ID NO: 751
  Synthetic

SEQ ID NO: 753 - protein, 239 aa, Artificial Sequence
  Synthetic
SDEELLERVERLLRELLDTNRRMLEEVEKELRRLLETNKKTLDDVRRLLKELLDVLETRGVKDEKRLRDIRRRLEEVVRRLDKLHRDIAEDLKRVKERLDRLHERIKRRLEEVVKELRDLKDRGVDERKVLERAAEVLRELLELLRESLEEIERIIRRLLELHKRSTEEAARALEELLRGLERDHMVLHEYVNAAGITKEDKERLEKIARDIERDLERYARDLKRLEDELREDIERARR

SEQ ID NO: 754 - protein, 239 aa, Artificial Sequence; identical to SEQ ID NO: 753
  Synthetic

SEQ ID NO: 755 - protein, 238 aa, Artificial Sequence
  Synthetic
EEDERLTKRVEEIKRENRELLRRLEEEVKELERKSEKIVRDLKEKVDRAKEKLDSGKGSTELLVEELEKLIREILKLSEDHNRTLEEVVRKIEDVLRANLERLKELVDEILKALKERGKGDSEELKRKVEKVARDYERLLRKLREVVKRILDESKRLDEELEERLKEVLKKLEELIKRGGPDRDHMVLHEYVNAAGITLVEKLIRRNLRLLEELLRLVREILRTSNEILEEILKDARR

SEQ ID NO: 756 - protein, 238 aa, Artificial Sequence
  Synthetic
SEAEKIREALETNLRLLEELIKRLKEILDTHNELLRRVIETLERLLKELLELLEEGGLDEEVLREVKRLVDELRKEARRVLDEHEKLVRKIKKEAEDVARESEEIIKEVEDKLKGLDREELLERVRRVLKKSDDLIAELVRRALKILEELTRLLAELLKKVVEILRRIVELVERVLTKKGAPRDHMVLHEYVNAAGITRLRRLLEKLARDSAELMRELERILDRYARESEELDRRLAE

SEQ ID NO: 757 - protein, 238 aa, Artificial Sequence; identical to SEQ ID NO: 756
  Synthetic

SEQ ID NO: 758 - protein, 242 aa, Artificial Sequence
  Synthetic
SEKERLMRLLDKLKDLNRRLVERIKELLDKALELHKKLVKELRELLERLKELVERGGVPEELLTRIDELIKKLEDEARKISKEVKRLIDELKKRLEDIHREVDRLIRELKETLKGVTDKDELLRRVAEVLERIARLSEELIREVKEVLEKIVELSRELLKRVLDVLRRIAELLEDALRKGNVRDHMVLHEYVNAAGITDDLRKIERDAEREYKKLKDELEELTERYRREIRKLKEELKADRK

SEQ ID NO: 759 - protein, 242 aa, Artificial Sequence; identical to SEQ ID NO: 758
  Synthetic

SEQ ID NO: 760 - protein, 240 aa, Artificial Sequence
  Synthetic
SDKEEIKRRVEKTARDLETEHDKIKKRLEDTVRDIKRELDELLEKYERVLRKIEKTLREGDGDATDLVDKLLETVKRLNEEVLRTVKKIADELRRLVEEVLRVLRESNETLARLLEEGNVGDEVRERLEEVLRRTEEIIKTLEEIVKRLLDELRRLVEELRRISKKLKDELDKIKEKGKDEKRDHMVLHEYVNAAGITVRRILEALAKLIKELLEALEEVLRRNKELIRELLRVLDEALK

SEQ ID NO: 761 - protein, 240 aa, Artificial Sequence; identical to SEQ ID NO: 760
  Synthetic

SEQ ID NO: 762 - protein, 238 aa, Artificial Sequence
  Synthetic
DADELLRRLAEEVERVIREAEDLLRRWKETIKKVLDDLKRLLDELKKRNEDVIRELTKTKGDEELAKLIKDLLDTNEKVNRDLLRLIKKLLKDAERVNRRLLELIEELLEELKRVAKDLGLREEADKKLRDIADRARKELEDYERRLKELLKTVEDALRKAEEDSRKLKRDVEELLERGRLRRDHMVLHEYVNAAGITKLLERLREILRENLEALKKTLKRLEDVVREILEDLKRERK

SEQ ID NO: 763 - protein, 236 aa, Artificial Sequence
  Synthetic
STREKAKKVLDTLRADNEDMKRVVEKILRALKRTNERAEKLAREITEEIKRILKEVGVSEEALKEIEDTLKRVLEEIKRLLDESKKLLEDVEREIREILKTSEELLERIEREIETVGSDEKTLAEILKRLLELNEEMNRRLLKILRDLLRLNEEVIRRLLAVLERLLDALKEALDRGDVPEDRDHMVLHEYVNAAGITRKALEELEREHRELEKELDKLHDESRKEHERIEEELRR

SEQ ID NO: 764 - protein, 236 aa, Artificial Sequence; identical to SEQ ID NO: 763
  Synthetic

SEQ ID NO: 765 - protein, 243 aa, Artificial Sequence
  Synthetic
DLERVVEDIVDKAKRLLDKNLEVLKRIVDEVLRLLERLLRESRKVVKRVKEIIEELVRDEKELRRVKRALEEVLRRHEEIAKELKERLRKVAKEAEEKHKKLVEDLKRVVDEVRKKLSGPLDREKVLEVLDELVTIIAKLLDENIKVLEEVIRVIAELLERLLDSHRRLIDIIAKLLEGLRPRDHMVLHEYVNAAGITKRDSEKVVDDLKKELERIKREVKRLIEENARTLADIKRAVDEARK

SEQ ID NO: 766 - protein, 239 aa, Artificial Sequence
  Synthetic
SERELIERWLELHKEILRLIRELVERLLKLHREILDTIKKLIRELLELLEDIARKLGLDKEAKDELREIAKRVEDKLEKLERESRKVEEDLKRKLKELTDESDTVEKRVRDVVRRGTQSREEIAEELLRLDRKLLKAVEELLKEILDLNKKLLDDVRAILEETRRVLEKLLDRVRRGERTDDRDHMVLHEYVNAAGITEKVERTLKKLLDDSARMAEEVKKTLKELLERSEKVAEDVRK

SEQ ID NO: 767 - protein, 238 aa, Artificial Sequence
  Synthetic
SEIEDVIRRLRKILEDLERVSEKLLREIKKILDEARRLNEEVIKEIKRVLEDAVRVFRDGSGSKEELAKLVEELIRELAKLAKEVDEIHKRIVERLKALVEDAERIHRKIVETLEEIVRGVPSEELKRVVEAIVEVIKEHLKVLADVIRRIIKAIEENAETIKRVLEDIVRVLELVLRGEGSRDHMVLHEYVNAAGITDSLRELEKTVRELLKRIKEASDKVREDVDRLIKELKEAAD

SEQ ID NO: 768 - protein, 237 aa, Artificial Sequence
  Synthetic
KEKEDALKKLEDLARKSREDLERVLRKHKKILDKIEELLKRVLDEHKKIVDDILRKTGTESEILKELARLLREHHEALRRLIEELRRLLEEHHKILEDLAREHKRLLDELIKVVADGVDKDELERIIKELRERDKKLVDDLRKVSEDLLDAVRKLVEDLERISRELLRRVEELAKGIDEELARDHMVLHEYVNAAGITILERIERAIDELLKVSEEILKLSEDASEELLKILREFAK

SEQ ID NO: 769 - protein, 241 aa, Artificial Sequence
  Synthetic
SEKELLKEILDRIRELLEDDNRLLKRIVDEIRKLLEEWLRVHKEILERIKELLDRIGAPEDVIRELTRALKETEEDVDRVIRTLEKLLKEVLDAHEEVVRKLDRLLKEVERLVEGGDAEEVVRDLLRVVKEILDESKAVIDELARVVDEILKLLEEVDRKLAKVVKEILEDVLRGSGDDEDARDHMVLHEYVNAAGITDLARDTRRVIEEAKRLLKEWRDRNKEVADTLKKLLEDLIRKIR

SEQ ID NO: 770 - protein, 240 aa, Artificial Sequence
  Synthetic
DREKSVRDIEEDLKRVLDKLRRRVETSKEELKKVLKADKENADELEKTLRDVVRELDRGIDSEVLRAVREIVKRLVEVVRRYNELSEKIIRDLVRVNDRVLELLKRIVKRLIDVVRELEKIGDKEKALRRLEEVVKEVKRRIEELLKELEDVHRELVKILEEVNEDLKRVATEVKEIIKTGIRDHMVLHEYVNAAGITLDNLKENTDRLKEVIDRNLADLRDLAEELRAVIERLLEDARR

SEQ ID NO: 771 - protein, 240 aa, Artificial Sequence; identical to SEQ ID NO: 770
  Synthetic

SEQ ID NO: 772 - protein, 241 aa, Artificial Sequence
  Synthetic
SAEEAVEKLVRIARAIVKINEDLSREVVRILREIVRLNEETTRLLVEIAREVVKVVEDGGLSEDVVRKLRKLVKELEDLLKKSNDDIRKLVEDVARRLKESNDEIRRLVERLEELLKRGPGDEELLRLVEELTEELLRTHEEVVKALEKLTADLLELHRELLERVRRLTKRIEEELKRVGVSRDHMVLHEYVNAAGITVLDDSAKELEKLKRELERLLEESRRKLEKLKRDLERVLEETRR

SEQ ID NO: 773 - protein, 241 aa, Artificial Sequence; identical to SEQ ID NO: 772
  Synthetic

SEQ ID NO: 774 - protein, 237 aa, Artificial Sequence
  Synthetic
REDEVLRDIERLLREIEEKIRRILEESTAELRKVEEEVKRIIERTKRELKAIKEDVERKGIDEELRKLLDEVLDKLTKLIERNKRSLERILELIKRIIDENLEVLRDIIRLLEELLKATKDNGVPKDEVIKLVEDVVRRIEELVTRVVARNEKLVKDLDDLAKKNVRENEELLREIDRGLDERDHMVLHEYVNAAGITLEKLARDLKEILRRHIEALKELARDLAEVIRKLLEDVKR

SEQ ID NO: 775 - protein, 237 aa, Artificial Sequence; identical to SEQ ID NO: 774
  Synthetic

SEQ ID NO: 776 - protein, 243 aa, Artificial Sequence
  Synthetic
SEAERLADEVRKAVKKSEEDNETLVREVEKAVRELKKNNKTWVDEVRKLMKRLVDLLRDGQVSDRDLLKELEEVLRRVLEALAENHERTEEILKRWLDRYAEDIERLRKVLKEVIEALKRGGSDDKRIVDELEEILRRNEDVLDKIAKRLRRLLEEDRRLLERIVRELKRLLDDLDRITKEGRDHMVLHEYVNAAGITLEIIEELVRLNNEILERLLKIVRELHKDNIKILEDLLRIIEEVLR

SEQ ID NO: 777 - protein, 243 aa, Artificial Sequence; identical to SEQ ID NO: 776
  Synthetic

SEQ ID NO: 778 - protein, 239 aa, Artificial Sequence
  Synthetic
SAEDLVRRVKDLVDKLEDKLRKVVRTNERLWEEIRKRLEELVRRNKELWDALVEKLKAGDKDKDELIEEAKSLEDESNALVEKLVRDIERVLAESNKLLDTLAKEIEEVLEEIVELVERGSGSDKEAREKLEDIKARLKEVLKKLREESKRIIDELRRLLEEYKRLVKEIRDRIEEVRKRNSRDHMVLHEYVNAAGITKELVEELEKLVRDHNRVVEEVVRELVELLSRAVEVIKEVVK

SEQ ID NO: 779 - protein, 243 aa, Artificial Sequence
  Synthetic
SRVEELKKLIEDILRISREVVERIARVAEDIHRINRRVLDDLRKLIEDILRTVEEILARKVSGTEAAEALRDTIRRVVDEIRKLLEEHEKRSAELLEEIRKLLEDILRRSERAVEEIRELLKKGVSTKDVLRIIEEILREHLELLERVVRRIEEILRELLKTIEEIVKRIKEILEELKEVLKRDHMVLHEYVNAAGITKEDLDRILEEYRRLLEEIKRKLEEILRRVEELHRRLRRKLEEIDR

SEQ ID NO: 780 - protein, 243 aa, Artificial Sequence; identical to SEQ ID NO: 779
  Synthetic

SEQ ID NO: 781 - protein, 240 aa, Artificial Sequence
  Synthetic
DKDKRLEELLKRLKELNDKTFEELERILEELKRANEASLREAERILEELRARIEGGNLDKRLAELLKKLLDDLKRLLEEYTRTNEELLKRLRELLERYRETNKKLLDLLRKLLDEARRTGTDEDLLRRLEDILRKYEDEVRRLLKELEDILREYEDTSRRLLEELERIAKEAAERVSRGSDKRDHMVLHEYVNAAGITLRLLEEDSRTNSEVVKRLLDLLREDSKANSEVVKRLLDVLRE

SEQ ID NO: 782 - protein, 240 aa, Artificial Sequence
  Synthetic
SKEETLKRLLDELEKRNRETVERLERLLKELEDRNRASLEELEAVLEELERKIEESGLSKELKDTLARILEELRKLLEEYFRKNEELLRLLRKLLDEYARTNEELLRLLEELLDTARRTGGDSELLKRLEDIAREYEKRVRRLLEKLKDILDKYRKTVEELVRKMEEILKEAKKTISRIGSERDHMVLHEYVNAAGITIEILRRDVELNLDVAKKLLELLKEDSKLNLDVARELLELLDR

SEQ ID NO: 783 - protein, 240 aa, Artificial Sequence; identical to SEQ ID NO: 782
  Synthetic

SEQ ID NO: 784 - protein, 243 aa, Artificial Sequence
  Synthetic
DEEETLRRLLERKVELAKEYLDVSKEVIDRTTKLLDEYLKTSKRIVDATVELLERGDLGPDELIKRLAEELERSLRELEEEIKRLKRELEESLKKLKEIIDRLAEEAEKLLAVLKRGEGSEEEALRALASLVRELIEVLRENDERLRDVLRRLIEALRKNNEILERVLRKLVRAAEERGRDERDHMVLHEYVNAAGITLRELNEITKDLEAKLEKLLRDLNELTKALEEELKRLLDELKKRTD

SEQ ID NO: 785 - protein, 243 aa, Artificial Sequence; identical to SEQ ID NO: 784
  Synthetic

SEQ ID NO: 786 - protein, 243 aa, Artificial Sequence
  Synthetic
SEAERTKESLKKVLKALVDLNRELLRKLEENMRELTKLNEEVKRALKEVLDKVREGGIVDKDAEREAERLMRELDKSSEDTARETRKLIEESKKSTRRTEEEARKLTETLDRLAKGGLPREDLLRALVRLLEELARLIEEDVRRNAELVKRHIELVERDVAELLRLIKELVDLLADLAEKGSRDHMVLHEYVNAAGITKELADRYREEVRKSKDKLRSILEDYKRKVDELKERLRELIEEVET

SEQ ID NO: 787 - protein, 243 aa, Artificial Sequence; identical to SEQ ID NO: 786
  Synthetic

SEQ ID NO: 788 - protein, 238 aa, Artificial Sequence
  Synthetic
EEDERLTKRVEEIKRENRELLRRLEEEVKELERKSEKIVRDLKEKVDRAKEKLDSGKGSTELLVEELEKLIREILKLSEDHNRTLEEVVRKIEDVLRANLERLKELVDEILKALKERGKGDSEELKRKVEKVARDYERLLRKLREVVKRILDESKRLDEELEERLKEVLKKLEELIKRGGPDKRDHMVLHEYVNAAGITVEKLIRRNLRLLEELLRLVREILRTSNEILEEILKDARR

SEQ ID NO: 789 - protein, 234 aa, Artificial Sequence
  Synthetic
SAKETIRKLIEENKDIIRKLAEKLKRLLEESERIAEEALRLIKELLERIERALRRVGSGIDEELLKELEKELARLEEELKEILDRVRDLHRRLAEEIRKILEESKKLNEELEDRLRKDGDVEELLELLERVHATDVRLLRELLKLLKKVHEDVVSLLERLLELLKRVLDRIVEELGLSDKELERDHMVLHEYVNAAGITLKELSDRLEEKIRKIKRELDDLSARLREKIERTRK

SEQ ID NO: 790 - protein, 234 aa, Artificial Sequence; identical to SEQ ID NO: 789
  Synthetic

SEQ ID NO: 791 - protein, 238 aa, Artificial Sequence
  Synthetic
SKEDKARELEKRLRDNLKKLEEVVRELAEVLKRNLEKLRRLAEELLRALKRLLDKLRAGGLPKDELEDLRREVEDVLRRLEDLLRKLKKANDESLTRLEELLRRAEEENRRVLTTLRELLRGNGDDRDLARLVARLVEANNRALEELLRLVAKNVEDNNRVLEELLRLVKELAKRLLGRIRDERDHMVLHEYVNAAGITARKILRDDERDLRALEKRIRDIIREDREELERLKERARK

SEQ ID NO: 792 - protein, 243 aa, Artificial Sequence
  Synthetic
KREDILKKLEDIIRDIIDKLRRILEKVKRLNEDIIREIKRLLDESLKTLEDLLKRIADKSRDRELEDILRRVLEKLRRSLDKLRDTLRKLKEETDTVLERAERTLKELKDRLEKLLRDGEKVSEEDLVEALKALIDELRKVLEDVIRVSKELVERLLRALREHLETNKRLVKELLDALRKTTGRDHMVLHEYVNAAGITRRLEEEVERVARELEKAHRDLERDIRRVAEELKKLLKKLRDDRR

SEQ ID NO: 793 - protein, 244 aa, Artificial Sequence
  Synthetic
SAEETLRRITEESKRVLEEITKKYEDLERESREVLRKLREDLDRIKRELEDVLTKGGDDKDEVLTVLEKVLDELLKLHRENLRVIKELLRKVLEVDRENLEVLKRLLEKARDLLRRSGRDEKDLKKLEDELRKVKEELEKKHEASKRDIEDLERELDKVTEEVERLLRKLKEELRRAAEGSDERDHMVLHEYVNAAGITIRVLEEILKINEELNRKIIKFARENLERNRRVNKKVIEVLREAAR

SEQ ID NO: 794 - protein, 238 aa, Artificial Sequence
  Synthetic
SEAEKIREALETNLRLLEELIKRLKEILDTHNELLRRVIETLERLLKELLELLEEGGLDEEVLREVKRLVDELRKEARRVLDEHEKLVRKIKKEAEDVARESEEIIKEVEDKLKGLDREELLERVRRVLKKSDDLIAELVRRALKILEELTRLLAELLKKVVEILRRIVELVERVLTKKGAPKRDHMVLHEYVNAAGITLRRLLEKLARDSAELMRELERILDRYARESEELDRRLAE

SEQ ID NO: 795 - protein, 238 aa, Artificial Sequence; identical to SEQ ID NO: 794
  Synthetic

SEQ ID NO: 796 - protein, 242 aa, Artificial Sequence
  Synthetic
SEKERLMRLLDKLKDLNRRLVERIKELLDKALELHKKLVKELRELLERLKELVERGGVPEELLTRIDELIKKLEDEARKISKEVKRLIDELKKRLEDIHREVDRLIRELKETLKGVTDKDELLRRVAEVLERIARLSEELIREVKEVLEKIVELSRELLKRVLDVLRRIAELLEDALRKGNVSRDHMVLHEYVNAAGITDLRKIERDAEREYKKLKDELEELTERYRREIRKLKEELKADRK

SEQ ID NO: 797 - protein, 242 aa, Artificial Sequence; identical to SEQ ID NO: 796
  Synthetic

SEQ ID NO: 798 - protein, 240 aa, Artificial Sequence
  Synthetic
SDKEEIKRRVEKTARDLETEHDKIKKRLEDTVRDIKRELDELLEKYERVLRKIEKTLREGDGDATDLVDKLLETVKRLNEEVLRTVKKIADELRRLVEEVLRVLRESNETLARLLEEGNVGDEVRERLEEVLRRTEEIIKTLEEIVKRLLDELRRLVEELRRISKKLKDELDKIKEKGKDEKRRDHMVLHEYVNAAGITRRILEALAKLIKELLEALEEVLRRNKELIRELLRVLDEALK

SEQ ID NO: 799 - protein, 238 aa, Artificial Sequence
  Synthetic
DADELLRRLAEEVERVIREAEDLLRRWKETIKKVLDDLKRLLDELKKRNEDVIRELTKTKGDEELAKLIKDLLDTNEKVNRDLLRLIKKLLKDAERVNRRLLELIEELLEELKRVAKDLGLREEADKKLRDIADRARKELEDYERRLKELLKTVEDALRKAEEDSRKLKRDVEELLERGRLRKRDHMVLHEYVNAAGITLLERLREILRENLEALKKTLKRLEDVVREILEDLKRERK

SEQ ID NO: 800 - protein, 236 aa, Artificial Sequence
  Synthetic
STREKAKKVLDTLRADNEDMKRVVEKILRALKRTNERAEKLAREITEEIKRILKEVGVSEEALKEIEDTLKRVLEEIKRLLDESKKLLEDVEREIREILKTSEELLERIEREIETVGSDEKTLAEILKRLLELNEEMNRRLLKILRDLLRLNEEVIRRLLAVLERLLDALKEALDRGDVPEDLRDHMVLHEYVNAAGITKALEELEREHRELEKELDKLHDESRKEHERIEEELRR

SEQ ID NO: 801 - protein, 236 aa, Artificial Sequence; identical to SEQ ID NO: 800
  Synthetic

SEQ ID NO: 802 - protein, 243 aa, Artificial Sequence
  Synthetic
DLERVVEDIVDKAKRLLDKNLEVLKRIVDEVLRLLERLLRESRKVVKRVKEIIEELVRDEKELRRVKRALEEVLRRHEEIAKELKERLRKVAKEAEEKHKKLVEDLKRVVDEVRKKLSGPLDREKVLEVLDELVTIIAKLLDENIKVLEEVIRVIAELLERLLDSHRRLIDIIAKLLEGLRPGRDHMVLHEYVNAAGITRDSEKVVDDLKKELERIKREVKRLIEENARTLADIKRAVDEARK

SEQ ID NO: 803 - protein, 243 aa, Artificial Sequence; identical to SEQ ID NO: 802
  Synthetic

SEQ ID NO: 804 - protein, 239 aa, Artificial Sequence
  Synthetic
SERELIERWLELHKEILRLIRELVERLLKLHREILDTIKKLIRELLELLEDIARKLGLDKEAKDELREIAKRVEDKLEKLERESRKVEEDLKRKLKELTDESDTVEKRVRDVVRRGTQSREEIAEELLRLDRKLLKAVEELLKEILDLNKKLLDDVRAILEETRRVLEKLLDRVRRGERTDDERDHMVLHEYVNAAGITKVERTLKKLLDDSARMAEEVKKTLKELLERSEKVAEDVRK

SEQ ID NO: 805 - protein, 237 aa, Artificial Sequence
  Synthetic
KEKEDALKKLEDLARKSREDLERVLRKHKKILDKIEELLKRVLDEHKKIVDDILRKTGTESEILKELARLLREHHEALRRLIEELRRLLEEHHKILEDLAREHKRLLDELIKVVADGVDKDELERIIKELRERDKKLVDDLRKVSEDLLDAVRKLVEDLERISRELLRRVEELAKGIDEELARRDHMVLHEYVNAAGITLERIERAIDELLKVSEEILKLSEDASEELLKILREFAK

SEQ ID NO: 806 - protein, 241 aa, Artificial Sequence
  Synthetic
SEKELLKEILDRIRELLEDDNRLLKRIVDEIRKLLEEWLRVHKEILERIKELLDRIGAPEDVIRELTRALKETEEDVDRVIRTLEKLLKEVLDAHEEVVRKLDRLLKEVERLVEGGDAEEVVRDLLRVVKEILDESKAVIDELARVVDEILKLLEEVDRKLAKVVKEILEDVLRGSGDDEDAVRDHMVLHEYVNAAGITLARDTRRVIEEAKRLLKEWRDRNKEVADTLKKLLEDLIRKIR

SEQ ID NO: 807 - protein, 241 aa, Artificial Sequence; identical to SEQ ID NO: 806
  Synthetic

SEQ ID NO: 808 - protein, 240 aa, Artificial Sequence
  Synthetic
DREKSVRDIEEDLKRVLDKLRRRVETSKEELKKVLKADKENADELEKTLRDVVRELDRGIDSEVLRAVREIVKRLVEVVRRYNELSEKIIRDLVRVNDRVLELLKRIVKRLIDVVRELEKIGDKEKALRRLEEVVKEVKRRIEELLKELEDVHRELVKILEEVNEDLKRVATEVKEIIKTGIKRDHMVLHEYVNAAGITDNLKENTDRLKEVIDRNLADLRDLAEELRAVIERLLEDARR

SEQ ID NO: 809 - protein, 241 aa, Artificial Sequence
  Synthetic
SAEEAVEKLVRIARAIVKINEDLSREVVRILREIVRLNEETTRLLVEIAREVVKVVEDGGLSEDVVRKLRKLVKELEDLLKKSNDDIRKLVEDVARRLKESNDEIRRLVERLEELLKRGPGDEELLRLVEELTEELLRTHEEVVKALEKLTADLLELHRELLERVRRLTKRIEEELKRVGVSERDHMVLHEYVNAAGITLDDSAKELEKLKRELERLLEESRRKLEKLKRDLERVLEETRR

SEQ ID NO: 810 - protein, 241 aa, Artificial Sequence; identical to SEQ ID NO: 809
  Synthetic

SEQ ID NO: 811 - protein, 237 aa, Artificial Sequence
  Synthetic
REDEVLRDIERLLREIEEKIRRILEESTAELRKVEEEVKRIIERTKRELKAIKEDVERKGIDEELRKLLDEVLDKLTKLIERNKRSLERILELIKRIIDENLEVLRDIIRLLEELLKATKDNGVPKDEVIKLVEDVVRRIEELVTRVVARNEKLVKDLDDLAKKNVRENEELLREIDRGLDEDRDHMVLHEYVNAAGITEKLARDLKEILRRHIEALKELARDLAEVIRKLLEDVKR

SEQ ID NO: 812 - protein, 237 aa, Artificial Sequence; identical to SEQ ID NO: 811
  Synthetic

SEQ ID NO: 813 - protein, 243 aa, Artificial Sequence
  Synthetic
SEAERLADEVRKAVKKSEEDNETLVREVEKAVRELKKNNKTWVDEVRKLMKRLVDLLRDGQVSDRDLLKELEEVLRRVLEALAENHERTEEILKRWLDRYAEDIERLRKVLKEVIEALKRGGSDDKRIVDELEEILRRNEDVLDKIAKRLRRLLEEDRRLLERIVRELKRLLDDLDRITKEGKRDHMVLHEYVNAAGITEIIEELVRLNNEILERLLKIVRELHKDNIKILEDLLRIIEEVLR

SEQ ID NO: 814 - protein, 243 aa, Artificial Sequence; identical to SEQ ID NO: 813
  Synthetic

SEQ ID NO: 815 - protein, 243 aa, Artificial Sequence
  Synthetic
SRVEELKKLIEDILRISREVVERIARVAEDIHRINRRVLDDLRKLIEDILRTVEEILARKVSGTEAAEALRDTIRRVVDEIRKLLEEHEKRSAELLEEIRKLLEDILRRSERAVEEIRELLKKGVSTKDVLRIIEEILREHLELLERVVRRIEEILRELLKTIEEIVKRIKEILEELKEVLKRRDHMVLHEYVNAAGITEDLDRILEEYRRLLEEIKRKLEEILRRVEELHRRLRRKLEEIDR

SEQ ID NO: 816 - protein, 243 aa, Artificial Sequence; identical to SEQ ID NO: 815
  Synthetic

SEQ ID NO: 817 - protein, 240 aa, Artificial Sequence
  Synthetic
SKEETLKRLLDELEKRNRETVERLERLLKELEDRNRASLEELEAVLEELERKIEESGLSKELKDTLARILEELRKLLEEYFRKNEELLRLLRKLLDEYARTNEELLRLLEELLDTARRTGGDSELLKRLEDIAREYEKRVRRLLEKLKDILDKYRKTVEELVRKMEEILKEAKKTISRIGSEERDHMVLHEYVNAAGITEILRRDVELNLDVAKKLLELLKEDSKLNLDVARELLELLDR

SEQ ID NO: 818 - protein, 240 aa, Artificial Sequence; identical to SEQ ID NO: 817
  Synthetic

SEQ ID NO: 819 - protein, 243 aa, Artificial Sequence
  Synthetic
DEEETLRRLLERKVELAKEYLDVSKEVIDRTTKLLDEYLKTSKRIVDATVELLERGDLGPDELIKRLAEELERSLRELEEEIKRLKRELEESLKKLKEIIDRLAEEAEKLLAVLKRGEGSEEEALRALASLVRELIEVLRENDERLRDVLRRLIEALRKNNEILERVLRKLVRAAEERGRDESRDHMVLHEYVNAAGITRELNEITKDLEAKLEKLLRDLNELTKALEEELKRLLDELKKRTD

SEQ ID NO: 820 - protein, 243 aa, Artificial Sequence; identical to SEQ ID NO: 819
  Synthetic

SEQ ID NO: 821 - protein, 243 aa, Artificial Sequence
  Synthetic
SEAERTKESLKKVLKALVDLNRELLRKLEENMRELTKLNEEVKRALKEVLDKVREGGIVDKDAEREAERLMRELDKSSEDTARETRKLIEESKKSTRRTEEEARKLTETLDRLAKGGLPREDLLRALVRLLEELARLIEEDVRRNAELVKRHIELVERDVAELLRLIKELVDLLADLAEKGSRRDHMVLHEYVNAAGITELADRYREEVRKSKDKLRSILEDYKRKVDELKERLRELIEEVET

SEQ ID NO: 822 - protein, 243 aa, Artificial Sequence; identical to SEQ ID NO: 821
  Synthetic

SEQ ID NO: 823 - protein, 241 aa, Artificial Sequence
  Synthetic
SADEALEELVRRLLEVLKTVLERTKELSRDDLRVVKEVLRIIEELVKRLLKVIRDGLDDADRVLEEVERVIREAKREVKRWEEVVRKVVEDSRRLIERVLAEVEEVIKEAKRLLDERKSGGSREVIEELLSLLREIVRHHKEVSDEHLKLSAELVKRILDVVEETLRLATEIVRRIKEGGNSERDHMVLHEYVNAAGITVERLLEDIERLLAELEKLNEDVLRENKALLEDLERRVRERKK

SEQ ID NO: 824 - protein, 241 aa, Artificial Sequence; identical to SEQ ID NO: 823
  Synthetic

SEQ ID NO: 825 - protein, 239 aa, Artificial Sequence
  Synthetic
SDEELLERVERLLRELLDTNRRMLEEVEKELRRLLETNKKTLDDVRRLLKELLDVLETRGVKDEKRLRDIRRRLEEVVRRLDKLHRDIAEDLKRVKERLDRLHERIKRRLEEVVKELRDLKDRGVDERKVLERAAEVLRELLELLRESLEEIERIIRRLLELHKRSTEEAARALEELLRGLEGSRDHMVLHEYVNAAGITDKERLEKIARDIERDLERYARDLKRLEDELREDIERARR

SEQ ID NO: 826 - protein, 245 aa, Artificial Sequence
  Synthetic
TEEEVLRKVEKLIKDLLDVLRDLLRASEEVVREALRVLEELIEENKRVIEELSRALSGGSRESVESALAKNEERLKKILEDADRVLDKWRRLLEELSKKAKAVLDEVRKRLEEIKREVPETEKLRTLLTILEEILRALEKIIRDILRINERLLEKLKRILERLRETNREIDERIRKLVEEARGGRDHMVLHEYVNAAGITEKRHEDLRRELEKLLRDYKRELEEIERALEEIEKTLKRRADETRR

SEQ ID NO: 827 - protein, 238 aa, Artificial Sequence
  Synthetic
SKEDKARELEKRLRDNLKKLEEVVRELAEVLKRNLEKLRRLAEELLRALKRLLDKLRAGGLPKDELEDLRREVEDVLRRLEDLLRKLKKANDESLTRLEELLRRAEEENRRVLTTLRELLRGNGDDRDLARLVARLVEANNRALEELLRLVAKNVEDNNRVLEELLRLVKELAKRLLGRIRDEDRDHMVLHEYVNAAGITRKILRDDERDLRALEKRIRDIIREDREELERLKERARK

SEQ ID NO: 828 - protein, 243 aa, Artificial Sequence
  Synthetic
KREDILKKLEDIIRDIIDKLRRILEKVKRLNEDIIREIKRLLDESLKTLEDLLKRIADKSRDRELEDILRRVLEKLRRSLDKLRDTLRKLKEETDTVLERAERTLKELKDRLEKLLRDGEKVSEEDLVEALKALIDELRKVLEDVIRVSKELVERLLRALREHLETNKRLVKELLDALRKTTGDRDHMVLHEYVNAAGITRLEEEVERVARELEKAHRDLERDIRRVAEELKKLLKKLRDDRR

SEQ ID NO: 829 - protein, 243 aa, Artificial Sequence; identical to SEQ ID NO: 828
  Synthetic

SEQ ID NO: 830 - protein, 244 aa, Artificial Sequence
  Synthetic
SAEETLRRITEESKRVLEEITKKYEDLERESREVLRKLREDLDRIKRELEDVLTKGGDDKDEVLTVLEKVLDELLKLHRENLRVIKELLRKVLEVDRENLEVLKRLLEKARDLLRRSGRDEKDLKKLEDELRKVKEELEKKHEASKRDIEDLERELDKVTEEVERLLRKLKEELRRAAEGSDEDRDHMVLHEYVNAAGITRVLEEILKINEELNRKIIKFARENLERNRRVNKKVIEVLREAAR

SEQ ID NO: 831 - protein, 238 aa, Artificial Sequence
  Synthetic
SEAEKIREALETNLRLLEELIKRLKEILDTHNELLRRVIETLERLLKELLELLEEGGLDEEVLREVKRLVDELRKEARRVLDEHEKLVRKIKKEAEDVARESEEIIKEVEDKLKGLDREELLERVRRVLKKSDDLIAELVRRALKILEELTRLLAELLKKVVEILRRIVELVERVLTKKGAPKERDHMVLHEYVNAAGITRRLLEKLARDSAELMRELERILDRYARESEELDRRLAE

SEQ ID NO: 832 - protein, 238 aa, Artificial Sequence; identical to SEQ ID NO: 831
  Synthetic

SEQ ID NO: 833 - protein, 242 aa, Artificial Sequence
  Synthetic
SEKERLMRLLDKLKDLNRRLVERIKELLDKALELHKKLVKELRELLERLKELVERGGVPEELLTRIDELIKKLEDEARKISKEVKRLIDELKKRLEDIHREVDRLIRELKETLKGVTDKDELLRRVAEVLERIARLSEELIREVKEVLEKIVELSRELLKRVLDVLRRIAELLEDALRKGNVSERDHMVLHEYVNAAGITLRKIERDAEREYKKLKDELEELTERYRREIRKLKEELKADRK

SEQ ID NO: 834 - protein, 242 aa, Artificial Sequence; identical to SEQ ID NO: 833
  Synthetic

SEQ ID NO: 835 - protein, 240 aa, Artificial Sequence
  Synthetic
SDKEEIKRRVEKTARDLETEHDKIKKRLEDTVRDIKRELDELLEKYERVLRKIEKTLREGDGDATDLVDKLLETVKRLNEEVLRTVKKIADELRRLVEEVLRVLRESNETLARLLEEGNVGDEVRERLEEVLRRTEEIIKTLEEIVKRLLDELRRLVEELRRISKKLKDELDKIKEKGKDEKRLRDHMVLHEYVNAAGITRILEALAKLIKELLEALEEVLRRNKELIRELLRVLDEALK

SEQ ID NO: 836 - protein, 238 aa, Artificial Sequence
  Synthetic
DADELLRRLAEEVERVIREAEDLLRRWKETIKKVLDDLKRLLDELKKRNEDVIRELTKTKGDEELAKLIKDLLDTNEKVNRDLLRLIKKLLKDAERVNRRLLELIEELLEELKRVAKDLGLREEADKKLRDIADRARKELEDYERRLKELLKTVEDALRKAEEDSRKLKRDVEELLERGRLRKDRDHMVLHEYVNAAGITLERLREILRENLEALKKTLKRLEDVVREILEDLKRERK

SEQ ID NO: 837 - protein, 236 aa, Artificial Sequence
  Synthetic
STREKAKKVLDTLRADNEDMKRVVEKILRALKRTNERAEKLAREITEEIKRILKEVGVSEEALKEIEDTLKRVLEEIKRLLDESKKLLEDVEREIREILKTSEELLERIEREIETVGSDEKTLAEILKRLLELNEEMNRRLLKILRDLLRLNEEVIRRLLAVLERLLDALKEALDRGDVPEDLLRDHMVLHEYVNAAGITALEELEREHRELEKELDKLHDESRKEHERIEEELRR

SEQ ID NO: 838 - protein, 239 aa, Artificial Sequence
  Synthetic
SERELIERWLELHKEILRLIRELVERLLKLHREILDTIKKLIRELLELLEDIARKLGLDKEAKDELREIAKRVEDKLEKLERESRKVEEDLKRKLKELTDESDTVEKRVRDVVRRGTQSREEIAEELLRLDRKLLKAVEELLKEILDLNKKLLDDVRAILEETRRVLEKLLDRVRRGERTDDERRDHMVLHEYVNAAGITVERTLKKLLDDSARMAEEVKKTLKELLERSEKVAEDVRK

SEQ ID NO: 839 - protein, 241 aa, Artificial Sequence
  Synthetic
SEKELLKEILDRIRELLEDDNRLLKRIVDEIRKLLEEWLRVHKEILERIKELLDRIGAPEDVIRELTRALKETEEDVDRVIRTLEKLLKEVLDAHEEVVRKLDRLLKEVERLVEGGDAEEVVRDLLRVVKEILDESKAVIDELARVVDEILKLLEEVDRKLAKVVKEILEDVLRGSGDDEDAVRRDHMVLHEYVNAAGITARDTRRVIEEAKRLLKEWRDRNKEVADTLKKLLEDLIRKIR

SEQ ID NO: 840 - protein, 241 aa, Artificial Sequence; identical to SEQ ID NO: 839
  Synthetic

SEQ ID NO: 841 - protein, 237 aa, Artificial Sequence
  Synthetic
REDEVLRDIERLLREIEEKIRRILEESTAELRKVEEEVKRIIERTKRELKAIKEDVERKGIDEELRKLLDEVLDKLTKLIERNKRSLERILELIKRIIDENLEVLRDIIRLLEELLKATKDNGVPKDEVIKLVEDVVRRIEELVTRVVARNEKLVKDLDDLAKKNVRENEELLREIDRGLDEDLRDHMVLHEYVNAAGITKLARDLKEILRRHIEALKELARDLAEVIRKLLEDVKR

SEQ ID NO: 842 - protein, 237 aa, Artificial Sequence; identical to SEQ ID NO: 841
  Synthetic

SEQ ID NO: 843 - protein, 245 aa, Artificial Sequence
  Synthetic
SEKDEVTRRIRELLKEAEETNREAIERIKRLLDRVREAVEEVAKRSEELLRRLKKVLDRGLQDDEALLKLLIDALREHNRLSTELIKILIDVLRTILKIIKDVLATNIEIARRILDLVRRLAERGGLDDRLVKEVEKLVRTAERLHRDALRKVKRLVEELEKRLRELVKTDHDLVRRLETLLRRRDHMVLHEYVNAAGITAESLRLIRELLKEIEKIVKEIIELLERLNDELRKIIEAILETTKK

SEQ ID NO: 844 - protein, 243 aa, Artificial Sequence
  Synthetic
SRVEELKKLIEDILRISREVVERIARVAEDIHRINRRVLDDLRKLIEDILRTVEEILARKVSGTEAAEALRDTIRRVVDEIRKLLEEHEKRSAELLEEIRKLLEDILRRSERAVEEIRELLKKGVSTKDVLRIIEEILREHLELLERVVRRIEEILRELLKTIEEIVKRIKEILEELKEVLKRGRDHMVLHEYVNAAGITDLDRILEEYRRLLEEIKRKLEEILRRVEELHRRLRRKLEEIDR

SEQ ID NO: 845 - protein, 243 aa, Artificial Sequence; identical to SEQ ID NO: 844
  Synthetic

SEQ ID NO: 846 - protein, 243 aa, Artificial Sequence
  Synthetic
DEEETLRRLLERKVELAKEYLDVSKEVIDRTTKLLDEYLKTSKRIVDATVELLERGDLGPDELIKRLAEELERSLRELEEEIKRLKRELEESLKKLKEIIDRLAEEAEKLLAVLKRGEGSEEEALRALASLVRELIEVLRENDERLRDVLRRLIEALRKNNEILERVLRKLVRAAEERGRDESSRDHMVLHEYVNAAGITELNEITKDLEAKLEKLLRDLNELTKALEEELKRLLDELKKRTD

SEQ ID NO: 847 - protein, 243 aa, Artificial Sequence; identical to SEQ ID NO: 846
  Synthetic

SEQ ID NO: 848 - protein, 243 aa, Artificial Sequence
  Synthetic
SEAERTKESLKKVLKALVDLNRELLRKLEENMRELTKLNEEVKRALKEVLDKVREGGIVDKDAEREAERLMRELDKSSEDTARETRKLIEESKKSTRRTEEEARKLTETLDRLAKGGLPREDLLRALVRLLEELARLIEEDVRRNAELVKRHIELVERDVAELLRLIKELVDLLADLAEKGSRTRDHMVLHEYVNAAGITLADRYREEVRKSKDKLRSILEDYKRKVDELKERLRELIEEVET

SEQ ID NO: 849 - protein, 243 aa, Artificial Sequence; identical to SEQ ID NO: 848
  Synthetic

SEQ ID NO: 850 - protein, 238 aa, Artificial Sequence
  Synthetic
EEDERLTKRVEEIKRENRELLRRLEEEVKELERKSEKIVRDLKEKVDRAKEKLDSGKGSTELLVEELEKLIREILKLSEDHNRTLEEVVRKIEDVLRANLERLKELVDEILKALKERGKGDSEELKRKVEKVARDYERLLRKLREVVKRILDESKRLDEELEERLKEVLKKLEELIKRGGPDKDVRDHMVLHEYVNAAGITKLIRRNLRLLEELLRLVREILRTSNEILEEILKDARR

SEQ ID NO: 851 - protein, 245 aa, Artificial Sequence
  Synthetic
TEEEVLRKVEKLIKDLLDVLRDLLRASEEVVREALRVLEELIEENKRVIEELSRALSGGSRESVESALAKNEERLKKILEDADRVLDKWRRLLEELSKKAKAVLDEVRKRLEEIKREVPETEKLRTLLTILEEILRALEKIIRDILRINERLLEKLKRILERLRETNREIDERIRKLVEEARGGSRDHMVLHEYVNAAGITKRHEDLRRELEKLLRDYKRELEEIERALEEIEKTLKRRADETRR

SEQ ID NO: 852 - protein, 245 aa, Artificial Sequence; identical to SEQ ID NO: 851
  Synthetic

SEQ ID NO: 853 - protein, 244 aa, Artificial Sequence
  Synthetic
SAEETLRRITEESKRVLEEITKKYEDLERESREVLRKLREDLDRIKRELEDVLTKGGDDKDEVLTVLEKVLDELLKLHRENLRVIKELLRKVLEVDRENLEVLKRLLEKARDLLRRSGRDEKDLKKLEDELRKVKEELEKKHEASKRDIEDLERELDKVTEEVERLLRKLKEELRRAAEGSDEDRRDHMVLHEYVNAAGITVLEEILKINEELNRKIIKFARENLERNRRVNKKVIEVLREAAR

SEQ ID NO: 854 - protein, 238 aa, Artificial Sequence
  Synthetic
SEAEKIREALETNLRLLEELIKRLKEILDTHNELLRRVIETLERLLKELLELLEEGGLDEEVLREVKRLVDELRKEARRVLDEHEKLVRKIKKEAEDVARESEEIIKEVEDKLKGLDREELLERVRRVLKKSDDLIAELVRRALKILEELTRLLAELLKKVVEILRRIVELVERVLTKKGAPKEDRDHMVLHEYVNAAGITRLLEKLARDSAELMRELERILDRYARESEELDRRLAE

SEQ ID NO: 855 - protein, 238 aa, Artificial Sequence; identical to SEQ ID NO: 854
  Synthetic

SEQ ID NO: 856 - protein, 242 aa, Artificial Sequence
  Synthetic
SEKERLMRLLDKLKDLNRRLVERIKELLDKALELHKKLVKELRELLERLKELVERGGVPEELLTRIDELIKKLEDEARKISKEVKRLIDELKKRLEDIHREVDRLIRELKETLKGVTDKDELLRRVAEVLERIARLSEELIREVKEVLEKIVELSRELLKRVLDVLRRIAELLEDALRKGNVSEERDHMVLHEYVNAAGITRKIERDAEREYKKLKDELEELTERYRREIRKLKEELKADRK

SEQ ID NO: 857 - protein, 238 aa, Artificial Sequence
  Synthetic
DADELLRRLAEEVERVIREAEDLLRRWKETIKKVLDDLKRLLDELKKRNEDVIRELTKTKGDEELAKLIKDLLDTNEKVNRDLLRLIKKLLKDAERVNRRLLELIEELLEELKRVAKDLGLREEADKKLRDIADRARKELEDYERRLKELLKTVEDALRKAEEDSRKLKRDVEELLERGRLRKDDRDHMVLHEYVNAAGITERLREILRENLEALKKTLKRLEDVVREILEDLKRERK

SEQ ID NO: 858 - protein, 236 aa, Artificial Sequence
  Synthetic
STREKAKKVLDTLRADNEDMKRVVEKILRALKRTNERAEKLAREITEEIKRILKEVGVSEEALKEIEDTLKRVLEEIKRLLDESKKLLEDVEREIREILKTSEELLERIEREIETVGSDEKTLAEILKRLLELNEEMNRRLLKILRDLLRLNEEVIRRLLAVLERLLDALKEALDRGDVPEDLLRRDHMVLHEYVNAAGITLEELEREHRELEKELDKLHDESRKEHERIEEELRR

SEQ ID NO: 859 - protein, 236 aa, Artificial Sequence; identical to SEQ ID NO: 858
  Synthetic

SEQ ID NO: 860 - protein, 243 aa, Artificial Sequence
  Synthetic
DLERVVEDIVDKAKRLLDKNLEVLKRIVDEVLRLLERLLRESRKVVKRVKEIIEELVRDEKELRRVKRALEEVLRRHEEIAKELKERLRKVAKEAEEKHKKLVEDLKRVVDEVRKKLSGPLDREKVLEVLDELVTIIAKLLDENIKVLEEVIRVIAELLERLLDSHRRLIDIIAKLLEGLRPGDERDHMVLHEYVNAAGITSEKVVDDLKKELERIKREVKRLIEENARTLADIKRAVDEARK

SEQ ID NO: 861 - protein, 239 aa, Artificial Sequence
  Synthetic
SERELIERWLELHKEILRLIRELVERLLKLHREILDTIKKLIRELLELLEDIARKLGLDKEAKDELREIAKRVEDKLEKLERESRKVEEDLKRKLKELTDESDTVEKRVRDVVRRGTQSREEIAEELLRLDRKLLKAVEELLKEILDLNKKLLDDVRAILEETRRVLEKLLDRVRRGERTDDERRRDHMVLHEYVNAAGITERTLKKLLDDSARMAEEVKKTLKELLERSEKVAEDVRK

SEQ ID NO: 862 - protein, 246 aa, Artificial Sequence
  Synthetic
KEIEETLKELEDLNREMVETNRRVLEETRRLNKETVDRVKATLDELAKMLKKLVDDVRKGPTSEELKRLLAELEELLARVVRRVEELLKKSTDLLERAVKDSADALRRSHEVLKEVASRVKRAKDEGLPREEVLRLLRELLERHAKVLKDIVRVSEKLLREHLKVLREIVEVLEELLERILKVILRDHMVLHEYVNAAGITEEIKRRLKEVIDRYEDELRKLRKEYKEKIDKYERKLEEIERRERT

SEQ ID NO: 863 - protein, 246 aa, Artificial Sequence
  Synthetic
SREEIVATLEDLARKILEVVKKLAKEIEDAWREIERAVREILKRLEELWREIEDVVRKKVDSRVAEILETVVKRVVDITRRLIEEAERVVRELVDITRKLITILEEVVRRLVEIVREASKIDDRRELEDMLRKIREVVREVIERLKKLDEDVRRVVEEVIRRLEELNKRLEDVIREVKKRLKELGRDHMVLHEYVNAAGITLERNTRVIKEIIDLLRTVIRIHEKIVEDLIKLLEELLRRLEEATR

SEQ ID NO: 864 - protein, 237 aa, Artificial Sequence
  Synthetic
KEKEDALKKLEDLARKSREDLERVLRKHKKILDKIEELLKRVLDEHKKIVDDILRKTGTESEILKELARLLREHHEALRRLIEELRRLLEEHHKILEDLAREHKRLLDELIKVVADGVDKDELERIIKELRERDKKLVDDLRKVSEDLLDAVRKLVEDLERISRELLRRVEELAKGIDEELAREVRDHMVLHEYVNAAGITRIERAIDELLKVSEEILKLSEDASEELLKILREFAK

SEQ ID NO: 865 - protein, 241 aa, Artificial Sequence
  Synthetic
SEKELLKEILDRIRELLEDDNRLLKRIVDEIRKLLEEWLRVHKEILERIKELLDRIGAPEDVIRELTRALKETEEDVDRVIRTLEKLLKEVLDAHEEVVRKLDRLLKEVERLVEGGDAEEVVRDLLRVVKEILDESKAVIDELARVVDEILKLLEEVDRKLAKVVKEILEDVLRGSGDDEDAVRKRDHMVLHEYVNAAGITRDTRRVIEEAKRLLKEWRDRNKEVADTLKKLLEDLIRKIR

SEQ ID NO: 866 - protein, 241 aa, Artificial Sequence; identical to SEQ ID NO: 865
  Synthetic

SEQ ID NO: 867 - protein, 246 aa, Artificial Sequence
  Synthetic
SEREELLERIKEILKRVKDKLDEDLKRLKEILEKLKEKADRDLEELRRRIEEVREKLERTGRTDELVKEVLDTVRRNLENLKRLVEDILRKLEENVKNLTDLVREILKLITELIKRLEDGGLPKEVLDALRRVLEKLEELLREILERLKRSLEAVKRKIEELLKELERSLDELRRALERIRKEIGRDHMVLHEYVNAAGITLEAVRRVLEELLKVLAEHLETVRELIERLKRVLEEAIEVVERVAR

SEQ ID NO: 868 - protein, 246 aa, Artificial Sequence; identical to SEQ ID NO: 867
  Synthetic

SEQ ID NO: 869 - protein, 240 aa, Artificial Sequence
  Synthetic
DREKSVRDIEEDLKRVLDKLRRRVETSKEELKKVLKADKENADELEKTLRDVVRELDRGIDSEVLRAVREIVKRLVEVVRRYNELSEKIIRDLVRVNDRVLELLKRIVKRLIDVVRELEKIGDKEKALRRLEEVVKEVKRRIEELLKELEDVHRELVKILEEVNEDLKRVATEVKEIIKTGIKSSRDHMVLHEYVNAAGITLKENTDRLKEVIDRNLADLRDLAEELRAVIERLLEDARR

SEQ ID NO: 870 - protein, 240 aa, Artificial Sequence; identical to SEQ ID NO: 869
  Synthetic

SEQ ID NO: 871 - protein, 241 aa, Artificial Sequence
  Synthetic
SAEEAVEKLVRIARAIVKINEDLSREVVRILREIVRLNEETTRLLVEIAREVVKVVEDGGLSEDVVRKLRKLVKELEDLLKKSNDDIRKLVEDVARRLKESNDEIRRLVERLEELLKRGPGDEELLRLVEELTEELLRTHEEVVKALEKLTADLLELHRELLERVRRLTKRIEEELKRVGVSEELRDHMVLHEYVNAAGITDSAKELEKLKRELERLLEESRRKLEKLKRDLERVLEETRR

SEQ ID NO: 872 - protein, 237 aa, Artificial Sequence
  Synthetic
REDEVLRDIERLLREIEEKIRRILEESTAELRKVEEEVKRIIERTKRELKAIKEDVERKGIDEELRKLLDEVLDKLTKLIERNKRSLERILELIKRIIDENLEVLRDIIRLLEELLKATKDNGVPKDEVIKLVEDVVRRIEELVTRVVARNEKLVKDLDDLAKKNVRENEELLREIDRGLDEDLLRDHMVLHEYVNAAGITLARDLKEILRRHIEALKELARDLAEVIRKLLEDVKR

SEQ ID NO: 873 - protein, 243 aa, Artificial Sequence
  Synthetic
SEAERLADEVRKAVKKSEEDNETLVREVEKAVRELKKNNKTWVDEVRKLMKRLVDLLRDGQVSDRDLLKELEEVLRRVLEALAENHERTEEILKRWLDRYAEDIERLRKVLKEVIEALKRGGSDDKRIVDELEEILRRNEDVLDKIAKRLRRLLEEDRRLLERIVRELKRLLDDLDRITKEGKSERDHMVLHEYVNAAGITIEELVRLNNEILERLLKIVRELHKDNIKILEDLLRIIEEVLR

SEQ ID NO: 874 - protein, 243 aa, Artificial Sequence; identical to SEQ ID NO: 873
  Synthetic

SEQ ID NO: 875 - protein, 245 aa, Artificial Sequence
  Synthetic
SEKDEVTRRIRELLKEAEETNREAIERIKRLLDRVREAVEEVAKRSEELLRRLKKVLDRGLQDDEALLKLLIDALREHNRLSTELIKILIDVLRTILKIIKDVLATNIEIARRILDLVRRLAERGGLDDRLVKEVEKLVRTAERLHRDALRKVKRLVEELEKRLRELVKTDHDLVRRLETLLRRGRDHMVLHEYVNAAGITESLRLIRELLKEIEKIVKEIIELLERLNDELRKIIEAILETTKK

SEQ ID NO: 876 - protein, 239 aa, Artificial Sequence
  Synthetic
SAEDLVRRVKDLVDKLEDKLRKVVRTNERLWEEIRKRLEELVRRNKELWDALVEKLKAGDKDKDELIEEAKSLEDESNALVEKLVRDIERVLAESNKLLDTLAKEIEEVLEEIVELVERGSGSDKEAREKLEDIKARLKEVLKKLREESKRIIDELRRLLEEYKRLVKEIRDRIEEVRKRNSEIRRDHMVLHEYVNAAGITVEELEKLVRDHNRVVEEVVRELVELLSRAVEVIKEVVK

SEQ ID NO: 877 - protein, 243 aa, Artificial Sequence
  Synthetic
SRVEELKKLIEDILRISREVVERIARVAEDIHRINRRVLDDLRKLIEDILRTVEEILARKVSGTEAAEALRDTIRRVVDEIRKLLEEHEKRSAELLEEIRKLLEDILRRSERAVEEIRELLKKGVSTKDVLRIIEEILREHLELLERVVRRIEEILRELLKTIEEIVKRIKEILEELKEVLKRGSRDHMVLHEYVNAAGITLDRILEEYRRLLEEIKRKLEEILRRVEELHRRLRRKLEEIDR

SEQ ID NO: 878 - protein, 243 aa, Artificial Sequence; identical to SEQ ID NO: 877
  Synthetic

SEQ ID NO: 879 - protein, 240 aa, Artificial Sequence
  Synthetic
DKDKRLEELLKRLKELNDKTFEELERILEELKRANEASLREAERILEELRARIEGGNLDKRLAELLKKLLDDLKRLLEEYTRTNEELLKRLRELLERYRETNKKLLDLLRKLLDEARRTGTDEDLLRRLEDILRKYEDEVRRLLKELEDILREYEDTSRRLLEELERIAKEAAERVSRGSDKDVKRDHMVLHEYVNAAGITLEEDSRTNSEVVKRLLDLLREDSKANSEVVKRLLDVLRE

SEQ ID NO: 880 - protein, 240 aa, Artificial Sequence; identical to SEQ ID NO: 879
  Synthetic

SEQ ID NO: 881 - protein, 240 aa, Artificial Sequence
  Synthetic
SKEETLKRLLDELEKRNRETVERLERLLKELEDRNRASLEELEAVLEELERKIEESGLSKELKDTLARILEELRKLLEEYFRKNEELLRLLRKLLDEYARTNEELLRLLEELLDTARRTGGDSELLKRLEDIAREYEKRVRRLLEKLKDILDKYRKTVEELVRKMEEILKEAKKTISRIGSEEVKRDHMVLHEYVNAAGITLRRDVELNLDVAKKLLELLKEDSKLNLDVARELLELLDR

SEQ ID NO: 882 - protein, 240 aa, Artificial Sequence; identical to SEQ ID NO: 881
  Synthetic

SEQ ID NO: 883 - protein, 243 aa, Artificial Sequence
  Synthetic
DEEETLRRLLERKVELAKEYLDVSKEVIDRTTKLLDEYLKTSKRIVDATVELLERGDLGPDELIKRLAEELERSLRELEEEIKRLKRELEESLKKLKEIIDRLAEEAEKLLAVLKRGEGSEEEALRALASLVRELIEVLRENDERLRDVLRRLIEALRKNNEILERVLRKLVRAAEERGRDESSRRDHMVLHEYVNAAGITLNEITKDLEAKLEKLLRDLNELTKALEEELKRLLDELKKRTD

SEQ ID NO: 884 - protein, 243 aa, Artificial Sequence; identical to SEQ ID NO: 883
  Synthetic

SEQ ID NO: 885 - protein, 243 aa, Artificial Sequence
  Synthetic
SEAERTKESLKKVLKALVDLNRELLRKLEENMRELTKLNEEVKRALKEVLDKVREGGIVDKDAEREAERLMRELDKSSEDTARETRKLIEESKKSTRRTEEEARKLTETLDRLAKGGLPREDLLRALVRLLEELARLIEEDVRRNAELVKRHIELVERDVAELLRLIKELVDLLADLAEKGSRTERDHMVLHEYVNAAGITADRYREEVRKSKDKLRSILEDYKRKVDELKERLRELIEEVET

SEQ ID NO: 886 - protein, 243 aa, Artificial Sequence; identical to SEQ ID NO: 885
  Synthetic

SEQ ID NO: 887 - protein, 238 aa, Artificial Sequence
  Synthetic
EEDERLTKRVEEIKRENRELLRRLEEEVKELERKSEKIVRDLKEKVDRAKEKLDSGKGSTELLVEELEKLIREILKLSEDHNRTLEEVVRKIEDVLRANLERLKELVDEILKALKERGKGDSEELKRKVEKVARDYERLLRKLREVVKRILDESKRLDEELEERLKEVLKKLEELIKRGGPDKDVLRDHMVLHEYVNAAGITLIRRNLRLLEELLRLVREILRTSNEILEEILKDARR

SEQ ID NO: 888 - protein, 245 aa, Artificial Sequence
  Synthetic
TEEEVLRKVEKLIKDLLDVLRDLLRASEEVVREALRVLEELIEENKRVIEELSRALSGGSRESVESALAKNEERLKKILEDADRVLDKWRRLLEELSKKAKAVLDEVRKRLEEIKREVPETEKLRTLLTILEEILRALEKIIRDILRINERLLEKLKRILERLRETNREIDERIRKLVEEARGGSERDHMVLHEYVNAAGITRHEDLRRELEKLLRDYKRELEEIERALEEIEKTLKRRADETRR

SEQ ID NO: 889 - protein, 243 aa, Artificial Sequence
  Synthetic
KREDILKKLEDIIRDIIDKLRRILEKVKRLNEDIIREIKRLLDESLKTLEDLLKRIADKSRDRELEDILRRVLEKLRRSLDKLRDTLRKLKEETDTVLERAERTLKELKDRLEKLLRDGEKVSEEDLVEALKALIDELRKVLEDVIRVSKELVERLLRALREHLETNKRLVKELLDALRKTTGDDERDHMVLHEYVNAAGITEEEVERVARELEKAHRDLERDIRRVAEELKKLLKKLRDDRR

SEQ ID NO: 890 - protein, 243 aa, Artificial Sequence; identical to SEQ ID NO: 889
  Synthetic

SEQ ID NO: 891 - protein, 244 aa, Artificial Sequence
  Synthetic
SAEETLRRITEESKRVLEEITKKYEDLERESREVLRKLREDLDRIKRELEDVLTKGGDDKDEVLTVLEKVLDELLKLHRENLRVIKELLRKVLEVDRENLEVLKRLLEKARDLLRRSGRDEKDLKKLEDELRKVKEELEKKHEASKRDIEDLERELDKVTEEVERLLRKLKEELRRAAEGSDEDRERDHMVLHEYVNAAGITLEEILKINEELNRKIIKFARENLERNRRVNKKVIEVLREAAR

SEQ ID NO: 892 - protein, 247 aa, Artificial Sequence
  Synthetic
SEKEELLKLIKRVIELLKRVLEEHLRLVEDVIRRLKELLDSNEKIVREVIEDLKRLLDEVRGDKEELDRIKEKLEEVLERYKRRLEEIKRDLERMLEDYKRELKRIEEDLRRVLEEVERIATRGEGPAEALIDKLRKILERALRELDKLSKKLDELLKKVLEELEKSNREIDKLLKDVLRRVEEGGRDHMVLHEYVNAAGITREKLKRNLEDVRRVIEDVKRKSARILEEARRLIEEVERELEKIRK

SEQ ID NO: 893 - protein, 238 aa, Artificial Sequence
  Synthetic
SEAEKIREALETNLRLLEELIKRLKEILDTHNELLRRVIETLERLLKELLELLEEGGLDEEVLREVKRLVDELRKEARRVLDEHEKLVRKIKKEAEDVARESEEIIKEVEDKLKGLDREELLERVRRVLKKSDDLIAELVRRALKILEELTRLLAELLKKVVEILRRIVELVERVLTKKGAPKEDLRDHMVLHEYVNAAGITLLEKLARDSAELMRELERILDRYARESEELDRRLAE

SEQ ID NO: 894 - protein, 242 aa, Artificial Sequence
  Synthetic
SEKERLMRLLDKLKDLNRRLVERIKELLDKALELHKKLVKELRELLERLKELVERGGVPEELLTRIDELIKKLEDEARKISKEVKRLIDELKKRLEDIHREVDRLIRELKETLKGVTDKDELLRRVAEVLERIARLSEELIREVKEVLEKIVELSRELLKRVLDVLRRIAELLEDALRKGNVSEETRDHMVLHEYVNAAGITKIERDAEREYKKLKDELEELTERYRREIRKLKEELKADRK

SEQ ID NO: 895 - protein, 242 aa, Artificial Sequence; identical to SEQ ID NO: 894
  Synthetic

SEQ ID NO: 896 - protein, 247 aa, Artificial Sequence
  Synthetic
SEAEDLEELIKELAELLKDVIRKLEKINRRLVKILEDIIRRLKEISKEAEEELRKGTVEDKDILRDLERRLREILEESDRLLEELKRRLEEILRKSKELLRRLEEVLREILKRAEEVKRSNLPKEELIKEIVKLLEELLRVIEKILEDNIRLLEELVEVIKEILEKHLRLLEELVRVIERILREVGRDHMVLHEYVNAAGITLDRLREEHEEVKRRLEEELTRLRETHKKIEKELREALKRVRDRST

SEQ ID NO: 897 - protein, 247 aa, Artificial Sequence; identical to SEQ ID NO: 896
  Synthetic

SEQ ID NO: 898 - protein, 238 aa, Artificial Sequence
  Synthetic
DADELLRRLAEEVERVIREAEDLLRRWKETIKKVLDDLKRLLDELKKRNEDVIRELTKTKGDEELAKLIKDLLDTNEKVNRDLLRLIKKLLKDAERVNRRLLELIEELLEELKRVAKDLGLREEADKKLRDIADRARKELEDYERRLKELLKTVEDALRKAEEDSRKLKRDVEELLERGRLRKDDLRDHMVLHEYVNAAGITRLREILRENLEALKKTLKRLEDVVREILEDLKRERK

SEQ ID NO: 899 - protein, 238 aa, Artificial Sequence; identical to SEQ ID NO: 898
  Synthetic

SEQ ID NO: 900 - protein, 247 aa, Artificial Sequence
  Synthetic
SKAEKLLKDLREALEKVKRRYEELERRLDEVLKEHEEIVKRLLEELEKVLKRIEEGGLPEEELEKLKKLAEKVKELLRELLRLSKELVDRVRELLKRDLDLVRRLVEIALKVLREAREQPNDEKRVEKIKRDLEKKARRVREENERIKRDLKRTADESRKRLEKLLEDLKRELDRLREDLDRGRKDRDHMVLHEYVNAAGITERLLREVIKSHEKLVRTIERLIEESIRVNEELLEVIERLLDRARK

SEQ ID NO: 901 - protein, 247 aa, Artificial Sequence; identical to SEQ ID NO: 900
  Synthetic

SEQ ID NO: 902 - protein, 243 aa, Artificial Sequence
  Synthetic
DLERVVEDIVDKAKRLLDKNLEVLKRIVDEVLRLLERLLRESRKVVKRVKEIIEELVRDEKELRRVKRALEEVLRRHEEIAKELKERLRKVAKEAEEKHKKLVEDLKRVVDEVRKKLSGPLDREKVLEVLDELVTIIAKLLDENIKVLEEVIRVIAELLERLLDSHRRLIDIIAKLLEGLRPGDEDRDHMVLHEYVNAAGITEKVVDDLKKELERIKREVKRLIEENARTLADIKRAVDEARK

SEQ ID NO: 903 - protein, 246 aa, Artificial Sequence
  Synthetic
KEIEETLKELEDLNREMVETNRRVLEETRRLNKETVDRVKATLDELAKMLKKLVDDVRKGPTSEELKRLLAELEELLARVVRRVEELLKKSTDLLERAVKDSADALRRSHEVLKEVASRVKRAKDEGLPREEVLRLLRELLERHAKVLKDIVRVSEKLLREHLKVLREIVEVLEELLERILKVILDRDHMVLHEYVNAAGITEIKRRLKEVIDRYEDELRKLRKEYKEKIDKYERKLEEIERRERT

SEQ ID NO: 904 - protein, 247 aa, Artificial Sequence
  Synthetic
RDRDVLRKVKAEIEELVARIEKVSRDALSEVKRLLDENRKIAEDVLRLIESLLRKIRDTRGDDEVVKETEEVLRDNHRLLEELIRRLIKVLEEWLRRHKKLLDEIRELLKEILRLVKESGVSEDLLRRLKRVIEELDKKLKESEEKLRRVVEKAKEDLKAVLEEHRKVLEDLKRALEEVREKLRERRDHMVLHEYVNAAGITAEEMKRVHDDLSRAVEKVVRDVVRVDKELLDELARILRRLEEVIT

SEQ ID NO: 905 - protein, 237 aa, Artificial Sequence
  Synthetic
KEKEDALKKLEDLARKSREDLERVLRKHKKILDKIEELLKRVLDEHKKIVDDILRKTGTESEILKELARLLREHHEALRRLIEELRRLLEEHHKILEDLAREHKRLLDELIKVVADGVDKDELERIIKELRERDKKLVDDLRKVSEDLLDAVRKLVEDLERISRELLRRVEELAKGIDEELAREVERDHMVLHEYVNAAGITIERAIDELLKVSEEILKLSEDASEELLKILREFAK

SEQ ID NO: 906 - protein, 237 aa, Artificial Sequence; identical to SEQ ID NO: 905
  Synthetic

SEQ ID NO: 907 - protein, 241 aa, Artificial Sequence
  Synthetic
SEKELLKEILDRIRELLEDDNRLLKRIVDEIRKLLEEWLRVHKEILERIKELLDRIGAPEDVIRELTRALKETEEDVDRVIRTLEKLLKEVLDAHEEVVRKLDRLLKEVERLVEGGDAEEVVRDLLRVVKEILDESKAVIDELARVVDEILKLLEEVDRKLAKVVKEILEDVLRGSGDDEDAVRKIRDHMVLHEYVNAAGITDTRRVIEEAKRLLKEWRDRNKEVADTLKKLLEDLIRKIR

SEQ ID NO: 908 - protein, 246 aa, Artificial Sequence
  Synthetic
SEREELLERIKEILKRVKDKLDEDLKRLKEILEKLKEKADRDLEELRRRIEEVREKLERTGRTDELVKEVLDTVRRNLENLKRLVEDILRKLEENVKNLTDLVREILKLITELIKRLEDGGLPKEVLDALRRVLEKLEELLREILERLKRSLEAVKRKIEELLKELERSLDELRRALERIRKEIGDRDHMVLHEYVNAAGITEAVRRVLEELLKVLAEHLETVRELIERLKRVLEEAIEVVERVAR

SEQ ID NO: 909 - protein, 246 aa, Artificial Sequence; identical to SEQ ID NO: 908
  Synthetic

SEQ ID NO: 910 - protein, 240 aa, Artificial Sequence
  Synthetic
DREKSVRDIEEDLKRVLDKLRRRVETSKEELKKVLKADKENADELEKTLRDVVRELDRGIDSEVLRAVREIVKRLVEVVRRYNELSEKIIRDLVRVNDRVLELLKRIVKRLIDVVRELEKIGDKEKALRRLEEVVKEVKRRIEELLKELEDVHRELVKILEEVNEDLKRVATEVKEIIKTGIKSSERDHMVLHEYVNAAGITKENTDRLKEVIDRNLADLRDLAEELRAVIERLLEDARR

SEQ ID NO: 911 - protein, 240 aa, Artificial Sequence; identical to SEQ ID NO: 910
  Synthetic

SEQ ID NO: 912 - protein, 241 aa, Artificial Sequence
  Synthetic
SAEEAVEKLVRIARAIVKINEDLSREVVRILREIVRLNEETTRLLVEIAREVVKVVEDGGLSEDVVRKLRKLVKELEDLLKKSNDDIRKLVEDVARRLKESNDEIRRLVERLEELLKRGPGDEELLRLVEELTEELLRTHEEVVKALEKLTADLLELHRELLERVRRLTKRIEEELKRVGVSEELLRDHMVLHEYVNAAGITSAKELEKLKRELERLLEESRRKLEKLKRDLERVLEETRR

SEQ ID NO: 913 - protein, 237 aa, Artificial Sequence
  Synthetic
REDEVLRDIERLLREIEEKIRRILEESTAELRKVEEEVKRIIERTKRELKAIKEDVERKGIDEELRKLLDEVLDKLTKLIERNKRSLERILELIKRIIDENLEVLRDIIRLLEELLKATKDNGVPKDEVIKLVEDVVRRIEELVTRVVARNEKLVKDLDDLAKKNVRENEELLREIDRGLDEDLLERDHMVLHEYVNAAGITARDLKEILRRHIEALKELARDLAEVIRKLLEDVKR

SEQ ID NO: 914 - protein, 237 aa, Artificial Sequence; identical to SEQ ID NO: 913
  Synthetic

SEQ ID NO: 915 - protein, 243 aa, Artificial Sequence
  Synthetic
SEAERLADEVRKAVKKSEEDNETLVREVEKAVRELKKNNKTWVDEVRKLMKRLVDLLRDGQVSDRDLLKELEEVLRRVLEALAENHERTEEILKRWLDRYAEDIERLRKVLKEVIEALKRGGSDDKRIVDELEEILRRNEDVLDKIAKRLRRLLEEDRRLLERIVRELKRLLDDLDRITKEGKSEERDHMVLHEYVNAAGITEELVRLNNEILERLLKIVRELHKDNIKILEDLLRIIEEVLR

SEQ ID NO: 916 - protein, 243 aa, Artificial Sequence; identical to SEQ ID NO: 915
  Synthetic

SEQ ID NO: 917 - protein, 245 aa, Artificial Sequence
  Synthetic
SEKDEVTRRIRELLKEAEETNREAIERIKRLLDRVREAVEEVAKRSEELLRRLKKVLDRGLQDDEALLKLLIDALREHNRLSTELIKILIDVLRTILKIIKDVLATNIEIARRILDLVRRLAERGGLDDRLVKEVEKLVRTAERLHRDALRKVKRLVEELEKRLRELVKTDHDLVRRLETLLRRGSRDHMVLHEYVNAAGITSLRLIRELLKEIEKIVKEIIELLERLNDELRKIIEAILETTKK

SEQ ID NO: 918 - protein, 247 aa, Artificial Sequence
  Synthetic
DEERLAEELERVLDRNRKLLEEALRELRRVIEENRKSVKRLLDELKRVLDELLKVLRELSRGDSDEELRKVIEDLIRKLTKVLDKVRSLVEENIERLARVLEKLERLARENLEDLKKVLDDVDKKLKDRRLVERLAELVRELIEVNKEILEMLKEIVRELLEINRTLLERLKDLVATALEIIKLLARDHMVLHEYVNAAGITRDRLRKLLEDYERAVRRLEDKLRRVRERYEAVLKRIKDKLEETKR

SEQ ID NO: 919 - protein, 243 aa, Artificial Sequence
  Synthetic
SRVEELKKLIEDILRISREVVERIARVAEDIHRINRRVLDDLRKLIEDILRTVEEILARKVSGTEAAEALRDTIRRVVDEIRKLLEEHEKRSAELLEEIRKLLEDILRRSERAVEEIRELLKKGVSTKDVLRIIEEILREHLELLERVVRRIEEILRELLKTIEEIVKRIKEILEELKEVLKRGSVRDHMVLHEYVNAAGITDRILEEYRRLLEEIKRKLEEILRRVEELHRRLRRKLEEIDR

SEQ ID NO: 920 - protein, 243 aa, Artificial Sequence; identical to SEQ ID NO: 919
  Synthetic

SEQ ID NO: 921 - protein, 240 aa, Artificial Sequence
  Synthetic
DKDKRLEELLKRLKELNDKTFEELERILEELKRANEASLREAERILEELRARIEGGNLDKRLAELLKKLLDDLKRLLEEYTRTNEELLKRLRELLERYRETNKKLLDLLRKLLDEARRTGTDEDLLRRLEDILRKYEDEVRRLLKELEDILREYEDTSRRLLEELERIAKEAAERVSRGSDKDVKDRDHMVLHEYVNAAGITEEDSRTNSEVVKRLLDLLREDSKANSEVVKRLLDVLRE

SEQ ID NO: 922 - protein, 240 aa, Artificial Sequence
  Synthetic
SKEETLKRLLDELEKRNRETVERLERLLKELEDRNRASLEELEAVLEELERKIEESGLSKELKDTLARILEELRKLLEEYFRKNEELLRLLRKLLDEYARTNEELLRLLEELLDTARRTGGDSELLKRLEDIAREYEKRVRRLLEKLKDILDKYRKTVEELVRKMEEILKEAKKTISRIGSEEVKDRDHMVLHEYVNAAGITRRDVELNLDVAKKLLELLKEDSKLNLDVARELLELLDR

SEQ ID NO: 923 - protein, 243 aa, Artificial Sequence
  Synthetic
DEEETLRRLLERKVELAKEYLDVSKEVIDRTTKLLDEYLKTSKRIVDATVELLERGDLGPDELIKRLAEELERSLRELEEEIKRLKRELEESLKKLKEIIDRLAEEAEKLLAVLKRGEGSEEEALRALASLVRELIEVLRENDERLRDVLRRLIEALRKNNEILERVLRKLVRAAEERGRDESSRERDHMVLHEYVNAAGITNEITKDLEAKLEKLLRDLNELTKALEEELKRLLDELKKRTD

SEQ ID NO: 924 - protein, 243 aa, Artificial Sequence; identical to SEQ ID NO: 923
  Synthetic

SEQ ID NO: 925 - protein, 243 aa, Artificial Sequence
  Synthetic
SEAERTKESLKKVLKALVDLNRELLRKLEENMRELTKLNEEVKRALKEVLDKVREGGIVDKDAEREAERLMRELDKSSEDTARETRKLIEESKKSTRRTEEEARKLTETLDRLAKGGLPREDLLRALVRLLEELARLIEEDVRRNAELVKRHIELVERDVAELLRLIKELVDLLADLAEKGSRTEERDHMVLHEYVNAAGITDRYREEVRKSKDKLRSILEDYKRKVDELKERLRELIEEVET

SEQ ID NO: 926 - protein, 243 aa, Artificial Sequence; identical to SEQ ID NO: 925
  Synthetic

SEQ ID NO: 927 - protein, 238 aa, Artificial Sequence
  Synthetic
EEDERLTKRVEEIKRENRELLRRLEEEVKELERKSEKIVRDLKEKVDRAKEKLDSGKGSTELLVEELEKLIREILKLSEDHNRTLEEVVRKIEDVLRANLERLKELVDEILKALKERGKGDSEELKRKVEKVARDYERLLRKLREVVKRILDESKRLDEELEERLKEVLKKLEELIKRGGPDKDVLTRDHMVLHEYVNAAGITIRRNLRLLEELLRLVREILRTSNEILEEILKDARR

SEQ ID NO: 928 - protein, 238 aa, Artificial Sequence; identical to SEQ ID NO: 927
  Synthetic

SEQ ID NO: 929 - protein, 245 aa, Artificial Sequence
  Synthetic
TEEEVLRKVEKLIKDLLDVLRDLLRASEEVVREALRVLEELIEENKRVIEELSRALSGGSRESVESALAKNEERLKKILEDADRVLDKWRRLLEELSKKAKAVLDEVRKRLEEIKREVPETEKLRTLLTILEEILRALEKIIRDILRINERLLEKLKRILERLRETNREIDERIRKLVEEARGGSEERDHMVLHEYVNAAGITHEDLRRELEKLLRDYKRELEEIERALEEIEKTLKRRADETRR

SEQ ID NO: 930 - protein, 245 aa, Artificial Sequence; identical to SEQ ID NO: 929
  Synthetic

SEQ ID NO: 931 - protein, 238 aa, Artificial Sequence
  Synthetic
SKEDKARELEKRLRDNLKKLEEVVRELAEVLKRNLEKLRRLAEELLRALKRLLDKLRAGGLPKDELEDLRREVEDVLRRLEDLLRKLKKANDESLTRLEELLRRAEEENRRVLTTLRELLRGNGDDRDLARLVARLVEANNRALEELLRLVAKNVEDNNRVLEELLRLVKELAKRLLGRIRDEDLVRRDHMVLHEYVNAAGITLRDDERDLRALEKRIRDIIREDREELERLKERARK

SEQ ID NO: 932 - protein, 243 aa, Artificial Sequence
  Synthetic
KREDILKKLEDIIRDIIDKLRRILEKVKRLNEDIIREIKRLLDESLKTLEDLLKRIADKSRDRELEDILRRVLEKLRRSLDKLRDTLRKLKEETDTVLERAERTLKELKDRLEKLLRDGEKVSEEDLVEALKALIDELRKVLEDVIRVSKELVERLLRALREHLETNKRLVKELLDALRKTTGDDEERDHMVLHEYVNAAGITEEVERVARELEKAHRDLERDIRRVAEELKKLLKKLRDDRR

SEQ ID NO: 933 - protein, 244 aa, Artificial Sequence
  Synthetic
SAEETLRRITEESKRVLEEITKKYEDLERESREVLRKLREDLDRIKRELEDVLTKGGDDKDEVLTVLEKVLDELLKLHRENLRVIKELLRKVLEVDRENLEVLKRLLEKARDLLRRSGRDEKDLKKLEDELRKVKEELEKKHEASKRDIEDLERELDKVTEEVERLLRKLKEELRRAAEGSDEDRERRDHMVLHEYVNAAGITEEILKINEELNRKIIKFARENLERNRRVNKKVIEVLREAAR

SEQ ID NO: 934 - protein, 247 aa, Artificial Sequence
  Synthetic
SEKEELLKLIKRVIELLKRVLEEHLRLVEDVIRRLKELLDSNEKIVREVIEDLKRLLDEVRGDKEELDRIKEKLEEVLERYKRRLEEIKRDLERMLEDYKRELKRIEEDLRRVLEEVERIATRGEGPAEALIDKLRKILERALRELDKLSKKLDELLKKVLEELEKSNREIDKLLKDVLRRVEEGGARDHMVLHEYVNAAGITEKLKRNLEDVRRVIEDVKRKSARILEEARRLIEEVERELEKIRK

SEQ ID NO: 935 - protein, 247 aa, Artificial Sequence; identical to SEQ ID NO: 934
  Synthetic

SEQ ID NO: 936 - protein, 238 aa, Artificial Sequence
  Synthetic
SEAEKIREALETNLRLLEELIKRLKEILDTHNELLRRVIETLERLLKELLELLEEGGLDEEVLREVKRLVDELRKEARRVLDEHEKLVRKIKKEAEDVARESEEIIKEVEDKLKGLDREELLERVRRVLKKSDDLIAELVRRALKILEELTRLLAELLKKVVEILRRIVELVERVLTKKGAPKEDLERDHMVLHEYVNAAGITLEKLARDSAELMRELERILDRYARESEELDRRLAE

SEQ ID NO: 937 - protein, 238 aa, Artificial Sequence; identical to SEQ ID NO: 936
  Synthetic

SEQ ID NO: 938 - protein, 242 aa, Artificial Sequence
  Synthetic
SEKERLMRLLDKLKDLNRRLVERIKELLDKALELHKKLVKELRELLERLKELVERGGVPEELLTRIDELIKKLEDEARKISKEVKRLIDELKKRLEDIHREVDRLIRELKETLKGVTDKDELLRRVAEVLERIARLSEELIREVKEVLEKIVELSRELLKRVLDVLRRIAELLEDALRKGNVSEETVRDHMVLHEYVNAAGITIERDAEREYKKLKDELEELTERYRREIRKLKEELKADRK

SEQ ID NO: 939 - protein, 242 aa, Artificial Sequence; identical to SEQ ID NO: 938
  Synthetic

SEQ ID NO: 940 - protein, 247 aa, Artificial Sequence
  Synthetic
SEAEDLEELIKELAELLKDVIRKLEKINRRLVKILEDIIRRLKEISKEAEEELRKGTVEDKDILRDLERRLREILEESDRLLEELKRRLEEILRKSKELLRRLEEVLREILKRAEEVKRSNLPKEELIKEIVKLLEELLRVIEKILEDNIRLLEELVEVIKEILEKHLRLLEELVRVIERILREVGKRDHMVLHEYVNAAGITDRLREEHEEVKRRLEEELTRLRETHKKIEKELREALKRVRDRST

SEQ ID NO: 941 - protein, 247 aa, Artificial Sequence; identical to SEQ ID NO: 940
  Synthetic

SEQ ID NO: 942 - protein, 240 aa, Artificial Sequence
  Synthetic
SDKEEIKRRVEKTARDLETEHDKIKKRLEDTVRDIKRELDELLEKYERVLRKIEKTLREGDGDATDLVDKLLETVKRLNEEVLRTVKKIADELRRLVEEVLRVLRESNETLARLLEEGNVGDEVRERLEEVLRRTEEIIKTLEEIVKRLLDELRRLVEELRRISKKLKDELDKIKEKGKDEKRLIEERDHMVLHEYVNAAGITEALAKLIKELLEALEEVLRRNKELIRELLRVLDEALK

SEQ ID NO: 943 - protein, 248 aa, Artificial Sequence
  Synthetic
DEDRIIEEIARLLEELLRELLELIKKLIETNRRLNEEHERAVRELARLLEELLDRLVKKGISDEKLKRIRERLKRALDDLERLHREINKRLEDLVRELEKLVREILKELKDALEELRRASARAGGEEVLRRLEEIVKKLLDLVRRILERLKEIHKDNVRLLRELNERLTRIVEDLVRLIREILREAGRDHMVLHEYVNAAGITRRMIKRLHEDLERKLKESEDELREIEARLEEKIRRLEEKLERKRR

SEQ ID NO: 944 - protein, 248 aa, Artificial Sequence; identical to SEQ ID NO: 943
  Synthetic

SEQ ID NO: 945 - protein, 238 aa, Artificial Sequence
  Synthetic
DADELLRRLAEEVERVIREAEDLLRRWKETIKKVLDDLKRLLDELKKRNEDVIRELTKTKGDEELAKLIKDLLDTNEKVNRDLLRLIKKLLKDAERVNRRLLELIEELLEELKRVAKDLGLREEADKKLRDIADRARKELEDYERRLKELLKTVEDALRKAEEDSRKLKRDVEELLERGRLRKDDLERDHMVLHEYVNAAGITLREILRENLEALKKTLKRLEDVVREILEDLKRERK

SEQ ID NO: 946 - protein, 238 aa, Artificial Sequence; identical to SEQ ID NO: 945
  Synthetic

SEQ ID NO: 947 - protein, 243 aa, Artificial Sequence
  Synthetic
DLERVVEDIVDKAKRLLDKNLEVLKRIVDEVLRLLERLLRESRKVVKRVKEIIEELVRDEKELRRVKRALEEVLRRHEEIAKELKERLRKVAKEAEEKHKKLVEDLKRVVDEVRKKLSGPLDREKVLEVLDELVTIIAKLLDENIKVLEEVIRVIAELLERLLDSHRRLIDIIAKLLEGLRPGDEDLRDHMVLHEYVNAAGITKVVDDLKKELERIKREVKRLIEENARTLADIKRAVDEARK

SEQ ID NO: 948 - protein, 246 aa, Artificial Sequence
  Synthetic
KEIEETLKELEDLNREMVETNRRVLEETRRLNKETVDRVKATLDELAKMLKKLVDDVRKGPTSEELKRLLAELEELLARVVRRVEELLKKSTDLLERAVKDSADALRRSHEVLKEVASRVKRAKDEGLPREEVLRLLRELLERHAKVLKDIVRVSEKLLREHLKVLREIVEVLEELLERILKVILDTRDHMVLHEYVNAAGITIKRRLKEVIDRYEDELRKLRKEYKEKIDKYERKLEEIERRERT

SEQ ID NO: 949 - protein, 247 aa, Artificial Sequence
  Synthetic
RDRDVLRKVKAEIEELVARIEKVSRDALSEVKRLLDENRKIAEDVLRLIESLLRKIRDTRGDDEVVKETEEVLRDNHRLLEELIRRLIKVLEEWLRRHKKLLDEIRELLKEILRLVKESGVSEDLLRRLKRVIEELDKKLKESEEKLRRVVEKAKEDLKAVLEEHRKVLEDLKRALEEVREKLRERGRDHMVLHEYVNAAGITEEMKRVHDDLSRAVEKVVRDVVRVDKELLDELARILRRLEEVIT

SEQ ID NO: 950 - protein, 247 aa, Artificial Sequence; identical to SEQ ID NO: 949
  Synthetic

SEQ ID NO: 951 - protein, 246 aa, Artificial Sequence
  Synthetic
SREEIVATLEDLARKILEVVKKLAKEIEDAWREIERAVREILKRLEELWREIEDVVRKKVDSRVAEILETVVKRVVDITRRLIEEAERVVRELVDITRKLITILEEVVRRLVEIVREASKIDDRRELEDMLRKIREVVREVIERLKKLDEDVRRVVEEVIRRLEELNKRLEDVIREVKKRLKELGLSRDHMVLHEYVNAAGITRNTRVIKEIIDLLRTVIRIHEKIVEDLIKLLEELLRRLEEATR

SEQ ID NO: 952 - protein, 241 aa, Artificial Sequence
  Synthetic
SEKELLKEILDRIRELLEDDNRLLKRIVDEIRKLLEEWLRVHKEILERIKELLDRIGAPEDVIRELTRALKETEEDVDRVIRTLEKLLKEVLDAHEEVVRKLDRLLKEVERLVEGGDAEEVVRDLLRVVKEILDESKAVIDELARVVDEILKLLEEVDRKLAKVVKEILEDVLRGSGDDEDAVRKIARDHMVLHEYVNAAGITTRRVIEEAKRLLKEWRDRNKEVADTLKKLLEDLIRKIR

SEQ ID NO: 953 - protein, 241 aa, Artificial Sequence; identical to SEQ ID NO: 952
  Synthetic

SEQ ID NO: 954 - protein, 246 aa, Artificial Sequence
  Synthetic
SEREELLERIKEILKRVKDKLDEDLKRLKEILEKLKEKADRDLEELRRRIEEVREKLERTGRTDELVKEVLDTVRRNLENLKRLVEDILRKLEENVKNLTDLVREILKLITELIKRLEDGGLPKEVLDALRRVLEKLEELLREILERLKRSLEAVKRKIEELLKELERSLDELRRALERIRKEIGDSRDHMVLHEYVNAAGITAVRRVLEELLKVLAEHLETVRELIERLKRVLEEAIEVVERVAR

SEQ ID NO: 955 - protein, 240 aa, Artificial Sequence
  Synthetic
DREKSVRDIEEDLKRVLDKLRRRVETSKEELKKVLKADKENADELEKTLRDVVRELDRGIDSEVLRAVREIVKRLVEVVRRYNELSEKIIRDLVRVNDRVLELLKRIVKRLIDVVRELEKIGDKEKALRRLEEVVKEVKRRIEELLKELEDVHRELVKILEEVNEDLKRVATEVKEIIKTGIKSSEVRDHMVLHEYVNAAGITENTDRLKEVIDRNLADLRDLAEELRAVIERLLEDARR

SEQ ID NO: 956 - protein, 240 aa, Artificial Sequence; identical to SEQ ID NO: 955
  Synthetic

SEQ ID NO: 957 - protein, 245 aa, Artificial Sequence
  Synthetic
SEKDEVTRRIRELLKEAEETNREAIERIKRLLDRVREAVEEVAKRSEELLRRLKKVLDRGLQDDEALLKLLIDALREHNRLSTELIKILIDVLRTILKIIKDVLATNIEIARRILDLVRRLAERGGLDDRLVKEVEKLVRTAERLHRDALRKVKRLVEELEKRLRELVKTDHDLVRRLETLLRRGSGRDHMVLHEYVNAAGITLRLIRELLKEIEKIVKEIIELLERLNDELRKIIEAILETTKK

SEQ ID NO: 958 - protein, 245 aa, Artificial Sequence; identical to SEQ ID NO: 957
  Synthetic

SEQ ID NO: 959 - protein, 239 aa, Artificial Sequence
  Synthetic
SAEDLVRRVKDLVDKLEDKLRKVVRTNERLWEEIRKRLEELVRRNKELWDALVEKLKAGDKDKDELIEEAKSLEDESNALVEKLVRDIERVLAESNKLLDTLAKEIEEVLEEIVELVERGSGSDKEAREKLEDIKARLKEVLKKLREESKRIIDELRRLLEEYKRLVKEIRDRIEEVRKRNSEIRVLRDHMVLHEYVNAAGITELEKLVRDHNRVVEEVVRELVELLSRAVEVIKEVVK

SEQ ID NO: 960 - protein, 247 aa, Artificial Sequence
  Synthetic
DEERLAEELERVLDRNRKLLEEALRELRRVIEENRKSVKRLLDELKRVLDELLKVLRELSRGDSDEELRKVIEDLIRKLTKVLDKVRSLVEENIERLARVLEKLERLARENLEDLKKVLDDVDKKLKDRRLVERLAELVRELIEVNKEILEMLKEIVRELLEINRTLLERLKDLVATALEIIKLLARRDHMVLHEYVNAAGITDRLRKLLEDYERAVRRLEDKLRRVRERYEAVLKRIKDKLEETKR

SEQ ID NO: 961 - protein, 243 aa, Artificial Sequence
  Synthetic
SRVEELKKLIEDILRISREVVERIARVAEDIHRINRRVLDDLRKLIEDILRTVEEILARKVSGTEAAEALRDTIRRVVDEIRKLLEEHEKRSAELLEEIRKLLEDILRRSERAVEEIRELLKKGVSTKDVLRIIEEILREHLELLERVVRRIEEILRELLKTIEEIVKRIKEILEELKEVLKRGSVGRDHMVLHEYVNAAGITRILEEYRRLLEEIKRKLEEILRRVEELHRRLRRKLEEIDR

SEQ ID NO: 962 - protein, 243 aa, Artificial Sequence; identical to SEQ ID NO: 961
  Synthetic

SEQ ID NO: 963 - protein, 243 aa, Artificial Sequence
  Synthetic
DEEETLRRLLERKVELAKEYLDVSKEVIDRTTKLLDEYLKTSKRIVDATVELLERGDLGPDELIKRLAEELERSLRELEEEIKRLKRELEESLKKLKEIIDRLAEEAEKLLAVLKRGEGSEEEALRALASLVRELIEVLRENDERLRDVLRRLIEALRKNNEILERVLRKLVRAAEERGRDESSREARDHMVLHEYVNAAGITEITKDLEAKLEKLLRDLNELTKALEEELKRLLDELKKRTD

SEQ ID NO: 964 - protein, 243 aa, Artificial Sequence; identical to SEQ ID NO: 963
  Synthetic

SEQ ID NO: 965 - protein, 243 aa, Artificial Sequence
  Synthetic
SEAERTKESLKKVLKALVDLNRELLRKLEENMRELTKLNEEVKRALKEVLDKVREGGIVDKDAEREAERLMRELDKSSEDTARETRKLIEESKKSTRRTEEEARKLTETLDRLAKGGLPREDLLRALVRLLEELARLIEEDVRRNAELVKRHIELVERDVAELLRLIKELVDLLADLAEKGSRTEEIRDHMVLHEYVNAAGITRYREEVRKSKDKLRSILEDYKRKVDELKERLRELIEEVET

SEQ ID NO: 966 - protein, 243 aa, Artificial Sequence; identical to SEQ ID NO: 965
  Synthetic

SEQ ID NO: 967 - protein, 245 aa, Artificial Sequence
  Synthetic
TEEEVLRKVEKLIKDLLDVLRDLLRASEEVVREALRVLEELIEENKRVIEELSRALSGGSRESVESALAKNEERLKKILEDADRVLDKWRRLLEELSKKAKAVLDEVRKRLEEIKREVPETEKLRTLLTILEEILRALEKIIRDILRINERLLEKLKRILERLRETNREIDERIRKLVEEARGGSEEKRDHMVLHEYVNAAGITEDLRRELEKLLRDYKRELEEIERALEEIEKTLKRRADETRR

SEQ ID NO: 968 - protein, 245 aa, Artificial Sequence; identical to SEQ ID NO: 967
  Synthetic

SEQ ID NO: 969 - protein, 243 aa, Artificial Sequence
  Synthetic
KREDILKKLEDIIRDIIDKLRRILEKVKRLNEDIIREIKRLLDESLKTLEDLLKRIADKSRDRELEDILRRVLEKLRRSLDKLRDTLRKLKEETDTVLERAERTLKELKDRLEKLLRDGEKVSEEDLVEALKALIDELRKVLEDVIRVSKELVERLLRALREHLETNKRLVKELLDALRKTTGDDEEIRDHMVLHEYVNAAGITEVERVARELEKAHRDLERDIRRVAEELKKLLKKLRDDRR

SEQ ID NO: 970 - protein, 244 aa, Artificial Sequence
  Synthetic
SAEETLRRITEESKRVLEEITKKYEDLERESREVLRKLREDLDRIKRELEDVLTKGGDDKDEVLTVLEKVLDELLKLHRENLRVIKELLRKVLEVDRENLEVLKRLLEKARDLLRRSGRDEKDLKKLEDELRKVKEELEKKHEASKRDIEDLERELDKVTEEVERLLRKLKEELRRAAEGSDEDRERLRDHMVLHEYVNAAGITEILKINEELNRKIIKFARENLERNRRVNKKVIEVLREAAR

SEQ ID NO: 971 - protein, 247 aa, Artificial Sequence
  Synthetic
SEKEELLKLIKRVIELLKRVLEEHLRLVEDVIRRLKELLDSNEKIVREVIEDLKRLLDEVRGDKEELDRIKEKLEEVLERYKRRLEEIKRDLERMLEDYKRELKRIEEDLRRVLEEVERIATRGEGPAEALIDKLRKILERALRELDKLSKKLDELLKKVLEELEKSNREIDKLLKDVLRRVEEGGASRDHMVLHEYVNAAGITKLKRNLEDVRRVIEDVKRKSARILEEARRLIEEVERELEKIRK

SEQ ID NO: 972 - protein, 242 aa, Artificial Sequence
  Synthetic
SEKERLMRLLDKLKDLNRRLVERIKELLDKALELHKKLVKELRELLERLKELVERGGVPEELLTRIDELIKKLEDEARKISKEVKRLIDELKKRLEDIHREVDRLIRELKETLKGVTDKDELLRRVAEVLERIARLSEELIREVKEVLEKIVELSRELLKRVLDVLRRIAELLEDALRKGNVSEETVRRDHMVLHEYVNAAGITERDAEREYKKLKDELEELTERYRREIRKLKEELKADRK

SEQ ID NO: 973 - protein, 242 aa, Artificial Sequence; identical to SEQ ID NO: 972
  Synthetic

SEQ ID NO: 974 - protein, 247 aa, Artificial Sequence
  Synthetic
SEAEDLEELIKELAELLKDVIRKLEKINRRLVKILEDIIRRLKEISKEAEEELRKGTVEDKDILRDLERRLREILEESDRLLEELKRRLEEILRKSKELLRRLEEVLREILKRAEEVKRSNLPKEELIKEIVKLLEELLRVIEKILEDNIRLLEELVEVIKEILEKHLRLLEELVRVIERILREVGKDRDHMVLHEYVNAAGITRLREEHEEVKRRLEEELTRLRETHKKIEKELREALKRVRDRST

SEQ ID NO: 975 - protein, 247 aa, Artificial Sequence; identical to SEQ ID NO: 974
  Synthetic

SEQ ID NO: 976 - protein, 248 aa, Artificial Sequence
  Synthetic
DEDRIIEEIARLLEELLRELLELIKKLIETNRRLNEEHERAVRELARLLEELLDRLVKKGISDEKLKRIRERLKRALDDLERLHREINKRLEDLVRELEKLVREILKELKDALEELRRASARAGGEEVLRRLEEIVKKLLDLVRRILERLKEIHKDNVRLLRELNERLTRIVEDLVRLIREILREAGVRDHMVLHEYVNAAGITRMIKRLHEDLERKLKESEDELREIEARLEEKIRRLEEKLERKRR

SEQ ID NO: 977 - protein, 248 aa, Artificial Sequence; identical to SEQ ID NO: 976
  Synthetic

SEQ ID NO: 978 - protein, 247 aa, Artificial Sequence
  Synthetic
SKAEKLLKDLREALEKVKRRYEELERRLDEVLKEHEEIVKRLLEELEKVLKRIEEGGLPEEELEKLKKLAEKVKELLRELLRLSKELVDRVRELLKRDLDLVRRLVEIALKVLREAREQPNDEKRVEKIKRDLEKKARRVREENERIKRDLKRTADESRKRLEKLLEDLKRELDRLREDLDRGRKDIDRDHMVLHEYVNAAGITLLREVIKSHEKLVRTIERLIEESIRVNEELLEVIERLLDRARK

SEQ ID NO: 979 - protein, 239 aa, Artificial Sequence
  Synthetic
SERELIERWLELHKEILRLIRELVERLLKLHREILDTIKKLIRELLELLEDIARKLGLDKEAKDELREIAKRVEDKLEKLERESRKVEEDLKRKLKELTDESDTVEKRVRDVVRRGTQSREEIAEELLRLDRKLLKAVEELLKEILDLNKKLLDDVRAILEETRRVLEKLLDRVRRGERTDDERRTLTRDHMVLHEYVNAAGITLKKLLDDSARMAEEVKKTLKELLERSEKVAEDVRK

SEQ ID NO: 980 - protein, 246 aa, Artificial Sequence
  Synthetic
KEIEETLKELEDLNREMVETNRRVLEETRRLNKETVDRVKATLDELAKMLKKLVDDVRKGPTSEELKRLLAELEELLARVVRRVEELLKKSTDLLERAVKDSADALRRSHEVLKEVASRVKRAKDEGLPREEVLRLLRELLERHAKVLKDIVRVSEKLLREHLKVLREIVEVLEELLERILKVILDTTRDHMVLHEYVNAAGITKRRLKEVIDRYEDELRKLRKEYKEKIDKYERKLEEIERRERT

SEQ ID NO: 981 - protein, 246 aa, Artificial Sequence
  Synthetic
SREEIVATLEDLARKILEVVKKLAKEIEDAWREIERAVREILKRLEELWREIEDVVRKKVDSRVAEILETVVKRVVDITRRLIEEAERVVRELVDITRKLITILEEVVRRLVEIVREASKIDDRRELEDMLRKIREVVREVIERLKKLDEDVRRVVEEVIRRLEELNKRLEDVIREVKKRLKELGLSERDHMVLHEYVNAAGITNTRVIKEIIDLLRTVIRIHEKIVEDLIKLLEELLRRLEEATR

SEQ ID NO: 982 - protein, 241 aa, Artificial Sequence
  Synthetic
SEKELLKEILDRIRELLEDDNRLLKRIVDEIRKLLEEWLRVHKEILERIKELLDRIGAPEDVIRELTRALKETEEDVDRVIRTLEKLLKEVLDAHEEVVRKLDRLLKEVERLVEGGDAEEVVRDLLRVVKEILDESKAVIDELARVVDEILKLLEEVDRKLAKVVKEILEDVLRGSGDDEDAVRKIAKRDHMVLHEYVNAAGITRRVIEEAKRLLKEWRDRNKEVADTLKKLLEDLIRKIR

SEQ ID NO: 983 - protein, 241 aa, Artificial Sequence; identical to SEQ ID NO: 982
  Synthetic

SEQ ID NO: 984 - protein, 248 aa, Artificial Sequence
  Synthetic
SEDELLEKIVRKLAEAVKRIEEELRKSKREIERLVKEIKEKLEDSLARVKETLDRIRETRKGPSDEEVLERLVRTLEELLARHLKLIEDIARELKKLLKEHLDRIETIVRDLKRLLKEILDELERTGLPREALEAVRELVKTVARLLDEVLKNNKKLLDDLKKELDDVLANNKRIVDELARLLERVRRRDHMVLHEYVNAAGITERSIESLERLLELILRVLEYSVASLEELLRRLLEVIKRIVDTTK

SEQ ID NO: 985 - protein, 246 aa, Artificial Sequence
  Synthetic
SEREELLERIKEILKRVKDKLDEDLKRLKEILEKLKEKADRDLEELRRRIEEVREKLERTGRTDELVKEVLDTVRRNLENLKRLVEDILRKLEENVKNLTDLVREILKLITELIKRLEDGGLPKEVLDALRRVLEKLEELLREILERLKRSLEAVKRKIEELLKELERSLDELRRALERIRKEIGDSERDHMVLHEYVNAAGITVRRVLEELLKVLAEHLETVRELIERLKRVLEEAIEVVERVAR

SEQ ID NO: 986 - protein, 246 aa, Artificial Sequence; identical to SEQ ID NO: 985
  Synthetic

SEQ ID NO: 987 - protein, 240 aa, Artificial Sequence
  Synthetic
DREKSVRDIEEDLKRVLDKLRRRVETSKEELKKVLKADKENADELEKTLRDVVRELDRGIDSEVLRAVREIVKRLVEVVRRYNELSEKIIRDLVRVNDRVLELLKRIVKRLIDVVRELEKIGDKEKALRRLEEVVKEVKRRIEELLKELEDVHRELVKILEEVNEDLKRVATEVKEIIKTGIKSSEVARDHMVLHEYVNAAGITNTDRLKEVIDRNLADLRDLAEELRAVIERLLEDARR

SEQ ID NO: 988 - protein, 241 aa, Artificial Sequence
  Synthetic
SAEEAVEKLVRIARAIVKINEDLSREVVRILREIVRLNEETTRLLVEIAREVVKVVEDGGLSEDVVRKLRKLVKELEDLLKKSNDDIRKLVEDVARRLKESNDEIRRLVERLEELLKRGPGDEELLRLVEELTEELLRTHEEVVKALEKLTADLLELHRELLERVRRLTKRIEEELKRVGVSEELLRRRDHMVLHEYVNAAGITKELEKLKRELERLLEESRRKLEKLKRDLERVLEETRR

SEQ ID NO: 989 - protein, 243 aa, Artificial Sequence
  Synthetic
SEAERLADEVRKAVKKSEEDNETLVREVEKAVRELKKNNKTWVDEVRKLMKRLVDLLRDGQVSDRDLLKELEEVLRRVLEALAENHERTEEILKRWLDRYAEDIERLRKVLKEVIEALKRGGSDDKRIVDELEEILRRNEDVLDKIAKRLRRLLEEDRRLLERIVRELKRLLDDLDRITKEGKSEELVRDHMVLHEYVNAAGITLVRLNNEILERLLKIVRELHKDNIKILEDLLRIIEEVLR

SEQ ID NO: 990 - protein, 243 aa, Artificial Sequence; identical to SEQ ID NO: 989
  Synthetic

SEQ ID NO: 991 - protein, 243 aa, Artificial Sequence
  Synthetic
SRVEELKKLIEDILRISREVVERIARVAEDIHRINRRVLDDLRKLIEDILRTVEEILARKVSGTEAAEALRDTIRRVVDEIRKLLEEHEKRSAELLEEIRKLLEDILRRSERAVEEIRELLKKGVSTKDVLRIIEEILREHLELLERVVRRIEEILRELLKTIEEIVKRIKEILEELKEVLKRGSVGDRDHMVLHEYVNAAGITILEEYRRLLEEIKRKLEEILRRVEELHRRLRRKLEEIDR

SEQ ID NO: 992 - protein, 249 aa, Artificial Sequence
  Synthetic
DAEEVVKRLADVLRENDETIRKVVEDLVRIAEENDRLWKKLVEDIAEILRRIVELLRRGGVPEELLDRLAKVVKSIVEKAEKILERLNRVSKAIAEKLKTIVDELNEVSKEIVKRAEDILRKGKDKETVLRALRTLVKEYADLSKEVLERVERIVREYVKLSDEVVKSLAEIVEELIRIIEDLLRKGNRDHMVLHEYVNAAGITRKLLEDVKKASEDIVREVERIVRELAKRSDEILKKLEDIVEKLRE

SEQ ID NO: 993 - protein, 249 aa, Artificial Sequence; identical to SEQ ID NO: 992
  Synthetic

SEQ ID NO: 994 - protein, 240 aa, Artificial Sequence
  Synthetic
DKDKRLEELLKRLKELNDKTFEELERILEELKRANEASLREAERILEELRARIEGGNLDKRLAELLKKLLDDLKRLLEEYTRTNEELLKRLRELLERYRETNKKLLDLLRKLLDEARRTGTDEDLLRRLEDILRKYEDEVRRLLKELEDILREYEDTSRRLLEELERIAKEAAERVSRGSDKDVKDIIRDHMVLHEYVNAAGITDSRTNSEVVKRLLDLLREDSKANSEVVKRLLDVLRE

SEQ ID NO: 995 - protein, 240 aa, Artificial Sequence
  Synthetic
SKEETLKRLLDELEKRNRETVERLERLLKELEDRNRASLEELEAVLEELERKIEESGLSKELKDTLARILEELRKLLEEYFRKNEELLRLLRKLLDEYARTNEELLRLLEELLDTARRTGGDSELLKRLEDIAREYEKRVRRLLEKLKDILDKYRKTVEELVRKMEEILKEAKKTISRIGSEEVKDIVRDHMVLHEYVNAAGITDVELNLDVAKKLLELLKEDSKLNLDVARELLELLDR

SEQ ID NO: 996 - protein, 243 aa, Artificial Sequence
  Synthetic
DEEETLRRLLERKVELAKEYLDVSKEVIDRTTKLLDEYLKTSKRIVDATVELLERGDLGPDELIKRLAEELERSLRELEEEIKRLKRELEESLKKLKEIIDRLAEEAEKLLAVLKRGEGSEEEALRALASLVRELIEVLRENDERLRDVLRRLIEALRKNNEILERVLRKLVRAAEERGRDESSREALRDHMVLHEYVNAAGITITKDLEAKLEKLLRDLNELTKALEEELKRLLDELKKRTD

SEQ ID NO: 997 - protein, 243 aa, Artificial Sequence
  Synthetic
SEAERTKESLKKVLKALVDLNRELLRKLEENMRELTKLNEEVKRALKEVLDKVREGGIVDKDAEREAERLMRELDKSSEDTARETRKLIEESKKSTRRTEEEARKLTETLDRLAKGGLPREDLLRALVRLLEELARLIEEDVRRNAELVKRHIELVERDVAELLRLIKELVDLLADLAEKGSRTEEIRRDHMVLHEYVNAAGITYREEVRKSKDKLRSILEDYKRKVDELKERLRELIEEVET

SEQ ID NO: 998 - protein, 243 aa, Artificial Sequence; identical to SEQ ID NO: 997
  Synthetic

SEQ ID NO: 999 - protein, 245 aa, Artificial Sequence
  Synthetic
TEEEVLRKVEKLIKDLLDVLRDLLRASEEVVREALRVLEELIEENKRVIEELSRALSGGSRESVESALAKNEERLKKILEDADRVLDKWRRLLEELSKKAKAVLDEVRKRLEEIKREVPETEKLRTLLTILEEILRALEKIIRDILRINERLLEKLKRILERLRETNREIDERIRKLVEEARGGSEEKLRDHMVLHEYVNAAGITDLRRELEKLLRDYKRELEEIERALEEIEKTLKRRADETRR

SEQ ID NO: 1000 - protein, 243 aa, Artificial Sequence
  Synthetic
KREDILKKLEDIIRDIIDKLRRILEKVKRLNEDIIREIKRLLDESLKTLEDLLKRIADKSRDRELEDILRRVLEKLRRSLDKLRDTLRKLKEETDTVLERAERTLKELKDRLEKLLRDGEKVSEEDLVEALKALIDELRKVLEDVIRVSKELVERLLRALREHLETNKRLVKELLDALRKTTGDDEEIKRDHMVLHEYVNAAGITVERVARELEKAHRDLERDIRRVAEELKKLLKKLRDDRR

SEQ ID NO: 1001 - protein, 244 aa, Artificial Sequence
  Synthetic
SAEETLRRITEESKRVLEEITKKYEDLERESREVLRKLREDLDRIKRELEDVLTKGGDDKDEVLTVLEKVLDELLKLHRENLRVIKELLRKVLEVDRENLEVLKRLLEKARDLLRRSGRDEKDLKKLEDELRKVKEELEKKHEASKRDIEDLERELDKVTEEVERLLRKLKEELRRAAEGSDEDRERLARDHMVLHEYVNAAGITILKINEELNRKIIKFARENLERNRRVNKKVIEVLREAAR

SEQ ID NO: 1002 - protein, 250 aa, Artificial Sequence
  Synthetic
STEEILKRVKEILDELAKELRDIIRESLRTIEELLDELRRILEESERTLEELVKTIKDGVKDSEELLRRLKRLLEDLRRAHEELLKRLKEAVDEHRDRLRKILEELERVLKELRKRIEELRRSGDRISEKDVLRKLEEVLRKALEILERLLKKIRESARELLKIIEEVLDANIKVMEEALKTIKELLKDRDHMVLHEYVNAAGITRTRYEELRRRLRKRVKDYEDKLREIEKKVRRDAERIEEELERAKK

SEQ ID NO: 1003 - protein, 247 aa, Artificial Sequence
  Synthetic
SEKEELLKLIKRVIELLKRVLEEHLRLVEDVIRRLKELLDSNEKIVREVIEDLKRLLDEVRGDKEELDRIKEKLEEVLERYKRRLEEIKRDLERMLEDYKRELKRIEEDLRRVLEEVERIATRGEGPAEALIDKLRKILERALRELDKLSKKLDELLKKVLEELEKSNREIDKLLKDVLRRVEEGGASERDHMVLHEYVNAAGITLKRNLEDVRRVIEDVKRKSARILEEARRLIEEVERELEKIRK

SEQ ID NO: 1004 - protein, 247 aa, Artificial Sequence; identical to SEQ ID NO: 1003
  Synthetic

SEQ ID NO: 1005 - protein, 242 aa, Artificial Sequence
  Synthetic
SEKERLMRLLDKLKDLNRRLVERIKELLDKALELHKKLVKELRELLERLKELVERGGVPEELLTRIDELIKKLEDEARKISKEVKRLIDELKKRLEDIHREVDRLIRELKETLKGVTDKDELLRRVAEVLERIARLSEELIREVKEVLEKIVELSRELLKRVLDVLRRIAELLEDALRKGNVSEETVRRRDHMVLHEYVNAAGITRDAEREYKKLKDELEELTERYRREIRKLKEELKADRK

SEQ ID NO: 1006 - protein, 247 aa, Artificial Sequence
  Synthetic
SEAEDLEELIKELAELLKDVIRKLEKINRRLVKILEDIIRRLKEISKEAEEELRKGTVEDKDILRDLERRLREILEESDRLLEELKRRLEEILRKSKELLRRLEEVLREILKRAEEVKRSNLPKEELIKEIVKLLEELLRVIEKILEDNIRLLEELVEVIKEILEKHLRLLEELVRVIERILREVGKDKRDHMVLHEYVNAAGITLREEHEEVKRRLEEELTRLRETHKKIEKELREALKRVRDRST

SEQ ID NO: 1007 - protein, 247 aa, Artificial Sequence; identical to SEQ ID NO: 1006
  Synthetic

SEQ ID NO: 1008 - protein, 248 aa, Artificial Sequence
  Synthetic
DEDRIIEEIARLLEELLRELLELIKKLIETNRRLNEEHERAVRELARLLEELLDRLVKKGISDEKLKRIRERLKRALDDLERLHREINKRLEDLVRELEKLVREILKELKDALEELRRASARAGGEEVLRRLEEIVKKLLDLVRRILERLKEIHKDNVRLLRELNERLTRIVEDLVRLIREILREAGVDRDHMVLHEYVNAAGITMIKRLHEDLERKLKESEDELREIEARLEEKIRRLEEKLERKRR

SEQ ID NO: 1009 - protein, 248 aa, Artificial Sequence; identical to SEQ ID NO: 1008
  Synthetic

SEQ ID NO: 1010 - protein, 247 aa, Artificial Sequence
  Synthetic
SKAEKLLKDLREALEKVKRRYEELERRLDEVLKEHEEIVKRLLEELEKVLKRIEEGGLPEEELEKLKKLAEKVKELLRELLRLSKELVDRVRELLKRDLDLVRRLVEIALKVLREAREQPNDEKRVEKIKRDLEKKARRVREENERIKRDLKRTADESRKRLEKLLEDLKRELDRLREDLDRGRKDIDERDHMVLHEYVNAAGITLREVIKSHEKLVRTIERLIEESIRVNEELLEVIERLLDRARK

SEQ ID NO: 1011 - protein, 246 aa, Artificial Sequence
  Synthetic
KEIEETLKELEDLNREMVETNRRVLEETRRLNKETVDRVKATLDELAKMLKKLVDDVRKGPTSEELKRLLAELEELLARVVRRVEELLKKSTDLLERAVKDSADALRRSHEVLKEVASRVKRAKDEGLPREEVLRLLRELLERHAKVLKDIVRVSEKLLREHLKVLREIVEVLEELLERILKVILDTTGRDHMVLHEYVNAAGITRRLKEVIDRYEDELRKLRKEYKEKIDKYERKLEEIERRERT

SEQ ID NO: 1012 - protein, 246 aa, Artificial Sequence; identical to SEQ ID NO: 1011
  Synthetic

SEQ ID NO: 1013 - protein, 247 aa, Artificial Sequence
  Synthetic
RDRDVLRKVKAEIEELVARIEKVSRDALSEVKRLLDENRKIAEDVLRLIESLLRKIRDTRGDDEVVKETEEVLRDNHRLLEELIRRLIKVLEEWLRRHKKLLDEIRELLKEILRLVKESGVSEDLLRRLKRVIEELDKKLKESEEKLRRVVEKAKEDLKAVLEEHRKVLEDLKRALEEVREKLRERGSERDHMVLHEYVNAAGITMKRVHDDLSRAVEKVVRDVVRVDKELLDELARILRRLEEVIT

SEQ ID NO: 1014 - protein, 241 aa, Artificial Sequence
  Synthetic
SEKELLKEILDRIRELLEDDNRLLKRIVDEIRKLLEEWLRVHKEILERIKELLDRIGAPEDVIRELTRALKETEEDVDRVIRTLEKLLKEVLDAHEEVVRKLDRLLKEVERLVEGGDAEEVVRDLLRVVKEILDESKAVIDELARVVDEILKLLEEVDRKLAKVVKEILEDVLRGSGDDEDAVRKIAKIRDHMVLHEYVNAAGITRVIEEAKRLLKEWRDRNKEVADTLKKLLEDLIRKIR

SEQ ID NO: 1015 - protein, 241 aa, Artificial Sequence; identical to SEQ ID NO: 1014
  Synthetic

SEQ ID NO: 1016 - protein, 246 aa, Artificial Sequence
  Synthetic
SEREELLERIKEILKRVKDKLDEDLKRLKEILEKLKEKADRDLEELRRRIEEVREKLERTGRTDELVKEVLDTVRRNLENLKRLVEDILRKLEENVKNLTDLVREILKLITELIKRLEDGGLPKEVLDALRRVLEKLEELLREILERLKRSLEAVKRKIEELLKELERSLDELRRALERIRKEIGDSETRDHMVLHEYVNAAGITRRVLEELLKVLAEHLETVRELIERLKRVLEEAIEVVERVAR

SEQ ID NO: 1017 - protein, 240 aa, Artificial Sequence
  Synthetic
DREKSVRDIEEDLKRVLDKLRRRVETSKEELKKVLKADKENADELEKTLRDVVRELDRGIDSEVLRAVREIVKRLVEVVRRYNELSEKIIRDLVRVNDRVLELLKRIVKRLIDVVRELEKIGDKEKALRRLEEVVKEVKRRIEELLKELEDVHRELVKILEEVNEDLKRVATEVKEIIKTGIKSSEVAKRDHMVLHEYVNAAGITTDRLKEVIDRNLADLRDLAEELRAVIERLLEDARR

SEQ ID NO: 1018 - protein, 240 aa, Artificial Sequence; identical to SEQ ID NO: 1017
  Synthetic

SEQ ID NO: 1019 - protein, 241 aa, Artificial Sequence
  Synthetic
SAEEAVEKLVRIARAIVKINEDLSREVVRILREIVRLNEETTRLLVEIAREVVKVVEDGGLSEDVVRKLRKLVKELEDLLKKSNDDIRKLVEDVARRLKESNDEIRRLVERLEELLKRGPGDEELLRLVEELTEELLRTHEEVVKALEKLTADLLELHRELLERVRRLTKRIEEELKRVGVSEELLRRLRDHMVLHEYVNAAGITELEKLKRELERLLEESRRKLEKLKRDLERVLEETRR

SEQ ID NO: 1020 - protein, 243 aa, Artificial Sequence
  Synthetic
SEAERLADEVRKAVKKSEEDNETLVREVEKAVRELKKNNKTWVDEVRKLMKRLVDLLRDGQVSDRDLLKELEEVLRRVLEALAENHERTEEILKRWLDRYAEDIERLRKVLKEVIEALKRGGSDDKRIVDELEEILRRNEDVLDKIAKRLRRLLEEDRRLLERIVRELKRLLDDLDRITKEGKSEELVRRDHMVLHEYVNAAGITVRLNNEILERLLKIVRELHKDNIKILEDLLRIIEEVLR

SEQ ID NO: 1021 - protein, 243 aa, Artificial Sequence; identical to SEQ ID NO: 1020
  Synthetic

SEQ ID NO: 1022 - protein, 247 aa, Artificial Sequence
  Synthetic
DEERLAEELERVLDRNRKLLEEALRELRRVIEENRKSVKRLLDELKRVLDELLKVLRELSRGDSDEELRKVIEDLIRKLTKVLDKVRSLVEENIERLARVLEKLERLARENLEDLKKVLDDVDKKLKDRRLVERLAELVRELIEVNKEILEMLKEIVRELLEINRTLLERLKDLVATALEIIKLLARGDRDHMVLHEYVNAAGITLRKLLEDYERAVRRLEDKLRRVRERYEAVLKRIKDKLEETKR

SEQ ID NO: 1023 - protein, 247 aa, Artificial Sequence; identical to SEQ ID NO: 1022
  Synthetic

SEQ ID NO: 1024 - protein, 243 aa, Artificial Sequence
  Synthetic
SRVEELKKLIEDILRISREVVERIARVAEDIHRINRRVLDDLRKLIEDILRTVEEILARKVSGTEAAEALRDTIRRVVDEIRKLLEEHEKRSAELLEEIRKLLEDILRRSERAVEEIRELLKKGVSTKDVLRIIEEILREHLELLERVVRRIEEILRELLKTIEEIVKRIKEILEELKEVLKRGSVGDDRDHMVLHEYVNAAGITLEEYRRLLEEIKRKLEEILRRVEELHRRLRRKLEEIDR

SEQ ID NO: 1025 - protein, 243 aa, Artificial Sequence; identical to SEQ ID NO: 1024
  Synthetic

SEQ ID NO: 1026 - protein, 249 aa, Artificial Sequence
  Synthetic
DAEEVVKRLADVLRENDETIRKVVEDLVRIAEENDRLWKKLVEDIAEILRRIVELLRRGGVPEELLDRLAKVVKSIVEKAEKILERLNRVSKAIAEKLKTIVDELNEVSKEIVKRAEDILRKGKDKETVLRALRTLVKEYADLSKEVLERVERIVREYVKLSDEVVKSLAEIVEELIRIIEDLLRKGNLRDHMVLHEYVNAAGITKLLEDVKKASEDIVREVERIVRELAKRSDEILKKLEDIVEKLRE

SEQ ID NO: 1027 - protein, 249 aa, Artificial Sequence; identical to SEQ ID NO: 1026
  Synthetic

SEQ ID NO: 1028 - protein, 240 aa, Artificial Sequence
  Synthetic
SKEETLKRLLDELEKRNRETVERLERLLKELEDRNRASLEELEAVLEELERKIEESGLSKELKDTLARILEELRKLLEEYFRKNEELLRLLRKLLDEYARTNEELLRLLEELLDTARRTGGDSELLKRLEDIAREYEKRVRRLLEKLKDILDKYRKTVEELVRKMEEILKEAKKTISRIGSEEVKDIVRRDHMVLHEYVNAAGITVELNLDVAKKLLELLKEDSKLNLDVARELLELLDR

SEQ ID NO: 1029 - protein, 240 aa, Artificial Sequence; identical to SEQ ID NO: 1028
  Synthetic

SEQ ID NO: 1030 - protein, 243 aa, Artificial Sequence
  Synthetic
DEEETLRRLLERKVELAKEYLDVSKEVIDRTTKLLDEYLKTSKRIVDATVELLERGDLGPDELIKRLAEELERSLRELEEEIKRLKRELEESLKKLKEIIDRLAEEAEKLLAVLKRGEGSEEEALRALASLVRELIEVLRENDERLRDVLRRLIEALRKNNEILERVLRKLVRAAEERGRDESSREALERDHMVLHEYVNAAGITTKDLEAKLEKLLRDLNELTKALEEELKRLLDELKKRTD

SEQ ID NO: 1031 - protein, 243 aa, Artificial Sequence; identical to SEQ ID NO: 1030
  Synthetic

SEQ ID NO: 1032 - protein, 243 aa, Artificial Sequence
  Synthetic
SEAERTKESLKKVLKALVDLNRELLRKLEENMRELTKLNEEVKRALKEVLDKVREGGIVDKDAEREAERLMRELDKSSEDTARETRKLIEESKKSTRRTEEEARKLTETLDRLAKGGLPREDLLRALVRLLEELARLIEEDVRRNAELVKRHIELVERDVAELLRLIKELVDLLADLAEKGSRTEEIRKRDHMVLHEYVNAAGITREEVRKSKDKLRSILEDYKRKVDELKERLRELIEEVET

SEQ ID NO: 1033 - protein, 241 aa, Artificial Sequence
  Synthetic
SADEALEELVRRLLEVLKTVLERTKELSRDDLRVVKEVLRIIEELVKRLLKVIRDGLDDADRVLEEVERVIREAKREVKRWEEVVRKVVEDSRRLIERVLAEVEEVIKEAKRLLDERKSGGSREVIEELLSLLREIVRHHKEVSDEHLKLSAELVKRILDVVEETLRLATEIVRRIKEGGNSEDVRRDIRDHMVLHEYVNAAGITDIERLLAELEKLNEDVLRENKALLEDLERRVRERKK

SEQ ID NO: 1034 - protein, 245 aa, Artificial Sequence
  Synthetic
TEEEVLRKVEKLIKDLLDVLRDLLRASEEVVREALRVLEELIEENKRVIEELSRALSGGSRESVESALAKNEERLKKILEDADRVLDKWRRLLEELSKKAKAVLDEVRKRLEEIKREVPETEKLRTLLTILEEILRALEKIIRDILRINERLLEKLKRILERLRETNREIDERIRKLVEEARGGSEEKLRRDHMVLHEYVNAAGITLRRELEKLLRDYKRELEEIERALEEIEKTLKRRADETRR

SEQ ID NO: 1035 - protein, 245 aa, Artificial Sequence; identical to SEQ ID NO: 1034
  Synthetic

SEQ ID NO: 1036 - protein, 243 aa, Artificial Sequence
  Synthetic
KREDILKKLEDIIRDIIDKLRRILEKVKRLNEDIIREIKRLLDESLKTLEDLLKRIADKSRDRELEDILRRVLEKLRRSLDKLRDTLRKLKEETDTVLERAERTLKELKDRLEKLLRDGEKVSEEDLVEALKALIDELRKVLEDVIRVSKELVERLLRALREHLETNKRLVKELLDALRKTTGDDEEIKRRDHMVLHEYVNAAGITERVARELEKAHRDLERDIRRVAEELKKLLKKLRDDRR

SEQ ID NO: 1037 - protein, 244 aa, Artificial Sequence
  Synthetic
SAEETLRRITEESKRVLEEITKKYEDLERESREVLRKLREDLDRIKRELEDVLTKGGDDKDEVLTVLEKVLDELLKLHRENLRVIKELLRKVLEVDRENLEVLKRLLEKARDLLRRSGRDEKDLKKLEDELRKVKEELEKKHEASKRDIEDLERELDKVTEEVERLLRKLKEELRRAAEGSDEDRERLARRDHMVLHEYVNAAGITLKINEELNRKIIKFARENLERNRRVNKKVIEVLREAAR

SEQ ID NO: 1038 - protein, 250 aa, Artificial Sequence
  Synthetic
STEEILKRVKEILDELAKELRDIIRESLRTIEELLDELRRILEESERTLEELVKTIKDGVKDSEELLRRLKRLLEDLRRAHEELLKRLKEAVDEHRDRLRKILEELERVLKELRKRIEELRRSGDRISEKDVLRKLEEVLRKALEILERLLKKIRESARELLKIIEEVLDANIKVMEEALKTIKELLKDGRDHMVLHEYVNAAGITTRYEELRRRLRKRVKDYEDKLREIEKKVRRDAERIEEELERAKK

SEQ ID NO: 1039 - protein, 247 aa, Artificial Sequence
  Synthetic
SEKEELLKLIKRVIELLKRVLEEHLRLVEDVIRRLKELLDSNEKIVREVIEDLKRLLDEVRGDKEELDRIKEKLEEVLERYKRRLEEIKRDLERMLEDYKRELKRIEEDLRRVLEEVERIATRGEGPAEALIDKLRKILERALRELDKLSKKLDELLKKVLEELEKSNREIDKLLKDVLRRVEEGGASEDRDHMVLHEYVNAAGITKRNLEDVRRVIEDVKRKSARILEEARRLIEEVERELEKIRK

SEQ ID NO: 1040 - protein, 247 aa, Artificial Sequence; identical to SEQ ID NO: 1039
  Synthetic

SEQ ID NO: 1041 - protein, 242 aa, Artificial Sequence
  Synthetic
SEKERLMRLLDKLKDLNRRLVERIKELLDKALELHKKLVKELRELLERLKELVERGGVPEELLTRIDELIKKLEDEARKISKEVKRLIDELKKRLEDIHREVDRLIRELKETLKGVTDKDELLRRVAEVLERIARLSEELIREVKEVLEKIVELSRELLKRVLDVLRRIAELLEDALRKGNVSEETVRRLRDHMVLHEYVNAAGITDAEREYKKLKDELEELTERYRREIRKLKEELKADRK

SEQ ID NO: 1042 - protein, 247 aa, Artificial Sequence
  Synthetic
SEAEDLEELIKELAELLKDVIRKLEKINRRLVKILEDIIRRLKEISKEAEEELRKGTVEDKDILRDLERRLREILEESDRLLEELKRRLEEILRKSKELLRRLEEVLREILKRAEEVKRSNLPKEELIKEIVKLLEELLRVIEKILEDNIRLLEELVEVIKEILEKHLRLLEELVRVIERILREVGKDKDRDHMVLHEYVNAAGITREEHEEVKRRLEEELTRLRETHKKIEKELREALKRVRDRST

SEQ ID NO: 1043 - protein, 247 aa, Artificial Sequence; identical to SEQ ID NO: 1042
  Synthetic

SEQ ID NO: 1044 - protein, 248 aa, Artificial Sequence
  Synthetic
DEEERVKKLLTDLRRLLRKLHEESKKLLDELRKKLRELRRRSEEKLREVERRLREAEKKLPGTRVLKLVADVVKKVLDAIRDLNRKLEEIIDEALKLLEELDDILRRVVEEALRLLKEIKDTKGDREEVKKRVEDILKRLEELVKEYEDRVREIKKRLRRALEELRDEYRKIREDIERVLDELRKGGVPERDHMVLHEYVNAAGITLDENLKMVERLIRELEKVLDDHERKVRRLIEELLEVLDRDAK

SEQ ID NO: 1045 - protein, 248 aa, Artificial Sequence
  Synthetic
DEDRIIEEIARLLEELLRELLELIKKLIETNRRLNEEHERAVRELARLLEELLDRLVKKGISDEKLKRIRERLKRALDDLERLHREINKRLEDLVRELEKLVREILKELKDALEELRRASARAGGEEVLRRLEEIVKKLLDLVRRILERLKEIHKDNVRLLRELNERLTRIVEDLVRLIREILREAGVDERDHMVLHEYVNAAGITIKRLHEDLERKLKESEDELREIEARLEEKIRRLEEKLERKRR

SEQ ID NO: 1046 - protein, 248 aa, Artificial Sequence; identical to SEQ ID NO: 1045
  Synthetic

SEQ ID NO: 1047 - protein, 251 aa, Artificial Sequence
  Synthetic
DEEEKIRTTLDLLRKLLKVLREILEELIRSNKELNERLLRLVEDSDRLLEELLKKLADDGGVDEEALRRIKKRLEDLIRTNREIEERIDRESERLAEELRRILRELEKELRRLIEDLKEVLKRGLPREELLRRLKKVVEDVLRILEEVLRVVDELDKENVRLLREWLERNKEIVEEVIRILEDLIRKGGSRDHMVLHEYVNAAGITREKHAEIAKELERLLRENRRRLEELAREAKKVLDELRKRLEDERR

SEQ ID NO: 1048 - protein, 246 aa, Artificial Sequence
  Synthetic
SREEIVATLEDLARKILEVVKKLAKEIEDAWREIERAVREILKRLEELWREIEDVVRKKVDSRVAEILETVVKRVVDITRRLIEEAERVVRELVDITRKLITILEEVVRRLVEIVREASKIDDRRELEDMLRKIREVVREVIERLKKLDEDVRRVVEEVIRRLEELNKRLEDVIREVKKRLKELGLSEEARDHMVLHEYVNAAGITRVIKEIIDLLRTVIRIHEKIVEDLIKLLEELLRRLEEATR

SEQ ID NO: 1049 - protein, 241 aa, Artificial Sequence
  Synthetic
SEKELLKEILDRIRELLEDDNRLLKRIVDEIRKLLEEWLRVHKEILERIKELLDRIGAPEDVIRELTRALKETEEDVDRVIRTLEKLLKEVLDAHEEVVRKLDRLLKEVERLVEGGDAEEVVRDLLRVVKEILDESKAVIDELARVVDEILKLLEEVDRKLAKVVKEILEDVLRGSGDDEDAVRKIAKIIRDHMVLHEYVNAAGITVIEEAKRLLKEWRDRNKEVADTLKKLLEDLIRKIR

SEQ ID NO: 1050 - protein, 246 aa, Artificial Sequence
  Synthetic
SEREELLERIKEILKRVKDKLDEDLKRLKEILEKLKEKADRDLEELRRRIEEVREKLERTGRTDELVKEVLDTVRRNLENLKRLVEDILRKLEENVKNLTDLVREILKLITELIKRLEDGGLPKEVLDALRRVLEKLEELLREILERLKRSLEAVKRKIEELLKELERSLDELRRALERIRKEIGDSETARDHMVLHEYVNAAGITRVLEELLKVLAEHLETVRELIERLKRVLEEAIEVVERVAR

SEQ ID NO: 1051 - protein, 246 aa, Artificial Sequence; identical to SEQ ID NO: 1050
  Synthetic

SEQ ID NO: 1052 - protein, 245 aa, Artificial Sequence
  Synthetic
SEKDEVTRRIRELLKEAEETNREAIERIKRLLDRVREAVEEVAKRSEELLRRLKKVLDRGLQDDEALLKLLIDALREHNRLSTELIKILIDVLRTILKIIKDVLATNIEIARRILDLVRRLAERGGLDDRLVKEVEKLVRTAERLHRDALRKVKRLVEELEKRLRELVKTDHDLVRRLETLLRRGSGSKERDHMVLHEYVNAAGITIRELLKEIEKIVKEIIELLERLNDELRKIIEAILETTKK

SEQ ID NO: 1053 - protein, 247 aa, Artificial Sequence
  Synthetic
DEERLAEELERVLDRNRKLLEEALRELRRVIEENRKSVKRLLDELKRVLDELLKVLRELSRGDSDEELRKVIEDLIRKLTKVLDKVRSLVEENIERLARVLEKLERLARENLEDLKKVLDDVDKKLKDRRLVERLAELVRELIEVNKEILEMLKEIVRELLEINRTLLERLKDLVATALEIIKLLARGDGRDHMVLHEYVNAAGITRKLLEDYERAVRRLEDKLRRVRERYEAVLKRIKDKLEETKR

SEQ ID NO: 1054 - protein, 243 aa, Artificial Sequence
  Synthetic
SRVEELKKLIEDILRISREVVERIARVAEDIHRINRRVLDDLRKLIEDILRTVEEILARKVSGTEAAEALRDTIRRVVDEIRKLLEEHEKRSAELLEEIRKLLEDILRRSERAVEEIRELLKKGVSTKDVLRIIEEILREHLELLERVVRRIEEILRELLKTIEEIVKRIKEILEELKEVLKRGSVGDDERDHMVLHEYVNAAGITEEYRRLLEEIKRKLEEILRRVEELHRRLRRKLEEIDR

SEQ ID NO: 1055 - protein, 249 aa, Artificial Sequence
  Synthetic
DAEEVVKRLADVLRENDETIRKVVEDLVRIAEENDRLWKKLVEDIAEILRRIVELLRRGGVPEELLDRLAKVVKSIVEKAEKILERLNRVSKAIAEKLKTIVDELNEVSKEIVKRAEDILRKGKDKETVLRALRTLVKEYADLSKEVLERVERIVREYVKLSDEVVKSLAEIVEELIRIIEDLLRKGNLDRDHMVLHEYVNAAGITLLEDVKKASEDIVREVERIVRELAKRSDEILKKLEDIVEKLRE

SEQ ID NO: 1056 - protein, 249 aa, Artificial Sequence; identical to SEQ ID NO: 1055
  Synthetic

SEQ ID NO: 1057 - protein, 243 aa, Artificial Sequence
  Synthetic
DEEETLRRLLERKVELAKEYLDVSKEVIDRTTKLLDEYLKTSKRIVDATVELLERGDLGPDELIKRLAEELERSLRELEEEIKRLKRELEESLKKLKEIIDRLAEEAEKLLAVLKRGEGSEEEALRALASLVRELIEVLRENDERLRDVLRRLIEALRKNNEILERVLRKLVRAAEERGRDESSREALEERDHMVLHEYVNAAGITKDLEAKLEKLLRDLNELTKALEEELKRLLDELKKRTD

SEQ ID NO: 1058 - protein, 243 aa, Artificial Sequence; identical to SEQ ID NO: 1057
  Synthetic

SEQ ID NO: 1059 - protein, 243 aa, Artificial Sequence
  Synthetic
SEAERTKESLKKVLKALVDLNRELLRKLEENMRELTKLNEEVKRALKEVLDKVREGGIVDKDAEREAERLMRELDKSSEDTARETRKLIEESKKSTRRTEEEARKLTETLDRLAKGGLPREDLLRALVRLLEELARLIEEDVRRNAELVKRHIELVERDVAELLRLIKELVDLLADLAEKGSRTEEIRKIRDHMVLHEYVNAAGITEEVRKSKDKLRSILEDYKRKVDELKERLRELIEEVET

SEQ ID NO: 1060 - protein, 243 aa, Artificial Sequence; identical to SEQ ID NO: 1059
  Synthetic

SEQ ID NO: 1061 - protein, 241 aa, Artificial Sequence
  Synthetic
SADEALEELVRRLLEVLKTVLERTKELSRDDLRVVKEVLRIIEELVKRLLKVIRDGLDDADRVLEEVERVIREAKREVKRWEEVVRKVVEDSRRLIERVLAEVEEVIKEAKRLLDERKSGGSREVIEELLSLLREIVRHHKEVSDEHLKLSAELVKRILDVVEETLRLATEIVRRIKEGGNSEDVRRDIERDHMVLHEYVNAAGITIERLLAELEKLNEDVLRENKALLEDLERRVRERKK

SEQ ID NO: 1062 - protein, 245 aa, Artificial Sequence
  Synthetic
TEEEVLRKVEKLIKDLLDVLRDLLRASEEVVREALRVLEELIEENKRVIEELSRALSGGSRESVESALAKNEERLKKILEDADRVLDKWRRLLEELSKKAKAVLDEVRKRLEEIKREVPETEKLRTLLTILEEILRALEKIIRDILRINERLLEKLKRILERLRETNREIDERIRKLVEEARGGSEEKLRRRDHMVLHEYVNAAGITRRELEKLLRDYKRELEEIERALEEIEKTLKRRADETRR

SEQ ID NO: 1063 - protein, 245 aa, Artificial Sequence; identical to SEQ ID NO: 1062
  Synthetic

SEQ ID NO: 1064 - protein, 244 aa, Artificial Sequence
  Synthetic
SAEETLRRITEESKRVLEEITKKYEDLERESREVLRKLREDLDRIKRELEDVLTKGGDDKDEVLTVLEKVLDELLKLHRENLRVIKELLRKVLEVDRENLEVLKRLLEKARDLLRRSGRDEKDLKKLEDELRKVKEELEKKHEASKRDIEDLERELDKVTEEVERLLRKLKEELRRAAEGSDEDRERLARLRDHMVLHEYVNAAGITKINEELNRKIIKFARENLERNRRVNKKVIEVLREAAR

SEQ ID NO: 1065 - protein, 250 aa, Artificial Sequence
  Synthetic
STEEILKRVKEILDELAKELRDIIRESLRTIEELLDELRRILEESERTLEELVKTIKDGVKDSEELLRRLKRLLEDLRRAHEELLKRLKEAVDEHRDRLRKILEELERVLKELRKRIEELRRSGDRISEKDVLRKLEEVLRKALEILERLLKKIRESARELLKIIEEVLDANIKVMEEALKTIKELLKDGPRDHMVLHEYVNAAGITRYEELRRRLRKRVKDYEDKLREIEKKVRRDAERIEEELERAKK

SEQ ID NO: 1066 - protein, 247 aa, Artificial Sequence
  Synthetic
SEKEELLKLIKRVIELLKRVLEEHLRLVEDVIRRLKELLDSNEKIVREVIEDLKRLLDEVRGDKEELDRIKEKLEEVLERYKRRLEEIKRDLERMLEDYKRELKRIEEDLRRVLEEVERIATRGEGPAEALIDKLRKILERALRELDKLSKKLDELLKKVLEELEKSNREIDKLLKDVLRRVEEGGASEDLRDHMVLHEYVNAAGITRNLEDVRRVIEDVKRKSARILEEARRLIEEVERELEKIRK

SEQ ID NO: 1067 - protein, 247 aa, Artificial Sequence; identical to SEQ ID NO: 1066
  Synthetic

SEQ ID NO: 1068 - protein, 242 aa, Artificial Sequence
  Synthetic
SEKERLMRLLDKLKDLNRRLVERIKELLDKALELHKKLVKELRELLERLKELVERGGVPEELLTRIDELIKKLEDEARKISKEVKRLIDELKKRLEDIHREVDRLIRELKETLKGVTDKDELLRRVAEVLERIARLSEELIREVKEVLEKIVELSRELLKRVLDVLRRIAELLEDALRKGNVSEETVRRLRRDHMVLHEYVNAAGITAEREYKKLKDELEELTERYRREIRKLKEELKADRK

SEQ ID NO: 1069 - protein, 242 aa, Artificial Sequence; identical to SEQ ID NO: 1068
  Synthetic

SEQ ID NO: 1070 - protein, 247 aa, Artificial Sequence
  Synthetic
SEAEDLEELIKELAELLKDVIRKLEKINRRLVKILEDIIRRLKEISKEAEEELRKGTVEDKDILRDLERRLREILEESDRLLEELKRRLEEILRKSKELLRRLEEVLREILKRAEEVKRSNLPKEELIKEIVKLLEELLRVIEKILEDNIRLLEELVEVIKEILEKHLRLLEELVRVIERILREVGKDKDERDHMVLHEYVNAAGITEEHEEVKRRLEEELTRLRETHKKIEKELREALKRVRDRST

SEQ ID NO: 1071 - protein, 247 aa, Artificial Sequence; identical to SEQ ID NO: 1070
  Synthetic

SEQ ID NO: 1072 - protein, 248 aa, Artificial Sequence
  Synthetic
DEDRIIEEIARLLEELLRELLELIKKLIETNRRLNEEHERAVRELARLLEELLDRLVKKGISDEKLKRIRERLKRALDDLERLHREINKRLEDLVRELEKLVREILKELKDALEELRRASARAGGEEVLRRLEEIVKKLLDLVRRILERLKEIHKDNVRLLRELNERLTRIVEDLVRLIREILREAGVDEKRDHMVLHEYVNAAGITKRLHEDLERKLKESEDELREIEARLEEKIRRLEEKLERKRR

SEQ ID NO: 1073 - protein, 248 aa, Artificial Sequence; identical to SEQ ID NO: 1072
  Synthetic

SEQ ID NO: 1074 - protein, 251 aa, Artificial Sequence
  Synthetic
DEEEKIRTTLDLLRKLLKVLREILEELIRSNKELNERLLRLVEDSDRLLEELLKKLADDGGVDEEALRRIKKRLEDLIRTNREIEERIDRESERLAEELRRILRELEKELRRLIEDLKEVLKRGLPREELLRRLKKVVEDVLRILEEVLRVVDELDKENVRLLREWLERNKEIVEEVIRILEDLIRKGGSERDHMVLHEYVNAAGITEKHAEIAKELERLLRENRRRLEELAREAKKVLDELRKRLEDERR

SEQ ID NO: 1075 - protein, 246 aa, Artificial Sequence
  Synthetic
KEIEETLKELEDLNREMVETNRRVLEETRRLNKETVDRVKATLDELAKMLKKLVDDVRKGPTSEELKRLLAELEELLARVVRRVEELLKKSTDLLERAVKDSADALRRSHEVLKEVASRVKRAKDEGLPREEVLRLLRELLERHAKVLKDIVRVSEKLLREHLKVLREIVEVLEELLERILKVILDTTGGDRDHMVLHEYVNAAGITLKEVIDRYEDELRKLRKEYKEKIDKYERKLEEIERRERT

SEQ ID NO: 1076 - protein, 245 aa, Artificial Sequence
  Synthetic
DEDELIRKLLEDLKDIVRKILELIERDLRDIERVVRRIVKVIRDDLKKIKEVVDDIARGVPRTEELERVIKRIEELLRTSEEELDRILKEIEELLRESRRRLEEVVSAVEELLRRVEEIVDKGRESKEDVIKLLREVVDDILRLVEEVVRTNLEIIKRILELIERVIRLNLSIIRDILRLLEGTVDSELADRDHMVLHEYVNAAGITLEDVKRAITELRKNSKDILEEVRKLIDELRKRIKEVED

SEQ ID NO: 1077 - protein, 247 aa, Artificial Sequence
  Synthetic
RDRDVLRKVKAEIEELVARIEKVSRDALSEVKRLLDENRKIAEDVLRLIESLLRKIRDTRGDDEVVKETEEVLRDNHRLLEELIRRLIKVLEEWLRRHKKLLDEIRELLKEILRLVKESGVSEDLLRRLKRVIEELDKKLKESEEKLRRVVEKAKEDLKAVLEEHRKVLEDLKRALEEVREKLRERGSEEVRDHMVLHEYVNAAGITRVHDDLSRAVEKVVRDVVRVDKELLDELARILRRLEEVIT

SEQ ID NO: 1078 - protein, 243 aa, Artificial Sequence
  Synthetic
SEAERLADEVRKAVKKSEEDNETLVREVEKAVRELKKNNKTWVDEVRKLMKRLVDLLRDGQVSDRDLLKELEEVLRRVLEALAENHERTEEILKRWLDRYAEDIERLRKVLKEVIEALKRGGSDDKRIVDELEEILRRNEDVLDKIAKRLRRLLEEDRRLLERIVRELKRLLDDLDRITKEGKSEELVRIARDHMVLHEYVNAAGITLNNEILERLLKIVRELHKDNIKILEDLLRIIEEVLR

SEQ ID NO: 1079 - protein, 243 aa, Artificial Sequence; identical to SEQ ID NO: 1078
  Synthetic

SEQ ID NO: 1080 - protein, 245 aa, Artificial Sequence
  Synthetic
SEKDEVTRRIRELLKEAEETNREAIERIKRLLDRVREAVEEVAKRSEELLRRLKKVLDRGLQDDEALLKLLIDALREHNRLSTELIKILIDVLRTILKIIKDVLATNIEIARRILDLVRRLAERGGLDDRLVKEVEKLVRTAERLHRDALRKVKRLVEELEKRLRELVKTDHDLVRRLETLLRRGSGSKEDRDHMVLHEYVNAAGITRELLKEIEKIVKEIIELLERLNDELRKIIEAILETTKK

SEQ ID NO: 1081 - protein, 247 aa, Artificial Sequence
  Synthetic
DEERLAEELERVLDRNRKLLEEALRELRRVIEENRKSVKRLLDELKRVLDELLKVLRELSRGDSDEELRKVIEDLIRKLTKVLDKVRSLVEENIERLARVLEKLERLARENLEDLKKVLDDVDKKLKDRRLVERLAELVRELIEVNKEILEMLKEIVRELLEINRTLLERLKDLVATALEIIKLLARGDGTRDHMVLHEYVNAAGITKLLEDYERAVRRLEDKLRRVRERYEAVLKRIKDKLEETKR

SEQ ID NO: 1082 - protein, 247 aa, Artificial Sequence; identical to SEQ ID NO: 1081
  Synthetic

SEQ ID NO: 1083 - protein, 243 aa, Artificial Sequence
  Synthetic
SRVEELKKLIEDILRISREVVERIARVAEDIHRINRRVLDDLRKLIEDILRTVEEILARKVSGTEAAEALRDTIRRVVDEIRKLLEEHEKRSAELLEEIRKLLEDILRRSERAVEEIRELLKKGVSTKDVLRIIEEILREHLELLERVVRRIEEILRELLKTIEEIVKRIKEILEELKEVLKRGSVGDDEVRDHMVLHEYVNAAGITEYRRLLEEIKRKLEEILRRVEELHRRLRRKLEEIDR

SEQ ID NO: 1084 - protein, 249 aa, Artificial Sequence
  Synthetic
DAEEVVKRLADVLRENDETIRKVVEDLVRIAEENDRLWKKLVEDIAEILRRIVELLRRGGVPEELLDRLAKVVKSIVEKAEKILERLNRVSKAIAEKLKTIVDELNEVSKEIVKRAEDILRKGKDKETVLRALRTLVKEYADLSKEVLERVERIVREYVKLSDEVVKSLAEIVEELIRIIEDLLRKGNLDERDHMVLHEYVNAAGITLEDVKKASEDIVREVERIVRELAKRSDEILKKLEDIVEKLRE

SEQ ID NO: 1085 - protein, 249 aa, Artificial Sequence; identical to SEQ ID NO: 1084
  Synthetic

SEQ ID NO: 1086 - protein, 243 aa, Artificial Sequence
  Synthetic
DEEETLRRLLERKVELAKEYLDVSKEVIDRTTKLLDEYLKTSKRIVDATVELLERGDLGPDELIKRLAEELERSLRELEEEIKRLKRELEESLKKLKEIIDRLAEEAEKLLAVLKRGEGSEEEALRALASLVRELIEVLRENDERLRDVLRRLIEALRKNNEILERVLRKLVRAAEERGRDESSREALEEARDHMVLHEYVNAAGITDLEAKLEKLLRDLNELTKALEEELKRLLDELKKRTD

SEQ ID NO: 1087 - protein, 243 aa, Artificial Sequence; identical to SEQ ID NO: 1086
  Synthetic

SEQ ID NO: 1088 - protein, 245 aa, Artificial Sequence
  Synthetic
TEEEVLRKVEKLIKDLLDVLRDLLRASEEVVREALRVLEELIEENKRVIEELSRALSGGSRESVESALAKNEERLKKILEDADRVLDKWRRLLEELSKKAKAVLDEVRKRLEEIKREVPETEKLRTLLTILEEILRALEKIIRDILRINERLLEKLKRILERLRETNREIDERIRKLVEEARGGSEEKLRRDRDHMVLHEYVNAAGITRELEKLLRDYKRELEEIERALEEIEKTLKRRADETRR

SEQ ID NO: 1089 - protein, 245 aa, Artificial Sequence; identical to SEQ ID NO: 1088
  Synthetic

SEQ ID NO: 1090 - protein, 244 aa, Artificial Sequence
  Synthetic
SAEETLRRITEESKRVLEEITKKYEDLERESREVLRKLREDLDRIKRELEDVLTKGGDDKDEVLTVLEKVLDELLKLHRENLRVIKELLRKVLEVDRENLEVLKRLLEKARDLLRRSGRDEKDLKKLEDELRKVKEELEKKHEASKRDIEDLERELDKVTEEVERLLRKLKEELRRAAEGSDEDRERLARLLRDHMVLHEYVNAAGITINEELNRKIIKFARENLERNRRVNKKVIEVLREAAR

SEQ ID NO: 1091 - protein, 250 aa, Artificial Sequence
  Synthetic
STEEILKRVKEILDELAKELRDIIRESLRTIEELLDELRRILEESERTLEELVKTIKDGVKDSEELLRRLKRLLEDLRRAHEELLKRLKEAVDEHRDRLRKILEELERVLKELRKRIEELRRSGDRISEKDVLRKLEEVLRKALEILERLLKKIRESARELLKIIEEVLDANIKVMEEALKTIKELLKDGPDRDHMVLHEYVNAAGITYEELRRRLRKRVKDYEDKLREIEKKVRRDAERIEEELERAKK

SEQ ID NO: 1092 - protein, 250 aa, Artificial Sequence; identical to SEQ ID NO: 1091
  Synthetic

SEQ ID NO: 1093 - protein, 247 aa, Artificial Sequence
  Synthetic
SEKEELLKLIKRVIELLKRVLEEHLRLVEDVIRRLKELLDSNEKIVREVIEDLKRLLDEVRGDKEELDRIKEKLEEVLERYKRRLEEIKRDLERMLEDYKRELKRIEEDLRRVLEEVERIATRGEGPAEALIDKLRKILERALRELDKLSKKLDELLKKVLEELEKSNREIDKLLKDVLRRVEEGGASEDLLRDHMVLHEYVNAAGITNLEDVRRVIEDVKRKSARILEEARRLIEEVERELEKIRK

SEQ ID NO: 1094 - protein, 247 aa, Artificial Sequence; identical to SEQ ID NO: 1093
  Synthetic

SEQ ID NO: 1095 - protein, 247 aa, Artificial Sequence
  Synthetic
SEAEDLEELIKELAELLKDVIRKLEKINRRLVKILEDIIRRLKEISKEAEEELRKGTVEDKDILRDLERRLREILEESDRLLEELKRRLEEILRKSKELLRRLEEVLREILKRAEEVKRSNLPKEELIKEIVKLLEELLRVIEKILEDNIRLLEELVEVIKEILEKHLRLLEELVRVIERILREVGKDKDEARDHMVLHEYVNAAGITEHEEVKRRLEEELTRLRETHKKIEKELREALKRVRDRST

SEQ ID NO: 1096 - protein, 247 aa, Artificial Sequence; identical to SEQ ID NO: 1095
  Synthetic

SEQ ID NO: 1097 - protein, 248 aa, Artificial Sequence
  Synthetic
DEDRIIEEIARLLEELLRELLELIKKLIETNRRLNEEHERAVRELARLLEELLDRLVKKGISDEKLKRIRERLKRALDDLERLHREINKRLEDLVRELEKLVREILKELKDALEELRRASARAGGEEVLRRLEEIVKKLLDLVRRILERLKEIHKDNVRLLRELNERLTRIVEDLVRLIREILREAGVDEKIRDHMVLHEYVNAAGITRLHEDLERKLKESEDELREIEARLEEKIRRLEEKLERKRR

SEQ ID NO: 1098 - protein, 251 aa, Artificial Sequence
  Synthetic
DEEEKIRTTLDLLRKLLKVLREILEELIRSNKELNERLLRLVEDSDRLLEELLKKLADDGGVDEEALRRIKKRLEDLIRTNREIEERIDRESERLAEELRRILRELEKELRRLIEDLKEVLKRGLPREELLRRLKKVVEDVLRILEEVLRVVDELDKENVRLLREWLERNKEIVEEVIRILEDLIRKGGSESRDHMVLHEYVNAAGITKHAEIAKELERLLRENRRRLEELAREAKKVLDELRKRLEDERR

SEQ ID NO: 1099 - protein, 247 aa, Artificial Sequence
  Synthetic
SKAEKLLKDLREALEKVKRRYEELERRLDEVLKEHEEIVKRLLEELEKVLKRIEEGGLPEEELEKLKKLAEKVKELLRELLRLSKELVDRVRELLKRDLDLVRRLVEIALKVLREAREQPNDEKRVEKIKRDLEKKARRVREENERIKRDLKRTADESRKRLEKLLEDLKRELDRLREDLDRGRKDIDERVERDHMVLHEYVNAAGITVIKSHEKLVRTIERLIEESIRVNEELLEVIERLLDRARK

SEQ ID NO: 1100 - protein, 243 aa, Artificial Sequence
  Synthetic
DLERVVEDIVDKAKRLLDKNLEVLKRIVDEVLRLLERLLRESRKVVKRVKEIIEELVRDEKELRRVKRALEEVLRRHEEIAKELKERLRKVAKEAEEKHKKLVEDLKRVVDEVRKKLSGPLDREKVLEVLDELVTIIAKLLDENIKVLEEVIRVIAELLERLLDSHRRLIDIIAKLLEGLRPGDEDLLTELERDHMVLHEYVNAAGITLKKELERIKREVKRLIEENARTLADIKRAVDEARK

SEQ ID NO: 1101 - protein, 246 aa, Artificial Sequence
  Synthetic
KEIEETLKELEDLNREMVETNRRVLEETRRLNKETVDRVKATLDELAKMLKKLVDDVRKGPTSEELKRLLAELEELLARVVRRVEELLKKSTDLLERAVKDSADALRRSHEVLKEVASRVKRAKDEGLPREEVLRLLRELLERHAKVLKDIVRVSEKLLREHLKVLREIVEVLEELLERILKVILDTTGGDKRDHMVLHEYVNAAGITKEVIDRYEDELRKLRKEYKEKIDKYERKLEEIERRERT

SEQ ID NO: 1102 - protein, 246 aa, Artificial Sequence
  Synthetic
SEREELLERIKEILKRVKDKLDEDLKRLKEILEKLKEKADRDLEELRRRIEEVREKLERTGRTDELVKEVLDTVRRNLENLKRLVEDILRKLEENVKNLTDLVREILKLITELIKRLEDGGLPKEVLDALRRVLEKLEELLREILERLKRSLEAVKRKIEELLKELERSLDELRRALERIRKEIGDSETAVRRDHMVLHEYVNAAGITLEELLKVLAEHLETVRELIERLKRVLEEAIEVVERVAR

SEQ ID NO: 1103 - protein, 252 aa, Artificial Sequence
  Synthetic
SLEEITKRLLELVEENLARHEEILRELLELAKRLAKEDRDILEEVLKLIEELLKLLEDNGSSEEDLKRLLKEVIEELRAVVKRVKDKWDEVVKRIEDLVKKLKELHDDTLRKLRELVRKIVTDISESGGEAEKVKRVVEKILELVERLAKVVKESVEKLLEILRELAEVSKRVAEALLRLLEELVRVIRIKDRDHMVLHEYVNAAGITRLLDELEEVHKRVKKELEDIIEENRRVVKRVRDELREIKRELDE

SEQ ID NO: 1104 - protein, 243 aa, Artificial Sequence
  Synthetic
SEAERLADEVRKAVKKSEEDNETLVREVEKAVRELKKNNKTWVDEVRKLMKRLVDLLRDGQVSDRDLLKELEEVLRRVLEALAENHERTEEILKRWLDRYAEDIERLRKVLKEVIEALKRGGSDDKRIVDELEEILRRNEDVLDKIAKRLRRLLEEDRRLLERIVRELKRLLDDLDRITKEGKSEELVRIAIRDHMVLHEYVNAAGITNNEILERLLKIVRELHKDNIKILEDLLRIIEEVLR

SEQ ID NO: 1105 - protein, 243 aa, Artificial Sequence; identical to SEQ ID NO: 1104
  Synthetic

SEQ ID NO: 1106 - protein, 243 aa, Artificial Sequence
  Synthetic
SRVEELKKLIEDILRISREVVERIARVAEDIHRINRRVLDDLRKLIEDILRTVEEILARKVSGTEAAEALRDTIRRVVDEIRKLLEEHEKRSAELLEEIRKLLEDILRRSERAVEEIRELLKKGVSTKDVLRIIEEILREHLELLERVVRRIEEILRELLKTIEEIVKRIKEILEELKEVLKRGSVGDDEVERDHMVLHEYVNAAGITYRRLLEEIKRKLEEILRRVEELHRRLRRKLEEIDR

SEQ ID NO: 1107 - protein, 249 aa, Artificial Sequence
  Synthetic
DAEEVVKRLADVLRENDETIRKVVEDLVRIAEENDRLWKKLVEDIAEILRRIVELLRRGGVPEELLDRLAKVVKSIVEKAEKILERLNRVSKAIAEKLKTIVDELNEVSKEIVKRAEDILRKGKDKETVLRALRTLVKEYADLSKEVLERVERIVREYVKLSDEVVKSLAEIVEELIRIIEDLLRKGNLDEDRDHMVLHEYVNAAGITEDVKKASEDIVREVERIVRELAKRSDEILKKLEDIVEKLRE

SEQ ID NO: 1108 - protein, 249 aa, Artificial Sequence; identical to SEQ ID NO: 1107
  Synthetic

SEQ ID NO: 1109 - protein, 243 aa, Artificial Sequence
  Synthetic
DEEETLRRLLERKVELAKEYLDVSKEVIDRTTKLLDEYLKTSKRIVDATVELLERGDLGPDELIKRLAEELERSLRELEEEIKRLKRELEESLKKLKEIIDRLAEEAEKLLAVLKRGEGSEEEALRALASLVRELIEVLRENDERLRDVLRRLIEALRKNNEILERVLRKLVRAAEERGRDESSREALEEARRDHMVLHEYVNAAGITLEAKLEKLLRDLNELTKALEEELKRLLDELKKRTD

SEQ ID NO: 1110 - protein, 243 aa, Artificial Sequence; identical to SEQ ID NO: 1109
  Synthetic

SEQ ID NO: 1111 - protein, 245 aa, Artificial Sequence
  Synthetic
TEEEVLRKVEKLIKDLLDVLRDLLRASEEVVREALRVLEELIEENKRVIEELSRALSGGSRESVESALAKNEERLKKILEDADRVLDKWRRLLEELSKKAKAVLDEVRKRLEEIKREVPETEKLRTLLTILEEILRALEKIIRDILRINERLLEKLKRILERLRETNREIDERIRKLVEEARGGSEEKLRRDLRDHMVLHEYVNAAGITELEKLLRDYKRELEEIERALEEIEKTLKRRADETRR

SEQ ID NO: 1112 - protein, 244 aa, Artificial Sequence
  Synthetic
SAEETLRRITEESKRVLEEITKKYEDLERESREVLRKLREDLDRIKRELEDVLTKGGDDKDEVLTVLEKVLDELLKLHRENLRVIKELLRKVLEVDRENLEVLKRLLEKARDLLRRSGRDEKDLKKLEDELRKVKEELEKKHEASKRDIEDLERELDKVTEEVERLLRKLKEELRRAAEGSDEDRERLARLLKRDHMVLHEYVNAAGITNEELNRKIIKFARENLERNRRVNKKVIEVLREAAR

SEQ ID NO: 1113 - protein, 250 aa, Artificial Sequence
  Synthetic
STEEILKRVKEILDELAKELRDIIRESLRTIEELLDELRRILEESERTLEELVKTIKDGVKDSEELLRRLKRLLEDLRRAHEELLKRLKEAVDEHRDRLRKILEELERVLKELRKRIEELRRSGDRISEKDVLRKLEEVLRKALEILERLLKKIRESARELLKIIEEVLDANIKVMEEALKTIKELLKDGPDERDHMVLHEYVNAAGITEELRRRLRKRVKDYEDKLREIEKKVRRDAERIEEELERAKK

SEQ ID NO: 1114 - protein, 247 aa, Artificial Sequence
  Synthetic
SEAEDLEELIKELAELLKDVIRKLEKINRRLVKILEDIIRRLKEISKEAEEELRKGTVEDKDILRDLERRLREILEESDRLLEELKRRLEEILRKSKELLRRLEEVLREILKRAEEVKRSNLPKEELIKEIVKLLEELLRVIEKILEDNIRLLEELVEVIKEILEKHLRLLEELVRVIERILREVGKDKDEAERDHMVLHEYVNAAGITHEEVKRRLEEELTRLRETHKKIEKELREALKRVRDRST

SEQ ID NO: 1115 - protein, 247 aa, Artificial Sequence; identical to SEQ ID NO: 1114
  Synthetic

SEQ ID NO: 1116 - protein, 248 aa, Artificial Sequence
  Synthetic
DEDRIIEEIARLLEELLRELLELIKKLIETNRRLNEEHERAVRELARLLEELLDRLVKKGISDEKLKRIRERLKRALDDLERLHREINKRLEDLVRELEKLVREILKELKDALEELRRASARAGGEEVLRRLEEIVKKLLDLVRRILERLKEIHKDNVRLLRELNERLTRIVEDLVRLIREILREAGVDEKIARDHMVLHEYVNAAGITLHEDLERKLKESEDELREIEARLEEKIRRLEEKLERKRR

SEQ ID NO: 1117 - protein, 251 aa, Artificial Sequence
  Synthetic
DEEEKIRTTLDLLRKLLKVLREILEELIRSNKELNERLLRLVEDSDRLLEELLKKLADDGGVDEEALRRIKKRLEDLIRTNREIEERIDRESERLAEELRRILRELEKELRRLIEDLKEVLKRGLPREELLRRLKKVVEDVLRILEEVLRVVDELDKENVRLLREWLERNKEIVEEVIRILEDLIRKGGSESERDHMVLHEYVNAAGITHAEIAKELERLLRENRRRLEELAREAKKVLDELRKRLEDERR

SEQ ID NO: 1118 - protein, 246 aa, Artificial Sequence
  Synthetic
KEIEETLKELEDLNREMVETNRRVLEETRRLNKETVDRVKATLDELAKMLKKLVDDVRKGPTSEELKRLLAELEELLARVVRRVEELLKKSTDLLERAVKDSADALRRSHEVLKEVASRVKRAKDEGLPREEVLRLLRELLERHAKVLKDIVRVSEKLLREHLKVLREIVEVLEELLERILKVILDTTGGDKARDHMVLHEYVNAAGITEVIDRYEDELRKLRKEYKEKIDKYERKLEEIERRERT

SEQ ID NO: 1119 - protein, 247 aa, Artificial Sequence
  Synthetic
RDRDVLRKVKAEIEELVARIEKVSRDALSEVKRLLDENRKIAEDVLRLIESLLRKIRDTRGDDEVVKETEEVLRDNHRLLEELIRRLIKVLEEWLRRHKKLLDEIRELLKEILRLVKESGVSEDLLRRLKRVIEELDKKLKESEEKLRRVVEKAKEDLKAVLEEHRKVLEDLKRALEEVREKLRERGSEEVVERDHMVLHEYVNAAGITHDDLSRAVEKVVRDVVRVDKELLDELARILRRLEEVIT

SEQ ID NO: 1120 - protein, 246 aa, Artificial Sequence
  Synthetic
SEREELLERIKEILKRVKDKLDEDLKRLKEILEKLKEKADRDLEELRRRIEEVREKLERTGRTDELVKEVLDTVRRNLENLKRLVEDILRKLEENVKNLTDLVREILKLITELIKRLEDGGLPKEVLDALRRVLEKLEELLREILERLKRSLEAVKRKIEELLKELERSLDELRRALERIRKEIGDSETAVRARDHMVLHEYVNAAGITEELLKVLAEHLETVRELIERLKRVLEEAIEVVERVAR

SEQ ID NO: 1121 - protein, 252 aa, Artificial Sequence
  Synthetic
SLEEITKRLLELVEENLARHEEILRELLELAKRLAKEDRDILEEVLKLIEELLKLLEDNGSSEEDLKRLLKEVIEELRAVVKRVKDKWDEVVKRIEDLVKKLKELHDDTLRKLRELVRKIVTDISESGGEAEKVKRVVEKILELVERLAKVVKESVEKLLEILRELAEVSKRVAEALLRLLEELVRVIRIKDERDHMVLHEYVNAAGITLLDELEEVHKRVKKELEDIIEENRRVVKRVRDELREIKRELDE

SEQ ID NO: 1122 - protein, 249 aa, Artificial Sequence
  Synthetic
DAEEVVKRLADVLRENDETIRKVVEDLVRIAEENDRLWKKLVEDIAEILRRIVELLRRGGVPEELLDRLAKVVKSIVEKAEKILERLNRVSKAIAEKLKTIVDELNEVSKEIVKRAEDILRKGKDKETVLRALRTLVKEYADLSKEVLERVERIVREYVKLSDEVVKSLAEIVEELIRIIEDLLRKGNLDEDVRDHMVLHEYVNAAGITDVKKASEDIVREVERIVRELAKRSDEILKKLEDIVEKLRE

SEQ ID NO: 1123 - protein, 249 aa, Artificial Sequence; identical to SEQ ID NO: 1122
  Synthetic

SEQ ID NO: 1124 - protein, 245 aa, Artificial Sequence
  Synthetic
TEEEVLRKVEKLIKDLLDVLRDLLRASEEVVREALRVLEELIEENKRVIEELSRALSGGSRESVESALAKNEERLKKILEDADRVLDKWRRLLEELSKKAKAVLDEVRKRLEEIKREVPETEKLRTLLTILEEILRALEKIIRDILRINERLLEKLKRILERLRETNREIDERIRKLVEEARGGSEEKLRRDLTRDHMVLHEYVNAAGITLEKLLRDYKRELEEIERALEEIEKTLKRRADETRR

SEQ ID NO: 1125 - protein, 245 aa, Artificial Sequence; identical to SEQ ID NO: 1124
  Synthetic

SEQ ID NO: 1126 - protein, 250 aa, Artificial Sequence
  Synthetic
STEEILKRVKEILDELAKELRDIIRESLRTIEELLDELRRILEESERTLEELVKTIKDGVKDSEELLRRLKRLLEDLRRAHEELLKRLKEAVDEHRDRLRKILEELERVLKELRKRIEELRRSGDRISEKDVLRKLEEVLRKALEILERLLKKIRESARELLKIIEEVLDANIKVMEEALKTIKELLKDGPDEVRDHMVLHEYVNAAGITELRRRLRKRVKDYEDKLREIEKKVRRDAERIEEELERAKK

SEQ ID NO: 1127 - protein, 250 aa, Artificial Sequence; identical to SEQ ID NO: 1126
  Synthetic

SEQ ID NO: 1128 - protein, 247 aa, Artificial Sequence
  Synthetic
SEKEELLKLIKRVIELLKRVLEEHLRLVEDVIRRLKELLDSNEKIVREVIEDLKRLLDEVRGDKEELDRIKEKLEEVLERYKRRLEEIKRDLERMLEDYKRELKRIEEDLRRVLEEVERIATRGEGPAEALIDKLRKILERALRELDKLSKKLDELLKKVLEELEKSNREIDKLLKDVLRRVEEGGASEDLLRKRDHMVLHEYVNAAGITEDVRRVIEDVKRKSARILEEARRLIEEVERELEKIRK

SEQ ID NO: 1129 - protein, 247 aa, Artificial Sequence
  Synthetic
SEAEDLEELIKELAELLKDVIRKLEKINRRLVKILEDIIRRLKEISKEAEEELRKGTVEDKDILRDLERRLREILEESDRLLEELKRRLEEILRKSKELLRRLEEVLREILKRAEEVKRSNLPKEELIKEIVKLLEELLRVIEKILEDNIRLLEELVEVIKEILEKHLRLLEELVRVIERILREVGKDKDEAERRDHMVLHEYVNAAGITEEVKRRLEEELTRLRETHKKIEKELREALKRVRDRST

SEQ ID NO: 1130 - protein, 247 aa, Artificial Sequence; identical to SEQ ID NO: 1129
  Synthetic

SEQ ID NO: 1131 - protein, 248 aa, Artificial Sequence
  Synthetic
DEDRIIEEIARLLEELLRELLELIKKLIETNRRLNEEHERAVRELARLLEELLDRLVKKGISDEKLKRIRERLKRALDDLERLHREINKRLEDLVRELEKLVREILKELKDALEELRRASARAGGEEVLRRLEEIVKKLLDLVRRILERLKEIHKDNVRLLRELNERLTRIVEDLVRLIREILREAGVDEKIAERDHMVLHEYVNAAGITHEDLERKLKESEDELREIEARLEEKIRRLEEKLERKRR

SEQ ID NO: 1132 - protein, 251 aa, Artificial Sequence
  Synthetic
DEEEKIRTTLDLLRKLLKVLREILEELIRSNKELNERLLRLVEDSDRLLEELLKKLADDGGVDEEALRRIKKRLEDLIRTNREIEERIDRESERLAEELRRILRELEKELRRLIEDLKEVLKRGLPREELLRRLKKVVEDVLRILEEVLRVVDELDKENVRLLREWLERNKEIVEEVIRILEDLIRKGGSESEERDHMVLHEYVNAAGITAEIAKELERLLRENRRRLEELAREAKKVLDELRKRLEDERR

SEQ ID NO: 1133 - protein, 246 aa, Artificial Sequence
  Synthetic
KEIEETLKELEDLNREMVETNRRVLEETRRLNKETVDRVKATLDELAKMLKKLVDDVRKGPTSEELKRLLAELEELLARVVRRVEELLKKSTDLLERAVKDSADALRRSHEVLKEVASRVKRAKDEGLPREEVLRLLRELLERHAKVLKDIVRVSEKLLREHLKVLREIVEVLEELLERILKVILDTTGGDKAVRDHMVLHEYVNAAGITVIDRYEDELRKLRKEYKEKIDKYERKLEEIERRERT

SEQ ID NO: 1134 - protein, 246 aa, Artificial Sequence
  Synthetic
SREEIVATLEDLARKILEVVKKLAKEIEDAWREIERAVREILKRLEELWREIEDVVRKKVDSRVAEILETVVKRVVDITRRLIEEAERVVRELVDITRKLITILEEVVRRLVEIVREASKIDDRRELEDMLRKIREVVREVIERLKKLDEDVRRVVEEVIRRLEELNKRLEDVIREVKKRLKELGLSEEAVKELRDHMVLHEYVNAAGITEIIDLLRTVIRIHEKIVEDLIKLLEELLRRLEEATR

SEQ ID NO: 1135 - protein, 246 aa, Artificial Sequence
  Synthetic
SEREELLERIKEILKRVKDKLDEDLKRLKEILEKLKEKADRDLEELRRRIEEVREKLERTGRTDELVKEVLDTVRRNLENLKRLVEDILRKLEENVKNLTDLVREILKLITELIKRLEDGGLPKEVLDALRRVLEKLEELLREILERLKRSLEAVKRKIEELLKELERSLDELRRALERIRKEIGDSETAVRAIRDHMVLHEYVNAAGITELLKVLAEHLETVRELIERLKRVLEEAIEVVERVAR

SEQ ID NO: 1136 - protein, 246 aa, Artificial Sequence; identical to SEQ ID NO: 1135
  Synthetic

SEQ ID NO: 1137 - protein, 252 aa, Artificial Sequence
  Synthetic
SLEEITKRLLELVEENLARHEEILRELLELAKRLAKEDRDILEEVLKLIEELLKLLEDNGSSEEDLKRLLKEVIEELRAVVKRVKDKWDEVVKRIEDLVKKLKELHDDTLRKLRELVRKIVTDISESGGEAEKVKRVVEKILELVERLAKVVKESVEKLLEILRELAEVSKRVAEALLRLLEELVRVIRIKDERRDHMVLHEYVNAAGITLDELEEVHKRVKKELEDIIEENRRVVKRVRDELREIKRELDE

SEQ ID NO: 1138 - protein, 247 aa, Artificial Sequence
  Synthetic
DEERLAEELERVLDRNRKLLEEALRELRRVIEENRKSVKRLLDELKRVLDELLKVLRELSRGDSDEELRKVIEDLIRKLTKVLDKVRSLVEENIERLARVLEKLERLARENLEDLKKVLDDVDKKLKDRRLVERLAELVRELIEVNKEILEMLKEIVRELLEINRTLLERLKDLVATALEIIKLLARGDGTEEDRDHMVLHEYVNAAGITEDYERAVRRLEDKLRRVRERYEAVLKRIKDKLEETKR

SEQ ID NO: 1139 - protein, 249 aa, Artificial Sequence
  Synthetic
DAEEVVKRLADVLRENDETIRKVVEDLVRIAEENDRLWKKLVEDIAEILRRIVELLRRGGVPEELLDRLAKVVKSIVEKAEKILERLNRVSKAIAEKLKTIVDELNEVSKEIVKRAEDILRKGKDKETVLRALRTLVKEYADLSKEVLERVERIVREYVKLSDEVVKSLAEIVEELIRIIEDLLRKGNLDEDVKRDHMVLHEYVNAAGITVKKASEDIVREVERIVRELAKRSDEILKKLEDIVEKLRE

SEQ ID NO: 1140 - protein, 249 aa, Artificial Sequence; identical to SEQ ID NO: 1139
  Synthetic

SEQ ID NO: 1141 - protein, 250 aa, Artificial Sequence
  Synthetic
STEEILKRVKEILDELAKELRDIIRESLRTIEELLDELRRILEESERTLEELVKTIKDGVKDSEELLRRLKRLLEDLRRAHEELLKRLKEAVDEHRDRLRKILEELERVLKELRKRIEELRRSGDRISEKDVLRKLEEVLRKALEILERLLKKIRESARELLKIIEEVLDANIKVMEEALKTIKELLKDGPDEVKRDHMVLHEYVNAAGITLRRRLRKRVKDYEDKLREIEKKVRRDAERIEEELERAKK

SEQ ID NO: 1142 - protein, 247 aa, Artificial Sequence
  Synthetic
SEKEELLKLIKRVIELLKRVLEEHLRLVEDVIRRLKELLDSNEKIVREVIEDLKRLLDEVRGDKEELDRIKEKLEEVLERYKRRLEEIKRDLERMLEDYKRELKRIEEDLRRVLEEVERIATRGEGPAEALIDKLRKILERALRELDKLSKKLDELLKKVLEELEKSNREIDKLLKDVLRRVEEGGASEDLLRKARDHMVLHEYVNAAGITDVRRVIEDVKRKSARILEEARRLIEEVERELEKIRK

SEQ ID NO: 1143 - protein, 247 aa, Artificial Sequence; identical to SEQ ID NO: 1142
  Synthetic

SEQ ID NO: 1144 - protein, 247 aa, Artificial Sequence
  Synthetic
SEAEDLEELIKELAELLKDVIRKLEKINRRLVKILEDIIRRLKEISKEAEEELRKGTVEDKDILRDLERRLREILEESDRLLEELKRRLEEILRKSKELLRRLEEVLREILKRAEEVKRSNLPKEELIKEIVKLLEELLRVIEKILEDNIRLLEELVEVIKEILEKHLRLLEELVRVIERILREVGKDKDEAERRRDHMVLHEYVNAAGITEVKRRLEEELTRLRETHKKIEKELREALKRVRDRST

SEQ ID NO: 1145 - protein, 247 aa, Artificial Sequence; identical to SEQ ID NO: 1144
  Synthetic

SEQ ID NO: 1146 - protein, 246 aa, Artificial Sequence
  Synthetic
KEIEETLKELEDLNREMVETNRRVLEETRRLNKETVDRVKATLDELAKMLKKLVDDVRKGPTSEELKRLLAELEELLARVVRRVEELLKKSTDLLERAVKDSADALRRSHEVLKEVASRVKRAKDEGLPREEVLRLLRELLERHAKVLKDIVRVSEKLLREHLKVLREIVEVLEELLERILKVILDTTGGDKAVERDHMVLHEYVNAAGITIDRYEDELRKLRKEYKEKIDKYERKLEEIERRERT

SEQ ID NO: 1147 - protein, 252 aa, Artificial Sequence
  Synthetic
SLEEITKRLLELVEENLARHEEILRELLELAKRLAKEDRDILEEVLKLIEELLKLLEDNGSSEEDLKRLLKEVIEELRAVVKRVKDKWDEVVKRIEDLVKKLKELHDDTLRKLRELVRKIVTDISESGGEAEKVKRVVEKILELVERLAKVVKESVEKLLEILRELAEVSKRVAEALLRLLEELVRVIRIKDERTRDHMVLHEYVNAAGITDELEEVHKRVKKELEDIIEENRRVVKRVRDELREIKRELDE

SEQ ID NO: 1148 - protein, 249 aa, Artificial Sequence
  Synthetic
DAEEVVKRLADVLRENDETIRKVVEDLVRIAEENDRLWKKLVEDIAEILRRIVELLRRGGVPEELLDRLAKVVKSIVEKAEKILERLNRVSKAIAEKLKTIVDELNEVSKEIVKRAEDILRKGKDKETVLRALRTLVKEYADLSKEVLERVERIVREYVKLSDEVVKSLAEIVEELIRIIEDLLRKGNLDEDVKRRDHMVLHEYVNAAGITKKASEDIVREVERIVRELAKRSDEILKKLEDIVEKLRE

SEQ ID NO: 1149 - protein, 249 aa, Artificial Sequence; identical to SEQ ID NO: 1148
  Synthetic

SEQ ID NO: 1150 - protein, 250 aa, Artificial Sequence
  Synthetic
STEEILKRVKEILDELAKELRDIIRESLRTIEELLDELRRILEESERTLEELVKTIKDGVKDSEELLRRLKRLLEDLRRAHEELLKRLKEAVDEHRDRLRKILEELERVLKELRKRIEELRRSGDRISEKDVLRKLEEVLRKALEILERLLKKIRESARELLKIIEEVLDANIKVMEEALKTIKELLKDGPDEVKRRDHMVLHEYVNAAGITRRRLRKRVKDYEDKLREIEKKVRRDAERIEEELERAKK

SEQ ID NO: 1151 - protein, 250 aa, Artificial Sequence; identical to SEQ ID NO: 1150
  Synthetic

SEQ ID NO: 1152 - protein, 247 aa, Artificial Sequence
  Synthetic
SEKEELLKLIKRVIELLKRVLEEHLRLVEDVIRRLKELLDSNEKIVREVIEDLKRLLDEVRGDKEELDRIKEKLEEVLERYKRRLEEIKRDLERMLEDYKRELKRIEEDLRRVLEEVERIATRGEGPAEALIDKLRKILERALRELDKLSKKLDELLKKVLEELEKSNREIDKLLKDVLRRVEEGGASEDLLRKAKRDHMVLHEYVNAAGITVRRVIEDVKRKSARILEEARRLIEEVERELEKIRK

SEQ ID NO: 1153 - protein, 247 aa, Artificial Sequence
  Synthetic
SEAEDLEELIKELAELLKDVIRKLEKINRRLVKILEDIIRRLKEISKEAEEELRKGTVEDKDILRDLERRLREILEESDRLLEELKRRLEEILRKSKELLRRLEEVLREILKRAEEVKRSNLPKEELIKEIVKLLEELLRVIEKILEDNIRLLEELVEVIKEILEKHLRLLEELVRVIERILREVGKDKDEAERRRRDHMVLHEYVNAAGITVKRRLEEELTRLRETHKKIEKELREALKRVRDRST

SEQ ID NO: 1154 - protein, 247 aa, Artificial Sequence; identical to SEQ ID NO: 1153
  Synthetic

SEQ ID NO: 1155 - protein, 248 aa, Artificial Sequence
  Synthetic
DEDRIIEEIARLLEELLRELLELIKKLIETNRRLNEEHERAVRELARLLEELLDRLVKKGISDEKLKRIRERLKRALDDLERLHREINKRLEDLVRELEKLVREILKELKDALEELRRASARAGGEEVLRRLEEIVKKLLDLVRRILERLKEIHKDNVRLLRELNERLTRIVEDLVRLIREILREAGVDEKIAEEIRDHMVLHEYVNAAGITDLERKLKESEDELREIEARLEEKIRRLEEKLERKRR

SEQ ID NO: 1156 - protein, 251 aa, Artificial Sequence
  Synthetic
DEEEKIRTTLDLLRKLLKVLREILEELIRSNKELNERLLRLVEDSDRLLEELLKKLADDGGVDEEALRRIKKRLEDLIRTNREIEERIDRESERLAEELRRILRELEKELRRLIEDLKEVLKRGLPREELLRRLKKVVEDVLRILEEVLRVVDELDKENVRLLREWLERNKEIVEEVIRILEDLIRKGGSESEEKVRDHMVLHEYVNAAGITIAKELERLLRENRRRLEELAREAKKVLDELRKRLEDERR

SEQ ID NO: 1157 - protein, 247 aa, Artificial Sequence
  Synthetic
RDRDVLRKVKAEIEELVARIEKVSRDALSEVKRLLDENRKIAEDVLRLIESLLRKIRDTRGDDEVVKETEEVLRDNHRLLEELIRRLIKVLEEWLRRHKKLLDEIRELLKEILRLVKESGVSEDLLRRLKRVIEELDKKLKESEEKLRRVVEKAKEDLKAVLEEHRKVLEDLKRALEEVREKLRERGSEEVVEELLRDHMVLHEYVNAAGITLSRAVEKVVRDVVRVDKELLDELARILRRLEEVIT

SEQ ID NO: 1158 - protein, 249 aa, Artificial Sequence
  Synthetic
DAEEVVKRLADVLRENDETIRKVVEDLVRIAEENDRLWKKLVEDIAEILRRIVELLRRGGVPEELLDRLAKVVKSIVEKAEKILERLNRVSKAIAEKLKTIVDELNEVSKEIVKRAEDILRKGKDKETVLRALRTLVKEYADLSKEVLERVERIVREYVKLSDEVVKSLAEIVEELIRIIEDLLRKGNLDEDVKRARDHMVLHEYVNAAGITKASEDIVREVERIVRELAKRSDEILKKLEDIVEKLRE

SEQ ID NO: 1159 - protein, 250 aa, Artificial Sequence
  Synthetic
STEEILKRVKEILDELAKELRDIIRESLRTIEELLDELRRILEESERTLEELVKTIKDGVKDSEELLRRLKRLLEDLRRAHEELLKRLKEAVDEHRDRLRKILEELERVLKELRKRIEELRRSGDRISEKDVLRKLEEVLRKALEILERLLKKIRESARELLKIIEEVLDANIKVMEEALKTIKELLKDGPDEVKRRRDHMVLHEYVNAAGITRRLRKRVKDYEDKLREIEKKVRRDAERIEEELERAKK

SEQ ID NO: 1160 - protein, 248 aa, Artificial Sequence
  Synthetic
DEDRIIEEIARLLEELLRELLELIKKLIETNRRLNEEHERAVRELARLLEELLDRLVKKGISDEKLKRIRERLKRALDDLERLHREINKRLEDLVRELEKLVREILKELKDALEELRRASARAGGEEVLRRLEEIVKKLLDLVRRILERLKEIHKDNVRLLRELNERLTRIVEDLVRLIREILREAGVDEKIAEEIERDHMVLHEYVNAAGITLERKLKESEDELREIEARLEEKIRRLEEKLERKRR

SEQ ID NO: 1161 - protein, 248 aa, Artificial Sequence; identical to SEQ ID NO: 1160
  Synthetic

SEQ ID NO: 1162 - protein, 252 aa, Artificial Sequence
  Synthetic
SLEEITKRLLELVEENLARHEEILRELLELAKRLAKEDRDILEEVLKLIEELLKLLEDNGSSEEDLKRLLKEVIEELRAVVKRVKDKWDEVVKRIEDLVKKLKELHDDTLRKLRELVRKIVTDISESGGEAEKVKRVVEKILELVERLAKVVKESVEKLLEILRELAEVSKRVAEALLRLLEELVRVIRIKDERTLRRDHMVLHEYVNAAGITLEEVHKRVKKELEDIIEENRRVVKRVRDELREIKRELDE

SEQ ID NO: 1163 - protein, 249 aa, Artificial Sequence
  Synthetic
DAEEVVKRLADVLRENDETIRKVVEDLVRIAEENDRLWKKLVEDIAEILRRIVELLRRGGVPEELLDRLAKVVKSIVEKAEKILERLNRVSKAIAEKLKTIVDELNEVSKEIVKRAEDILRKGKDKETVLRALRTLVKEYADLSKEVLERVERIVREYVKLSDEVVKSLAEIVEELIRIIEDLLRKGNLDEDVKRALRDHMVLHEYVNAAGITASEDIVREVERIVRELAKRSDEILKKLEDIVEKLRE

SEQ ID NO: 1164 - protein, 249 aa, Artificial Sequence; identical to SEQ ID NO: 1163
  Synthetic

SEQ ID NO: 1165 - protein, 250 aa, Artificial Sequence
  Synthetic
STEEILKRVKEILDELAKELRDIIRESLRTIEELLDELRRILEESERTLEELVKTIKDGVKDSEELLRRLKRLLEDLRRAHEELLKRLKEAVDEHRDRLRKILEELERVLKELRKRIEELRRSGDRISEKDVLRKLEEVLRKALEILERLLKKIRESARELLKIIEEVLDANIKVMEEALKTIKELLKDGPDEVKRRLRDHMVLHEYVNAAGITRLRKRVKDYEDKLREIEKKVRRDAERIEEELERAKK

SEQ ID NO: 1166 - protein, 250 aa, Artificial Sequence; identical to SEQ ID NO: 1165
  Synthetic

SEQ ID NO: 1167 - protein, 251 aa, Artificial Sequence
  Synthetic
DEEEKIRTTLDLLRKLLKVLREILEELIRSNKELNERLLRLVEDSDRLLEELLKKLADDGGVDEEALRRIKKRLEDLIRTNREIEERIDRESERLAEELRRILRELEKELRRLIEDLKEVLKRGLPREELLRRLKKVVEDVLRILEEVLRVVDELDKENVRLLREWLERNKEIVEEVIRILEDLIRKGGSESEEKVRDRDHMVLHEYVNAAGITKELERLLRENRRRLEELAREAKKVLDELRKRLEDERR

SEQ ID NO: 1168 - protein, 249 aa, Artificial Sequence
  Synthetic
DAEEVVKRLADVLRENDETIRKVVEDLVRIAEENDRLWKKLVEDIAEILRRIVELLRRGGVPEELLDRLAKVVKSIVEKAEKILERLNRVSKAIAEKLKTIVDELNEVSKEIVKRAEDILRKGKDKETVLRALRTLVKEYADLSKEVLERVERIVREYVKLSDEVVKSLAEIVEELIRIIEDLLRKGNLDEDVKRALERDHMVLHEYVNAAGITSEDIVREVERIVRELAKRSDEILKKLEDIVEKLRE

SEQ ID NO: 1169 - protein, 249 aa, Artificial Sequence; identical to SEQ ID NO: 1168
  Synthetic

SEQ ID NO: 1170 - protein, 250 aa, Artificial Sequence
  Synthetic
STEEILKRVKEILDELAKELRDIIRESLRTIEELLDELRRILEESERTLEELVKTIKDGVKDSEELLRRLKRLLEDLRRAHEELLKRLKEAVDEHRDRLRKILEELERVLKELRKRIEELRRSGDRISEKDVLRKLEEVLRKALEILERLLKKIRESARELLKIIEEVLDANIKVMEEALKTIKELLKDGPDEVKRRLERDHMVLHEYVNAAGITLRKRVKDYEDKLREIEKKVRRDAERIEEELERAKK

SEQ ID NO: 1171 - protein, 250 aa, Artificial Sequence; identical to SEQ ID NO: 1170
  Synthetic

SEQ ID NO: 1172 - protein, 251 aa, Artificial Sequence
  Synthetic
DEEEKIRTTLDLLRKLLKVLREILEELIRSNKELNERLLRLVEDSDRLLEELLKKLADDGGVDEEALRRIKKRLEDLIRTNREIEERIDRESERLAEELRRILRELEKELRRLIEDLKEVLKRGLPREELLRRLKKVVEDVLRILEEVLRVVDELDKENVRLLREWLERNKEIVEEVIRILEDLIRKGGSESEEKVRDTRDHMVLHEYVNAAGITELERLLRENRRRLEELAREAKKVLDELRKRLEDERR

SEQ ID NO: 1173 - protein, 252 aa, Artificial Sequence
  Synthetic
SLEEITKRLLELVEENLARHEEILRELLELAKRLAKEDRDILEEVLKLIEELLKLLEDNGSSEEDLKRLLKEVIEELRAVVKRVKDKWDEVVKRIEDLVKKLKELHDDTLRKLRELVRKIVTDISESGGEAEKVKRVVEKILELVERLAKVVKESVEKLLEILRELAEVSKRVAEALLRLLEELVRVIRIKDERTLREVRDHMVLHEYVNAAGITEVHKRVKKELEDIIEENRRVVKRVRDELREIKRELDE

SEQ ID NO: 1174 - protein, 251 aa, Artificial Sequence
  Synthetic
DEEEKIRTTLDLLRKLLKVLREILEELIRSNKELNERLLRLVEDSDRLLEELLKKLADDGGVDEEALRRIKKRLEDLIRTNREIEERIDRESERLAEELRRILRELEKELRRLIEDLKEVLKRGLPREELLRRLKKVVEDVLRILEEVLRVVDELDKENVRLLREWLERNKEIVEEVIRILEDLIRKGGSESEEKVRDTERDHMVLHEYVNAAGITLERLLRENRRRLEELAREAKKVLDELRKRLEDERR

SEQ ID NO: 1175 - protein, 186 aa, Artificial Sequence
  Synthetic
SAEDSIRELLERDERLLEEARKEAKRLNEENERRDHMVLHEYVNAAGITKRLLDDIRKKIKGEKLREIEELVRRVKRTIEKLLEEVKKSVEDSSKRIEELLEAVERSVERTKEEIRRLLDEVRKDRKEELVKRVEERIKRLHDENRRLVKEVIEEVEKLIRDNEKLAEDIEREIRRLLKELDEAAK

SEQ ID NO: 1176 - protein, 181 aa, Artificial Sequence
  Synthetic
SRVERLSAEIKKLIDENRRVAEELLRELEKLLKRDHMVLHEYVNAAGITSRKLEELARAGAPEEDIRRLVEESKELIKRLLRDIERTTREINEVIKRVVETIRRTTDEINRRIEELVRKIDRGEAREDMDRLVRENERLLKKVEDDLRKLSEENKRLVDRARERLARLLEENERLVDERRK

SEQ ID NO: 1177 - protein, 182 aa, Artificial Sequence
  Synthetic
RVEDALRKLLDDVRRLVEEAERRLRTSNDKSRRRDHMVLHEYVNAAGITEKLVRDVRRRIRDEDVKRVLEELLKRDHDVVRRVLERIDEMLERNSRLVKRVLEDIRRLLKRVREVVERIKRVRSKVVEEVLKELEELIKTAKKIIEDVLRASEDTIRRLEEIIRKVEEDSKRIIEEIERAAR

SEQ ID NO: 1178 - protein, 183 aa, Artificial Sequence
  Synthetic
KVEKRLTDLLKTVADEVKRVEDELRETVRESKERDHMVLHEYVNAAGITEKTVKDAERRVSEDLVRRIRKVLDENREVNDRVVKEDERILEENERVNRKVVEKIRDILRKIEEVVRRAAEEIRDEEVVKKVEKEIRELLERLKEEADRVRERSKKILTDLKKSSEDVKRESERMLKKLEDEIR

SEQ ID NO: 1179 - protein, 184 aa, Artificial Sequence
  Synthetic
SLEEVIKTVRKLLEEVERRLREVVERAERMLEERDHMVLHEYVNAAGITKDVEKALRDKNVSEEIEEKLRKIKEELERDNEKVNRDNERSVETLRRLLDRVRKEVKDIAKELEERLKEVERKSRDDRIVEKLLRDAERIVKRLRELIEKLREEVEKIVDENRKTVEELRRRNEEIVRRLRREIE

SEQ ID NO: 1180 - protein, 177 aa, Artificial Sequence
  Synthetic
KEEEDLEREVKRLEDKVREDAKKLEEVVKTVEKRDHMVLHEYVNAAGITADRVRRLTERKLDEETLRKVKEDLKRTLERLKRENEKSLEELRDILRRLKKENDDTLKELRDELKRLTDSGASEDVIRKMEEIIKRLEEVSREVEKRLRRIIRELERVSKEVLDRLREIIEKLDRDAT

SEQ ID NO: 1181 - protein, 175 aa, Artificial Sequence
  Synthetic
SELEKVVDDVRRRLDRLLETSEKLLEDATKRLKRDHMVLHEYVNAAGITLERLKTVLERRETDKRELLKENKEILERTRELSERNLKEVEDILREVEEEVRKNLRRIEKVLEEVRRKLRSELLKRVEERIKRVLDESKKILKEIADEVRRVLERDKELLKRLEDKNREVSERIRK

SEQ ID NO: 1182 - protein, 180 aa, Artificial Sequence
  Synthetic
SKEEVLREIERLHKETIRRIEEVLREATELHKRRDHMVLHEYVNAAGITREVIEDVRRADTPNVEELLRELKDALDKVRDHNRKTLKKNEDVVREIEKEVRELLKEDEDVLRRIEKVMRDGRVDARELLEESRREVERSEKEVERLLRKSRKVVEEVRKLSEENDREVKKILEEVKRRLD

SEQ ID NO: 1183 - protein, 187 aa, Artificial Sequence
  Synthetic
SEKERLKEELEKLSKEIEDILRDDKRSDDELRRRDHMVLHEYVNAAGITNEELKRMLEEARKRVSEDELRAIKKEIEDLNRRNEESLRAIEEKIKRLNDENRKSLEEIRRRLKRLVEEVDELRKRDNREELLRRLLEKLKRMAEKLKRDIEDNNRKLRKVATELAKEIEDNSEKLREDAKRLSEKIK

SEQ ID NO: 1184 - protein, 177 aa, Artificial Sequence
  Synthetic
SAIEKVKEVVERVLETVRDSVRRSHEESKRLIDRDHMVLHEYVNAAGITIERVRRKGIPERMVEKLERDLEELLKEIKDTIDRIEEELRTSNRRLKETNDEIAKRLEELLRELSRDRDKDAVEDVLRRIEELIRDLNKKNDDNVRRVKEVIDRAEKLVRDLLREIRKLIEKLIRDTE

SEQ ID NO: 1185 - protein, 177 aa, Artificial Sequence
  Synthetic
SVLEEVRRRVEELLKTVKESVDRSHERSERLIERDHMVLHEYVNAAGITVERVREKGIPEDRVKRIEDKLREELERLERENRKIEEDLKRSNDELRRENERIAERLEELLRELSRDTNDKVARDVLEEIERLIREANERNKRNLEDVERVIRELNKENERVLREVEKKIEKLIRETE

SEQ ID NO: 1186 - protein, 183 aa, Artificial Sequence
  Synthetic
KDAEDLERRVRELVEENNRVSKRLAEEVTRLVKRDHMVLHEYVNAAGITAKELLDMKRRGEVREEEVKRVLREIEELLREITEHSKEVLKTIEKLLRDSLEHSRRVLEEIERLLETILRKSKDSERLKKLVDELRETLERSLRENEKVADELRKRAEKSLEDVKRVVDELRKIVDDVLKRVED

SEQ ID NO: 1187 - protein, 183 aa, Artificial Sequence
  Synthetic
SEIEKLVEDVRKLVEDNLRHSEEVHRRNRRLIERDHMVLHEYVNAAGITVEELRELAERGEIREEEARKVLEEIKRLLDEIRRHSEEVLKEIERTLKENLKHSEEVLRRIEERLEDIKRKDKDSERVRTLVDRLREELKRSLDESEKLNRESRKRVTRSLEKVDDLVRELEKLARKVLEEVKT

SEQ ID NO: 1188 - protein, 181 aa, Artificial Sequence
  Synthetic
EEIERALREMRELSRTHKELVEKILRDIAELAKRDHMVLHEYVNAAGITIDEIADEIRKEDKKEELKRKIDELRRRAEELLKESKEHLKRLEDTVRELIERLKETLKKVEEDLKRILEKLEKSRELDEIAKDVKRLIDENRELLKRVEDEVRRLIRKLEELNRRTEEEVKKLIKKLEDDLK

SEQ ID NO: 1189 - protein, 174 aa, Artificial Sequence
  Synthetic
SEIEELEKRIDELLKELRDLSRRIAEEVKRLLERDHMVLHEYVNAAGITLERLKRKGVPEEELRRVEEEVERVVRESRKLNKETEDELRRLLEEIKESNDRVEKRARELKKLLRDGKDVEEVLRRLEKLVREDKERLKKVLKDARDLIKKDKDLNEKLSRELEKLVRELEERAR

SEQ ID NO: 1190 - protein, 174 aa, Artificial Sequence
  Synthetic
REIEEAAKDLDRLLEENKKLVKEVEEELRRLLKRDHMVLHEYVNAAGITLEELRRRGVPEEELKEVEERARRVIEESRRSSKELEKRLRELLEELRRSTKELEDRLREIKKLLRNGKDVEEVLRRVRKLSRENKEKIRKILEDVKKLSEDNKRRNEELSRRVKTLVDEIKKRAT

SEQ ID NO: 1191 - protein, 178 aa, Artificial Sequence
  Synthetic
SEIERIERENDRLNEENKKITEDIERELKRLLERDHMVLHEYVNAAGITLRELRKRNGGREEVLKEVEDRLRRIVEEIRRSDKRLEDIAREVKKRIRESDEELRRVSEEITRRLRKVRDEKTLRELLKRSEELSKENKDRLKKLLDDLREVSKKNKEDLKRLLREVREVARKVKERAN

SEQ ID NO: 1192 - protein, 182 aa, Artificial Sequence
  Synthetic
DEIETVLDEVRRLHEDAKRRLEEMIDEVRKLNERDHMVLHEYVNAAGITLRTVKEEVERAGLDKGKLEELEERLERVREDVERILREIKRRNEKTLEDSERILEENKERNRTVLKKLKELRDRGSDAREALKESRKVVEESRESVRRVLEKNRRVVEESKRLAEELLRRVKKVVDEIRKRVE

SEQ ID NO: 1193 - protein, 174 aa, Artificial Sequence
  Synthetic
EELERILDKVRKVIEEVRKRLRDDLRTVEKVLKRDHMVLHEYVNAAGITLERVEEAARRGRDRREIKEELKKVLDDLRELLRALEEKNRRVNKENEDSLRKIEEDLRDVLRKLEEEIKGREVLRKVRELLRTIREEVERVLRKSNELSTRIKKRIDDVLETLERLLKELDDKLR

SEQ ID NO: 1194 - protein, 178 aa, Artificial Sequence
  Synthetic
SSKDEIRRRVEEVVERSDEIVKRSREHVKTVVDRDHMVLHEYVNAAGITVKKLDKIRKDGGSEETLKRVLDELREILKELKEEVKKVKRKLEKVVKENRDTIREVEERNRKILDELRKRGVEERALREVEEISRKSEEKLRRVLKESEDIAKEAEDRLKTVLERVERIADEVLKRLTK

SEQ ID NO: 1195 - protein, 182 aa, Artificial Sequence
  Synthetic
SDADRVAEELKKLVEDSRRENERVIEESKRLVKRDHMVLHEYVNAAGITVDKLRDILEKEKDKKTLDDIVREILERLKRLLEKVEDENRKSHEENKRLLEDVKRKNKRISDELKRLLEEIERRNVDVDKVRETVKRLLEENKRVMEKTEEVAKKSSEDIKRVADETRRRAEELLKEVDELRK

SEQ ID NO: 1196 - protein, 182 aa, Artificial Sequence
  Synthetic
DEVDELLKRLRKLVDEVRKENDKMVKESKRLVERDHMVLHEYVNAAGITLEELEKILKDTEDKDTLRKIVEEIKRRLRRLLEELKRIIEKALRDNKKLLDEVRKRNKEISDELRRLLEEIRRRNVRVEDIEREAERLLRENEELLRRSEEVIRRSTEKIKKVLRDAEERAREILKRVEDAAK

SEQ ID NO: 1197 - protein, 175 aa, Artificial Sequence
  Synthetic
SEVDEVLREAKRIVDEVHKDNERATEESRRLVKRDHMVLHEYVNAAGITVKEVKDANIDEKLVTEILKEIEEALKEAARRNKEVKDRLRELSRRVSERNREILEELKERLDRVRERRKDVKELEREVEKLLKRIEESLRRHRKENKRLLEELDRSLRELAKIVKEVLDEIRERTR

SEQ ID NO: 1198 - protein, 175 aa, Artificial Sequence
  Synthetic
SEMDDVLKKLAETVKRIIERLKKLTDDSRRLVERDHMVLHEYVNAAGITVRKAEERNIDEKDVRKLLEDLKKKSEEVAERNKRILDTLREISKRAEDEVRKVLKELEKTLKELEDRRPDVRELSEEVKKLLDEVRKALKRHKDENDKLLKEIEDSLRRHKEENDRLLEKLKESTR

SEQ ID NO: 1199 - protein, 186 aa, Artificial Sequence
  Synthetic
SEVDEVRKTLEDLLRRLDEENKDIIRRNKELLDRDHMVLHEYVNAAGITLDELRKILEKLKDRETLTRIIEEIEKRARELIKRLRDEIRKIEEESKKSIEDSRKRNDEIRKRLEELIKDLRDKIKDSEELARRITELEKRVREVIERLKEKNKRLEDDSRRVITELRKKLKDLEDRVREEIEELRK

SEQ ID NO: 1200 - protein, 186 aa, Artificial Sequence
  Synthetic
SRVDEVIERLERLLRELDKINRDMIEDDKRLNTRDHMVLHEYVNAAGITLEELEEIRKKLSDEKTLEEIIERVERRLEELIERSKRRNREILERSKELIERSKKTNEEILRRAEELIKRLREEVKDIKEALDKIRRLEERARRVIEELDEKNRRALERSKENVKRLDERNERLRKELEEKVRRLRK

SEQ ID NO: 1201 - protein, 176 aa, Artificial Sequence
  Synthetic
REAEEAKEEVEELNRRNKKELDDARRRVDELDKRDHMVLHEYVNAAGITVEELERVKEEGRSDDRLREKIERMLKTSADELERLKEENKRALRDLAERLRELIERNRRKLEEITRRTVPDKDVLKRLAELIKESIRELERVLEELAEKIDRSLKELDDVLRKNETDLKRVIEDLKR

SEQ ID NO: 1202 - protein, 179 aa, Artificial Sequence
  Synthetic
REAEEVERKVEELNRRNRKVLDDARKESEEVVRRDHMVLHEYVNAAGITLRELDKRKRDGTSEEVIKRLIDRVRKILEDIRRLVDELIKRNERIVEKLTRIVEELIRRNKKLLEDIRRELVKVDEVLRRLAEDIERSIRELEKVLRELERIHRELIKELKEVLKRLEKDAKEVIERLRT

SEQ ID NO: 1203 - protein, 174 aa, Artificial Sequence
  Synthetic
SEEEVLREAAKTVEKLLDEIRRSLEKVSKRVEDRDHMVLHEYVNAAGITRELLEELRKNNVDRTLLEDVRRKLERIEERNEEMNDRSRRKLEELRERNRKILEDIRRTLEDLKRRQLPKDDVERTLREIAKLVDEVDKENKRALRENEERVKTLNRENEEMLKRIEEEVRRATK

SEQ ID NO: 1204 - protein, 183 aa, Artificial Sequence
  Synthetic
RVDERLDTVLKRVEETVRENKKKNDELLERSKERDHMVLHEYVNAAGITRREAEKLKREVTKEEVKKIIDEVLKEIEDLLRTVKEELDRALERNREVVEETKRRIDRVLKEIEKLIRDVKRDRKEEVVKEVEERIKKLLKEVNDTSKDAERRLRETNERLNEIVKEVEKRIRELSEEVRKRVK

SEQ ID NO: 1205 - protein, 183 aa, Artificial Sequence
  Synthetic
SVDERLDEVLERVKEDMDRNRRKNDESLREDEERDHMVLHEYVNAAGITEERVRELKKRVKDERVKEFLDRVLEEIRKSAEEVKTIIDEVHKESEETVRRTKKIIEEVLRRIEELIRRVKKDRKEEVVKTVEEDIKRLLKEVNKVSDEAHKRNKELNERVNRVNKEAHKRNEDLLREAERKVR

SEQ ID NO: 1206 - protein, 174 aa, Artificial Sequence
  Synthetic
SESDEVIRDLARLLDELARHVDDSVRRMDEVVKRDHMVLHEYVNAAGITVKEVEKKPGDERVERMVAEIERLVAEVLEELKKKYEKLKREVEENLRRLEETVRDIVEKARKVTEKGVSKEKIDRIIRELERILEEAKKKHEDVLRRLEDSLRRVAELLKAALDRLREIVDRLRR

SEQ ID NO: 1207 - protein, 172 aa, Artificial Sequence
  Synthetic
SRAETVLKEVTDKIKKLADSSDELLRRNKENIDRDHMVLHEYVNAAGITIEEIEKGSVDEETLEELIRRVEAELEAHHRELEKNSREDEKRNRDHHAKLEEEMRRVEERLEREGIDDEVVKRVRDLLDTVRRRNEKVNEDVKRMNDKLRRDNEDVIRRVEKLLRELEEKRRT

SEQ ID NO: 1208 - protein, 176 aa, Artificial Sequence
  Synthetic
SVDEVLKEIEDALRRLKEEVERVLKENEDELRRRDHMVLHEYVNAAGITESLKRGVGESDEVDRVVDEIAKLSAEILEKVKKVVKEIRDSLETVKRRVDDVVRRLKELLDEIKRGSDEKAIRDVAKEIRDRLKELEEEIEEVTRRNLKLLADVEEEIRRVHEKTRRLLETVLRRAT

SEQ ID NO: 1209 - protein, 186 aa, Artificial Sequence
  Synthetic
SEVDEIIKELERLLAEIARENERIIRESRKLADRDHMVLHEYVNAAGITVARLADAVRRKGSESEEVKKLIEDVLREIERLLKRIEEENREVVKRNSELVERVRAINEEILRRVAELVEKIARDIGDKDEVTKVKKVADDVLAEIKKLDDETRRVIEDTNKKIADLDKATRDVVRKVLEEVKKLEK

SEQ ID NO: 1210 - protein, 181 aa, Artificial Sequence
  Synthetic
SEVDDVLRRLEELIKTLEDINAKSLEDIKKLIDRDHMVLHEYVNAAGITIRELREAKKGIDSREAEEIAKRVLEELKRTSDDLRKKVERVDEDLRRLLRENHERNKKILRDLERLLRDAARRGVPKEALDRMREEIRRLEEESRKSDETIERLIRELRRRVEEVLKTSTDLIRELEEEVKK

SEQ ID NO: 1211 - protein, 181 aa, Artificial Sequence; identical to SEQ ID NO: 1210
  Synthetic

SEQ ID NO: 1212 - protein, 234 aa, Artificial Sequence
  Synthetic
SAKETIRKLIEENKDIIRKLAEKLKRLLEESERRDHMVLHEYVNAAGITERALRRVGSGIDEELLKELEKELARLEEELKEILDRVRDLHRRLAEEIRKILEESKKLNEELEDRLRKDGDVEELLELLERVHATDVRLLRELLKLLKKVHEDVVSLLERLLELLKRVLDRIVEELGLSDKELEKLLEDLEREIRRLAKRLKELSDRLEEKIRKIKRELDDLSARLREKIERTRK

SEQ ID NO: 1213 - protein, 244 aa, Artificial Sequence
  Synthetic
SAEETLRRITEESKRVLEEITKKYEDLERESRERDHMVLHEYVNAAGITEDVLTKGGDDKDEVLTVLEKVLDELLKLHRENLRVIKELLRKVLEVDRENLEVLKRLLEKARDLLRRSGRDEKDLKKLEDELRKVKEELEKKHEASKRDIEDLERELDKVTEEVERLLRKLKEELRRAAEGSDEDRERLARLLKALADKLIRVLEEILKINEELNRKIIKFARENLERNRRVNKKVIEVLREAAR

SEQ ID NO: 1214 - protein, 238 aa, Artificial Sequence
  Synthetic
SEAEKIREALETNLRLLEELIKRLKEILDTHNERDHMVLHEYVNAAGITLELLEEGGLDEEVLREVKRLVDELRKEARRVLDEHEKLVRKIKKEAEDVARESEEIIKEVEDKLKGLDREELLERVRRVLKKSDDLIAELVRRALKILEELTRLLAELLKKVVEILRRIVELVERVLTKKGAPKEDLERLRRKVEELEDRLRRLLEKLARDSAELMRELERILDRYARESEELDRRLAE

SEQ ID NO: 1215 - protein, 238 aa, Artificial Sequence; identical to SEQ ID NO: 1214
  Synthetic

SEQ ID NO: 1216 - protein, 242 aa, Artificial Sequence
  Synthetic
SEKERLMRLLDKLKDLNRRLVERIKELLDKALERDHMVLHEYVNAAGITKELVERGGVPEELLTRIDELIKKLEDEARKISKEVKRLIDELKKRLEDIHREVDRLIRELKETLKGVTDKDELLRRVAEVLERIARLSEELIREVKEVLEKIVELSRELLKRVLDVLRRIAELLEDALRKGNVSEETVRRLREALKKLEDDLRKIERDAEREYKKLKDELEELTERYRREIRKLKEELKADRK

SEQ ID NO: 1217 - protein, 242 aa, Artificial Sequence; identical to SEQ ID NO: 1216
  Synthetic

SEQ ID NO: 1218 - protein, 247 aa, Artificial Sequence
  Synthetic
SEAEDLEELIKELAELLKDVIRKLEKINRRLVKRDHMVLHEYVNAAGITEEELRKGTVEDKDILRDLERRLREILEESDRLLEELKRRLEEILRKSKELLRRLEEVLREILKRAEEVKRSNLPKEELIKEIVKLLEELLRVIEKILEDNIRLLEELVEVIKEILEKHLRLLEELVRVIERILREVGKDKDEAERRRRELKDKLDRLREEHEEVKRRLEEELTRLRETHKKIEKELREALKRVRDRST

SEQ ID NO: 1219 - protein, 240 aa, Artificial Sequence
  Synthetic
SDKEEIKRRVEKTARDLETEHDKIKKRLEDTVRRDHMVLHEYVNAAGITLRKIEKTLREGDGDATDLVDKLLETVKRLNEEVLRTVKKIADELRRLVEEVLRVLRESNETLARLLEEGNVGDEVRERLEEVLRRTEEIIKTLEEIVKRLLDELRRLVEELRRISKKLKDELDKIKEKGKDEKRLIEEVVRLLRENLDVVRRILEALAKLIKELLEALEEVLRRNKELIRELLRVLDEALK

SEQ ID NO: 1220 - protein, 240 aa, Artificial Sequence; identical to SEQ ID NO: 1219
  Synthetic

SEQ ID NO: 1221 - protein, 248 aa, Artificial Sequence
  Synthetic
DEEERVKKLLTDLRRLLRKLHEESKKLLDELRKRDHMVLHEYVNAAGITERRLREAEKKLPGTRVLKLVADVVKKVLDAIRDLNRKLEEIIDEALKLLEELDDILRRVVEEALRLLKEIKDTKGDREEVKKRVEDILKRLEELVKEYEDRVREIKKRLRRALEELRDEYRKIREDIERVLDELRKGGVPEELLRVLEELVRTLKKLLDENLKMVERLIRELEKVLDDHERKVRRLIEELLEVLDRDAK

SEQ ID NO: 1222 - protein, 238 aa, Artificial Sequence
  Synthetic
DADELLRRLAEEVERVIREAEDLLRRWKETIKKRDHMVLHEYVNAAGITEDVIRELTKTKGDEELAKLIKDLLDTNEKVNRDLLRLIKKLLKDAERVNRRLLELIEELLEELKRVAKDLGLREEADKKLRDIADRARKELEDYERRLKELLKTVEDALRKAEEDSRKLKRDVEELLERGRLRKDDLEDILRKNLDRLRKLLERLREILRENLEALKKTLKRLEDVVREILEDLKRERK

SEQ ID NO: 1223 - protein, 238 aa, Artificial Sequence; identical to SEQ ID NO: 1222
  Synthetic

SEQ ID NO: 1224 - protein, 231 aa, Artificial Sequence
  Synthetic
DKAEVLREALKLLKDLLEELIKIHEESLKRILDRDHMVLHEYVNAAGITKELLERSGLDERELRKVERMATESLRTIAKLKEELRDLARRSLEKLREDLKRVDDTLRKVEEKVRRTGPSEELIEELIRTIEKLLKEIVRINEEVLKAVRELLKTLLKLSEDVVRRIEEILRKGGVPEEIDRELKRVVEELRRLHEEIKERLDDVARRSEEELRRIIKKLKEVVKEIRKKLK

SEQ ID NO: 1225 - protein, 236 aa, Artificial Sequence
  Synthetic
STREKAKKVLDTLRADNEDMKRVVEKILRALKRRDHMVLHEYVNAAGITKRILKEVGVSEEALKEIEDTLKRVLEEIKRLLDESKKLLEDVEREIREILKTSEELLERIEREIETVGSDEKTLAEILKRLLELNEEMNRRLLKILRDLLRLNEEVIRRLLAVLERLLDALKEALDRGDVPEDLLRKLEEELRRIKEKLRKALEELEREHRELEKELDKLHDESRKEHERIEEELRR

SEQ ID NO: 1226 - protein, 236 aa, Artificial Sequence; identical to SEQ ID NO: 1225
  Synthetic

SEQ ID NO: 1227 - protein, 247 aa, Artificial Sequence
  Synthetic
SKAEKLLKDLREALEKVKRRYEELERRLDEVLKRDHMVLHEYVNAAGITLKRIEEGGLPEEELEKLKKLAEKVKELLRELLRLSKELVDRVRELLKRDLDLVRRLVEIALKVLREAREQPNDEKRVEKIKRDLEKKARRVREENERIKRDLKRTADESRKRLEKLLEDLKRELDRLREDLDRGRKDIDERVEELIERLIRIIERLLREVIKSHEKLVRTIERLIEESIRVNEELLEVIERLLDRARK

SEQ ID NO: 1228 - protein, 246 aa, Artificial Sequence
  Synthetic
KEIEETLKELEDLNREMVETNRRVLEETRRLNKRDHMVLHEYVNAAGITLKKLVDDVRKGPTSEELKRLLAELEELLARVVRRVEELLKKSTDLLERAVKDSADALRRSHEVLKEVASRVKRAKDEGLPREEVLRLLRELLERHAKVLKDIVRVSEKLLREHLKVLREIVEVLEELLERILKVILDTTGGDKAVEELEKALEEIKRRLKEVIDRYEDELRKLRKEYKEKIDKYERKLEEIERRERT

SEQ ID NO: 1229 - protein, 231 aa, Artificial Sequence
  Synthetic
SKEEEVEKVLRKWEEILRRLIEENKRANDKIRRRDHMVLHEYVNAAGITKEVAERLGVSEEVKRILEKLIKLLEDILEYEKENVERLIELNERILRELKKSVEELKALVTRVRRDGLPESEVRKLVEDVLRKNEELLKEAKKAWRDSIENLKRVLEEVAKLVKTVLREIEEKIDDEDVVRALIEVIERLLRVAEEVIRRILKVNTELMRVDERSIRESLKAISEVLKVLDT

SEQ ID NO: 1230 - protein, 245 aa, Artificial Sequence
  Synthetic
DEDELIRKLLEDLKDIVRKILELIERDLRDIERRDHMVLHEYVNAAGITKEVVDDIARGVPRTEELERVIKRIEELLRTSEEELDRILKEIEELLRESRRRLEEVVSAVEELLRRVEEIVDKGRESKEDVIKLLREVVDDILRLVEEVVRTNLEIIKRILELIERVIRLNLSIIRDILRLLEGTVDSELADRIRKLIEDLERHTAKVLEDVKRAITELRKNSKDILEEVRKLIDELRKRIKEVED

SEQ ID NO: 1231 - protein, 231 aa, Artificial Sequence
  Synthetic
SKDEELARLLEELVERWRKIVEDLERDHRRLVKRDHMVLHEYVNAAGITVDRIRKNGIDERIVRLIEEIAKIIEEVLKEIVKLVERAVRENVRVLRESVRLVAELVETLARLLRGSDERVTEAIKKVLDTSEDLIRRVIKVNEDILREIAKLVEEVLREAERILTEIKKEGDREEIRRILEELKRIVDDVLRIIARILKLLRDLTRRLAEVAKAVHKLLEELLRKLKEDTR

SEQ ID NO: 1232 - protein, 238 aa, Artificial Sequence
  Synthetic
SEIEDVIRRLRKILEDLERVSEKLLREIKKILDRDHMVLHEYVNAAGITLEDAVRVFRDGSGSKEELAKLVEELIRELAKLAKEVDEIHKRIVERLKALVEDAERIHRKIVETLEEIVRGVPSEELKRVVEAIVEVIKEHLKVLADVIRRIIKAIEENAETIKRVLEDIVRVLELVLRGEGSIEDLVREVERLIKRIEDSLRELEKTVRELLKRIKEASDKVREDVDRLIKELKEAAD

SEQ ID NO: 1233 - protein, 238 aa, Artificial Sequence; identical to SEQ ID NO: 1232
  Synthetic

SEQ ID NO: 1234 - protein, 246 aa, Artificial Sequence
  Synthetic
SREEIVATLEDLARKILEVVKKLAKEIEDAWRERDHMVLHEYVNAAGITREIEDVVRKKVDSRVAEILETVVKRVVDITRRLIEEAERVVRELVDITRKLITILEEVVRRLVEIVREASKIDDRRELEDMLRKIREVVREVIERLKKLDEDVRRVVEEVIRRLEELNKRLEDVIREVKKRLKELGLSEEAVKELVELLEEILERNTRVIKEIIDLLRTVIRIHEKIVEDLIKLLEELLRRLEEATR

SEQ ID NO: 1235 - protein, 237 aa, Artificial Sequence
  Synthetic
KEKEDALKKLEDLARKSREDLERVLRKHKKILDRDHMVLHEYVNAAGITVDDILRKTGTESEILKELARLLREHHEALRRLIEELRRLLEEHHKILEDLAREHKRLLDELIKVVADGVDKDELERIIKELRERDKKLVDDLRKVSEDLLDAVRKLVEDLERISRELLRRVEELAKGIDEELAREVERVIKELLDKSKEILERIERAIDELLKVSEEILKLSEDASEELLKILREFAK

SEQ ID NO: 1236 - protein, 229 aa, Artificial Sequence
  Synthetic
SKEERLREVAEKHKKDLEDIVKRVDEAAKETARRDHMVLHEYVNAAGITLDDLEKGPDDEKLKKVKKILKDIMDRLAELIKKILKLLKENLEKIKELLRRNLEISEELLKLAKGLSDRDVLETVRRVLEKLDEEWDRVLEDSRRIIETILRELDTLLREVEKLIKEIKDEISGSKEVLDILERAVEVVRRVIKALKEVLERHVDATREVIERVKRVNKRLLEAVREVVT

SEQ ID NO: 1237 - protein, 241 aa, Artificial Sequence
  Synthetic
SEKELLKEILDRIRELLEDDNRLLKRIVDEIRKRDHMVLHEYVNAAGITKELLDRIGAPEDVIRELTRALKETEEDVDRVIRTLEKLLKEVLDAHEEVVRKLDRLLKEVERLVEGGDAEEVVRDLLRVVKEILDESKAVIDELARVVDEILKLLEEVDRKLAKVVKEILEDVLRGSGDDEDAVRKIAKIIEELKRLLEDLARDTRRVIEEAKRLLKEWRDRNKEVADTLKKLLEDLIRKIR

SEQ ID NO: 1238 - protein, 240 aa, Artificial Sequence
  Synthetic
DREKSVRDIEEDLKRVLDKLRRRVETSKEELKKRDHMVLHEYVNAAGITRDVVRELDRGIDSEVLRAVREIVKRLVEVVRRYNELSEKIIRDLVRVNDRVLELLKRIVKRLIDVVRELEKIGDKEKALRRLEEVVKEVKRRIEELLKELEDVHRELVKILEEVNEDLKRVATEVKEIIKTGIKSSEVAKELDEVIKRLLDNLKENTDRLKEVIDRNLADLRDLAEELRAVIERLLEDARR

SEQ ID NO: 1239 - protein, 252 aa, Artificial Sequence
  Synthetic
SLEEITKRLLELVEENLARHEEILRELLELAKRRDHMVLHEYVNAAGITEELLKLLEDNGSSEEDLKRLLKEVIEELRAVVKRVKDKWDEVVKRIEDLVKKLKELHDDTLRKLRELVRKIVTDISESGGEAEKVKRVVEKILELVERLAKVVKESVEKLLEILRELAEVSKRVAEALLRLLEELVRVIRIKDERTLREVVRKVLEEAKRLLDELEEVHKRVKKELEDIIEENRRVVKRVRDELREIKRELDE

SEQ ID NO: 1240 - protein, 237 aa, Artificial Sequence
  Synthetic
REDEVLRDIERLLREIEEKIRRILEESTAELRKRDHMVLHEYVNAAGITKAIKEDVERKGIDEELRKLLDEVLDKLTKLIERNKRSLERILELIKRIIDENLEVLRDIIRLLEELLKATKDNGVPKDEVIKLVEDVVRRIEELVTRVVARNEKLVKDLDDLAKKNVRENEELLREIDRGLDEDLLEKIKRVIREHIKALEKLARDLKEILRRHIEALKELARDLAEVIRKLLEDVKR

SEQ ID NO: 1241 - protein, 237 aa, Artificial Sequence; identical to SEQ ID NO: 1240
  Synthetic

SEQ ID NO: 1242 - protein, 243 aa, Artificial Sequence
  Synthetic
SEAERLADEVRKAVKKSEEDNETLVREVEKAVRRDHMVLHEYVNAAGITMKRLVDLLRDGQVSDRDLLKELEEVLRRVLEALAENHERTEEILKRWLDRYAEDIERLRKVLKEVIEALKRGGSDDKRIVDELEEILRRNEDVLDKIAKRLRRLLEEDRRLLERIVRELKRLLDDLDRITKEGKSEELVRIAIEVLKRLLEIIEELVRLNNEILERLLKIVRELHKDNIKILEDLLRIIEEVLR

SEQ ID NO: 1243 - protein, 243 aa, Artificial Sequence; identical to SEQ ID NO: 1242
  Synthetic

SEQ ID NO: 1244 - protein, 245 aa, Artificial Sequence
  Synthetic
SEKDEVTRRIRELLKEAEETNREAIERIKRLLDRDHMVLHEYVNAAGITLRRLKKVLDRGLQDDEALLKLLIDALREHNRLSTELIKILIDVLRTILKIIKDVLATNIEIARRILDLVRRLAERGGLDDRLVKEVEKLVRTAERLHRDALRKVKRLVEELEKRLRELVKTDHDLVRRLETLLRRGSGSKEDLLREIARILAESLRLIRELLKEIEKIVKEIIELLERLNDELRKIIEAILETTKK

SEQ ID NO: 1245 - protein, 239 aa, Artificial Sequence
  Synthetic
SAEDLVRRVKDLVDKLEDKLRKVVRTNERLWEERDHMVLHEYVNAAGITDALVEKLKAGDKDKDELIEEAKSLEDESNALVEKLVRDIERVLAESNKLLDTLAKEIEEVLEEIVELVERGSGSDKEAREKLEDIKARLKEVLKKLREESKRIIDELRRLLEEYKRLVKEIRDRIEEVRKRNSEIRVLVELVRRHNKVLKELVEELEKLVRDHNRVVEEVVRELVELLSRAVEVIKEVVK

SEQ ID NO: 1246 - protein, 232 aa, Artificial Sequence
  Synthetic
SEKELVDDIRRILEEILRLLRSLLEEVIRLLEERDHMVLHEYVNAAGITRRVAKLLDENGIRTDEADRVLERLEKAHRELLEDYKRALEKIKETLERVLREAEEVVKKIDDALRKLGGSKEVLKRLLEELLRLVEKIAEEIKRLLSELVRVTEELVRTNKELLEEAVRVIRKEVGDDSLVREVEELIKRLEKHIDDLLKTSRDLVKRVLDLVDEVVKRVEDLVERVKEKIDT

SEQ ID NO: 1247 - protein, 243 aa, Artificial Sequence
  Synthetic
SRVEELKKLIEDILRISREVVERIARVAEDIHRRDHMVLHEYVNAAGITLRTVEEILARKVSGTEAAEALRDTIRRVVDEIRKLLEEHEKRSAELLEEIRKLLEDILRRSERAVEEIRELLKKGVSTKDVLRIIEEILREHLELLERVVRRIEEILRELLKTIEEIVKRIKEILEELKEVLKRGSVGDDEVEREIRRVKEDLDRILEEYRRLLEEIKRKLEEILRRVEELHRRLRRKLEEIDR

SEQ ID NO: 1248 - protein, 243 aa, Artificial Sequence; identical to SEQ ID NO: 1247
  Synthetic

SEQ ID NO: 1249 - protein, 244 aa, Artificial Sequence
  Synthetic
DEDRRLEDAVAKLRKEHADIMKKLDDIMRELDERDHMVLHEYVNAAGITKALLTRVLRETREDELLRKVLELLTRLLKLLADVLEENKRLLEDILRLLKELIETNLRLLEEILALLRKVARGPVSEEEAKRLVEEITRLLEASTEEARKLVETIKRLLEESLDKLRSLVEEIERRLRTVLEEIRRRGAPEEIERIIRRVIEVIREILDLVRKVNKKALRVIEEILEDLARVNKKAVDAIDELAK

SEQ ID NO: 1250 - protein, 240 aa, Artificial Sequence
  Synthetic
DKDKRLEELLKRLKELNDKTFEELERILEELKRRDHMVLHEYVNAAGITRARIEGGNLDKRLAELLKKLLDDLKRLLEEYTRTNEELLKRLRELLERYRETNKKLLDLLRKLLDEARRTGTDEDLLRRLEDILRKYEDEVRRLLKELEDILREYEDTSRRLLEELERIAKEAAERVSRGSDKDVKDIIRTILEVARDLLRLLEEDSRTNSEVVKRLLDLLREDSKANSEVVKRLLDVLRE

SEQ ID NO: 1251 - protein, 240 aa, Artificial Sequence
  Synthetic
SKEETLKRLLDELEKRNRETVERLERLLKELEDRDHMVLHEYVNAAGITERKIEESGLSKELKDTLARILEELRKLLEEYFRKNEELLRLLRKLLDEYARTNEELLRLLEELLDTARRTGGDSELLKRLEDIAREYEKRVRRLLEKLKDILDKYRKTVEELVRKMEEILKEAKKTISRIGSEEVKDIVRAMEEVIRRLIEILRRDVELNLDVAKKLLELLKEDSKLNLDVARELLELLDR

SEQ ID NO: 1252 - protein, 240 aa, Artificial Sequence; identical to SEQ ID NO: 1251
  Synthetic

SEQ ID NO: 1253 - protein, 243 aa, Artificial Sequence
  Synthetic
DEEETLRRLLERKVELAKEYLDVSKEVIDRTTKRDHMVLHEYVNAAGITVELLERGDLGPDELIKRLAEELERSLRELEEEIKRLKRELEESLKKLKEIIDRLAEEAEKLLAVLKRGEGSEEEALRALASLVRELIEVLRENDERLRDVLRRLIEALRKNNEILERVLRKLVRAAEERGRDESSREALEEARRRLEELLRELNEITKDLEAKLEKLLRDLNELTKALEEELKRLLDELKKRTD

SEQ ID NO: 1254 - protein, 243 aa, Artificial Sequence
  Synthetic
SEAERTKESLKKVLKALVDLNRELLRKLEENMRRDHMVLHEYVNAAGITLDKVREGGIVDKDAEREAERLMRELDKSSEDTARETRKLIEESKKSTRRTEEEARKLTETLDRLAKGGLPREDLLRALVRLLEELARLIEEDVRRNAELVKRHIELVERDVAELLRLIKELVDLLADLAEKGSRTEEIRKIVEEILKEIKELADRYREEVRKSKDKLRSILEDYKRKVDELKERLRELIEEVET

SEQ ID NO: 1255 - protein, 243 aa, Artificial Sequence; identical to SEQ ID NO: 1254
  Synthetic

SEQ ID NO: 1256 - protein, 239 aa, Artificial Sequence
  Synthetic
SEVEDILRRLAELNKRLIDKLRELIDRIARLNERDHMVLHEYVNAAGITADELIRVVRERGDIPEELLRKLEEELKKIVDELRRLVEEYEKALRDLIKELRKAVEEYRRTLAELVERLRRLEGPEELLKDLAEDVSRNIKAVEEVIRRFEKNVEDNIEVVRRLVDALEKLVRRLESVLRGKGSDEDLKRLLEKLKEDVERVLKEVRDRTAESLKHLEDVIRELEKKTEDSLRHMEERRK

SEQ ID NO: 1257 - protein, 239 aa, Artificial Sequence; identical to SEQ ID NO: 1256
  Synthetic

SEQ ID NO: 1258 - protein, 186 aa, Artificial Sequence
  Synthetic
SAEDSIRELLERDERLLEEARKEAKRLNEENERLRDHMVLHEYVNAAGITRLLDDIRKKIKGEKLREIEELVRRVKRTIEKLLEEVKKSVEDSSKRIEELLEAVERSVERTKEEIRRLLDEVRKDRKEELVKRVEERIKRLHDENRRLVKEVIEEVEKLIRDNEKLAEDIEREIRRLLKELDEAAK

SEQ ID NO: 1259 - protein, 182 aa, Artificial Sequence
  Synthetic
DEAEKLLKELRDLLEESRKDLERLLKELEDLLEERDHMVLHEYVNAAGITKRIKETVERRNEREKLEKLLRELKKVVERLKDNLKDNERRNKEAIERVRKKLKDNERENKKVIEDLRAKLKDLEEVKRKIDRLEEESRRVIEEARKRLEEVEEKSKKIIDDARRALDRIDKELRRVVEETRK

SEQ ID NO: 1260 - protein, 173 aa, Artificial Sequence
  Synthetic
SLEELLEEARKTVERLIRESERVLRESEERVRRLRDHMVLHEYVNAAGITEVIERVEDEEALKELEKLLREDSKRVKEVLDDLRRDLERNKRRNEKVLRELEELLKRLEELVREGVREEELEKLLREIEERVKEMLKRDEDTLREIERKVKEAVRDSERTLEEIEKRVTEEKT

SEQ ID NO: 1261 - protein, 175 aa, Artificial Sequence
  Synthetic
SELEKVVDDVRRRLDRLLETSEKLLEDATKRLKDRDHMVLHEYVNAAGITERLKTVLERRETDKRELLKENKEILERTRELSERNLKEVEDILREVEEEVRKNLRRIEKVLEEVRRKLRSELLKRVEERIKRVLDESKKILKEIADEVRRVLERDKELLKRLEDKNREVSERIRK

SEQ ID NO: 1262 - protein, 180 aa, Artificial Sequence
  Synthetic
SKEEVLREIERLHKETIRRIEEVLREATELHKRLRDHMVLHEYVNAAGITEVIEDVRRADTPNVEELLRELKDALDKVRDHNRKTLKKNEDVVREIEKEVRELLKEDEDVLRRIEKVMRDGRVDARELLEESRREVERSEKEVERLLRKSRKVVEEVRKLSEENDREVKKILEEVKRRLD

SEQ ID NO: 1263 - protein, 180 aa, Artificial Sequence
  Synthetic
SKEEVLDEMRRLHETTKRDIRRVLKEIEELHERTRDHMVLHEYVNAAGITRVIEDIKRKKTPDVEKLVRRVEEMLKELEKHNKKTTDDDKRVLDEIRRRADELVKEDERVLREIEEVVRAGKVDLKELLDESRRVVKESKEDLDRLLKESRDVVDDTRRKSEKNLRDAERVIREAEEAVR

SEQ ID NO: 1264 - protein, 178 aa, Artificial Sequence
  Synthetic
DDLERVLKEIKKAADKIREDNKRTADKIRKRVKERDHMVLHEYVNAAGITKEIKERVRGREEARKVIEELKKLVDEVRKRNEKSIEELKKLLKEDRDLMRRVIEELEDLVRRLREEVRDDEALRRVEEEVERLIRDLRRVLKETSDRVRELIDKHRRLSEEVEKDVKRLIDELKKKTD

SEQ ID NO: 1265 - protein, 181 aa, Artificial Sequence
  Synthetic
DEEETLEDVLRELEERVEKLLRDLTRDLERVEKERDHMVLHEYVNAAGITKRIEELLKRIEDDEKLRRLKEEVRKLVEESRERNKRHHKEVREVLERIRELLERLEKELRRALEEIRDKIRKDGATDEILRKIEELLRRAEEVIRDLERKVRKLERDIRENIKKNHREVREILRKIEEDVR

SEQ ID NO: 1266 - protein, 179 aa, Artificial Sequence
  Synthetic
SSKEVADELRKKAEKVLDELRKIIRELERKNEDSRDHMVLHEYVNAAGITRVLRDLVRTRGEDDRLVREVERLLRELKRRLEELIRRSEELIKRSREEVDRVIRTVEKLLEELDRLLRANKGDIEDLRRTVDKLVEEIKDLARKLAKSSDDTVREDEKLVEELRKDVKRIVRKIKKDLE

SEQ ID NO: 1267 - protein, 183 aa, Artificial Sequence
  Synthetic
SEIEKLVEDVRKLVEDNLRHSEEVHRRNRRLIEERDHMVLHEYVNAAGITEELRELAERGEIREEEARKVLEEIKRLLDEIRRHSEEVLKEIERTLKENLKHSEEVLRRIEERLEDIKRKDKDSERVRTLVDRLREELKRSLDESEKLNRESRKRVTRSLEKVDDLVRELEKLARKVLEEVKT

SEQ ID NO: 1268 - protein, 177 aa, Artificial Sequence
  Synthetic
SEAEKVVEELKKLLREVEKKIRDHTEDVKRILEERDHMVLHEYVNAAGITKELKDKNSDDDTVRKVKEELDRSHEKLREELRKVAKELKESNEELERDLKRLVEEAEDRLRRLKDRVSEKVLRELEKILEDIKRTLDKLLRENRETLKRIEDRLRELLEENRKLLEKIERELRERSR

SEQ ID NO: 1269 - protein, 182 aa, Artificial Sequence
  Synthetic
DEIETVLDEVRRLHEDAKRRLEEMIDEVRKLNEERDHMVLHEYVNAAGITRTVKEEVERAGLDKGKLEELEERLERVREDVERILREIKRRNEKTLEDSERILEENKERNRTVLKKLKELRDRGSDAREALKESRKVVEESRESVRRVLEKNRRVVEESKRLAEELLRRVKKVVDEIRKRVE

SEQ ID NO: 1270 - protein, 178 aa, Artificial Sequence
  Synthetic
SSKDEIRRRVEEVVERSDEIVKRSREHVKTVVDERDHMVLHEYVNAAGITKKLDKIRKDGGSEETLKRVLDELREILKELKEEVKKVKRKLEKVVKENRDTIREVEERNRKILDELRKRGVEERALREVEEISRKSEEKLRRVLKESEDIAKEAEDRLKTVLERVERIADEVLKRLTK

SEQ ID NO: 1271 - protein, 182 aa, Artificial Sequence
  Synthetic
SDADRVAEELKKLVEDSRRENERVIEESKRLVKERDHMVLHEYVNAAGITDKLRDILEKEKDKKTLDDIVREILERLKRLLEKVEDENRKSHEENKRLLEDVKRKNKRISDELKRLLEEIERRNVDVDKVRETVKRLLEENKRVMEKTEEVAKKSSEDIKRVADETRRRAEELLKEVDELRK

SEQ ID NO: 1272 - protein, 182 aa, Artificial Sequence
  Synthetic
DEVDELLKRLRKLVDEVRKENDKMVKESKRLVEDRDHMVLHEYVNAAGITEELEKILKDTEDKDTLRKIVEEIKRRLRRLLEELKRIIEKALRDNKKLLDEVRKRNKEISDELRRLLEEIRRRNVRVEDIEREAERLLRENEELLRRSEEVIRRSTEKIKKVLRDAEERAREILKRVEDAAK

SEQ ID NO: 1273 - protein, 175 aa, Artificial Sequence
  Synthetic
SEVDEVLREAKRIVDEVHKDNERATEESRRLVKKRDHMVLHEYVNAAGITKEVKDANIDEKLVTEILKEIEEALKEAARRNKEVKDRLRELSRRVSERNREILEELKERLDRVRERRKDVKELEREVEKLLKRIEESLRRHRKENKRLLEELDRSLRELAKIVKEVLDEIRERTR

SEQ ID NO: 1274 - protein, 178 aa, Artificial Sequence
  Synthetic
SEEEKLKEVKDRIREVLRKLEEHTDKVKKEVEKVRDHMVLHEYVNAAGITAMLERLRRKKKDAEDLLRELEKIIEEIERELDRVLEENDKMAEEWKKLLDKVLDDNRKSIRDIEKELDDREPTDELVTEVEKLLRDDEETNRDVVKKVREAVKKDADTNRKVIEEVKKVLEDAARRLD

SEQ ID NO: 1275 - protein, 186 aa, Artificial Sequence
  Synthetic
SEVDEVRKTLEDLLRRLDEENKDIIRRNKELLDDRDHMVLHEYVNAAGITDELRKILEKLKDRETLTRIIEEIEKRARELIKRLRDEIRKIEEESKKSIEDSRKRNDEIRKRLEELIKDLRDKIKDSEELARRITELEKRVREVIERLKEKNKRLEDDSRRVITELRKKLKDLEDRVREEIEELRK

SEQ ID NO: 1276 - protein, 179 aa, Artificial Sequence
  Synthetic
REDERLEEIARKIKKVVDELVERNKKLTEDNHESRDHMVLHEYVNAAGITEVAKRAIERIRSDKKVVDEVKKLLEDAKKHSKEVIDELRRLNEESKRSSEDTIRRMRKLLRELEETVKAKKGDVEDIERKVEDIIRRLEDLSRRNEEKVRRISEEIKKLSKDNERTIKEIIKEIEERVK

SEQ ID NO: 1277 - protein, 185 aa, Artificial Sequence
  Synthetic
DDIERLKREIERLLKEAEKISRDNEERSKELLDRRDHMVLHEYVNAAGITEELKRLADKIKDKEELTRRLKEVVDRVEKSVRDSERMLREVVREDEESVRRSKTKLEDLLRKVEELVRRLEKKVTDEKVKRDAREALRKAKKKVDELKRKNDEVHRRSREEVKRLLEENRKLLEDLRRMVREITQ

SEQ ID NO: 1278 - protein, 176 aa, Artificial Sequence
  Synthetic
REAEEAKEEVEELNRRNKKELDDARRRVDELDKRRDHMVLHEYVNAAGITEELERVKEEGRSDDRLREKIERMLKTSADELERLKEENKRALRDLAERLRELIERNRRKLEEITRRTVPDKDVLKRLAELIKESIRELERVLEELAEKIDRSLKELDDVLRKNETDLKRVIEDLKR

SEQ ID NO: 1279 - protein, 179 aa, Artificial Sequence
  Synthetic
DEAEKAKRDSEKVVEDNRKMLEDSTRRAERLNEERDHMVLHEYVNAAGITREIDETKRRGTDDEVVKDLIRRVEELLERSRKKLEDLTRDNERVLDESRRRLEKLIRDNERIVKDLTDRVVRVDEVLKRLKEEHRRLIEELEEVLRRNEEIIRRSIEDLERVLDRNRRELEDVIRRLKE

SEQ ID NO: 1280 - protein, 174 aa, Artificial Sequence
  Synthetic
SEEEVLREAAKTVEKLLDEIRRSLEKVSKRVEDSRDHMVLHEYVNAAGITELLEELRKNNVDRTLLEDVRRKLERIEERNEEMNDRSRRKLEELRERNRKILEDIRRTLEDLKRRQLPKDDVERTLREIAKLVDEVDKENKRALRENEERVKTLNRENEEMLKRIEEEVRRATK

SEQ ID NO: 1281 - protein, 182 aa, Artificial Sequence
  Synthetic
SELEKTLEDLKRHSEENKKKLEEDLRDMERNLKERDHMVLHEYVNAAGITKDLERRFREGDIDERELERVRRKMEEIKKRLDENVERNRRKAEDIKRKLDENVKRSEDRVKEIKEDIRRRVRDKDKAEELERRLDELVKENREIHERVKKALDDIVKELEELHERLKRRLEEILRRIAETVR

SEQ ID NO: 1282 - protein, 186 aa, Artificial Sequence
  Synthetic
SEIEKLIEELRRELEKVKDELERSIEEMDRELDDRDHMVLHEYVNAAGITREVTERTKRGDRPEEVLRKELEDIKRKLRRILEEHHEKIRRIKEKLRRENKRVRDELKRIKDEIDEKVKDVRRKGADEELLKRLEEVAEDVKRALEELLKKHTRVVERVEKALDELDKELERIVREAEKELDRREK

SEQ ID NO: 1283 - protein, 179 aa, Artificial Sequence
  Synthetic
RLEDEVRKMEKEVREEVKRLEDESRKVLEESRRNRDHMVLHEYVNAAGITERIKDLRRRGLDERVLRELLKRVREVHERNRKLLDEVRRASEKVHEDNRRILEEVRKTVKDVVDKLRRVDAKVVKELIDRVRKILEDVEREVKKSIEEVKEINRRLNEEVKKTIEEVKEIVKEVTERAK

SEQ ID NO: 1284 - protein, 183 aa, Artificial Sequence
  Synthetic
RVDERLDTVLKRVEETVRENKKKNDELLERSKENRDHMVLHEYVNAAGITREAEKLKREVTKEEVKKIIDEVLKEIEDLLRTVKEELDRALERNREVVEETKRRIDRVLKEIEKLIRDVKRDRKEEVVKEVEERIKKLLKEVNDTSKDAERRLRETNERLNEIVKEVEKRIRELSEEVRKRVK

SEQ ID NO: 1285 - protein, 172 aa, Artificial Sequence
  Synthetic
SRAETVLKEVTDKIKKLADSSDELLRRNKENIDERDHMVLHEYVNAAGITEEIEKGSVDEETLEELIRRVEAELEAHHRELEKNSREDEKRNRDHHAKLEEEMRRVEERLEREGIDDEVVKRVRDLLDTVRRRNEKVNEDVKRMNDKLRRDNEDVIRRVEKLLRELEEKRRT

SEQ ID NO: 1286 - protein, 174 aa, Artificial Sequence
  Synthetic
KEVEDAVKELEDLLRANEDKTRSIVEDMRASNKDRDHMVLHEYVNAAGITDDLRRAGVPRDSLKRLAEDVERVTRESRELLERVHRADRELIERLKESNERLRRAIEEIRKAIKGGSDIKTLLDRVRKLAEEDAERLDRLRRESEELNERVRRVDKKLLEEIRRKAKKVEDDTR

SEQ ID NO: 1287 - protein, 181 aa, Artificial Sequence
  Synthetic
SEVDDVLRRLEELIKTLEDINAKSLEDIKKLIDDRDHMVLHEYVNAAGITRELREAKKGIDSREAEEIAKRVLEELKRTSDDLRKKVERVDEDLRRLLRENHERNKKILRDLERLLRDAARRGVPKEALDRMREEIRRLEEESRKSDETIERLIRELRRRVEEVLKTSTDLIRELEEEVKK

SEQ ID NO: 1288 - protein, 245 aa, Artificial Sequence
  Synthetic
TEEEVLRKVEKLIKDLLDVLRDLLRASEEVVREARDHMVLHEYVNAAGITELSRALSGGSRESVESALAKNEERLKKILEDADRVLDKWRRLLEELSKKAKAVLDEVRKRLEEIKREVPETEKLRTLLTILEEILRALEKIIRDILRINERLLEKLKRILERLRETNREIDERIRKLVEEARGGSEEKLRRDLTETKKELEKRHEDLRRELEKLLRDYKRELEEIERALEEIEKTLKRRADETRR

SEQ ID NO: 1289 - protein, 238 aa, Artificial Sequence
  Synthetic
SKEDKARELEKRLRDNLKKLEEVVRELAEVLKRNRDHMVLHEYVNAAGITRLLDKLRAGGLPKDELEDLRREVEDVLRRLEDLLRKLKKANDESLTRLEELLRRAEEENRRVLTTLRELLRGNGDDRDLARLVARLVEANNRALEELLRLVAKNVEDNNRVLEELLRLVKELAKRLLGRIRDEDLVRDIRRELKELEERARKILRDDERDLRALEKRIRDIIREDREELERLKERARK

SEQ ID NO: 1290 - protein, 243 aa, Artificial Sequence
  Synthetic
KREDILKKLEDIIRDIIDKLRRILEKVKRLNEDIRDHMVLHEYVNAAGITDLLKRIADKSRDRELEDILRRVLEKLRRSLDKLRDTLRKLKEETDTVLERAERTLKELKDRLEKLLRDGEKVSEEDLVEALKALIDELRKVLEDVIRVSKELVERLLRALREHLETNKRLVKELLDALRKTTGDDEEIKRLKEELERRHRRLEEEVERVARELEKAHRDLERDIRRVAEELKKLLKKLRDDRR

SEQ ID NO: 1291 - protein, 244 aa, Artificial Sequence
  Synthetic
SAEETLRRITEESKRVLEEITKKYEDLERESREVRDHMVLHEYVNAAGITDVLTKGGDDKDEVLTVLEKVLDELLKLHRENLRVIKELLRKVLEVDRENLEVLKRLLEKARDLLRRSGRDEKDLKKLEDELRKVKEELEKKHEASKRDIEDLERELDKVTEEVERLLRKLKEELRRAAEGSDEDRERLARLLKALADKLIRVLEEILKINEELNRKIIKFARENLERNRRVNKKVIEVLREAAR

SEQ ID NO: 1292 - protein, 250 aa, Artificial Sequence
  Synthetic
STEEILKRVKEILDELAKELRDIIRESLRTIEELRDHMVLHEYVNAAGITELVKTIKDGVKDSEELLRRLKRLLEDLRRAHEELLKRLKEAVDEHRDRLRKILEELERVLKELRKRIEELRRSGDRISEKDVLRKLEEVLRKALEILERLLKKIRESARELLKIIEEVLDANIKVMEEALKTIKELLKDGPDEVKRRLEEKERRIRTRYEELRRRLRKRVKDYEDKLREIEKKVRRDAERIEEELERAKK

SEQ ID NO: 1293 - protein, 242 aa, Artificial Sequence
  Synthetic
SEKERLMRLLDKLKDLNRRLVERIKELLDKALELRDHMVLHEYVNAAGITELVERGGVPEELLTRIDELIKKLEDEARKISKEVKRLIDELKKRLEDIHREVDRLIRELKETLKGVTDKDELLRRVAEVLERIARLSEELIREVKEVLEKIVELSRELLKRVLDVLRRIAELLEDALRKGNVSEETVRRLREALKKLEDDLRKIERDAEREYKKLKDELEELTERYRREIRKLKEELKADRK

SEQ ID NO: 1294 - protein, 240 aa, Artificial Sequence
  Synthetic
SDKEEIKRRVEKTARDLETEHDKIKKRLEDTVRDRDHMVLHEYVNAAGITRKIEKTLREGDGDATDLVDKLLETVKRLNEEVLRTVKKIADELRRLVEEVLRVLRESNETLARLLEEGNVGDEVRERLEEVLRRTEEIIKTLEEIVKRLLDELRRLVEELRRISKKLKDELDKIKEKGKDEKRLIEEVVRLLRENLDVVRRILEALAKLIKELLEALEEVLRRNKELIRELLRVLDEALK

SEQ ID NO: 1295 - protein, 240 aa, Artificial Sequence; identical to SEQ ID NO: 1294
  Synthetic

SEQ ID NO: 1296 - protein, 248 aa, Artificial Sequence
  Synthetic
DEDRIIEEIARLLEELLRELLELIKKLIETNRRLRDHMVLHEYVNAAGITELLDRLVKKGISDEKLKRIRERLKRALDDLERLHREINKRLEDLVRELEKLVREILKELKDALEELRRASARAGGEEVLRRLEEIVKKLLDLVRRILERLKEIHKDNVRLLRELNERLTRIVEDLVRLIREILREAGVDEKIAEEIERELEELRRMIKRLHEDLERKLKESEDELREIEARLEEKIRRLEEKLERKRR

SEQ ID NO: 1297 - protein, 236 aa, Artificial Sequence
  Synthetic
STREKAKKVLDTLRADNEDMKRVVEKILRALKRTRDHMVLHEYVNAAGITRILKEVGVSEEALKEIEDTLKRVLEEIKRLLDESKKLLEDVEREIREILKTSEELLERIEREIETVGSDEKTLAEILKRLLELNEEMNRRLLKILRDLLRLNEEVIRRLLAVLERLLDALKEALDRGDVPEDLLRKLEEELRRIKEKLRKALEELEREHRELEKELDKLHDESRKEHERIEEELRR

SEQ ID NO: 1298 - protein, 231 aa, Artificial Sequence
  Synthetic
SKEEEVEKVLRKWEEILRRLIEENKRANDKIRRERDHMVLHEYVNAAGITEVAERLGVSEEVKRILEKLIKLLEDILEYEKENVERLIELNERILRELKKSVEELKALVTRVRRDGLPESEVRKLVEDVLRKNEELLKEAKKAWRDSIENLKRVLEEVAKLVKTVLREIEEKIDDEDVVRALIEVIERLLRVAEEVIRRILKVNTELMRVDERSIRESLKAISEVLKVLDT

SEQ ID NO: 1299 - protein, 247 aa, Artificial Sequence
  Synthetic
RDRDVLRKVKAEIEELVARIEKVSRDALSEVKRLRDHMVLHEYVNAAGITSLLRKIRDTRGDDEVVKETEEVLRDNHRLLEELIRRLIKVLEEWLRRHKKLLDEIRELLKEILRLVKESGVSEDLLRRLKRVIEELDKKLKESEEKLRRVVEKAKEDLKAVLEEHRKVLEDLKRALEEVREKLRERGSEEVVEELLRMLKRVAEEMKRVHDDLSRAVEKVVRDVVRVDKELLDELARILRRLEEVIT

SEQ ID NO: 1300 - protein, 237 aa, Artificial Sequence
  Synthetic
KEKEDALKKLEDLARKSREDLERVLRKHKKILDKRDHMVLHEYVNAAGITDDILRKTGTESEILKELARLLREHHEALRRLIEELRRLLEEHHKILEDLAREHKRLLDELIKVVADGVDKDELERIIKELRERDKKLVDDLRKVSEDLLDAVRKLVEDLERISRELLRRVEELAKGIDEELAREVERVIKELLDKSKEILERIERAIDELLKVSEEILKLSEDASEELLKILREFAK

SEQ ID NO: 1301 - protein, 240 aa, Artificial Sequence
  Synthetic
DREKSVRDIEEDLKRVLDKLRRRVETSKEELKKVRDHMVLHEYVNAAGITDVVRELDRGIDSEVLRAVREIVKRLVEVVRRYNELSEKIIRDLVRVNDRVLELLKRIVKRLIDVVRELEKIGDKEKALRRLEEVVKEVKRRIEELLKELEDVHRELVKILEEVNEDLKRVATEVKEIIKTGIKSSEVAKELDEVIKRLLDNLKENTDRLKEVIDRNLADLRDLAEELRAVIERLLEDARR

SEQ ID NO: 1302 - protein, 240 aa, Artificial Sequence; identical to SEQ ID NO: 1301
  Synthetic

SEQ ID NO: 1303 - protein, 241 aa, Artificial Sequence
  Synthetic
SAEEAVEKLVRIARAIVKINEDLSREVVRILREIRDHMVLHEYVNAAGITEVVKVVEDGGLSEDVVRKLRKLVKELEDLLKKSNDDIRKLVEDVARRLKESNDEIRRLVERLEELLKRGPGDEELLRLVEELTEELLRTHEEVVKALEKLTADLLELHRELLERVRRLTKRIEEELKRVGVSEELLRRLEELRKRLEKVLDDSAKELEKLKRELERLLEESRRKLEKLKRDLERVLEETRR

SEQ ID NO: 1304 - protein, 237 aa, Artificial Sequence
  Synthetic
REDEVLRDIERLLREIEEKIRRILEESTAELRKVRDHMVLHEYVNAAGITAIKEDVERKGIDEELRKLLDEVLDKLTKLIERNKRSLERILELIKRIIDENLEVLRDIIRLLEELLKATKDNGVPKDEVIKLVEDVVRRIEELVTRVVARNEKLVKDLDDLAKKNVRENEELLREIDRGLDEDLLEKIKRVIREHIKALEKLARDLKEILRRHIEALKELARDLAEVIRKLLEDVKR

SEQ ID NO: 1305 - protein, 237 aa, Artificial Sequence; identical to SEQ ID NO: 1304
  Synthetic

SEQ ID NO: 1306 - protein, 243 aa, Artificial Sequence
  Synthetic
SEAERLADEVRKAVKKSEEDNETLVREVEKAVRERDHMVLHEYVNAAGITKRLVDLLRDGQVSDRDLLKELEEVLRRVLEALAENHERTEEILKRWLDRYAEDIERLRKVLKEVIEALKRGGSDDKRIVDELEEILRRNEDVLDKIAKRLRRLLEEDRRLLERIVRELKRLLDDLDRITKEGKSEELVRIAIEVLKRLLEIIEELVRLNNEILERLLKIVRELHKDNIKILEDLLRIIEEVLR

SEQ ID NO: 1307 - protein, 243 aa, Artificial Sequence; identical to SEQ ID NO: 1306
  Synthetic

SEQ ID NO: 1308 - protein, 239 aa, Artificial Sequence
  Synthetic
SAEDLVRRVKDLVDKLEDKLRKVVRTNERLWEEIRDHMVLHEYVNAAGITALVEKLKAGDKDKDELIEEAKSLEDESNALVEKLVRDIERVLAESNKLLDTLAKEIEEVLEEIVELVERGSGSDKEAREKLEDIKARLKEVLKKLREESKRIIDELRRLLEEYKRLVKEIRDRIEEVRKRNSEIRVLVELVRRHNKVLKELVEELEKLVRDHNRVVEEVVRELVELLSRAVEVIKEVVK

SEQ ID NO: 1309 - protein, 249 aa, Artificial Sequence
  Synthetic
DAEEVVKRLADVLRENDETIRKVVEDLVRIAEENRDHMVLHEYVNAAGITRIVELLRRGGVPEELLDRLAKVVKSIVEKAEKILERLNRVSKAIAEKLKTIVDELNEVSKEIVKRAEDILRKGKDKETVLRALRTLVKEYADLSKEVLERVERIVREYVKLSDEVVKSLAEIVEELIRIIEDLLRKGNLDEDVKRALEELVSRLRKLLEDVKKASEDIVREVERIVRELAKRSDEILKKLEDIVEKLRE

SEQ ID NO: 1310 - protein, 249 aa, Artificial Sequence; identical to SEQ ID NO: 1309
  Synthetic

SEQ ID NO: 1311 - protein, 240 aa, Artificial Sequence
  Synthetic
DKDKRLEELLKRLKELNDKTFEELERILEELKRARDHMVLHEYVNAAGITARIEGGNLDKRLAELLKKLLDDLKRLLEEYTRTNEELLKRLRELLERYRETNKKLLDLLRKLLDEARRTGTDEDLLRRLEDILRKYEDEVRRLLKELEDILREYEDTSRRLLEELERIAKEAAERVSRGSDKDVKDIIRTILEVARDLLRLLEEDSRTNSEVVKRLLDLLREDSKANSEVVKRLLDVLRE

SEQ ID NO: 1312 - protein, 240 aa, Artificial Sequence; identical to SEQ ID NO: 1311
  Synthetic

SEQ ID NO: 1313 - protein, 240 aa, Artificial Sequence
  Synthetic
SKEETLKRLLDELEKRNRETVERLERLLKELEDRRDHMVLHEYVNAAGITRKIEESGLSKELKDTLARILEELRKLLEEYFRKNEELLRLLRKLLDEYARTNEELLRLLEELLDTARRTGGDSELLKRLEDIAREYEKRVRRLLEKLKDILDKYRKTVEELVRKMEEILKEAKKTISRIGSEEVKDIVRAMEEVIRRLIEILRRDVELNLDVAKKLLELLKEDSKLNLDVARELLELLDR

SEQ ID NO: 1314 - protein, 243 aa, Artificial Sequence
  Synthetic
DEEETLRRLLERKVELAKEYLDVSKEVIDRTTKLRDHMVLHEYVNAAGITELLERGDLGPDELIKRLAEELERSLRELEEEIKRLKRELEESLKKLKEIIDRLAEEAEKLLAVLKRGEGSEEEALRALASLVRELIEVLRENDERLRDVLRRLIEALRKNNEILERVLRKLVRAAEERGRDESSREALEEARRRLEELLRELNEITKDLEAKLEKLLRDLNELTKALEEELKRLLDELKKRTD

SEQ ID NO: 1315 - protein, 243 aa, Artificial Sequence; identical to SEQ ID NO: 1314
  Synthetic

SEQ ID NO: 1316 - protein, 243 aa, Artificial Sequence
  Synthetic
SEAERTKESLKKVLKALVDLNRELLRKLEENMRERDHMVLHEYVNAAGITDKVREGGIVDKDAEREAERLMRELDKSSEDTARETRKLIEESKKSTRRTEEEARKLTETLDRLAKGGLPREDLLRALVRLLEELARLIEEDVRRNAELVKRHIELVERDVAELLRLIKELVDLLADLAEKGSRTEEIRKIVEEILKEIKELADRYREEVRKSKDKLRSILEDYKRKVDELKERLRELIEEVET

SEQ ID NO: 1317 - protein, 243 aa, Artificial Sequence; identical to SEQ ID NO: 1316
  Synthetic

SEQ ID NO: 1318 - protein, 186 aa, Artificial Sequence
  Synthetic
SAEDSIRELLERDERLLEEARKEAKRLNEENERLLRDHMVLHEYVNAAGITLLDDIRKKIKGEKLREIEELVRRVKRTIEKLLEEVKKSVEDSSKRIEELLEAVERSVERTKEEIRRLLDEVRKDRKEELVKRVEERIKRLHDENRRLVKEVIEEVEKLIRDNEKLAEDIEREIRRLLKELDEAAK

SEQ ID NO: 1319 - protein, 178 aa, Artificial Sequence
  Synthetic
DEVEKLLRDLEELDRDIERKVRELLKRNKEVLDDIRDHMVLHEYVNAAGITEVADVIRKTTDKRTVDKLLKELEKILKEVLDRVRRLLEEAKESLDRSREEIERLLEESKTLVDEVRRAGIDKKEVDKIEKHSRDLIERAKRETDRLLEEAERLMREVVDRVRKILEEAKRLIDEARR

SEQ ID NO: 1320 - protein, 182 aa, Artificial Sequence
  Synthetic
DEAEKLLKELRDLLEESRKDLERLLKELEDLLEESRDHMVLHEYVNAAGITRIKETVERRNEREKLEKLLRELKKVVERLKDNLKDNERRNKEAIERVRKKLKDNERENKKVIEDLRAKLKDLEEVKRKIDRLEEESRRVIEEARKRLEEVEEKSKKIIDDARRALDRIDKELRRVVEETRK

SEQ ID NO: 1321 - protein, 174 aa, Artificial Sequence
  Synthetic
SRDEKIRDILRRVLKEVRDSTKKVEEDLEDVHRRTRDHMVLHEYVNAAGITRVRDEGASEELKRRMEEVVRRIEELLKKLLKEDRDVVKEIRDKLDETRKEMEEVAERIKDKIRRGDGREKVAEEVKRIADRLIDLNRRIAEEVDKIVRDSIKKVEEIVTEVEKIVEKLIRDVR

SEQ ID NO: 1322 - protein, 173 aa, Artificial Sequence
  Synthetic
SLEELLEEARKTVERLIRESERVLRESEERVRRLIRDHMVLHEYVNAAGITVIERVEDEEALKELEKLLREDSKRVKEVLDDLRRDLERNKRRNEKVLRELEELLKRLEELVREGVREEELEKLLREIEERVKEMLKRDEDTLREIERKVKEAVRDSERTLEEIEKRVTEEKT

SEQ ID NO: 1323 - protein, 179 aa, Artificial Sequence
  Synthetic
STREDARRLVERVRKEVKRLLKKNSDLLREVTERVRDHMVLHEYVNAAGITEAKRLKDSDERDVERLLDRARKLVKESEDLIRKLLKDLRELVRRSEKDIDELRKELKRLLDELRARATDKDLERVVREIEKEIRDLIRELEENVKTSEKLIEDLIRELEKSVDESRKRVEELVKELRT

SEQ ID NO: 1324 - protein, 175 aa, Artificial Sequence
  Synthetic
SELEKVVDDVRRRLDRLLETSEKLLEDATKRLKDSRDHMVLHEYVNAAGITRLKTVLERRETDKRELLKENKEILERTRELSERNLKEVEDILREVEEEVRKNLRRIEKVLEEVRRKLRSELLKRVEERIKRVLDESKKILKEIADEVRRVLERDKELLKRLEDKNREVSERIRK

SEQ ID NO: 1325 - protein, 174 aa, Artificial Sequence
  Synthetic
SELEKVVKEVADLLRRNLEKSKRVLEEVRRRLEENRDHMVLHEYVNAAGITRILELVREGKDKRDLTRLLEEDDKRVKEALDKSRENNERILKEVRRALRESEEDNRRILKEVREKVDSRLLEELEERVRESIERSRRFIEELEKIVEETLTESEKLARASSEITKTVLDEIRK

SEQ ID NO: 1326 - protein, 180 aa, Artificial Sequence
  Synthetic
SKEEVLDEMRRLHETTKRDIRRVLKEIEELHERTLRDHMVLHEYVNAAGITVIEDIKRKKTPDVEKLVRRVEEMLKELEKHNKKTTDDDKRVLDEIRRRADELVKEDERVLREIEEVVRAGKVDLKELLDESRRVVKESKEDLDRLLKESRDVVDDTRRKSEKNLRDAERVIREAEEAVR

SEQ ID NO: 1327 - protein, 187 aa, Artificial Sequence
  Synthetic
DEEEELRKRLEKLSKEVRELLRRDEEEDRRLNRELRDHMVLHEYVNAAGITEVEDLLRKARRKVSEEELTRLRKKLRDLEEESKEALRELRRRVEELNKENKKSLDDLERRLKELEDRAREVEKRDRREDELRELLRRLEDVIRKLAEDLKRNTEDLRRVIKELAERLEELNKRLKREIRRLKEELR

SEQ ID NO: 1328 - protein, 171 aa, Artificial Sequence
  Synthetic
SEKEKVIKEARELLERLRKRLKDVNDDVTRLLDELRDHMVLHEYVNAAGITRLEEEVPVEDVIRELKRRLEEVDKKNRDILETLKRELDEVSRRTREELEKLRKELEEVEKAGLPAEELKRVADRLRRRLERLVEENERVVKKILDEIRRSVEENKRIVDKVRKDLDERRK

SEQ ID NO: 1329 - protein, 177 aa, Artificial Sequence
  Synthetic
SVIERVEEEMEKVIRDSERVTKEVEDRAREVHERSRDHMVLHEYVNAAGITELRRAGVDKRILDELRKRIKDSREDLERINEELRRALRKLLEDSKRINEELRKTLEELRKRLERVDDEEEVKKLAEEVRRLVEDSIRKLEELARRVDELVRESIERVDRNVEENKRLVREAIERRR

SEQ ID NO: 1330 - protein, 183 aa, Artificial Sequence
  Synthetic
SEIEKLVEDVRKLVEDNLRHSEEVHRRNRRLIEENRDHMVLHEYVNAAGITELRELAERGEIREEEARKVLEEIKRLLDEIRRHSEEVLKEIERTLKENLKHSEEVLRRIEERLEDIKRKDKDSERVRTLVDRLREELKRSLDESEKLNRESRKRVTRSLEKVDDLVRELEKLARKVLEEVKT

SEQ ID NO: 1331 - protein, 181 aa, Artificial Sequence
  Synthetic
EEIERALREMRELSRTHKELVEKILRDIAELAKTHRDHMVLHEYVNAAGITEIADEIRKEDKKEELKRKIDELRRRAEELLKESKEHLKRLEDTVRELIERLKETLKKVEEDLKRILEKLEKSRELDEIAKDVKRLIDENRELLKRVEDEVRRLIRKLEELNRRTEEEVKKLIKKLEDDLK

SEQ ID NO: 1332 - protein, 174 aa, Artificial Sequence
  Synthetic
REIEEAAKDLDRLLEENKKLVKEVEEELRRLLKENRDHMVLHEYVNAAGITELRRRGVPEEELKEVEERARRVIEESRRSSKELEKRLRELLEELRRSTKELEDRLREIKKLLRNGKDVEEVLRRVRKLSRENKEKIRKILEDVKKLSEDNKRRNEELSRRVKTLVDEIKKRAT

SEQ ID NO: 1333 - protein, 177 aa, Artificial Sequence
  Synthetic
SEAEKVVEELKKLLREVEKKIRDHTEDVKRILEELRDHMVLHEYVNAAGITELKDKNSDDDTVRKVKEELDRSHEKLREELRKVAKELKESNEELERDLKRLVEEAEDRLRRLKDRVSEKVLRELEKILEDIKRTLDKLLRENRETLKRIEDRLRELLEENRKLLEKIERELRERSR

SEQ ID NO: 1334 - protein, 178 aa, Artificial Sequence
  Synthetic
SKVEKLEEEIARLVERSRRLVEELKKEVTKVKEKVRDHMVLHEYVNAAGITKLRDIKRRGGSEEVLRRVTEELKKVLEDNRRVIEEVLRDLERILEELKRKAEEVTKRNRDDLKRLRDSGVDEEVLRRVEETSDRSEKELRTVLRDVTEDIKRIAEELKKALEDSTEIIRRAEDELRT

SEQ ID NO: 1335 - protein, 182 aa, Artificial Sequence
  Synthetic
DEVDELLKRLRKLVDEVRKENDKMVKESKRLVEDLRDHMVLHEYVNAAGITELEKILKDTEDKDTLRKIVEEIKRRLRRLLEELKRIIEKALRDNKKLLDEVRKRNKEISDELRRLLEEIRRRNVRVEDIEREAERLLRENEELLRRSEEVIRRSTEKIKKVLRDAEERAREILKRVEDAAK

SEQ ID NO: 1336 - protein, 186 aa, Artificial Sequence
  Synthetic
SEVDEVRKTLEDLLRRLDEENKDIIRRNKELLDDLRDHMVLHEYVNAAGITELRKILEKLKDRETLTRIIEEIEKRARELIKRLRDEIRKIEEESKKSIEDSRKRNDEIRKRLEELIKDLRDKIKDSEELARRITELEKRVREVIERLKEKNKRLEDDSRRVITELRKKLKDLEDRVREEIEELRK

SEQ ID NO: 1337 - protein, 183 aa, Artificial Sequence
  Synthetic
SEVDEVLERIKRLLERLAEHSDKVVRDIEKLLDDNRDHMVLHEYVNAAGITRLEEMRRRGDLREELLERVVREVEKEIRDIKRKNKRSVETVEKLVRDDRKELKRALEDVERLIRELETRLKDKEELRRKLEKVLREAEKVIDELLKKTDEVLKRARETIEDLNRKLDKVLKEVRDKLDRLRD

SEQ ID NO: 1338 - protein, 179 aa, Artificial Sequence
  Synthetic
KDEETLKRLLEKAKEVVDRLKDENEKVTRDNHESVRDHMVLHEYVNAAGITVARDAIRRVREAKEVVDTAEKLLRDNHEHSRDTVKKARELNETSRRHSERIVEKIEEILEEVERTLRENRGDVRELAKKVEKAIRELEELSRENREAVKRISDEIKRLSDENAKDSERIIKEIDDRVR

SEQ ID NO: 1339 - protein, 185 aa, Artificial Sequence
  Synthetic
DDIERLKREIERLLKEAEKISRDNEERSKELLDRLRDHMVLHEYVNAAGITELKRLADKIKDKEELTRRLKEVVDRVEKSVRDSERMLREVVREDEESVRRSKTKLEDLLRKVEELVRRLEKKVTDEKVKRDAREALRKAKKKVDELKRKNDEVHRRSREEVKRLLEENRKLLEDLRRMVREITQ

SEQ ID NO: 1340 - protein, 184 aa, Artificial Sequence
  Synthetic
ELIKKARKDVEEVRERSERLVDELRKRNKKLADESRDHMVLHEYVNAAGITEIEDLLRKRRTKDVLKEIEDLVRELERELRRVVKESSDKVRKLIRENEKVVEESSRLFRDLVEKLRRVVEERNDKKLMEEVERLIKRLEDVNEKSERDVREINKESERVNEETEREVEDAIRKLREVLRRAKK

SEQ ID NO: 1341 - protein, 186 aa, Artificial Sequence
  Synthetic
KEVEDLERRVKEILDRMKRLIDENRKKIEKSIRELRDHMVLHEYVNAAGITELKDLKREGGDDARTLRERVRKIIEDVEEHSRRSTEEVRRIHKENKEHSERSSDEIRELLRRVEELIEEVKRRLRDKEMEKKLEDIVRRVREVVRRAHETNERLVDRSRKAVEKAERTNRRLVEEIRKVAEEVRK

SEQ ID NO: 1342 - protein, 186 aa, Artificial Sequence
  Synthetic
KEVEDLERTVRTILKRMRELITRNEEEIRRSIEELRDHMVLHEYVNAAGITEMKELKKEGGDDKKRLVEEIKRLLDELRENSKRSSDRAKEIHERNKRHSEESSRTIEKLLKELRDLVRDVERKLRDEDAKRKLDELTKRVEKVVREADERNKRLTKRSKEVLDEVHRANEEALKEVEEVVRRVTK

SEQ ID NO: 1343 - protein, 185 aa, Artificial Sequence
  Synthetic
SAEELLRTIEKRIEDNHRRLEEILEEIARLIEDMLRDHMVLHEYVNAAGITVLDRVRRAGVPEEVLERVRRELERLKKELEELRRRSEEKVKELKRRLEEIRRKLEEEHRDLRRKLEELRRDLGDKEEVVKKLVEDVERELERSLREAEDLLRRVEEVIRTSKKESKDVLEKIERLLRDLERRTR

SEQ ID NO: 1344 - protein, 182 aa, Artificial Sequence
  Synthetic
SELEKTLEDLKRHSEENKKKLEEDLRDMERNLKENRDHMVLHEYVNAAGITDLERRFREGDIDERELERVRRKMEEIKKRLDENVERNRRKAEDIKRKLDENVKRSEDRVKEIKEDIRRRVRDKDKAEELERRLDELVKENREIHERVKKALDDIVKELEELHERLKRRLEEILRRIAETVR

SEQ ID NO: 1345 - protein, 179 aa, Artificial Sequence
  Synthetic
RLEDEVRKMEKEVREEVKRLEDESRKVLEESRRNLRDHMVLHEYVNAAGITRIKDLRRRGLDERVLRELLKRVREVHERNRKLLDEVRRASEKVHEDNRRILEEVRKTVKDVVDKLRRVDAKVVKELIDRVRKILEDVEREVKKSIEEVKEINRRLNEEVKKTIEEVKEIVKEVTERAK

SEQ ID NO: 1346 - protein, 183 aa, Artificial Sequence
  Synthetic
SIREKIRELEERLEEVLRRIEENSERVLREAERVLRDHMVLHEYVNAAGITALEEIRKLPVEDELVRRVKELVERLKRHNKKSSEDVERVVRELKEELKRSSEEVKKAVDRLKEELEKVLRDGGEREVDRVIRKLEDVLRKLEEHNRRVVERLKRLLEELKKHNEDSLRKSEEVLRKLEEDAR

SEQ ID NO: 1347 - protein, 174 aa, Artificial Sequence
  Synthetic
SESDEVIRDLARLLDELARHVDDSVRRMDEVVKRSRDHMVLHEYVNAAGITEVEKKPGDERVERMVAEIERLVAEVLEELKKKYEKLKREVEENLRRLEETVRDIVEKARKVTEKGVSKEKIDRIIRELERILEEAKKKHEDVLRRLEDSLRRVAELLKAALDRLREIVDRLRR

SEQ ID NO: 1348 - protein, 174 aa, Artificial Sequence
  Synthetic
SESDDVIRKLRELLEELRTHVEKSIRDLRKILEDSRDHMVLHEYVNAAGITEVRKKPGDEEVRKTVEEISRRVAENVKRLEDLYRRMEEEVKKNLDRLRKRVEDIIREVEEARKKGVDEEKLKDLIRKLRDILRRAAEAHKKLIDDARESLERAKREHEKLIDRLKKILEELER

SEQ ID NO: 1349 - protein, 172 aa, Artificial Sequence
  Synthetic
SRAETVLKEVTDKIKKLADSSDELLRRNKENIDELRDHMVLHEYVNAAGITEIEKGSVDEETLEELIRRVEAELEAHHRELEKNSREDEKRNRDHHAKLEEEMRRVEERLEREGIDDEVVKRVRDLLDTVRRRNEKVNEDVKRMNDKLRRDNEDVIRRVEKLLRELEEKRRT

SEQ ID NO: 1350 - protein, 178 aa, Artificial Sequence
  Synthetic
SEAEKAKETIDRLADRVRKLLEEIKRSLDDSRRKSRDHMVLHEYVNAAGITEVDAAKRGSVSEEELERLIRKLKKTLDELRRRHEKLVEDLRRNLERIKRRLEELTREMRETLERLAREGLDEEVLRTLEEIIRRLTKELEDVLREYERELRRLEEENKRVIDKTEEEIRRLADRLRR

SEQ ID NO: 1351 - protein, 178 aa, Artificial Sequence; identical to SEQ ID NO: 1350
  Synthetic

SEQ ID NO: 1352 - protein, 179 aa, Artificial Sequence
  Synthetic
SEVEELIKRLAKVLKELVDKVRKVIEDTKELLERLRDHMVLHEYVNAAGITEAKDQPIDDEELKEILDRLRKTLEELEEELKKALEDDREEAKRLVDDARRVLKELEEEVREIRERRGESEELDRRIEKVLKEIEEKIREVIKEWERVHREVEELLKRLIDENRKVLDEIRKLLEEKSK

SEQ ID NO: 1353 - protein, 182 aa, Artificial Sequence
  Synthetic
SELEEIEKKVRELTKRHRELVERVRKTVKELIETNRDHMVLHEYVNAAGITEVRDLERRGEPKEDLKARLEDIIRRLAEDIERVKRETDKLLEELARIIEEVEKEMRETNKELDKEIKDGGLDDKALEEAKRVLAENNEVIKDIKRALDELLKELEKSVRESEERLRRLLEEVKRVIEEVAT

SEQ ID NO: 1354 - protein, 177 aa, Artificial Sequence
  Synthetic
SSEERLRAVIEDLKRLAEESRKRHKELIDELAKAVRDHMVLHEYVNAAGITVVDDIRRGVSEELLKRIEEVLDEIRKELEENIKRIRKVLDELRRTSEENIARIEKVLRELEDLVRKGGSDADTIIEEVKRVLEELARSTEEVEKRVRDAIEELERSSEELARRIKEVLKRLEEETR

SEQ ID NO: 1355 - protein, 184 aa, Artificial Sequence
  Synthetic
DEIRKVVKEITDLLKASNDKNRKVVEEIRDLLRKSRDHMVLHEYVNAAGITDLRRRIDKSGDKETAEDIVRRIIEELKRILKEIEDLARRINREIERLVEEVERDNRDVNRAIEELLKDIARRGGSEDLKRVEERAREVSRRNEESMRRVKEDADRVSEANKEVLDRVREEVKRLIEEVRETLR

SEQ ID NO: 1356 - protein, 176 aa, Artificial Sequence
  Synthetic
STAETVAEEVERVLKHSDDLIKEVEDVNRRVEEEIRDHMVLHEYVNAAGITEVRKGVKGEILAEIEKRLADNSEKVREVAERAKKLLEENTARVKDILRESRKLVKDLLDEVRGTGSEEAAREIIKRLREVNKRTKEKLDELIKHSEEVLERVKRLIDELRKHSEEVLEDLRRRAK

SEQ ID NO: 1357 - protein, 186 aa, Artificial Sequence
  Synthetic
SEVDEIIKELERLLAEIARENERIIRESRKLADEVRDHMVLHEYVNAAGITRLADAVRRKGSESEEVKKLIEDVLREIERLLKRIEEENREVVKRNSELVERVRAINEEILRRVAELVEKIARDIGDKDEVTKVKKVADDVLAEIKKLDDETRRVIEDTNKKIADLDKATRDVVRKVLEEVKKLEK

SEQ ID NO: 1358 - protein, 185 aa, Artificial Sequence
  Synthetic
SEIDEVLTRLRKISKDLNETSDRVNERARKIIDDIRDHMVLHEYVNAAGITRLKREIDKTRDRDVLRRILKEIEDVARRVKEINEELLARVEKVVREVEEINRELVKRSREAVEAVKRLLDRGVSDEDKVERVVREVEKLHEEDRKRLEESTRSVRKLLEELKRELEKSTRSVKALVDELRERVR

SEQ ID NO: 1359 - protein, 177 aa, Artificial Sequence
  Synthetic
SEDEDLDRVAEKLAREHKKSVEEIKRVLKSADEESRDHMVLHEYVNAAGITEVEEARRGNIDEELVERLKKKIEDILRTLEERHKKLIKELREILKRLSDESRRLAEETEKVLEDLERKGVDEEVLKKLAEIVRRVKEENRKVNEEVEKRLRELEEENKKVIEDLKSTVEELVERLR

SEQ ID NO: 1360 - protein, 185 aa, Artificial Sequence
  Synthetic
SSVEELLERLRRISEENKRRIEKLLREVEKVLRELRDHMVLHEYVNAAGITKVKEEIKSGLPEEAVKRVLERVRERVKEVLEEADRLNDEMRRIVTEVEKELDKSDKEVEDAVRDILKKIEEGVRDRETAERARETLKRLLDENRDRSKKVKEEIRRILEDLTRTTERVKREIAKLLKELEDTAR

SEQ ID NO: 1361 - protein, 238 aa, Artificial Sequence
  Synthetic
EEDERLTKRVEEIKRENRELLRRLEEEVKELERKSRDHMVLHEYVNAAGITKLDSGKGSTELLVEELEKLIREILKLSEDHNRTLEEVVRKIEDVLRANLERLKELVDEILKALKERGKGDSEELKRKVEKVARDYERLLRKLREVVKRILDESKRLDEELEERLKEVLKKLEELIKRGGPDKDVLTELKRILDELLKLVEKLIRRNLRLLEELLRLVREILRTSNEILEEILKDARR

SEQ ID NO: 1362 - protein, 238 aa, Artificial Sequence
  Synthetic
SKEDKARELEKRLRDNLKKLEEVVRELAEVLKRNLRDHMVLHEYVNAAGITLLDKLRAGGLPKDELEDLRREVEDVLRRLEDLLRKLKKANDESLTRLEELLRRAEEENRRVLTTLRELLRGNGDDRDLARLVARLVEANNRALEELLRLVAKNVEDNNRVLEELLRLVKELAKRLLGRIRDEDLVRDIRRELKELEERARKILRDDERDLRALEKRIRDIIREDREELERLKERARK

SEQ ID NO: 1363 - protein, 243 aa, Artificial Sequence
  Synthetic
KREDILKKLEDIIRDIIDKLRRILEKVKRLNEDIIRDHMVLHEYVNAAGITLLKRIADKSRDRELEDILRRVLEKLRRSLDKLRDTLRKLKEETDTVLERAERTLKELKDRLEKLLRDGEKVSEEDLVEALKALIDELRKVLEDVIRVSKELVERLLRALREHLETNKRLVKELLDALRKTTGDDEEIKRLKEELERRHRRLEEEVERVARELEKAHRDLERDIRRVAEELKKLLKKLRDDRR

SEQ ID NO: 1364 - protein, 247 aa, Artificial Sequence
  Synthetic
SEKEELLKLIKRVIELLKRVLEEHLRLVEDVIRRLRDHMVLHEYVNAAGITDLKRLLDEVRGDKEELDRIKEKLEEVLERYKRRLEEIKRDLERMLEDYKRELKRIEEDLRRVLEEVERIATRGEGPAEALIDKLRKILERALRELDKLSKKLDELLKKVLEELEKSNREIDKLLKDVLRRVEEGGASEDLLRKAKKVITEVREKLKRNLEDVRRVIEDVKRKSARILEEARRLIEEVERELEKIRK

SEQ ID NO: 1365 - protein, 238 aa, Artificial Sequence
  Synthetic
SEAEKIREALETNLRLLEELIKRLKEILDTHNELLRDHMVLHEYVNAAGITLLEEGGLDEEVLREVKRLVDELRKEARRVLDEHEKLVRKIKKEAEDVARESEEIIKEVEDKLKGLDREELLERVRRVLKKSDDLIAELVRRALKILEELTRLLAELLKKVVEILRRIVELVERVLTKKGAPKEDLERLRRKVEELEDRLRRLLEKLARDSAELMRELERILDRYARESEELDRRLAE

SEQ ID NO: 1366 - protein, 247 aa, Artificial Sequence
  Synthetic
SEAEDLEELIKELAELLKDVIRKLEKINRRLVKILRDHMVLHEYVNAAGITELRKGTVEDKDILRDLERRLREILEESDRLLEELKRRLEEILRKSKELLRRLEEVLREILKRAEEVKRSNLPKEELIKEIVKLLEELLRVIEKILEDNIRLLEELVEVIKEILEKHLRLLEELVRVIERILREVGKDKDEAERRRRELKDKLDRLREEHEEVKRRLEEELTRLRETHKKIEKELREALKRVRDRST

SEQ ID NO: 1367 - protein, 240 aa, Artificial Sequence
  Synthetic
SDKEEIKRRVEKTARDLETEHDKIKKRLEDTVRDIRDHMVLHEYVNAAGITKIEKTLREGDGDATDLVDKLLETVKRLNEEVLRTVKKIADELRRLVEEVLRVLRESNETLARLLEEGNVGDEVRERLEEVLRRTEEIIKTLEEIVKRLLDELRRLVEELRRISKKLKDELDKIKEKGKDEKRLIEEVVRLLRENLDVVRRILEALAKLIKELLEALEEVLRRNKELIRELLRVLDEALK

SEQ ID NO: 1368 - protein, 240 aa, Artificial Sequence; identical to SEQ ID NO: 1367
  Synthetic

SEQ ID NO: 1369 - protein, 248 aa, Artificial Sequence
  Synthetic
DEDRIIEEIARLLEELLRELLELIKKLIETNRRLNRDHMVLHEYVNAAGITLLDRLVKKGISDEKLKRIRERLKRALDDLERLHREINKRLEDLVRELEKLVREILKELKDALEELRRASARAGGEEVLRRLEEIVKKLLDLVRRILERLKEIHKDNVRLLRELNERLTRIVEDLVRLIREILREAGVDEKIAEEIERELEELRRMIKRLHEDLERKLKESEDELREIEARLEEKIRRLEEKLERKRR

SEQ ID NO: 1370 - protein, 251 aa, Artificial Sequence
  Synthetic
DEEEKIRTTLDLLRKLLKVLREILEELIRSNKELNRDHMVLHEYVNAAGITLLKKLADDGGVDEEALRRIKKRLEDLIRTNREIEERIDRESERLAEELRRILRELEKELRRLIEDLKEVLKRGLPREELLRRLKKVVEDVLRILEEVLRVVDELDKENVRLLREWLERNKEIVEEVIRILEDLIRKGGSESEEKVRDTEKKLRDLREKHAEIAKELERLLRENRRRLEELAREAKKVLDELRKRLEDERR

SEQ ID NO: 1371 - protein, 238 aa, Artificial Sequence
  Synthetic
DADELLRRLAEEVERVIREAEDLLRRWKETIKKVLRDHMVLHEYVNAAGITVIRELTKTKGDEELAKLIKDLLDTNEKVNRDLLRLIKKLLKDAERVNRRLLELIEELLEELKRVAKDLGLREEADKKLRDIADRARKELEDYERRLKELLKTVEDALRKAEEDSRKLKRDVEELLERGRLRKDDLEDILRKNLDRLRKLLERLREILRENLEALKKTLKRLEDVVREILEDLKRERK

SEQ ID NO: 1372 - protein, 231 aa, Artificial Sequence
  Synthetic
DKAEVLREALKLLKDLLEELIKIHEESLKRILDLIRDHMVLHEYVNAAGITLLERSGLDERELRKVERMATESLRTIAKLKEELRDLARRSLEKLREDLKRVDDTLRKVEEKVRRTGPSEELIEELIRTIEKLLKEIVRINEEVLKAVRELLKTLLKLSEDVVRRIEEILRKGGVPEEIDRELKRVVEELRRLHEEIKERLDDVARRSEEELRRIIKKLKEVVKEIRKKLK

SEQ ID NO: 1373 - protein, 236 aa, Artificial Sequence
  Synthetic
STREKAKKVLDTLRADNEDMKRVVEKILRALKRTNRDHMVLHEYVNAAGITILKEVGVSEEALKEIEDTLKRVLEEIKRLLDESKKLLEDVEREIREILKTSEELLERIEREIETVGSDEKTLAEILKRLLELNEEMNRRLLKILRDLLRLNEEVIRRLLAVLERLLDALKEALDRGDVPEDLLRKLEEELRRIKEKLRKALEELEREHRELEKELDKLHDESRKEHERIEEELRR

SEQ ID NO: 1374 - protein, 247 aa, Artificial Sequence
  Synthetic
SKAEKLLKDLREALEKVKRRYEELERRLDEVLKEHRDHMVLHEYVNAAGITRIEEGGLPEEELEKLKKLAEKVKELLRELLRLSKELVDRVRELLKRDLDLVRRLVEIALKVLREAREQPNDEKRVEKIKRDLEKKARRVREENERIKRDLKRTADESRKRLEKLLEDLKRELDRLREDLDRGRKDIDERVEELIERLIRIIERLLREVIKSHEKLVRTIERLIEESIRVNEELLEVIERLLDRARK

SEQ ID NO: 1375 - protein, 247 aa, Artificial Sequence; identical to SEQ ID NO: 1374
  Synthetic

SEQ ID NO: 1376 - protein, 231 aa, Artificial Sequence
  Synthetic
SKEEEVEKVLRKWEEILRRLIEENKRANDKIRREYRDHMVLHEYVNAAGITVAERLGVSEEVKRILEKLIKLLEDILEYEKENVERLIELNERILRELKKSVEELKALVTRVRRDGLPESEVRKLVEDVLRKNEELLKEAKKAWRDSIENLKRVLEEVAKLVKTVLREIEEKIDDEDVVRALIEVIERLLRVAEEVIRRILKVNTELMRVDERSIRESLKAISEVLKVLDT

SEQ ID NO: 1377 - protein, 231 aa, Artificial Sequence; identical to SEQ ID NO: 1376
  Synthetic

SEQ ID NO: 1378 - protein, 231 aa, Artificial Sequence
  Synthetic
SKDEELARLLEELVERWRKIVEDLERDHRRLVKEIRDHMVLHEYVNAAGITRIRKNGIDERIVRLIEEIAKIIEEVLKEIVKLVERAVRENVRVLRESVRLVAELVETLARLLRGSDERVTEAIKKVLDTSEDLIRRVIKVNEDILREIAKLVEEVLREAERILTEIKKEGDREEIRRILEELKRIVDDVLRIIARILKLLRDLTRRLAEVAKAVHKLLEELLRKLKEDTR

SEQ ID NO: 1379 - protein, 231 aa, Artificial Sequence; identical to SEQ ID NO: 1378
  Synthetic

SEQ ID NO: 1380 - protein, 237 aa, Artificial Sequence
  Synthetic
KEKEDALKKLEDLARKSREDLERVLRKHKKILDKIRDHMVLHEYVNAAGITDILRKTGTESEILKELARLLREHHEALRRLIEELRRLLEEHHKILEDLAREHKRLLDELIKVVADGVDKDELERIIKELRERDKKLVDDLRKVSEDLLDAVRKLVEDLERISRELLRRVEELAKGIDEELAREVERVIKELLDKSKEILERIERAIDELLKVSEEILKLSEDASEELLKILREFAK

SEQ ID NO: 1381 - protein, 237 aa, Artificial Sequence; identical to SEQ ID NO: 1380
  Synthetic

SEQ ID NO: 1382 - protein, 229 aa, Artificial Sequence
  Synthetic
SKEERLREVAEKHKKDLEDIVKRVDEAAKETARRLRDHMVLHEYVNAAGITDLEKGPDDEKLKKVKKILKDIMDRLAELIKKILKLLKENLEKIKELLRRNLEISEELLKLAKGLSDRDVLETVRRVLEKLDEEWDRVLEDSRRIIETILRELDTLLREVEKLIKEIKDEISGSKEVLDILERAVEVVRRVIKALKEVLERHVDATREVIERVKRVNKRLLEAVREVVT

SEQ ID NO: 1383 - protein, 229 aa, Artificial Sequence; identical to SEQ ID NO: 1382
  Synthetic

SEQ ID NO: 1384 - protein, 241 aa, Artificial Sequence
  Synthetic
SEKELLKEILDRIRELLEDDNRLLKRIVDEIRKLLRDHMVLHEYVNAAGITLLDRIGAPEDVIRELTRALKETEEDVDRVIRTLEKLLKEVLDAHEEVVRKLDRLLKEVERLVEGGDAEEVVRDLLRVVKEILDESKAVIDELARVVDEILKLLEEVDRKLAKVVKEILEDVLRGSGDDEDAVRKIAKIIEELKRLLEDLARDTRRVIEEAKRLLKEWRDRNKEVADTLKKLLEDLIRKIR

SEQ ID NO: 1385 - protein, 241 aa, Artificial Sequence; identical to SEQ ID NO: 1384
  Synthetic

SEQ ID NO: 1386 - protein, 246 aa, Artificial Sequence
  Synthetic
SEREELLERIKEILKRVKDKLDEDLKRLKEILEKLRDHMVLHEYVNAAGITEVREKLERTGRTDELVKEVLDTVRRNLENLKRLVEDILRKLEENVKNLTDLVREILKLITELIKRLEDGGLPKEVLDALRRVLEKLEELLREILERLKRSLEAVKRKIEELLKELERSLDELRRALERIRKEIGDSETAVRAIIRVLEKHLEAVRRVLEELLKVLAEHLETVRELIERLKRVLEEAIEVVERVAR

SEQ ID NO: 1387 - protein, 240 aa, Artificial Sequence
  Synthetic
DREKSVRDIEEDLKRVLDKLRRRVETSKEELKKVLRDHMVLHEYVNAAGITVVRELDRGIDSEVLRAVREIVKRLVEVVRRYNELSEKIIRDLVRVNDRVLELLKRIVKRLIDVVRELEKIGDKEKALRRLEEVVKEVKRRIEELLKELEDVHRELVKILEEVNEDLKRVATEVKEIIKTGIKSSEVAKELDEVIKRLLDNLKENTDRLKEVIDRNLADLRDLAEELRAVIERLLEDARR

SEQ ID NO: 1388 - protein, 243 aa, Artificial Sequence
  Synthetic
SEAERLADEVRKAVKKSEEDNETLVREVEKAVRELRDHMVLHEYVNAAGITRLVDLLRDGQVSDRDLLKELEEVLRRVLEALAENHERTEEILKRWLDRYAEDIERLRKVLKEVIEALKRGGSDDKRIVDELEEILRRNEDVLDKIAKRLRRLLEEDRRLLERIVRELKRLLDDLDRITKEGKSEELVRIAIEVLKRLLEIIEELVRLNNEILERLLKIVRELHKDNIKILEDLLRIIEEVLR

SEQ ID NO: 1389 - protein, 245 aa, Artificial Sequence
  Synthetic
SEKDEVTRRIRELLKEAEETNREAIERIKRLLDRVRDHMVLHEYVNAAGITRLKKVLDRGLQDDEALLKLLIDALREHNRLSTELIKILIDVLRTILKIIKDVLATNIEIARRILDLVRRLAERGGLDDRLVKEVEKLVRTAERLHRDALRKVKRLVEELEKRLRELVKTDHDLVRRLETLLRRGSGSKEDLLREIARILAESLRLIRELLKEIEKIVKEIIELLERLNDELRKIIEAILETTKK

SEQ ID NO: 1390 - protein, 245 aa, Artificial Sequence; identical to SEQ ID NO: 1389
  Synthetic

SEQ ID NO: 1391 - protein, 249 aa, Artificial Sequence
  Synthetic
DAEEVVKRLADVLRENDETIRKVVEDLVRIAEENDRDHMVLHEYVNAAGITIVELLRRGGVPEELLDRLAKVVKSIVEKAEKILERLNRVSKAIAEKLKTIVDELNEVSKEIVKRAEDILRKGKDKETVLRALRTLVKEYADLSKEVLERVERIVREYVKLSDEVVKSLAEIVEELIRIIEDLLRKGNLDEDVKRALEELVSRLRKLLEDVKKASEDIVREVERIVRELAKRSDEILKKLEDIVEKLRE

SEQ ID NO: 1392 - protein, 240 aa, Artificial Sequence
  Synthetic
SKEETLKRLLDELEKRNRETVERLERLLKELEDRNRDHMVLHEYVNAAGITKIEESGLSKELKDTLARILEELRKLLEEYFRKNEELLRLLRKLLDEYARTNEELLRLLEELLDTARRTGGDSELLKRLEDIAREYEKRVRRLLEKLKDILDKYRKTVEELVRKMEEILKEAKKTISRIGSEEVKDIVRAMEEVIRRLIEILRRDVELNLDVAKKLLELLKEDSKLNLDVARELLELLDR

SEQ ID NO: 1393 - protein, 240 aa, Artificial Sequence; identical to SEQ ID NO: 1392
  Synthetic

SEQ ID NO: 1394 - protein, 243 aa, Artificial Sequence
  Synthetic
SEAERTKESLKKVLKALVDLNRELLRKLEENMRELRDHMVLHEYVNAAGITKVREGGIVDKDAEREAERLMRELDKSSEDTARETRKLIEESKKSTRRTEEEARKLTETLDRLAKGGLPREDLLRALVRLLEELARLIEEDVRRNAELVKRHIELVERDVAELLRLIKELVDLLADLAEKGSRTEEIRKIVEEILKEIKELADRYREEVRKSKDKLRSILEDYKRKVDELKERLRELIEEVET

SEQ ID NO: 1395 - protein, 186 aa, Artificial Sequence
  Synthetic
SAEDSIRELLERDERLLEEARKEAKRLNEENERLLERDHMVLHEYVNAAGITLDDIRKKIKGEKLREIEELVRRVKRTIEKLLEEVKKSVEDSSKRIEELLEAVERSVERTKEEIRRLLDEVRKDRKEELVKRVEERIKRLHDENRRLVKEVIEEVEKLIRDNEKLAEDIEREIRRLLKELDEAAK

SEQ ID NO: 1396 - protein, 178 aa, Artificial Sequence
  Synthetic
DEVEKLLRDLEELDRDIERKVRELLKRNKEVLDDIERDHMVLHEYVNAAGITVADVIRKTTDKRTVDKLLKELEKILKEVLDRVRRLLEEAKESLDRSREEIERLLEESKTLVDEVRRAGIDKKEVDKIEKHSRDLIERAKRETDRLLEEAERLMREVVDRVRKILEEAKRLIDEARR

SEQ ID NO: 1397 - protein, 182 aa, Artificial Sequence
  Synthetic
DEAEKLLKELRDLLEESRKDLERLLKELEDLLEESKRDHMVLHEYVNAAGITIKETVERRNEREKLEKLLRELKKVVERLKDNLKDNERRNKEAIERVRKKLKDNERENKKVIEDLRAKLKDLEEVKRKIDRLEEESRRVIEEARKRLEEVEEKSKKIIDDARRALDRIDKELRRVVEETRK

SEQ ID NO: 1398 - protein, 182 aa, Artificial Sequence
  Synthetic
RVEDALRKLLDDVRRLVEEAERRLRTSNDKSRRLVERDHMVLHEYVNAAGITVRDVRRRIRDEDVKRVLEELLKRDHDVVRRVLERIDEMLERNSRLVKRVLEDIRRLLKRVREVVERIKRVRSKVVEEVLKELEELIKTAKKIIEDVLRASEDTIRRLEEIIRKVEEDSKRIIEEIERAAR

SEQ ID NO: 1399 - protein, 184 aa, Artificial Sequence
  Synthetic
SLEEVIKTVRKLLEEVERRLREVVERAERMLEEVRRRDHMVLHEYVNAAGITEKALRDKNVSEEIEEKLRKIKEELERDNEKVNRDNERSVETLRRLLDRVRKEVKDIAKELEERLKEVERKSRDDRIVEKLLRDAERIVKRLRELIEKLREEVEKIVDENRKTVEELRRRNEEIVRRLRREIE

SEQ ID NO: 1400 - protein, 177 aa, Artificial Sequence
  Synthetic
ELREDVERVVDEIRRLVEENVRRIDEVAKDIKRLADRDHMVLHEYVNAAGITIRRLKEEGVTEVVDELREEVRKLSEDNRRHSRELIERVKKLLKELEEHSRDLKRRVKELLEDLKRKGVDERVLKKLKEVIEDVERKSRDALRRLEEAIRRVRRESERVNRELDEVIKRVTEELKK

SEQ ID NO: 1401 - protein, 174 aa, Artificial Sequence
  Synthetic
SEDETIRRIVRTVHEESRKSTEDVRREVERVLRESERDHMVLHEYVNAAGITVEETGISEELEERMRRIIREIREHLKDNLRRVREVIERIERKLEETERRDEKVLREIEKKIRDGDGREEVAREVTKIARDTIRENEEIAKEVREIVERSIKNLEEVAEEVERVVRELIEARR

SEQ ID NO: 1402 - protein, 174 aa, Artificial Sequence
  Synthetic
SRDEKIRDILRRVLKEVRDSTKKVEEDLEDVHRRTERDHMVLHEYVNAAGITVRDEGASEELKRRMEEVVRRIEELLKKLLKEDRDVVKEIRDKLDETRKEMEEVAERIKDKIRRGDGREKVAEEVKRIADRLIDLNRRIAEEVDKIVRDSIKKVEEIVTEVEKIVEKLIRDVR

SEQ ID NO: 1403 - protein, 170 aa, Artificial Sequence
  Synthetic
SEVEDVVRKVEKLVRDLIKHVEENVRRVEEVVRKLIRDHMVLHEYVNAAGITLAKEPGSEDLLRKLEKVLKEIDDKLKELEDRLRDMVRRSRESSEENERRLKRVEDEVRRNGISEEVEKVLREVVKEVEKVNRESREVTRRVLEEAKEMLERVKKIVKEVIEKVRRVVK

SEQ ID NO: 1404 - protein, 173 aa, Artificial Sequence
  Synthetic
SLEELLEEARKTVERLIRESERVLRESEERVRRLIERDHMVLHEYVNAAGITIERVEDEEALKELEKLLREDSKRVKEVLDDLRRDLERNKRRNEKVLRELEELLKRLEELVREGVREEELEKLLREIEERVKEMLKRDEDTLREIERKVKEAVRDSERTLEEIEKRVTEEKT

SEQ ID NO: 1405 - protein, 174 aa, Artificial Sequence
  Synthetic
SELEKVVKEVADLLRRNLEKSKRVLEEVRRRLEENLRDHMVLHEYVNAAGITILELVREGKDKRDLTRLLEEDDKRVKEALDKSRENNERILKEVRRALRESEEDNRRILKEVREKVDSRLLEELEERVRESIERSRRFIEELEKIVEETLTESEKLARASSEITKTVLDEIRK

SEQ ID NO: 1406 - protein, 180 aa, Artificial Sequence
  Synthetic
STEEVLDEIRKLHKTLTEDIKRVLREIEELHRRTIERDHMVLHEYVNAAGITIDDVRTKDTPNVEKLLKDLEKSAKENEEHNERTLREDDRVLKEIRRRATELLKANEEMLRRIEEVMRAGKVDAEELLRESKEAIKEVKRVLEELRKESKRVVDETRKLSEENLEHSERVLRKVEEDLR

SEQ ID NO: 1407 - protein, 180 aa, Artificial Sequence
  Synthetic
SKEEVLREIERLHKETIRRIEEVLREATELHKRLTERDHMVLHEYVNAAGITIEDVRRADTPNVEELLRELKDALDKVRDHNRKTLKKNEDVVREIEKEVRELLKEDEDVLRRIEKVMRDGRVDARELLEESRREVERSEKEVERLLRKSRKVVEEVRKLSEENDREVKKILEEVKRRLD

SEQ ID NO: 1408 - protein, 178 aa, Artificial Sequence
  Synthetic
DDLERVLKEIKKAADKIREDNKRTADKIRKRVKELDRDHMVLHEYVNAAGITIKERVRGREEARKVIEELKKLVDEVRKRNEKSIEELKKLLKEDRDLMRRVIEELEDLVRRLREEVRDDEALRRVEEEVERLIRDLRRVLKETSDRVRELIDKHRRLSEEVEKDVKRLIDELKKKTD

SEQ ID NO: 1409 - protein, 187 aa, Artificial Sequence
  Synthetic
SEKETVRDELRKLVETIRKLLEEDKESDKRLADRIRRDHMVLHEYVNAAGITLEKVLEELRKKVSEDELRKLRKRIEDLRRRDEELNKRSREKLEDLNERNKDSLRRIEDELRKLVEEAREVEKRDNDEERLRKLLERLERVIRDLLRKIEENNKRLRKAIKELLDELRKINKELREVIKKLLDDAR

SEQ ID NO: 1410 - protein, 175 aa, Artificial Sequence
  Synthetic
SEEDELRRLLKEVNERVERLLDEIRKELEKIAEELRRDHMVLHEYVNAAGITVEENRVDEEIKKDAERALTELKEEHERLDREAKKDLDRIRKELERLEEEHRRVSERIEEVLDKESDKTEDIAREIRELMERTRRVIEEIKKELRDILEKLRRVSEELNKKLDEILKRIEDRTR

SEQ ID NO: 1411 - protein, 171 aa, Artificial Sequence
  Synthetic
SEKEKVIKEARELLERLRKRLKDVNDDVTRLLDELRRDHMVLHEYVNAAGITLEEEVPVEDVIRELKRRLEEVDKKNRDILETLKRELDEVSRRTREELEKLRKELEEVEKAGLPAEELKRVADRLRRRLERLVEENERVVKKILDEIRRSVEENKRIVDKVRKDLDERRK

SEQ ID NO: 1412 - protein, 177 aa, Artificial Sequence
  Synthetic
SAIEKVKEVVERVLETVRDSVRRSHEESKRLIDKVRRDHMVLHEYVNAAGITVRRKGIPERMVEKLERDLEELLKEIKDTIDRIEEELRTSNRRLKETNDEIAKRLEELLRELSRDRDKDAVEDVLRRIEELIRDLNKKNDDNVRRVKEVIDRAEKLVRDLLREIRKLIEKLIRDTE

SEQ ID NO: 1413 - protein, 177 aa, Artificial Sequence
  Synthetic
SVLEEVRRRVEELLKTVKESVDRSHERSERLIEEVRRDHMVLHEYVNAAGITVREKGIPEDRVKRIEDKLREELERLERENRKIEEDLKRSNDELRRENERIAERLEELLRELSRDTNDKVARDVLEEIERLIREANERNKRNLEDVERVIRELNKENERVLREVEKKIEKLIRETE

SEQ ID NO: 1414 - protein, 183 aa, Artificial Sequence
  Synthetic
KDAEDLERRVRELVEENNRVSKRLAEEVTRLVKENERDHMVLHEYVNAAGITLLDMKRRGEVREEEVKRVLREIEELLREITEHSKEVLKTIEKLLRDSLEHSRRVLEEIERLLETILRKSKDSERLKKLVDELRETLERSLRENEKVADELRKRAEKSLEDVKRVVDELRKIVDDVLKRVED

SEQ ID NO: 1415 - protein, 183 aa, Artificial Sequence
  Synthetic
SEIEKLVEDVRKLVEDNLRHSEEVHRRNRRLIEENERDHMVLHEYVNAAGITLRELAERGEIREEEARKVLEEIKRLLDEIRRHSEEVLKEIERTLKENLKHSEEVLRRIEERLEDIKRKDKDSERVRTLVDRLREELKRSLDESEKLNRESRKRVTRSLEKVDDLVRELEKLARKVLEEVKT

SEQ ID NO: 1416 - protein, 181 aa, Artificial Sequence
  Synthetic
EEIERALREMRELSRTHKELVEKILRDIAELAKTHERDHMVLHEYVNAAGITIADEIRKEDKKEELKRKIDELRRRAEELLKESKEHLKRLEDTVRELIERLKETLKKVEEDLKRILEKLEKSRELDEIAKDVKRLIDENRELLKRVEDEVRRLIRKLEELNRRTEEEVKKLIKKLEDDLK

SEQ ID NO: 1417 - protein, 174 aa, Artificial Sequence
  Synthetic
SEIEELEKRIDELLKELRDLSRRIAEEVKRLLEELKRDHMVLHEYVNAAGITLKRKGVPEEELRRVEEEVERVVRESRKLNKETEDELRRLLEEIKESNDRVEKRARELKKLLRDGKDVEEVLRRLEKLVREDKERLKKVLKDARDLIKKDKDLNEKLSRELEKLVRELEERAR

SEQ ID NO: 1418 - protein, 174 aa, Artificial Sequence
  Synthetic
DELRDVKRELDRLLRENEEIVERIAETVRRLLEELKRDHMVLHEYVNAAGITLRKRGVPEKELKEVADTLRKLLKDIERSNKEVEDRLRKLLEEIKESTDRLREELEEVEKLLRGGKDVETVLRRVRELSRDNKRRMRRVLEEAKRLAKEDKERIDKIRKEIEELIKRLKDKAT

SEQ ID NO: 1419 - protein, 174 aa, Artificial Sequence
  Synthetic
DEEEDLERRIKKLLDENRELLKRIAEELRRLLEELRRDHMVLHEYVNAAGITLKDRGVPEKDLRDVAEKVKKVLKESEDSNRDVKRKLEKLLRDLERSTERLEREARKVRKLLRDGKDIETLLRELEKLSRDNKELLKKIEKEIRDLIKEDKERNRELSERLRKLVEELKKKAT

SEQ ID NO: 1420 - protein, 174 aa, Artificial Sequence
  Synthetic
REIEEAAKDLDRLLEENKKLVKEVEEELRRLLKENRRDHMVLHEYVNAAGITLRRRGVPEEELKEVEERARRVIEESRRSSKELEKRLRELLEELRRSTKELEDRLREIKKLLRNGKDVEEVLRRVRKLSRENKEKIRKILEDVKKLSEDNKRRNEELSRRVKTLVDEIKKRAT

SEQ ID NO: 1421 - protein, 177 aa, Artificial Sequence
  Synthetic
SEAEKVVEELKKLLREVEKKIRDHTEDVKRILEELERDHMVLHEYVNAAGITLKDKNSDDDTVRKVKEELDRSHEKLREELRKVAKELKESNEELERDLKRLVEEAEDRLRRLKDRVSEKVLRELEKILEDIKRTLDKLLRENRETLKRIEDRLRELLEENRKLLEKIERELRERSR

SEQ ID NO: 1422 - protein, 182 aa, Artificial Sequence
  Synthetic
DELEEVVRRVRELSRTVKEELREVIERVRELSERVKRDHMVLHEYVNAAGITVMKRVRDSGLDKSKLEKLEDESRRVLDKSREILRKNEEDNRRLNKELEEILKKNEDDNEDVRRKVDEVTRKGKDAEEVLREVEKVVEDSRRSAKDALKRVEDRVRESDKSVRELLEENRKVVEDIKRRVD

SEQ ID NO: 1423 - protein, 174 aa, Artificial Sequence
  Synthetic
EELERILDKVRKVIEEVRKRLRDDLRTVEKVLKETERDHMVLHEYVNAAGITVEEAARRGRDRREIKEELKKVLDDLRELLRALEEKNRRVNKENEDSLRKIEEDLRDVLRKLEEEIKGREVLRKVRELLRTIREEVERVLRKSNELSTRIKKRIDDVLETLERLLKELDDKLR

SEQ ID NO: 1424 - protein, 178 aa, Artificial Sequence
  Synthetic
SSKDEIRRRVEEVVERSDEIVKRSREHVKTVVDELDRDHMVLHEYVNAAGITLDKIRKDGGSEETLKRVLDELREILKELKEEVKKVKRKLEKVVKENRDTIREVEERNRKILDELRKRGVEERALREVEEISRKSEEKLRRVLKESEDIAKEAEDRLKTVLERVERIADEVLKRLTK

SEQ ID NO: 1425 - protein, 178 aa, Artificial Sequence
  Synthetic
SKVEKLEEEIARLVERSRRLVEELKKEVTKVKEKVDRDHMVLHEYVNAAGITLRDIKRRGGSEEVLRRVTEELKKVLEDNRRVIEEVLRDLERILEELKRKAEEVTKRNRDDLKRLRDSGVDEEVLRRVEETSDRSEKELRTVLRDVTEDIKRIAEELKKALEDSTEIIRRAEDELRT

SEQ ID NO: 1426 - protein, 182 aa, Artificial Sequence
  Synthetic
SDADRVAEELKKLVEDSRRENERVIEESKRLVKENERDHMVLHEYVNAAGITLRDILEKEKDKKTLDDIVREILERLKRLLEKVEDENRKSHEENKRLLEDVKRKNKRISDELKRLLEEIERRNVDVDKVRETVKRLLEENKRVMEKTEEVAKKSSEDIKRVADETRRRAEELLKEVDELRK

SEQ ID NO: 1427 - protein, 182 aa, Artificial Sequence
  Synthetic
DEVREVAERLRRLVDESRKRNEEVIKESEALVDRVRRDHMVLHEYVNAAGITLEKDIRRLKDKKTVEKIIREVLKKIDELLKRVERTNREISKENKRLLDEVRKTNEEISRRLKKLLEDIRRRNVDVETIERVVRELLEENKEVLRKTEEMVKRSTETNKRLLERSKEVADRLRERIKEAAK

SEQ ID NO: 1428 - protein, 175 aa, Artificial Sequence
  Synthetic
SEVDEVLREAKRIVDEVHKDNERATEESRRLVKKVHRDHMVLHEYVNAAGITVKDANIDEKLVTEILKEIEEALKEAARRNKEVKDRLRELSRRVSERNREILEELKERLDRVRERRKDVKELEREVEKLLKRIEESLRRHRKENKRLLEELDRSLRELAKIVKEVLDEIRERTR

SEQ ID NO: 1429 - protein, 175 aa, Artificial Sequence
  Synthetic
SEMDDVLKKLAETVKRIIERLKKLTDDSRRLVEEVHRDHMVLHEYVNAAGITAEERNIDEKDVRKLLEDLKKKSEEVAERNKRILDTLREISKRAEDEVRKVLKELEKTLKELEDRRPDVRELSEEVKKLLDEVRKALKRHKDENDKLLKEIEDSLRRHKEENDRLLEKLKESTR

SEQ ID NO: 1430 - protein, 178 aa, Artificial Sequence
  Synthetic
SEEEKLKEVKDRIREVLRKLEEHTDKVKKEVEKVLRRDHMVLHEYVNAAGITLERLRRKKKDAEDLLRELEKIIEEIERELDRVLEENDKMAEEWKKLLDKVLDDNRKSIRDIEKELDDREPTDELVTEVEKLLRDDEETNRDVVKKVREAVKKDADTNRKVIEEVKKVLEDAARRLD

SEQ ID NO: 1431 - protein, 186 aa, Artificial Sequence
  Synthetic
SRVDEVIERLERLLRELDKINRDMIEDDKRLNTELNRDHMVLHEYVNAAGITLEEIRKKLSDEKTLEEIIERVERRLEELIERSKRRNREILERSKELIERSKKTNEEILRRAEELIKRLREEVKDIKEALDKIRRLEERARRVIEELDEKNRRALERSKENVKRLDERNERLRKELEEKVRRLRK

SEQ ID NO: 1432 - protein, 183 aa, Artificial Sequence
  Synthetic
SEVDEVLERIKRLLERLAEHSDKVVRDIEKLLDDNRRDHMVLHEYVNAAGITLEEMRRRGDLREELLERVVREVEKEIRDIKRKNKRSVETVEKLVRDDRKELKRALEDVERLIRELETRLKDKEELRRKLEKVLREAEKVIDELLKKTDEVLKRARETIEDLNRKLDKVLKEVRDKLDRLRD

SEQ ID NO: 1433 - protein, 184 aa, Artificial Sequence
  Synthetic
ELIKKARKDVEEVRERSERLVDELRKRNKKLADESRRDHMVLHEYVNAAGITIEDLLRKRRTKDVLKEIEDLVRELERELRRVVKESSDKVRKLIRENEKVVEESSRLFRDLVEKLRRVVEERNDKKLMEEVERLIKRLEDVNEKSERDVREINKESERVNEETEREVEDAIRKLREVLRRAKK

SEQ ID NO: 1434 - protein, 186 aa, Artificial Sequence
  Synthetic
KEVEDLERTVRTILKRMRELITRNEEEIRRSIEELKRDHMVLHEYVNAAGITMKELKKEGGDDKKRLVEEIKRLLDELRENSKRSSDRAKEIHERNKRHSEESSRTIEKLLKELRDLVRDVERKLRDEDAKRKLDELTKRVEKVVREADERNKRLTKRSKEVLDEVHRANEEALKEVEEVVRRVTK

SEQ ID NO: 1435 - protein, 176 aa, Artificial Sequence
  Synthetic
REAEEAKEEVEELNRRNKKELDDARRRVDELDKRNKRDHMVLHEYVNAAGITLERVKEEGRSDDRLREKIERMLKTSADELERLKEENKRALRDLAERLRELIERNRRKLEEITRRTVPDKDVLKRLAELIKESIRELERVLEELAEKIDRSLKELDDVLRKNETDLKRVIEDLKR

SEQ ID NO: 1436 - protein, 186 aa, Artificial Sequence
  Synthetic
SEIEKLIEELRRELEKVKDELERSIEEMDRELDDVRRDHMVLHEYVNAAGITVTERTKRGDRPEEVLRKELEDIKRKLRRILEEHHEKIRRIKEKLRRENKRVRDELKRIKDEIDEKVKDVRRKGADEELLKRLEEVAEDVKRALEELLKKHTRVVERVEKALDELDKELERIVREAEKELDRREK

SEQ ID NO: 1437 - protein, 179 aa, Artificial Sequence
  Synthetic
RLEDEVRKMEKEVREEVKRLEDESRKVLEESRRNLDRDHMVLHEYVNAAGITIKDLRRRGLDERVLRELLKRVREVHERNRKLLDEVRRASEKVHEDNRRILEEVRKTVKDVVDKLRRVDAKVVKELIDRVRKILEDVEREVKKSIEEVKEINRRLNEEVKKTIEEVKEIVKEVTERAK

SEQ ID NO: 1438 - protein, 183 aa, Artificial Sequence
  Synthetic
SIREKIRELEERLEEVLRRIEENSERVLREAERVLKRDHMVLHEYVNAAGITLEEIRKLPVEDELVRRVKELVERLKRHNKKSSEDVERVVRELKEELKRSSEEVKKAVDRLKEELEKVLRDGGEREVDRVIRKLEDVLRKLEEHNRRVVERLKRLLEELKKHNEDSLRKSEEVLRKLEEDAR

SEQ ID NO: 1439 - protein, 182 aa, Artificial Sequence
  Synthetic
SIEDLVRELKKKVDEVAEDLRRKVREALERSRENIDRDHMVLHEYVNAAGITVDKLRKETREEEVKDILRRVLELSKRIVEESKEILDRVLELSKKVVDDIEEIIRRVEETVKEVLTRLSRVDDKVVKKLIKEVDDILREVTKLVEKLIRELEDINRKVNERNRRLAEESRKILDEVEKRVR

SEQ ID NO: 1440 - protein, 179 aa, Artificial Sequence
  Synthetic
SKAEEVEELVKKLLAEVKKSLDDVRRTVEKLLREVRRDHMVLHEYVNAAGITLKDLKDDGQDERAVRRVVEEIKELLDRNNEDSKRVVKEIRKLLDENDKTSKRVVEEIKRLLDEVRKEGKISEEKVEKLERDVRRALERDTRENKKLEDRVETALREDKKRNDDLREDVKRVLEEIRT

SEQ ID NO: 1441 - protein, 177 aa, Artificial Sequence
  Synthetic
SAADEVVERMKELVATVKRENDEVVKELKKLVKELERDHMVLHEYVNAAGITLARRVGKDKREVVEEVRRTSKELVERNEETAKRVDDLVRRLVEENRRSVTEVEELVKELVKELRRGSGSEDLVREVEKRVRDIVEESRKLAEETRKAVEDIIEKSKRIAEDTLEKNKEMVERLER

SEQ ID NO: 1442 - protein, 174 aa, Artificial Sequence
  Synthetic
SESDEVIRDLARLLDELARHVDDSVRRMDEVVKRSTRDHMVLHEYVNAAGITVEKKPGDERVERMVAEIERLVAEVLEELKKKYEKLKREVEENLRRLEETVRDIVEKARKVTEKGVSKEKIDRIIRELERILEEAKKKHEDVLRRLEDSLRRVAELLKAALDRLREIVDRLRR

SEQ ID NO: 1443 - protein, 174 aa, Artificial Sequence
  Synthetic
KEVEDAVKELEDLLRANEDKTRSIVEDMRASNKDLERDHMVLHEYVNAAGITLRRAGVPRDSLKRLAEDVERVTRESRELLERVHRADRELIERLKESNERLRRAIEEIRKAIKGGSDIKTLLDRVRKLAEEDAERLDRLRRESEELNERVRRVDKKLLEEIRRKAKKVEDDTR

SEQ ID NO: 1444 - protein, 184 aa, Artificial Sequence
  Synthetic
DEIRKVVKEITDLLKASNDKNRKVVEEIRDLLRKSKRDHMVLHEYVNAAGITLRRRIDKSGDKETAEDIVRRIIEELKRILKEIEDLARRINREIERLVEEVERDNRDVNRAIEELLKDIARRGGSEDLKRVEERAREVSRRNEESMRRVKEDADRVSEANKEVLDRVREEVKRLIEEVRETLR

SEQ ID NO: 1445 - protein, 186 aa, Artificial Sequence
  Synthetic
SRVEEIIEDLRRLLEEIRKENEDSIRRSKELLDRVKRDHMVLHEYVNAAGITIEKEVREKGSESEEVKKALRAVLEELEKLLRRVAEINEEVLRRNSKLVEEDERRNREVLKELARLVEELIREIGDEDKARKVAEVAEKVLRDIDKLDRESKEAFRATNEEIAKLDEDTARVAERVKKAIEDLAK

SEQ ID NO: 1446 - protein, 186 aa, Artificial Sequence; identical to SEQ ID NO: 1445
  Synthetic

SEQ ID NO: 1447 - protein, 181 aa, Artificial Sequence
  Synthetic
SEVDDVLRRLEELIKTLEDINAKSLEDIKKLIDDLARDHMVLHEYVNAAGITLREAKKGIDSREAEEIAKRVLEELKRTSDDLRKKVERVDEDLRRLLRENHERNKKILRDLERLLRDAARRGVPKEALDRMREEIRRLEEESRKSDETIERLIRELRRRVEEVLKTSTDLIRELEEEVKK

SEQ ID NO: 1448 - protein, 183 aa, Artificial Sequence
  Synthetic
SKLEEVEKAVRKVIEDSRRVNEEVNRRSEEVVRELERDHMVLHEYVNAAGITARRVLKGSGDERLAAEVERIIEEIRELNERDRKRVEEIRKEIEDLNRDLNRRSKESEDRLRKLLEDATRGGVTKEADEVVERAERISEENKRRVEDVARKSKELVEDVRRHSEEVVRRVEELVKEVEERVR

SEQ ID NO: 1449 - protein, 238 aa, Artificial Sequence
  Synthetic
EEDERLTKRVEEIKRENRELLRRLEEEVKELERKSERDHMVLHEYVNAAGITLDSGKGSTELLVEELEKLIREILKLSEDHNRTLEEVVRKIEDVLRANLERLKELVDEILKALKERGKGDSEELKRKVEKVARDYERLLRKLREVVKRILDESKRLDEELEERLKEVLKKLEELIKRGGPDKDVLTELKRILDELLKLVEKLIRRNLRLLEELLRLVREILRTSNEILEEILKDARR

SEQ ID NO: 1450 - protein, 245 aa, Artificial Sequence
  Synthetic
TEEEVLRKVEKLIKDLLDVLRDLLRASEEVVREALRRDHMVLHEYVNAAGITSRALSGGSRESVESALAKNEERLKKILEDADRVLDKWRRLLEELSKKAKAVLDEVRKRLEEIKREVPETEKLRTLLTILEEILRALEKIIRDILRINERLLEKLKRILERLRETNREIDERIRKLVEEARGGSEEKLRRDLTETKKELEKRHEDLRRELEKLLRDYKRELEEIERALEEIEKTLKRRADETRR

SEQ ID NO: 1451 - protein, 234 aa, Artificial Sequence
  Synthetic
SAKETIRKLIEENKDIIRKLAEKLKRLLEESERIAERDHMVLHEYVNAAGITLRRVGSGIDEELLKELEKELARLEEELKEILDRVRDLHRRLAEEIRKILEESKKLNEELEDRLRKDGDVEELLELLERVHATDVRLLRELLKLLKKVHEDVVSLLERLLELLKRVLDRIVEELGLSDKELEKLLEDLEREIRRLAKRLKELSDRLEEKIRKIKRELDDLSARLREKIERTRK

SEQ ID NO: 1452 - protein, 238 aa, Artificial Sequence
  Synthetic
SKEDKARELEKRLRDNLKKLEEVVRELAEVLKRNLERDHMVLHEYVNAAGITLDKLRAGGLPKDELEDLRREVEDVLRRLEDLLRKLKKANDESLTRLEELLRRAEEENRRVLTTLRELLRGNGDDRDLARLVARLVEANNRALEELLRLVAKNVEDNNRVLEELLRLVKELAKRLLGRIRDEDLVRDIRRELKELEERARKILRDDERDLRALEKRIRDIIREDREELERLKERARK

SEQ ID NO: 1453 - protein, 244 aa, Artificial Sequence
  Synthetic
SAEETLRRITEESKRVLEEITKKYEDLERESREVLRRDHMVLHEYVNAAGITLTKGGDDKDEVLTVLEKVLDELLKLHRENLRVIKELLRKVLEVDRENLEVLKRLLEKARDLLRRSGRDEKDLKKLEDELRKVKEELEKKHEASKRDIEDLERELDKVTEEVERLLRKLKEELRRAAEGSDEDRERLARLLKALADKLIRVLEEILKINEELNRKIIKFARENLERNRRVNKKVIEVLREAAR

SEQ ID NO: 1454 - protein, 250 aa, Artificial Sequence
  Synthetic
STEEILKRVKEILDELAKELRDIIRESLRTIEELLDRDHMVLHEYVNAAGITVKTIKDGVKDSEELLRRLKRLLEDLRRAHEELLKRLKEAVDEHRDRLRKILEELERVLKELRKRIEELRRSGDRISEKDVLRKLEEVLRKALEILERLLKKIRESARELLKIIEEVLDANIKVMEEALKTIKELLKDGPDEVKRRLEEKERRIRTRYEELRRRLRKRVKDYEDKLREIEKKVRRDAERIEEELERAKK

SEQ ID NO: 1455 - protein, 238 aa, Artificial Sequence
  Synthetic
SEAEKIREALETNLRLLEELIKRLKEILDTHNELLRRDHMVLHEYVNAAGITLEEGGLDEEVLREVKRLVDELRKEARRVLDEHEKLVRKIKKEAEDVARESEEIIKEVEDKLKGLDREELLERVRRVLKKSDDLIAELVRRALKILEELTRLLAELLKKVVEILRRIVELVERVLTKKGAPKEDLERLRRKVEELEDRLRRLLEKLARDSAELMRELERILDRYARESEELDRRLAE

SEQ ID NO: 1456 - protein, 238 aa, Artificial Sequence; identical to SEQ ID NO: 1455
  Synthetic

SEQ ID NO: 1457 - protein, 242 aa, Artificial Sequence
  Synthetic
SEKERLMRLLDKLKDLNRRLVERIKELLDKALELHKRDHMVLHEYVNAAGITVERGGVPEELLTRIDELIKKLEDEARKISKEVKRLIDELKKRLEDIHREVDRLIRELKETLKGVTDKDELLRRVAEVLERIARLSEELIREVKEVLEKIVELSRELLKRVLDVLRRIAELLEDALRKGNVSEETVRRLREALKKLEDDLRKIERDAEREYKKLKDELEELTERYRREIRKLKEELKADRK

SEQ ID NO: 1458 - protein, 242 aa, Artificial Sequence; identical to SEQ ID NO: 1457
  Synthetic

SEQ ID NO: 1459 - protein, 247 aa, Artificial Sequence
  Synthetic
SEAEDLEELIKELAELLKDVIRKLEKINRRLVKILERDHMVLHEYVNAAGITLRKGTVEDKDILRDLERRLREILEESDRLLEELKRRLEEILRKSKELLRRLEEVLREILKRAEEVKRSNLPKEELIKEIVKLLEELLRVIEKILEDNIRLLEELVEVIKEILEKHLRLLEELVRVIERILREVGKDKDEAERRRRELKDKLDRLREEHEEVKRRLEEELTRLRETHKKIEKELREALKRVRDRST

SEQ ID NO: 1460 - protein, 247 aa, Artificial Sequence; identical to SEQ ID NO: 1459
  Synthetic

SEQ ID NO: 1461 - protein, 240 aa, Artificial Sequence
  Synthetic
SDKEEIKRRVEKTARDLETEHDKIKKRLEDTVRDIKRDHMVLHEYVNAAGITIEKTLREGDGDATDLVDKLLETVKRLNEEVLRTVKKIADELRRLVEEVLRVLRESNETLARLLEEGNVGDEVRERLEEVLRRTEEIIKTLEEIVKRLLDELRRLVEELRRISKKLKDELDKIKEKGKDEKRLIEEVVRLLRENLDVVRRILEALAKLIKELLEALEEVLRRNKELIRELLRVLDEALK

SEQ ID NO: 1462 - protein, 240 aa, Artificial Sequence; identical to SEQ ID NO: 1461
  Synthetic

SEQ ID NO: 1463 - protein, 248 aa, Artificial Sequence
  Synthetic
DEDRIIEEIARLLEELLRELLELIKKLIETNRRLNERDHMVLHEYVNAAGITLDRLVKKGISDEKLKRIRERLKRALDDLERLHREINKRLEDLVRELEKLVREILKELKDALEELRRASARAGGEEVLRRLEEIVKKLLDLVRRILERLKEIHKDNVRLLRELNERLTRIVEDLVRLIREILREAGVDEKIAEEIERELEELRRMIKRLHEDLERKLKESEDELREIEARLEEKIRRLEEKLERKRR

SEQ ID NO: 1464 - protein, 238 aa, Artificial Sequence
  Synthetic
DADELLRRLAEEVERVIREAEDLLRRWKETIKKVLDRDHMVLHEYVNAAGITIRELTKTKGDEELAKLIKDLLDTNEKVNRDLLRLIKKLLKDAERVNRRLLELIEELLEELKRVAKDLGLREEADKKLRDIADRARKELEDYERRLKELLKTVEDALRKAEEDSRKLKRDVEELLERGRLRKDDLEDILRKNLDRLRKLLERLREILRENLEALKKTLKRLEDVVREILEDLKRERK

SEQ ID NO: 1465 - protein, 231 aa, Artificial Sequence
  Synthetic
DKAEVLREALKLLKDLLEELIKIHEESLKRILDLIDRDHMVLHEYVNAAGITLERSGLDERELRKVERMATESLRTIAKLKEELRDLARRSLEKLREDLKRVDDTLRKVEEKVRRTGPSEELIEELIRTIEKLLKEIVRINEEVLKAVRELLKTLLKLSEDVVRRIEEILRKGGVPEEIDRELKRVVEELRRLHEEIKERLDDVARRSEEELRRIIKKLKEVVKEIRKKLK

SEQ ID NO: 1466 - protein, 247 aa, Artificial Sequence
  Synthetic
SKAEKLLKDLREALEKVKRRYEELERRLDEVLKEHERDHMVLHEYVNAAGITIEEGGLPEEELEKLKKLAEKVKELLRELLRLSKELVDRVRELLKRDLDLVRRLVEIALKVLREAREQPNDEKRVEKIKRDLEKKARRVREENERIKRDLKRTADESRKRLEKLLEDLKRELDRLREDLDRGRKDIDERVEELIERLIRIIERLLREVIKSHEKLVRTIERLIEESIRVNEELLEVIERLLDRARK

SEQ ID NO: 1467 - protein, 239 aa, Artificial Sequence
  Synthetic
SERELIERWLELHKEILRLIRELVERLLKLHREILDRDHMVLHEYVNAAGITARKLGLDKEAKDELREIAKRVEDKLEKLERESRKVEEDLKRKLKELTDESDTVEKRVRDVVRRGTQSREEIAEELLRLDRKLLKAVEELLKEILDLNKKLLDDVRAILEETRRVLEKLLDRVRRGERTDDERRTLTELLKRMEDILEKVERTLKKLLDDSARMAEEVKKTLKELLERSEKVAEDVRK

SEQ ID NO: 1468 - protein, 246 aa, Artificial Sequence
  Synthetic
KEIEETLKELEDLNREMVETNRRVLEETRRLNKETVRDHMVLHEYVNAAGITLVDDVRKGPTSEELKRLLAELEELLARVVRRVEELLKKSTDLLERAVKDSADALRRSHEVLKEVASRVKRAKDEGLPREEVLRLLRELLERHAKVLKDIVRVSEKLLREHLKVLREIVEVLEELLERILKVILDTTGGDKAVEELEKALEEIKRRLKEVIDRYEDELRKLRKEYKEKIDKYERKLEEIERRERT

SEQ ID NO: 1469 - protein, 231 aa, Artificial Sequence
  Synthetic
SKEEEVEKVLRKWEEILRRLIEENKRANDKIRREYERDHMVLHEYVNAAGITAERLGVSEEVKRILEKLIKLLEDILEYEKENVERLIELNERILRELKKSVEELKALVTRVRRDGLPESEVRKLVEDVLRKNEELLKEAKKAWRDSIENLKRVLEEVAKLVKTVLREIEEKIDDEDVVRALIEVIERLLRVAEEVIRRILKVNTELMRVDERSIRESLKAISEVLKVLDT

SEQ ID NO: 1470 - protein, 231 aa, Artificial Sequence; identical to SEQ ID NO: 1469
  Synthetic

SEQ ID NO: 1471 - protein, 247 aa, Artificial Sequence
  Synthetic
RDRDVLRKVKAEIEELVARIEKVSRDALSEVKRLLDRDHMVLHEYVNAAGITLRKIRDTRGDDEVVKETEEVLRDNHRLLEELIRRLIKVLEEWLRRHKKLLDEIRELLKEILRLVKESGVSEDLLRRLKRVIEELDKKLKESEEKLRRVVEKAKEDLKAVLEEHRKVLEDLKRALEEVREKLRERGSEEVVEELLRMLKRVAEEMKRVHDDLSRAVEKVVRDVVRVDKELLDELARILRRLEEVIT

SEQ ID NO: 1472 - protein, 231 aa, Artificial Sequence
  Synthetic
SKDEELARLLEELVERWRKIVEDLERDHRRLVKEIRRDHMVLHEYVNAAGITIRKNGIDERIVRLIEEIAKIIEEVLKEIVKLVERAVRENVRVLRESVRLVAELVETLARLLRGSDERVTEAIKKVLDTSEDLIRRVIKVNEDILREIAKLVEEVLREAERILTEIKKEGDREEIRRILEELKRIVDDVLRIIARILKLLRDLTRRLAEVAKAVHKLLEELLRKLKEDTR

SEQ ID NO: 1473 - protein, 231 aa, Artificial Sequence; identical to SEQ ID NO: 1472
  Synthetic

SEQ ID NO: 1474 - protein, 238 aa, Artificial Sequence
  Synthetic
SEIEDVIRRLRKILEDLERVSEKLLREIKKILDEARRDHMVLHEYVNAAGITAVRVFRDGSGSKEELAKLVEELIRELAKLAKEVDEIHKRIVERLKALVEDAERIHRKIVETLEEIVRGVPSEELKRVVEAIVEVIKEHLKVLADVIRRIIKAIEENAETIKRVLEDIVRVLELVLRGEGSIEDLVREVERLIKRIEDSLRELEKTVRELLKRIKEASDKVREDVDRLIKELKEAAD

SEQ ID NO: 1475 - protein, 229 aa, Artificial Sequence
  Synthetic
SKEERLREVAEKHKKDLEDIVKRVDEAAKETARRLERDHMVLHEYVNAAGITLEKGPDDEKLKKVKKILKDIMDRLAELIKKILKLLKENLEKIKELLRRNLEISEELLKLAKGLSDRDVLETVRRVLEKLDEEWDRVLEDSRRIIETILRELDTLLREVEKLIKEIKDEISGSKEVLDILERAVEVVRRVIKALKEVLERHVDATREVIERVKRVNKRLLEAVREVVT

SEQ ID NO: 1476 - protein, 229 aa, Artificial Sequence; identical to SEQ ID NO: 1475
  Synthetic

SEQ ID NO: 1477 - protein, 241 aa, Artificial Sequence
  Synthetic
SEKELLKEILDRIRELLEDDNRLLKRIVDEIRKLLERDHMVLHEYVNAAGITLDRIGAPEDVIRELTRALKETEEDVDRVIRTLEKLLKEVLDAHEEVVRKLDRLLKEVERLVEGGDAEEVVRDLLRVVKEILDESKAVIDELARVVDEILKLLEEVDRKLAKVVKEILEDVLRGSGDDEDAVRKIAKIIEELKRLLEDLARDTRRVIEEAKRLLKEWRDRNKEVADTLKKLLEDLIRKIR

SEQ ID NO: 1478 - protein, 241 aa, Artificial Sequence; identical to SEQ ID NO: 1477
  Synthetic

SEQ ID NO: 1479 - protein, 240 aa, Artificial Sequence
  Synthetic
DREKSVRDIEEDLKRVLDKLRRRVETSKEELKKVLKRDHMVLHEYVNAAGITVRELDRGIDSEVLRAVREIVKRLVEVVRRYNELSEKIIRDLVRVNDRVLELLKRIVKRLIDVVRELEKIGDKEKALRRLEEVVKEVKRRIEELLKELEDVHRELVKILEEVNEDLKRVATEVKEIIKTGIKSSEVAKELDEVIKRLLDNLKENTDRLKEVIDRNLADLRDLAEELRAVIERLLEDARR

SEQ ID NO: 1480 - protein, 240 aa, Artificial Sequence; identical to SEQ ID NO: 1479
  Synthetic

SEQ ID NO: 1481 - protein, 252 aa, Artificial Sequence
  Synthetic
SLEEITKRLLELVEENLARHEEILRELLELAKRLAKRDHMVLHEYVNAAGITLKLLEDNGSSEEDLKRLLKEVIEELRAVVKRVKDKWDEVVKRIEDLVKKLKELHDDTLRKLRELVRKIVTDISESGGEAEKVKRVVEKILELVERLAKVVKESVEKLLEILRELAEVSKRVAEALLRLLEELVRVIRIKDERTLREVVRKVLEEAKRLLDELEEVHKRVKKELEDIIEENRRVVKRVRDELREIKRELDE

SEQ ID NO: 1482 - protein, 252 aa, Artificial Sequence; identical to SEQ ID NO: 1481
  Synthetic

SEQ ID NO: 1483 - protein, 241 aa, Artificial Sequence
  Synthetic
SAEEAVEKLVRIARAIVKINEDLSREVVRILREIVRRDHMVLHEYVNAAGITVKVVEDGGLSEDVVRKLRKLVKELEDLLKKSNDDIRKLVEDVARRLKESNDEIRRLVERLEELLKRGPGDEELLRLVEELTEELLRTHEEVVKALEKLTADLLELHRELLERVRRLTKRIEEELKRVGVSEELLRRLEELRKRLEKVLDDSAKELEKLKRELERLLEESRRKLEKLKRDLERVLEETRR

SEQ ID NO: 1484 - protein, 237 aa, Artificial Sequence
  Synthetic
REDEVLRDIERLLREIEEKIRRILEESTAELRKVEERDHMVLHEYVNAAGITKEDVERKGIDEELRKLLDEVLDKLTKLIERNKRSLERILELIKRIIDENLEVLRDIIRLLEELLKATKDNGVPKDEVIKLVEDVVRRIEELVTRVVARNEKLVKDLDDLAKKNVRENEELLREIDRGLDEDLLEKIKRVIREHIKALEKLARDLKEILRRHIEALKELARDLAEVIRKLLEDVKR

SEQ ID NO: 1485 - protein, 237 aa, Artificial Sequence; identical to SEQ ID NO: 1484
  Synthetic

SEQ ID NO: 1486 - protein, 237 aa, Artificial Sequence
  Synthetic
SREDLLRSLAELIETILRKSSELLDRLLKLVREHSERDHMVLHEYVNAAGITLKLIKGGISEDDVRRIVKEAKDELRRSVEEVKKSVDDLKEELKRSLREVRELVKSIADALEEIVRRSSGLGEVIKKLLELLRRLLEVHERTIRLLAELLERHLEVHEESIRLLLRLLEELLELVERKGDEKELRRIAEAVERVLRDHKAKNDKILRDVEEVLRRHLEELARILKDVKKVLDEARK

SEQ ID NO: 1487 - protein, 243 aa, Artificial Sequence
  Synthetic
SEAERLADEVRKAVKKSEEDNETLVREVEKAVRELKRDHMVLHEYVNAAGITLVDLLRDGQVSDRDLLKELEEVLRRVLEALAENHERTEEILKRWLDRYAEDIERLRKVLKEVIEALKRGGSDDKRIVDELEEILRRNEDVLDKIAKRLRRLLEEDRRLLERIVRELKRLLDDLDRITKEGKSEELVRIAIEVLKRLLEIIEELVRLNNEILERLLKIVRELHKDNIKILEDLLRIIEEVLR

SEQ ID NO: 1488 - protein, 243 aa, Artificial Sequence; identical to SEQ ID NO: 1487
  Synthetic

SEQ ID NO: 1489 - protein, 245 aa, Artificial Sequence
  Synthetic
SEKDEVTRRIRELLKEAEETNREAIERIKRLLDRVRRDHMVLHEYVNAAGITLKKVLDRGLQDDEALLKLLIDALREHNRLSTELIKILIDVLRTILKIIKDVLATNIEIARRILDLVRRLAERGGLDDRLVKEVEKLVRTAERLHRDALRKVKRLVEELEKRLRELVKTDHDLVRRLETLLRRGSGSKEDLLREIARILAESLRLIRELLKEIEKIVKEIIELLERLNDELRKIIEAILETTKK

SEQ ID NO: 1490 - protein, 247 aa, Artificial Sequence
  Synthetic
DEERLAEELERVLDRNRKLLEEALRELRRVIEENRKRDHMVLHEYVNAAGITLKVLRELSRGDSDEELRKVIEDLIRKLTKVLDKVRSLVEENIERLARVLEKLERLARENLEDLKKVLDDVDKKLKDRRLVERLAELVRELIEVNKEILEMLKEIVRELLEINRTLLERLKDLVATALEIIKLLARGDGTEEDVERAVKEIRDRLRKLLEDYERAVRRLEDKLRRVRERYEAVLKRIKDKLEETKR

SEQ ID NO: 1491 - protein, 243 aa, Artificial Sequence
  Synthetic
SRVEELKKLIEDILRISREVVERIARVAEDIHRINRRDHMVLHEYVNAAGITVEEILARKVSGTEAAEALRDTIRRVVDEIRKLLEEHEKRSAELLEEIRKLLEDILRRSERAVEEIRELLKKGVSTKDVLRIIEEILREHLELLERVVRRIEEILRELLKTIEEIVKRIKEILEELKEVLKRGSVGDDEVEREIRRVKEDLDRILEEYRRLLEEIKRKLEEILRRVEELHRRLRRKLEEIDR

SEQ ID NO: 1492 - protein, 243 aa, Artificial Sequence; identical to SEQ ID NO: 1491
  Synthetic

SEQ ID NO: 1493 - protein, 249 aa, Artificial Sequence
  Synthetic
DAEEVVKRLADVLRENDETIRKVVEDLVRIAEENDRRDHMVLHEYVNAAGITVELLRRGGVPEELLDRLAKVVKSIVEKAEKILERLNRVSKAIAEKLKTIVDELNEVSKEIVKRAEDILRKGKDKETVLRALRTLVKEYADLSKEVLERVERIVREYVKLSDEVVKSLAEIVEELIRIIEDLLRKGNLDEDVKRALEELVSRLRKLLEDVKKASEDIVREVERIVRELAKRSDEILKKLEDIVEKLRE

SEQ ID NO: 1494 - protein, 249 aa, Artificial Sequence; identical to SEQ ID NO: 1493
  Synthetic

SEQ ID NO: 1495 - protein, 240 aa, Artificial Sequence
  Synthetic
DKDKRLEELLKRLKELNDKTFEELERILEELKRANERDHMVLHEYVNAAGITIEGGNLDKRLAELLKKLLDDLKRLLEEYTRTNEELLKRLRELLERYRETNKKLLDLLRKLLDEARRTGTDEDLLRRLEDILRKYEDEVRRLLKELEDILREYEDTSRRLLEELERIAKEAAERVSRGSDKDVKDIIRTILEVARDLLRLLEEDSRTNSEVVKRLLDLLREDSKANSEVVKRLLDVLRE

SEQ ID NO: 1496 - protein, 240 aa, Artificial Sequence
  Synthetic
SKEETLKRLLDELEKRNRETVERLERLLKELEDRNRRDHMVLHEYVNAAGITIEESGLSKELKDTLARILEELRKLLEEYFRKNEELLRLLRKLLDEYARTNEELLRLLEELLDTARRTGGDSELLKRLEDIAREYEKRVRRLLEKLKDILDKYRKTVEELVRKMEEILKEAKKTISRIGSEEVKDIVRAMEEVIRRLIEILRRDVELNLDVAKKLLELLKEDSKLNLDVARELLELLDR

SEQ ID NO: 1497 - protein, 240 aa, Artificial Sequence; identical to SEQ ID NO: 1496
  Synthetic

SEQ ID NO: 1498 - protein, 243 aa, Artificial Sequence
  Synthetic
DEEETLRRLLERKVELAKEYLDVSKEVIDRTTKLLDRDHMVLHEYVNAAGITLERGDLGPDELIKRLAEELERSLRELEEEIKRLKRELEESLKKLKEIIDRLAEEAEKLLAVLKRGEGSEEEALRALASLVRELIEVLRENDERLRDVLRRLIEALRKNNEILERVLRKLVRAAEERGRDESSREALEEARRRLEELLRELNEITKDLEAKLEKLLRDLNELTKALEEELKRLLDELKKRTD

SEQ ID NO: 1499 - protein, 243 aa, Artificial Sequence; identical to SEQ ID NO: 1498
  Synthetic

SEQ ID NO: 1500 - protein, 243 aa, Artificial Sequence
  Synthetic
SEAERTKESLKKVLKALVDLNRELLRKLEENMRELTRDHMVLHEYVNAAGITVREGGIVDKDAEREAERLMRELDKSSEDTARETRKLIEESKKSTRRTEEEARKLTETLDRLAKGGLPREDLLRALVRLLEELARLIEEDVRRNAELVKRHIELVERDVAELLRLIKELVDLLADLAEKGSRTEEIRKIVEEILKEIKELADRYREEVRKSKDKLRSILEDYKRKVDELKERLRELIEEVET

SEQ ID NO: 1501 - protein, 178 aa, Artificial Sequence
  Synthetic
DEVEKLLRDLEELDRDIERKVRELLKRNKEVLDDIERRDHMVLHEYVNAAGITADVIRKTTDKRTVDKLLKELEKILKEVLDRVRRLLEEAKESLDRSREEIERLLEESKTLVDEVRRAGIDKKEVDKIEKHSRDLIERAKRETDRLLEEAERLMREVVDRVRKILEEAKRLIDEARR

SEQ ID NO: 1502 - protein, 182 aa, Artificial Sequence
  Synthetic
DEAEKLLKELRDLLEESRKDLERLLKELEDLLEESKRRDHMVLHEYVNAAGITKETVERRNEREKLEKLLRELKKVVERLKDNLKDNERRNKEAIERVRKKLKDNERENKKVIEDLRAKLKDLEEVKRKIDRLEEESRRVIEEARKRLEEVEEKSKKIIDDARRALDRIDKELRRVVEETRK

SEQ ID NO: 1503 - protein, 181 aa, Artificial Sequence
  Synthetic
SEVERVLEDLRRLVRDVEEKLRRIIERDRRLVEEVERRDHMVLHEYVNAAGITLEELKDISDKKTIERIVREIIKEARDLVRRNHERNREIVDESRRLVEELRRIVEEIIRRLRELLERVKSGELAERIEDVVREAEKRLRELLKELEKTSRDLKKRLEELDRELKALVEKVERDLEELRK

SEQ ID NO: 1504 - protein, 174 aa, Artificial Sequence
  Synthetic
SEDETIRRIVRTVHEESRKSTEDVRREVERVLRESEERDHMVLHEYVNAAGITEETGISEELEERMRRIIREIREHLKDNLRRVREVIERIERKLEETERRDEKVLREIEKKIRDGDGREEVAREVTKIARDTIRENEEIAKEVREIVERSIKNLEEVAEEVERVVRELIEARR

SEQ ID NO: 1505 - protein, 174 aa, Artificial Sequence
  Synthetic
SELEKVVKEVADLLRRNLEKSKRVLEEVRRRLEENLRRDHMVLHEYVNAAGITLELVREGKDKRDLTRLLEEDDKRVKEALDKSRENNERILKEVRRALRESEEDNRRILKEVREKVDSRLLEELEERVRESIERSRRFIEELEKIVEETLTESEKLARASSEITKTVLDEIRK

SEQ ID NO: 1506 - protein, 178 aa, Artificial Sequence
  Synthetic
DDLERVLKEIKKAADKIREDNKRTADKIRKRVKELDDRDHMVLHEYVNAAGITKERVRGREEARKVIEELKKLVDEVRKRNEKSIEELKKLLKEDRDLMRRVIEELEDLVRRLREEVRDDEALRRVEEEVERLIRDLRRVLKETSDRVRELIDKHRRLSEEVEKDVKRLIDELKKKTD

SEQ ID NO: 1507 - protein, 181 aa, Artificial Sequence
  Synthetic
DEEETLEDVLRELEERVEKLLRDLTRDLERVEKEHKERDHMVLHEYVNAAGITEELLKRIEDDEKLRRLKEEVRKLVEESRERNKRHHKEVREVLERIRELLERLEKELRRALEEIRDKIRKDGATDEILRKIEELLRRAEEVIRDLERKVRKLERDIRENIKKNHREVREILRKIEEDVR

SEQ ID NO: 1508 - protein, 175 aa, Artificial Sequence
  Synthetic
SEEDELRRLLKEVNERVERLLDEIRKELEKIAEELRDRDHMVLHEYVNAAGITEENRVDEEIKKDAERALTELKEEHERLDREAKKDLDRIRKELERLEEEHRRVSERIEEVLDKESDKTEDIAREIRELMERTRRVIEEIKKELRDILEKLRRVSEELNKKLDEILKRIEDRTR

SEQ ID NO: 1509 - protein, 177 aa, Artificial Sequence
  Synthetic
SAIEKVKEVVERVLETVRDSVRRSHEESKRLIDKVRKRDHMVLHEYVNAAGITRRKGIPERMVEKLERDLEELLKEIKDTIDRIEEELRTSNRRLKETNDEIAKRLEELLRELSRDRDKDAVEDVLRRIEELIRDLNKKNDDNVRRVKEVIDRAEKLVRDLLREIRKLIEKLIRDTE

SEQ ID NO: 1510 - protein, 183 aa, Artificial Sequence
  Synthetic
KDAEDLERRVRELVEENNRVSKRLAEEVTRLVKENEDRDHMVLHEYVNAAGITLDMKRRGEVREEEVKRVLREIEELLREITEHSKEVLKTIEKLLRDSLEHSRRVLEEIERLLETILRKSKDSERLKKLVDELRETLERSLRENEKVADELRKRAEKSLEDVKRVVDELRKIVDDVLKRVED

SEQ ID NO: 1511 - protein, 183 aa, Artificial Sequence
  Synthetic
SEIEKLVEDVRKLVEDNLRHSEEVHRRNRRLIEENERRDHMVLHEYVNAAGITRELAERGEIREEEARKVLEEIKRLLDEIRRHSEEVLKEIERTLKENLKHSEEVLRRIEERLEDIKRKDKDSERVRTLVDRLREELKRSLDESEKLNRESRKRVTRSLEKVDDLVRELEKLARKVLEEVKT

SEQ ID NO: 1512 - protein, 177 aa, Artificial Sequence
  Synthetic
REIEELRKEIETLIRENEELNRRSKETSEELIRRLKKRDHMVLHEYVNAAGITRDRGAPEEDVRRAEERVKKLIEDNKRHSDEVAKTDKKLNEDSERHTRRVEERLRELLDRLSRSDKDEVVRRVAEEARRLSKRNKDAIREVNETSRRLATRDAKHTRDVLREIKRLADEIRERTR

SEQ ID NO: 1513 - protein, 174 aa, Artificial Sequence
  Synthetic
REIEEAAKDLDRLLEENKKLVKEVEEELRRLLKENRDRDHMVLHEYVNAAGITRRRGVPEEELKEVEERARRVIEESRRSSKELEKRLRELLEELRRSTKELEDRLREIKKLLRNGKDVEEVLRRVRKLSRENKEKIRKILEDVKKLSEDNKRRNEELSRRVKTLVDEIKKRAT

SEQ ID NO: 1514 - protein, 182 aa, Artificial Sequence
  Synthetic
DEIETVLDEVRRLHEDAKRRLEEMIDEVRKLNEESVRRDHMVLHEYVNAAGITKEEVERAGLDKGKLEELEERLERVREDVERILREIKRRNEKTLEDSERILEENKERNRTVLKKLKELRDRGSDAREALKESRKVVEESRESVRRVLEKNRRVVEESKRLAEELLRRVKKVVDEIRKRVE

SEQ ID NO: 1515 - protein, 182 aa, Artificial Sequence
  Synthetic
DELEEVVRRVRELSRTVKEELREVIERVRELSERVKKRDHMVLHEYVNAAGITMKRVRDSGLDKSKLEKLEDESRRVLDKSREILRKNEEDNRRLNKELEEILKKNEDDNEDVRRKVDEVTRKGKDAEEVLREVEKVVEDSRRSAKDALKRVEDRVRESDKSVRELLEENRKVVEDIKRRVD

SEQ ID NO: 1516 - protein, 182 aa, Artificial Sequence
  Synthetic
SDADRVAEELKKLVEDSRRENERVIEESKRLVKENEDRDHMVLHEYVNAAGITRDILEKEKDKKTLDDIVREILERLKRLLEKVEDENRKSHEENKRLLEDVKRKNKRISDELKRLLEEIERRNVDVDKVRETVKRLLEENKRVMEKTEEVAKKSSEDIKRVADETRRRAEELLKEVDELRK

SEQ ID NO: 1517 - protein, 175 aa, Artificial Sequence
  Synthetic
SEVDEVLREAKRIVDEVHKDNERATEESRRLVKKVHERDHMVLHEYVNAAGITKDANIDEKLVTEILKEIEEALKEAARRNKEVKDRLRELSRRVSERNREILEELKERLDRVRERRKDVKELEREVEKLLKRIEESLRRHRKENKRLLEELDRSLRELAKIVKEVLDEIRERTR

SEQ ID NO: 1518 - protein, 186 aa, Artificial Sequence
  Synthetic
SRVDEVIERLERLLRELDKINRDMIEDDKRLNTELNKRDHMVLHEYVNAAGITEEIRKKLSDEKTLEEIIERVERRLEELIERSKRRNREILERSKELIERSKKTNEEILRRAEELIKRLREEVKDIKEALDKIRRLEERARRVIEELDEKNRRALERSKENVKRLDERNERLRKELEEKVRRLRK

SEQ ID NO: 1519 - protein, 185 aa, Artificial Sequence
  Synthetic
DDIERLKREIERLLKEAEKISRDNEERSKELLDRLRKRDHMVLHEYVNAAGITKRLADKIKDKEELTRRLKEVVDRVEKSVRDSERMLREVVREDEESVRRSKTKLEDLLRKVEELVRRLEKKVTDEKVKRDAREALRKAKKKVDELKRKNDEVHRRSREEVKRLLEENRKLLEDLRRMVREITQ

SEQ ID NO: 1520 - protein, 184 aa, Artificial Sequence
  Synthetic
ELIKKARKDVEEVRERSERLVDELRKRNKKLADESRRRDHMVLHEYVNAAGITEDLLRKRRTKDVLKEIEDLVRELERELRRVVKESSDKVRKLIRENEKVVEESSRLFRDLVEKLRRVVEERNDKKLMEEVERLIKRLEDVNEKSERDVREINKESERVNEETEREVEDAIRKLREVLRRAKK

SEQ ID NO: 1521 - protein, 186 aa, Artificial Sequence
  Synthetic
KEVEDLERTVRTILKRMRELITRNEEEIRRSIEELKKRDHMVLHEYVNAAGITKELKKEGGDDKKRLVEEIKRLLDELRENSKRSSDRAKEIHERNKRHSEESSRTIEKLLKELRDLVRDVERKLRDEDAKRKLDELTKRVEKVVREADERNKRLTKRSKEVLDEVHRANEEALKEVEEVVRRVTK

SEQ ID NO: 1522 - protein, 179 aa, Artificial Sequence
  Synthetic
RLEDEVRKMEKEVREEVKRLEDESRKVLEESRRNLDKRDHMVLHEYVNAAGITKDLRRRGLDERVLRELLKRVREVHERNRKLLDEVRRASEKVHEDNRRILEEVRKTVKDVVDKLRRVDAKVVKELIDRVRKILEDVEREVKKSIEEVKEINRRLNEEVKKTIEEVKEIVKEVTERAK

SEQ ID NO: 1523 - protein, 183 aa, Artificial Sequence
  Synthetic
SVDERLDEVLERVKEDMDRNRRKNDESLREDEENVRRRDHMVLHEYVNAAGITRELKKRVKDERVKEFLDRVLEEIRKSAEEVKTIIDEVHKESEETVRRTKKIIEEVLRRIEELIRRVKKDRKEEVVKTVEEDIKRLLKEVNKVSDEAHKRNKELNERVNRVNKEAHKRNEDLLREAERKVR

SEQ ID NO: 1524 - protein, 183 aa, Artificial Sequence
  Synthetic
SIREKIRELEERLEEVLRRIEENSERVLREAERVLKERDHMVLHEYVNAAGITEEIRKLPVEDELVRRVKELVERLKRHNKKSSEDVERVVRELKEELKRSSEEVKKAVDRLKEELEKVLRDGGEREVDRVIRKLEDVLRKLEEHNRRVVERLKRLLEELKKHNEDSLRKSEEVLRKLEEDAR

SEQ ID NO: 1525 - protein, 182 aa, Artificial Sequence
  Synthetic
SIEDLVRELKKKVDEVAEDLRRKVREALERSRENIDRRDHMVLHEYVNAAGITDKLRKETREEEVKDILRRVLELSKRIVEESKEILDRVLELSKKVVDDIEEIIRRVEETVKEVLTRLSRVDDKVVKKLIKEVDDILREVTKLVEKLIRELEDINRKVNERNRRLAEESRKILDEVEKRVR

SEQ ID NO: 1526 - protein, 179 aa, Artificial Sequence
  Synthetic
SKAEEVEELVKKLLAEVKKSLDDVRRTVEKLLREVRKRDHMVLHEYVNAAGITKDLKDDGQDERAVRRVVEEIKELLDRNNEDSKRVVKEIRKLLDENDKTSKRVVEEIKRLLDEVRKEGKISEEKVEKLERDVRRALERDTRENKKLEDRVETALREDKKRNDDLREDVKRVLEEIRT

SEQ ID NO: 1527 - protein, 174 aa, Artificial Sequence
  Synthetic
SESDEVIRDLARLLDELARHVDDSVRRMDEVVKRSTRRDHMVLHEYVNAAGITEKKPGDERVERMVAEIERLVAEVLEELKKKYEKLKREVEENLRRLEETVRDIVEKARKVTEKGVSKEKIDRIIRELERILEEAKKKHEDVLRRLEDSLRRVAELLKAALDRLREIVDRLRR

SEQ ID NO: 1528 - protein, 174 aa, Artificial Sequence; identical to SEQ ID NO: 1527
  Synthetic

SEQ ID NO: 1529 - protein, 174 aa, Artificial Sequence
  Synthetic
SESDDVIRKLRELLEELRTHVEKSIRDLRKILEDSTRRDHMVLHEYVNAAGITRKKPGDEEVRKTVEEISRRVAENVKRLEDLYRRMEEEVKKNLDRLRKRVEDIIREVEEARKKGVDEEKLKDLIRKLRDILRRAAEAHKKLIDDARESLERAKREHEKLIDRLKKILEELER

SEQ ID NO: 1530 - protein, 177 aa, Artificial Sequence
  Synthetic
DEVRELLERNRRLLEEIKKTVKDLIRANEELLKRIEDRDHMVLHEYVNAAGITEKGLSDDETIREAKERLKASLEDVKRRVEEVKRLLEKSLEEVETIIREAEKRNRDSLREMERRGSSEELEELRRVVEESDETIKRLLEEAKESVDRSLDRIRKLLEDVRRSVERSAKRIDEKRK

SEQ ID NO: 1531 - protein, 184 aa, Artificial Sequence
  Synthetic
DEIRKVVKEITDLLKASNDKNRKVVEEIRDLLRKSKKRDHMVLHEYVNAAGITRRRIDKSGDKETAEDIVRRIIEELKRILKEIEDLARRINREIERLVEEVERDNRDVNRAIEELLKDIARRGGSEDLKRVEERAREVSRRNEESMRRVKEDADRVSEANKEVLDRVREEVKRLIEEVRETLR

SEQ ID NO: 1532 - protein, 238 aa, Artificial Sequence
  Synthetic
EEDERLTKRVEEIKRENRELLRRLEEEVKELERKSEKRDHMVLHEYVNAAGITDSGKGSTELLVEELEKLIREILKLSEDHNRTLEEVVRKIEDVLRANLERLKELVDEILKALKERGKGDSEELKRKVEKVARDYERLLRKLREVVKRILDESKRLDEELEERLKEVLKKLEELIKRGGPDKDVLTELKRILDELLKLVEKLIRRNLRLLEELLRLVREILRTSNEILEEILKDARR

SEQ ID NO: 1533 - protein, 247 aa, Artificial Sequence
  Synthetic
SEKEELLKLIKRVIELLKRVLEEHLRLVEDVIRRLKERDHMVLHEYVNAAGITKRLLDEVRGDKEELDRIKEKLEEVLERYKRRLEEIKRDLERMLEDYKRELKRIEEDLRRVLEEVERIATRGEGPAEALIDKLRKILERALRELDKLSKKLDELLKKVLEELEKSNREIDKLLKDVLRRVEEGGASEDLLRKAKKVITEVREKLKRNLEDVRRVIEDVKRKSARILEEARRLIEEVERELEKIRK

SEQ ID NO: 1534 - protein, 238 aa, Artificial Sequence
  Synthetic
SEAEKIREALETNLRLLEELIKRLKEILDTHNELLRRRDHMVLHEYVNAAGITEEGGLDEEVLREVKRLVDELRKEARRVLDEHEKLVRKIKKEAEDVARESEEIIKEVEDKLKGLDREELLERVRRVLKKSDDLIAELVRRALKILEELTRLLAELLKKVVEILRRIVELVERVLTKKGAPKEDLERLRRKVEELEDRLRRLLEKLARDSAELMRELERILDRYARESEELDRRLAE

SEQ ID NO: 1535 - protein, 248 aa, Artificial Sequence
  Synthetic
SAEEELEKLVRKVEEDLKRLEEESERIKKEIKDTLRARDHMVLHEYVNAAGITRRLEEEGRRVSLEEAIKIIKEILDELAKVNEDIIRIIKELLKRLVDTNRRVIETIDRILKKLVDDLRRGNLPEDKLREVERELRELKKELEEIVRESEKMLKELEDKLREIVRESRELLEKLRRDLKRIKDGNLSADEALEMLKRLLDKALKVHEDVLRKLVELVDEVLKVHEESLRKLLTLAAKVLEVLRKITK

SEQ ID NO: 1536 - protein, 240 aa, Artificial Sequence
  Synthetic
SDKEEIKRRVEKTARDLETEHDKIKKRLEDTVRDIKRRDHMVLHEYVNAAGITEKTLREGDGDATDLVDKLLETVKRLNEEVLRTVKKIADELRRLVEEVLRVLRESNETLARLLEEGNVGDEVRERLEEVLRRTEEIIKTLEEIVKRLLDELRRLVEELRRISKKLKDELDKIKEKGKDEKRLIEEVVRLLRENLDVVRRILEALAKLIKELLEALEEVLRRNKELIRELLRVLDEALK

SEQ ID NO: 1537 - protein, 248 aa, Artificial Sequence
  Synthetic
DEEERVKKLLTDLRRLLRKLHEESKKLLDELRKKLRERDHMVLHEYVNAAGITREAEKKLPGTRVLKLVADVVKKVLDAIRDLNRKLEEIIDEALKLLEELDDILRRVVEEALRLLKEIKDTKGDREEVKKRVEDILKRLEELVKEYEDRVREIKKRLRRALEELRDEYRKIREDIERVLDELRKGGVPEELLRVLEELVRTLKKLLDENLKMVERLIRELEKVLDDHERKVRRLIEELLEVLDRDAK

SEQ ID NO: 1538 - protein, 236 aa, Artificial Sequence
  Synthetic
STREKAKKVLDTLRADNEDMKRVVEKILRALKRTNERRDHMVLHEYVNAAGITKEVGVSEEALKEIEDTLKRVLEEIKRLLDESKKLLEDVEREIREILKTSEELLERIEREIETVGSDEKTLAEILKRLLELNEEMNRRLLKILRDLLRLNEEVIRRLLAVLERLLDALKEALDRGDVPEDLLRKLEEELRRIKEKLRKALEELEREHRELEKELDKLHDESRKEHERIEEELRR

SEQ ID NO: 1539 - protein, 247 aa, Artificial Sequence
  Synthetic
SKAEKLLKDLREALEKVKRRYEELERRLDEVLKEHEERDHMVLHEYVNAAGITEEGGLPEEELEKLKKLAEKVKELLRELLRLSKELVDRVRELLKRDLDLVRRLVEIALKVLREAREQPNDEKRVEKIKRDLEKKARRVREENERIKRDLKRTADESRKRLEKLLEDLKRELDRLREDLDRGRKDIDERVEELIERLIRIIERLLREVIKSHEKLVRTIERLIEESIRVNEELLEVIERLLDRARK

SEQ ID NO: 1540 - protein, 231 aa, Artificial Sequence
  Synthetic
SKEEEVEKVLRKWEEILRRLIEENKRANDKIRREYEERDHMVLHEYVNAAGITERLGVSEEVKRILEKLIKLLEDILEYEKENVERLIELNERILRELKKSVEELKALVTRVRRDGLPESEVRKLVEDVLRKNEELLKEAKKAWRDSIENLKRVLEEVAKLVKTVLREIEEKIDDEDVVRALIEVIERLLRVAEEVIRRILKVNTELMRVDERSIRESLKAISEVLKVLDT

SEQ ID NO: 1541 - protein, 231 aa, Artificial Sequence; identical to SEQ ID NO: 1540
  Synthetic

SEQ ID NO: 1542 - protein, 247 aa, Artificial Sequence
  Synthetic
RDRDVLRKVKAEIEELVARIEKVSRDALSEVKRLLDERDHMVLHEYVNAAGITRKIRDTRGDDEVVKETEEVLRDNHRLLEELIRRLIKVLEEWLRRHKKLLDEIRELLKEILRLVKESGVSEDLLRRLKRVIEELDKKLKESEEKLRRVVEKAKEDLKAVLEEHRKVLEDLKRALEEVREKLRERGSEEVVEELLRMLKRVAEEMKRVHDDLSRAVEKVVRDVVRVDKELLDELARILRRLEEVIT

SEQ ID NO: 1543 - protein, 231 aa, Artificial Sequence
  Synthetic
SKDEELARLLEELVERWRKIVEDLERDHRRLVKEIRERDHMVLHEYVNAAGITRKNGIDERIVRLIEEIAKIIEEVLKEIVKLVERAVRENVRVLRESVRLVAELVETLARLLRGSDERVTEAIKKVLDTSEDLIRRVIKVNEDILREIAKLVEEVLREAERILTEIKKEGDREEIRRILEELKRIVDDVLRIIARILKLLRDLTRRLAEVAKAVHKLLEELLRKLKEDTR

SEQ ID NO: 1544 - protein, 238 aa, Artificial Sequence
  Synthetic
SEIEDVIRRLRKILEDLERVSEKLLREIKKILDEARRRDHMVLHEYVNAAGITVRVFRDGSGSKEELAKLVEELIRELAKLAKEVDEIHKRIVERLKALVEDAERIHRKIVETLEEIVRGVPSEELKRVVEAIVEVIKEHLKVLADVIRRIIKAIEENAETIKRVLEDIVRVLELVLRGEGSIEDLVREVERLIKRIEDSLRELEKTVRELLKRIKEASDKVREDVDRLIKELKEAAD

SEQ ID NO: 1545 - protein, 246 aa, Artificial Sequence
  Synthetic
SREEIVATLEDLARKILEVVKKLAKEIEDAWREIERARDHMVLHEYVNAAGITDVVRKKVDSRVAEILETVVKRVVDITRRLIEEAERVVRELVDITRKLITILEEVVRRLVEIVREASKIDDRRELEDMLRKIREVVREVIERLKKLDEDVRRVVEEVIRRLEELNKRLEDVIREVKKRLKELGLSEEAVKELVELLEEILERNTRVIKEIIDLLRTVIRIHEKIVEDLIKLLEELLRRLEEATR

SEQ ID NO: 1546 - protein, 237 aa, Artificial Sequence
  Synthetic
KEKEDALKKLEDLARKSREDLERVLRKHKKILDKIEERDHMVLHEYVNAAGITLRKTGTESEILKELARLLREHHEALRRLIEELRRLLEEHHKILEDLAREHKRLLDELIKVVADGVDKDELERIIKELRERDKKLVDDLRKVSEDLLDAVRKLVEDLERISRELLRRVEELAKGIDEELAREVERVIKELLDKSKEILERIERAIDELLKVSEEILKLSEDASEELLKILREFAK

SEQ ID NO: 1547 - protein, 237 aa, Artificial Sequence; identical to SEQ ID NO: 1546
  Synthetic

SEQ ID NO: 1548 - protein, 229 aa, Artificial Sequence
  Synthetic
SKEERLREVAEKHKKDLEDIVKRVDEAAKETARRLEERDHMVLHEYVNAAGITEKGPDDEKLKKVKKILKDIMDRLAELIKKILKLLKENLEKIKELLRRNLEISEELLKLAKGLSDRDVLETVRRVLEKLDEEWDRVLEDSRRIIETILRELDTLLREVEKLIKEIKDEISGSKEVLDILERAVEVVRRVIKALKEVLERHVDATREVIERVKRVNKRLLEAVREVVT

SEQ ID NO: 1549 - protein, 241 aa, Artificial Sequence
  Synthetic
SEKELLKEILDRIRELLEDDNRLLKRIVDEIRKLLEERDHMVLHEYVNAAGITDRIGAPEDVIRELTRALKETEEDVDRVIRTLEKLLKEVLDAHEEVVRKLDRLLKEVERLVEGGDAEEVVRDLLRVVKEILDESKAVIDELARVVDEILKLLEEVDRKLAKVVKEILEDVLRGSGDDEDAVRKIAKIIEELKRLLEDLARDTRRVIEEAKRLLKEWRDRNKEVADTLKKLLEDLIRKIR

SEQ ID NO: 1550 - protein, 246 aa, Artificial Sequence
  Synthetic
SEREELLERIKEILKRVKDKLDEDLKRLKEILEKLKERDHMVLHEYVNAAGITREKLERTGRTDELVKEVLDTVRRNLENLKRLVEDILRKLEENVKNLTDLVREILKLITELIKRLEDGGLPKEVLDALRRVLEKLEELLREILERLKRSLEAVKRKIEELLKELERSLDELRRALERIRKEIGDSETAVRAIIRVLEKHLEAVRRVLEELLKVLAEHLETVRELIERLKRVLEEAIEVVERVAR

SEQ ID NO: 1551 - protein, 240 aa, Artificial Sequence
  Synthetic
DREKSVRDIEEDLKRVLDKLRRRVETSKEELKKVLKARDHMVLHEYVNAAGITRELDRGIDSEVLRAVREIVKRLVEVVRRYNELSEKIIRDLVRVNDRVLELLKRIVKRLIDVVRELEKIGDKEKALRRLEEVVKEVKRRIEELLKELEDVHRELVKILEEVNEDLKRVATEVKEIIKTGIKSSEVAKELDEVIKRLLDNLKENTDRLKEVIDRNLADLRDLAEELRAVIERLLEDARR

SEQ ID NO: 1552 - protein, 240 aa, Artificial Sequence; identical to SEQ ID NO: 1551
  Synthetic

SEQ ID NO: 1553 - protein, 237 aa, Artificial Sequence
  Synthetic
REDEVLRDIERLLREIEEKIRRILEESTAELRKVEEERDHMVLHEYVNAAGITEDVERKGIDEELRKLLDEVLDKLTKLIERNKRSLERILELIKRIIDENLEVLRDIIRLLEELLKATKDNGVPKDEVIKLVEDVVRRIEELVTRVVARNEKLVKDLDDLAKKNVRENEELLREIDRGLDEDLLEKIKRVIREHIKALEKLARDLKEILRRHIEALKELARDLAEVIRKLLEDVKR

SEQ ID NO: 1554 - protein, 237 aa, Artificial Sequence; identical to SEQ ID NO: 1553
  Synthetic

SEQ ID NO: 1555 - protein, 243 aa, Artificial Sequence
  Synthetic
SEAERLADEVRKAVKKSEEDNETLVREVEKAVRELKKRDHMVLHEYVNAAGITVDLLRDGQVSDRDLLKELEEVLRRVLEALAENHERTEEILKRWLDRYAEDIERLRKVLKEVIEALKRGGSDDKRIVDELEEILRRNEDVLDKIAKRLRRLLEEDRRLLERIVRELKRLLDDLDRITKEGKSEELVRIAIEVLKRLLEIIEELVRLNNEILERLLKIVRELHKDNIKILEDLLRIIEEVLR

SEQ ID NO: 1556 - protein, 243 aa, Artificial Sequence; identical to SEQ ID NO: 1555
  Synthetic

SEQ ID NO: 1557 - protein, 245 aa, Artificial Sequence
  Synthetic
SEKDEVTRRIRELLKEAEETNREAIERIKRLLDRVRERDHMVLHEYVNAAGITKKVLDRGLQDDEALLKLLIDALREHNRLSTELIKILIDVLRTILKIIKDVLATNIEIARRILDLVRRLAERGGLDDRLVKEVEKLVRTAERLHRDALRKVKRLVEELEKRLRELVKTDHDLVRRLETLLRRGSGSKEDLLREIARILAESLRLIRELLKEIEKIVKEIIELLERLNDELRKIIEAILETTKK

SEQ ID NO: 1558 - protein, 245 aa, Artificial Sequence; identical to SEQ ID NO: 1557
  Synthetic

SEQ ID NO: 1559 - protein, 243 aa, Artificial Sequence
  Synthetic
SRVEELKKLIEDILRISREVVERIARVAEDIHRINRRRDHMVLHEYVNAAGITEEILARKVSGTEAAEALRDTIRRVVDEIRKLLEEHEKRSAELLEEIRKLLEDILRRSERAVEEIRELLKKGVSTKDVLRIIEEILREHLELLERVVRRIEEILRELLKTIEEIVKRIKEILEELKEVLKRGSVGDDEVEREIRRVKEDLDRILEEYRRLLEEIKRKLEEILRRVEELHRRLRRKLEEIDR

SEQ ID NO: 1560 - protein, 249 aa, Artificial Sequence
  Synthetic
DAEEVVKRLADVLRENDETIRKVVEDLVRIAEENDRLRDHMVLHEYVNAAGITELLRRGGVPEELLDRLAKVVKSIVEKAEKILERLNRVSKAIAEKLKTIVDELNEVSKEIVKRAEDILRKGKDKETVLRALRTLVKEYADLSKEVLERVERIVREYVKLSDEVVKSLAEIVEELIRIIEDLLRKGNLDEDVKRALEELVSRLRKLLEDVKKASEDIVREVERIVRELAKRSDEILKKLEDIVEKLRE

SEQ ID NO: 1561 - protein, 249 aa, Artificial Sequence; identical to SEQ ID NO: 1560
  Synthetic

SEQ ID NO: 1562 - protein, 240 aa, Artificial Sequence
  Synthetic
DKDKRLEELLKRLKELNDKTFEELERILEELKRANEARDHMVLHEYVNAAGITEGGNLDKRLAELLKKLLDDLKRLLEEYTRTNEELLKRLRELLERYRETNKKLLDLLRKLLDEARRTGTDEDLLRRLEDILRKYEDEVRRLLKELEDILREYEDTSRRLLEELERIAKEAAERVSRGSDKDVKDIIRTILEVARDLLRLLEEDSRTNSEVVKRLLDLLREDSKANSEVVKRLLDVLRE

SEQ ID NO: 1563 - protein, 240 aa, Artificial Sequence; identical to SEQ ID NO: 1562
  Synthetic

SEQ ID NO: 1564 - protein, 240 aa, Artificial Sequence
  Synthetic
SKEETLKRLLDELEKRNRETVERLERLLKELEDRNRARDHMVLHEYVNAAGITEESGLSKELKDTLARILEELRKLLEEYFRKNEELLRLLRKLLDEYARTNEELLRLLEELLDTARRTGGDSELLKRLEDIAREYEKRVRRLLEKLKDILDKYRKTVEELVRKMEEILKEAKKTISRIGSEEVKDIVRAMEEVIRRLIEILRRDVELNLDVAKKLLELLKEDSKLNLDVARELLELLDR

SEQ ID NO: 1565 - protein, 240 aa, Artificial Sequence; identical to SEQ ID NO: 1564
  Synthetic

SEQ ID NO: 1566 - protein, 243 aa, Artificial Sequence
  Synthetic
SEAERTKESLKKVLKALVDLNRELLRKLEENMRELTKRDHMVLHEYVNAAGITREGGIVDKDAEREAERLMRELDKSSEDTARETRKLIEESKKSTRRTEEEARKLTETLDRLAKGGLPREDLLRALVRLLEELARLIEEDVRRNAELVKRHIELVERDVAELLRLIKELVDLLADLAEKGSRTEEIRKIVEEILKEIKELADRYREEVRKSKDKLRSILEDYKRKVDELKERLRELIEEVET

SEQ ID NO: 1567 - protein, 241 aa, Artificial Sequence
  Synthetic
SADEALEELVRRLLEVLKTVLERTKELSRDDLRVVKERDHMVLHEYVNAAGITRDGLDDADRVLEEVERVIREAKREVKRWEEVVRKVVEDSRRLIERVLAEVEEVIKEAKRLLDERKSGGSREVIEELLSLLREIVRHHKEVSDEHLKLSAELVKRILDVVEETLRLATEIVRRIKEGGNSEDVRRDIERLLEELKRRVERLLEDIERLLAELEKLNEDVLRENKALLEDLERRVRERKK

SEQ ID NO: 1568 - protein, 186 aa, Artificial Sequence
  Synthetic
SAEDSIRELLERDERLLEEARKEAKRLNEENERLLERIRDHMVLHEYVNAAGITDIRKKIKGEKLREIEELVRRVKRTIEKLLEEVKKSVEDSSKRIEELLEAVERSVERTKEEIRRLLDEVRKDRKEELVKRVEERIKRLHDENRRLVKEVIEEVEKLIRDNEKLAEDIEREIRRLLKELDEAAK

SEQ ID NO: 1569 - protein, 177 aa, Artificial Sequence
  Synthetic
ELREDVERVVDEIRRLVEENVRRIDEVAKDIKRLADDNRDHMVLHEYVNAAGITRLKEEGVTEVVDELREEVRKLSEDNRRHSRELIERVKKLLKELEEHSRDLKRRVKELLEDLKRKGVDERVLKKLKEVIEDVERKSRDALRRLEEAIRRVRRESERVNRELDEVIKRVTEELKK

SEQ ID NO: 1570 - protein, 174 aa, Artificial Sequence
  Synthetic
SEDETIRRIVRTVHEESRKSTEDVRREVERVLRESEEVRDHMVLHEYVNAAGITETGISEELEERMRRIIREIREHLKDNLRRVREVIERIERKLEETERRDEKVLREIEKKIRDGDGREEVAREVTKIARDTIRENEEIAKEVREIVERSIKNLEEVAEEVERVVRELIEARR

SEQ ID NO: 1571 - protein, 180 aa, Artificial Sequence
  Synthetic
SKEEVLREIERLHKETIRRIEEVLREATELHKRLTETNRDHMVLHEYVNAAGITDVRRADTPNVEELLRELKDALDKVRDHNRKTLKKNEDVVREIEKEVRELLKEDEDVLRRIEKVMRDGRVDARELLEESRREVERSEKEVERLLRKSRKVVEEVRKLSEENDREVKKILEEVKRRLD

SEQ ID NO: 1572 - protein, 187 aa, Artificial Sequence
  Synthetic
DEEEELRKRLEKLSKEVRELLRRDEEEDRRLNRELEELRDHMVLHEYVNAAGITDLLRKARRKVSEEELTRLRKKLRDLEEESKEALRELRRRVEELNKENKKSLDDLERRLKELEDRAREVEKRDRREDELRELLRRLEDVIRKLAEDLKRNTEDLRRVIKELAERLEELNKRLKREIRRLKEELR

SEQ ID NO: 1573 - protein, 181 aa, Artificial Sequence
  Synthetic
DEERKLEKSLKDVEDTHRRLLEKNDEDLKELRKRVEDMRDHMVLHEYVNAAGITEKLKRIEDDETLKRLRKRVKELLDEIRRRLERLEREVDKRLEEIKERNDRHHEEAKKELKRIRDKIRRDGADEKILREVEDLLRKVAEDLKRSNDEVKELAERLEETIRDLLRRIEEILKEIEERVR

SEQ ID NO: 1574 - protein, 175 aa, Artificial Sequence
  Synthetic
SEKEDLERELEEVRRRVEESLRKNEEDVKRVRDELKKLRDHMVLHEYVNAAGITRANVDKRVLDEADRLLKELEDDHKKLEEDAKKALDELREEHKRLEETLRRMLKRIKEVLDRESDKMEEIKKEIEKILRDIERVSRELNKKLEEIVRRLKKVSDELNRRIEEIAERVRRRRK

SEQ ID NO: 1575 - protein, 177 aa, Artificial Sequence
  Synthetic
SAIEKVKEVVERVLETVRDSVRRSHEESKRLIDKVRKRRDHMVLHEYVNAAGITRKGIPERMVEKLERDLEELLKEIKDTIDRIEEELRTSNRRLKETNDEIAKRLEELLRELSRDRDKDAVEDVLRRIEELIRDLNKKNDDNVRRVKEVIDRAEKLVRDLLREIRKLIEKLIRDTE

SEQ ID NO: 1576 - protein, 177 aa, Artificial Sequence
  Synthetic
SVLEEVRRRVEELLKTVKESVDRSHERSERLIEEVRESRDHMVLHEYVNAAGITEKGIPEDRVKRIEDKLREELERLERENRKIEEDLKRSNDELRRENERIAERLEELLRELSRDTNDKVARDVLEEIERLIREANERNKRNLEDVERVIRELNKENERVLREVEKKIEKLIRETE

SEQ ID NO: 1577 - protein, 178 aa, Artificial Sequence
  Synthetic
SSIERVEKEVRRLLRESDESLKRVMEEAKELIKSVRESRDHMVLHEYVNAAGITERTGDEREDLRRVLEELRKLIEDNRREDKRSEDELRKLIRDNKEENDRARREAEKLLEDLSRGRSEEEVERVLEEVRRIIEKLKEDDKRSLERIERIVRRNNELNKESVDRIRKIIKEMEERAD

SEQ ID NO: 1578 - protein, 177 aa, Artificial Sequence
  Synthetic
SVIERVEEEMEKVIRDSERVTKEVEDRAREVHERSEKRRDHMVLHEYVNAAGITRAGVDKRILDELRKRIKDSREDLERINEELRRALRKLLEDSKRINEELRKTLEELRKRLERVDDEEEVKKLAEEVRRLVEDSIRKLEELARRVDELVRESIERVDRNVEENKRLVREAIERRR

SEQ ID NO: 1579 - protein, 179 aa, Artificial Sequence
  Synthetic
SSKEVADELRKKAEKVLDELRKIIRELERKNEDSLRRTRDHMVLHEYVNAAGITDLVRTRGEDDRLVREVERLLRELKRRLEELIRRSEELIKRSREEVDRVIRTVEKLLEELDRLLRANKGDIEDLRRTVDKLVEEIKDLARKLAKSSDDTVREDEKLVEELRKDVKRIVRKIKKDLE

SEQ ID NO: 1580 - protein, 183 aa, Artificial Sequence
  Synthetic
KDAEDLERRVRELVEENNRVSKRLAEEVTRLVKENEDKRDHMVLHEYVNAAGITDMKRRGEVREEEVKRVLREIEELLREITEHSKEVLKTIEKLLRDSLEHSRRVLEEIERLLETILRKSKDSERLKKLVDELRETLERSLRENEKVADELRKRAEKSLEDVKRVVDELRKIVDDVLKRVED

SEQ ID NO: 1581 - protein, 174 aa, Artificial Sequence
  Synthetic
SEIEELEKRIDELLKELRDLSRRIAEEVKRLLEELKKLRDHMVLHEYVNAAGITRKGVPEEELRRVEEEVERVVRESRKLNKETEDELRRLLEEIKESNDRVEKRARELKKLLRDGKDVEEVLRRLEKLVREDKERLKKVLKDARDLIKKDKDLNEKLSRELEKLVRELEERAR

SEQ ID NO: 1582 - protein, 174 aa, Artificial Sequence
  Synthetic
DELRDVKRELDRLLRENEEIVERIAETVRRLLEELKKLRDHMVLHEYVNAAGITKRGVPEKELKEVADTLRKLLKDIERSNKEVEDRLRKLLEEIKESTDRLREELEEVEKLLRGGKDVETVLRRVRELSRDNKRRMRRVLEEAKRLAKEDKERIDKIRKEIEELIKRLKDKAT

SEQ ID NO: 1583 - protein, 174 aa, Artificial Sequence
  Synthetic
DEEEDLERRIKKLLDENRELLKRIAEELRRLLEELRRLRDHMVLHEYVNAAGITDRGVPEKDLRDVAEKVKKVLKESEDSNRDVKRKLEKLLRDLERSTERLEREARKVRKLLRDGKDIETLLRELEKLSRDNKELLKKIEKEIRDLIKEDKERNRELSERLRKLVEELKKKAT

SEQ ID NO: 1584 - protein, 174 aa, Artificial Sequence
  Synthetic
REIEEAAKDLDRLLEENKKLVKEVEEELRRLLKENRDLRDHMVLHEYVNAAGITRRGVPEEELKEVEERARRVIEESRRSSKELEKRLRELLEELRRSTKELEDRLREIKKLLRNGKDVEEVLRRVRKLSRENKEKIRKILEDVKKLSEDNKRRNEELSRRVKTLVDEIKKRAT

SEQ ID NO: 1585 - protein, 177 aa, Artificial Sequence
  Synthetic
SEAEKVVEELKKLLREVEKKIRDHTEDVKRILEELERRRDHMVLHEYVNAAGITDKNSDDDTVRKVKEELDRSHEKLREELRKVAKELKESNEELERDLKRLVEEAEDRLRRLKDRVSEKVLRELEKILEDIKRTLDKLLRENRETLKRIEDRLRELLEENRKLLEKIERELRERSR

SEQ ID NO: 1586 - protein, 182 aa, Artificial Sequence
  Synthetic
DEIETVLDEVRRLHEDAKRRLEEMIDEVRKLNEESVRERDHMVLHEYVNAAGITEEVERAGLDKGKLEELEERLERVREDVERILREIKRRNEKTLEDSERILEENKERNRTVLKKLKELRDRGSDAREALKESRKVVEESRESVRRVLEKNRRVVEESKRLAEELLRRVKKVVDEIRKRVE

SEQ ID NO: 1587 - protein, 178 aa, Artificial Sequence
  Synthetic
SKVEKLEEEIARLVERSRRLVEELKKEVTKVKEKVDEIRDHMVLHEYVNAAGITDIKRRGGSEEVLRRVTEELKKVLEDNRRVIEEVLRDLERILEELKRKAEEVTKRNRDDLKRLRDSGVDEEVLRRVEETSDRSEKELRTVLRDVTEDIKRIAEELKKALEDSTEIIRRAEDELRT

SEQ ID NO: 1588 - protein, 186 aa, Artificial Sequence
  Synthetic
SEVDEVRKTLEDLLRRLDEENKDIIRRNKELLDDLDRKRDHMVLHEYVNAAGITKILEKLKDRETLTRIIEEIEKRARELIKRLRDEIRKIEEESKKSIEDSRKRNDEIRKRLEELIKDLRDKIKDSEELARRITELEKRVREVIERLKEKNKRLEDDSRRVITELRKKLKDLEDRVREEIEELRK

SEQ ID NO: 1589 - protein, 184 aa, Artificial Sequence
  Synthetic
ELIKKARKDVEEVRERSERLVDELRKRNKKLADESRRLRDHMVLHEYVNAAGITDLLRKRRTKDVLKEIEDLVRELERELRRVVKESSDKVRKLIRENEKVVEESSRLFRDLVEKLRRVVEERNDKKLMEEVERLIKRLEDVNEKSERDVREINKESERVNEETEREVEDAIRKLREVLRRAKK

SEQ ID NO: 1590 - protein, 186 aa, Artificial Sequence
  Synthetic
KEVEDLERRVKEILDRMKRLIDENRKKIEKSIRELERLRDHMVLHEYVNAAGITDLKREGGDDARTLRERVRKIIEDVEEHSRRSTEEVRRIHKENKEHSERSSDEIRELLRRVEELIEEVKRRLRDKEMEKKLEDIVRRVREVVRRAHETNERLVDRSRKAVEKAERTNRRLVEEIRKVAEEVRK

SEQ ID NO: 1591 - protein, 176 aa, Artificial Sequence
  Synthetic
REAEEAKEEVEELNRRNKKELDDARRRVDELDKRNKDRRDHMVLHEYVNAAGITRVKEEGRSDDRLREKIERMLKTSADELERLKEENKRALRDLAERLRELIERNRRKLEEITRRTVPDKDVLKRLAELIKESIRELERVLEELAEKIDRSLKELDDVLRKNETDLKRVIEDLKR

SEQ ID NO: 1592 - protein, 182 aa, Artificial Sequence
  Synthetic
SELEKTLEDLKRHSEENKKKLEEDLRDMERNLKENKDRRDHMVLHEYVNAAGITRRFREGDIDERELERVRRKMEEIKKRLDENVERNRRKAEDIKRKLDENVKRSEDRVKEIKEDIRRRVRDKDKAEELERRLDELVKENREIHERVKKALDDIVKELEELHERLKRRLEEILRRIAETVR

SEQ ID NO: 1593 - protein, 179 aa, Artificial Sequence
  Synthetic
RLEDEVRKMEKEVREEVKRLEDESRKVLEESRRNLDKLRDHMVLHEYVNAAGITDLRRRGLDERVLRELLKRVREVHERNRKLLDEVRRASEKVHEDNRRILEEVRKTVKDVVDKLRRVDAKVVKELIDRVRKILEDVEREVKKSIEEVKEINRRLNEEVKKTIEEVKEIVKEVTERAK

SEQ ID NO: 1594 - protein, 183 aa, Artificial Sequence
  Synthetic
RVDERLDTVLKRVEETVRENKKKNDELLERSKENIDRLRDHMVLHEYVNAAGITKLKREVTKEEVKKIIDEVLKEIEDLLRTVKEELDRALERNREVVEETKRRIDRVLKEIEKLIRDVKRDRKEEVVKEVEERIKKLLKEVNDTSKDAERRLRETNERLNEIVKEVEKRIRELSEEVRKRVK

SEQ ID NO: 1595 - protein, 183 aa, Artificial Sequence
  Synthetic
SVDERLDEVLERVKEDMDRNRRKNDESLREDEENVRRNRDHMVLHEYVNAAGITELKKRVKDERVKEFLDRVLEEIRKSAEEVKTIIDEVHKESEETVRRTKKIIEEVLRRIEELIRRVKKDRKEEVVKTVEEDIKRLLKEVNKVSDEAHKRNKELNERVNRVNKEAHKRNEDLLREAERKVR

SEQ ID NO: 1596 - protein, 183 aa, Artificial Sequence
  Synthetic
SIREKIRELEERLEEVLRRIEENSERVLREAERVLKEIRDHMVLHEYVNAAGITEIRKLPVEDELVRRVKELVERLKRHNKKSSEDVERVVRELKEELKRSSEEVKKAVDRLKEELEKVLRDGGEREVDRVIRKLEDVLRKLEEHNRRVVERLKRLLEELKKHNEDSLRKSEEVLRKLEEDAR

SEQ ID NO: 1597 - protein, 182 aa, Artificial Sequence
  Synthetic
SIEDLVRELKKKVDEVAEDLRRKVREALERSRENIDRLRDHMVLHEYVNAAGITKLRKETREEEVKDILRRVLELSKRIVEESKEILDRVLELSKKVVDDIEEIIRRVEETVKEVLTRLSRVDDKVVKKLIKEVDDILREVTKLVEKLIRELEDINRKVNERNRRLAEESRKILDEVEKRVR

SEQ ID NO: 1598 - protein, 172 aa, Artificial Sequence
  Synthetic
SRAETVLKEVTDKIKKLADSSDELLRRNKENIDELKKSRDHMVLHEYVNAAGITKGSVDEETLEELIRRVEAELEAHHRELEKNSREDEKRNRDHHAKLEEEMRRVEERLEREGIDDEVVKRVRDLLDTVRRRNEKVNEDVKRMNDKLRRDNEDVIRRVEKLLRELEEKRRT

SEQ ID NO: 1599 - protein, 174 aa, Artificial Sequence
  Synthetic
DEEEDLERAIKKLLDENRELLKRIAEELRRLLEELRRLRDHMVLHEYVNAAGITDRGVPEEDLADVAEKVKKVLKESEDSNADVARKLEKLLRDLERSTERLEREARKVRKLLRGGKDAETLLRELEKLSRDNKELLKKIEKEIRDLIKEDKERNIELSERLRKLVEELKKKAT

SEQ ID NO: 1600 - protein, 184 aa, Artificial Sequence
  Synthetic
DEIRKVVKEITDLLKASNDKNRKVVEEIRDLLRKSKKLRDHMVLHEYVNAAGITRRIDKSGDKETAEDIVRRIIEELKRILKEIEDLARRINREIERLVEEVERDNRDVNRAIEELLKDIARRGGSEDLKRVEERAREVSRRNEESMRRVKEDADRVSEANKEVLDRVREEVKRLIEEVRETLR

SEQ ID NO: 1601 - protein, 177 aa, Artificial Sequence
  Synthetic
SKEDRLREELKKLLARLAEEIERLKRALEESNKDLKRTRDHMVLHEYVNAAGITRGGVSEELLRELERSTAENKERAKELLKRHEDLVRKVEKELADLLRRLEEIVARVDEALKRGISEEELDKLLKEARDLIREIEKRLEELLKRVEKLTEDAKRDLERSNREHKELADRIKETAR

SEQ ID NO: 1602 - protein, 243 aa, Artificial Sequence
  Synthetic
KREDILKKLEDIIRDIIDKLRRILEKVKRLNEDIIREIRDHMVLHEYVNAAGITRIADKSRDRELEDILRRVLEKLRRSLDKLRDTLRKLKEETDTVLERAERTLKELKDRLEKLLRDGEKVSEEDLVEALKALIDELRKVLEDVIRVSKELVERLLRALREHLETNKRLVKELLDALRKTTGDDEEIKRLKEELERRHRRLEEEVERVARELEKAHRDLERDIRRVAEELKKLLKKLRDDRR

SEQ ID NO: 1603 - protein, 244 aa, Artificial Sequence
  Synthetic
SAEETLRRITEESKRVLEEITKKYEDLERESREVLRKLRDHMVLHEYVNAAGITKGGDDKDEVLTVLEKVLDELLKLHRENLRVIKELLRKVLEVDRENLEVLKRLLEKARDLLRRSGRDEKDLKKLEDELRKVKEELEKKHEASKRDIEDLERELDKVTEEVERLLRKLKEELRRAAEGSDEDRERLARLLKALADKLIRVLEEILKINEELNRKIIKFARENLERNRRVNKKVIEVLREAAR

SEQ ID NO: 1604 - protein, 242 aa, Artificial Sequence
  Synthetic
SEKERLMRLLDKLKDLNRRLVERIKELLDKALELHKKLRDHMVLHEYVNAAGITRGGVPEELLTRIDELIKKLEDEARKISKEVKRLIDELKKRLEDIHREVDRLIRELKETLKGVTDKDELLRRVAEVLERIARLSEELIREVKEVLEKIVELSRELLKRVLDVLRRIAELLEDALRKGNVSEETVRRLREALKKLEDDLRKIERDAEREYKKLKDELEELTERYRREIRKLKEELKADRK

SEQ ID NO: 1605 - protein, 242 aa, Artificial Sequence; identical to SEQ ID NO: 1604
  Synthetic

SEQ ID NO: 1606 - protein, 240 aa, Artificial Sequence
  Synthetic
SDKEEIKRRVEKTARDLETEHDKIKKRLEDTVRDIKRERDHMVLHEYVNAAGITKTLREGDGDATDLVDKLLETVKRLNEEVLRTVKKIADELRRLVEEVLRVLRESNETLARLLEEGNVGDEVRERLEEVLRRTEEIIKTLEEIVKRLLDELRRLVEELRRISKKLKDELDKIKEKGKDEKRLIEEVVRLLRENLDVVRRILEALAKLIKELLEALEEVLRRNKELIRELLRVLDEALK

SEQ ID NO: 1607 - protein, 248 aa, Artificial Sequence
  Synthetic
DEDRIIEEIARLLEELLRELLELIKKLIETNRRLNEEHRDHMVLHEYVNAAGITRLVKKGISDEKLKRIRERLKRALDDLERLHREINKRLEDLVRELEKLVREILKELKDALEELRRASARAGGEEVLRRLEEIVKKLLDLVRRILERLKEIHKDNVRLLRELNERLTRIVEDLVRLIREILREAGVDEKIAEEIERELEELRRMIKRLHEDLERKLKESEDELREIEARLEEKIRRLEEKLERKRR

SEQ ID NO: 1608 - protein, 248 aa, Artificial Sequence; identical to SEQ ID NO: 1607
  Synthetic

SEQ ID NO: 1609 - protein, 238 aa, Artificial Sequence
  Synthetic
DADELLRRLAEEVERVIREAEDLLRRWKETIKKVLDDLRDHMVLHEYVNAAGITELTKTKGDEELAKLIKDLLDTNEKVNRDLLRLIKKLLKDAERVNRRLLELIEELLEELKRVAKDLGLREEADKKLRDIADRARKELEDYERRLKELLKTVEDALRKAEEDSRKLKRDVEELLERGRLRKDDLEDILRKNLDRLRKLLERLREILRENLEALKKTLKRLEDVVREILEDLKRERK

SEQ ID NO: 1610 - protein, 231 aa, Artificial Sequence
  Synthetic
DKAEVLREALKLLKDLLEELIKIHEESLKRILDLIDTLRDHMVLHEYVNAAGITRSGLDERELRKVERMATESLRTIAKLKEELRDLARRSLEKLREDLKRVDDTLRKVEEKVRRTGPSEELIEELIRTIEKLLKEIVRINEEVLKAVRELLKTLLKLSEDVVRRIEEILRKGGVPEEIDRELKRVVEELRRLHEEIKERLDDVARRSEEELRRIIKKLKEVVKEIRKKLK

SEQ ID NO: 1611 - protein, 236 aa, Artificial Sequence
  Synthetic
STREKAKKVLDTLRADNEDMKRVVEKILRALKRTNERARDHMVLHEYVNAAGITEVGVSEEALKEIEDTLKRVLEEIKRLLDESKKLLEDVEREIREILKTSEELLERIEREIETVGSDEKTLAEILKRLLELNEEMNRRLLKILRDLLRLNEEVIRRLLAVLERLLDALKEALDRGDVPEDLLRKLEEELRRIKEKLRKALEELEREHRELEKELDKLHDESRKEHERIEEELRR

SEQ ID NO: 1612 - protein, 247 aa, Artificial Sequence
  Synthetic
RDRDVLRKVKAEIEELVARIEKVSRDALSEVKRLLDENRDHMVLHEYVNAAGITKIRDTRGDDEVVKETEEVLRDNHRLLEELIRRLIKVLEEWLRRHKKLLDEIRELLKEILRLVKESGVSEDLLRRLKRVIEELDKKLKESEEKLRRVVEKAKEDLKAVLEEHRKVLEDLKRALEEVREKLRERGSEEVVEELLRMLKRVAEEMKRVHDDLSRAVEKVVRDVVRVDKELLDELARILRRLEEVIT

SEQ ID NO: 1613 - protein, 231 aa, Artificial Sequence
  Synthetic
SKDEELARLLEELVERWRKIVEDLERDHRRLVKEIRELRDHMVLHEYVNAAGITKNGIDERIVRLIEEIAKIIEEVLKEIVKLVERAVRENVRVLRESVRLVAELVETLARLLRGSDERVTEAIKKVLDTSEDLIRRVIKVNEDILREIAKLVEEVLREAERILTEIKKEGDREEIRRILEELKRIVDDVLRIIARILKLLRDLTRRLAEVAKAVHKLLEELLRKLKEDTR

SEQ ID NO: 1614 - protein, 229 aa, Artificial Sequence
  Synthetic
SKEERLREVAEKHKKDLEDIVKRVDEAAKETARRLEEIRDHMVLHEYVNAAGITKGPDDEKLKKVKKILKDIMDRLAELIKKILKLLKENLEKIKELLRRNLEISEELLKLAKGLSDRDVLETVRRVLEKLDEEWDRVLEDSRRIIETILRELDTLLREVEKLIKEIKDEISGSKEVLDILERAVEVVRRVIKALKEVLERHVDATREVIERVKRVNKRLLEAVREVVT

SEQ ID NO: 1615 - protein, 229 aa, Artificial Sequence; identical to SEQ ID NO: 1614
  Synthetic

SEQ ID NO: 1616 - protein, 246 aa, Artificial Sequence
  Synthetic
SEREELLERIKEILKRVKDKLDEDLKRLKEILEKLKEKRDHMVLHEYVNAAGITEKLERTGRTDELVKEVLDTVRRNLENLKRLVEDILRKLEENVKNLTDLVREILKLITELIKRLEDGGLPKEVLDALRRVLEKLEELLREILERLKRSLEAVKRKIEELLKELERSLDELRRALERIRKEIGDSETAVRAIIRVLEKHLEAVRRVLEELLKVLAEHLETVRELIERLKRVLEEAIEVVERVAR

SEQ ID NO: 1617 - protein, 240 aa, Artificial Sequence
  Synthetic
DREKSVRDIEEDLKRVLDKLRRRVETSKEELKKVLKADRDHMVLHEYVNAAGITELDRGIDSEVLRAVREIVKRLVEVVRRYNELSEKIIRDLVRVNDRVLELLKRIVKRLIDVVRELEKIGDKEKALRRLEEVVKEVKRRIEELLKELEDVHRELVKILEEVNEDLKRVATEVKEIIKTGIKSSEVAKELDEVIKRLLDNLKENTDRLKEVIDRNLADLRDLAEELRAVIERLLEDARR

SEQ ID NO: 1618 - protein, 240 aa, Artificial Sequence; identical to SEQ ID NO: 1617
  Synthetic

SEQ ID NO: 1619 - protein, 241 aa, Artificial Sequence
  Synthetic
SAEEAVEKLVRIARAIVKINEDLSREVVRILREIVRLNRDHMVLHEYVNAAGITVVEDGGLSEDVVRKLRKLVKELEDLLKKSNDDIRKLVEDVARRLKESNDEIRRLVERLEELLKRGPGDEELLRLVEELTEELLRTHEEVVKALEKLTADLLELHRELLERVRRLTKRIEEELKRVGVSEELLRRLEELRKRLEKVLDDSAKELEKLKRELERLLEESRRKLEKLKRDLERVLEETRR

SEQ ID NO: 1620 - protein, 237 aa, Artificial Sequence
  Synthetic
REDEVLRDIERLLREIEEKIRRILEESTAELRKVEEEVRDHMVLHEYVNAAGITDVERKGIDEELRKLLDEVLDKLTKLIERNKRSLERILELIKRIIDENLEVLRDIIRLLEELLKATKDNGVPKDEVIKLVEDVVRRIEELVTRVVARNEKLVKDLDDLAKKNVRENEELLREIDRGLDEDLLEKIKRVIREHIKALEKLARDLKEILRRHIEALKELARDLAEVIRKLLEDVKR

SEQ ID NO: 1621 - protein, 243 aa, Artificial Sequence
  Synthetic
SEAERLADEVRKAVKKSEEDNETLVREVEKAVRELKKNRDHMVLHEYVNAAGITDLLRDGQVSDRDLLKELEEVLRRVLEALAENHERTEEILKRWLDRYAEDIERLRKVLKEVIEALKRGGSDDKRIVDELEEILRRNEDVLDKIAKRLRRLLEEDRRLLERIVRELKRLLDDLDRITKEGKSEELVRIAIEVLKRLLEIIEELVRLNNEILERLLKIVRELHKDNIKILEDLLRIIEEVLR

SEQ ID NO: 1622 - protein, 245 aa, Artificial Sequence
  Synthetic
SEKDEVTRRIRELLKEAEETNREAIERIKRLLDRVREARDHMVLHEYVNAAGITKVLDRGLQDDEALLKLLIDALREHNRLSTELIKILIDVLRTILKIIKDVLATNIEIARRILDLVRRLAERGGLDDRLVKEVEKLVRTAERLHRDALRKVKRLVEELEKRLRELVKTDHDLVRRLETLLRRGSGSKEDLLREIARILAESLRLIRELLKEIEKIVKEIIELLERLNDELRKIIEAILETTKK

SEQ ID NO: 1623 - protein, 243 aa, Artificial Sequence
  Synthetic
SRVEELKKLIEDILRISREVVERIARVAEDIHRINRRVRDHMVLHEYVNAAGITEILARKVSGTEAAEALRDTIRRVVDEIRKLLEEHEKRSAELLEEIRKLLEDILRRSERAVEEIRELLKKGVSTKDVLRIIEEILREHLELLERVVRRIEEILRELLKTIEEIVKRIKEILEELKEVLKRGSVGDDEVEREIRRVKEDLDRILEEYRRLLEEIKRKLEEILRRVEELHRRLRRKLEEIDR

SEQ ID NO: 1624 - protein, 249 aa, Artificial Sequence
  Synthetic
DAEEVVKRLADVLRENDETIRKVVEDLVRIAEENDRLWRDHMVLHEYVNAAGITLLRRGGVPEELLDRLAKVVKSIVEKAEKILERLNRVSKAIAEKLKTIVDELNEVSKEIVKRAEDILRKGKDKETVLRALRTLVKEYADLSKEVLERVERIVREYVKLSDEVVKSLAEIVEELIRIIEDLLRKGNLDEDVKRALEELVSRLRKLLEDVKKASEDIVREVERIVRELAKRSDEILKKLEDIVEKLRE

SEQ ID NO: 1625 - protein, 240 aa, Artificial Sequence
  Synthetic
DKDKRLEELLKRLKELNDKTFEELERILEELKRANEASRDHMVLHEYVNAAGITGGNLDKRLAELLKKLLDDLKRLLEEYTRTNEELLKRLRELLERYRETNKKLLDLLRKLLDEARRTGTDEDLLRRLEDILRKYEDEVRRLLKELEDILREYEDTSRRLLEELERIAKEAAERVSRGSDKDVKDIIRTILEVARDLLRLLEEDSRTNSEVVKRLLDLLREDSKANSEVVKRLLDVLRE

SEQ ID NO: 1626 - protein, 240 aa, Artificial Sequence
  Synthetic
SKEETLKRLLDELEKRNRETVERLERLLKELEDRNRASRDHMVLHEYVNAAGITESGLSKELKDTLARILEELRKLLEEYFRKNEELLRLLRKLLDEYARTNEELLRLLEELLDTARRTGGDSELLKRLEDIAREYEKRVRRLLEKLKDILDKYRKTVEELVRKMEEILKEAKKTISRIGSEEVKDIVRAMEEVIRRLIEILRRDVELNLDVAKKLLELLKEDSKLNLDVARELLELLDR

SEQ ID NO: 1627 - protein, 240 aa, Artificial Sequence; identical to SEQ ID NO: 1626
  Synthetic

SEQ ID NO: 1628 - protein, 243 aa, Artificial Sequence
  Synthetic
DEEETLRRLLERKVELAKEYLDVSKEVIDRTTKLLDEYRDHMVLHEYVNAAGITRGDLGPDELIKRLAEELERSLRELEEEIKRLKRELEESLKKLKEIIDRLAEEAEKLLAVLKRGEGSEEEALRALASLVRELIEVLRENDERLRDVLRRLIEALRKNNEILERVLRKLVRAAEERGRDESSREALEEARRRLEELLRELNEITKDLEAKLEKLLRDLNELTKALEEELKRLLDELKKRTD

SEQ ID NO: 1629 - protein, 243 aa, Artificial Sequence
  Synthetic
SEAERTKESLKKVLKALVDLNRELLRKLEENMRELTKLRDHMVLHEYVNAAGITEGGIVDKDAEREAERLMRELDKSSEDTARETRKLIEESKKSTRRTEEEARKLTETLDRLAKGGLPREDLLRALVRLLEELARLIEEDVRRNAELVKRHIELVERDVAELLRLIKELVDLLADLAEKGSRTEEIRKIVEEILKEIKELADRYREEVRKSKDKLRSILEDYKRKVDELKERLRELIEEVET

SEQ ID NO: 1630 - protein, 186 aa, Artificial Sequence
  Synthetic
SAEDSIRELLERDERLLEEARKEAKRLNEENERLLERIERDHMVLHEYVNAAGITIRKKIKGEKLREIEELVRRVKRTIEKLLEEVKKSVEDSSKRIEELLEAVERSVERTKEEIRRLLDEVRKDRKEELVKRVEERIKRLHDENRRLVKEVIEEVEKLIRDNEKLAEDIEREIRRLLKELDEAAK

SEQ ID NO: 1631 - protein, 182 aa, Artificial Sequence
  Synthetic
DEAEKLLKELRDLLEESRKDLERLLKELEDLLEESKRDLRDHMVLHEYVNAAGITTVERRNEREKLEKLLRELKKVVERLKDNLKDNERRNKEAIERVRKKLKDNERENKKVIEDLRAKLKDLEEVKRKIDRLEEESRRVIEEARKRLEEVEEKSKKIIDDARRALDRIDKELRRVVEETRK

SEQ ID NO: 1632 - protein, 182 aa, Artificial Sequence
  Synthetic
RVEDALRKLLDDVRRLVEEAERRLRTSNDKSRRLVEEAKRDHMVLHEYVNAAGITVRRRIRDEDVKRVLEELLKRDHDVVRRVLERIDEMLERNSRLVKRVLEDIRRLLKRVREVVERIKRVRSKVVEEVLKELEELIKTAKKIIEDVLRASEDTIRRLEEIIRKVEEDSKRIIEEIERAAR

SEQ ID NO: 1633 - protein, 183 aa, Artificial Sequence
  Synthetic
KVEKRLTDLLKTVADEVKRVEDELRETVRESKEVVDKSRRDHMVLHEYVNAAGITAERRVSEDLVRRIRKVLDENREVNDRVVKEDERILEENERVNRKVVEKIRDILRKIEEVVRRAAEEIRDEEVVKKVEKEIRELLERLKEEADRVRERSKKILTDLKKSSEDVKRESERMLKKLEDEIR

SEQ ID NO: 1634 - protein, 184 aa, Artificial Sequence
  Synthetic
SLEEVIKTVRKLLEEVERRLREVVERAERMLEEVRRRTRRDHMVLHEYVNAAGITLRDKNVSEEIEEKLRKIKEELERDNEKVNRDNERSVETLRRLLDRVRKEVKDIAKELEERLKEVERKSRDDRIVEKLLRDAERIVKRLRELIEKLREEVEKIVDENRKTVEELRRRNEEIVRRLRREIE

SEQ ID NO: 1635 - protein, 184 aa, Artificial Sequence
  Synthetic
KLDEVIEEIRKLLRRMEEELRRSVEEIDKLLREVRELLRRDHMVLHEYVNAAGITLKKRGVPEEVKERLDRLVETLRRLSEETLKELDKLVREVKELSKESLKRLRELVERLRRELEEIKKRGEDEKLVEDLKRRAEEVIRELREIVKRNTEIAREVVERAKRIVEKNEKLLKDVVEEAKKIVK

SEQ ID NO: 1636 - protein, 181 aa, Artificial Sequence
  Synthetic
SEVERVLEDLRRLVRDVEEKLRRIIERDRRLVEEVERENRDHMVLHEYVNAAGITELKDISDKKTIERIVREIIKEARDLVRRNHERNREIVDESRRLVEELRRIVEEIIRRLRELLERVKSGELAERIEDVVREAEKRLRELLKELEKTSRDLKKRLEELDRELKALVEKVERDLEELRK

SEQ ID NO: 1637 - protein, 177 aa, Artificial Sequence
  Synthetic
KEEEDLEREVKRLEDKVREDAKKLEEVVKTVEKLVRDDARDHMVLHEYVNAAGITLTERKLDEETLRKVKEDLKRTLERLKRENEKSLEELRDILRRLKKENDDTLKELRDELKRLTDSGASEDVIRKMEEIIKRLEEVSREVEKRLRRIIRELERVSKEVLDRLREIIEKLDRDAT

SEQ ID NO: 1638 - protein, 180 aa, Artificial Sequence
  Synthetic
STEEVLDEIRKLHKTLTEDIKRVLREIEELHRRTIEENKRDHMVLHEYVNAAGITVRTKDTPNVEKLLKDLEKSAKENEEHNERTLREDDRVLKEIRRRATELLKANEEMLRRIEEVMRAGKVDAEELLRESKEAIKEVKRVLEELRKESKRVVDETRKLSEENLEHSERVLRKVEEDLR

SEQ ID NO: 1639 - protein, 180 aa, Artificial Sequence
  Synthetic
SKEEVLDEMRRLHETTKRDIRRVLKEIEELHERTLRENKRDHMVLHEYVNAAGITIKRKKTPDVEKLVRRVEEMLKELEKHNKKTTDDDKRVLDEIRRRADELVKEDERVLREIEEVVRAGKVDLKELLDESRRVVKESKEDLDRLLKESRDVVDDTRRKSEKNLRDAERVIREAEEAVR

SEQ ID NO: 1640 - protein, 187 aa, Artificial Sequence
  Synthetic
SEKERLKEELEKLSKEIEDILRDDKRSDDELRRRLRELLRDHMVLHEYVNAAGITMLEEARKRVSEDELRAIKKEIEDLNRRNEESLRAIEEKIKRLNDENRKSLEEIRRRLKRLVEEVDELRKRDNREELLRRLLEKLKRMAEKLKRDIEDNNRKLRKVATELAKEIEDNSEKLREDAKRLSEKIK

SEQ ID NO: 1641 - protein, 187 aa, Artificial Sequence
  Synthetic
DEEEELRKRLEKLSKEVRELLRRDEEEDRRLNRELEELLRDHMVLHEYVNAAGITLLRKARRKVSEEELTRLRKKLRDLEEESKEALRELRRRVEELNKENKKSLDDLERRLKELEDRAREVEKRDRREDELRELLRRLEDVIRKLAEDLKRNTEDLRRVIKELAERLEELNKRLKREIRRLKEELR

SEQ ID NO: 1642 - protein, 171 aa, Artificial Sequence
  Synthetic
SEKEKVIKEARELLERLRKRLKDVNDDVTRLLDELRKENRDHMVLHEYVNAAGITEVPVEDVIRELKRRLEEVDKKNRDILETLKRELDEVSRRTREELEKLRKELEEVEKAGLPAEELKRVADRLRRRLERLVEENERVVKKILDEIRRSVEENKRIVDKVRKDLDERRK

SEQ ID NO: 1643 - protein, 177 aa, Artificial Sequence
  Synthetic
SAIEKVKEVVERVLETVRDSVRRSHEESKRLIDKVRKRLRDHMVLHEYVNAAGITKGIPERMVEKLERDLEELLKEIKDTIDRIEEELRTSNRRLKETNDEIAKRLEELLRELSRDRDKDAVEDVLRRIEELIRDLNKKNDDNVRRVKEVIDRAEKLVRDLLREIRKLIEKLIRDTE

SEQ ID NO: 1644 - protein, 179 aa, Artificial Sequence
  Synthetic
SSKEVADELRKKAEKVLDELRKIIRELERKNEDSLRRTERDHMVLHEYVNAAGITLVRTRGEDDRLVREVERLLRELKRRLEELIRRSEELIKRSREEVDRVIRTVEKLLEELDRLLRANKGDIEDLRRTVDKLVEEIKDLARKLAKSSDDTVREDEKLVEELRKDVKRIVRKIKKDLE

SEQ ID NO: 1645 - protein, 174 aa, Artificial Sequence
  Synthetic
SEIEELEKRIDELLKELRDLSRRIAEEVKRLLEELKKLSRDHMVLHEYVNAAGITKGVPEEELRRVEEEVERVVRESRKLNKETEDELRRLLEEIKESNDRVEKRARELKKLLRDGKDVEEVLRRLEKLVREDKERLKKVLKDARDLIKKDKDLNEKLSRELEKLVRELEERAR

SEQ ID NO: 1646 - protein, 182 aa, Artificial Sequence
  Synthetic
SDADRVAEELKKLVEDSRRENERVIEESKRLVKENEDRNRDHMVLHEYVNAAGITILEKEKDKKTLDDIVREILERLKRLLEKVEDENRKSHEENKRLLEDVKRKNKRISDELKRLLEEIERRNVDVDKVRETVKRLLEENKRVMEKTEEVAKKSSEDIKRVADETRRRAEELLKEVDELRK

SEQ ID NO: 1647 - protein, 178 aa, Artificial Sequence
  Synthetic
SEEEKLKEVKDRIREVLRKLEEHTDKVKKEVEKVLRDIRRDHMVLHEYVNAAGITLRRKKKDAEDLLRELEKIIEEIERELDRVLEENDKMAEEWKKLLDKVLDDNRKSIRDIEKELDDREPTDELVTEVEKLLRDDEETNRDVVKKVREAVKKDADTNRKVIEEVKKVLEDAARRLD

SEQ ID NO: 1648 - protein, 183 aa, Artificial Sequence
  Synthetic
SEVDEVLERIKRLLERLAEHSDKVVRDIEKLLDDNRKENRDHMVLHEYVNAAGITMRRRGDLREELLERVVREVEKEIRDIKRKNKRSVETVEKLVRDDRKELKRALEDVERLIRELETRLKDKEELRRKLEKVLREAEKVIDELLKKTDEVLKRARETIEDLNRKLDKVLKEVRDKLDRLRD

SEQ ID NO: 1649 - protein, 179 aa, Artificial Sequence
  Synthetic
KDEETLKRLLEKAKEVVDRLKDENEKVTRDNHESVKKAKRDHMVLHEYVNAAGITAIRRVREAKEVVDTAEKLLRDNHEHSRDTVKKARELNETSRRHSERIVEKIEEILEEVERTLRENRGDVRELAKKVEKAIRELEELSRENREAVKRISDEIKRLSDENAKDSERIIKEIDDRVR

SEQ ID NO: 1650 - protein, 179 aa, Artificial Sequence
  Synthetic
REDERLEEIARKIKKVVDELVERNKKLTEDNHESVRRAERDHMVLHEYVNAAGITAIERIRSDKKVVDEVKKLLEDAKKHSKEVIDELRRLNEESKRSSEDTIRRMRKLLRELEETVKAKKGDVEDIERKVEDIIRRLEDLSRRNEEKVRRISEEIKKLSKDNERTIKEIIKEIEERVK

SEQ ID NO: 1651 - protein, 184 aa, Artificial Sequence
  Synthetic
ELIKKARKDVEEVRERSERLVDELRKRNKKLADESRRLIRDHMVLHEYVNAAGITLLRKRRTKDVLKEIEDLVRELERELRRVVKESSDKVRKLIRENEKVVEESSRLFRDLVEKLRRVVEERNDKKLMEEVERLIKRLEDVNEKSERDVREINKESERVNEETEREVEDAIRKLREVLRRAKK

SEQ ID NO: 1652 - protein, 179 aa, Artificial Sequence
  Synthetic
RLEDEVRKMEKEVREEVKRLEDESRKVLEESRRNLDKLRRDHMVLHEYVNAAGITLRRRGLDERVLRELLKRVREVHERNRKLLDEVRRASEKVHEDNRRILEEVRKTVKDVVDKLRRVDAKVVKELIDRVRKILEDVEREVKKSIEEVKEINRRLNEEVKKTIEEVKEIVKEVTERAK

SEQ ID NO: 1653 - protein, 179 aa, Artificial Sequence
  Synthetic
SKAEEVEELVKKLLAEVKKSLDDVRRTVEKLLREVRKSLRDHMVLHEYVNAAGITLKDDGQDERAVRRVVEEIKELLDRNNEDSKRVVKEIRKLLDENDKTSKRVVEEIKRLLDEVRKEGKISEEKVEKLERDVRRALERDTRENKKLEDRVETALREDKKRNDDLREDVKRVLEEIRT

SEQ ID NO: 1654 - protein, 174 aa, Artificial Sequence
  Synthetic
SESDEVIRDLARLLDELARHVDDSVRRMDEVVKRSTREARDHMVLHEYVNAAGITKPGDERVERMVAEIERLVAEVLEELKKKYEKLKREVEENLRRLEETVRDIVEKARKVTEKGVSKEKIDRIIRELERILEEAKKKHEDVLRRLEDSLRRVAELLKAALDRLREIVDRLRR

SEQ ID NO: 1655 - protein, 174 aa, Artificial Sequence; identical to SEQ ID NO: 1654
  Synthetic

SEQ ID NO: 1656 - protein, 174 aa, Artificial Sequence
  Synthetic
SESDDVIRKLRELLEELRTHVEKSIRDLRKILEDSTRHARDHMVLHEYVNAAGITKPGDEEVRKTVEEISRRVAENVKRLEDLYRRMEEEVKKNLDRLRKRVEDIIREVEEARKKGVDEEKLKDLIRKLRDILRRAAEAHKKLIDDARESLERAKREHEKLIDRLKKILEELER

SEQ ID NO: 1657 - protein, 186 aa, Artificial Sequence
  Synthetic
SRVEEIIEDLRRLLEEIRKENEDSIRRSKELLDRVKEINRDHMVLHEYVNAAGITEVREKGSESEEVKKALRAVLEELEKLLRRVAEINEEVLRRNSKLVEEDERRNREVLKELARLVEELIREIGDEDKARKVAEVAEKVLRDIDKLDRESKEAFRATNEEIAKLDEDTARVAERVKKAIEDLAK

SEQ ID NO: 1658 - protein, 186 aa, Artificial Sequence
  Synthetic
SEVDEIIKELERLLAEIARENERIIRESRKLADEVRKRNRDHMVLHEYVNAAGITAVRRKGSESEEVKKLIEDVLREIERLLKRIEEENREVVKRNSELVERVRAINEEILRRVAELVEKIARDIGDKDEVTKVKKVADDVLAEIKKLDDETRRVIEDTNKKIADLDKATRDVVRKVLEEVKKLEK

SEQ ID NO: 1659 - protein, 185 aa, Artificial Sequence
  Synthetic
SSVEELLERLRRISEENKRRIEKLLREVEKVLRELKDRHRDHMVLHEYVNAAGITEIKSGLPEEAVKRVLERVRERVKEVLEEADRLNDEMRRIVTEVEKELDKSDKEVEDAVRDILKKIEEGVRDRETAERARETLKRLLDENRDRSKKVKEEIRRILEDLTRTTERVKREIAKLLKELEDTAR

SEQ ID NO: 1660 - protein, 180 aa, Artificial Sequence
  Synthetic
SELEEVLRRIEALVRKAHKENEDVLREIERLVRTAHRLNRDHMVLHEYVNAAGITGGREDKDKVEEALRRLRELYRRLEEENRRILREIEELVKELEKRNREILKELEDLVADAERKGSDGSEAVRRLKEILERLKEEVRRSLEELRKEVERLKKEVEDSLRELKKSLEEWVKSLEEATR

SEQ ID NO: 1661 - protein, 238 aa, Artificial Sequence
  Synthetic
EEDERLTKRVEEIKRENRELLRRLEEEVKELERKSEKIVRDHMVLHEYVNAAGITGKGSTELLVEELEKLIREILKLSEDHNRTLEEVVRKIEDVLRANLERLKELVDEILKALKERGKGDSEELKRKVEKVARDYERLLRKLREVVKRILDESKRLDEELEERLKEVLKKLEELIKRGGPDKDVLTELKRILDELLKLVEKLIRRNLRLLEELLRLVREILRTSNEILEEILKDARR

SEQ ID NO: 1662 - protein, 244 aa, Artificial Sequence
  Synthetic
SAEETLRRITEESKRVLEEITKKYEDLERESREVLRKLRRDHMVLHEYVNAAGITGGDDKDEVLTVLEKVLDELLKLHRENLRVIKELLRKVLEVDRENLEVLKRLLEKARDLLRRSGRDEKDLKKLEDELRKVKEELEKKHEASKRDIEDLERELDKVTEEVERLLRKLKEELRRAAEGSDEDRERLARLLKALADKLIRVLEEILKINEELNRKIIKFARENLERNRRVNKKVIEVLREAAR

SEQ ID NO: 1663 - protein, 244 aa, Artificial Sequence; identical to SEQ ID NO: 1662
  Synthetic

SEQ ID NO: 1664 - protein, 250 aa, Artificial Sequence
  Synthetic
STEEILKRVKEILDELAKELRDIIRESLRTIEELLDELRRDHMVLHEYVNAAGITIKDGVKDSEELLRRLKRLLEDLRRAHEELLKRLKEAVDEHRDRLRKILEELERVLKELRKRIEELRRSGDRISEKDVLRKLEEVLRKALEILERLLKKIRESARELLKIIEEVLDANIKVMEEALKTIKELLKDGPDEVKRRLEEKERRIRTRYEELRRRLRKRVKDYEDKLREIEKKVRRDAERIEEELERAKK

SEQ ID NO: 1665 - protein, 238 aa, Artificial Sequence
  Synthetic
SEAEKIREALETNLRLLEELIKRLKEILDTHNELLRRVIRDHMVLHEYVNAAGITGGLDEEVLREVKRLVDELRKEARRVLDEHEKLVRKIKKEAEDVARESEEIIKEVEDKLKGLDREELLERVRRVLKKSDDLIAELVRRALKILEELTRLLAELLKKVVEILRRIVELVERVLTKKGAPKEDLERLRRKVEELEDRLRRLLEKLARDSAELMRELERILDRYARESEELDRRLAE

SEQ ID NO: 1666 - protein, 248 aa, Artificial Sequence
  Synthetic
SAEEELEKLVRKVEEDLKRLEEESERIKKEIKDTLRAIRRDHMVLHEYVNAAGITLEEEGRRVSLEEAIKIIKEILDELAKVNEDIIRIIKELLKRLVDTNRRVIETIDRILKKLVDDLRRGNLPEDKLREVERELRELKKELEEIVRESEKMLKELEDKLREIVRESRELLEKLRRDLKRIKDGNLSADEALEMLKRLLDKALKVHEDVLRKLVELVDEVLKVHEESLRKLLTLAAKVLEVLRKITK

SEQ ID NO: 1667 - protein, 240 aa, Artificial Sequence
  Synthetic
SDKEEIKRRVEKTARDLETEHDKIKKRLEDTVRDIKRELRDHMVLHEYVNAAGITTLREGDGDATDLVDKLLETVKRLNEEVLRTVKKIADELRRLVEEVLRVLRESNETLARLLEEGNVGDEVRERLEEVLRRTEEIIKTLEEIVKRLLDELRRLVEELRRISKKLKDELDKIKEKGKDEKRLIEEVVRLLRENLDVVRRILEALAKLIKELLEALEEVLRRNKELIRELLRVLDEALK

SEQ ID NO: 1668 - protein, 248 aa, Artificial Sequence
  Synthetic
DEEERVKKLLTDLRRLLRKLHEESKKLLDELRKKLRELRRDHMVLHEYVNAAGITAEKKLPGTRVLKLVADVVKKVLDAIRDLNRKLEEIIDEALKLLEELDDILRRVVEEALRLLKEIKDTKGDREEVKKRVEDILKRLEELVKEYEDRVREIKKRLRRALEELRDEYRKIREDIERVLDELRKGGVPEELLRVLEELVRTLKKLLDENLKMVERLIRELEKVLDDHERKVRRLIEELLEVLDRDAK

SEQ ID NO: 1669 - protein, 248 aa, Artificial Sequence
  Synthetic
DEDRIIEEIARLLEELLRELLELIKKLIETNRRLNEEHERDHMVLHEYVNAAGITLVKKGISDEKLKRIRERLKRALDDLERLHREINKRLEDLVRELEKLVREILKELKDALEELRRASARAGGEEVLRRLEEIVKKLLDLVRRILERLKEIHKDNVRLLRELNERLTRIVEDLVRLIREILREAGVDEKIAEEIERELEELRRMIKRLHEDLERKLKESEDELREIEARLEEKIRRLEEKLERKRR

SEQ ID NO: 1670 - protein, 238 aa, Artificial Sequence
  Synthetic
DADELLRRLAEEVERVIREAEDLLRRWKETIKKVLDDLKRDHMVLHEYVNAAGITLTKTKGDEELAKLIKDLLDTNEKVNRDLLRLIKKLLKDAERVNRRLLELIEELLEELKRVAKDLGLREEADKKLRDIADRARKELEDYERRLKELLKTVEDALRKAEEDSRKLKRDVEELLERGRLRKDDLEDILRKNLDRLRKLLERLREILRENLEALKKTLKRLEDVVREILEDLKRERK

SEQ ID NO: 1671 - protein, 238 aa, Artificial Sequence; identical to SEQ ID NO: 1670
  Synthetic

SEQ ID NO: 1672 - protein, 236 aa, Artificial Sequence
  Synthetic
STREKAKKVLDTLRADNEDMKRVVEKILRALKRTNERAERDHMVLHEYVNAAGITVGVSEEALKEIEDTLKRVLEEIKRLLDESKKLLEDVEREIREILKTSEELLERIEREIETVGSDEKTLAEILKRLLELNEEMNRRLLKILRDLLRLNEEVIRRLLAVLERLLDALKEALDRGDVPEDLLRKLEEELRRIKEKLRKALEELEREHRELEKELDKLHDESRKEHERIEEELRR

SEQ ID NO: 1673 - protein, 236 aa, Artificial Sequence; identical to SEQ ID NO: 1672
  Synthetic

SEQ ID NO: 1674 - protein, 247 aa, Artificial Sequence
  Synthetic
SKAEKLLKDLREALEKVKRRYEELERRLDEVLKEHEEIVRDHMVLHEYVNAAGITGGLPEEELEKLKKLAEKVKELLRELLRLSKELVDRVRELLKRDLDLVRRLVEIALKVLREAREQPNDEKRVEKIKRDLEKKARRVREENERIKRDLKRTADESRKRLEKLLEDLKRELDRLREDLDRGRKDIDERVEELIERLIRIIERLLREVIKSHEKLVRTIERLIEESIRVNEELLEVIERLLDRARK

SEQ ID NO: 1675 - protein, 247 aa, Artificial Sequence; identical to SEQ ID NO: 1674
  Synthetic

SEQ ID NO: 1676 - protein, 231 aa, Artificial Sequence
  Synthetic
SKEEEVEKVLRKWEEILRRLIEENKRANDKIRREYEELVRDHMVLHEYVNAAGITLGVSEEVKRILEKLIKLLEDILEYEKENVERLIELNERILRELKKSVEELKALVTRVRRDGLPESEVRKLVEDVLRKNEELLKEAKKAWRDSIENLKRVLEEVAKLVKTVLREIEEKIDDEDVVRALIEVIERLLRVAEEVIRRILKVNTELMRVDERSIRESLKAISEVLKVLDT

SEQ ID NO: 1677 - protein, 247 aa, Artificial Sequence
  Synthetic
RDRDVLRKVKAEIEELVARIEKVSRDALSEVKRLLDENRRDHMVLHEYVNAAGITIRDTRGDDEVVKETEEVLRDNHRLLEELIRRLIKVLEEWLRRHKKLLDEIRELLKEILRLVKESGVSEDLLRRLKRVIEELDKKLKESEEKLRRVVEKAKEDLKAVLEEHRKVLEDLKRALEEVREKLRERGSEEVVEELLRMLKRVAEEMKRVHDDLSRAVEKVVRDVVRVDKELLDELARILRRLEEVIT

SEQ ID NO: 1678 - protein, 237 aa, Artificial Sequence
  Synthetic
KEKEDALKKLEDLARKSREDLERVLRKHKKILDKIEELLRDHMVLHEYVNAAGITKTGTESEILKELARLLREHHEALRRLIEELRRLLEEHHKILEDLAREHKRLLDELIKVVADGVDKDELERIIKELRERDKKLVDDLRKVSEDLLDAVRKLVEDLERISRELLRRVEELAKGIDEELAREVERVIKELLDKSKEILERIERAIDELLKVSEEILKLSEDASEELLKILREFAK

SEQ ID NO: 1679 - protein, 229 aa, Artificial Sequence
  Synthetic
SKEERLREVAEKHKKDLEDIVKRVDEAAKETARRLEEILRDHMVLHEYVNAAGITGPDDEKLKKVKKILKDIMDRLAELIKKILKLLKENLEKIKELLRRNLEISEELLKLAKGLSDRDVLETVRRVLEKLDEEWDRVLEDSRRIIETILRELDTLLREVEKLIKEIKDEISGSKEVLDILERAVEVVRRVIKALKEVLERHVDATREVIERVKRVNKRLLEAVREVVT

SEQ ID NO: 1680 - protein, 241 aa, Artificial Sequence
  Synthetic
SEKELLKEILDRIRELLEDDNRLLKRIVDEIRKLLEEWLRDHMVLHEYVNAAGITIGAPEDVIRELTRALKETEEDVDRVIRTLEKLLKEVLDAHEEVVRKLDRLLKEVERLVEGGDAEEVVRDLLRVVKEILDESKAVIDELARVVDEILKLLEEVDRKLAKVVKEILEDVLRGSGDDEDAVRKIAKIIEELKRLLEDLARDTRRVIEEAKRLLKEWRDRNKEVADTLKKLLEDLIRKIR

SEQ ID NO: 1681 - protein, 241 aa, Artificial Sequence; identical to SEQ ID NO: 1680
  Synthetic

SEQ ID NO: 1682 - protein, 240 aa, Artificial Sequence
  Synthetic
DREKSVRDIEEDLKRVLDKLRRRVETSKEELKKVLKADKRDHMVLHEYVNAAGITLDRGIDSEVLRAVREIVKRLVEVVRRYNELSEKIIRDLVRVNDRVLELLKRIVKRLIDVVRELEKIGDKEKALRRLEEVVKEVKRRIEELLKELEDVHRELVKILEEVNEDLKRVATEVKEIIKTGIKSSEVAKELDEVIKRLLDNLKENTDRLKEVIDRNLADLRDLAEELRAVIERLLEDARR

SEQ ID NO: 1683 - protein, 240 aa, Artificial Sequence; identical to SEQ ID NO: 1682
  Synthetic

SEQ ID NO: 1684 - protein, 237 aa, Artificial Sequence
  Synthetic
REDEVLRDIERLLREIEEKIRRILEESTAELRKVEEEVKRDHMVLHEYVNAAGITVERKGIDEELRKLLDEVLDKLTKLIERNKRSLERILELIKRIIDENLEVLRDIIRLLEELLKATKDNGVPKDEVIKLVEDVVRRIEELVTRVVARNEKLVKDLDDLAKKNVRENEELLREIDRGLDEDLLEKIKRVIREHIKALEKLARDLKEILRRHIEALKELARDLAEVIRKLLEDVKR

SEQ ID NO: 1685 - protein, 237 aa, Artificial Sequence; identical to SEQ ID NO: 1684
  Synthetic

SEQ ID NO: 1686 - protein, 243 aa, Artificial Sequence
  Synthetic
SEAERLADEVRKAVKKSEEDNETLVREVEKAVRELKKNNRDHMVLHEYVNAAGITLLRDGQVSDRDLLKELEEVLRRVLEALAENHERTEEILKRWLDRYAEDIERLRKVLKEVIEALKRGGSDDKRIVDELEEILRRNEDVLDKIAKRLRRLLEEDRRLLERIVRELKRLLDDLDRITKEGKSEELVRIAIEVLKRLLEIIEELVRLNNEILERLLKIVRELHKDNIKILEDLLRIIEEVLR

SEQ ID NO: 1687 - protein, 243 aa, Artificial Sequence; identical to SEQ ID NO: 1686
  Synthetic

SEQ ID NO: 1688 - protein, 245 aa, Artificial Sequence
  Synthetic
SEKDEVTRRIRELLKEAEETNREAIERIKRLLDRVREAVRDHMVLHEYVNAAGITVLDRGLQDDEALLKLLIDALREHNRLSTELIKILIDVLRTILKIIKDVLATNIEIARRILDLVRRLAERGGLDDRLVKEVEKLVRTAERLHRDALRKVKRLVEELEKRLRELVKTDHDLVRRLETLLRRGSGSKEDLLREIARILAESLRLIRELLKEIEKIVKEIIELLERLNDELRKIIEAILETTKK

SEQ ID NO: 1689 - protein, 243 aa, Artificial Sequence
  Synthetic
SRVEELKKLIEDILRISREVVERIARVAEDIHRINRRVLRDHMVLHEYVNAAGITILARKVSGTEAAEALRDTIRRVVDEIRKLLEEHEKRSAELLEEIRKLLEDILRRSERAVEEIRELLKKGVSTKDVLRIIEEILREHLELLERVVRRIEEILRELLKTIEEIVKRIKEILEELKEVLKRGSVGDDEVEREIRRVKEDLDRILEEYRRLLEEIKRKLEEILRRVEELHRRLRRKLEEIDR

SEQ ID NO: 1690 - protein, 249 aa, Artificial Sequence
  Synthetic
DAEEVVKRLADVLRENDETIRKVVEDLVRIAEENDRLWKRDHMVLHEYVNAAGITLRRGGVPEELLDRLAKVVKSIVEKAEKILERLNRVSKAIAEKLKTIVDELNEVSKEIVKRAEDILRKGKDKETVLRALRTLVKEYADLSKEVLERVERIVREYVKLSDEVVKSLAEIVEELIRIIEDLLRKGNLDEDVKRALEELVSRLRKLLEDVKKASEDIVREVERIVRELAKRSDEILKKLEDIVEKLRE

SEQ ID NO: 1691 - protein, 240 aa, Artificial Sequence
  Synthetic
DKDKRLEELLKRLKELNDKTFEELERILEELKRANEASLRDHMVLHEYVNAAGITGNLDKRLAELLKKLLDDLKRLLEEYTRTNEELLKRLRELLERYRETNKKLLDLLRKLLDEARRTGTDEDLLRRLEDILRKYEDEVRRLLKELEDILREYEDTSRRLLEELERIAKEAAERVSRGSDKDVKDIIRTILEVARDLLRLLEEDSRTNSEVVKRLLDLLREDSKANSEVVKRLLDVLRE

SEQ ID NO: 1692 - protein, 240 aa, Artificial Sequence
  Synthetic
SKEETLKRLLDELEKRNRETVERLERLLKELEDRNRASLRDHMVLHEYVNAAGITSGLSKELKDTLARILEELRKLLEEYFRKNEELLRLLRKLLDEYARTNEELLRLLEELLDTARRTGGDSELLKRLEDIAREYEKRVRRLLEKLKDILDKYRKTVEELVRKMEEILKEAKKTISRIGSEEVKDIVRAMEEVIRRLIEILRRDVELNLDVAKKLLELLKEDSKLNLDVARELLELLDR

SEQ ID NO: 1693 - protein, 240 aa, Artificial Sequence; identical to SEQ ID NO: 1692
  Synthetic

SEQ ID NO: 1694 - protein, 243 aa, Artificial Sequence
  Synthetic
DEEETLRRLLERKVELAKEYLDVSKEVIDRTTKLLDEYLRDHMVLHEYVNAAGITGDLGPDELIKRLAEELERSLRELEEEIKRLKRELEESLKKLKEIIDRLAEEAEKLLAVLKRGEGSEEEALRALASLVRELIEVLRENDERLRDVLRRLIEALRKNNEILERVLRKLVRAAEERGRDESSREALEEARRRLEELLRELNEITKDLEAKLEKLLRDLNELTKALEEELKRLLDELKKRTD

SEQ ID NO: 1695 - protein, 243 aa, Artificial Sequence
  Synthetic
SEAERTKESLKKVLKALVDLNRELLRKLEENMRELTKLNRDHMVLHEYVNAAGITGGIVDKDAEREAERLMRELDKSSEDTARETRKLIEESKKSTRRTEEEARKLTETLDRLAKGGLPREDLLRALVRLLEELARLIEEDVRRNAELVKRHIELVERDVAELLRLIKELVDLLADLAEKGSRTEEIRKIVEEILKEIKELADRYREEVRKSKDKLRSILEDYKRKVDELKERLRELIEEVET

SEQ ID NO: 1696 - protein, 243 aa, Artificial Sequence; identical to SEQ ID NO: 1695
  Synthetic

SEQ ID NO: 1697 - protein, 178 aa, Artificial Sequence
  Synthetic
DEVEKLLRDLEELDRDIERKVRELLKRNKEVLDDIEREVRRDHMVLHEYVNAAGITIRKTTDKRTVDKLLKELEKILKEVLDRVRRLLEEAKESLDRSREEIERLLEESKTLVDEVRRAGIDKKEVDKIEKHSRDLIERAKRETDRLLEEAERLMREVVDRVRKILEEAKRLIDEARR

SEQ ID NO: 1698 - protein, 181 aa, Artificial Sequence
  Synthetic
SEVERVLEDLRRLVRDVEEKLRRIIERDRRLVEEVERENRRDHMVLHEYVNAAGITLKDISDKKTIERIVREIIKEARDLVRRNHERNREIVDESRRLVEELRRIVEEIIRRLRELLERVKSGELAERIEDVVREAEKRLRELLKELEKTSRDLKKRLEELDRELKALVEKVERDLEELRK

SEQ ID NO: 1699 - protein, 174 aa, Artificial Sequence
  Synthetic
SEDETIRRIVRTVHEESRKSTEDVRREVERVLRESEEVVKRDHMVLHEYVNAAGITGISEELEERMRRIIREIREHLKDNLRRVREVIERIERKLEETERRDEKVLREIEKKIRDGDGREEVAREVTKIARDTIRENEEIAKEVREIVERSIKNLEEVAEEVERVVRELIEARR

SEQ ID NO: 1700 - protein, 174 aa, Artificial Sequence
  Synthetic
SRDEKIRDILRRVLKEVRDSTKKVEEDLEDVHRRTEEELRRDHMVLHEYVNAAGITGASEELKRRMEEVVRRIEELLKKLLKEDRDVVKEIRDKLDETRKEMEEVAERIKDKIRRGDGREKVAEEVKRIADRLIDLNRRIAEEVDKIVRDSIKKVEEIVTEVEKIVEKLIRDVR

SEQ ID NO: 1701 - protein, 174 aa, Artificial Sequence
  Synthetic
SELEKVVKEVADLLRRNLEKSKRVLEEVRRRLEENLRESERDHMVLHEYVNAAGITVREGKDKRDLTRLLEEDDKRVKEALDKSRENNERILKEVRRALRESEEDNRRILKEVREKVDSRLLEELEERVRESIERSRRFIEELEKIVEETLTESEKLARASSEITKTVLDEIRK

SEQ ID NO: 1702 - protein, 180 aa, Artificial Sequence
  Synthetic
STEEVLDEIRKLHKTLTEDIKRVLREIEELHRRTIEENKERDHMVLHEYVNAAGITRTKDTPNVEKLLKDLEKSAKENEEHNERTLREDDRVLKEIRRRATELLKANEEMLRRIEEVMRAGKVDAEELLRESKEAIKEVKRVLEELRKESKRVVDETRKLSEENLEHSERVLRKVEEDLR

SEQ ID NO: 1703 - protein, 180 aa, Artificial Sequence
  Synthetic
SKEEVLREIERLHKETIRRIEEVLREATELHKRLTETNKRRDHMVLHEYVNAAGITRRADTPNVEELLRELKDALDKVRDHNRKTLKKNEDVVREIEKEVRELLKEDEDVLRRIEKVMRDGRVDARELLEESRREVERSEKEVERLLRKSRKVVEEVRKLSEENDREVKKILEEVKRRLD

SEQ ID NO: 1704 - protein, 180 aa, Artificial Sequence
  Synthetic
SKEEVLDEMRRLHETTKRDIRRVLKEIEELHERTLRENKRRDHMVLHEYVNAAGITKRKKTPDVEKLVRRVEEMLKELEKHNKKTTDDDKRVLDEIRRRADELVKEDERVLREIEEVVRAGKVDLKELLDESRRVVKESKEDLDRLLKESRDVVDDTRRKSEKNLRDAERVIREAEEAVR

SEQ ID NO: 1705 - protein, 187 aa, Artificial Sequence
  Synthetic
SEKETVRDELRKLVETIRKLLEEDKESDKRLADRIRELNERDHMVLHEYVNAAGITLEELRKKVSEDELRKLRKRIEDLRRRDEELNKRSREKLEDLNERNKDSLRRIEDELRKLVEEAREVEKRDNDEERLRKLLERLERVIRDLLRKIEENNKRLRKAIKELLDELRKINKELREVIKKLLDDAR

SEQ ID NO: 1706 - protein, 187 aa, Artificial Sequence
  Synthetic
SEKERLKEELEKLSKEIEDILRDDKRSDDELRRRLRELLERDHMVLHEYVNAAGITLEEARKRVSEDELRAIKKEIEDLNRRNEESLRAIEEKIKRLNDENRKSLEEIRRRLKRLVEEVDELRKRDNREELLRRLLEKLKRMAEKLKRDIEDNNRKLRKVATELAKEIEDNSEKLREDAKRLSEKIK

SEQ ID NO: 1707 - protein, 187 aa, Artificial Sequence
  Synthetic
DEEEELRKRLEKLSKEVRELLRRDEEEDRRLNRELEELLKRDHMVLHEYVNAAGITLRKARRKVSEEELTRLRKKLRDLEEESKEALRELRRRVEELNKENKKSLDDLERRLKELEDRAREVEKRDRREDELRELLRRLEDVIRKLAEDLKRNTEDLRRVIKELAERLEELNKRLKREIRRLKEELR

SEQ ID NO: 1708 - protein, 175 aa, Artificial Sequence
  Synthetic
SEKEDLERELEEVRRRVEESLRKNEEDVKRVRDELKKLLDRDHMVLHEYVNAAGITNVDKRVLDEADRLLKELEDDHKKLEEDAKKALDELREEHKRLEETLRRMLKRIKEVLDRESDKMEEIKKEIEKILRDIERVSRELNKKLEEIVRRLKKVSDELNRRIEEIAERVRRRRK

SEQ ID NO: 1709 - protein, 177 aa, Artificial Sequence
  Synthetic
SVIERVEEEMEKVIRDSERVTKEVEDRAREVHERSEKRIRRDHMVLHEYVNAAGITGVDKRILDELRKRIKDSREDLERINEELRRALRKLLEDSKRINEELRKTLEELRKRLERVDDEEEVKKLAEEVRRLVEDSIRKLEELARRVDELVRESIERVDRNVEENKRLVREAIERRR

SEQ ID NO: 1710 - protein, 179 aa, Artificial Sequence
  Synthetic
SSKEVADELRKKAEKVLDELRKIIRELERKNEDSLRRTEERDHMVLHEYVNAAGITVRTRGEDDRLVREVERLLRELKRRLEELIRRSEELIKRSREEVDRVIRTVEKLLEELDRLLRANKGDIEDLRRTVDKLVEEIKDLARKLAKSSDDTVREDEKLVEELRKDVKRIVRKIKKDLE

SEQ ID NO: 1711 - protein, 183 aa, Artificial Sequence
  Synthetic
SEIEKLVEDVRKLVEDNLRHSEEVHRRNRRLIEENERKIDRDHMVLHEYVNAAGITAERGEIREEEARKVLEEIKRLLDEIRRHSEEVLKEIERTLKENLKHSEEVLRRIEERLEDIKRKDKDSERVRTLVDRLREELKRSLDESEKLNRESRKRVTRSLEKVDDLVRELEKLARKVLEEVKT

SEQ ID NO: 1712 - protein, 174 aa, Artificial Sequence
  Synthetic
SEIEELEKRIDELLKELRDLSRRIAEEVKRLLEELKKLSKRDHMVLHEYVNAAGITGVPEEELRRVEEEVERVVRESRKLNKETEDELRRLLEEIKESNDRVEKRARELKKLLRDGKDVEEVLRRLEKLVREDKERLKKVLKDARDLIKKDKDLNEKLSRELEKLVRELEERAR

SEQ ID NO: 1713 - protein, 174 aa, Artificial Sequence
  Synthetic
DELRDVKRELDRLLRENEEIVERIAETVRRLLEELKKLTKRDHMVLHEYVNAAGITGVPEKELKEVADTLRKLLKDIERSNKEVEDRLRKLLEEIKESTDRLREELEEVEKLLRGGKDVETVLRRVRELSRDNKRRMRRVLEEAKRLAKEDKERIDKIRKEIEELIKRLKDKAT

SEQ ID NO: 1714 - protein, 174 aa, Artificial Sequence
  Synthetic
DEEEDLERRIKKLLDENRELLKRIAEELRRLLEELRRLTERDHMVLHEYVNAAGITGVPEKDLRDVAEKVKKVLKESEDSNRDVKRKLEKLLRDLERSTERLEREARKVRKLLRDGKDIETLLRELEKLSRDNKELLKKIEKEIRDLIKEDKERNRELSERLRKLVEELKKKAT

SEQ ID NO: 1715 - protein, 174 aa, Artificial Sequence
  Synthetic
REIEEAAKDLDRLLEENKKLVKEVEEELRRLLKENRDLVKRDHMVLHEYVNAAGITGVPEEELKEVEERARRVIEESRRSSKELEKRLRELLEELRRSTKELEDRLREIKKLLRNGKDVEEVLRRVRKLSRENKEKIRKILEDVKKLSEDNKRRNEELSRRVKTLVDEIKKRAT

SEQ ID NO: 1716 - protein, 177 aa, Artificial Sequence
  Synthetic
SEAEKVVEELKKLLREVEKKIRDHTEDVKRILEELERRLRRDHMVLHEYVNAAGITNSDDDTVRKVKEELDRSHEKLREELRKVAKELKESNEELERDLKRLVEEAEDRLRRLKDRVSEKVLRELEKILEDIKRTLDKLLRENRETLKRIEDRLRELLEENRKLLEKIERELRERSR

SEQ ID NO: 1717 - protein, 174 aa, Artificial Sequence
  Synthetic
EELERILDKVRKVIEEVRKRLRDDLRTVEKVLKETEEVLRRDHMVLHEYVNAAGITARRGRDRREIKEELKKVLDDLRELLRALEEKNRRVNKENEDSLRKIEEDLRDVLRKLEEEIKGREVLRKVRELLRTIREEVERVLRKSNELSTRIKKRIDDVLETLERLLKELDDKLR

SEQ ID NO: 1718 - protein, 178 aa, Artificial Sequence
  Synthetic
SSKDEIRRRVEEVVERSDEIVKRSREHVKTVVDELDRVVKRDHMVLHEYVNAAGITRKDGGSEETLKRVLDELREILKELKEEVKKVKRKLEKVVKENRDTIREVEERNRKILDELRKRGVEERALREVEEISRKSEEKLRRVLKESEDIAKEAEDRLKTVLERVERIADEVLKRLTK

SEQ ID NO: 1719 - protein, 178 aa, Artificial Sequence
  Synthetic
SKVEKLEEEIARLVERSRRLVEELKKEVTKVKEKVDEIVERDHMVLHEYVNAAGITKRRGGSEEVLRRVTEELKKVLEDNRRVIEEVLRDLERILEELKRKAEEVTKRNRDDLKRLRDSGVDEEVLRRVEETSDRSEKELRTVLRDVTEDIKRIAEELKKALEDSTEIIRRAEDELRT

SEQ ID NO: 1720 - protein, 182 aa, Artificial Sequence
  Synthetic
SDADRVAEELKKLVEDSRRENERVIEESKRLVKENEDRNRRDHMVLHEYVNAAGITLEKEKDKKTLDDIVREILERLKRLLEKVEDENRKSHEENKRLLEDVKRKNKRISDELKRLLEEIERRNVDVDKVRETVKRLLEENKRVMEKTEEVAKKSSEDIKRVADETRRRAEELLKEVDELRK

SEQ ID NO: 1721 - protein, 175 aa, Artificial Sequence
  Synthetic
SEVDEVLREAKRIVDEVHKDNERATEESRRLVKKVHEENERDHMVLHEYVNAAGITNIDEKLVTEILKEIEEALKEAARRNKEVKDRLRELSRRVSERNREILEELKERLDRVRERRKDVKELEREVEKLLKRIEESLRRHRKENKRLLEELDRSLRELAKIVKEVLDEIRERTR

SEQ ID NO: 1722 - protein, 175 aa, Artificial Sequence
  Synthetic
SEMDDVLKKLAETVKRIIERLKKLTDDSRRLVEEVHRRNDRDHMVLHEYVNAAGITNIDEKDVRKLLEDLKKKSEEVAERNKRILDTLREISKRAEDEVRKVLKELEKTLKELEDRRPDVRELSEEVKKLLDEVRKALKRHKDENDKLLKEIEDSLRRHKEENDRLLEKLKESTR

SEQ ID NO: 1723 - protein, 178 aa, Artificial Sequence
  Synthetic
SEEEKLKEVKDRIREVLRKLEEHTDKVKKEVEKVLRDIRRRDHMVLHEYVNAAGITRRKKKDAEDLLRELEKIIEEIERELDRVLEENDKMAEEWKKLLDKVLDDNRKSIRDIEKELDDREPTDELVTEVEKLLRDDEETNRDVVKKVREAVKKDADTNRKVIEEVKKVLEDAARRLD

SEQ ID NO: 1724 - protein, 186 aa, Artificial Sequence
  Synthetic
SEVDEVRKTLEDLLRRLDEENKDIIRRNKELLDDLDRKVRRDHMVLHEYVNAAGITLEKLKDRETLTRIIEEIEKRARELIKRLRDEIRKIEEESKKSIEDSRKRNDEIRKRLEELIKDLRDKIKDSEELARRITELEKRVREVIERLKEKNKRLEDDSRRVITELRKKLKDLEDRVREEIEELRK

SEQ ID NO: 1725 - protein, 186 aa, Artificial Sequence
  Synthetic
SRVDEVIERLERLLRELDKINRDMIEDDKRLNTELNKENKRDHMVLHEYVNAAGITRKKLSDEKTLEEIIERVERRLEELIERSKRRNREILERSKELIERSKKTNEEILRRAEELIKRLREEVKDIKEALDKIRRLEERARRVIEELDEKNRRALERSKENVKRLDERNERLRKELEEKVRRLRK

SEQ ID NO: 1726 - protein, 186 aa, Artificial Sequence
  Synthetic
DEIRELEERVRRILDELRRLVERNREVIERSIRELEKLLDRDHMVLHEYVNAAGITTRRGGDDKKTMLDDVRRLLREAEDHSRRSSETAKRIHRENEEHSKDSSRKVRKLIEELRELAKKVEKEITDERVKEAIKELVKDVDRVMREVDRANRELTKTSKKVLEDVDRTNRRLVKEVRDVVERARK

SEQ ID NO: 1727 - protein, 186 aa, Artificial Sequence
  Synthetic
KEVEDLERTVRTILKRMRELITRNEEEIRRSIEELKKLLKRDHMVLHEYVNAAGITKKEGGDDKKRLVEEIKRLLDELRENSKRSSDRAKEIHERNKRHSEESSRTIEKLLKELRDLVRDVERKLRDEDAKRKLDELTKRVEKVVREADERNKRLTKRSKEVLDEVHRANEEALKEVEEVVRRVTK

SEQ ID NO: 1728 - protein, 178 aa, Artificial Sequence
  Synthetic
KAAEEIRKKVEDYKRESEKILEEVEDHSRRSKETLKRLLDRDHMVLHEYVNAAGITKRRPRTEEIAKRAEEAVRRAAERIKKVIDDVERHIRENAKELKRLLEEDREASRRLEDEIDKEVKAREVADELKKRLKRANEESERVLRELAERNKTALEEAERVLRRLKEEIEKVLRKLKK

SEQ ID NO: 1729 - protein, 176 aa, Artificial Sequence
  Synthetic
REAEEAKEEVEELNRRNKKELDDARRRVDELDKRNKDRLKRDHMVLHEYVNAAGITKEEGRSDDRLREKIERMLKTSADELERLKEENKRALRDLAERLRELIERNRRKLEEITRRTVPDKDVLKRLAELIKESIRELERVLEELAEKIDRSLKELDDVLRKNETDLKRVIEDLKR

SEQ ID NO: 1730 - protein, 179 aa, Artificial Sequence
  Synthetic
DEAEKAKRDSEKVVEDNRKMLEDSTRRAERLNEENKKELKRDHMVLHEYVNAAGITKRRGTDDEVVKDLIRRVEELLERSRKKLEDLTRDNERVLDESRRRLEKLIRDNERIVKDLTDRVVRVDEVLKRLKEEHRRLIEELEEVLRRNEEIIRRSIEDLERVLDRNRRELEDVIRRLKE

SEQ ID NO: 1731 - protein, 174 aa, Artificial Sequence
  Synthetic
SEEEVLREAAKTVEKLLDEIRRSLEKVSKRVEDSNRELKERDHMVLHEYVNAAGITRKNNVDRTLLEDVRRKLERIEERNEEMNDRSRRKLEELRERNRKILEDIRRTLEDLKRRQLPKDDVERTLREIAKLVDEVDKENKRALRENEERVKTLNRENEEMLKRIEEEVRRATK

SEQ ID NO: 1732 - protein, 182 aa, Artificial Sequence
  Synthetic
SELEKTLEDLKRHSEENKKKLEEDLRDMERNLKENKDRLKRDHMVLHEYVNAAGITFREGDIDERELERVRRKMEEIKKRLDENVERNRRKAEDIKRKLDENVKRSEDRVKEIKEDIRRRVRDKDKAEELERRLDELVKENREIHERVKKALDDIVKELEELHERLKRRLEEILRRIAETVR

SEQ ID NO: 1733 - protein, 186 aa, Artificial Sequence
  Synthetic
SEIEKLIEELRRELEKVKDELERSIEEMDRELDDVRRDSKRDHMVLHEYVNAAGITTKRGDRPEEVLRKELEDIKRKLRRILEEHHEKIRRIKEKLRRENKRVRDELKRIKDEIDEKVKDVRRKGADEELLKRLEEVAEDVKRALEELLKKHTRVVERVEKALDELDKELERIVREAEKELDRREK

SEQ ID NO: 1734 - protein, 179 aa, Artificial Sequence
  Synthetic
RLEDEVRKMEKEVREEVKRLEDESRKVLEESRRNLDKLRERDHMVLHEYVNAAGITRRRGLDERVLRELLKRVREVHERNRKLLDEVRRASEKVHEDNRRILEEVRKTVKDVVDKLRRVDAKVVKELIDRVRKILEDVEREVKKSIEEVKEINRRLNEEVKKTIEEVKEIVKEVTERAK

SEQ ID NO: 1735 - protein, 174 aa, Artificial Sequence
  Synthetic
SESDEVIRDLARLLDELARHVDDSVRRMDEVVKRSTREADRDHMVLHEYVNAAGITPGDERVERMVAEIERLVAEVLEELKKKYEKLKREVEENLRRLEETVRDIVEKARKVTEKGVSKEKIDRIIRELERILEEAKKKHEDVLRRLEDSLRRVAELLKAALDRLREIVDRLRR

SEQ ID NO: 1736 - protein, 174 aa, Artificial Sequence
  Synthetic
SESDDVIRKLRELLEELRTHVEKSIRDLRKILEDSTRHAKRDHMVLHEYVNAAGITPGDEEVRKTVEEISRRVAENVKRLEDLYRRMEEEVKKNLDRLRKRVEDIIREVEEARKKGVDEEKLKDLIRKLRDILRRAAEAHKKLIDDARESLERAKREHEKLIDRLKKILEELER

SEQ ID NO: 1737 - protein, 172 aa, Artificial Sequence
  Synthetic
SRAETVLKEVTDKIKKLADSSDELLRRNKENIDELKKSSERDHMVLHEYVNAAGITSVDEETLEELIRRVEAELEAHHRELEKNSREDEKRNRDHHAKLEEEMRRVEERLEREGIDDEVVKRVRDLLDTVRRRNEKVNEDVKRMNDKLRRDNEDVIRRVEKLLRELEEKRRT

SEQ ID NO: 1738 - protein, 177 aa, Artificial Sequence
  Synthetic
DEVRELLERNRRLLEEIKKTVKDLIRANEELLKRIEDDAKRDHMVLHEYVNAAGITLSDDETIREAKERLKASLEDVKRRVEEVKRLLEKSLEEVETIIREAEKRNRDSLREMERRGSSEELEELRRVVEESDETIKRLLEEAKESVDRSLDRIRKLLEDVRRSVERSAKRIDEKRK

SEQ ID NO: 1739 - protein, 180 aa, Artificial Sequence
  Synthetic
STEEVLDEIRKLHKTLTEDIKRVLREIEELHRRTIEENKERDHMVLHEYVNAAGITRTKDTPNVEKLLKDLEKSAKENIEHNERTLREDDRVLKEIRRRATELLKANEEMLRRIEEVARKGGVDAEELLRESKEAIKEVKRVLEELRKESKRVVDETRKLSEENLEHSERVLRKVEEDLR

SEQ ID NO: 1740 - protein, 188 aa, Artificial Sequence
  Synthetic
SEIEKILKEIEDLARRDEEVSKKIVEDIRRLAKEVEDTSRRDHMVLHEYVNAAGITLRKDGSKEELEKEVREVVKTLEELVKDNHRLIRRAVEEMKRLVEENHRHSREVVKELEDLVRELRKGSGSEDSERLVREVEDLVRRLVRRSEKSNEEVKRTVEELVRRMEESNDRVRDLVRRLVEELKRAVD

SEQ ID NO: 1741 - protein, 186 aa, Artificial Sequence
  Synthetic
SEAERLEARARELLRANEELMDDLRAKAEELLKRNDRLVKRDHMVLHEYVNAAGITKRRGEPKEEVARKIEEILRRLEETLRRIKEESDRLDEELKRELERVKRESEELDRELRKLIEDVERRGSGSKRLEELLRRLNEEHKRISDELRKLLDEALEAHRELSRRLEEELERLLREIERLVEEVTR

SEQ ID NO: 1742 - protein, 184 aa, Artificial Sequence
  Synthetic
DDLERAREEVADLIRKHEEKTRRILEESRRLNERHRELSARDHMVLHEYVNAAGITIKRERGKDELRRKVEDLEARVEDLIRRLEEHLRRVHDKDRRLIEDLRRHLKRVVEELKRLIDELRRGVPKEELDRIEEELKRLIDTLREKNREVEKRARDSNRDLKRTNDEIAKEVRELIKKLREDLK

SEQ ID NO: 1743 - protein, 174 aa, Artificial Sequence
  Synthetic
DEEEDLERAIKKLLDENRELLKRIAEELRRLLEELRRLTERDHMVLHEYVNAAGITGVPEEDLADVAEKVKKVLKESEDSNADVARKLEKLLRDLERSTERLEREARKVRKLLRGGKDAETLLRELEKLSRDNKELLKKIEKEIRDLIKEDKERNIELSERLRKLVEELKKKAT

SEQ ID NO: 1744 - protein, 184 aa, Artificial Sequence
  Synthetic
DEIRKVVKEITDLLKASNDKNRKVVEEIRDLLRKSKKLADRDHMVLHEYVNAAGITIDKSGDKETAEDIVRRIIEELKRILKEIEDLARRINREIERLVEEVERDNRDVNRAIEELLKDIARRGGSEDLKRVEERAREVSRRNEESMRRVKEDADRVSEANKEVLDRVREEVKRLIEEVRETLR

SEQ ID NO: 1745 - protein, 184 aa, Artificial Sequence; identical to SEQ ID NO: 1744
  Synthetic

SEQ ID NO: 1746 - protein, 176 aa, Artificial Sequence
  Synthetic
STAETVEKKVEEVIRENEKSMRESEEKVDRSTKRIEDVLRRDHMVLHEYVNAAGITVKGERVKEVLEENRRLLEEAKKLVDEVLETNKKLLEDDKRLNEEVSKTLKKLLEEIKSVDTREDATRVIEEAKRILDEARKLNEETIRRSEELVRRIERVIEEIIKRSEKLLEDVARESK

SEQ ID NO: 1747 - protein, 186 aa, Artificial Sequence
  Synthetic
SRVEEIIEDLRRLLEEIRKENEDSIRRSKELLDRVKEINDRDHMVLHEYVNAAGITVREKGSESEEVKKALRAVLEELEKLLRRVAEINEEVLRRNSKLVEEDERRNREVLKELARLVEELIREIGDEDKARKVAEVAEKVLRDIDKLDRESKEAFRATNEEIAKLDEDTARVAERVKKAIEDLAK

SEQ ID NO: 1748 - protein, 186 aa, Artificial Sequence; identical to SEQ ID NO: 1747
  Synthetic

SEQ ID NO: 1749 - protein, 180 aa, Artificial Sequence
  Synthetic
REVEEMIKELEELLKDLKEKNERASKRNRELVRRLEEENKRDHMVLHEYVNAAGITVRSGEDEEVLREVLKRLEEVLERVRALNERVLEAIEKSLEEVKASNEAVKRRLKELLEEAERGVDSEKLKELRDVIAEVAKRIDELDEYTRESIRRAKKEIERLNRETKKVIEEVVKRIEEERK

SEQ ID NO: 1750 - protein, 181 aa, Artificial Sequence
  Synthetic
SEVDDVLRRLEELIKTLEDINAKSLEDIKKLIDDLAKILERDHMVLHEYVNAAGITKKGIDSREAEEIAKRVLEELKRTSDDLRKKVERVDEDLRRLLRENHERNKKILRDLERLLRDAARRGVPKEALDRMREEIRRLEEESRKSDETIERLIRELRRRVEEVLKTSTDLIRELEEEVKK

SEQ ID NO: 1751 - protein, 183 aa, Artificial Sequence
  Synthetic
SKLEEVEKAVRKVIEDSRRVNEEVNRRSEEVVRELEKVHRRDHMVLHEYVNAAGITLKGSGDERLAAEVERIIEEIRELNERDRKRVEEIRKEIEDLNRDLNRRSKESEDRLRKLLEDATRGGVTKEADEVVERAERISEENKRRVEDVARKSKELVEDVRRHSEEVVRRVEELVKEVEERVR

SEQ ID NO: 1752 - protein, 180 aa, Artificial Sequence
  Synthetic
DEVEDVLRKIEKILDDHRKRIEKNSRDMARIIDEHRRKVERDHMVLHEYVNAAGITVDRGEGDEETAEDVKAKLEKSNRELEKHSEEVKRALDESNEDLRRHSEEVKERIERLVKKLREDGVEREEELKEVADRVKEKLDRLNRENEKSSEELKRELDKINDENRETSERLKREIDETTR

SEQ ID NO: 1753 - protein, 185 aa, Artificial Sequence
  Synthetic
SSVEELLERLRRISEENKRRIEKLLREVEKVLRELKDRHRRDHMVLHEYVNAAGITIKSGLPEEAVKRVLERVRERVKEVLEEADRLNDEMRRIVTEVEKELDKSDKEVEDAVRDILKKIEEGVRDRETAERARETLKRLLDENRDRSKKVKEEIRRILEDLTRTTERVKREIAKLLKELEDTAR

SEQ ID NO: 1754 - protein, 238 aa, Artificial Sequence
  Synthetic
EEDERLTKRVEEIKRENRELLRRLEEEVKELERKSEKIVRRDHMVLHEYVNAAGITKGSTELLVEELEKLIREILKLSEDHNRTLEEVVRKIEDVLRANLERLKELVDEILKALKERGKGDSEELKRKVEKVARDYERLLRKLREVVKRILDESKRLDEELEERLKEVLKKLEELIKRGGPDKDVLTELKRILDELLKLVEKLIRRNLRLLEELLRLVREILRTSNEILEEILKDARR

SEQ ID NO: 1755 - protein, 238 aa, Artificial Sequence
  Synthetic
SKEDKARELEKRLRDNLKKLEEVVRELAEVLKRNLEKLRRRDHMVLHEYVNAAGITRAGGLPKDELEDLRREVEDVLRRLEDLLRKLKKANDESLTRLEELLRRAEEENRRVLTTLRELLRGNGDDRDLARLVARLVEANNRALEELLRLVAKNVEDNNRVLEELLRLVKELAKRLLGRIRDEDLVRDIRRELKELEERARKILRDDERDLRALEKRIRDIIREDREELERLKERARK

SEQ ID NO: 1756 - protein, 244 aa, Artificial Sequence
  Synthetic
SAEETLRRITEESKRVLEEITKKYEDLERESREVLRKLRERDHMVLHEYVNAAGITGDDKDEVLTVLEKVLDELLKLHRENLRVIKELLRKVLEVDRENLEVLKRLLEKARDLLRRSGRDEKDLKKLEDELRKVKEELEKKHEASKRDIEDLERELDKVTEEVERLLRKLKEELRRAAEGSDEDRERLARLLKALADKLIRVLEEILKINEELNRKIIKFARENLERNRRVNKKVIEVLREAAR

SEQ ID NO: 1757 - protein, 244 aa, Artificial Sequence; identical to SEQ ID NO: 1756
  Synthetic

SEQ ID NO: 1758 - protein, 247 aa, Artificial Sequence
  Synthetic
SEKEELLKLIKRVIELLKRVLEEHLRLVEDVIRRLKELLDRDHMVLHEYVNAAGITLDEVRGDKEELDRIKEKLEEVLERYKRRLEEIKRDLERMLEDYKRELKRIEEDLRRVLEEVERIATRGEGPAEALIDKLRKILERALRELDKLSKKLDELLKKVLEELEKSNREIDKLLKDVLRRVEEGGASEDLLRKAKKVITEVREKLKRNLEDVRRVIEDVKRKSARILEEARRLIEEVERELEKIRK

SEQ ID NO: 1759 - protein, 247 aa, Artificial Sequence; identical to SEQ ID NO: 1758
  Synthetic

SEQ ID NO: 1760 - protein, 238 aa, Artificial Sequence
  Synthetic
SEAEKIREALETNLRLLEELIKRLKEILDTHNELLRRVIERDHMVLHEYVNAAGITGLDEEVLREVKRLVDELRKEARRVLDEHEKLVRKIKKEAEDVARESEEIIKEVEDKLKGLDREELLERVRRVLKKSDDLIAELVRRALKILEELTRLLAELLKKVVEILRRIVELVERVLTKKGAPKEDLERLRRKVEELEDRLRRLLEKLARDSAELMRELERILDRYARESEELDRRLAE

SEQ ID NO: 1761 - protein, 238 aa, Artificial Sequence; identical to SEQ ID NO: 1760
  Synthetic

SEQ ID NO: 1762 - protein, 242 aa, Artificial Sequence
  Synthetic
SEKERLMRLLDKLKDLNRRLVERIKELLDKALELHKKLVKRDHMVLHEYVNAAGITGVPEELLTRIDELIKKLEDEARKISKEVKRLIDELKKRLEDIHREVDRLIRELKETLKGVTDKDELLRRVAEVLERIARLSEELIREVKEVLEKIVELSRELLKRVLDVLRRIAELLEDALRKGNVSEETVRRLREALKKLEDDLRKIERDAEREYKKLKDELEELTERYRREIRKLKEELKADRK

SEQ ID NO: 1763 - protein, 242 aa, Artificial Sequence; identical to SEQ ID NO: 1762
  Synthetic

SEQ ID NO: 1764 - protein, 247 aa, Artificial Sequence
  Synthetic
SEAEDLEELIKELAELLKDVIRKLEKINRRLVKILEDIIRRDHMVLHEYVNAAGITTVEDKDILRDLERRLREILEESDRLLEELKRRLEEILRKSKELLRRLEEVLREILKRAEEVKRSNLPKEELIKEIVKLLEELLRVIEKILEDNIRLLEELVEVIKEILEKHLRLLEELVRVIERILREVGKDKDEAERRRRELKDKLDRLREEHEEVKRRLEEELTRLRETHKKIEKELREALKRVRDRST

SEQ ID NO: 1765 - protein, 240 aa, Artificial Sequence
  Synthetic
SDKEEIKRRVEKTARDLETEHDKIKKRLEDTVRDIKRELDRDHMVLHEYVNAAGITLREGDGDATDLVDKLLETVKRLNEEVLRTVKKIADELRRLVEEVLRVLRESNETLARLLEEGNVGDEVRERLEEVLRRTEEIIKTLEEIVKRLLDELRRLVEELRRISKKLKDELDKIKEKGKDEKRLIEEVVRLLRENLDVVRRILEALAKLIKELLEALEEVLRRNKELIRELLRVLDEALK

SEQ ID NO: 1766 - protein, 240 aa, Artificial Sequence; identical to SEQ ID NO: 1765
  Synthetic

SEQ ID NO: 1767 - protein, 248 aa, Artificial Sequence
  Synthetic
DEEERVKKLLTDLRRLLRKLHEESKKLLDELRKKLRELRRRDHMVLHEYVNAAGITEKKLPGTRVLKLVADVVKKVLDAIRDLNRKLEEIIDEALKLLEELDDILRRVVEEALRLLKEIKDTKGDREEVKKRVEDILKRLEELVKEYEDRVREIKKRLRRALEELRDEYRKIREDIERVLDELRKGGVPEELLRVLEELVRTLKKLLDENLKMVERLIRELEKVLDDHERKVRRLIEELLEVLDRDAK

SEQ ID NO: 1768 - protein, 248 aa, Artificial Sequence
  Synthetic
DEDRIIEEIARLLEELLRELLELIKKLIETNRRLNEEHERRDHMVLHEYVNAAGITVKKGISDEKLKRIRERLKRALDDLERLHREINKRLEDLVRELEKLVREILKELKDALEELRRASARAGGEEVLRRLEEIVKKLLDLVRRILERLKEIHKDNVRLLRELNERLTRIVEDLVRLIREILREAGVDEKIAEEIERELEELRRMIKRLHEDLERKLKESEDELREIEARLEEKIRRLEEKLERKRR

SEQ ID NO: 1769 - protein, 238 aa, Artificial Sequence
  Synthetic
DADELLRRLAEEVERVIREAEDLLRRWKETIKKVLDDLKRRDHMVLHEYVNAAGITTKTKGDEELAKLIKDLLDTNEKVNRDLLRLIKKLLKDAERVNRRLLELIEELLEELKRVAKDLGLREEADKKLRDIADRARKELEDYERRLKELLKTVEDALRKAEEDSRKLKRDVEELLERGRLRKDDLEDILRKNLDRLRKLLERLREILRENLEALKKTLKRLEDVVREILEDLKRERK

SEQ ID NO: 1770 - protein, 236 aa, Artificial Sequence
  Synthetic
STREKAKKVLDTLRADNEDMKRVVEKILRALKRTNERAEKRDHMVLHEYVNAAGITGVSEEALKEIEDTLKRVLEEIKRLLDESKKLLEDVEREIREILKTSEELLERIEREIETVGSDEKTLAEILKRLLELNEEMNRRLLKILRDLLRLNEEVIRRLLAVLERLLDALKEALDRGDVPEDLLRKLEEELRRIKEKLRKALEELEREHRELEKELDKLHDESRKEHERIEEELRR

SEQ ID NO: 1771 - protein, 236 aa, Artificial Sequence; identical to SEQ ID NO: 1770
  Synthetic

SEQ ID NO: 1772 - protein, 247 aa, Artificial Sequence
  Synthetic
SKAEKLLKDLREALEKVKRRYEELERRLDEVLKEHEEIVKRDHMVLHEYVNAAGITGLPEEELEKLKKLAEKVKELLRELLRLSKELVDRVRELLKRDLDLVRRLVEIALKVLREAREQPNDEKRVEKIKRDLEKKARRVREENERIKRDLKRTADESRKRLEKLLEDLKRELDRLREDLDRGRKDIDERVEELIERLIRIIERLLREVIKSHEKLVRTIERLIEESIRVNEELLEVIERLLDRARK

SEQ ID NO: 1773 - protein, 247 aa, Artificial Sequence; identical to SEQ ID NO: 1772
  Synthetic

SEQ ID NO: 1774 - protein, 243 aa, Artificial Sequence
  Synthetic
DLERVVEDIVDKAKRLLDKNLEVLKRIVDEVLRLLERLLRRDHMVLHEYVNAAGITVRDEKELRRVKRALEEVLRRHEEIAKELKERLRKVAKEAEEKHKKLVEDLKRVVDEVRKKLSGPLDREKVLEVLDELVTIIAKLLDENIKVLEEVIRVIAELLERLLDSHRRLIDIIAKLLEGLRPGDEDLLTELEKKLRKLKRDSEKVVDDLKKELERIKREVKRLIEENARTLADIKRAVDEARK

SEQ ID NO: 1775 - protein, 239 aa, Artificial Sequence
  Synthetic
SERELIERWLELHKEILRLIRELVERLLKLHREILDTIKKRDHMVLHEYVNAAGITGLDKEAKDELREIAKRVEDKLEKLERESRKVEEDLKRKLKELTDESDTVEKRVRDVVRRGTQSREEIAEELLRLDRKLLKAVEELLKEILDLNKKLLDDVRAILEETRRVLEKLLDRVRRGERTDDERRTLTELLKRMEDILEKVERTLKKLLDDSARMAEEVKKTLKELLERSEKVAEDVRK

SEQ ID NO: 1776 - protein, 246 aa, Artificial Sequence
  Synthetic
KEIEETLKELEDLNREMVETNRRVLEETRRLNKETVDRVKRDHMVLHEYVNAAGITVRKGPTSEELKRLLAELEELLARVVRRVEELLKKSTDLLERAVKDSADALRRSHEVLKEVASRVKRAKDEGLPREEVLRLLRELLERHAKVLKDIVRVSEKLLREHLKVLREIVEVLEELLERILKVILDTTGGDKAVEELEKALEEIKRRLKEVIDRYEDELRKLRKEYKEKIDKYERKLEEIERRERT

SEQ ID NO: 1777 - protein, 231 aa, Artificial Sequence
  Synthetic
SKEEEVEKVLRKWEEILRRLIEENKRANDKIRREYEELVKRDHMVLHEYVNAAGITGVSEEVKRILEKLIKLLEDILEYEKENVERLIELNERILRELKKSVEELKALVTRVRRDGLPESEVRKLVEDVLRKNEELLKEAKKAWRDSIENLKRVLEEVAKLVKTVLREIEEKIDDEDVVRALIEVIERLLRVAEEVIRRILKVNTELMRVDERSIRESLKAISEVLKVLDT

SEQ ID NO: 1778 - protein, 247 aa, Artificial Sequence
  Synthetic
RDRDVLRKVKAEIEELVARIEKVSRDALSEVKRLLDENRKRDHMVLHEYVNAAGITRDTRGDDEVVKETEEVLRDNHRLLEELIRRLIKVLEEWLRRHKKLLDEIRELLKEILRLVKESGVSEDLLRRLKRVIEELDKKLKESEEKLRRVVEKAKEDLKAVLEEHRKVLEDLKRALEEVREKLRERGSEEVVEELLRMLKRVAEEMKRVHDDLSRAVEKVVRDVVRVDKELLDELARILRRLEEVIT

SEQ ID NO: 1779 - protein, 231 aa, Artificial Sequence
  Synthetic
SKDEELARLLEELVERWRKIVEDLERDHRRLVKEIRELVERDHMVLHEYVNAAGITGIDERIVRLIEEIAKIIEEVLKEIVKLVERAVRENVRVLRESVRLVAELVETLARLLRGSDERVTEAIKKVLDTSEDLIRRVIKVNEDILREIAKLVEEVLREAERILTEIKKEGDREEIRRILEELKRIVDDVLRIIARILKLLRDLTRRLAEVAKAVHKLLEELLRKLKEDTR

SEQ ID NO: 1780 - protein, 231 aa, Artificial Sequence; identical to SEQ ID NO: 1779
  Synthetic

SEQ ID NO: 1781 - protein, 238 aa, Artificial Sequence
  Synthetic
SEIEDVIRRLRKILEDLERVSEKLLREIKKILDEARRLNERDHMVLHEYVNAAGITFRDGSGSKEELAKLVEELIRELAKLAKEVDEIHKRIVERLKALVEDAERIHRKIVETLEEIVRGVPSEELKRVVEAIVEVIKEHLKVLADVIRRIIKAIEENAETIKRVLEDIVRVLELVLRGEGSIEDLVREVERLIKRIEDSLRELEKTVRELLKRIKEASDKVREDVDRLIKELKEAAD

SEQ ID NO: 1782 - protein, 237 aa, Artificial Sequence
  Synthetic
KEKEDALKKLEDLARKSREDLERVLRKHKKILDKIEELLKRDHMVLHEYVNAAGITTGTESEILKELARLLREHHEALRRLIEELRRLLEEHHKILEDLAREHKRLLDELIKVVADGVDKDELERIIKELRERDKKLVDDLRKVSEDLLDAVRKLVEDLERISRELLRRVEELAKGIDEELAREVERVIKELLDKSKEILERIERAIDELLKVSEEILKLSEDASEELLKILREFAK

SEQ ID NO: 1783 - protein, 237 aa, Artificial Sequence; identical to SEQ ID NO: 1782
  Synthetic

SEQ ID NO: 1784 - protein, 229 aa, Artificial Sequence
  Synthetic
SKEERLREVAEKHKKDLEDIVKRVDEAAKETARRLEEILKRDHMVLHEYVNAAGITPDDEKLKKVKKILKDIMDRLAELIKKILKLLKENLEKIKELLRRNLEISEELLKLAKGLSDRDVLETVRRVLEKLDEEWDRVLEDSRRIIETILRELDTLLREVEKLIKEIKDEISGSKEVLDILERAVEVVRRVIKALKEVLERHVDATREVIERVKRVNKRLLEAVREVVT

SEQ ID NO: 1785 - protein, 246 aa, Artificial Sequence
  Synthetic
SEREELLERIKEILKRVKDKLDEDLKRLKEILEKLKEKADRDHMVLHEYVNAAGITLERTGRTDELVKEVLDTVRRNLENLKRLVEDILRKLEENVKNLTDLVREILKLITELIKRLEDGGLPKEVLDALRRVLEKLEELLREILERLKRSLEAVKRKIEELLKELERSLDELRRALERIRKEIGDSETAVRAIIRVLEKHLEAVRRVLEELLKVLAEHLETVRELIERLKRVLEEAIEVVERVAR

SEQ ID NO: 1786 - protein, 246 aa, Artificial Sequence; identical to SEQ ID NO: 1785
  Synthetic

SEQ ID NO: 1787 - protein, 240 aa, Artificial Sequence
  Synthetic
DREKSVRDIEEDLKRVLDKLRRRVETSKEELKKVLKADKERDHMVLHEYVNAAGITDRGIDSEVLRAVREIVKRLVEVVRRYNELSEKIIRDLVRVNDRVLELLKRIVKRLIDVVRELEKIGDKEKALRRLEEVVKEVKRRIEELLKELEDVHRELVKILEEVNEDLKRVATEVKEIIKTGIKSSEVAKELDEVIKRLLDNLKENTDRLKEVIDRNLADLRDLAEELRAVIERLLEDARR

SEQ ID NO: 1788 - protein, 240 aa, Artificial Sequence; identical to SEQ ID NO: 1787
  Synthetic

SEQ ID NO: 1789 - protein, 237 aa, Artificial Sequence
  Synthetic
REDEVLRDIERLLREIEEKIRRILEESTAELRKVEEEVKRRDHMVLHEYVNAAGITERKGIDEELRKLLDEVLDKLTKLIERNKRSLERILELIKRIIDENLEVLRDIIRLLEELLKATKDNGVPKDEVIKLVEDVVRRIEELVTRVVARNEKLVKDLDDLAKKNVRENEELLREIDRGLDEDLLEKIKRVIREHIKALEKLARDLKEILRRHIEALKELARDLAEVIRKLLEDVKR

SEQ ID NO: 1790 - protein, 243 aa, Artificial Sequence
  Synthetic
SEAERLADEVRKAVKKSEEDNETLVREVEKAVRELKKNNKRDHMVLHEYVNAAGITLRDGQVSDRDLLKELEEVLRRVLEALAENHERTEEILKRWLDRYAEDIERLRKVLKEVIEALKRGGSDDKRIVDELEEILRRNEDVLDKIAKRLRRLLEEDRRLLERIVRELKRLLDDLDRITKEGKSEELVRIAIEVLKRLLEIIEELVRLNNEILERLLKIVRELHKDNIKILEDLLRIIEEVLR

SEQ ID NO: 1791 - protein, 243 aa, Artificial Sequence; identical to SEQ ID NO: 1790
  Synthetic

SEQ ID NO: 1792 - protein, 245 aa, Artificial Sequence
  Synthetic
SEKDEVTRRIRELLKEAEETNREAIERIKRLLDRVREAVERDHMVLHEYVNAAGITLDRGLQDDEALLKLLIDALREHNRLSTELIKILIDVLRTILKIIKDVLATNIEIARRILDLVRRLAERGGLDDRLVKEVEKLVRTAERLHRDALRKVKRLVEELEKRLRELVKTDHDLVRRLETLLRRGSGSKEDLLREIARILAESLRLIRELLKEIEKIVKEIIELLERLNDELRKIIEAILETTKK

SEQ ID NO: 1793 - protein, 245 aa, Artificial Sequence; identical to SEQ ID NO: 1792
  Synthetic

SEQ ID NO: 1794 - protein, 232 aa, Artificial Sequence
  Synthetic
SEKELVDDIRRILEEILRLLRSLLEEVIRLLEENEKLVRRRDHMVLHEYVNAAGITDENGIRTDEADRVLERLEKAHRELLEDYKRALEKIKETLERVLREAEEVVKKIDDALRKLGGSKEVLKRLLEELLRLVEKIAEEIKRLLSELVRVTEELVRTNKELLEEAVRVIRKEVGDDSLVREVEELIKRLEKHIDDLLKTSRDLVKRVLDLVDEVVKRVEDLVERVKEKIDT

SEQ ID NO: 1795 - protein, 247 aa, Artificial Sequence
  Synthetic
DEERLAEELERVLDRNRKLLEEALRELRRVIEENRKSVKRRDHMVLHEYVNAAGITRELSRGDSDEELRKVIEDLIRKLTKVLDKVRSLVEENIERLARVLEKLERLARENLEDLKKVLDDVDKKLKDRRLVERLAELVRELIEVNKEILEMLKEIVRELLEINRTLLERLKDLVATALEIIKLLARGDGTEEDVERAVKEIRDRLRKLLEDYERAVRRLEDKLRRVRERYEAVLKRIKDKLEETKR

SEQ ID NO: 1796 - protein, 240 aa, Artificial Sequence
  Synthetic
DKDKRLEELLKRLKELNDKTFEELERILEELKRANEASLRRDHMVLHEYVNAAGITNLDKRLAELLKKLLDDLKRLLEEYTRTNEELLKRLRELLERYRETNKKLLDLLRKLLDEARRTGTDEDLLRRLEDILRKYEDEVRRLLKELEDILREYEDTSRRLLEELERIAKEAAERVSRGSDKDVKDIIRTILEVARDLLRLLEEDSRTNSEVVKRLLDLLREDSKANSEVVKRLLDVLRE

SEQ ID NO: 1797 - protein, 240 aa, Artificial Sequence
  Synthetic
SKEETLKRLLDELEKRNRETVERLERLLKELEDRNRASLERDHMVLHEYVNAAGITGLSKELKDTLARILEELRKLLEEYFRKNEELLRLLRKLLDEYARTNEELLRLLEELLDTARRTGGDSELLKRLEDIAREYEKRVRRLLEKLKDILDKYRKTVEELVRKMEEILKEAKKTISRIGSEEVKDIVRAMEEVIRRLIEILRRDVELNLDVAKKLLELLKEDSKLNLDVARELLELLDR

SEQ ID NO: 1798 - protein, 240 aa, Artificial Sequence; identical to SEQ ID NO: 1797
  Synthetic

SEQ ID NO: 1799 - protein, 243 aa, Artificial Sequence
  Synthetic
DEEETLRRLLERKVELAKEYLDVSKEVIDRTTKLLDEYLKRDHMVLHEYVNAAGITDLGPDELIKRLAEELERSLRELEEEIKRLKRELEESLKKLKEIIDRLAEEAEKLLAVLKRGEGSEEEALRALASLVRELIEVLRENDERLRDVLRRLIEALRKNNEILERVLRKLVRAAEERGRDESSREALEEARRRLEELLRELNEITKDLEAKLEKLLRDLNELTKALEEELKRLLDELKKRTD

SEQ ID NO: 1800 - protein, 243 aa, Artificial Sequence
  Synthetic
SEAERTKESLKKVLKALVDLNRELLRKLEENMRELTKLNERDHMVLHEYVNAAGITGIVDKDAEREAERLMRELDKSSEDTARETRKLIEESKKSTRRTEEEARKLTETLDRLAKGGLPREDLLRALVRLLEELARLIEEDVRRNAELVKRHIELVERDVAELLRLIKELVDLLADLAEKGSRTEEIRKIVEEILKEIKELADRYREEVRKSKDKLRSILEDYKRKVDELKERLRELIEEVET

SEQ ID NO: 1801 - protein, 182 aa, Artificial Sequence
  Synthetic
DEAEKLLKELRDLLEESRKDLERLLKELEDLLEESKRDLERRDHMVLHEYVNAAGITERRNEREKLEKLLRELKKVVERLKDNLKDNERRNKEAIERVRKKLKDNERENKKVIEDLRAKLKDLEEVKRKIDRLEEESRRVIEEARKRLEEVEEKSKKIIDDARRALDRIDKELRRVVEETRK

SEQ ID NO: 1802 - protein, 184 aa, Artificial Sequence
  Synthetic
SLEEVIKTVRKLLEEVERRLREVVERAERMLEEVRRRTREVRDHMVLHEYVNAAGITDKNVSEEIEEKLRKIKEELERDNEKVNRDNERSVETLRRLLDRVRKEVKDIAKELEERLKEVERKSRDDRIVEKLLRDAERIVKRLRELIEKLREEVEKIVDENRKTVEELRRRNEEIVRRLRREIE

SEQ ID NO: 1803 - protein, 181 aa, Artificial Sequence
  Synthetic
SLDEVVKRLEDLLREVEEKSKESSKRMEDLNREVNERLRRSRDHMVLHEYVNAAGITDAGRDDKIRRTLERLSEDTKRKSDKTNEDLKRLSDETRERSKRLNEELRRLVEEVRRRLEDLRRKGSPVEEIKKLADKVVTELEKLVEDDRRLAEESFERARKIVEEDERLARESVDRARRLVD

SEQ ID NO: 1804 - protein, 181 aa, Artificial Sequence
  Synthetic
SEVERVLEDLRRLVRDVEEKLRRIIERDRRLVEEVERENRKRDHMVLHEYVNAAGITKDISDKKTIERIVREIIKEARDLVRRNHERNREIVDESRRLVEELRRIVEEIIRRLRELLERVKSGELAERIEDVVREAEKRLRELLKELEKTSRDLKKRLEELDRELKALVEKVERDLEELRK

SEQ ID NO: 1805 - protein, 177 aa, Artificial Sequence
  Synthetic
KEEEDLEREVKRLEDKVREDAKKLEEVVKTVEKLVRDDARRRDHMVLHEYVNAAGITERKLDEETLRKVKEDLKRTLERLKRENEKSLEELRDILRRLKKENDDTLKELRDELKRLTDSGASEDVIRKMEEIIKRLEEVSREVEKRLRRIIRELERVSKEVLDRLREIIEKLDRDAT

SEQ ID NO: 1806 - protein, 174 aa, Artificial Sequence
  Synthetic
SEDETIRRIVRTVHEESRKSTEDVRREVERVLRESEEVVKKRDHMVLHEYVNAAGITISEELEERMRRIIREIREHLKDNLRRVREVIERIERKLEETERRDEKVLREIEKKIRDGDGREEVAREVTKIARDTIRENEEIAKEVREIVERSIKNLEEVAEEVERVVRELIEARR

SEQ ID NO: 1807 - protein, 174 aa, Artificial Sequence
  Synthetic
SRDEKIRDILRRVLKEVRDSTKKVEEDLEDVHRRTEEELRKRDHMVLHEYVNAAGITASEELKRRMEEVVRRIEELLKKLLKEDRDVVKEIRDKLDETRKEMEEVAERIKDKIRRGDGREKVAEEVKRIADRLIDLNRRIAEEVDKIVRDSIKKVEEIVTEVEKIVEKLIRDVR

SEQ ID NO: 1808 - protein, 179 aa, Artificial Sequence
  Synthetic
STREDARRLVERVRKEVKRLLKKNSDLLREVTERVKTLNERRDHMVLHEYVNAAGITDSDERDVERLLDRARKLVKESEDLIRKLLKDLRELVRRSEKDIDELRKELKRLLDELRARATDKDLERVVREIEKEIRDLIRELEENVKTSEKLIEDLIRELEKSVDESRKRVEELVKELRT

SEQ ID NO: 1809 - protein, 174 aa, Artificial Sequence
  Synthetic
SELEKVVKEVADLLRRNLEKSKRVLEEVRRRLEENLRESEKRDHMVLHEYVNAAGITREGKDKRDLTRLLEEDDKRVKEALDKSRENNERILKEVRRALRESEEDNRRILKEVREKVDSRLLEELEERVRESIERSRRFIEELEKIVEETLTESEKLARASSEITKTVLDEIRK

SEQ ID NO: 1810 - protein, 178 aa, Artificial Sequence
  Synthetic
DDLERVLKEIKKAADKIREDNKRTADKIRKRVKELDDETRDRDHMVLHEYVNAAGITRGREEARKVIEELKKLVDEVRKRNEKSIEELKKLLKEDRDLMRRVIEELEDLVRRLREEVRDDEALRRVEEEVERLIRDLRRVLKETSDRVRELIDKHRRLSEEVEKDVKRLIDELKKKTD

SEQ ID NO: 1811 - protein, 187 aa, Artificial Sequence
  Synthetic
DEEEELRKRLEKLSKEVRELLRRDEEEDRRLNRELEELLKDRDHMVLHEYVNAAGITRKARRKVSEEELTRLRKKLRDLEEESKEALRELRRRVEELNKENKKSLDDLERRLKELEDRAREVEKRDRREDELRELLRRLEDVIRKLAEDLKRNTEDLRRVIKELAERLEELNKRLKREIRRLKEELR

SEQ ID NO: 1812 - protein, 177 aa, Artificial Sequence
  Synthetic
SVLEEVRRRVEELLKTVKESVDRSHERSERLIEEVRESLKERDHMVLHEYVNAAGITIPEDRVKRIEDKLREELERLERENRKIEEDLKRSNDELRRENERIAERLEELLRELSRDTNDKVARDVLEEIERLIREANERNKRNLEDVERVIRELNKENERVLREVEKKIEKLIRETE

SEQ ID NO: 1813 - protein, 178 aa, Artificial Sequence
  Synthetic
SSIERVEKEVRRLLRESDESLKRVMEEAKELIKSVRESTKRRDHMVLHEYVNAAGITGDEREDLRRVLEELRKLIEDNRREDKRSEDELRKLIRDNKEENDRARREAEKLLEDLSRGRSEEEVERVLEEVRRIIEKLKEDDKRSLERIERIVRRNNELNKESVDRIRKIIKEMEERAD

SEQ ID NO: 1814 - protein, 183 aa, Artificial Sequence
  Synthetic
KDAEDLERRVRELVEENNRVSKRLAEEVTRLVKENEDKVRERDHMVLHEYVNAAGITRRGEVREEEVKRVLREIEELLREITEHSKEVLKTIEKLLRDSLEHSRRVLEEIERLLETILRKSKDSERLKKLVDELRETLERSLRENEKVADELRKRAEKSLEDVKRVVDELRKIVDDVLKRVED

SEQ ID NO: 1815 - protein, 183 aa, Artificial Sequence
  Synthetic
SEIEKLVEDVRKLVEDNLRHSEEVHRRNRRLIEENERKIDERDHMVLHEYVNAAGITERGEIREEEARKVLEEIKRLLDEIRRHSEEVLKEIERTLKENLKHSEEVLRRIEERLEDIKRKDKDSERVRTLVDRLREELKRSLDESEKLNRESRKRVTRSLEKVDDLVRELEKLARKVLEEVKT

SEQ ID NO: 1816 - protein, 177 aa, Artificial Sequence
  Synthetic
REIEELRKEIETLIRENEELNRRSKETSEELIRRLKKLNRDRDHMVLHEYVNAAGITAPEEDVRRAEERVKKLIEDNKRHSDEVAKTDKKLNEDSERHTRRVEERLRELLDRLSRSDKDEVVRRVAEEARRLSKRNKDAIREVNETSRRLATRDAKHTRDVLREIKRLADEIRERTR

SEQ ID NO: 1817 - protein, 181 aa, Artificial Sequence
  Synthetic
EEIERALREMRELSRTHKELVEKILRDIAELAKTHERINEDRDHMVLHEYVNAAGITRKEDKKEELKRKIDELRRRAEELLKESKEHLKRLEDTVRELIERLKETLKKVEEDLKRILEKLEKSRELDEIAKDVKRLIDENRELLKRVEDEVRRLIRKLEELNRRTEEEVKKLIKKLEDDLK

SEQ ID NO: 1818 - protein, 174 aa, Artificial Sequence
  Synthetic
SEIEELEKRIDELLKELRDLSRRIAEEVKRLLEELKKLSKDRDHMVLHEYVNAAGITVPEEELRRVEEEVERVVRESRKLNKETEDELRRLLEEIKESNDRVEKRARELKKLLRDGKDVEEVLRRLEKLVREDKERLKKVLKDARDLIKKDKDLNEKLSRELEKLVRELEERAR

SEQ ID NO: 1819 - protein, 174 aa, Artificial Sequence
  Synthetic
DELRDVKRELDRLLRENEEIVERIAETVRRLLEELKKLTKERDHMVLHEYVNAAGITVPEKELKEVADTLRKLLKDIERSNKEVEDRLRKLLEEIKESTDRLREELEEVEKLLRGGKDVETVLRRVRELSRDNKRRMRRVLEEAKRLAKEDKERIDKIRKEIEELIKRLKDKAT

SEQ ID NO: 1820 - protein, 174 aa, Artificial Sequence
  Synthetic
DEEEDLERRIKKLLDENRELLKRIAEELRRLLEELRRLTEERDHMVLHEYVNAAGITVPEKDLRDVAEKVKKVLKESEDSNRDVKRKLEKLLRDLERSTERLEREARKVRKLLRDGKDIETLLRELEKLSRDNKELLKKIEKEIRDLIKEDKERNRELSERLRKLVEELKKKAT

SEQ ID NO: 1821 - protein, 174 aa, Artificial Sequence
  Synthetic
REIEEAAKDLDRLLEENKKLVKEVEEELRRLLKENRDLVKERDHMVLHEYVNAAGITVPEEELKEVEERARRVIEESRRSSKELEKRLRELLEELRRSTKELEDRLREIKKLLRNGKDVEEVLRRVRKLSRENKEKIRKILEDVKKLSEDNKRRNEELSRRVKTLVDEIKKRAT

SEQ ID NO: 1822 - protein, 177 aa, Artificial Sequence
  Synthetic
SEAEKVVEELKKLLREVEKKIRDHTEDVKRILEELERRLRKRDHMVLHEYVNAAGITSDDDTVRKVKEELDRSHEKLREELRKVAKELKESNEELERDLKRLVEEAEDRLRRLKDRVSEKVLRELEKILEDIKRTLDKLLRENRETLKRIEDRLRELLEENRKLLEKIERELRERSR

SEQ ID NO: 1823 - protein, 182 aa, Artificial Sequence
  Synthetic
DEIETVLDEVRRLHEDAKRRLEEMIDEVRKLNEESVRELARRDHMVLHEYVNAAGITERAGLDKGKLEELEERLERVREDVERILREIKRRNEKTLEDSERILEENKERNRTVLKKLKELRDRGSDAREALKESRKVVEESRESVRRVLEKNRRVVEESKRLAEELLRRVKKVVDEIRKRVE

SEQ ID NO: 1824 - protein, 177 aa, Artificial Sequence
  Synthetic
DEVEDILRKVEEIVKKSITDARRLLKEAREIVEESIKTAEERDHMVLHEYVNAAGITKRTTDEEKKKKLEEESRRVLEKTKRDLDRTKDDNRKALEKIRKRVKETEEENREVVDRVRKAGVDKRVLEKIKKVVDDSVRVNREVLKRVEEVLEESKRVNEKVEEDVRRVHEEVRKEIK

SEQ ID NO: 1825 - protein, 175 aa, Artificial Sequence
  Synthetic
SEVDEVLREAKRIVDEVHKDNERATEESRRLVKKVHEENEERDHMVLHEYVNAAGITIDEKLVTEILKEIEEALKEAARRNKEVKDRLRELSRRVSERNREILEELKERLDRVRERRKDVKELEREVEKLLKRIEESLRRHRKENKRLLEELDRSLRELAKIVKEVLDEIRERTR

SEQ ID NO: 1826 - protein, 175 aa, Artificial Sequence
  Synthetic
SEMDDVLKKLAETVKRIIERLKKLTDDSRRLVEEVHRRNDKRDHMVLHEYVNAAGITIDEKDVRKLLEDLKKKSEEVAERNKRILDTLREISKRAEDEVRKVLKELEKTLKELEDRRPDVRELSEEVKKLLDEVRKALKRHKDENDKLLKEIEDSLRRHKEENDRLLEKLKESTR

SEQ ID NO: 1827 - protein, 186 aa, Artificial Sequence
  Synthetic
SEVDEVRKTLEDLLRRLDEENKDIIRRNKELLDDLDRKVRERDHMVLHEYVNAAGITEKLKDRETLTRIIEEIEKRARELIKRLRDEIRKIEEESKKSIEDSRKRNDEIRKRLEELIKDLRDKIKDSEELARRITELEKRVREVIERLKEKNKRLEDDSRRVITELRKKLKDLEDRVREEIEELRK

SEQ ID NO: 1828 - protein, 183 aa, Artificial Sequence
  Synthetic
SEVDEVLERIKRLLERLAEHSDKVVRDIEKLLDDNRKENERRDHMVLHEYVNAAGITRRGDLREELLERVVREVEKEIRDIKRKNKRSVETVEKLVRDDRKELKRALEDVERLIRELETRLKDKEELRRKLEKVLREAEKVIDELLKKTDEVLKRARETIEDLNRKLDKVLKEVRDKLDRLRD

SEQ ID NO: 1829 - protein, 185 aa, Artificial Sequence
  Synthetic
DDIERLKREIERLLKEAEKISRDNEERSKELLDRLRKLSEDRDHMVLHEYVNAAGITDKIKDKEELTRRLKEVVDRVEKSVRDSERMLREVVREDEESVRRSKTKLEDLLRKVEELVRRLEKKVTDEKVKRDAREALRKAKKKVDELKRKNDEVHRRSREEVKRLLEENRKLLEDLRRMVREITQ

SEQ ID NO: 1830 - protein, 184 aa, Artificial Sequence
  Synthetic
ELIKKARKDVEEVRERSERLVDELRKRNKKLADESRRLIDKRDHMVLHEYVNAAGITRKRRTKDVLKEIEDLVRELERELRRVVKESSDKVRKLIRENEKVVEESSRLFRDLVEKLRRVVEERNDKKLMEEVERLIKRLEDVNEKSERDVREINKESERVNEETEREVEDAIRKLREVLRRAKK

SEQ ID NO: 1831 - protein, 186 aa, Artificial Sequence
  Synthetic
KEVEDLERRVKEILDRMKRLIDENRKKIEKSIRELERLIDERDHMVLHEYVNAAGITREGGDDARTLRERVRKIIEDVEEHSRRSTEEVRRIHKENKEHSERSSDEIRELLRRVEELIEEVKRRLRDKEMEKKLEDIVRRVREVVRRAHETNERLVDRSRKAVEKAERTNRRLVEEIRKVAEEVRK

SEQ ID NO: 1832 - protein, 186 aa, Artificial Sequence
  Synthetic
KEVEDLERTVRTILKRMRELITRNEEEIRRSIEELKKLLKERDHMVLHEYVNAAGITKEGGDDKKRLVEEIKRLLDELRENSKRSSDRAKEIHERNKRHSEESSRTIEKLLKELRDLVRDVERKLRDEDAKRKLDELTKRVEKVVREADERNKRLTKRSKEVLDEVHRANEEALKEVEEVVRRVTK

SEQ ID NO: 1833 - protein, 176 aa, Artificial Sequence
  Synthetic
REAEEAKEEVEELNRRNKKELDDARRRVDELDKRNKDRLKERDHMVLHEYVNAAGITEEGRSDDRLREKIERMLKTSADELERLKEENKRALRDLAERLRELIERNRRKLEEITRRTVPDKDVLKRLAELIKESIRELERVLEELAEKIDRSLKELDDVLRKNETDLKRVIEDLKR

SEQ ID NO: 1834 - protein, 174 aa, Artificial Sequence
  Synthetic
SEEEVLREAAKTVEKLLDEIRRSLEKVSKRVEDSNRELKESRDHMVLHEYVNAAGITKNNVDRTLLEDVRRKLERIEERNEEMNDRSRRKLEELRERNRKILEDIRRTLEDLKRRQLPKDDVERTLREIAKLVDEVDKENKRALRENEERVKTLNRENEEMLKRIEEEVRRATK

SEQ ID NO: 1835 - protein, 182 aa, Artificial Sequence
  Synthetic
SELEKTLEDLKRHSEENKKKLEEDLRDMERNLKENKDRLKKRDHMVLHEYVNAAGITREGDIDERELERVRRKMEEIKKRLDENVERNRRKAEDIKRKLDENVKRSEDRVKEIKEDIRRRVRDKDKAEELERRLDELVKENREIHERVKKALDDIVKELEELHERLKRRLEEILRRIAETVR

SEQ ID NO: 1836 - protein, 186 aa, Artificial Sequence
  Synthetic
SEIEKLIEELRRELEKVKDELERSIEEMDRELDDVRRDSKRRDHMVLHEYVNAAGITKRGDRPEEVLRKELEDIKRKLRRILEEHHEKIRRIKEKLRRENKRVRDELKRIKDEIDEKVKDVRRKGADEELLKRLEEVAEDVKRALEELLKKHTRVVERVEKALDELDKELERIVREAEKELDRREK

SEQ ID NO: 1837 - protein, 179 aa, Artificial Sequence
  Synthetic
RLEDEVRKMEKEVREEVKRLEDESRKVLEESRRNLDKLREERDHMVLHEYVNAAGITRRGLDERVLRELLKRVREVHERNRKLLDEVRRASEKVHEDNRRILEEVRKTVKDVVDKLRRVDAKVVKELIDRVRKILEDVEREVKKSIEEVKEINRRLNEEVKKTIEEVKEIVKEVTERAK

SEQ ID NO: 1838 - protein, 183 aa, Artificial Sequence
  Synthetic
RVDERLDTVLKRVEETVRENKKKNDELLERSKENIDRLKKRRDHMVLHEYVNAAGITREVTKEEVKKIIDEVLKEIEDLLRTVKEELDRALERNREVVEETKRRIDRVLKEIEKLIRDVKRDRKEEVVKEVEERIKKLLKEVNDTSKDAERRLRETNERLNEIVKEVEKRIRELSEEVRKRVK

SEQ ID NO: 1839 - protein, 183 aa, Artificial Sequence
  Synthetic
SIEDEIRKLKEDIKRVLDKVRRDNERLKERLDKVLEDIRRSRDHMVLHEYVNAAGITDKPVDERLVRKVEEAVKRLKEHNEDSTRRVEEVIRRLKEESEESVRKTEKVARDLERELDEVLTRGGEERVREVIEKLKETLERLKREDKEVADRAEKLLREAEEHNKRSLDESRRVLEELDEEIR

SEQ ID NO: 1840 - protein, 172 aa, Artificial Sequence
  Synthetic
DEVEKVLEEIKRALDDLRKKVEESKREIKEALKAVEKHTRDRDHMVLHEYVNAAGITKSKDTERVRKLVEELSEENERSLREVRRVAEELLEINERVLEEVERVVEALLDLVRRGGSERVVEEVRRVLEELRRRLEKVTEDSRRAIERLAREDARVSKKSIDVNKKLDDDVR

SEQ ID NO: 1841 - protein, 174 aa, Artificial Sequence
  Synthetic
SESDEVIRDLARLLDELARHVDDSVRRMDEVVKRSTREADERDHMVLHEYVNAAGITGDERVERMVAEIERLVAEVLEELKKKYEKLKREVEENLRRLEETVRDIVEKARKVTEKGVSKEKIDRIIRELERILEEAKKKHEDVLRRLEDSLRRVAELLKAALDRLREIVDRLRR

SEQ ID NO: 1842 - protein, 174 aa, Artificial Sequence
  Synthetic
KEVEDAVKELEDLLRANEDKTRSIVEDMRASNKDLEDHSRARDHMVLHEYVNAAGITVPRDSLKRLAEDVERVTRESRELLERVHRADRELIERLKESNERLRRAIEEIRKAIKGGSDIKTLLDRVRKLAEEDAERLDRLRRESEELNERVRRVDKKLLEEIRRKAKKVEDDTR

SEQ ID NO: 1843 - protein, 184 aa, Artificial Sequence
  Synthetic
DEIRKVVKEITDLLKASNDKNRKVVEEIRDLLRKSKKLADERDHMVLHEYVNAAGITDKSGDKETAEDIVRRIIEELKRILKEIEDLARRINREIERLVEEVERDNRDVNRAIEELLKDIARRGGSEDLKRVEERAREVSRRNEESMRRVKEDADRVSEANKEVLDRVREEVKRLIEEVRETLR

SEQ ID NO: 1844 - protein, 176 aa, Artificial Sequence
  Synthetic
STAETVAEEVERVLKHSDDLIKEVEDVNRRVEEEIKRVIRERDHMVLHEYVNAAGITKGEILAEIEKRLADNSEKVREVAERAKKLLEENTARVKDILRESRKLVKDLLDEVRGTGSEEAAREIIKRLREVNKRTKEKLDELIKHSEEVLERVKRLIDELRKHSEEVLEDLRRRAK

SEQ ID NO: 1845 - protein, 186 aa, Artificial Sequence
  Synthetic
SRVEEIIEDLRRLLEEIRKENEDSIRRSKELLDRVKEINDTRDHMVLHEYVNAAGITREKGSESEEVKKALRAVLEELEKLLRRVAEINEEVLRRNSKLVEEDERRNREVLKELARLVEELIREIGDEDKARKVAEVAEKVLRDIDKLDRESKEAFRATNEEIAKLDEDTARVAERVKKAIEDLAK

SEQ ID NO: 1846 - protein, 186 aa, Artificial Sequence
  Synthetic
SEVDEIIKELERLLAEIARENERIIRESRKLADEVRKRNEDRDHMVLHEYVNAAGITRRKGSESEEVKKLIEDVLREIERLLKRIEEENREVVKRNSELVERVRAINEEILRRVAELVEKIARDIGDKDEVTKVKKVADDVLAEIKKLDDETRRVIEDTNKKIADLDKATRDVVRKVLEEVKKLEK

SEQ ID NO: 1847 - protein, 181 aa, Artificial Sequence
  Synthetic
SEVDDVLRRLEELIKTLEDINAKSLEDIKKLIDDLAKILEDRDHMVLHEYVNAAGITKGIDSREAEEIAKRVLEELKRTSDDLRKKVERVDEDLRRLLRENHERNKKILRDLERLLRDAARRGVPKEALDRMREEIRRLEEESRKSDETIERLIRELRRRVEEVLKTSTDLIRELEEEVKK

SEQ ID NO: 1848 - protein, 183 aa, Artificial Sequence
  Synthetic
SKLEEVEKAVRKVIEDSRRVNEEVNRRSEEVVRELEKVHRERDHMVLHEYVNAAGITKGSGDERLAAEVERIIEEIRELNERDRKRVEEIRKEIEDLNRDLNRRSKESEDRLRKLLEDATRGGVTKEADEVVERAERISEENKRRVEDVARKSKELVEDVRRHSEEVVRRVEELVKEVEERVR

SEQ ID NO: 1849 - protein, 173 aa, Artificial Sequence
  Synthetic
SAEEVKEELKRIATKLKEEIKENIRRLEESVEKIAKELAENRDHMVLHEYVNAAGITDERIVKTVEDIARRVVEDNERIMEEDKDVVRRLVERNEEIVRRVDETVKKIVELIDRGEPGEELVERLRRVVEEVRERLKDSSRELRKINEDSRKAVEDSSAEVAKVVEELERRDT

SEQ ID NO: 1850 - protein, 183 aa, Artificial Sequence
  Synthetic
SDVDRVLEEIRKLLEDLKRHSEKVSEENEDLLRANTELNKRRDHMVLHEYVNAAGITERGGISEEDLKRALDRVRKTVETVKEENKRSLEDVRRTVETNKRKLERVVEEIKKLIEDAKRRGSGDEEAKKKLDEVLERAKRTIDRLLETSDRSLEKVEADLRRLNEELDRSLERAERTIRELAK

SEQ ID NO: 1851 - protein, 180 aa, Artificial Sequence
  Synthetic
DEVEDVLRKIEKILDDHRKRIEKNSRDMARIIDEHRRKVEERDHMVLHEYVNAAGITDRGEGDEETAEDVKAKLEKSNRELEKHSEEVKRALDESNEDLRRHSEEVKERIERLVKKLREDGVEREEELKEVADRVKEKLDRLNRENEKSSEELKRELDKINDENRETSERLKREIDETTR

SEQ ID NO: 1852 - protein, 185 aa, Artificial Sequence
  Synthetic
SSVEELLERLRRISEENKRRIEKLLREVEKVLRELKDRHRKRDHMVLHEYVNAAGITKSGLPEEAVKRVLERVRERVKEVLEEADRLNDEMRRIVTEVEKELDKSDKEVEDAVRDILKKIEEGVRDRETAERARETLKRLLDENRDRSKKVKEEIRRILEDLTRTTERVKREIAKLLKELEDTAR

SEQ ID NO: 1853 - protein, 238 aa, Artificial Sequence
  Synthetic
EEDERLTKRVEEIKRENRELLRRLEEEVKELERKSEKIVRDRDHMVLHEYVNAAGITGSTELLVEELEKLIREILKLSEDHNRTLEEVVRKIEDVLRANLERLKELVDEILKALKERGKGDSEELKRKVEKVARDYERLLRKLREVVKRILDESKRLDEELEERLKEVLKKLEELIKRGGPDKDVLTELKRILDELLKLVEKLIRRNLRLLEELLRLVREILRTSNEILEEILKDARR

SEQ ID NO: 1854 - protein, 244 aa, Artificial Sequence
  Synthetic
SAEETLRRITEESKRVLEEITKKYEDLERESREVLRKLREDRDHMVLHEYVNAAGITDDKDEVLTVLEKVLDELLKLHRENLRVIKELLRKVLEVDRENLEVLKRLLEKARDLLRRSGRDEKDLKKLEDELRKVKEELEKKHEASKRDIEDLERELDKVTEEVERLLRKLKEELRRAAEGSDEDRERLARLLKALADKLIRVLEEILKINEELNRKIIKFARENLERNRRVNKKVIEVLREAAR

SEQ ID NO: 1855 - protein, 250 aa, Artificial Sequence
  Synthetic
STEEILKRVKEILDELAKELRDIIRESLRTIEELLDELRRIRDHMVLHEYVNAAGITDGVKDSEELLRRLKRLLEDLRRAHEELLKRLKEAVDEHRDRLRKILEELERVLKELRKRIEELRRSGDRISEKDVLRKLEEVLRKALEILERLLKKIRESARELLKIIEEVLDANIKVMEEALKTIKELLKDGPDEVKRRLEEKERRIRTRYEELRRRLRKRVKDYEDKLREIEKKVRRDAERIEEELERAKK

SEQ ID NO: 1856 - protein, 238 aa, Artificial Sequence
  Synthetic
SEAEKIREALETNLRLLEELIKRLKEILDTHNELLRRVIETRDHMVLHEYVNAAGITLDEEVLREVKRLVDELRKEARRVLDEHEKLVRKIKKEAEDVARESEEIIKEVEDKLKGLDREELLERVRRVLKKSDDLIAELVRRALKILEELTRLLAELLKKVVEILRRIVELVERVLTKKGAPKEDLERLRRKVEELEDRLRRLLEKLARDSAELMRELERILDRYARESEELDRRLAE

SEQ ID NO: 1857 - protein, 247 aa, Artificial Sequence
  Synthetic
SEAEDLEELIKELAELLKDVIRKLEKINRRLVKILEDIIRRRDHMVLHEYVNAAGITVEDKDILRDLERRLREILEESDRLLEELKRRLEEILRKSKELLRRLEEVLREILKRAEEVKRSNLPKEELIKEIVKLLEELLRVIEKILEDNIRLLEELVEVIKEILEKHLRLLEELVRVIERILREVGKDKDEAERRRRELKDKLDRLREEHEEVKRRLEEELTRLRETHKKIEKELREALKRVRDRST

SEQ ID NO: 1858 - protein, 240 aa, Artificial Sequence
  Synthetic
SDKEEIKRRVEKTARDLETEHDKIKKRLEDTVRDIKRELDERDHMVLHEYVNAAGITREGDGDATDLVDKLLETVKRLNEEVLRTVKKIADELRRLVEEVLRVLRESNETLARLLEEGNVGDEVRERLEEVLRRTEEIIKTLEEIVKRLLDELRRLVEELRRISKKLKDELDKIKEKGKDEKRLIEEVVRLLRENLDVVRRILEALAKLIKELLEALEEVLRRNKELIRELLRVLDEALK

SEQ ID NO: 1859 - protein, 238 aa, Artificial Sequence
  Synthetic
DADELLRRLAEEVERVIREAEDLLRRWKETIKKVLDDLKRLRDHMVLHEYVNAAGITKTKGDEELAKLIKDLLDTNEKVNRDLLRLIKKLLKDAERVNRRLLELIEELLEELKRVAKDLGLREEADKKLRDIADRARKELEDYERRLKELLKTVEDALRKAEEDSRKLKRDVEELLERGRLRKDDLEDILRKNLDRLRKLLERLREILRENLEALKKTLKRLEDVVREILEDLKRERK

SEQ ID NO: 1860 - protein, 236 aa, Artificial Sequence
  Synthetic
STREKAKKVLDTLRADNEDMKRVVEKILRALKRTNERAEKLRDHMVLHEYVNAAGITVSEEALKEIEDTLKRVLEEIKRLLDESKKLLEDVEREIREILKTSEELLERIEREIETVGSDEKTLAEILKRLLELNEEMNRRLLKILRDLLRLNEEVIRRLLAVLERLLDALKEALDRGDVPEDLLRKLEEELRRIKEKLRKALEELEREHRELEKELDKLHDESRKEHERIEEELRR

SEQ ID NO: 1861 - protein, 236 aa, Artificial Sequence; identical to SEQ ID NO: 1860
  Synthetic

SEQ ID NO: 1862 - protein, 239 aa, Artificial Sequence
  Synthetic
SERELIERWLELHKEILRLIRELVERLLKLHREILDTIKKLRDHMVLHEYVNAAGITLDKEAKDELREIAKRVEDKLEKLERESRKVEEDLKRKLKELTDESDTVEKRVRDVVRRGTQSREEIAEELLRLDRKLLKAVEELLKEILDLNKKLLDDVRAILEETRRVLEKLLDRVRRGERTDDERRTLTELLKRMEDILEKVERTLKKLLDDSARMAEEVKKTLKELLERSEKVAEDVRK

SEQ ID NO: 1863 - protein, 246 aa, Artificial Sequence
  Synthetic
KEIEETLKELEDLNREMVETNRRVLEETRRLNKETVDRVKARDHMVLHEYVNAAGITRKGPTSEELKRLLAELEELLARVVRRVEELLKKSTDLLERAVKDSADALRRSHEVLKEVASRVKRAKDEGLPREEVLRLLRELLERHAKVLKDIVRVSEKLLREHLKVLREIVEVLEELLERILKVILDTTGGDKAVEELEKALEEIKRRLKEVIDRYEDELRKLRKEYKEKIDKYERKLEEIERRERT

SEQ ID NO: 1864 - protein, 231 aa, Artificial Sequence
  Synthetic
SKEEEVEKVLRKWEEILRRLIEENKRANDKIRREYEELVKERDHMVLHEYVNAAGITVSEEVKRILEKLIKLLEDILEYEKENVERLIELNERILRELKKSVEELKALVTRVRRDGLPESEVRKLVEDVLRKNEELLKEAKKAWRDSIENLKRVLEEVAKLVKTVLREIEEKIDDEDVVRALIEVIERLLRVAEEVIRRILKVNTELMRVDERSIRESLKAISEVLKVLDT

SEQ ID NO: 1865 - protein, 231 aa, Artificial Sequence
  Synthetic
SKDEELARLLEELVERWRKIVEDLERDHRRLVKEIRELVERRDHMVLHEYVNAAGITIDERIVRLIEEIAKIIEEVLKEIVKLVERAVRENVRVLRESVRLVAELVETLARLLRGSDERVTEAIKKVLDTSEDLIRRVIKVNEDILREIAKLVEEVLREAERILTEIKKEGDREEIRRILEELKRIVDDVLRIIARILKLLRDLTRRLAEVAKAVHKLLEELLRKLKEDTR

SEQ ID NO: 1866 - protein, 237 aa, Artificial Sequence
  Synthetic
KEKEDALKKLEDLARKSREDLERVLRKHKKILDKIEELLKRRDHMVLHEYVNAAGITGTESEILKELARLLREHHEALRRLIEELRRLLEEHHKILEDLAREHKRLLDELIKVVADGVDKDELERIIKELRERDKKLVDDLRKVSEDLLDAVRKLVEDLERISRELLRRVEELAKGIDEELAREVERVIKELLDKSKEILERIERAIDELLKVSEEILKLSEDASEELLKILREFAK

SEQ ID NO: 1867 - protein, 237 aa, Artificial Sequence; identical to SEQ ID NO: 1866
  Synthetic

SEQ ID NO: 1868 - protein, 229 aa, Artificial Sequence
  Synthetic
SKEERLREVAEKHKKDLEDIVKRVDEAAKETARRLEEILKRRDHMVLHEYVNAAGITDDEKLKKVKKILKDIMDRLAELIKKILKLLKENLEKIKELLRRNLEISEELLKLAKGLSDRDVLETVRRVLEKLDEEWDRVLEDSRRIIETILRELDTLLREVEKLIKEIKDEISGSKEVLDILERAVEVVRRVIKALKEVLERHVDATREVIERVKRVNKRLLEAVREVVT

SEQ ID NO: 1869 - protein, 241 aa, Artificial Sequence
  Synthetic
SEKELLKEILDRIRELLEDDNRLLKRIVDEIRKLLEEWLRVRDHMVLHEYVNAAGITAPEDVIRELTRALKETEEDVDRVIRTLEKLLKEVLDAHEEVVRKLDRLLKEVERLVEGGDAEEVVRDLLRVVKEILDESKAVIDELARVVDEILKLLEEVDRKLAKVVKEILEDVLRGSGDDEDAVRKIAKIIEELKRLLEDLARDTRRVIEEAKRLLKEWRDRNKEVADTLKKLLEDLIRKIR

SEQ ID NO: 1870 - protein, 246 aa, Artificial Sequence
  Synthetic
SEREELLERIKEILKRVKDKLDEDLKRLKEILEKLKEKADRRDHMVLHEYVNAAGITERTGRTDELVKEVLDTVRRNLENLKRLVEDILRKLEENVKNLTDLVREILKLITELIKRLEDGGLPKEVLDALRRVLEKLEELLREILERLKRSLEAVKRKIEELLKELERSLDELRRALERIRKEIGDSETAVRAIIRVLEKHLEAVRRVLEELLKVLAEHLETVRELIERLKRVLEEAIEVVERVAR

SEQ ID NO: 1871 - protein, 240 aa, Artificial Sequence
  Synthetic
DREKSVRDIEEDLKRVLDKLRRRVETSKEELKKVLKADKENRDHMVLHEYVNAAGITRGIDSEVLRAVREIVKRLVEVVRRYNELSEKIIRDLVRVNDRVLELLKRIVKRLIDVVRELEKIGDKEKALRRLEEVVKEVKRRIEELLKELEDVHRELVKILEEVNEDLKRVATEVKEIIKTGIKSSEVAKELDEVIKRLLDNLKENTDRLKEVIDRNLADLRDLAEELRAVIERLLEDARR

SEQ ID NO: 1872 - protein, 241 aa, Artificial Sequence
  Synthetic
SAEEAVEKLVRIARAIVKINEDLSREVVRILREIVRLNEETRDHMVLHEYVNAAGITDGGLSEDVVRKLRKLVKELEDLLKKSNDDIRKLVEDVARRLKESNDEIRRLVERLEELLKRGPGDEELLRLVEELTEELLRTHEEVVKALEKLTADLLELHRELLERVRRLTKRIEEELKRVGVSEELLRRLEELRKRLEKVLDDSAKELEKLKRELERLLEESRRKLEKLKRDLERVLEETRR

SEQ ID NO: 1873 - protein, 237 aa, Artificial Sequence
  Synthetic
REDEVLRDIERLLREIEEKIRRILEESTAELRKVEEEVKRIRDHMVLHEYVNAAGITRKGIDEELRKLLDEVLDKLTKLIERNKRSLERILELIKRIIDENLEVLRDIIRLLEELLKATKDNGVPKDEVIKLVEDVVRRIEELVTRVVARNEKLVKDLDDLAKKNVRENEELLREIDRGLDEDLLEKIKRVIREHIKALEKLARDLKEILRRHIEALKELARDLAEVIRKLLEDVKR

SEQ ID NO: 1874 - protein, 237 aa, Artificial Sequence; identical to SEQ ID NO: 1873
  Synthetic

SEQ ID NO: 1875 - protein, 243 aa, Artificial Sequence
  Synthetic
SEAERLADEVRKAVKKSEEDNETLVREVEKAVRELKKNNKTRDHMVLHEYVNAAGITRDGQVSDRDLLKELEEVLRRVLEALAENHERTEEILKRWLDRYAEDIERLRKVLKEVIEALKRGGSDDKRIVDELEEILRRNEDVLDKIAKRLRRLLEEDRRLLERIVRELKRLLDDLDRITKEGKSEELVRIAIEVLKRLLEIIEELVRLNNEILERLLKIVRELHKDNIKILEDLLRIIEEVLR

SEQ ID NO: 1876 - protein, 243 aa, Artificial Sequence; identical to SEQ ID NO: 1875
  Synthetic

SEQ ID NO: 1877 - protein, 245 aa, Artificial Sequence
  Synthetic
SEKDEVTRRIRELLKEAEETNREAIERIKRLLDRVREAVEERDHMVLHEYVNAAGITDRGLQDDEALLKLLIDALREHNRLSTELIKILIDVLRTILKIIKDVLATNIEIARRILDLVRRLAERGGLDDRLVKEVEKLVRTAERLHRDALRKVKRLVEELEKRLRELVKTDHDLVRRLETLLRRGSGSKEDLLREIARILAESLRLIRELLKEIEKIVKEIIELLERLNDELRKIIEAILETTKK

SEQ ID NO: 1878 - protein, 245 aa, Artificial Sequence; identical to SEQ ID NO: 1877
  Synthetic

SEQ ID NO: 1879 - protein, 249 aa, Artificial Sequence
  Synthetic
DAEEVVKRLADVLRENDETIRKVVEDLVRIAEENDRLWKKLRDHMVLHEYVNAAGITRGGVPEELLDRLAKVVKSIVEKAEKILERLNRVSKAIAEKLKTIVDELNEVSKEIVKRAEDILRKGKDKETVLRALRTLVKEYADLSKEVLERVERIVREYVKLSDEVVKSLAEIVEELIRIIEDLLRKGNLDEDVKRALEELVSRLRKLLEDVKKASEDIVREVERIVRELAKRSDEILKKLEDIVEKLRE

SEQ ID NO: 1880 - protein, 240 aa, Artificial Sequence
  Synthetic
DKDKRLEELLKRLKELNDKTFEELERILEELKRANEASLRERDHMVLHEYVNAAGITLDKRLAELLKKLLDDLKRLLEEYTRTNEELLKRLRELLERYRETNKKLLDLLRKLLDEARRTGTDEDLLRRLEDILRKYEDEVRRLLKELEDILREYEDTSRRLLEELERIAKEAAERVSRGSDKDVKDIIRTILEVARDLLRLLEEDSRTNSEVVKRLLDLLREDSKANSEVVKRLLDVLRE

SEQ ID NO: 1881 - protein, 240 aa, Artificial Sequence
  Synthetic
SKEETLKRLLDELEKRNRETVERLERLLKELEDRNRASLEERDHMVLHEYVNAAGITLSKELKDTLARILEELRKLLEEYFRKNEELLRLLRKLLDEYARTNEELLRLLEELLDTARRTGGDSELLKRLEDIAREYEKRVRRLLEKLKDILDKYRKTVEELVRKMEEILKEAKKTISRIGSEEVKDIVRAMEEVIRRLIEILRRDVELNLDVAKKLLELLKEDSKLNLDVARELLELLDR

SEQ ID NO: 1882 - protein, 243 aa, Artificial Sequence
  Synthetic
SEAERTKESLKKVLKALVDLNRELLRKLEENMRELTKLNEERDHMVLHEYVNAAGITIVDKDAEREAERLMRELDKSSEDTARETRKLIEESKKSTRRTEEEARKLTETLDRLAKGGLPREDLLRALVRLLEELARLIEEDVRRNAELVKRHIELVERDVAELLRLIKELVDLLADLAEKGSRTEEIRKIVEEILKEIKELADRYREEVRKSKDKLRSILEDYKRKVDELKERLRELIEEVET

SEQ ID NO: 1883 - protein, 243 aa, Artificial Sequence; identical to SEQ ID NO: 1882
  Synthetic

SEQ ID NO: 1884 - protein, 182 aa, Artificial Sequence
  Synthetic
DEAEKLLKELRDLLEESRKDLERLLKELEDLLEESKRDLERLRDHMVLHEYVNAAGITRRNEREKLEKLLRELKKVVERLKDNLKDNERRNKEAIERVRKKLKDNERENKKVIEDLRAKLKDLEEVKRKIDRLEEESRRVIEEARKRLEEVEEKSKKIIDDARRALDRIDKELRRVVEETRK

SEQ ID NO: 1885 - protein, 182 aa, Artificial Sequence
  Synthetic
RVEDALRKLLDDVRRLVEEAERRLRTSNDKSRRLVEEAKRRLRDHMVLHEYVNAAGITRIRDEDVKRVLEELLKRDHDVVRRVLERIDEMLERNSRLVKRVLEDIRRLLKRVREVVERIKRVRSKVVEEVLKELEELIKTAKKIIEDVLRASEDTIRRLEEIIRKVEEDSKRIIEEIERAAR

SEQ ID NO: 1886 - protein, 181 aa, Artificial Sequence
  Synthetic
SEVERVLEDLRRLVRDVEEKLRRIIERDRRLVEEVERENRKTRDHMVLHEYVNAAGITDISDKKTIERIVREIIKEARDLVRRNHERNREIVDESRRLVEELRRIVEEIIRRLRELLERVKSGELAERIEDVVREAEKRLRELLKELEKTSRDLKKRLEELDRELKALVEKVERDLEELRK

SEQ ID NO: 1887 - protein, 174 aa, Artificial Sequence
  Synthetic
SRDEKIRDILRRVLKEVRDSTKKVEEDLEDVHRRTEEELRKVRDHMVLHEYVNAAGITSEELKRRMEEVVRRIEELLKKLLKEDRDVVKEIRDKLDETRKEMEEVAERIKDKIRRGDGREKVAEEVKRIADRLIDLNRRIAEEVDKIVRDSIKKVEEIVTEVEKIVEKLIRDVR

SEQ ID NO: 1888 - protein, 174 aa, Artificial Sequence
  Synthetic
SELEKVVKEVADLLRRNLEKSKRVLEEVRRRLEENLRESEKVRDHMVLHEYVNAAGITEGKDKRDLTRLLEEDDKRVKEALDKSRENNERILKEVRRALRESEEDNRRILKEVREKVDSRLLEELEERVRESIERSRRFIEELEKIVEETLTESEKLARASSEITKTVLDEIRK

SEQ ID NO: 1889 - protein, 178 aa, Artificial Sequence
  Synthetic
DDLERVLKEIKKAADKIREDNKRTADKIRKRVKELDDETRDMRDHMVLHEYVNAAGITGREEARKVIEELKKLVDEVRKRNEKSIEELKKLLKEDRDLMRRVIEELEDLVRRLREEVRDDEALRRVEEEVERLIRDLRRVLKETSDRVRELIDKHRRLSEEVEKDVKRLIDELKKKTD

SEQ ID NO: 1890 - protein, 187 aa, Artificial Sequence
  Synthetic
DEEEELRKRLEKLSKEVRELLRRDEEEDRRLNRELEELLKDHRDHMVLHEYVNAAGITKARRKVSEEELTRLRKKLRDLEEESKEALRELRRRVEELNKENKKSLDDLERRLKELEDRAREVEKRDRREDELRELLRRLEDVIRKLAEDLKRNTEDLRRVIKELAERLEELNKRLKREIRRLKEELR

SEQ ID NO: 1891 - protein, 175 aa, Artificial Sequence
  Synthetic
SEEDELRRLLKEVNERVERLLDEIRKELEKIAEELRDLLKKNRDHMVLHEYVNAAGITDEEIKKDAERALTELKEEHERLDREAKKDLDRIRKELERLEEEHRRVSERIEEVLDKESDKTEDIAREIRELMERTRRVIEEIKKELRDILEKLRRVSEELNKKLDEILKRIEDRTR

SEQ ID NO: 1892 - protein, 171 aa, Artificial Sequence
  Synthetic
SEKEKVIKEARELLERLRKRLKDVNDDVTRLLDELRKENEKSRDHMVLHEYVNAAGITVEDVIRELKRRLEEVDKKNRDILETLKRELDEVSRRTREELEKLRKELEEVEKAGLPAEELKRVADRLRRRLERLVEENERVVKKILDEIRRSVEENKRIVDKVRKDLDERRK

SEQ ID NO: 1893 - protein, 177 aa, Artificial Sequence
  Synthetic
SAIEKVKEVVERVLETVRDSVRRSHEESKRLIDKVRKRLEEVRDHMVLHEYVNAAGITPERMVEKLERDLEELLKEIKDTIDRIEEELRTSNRRLKETNDEIAKRLEELLRELSRDRDKDAVEDVLRRIEELIRDLNKKNDDNVRRVKEVIDRAEKLVRDLLREIRKLIEKLIRDTE

SEQ ID NO: 1894 - protein, 183 aa, Artificial Sequence
  Synthetic
SEIEKLVEDVRKLVEDNLRHSEEVHRRNRRLIEENERKIDELRDHMVLHEYVNAAGITRGEIREEEARKVLEEIKRLLDEIRRHSEEVLKEIERTLKENLKHSEEVLRRIEERLEDIKRKDKDSERVRTLVDRLREELKRSLDESEKLNRESRKRVTRSLEKVDDLVRELEKLARKVLEEVKT

SEQ ID NO: 1895 - protein, 174 aa, Artificial Sequence
  Synthetic
DELRDVKRELDRLLRENEEIVERIAETVRRLLEELKKLTKELRDHMVLHEYVNAAGITPEKELKEVADTLRKLLKDIERSNKEVEDRLRKLLEEIKESTDRLREELEEVEKLLRGGKDVETVLRRVRELSRDNKRRMRRVLEEAKRLAKEDKERIDKIRKEIEELIKRLKDKAT

SEQ ID NO: 1896 - protein, 174 aa, Artificial Sequence
  Synthetic
DEEEDLERRIKKLLDENRELLKRIAEELRRLLEELRRLTEESRDHMVLHEYVNAAGITPEKDLRDVAEKVKKVLKESEDSNRDVKRKLEKLLRDLERSTERLEREARKVRKLLRDGKDIETLLRELEKLSRDNKELLKKIEKEIRDLIKEDKERNRELSERLRKLVEELKKKAT

SEQ ID NO: 1897 - protein, 177 aa, Artificial Sequence
  Synthetic
SEAEKVVEELKKLLREVEKKIRDHTEDVKRILEELERRLRKHRDHMVLHEYVNAAGITDDDTVRKVKEELDRSHEKLREELRKVAKELKESNEELERDLKRLVEEAEDRLRRLKDRVSEKVLRELEKILEDIKRTLDKLLRENRETLKRIEDRLRELLEENRKLLEKIERELRERSR

SEQ ID NO: 1898 - protein, 182 aa, Artificial Sequence
  Synthetic
DEIETVLDEVRRLHEDAKRRLEEMIDEVRKLNEESVRELARVRDHMVLHEYVNAAGITRAGLDKGKLEELEERLERVREDVERILREIKRRNEKTLEDSERILEENKERNRTVLKKLKELRDRGSDAREALKESRKVVEESRESVRRVLEKNRRVVEESKRLAEELLRRVKKVVDEIRKRVE

SEQ ID NO: 1899 - protein, 174 aa, Artificial Sequence
  Synthetic
EELERILDKVRKVIEEVRKRLRDDLRTVEKVLKETEEVLRRARDHMVLHEYVNAAGITRGRDRREIKEELKKVLDDLRELLRALEEKNRRVNKENEDSLRKIEEDLRDVLRKLEEEIKGREVLRKVRELLRTIREEVERVLRKSNELSTRIKKRIDDVLETLERLLKELDDKLR

SEQ ID NO: 1900 - protein, 178 aa, Artificial Sequence
  Synthetic
SSKDEIRRRVEEVVERSDEIVKRSREHVKTVVDELDRVVKELRDHMVLHEYVNAAGITDGGSEETLKRVLDELREILKELKEEVKKVKRKLEKVVKENRDTIREVEERNRKILDELRKRGVEERALREVEEISRKSEEKLRRVLKESEDIAKEAEDRLKTVLERVERIADEVLKRLTK

SEQ ID NO: 1901 - protein, 182 aa, Artificial Sequence
  Synthetic
SDADRVAEELKKLVEDSRRENERVIEESKRLVKENEDRNRELRDHMVLHEYVNAAGITKEKDKKTLDDIVREILERLKRLLEKVEDENRKSHEENKRLLEDVKRKNKRISDELKRLLEEIERRNVDVDKVRETVKRLLEENKRVMEKTEEVAKKSSEDIKRVADETRRRAEELLKEVDELRK

SEQ ID NO: 1902 - protein, 175 aa, Artificial Sequence
  Synthetic
SEVDEVLREAKRIVDEVHKDNERATEESRRLVKKVHEENEEMRDHMVLHEYVNAAGITDEKLVTEILKEIEEALKEAARRNKEVKDRLRELSRRVSERNREILEELKERLDRVRERRKDVKELEREVEKLLKRIEESLRRHRKENKRLLEELDRSLRELAKIVKEVLDEIRERTR

SEQ ID NO: 1903 - protein, 175 aa, Artificial Sequence
  Synthetic
SEMDDVLKKLAETVKRIIERLKKLTDDSRRLVEEVHRRNDKLRDHMVLHEYVNAAGITDEKDVRKLLEDLKKKSEEVAERNKRILDTLREISKRAEDEVRKVLKELEKTLKELEDRRPDVRELSEEVKKLLDEVRKALKRHKDENDKLLKEIEDSLRRHKEENDRLLEKLKESTR

SEQ ID NO: 1904 - protein, 186 aa, Artificial Sequence
  Synthetic
SEVDEVRKTLEDLLRRLDEENKDIIRRNKELLDDLDRKVREARDHMVLHEYVNAAGITKLKDRETLTRIIEEIEKRARELIKRLRDEIRKIEEESKKSIEDSRKRNDEIRKRLEELIKDLRDKIKDSEELARRITELEKRVREVIERLKEKNKRLEDDSRRVITELRKKLKDLEDRVREEIEELRK

SEQ ID NO: 1905 - protein, 183 aa, Artificial Sequence
  Synthetic
SEVDEVLERIKRLLERLAEHSDKVVRDIEKLLDDNRKENERLRDHMVLHEYVNAAGITRGDLREELLERVVREVEKEIRDIKRKNKRSVETVEKLVRDDRKELKRALEDVERLIRELETRLKDKEELRRKLEKVLREAEKVIDELLKKTDEVLKRARETIEDLNRKLDKVLKEVRDKLDRLRD

SEQ ID NO: 1906 - protein, 184 aa, Artificial Sequence
  Synthetic
ELIKKARKDVEEVRERSERLVDELRKRNKKLADESRRLIDKLRDHMVLHEYVNAAGITKRRTKDVLKEIEDLVRELERELRRVVKESSDKVRKLIRENEKVVEESSRLFRDLVEKLRRVVEERNDKKLMEEVERLIKRLEDVNEKSERDVREINKESERVNEETEREVEDAIRKLREVLRRAKK

SEQ ID NO: 1907 - protein, 182 aa, Artificial Sequence
  Synthetic
SELEKTLEDLKRHSEENKKKLEEDLRDMERNLKENKDRLKKIRDHMVLHEYVNAAGITEGDIDERELERVRRKMEEIKKRLDENVERNRRKAEDIKRKLDENVKRSEDRVKEIKEDIRRRVRDKDKAEELERRLDELVKENREIHERVKKALDDIVKELEELHERLKRRLEEILRRIAETVR

SEQ ID NO: 1908 - protein, 186 aa, Artificial Sequence
  Synthetic
SEIEKLIEELRRELEKVKDELERSIEEMDRELDDVRRDSKRLRDHMVLHEYVNAAGITRGDRPEEVLRKELEDIKRKLRRILEEHHEKIRRIKEKLRRENKRVRDELKRIKDEIDEKVKDVRRKGADEELLKRLEEVAEDVKRALEELLKKHTRVVERVEKALDELDKELERIVREAEKELDRREK

SEQ ID NO: 1909 - protein, 178 aa, Artificial Sequence
  Synthetic
DREREVKKRLDEVRERIERLLRRVEEESRRVAEEIRRLIEEVRDHMVLHEYVNAAGITGLKDKEEVRRVLERLRKLNAESDELLERILERLRRLVEATNRLVKAIIEELRRLVEKIVREVPDSEELREELKKLERKIEKVAKEIHDHDKEVTERLEDLLRRITEHARKSDREIEETAR

SEQ ID NO: 1910 - protein, 172 aa, Artificial Sequence
  Synthetic
SRAETVLKEVTDKIKKLADSSDELLRRNKENIDELKKSSEELRDHMVLHEYVNAAGITDEETLEELIRRVEAELEAHHRELEKNSREDEKRNRDHHAKLEEEMRRVEERLEREGIDDEVVKRVRDLLDTVRRRNEKVNEDVKRMNDKLRRDNEDVIRRVEKLLRELEEKRRT

SEQ ID NO: 1911 - protein, 188 aa, Artificial Sequence
  Synthetic
SEIEKILKEIEDLARRDEEVSKKIVEDIRRLAKEVEDTSRDIRDHMVLHEYVNAAGITKDGSKEELEKEVREVVKTLEELVKDNHRLIRRAVEEMKRLVEENHRHSREVVKELEDLVRELRKGSGSEDSERLVREVEDLVRRLVRRSEKSNEEVKRTVEELVRRMEESNDRVRDLVRRLVEELKRAVD

SEQ ID NO: 1912 - protein, 178 aa, Artificial Sequence
  Synthetic
SEAEKAKETIDRLADRVRKLLEEIKRSLDDSRRKSKETVEENRDHMVLHEYVNAAGITGSVSEEELERLIRKLKKTLDELRRRHEKLVEDLRRNLERIKRRLEELTREMRETLERLAREGLDEEVLRTLEEIIRRLTKELEDVLREYERELRRLEEENKRVIDKTEEEIRRLADRLRR

SEQ ID NO: 1913 - protein, 179 aa, Artificial Sequence
  Synthetic
SEVEELIKRLAKVLKELVDKVRKVIEDTKELLERLKRRSEDHRDHMVLHEYVNAAGITDDEELKEILDRLRKTLEELEEELKKALEDDREEAKRLVDDARRVLKELEEEVREIRERRGESEELDRRIEKVLKEIEEKIREVIKEWERVHREVEELLKRLIDENRKVLDEIRKLLEEKSK

SEQ ID NO: 1914 - protein, 184 aa, Artificial Sequence
  Synthetic
DEIRKVVKEITDLLKASNDKNRKVVEEIRDLLRKSKKLADELRDHMVLHEYVNAAGITKSGDKETAEDIVRRIIEELKRILKEIEDLARRINREIERLVEEVERDNRDVNRAIEELLKDIARRGGSEDLKRVEERAREVSRRNEESMRRVKEDADRVSEANKEVLDRVREEVKRLIEEVRETLR

SEQ ID NO: 1915 - protein, 184 aa, Artificial Sequence; identical to SEQ ID NO: 1914
  Synthetic

SEQ ID NO: 1916 - protein, 176 aa, Artificial Sequence
  Synthetic
STAETVEKKVEEVIRENEKSMRESEEKVDRSTKRIEDVLRRLRDHMVLHEYVNAAGITGERVKEVLEENRRLLEEAKKLVDEVLETNKKLLEDDKRLNEEVSKTLKKLLEEIKSVDTREDATRVIEEAKRILDEARKLNEETIRRSEELVRRIERVIEEIIKRSEKLLEDVARESK

SEQ ID NO: 1917 - protein, 186 aa, Artificial Sequence
  Synthetic
SRVEEIIEDLRRLLEEIRKENEDSIRRSKELLDRVKEINDTIRDHMVLHEYVNAAGITEKGSESEEVKKALRAVLEELEKLLRRVAEINEEVLRRNSKLVEEDERRNREVLKELARLVEELIREIGDEDKARKVAEVAEKVLRDIDKLDRESKEAFRATNEEIAKLDEDTARVAERVKKAIEDLAK

SEQ ID NO: 1918 - protein, 180 aa, Artificial Sequence
  Synthetic
REVEEMIKELEELLKDLKEKNERASKRNRELVRRLEEENKRVRDHMVLHEYVNAAGITSGEDEEVLREVLKRLEEVLERVRALNERVLEAIEKSLEEVKASNEAVKRRLKELLEEAERGVDSEKLKELRDVIAEVAKRIDELDEYTRESIRRAKKEIERLNRETKKVIEEVVKRIEEERK

SEQ ID NO: 1919 - protein, 181 aa, Artificial Sequence
  Synthetic
DAVEEAEKLIRKVIADSEKLLRDLADLNAKSIRRSEKLVEDDRDHMVLHEYVNAAGITNGGSEEELRALLKEVEDTNRASHETNKRLLDEDRALNKEVHDRNEKLLRDIKRLVEEVAKGIDSEELLRRIKKLLDEIKKAIEDSSREIKRLLEESERVMKRSSEDIKRTLDDTRRVVEEVRR

SEQ ID NO: 1920 - protein, 181 aa, Artificial Sequence
  Synthetic
SEVDDVLRRLEELIKTLEDINAKSLEDIKKLIDDLAKILEDARDHMVLHEYVNAAGITGIDSREAEEIAKRVLEELKRTSDDLRKKVERVDEDLRRLLRENHERNKKILRDLERLLRDAARRGVPKEALDRMREEIRRLEEESRKSDETIERLIRELRRRVEEVLKTSTDLIRELEEEVKK

SEQ ID NO: 1921 - protein, 175 aa, Artificial Sequence
  Synthetic
SEIERVKKRLEELLAEVEESTRRLEERLKRLLEEAKRSSEEVRDHMVLHEYVNAAGITRDEKLVSELEARVKELLEDSRASLEELKKRVRKLAEDSARLLEEVKREVEKLKAKLDRGGDADDVLARVEELAKRAHDENERLIREVEELVRAHNKRNKELVDEVKRLVEKVIEEER

SEQ ID NO: 1922 - protein, 183 aa, Artificial Sequence
  Synthetic
SDVDRVLEEIRKLLEDLKRHSEKVSEENEDLLRANTELNKRVRDHMVLHEYVNAAGITRGGISEEDLKRALDRVRKTVETVKEENKRSLEDVRRTVETNKRKLERVVEEIKKLIEDAKRRGSGDEEAKKKLDEVLERAKRTIDRLLETSDRSLEKVEADLRRLNEELDRSLERAERTIRELAK

SEQ ID NO: 1923 - protein, 180 aa, Artificial Sequence
  Synthetic
DEVEDVLRKIEKILDDHRKRIEKNSRDMARIIDEHRRKVEENRDHMVLHEYVNAAGITRGEGDEETAEDVKAKLEKSNRELEKHSEEVKRALDESNEDLRRHSEEVKERIERLVKKLREDGVEREEELKEVADRVKEKLDRLNRENEKSSEELKRELDKINDENRETSERLKREIDETTR

SEQ ID NO: 1924 - protein, 238 aa, Artificial Sequence
  Synthetic
EEDERLTKRVEEIKRENRELLRRLEEEVKELERKSEKIVRDLRDHMVLHEYVNAAGITSTELLVEELEKLIREILKLSEDHNRTLEEVVRKIEDVLRANLERLKELVDEILKALKERGKGDSEELKRKVEKVARDYERLLRKLREVVKRILDESKRLDEELEERLKEVLKKLEELIKRGGPDKDVLTELKRILDELLKLVEKLIRRNLRLLEELLRLVREILRTSNEILEEILKDARR

SEQ ID NO: 1925 - protein, 238 aa, Artificial Sequence; identical to SEQ ID NO: 1924
  Synthetic

SEQ ID NO: 1926 - protein, 240 aa, Artificial Sequence
  Synthetic
SDKEEIKRRVEKTARDLETEHDKIKKRLEDTVRDIKRELDELRDHMVLHEYVNAAGITEGDGDATDLVDKLLETVKRLNEEVLRTVKKIADELRRLVEEVLRVLRESNETLARLLEEGNVGDEVRERLEEVLRRTEEIIKTLEEIVKRLLDELRRLVEELRRISKKLKDELDKIKEKGKDEKRLIEEVVRLLRENLDVVRRILEALAKLIKELLEALEEVLRRNKELIRELLRVLDEALK

SEQ ID NO: 1927 - protein, 240 aa, Artificial Sequence; identical to SEQ ID NO: 1926
  Synthetic

SEQ ID NO: 1928 - protein, 248 aa, Artificial Sequence
  Synthetic
DEDRIIEEIARLLEELLRELLELIKKLIETNRRLNEEHERAVRDHMVLHEYVNAAGITKGISDEKLKRIRERLKRALDDLERLHREINKRLEDLVRELEKLVREILKELKDALEELRRASARAGGEEVLRRLEEIVKKLLDLVRRILERLKEIHKDNVRLLRELNERLTRIVEDLVRLIREILREAGVDEKIAEEIERELEELRRMIKRLHEDLERKLKESEDELREIEARLEEKIRRLEEKLERKRR

SEQ ID NO: 1929 - protein, 248 aa, Artificial Sequence; identical to SEQ ID NO: 1928
  Synthetic

SEQ ID NO: 1930 - protein, 246 aa, Artificial Sequence
  Synthetic
KEIEETLKELEDLNREMVETNRRVLEETRRLNKETVDRVKATRDHMVLHEYVNAAGITKGPTSEELKRLLAELEELLARVVRRVEELLKKSTDLLERAVKDSADALRRSHEVLKEVASRVKRAKDEGLPREEVLRLLRELLERHAKVLKDIVRVSEKLLREHLKVLREIVEVLEELLERILKVILDTTGGDKAVEELEKALEEIKRRLKEVIDRYEDELRKLRKEYKEKIDKYERKLEEIERRERT

SEQ ID NO: 1931 - protein, 231 aa, Artificial Sequence
  Synthetic
SKEEEVEKVLRKWEEILRRLIEENKRANDKIRREYEELVKEIRDHMVLHEYVNAAGITSEEVKRILEKLIKLLEDILEYEKENVERLIELNERILRELKKSVEELKALVTRVRRDGLPESEVRKLVEDVLRKNEELLKEAKKAWRDSIENLKRVLEEVAKLVKTVLREIEEKIDDEDVVRALIEVIERLLRVAEEVIRRILKVNTELMRVDERSIRESLKAISEVLKVLDT

SEQ ID NO: 1932 - protein, 247 aa, Artificial Sequence
  Synthetic
RDRDVLRKVKAEIEELVARIEKVSRDALSEVKRLLDENRKIARDHMVLHEYVNAAGITTRGDDEVVKETEEVLRDNHRLLEELIRRLIKVLEEWLRRHKKLLDEIRELLKEILRLVKESGVSEDLLRRLKRVIEELDKKLKESEEKLRRVVEKAKEDLKAVLEEHRKVLEDLKRALEEVREKLRERGSEEVVEELLRMLKRVAEEMKRVHDDLSRAVEKVVRDVVRVDKELLDELARILRRLEEVIT

SEQ ID NO: 1933 - protein, 231 aa, Artificial Sequence
  Synthetic
SKDEELARLLEELVERWRKIVEDLERDHRRLVKEIRELVERIRDHMVLHEYVNAAGITDERIVRLIEEIAKIIEEVLKEIVKLVERAVRENVRVLRESVRLVAELVETLARLLRGSDERVTEAIKKVLDTSEDLIRRVIKVNEDILREIAKLVEEVLREAERILTEIKKEGDREEIRRILEELKRIVDDVLRIIARILKLLRDLTRRLAEVAKAVHKLLEELLRKLKEDTR

SEQ ID NO: 1934 - protein, 237 aa, Artificial Sequence
  Synthetic
KEKEDALKKLEDLARKSREDLERVLRKHKKILDKIEELLKRVRDHMVLHEYVNAAGITTESEILKELARLLREHHEALRRLIEELRRLLEEHHKILEDLAREHKRLLDELIKVVADGVDKDELERIIKELRERDKKLVDDLRKVSEDLLDAVRKLVEDLERISRELLRRVEELAKGIDEELAREVERVIKELLDKSKEILERIERAIDELLKVSEEILKLSEDASEELLKILREFAK

SEQ ID NO: 1935 - protein, 229 aa, Artificial Sequence
  Synthetic
SKEERLREVAEKHKKDLEDIVKRVDEAAKETARRLEEILKRLRDHMVLHEYVNAAGITDEKLKKVKKILKDIMDRLAELIKKILKLLKENLEKIKELLRRNLEISEELLKLAKGLSDRDVLETVRRVLEKLDEEWDRVLEDSRRIIETILRELDTLLREVEKLIKEIKDEISGSKEVLDILERAVEVVRRVIKALKEVLERHVDATREVIERVKRVNKRLLEAVREVVT

SEQ ID NO: 1936 - protein, 246 aa, Artificial Sequence
  Synthetic
SEREELLERIKEILKRVKDKLDEDLKRLKEILEKLKEKADRDRDHMVLHEYVNAAGITRTGRTDELVKEVLDTVRRNLENLKRLVEDILRKLEENVKNLTDLVREILKLITELIKRLEDGGLPKEVLDALRRVLEKLEELLREILERLKRSLEAVKRKIEELLKELERSLDELRRALERIRKEIGDSETAVRAIIRVLEKHLEAVRRVLEELLKVLAEHLETVRELIERLKRVLEEAIEVVERVAR

SEQ ID NO: 1937 - protein, 252 aa, Artificial Sequence
  Synthetic
SLEEITKRLLELVEENLARHEEILRELLELAKRLAKEDRDILRDHMVLHEYVNAAGITNGSSEEDLKRLLKEVIEELRAVVKRVKDKWDEVVKRIEDLVKKLKELHDDTLRKLRELVRKIVTDISESGGEAEKVKRVVEKILELVERLAKVVKESVEKLLEILRELAEVSKRVAEALLRLLEELVRVIRIKDERTLREVVRKVLEEAKRLLDELEEVHKRVKKELEDIIEENRRVVKRVRDELREIKRELDE

SEQ ID NO: 1938 - protein, 237 aa, Artificial Sequence
  Synthetic
REDEVLRDIERLLREIEEKIRRILEESTAELRKVEEEVKRIIRDHMVLHEYVNAAGITKGIDEELRKLLDEVLDKLTKLIERNKRSLERILELIKRIIDENLEVLRDIIRLLEELLKATKDNGVPKDEVIKLVEDVVRRIEELVTRVVARNEKLVKDLDDLAKKNVRENEELLREIDRGLDEDLLEKIKRVIREHIKALEKLARDLKEILRRHIEALKELARDLAEVIRKLLEDVKR

SEQ ID NO: 1939 - protein, 237 aa, Artificial Sequence; identical to SEQ ID NO: 1938
  Synthetic

SEQ ID NO: 1940 - protein, 243 aa, Artificial Sequence
  Synthetic
SEAERLADEVRKAVKKSEEDNETLVREVEKAVRELKKNNKTWRDHMVLHEYVNAAGITDGQVSDRDLLKELEEVLRRVLEALAENHERTEEILKRWLDRYAEDIERLRKVLKEVIEALKRGGSDDKRIVDELEEILRRNEDVLDKIAKRLRRLLEEDRRLLERIVRELKRLLDDLDRITKEGKSEELVRIAIEVLKRLLEIIEELVRLNNEILERLLKIVRELHKDNIKILEDLLRIIEEVLR

SEQ ID NO: 1941 - protein, 243 aa, Artificial Sequence; identical to SEQ ID NO: 1940
  Synthetic

SEQ ID NO: 1942 - protein, 245 aa, Artificial Sequence
  Synthetic
SEKDEVTRRIRELLKEAEETNREAIERIKRLLDRVREAVEEVRDHMVLHEYVNAAGITRGLQDDEALLKLLIDALREHNRLSTELIKILIDVLRTILKIIKDVLATNIEIARRILDLVRRLAERGGLDDRLVKEVEKLVRTAERLHRDALRKVKRLVEELEKRLRELVKTDHDLVRRLETLLRRGSGSKEDLLREIARILAESLRLIRELLKEIEKIVKEIIELLERLNDELRKIIEAILETTKK

SEQ ID NO: 1943 - protein, 245 aa, Artificial Sequence; identical to SEQ ID NO: 1942
  Synthetic

SEQ ID NO: 1944 - protein, 243 aa, Artificial Sequence
  Synthetic
SRVEELKKLIEDILRISREVVERIARVAEDIHRINRRVLDDLRDHMVLHEYVNAAGITRKVSGTEAAEALRDTIRRVVDEIRKLLEEHEKRSAELLEEIRKLLEDILRRSERAVEEIRELLKKGVSTKDVLRIIEEILREHLELLERVVRRIEEILRELLKTIEEIVKRIKEILEELKEVLKRGSVGDDEVEREIRRVKEDLDRILEEYRRLLEEIKRKLEEILRRVEELHRRLRRKLEEIDR

SEQ ID NO: 1945 - protein, 249 aa, Artificial Sequence
  Synthetic
DAEEVVKRLADVLRENDETIRKVVEDLVRIAEENDRLWKKLVRDHMVLHEYVNAAGITGGVPEELLDRLAKVVKSIVEKAEKILERLNRVSKAIAEKLKTIVDELNEVSKEIVKRAEDILRKGKDKETVLRALRTLVKEYADLSKEVLERVERIVREYVKLSDEVVKSLAEIVEELIRIIEDLLRKGNLDEDVKRALEELVSRLRKLLEDVKKASEDIVREVERIVRELAKRSDEILKKLEDIVEKLRE

SEQ ID NO: 1946 - protein, 240 aa, Artificial Sequence
  Synthetic
DKDKRLEELLKRLKELNDKTFEELERILEELKRANEASLREARDHMVLHEYVNAAGITDKRLAELLKKLLDDLKRLLEEYTRTNEELLKRLRELLERYRETNKKLLDLLRKLLDEARRTGTDEDLLRRLEDILRKYEDEVRRLLKELEDILREYEDTSRRLLEELERIAKEAAERVSRGSDKDVKDIIRTILEVARDLLRLLEEDSRTNSEVVKRLLDLLREDSKANSEVVKRLLDVLRE

SEQ ID NO: 1947 - protein, 240 aa, Artificial Sequence
  Synthetic
SKEETLKRLLDELEKRNRETVERLERLLKELEDRNRASLEELRDHMVLHEYVNAAGITSKELKDTLARILEELRKLLEEYFRKNEELLRLLRKLLDEYARTNEELLRLLEELLDTARRTGGDSELLKRLEDIAREYEKRVRRLLEKLKDILDKYRKTVEELVRKMEEILKEAKKTISRIGSEEVKDIVRAMEEVIRRLIEILRRDVELNLDVAKKLLELLKEDSKLNLDVARELLELLDR

SEQ ID NO: 1948 - protein, 240 aa, Artificial Sequence; identical to SEQ ID NO: 1947
  Synthetic

SEQ ID NO: 1949 - protein, 243 aa, Artificial Sequence
  Synthetic
DEEETLRRLLERKVELAKEYLDVSKEVIDRTTKLLDEYLKTSRDHMVLHEYVNAAGITGPDELIKRLAEELERSLRELEEEIKRLKRELEESLKKLKEIIDRLAEEAEKLLAVLKRGEGSEEEALRALASLVRELIEVLRENDERLRDVLRRLIEALRKNNEILERVLRKLVRAAEERGRDESSREALEEARRRLEELLRELNEITKDLEAKLEKLLRDLNELTKALEEELKRLLDELKKRTD

SEQ ID NO: 1950 - protein, 243 aa, Artificial Sequence
  Synthetic
SEAERTKESLKKVLKALVDLNRELLRKLEENMRELTKLNEEVRDHMVLHEYVNAAGITVDKDAEREAERLMRELDKSSEDTARETRKLIEESKKSTRRTEEEARKLTETLDRLAKGGLPREDLLRALVRLLEELARLIEEDVRRNAELVKRHIELVERDVAELLRLIKELVDLLADLAEKGSRTEEIRKIVEEILKEIKELADRYREEVRKSKDKLRSILEDYKRKVDELKERLRELIEEVET

SEQ ID NO: 1951 - protein, 243 aa, Artificial Sequence; identical to SEQ ID NO: 1950
  Synthetic

SEQ ID NO: 1952 - protein, 186 aa, Artificial Sequence
  Synthetic
SAEDSIRELLERDERLLEEARKEAKRLNEENERLLERIEETVRRDHMVLHEYVNAAGITIKGEKLREIEELVRRVKRTIEKLLEEVKKSVEDSSKRIEELLEAVERSVERTKEEIRRLLDEVRKDRKEELVKRVEERIKRLHDENRRLVKEVIEEVEKLIRDNEKLAEDIEREIRRLLKELDEAAK

SEQ ID NO: 1953 - protein, 182 aa, Artificial Sequence
  Synthetic
RVEDALRKLLDDVRRLVEEAERRLRTSNDKSRRLVEEAKRRLERDHMVLHEYVNAAGITIRDEDVKRVLEELLKRDHDVVRRVLERIDEMLERNSRLVKRVLEDIRRLLKRVREVVERIKRVRSKVVEEVLKELEELIKTAKKIIEDVLRASEDTIRRLEEIIRKVEEDSKRIIEEIERAAR

SEQ ID NO: 1954 - protein, 184 aa, Artificial Sequence
  Synthetic
KLDEVIEEIRKLLRRMEEELRRSVEEIDKLLREVRELLRESSERDHMVLHEYVNAAGITGVPEEVKERLDRLVETLRRLSEETLKELDKLVREVKELSKESLKRLRELVERLRRELEEIKKRGEDEKLVEDLKRRAEEVIRELREIVKRNTEIAREVVERAKRIVEKNEKLLKDVVEEAKKIVK

SEQ ID NO: 1955 - protein, 181 aa, Artificial Sequence
  Synthetic
SEVERVLEDLRRLVRDVEEKLRRIIERDRRLVEEVERENRKTIRDHMVLHEYVNAAGITISDKKTIERIVREIIKEARDLVRRNHERNREIVDESRRLVEELRRIVEEIIRRLRELLERVKSGELAERIEDVVREAEKRLRELLKELEKTSRDLKKRLEELDRELKALVEKVERDLEELRK

SEQ ID NO: 1956 - protein, 177 aa, Artificial Sequence
  Synthetic
ELREDVERVVDEIRRLVEENVRRIDEVAKDIKRLADDNVRRVKRDHMVLHEYVNAAGITGVTEVVDELREEVRKLSEDNRRHSRELIERVKKLLKELEEHSRDLKRRVKELLEDLKRKGVDERVLKKLKEVIEDVERKSRDALRRLEEAIRRVRRESERVNRELDEVIKRVTEELKK

SEQ ID NO: 1957 - protein, 173 aa, Artificial Sequence
  Synthetic
SLEELLEEARKTVERLIRESERVLRESEERVRRLIEELERVVRRDHMVLHEYVNAAGITEALKELEKLLREDSKRVKEVLDDLRRDLERNKRRNEKVLRELEELLKRLEELVREGVREEELEKLLREIEERVKEMLKRDEDTLREIERKVKEAVRDSERTLEEIEKRVTEEKT

SEQ ID NO: 1958 - protein, 179 aa, Artificial Sequence
  Synthetic
STREDARRLVERVRKEVKRLLKKNSDLLREVTERVKTLNERNRRDHMVLHEYVNAAGITDERDVERLLDRARKLVKESEDLIRKLLKDLRELVRRSEKDIDELRKELKRLLDELRARATDKDLERVVREIEKEIRDLIRELEENVKTSEKLIEDLIRELEKSVDESRKRVEELVKELRT

SEQ ID NO: 1959 - protein, 180 aa, Artificial Sequence
  Synthetic
STEEVLDEIRKLHKTLTEDIKRVLREIEELHRRTIEENKEVLDRDHMVLHEYVNAAGITDTPNVEKLLKDLEKSAKENEEHNERTLREDDRVLKEIRRRATELLKANEEMLRRIEEVMRAGKVDAEELLRESKEAIKEVKRVLEELRKESKRVVDETRKLSEENLEHSERVLRKVEEDLR

SEQ ID NO: 1960 - protein, 180 aa, Artificial Sequence
  Synthetic
SKEEVLREIERLHKETIRRIEEVLREATELHKRLTETNKRVLERDHMVLHEYVNAAGITDTPNVEELLRELKDALDKVRDHNRKTLKKNEDVVREIEKEVRELLKEDEDVLRRIEKVMRDGRVDARELLEESRREVERSEKEVERLLRKSRKVVEEVRKLSEENDREVKKILEEVKRRLD

SEQ ID NO: 1961 - protein, 178 aa, Artificial Sequence
  Synthetic
DDLERVLKEIKKAADKIREDNKRTADKIRKRVKELDDETRDMLRDHMVLHEYVNAAGITREEARKVIEELKKLVDEVRKRNEKSIEELKKLLKEDRDLMRRVIEELEDLVRRLREEVRDDEALRRVEEEVERLIRDLRRVLKETSDRVRELIDKHRRLSEEVEKDVKRLIDELKKKTD

SEQ ID NO: 1962 - protein, 187 aa, Artificial Sequence
  Synthetic
SEKERLKEELEKLSKEIEDILRDDKRSDDELRRRLRELLEKDRRDHMVLHEYVNAAGITARKRVSEDELRAIKKEIEDLNRRNEESLRAIEEKIKRLNDENRKSLEEIRRRLKRLVEEVDELRKRDNREELLRRLLEKLKRMAEKLKRDIEDNNRKLRKVATELAKEIEDNSEKLREDAKRLSEKIK

SEQ ID NO: 1963 - protein, 175 aa, Artificial Sequence
  Synthetic
SEKEDLERELEEVRRRVEESLRKNEEDVKRVRDELKKLLDENRRDHMVLHEYVNAAGITKRVLDEADRLLKELEDDHKKLEEDAKKALDELREEHKRLEETLRRMLKRIKEVLDRESDKMEEIKKEIEKILRDIERVSRELNKKLEEIVRRLKKVSDELNRRIEEIAERVRRRRK

SEQ ID NO: 1964 - protein, 175 aa, Artificial Sequence
  Synthetic
SEEDELRRLLKEVNERVERLLDEIRKELEKIAEELRDLLKKNERDHMVLHEYVNAAGITEEIKKDAERALTELKEEHERLDREAKKDLDRIRKELERLEEEHRRVSERIEEVLDKESDKTEDIAREIRELMERTRRVIEEIKKELRDILEKLRRVSEELNKKLDEILKRIEDRTR

SEQ ID NO: 1965 - protein, 177 aa, Artificial Sequence
  Synthetic
SAIEKVKEVVERVLETVRDSVRRSHEESKRLIDKVRKRLEEVRRDHMVLHEYVNAAGITERMVEKLERDLEELLKEIKDTIDRIEEELRTSNRRLKETNDEIAKRLEELLRELSRDRDKDAVEDVLRRIEELIRDLNKKNDDNVRRVKEVIDRAEKLVRDLLREIRKLIEKLIRDTE

SEQ ID NO: 1966 - protein, 174 aa, Artificial Sequence
  Synthetic
SEIEELEKRIDELLKELRDLSRRIAEEVKRLLEELKKLSKDSERDHMVLHEYVNAAGITEEELRRVEEEVERVVRESRKLNKETEDELRRLLEEIKESNDRVEKRARELKKLLRDGKDVEEVLRRLEKLVREDKERLKKVLKDARDLIKKDKDLNEKLSRELEKLVRELEERAR

SEQ ID NO: 1967 - protein, 174 aa, Artificial Sequence
  Synthetic
DEEEDLERRIKKLLDENRELLKRIAEELRRLLEELRRLTEESARDHMVLHEYVNAAGITEKDLRDVAEKVKKVLKESEDSNRDVKRKLEKLLRDLERSTERLEREARKVRKLLRDGKDIETLLRELEKLSRDNKELLKKIEKEIRDLIKEDKERNRELSERLRKLVEELKKKAT

SEQ ID NO: 1968 - protein, 177 aa, Artificial Sequence
  Synthetic
SEAEKVVEELKKLLREVEKKIRDHTEDVKRILEELERRLRKHSRDHMVLHEYVNAAGITDDTVRKVKEELDRSHEKLREELRKVAKELKESNEELERDLKRLVEEAEDRLRRLKDRVSEKVLRELEKILEDIKRTLDKLLRENRETLKRIEDRLRELLEENRKLLEKIERELRERSR

SEQ ID NO: 1969 - protein, 174 aa, Artificial Sequence
  Synthetic
EELERILDKVRKVIEEVRKRLRDDLRTVEKVLKETEEVLRRAARDHMVLHEYVNAAGITGRDRREIKEELKKVLDDLRELLRALEEKNRRVNKENEDSLRKIEEDLRDVLRKLEEEIKGREVLRKVRELLRTIREEVERVLRKSNELSTRIKKRIDDVLETLERLLKELDDKLR

SEQ ID NO: 1970 - protein, 178 aa, Artificial Sequence
  Synthetic
SSKDEIRRRVEEVVERSDEIVKRSREHVKTVVDELDRVVKELERDHMVLHEYVNAAGITGGSEETLKRVLDELREILKELKEEVKKVKRKLEKVVKENRDTIREVEERNRKILDELRKRGVEERALREVEEISRKSEEKLRRVLKESEDIAKEAEDRLKTVLERVERIADEVLKRLTK

SEQ ID NO: 1971 - protein, 175 aa, Artificial Sequence
  Synthetic
SEVDEVLREAKRIVDEVHKDNERATEESRRLVKKVHEENEEMVRDHMVLHEYVNAAGITEKLVTEILKEIEEALKEAARRNKEVKDRLRELSRRVSERNREILEELKERLDRVRERRKDVKELEREVEKLLKRIEESLRRHRKENKRLLEELDRSLRELAKIVKEVLDEIRERTR

SEQ ID NO: 1972 - protein, 186 aa, Artificial Sequence
  Synthetic
SEVDEVRKTLEDLLRRLDEENKDIIRRNKELLDDLDRKVREAIRDHMVLHEYVNAAGITLKDRETLTRIIEEIEKRARELIKRLRDEIRKIEEESKKSIEDSRKRNDEIRKRLEELIKDLRDKIKDSEELARRITELEKRVREVIERLKEKNKRLEDDSRRVITELRKKLKDLEDRVREEIEELRK

SEQ ID NO: 1973 - protein, 184 aa, Artificial Sequence
  Synthetic
ELIKKARKDVEEVRERSERLVDELRKRNKKLADESRRLIDKLRRDHMVLHEYVNAAGITRRTKDVLKEIEDLVRELERELRRVVKESSDKVRKLIRENEKVVEESSRLFRDLVEKLRRVVEERNDKKLMEEVERLIKRLEDVNEKSERDVREINKESERVNEETEREVEDAIRKLREVLRRAKK

SEQ ID NO: 1974 - protein, 186 aa, Artificial Sequence
  Synthetic
KEVEDLERRVKEILDRMKRLIDENRKKIEKSIRELERLIDENRRDHMVLHEYVNAAGITGGDDARTLRERVRKIIEDVEEHSRRSTEEVRRIHKENKEHSERSSDEIRELLRRVEELIEEVKRRLRDKEMEKKLEDIVRRVREVVRRAHETNERLVDRSRKAVEKAERTNRRLVEEIRKVAEEVRK

SEQ ID NO: 1975 - protein, 186 aa, Artificial Sequence
  Synthetic
DEIRELEERVRRILDELRRLVERNREVIERSIRELEKLLDRNRRDHMVLHEYVNAAGITGGDDKKTMLDDVRRLLREAEDHSRRSSETAKRIHRENEEHSKDSSRKVRKLIEELRELAKKVEKEITDERVKEAIKELVKDVDRVMREVDRANRELTKTSKKVLEDVDRTNRRLVKEVRDVVERARK

SEQ ID NO: 1976 - protein, 186 aa, Artificial Sequence
  Synthetic
KEVEDLERTVRTILKRMRELITRNEEEIRRSIEELKKLLKENKRDHMVLHEYVNAAGITGGDDKKRLVEEIKRLLDELRENSKRSSDRAKEIHERNKRHSEESSRTIEKLLKELRDLVRDVERKLRDEDAKRKLDELTKRVEKVVREADERNKRLTKRSKEVLDEVHRANEEALKEVEEVVRRVTK

SEQ ID NO: 1977 - protein, 185 aa, Artificial Sequence
  Synthetic
SAEELLRTIEKRIEDNHRRLEEILEEIARLIEDMLRTDERIVRRDHMVLHEYVNAAGITGVPEEVLERVRRELERLKKELEELRRRSEEKVKELKRRLEEIRRKLEEEHRDLRRKLEELRRDLGDKEEVVKKLVEDVERELERSLREAEDLLRRVEEVIRTSKKESKDVLEKIERLLRDLERRTR

SEQ ID NO: 1978 - protein, 176 aa, Artificial Sequence
  Synthetic
REAEEAKEEVEELNRRNKKELDDARRRVDELDKRNKDRLKESSRDHMVLHEYVNAAGITGRSDDRLREKIERMLKTSADELERLKEENKRALRDLAERLRELIERNRRKLEEITRRTVPDKDVLKRLAELIKESIRELERVLEELAEKIDRSLKELDDVLRKNETDLKRVIEDLKR

SEQ ID NO: 1979 - protein, 182 aa, Artificial Sequence
  Synthetic
DLERRLDELLKRIEDRVRELVRTLEESLRELERRVREIIRRLERDHMVLHEYVNAAGITNKPDKAVKDDVRRLRENADRLNKRVREELKKLREDVKRVNEDVKRELDKLAEEAKDMLRKLREAGIDERVIKKAEEDVRRLLREIEEVSERHKREVDRLEREIEEVSREHKERVEKLLREIER

SEQ ID NO: 1980 - protein, 179 aa, Artificial Sequence
  Synthetic
RLEDEVRKMEKEVREEVKRLEDESRKVLEESRRNLDKLREESKRDHMVLHEYVNAAGITGLDERVLRELLKRVREVHERNRKLLDEVRRASEKVHEDNRRILEEVRKTVKDVVDKLRRVDAKVVKELIDRVRKILEDVEREVKKSIEEVKEINRRLNEEVKKTIEEVKEIVKEVTERAK

SEQ ID NO: 1981 - protein, 183 aa, Artificial Sequence
  Synthetic
SVDERLDEVLERVKEDMDRNRRKNDESLREDEENVRRNKKETDRDHMVLHEYVNAAGITVKDERVKEFLDRVLEEIRKSAEEVKTIIDEVHKESEETVRRTKKIIEEVLRRIEELIRRVKKDRKEEVVKTVEEDIKRLLKEVNKVSDEAHKRNKELNERVNRVNKEAHKRNEDLLREAERKVR

SEQ ID NO: 1982 - protein, 183 aa, Artificial Sequence
  Synthetic
SIEDEIRKLKEDIKRVLDKVRRDNERLKERLDKVLEDIRRSSERDHMVLHEYVNAAGITPVDERLVRKVEEAVKRLKEHNEDSTRRVEEVIRRLKEESEESVRKTEKVARDLERELDEVLTRGGEERVREVIEKLKETLERLKREDKEVADRAEKLLREAEEHNKRSLDESRRVLEELDEEIR

SEQ ID NO: 1983 - protein, 183 aa, Artificial Sequence
  Synthetic
SIEERVRELMRDLERVLKEIREHSKRVIEEAKRVLEEIERNSERDHMVLHEYVNAAGITPVDETLVREVEEAVKKLKEHNKRSSDTVRDAVRKLVERLKESSDRATELVKDLKRKLEEVLRRGGEKELEEVERRLRKVLEDLRRNNKEVVDRLKEVLERLKEHNRRSLDESRKVLRELKERIR

SEQ ID NO: 1984 - protein, 174 aa, Artificial Sequence
  Synthetic
SESDEVIRDLARLLDELARHVDDSVRRMDEVVKRSTREADELARDHMVLHEYVNAAGITERVERMVAEIERLVAEVLEELKKKYEKLKREVEENLRRLEETVRDIVEKARKVTEKGVSKEKIDRIIRELERILEEAKKKHEDVLRRLEDSLRRVAELLKAALDRLREIVDRLRR

SEQ ID NO: 1985 - protein, 172 aa, Artificial Sequence
  Synthetic
SRAETVLKEVTDKIKKLADSSDELLRRNKENIDELKKSSEELLRDHMVLHEYVNAAGITEETLEELIRRVEAELEAHHRELEKNSREDEKRNRDHHAKLEEEMRRVEERLEREGIDDEVVKRVRDLLDTVRRRNEKVNEDVKRMNDKLRRDNEDVIRRVEKLLRELEEKRRT

SEQ ID NO: 1986 - protein, 174 aa, Artificial Sequence
  Synthetic
DEEEDLERAIKKLLDENRELLKRIAEELRRLLEELRRLTEESARDHMVLHEYVNAAGITEEDLADVAEKVKKVLKESEDSNADVARKLEKLLRDLERSTERLEREARKVRKLLRGGKDAETLLRELEKLSRDNKELLKKIEKEIRDLIKEDKERNIELSERLRKLVEELKKKAT

SEQ ID NO: 1987 - protein, 184 aa, Artificial Sequence
  Synthetic
DEIRKVVKEITDLLKASNDKNRKVVEEIRDLLRKSKKLADELVRDHMVLHEYVNAAGITSGDKETAEDIVRRIIEELKRILKEIEDLARRINREIERLVEEVERDNRDVNRAIEELLKDIARRGGSEDLKRVEERAREVSRRNEESMRRVKEDADRVSEANKEVLDRVREEVKRLIEEVRETLR

SEQ ID NO: 1988 - protein, 181 aa, Artificial Sequence
  Synthetic
DAVEEAEKLIRKVIADSEKLLRDLADLNAKSIRRSEKLVEDDRRDHMVLHEYVNAAGITGGSEEELRALLKEVEDTNRASHETNKRLLDEDRALNKEVHDRNEKLLRDIKRLVEEVAKGIDSEELLRRIKKLLDEIKKAIEDSSREIKRLLEESERVMKRSSEDIKRTLDDTRRVVEEVRR

SEQ ID NO: 1989 - protein, 177 aa, Artificial Sequence
  Synthetic
SEDEDLDRVAEKLAREHKKSVEEIKRVLKSADEESKKLVRDTERDHMVLHEYVNAAGITNIDEELVERLKKKIEDILRTLEERHKKLIKELREILKRLSDESRRLAEETEKVLEDLERKGVDEEVLKKLAEIVRRVKEENRKVNEEVEKRLRELEEENKKVIEDLKSTVEELVERLR

SEQ ID NO: 1990 - protein, 177 aa, Artificial Sequence
  Synthetic
SKEDRLREELKKLLARLAEEIERLKRALEESNKDLKRTIDASERDHMVLHEYVNAAGITEELLRELERSTAENKERAKELLKRHEDLVRKVEKELADLLRRLEEIVARVDEALKRGISEEELDKLLKEARDLIREIEKRLEELLKRVEKLTEDAKRDLERSNREHKELADRIKETAR

SEQ ID NO: 1991 - protein, 238 aa, Artificial Sequence
  Synthetic
EEDERLTKRVEEIKRENRELLRRLEEEVKELERKSEKIVRDLKRDHMVLHEYVNAAGITTELLVEELEKLIREILKLSEDHNRTLEEVVRKIEDVLRANLERLKELVDEILKALKERGKGDSEELKRKVEKVARDYERLLRKLREVVKRILDESKRLDEELEERLKEVLKKLEELIKRGGPDKDVLTELKRILDELLKLVEKLIRRNLRLLEELLRLVREILRTSNEILEEILKDARR

SEQ ID NO: 1992 - protein, 245 aa, Artificial Sequence
  Synthetic
TEEEVLRKVEKLIKDLLDVLRDLLRASEEVVREALRVLEELIERDHMVLHEYVNAAGITSRESVESALAKNEERLKKILEDADRVLDKWRRLLEELSKKAKAVLDEVRKRLEEIKREVPETEKLRTLLTILEEILRALEKIIRDILRINERLLEKLKRILERLRETNREIDERIRKLVEEARGGSEEKLRRDLTETKKELEKRHEDLRRELEKLLRDYKRELEEIERALEEIEKTLKRRADETRR

SEQ ID NO: 1993 - protein, 250 aa, Artificial Sequence
  Synthetic
STEEILKRVKEILDELAKELRDIIRESLRTIEELLDELRRILERDHMVLHEYVNAAGITVKDSEELLRRLKRLLEDLRRAHEELLKRLKEAVDEHRDRLRKILEELERVLKELRKRIEELRRSGDRISEKDVLRKLEEVLRKALEILERLLKKIRESARELLKIIEEVLDANIKVMEEALKTIKELLKDGPDEVKRRLEEKERRIRTRYEELRRRLRKRVKDYEDKLREIEKKVRRDAERIEEELERAKK

SEQ ID NO: 1994 - protein, 247 aa, Artificial Sequence
  Synthetic
SEKEELLKLIKRVIELLKRVLEEHLRLVEDVIRRLKELLDSNERDHMVLHEYVNAAGITVRGDKEELDRIKEKLEEVLERYKRRLEEIKRDLERMLEDYKRELKRIEEDLRRVLEEVERIATRGEGPAEALIDKLRKILERALRELDKLSKKLDELLKKVLEELEKSNREIDKLLKDVLRRVEEGGASEDLLRKAKKVITEVREKLKRNLEDVRRVIEDVKRKSARILEEARRLIEEVERELEKIRK

SEQ ID NO: 1995 - protein, 238 aa, Artificial Sequence
  Synthetic
SEAEKIREALETNLRLLEELIKRLKEILDTHNELLRRVIETLERDHMVLHEYVNAAGITEEVLREVKRLVDELRKEARRVLDEHEKLVRKIKKEAEDVARESEEIIKEVEDKLKGLDREELLERVRRVLKKSDDLIAELVRRALKILEELTRLLAELLKKVVEILRRIVELVERVLTKKGAPKEDLERLRRKVEELEDRLRRLLEKLARDSAELMRELERILDRYARESEELDRRLAE

SEQ ID NO: 1996 - protein, 247 aa, Artificial Sequence
  Synthetic
SEAEDLEELIKELAELLKDVIRKLEKINRRLVKILEDIIRRLKRDHMVLHEYVNAAGITDKDILRDLERRLREILEESDRLLEELKRRLEEILRKSKELLRRLEEVLREILKRAEEVKRSNLPKEELIKEIVKLLEELLRVIEKILEDNIRLLEELVEVIKEILEKHLRLLEELVRVIERILREVGKDKDEAERRRRELKDKLDRLREEHEEVKRRLEEELTRLRETHKKIEKELREALKRVRDRST

SEQ ID NO: 1997 - protein, 240 aa, Artificial Sequence
  Synthetic
SDKEEIKRRVEKTARDLETEHDKIKKRLEDTVRDIKRELDELLRDHMVLHEYVNAAGITGDGDATDLVDKLLETVKRLNEEVLRTVKKIADELRRLVEEVLRVLRESNETLARLLEEGNVGDEVRERLEEVLRRTEEIIKTLEEIVKRLLDELRRLVEELRRISKKLKDELDKIKEKGKDEKRLIEEVVRLLRENLDVVRRILEALAKLIKELLEALEEVLRRNKELIRELLRVLDEALK

SEQ ID NO: 1998 - protein, 240 aa, Artificial Sequence; identical to SEQ ID NO: 1997
  Synthetic

SEQ ID NO: 1999 - protein, 248 aa, Artificial Sequence
  Synthetic
DEDRIIEEIARLLEELLRELLELIKKLIETNRRLNEEHERAVRRDHMVLHEYVNAAGITGISDEKLKRIRERLKRALDDLERLHREINKRLEDLVRELEKLVREILKELKDALEELRRASARAGGEEVLRRLEEIVKKLLDLVRRILERLKEIHKDNVRLLRELNERLTRIVEDLVRLIREILREAGVDEKIAEEIERELEELRRMIKRLHEDLERKLKESEDELREIEARLEEKIRRLEEKLERKRR

SEQ ID NO: 2000 - protein, 248 aa, Artificial Sequence; identical to SEQ ID NO: 1999
  Synthetic

SEQ ID NO: 2001 - protein, 238 aa, Artificial Sequence
  Synthetic
DADELLRRLAEEVERVIREAEDLLRRWKETIKKVLDDLKRLLDRDHMVLHEYVNAAGITKGDEELAKLIKDLLDTNEKVNRDLLRLIKKLLKDAERVNRRLLELIEELLEELKRVAKDLGLREEADKKLRDIADRARKELEDYERRLKELLKTVEDALRKAEEDSRKLKRDVEELLERGRLRKDDLEDILRKNLDRLRKLLERLREILRENLEALKKTLKRLEDVVREILEDLKRERK

SEQ ID NO: 2002 - protein, 231 aa, Artificial Sequence
  Synthetic
DKAEVLREALKLLKDLLEELIKIHEESLKRILDLIDTLVKVHERDHMVLHEYVNAAGITERELRKVERMATESLRTIAKLKEELRDLARRSLEKLREDLKRVDDTLRKVEEKVRRTGPSEELIEELIRTIEKLLKEIVRINEEVLKAVRELLKTLLKLSEDVVRRIEEILRKGGVPEEIDRELKRVVEELRRLHEEIKERLDDVARRSEEELRRIIKKLKEVVKEIRKKLK

SEQ ID NO: 2003 - protein, 231 aa, Artificial Sequence; identical to SEQ ID NO: 2002
  Synthetic

SEQ ID NO: 2004 - protein, 236 aa, Artificial Sequence
  Synthetic
STREKAKKVLDTLRADNEDMKRVVEKILRALKRTNERAEKLARRDHMVLHEYVNAAGITEEALKEIEDTLKRVLEEIKRLLDESKKLLEDVEREIREILKTSEELLERIEREIETVGSDEKTLAEILKRLLELNEEMNRRLLKILRDLLRLNEEVIRRLLAVLERLLDALKEALDRGDVPEDLLRKLEEELRRIKEKLRKALEELEREHRELEKELDKLHDESRKEHERIEEELRR

SEQ ID NO: 2005 - protein, 236 aa, Artificial Sequence; identical to SEQ ID NO: 2004
  Synthetic

SEQ ID NO: 2006 - protein, 239 aa, Artificial Sequence
  Synthetic
SERELIERWLELHKEILRLIRELVERLLKLHREILDTIKKLIRRDHMVLHEYVNAAGITKEAKDELREIAKRVEDKLEKLERESRKVEEDLKRKLKELTDESDTVEKRVRDVVRRGTQSREEIAEELLRLDRKLLKAVEELLKEILDLNKKLLDDVRAILEETRRVLEKLLDRVRRGERTDDERRTLTELLKRMEDILEKVERTLKKLLDDSARMAEEVKKTLKELLERSEKVAEDVRK

SEQ ID NO: 2007 - protein, 239 aa, Artificial Sequence; identical to SEQ ID NO: 2006
  Synthetic

SEQ ID NO: 2008 - protein, 231 aa, Artificial Sequence
  Synthetic
SKEEEVEKVLRKWEEILRRLIEENKRANDKIRREYEELVKEIRRDHMVLHEYVNAAGITEEVKRILEKLIKLLEDILEYEKENVERLIELNERILRELKKSVEELKALVTRVRRDGLPESEVRKLVEDVLRKNEELLKEAKKAWRDSIENLKRVLEEVAKLVKTVLREIEEKIDDEDVVRALIEVIERLLRVAEEVIRRILKVNTELMRVDERSIRESLKAISEVLKVLDT

SEQ ID NO: 2009 - protein, 231 aa, Artificial Sequence; identical to SEQ ID NO: 2008
  Synthetic

SEQ ID NO: 2010 - protein, 245 aa, Artificial Sequence
  Synthetic
DEDELIRKLLEDLKDIVRKILELIERDLRDIERVVRRIVKVIRRDHMVLHEYVNAAGITVPRTEELERVIKRIEELLRTSEEELDRILKEIEELLRESRRRLEEVVSAVEELLRRVEEIVDKGRESKEDVIKLLREVVDDILRLVEEVVRTNLEIIKRILELIERVIRLNLSIIRDILRLLEGTVDSELADRIRKLIEDLERHTAKVLEDVKRAITELRKNSKDILEEVRKLIDELRKRIKEVED

SEQ ID NO: 2011 - protein, 247 aa, Artificial Sequence
  Synthetic
RDRDVLRKVKAEIEELVARIEKVSRDALSEVKRLLDENRKIAERDHMVLHEYVNAAGITRGDDEVVKETEEVLRDNHRLLEELIRRLIKVLEEWLRRHKKLLDEIRELLKEILRLVKESGVSEDLLRRLKRVIEELDKKLKESEEKLRRVVEKAKEDLKAVLEEHRKVLEDLKRALEEVREKLRERGSEEVVEELLRMLKRVAEEMKRVHDDLSRAVEKVVRDVVRVDKELLDELARILRRLEEVIT

SEQ ID NO: 2012 - protein, 247 aa, Artificial Sequence; identical to SEQ ID NO: 2011
  Synthetic

SEQ ID NO: 2013 - protein, 231 aa, Artificial Sequence
  Synthetic
SKDEELARLLEELVERWRKIVEDLERDHRRLVKEIRELVERIRRDHMVLHEYVNAAGITERIVRLIEEIAKIIEEVLKEIVKLVERAVRENVRVLRESVRLVAELVETLARLLRGSDERVTEAIKKVLDTSEDLIRRVIKVNEDILREIAKLVEEVLREAERILTEIKKEGDREEIRRILEELKRIVDDVLRIIARILKLLRDLTRRLAEVAKAVHKLLEELLRKLKEDTR

SEQ ID NO: 2014 - protein, 238 aa, Artificial Sequence
  Synthetic
SEIEDVIRRLRKILEDLERVSEKLLREIKKILDEARRLNEEVIRDHMVLHEYVNAAGITGSGSKEELAKLVEELIRELAKLAKEVDEIHKRIVERLKALVEDAERIHRKIVETLEEIVRGVPSEELKRVVEAIVEVIKEHLKVLADVIRRIIKAIEENAETIKRVLEDIVRVLELVLRGEGSIEDLVREVERLIKRIEDSLRELEKTVRELLKRIKEASDKVREDVDRLIKELKEAAD

SEQ ID NO: 2015 - protein, 237 aa, Artificial Sequence
  Synthetic
KEKEDALKKLEDLARKSREDLERVLRKHKKILDKIEELLKRVLRDHMVLHEYVNAAGITESEILKELARLLREHHEALRRLIEELRRLLEEHHKILEDLAREHKRLLDELIKVVADGVDKDELERIIKELRERDKKLVDDLRKVSEDLLDAVRKLVEDLERISRELLRRVEELAKGIDEELAREVERVIKELLDKSKEILERIERAIDELLKVSEEILKLSEDASEELLKILREFAK

SEQ ID NO: 2016 - protein, 237 aa, Artificial Sequence; identical to SEQ ID NO: 2015
  Synthetic

SEQ ID NO: 2017 - protein, 241 aa, Artificial Sequence
  Synthetic
SEKELLKEILDRIRELLEDDNRLLKRIVDEIRKLLEEWLRVHKRDHMVLHEYVNAAGITEDVIRELTRALKETEEDVDRVIRTLEKLLKEVLDAHEEVVRKLDRLLKEVERLVEGGDAEEVVRDLLRVVKEILDESKAVIDELARVVDEILKLLEEVDRKLAKVVKEILEDVLRGSGDDEDAVRKIAKIIEELKRLLEDLARDTRRVIEEAKRLLKEWRDRNKEVADTLKKLLEDLIRKIR

SEQ ID NO: 2018 - protein, 241 aa, Artificial Sequence; identical to SEQ ID NO: 2017
  Synthetic

SEQ ID NO: 2019 - protein, 240 aa, Artificial Sequence
  Synthetic
DREKSVRDIEEDLKRVLDKLRRRVETSKEELKKVLKADKENADRDHMVLHEYVNAAGITIDSEVLRAVREIVKRLVEVVRRYNELSEKIIRDLVRVNDRVLELLKRIVKRLIDVVRELEKIGDKEKALRRLEEVVKEVKRRIEELLKELEDVHRELVKILEEVNEDLKRVATEVKEIIKTGIKSSEVAKELDEVIKRLLDNLKENTDRLKEVIDRNLADLRDLAEELRAVIERLLEDARR

SEQ ID NO: 2020 - protein, 240 aa, Artificial Sequence; identical to SEQ ID NO: 2019
  Synthetic

SEQ ID NO: 2021 - protein, 237 aa, Artificial Sequence
  Synthetic
REDEVLRDIERLLREIEEKIRRILEESTAELRKVEEEVKRIIERDHMVLHEYVNAAGITGIDEELRKLLDEVLDKLTKLIERNKRSLERILELIKRIIDENLEVLRDIIRLLEELLKATKDNGVPKDEVIKLVEDVVRRIEELVTRVVARNEKLVKDLDDLAKKNVRENEELLREIDRGLDEDLLEKIKRVIREHIKALEKLARDLKEILRRHIEALKELARDLAEVIRKLLEDVKR

SEQ ID NO: 2022 - protein, 237 aa, Artificial Sequence; identical to SEQ ID NO: 2021
  Synthetic

SEQ ID NO: 2023 - protein, 243 aa, Artificial Sequence
  Synthetic
SEAERLADEVRKAVKKSEEDNETLVREVEKAVRELKKNNKTWVRDHMVLHEYVNAAGITGQVSDRDLLKELEEVLRRVLEALAENHERTEEILKRWLDRYAEDIERLRKVLKEVIEALKRGGSDDKRIVDELEEILRRNEDVLDKIAKRLRRLLEEDRRLLERIVRELKRLLDDLDRITKEGKSEELVRIAIEVLKRLLEIIEELVRLNNEILERLLKIVRELHKDNIKILEDLLRIIEEVLR

SEQ ID NO: 2024 - protein, 245 aa, Artificial Sequence
  Synthetic
SEKDEVTRRIRELLKEAEETNREAIERIKRLLDRVREAVEEVARDHMVLHEYVNAAGITGLQDDEALLKLLIDALREHNRLSTELIKILIDVLRTILKIIKDVLATNIEIARRILDLVRRLAERGGLDDRLVKEVEKLVRTAERLHRDALRKVKRLVEELEKRLRELVKTDHDLVRRLETLLRRGSGSKEDLLREIARILAESLRLIRELLKEIEKIVKEIIELLERLNDELRKIIEAILETTKK

SEQ ID NO: 2025 - protein, 239 aa, Artificial Sequence
  Synthetic
SAEDLVRRVKDLVDKLEDKLRKVVRTNERLWEEIRKRLEELVRRDHMVLHEYVNAAGITDKDKDELIEEAKSLEDESNALVEKLVRDIERVLAESNKLLDTLAKEIEEVLEEIVELVERGSGSDKEAREKLEDIKARLKEVLKKLREESKRIIDELRRLLEEYKRLVKEIRDRIEEVRKRNSEIRVLVELVRRHNKVLKELVEELEKLVRDHNRVVEEVVRELVELLSRAVEVIKEVVK

SEQ ID NO: 2026 - protein, 247 aa, Artificial Sequence
  Synthetic
DEERLAEELERVLDRNRKLLEEALRELRRVIEENRKSVKRLLDRDHMVLHEYVNAAGITSRGDSDEELRKVIEDLIRKLTKVLDKVRSLVEENIERLARVLEKLERLARENLEDLKKVLDDVDKKLKDRRLVERLAELVRELIEVNKEILEMLKEIVRELLEINRTLLERLKDLVATALEIIKLLARGDGTEEDVERAVKEIRDRLRKLLEDYERAVRRLEDKLRRVRERYEAVLKRIKDKLEETKR

SEQ ID NO: 2027 - protein, 243 aa, Artificial Sequence
  Synthetic
SRVEELKKLIEDILRISREVVERIARVAEDIHRINRRVLDDLRRDHMVLHEYVNAAGITKVSGTEAAEALRDTIRRVVDEIRKLLEEHEKRSAELLEEIRKLLEDILRRSERAVEEIRELLKKGVSTKDVLRIIEEILREHLELLERVVRRIEEILRELLKTIEEIVKRIKEILEELKEVLKRGSVGDDEVEREIRRVKEDLDRILEEYRRLLEEIKRKLEEILRRVEELHRRLRRKLEEIDR

SEQ ID NO: 2028 - protein, 249 aa, Artificial Sequence
  Synthetic
DAEEVVKRLADVLRENDETIRKVVEDLVRIAEENDRLWKKLVERDHMVLHEYVNAAGITGVPEELLDRLAKVVKSIVEKAEKILERLNRVSKAIAEKLKTIVDELNEVSKEIVKRAEDILRKGKDKETVLRALRTLVKEYADLSKEVLERVERIVREYVKLSDEVVKSLAEIVEELIRIIEDLLRKGNLDEDVKRALEELVSRLRKLLEDVKKASEDIVREVERIVRELAKRSDEILKKLEDIVEKLRE

SEQ ID NO: 2029 - protein, 240 aa, Artificial Sequence
  Synthetic
DKDKRLEELLKRLKELNDKTFEELERILEELKRANEASLREAERDHMVLHEYVNAAGITKRLAELLKKLLDDLKRLLEEYTRTNEELLKRLRELLERYRETNKKLLDLLRKLLDEARRTGTDEDLLRRLEDILRKYEDEVRRLLKELEDILREYEDTSRRLLEELERIAKEAAERVSRGSDKDVKDIIRTILEVARDLLRLLEEDSRTNSEVVKRLLDLLREDSKANSEVVKRLLDVLRE

SEQ ID NO: 2030 - protein, 240 aa, Artificial Sequence; identical to SEQ ID NO: 2029
  Synthetic

SEQ ID NO: 2031 - protein, 240 aa, Artificial Sequence
  Synthetic
SKEETLKRLLDELEKRNRETVERLERLLKELEDRNRASLEELERDHMVLHEYVNAAGITKELKDTLARILEELRKLLEEYFRKNEELLRLLRKLLDEYARTNEELLRLLEELLDTARRTGGDSELLKRLEDIAREYEKRVRRLLEKLKDILDKYRKTVEELVRKMEEILKEAKKTISRIGSEEVKDIVRAMEEVIRRLIEILRRDVELNLDVAKKLLELLKEDSKLNLDVARELLELLDR

SEQ ID NO: 2032 - protein, 240 aa, Artificial Sequence; identical to SEQ ID NO: 2031
  Synthetic

SEQ ID NO: 2033 - protein, 243 aa, Artificial Sequence
  Synthetic
SEAERTKESLKKVLKALVDLNRELLRKLEENMRELTKLNEEVKRDHMVLHEYVNAAGITDKDAEREAERLMRELDKSSEDTARETRKLIEESKKSTRRTEEEARKLTETLDRLAKGGLPREDLLRALVRLLEELARLIEEDVRRNAELVKRHIELVERDVAELLRLIKELVDLLADLAEKGSRTEEIRKIVEEILKEIKELADRYREEVRKSKDKLRSILEDYKRKVDELKERLRELIEEVET

SEQ ID NO: 2034 - protein, 178 aa, Artificial Sequence
  Synthetic
REVEEIERRLRELVRRSDELVRTVAEELEKLVRRNKKLVEDVMKRLRDLVERLRELVDAGLDKKEAEEDVRRLEEEIRRLLETLKEHSDRTRKKIRELVERLRDVNRKVNEEVKKLIRDRDEVRKVLKDVTELSKTSEDKLEKVVREVKRKLDEVNRDLERVVREAKKLLREVRERLE

SEQ ID NO: 2035 - protein, 178 aa, Artificial Sequence; identical to SEQ ID NO: 2034
  Synthetic

SEQ ID NO: 2036 - protein, 178 aa, Artificial Sequence
  Synthetic
DEVDEIRRRLKKLLDDSRKTSKDIERRLRELLDRNRRLVERVEEELRKLIKELEELVRSGLDREDVKRMVKKIEDEIRKLLEDLREHSKRTLEEVKRLLEEDRRTNEDLNREIERLDRRREEVEKVLKEARDVSEDSKRETTEVLKEAKKALEDINKRLREIVETVREALERVERALT

SEQ ID NO: 2037 - protein, 178 aa, Artificial Sequence; identical to SEQ ID NO: 2036
  Synthetic

SEQ ID NO: 2038 - protein, 178 aa, Artificial Sequence
  Synthetic
DEKETVKDVVRRLVEKLEEVVKESKKLVDDLVKRAKEIVRESEELVRRNVRRAEEVARERNDEETAKRLIEDIRRTTKEIIDTSRRLIEELRRLLEELKRRSEELIREIEKELKDVADRLVRDEKVLKELEDAVREVKERIKKTNKELEEMVRRVEEEIRESDERLKKASEEVEEKIR

SEQ ID NO: 2039 - protein, 178 aa, Artificial Sequence; identical to SEQ ID NO: 2038
  Synthetic

SEQ ID NO: 2040 - protein, 178 aa, Artificial Sequence
  Synthetic
SEMETVLDDVRRVVEESEELVKRARDRVKKLVDDLKRLVEKNEEDVKRVVDELDKLVEKVRTEELLERVRKTIERLADEIRRSTETIEREITKIEEEIERIVKTIEDRDRRLLEEIERRGAGEEVLEEARRLSERSREELRRVLEEARRLIRRVREELKRVHDKARRLVERVEEKLRT

SEQ ID NO: 2041 - protein, 178 aa, Artificial Sequence; identical to SEQ ID NO: 2040
  Synthetic

SEQ ID NO: 2042 - protein, 178 aa, Artificial Sequence
  Synthetic
DEVEEVLERVKKVVADSEELVKRNRERVKKVVDDIRDLIRRNAETVKEVVKTIRELVKKVRTRELLEDVKRRIKKLLDEIRESTKRIKDTIRRLREEIERTSRKIEDDDRKLVEEIRKSGLGEEALKDAERRSDESRKKLKKVHDDADRMVREVTRRLDEVHKEAEKRVREVLAELDT

SEQ ID NO: 2043 - protein, 178 aa, Artificial Sequence; identical to SEQ ID NO: 2042
  Synthetic

SEQ ID NO: 2044 - protein, 177 aa, Artificial Sequence
  Synthetic
SIEEVLKEAHELNKEANKRLRDVEEDAKRLIEEVLRRLEDVLRESERLAREVLEELKRKGVDEKILREIKKLLDENRKHSEEVKRRIEELLRRLKDLVRRILKKDTDSNRELKRLVEEGLDAKELRRRVERSVEESKRLVDELRKDVKRVVDEIRKVVEEDLRHAKRVVDEIREKVR

SEQ ID NO: 2045 - protein, 177 aa, Artificial Sequence; identical to SEQ ID NO: 2044
  Synthetic

SEQ ID NO: 2046 - protein, 175 aa, Artificial Sequence
  Synthetic
DEAEEVKRVVEESVRRNEELVRRNEELVRDVLRRLKEVVDENERLVKEVVDRLRDLVRRGADKEEVRREIEKILRDLHEHSKRTEEEIRRLLEELHKHSEETLKDSKRSHEELRRRGAEERVLKEVEELDRRVLEELKRVNDEARKRVRTLLEELRRVNEKVEELVRRILEELKK

SEQ ID NO: 2047 - protein, 175 aa, Artificial Sequence; identical to SEQ ID NO: 2046
  Synthetic

SEQ ID NO: 2048 - protein, 172 aa, Artificial Sequence
  Synthetic
DEAEDVVRKVMDEIRKLIEVSKEILKELRRLVEELKKHSDRTVEELRRVVTELLKKEASEEEAKEVVDRIRELVTRLVEENKKLVEEIRRRVEELIRRSEEELKRIEREVDTKLKDITDAVRRVRELLETVRRTSEEVLKTLEEFLRRVEKSTRRAEEELEEFLKRVEDRVK

SEQ ID NO: 2049 - protein, 172 aa, Artificial Sequence; identical to SEQ ID NO: 2048
  Synthetic

SEQ ID NO: 2050 - protein, 183 aa, Artificial Sequence
  Synthetic
KEADKLAKELEETIERLKRDSERLVTDLERLLERLERRSRELVKRLRRHVEELLKTVRRDGGESEELKKRLKELKDSNKRLNEDSERVTRKLVTDVERLLEKAEERTKELSERVKRRIDEVRKDVPELREVIKKVEDLLREVEETSKRILDRVRELLKKVEDSSRRINEESKKLLKRVEEEAR

SEQ ID NO: 2051 - protein, 183 aa, Artificial Sequence; identical to SEQ ID NO: 2050
  Synthetic

SEQ ID NO: 2052 - protein, 175 aa, Artificial Sequence
  Synthetic
SELEKILEDLKRVAERVAKALDRSLRELEKVLRRVEEELTRSNERLREVVKEVEDAADKLREVIKKLRELLRDLEEKTKRLVDELRKLAKRLAEDTKRLVEDIKRLLDELRKRIRDVDRDEEVRKLVEDLARRLDDIVRRSEELSRKLAEDVEEIVERSKRLSEELAREARELVR

SEQ ID NO: 2053 - protein, 175 aa, Artificial Sequence; identical to SEQ ID NO: 2052
  Synthetic

SEQ ID NO: 2054 - protein, 180 aa, Artificial Sequence
  Synthetic
SEIEDVVRKVETLARESDERVKTLMEENKDLAEKLKKLVRDVVEKVKREVTRLLDEVRRRPEREVLDRIRETIKRIEDELRELLKTIDRLSRDLERKNRELRETSKKIIDDIRRELDKLPEDEELKKVKERLDEAERRSKELIDEADRLNREMLKRVKEAIKKVKETLDKALEDVERAVR

SEQ ID NO: 2055 - protein, 180 aa, Artificial Sequence; identical to SEQ ID NO: 2054
  Synthetic

SEQ ID NO: 2056 - protein, 173 aa, Artificial Sequence
  Synthetic
SDLERVEERLERAVREVEKLHEDSRRELRRVVKEVHDSTRKVEERNRKLVKRVEEADIREEMLEELRRRSEESIRRTRKVNEDLHRAIEEIERKDKELLDRAKKEVEELLKEVRERGDKKVIKKLEDMLREWAKLVEKSIKELKELLEELRKVSKKLVDDNDRLAEELKRRVD

SEQ ID NO: 2057 - protein, 173 aa, Artificial Sequence; identical to SEQ ID NO: 2056
  Synthetic

SEQ ID NO: 2058 - protein, 183 aa, Artificial Sequence
  Synthetic
DEVKALVDKVRELVRKLKEESDDLVRRNEELAKEVEKRSREVVEKVRDTVRKLLEELERADKSDKERLDRLITRIREKIDEVRRRIEELNREIEEVSKKSLKENKDTNREIRERIERLRKELDDKGVDKKVRDDLRKALEDVNRSSKRVEERDKEVLDEAHRSSTRVLETLKRMLERLDEKIR

SEQ ID NO: 2059 - protein, 183 aa, Artificial Sequence; identical to SEQ ID NO: 2058
  Synthetic

SEQ ID NO: 2060 - protein, 183 aa, Artificial Sequence
  Synthetic
DEVEKLVKKVEDLVKRLIEVSEDVVREVEKRLRELEKVHREALRKNRKLLEDLLRRLREADKTSDEEVKRLKEEIDEVSERSRRENDRLNEEVNRVTKEVTDKIRKVNEDIRRKIKELKKELDEKGVDDKVREKLKRALDRVNKSSREVEETLRRADKRLNDLVKEIKDEDKRMLERLERETQ

SEQ ID NO: 2061 - protein, 183 aa, Artificial Sequence; identical to SEQ ID NO: 2060
  Synthetic

SEQ ID NO: 2062 - protein, 183 aa, Artificial Sequence
  Synthetic
KEVEELVKEVRKLATKVIETSKRVVEELEKLAERLLRTSKEVVKRNKELVDDLLRRVREVSDGDEEKVRRLEEDIRRRSKKSEEDNDRLNEDINRKSKKVADELKKLNDDIRRELDELERELDREGVEEEVRKELRELLRRVNESSKDVKRRLEDLDREINRLSKRVKEEDRRALKEVEEEIK

SEQ ID NO: 2063 - protein, 183 aa, Artificial Sequence; identical to SEQ ID NO: 2062
  Synthetic

SEQ ID NO: 2064 - protein, 177 aa, Artificial Sequence
  Synthetic
SKEEEVKRVLREALERVEELNKRLNEEDKRMLDEVRKVNRDAERVLREALKRVEELLSRVSDKDRVKKLREDVKRIAEEVERLSRKSEEDVKKVHRESKRLSDENRKEVKRVEDRVRDKPKTDELVTDVERVVRELLDHVRRLVRESKELARELIRRSEEIVRTVEEVVRKLEKDVR

SEQ ID NO: 2065 - protein, 177 aa, Artificial Sequence; identical to SEQ ID NO: 2064
  Synthetic

SEQ ID NO: 2066 - protein, 177 aa, Artificial Sequence
  Synthetic
DKAKKVEELLRKAIEEVEKLNDEVNRTDEKMLRRVKELNDDVHRTLEEAIKRVRELLSRVSDEDRVRDLRKKVEDARREIEKLSEENEERVRRVHERSRKLSDDNRRRVKEVEDRIRKKEKTDEVVTEVEKLMRELLEHVKRLIDESRKLAADLEKHSRDIVEEVRRLVEELLRTVK

SEQ ID NO: 2067 - protein, 177 aa, Artificial Sequence; identical to SEQ ID NO: 2066
  Synthetic

SEQ ID NO: 2068 - protein, 177 aa, Artificial Sequence
  Synthetic
SKERDVERKVREVIKRVEDLNKRVHKTLEDVIREVEKLNEEVKTRVEKLIREVEELLKRVSDKDKVRRLRELVERVRRRIEELSRENKKRVEEVRKTIEDLSRENRELVERVRREIEKKEKTDRVVEEVERLLRELEKHSKEIEEAVDRLVRKLEEHVKKVVEEVARLVAELKERVK

SEQ ID NO: 2069 - protein, 177 aa, Artificial Sequence; identical to SEQ ID NO: 2068
  Synthetic

SEQ ID NO: 2070 - protein, 177 aa, Artificial Sequence
  Synthetic
SVAEEVKKVKDKLKKDVERLNEEDRRVLEKAKRESKKLLDEIKRVLEELERKLEELLRRDDDKDRVRDLRRKLDEVRKRVKKLIDDSRKRTKDVEKRTEDLNRETEELVRRVEKRVEDLPKAKEVVTEIRRVVKELLDKVRESIKETERVVRELLERNRKILKEIREVVRKLLEDVR

SEQ ID NO: 2071 - protein, 177 aa, Artificial Sequence; identical to SEQ ID NO: 2070
  Synthetic

SEQ ID NO: 2072 - protein, 186 aa, Artificial Sequence
  Synthetic
DEARKLLEELKRLAERVLKTDTDLLDESRRILEEVLKTNKKSIEDSKRLAEDVLRKVAREGGESERAKDLIRKLLEDLKELLKRSHETNKRLLEELRRLDEEIHRTNEKLLRELKALLDRIREAGLEEEVLDRVREIMERVLTESKELNDRIHTISRKAEEDSKRLNEEDRAIMEDVRRELKRVVD

SEQ ID NO: 2073 - protein, 186 aa, Artificial Sequence; identical to SEQ ID NO: 2072
  Synthetic

SEQ ID NO: 2074 - protein, 186 aa, Artificial Sequence
  Synthetic
SEAEKLLEELRTIAKEVLDRVRKMLRESEKLAEDVLRENKKSIEDSRRIAKKVLDELRRDGGEDESLRERIKRLLEELRRLLEESHKKNEELKRELEELNRRIEETIRRLEKRLKELLDRIEEAGLEEEVLERIRRIFEDVLRKLRKLLDEIHRISEKVKKESEELNEEDKRIVDDAERRLEDLER

SEQ ID NO: 2075 - protein, 186 aa, Artificial Sequence; identical to SEQ ID NO: 2074
  Synthetic

SEQ ID NO: 2076 - protein, 177 aa, Artificial Sequence
  Synthetic
SVKDAVEKILREAEETVKRLNEETKRRLDEAREESKRLIDEVRRILEKLKEVLDEVLRRVSDEEKVKRLEDVLRRIEKRVRDLLKEVEDNTRRSVERVRKLNEDDKRRLDEIKEEVRREPGAEELLERVKRLMDELEETSRRILEEVERVIRRNKELADRILKEVAELLKRLEEELR

SEQ ID NO: 2077 - protein, 177 aa, Artificial Sequence; identical to SEQ ID NO: 2076
  Synthetic

SEQ ID NO: 2078 - protein, 180 aa, Artificial Sequence
  Synthetic
DEAEELRKTVEDIMKELREELKRLEEESRRIMEELKKRLEKLIEDSRKAAEDLKREADRLTDKEKVKRLKEELERLNRTINKISKELLEKLRRLNTEINKTVDRLRERLERLAEDIRRRVDKRLLEEIKERVDRVKKELDEADKRINDSSREVEKTLEDLDRKINKSSEEVRRVLEEAER

SEQ ID NO: 2079 - protein, 180 aa, Artificial Sequence; identical to SEQ ID NO: 2078
  Synthetic

SEQ ID NO: 2080 - protein, 181 aa, Artificial Sequence
  Synthetic
DVEETLTRLLKEILDVVRKALRDTREIVRDVRRVSEEVLKELEDLLREVDREVKRVLAELKGKELLEELKKLLEEIRKVVKEIEDRLKRVTEESEENIEESLRELKRLLKEIKDDVDRVRKSGVEDTEVVKRIRELVEKLRELVKRSNDNLKEHVKRNKELAKRLLDELRKLVEDLKRARK

SEQ ID NO: 2081 - protein, 181 aa, Artificial Sequence; identical to SEQ ID NO: 2080
  Synthetic

SEQ ID NO: 2082 - protein, 176 aa, Artificial Sequence
  Synthetic
DMEEEVKKLIDEVRRVLEEVLKRVEDIIDASRRTLKKVVDDVRRIDEDVERELKEAEKRGVPKEVVEEVRDRLRRNHETVKKRIRDLEKENRDLIREIRKLIDKLRREIEELERRLDELGKEEVLREVDRLVKKVEKTARELLRLLEESIEKSKREAEKLLRSNEDVVRRVRERVR

SEQ ID NO: 2083 - protein, 176 aa, Artificial Sequence; identical to SEQ ID NO: 2082
  Synthetic

SEQ ID NO: 2084 - protein, 174 aa, Artificial Sequence
  Synthetic
DAEEDAKRLLKEVKDLLDEVRERHRELNERSRKVLEDARKTHEDLNEESRKTLEDRNIPEDILRKIEKHTRDTHRRAERLVRELREHSKKVHDTARRLVEELDKRIKELEERVRRERVGREARELLKRILKDIERILETVVRLSERDVEEVRKIMEELKKLSDDDLKRVEEEAR

SEQ ID NO: 2085 - protein, 174 aa, Artificial Sequence; identical to SEQ ID NO: 2084
  Synthetic

SEQ ID NO: 2086 - protein, 174 aa, Artificial Sequence
  Synthetic
SAREEIEELIKRVKDTSKKILEDVRRMIERVKRKSKKIKEDAKRLIERVEKLLRDSNLREDLLKRLEEEIRRIKEDIDRLIEKDERDIRRIEKEIEDLVRRNEDEIRKIEERIDKIDDKDELRELIKRLEDHSRRVVEEVARLVKELDEHSERVLKTLEDLIRRLDELVKRVTT

SEQ ID NO: 2087 - protein, 174 aa, Artificial Sequence; identical to SEQ ID NO: 2086
  Synthetic

SEQ ID NO: 2088 - protein, 174 aa, Artificial Sequence
  Synthetic
KAEETVKELLDRVERISERARKEVRELLERSKESTKRILDEAREMIKRSRDELRRVGTDDKELKKVEDHSEEVRREVDELIKKSEKHTEDIRREVEELVRRDREELRKVEDKARREGDLEDLERLARELARHSEDVMRRLRDLARKDKELSEDLVRRLRELVKRDLDLVKTVKE

SEQ ID NO: 2089 - protein, 174 aa, Artificial Sequence; identical to SEQ ID NO: 2088
  Synthetic

SEQ ID NO: 2090 - protein, 181 aa, Artificial Sequence
  Synthetic
SMEDRLREVNEKNNRLIEDATRKSERVLDKIRELLKEVKRRSEDVLRRIKELVEKLPVEERVKKEIKEDIDRLRKHSEELVRDVERIIRDLKRHSEEVVERVRRKDEETRREVEELARRGSDEKTLKELVEKIEKVAEDSLREAEEDVKRIEDLVREIKKRADDDVRRLEDRVRRLRERLE

SEQ ID NO: 2091 - protein, 181 aa, Artificial Sequence; identical to SEQ ID NO: 2090
  Synthetic

SEQ ID NO: 2092 - protein, 182 aa, Artificial Sequence
  Synthetic
SSVEEVVEEIERLVDELRKRAEELVRESEKLVAELERRIRKLVEDSEKLVKDLKDRAAKGVSEEELERLLEKLKRVAEKTNRTSEELLRELHDFNRRSEKEIDDLLRELEKRVKEVRDRINSDDKVLRKIEDVDRRLKELVRRVKKKDRDSNERVKELVKRLNDENEKVLKRVEELVRRDKT

SEQ ID NO: 2093 - protein, 182 aa, Artificial Sequence; identical to SEQ ID NO: 2092
  Synthetic

SEQ ID NO: 2094 - protein, 174 aa, Artificial Sequence
  Synthetic
DEIKKVVKDLEDLVKRLKDEVDRHVRENERIVEELKRNVDRHVEENRRLVKTLEDEVRKGVSEDELRKLLEEVERVTRRSKEDIDRMSKRVDDVTRESDEHIKELLKRVRDMAEKLPDSEDLKRVLKAVEDVVREAKERLERVNRTIREVVKRAREKLKRVHDTIRKVVDDARR

SEQ ID NO: 2095 - protein, 174 aa, Artificial Sequence; identical to SEQ ID NO: 2094
  Synthetic

SEQ ID NO: 2096 - protein, 178 aa, Artificial Sequence
  Synthetic
DEVEEVLKELKRSVDETRKLLKKIEDEAKRNVRRNEELAERVKRTVDRLVEELRDLIRRGVDKEKLDRLLRKIEKDLRELKRELEESLKESEKTIRRLKEELEDMLRRSREKIEELRRRGVDNEKLKRAEKEDEEVVRRIRELIERLREENEDVIRRAEELLREVVKRIEEVITEARR

SEQ ID NO: 2097 - protein, 178 aa, Artificial Sequence; identical to SEQ ID NO: 2096
  Synthetic

SEQ ID NO: 2098 - protein, 181 aa, Artificial Sequence
  Synthetic
SVEDEIRRVIEELDRLLRKDKETIKRVIKELRDLLREVKKRTEEMIRRLDELLETVTRRIKDEETMDRIDKEIKRLKEELRELLERSDREIRKLEERLERLVRESEKKIRDLKRRLDKARRDGSDVDDVRRLAKEVLDEVKKSVDETKRLADEVKTRVRKNVKDNTDLAREVLRRVAERAR

SEQ ID NO: 2099 - protein, 181 aa, Artificial Sequence; identical to SEQ ID NO: 2098
  Synthetic

SEQ ID NO: 2100 - protein, 174 aa, Artificial Sequence
  Synthetic
SRLEKLVKEIRDVVRELAERVKESVDRARKVVKEDLEHAEESVRRVKKVVKELEELVRKLDREEELRKTVEEIRRRNERSNRENRKHSKKVLDDDERSNRELERTMREIKDRIDKLDDDKDIKEVEKRLKDVLDEAHKLNKRTNDELKRVNKESNDLNRKTEEDLKRVLERAED

SEQ ID NO: 2101 - protein, 174 aa, Artificial Sequence; identical to SEQ ID NO: 2100
  Synthetic

SEQ ID NO: 2102 - protein, 174 aa, Artificial Sequence
  Synthetic
KRKEDLVEEIRKIVKAVEDEVRRSVKESEDSVRENLKEAERIVRELEEIVKELEKLVRDGLDRRDLRRVAREVKERLRELVERLRESIRDSNRRNKELHDRLRELVRRVAEELKKLDQDELLEDVRKKLEDVLREVEKLNKTVEDKNREVLRRIDELIRRVEEAIEDVRRKVEK

SEQ ID NO: 2103 - protein, 174 aa, Artificial Sequence; identical to SEQ ID NO: 2102
  Synthetic

SEQ ID NO: 2104 - protein, 174 aa, Artificial Sequence
  Synthetic
DEKEELVKRVEDKVKDLRDKVEKSVRESTESVRDNERRVRESVERSRDLVRRLDELVRAGLDEEEVKKVVKRIEEDNKRLHDELRRSVEASNEKNKKLHEDLKRLADEIRKEIDKLDQDEELERVRKELEEVLRRAKRLNEDVLEKNREVVRRAAELNKEVKKLLKEVLDRAKT

SEQ ID NO: 2105 - protein, 174 aa, Artificial Sequence; identical to SEQ ID NO: 2104
  Synthetic

SEQ ID NO: 2106 - protein, 175 aa, Artificial Sequence
  Synthetic
DEKEDIDRRLRDMVRRDRELARRSVEEARKLVDKNRKLVERVFRELKKLVDELDELVRRRDGPEDDIRRAVKKIKDDLRKLLKELDDHSKDTRRRDEESNRELERHTRELEERIRRLEDDKLLKDLEEELRKTREEVHRLNEETNRRLDKVNKDARDLVRELEELIEDVLRKVET

SEQ ID NO: 2107 - protein, 175 aa, Artificial Sequence; identical to SEQ ID NO: 2106
  Synthetic

SEQ ID NO: 2108 - protein, 174 aa, Artificial Sequence
  Synthetic
DEKETVEERLDRLVRHHEKLVRESVKELEELVRHNRELIKKSVEDARRLVEDLKRLIDEGVPEDDVRRTVREIEERNRESHKELEDHNRELRRRNKESHEELKKHIDEIRKELDKLPKDKLLDELRERIDKVNEDARKLNEEVERRITESEKEVTDLNRKVDEDIKRVLEKVER

SEQ ID NO: 2109 - protein, 174 aa, Artificial Sequence; identical to SEQ ID NO: 2108
  Synthetic

SEQ ID NO: 2110 - protein, 178 aa, Artificial Sequence
  Synthetic
SVEKVVKDVTDTIKKVVDDARRLSEEVVERNERVNKKLERLSREVVERIKDVLKRLRDKKSEKEEVERRIEKLVREHEEKTKKISEENKRSIREHERTSKEVEERIRRLVETLKELVRRGVPVEDLKRDADRIVEDIKRVVKELVKHAEKSVEDLERVVKEIVKDAERIVREIEKRVK

SEQ ID NO: 2111 - protein, 178 aa, Artificial Sequence; identical to SEQ ID NO: 2110
  Synthetic

SEQ ID NO: 2112 - protein, 182 aa, Artificial Sequence
  Synthetic
DVEEVVRRAREENKRSHDEVRELVKEVNERNKTVLERIKELAERALREIREVLREVDERKKDAREDLERLRKRVEDLLRRLEELLKTLEKRVRDLNDESRKLLKRLEEVNRELKKEIDDLEENRVETEKLKEDLDRIVRTSEELVRRLLERARRMVRETEELMRELLTEVKRIVEEVARRVK

SEQ ID NO: 2113 - protein, 182 aa, Artificial Sequence; identical to SEQ ID NO: 2112
  Synthetic

SEQ ID NO: 2114 - protein, 178 aa, Artificial Sequence
  Synthetic
DKEELLKRVTEKLEKVSDKSRRLIEEVEREVEKVHREVEERVRKVREDVRDVLRKIRAQGSSEEELEEVRDLARRIEETLKRILDEIKRVTEETREELKRLLEENRRLSEEIKDRLRRLRDDTELVLREVERLVAENERSVEELKKELEKLVRRNRTLVRKIEEDVRRLVEKITKRRE

SEQ ID NO: 2115 - protein, 178 aa, Artificial Sequence; identical to SEQ ID NO: 2114
  Synthetic

SEQ ID NO: 2116 - protein, 175 aa, Artificial Sequence
  Synthetic
SDSERVKKEAEDVLREIKRLIERNKRLAEETSERIRRLLEELKDLADKIVETLKDLIDRGEDKDTVREKIKDDLRDLERLAREVEDRIKKLTDELREHTRESEKEIKKIVEELRRKMKGREVVDEVEKRIRELLERLKDVSKKVEESNKKLLDEIRETVERVKKRIKELLEELRR

SEQ ID NO: 2117 - protein, 175 aa, Artificial Sequence; identical to SEQ ID NO: 2116
  Synthetic

SEQ ID NO: 2118 - protein, 176 aa, Artificial Sequence
  Synthetic
SLEEVVEEVKRRLTKLLKEIEDVIRRAEEESRRLLEEIERVIREAEKESRRLLEEIRTAGVREEELDKLRKHSEDVKRRLRKILEDNRKRSEEVAKELKELLEELKERIRKVEEDARDLDEDLVRKLAKELLDTLREVLKRIEEIAKEVLDLNDESLKEIRRIVEEDLRKLEEKMR

SEQ ID NO: 2119 - protein, 176 aa, Artificial Sequence; identical to SEQ ID NO: 2118
  Synthetic

SEQ ID NO: 2120 - protein, 173 aa, Artificial Sequence
  Synthetic
SEEEEVKRLLDDVREKVKRVAEENRRTVEEVKRVVDEVRRRNKETVERDRRELEKVARDEDKDRVVKEVRKSSADVVREDRESVRRAEEEIRKVMEDDKRSAEEVERIVRRAEEEVKVEEVVREIRRIVEDVRRKVKESVDRVKKILEKVRKDVEDSVREVERTMKKVSDDVT

SEQ ID NO: 2121 - protein, 173 aa, Artificial Sequence; identical to SEQ ID NO: 2120
  Synthetic

SEQ ID NO: 2122 - protein, 183 aa, Artificial Sequence
  Synthetic
SKEETAKRLIEEVRKVIEEVKKRAEDSNDHNRRSIEEVEKTLKRLIDEVRRVVEEVKEKISRTTDKDDIKRVLEEIKRIAEEVVRKIRRLLEEITRNSERIVRENEKLLREIEEIVRRVLEELKRLDLKEAVEEIERLMRKIKKVVEDSVRNVERTMREVEEKVRKVEEDVRRLAEDVTRAVK

SEQ ID NO: 2123 - protein, 183 aa, Artificial Sequence; identical to SEQ ID NO: 2122
  Synthetic

SEQ ID NO: 2124 - protein, 172 aa, Artificial Sequence
  Synthetic
DEVEEVLRRVRKIVKEDRDEAKDVREENRRLVEDDKRKVERVKEENRRLVEELRKRDEERVEEVVRRIEESARRVAKLSEETARDAERSVEKVVKDSERTVREIDKLVRDVVTDGDRRLLEEVERRVEKLVKESREIAKRSNDRTKDLVRRSEEILRESNERTRRLLEETER

SEQ ID NO: 2125 - protein, 172 aa, Artificial Sequence; identical to SEQ ID NO: 2124
  Synthetic

SEQ ID NO: 2126 - protein, 172 aa, Artificial Sequence
  Synthetic
SEAEKVLKDIEKIVKDLERNAKEVLDRNKRNVEDDKRAAEEVLEKLERIVREIDRGDKESVKEVVKEIRRLAEEVARASDETVRRNEKLAREVVEANKDVVRKIRKLVEDVVRDGDRELLKKVIRTVEKLLEDVHKLNEDSERAAKKLTDESREIAREVEERVERLLREEER

SEQ ID NO: 2127 - protein, 172 aa, Artificial Sequence; identical to SEQ ID NO: 2126
  Synthetic

SEQ ID NO: 2128 - protein, 174 aa, Artificial Sequence
  Synthetic
REVEEAEKRLREIVKEVTERNKEVVERLRDIVRKSEDDSRKSVETNKEIVDRVRRDVSDERVVREVKKVADEVVRRNERSAEDSRRVVEELVERSRESMERVREMVKRLVEEARKVTDRDVLRELIRTLEEVLKRSEDTNRELEKRIKEVVEDNRRKLEESIKESEKVVDEIRK

SEQ ID NO: 2129 - protein, 174 aa, Artificial Sequence; identical to SEQ ID NO: 2128
  Synthetic

SEQ ID NO: 2130 - protein, 174 aa, Artificial Sequence
  Synthetic
SEVEEAERRLKEIAEESKEISKRSVETNAKILDEVRRENTRVLETLKKILEEVERRVSDERVVREVEERVKELVRRSEESLRRVEEVIRRVLEENKESMRRSEERVRRLLEEARKVTDKDELERLIEDIREVVERNKKIADESIKRSRDVVKRSKETNDELEKTIREVVKRIED

SEQ ID NO: 2131 - protein, 174 aa, Artificial Sequence; identical to SEQ ID NO: 2130
  Synthetic

SEQ ID NO: 2132 - protein, 174 aa, Artificial Sequence
  Synthetic
DEVEEVLKRLRDILREAKELVERSVKRNEEIAEESRKESEESVRRNEEIVDAVRKRVDDKDKVARVEEVIRRVVEENRKSAKESLDMIRDVVRKNKKVLREAEEVVKRLVEEVRKVTDRRVLERLIRELERVLEELREKLKRSIEESEDVVRKNREILRRSIEKSEDVVRKIET

SEQ ID NO: 2133 - protein, 174 aa, Artificial Sequence; identical to SEQ ID NO: 2132
  Synthetic

SEQ ID NO: 2134 - protein, 182 aa, Artificial Sequence
  Synthetic
DVDEVLDTVRRLVEELLKKVERTSRESVRLAEKLLDEVRESSKRSKDESRRLLEEVREIDDSRKVARVVEESRRLMKEDLETVTEVVKRNEDSAREDEERVKRVAEEIRKIVADVFRRVKDKKREKVDKVRRDVERLVEEVEKTVKRSVEENRRIAEEIKRTVEESVKTNEEVVKRIEETAR

SEQ ID NO: 2135 - protein, 182 aa, Artificial Sequence; identical to SEQ ID NO: 2134
  Synthetic

SEQ ID NO: 2136 - protein, 172 aa, Artificial Sequence
  Synthetic
RERELVEEVERRLRESNERVKESVDRSRKLLETSHRRVKELVDRLKRVLERVEREVRNTTDKDRVRELVEEVKDAVRRVKEEVKKSVDEVREVVDKDVRDVRRSVKEVEEVARRVKVDELVKRVKEVVDHNERLAEESKKEVDDVVRRNEDLVRKVVEEVKDVVRRIKETVR

SEQ ID NO: 2137 - protein, 172 aa, Artificial Sequence; identical to SEQ ID NO: 2136
  Synthetic

SEQ ID NO: 2138 - protein, 172 aa, Artificial Sequence
  Synthetic
RERELVEEVERELKRSTREVEESIEESRKRLEESHRLVAELVKRLEEVLERVRDDVRRTRDKRRADKLVKDVEKAVRDVKREVDKSVKEVEDVVKEDKKRVDDSVTRVDEVLKRVDVDELRKRVEEVVRTNEELARESVRKVKEVVRRNKELVARVADKVREVVKRIRETLK

SEQ ID NO: 2139 - protein, 172 aa, Artificial Sequence; identical to SEQ ID NO: 2138
  Synthetic

SEQ ID NO: 2140 - protein, 179 aa, Artificial Sequence
  Synthetic
SVKEIVKKVVEENKKSDDELREFARRVAERNKRVVEELKKRLEDLVRKNEEVVDRLRKRSREEVVEKVKEDSKASVDTAKKVVDEVEERSRRSVKEVERVARESERKSRESVDRVRKAVRSEIVKEVVDRVRKSEESSRKLLEEIVRLVEKSLEEVKRILDEIRRRVEKSERDVRRLRK

SEQ ID NO: 2141 - protein, 179 aa, Artificial Sequence; identical to SEQ ID NO: 2140
  Synthetic

SEQ ID NO: 2142 - protein, 181 aa, Artificial Sequence
  Synthetic
DIVEELKENVKRVEETIRKIVKEARENVDDVLKKNKDNVEHDKRTAEEVLKEVKKSIKSDELRRKVEEVVERSRKTAKENEELARRVRDENEKVVKEVERLVRTVAEANKRIVEEIRRIEDKDTVRRLLEEASKLNKDVIRRVRELLKRLHERNEESLRRARELNERSRREAERVLEEVRK

SEQ ID NO: 2143 - protein, 181 aa, Artificial Sequence; identical to SEQ ID NO: 2142
  Synthetic

SEQ ID NO: 2144 - protein, 185 aa, Artificial Sequence
  Synthetic
SIVDRIREIMKEVREKVKRVVEENRRNAERIKRRVDEVVKTNRKTVDDVRRKVEDVVRKIKEKGREIERLLRRVEETVEESVERVERIAEKVVREHDKSVKDVERIVKRVTEVAEEVVKRLRRVDREVVEELLRRLRKIVKDVERELKRSTEELNRRSREVLKELEKSTRDVEKVVRELEERLRK

SEQ ID NO: 2145 - protein, 185 aa, Artificial Sequence; identical to SEQ ID NO: 2144
  Synthetic

SEQ ID NO: 2146 - protein, 185 aa, Artificial Sequence
  Synthetic
SVVDKIREIVRKSREDVRRVVEEIKDNARDLKRKAEEVVKEVKRIVDEVRETVRDVVEKIKELGREIEKLMERVRKAVEEVIRDIERIMREVLRLHEEVVERIERIVTEDEKKVRDVVAKVRRVREEEARKLLEDVKKSSDDVRRELKRLLEEVNRVSREAEKKLRELLERVKRIIDTLKDELRK

SEQ ID NO: 2147 - protein, 185 aa, Artificial Sequence; identical to SEQ ID NO: 2146
  Synthetic

SEQ ID NO: 2148 - protein, 185 aa, Artificial Sequence
  Synthetic
SVKDEIRRIVKESEEANRDVVEKIRRNVERIRRKVERVVEEIKRIVKEVKEKVEDVVRKNKEKGERIKKLVTDVEREVERVVEEIRRIAEKVTDVHRRVAEESKRSADEDKKTVDRVVERVDKAEEEVVRKLLEEVKKSSDESKDRSRRLLEEVNRISRDVERKLEELLRKVEKVVRDLEEELRR

SEQ ID NO: 2149 - protein, 185 aa, Artificial Sequence; identical to SEQ ID NO: 2148
  Synthetic

SEQ ID NO: 2150 - protein, 185 aa, Artificial Sequence
  Synthetic
SAEDVVRELKKRVDRSREDNTRVLEELKKAVEESRRLNEESNRRLEKIVRDIKEDLKRITTRKKELEDTVRRLLEKAEKVVRDSIKTSEETVTRVTDVVRRVIERSRETVTDLARVVEEVIRNVTREEVLRELAKIREDIERENKRVLEELEDVLRKVKRVNEEALKNSEDILRDIKEKVDRRRK

SEQ ID NO: 2151 - protein, 185 aa, Artificial Sequence; identical to SEQ ID NO: 2150
  Synthetic

SEQ ID NO: 2152 - protein, 180 aa, Artificial Sequence
  Synthetic
SVEELLRKLEEVLRKIREENERSLKELRDRAREIVKRNRETNRELEEVIKELEKRLSRRDKEKVEELVRRIRRIVERVVEEDRRTVEEIEKIAREVVKRDRDSMDRVRRTVEDVLRKATGSEDIVRKIERIVETIEREVRESVKKVEEIARDIRRKVDESVKNVEKLLRDVDKKARDRKK

SEQ ID NO: 2153 - protein, 180 aa, Artificial Sequence; identical to SEQ ID NO: 2152
  Synthetic

SEQ ID NO: 2154 - protein, 174 aa, Artificial Sequence
  Synthetic
SEEEKVKEEIRKLIEDSRRHVDELKKRLEKLLRDSEKNVEDAHRTNEKLARELKEKVKKTGTDKKLEEDLRRLLKKTEEYVKEHHRTNRELLEKVREEVKDHERRNRKLLEDLKKRGVNEDVLREAEEMLRDSNRELREILEKIERDLRKSDEELKKSVDDLRRLIKEVEDRLK

SEQ ID NO: 2155 - protein, 174 aa, Artificial Sequence; identical to SEQ ID NO: 2154
  Synthetic

SEQ ID NO: 2156 - protein, 174 aa, Artificial Sequence
  Synthetic
SREEELKKELKKRIEDSDRHVKEEKDELDRLIRESEEHVKRLKEEARKKLERLKDLVRKDGPTDELRKRLKDLLDEVKKMVEEHERDNRRKLKELEKRARDHHKRNRELLDEVRKAGVDEKVLREAEELLKEVDRKLERILEEIKRRLEKSDRDLRRVLKELEELIDEVRRRLE

SEQ ID NO: 2157 - protein, 174 aa, Artificial Sequence; identical to SEQ ID NO: 2156
  Synthetic

SEQ ID NO: 2158 - protein, 175 aa, Artificial Sequence
  Synthetic
SEKEDIKERIKELLKRSEENVRKLREENRELVRRSEENVKEIHKENEDLIRKLEKLRTRDVDKKKEAEDELRRLLRRTEKLLEDHKKLLEDILRRSRELLKEHEELLREIERELRERIKDEDVLREAKEALEESLRRLRKIHEDSERRLRESLEELRRSVEEAKRLLERLKRELD

SEQ ID NO: 2159 - protein, 175 aa, Artificial Sequence; identical to SEQ ID NO: 2158
  Synthetic

SEQ ID NO: 2160 - protein, 182 aa, Artificial Sequence
  Synthetic
DELDRVIEEAEELIRRIEEKLRRINETAKRLLDENLRHSERVHEEINRALERVRKKVEDAGLPKEVVETIKRLLEEVKKESEDLLRENKKLLDDVTKESKDLHDTVKELLKRVADELERLRRSGSDVKDVKDRLRRIIEELERRVRELKKRHEDILRELNRRSKELKDRHKKILEDLDRRVR

SEQ ID NO: 2161 - protein, 182 aa, Artificial Sequence; identical to SEQ ID NO: 2160
  Synthetic

SEQ ID NO: 2162 - protein, 182 aa, Artificial Sequence
  Synthetic
EEVERVIDEARRLLRENERHSEEVIEEITKLIRDVEEKVKRINDRAREALEDIREEVKRKGLPEEELKRIEELLDTVRRESEKMHETIKEKLKRVEDEVRKALKENRDLLKKLEDELRELRKTGKDVDELRKELERLIRDLNRLSKRIKEELKRRIEELEEEVKRLKEEHERIIEELRRRVK

SEQ ID NO: 2163 - protein, 182 aa, Artificial Sequence; identical to SEQ ID NO: 2162
  Synthetic

SEQ ID NO: 2164 - protein, 177 aa, Artificial Sequence
  Synthetic
EEVERAKKELEDRIREWEEDSKRLKDELKRIIKEWEDESRRVKEELRKIIDDLRKAVEKGISEETLRKIEREIEEILRKIEKKDRDILKRVEEIIEEIERRDRKILRELEKVLDELKKAGIDERILEEARRLVRRVHESSKRVLDDARRKLKELHERSKRVLDDVRRKLKKVADDTR

SEQ ID NO: 2165 - protein, 177 aa, Artificial Sequence; identical to SEQ ID NO: 2164
  Synthetic

SEQ ID NO: 2166 - protein, 177 aa, Artificial Sequence
  Synthetic
SEVERIKEELKRIIEDWDRRSRRLKEELKKEIKDWEEDSRRLKRELEEELKKLKEKVERGISEDELRELLRTVEKKIEEIERRDRRIKEEVEKKIEEAERRDEKIKREVEERLKELERRGVDKKIIDEARRLLEELHRKSREVAKEIRKEVKRLHDTSKKVLEDIRRAVKKVADDVK

SEQ ID NO: 2167 - protein, 177 aa, Artificial Sequence; identical to SEQ ID NO: 2166
  Synthetic

SEQ ID NO: 2168 - protein, 177 aa, Artificial Sequence
  Synthetic
SEVEKIKRDLEEIIRRWEEDIKRVKKRLDEEIRRWEEESKKVKKKLEDLIRRLEKEVADGRSEEDLKRLLKKLREELEKIERDDRRIAERVKRRLDEIRRRDEDIKKKLEDRLRELRERGVDEKILEDARREAERLHKTSKDVLKKVEDLLRRVNEHSRRVLEEAERRIRDVAEKTR

SEQ ID NO: 2169 - protein, 177 aa, Artificial Sequence; identical to SEQ ID NO: 2168
  Synthetic

SEQ ID NO: 2170 - protein, 177 aa, Artificial Sequence
  Synthetic
SEVEDIKRRLEKIIEDWRRKSKELEKRLEDIIDEWDKRSRKLKEDLKRIIEEARKAVDDGIDREEVKELKKRLEDEIEKIRETDREIEKRVDEAIREAEERDKEIAERVKDTLEKLRKAGVDEKVIKEAEDLLRELNESSRRVAKKAKDDLRELNERSRRALKEIRELLREVRERVE

SEQ ID NO: 2171 - protein, 177 aa, Artificial Sequence; identical to SEQ ID NO: 2170
  Synthetic

SEQ ID NO: 2172 - protein, 177 aa, Artificial Sequence
  Synthetic
REVEKIITDLEEVIRRVEEYLKRSDEELEKELRRVKRYLDKSDKDLRDEIRRVKEELDKRGGSEDVTRRLKELLRESEEHSERLKRRLDKLLKDSRDHSEELRERLRRLLEEARRRLKEVDKDELRARVEDVVRRAEDELRRHSELNKRLVDEARKLLEDHSRRNEELMRELRKLVE

SEQ ID NO: 2173 - protein, 177 aa, Artificial Sequence; identical to SEQ ID NO: 2172
  Synthetic

SEQ ID NO: 2174 - protein, 177 aa, Artificial Sequence
  Synthetic
SELEDILRKLEKRMTDVERYLDESNKDLERAVRRVVETLKRIDDEIRRLLEEVERDLDRKGGNEDLKRKLRELLKRLEEHSERLKRRADELLERSREHSERLKEKLRRLLEEVRRRLDEVDKDELETRLREITKTAEDELRKHSRTNEDIVRELKELVDEHEKELRKVVREAEDESR

SEQ ID NO: 2175 - protein, 177 aa, Artificial Sequence; identical to SEQ ID NO: 2174
  Synthetic

SEQ ID NO: 2176 - protein, 177 aa, Artificial Sequence
  Synthetic
SELEEILKDLERMIREVEDYLRKSNERLEDVLRKVKKKLDEINDELRRVVEEVKKKLEDKGGKRELTEKIDRLLDDARRHSEELKKELDDLLRESRKHSEDLKRELRRLLDEVRRLLSQVDAEELKRRLEEIVKRARDLLKEHSDDNERLVERAERLVEEHRDKVRKIVEELEEEVR

SEQ ID NO: 2177 - protein, 177 aa, Artificial Sequence; identical to SEQ ID NO: 2176
  Synthetic

SEQ ID NO: 2178 - protein, 178 aa, Artificial Sequence
  Synthetic
SEIERILEEVERAVRESDERLKDIVRKDREVVKRVKELLDKILRKDEEAIKRVIEDLERRGSDETLIRKLKKHLDENRRKVEELKRRLDEHLRRNDETVKDLIRKNNKELEEVRRRLKDITDKDELKKEVDKWVKRARDIVKELEEHSRRSTDELRRTVEDLERHSEESVRRAEKTSE

SEQ ID NO: 2179 - protein, 178 aa, Artificial Sequence; identical to SEQ ID NO: 2178
  Synthetic

SEQ ID NO: 2180 - protein, 183 aa, Artificial Sequence
  Synthetic
SELEKILKKIEDALKKVEEDLDRILEEDRKTLEEVKERLERDNEDLKRVVERVEEELKRRGRRRSELDKIRKELRDRLRDASKTHEDIKDELEKIHREVEDTIRRLKEELRDLVRRLEEMVRRDIDKTDELRKDVDRLVKRLKKLVDDLRRKSKETADRLRELVKRSRELSRTLAEELRKKTE

SEQ ID NO: 2181 - protein, 183 aa, Artificial Sequence; identical to SEQ ID NO: 2180
  Synthetic

SEQ ID NO: 2182 - protein, 178 aa, Artificial Sequence
  Synthetic
SEDEEAKKRVEDLVRELKKSNDELRRKSEESLRRLKELNDELRKRVRDLEDRLRKLVEDNVDKKDLKKTLDDIRKRLEELERRLKEEHKDLEDRTRELKKRHEDLLKRIKEELKRLADEGKISERIIEELDKELKKSSEETDEIVKRDEDVLRRSDEESRRIIKKLEDVLRRADERVK

SEQ ID NO: 2183 - protein, 178 aa, Artificial Sequence; identical to SEQ ID NO: 2182
  Synthetic

SEQ ID NO: 2184 - protein, 177 aa, Artificial Sequence
  Synthetic
SKDEEAKKRVEELTRKLEETVREDKKRIEDLAEKLKKVVDKLRRDSERTRKKLEEVERKGVDDEVVRRLKEEVERINKESREELKKLTKEVEDIIRDSERKLRRLEEEVRKLIEDLRRRGVDERILRELEKVLREVKKKHKETLRTLEELLREVAKRAEDINEEDRKVLEDVVRKLT

SEQ ID NO: 2185 - protein, 177 aa, Artificial Sequence; identical to SEQ ID NO: 2184
  Synthetic

SEQ ID NO: 2186 - protein, 179 aa, Artificial Sequence
  Synthetic
SEVEEILEDIRRRMTRVEERLRKSNKELEDAIREVTKRLKKSLDDLKKIIEEVKDVADKKGIDDKVKEKLKRDLDKHRRESEELVKKLDKKLKDHKRDSKRVIDELKRKVEDLERIVRKGELDAEELRKMVEDLTKELEDLVEEDKERVKRWRDELEEIVKRDRDKVERWREEAEKIKK

SEQ ID NO: 2187 - protein, 179 aa, Artificial Sequence; identical to SEQ ID NO: 2186
  Synthetic

SEQ ID NO: 2188 - protein, 179 aa, Artificial Sequence
  Synthetic
SELEEILRDVERLVRKVKTDLDDSLRRLKEVIDDVERLLRESNEKLRRVIKDVEDLADKKGIDDKEKKKLREELKEHDDRSRELVKELRKELKEHADDTERLKKEIEELLERLERIVRRGDLSEEALKKLVEDLRKRLREVVEEDKEKVRRWTEKAKRIVEDDKRRVEEWERKLEETVR

SEQ ID NO: 2189 - protein, 179 aa, Artificial Sequence; identical to SEQ ID NO: 2188
  Synthetic

SEQ ID NO: 2190 - protein, 179 aa, Artificial Sequence
  Synthetic
DEVERVLDDVRRKLEKVRRDLRRIDEDLRRVVETVKRLLDESNKDLERAVRKVKDELDKKVRDKKELEKVKKELDEMLEEHKKRAEDLKRRLEELLRRHHEELKKMERKLREELKRLEDAQLPEEELRRVVKELKEDLERLVRELEETVREVKEELEKVVRDDEKLVEEWKKRLEERSR

SEQ ID NO: 2191 - protein, 179 aa, Artificial Sequence; identical to SEQ ID NO: 2190
  Synthetic

SEQ ID NO: 2192 - protein, 179 aa, Artificial Sequence
  Synthetic
EEVERVLDDIRRVVEEVKRRLDEIDKKLTEENERVKEELDRIDDRLRKLVEEVKRRLDEKVGDKEELERVKRELDERLKKHHEEIERLKRELDEINKEHHRRIEELKKDLERLLKELEDAQLPREELEKVVEDIKRKLEKAVRDLEKTVKENKDRNDDIVRRVKKTVDDAEERLRRAVK

SEQ ID NO: 2193 - protein, 179 aa, Artificial Sequence; identical to SEQ ID NO: 2192
  Synthetic

SEQ ID NO: 2194 - protein, 175 aa, Artificial Sequence
  Synthetic
KEVEDILRELRRAVEEHRRRSEELLRRMRKLVKDLEDRIREILERARRSVKEIKDRIEKDGPDKRMEDLLRKDNEDLKRLAEEIRKVLEKLRRDIERVKRKNETDLRKWEEDLRRLNIDEEVLKEVKKLLDEVRKRSKDIVDEVRKLLEEVLKEAERVLREWKKLNDEVEDRLRQ

SEQ ID NO: 2195 - protein, 175 aa, Artificial Sequence; identical to SEQ ID NO: 2194
  Synthetic

SEQ ID NO: 2196 - protein, 180 aa, Artificial Sequence
  Synthetic
SEVEEVLKEVRKLIEDWRANSERILRRIERAIRELRRKIREWLERSKKKIKRLEEVIDKEVDKKEELREKIKRVREDNERRLKRLEEEIEEVRKELEDALRDDTRKLKELEKRLEDVRRDGVIDEDVLREARKRVDELEKRSREVAKRARDLLKEVRDKIKEVADRSRDLLRKVEEAIEK

SEQ ID NO: 2197 - protein, 180 aa, Artificial Sequence; identical to SEQ ID NO: 2196
  Synthetic

SEQ ID NO: 2198 - protein, 184 aa, Artificial Sequence
  Synthetic
SAEEVDRRVEELLKELERRSEEVLETWKELNKKLNKDAKDVTDEVRELLKELAELIKRDGLPEEDVRRLLERVKRTIEELKKELEKLSEDDKRRLERVREENKRIAERLRETIERIREDIKRGRSEEVVRRLLEDLRRLIDEWRKRSKEVEEEVRKSIEDIKRRIEEILRRIRKLIEEIRRRIK

SEQ ID NO: 2199 - protein, 184 aa, Artificial Sequence; identical to SEQ ID NO: 2198
  Synthetic

SEQ ID NO: 2200 - protein, 174 aa, Artificial Sequence
  Synthetic
DEDERVKDLLRRVKKTVDELLEELKREVKKSREEAKRLLKELEDRLRRSRKEAEKLRSSTDEDRLREESDRDRRELEDVREKLKRVLREDNERLKEVEKKLRDILRRMEDTLRRANIPREVLEEAKKILDDARRAIEEIIREWEEVNKEVDDRIDRIVEEWRKVNDKVNKDLTT

SEQ ID NO: 2201 - protein, 174 aa, Artificial Sequence; identical to SEQ ID NO: 2200
  Synthetic

SEQ ID NO: 2202 - protein, 174 aa, Artificial Sequence
  Synthetic
SEEEKIVEDLRREVKRLAERVKELIETSKKLVEDSKRHVKDLARRLRDIIRKLKKDLRDKGPTEDLKRKVDKVLEEAAREIKKHLDKNKELLERDERVVRDVERRLRELLKKVEDRGVERRALEELEKVVREIRRELERVHEETRRVIEESNRELEEILREAKELLEEVKKEAE

SEQ ID NO: 2203 - protein, 174 aa, Artificial Sequence; identical to SEQ ID NO: 2202
  Synthetic

SEQ ID NO: 2204 - protein, 187 aa, Artificial Sequence
  Synthetic
RELEKALEEAKRLLDKVRKELKKIHEESRRLLKETRDETRRVLEEAERLLREIKKLIDRLREDRDETEVKRLEDALKRLKEKVEEDVRRNEEHNKKLEEDDEKLLRDLERTIDTLERRIKEKAKRDIREEDVRRLVEELRDLIRELERKVKEVVETSRRLAEKDKEDNKRILEELRRLIRELEEDVR

SEQ ID NO: 2205 - protein, 187 aa, Artificial Sequence; identical to SEQ ID NO: 2204
  Synthetic

SEQ ID NO: 2206 - protein, 182 aa, Artificial Sequence
  Synthetic
EEIERVEKLVEEVVRRAEDELRRSAEHVDRVVERAERLVERSREHSKDLMRRLEEVLRRGEPRREVLTEVKEELDRHREENKRLVEELRKIVEDHERDNRRLVKKMREDIKRVEDRVRRELKDEDKAREIIERLRDVLRKIEEALERISRKLKEVLRRVEKKLEEDSRTLTRVVEEAKKKLD

SEQ ID NO: 2207 - protein, 182 aa, Artificial Sequence; identical to SEQ ID NO: 2206
  Synthetic

SEQ ID NO: 2208 - protein, 182 aa, Artificial Sequence
  Synthetic
KEIEELDEEVRRLVEELKRLSDESRKHSKRLVEELKKLLEDSKRHSEELARRARKVLREGRERDKVLKELEELVKRHEEDNKRIVDELRKLIEDHRRKVEELTERVRRLLETLTRKVKDKLKRREDAERIIKKLEDVMKRAEETNRRDIKKLEDVLKDVEDKLREDSKRLREVLEEVKKRLE

SEQ ID NO: 2209 - protein, 182 aa, Artificial Sequence; identical to SEQ ID NO: 2208
  Synthetic

SEQ ID NO: 2210 - protein, 182 aa, Artificial Sequence
  Synthetic
SEVEEILRDIERASEESKKTLDRILKKIEDASRRSKELSDKSLKEIRDAMEEIKKELDKGPDDEKVKRIKERLEELLRRLEEHNRRLKEEDDRLLKELRDKVRELKERDKKLLKDLERMVRRDVRKSEELDRRVKELVRKSEEELKDLDREVKELVRRSEELLEDDKRLVKEVVDEARERRR

SEQ ID NO: 2211 - protein, 182 aa, Artificial Sequence; identical to SEQ ID NO: 2210
  Synthetic

SEQ ID NO: 2212 - protein, 178 aa, Artificial Sequence
  Synthetic
DELEDVKRRVDEIVRELERLNEKLRRDVEEIVKRLKELNKRLLEEVRRTAEELKTKNVDRDRAKEELDEVRRKLKEVFDRAKRVHDEVRKRLEELKRRSKEVLDRVREDLKRLEREIPETEELREILKELKRVLDESRKLSKEIEEELERVLRDSERATEEILRELEKIIEEVERKVR

SEQ ID NO: 2213 - protein, 178 aa, Artificial Sequence; identical to SEQ ID NO: 2212
  Synthetic

SEQ ID NO: 2214 - protein, 178 aa, Artificial Sequence
  Synthetic
DELEEVRKRVERIMEELKRHLEKIAKDSKKSVDELKKHLEDADRKSEESVRKLERDNVDRDEARKLLEDNEREVRKVERNVEERNKRNEDEMKKVEDDVRRLNDEVRRDLERLAREIPRTRELEDILRRLEEVSERHRRSIEEILRRNEEASRRHRESIRRILEKNRRVLERVERKVE

SEQ ID NO: 2215 - protein, 178 aa, Artificial Sequence; identical to SEQ ID NO: 2214
  Synthetic

SEQ ID NO: 2216 - protein, 177 aa, Artificial Sequence
  Synthetic
EEDERAKERVKRVVEENDKVNEDVEREVRKVVKENEDVLEEIKRTVDKIVEDLERLVREGVSEEIVKKVKKDVKDVLKELEKKLRALSRKNKELLDRMEEVTRDLSRRNKELLDELKARNVDERILKELEDANEKSKKRSREILERLREANERIEETARRILKKLEEVLEEVERRTT

SEQ ID NO: 2217 - protein, 177 aa, Artificial Sequence; identical to SEQ ID NO: 2216
  Synthetic

SEQ ID NO: 2218 - protein, 174 aa, Artificial Sequence
  Synthetic
KEREDVKREVEKSVEDLRRHVRDVEEKVRKIKKELEDHVRELKKRVEEIRRRLKDLADRNVDREVVRKELEKLERELREEEKDVKRKNDDIRRRLKEIEDDVDRKNKESEERLRRSDIDESVLEELKRANERHKREIERIRKELEDVSKEHEDRIRRVLEELERVLEEVKRRVD

SEQ ID NO: 2219 - protein, 174 aa, Artificial Sequence; identical to SEQ ID NO: 2218
  Synthetic

SEQ ID NO: 2220 - protein, 175 aa, Artificial Sequence
  Synthetic
SEEERAKEEVEKHKRRLEKLVRDAERSSTEHERKLREIVERVKRELDKHEEKLRDIERKGDLTEELKRELDESTKRFKEKIERLKREIRRSSDEHRKRIKEIEDELKESTKRIKERLKRLEEVIREVEKISREVTKLLRDNLKRVEEVTERVERTLDELLERVKEVTKEVKERLR

SEQ ID NO: 2221 - protein, 175 aa, Artificial Sequence; identical to SEQ ID NO: 2220
  Synthetic

SEQ ID NO: 2222 - protein, 175 aa, Artificial Sequence
  Synthetic
SERERAEELVRRHEDRLEKLVRELEESSDRHKKRLKRLVEEVRRLIEEHRRRLDEIKKEGEQTEELTKELEDSDRAVEETIRRIEEELKRSSDRHRRKVTEIKRELDKSTRDIEEELKTLEEVLRKVRTVSTEVKKRLDRNLEEVKKLTEDVTRKLRRLLEEVNKITRDVKREIK

SEQ ID NO: 2223 - protein, 175 aa, Artificial Sequence; identical to SEQ ID NO: 2222
  Synthetic

SEQ ID NO: 2224 - protein, 175 aa, Artificial Sequence
  Synthetic
SELDEVRERLKRIVDDLRRRSEEVNKRLEEILREITERLREVNERLADIIRKIREDRKDAEESLRRLTKILEDAHRRSREVIEDLKRTLEELERRSRELIRRLEEILEKIRKDLEEGRREEVLKKLVEELRKRVEDMARTHDRLVEELKRKADEIVRRHEELVKDLKRKLEEVKT

SEQ ID NO: 2225 - protein, 175 aa, Artificial Sequence; identical to SEQ ID NO: 2224
  Synthetic

SEQ ID NO: 2226 - protein, 173 aa, Artificial Sequence
  Synthetic
SEEEKAKELVKELRKEAKKIVDEMRKLVEDHAKLVEELVRDHKRLVDEHRRLIEELKDREEKERILEELRRSDEKLKEDSERAKRELDRSTKELRETAERAKRRLTKLLDEIRREGVSEDVLRELEEIVRDIRKKIDDVIRKLEDISRKARKDSDDVNKRLNELTDDVRRKLT

SEQ ID NO: 2227 - protein, 173 aa, Artificial Sequence; identical to SEQ ID NO: 2226
  Synthetic

SEQ ID NO: 2228 - protein, 173 aa, Artificial Sequence
  Synthetic
EEEERARDLVRRLEEIVRRLVKEHEDLVRRHKELVDKLVREHEKLLEDHRKLVEELKDRERKEEILEELRRSTEEIERRSEEAKKRLRESDERLKEMSKRAKEEIKRLLEEIKRRGVSEEILERARKIVERLKTESDRVNKRLNEITRELEKRSDEVNTEVRRITKKVTEELK

SEQ ID NO: 2229 - protein, 173 aa, Artificial Sequence; identical to SEQ ID NO: 2228
  Synthetic

SEQ ID NO: 2230 - protein, 173 aa, Artificial Sequence
  Synthetic
SEEERADKLVKELKKMAEDIKREMDKLVEELKRTIDELRKKHKELVDRHRRLVEELARREDSERIERELKESDDRIKEESDRAKRKLEKLLKDLTDRAREAKKRLRRLLEEIERDGVSEEVLKTLKEIVRKIEEEIDRVEKRLRELVKELKDDSDEVNKEVNKITRKVKEELR

SEQ ID NO: 2231 - protein, 173 aa, Artificial Sequence; identical to SEQ ID NO: 2230
  Synthetic

SEQ ID NO: 2232 - protein, 175 aa, Artificial Sequence
  Synthetic
RTEEEAERTVEDVARKVKEWREELEEVVKEVRERVKRWKEEMRKLDEDTKKKLDDASDIDEELLKRLITEIKKINEDSKKKDKELEKEIRRLLEELKRKDEKLAEEIKRIIEDLRRRGVPEEVIERIERILKDLHRDSERVLRELKRILDELHRESKESNERNKKLVEDAERRTK

SEQ ID NO: 2233 - protein, 175 aa, Artificial Sequence; identical to SEQ ID NO: 2232
  Synthetic

SEQ ID NO: 2234 - protein, 175 aa, Artificial Sequence
  Synthetic
DTEKDAKRTVDDVRRKIREWEERLKKIVEEVKELVRELVERAKRLDEETEREAREAKDIDDDTLRKLKEKVERENRKSRKELEEIERRIEKLLEDMTEEDKKLEKEIRDILRDLRRRGVPEEVIKELEDLLRRLHEESKRVLDTLRRILEELRDRVRRSNKRNEEIVKELEDRSR

SEQ ID NO: 2235 - protein, 175 aa, Artificial Sequence; identical to SEQ ID NO: 2234
  Synthetic

SEQ ID NO: 2236 - protein, 175 aa, Artificial Sequence
  Synthetic
SEEDKAREVLKRVRDEVEKWRKELERLDEESKKKVDDLVRELEELDKKTDEELRRMQDATSEVLKDLERKIKERNEESKRKLKRIAEDAERTNRESKKKDEKLAEDIERILERLKEEGVPEEILKKIRRILEKLHEDSRRSNETNRRILEELEKRVRESNKRNEDILREVKRKAK

SEQ ID NO: 2237 - protein, 175 aa, Artificial Sequence; identical to SEQ ID NO: 2236
  Synthetic

SEQ ID NO: 2238 - protein, 175 aa, Artificial Sequence
  Synthetic
KTEEKVERDVERVKRDVDELIRRAEEVVKRVEDEVRKWIKELKELDDETERLVREASTVSSEDVKRLEEEAREINRESKKKDDELAKEVRRLLEDLRRLLRELAEKIRKIIEDLRREGVPEEVIKRIKKILDDVRRAVKEVLDRIRRILEKVHEDSRRSNKRNKEILDKVREDTR

SEQ ID NO: 2239 - protein, 175 aa, Artificial Sequence; identical to SEQ ID NO: 2238
  Synthetic

SEQ ID NO: 2240 - protein, 175 aa, Artificial Sequence
  Synthetic
SDEERVKEELKRILDEARRLLEESDEKLKRILDELRERLKESDERLKRILDKVRKDGLPEEVLRRLEKLVREHHKRNRELLKRVEDYVKEHHDRNRRLLEDVEKKVRELEELIDRGDLSSEELEKEVRELKKRLKKLIDESDKNVKEAEKELRELLRRSEEHVKELKKDADRESK

SEQ ID NO: 2241 - protein, 175 aa, Artificial Sequence; identical to SEQ ID NO: 2240
  Synthetic

SEQ ID NO: 2242 - protein, 175 aa, Artificial Sequence
  Synthetic
DDERRVKEKLKRILDESRDMLRRSDERVERSVRTLEDALRRSDEKLERILKKAEDDGVPREELERVRRYVKRHHEENRRLLKETREYAERHHRENRRLLKEDEEKIRRWEEILDRGELDSKELDDAVKKNKKESKETVDRSEKNVKELHDRNEELLRRSEKNVDDAKRRLDDTSR

SEQ ID NO: 2243 - protein, 175 aa, Artificial Sequence; identical to SEQ ID NO: 2242
  Synthetic

SEQ ID NO: 2244 - protein, 175 aa, Artificial Sequence
  Synthetic
DDEERVKKALDEILDRSRRRLEESDEKLDRSLKTLKKLLEESDRDLERILEKAERDGVPREVLEELKKLVEKHKKDNRELLRATEERVKRHKDTNRRLLEEDRRKIETWKEIIDRGELSREELEEAVRRNDEESKKTVDDSRRHVDELHRRNEKLIEESKDHVRRLEEELRKKSK

SEQ ID NO: 2245 - protein, 175 aa, Artificial Sequence; identical to SEQ ID NO: 2244
  Synthetic

SEQ ID NO: 2246 - protein, 175 aa, Artificial Sequence
  Synthetic
DEKEELSERVERVIRTAEKLLDEIKRKLEEIHKKANEDLERSLRKLEKVVKEVRDAGVSEDVERRLKRLVDEHRKKLEDIVRRSREELRELEKTLRDIKDEVKKELDRLEEVLRRGELREDELREDVERVKRRLEELIERLRKKVDEVKERHERMLKRSEEHVKELKDEVTEEAK

SEQ ID NO: 2247 - protein, 175 aa, Artificial Sequence; identical to SEQ ID NO: 2246
  Synthetic

SEQ ID NO: 2248 - protein, 174 aa, Artificial Sequence
  Synthetic
SEKEELEKEVEDLERRHREELEKLNRKSKKIDEDLKRIIEELNKVSKKIKEDLEREIRKGQRKDDLRRRLEEMLRRNKKDLDEVRKELEELLRENKRLLDKVEEDSKRRHEELERRNIDDEVRKRVEDINREVKEMLERNLRHTEEVIKKADREIEKNERHTREVIREAEERLR

SEQ ID NO: 2249 - protein, 174 aa, Artificial Sequence; identical to SEQ ID NO: 2248
  Synthetic

SEQ ID NO: 2250 - protein, 175 aa, Artificial Sequence
  Synthetic
SEVEEVDKKLETSHRDIEKRIREVLRELEESSRKLKRDVDEVLKKLEESHRRIAESLKTADEKLRRLEETTRTLIERLKRLVERVKELSDELARRLEEVEKELRERSRRLKEELKRVTDSKRLEELVKEHKRTLEEVKRRLEELVKKHRKDLEDLVREAEELVERHKRKLDETEK

SEQ ID NO: 2251 - protein, 175 aa, Artificial Sequence; identical to SEQ ID NO: 2250
  Synthetic

SEQ ID NO: 2252 - protein, 175 aa, Artificial Sequence
  Synthetic
SEVEEVDKEVERILDEARKALKRVEERVRKSHEDIRREIKRVEEDLERSSREIREKLKDQDRKLEELEKESKTLKDDLDRIRKEVEKLTRDVEKRLRELMERIKDEIRRVKEKLKRVTDAEKLKKLVEELEKEIRRLVDELDKLVRKHEEELDRLRKRMDELVKEHKKRLDDTAK

SEQ ID NO: 2253 - protein, 175 aa, Artificial Sequence; identical to SEQ ID NO: 2252
  Synthetic

SEQ ID NO: 2254 - protein, 184 aa, Artificial Sequence
  Synthetic
DDEERAKKRVKEAEKEIKDLAKESRDIVEKHRKEVEDVVREMERIVRELAEEAKDVVRKVKDDRDDDKIRELLERLKRKVEEILREIRKLLDDLRRKSEEVVRTNKELTDRLRKKIKDILDELEKEDVRTEVKDRLRDVLKKAEEMSKEVEDRLRKSSEDLREEVERVEEELKRVLRKIEEDIR

SEQ ID NO: 2255 - protein, 184 aa, Artificial Sequence; identical to SEQ ID NO: 2254
  Synthetic

SEQ ID NO: 2256 - protein, 184 aa, Artificial Sequence
  Synthetic
DDRERAKKTVDKVKEDLTRLVRRSEDLVRRHTEKLERVVEELERIVKELEERLKKVVDDVKDRRDREEIERLLRTLDREVKEIKKRIRELLKKLHDDSRRVVKENKELTDRAADEARRIEKRLEDEDVREDVKRTLREILRELEEASREVEERLKESDDRIRERVREVDEKLDRVLEELRKKMT

SEQ ID NO: 2257 - protein, 184 aa, Artificial Sequence; identical to SEQ ID NO: 2256
  Synthetic

SEQ ID NO: 2258 - protein, 174 aa, Artificial Sequence
  Synthetic
DELEKVRKELKEILDKLKDVLEESRERTDRLLRKAEEDLRRSDEETERLVKELKDAGVSEEALRRLEELVKRHKEELKKLLEELRRLIEEARDVHRRLLERIDRLIKELEEMLRRGTDKDELKKLVEDLDREVRKIVEELKELNKRIEDELRRIVDEARRSNEKVKELIDRLRK

SEQ ID NO: 2259 - protein, 174 aa, Artificial Sequence; identical to SEQ ID NO: 2258
  Synthetic

SEQ ID NO: 2260 - protein, 174 aa, Artificial Sequence
  Synthetic
DEVETVEREADRILKEDEDVLRRSKKITEDILDTLREMLERSERRTEEILKRLEEDGVSEEVKREIRERIKELKDRHRRIEEDVKRLADEHRERLKELLKDTKRIIEDIRRKLREGTDKDELKKLVDELKERSKETERELKESNDRLRKKVEDIRRELKRLNDEAEEAVRRLRT

SEQ ID NO: 2261 - protein, 174 aa, Artificial Sequence; identical to SEQ ID NO: 2260
  Synthetic

SEQ ID NO: 2262 - protein, 181 aa, Artificial Sequence
  Synthetic
SLIERIEEEIRRVIERVRRLVREIEDSDRKAKEDLERVVREDEETLRRVEKKLKDLNVPEEVLKRLREELEKVLRDSKELLKRMTEESERHNKEVRDEVRRLEKKLEKLVEDVKRTASRPTSEEEVKKLLEKVKRTARELEKVAEDMLRSNRELVKELLRTLEKSLRDSERTAEKLERAEK

SEQ ID NO: 2263 - protein, 181 aa, Artificial Sequence; identical to SEQ ID NO: 2262
  Synthetic

SEQ ID NO: 2264 - protein, 175 aa, Artificial Sequence
  Synthetic
DKEKEISDRLKDVLRKVRDVIEKDKRTNEEARKRVEDLVRKDEETLKRVLEEVRKGGLDEDKLRKLETEVRRILEESEKLLRDIRDRLRRSLEEIERLLEELERELRKIDEEVKRKEIPLEDLLRKVEKLAREITERLKESNERSRDLVEKLKREVKKSLRKSERLMEKARETLR

SEQ ID NO: 2265 - protein, 175 aa, Artificial Sequence; identical to SEQ ID NO: 2264
  Synthetic

SEQ ID NO: 2266 - protein, 174 aa, Artificial Sequence
  Synthetic
SEREEVKRTLTKAEEEARRLIKRDRDTNTEILKEATERSERDKDKLRKILEEVKKAGLPKELLDEVRERVRRHEEENKKVLEEVKKLIEDSKRETEELERRVKTKVDKLRDEIDKEPPDKDILDRVRRLVEELRRMIEELNDKSRKLVERLRKLLEDLNRHLEELVKRLRDKAK

SEQ ID NO: 2267 - protein, 174 aa, Artificial Sequence; identical to SEQ ID NO: 2266
  Synthetic

SEQ ID NO: 2268 - protein, 174 aa, Artificial Sequence
  Synthetic
SAKEELEDRIRDIVRRVRELITEVKKKNREILKRVEKVIKEVKETNERIEEEVRRGGLPEKLLRDITRKLRDHNRKVEEVMKRLRDLSRKHEKEVEDVLRELEKKAKELRDRLRKIEDIDKARKEVEDLVRDAKRVIEELERSLDELVRTLDELVRRLKKSSEDLMRELRKTTE

SEQ ID NO: 2269 - protein, 174 aa, Artificial Sequence; identical to SEQ ID NO: 2268
  Synthetic

SEQ ID NO: 2270 - protein, 174 aa, Artificial Sequence
  Synthetic
DEKKEVEKRLKEIEDEVRKMIKEVKETNRRILKKARDLIKKVEDTNKRILEEVRRGGRPEELLRRIEEELRKHNRDVDKVRKDVEDEVRKHDREVEEVLDRARRKVEEVARRVKRIEDIKKLEDEVRKLKDELRRELERLKRSSTDLARRLEEIIRRLERSSEDLERRLRERER

SEQ ID NO: 2271 - protein, 174 aa, Artificial Sequence; identical to SEQ ID NO: 2270
  Synthetic

SEQ ID NO: 2272 - protein, 174 aa, Artificial Sequence
  Synthetic
DEKEEVRKRLTDILRELEDLSRENERSNRRILDRVRELIERVKKTNKDILEEVERGGLPKDLLREIRERLRKHDKRVEEVLEEAERKVRDHDRENRRVTKEARELLEEARRRVERIEDIDKLRREVEELVRDLRRLIEELSRSSEELVKELEKLLRELEESSKKLAEELRKAVE

SEQ ID NO: 2273 - protein, 174 aa, Artificial Sequence; identical to SEQ ID NO: 2272
  Synthetic

SEQ ID NO: 2274 - protein, 181 aa, Artificial Sequence
  Synthetic
SSKERIKEKVDRIEERIREVVKEVEEELRRSTEEARRMVREVKRRLEDSNRKIKKFIDEKPEDEDLRRKEREIEELTRDIERKLRRIEEEIEKLSERLKRELDKISKTVEDLARKLEEKIKRITDSEELKRLLEDLRRKIEELAKELKKLLEEHKRRVDDVVRRMEELLKRHEELVRRIAK

SEQ ID NO: 2275 - protein, 181 aa, Artificial Sequence; identical to SEQ ID NO: 2274
  Synthetic

SEQ ID NO: 2276 - protein, 177 aa, Artificial Sequence
  Synthetic
SEAEEAKKTVEEISERLREALRRSEEETERILRENEKASERHKTEIEKITKELEDKLGDDKRVREEIERLRRNVEKLNKENREAAEELKRRAKEVHDRVRKKLRELEDKVDKLRRKGKDRDKDELKKVLKEIEDTVRRIVKELEDLNTEAEKASRKSVKELEEHLKRVEERVREEAK

SEQ ID NO: 2277 - protein, 177 aa, Artificial Sequence; identical to SEQ ID NO: 2276
  Synthetic

SEQ ID NO: 2278 - protein, 180 aa, Artificial Sequence
  Synthetic
ELKERLEKLLKDWADDSKRMRDELARLLKEWEDRSRKAKRDLEKILEENDDKVKKLDKVDKREAVEKELKELDERNKEVLKKLEDDDRKILEDAEELIERIERRDRKILEEVERDLSRISDEKVLREVKESAKKISRHSEKVLDEARKELERISEHSRRVLDRVRRESKKIVEDLRERKR

SEQ ID NO: 2279 - protein, 180 aa, Artificial Sequence; identical to SEQ ID NO: 2278
  Synthetic

SEQ ID NO: 2280 - protein, 178 aa, Artificial Sequence
  Synthetic
DIERELEEIVRRIKELIRRHKKRLEELVRELEELLRRHREELKKLVKRAAELVEELRRRNSRDETTLRRMREKLDRIRREIEKSTKEVEDELDKLLKEVDTSHKELEDRVRELAKELERKNVDDTVKDMLRKLLEEVKEASDRAREKLTDILRKIKKISEEVKREIDDIRKKIEDTAK

SEQ ID NO: 2281 - protein, 178 aa, Artificial Sequence; identical to SEQ ID NO: 2280
  Synthetic

SEQ ID NO: 2282 - protein, 178 aa, Artificial Sequence
  Synthetic
SIEEEAARIVEELRREVEEWERTLREIVERLRRLVEEHKRRLDELVAELKRLVDELRKENSKDETSLREIKERLERLEKEIDESDERMERELRKLTEEVKERNERLRRKVEEVKKELDDKNVREDIRRKLKEILDELDTITEKLKKELERIKREMKEASRRVREKIDRIRKEIEEVAR

SEQ ID NO: 2283 - protein, 178 aa, Artificial Sequence; identical to SEQ ID NO: 2282
  Synthetic

SEQ ID NO: 2284 - protein, 179 aa, Artificial Sequence
  Synthetic
DEIRELLKRIRDVAKRIKDKADRLNEKSRRKVEKLVRDVEKINEDTKRLLDRLRDSDQDRKDLERDVRRVKEDIKRLNEELDDRVRRILRELEKENEDSKREVDEIAKRIKDLLREIKLPEDVLRELERLLKEIEDLVRELNKTNKKIVDKARKDVKDVHRTNERLLREIERVVREKLK

SEQ ID NO: 2285 - protein, 179 aa, Artificial Sequence; identical to SEQ ID NO: 2284
  Synthetic

SEQ ID NO: 2286 - protein, 179 aa, Artificial Sequence
  Synthetic
SEAEELLRRLEKIIEDLERNARALLEKLKEEIRRLDKNLRDLLRRIEKIMRDLTRSDVDRDELRKEVDRLRKEIKKYLDDHREEVRKIVEEIKKELDDHRRRSKEIVDRIKRLLDEINLDEEVLKEIKRVLEEAEKVSEDLLREIKEVLDRAEELSRRLLKTLEDLLRDIERSVKERED

SEQ ID NO: 2287 - protein, 179 aa, Artificial Sequence; identical to SEQ ID NO: 2286
  Synthetic

SEQ ID NO: 2288 - protein, 174 aa, Artificial Sequence
  Synthetic
SSKEKVEELVKEIEEEDRRVLEDTRRLLEEIMRRDEDVLRKTDERIKEIEKELRDRVRDEELLRELLRELKEVLRRHREESKRSLEKLKKVMEDHDDESRRTLEELKEALRELKRDKDSKEAEDRLRDLVRRSREIAKRSRDHLRDLLRESEERVRASLEHVERLVKKLRKDAN

SEQ ID NO: 2289 - protein, 174 aa, Artificial Sequence; identical to SEQ ID NO: 2288
  Synthetic

SEQ ID NO: 2290 - protein, 178 aa, Artificial Sequence
  Synthetic
SEAEDLLRRLEEEIRRIKKRHKEVLDELRKLIKEVEDRHKELLDRLREEIRELEERDVSREDLKRLVEELRERVKRMNRESEKLVRDLEERAKELHRESEELVTRLERVIEDLERRIKGDRVKEELRRIVKEVRDEIRKANEKIKRLLDEVRERSKDMNRRLKEIVDRVTESLRRKAE

SEQ ID NO: 2291 - protein, 178 aa, Artificial Sequence; identical to SEQ ID NO: 2290
  Synthetic

SEQ ID NO: 2292 - protein, 180 aa, Artificial Sequence
  Synthetic
SEVDEALERIKRLIEDLERHVREWLKELREIIEDLRERVRKLLEDLERRIKELEEKARRTGPDRELEELLERLRRKIEEDIKKLEEDLREIEKRVEETNRRHEKKSRDVKREIDELLKRLRSKAVEDLERLVEELRKLSEEASRRSRKILEELRETVERVIKRLKELLKKLKEVVDELRR

SEQ ID NO: 2293 - protein, 180 aa, Artificial Sequence; identical to SEQ ID NO: 2292
  Synthetic

SEQ ID NO: 2294 - protein, 180 aa, Artificial Sequence
  Synthetic
DRAEKVLEDIRKLIEEMRKHAEEWERRAREAVKELRKEVTDWRRRLRKLLEDLEEKVRREGNDERLERLAEELLKEVKKVNEETKRRVKELLDRLRKENEEHDRLSKKLLDEIREKLKSLRSEVVRRLEKLVEDLRKINEDVNRRSRELVETLRDDVRKVNEESKRILEEVKKILDDSKR

SEQ ID NO: 2295 - protein, 180 aa, Artificial Sequence; identical to SEQ ID NO: 2294
  Synthetic

SEQ ID NO: 2296 - protein, 181 aa, Artificial Sequence
  Synthetic
DLRRELRRVLEESKKHVKELVRELDEDLTRWERRVEELVKRLRDVLRKLEKEVDELEKKPTREEELREAVERLRRVIRELEERNKRTLDEADKRVKDLKRKLRKVVEDHRRRIKELEDRVEGDRVKEELRELVRESDKIAEEIIEKLDRDVKKVKKDHERIDEELKRKLKEVEERVERIRT

SEQ ID NO: 2297 - protein, 181 aa, Artificial Sequence; identical to SEQ ID NO: 2296
  Synthetic

SEQ ID NO: 2298 - protein, 184 aa, Artificial Sequence
  Synthetic
SEVEETLREIKEDIKRSKKEWDDLLKTIKELIEDSKRKWDKLLRDVEELIRELLERLRRDGPTEEIDRTVKKIIDDVEELLRKLEKDDRDADERIDRLVKELVERDKRSLDKLKERLDKLKDRVPDRAERDVERIIREAKKLTDKVREDVERLREEWERLVREVKERIKRLLEDLRRLVEETRR

SEQ ID NO: 2299 - protein, 184 aa, Artificial Sequence; identical to SEQ ID NO: 2298
  Synthetic

SEQ ID NO: 2300 - protein, 184 aa, Artificial Sequence
  Synthetic
DEAERLLEEAERIIEKSREEWERLLERIKRLIETLRKRYEDDLRESEKRIEELLRKARRDGPTEELRREVEKINRDNKESLERWNREVEEILRELKELVERLEERDRRLIEELKRRLERLRERVSDRVAREVERILRELKKLTDDMKKRAKELIDELKRLSEEMHRRIEKSNEDLKRLVDDVDR

SEQ ID NO: 2301 - protein, 184 aa, Artificial Sequence; identical to SEQ ID NO: 2300
  Synthetic

SEQ ID NO: 2302 - protein, 185 aa, Artificial Sequence
  Synthetic
DEAEDILRRIRELIERSKRKWDELLREIKKLIEESRREWEELLRRIREIIERLKRLAERDVDDKDRLKEEVKRIKEELKREVDRLEERNRELLERLKKEVEKLKREDDEIVKELEELLTRAKDRVDERVKEEMKRLIEDLKRVSEEVKRELDKLIEELKEVSERASKRLKELIDDLDRLVKEVEK

SEQ ID NO: 2303 - protein, 185 aa, Artificial Sequence; identical to SEQ ID NO: 2302
  Synthetic

SEQ ID NO: 2304 - protein, 178 aa, Artificial Sequence
  Synthetic
SEDEKAIEELKKEIERLRRLLEELRKHVRRLIEEIKRLVEESKRHVEELIREIDDLRRRDQREEEVKRSVEKIKEDLERHERDVKRRLDEIREALKRHEEDTKRVDDELRERIERLDRRLKGRKEVTDIIRELKEVLDEIKRTSEELLRTIEEIVRDAERKNRELLKELKKVLDEVEK

SEQ ID NO: 2305 - protein, 178 aa, Artificial Sequence; identical to SEQ ID NO: 2304
  Synthetic

SEQ ID NO: 2306 - protein, 178 aa, Artificial Sequence
  Synthetic
DEDEELIKRLRDRIREIRKLVEDSARNVKRLIDEDERLARRSLRHLEETLKEIERKAREDQSEDTVREAVERIKRDLERHRRESKRLLETSDKLLRDHEEEVKKLLERIKRVIEDLDRKLRGRDEVREVLKEIRELVKELKERNDELLTRWKESIKRVEEEDERILREIERRVEEVER

SEQ ID NO: 2307 - protein, 178 aa, Artificial Sequence; identical to SEQ ID NO: 2306
  Synthetic

SEQ ID NO: 2308 - protein, 177 aa, Artificial Sequence
  Synthetic
RAEEEVKRLLKEDNETLKRIEDDVRRLLRKNNESIREAEKTNRELVKRVEDIIRRARERGVDESVLADLRRVLKELKEESDKVLDELRKLNEKLREEVRELKRELDEENKELDREIKEGQPLEELLERIKELNERTKKKVADLRRVAKRLDEETERKVRETERRWRDVLDKVRKKVK

SEQ ID NO: 2309 - protein, 177 aa, Artificial Sequence; identical to SEQ ID NO: 2308
  Synthetic

SEQ ID NO: 2310 - protein, 178 aa, Artificial Sequence
  Synthetic
REVEEVLERLKELLREHEKHAKEVEDRLRELIRENKEHAREMLERLEKILDELKKIRDSEEVLRETLKRIDEEVRRLIRHHEELSKEVLKEIEDIIRHHRKESRRSEEEVREIEKRITDEEALRELRRLLDEIRRVNRKVEERIKEVLKKIDEDNKEVVRRLEEALEKIREVIERTAT

SEQ ID NO: 2311 - protein, 178 aa, Artificial Sequence; identical to SEQ ID NO: 2310
  Synthetic

SEQ ID NO: 2312 - protein, 176 aa, Artificial Sequence
  Synthetic
KAKEDVKRALDEWKEVNDRVNEELKKAIDTWREVNRKVKEDVDRLVKEIEELIRRVRENGADERLLEKLKRELEKLTEDVKRRLKEDNDRLEKLLTDLKRESDKDREELKELARRLDELRREDVKRELKRVIEETRERAKRLLEDLRRLIEETKKLAEELLARAKEIIDRIREAAR

SEQ ID NO: 2313 - protein, 176 aa, Artificial Sequence; identical to SEQ ID NO: 2312
  Synthetic

SEQ ID NO: 2314 - protein, 182 aa, Artificial Sequence
  Synthetic
RAEEELDRLSREVEKVSKKAREDLEEMRKALEDVSRRVKEKLRRILEEIKEAIKDVKRRTNGSSKKLKEIEDLLRKLEEDLRDLERRVEESHERLEREVRRLLKEVDESSKRLREEVKRLRDEPPSRELIREVEKLIEDHRRRLEEIVETVRRLVDEHRRRLERIVREAAKLVKDIKRELEK

SEQ ID NO: 2315 - protein, 182 aa, Artificial Sequence; identical to SEQ ID NO: 2314
  Synthetic

SEQ ID NO: 2316 - protein, 182 aa, Artificial Sequence
  Synthetic
SVKEKLRRISKELEKASRDDERENRRILKEARDVIREAADKIRRIEEELRKIIDRVRKETNGSEDELRRIEELMRRADTELRKLEKTIEDLLREVEERVKESLERSRRSSERLRELVRDLDEKPPSEEIIEEVKRLVDEHKKRLDENVKRLKELVDRLRETLERLVDRLRKLVETLKRESDR

SEQ ID NO: 2317 - protein, 182 aa, Artificial Sequence; identical to SEQ ID NO: 2316
  Synthetic

SEQ ID NO: 2318 - protein, 182 aa, Artificial Sequence
  Synthetic
KVEEDLKRIKKEIKDAADEDREKNREIMKRLNDVTREVEERLRKILEDLERLVRRVKEEVNGRKEELDRIEELLRRAREELEKLEEDVRRDNKELRERVRESLERSDELVRRLEDELRRLEEKPPSEELIKRVKELVREAKERLKDNVRRLEELVKEWKRKLKEIVDRVRELVKDLERRLKE

SEQ ID NO: 2319 - protein, 182 aa, Artificial Sequence; identical to SEQ ID NO: 2318
  Synthetic

SEQ ID NO: 2320 - protein, 175 aa, Artificial Sequence
  Synthetic
SEKEKIVKDVEELIREAEELVRRLLKRLKELNDESEKTARDLVRKNEETLKELKDVVDRRVKDKDTLRKRVKELHDESRDDLRKLDELNRRVERELEKLVEELKRTIEELKKRLEEAPRARELDELIKKLDEVLRRAEKEAEELIRDHRRISREVKERIKDLNRRIERILREAEK

SEQ ID NO: 2321 - protein, 175 aa, Artificial Sequence; identical to SEQ ID NO: 2320
  Synthetic

SEQ ID NO: 2322 - protein, 181 aa, Artificial Sequence
  Synthetic
SLEEIVKRVEEDIRRIIEELRRRIEEADRKIAEIIDRLRKTVEKVNKEIEDLIRELKKKEGDDRDVERKLRELEELLRRHTERVRDVERRLKKLLEDHHREVREILKRAEKLLRDLSEELRTITDDKRVRELVEEVKKKLRDLVEEVRESVKRLEDTLRRVEEEIRTTARELLRRLREELE

SEQ ID NO: 2323 - protein, 181 aa, Artificial Sequence; identical to SEQ ID NO: 2322
  Synthetic

SEQ ID NO: 2324 - protein, 181 aa, Artificial Sequence
  Synthetic
SLEEEVRETVKRLRKEVEDWLREVEKVLEDLLRELKKSIEETKKVAKELEDKLRDVKRRNVDEDEVRRLKEEAKRTIEELEKKNKELERKIEKIVRELREKDKELDKRVEDVLDELRKRLTDERIRRTLEKAREEVKRLSAETKRLIEEVKRRLDELLKRDNDIIDDARRRVKKVLDEIET

SEQ ID NO: 2325 - protein, 181 aa, Artificial Sequence; identical to SEQ ID NO: 2324
  Synthetic

SEQ ID NO: 2326 - protein, 181 aa, Artificial Sequence
  Synthetic
DLEEELRKVVEDLERKLRESIRETEEVMRRLEESVEESIRKTEEVVKRLREKLEDVKRRNVDEEVVKKLEREVKEVIDRLREENRRHHETVKEIIKELEEKNRRLKKEAEDVIRELEKRLKSDEIRDTVRKAKEDVERLLEEDNRRIKEVLDRVAKLNKRDNETIERAEEEARKVLREIEK

SEQ ID NO: 2327 - protein, 181 aa, Artificial Sequence; identical to SEQ ID NO: 2326
  Synthetic

SEQ ID NO: 2328 - protein, 181 aa, Artificial Sequence
  Synthetic
DIEEEIREEVERLRRTLKELADRIKKLVDELREKLRRWLEEVEEVLRRLIEDLRRVKEENVDEKVVDDLEKKVRKLVEELKEKDKRLNEEAKEVIRKVEEEIKRHHDEVKKRLDELRKRVKTEELEKRVREAEEEVRRVNKKLKDDLDKAREDLKEFSDRTRRMIKAVERDVKRVLDEIRR

SEQ ID NO: 2329 - protein, 181 aa, Artificial Sequence; identical to SEQ ID NO: 2328
  Synthetic

SEQ ID NO: 2330 - protein, 177 aa, Artificial Sequence
  Synthetic
SVEETIKRILEEVEELIREVKERNERIERRAERLIEEVKRSNDEIKKEVRTAIEKVIRKREDDRVRKVLRELEKAVEDHDREVEKVVEEVRRLSKKHLDEVERALEELRRRLKEIKDRPVDKEKVDKLVKDLRRVIEELRKSLEDLERRLDDILRRLKESSDELVRELRRLLKEMEK

SEQ ID NO: 2331 - protein, 177 aa, Artificial Sequence; identical to SEQ ID NO: 2330
  Synthetic

SEQ ID NO: 2332 - protein, 177 aa, Artificial Sequence
  Synthetic
SVEEALDEIEKKVEEMIREVKETNDRVRRKVKELSEKSKTENERVVREARELIREVEREREEEEVRRILEEVERLSKKHLDENRRLVEEIDKEVEDHNREVERVLEEARRRLDDIKKKPVDKKDVDDLDRDLEKKLRDLKDSSRKLVKRVEDLVRESEDTVRKLIERLERLIRETKR

SEQ ID NO: 2333 - protein, 177 aa, Artificial Sequence; identical to SEQ ID NO: 2332
  Synthetic

SEQ ID NO: 2334 - protein, 177 aa, Artificial Sequence
  Synthetic
KVEEELDKILKEVEDLVRRDEEEIKRILEEVKELIRKVKETNDKVEREMRKLVEEVKKREEREEVKKVEREAEKKVRDHKREVKRVLEELARELKELLDETRRLLKDIRREVEDIKRKPVDEDSVRELVKRLRERAEESKKRTKDLEDKIRTKIEELERSSKELTDELRTLIREAER

SEQ ID NO: 2335 - protein, 177 aa, Artificial Sequence; identical to SEQ ID NO: 2334
  Synthetic

SEQ ID NO: 2336 - protein, 184 aa, Artificial Sequence
  Synthetic
SVEEAIKEILRELEKVNEDSKRLSDRNLKELEKALRDAKKSVEEILRELEKALDEVRKNGLSEELERRVREVLERIKEKLDRLRKTIKEALDRSRKKTEELSRENERLLRDIRRRVEEVRKDDSREDVERILKEIKDEVDRVRKENERVNRESEDESRKLVEELKKVLRRLKEEVRRIVEELRT

SEQ ID NO: 2337 - protein, 184 aa, Artificial Sequence; identical to SEQ ID NO: 2336
  Synthetic

SEQ ID NO: 2338 - protein, 182 aa, Artificial Sequence
  Synthetic
EVEERLEEILRRLERAVEDWKRKNEKILKELRDVVRESKKRTREIEKKIEDAARDVLREVNTDKKKLEEIKRLLEEVRKEIEDLLRTNEKLLEDLERLSKDDERRVRELLKEVRERVDKLKKDKVSKEVVKELEKDVRRIVEELKDSLRRLKEKVEEVARTVKKLNEELDDSVREIVERLRK

SEQ ID NO: 2339 - protein, 182 aa, Artificial Sequence; identical to SEQ ID NO: 2338
  Synthetic

SEQ ID NO: 2340 - protein, 182 aa, Artificial Sequence
  Synthetic
NVEEELDRIRREAEKVVKESRELTREILERAREAVEKSEEDTRRILERLERVVKRVKKDVNDREEKLKRIEDIVRRVRESVKKLEEDNKKILRELEESIRRWLEAIEKILEDLRREIKKLKDDRVSEEVLDELRKKVKKLVDELRTEDRRLEEEVKKIVRDAEKRNKELEDEIRRLAEELEK

SEQ ID NO: 2341 - protein, 182 aa, Artificial Sequence; identical to SEQ ID NO: 2340
  Synthetic

SEQ ID NO: 2342 - protein, 176 aa, Artificial Sequence
  Synthetic
SETETAVKKLKKLVDDLKREVERLVERLRELVRENSEKSRELVKRSDDLVRELLEKVKRRDLREDELRKEAEDLRETDDDLLRDDERHVKELEERMREELKRLREEARKLEEDIRKGEVDSELVKTVEEELKKVLEEVDRLVRKILEDLRRSLEESKRLSEESKKKLEDVLDRARR

SEQ ID NO: 2343 - protein, 176 aa, Artificial Sequence; identical to SEQ ID NO: 2342
  Synthetic

SEQ ID NO: 2344 - protein, 176 aa, Artificial Sequence
  Synthetic
RELEEAVKKLKKKVEDNTRTSRKLVTDLEREVEELKKEVEEVVRKSKELVRELKKKVDRRDLDKRELRKEVKELEERDERLLEKLERAVEELERKIRELLERDRRHVDKLRKDIEDGEVDSELVERVKEELKRSLEESDKLVEDVRRKLKEVLDDIRRLSEESKRELRDVLREADK

SEQ ID NO: 2345 - protein, 176 aa, Artificial Sequence; identical to SEQ ID NO: 2344
  Synthetic

SEQ ID NO: 2346 - protein, 182 aa, Artificial Sequence
  Synthetic
ELEEIVKDARRRIKELIDEARRTSEEVVERIKELLKRAEEISREARKRLTELLEELKKTVKDEDTLRRLLTELERLIREHDRLSREVLERLKKLIEDHKRKSDELLERLKRLLEELEDMVRRRIDKKEELRKIVEDILRTIKKLLEELRDDARRLLEEIKRLLEELERHVRKLLKEIDERIK

SEQ ID NO: 2347 - protein, 182 aa, Artificial Sequence; identical to SEQ ID NO: 2346
  Synthetic

SEQ ID NO: 2348 - protein, 182 aa, Artificial Sequence
  Synthetic
ELEEIARKAKEDIERLVEEARRISEEVKRELTELVERLRRISEEVRKRIEDLADELRKKVEDKDTLKRLEEEIRELAERHERKSRELEKRLKELVDTHRKKSEDLLRELKRLVEELERVLRRDIKDKKTLKEKVEDILRRIRELLRELRENARELVKEIERLIRELEKDAKRILKKIEDAIR

SEQ ID NO: 2349 - protein, 182 aa, Artificial Sequence; identical to SEQ ID NO: 2348
  Synthetic

SEQ ID NO: 2350 - protein, 181 aa, Artificial Sequence
  Synthetic
SVEELVKEIEKRLDELVREIEKTNKKVEDDIRKMLEDIKRVHDKSNEDLEKLVKELREKLKDEKRLEEITRRVEKMKRDNNEVLKELEERVRRILEHHRRLSDRVREEAEDIRRRLRELLERGLDLKDIEKVARDILRRVKKILEENRKHAEKARRELEKLLRESKRLVDELLRRAEEEKR

SEQ ID NO: 2351 - protein, 181 aa, Artificial Sequence; identical to SEQ ID NO: 2350
  Synthetic

SEQ ID NO: 2352 - protein, 175 aa, Artificial Sequence
  Synthetic
SREDRARELVKRILDEHKKILEDVEELAKELLRRHEELLKTLRELMRRIEEDLKRLEDEDVDREKAKRRVDELRKTLKKVLDELHKESRRLLKTLEEVLRRIDKRSREIKEELEKGEIDSEILKTVTRLSEELNRRIREVVRKVEEDLEDLNRRLKKIADEIEERIKEILRRIEK

SEQ ID NO: 2353 - protein, 175 aa, Artificial Sequence; identical to SEQ ID NO: 2352
  Synthetic

SEQ ID NO: 2354 - protein, 177 aa, Artificial Sequence
  Synthetic
SIEDVVRRIREEDRRLHEEIRKVVDEIRKRLEDALRSHEERVREVLERIKKLLEELKRRGTDKRVEKEVEDIERRLKEVLEESRDIVRRLEEELKRTLDKIRRENEKSEDELKKLTDERLDEKDLRKKLREIEEKNERLLRELERLLEEIRRTLEDLNRKLDEEIKKLERRLKERDR

SEQ ID NO: 2355 - protein, 177 aa, Artificial Sequence; identical to SEQ ID NO: 2354
  Synthetic

SEQ ID NO: 2356 - protein, 184 aa, Artificial Sequence
  Synthetic
SLKELIDEVERRLREVNRRARELVEEVKERLRRVNEESRELLREIEERLEDVLRELEEGDLREEELRRLAEDIKRVKDEVKKLFDDHRDTNRRIEDDLRKKVEEHHERNRRIIEELKRLLDRGNGEEEIKELVKRARELVKRSKEHVDELMETAKRLVDESRKHAEELFRELKKLIEELREKIR

SEQ ID NO: 2357 - protein, 184 aa, Artificial Sequence; identical to SEQ ID NO: 2356
  Synthetic

SEQ ID NO: 2358 - protein, 176 aa, Artificial Sequence
  Synthetic
SEVEKLVEDLRREVKRHSEKVERLVKELRDDLERWKERLEEIMRRLEKLVRDLEELLRRGDLSEESIKRLIDDAERRLRELLKRIREEIEEHRKKSEDLRREAKETVDELRERIERMNLDEELVREVKERLERSRERVDKLLRDNHKRLKEVLDEAKKLIDRVRKLLRRVLEEAKK

SEQ ID NO: 2359 - protein, 176 aa, Artificial Sequence; identical to SEQ ID NO: 2358
  Synthetic

SEQ ID NO: 2360 - protein, 176 aa, Artificial Sequence
  Synthetic
SDVERLITELADSVRDHSRDVRRVVEELEKLLRDWERDIEDIVEKLDRLVRTLEELLRRGELSEDLIREVVKDIDRKLKKVAREIEKKIRDHERKSRKLLEDVEKTSRENREEIKKANAREDLVRTVEKLNTESLDEVRKLVKKNHEDLKRVLDKAKKLIEEVRKKLEEVLDEARK

SEQ ID NO: 2361 - protein, 176 aa, Artificial Sequence; identical to SEQ ID NO: 2360
  Synthetic

SEQ ID NO: 2362 - protein, 178 aa, Artificial Sequence
  Synthetic
TLEEILKEVAERVKKANEDSRRILEKVKRDVETVNRENEKILKKAAEDVKRVLDEARKRNVDEKLLRELERLLEELKKEVEKLNRRNEKLLRDLARRVRELDERNKELLDRLADLVRRGDLSEKELREMIEKLKRDNERMLRELERRIEELKRDNDRVNEESKRLVDELKRDAEEKLK

SEQ ID NO: 2363 - protein, 178 aa, Artificial Sequence; identical to SEQ ID NO: 2362
  Synthetic

SEQ ID NO: 2364 - protein, 178 aa, Artificial Sequence
  Synthetic
TLEEILREVEKRVKEANERNRKISEELADLVRRVNEENKKILEDVAEEVRRALERARRRNVDERVLKKIRDLLRKLAEEVKKLNERNKEELKRLEKRDKELNDRNKELLKRLKETVERGDLSEEELRRMIEELEKRNRDVDRESKKLAEELEKTNRDVNRKSRELVRRLRRKLEEELR

SEQ ID NO: 2365 - protein, 178 aa, Artificial Sequence; identical to SEQ ID NO: 2364
  Synthetic

SEQ ID NO: 2366 - protein, 178 aa, Artificial Sequence
  Synthetic
ELEDILREVRKRVEDVNRRNKEILERVAEEVRRLNEENKRILEEARKRVEKVLEDLKRRNVDERLLRELEELLERLARRVEELNRENKRDLDRLRETVKRLNDENRELLRRLAETVKRGDLSEEELRRAIKELKDRNEDVDRRTKELIKRLEDKNRELNRESRERVEELKKRAEELAR

SEQ ID NO: 2367 - protein, 178 aa, Artificial Sequence; identical to SEQ ID NO: 2366
  Synthetic

SEQ ID NO: 2368 - protein, 178 aa, Artificial Sequence
  Synthetic
DLEEILKDVKRRVEEANRRNEKILEEAKEKVDRVNRSNEKILEEVKETVKEVLRRAREENVDDRVLEDLKRLLRELEERVKELNRRNRELLKELADRVKKLNDDNRKLLEELADTVRRGDLSEEELKEMIRRLEETNRRVDKETRKLIEELERRNREVDRESERLIRELKKKAKDDLD

SEQ ID NO: 2369 - protein, 178 aa, Artificial Sequence; identical to SEQ ID NO: 2368
  Synthetic

SEQ ID NO: 2370 - protein, 178 aa, Artificial Sequence
  Synthetic
TLEDILREIAKVVKEANKRNKRILEKVARDVEEVNKENKKILDEVKRDVERVLREAEKRNVPEDVLRKLAELLKRLEDRVRELNEETKRLLEELADRVRELNERSKDLLRRLADIVRRGDLSEDELRRMLEELERTLREVDRESDELVKKLKRDAERVNEETRRLIKELKEIADRLLD

SEQ ID NO: 2371 - protein, 178 aa, Artificial Sequence; identical to SEQ ID NO: 2370
  Synthetic

SEQ ID NO: 2372 - protein, 184 aa, Artificial Sequence
  Synthetic
SIEELVREIEKTNEDMRREIERLSDENRRRLDKALEDIERRAREIKEKLERVMKRLREKGVSEEVEERLRRLEKELKEVLDRLREIIKELKDDNERLTKRIRDRSRETRERLKRFLDEARRDKDEKRVLDELRKLLEDSKDELRRLLEELRRHIKETDDTVRELLDRIRKIREELDDEVRRLEK

SEQ ID NO: 2373 - protein, 184 aa, Artificial Sequence; identical to SEQ ID NO: 2372
  Synthetic

SEQ ID NO: 2374 - protein, 174 aa, Artificial Sequence
  Synthetic
KEEEDARRALKRVEEEVRRNKEEMRKLLEDNEKRIRENKKRAEDSSRKVKKRIDELRRDGKRGEEVKRDLDRLRDEHRRETKKSEDELKRNNERLEEETKRSKEDIKRIKEDLDRRGLPEEVLREIEKILRDLERDHRRVLEEIRKRNDELRETHERVLRENEKILEKVERELR

SEQ ID NO: 2375 - protein, 174 aa, Artificial Sequence; identical to SEQ ID NO: 2374
  Synthetic

SEQ ID NO: 2376 - protein, 181 aa, Artificial Sequence
  Synthetic
SVDDKVRRRIREIKEELERVLTRSERESDDIKRELEEVLKRSEERTKKIKDDAERGGVSDELREKLERETKRAEDKHRKIREDLKRDEDRNRKRHKEIRDEARKDTERMKKKLKDLKDDKDDERVMRDLERELEKLERKVREIKRELEEHNARLREKVRRIDEDLKRDNKELEDTIREDTR

SEQ ID NO: 2377 - protein, 181 aa, Artificial Sequence; identical to SEQ ID NO: 2376
  Synthetic

SEQ ID NO: 2378 - protein, 182 aa, Artificial Sequence
  Synthetic
KEEEELEERIRRLEKLVEDYKRELDRSIKELEDEVDRARRELEKSIEEMKKKVKKAEDDGPVDEELKRRLEEDNERHKRDLDRRKEELEKKLRELRKRNEELRRRLEEELKRVEEELKEANLPDRVIRKIKKLLDEVRERLERINRTHRELLKEVEERLKKILKDITDANRRIEERLEEITR

SEQ ID NO: 2379 - protein, 182 aa, Artificial Sequence; identical to SEQ ID NO: 2378
  Synthetic

SEQ ID NO: 2380 - protein, 182 aa, Artificial Sequence
  Synthetic
SLKEELKRINDENKEELDRLREELKKLLKEVEEELRRAAEELERINRRIKEELDKVADRVDDEKIKRIEKRLKEEHDRHREELKRIKRELDELKKELEKVLKDIEKKNREREKELRDREETTTEEVAERLLEELREDVKRTKEKMKEMLDRVKKKIDDIKRKLEKLLRDNERRIEELKRDAD

SEQ ID NO: 2381 - protein, 182 aa, Artificial Sequence; identical to SEQ ID NO: 2380
  Synthetic

SEQ ID NO: 2382 - protein, 176 aa, Artificial Sequence
  Synthetic
SVEEKLKKALEESKRKSKRIKDDDERANREVKKRIEDIVRRLEEVLRKVLKDVTKDIKDKRELLKEIEDRIREIEERIRRLTEEMKRTHEENEKRTREDEKRNDEEHKRIEKKLAETGASEDEVTRDVKRLEDHNTRLEKKVKESVERLKEKLEELRKRVEKIERDLEKLLEDVRT

SEQ ID NO: 2383 - protein, 176 aa, Artificial Sequence; identical to SEQ ID NO: 2382
  Synthetic

SEQ ID NO: 2384 - protein, 179 aa, Artificial Sequence
  Synthetic
KAEDVLRRVKEEHERIRREIKRVIDDVRRKHKEILDRLREEIKRVEELLRKILEDVERDGKRDDRLRRLAEELKKRLDDVKRDVEEKEKENRRRLEKEEKRLEENFKRNEERLRRIEEEGPVREEVVKELEDNVKRNEEDAKRTVEKLRKNLEDNRREVEKIVRDLRRLVEKAREDVKR

SEQ ID NO: 2385 - protein, 179 aa, Artificial Sequence; identical to SEQ ID NO: 2384
  Synthetic

SEQ ID NO: 2386 - protein, 173 aa, Artificial Sequence
  Synthetic
DLKEILDEARKLIEDLRKKAEEILEESKRLLDDLKRKADEILTRYDELTKRLSTKVPRTRELEELERRSKEELDKLKRELEEEVERWKEENEKIRKRMEDLVRDLRRKLEEARRDQRLEELKKRLEELIREVEKDLRRIKKESEDRVEEIERRLRRIAEELDKDVRRVEEEAK

SEQ ID NO: 2387 - protein, 173 aa, Artificial Sequence; identical to SEQ ID NO: 2386
  Synthetic

SEQ ID NO: 2388 - protein, 181 aa, Artificial Sequence
  Synthetic
SKEETVARRVDEIARELEEKNKKWEDDSRKAVDELRRKLEEWEKRSRDLREKVKDLLRKLKDQDDKERLKEEVRRVLEEWRRELKKLREEVKRTAEKWRRELKKLEDDSRRKLEEVKRELEELDVSEELKKKVEKLLEDHRKKSEELLRKDEKLIRDMEREVERLLREDEKVIEDVERATK

SEQ ID NO: 2389 - protein, 181 aa, Artificial Sequence; identical to SEQ ID NO: 2388
  Synthetic

SEQ ID NO: 2390 - protein, 181 aa, Artificial Sequence
  Synthetic
SKEETVERDVERIVRRLRELNKEWKKRSEEVKREVDESDKRTAEAVKKLVRDLEETLKDLKDRDDRETAKEEVDRRIKKIEDDLRRLLDEHRKLLEEWRERLKKLLDDSRRELEKVKEELERLDVSEEIKKKLEKLLKEHEDLSRKLLKEDEEEIDRHRRKVREWAEDLRKKLEEAERAST

SEQ ID NO: 2391 - protein, 181 aa, Artificial Sequence; identical to SEQ ID NO: 2390
  Synthetic

SEQ ID NO: 2392 - protein, 177 aa, Artificial Sequence
  Synthetic
SEKERAEEELKRIEDELREAIKRSEDRLRRIEKELRDREKRSEEELRRLEEELRRLAEERISEETVEKVARDIDEENKKHEDEVRKTEEKVKTENERHKKEVEDIARKVKRSIEELKRRNGDRKIIEDLKRLLREFERAVEESNERLRRLLEEFKEKVKESNKRSRELLRRMEEEVR

SEQ ID NO: 2393 - protein, 177 aa, Artificial Sequence; identical to SEQ ID NO: 2392
  Synthetic

SEQ ID NO: 2394 - protein, 175 aa, Artificial Sequence
  Synthetic
DDLERLEKEAREILERHKRALDELEKRLRRVLEKHEEDLRRLEETLRELLKKVRKDGLPEEVLRDVKRKLDKLKEDLKRSLDRLREELDRLRKELERSLRELKRDVERVKEELERNEKRREELEKEVRKLEKKSRDDIRRLEKELRELEKRSRDNIRELEKRVRRVARELDKTAK

SEQ ID NO: 2395 - protein, 175 aa, Artificial Sequence; identical to SEQ ID NO: 2394
  Synthetic

SEQ ID NO: 2396 - protein, 177 aa, Artificial Sequence
  Synthetic
DEKEEAEKALREIKKRIEDNVREVRRLNRELREKLRKLIEDYDRLLKELEKRVEDIVRKGRVDEKVKEDADRELEKNREELDRRRKEVDDRLRKHNRELEESMKEARRRLEEVDRRLDELGERDLRREEKKLRDELRDLHREHRKSIEDLDREIKKMEDELRRSIEENRKRVEELEK

SEQ ID NO: 2397 - protein, 177 aa, Artificial Sequence; identical to SEQ ID NO: 2396
  Synthetic

SEQ ID NO: 2398 - protein, 175 aa, Artificial Sequence
  Synthetic
REKERVKRVVRRVEEELKRNLEEVEEESRRDLRRLEENLERVEEAVRRILKRLDDSRIDSEELKRLKEEVREKLRRAKKDHDEYLKRNEEDLRRVRRKHEEIRERIKKKLRDVERENKPREELEKLIEKIERELKKTHDDSRREIERLRRETKKLHEKSEELIRELEKRLRDAER

SEQ ID NO: 2399 - protein, 175 aa, Artificial Sequence; identical to SEQ ID NO: 2398
  Synthetic

SEQ ID NO: 2400 - protein, 180 aa, Artificial Sequence
  Synthetic
SEVEEILDRIRRELERLAREARKTVERNKKELDRIREEVDRSLRRNKEELDRLRREKKDVDEEFLRRIEKELEDNKRELEREDRRLEEELKRNHEELEKEDRKIRKEIKDLEDEVEKKVRGEDARRAARELLKRLEDLLREHHDRLRKSDEEIRKLIEDHHRALEESNREIKELIDRMAK

SEQ ID NO: 2401 - protein, 180 aa, Artificial Sequence; identical to SEQ ID NO: 2400
  Synthetic

SEQ ID NO: 2402 - protein, 185 aa, Artificial Sequence
  Synthetic
DEAEKLIKDIEDKDEELKEKARELKEKLEERDERTKKLIEELKREADRTLEELKKKVEKAKTSDEKVLEELVREVEELLKRVKDLLDELVETVKRLNEESEEELRRLEERSRKVIEDLERRLSKLRSEVVKRVRDLLKRHEDLTREIKKEVKKMNEKNRELVRRVEETLKKLLEDLKRLLDESRK

SEQ ID NO: 2403 - protein, 185 aa, Artificial Sequence; identical to SEQ ID NO: 2402
  Synthetic

SEQ ID NO: 2404 - protein, 175 aa, Artificial Sequence
  Synthetic
SEEEEKVKDIERKLRKHNKEVKDTERENEKRLRELRRTVEEDRKDAERELERIKRVVERGEVDEETLKKILKDLRRKLEELRKRIEELKRRLERHHEEVERRLEESLRRLEDTLRKLEKSEELDRLEKELRESIRRAEELLKDSKRRADELIERIKDVLRKVKEKIEKLIEDTRR

SEQ ID NO: 2405 - protein, 175 aa, Artificial Sequence; identical to SEQ ID NO: 2404
  Synthetic

SEQ ID NO: 2406 - protein, 173 aa, Artificial Sequence
  Synthetic
SEKEVVEELKKTVDDLKRKSEEAIKKAKEAVDKIRRDSERAIRKNEDTLRKIEEEIKRNRSEEALKKIEDTLRELSKEHKEIIERIKKALDDLKRESEEIVKRLEDALRELAKSETDEDILREIAKRIKDLIEDHKRASKEIERDIRKILEDHKRAAEKIRRDLRRLLEDVER

SEQ ID NO: 2407 - protein, 173 aa, Artificial Sequence; identical to SEQ ID NO: 2406
  Synthetic

SEQ ID NO: 2408 - protein, 179 aa, Artificial Sequence
  Synthetic
SLEKMVTDIIRKLEEIARRHKTRSDEIVRRLEEIIKTHEKRSKELMDDLKRLVDEVRKKKDKAEEVKEKLRESLKRLAEESRKVVEDLKRTIERIKKESTETLKRIKDVVRRIREEARDKEPKEEDIRRLDEEVKDLERRSREEEERLEREVRELEKRSEETIRRVEKKVRDLADELRK

SEQ ID NO: 2409 - protein, 179 aa, Artificial Sequence; identical to SEQ ID NO: 2408
  Synthetic

SEQ ID NO: 2410 - protein, 174 aa, Artificial Sequence
  Synthetic
SEEDVVKKVRKKLEDVHRDTRREIRRLEEETKKLHDETRKTIETIERRLRDLRDRLTKEPKDKRVEEKVKKIAEDIERILRKLRRDHEDYLRRNEEVLKRLEDKHRKITEELDRGELDSEEVRDVKEKLKRNLEEARKASREDLERLKRNLEKADEDVRRLLEELKRLLDEVRR

SEQ ID NO: 2411 - protein, 174 aa, Artificial Sequence; identical to SEQ ID NO: 2410
  Synthetic

SEQ ID NO: 2412 - protein, 183 aa, Artificial Sequence
  Synthetic
SLEEAIEDLRRKLEKLLKDYADLSKEIEDKLRKIHEDSRRLVEKLEEEARRILKEVRERGKDEERVKKEERDIREELKKLEKTIEDSEREVEKEKRDSDEKLKRVEDDARKLLEDLRRSGEGREEEVRKEIEDADKRVKDLKRELERDIDELRKRVEELRRRHEEKIKKVAEDVKRREDEARK

SEQ ID NO: 2413 - protein, 183 aa, Artificial Sequence; identical to SEQ ID NO: 2412
  Synthetic

SEQ ID NO: 2414 - protein, 175 aa, Artificial Sequence
  Synthetic
SRLEKIKRELDKKLKDHEDDSRDKVRKLRESLKRHEDKSRKEEEEVKKTLKELEDKLRRDGPDKRVEEESRRHLEEVEKLLKELEDHSRRHREELKKRLDELRDHLRKLLEDLDRTDLEKRLVDDAKRKIKELEEENERLVKEVEDRNRELDERNKRIIDRIRRLNERVKEEAEK

SEQ ID NO: 2415 - protein, 175 aa, Artificial Sequence; identical to SEQ ID NO: 2414
  Synthetic

SEQ ID NO: 2416 - protein, 179 aa, Artificial Sequence
  Synthetic
DEVETVIERDKKLLEDWVDRARKVVKRDEDSLRRDEEENRRVVEENSRTVKELKERIRDERLVREVDTLARKLNRDIERTVEESRRLSEESKRLIEEVVKKVEKLSRDSVRILEAVKDGKEEVVKRVEEEVKRLNERADELLKRVEKRAEELNEESRRLSEEVERKVRELNREADERVK

SEQ ID NO: 2417 - protein, 179 aa, Artificial Sequence; identical to SEQ ID NO: 2416
  Synthetic

SEQ ID NO: 2418 - protein, 179 aa, Artificial Sequence
  Synthetic
SEVEEVVKRNSDTAKEDMDRNEKVVEDNSKRLREWEKAIEEVEKEVDKAMKDLKRRIRDEELVRRVEKLAKELKEIIKKVLDDIRKLIEELNRKIKDTVRRSKKEIDELNKILEEVRDGREKLVEDVRREVEKLNRESEERSKRVKEEVDDLNRKLEKLLRDVKEEVKKLLEEAERETK

SEQ ID NO: 2419 - protein, 179 aa, Artificial Sequence; identical to SEQ ID NO: 2418
  Synthetic

SEQ ID NO: 2420 - protein, 178 aa, Artificial Sequence
  Synthetic
DEVRKVVEDNERSVREIKEELKRVVEEDKELVDRWRERLEKVVKDNERSAKKIKDDVTKEEVKKLVEEVLRTSRKLAEELKKLIEEVHRTSRELIKRVDEEVDKVLEDSRRLAKELKDVDEMLRRIEETIRRLDEELRRLVEEVKRRIDELNREVEKRIREVEERIKEMDKRLREAVK

SEQ ID NO: 2421 - protein, 178 aa, Artificial Sequence; identical to SEQ ID NO: 2420
  Synthetic

SEQ ID NO: 2422 - protein, 178 aa, Artificial Sequence
  Synthetic
DEAEKVVEKDRRLIEKWKEDLKELVRRVREKVKEIKKRVADVVKENEDSVRRIEKEVTKEEVKRLVREVLERSRRLIEEVRRLVDEVLKTVEKLAKELVDKAEEVHRESRELIKDLKDVDEMLRRIDRRAERLNEDVARVIDEVAKRVTRLLERLEEKLKKIRDDIKKLDEELEEAAR

SEQ ID NO: 2423 - protein, 178 aa, Artificial Sequence; identical to SEQ ID NO: 2422
  Synthetic

SEQ ID NO: 2424 - protein, 178 aa, Artificial Sequence
  Synthetic
DEVRELVKENRRSVKENEEELKRILDEDERLIRDWKKKLEEVVRKVAELVREIEERVTKEEVKKLVREVLKTVKKLIDELRKLADEVHKRSNKLIEDNKRLTDEVLRRSEDLARKVKDSDELLRRVAETVKRMDEDLNRTTEEIADTIRRLNEEVAKRIREVERTVERLIEELEEAVR

SEQ ID NO: 2425 - protein, 178 aa, Artificial Sequence; identical to SEQ ID NO: 2424
  Synthetic

SEQ ID NO: 2426 - protein, 170 aa, Artificial Sequence
  Synthetic
DEEEELEKDARRVLEELRRELERVVREAKDINRRVEELIREVRERAKRVDDELRKRPRDDEVMKDVKREVERTIRDIERVLEDIERLSERSERLIKRVLDEVKRVVDDVLRKITNERVLREVERVLRELEREADEVLKEDRELLERWKKTVKDVVKENRDSLDELAKEMK

SEQ ID NO: 2427 - protein, 170 aa, Artificial Sequence; identical to SEQ ID NO: 2426
  Synthetic

SEQ ID NO: 2428 - protein, 170 aa, Artificial Sequence
  Synthetic
SEEERLREEAKEVLKRLREDLKRVEEDVERVDKRLRELNEDVARKLEEVLKRLREQPRDKDVADRVRREVEKILRESREVLKKSARDVDETIKKIETVLREIEKKVEEVVRKITNEKVLREVKRALDDLRRRVEEVLRKNEKSLRELEEENRRVLKKVEDLLEDIIRRLK

SEQ ID NO: 2429 - protein, 170 aa, Artificial Sequence; identical to SEQ ID NO: 2428
  Synthetic

SEQ ID NO: 2430 - protein, 175 aa, Artificial Sequence
  Synthetic
REEDEVRKELERVERRIEDLLREVERTNREVIETSERLTKTVEDDVRRVNTEIDRLLKEKKDDKERVVREVRELIRELNEKIKKTVEDSKRLADELAERNERVAREVRRLIEELKRRVGVEELLRELEEVLRRIEEKLKKIDDESKKLAKEDTDRNKRIVDENTRLVEEWDKRAK

SEQ ID NO: 2431 - protein, 175 aa, Artificial Sequence; identical to SEQ ID NO: 2430
  Synthetic

SEQ ID NO: 2432 - protein, 187 aa, Artificial Sequence
  Synthetic
SVLEEVRKKVERVIRESRELSERVREHIKRTIDEVKKLTEEVRKIVETLIRRLKELLDRVRRKELVEEVVRRARKVLKELEELAEKSIRDTRRLLDENRDILRKTIERSKRLLEEIEDVARKILKDVPDEEVRKILTDLRKAVDEDRRRNEKLLKDSEDAVRRDEKENRDILRELRKAIEEIERRLR

SEQ ID NO: 2433 - protein, 187 aa, Artificial Sequence; identical to SEQ ID NO: 2432
  Synthetic

SEQ ID NO: 2434 - protein, 187 aa, Artificial Sequence
  Synthetic
SMVDKVREEARKLIEEARRLSEEVKKIIDELTKRVKDLTRTSHELSKRLEDTIRELLKRVRRRELVEEVVRRLREMLKELEKTDRDSIRTTRDLLRRLEKIVRDTIRESRRVVKEAEDEIRRITKDVDDEKLREILKRLREELKRDEDRNRELLKRVRDRVKKDEEENRENTKRVREAVEKIERELE

SEQ ID NO: 2435 - protein, 187 aa, Artificial Sequence; identical to SEQ ID NO: 2434
  Synthetic

SEQ ID NO: 2436 - protein, 187 aa, Artificial Sequence
  Synthetic
DVLEEVRRRAEEVIREARELSKRSHDRSRELIERVKKLTEESHRLSRKLIRELEERLEKVRREEELEKVVRDAEKVLRDLKETDERSIRDTERVLRELEKTDRETIKRSRDLLEELERLARKILKDVPDEEVRRILKELRDEVKRDEERNRKNTKDVKDEVDKDRRTNEKNTEDAEREIRRIKEDAR

SEQ ID NO: 2437 - protein, 187 aa, Artificial Sequence; identical to SEQ ID NO: 2436
  Synthetic

SEQ ID NO: 2438 - protein, 187 aa, Artificial Sequence
  Synthetic
SVLEDVRRDVERLRREIEELSKRSHERSRRIIERLEELLKRSHDLSKRLRERLEELLKRVRREELVRRVVEEARRLLKELEKTDRDVVEEARRLVTELEDTDRRTIEESRRALKELEEEARKIRKDVPDEEVRRILKKLRDDVKKDEDDNRRNTEEVRKLAKDIERKLKKNTDDVRKDIKAIEDRLR

SEQ ID NO: 2439 - protein, 187 aa, Artificial Sequence; identical to SEQ ID NO: 2438
  Synthetic

SEQ ID NO: 2440 - protein, 187 aa, Artificial Sequence
  Synthetic
SVLEKVKELLDRLIRELEELVKTVEEIARRLITEVRELTERSHELSRRLIKELKRLLDDVRREEVLKDVVRRAEEVLERLRKTDEDSIRSTEDAVRRVAELAKRVLDKAEEVIRKVREDARKISKDVPDEEVRRILEEITRVLEEIATRLKRILDELRKAVDKDRKDNERNTEEVRKLIEEIKRRLK

SEQ ID NO: 2441 - protein, 187 aa, Artificial Sequence; identical to SEQ ID NO: 2440
  Synthetic

SEQ ID NO: 2442 - protein, 187 aa, Artificial Sequence
  Synthetic
SLLDEVRRKVKEVEDRLRKLVKDSHELSRRLIEEVERLTKTSHELSRRLIEELRELLKRTRTEELVKKVEEIVKELLRRLEETDKRSIERTEELLEELRETDRRVVEEAKRLVKEVEDEARRIKERVPDKDLRDILRKLREVLEEIERRLRKNTEDVKKVVDDDRKRNKDNTDEVRKAIREIEERLR

SEQ ID NO: 2443 - protein, 187 aa, Artificial Sequence; identical to SEQ ID NO: 2442
  Synthetic

SEQ ID NO: 2444 - protein, 181 aa, Artificial Sequence
  Synthetic
SEIERLLEEDTKRLRDWEEAIRKNLEDSEREAKKLKDRVKKLLDDARRDIDRLKKERKDDKDVIKLLDEVLDTVRRLAEDIKRVIEEVLKESRRLVEEVKKVIEEVNRRSKKLVEEIRREEREEILDEVRRRLKTLNDDVERLLREVHERSKKLRETVRKIVEEVEKRITELRDRVRRAAK

SEQ ID NO: 2445 - protein, 181 aa, Artificial Sequence; identical to SEQ ID NO: 2444
  Synthetic

SEQ ID NO: 2446 - protein, 181 aa, Artificial Sequence
  Synthetic
SDIDRLLEEDKKKLDDWRRAIEKNLEDSERRAREIKERLKKLLDEVRREAERLKEERKDDKDVLELIDRVVDTVRKLIEEVERVIDEVLRTSEKLVRDVKRAIDEVNERSKKLVEDARRDEKEDILREIAKRIEDLNKEVEDLLRTVHKESRRLDREVEEIVRRVKEEIDRLIREVREAAK

SEQ ID NO: 2447 - protein, 181 aa, Artificial Sequence; identical to SEQ ID NO: 2446
  Synthetic

SEQ ID NO: 2448 - protein, 181 aa, Artificial Sequence
  Synthetic
SEVDKLLEDDRKALEEWERRITKNLEDSKREIDDIRRRLRKNLEDSRRAIKEMKDRRREDEEVLRLLEEVLERSKRLVEEVEKLLEKVLRDSEKLVREVRRAIREVNKTSAELAKELKREEREEILKRIADEIKRLNDEVKKLLEEVHERSRRLIEELRRLLEEVHRRSRKLIREVEEAAR

SEQ ID NO: 2449 - protein, 181 aa, Artificial Sequence; identical to SEQ ID NO: 2448
  Synthetic

SEQ ID NO: 2450 - protein, 180 aa, Artificial Sequence
  Synthetic
SAEEEIEERLKRAIDRDEESVKRSAEEIKRLIEELKKSVDDSARELKELIERLKKLKKDGVDKSVIDKVVRELTRRVEELHERNRELLERVKETVERLHEENRRTSDEIEERVRELVREVDTKEIKDLLDRVKKEVERSKRKSAKLLKELEDAIKEIEDRSRELLERAREELKRVKDDKR

SEQ ID NO: 2451 - protein, 180 aa, Artificial Sequence; identical to SEQ ID NO: 2450
  Synthetic

SEQ ID NO: 2452 - protein, 180 aa, Artificial Sequence
  Synthetic
DETKRVRDLIRELIKRDEESVRRSARTLEELIRRLEESVKRSKKLVEDVIRKLKKLVKDGVDSDDIRKLVRDVERVVRKVVEENRRLVETVAREVERVHKENEDTSEEVRRTVKELVDEVRTEEAKKLLEDVEEAVERSKRKSRKLLEDARRALEKVKRDSDKLLEDVREEVERVLRTVK

SEQ ID NO: 2453 - protein, 180 aa, Artificial Sequence; identical to SEQ ID NO: 2452
  Synthetic

SEQ ID NO: 2454 - protein, 180 aa, Artificial Sequence
  Synthetic
DELEKIAEELDKLIRDDKKSVDESKRLLEDLIRRDRESVEESERELTELRRRLDELRRRGVDRDEIRKALEEVKRVVEKLVEENERSTEEVKRTVDRLHRENERTSEEVRRRVEELVREVDTREIKELLKRVRELVRESKERSRAVKERLKEEVKESERRSRELLERVRRDLEKIERDTR

SEQ ID NO: 2455 - protein, 180 aa, Artificial Sequence; identical to SEQ ID NO: 2454
  Synthetic

SEQ ID NO: 2456 - protein, 180 aa, Artificial Sequence
  Synthetic
SELERIKKELEELIERDKKSVKDTARRLEEMERRLRESVRKSEEDLRRMIEKLEKLVTDGVEEESIRRLIKEIIRTAKKLHDDNERLLKEVEEVVRKLVKDNEDTSKEIEDRVRELIREVKTDEARKLLEDVKRLVEESKRESKRLLDEVKKVIDRLRERSEKLLRDVERALREAEERTR

SEQ ID NO: 2457 - protein, 180 aa, Artificial Sequence; identical to SEQ ID NO: 2456
  Synthetic

SEQ ID NO: 2458 - protein, 180 aa, Artificial Sequence
  Synthetic
EEDERIRRDLEEAIRRDRKSVEDTREELRKMIEDDERSVRDSEEKLKELIKRLEELVREGRDSKDIEKALRDVEDTVRRLVRENEKSTEDIEKRVKELVEENKRTSEEIERRVEKLVDDVRTDEIRELLRRVRELVKKSKDDSRKLLEDVKRELERSKEESKRLLDEVKRAIDEIRERDK

SEQ ID NO: 2459 - protein, 180 aa, Artificial Sequence; identical to SEQ ID NO: 2458
  Synthetic

SEQ ID NO: 2460 - protein, 180 aa, Artificial Sequence
  Synthetic
SELERIEEELKKLIEDDKKSVDDTRKELDRAIEEDKRSVERSERDLRRMIKKLEDLVRRGRRDEDIRKLLEDVKREVKRLVDENEASTRTIKRRVEELDKRNRETSERIRKRVEELVREVKTDEIRKLLEEVKKLVEESKRTSEELLKEVDRRLRRSEDESRKLLEEAKKAVKRIEEETR

SEQ ID NO: 2461 - protein, 180 aa, Artificial Sequence; identical to SEQ ID NO: 2460
  Synthetic

SEQ ID NO: 2462 - protein, 180 aa, Artificial Sequence
  Synthetic
DELEEIKRRLKELIDRDRESVKRTEDELRELIKRLRKSVDDSRKEAERLIRELERLVKEGVDRRDIERLIREIKKRVKELNDENRRLAEEILRRVEKLDKENKETSEEIRKRVKRLVDEVRTDEIRELLERVERALRESKERSRKLLEDVRRAIEKVERDSEKLLKDVEEALERVKRERD

SEQ ID NO: 2463 - protein, 180 aa, Artificial Sequence; identical to SEQ ID NO: 2462
  Synthetic

SEQ ID NO: 2464 - protein, 180 aa, Artificial Sequence
  Synthetic
REEDEIRRELKELIERDERSVEETRKELEELIRELEELVKRVEDDLRRLIEKLEDLRRKGRDRREIERLLEEIEKRVTELVKEIEKLIEDIRRRVDELDKENRRTSEEIRKRVKELIDEVRSDEARKLLKEVEELLRRSKRKSEELLKRVEELLRKAREDIRRLLEEVKRVIDKVKKDTD

SEQ ID NO: 2465 - protein, 180 aa, Artificial Sequence; identical to SEQ ID NO: 2464
  Synthetic

SEQ ID NO: 2466 - protein, 179 aa, Artificial Sequence
  Synthetic
SDVERIIRENERKAKEIKDKVRKVIEDNERSVEEIKEKAERIVREVRKTLEEIRKRIRSELMRRLAELIREIEKRIEDVLRRIEKLHKDVSEAIRRVLKEIEDLHREVTEEVKRVRDANSKEMVERVERLIEEVARRSEELLRRIAKLVEDVNRESERLIREIKELAREVEKELKERAD

SEQ ID NO: 2467 - protein, 179 aa, Artificial Sequence; identical to SEQ ID NO: 2466
  Synthetic

SEQ ID NO: 2468 - protein, 179 aa, Artificial Sequence
  Synthetic
SEVDDIIRKNEELLKKIEDDARKILKENEERVEEIKERIKKLIEDDRRKLEEIKRRIRGELAERLRELSRTTVELLKEVLRRIETLHKKVTDDLKKVLEDIRRLHEEVTKELRRVKDANSEEALDRIRKLIEKVKRESEKLLEDIKRLIDKVDKDSERLLRTVKKLSEDVEKELKDTTK

SEQ ID NO: 2469 - protein, 179 aa, Artificial Sequence; identical to SEQ ID NO: 2468
  Synthetic

SEQ ID NO: 2470 - protein, 179 aa, Artificial Sequence
  Synthetic
SEVDEIIKDNERELDEVRREVEEIDKENKERLKEWVEEAREILDRLRKDLEEIRKRVRSRLVDELERLIREVEEVIRRVLERVRRLIEEVSKIITDVLREVERLHEEVTKELRKVEDANVREALDRLRRLIEKVVEDSRRLIKKVDELLKKVNKEIEDLVREVKDLVRRVKEELDRRVK

SEQ ID NO: 2471 - protein, 179 aa, Artificial Sequence; identical to SEQ ID NO: 2470
  Synthetic

SEQ ID NO: 2472 - protein, 179 aa, Artificial Sequence
  Synthetic
EEAERILKKDDDSVRKIKKEADRIVRENERLAEEIKKEVRKIIEDDKRTLEEIEKRIRSKLVEDLKRLSRETLEELRRVLEEAEKLHEEVTRLIRDVLRKIEELHRRTKKKLRDVRDANSEEMLRRVEEDLRRVNEESERLIRRIAKEVKRVTDESKKLLEEVKRISETVIEKMKEDAR

SEQ ID NO: 2473 - protein, 179 aa, Artificial Sequence; identical to SEQ ID NO: 2472
  Synthetic

SEQ ID NO: 2474 - protein, 179 aa, Artificial Sequence
  Synthetic
DEVEEILKRDEEALRDIEKKVREVDERNRREVEKIKEKVKEIIKRDKDELDEIRKRIRSEKARELEELSDRTLKTLKKVLDDIEREHREVSRDIKKVLEDIKRLHDETLKELTRVRDANSEEVLKRLEEEARRVNKTSKDLLKEVEDKIRKVNRKSEELLKKVEELSRRVIEEMRRRVK

SEQ ID NO: 2475 - protein, 179 aa, Artificial Sequence; identical to SEQ ID NO: 2474
  Synthetic

SEQ ID NO: 2476 - protein, 181 aa, Artificial Sequence
  Synthetic
RELEELIEDLRRALERSREEVTRLLKDLEDANRRSHRHNEELIKRLRKILKEARDRVKRDNVDERVVRRVERLVKESEKDNRRVLKESSDLVKKIVDELREVLKRSTELVERVVDLIRKLREEEALKDLRRVVEEVKKRSTDLNREVAKVIEEVKKRSEDLNRELEKLNRDIEERIDRETR

SEQ ID NO: 2477 - protein, 181 aa, Artificial Sequence; identical to SEQ ID NO: 2476
  Synthetic

SEQ ID NO: 2478 - protein, 175 aa, Artificial Sequence
  Synthetic
REEEEARKILERLEEELKRSLDEVRDLIEKATKESKDVNEKIRKLLEELKEELRKVVEDTGGNVEEIDKILKKVKKDLDDLLKESEDVARKVKKLLDELHEKNREMLERVRRELERVVKVEELVKDVERKLKRVAEESRKLVEDLRRRIKESREEIKRLVEDLERVLKEIKEEAK

SEQ ID NO: 2479 - protein, 175 aa, Artificial Sequence; identical to SEQ ID NO: 2478
  Synthetic

SEQ ID NO: 2480 - protein, 175 aa, Artificial Sequence
  Synthetic
REEEEALKRIRETSERIKRVVDDLHRRNKKSTDDIKRRVDELHKRNEKIVREVLDVIRRRGGEAEEVKELVERLRRSVEDSLREVTRLVEEDKRSVDESLDELRRLLKENRDLVERLVDSEVLRELDRRTKELKRRADELVTENRKLSKELEDEIRRLAERNRDAIRKIDKAVKE

SEQ ID NO: 2481 - protein, 175 aa, Artificial Sequence; identical to SEQ ID NO: 2480
  Synthetic

SEQ ID NO: 2482 - protein, 175 aa, Artificial Sequence
  Synthetic
DEEERALETIRDTSRRIEERIDDLRRRVEKIVRDIEETIRRLHEENRKIAERVKEVIERRGGKAEEVKKLVDELRRSVKKSLDDARKLVEDLKRVIDKVLEELRRLLEEDKRLVDELVDSEVLKELEDETRRVKERVDKIIKELEERVEDVERKVRELVKRNEELLKKIKDDADK

SEQ ID NO: 2483 - protein, 175 aa, Artificial Sequence; identical to SEQ ID NO: 2482
  Synthetic

SEQ ID NO: 2484 - protein, 175 aa, Artificial Sequence
  Synthetic
SREEDAVRKIRKLVEDVTRETKKMLEDVRRLVETVEKLTDDLLEEVRRLVEEVEDEIRRAGDVEERARELVEEIKRIIDEVRETSERLDREIEDLLRKVEKRARDLDRRIKEIIDREVDSELLREVEDLLRRHHETVRRILDEIRRLIERHHRRVREILKELDKLVKDAADEVRR

SEQ ID NO: 2485 - protein, 175 aa, Artificial Sequence; identical to SEQ ID NO: 2484
  Synthetic

SEQ ID NO: 2486 - protein, 188 aa, Artificial Sequence
  Synthetic
SEVERVEEEVKRLATEVEKSNRDSLREIEDLNRRDRDISRRVKEEIERLIREVKKLIDDRREEEAVREVEKVIREVLRRVTELIRRLRETVKEIRKRVEELIRRDEELVDRVLKEVRRLIEELRKRNDEKKVKELLERAKKIADELRKHIKRTLKKVEEEVEKNKRDNDKLLEEARELIKRLDDEVRR

SEQ ID NO: 2487 - protein, 188 aa, Artificial Sequence; identical to SEQ ID NO: 2486
  Synthetic

SEQ ID NO: 2488 - protein, 188 aa, Artificial Sequence
  Synthetic
DDLERVRKEIEDLNREDKRRSEEVRREVKKLIEDLEDSNRRSLEEVDRLVETVRELIDRERREEAVDKVRKVIEEVLRRVRELVERDERLVDEVLRRVKELIRELRETVKEILKRVEELIRRLEDRNDKEKVKRLLRTVRELMKKNKRDNDRLLKEAEDEARRVKRHIKESLKRIEEEIRRLKERLER

SEQ ID NO: 2489 - protein, 188 aa, Artificial Sequence; identical to SEQ ID NO: 2488
  Synthetic

SEQ ID NO: 2490 - protein, 188 aa, Artificial Sequence
  Synthetic
DELEKVAEDIKKLNKEDRDRSDEVRRAVKELVKEVEKKDKDIKRRAEELIREIKEDIERRREEEVVDRVREKIKKVLKEAEDLIRDSKRVIDEVLERVERLIRELEKTLEEILRRVRKLIRDLEEKNDREKVRKLLEDVEREARKNEEDNRKLLKDIREEIRRLADRSRKTLEDAKRLIEKIERDLEK

SEQ ID NO: 2491 - protein, 188 aa, Artificial Sequence; identical to SEQ ID NO: 2490
  Synthetic

SEQ ID NO: 2492 - protein, 172 aa, Artificial Sequence
  Synthetic
SEVEEVLKEIEEMLRDLERRVKESDEENRDSLRKIREDVERVDEENRDTLRRIKEKVKGELLKEVEELIRELSRELEKVLKEAEDAVRELSKDNRRVLEEIRKAVKRLLDLVREDGSEKVMKEVRDVIARLRDELEKVTEDSRRVNKELKKRLEDVVREIRRANEELDERVR

SEQ ID NO: 2493 - protein, 172 aa, Artificial Sequence; identical to SEQ ID NO: 2492
  Synthetic

SEQ ID NO: 2494 - protein, 172 aa, Artificial Sequence
  Synthetic
DEVEKVLEEIKRALDDLRKKVEESKREIKEALKRVEKHTRDSDTDNKRTLREIEERVKSKDLERVRKLVEELSEENERSLREVRRVAEELLEINERVLEEVERVVKRLLDLVRRRGEERVVEEVRRVLEELRRRLEKVTEDSRRAIERLEREDRRVSKKSKDVNKKLDDDVR

SEQ ID NO: 2495 - protein, 172 aa, Artificial Sequence; identical to SEQ ID NO: 2494
  Synthetic

SEQ ID NO: 2496 - protein, 178 aa, Artificial Sequence
  Synthetic
DSARKVEREVEEAARRVERTLEDVTRKVRELHDEVRRRLEEVKRRIEDLHRRVDEEPRGKELKEKLDEVHKRSEDMLREVEKIVRKVNTESKKLLDDVRRELEDVLRRVKELLRDVLSDKDTVKRVLDDVARIVKRIEEDIKRVLEESKKLVRDIEKEIRDVKKESRDLVREIREKIR

SEQ ID NO: 2497 - protein, 178 aa, Artificial Sequence; identical to SEQ ID NO: 2496
  Synthetic

SEQ ID NO: 2498 - protein, 178 aa, Artificial Sequence
  Synthetic
SSAEEVKRELEERHRDLRRTDEELRKDLDRVHDRARKILEEIEKKIRDMHRKVKERERGEDLERELDEVNKRSEELVTRAKEEVTRVNERSKRLVERSKEKVAEVNKRSETVLRDVLSDERKVKKVRDESNKVVEEIMRHSDKVLERSRRLVEEIRRRLEEVLRTSREVVRRIRDEVR

SEQ ID NO: 2499 - protein, 178 aa, Artificial Sequence; identical to SEQ ID NO: 2498
  Synthetic

SEQ ID NO: 2500 - protein, 172 aa, Artificial Sequence
  Synthetic
REVEEVLKEIEEMLKRIEDDVRRVLEEIKDVARRNEDEVRKLLRENEESVEEIKRRVSEELLRKVVTLSEDVVRKLAEVVKDTLRKIETVVKKVEKVVEKIRRDIKRVAKKVRKDSDRKVVEEVRKLLTDLKRLLEEVVKEVRKRLKELHDRTRTVAEEIRDINKKLKEEVN

SEQ ID NO: 2501 - protein, 172 aa, Artificial Sequence; identical to SEQ ID NO: 2500
  Synthetic

SEQ ID NO: 2502 - protein, 185 aa, Artificial Sequence
  Synthetic
SSVDEVRRTIEELIRRVEELVKRSKDHVDETERRVKELVRRSHELTKEVIERVEELLRRLKQRDVLEDILRRVKKLVDDVHESNRRVLEEVKRLVDENRESNKKVLEDVTRAVEELERLLRDKVSDEDKVRKLVEDLRRALEKIRREIEKSTEESDRVLRRIEEEIRRDSEELKRALREAEEEVR

SEQ ID NO: 2503 - protein, 185 aa, Artificial Sequence; identical to SEQ ID NO: 2502
  Synthetic

SEQ ID NO: 2504 - protein, 184 aa, Artificial Sequence
  Synthetic
SEVEELLKEVERLVREVEERVRRLHETDRKLLEDVKRKVEELHREDKKLADEVREAVKRRRDEEAVERIERLLREVEKHSDETVKEVKKLLDEVTKHVEDSNREAERLLREVRELVKEVLRRAGDNEDVERLRRELEKVAEKIRRLVEANRKTVEDARREIEKLLEENRRELDKVRRDVEREAK

SEQ ID NO: 2505 - protein, 184 aa, Artificial Sequence; identical to SEQ ID NO: 2504
  Synthetic

SEQ ID NO: 2506 - protein, 188 aa, Artificial Sequence
  Synthetic
KEVDDLLKEVRRLVREVEKELKRLHDENRKSSEEIARRLEELHKESKELVERVKETLRDLRKDSGDERVRREIRRLVKEVEDVVRRSIREAEELVERDERSVKRSIEEIRRLVKEVEDFVRDVIRKIRDEKVVRDLEREVREALRRLEEILRRDEDDVRRSREELKRIIDENREEVKRVLRELEETLR

SEQ ID NO: 2507 - protein, 188 aa, Artificial Sequence; identical to SEQ ID NO: 2506
  Synthetic

SEQ ID NO: 2508 - protein, 182 aa, Artificial Sequence
  Synthetic
SEVDELVERNERLVDEVRRRVEDVARKLEKVSRDSDDLVRRSNEELEDRLRKVEKRVREERDAKELVEKLIREVRKVLEESEKLVRDLIKKNEDVLREIEKEIRRLSKENEDVLREIERRIEDKKKLDEIRERSKRANDTLRKLLEDIRKRVEDSIRRLDELLKRSETRVRDIIKKLEDELR

SEQ ID NO: 2509 - protein, 182 aa, Artificial Sequence; identical to SEQ ID NO: 2508
  Synthetic

SEQ ID NO: 2510 - protein, 182 aa, Artificial Sequence
  Synthetic
DEVDELERRNERLAEDVRRKVREVEERLKELSKRSMDIVKDVLRRLKELVDRVEKKVREKRDDEELVRRLIKEVRRVLEEAKKVVKRLIEENRRVLEEIKEVVERLSRKNEEVLKRIRERISDEKKVEEIREKSERVNRDLEDKLRKIEEKVKESEKRLRDLLREIEERIKRAIEKLERDLK

SEQ ID NO: 2511 - protein, 182 aa, Artificial Sequence; identical to SEQ ID NO: 2510
  Synthetic

SEQ ID NO: 2512 - protein, 182 aa, Artificial Sequence
  Synthetic
SKVEELTERLRRLSKRSEEEVEKSNKDNDELVRRVLKRVKEVMRELEKLVEKVKEDVRRERDSRELVKKLIDEVRRVLEDARRVVKELSKENERVLRESEKLVRELIKENERVLKELEKRIDDKETLDRIRKEVEDSIERLKKLLDDSRRRSKEANDALRKLLKEIEDTIRRAIEELERARR

SEQ ID NO: 2513 - protein, 182 aa, Artificial Sequence; identical to SEQ ID NO: 2512
  Synthetic

SEQ ID NO: 2514 - protein, 182 aa, Artificial Sequence
  Synthetic
SRVEELTEENRRLAKRLKEVVKKVLDELRRRVEEVKERVERSNKKLRDLVREVDERVATKRDVKELVEKLLREIEKVLRESEKLVRDLIRDVRRVLEEVKKLVKEVSDRNREVLEDIKRRIDDEEIVRRIEEESKKVNRELEELLRKIEDDIRKAEEELRELVERSKREVDKALDDIDRRTR

SEQ ID NO: 2515 - protein, 182 aa, Artificial Sequence; identical to SEQ ID NO: 2514
  Synthetic

SEQ ID NO: 2516 - protein, 182 aa, Artificial Sequence
  Synthetic
KEVDDVKKELDDVDREVKELIKRAHDKNRKVVKEVEDELRRLTEDDKRVADKVRELLKKVRDKEEVVRRLLEEIERSLRKIEEDVKKLLEKIKRSLEESRELAKELLEKVARVLDKIKKTITDKDKMKEVEDEVRKVLDTIRKLLKRDEEAVKEALDKVKKMLDDARRHSEKVLREVEDTLR

SEQ ID NO: 2517 - protein, 182 aa, Artificial Sequence; identical to SEQ ID NO: 2516
  Synthetic

SEQ ID NO: 2518 - protein, 178 aa, Artificial Sequence
  Synthetic
SEVEELLKEVRELARRIEEEIKKLHRRNEELARRIKETIKRLIDENRKLAEDVRRDSGPDDRLRDLVRRVAEHVKESSDRIKELVDRVRRHVKKTSKEVDELLKKVERVVEEVLRRVGDGEDAKRIRDELERVRKSIEKLIRDNERFLEKVERDIRKLIEENEDLLRKIKEDVERKEK

SEQ ID NO: 2519 - protein, 178 aa, Artificial Sequence; identical to SEQ ID NO: 2518
  Synthetic

SEQ ID NO: 2520 - protein, 178 aa, Artificial Sequence
  Synthetic
DEVRELLETVRKLAEDVERRIRELIKENERLAREVERRIKELHDRNRELAREVEEKTGPDEELRRLLKEVEDHVRRTIREVEDLLRRVKKHVEDTTREIAKLLREVEEVVKDVLRKTGEGKEAREIERELEKVKDTIRRLLERNEELLEEIARRITKLLEEDKELLERIERRIAEKLK

SEQ ID NO: 2521 - protein, 178 aa, Artificial Sequence; identical to SEQ ID NO: 2520
  Synthetic

SEQ ID NO: 2522 - protein, 185 aa, Artificial Sequence
  Synthetic
SEVETLLRELKRLAEEVKKRIEELDRELKKLSDDVRREIERLIRENERLAREVLKEIRDLKGDKKRIEELLREVEKSVRETSKTIRDLLRRVEKVYEDVLRTIRELLERVRRVAEDVRRKIKERGKEEALREIEKLLRKVEEDVRRLIEKLKKSLEDSARDVDRLVKENERILEEVAREVEKLLR

SEQ ID NO: 2523 - protein, 185 aa, Artificial Sequence; identical to SEQ ID NO: 2522
  Synthetic

SEQ ID NO: 2524 - protein, 185 aa, Artificial Sequence
  Synthetic
KEVEDLLRDLKRIVDEVEKRIRKLIEDNKRLADEVRERIERLHKRNKDLAEEVLKRVRELKGDDKRIRELLKEVEDSSKESVERIEELLREVEESVKRSSREIERLLEEVARLAEDVIRKAEERGKKEVVKRIKEELDRVREEVKKLIKRNEELLKKVAEDVRRLLEKDKKALEEIKRRVEDELR

SEQ ID NO: 2525 - protein, 185 aa, Artificial Sequence; identical to SEQ ID NO: 2524
  Synthetic

SEQ ID NO: 2526 - protein, 181 aa, Artificial Sequence
  Synthetic
DELEELRKRVKENEDEVEKVLRELHKLNEENKEEVDRALEELRKRVRDIEEEIKKEPVDEELLRELERLVDELRRIVEKVIEDAKKLTEESNELNRRIIEESRRLSKELRKIVEDVSRVENRKDVVDKVRKVIEEVHKRSRDLAKEAREVNRRVHETTKKLVEDVRRVIEKVEEDVRRKVK

SEQ ID NO: 2527 - protein, 181 aa, Artificial Sequence; identical to SEQ ID NO: 2526
  Synthetic

SEQ ID NO: 2528 - protein, 181 aa, Artificial Sequence
  Synthetic
SSLEEADKKVDKNRRDVDRALEELHRRNKRNEEEIRKALKENRETNKRLLEEIRKNPVERELLEELEKLVRDSLRVSEEVIRDLERLTRESNRLNKEVIDESRKLSERLKDIVRTMSRVENREDAVRRVDKVIKEVHDESKRLVDELRDRNRRVHDETRRLDEESKKINRTVEELIRRKET

SEQ ID NO: 2529 - protein, 181 aa, Artificial Sequence; identical to SEQ ID NO: 2528
  Synthetic

SEQ ID NO: 2530 - protein, 181 aa, Artificial Sequence
  Synthetic
DKVEELLKRLEESTRRILKRVEELLRENERLAREVRKTVERLLEENRRLIEEVERRVRRDKKREAIEKLVRDVSRSADESSKRIKKLLDEVEESVRRSSKEIKRLLDEDRKLVEDVERRITDEKLRRELRRLLRESEKKIKEMLDRNKELLDEIERTIRELLKRNEDLLREVRERAKEADK

SEQ ID NO: 2531 - protein, 181 aa, Artificial Sequence; identical to SEQ ID NO: 2530
  Synthetic

SEQ ID NO: 2532 - protein, 181 aa, Artificial Sequence
  Synthetic
DEAEDLLRKLKRSTDEIKKTVEKLLRENEKTSRDIEREVRELLRRNKELAERVEEVARRENDKKKIEELLKEVERSARESSERIKKLLRDDEKSVKDSSDEIKRLLKEDKELVERVIRRITDEKVRRELERLLRESEKEIRKLLKRNKELLDESRDTIREMLERNKRLLEEVRKKIEKMKE

SEQ ID NO: 2533 - protein, 181 aa, Artificial Sequence; identical to SEQ ID NO: 2532
  Synthetic

SEQ ID NO: 2534 - protein, 181 aa, Artificial Sequence
  Synthetic
SEAERLLEELKRSTDEIKKRVEKLLEDNKRTSEEIEEEVRRLLETNRKLIEDVKRKVERDRDKDEIKRLLDEVKKSAEDSSRRIEELLKEDKKSADDSSEEIKRLLDEDRKLVEDVIRRITDERVRRELEKLLRDSERKIKEMLERNEKLARDSEERIRRMDDKNKDLLRRVKETIERKLK

SEQ ID NO: 2535 - protein, 181 aa, Artificial Sequence; identical to SEQ ID NO: 2534
  Synthetic

SEQ ID NO: 2536 - protein, 181 aa, Artificial Sequence
  Synthetic
DEVEDLLRKLEESTRRILERVKKLLEDNKRLIDRVRKEVERLLRDLKRLAKEIDEEVRRDNDKDRIRDLLREVERLVREVIKRIRKLLEEVKKSIEDSSREIKRLAEDDERLVREVIARVTDERVIRELEELLKESKKRIDDALRENEKLLREVKRRIEEAERTIKELLEEIKRKIAEEEK

SEQ ID NO: 2537 - protein, 181 aa, Artificial Sequence; identical to SEQ ID NO: 2536
  Synthetic

SEQ ID NO: 2538 - protein, 182 aa, Artificial Sequence
  Synthetic
KEAEELKRRLEDLVRRVEEDNRRLLEEHKKLVKDVRKRAKELLETHKKLVEDVTREVRKSTDSDVIRRLLEEIHRLVEEILREIEELLKRLHDLARRILERVRDTLRELEKLVRKILKDIKDLREVLEDLKRDLERARKINEESEKRIKDSDKRVHEEIRRVLEEVKKSDEEVRRRADRERE

SEQ ID NO: 2539 - protein, 182 aa, Artificial Sequence; identical to SEQ ID NO: 2538
  Synthetic

SEQ ID NO: 2540 - protein, 181 aa, Artificial Sequence
  Synthetic
REVDELRKELERIVKEVEDVIRDLNKKLKDILKDVKDKSDELNERLKKIVEDVRRLIRDVKGNRKDIRTVLERVKELVEETIRRDEELLDRVRKLVEETIRRIKRMLERVEELVKRVISRVRDKMVEELERLLDEARRRVEEAIRSNEELLKRIEEESERTVRSNEKLLKEAEEEVRRAEE

SEQ ID NO: 2541 - protein, 181 aa, Artificial Sequence; identical to SEQ ID NO: 2540
  Synthetic

SEQ ID NO: 2542 - protein, 181 aa, Artificial Sequence
  Synthetic
DEVEDVERDLKRILKEVKDRSDELIERNRKSTEDMKRRSKELNEELRRIIEDIRRLIRDTKGDKKKIEEALERVERLARRTIEEDKRVLEEDKRLVDRLLDTDRKLLKEVKDLVKEIIKRVRSKMVERLERLLEEAERTSRETLKRLEDTLRESEKRSRETVRSNEELVKEVTKEVEDAKK

SEQ ID NO: 2543 - protein, 181 aa, Artificial Sequence; identical to SEQ ID NO: 2542
  Synthetic

SEQ ID NO: 2544 - protein, 181 aa, Artificial Sequence
  Synthetic
DEVETVLRDNERTTKEAEDDVRRLNEELKEIIKRVREVSKRLIDELRRILEDVERRAREVKGDKDDIDRLLKEVEELVRRVIRTDEELLKRVEKLVRETIKKSKDVVKEDEKVVRRLISRIRSDFVERLRRTLEESKDKARRNVESNRELLERARKDSKRTLEELERLLETVRKSVDEMKK

SEQ ID NO: 2545 - protein, 181 aa, Artificial Sequence; identical to SEQ ID NO: 2544
  Synthetic

SEQ ID NO: 2546 - protein, 178 aa, Artificial Sequence
  Synthetic
EREERLEEKLKKSVDDSRELIERVLRKHEKVSDKVRRELERILEDHKRVLEEIKRVLKDRRKDKEVIRDLLRKIHEVATRLRERIKRLLEEVRRSVEEIKELVDRLNKHNERVIREVRRDSDVERLKDLLDKAHEEDRRAKEEVKRLLEDTTKKIKEFLDRVERSNEEVERELEKAER

SEQ ID NO: 2547 - protein, 178 aa, Artificial Sequence; identical to SEQ ID NO: 2546
  Synthetic

SEQ ID NO: 2548 - protein, 180 aa, Artificial Sequence
  Synthetic
DKDRKIKRIIEEVKKTIRKLLDDVRRINEEVLKELRKLLREVEEINKEILRRLKELVKTSKSDDVIRKARELIKRSREINKEVIDRLRKLVEDTRRINKTVIDEIKKLIDDVAEIIKDVTDEKVKKELDDEIRDAERELREAKKDMDRSNEELREEIKRAEERLRRLDEKLREEVEKDRK

SEQ ID NO: 2549 - protein, 180 aa, Artificial Sequence; identical to SEQ ID NO: 2548
  Synthetic

SEQ ID NO: 2550 - protein, 187 aa, Artificial Sequence
  Synthetic
SVKEEIKEMLKKIKRHSDEALKKNKETLDRDRKRVEDVIRELKKLLDEIRKRVEDVRRRVKDEDKLREIEDVLRRIEKRVTDLIREVRDSLRESEELSKRLLDKIKRSLDEAKRLVEELLEEVDRDDREEIARKVRELLERVLRDDRRVVREVEELNRRMHKKNEEVAKKVRDLLREVRKELEDVDR

SEQ ID NO: 2551 - protein, 187 aa, Artificial Sequence; identical to SEQ ID NO: 2550
  Synthetic

SEQ ID NO: 2552 - protein, 188 aa, Artificial Sequence
  Synthetic
REAEELLKELDEIIRRVEEEVKRLLDKVRETTKRIEEEIRKLDEDLKEIIREVEERIRKLKSDSGDERVRDKVRKLLRRLERVATESIRRIRELMKRDEDVIRRVLERVDELLKEIEKLIKEVRDRTDDEEVERRIKRLREKVKKKIDELKERVRRLLEESRRKAERVEESNRDLLRELKERLEERRR

SEQ ID NO: 2553 - protein, 188 aa, Artificial Sequence; identical to SEQ ID NO: 2552
  Synthetic

SEQ ID NO: 2554 - protein, 175 aa, Artificial Sequence
  Synthetic
SFEEEIKKIADEVEKRIRDAEKRSKDILEKSREVVERAKRRSEKLLRDAEREIKRVMEEKDDERIRRLLKELRDVVKRSKDLIDDLLRENKRVVDDSLRLIRELLRRLREVVRRLEEDGKDEMLRRLKKVTDDVRKRLEDSHRRLEKVTEESRKRADESHEELRKLIEEVREKLK

SEQ ID NO: 2555 - protein, 175 aa, Artificial Sequence; identical to SEQ ID NO: 2554
  Synthetic

SEQ ID NO: 2556 - protein, 175 aa, Artificial Sequence
  Synthetic
SSKERIEKILREVKREIEEAEKRSRDILKDSERIMRDVKRTTDDLLRKAEEIIREVAKRKDDDRVRDLLRRLRDVVRRSRELIKKLLKDNRKAVEDSKRLIKKLLDELRDMAEKLKKDGDEEVLKRLRELIDTVRRVLEESHKRLRELTKRSEEEARRVNEELRELIDRVRREAE

SEQ ID NO: 2557 - protein, 175 aa, Artificial Sequence; identical to SEQ ID NO: 2556
  Synthetic

SEQ ID NO: 2558 - protein, 175 aa, Artificial Sequence
  Synthetic
DVEKRIEELRERSDRIIDEARKRSEKLLRESEKMMRDVDKTTEDILREAEEEIKRVLDEKDDDRIRKLLEEIRKVIKESKDVIRKLLKENKEAVDTSRRLIEELLKRNREAIEKIRDKGEERVLKDLERLSKESEDELRRSHEELKRLTEESRETIEDVNRKIKEKIEDVKRKLK

SEQ ID NO: 2559 - protein, 175 aa, Artificial Sequence; identical to SEQ ID NO: 2558
  Synthetic

SEQ ID NO: 2560 - protein, 186 aa, Artificial Sequence
  Synthetic
SAEDSIRELLERDERLLEEARKEAKRLNEENERLLERIEETVRRLLEEIKRLLDDIRKKIKGEKLREIEELVRRVKRTIEKLLEEVKKSVEDSSKRIEELLEAVERSVERTKEEIRRLLDEVRKDRKEELVKRVEERIKRLHDENRRLVKEVIEEVEKLIRDNEKLAEDIEREIRRLLKELDEAAK

SEQ ID NO: 2561 - protein, 186 aa, Artificial Sequence; identical to SEQ ID NO: 2560
  Synthetic

SEQ ID NO: 2562 - protein, 181 aa, Artificial Sequence
  Synthetic
SEVEEIVKEIEKLIKENEEVVREVEKEIRELIKRNREVVERIRKELEKMLRELERLAREGADRSLIRTLVREIEKEIERLAEEIRKTTEDINRRIEELLKRIKETTKEINDRIRELLKRIDRGEARERIKELVRRNERLLREVEKRLKTLSEENKKLLEDAKRELDRILKEVRDLLRETER

SEQ ID NO: 2563 - protein, 181 aa, Artificial Sequence; identical to SEQ ID NO: 2562
  Synthetic

SEQ ID NO: 2564 - protein, 181 aa, Artificial Sequence
  Synthetic
SRVERLSAEIKKLIDENRRVAEELLRELEKLLKDNEDVVREVERRIRDSSRKLEELARAGAPEEDIRRLVEESKELIKRLLRDIERTTREINEVIKRVVETIRRTTDEINRRIEELVRKIDRGEAREDMDRLVRENERLLKKVEDDLRKLSEENKRLVDRARERLARLLEENERLVDERRK

SEQ ID NO: 2565 - protein, 181 aa, Artificial Sequence; identical to SEQ ID NO: 2564
  Synthetic

SEQ ID NO: 2566 - protein, 172 aa, Artificial Sequence
  Synthetic
REAEEALKRVKEILKRIAEEVERVLTEVKKLSEDVKRRVEEVLTRLKRSTEEIERKKGPKEDLERLVKDDERTIKELLKEVEELIRRVDRLSEELLRKVEKLIRDLSKTLRDVGVDKKLVEDVDREIKKLLEEVTKKAKRLNDENKRLLDDVRDKARRVIEESREVLERARK

SEQ ID NO: 2567 - protein, 172 aa, Artificial Sequence; identical to SEQ ID NO: 2566
  Synthetic

SEQ ID NO: 2568 - protein, 176 aa, Artificial Sequence
  Synthetic
SSEEEVEKLERKVRAVIRKAEEDLEDSLRKSEKMAKEVTDEIEKSRRKAKAVIDDARRRNVDTDLVRELLRKLEETTRRVKKLVDELLEENRRTTERLKELVKRLLDELDEVVKEIARRGEEEVLKKVEELIRKVEKVIRTVLEEDRKVSEDSLRKMRKVLKEDEDVIKEVRDRAQ

SEQ ID NO: 2569 - protein, 176 aa, Artificial Sequence; identical to SEQ ID NO: 2568
  Synthetic

SEQ ID NO: 2570 - protein, 176 aa, Artificial Sequence
  Synthetic
SMKEEVDRLLKEVKDVIREVRERIKKSEEDVRRVIDDARRKLEELSKRAREVVEEVRRRNVDDEAVERLLRKVDRTSKELKKTVDELLKELERTTRRVKELVDRLLEKLRDVAEKLKKRGEEEVLKRVKELIDEVRERIEKVLTDDRRLIERVKREIERVIRENEKVIRDARERLR

SEQ ID NO: 2571 - protein, 176 aa, Artificial Sequence; identical to SEQ ID NO: 2570
  Synthetic

SEQ ID NO: 2572 - protein, 178 aa, Artificial Sequence
  Synthetic
DEVEKLLRDLEELDRDIERKVRELLKRNKEVLDDIEREVRRLEKELRRIIKEVADVIRKTTDKRTVDKLLKELEKILKEVLDRVRRLLEEAKESLDRSREEIERLLEESKTLVDEVRRAGIDKKEVDKIEKHSRDLIERAKRETDRLLEEAERLMREVVDRVRKILEEAKRLIDEARR

SEQ ID NO: 2573 - protein, 178 aa, Artificial Sequence; identical to SEQ ID NO: 2572
  Synthetic

SEQ ID NO: 2574 - protein, 187 aa, Artificial Sequence
  Synthetic
DVEDEARRLEKELRDILREIADDIRKLLEENKELLKESEKDIRRAEKAIEDILDDVRKRITDEKKLREIEKLAEDVKRRVRELLEEDRKSVEDTTRRIKELLREVKELVERVIKRVRELVDEVRKDKKEKLLTEVSEEVKRLADELRELARRVKEEVKKLLDDNRETTDRIRRTVTELLEELKRKTK

SEQ ID NO: 2575 - protein, 187 aa, Artificial Sequence; identical to SEQ ID NO: 2574
  Synthetic

SEQ ID NO: 2576 - protein, 187 aa, Artificial Sequence
  Synthetic
SVDETITEVIKRIEDTLRKVKEDADRLDERNKALLEDSKKKIKEVEEELRRILEEVRRKVKDEKKLREIEELVRRVIEEVRRLLDEDRKSVERSSRRIEELARRVEDLVRKVIETIRRLMAEVRREERRELVEEVKERAERLLKELEDLIKKVKEEVERLLEENRKTTEDILKRAKDLARELRKRTK

SEQ ID NO: 2577 - protein, 187 aa, Artificial Sequence; identical to SEQ ID NO: 2576
  Synthetic

SEQ ID NO: 2578 - protein, 187 aa, Artificial Sequence
  Synthetic
DAKESIEEVKKRLEKSLEDSERESRKTLEENKDLLRRSREEIKKALDRLKDLLRRAEERIDDKDKLEKVKRLVERVEEEVRRLMREDEKSLEDSLETDKKLLREDEEVVKRIIDTVEELLRRVEEEEREKLVEEVEREVERLLRENEKTSDEIKKTSEELLKRNEETTRRILEEVERLLKRVKEATD

SEQ ID NO: 2579 - protein, 187 aa, Artificial Sequence; identical to SEQ ID NO: 2578
  Synthetic

SEQ ID NO: 2580 - protein, 186 aa, Artificial Sequence
  Synthetic
KVEETATRLREEVKRSDTEVHRENRESEDRNKKSDEEVHKTIRDALKRVKDKLDDVRRRRKSRKLEEIERIVRDILRRIEELLRRLHKLAKESRDLVRKTLEELHKLAEDILRRIKELLDEVKDERRDEIVRRVKEEVERLLEEHRRLAKRVRDENRRSTEEHRDLVRKVKREIERLEEELDRAEK

SEQ ID NO: 2581 - protein, 186 aa, Artificial Sequence; identical to SEQ ID NO: 2580
  Synthetic

SEQ ID NO: 2582 - protein, 186 aa, Artificial Sequence
  Synthetic
KVEESADRARREVKRSDEEVRKRNTDSREEIKKSDKEVHERIRELLERIRRILDEVRKKRKSRDLDRIRRIVEEIERRIERLLEELHKLAEEILKRVEETLKRLHELARRILEEIKRLLKEVERENRDEIVRRVEDEIEKLLREHRELVKDVERENRRLLEEHKKLVEEVEREVRRMMKKLRDATK

SEQ ID NO: 2583 - protein, 186 aa, Artificial Sequence; identical to SEQ ID NO: 2582
  Synthetic

SEQ ID NO: 2584 - protein, 186 aa, Artificial Sequence
  Synthetic
KVEEEIEKLLRHNDELLKEVEKRAREVEERIKRSDEAVHDSIRKLLEDVKRILDEARRRRKGEELEKLEKIARDVLEEIKRLLRELHELAKRILEEVRRLLEEIEKSSRESKERIKRLLEELKRENRDEIVERVEREVRKLDDDDRRLAERVLRRAEELLKRHKELVERVEREVERLLKELEDAVK

SEQ ID NO: 2585 - protein, 186 aa, Artificial Sequence; identical to SEQ ID NO: 2584
  Synthetic

SEQ ID NO: 2586 - protein, 186 aa, Artificial Sequence
  Synthetic
KAEDEARRLERHNKELLKEVRKDNTRSEREIEESDKRAHDEIKRLEEEVEEILKDIERRRKSDKLRKIREIVERIRREIRRLLKELHELAKTIKDRVRDTLRKLDESSRRSLELIKRLLREVERENRDEIVERVRRTVKKLDEDDDKLVKDVRKENKDLLRRHEELVREVTERVKKLLRDLREASR

SEQ ID NO: 2587 - protein, 186 aa, Artificial Sequence; identical to SEQ ID NO: 2586
  Synthetic

SEQ ID NO: 2588 - protein, 183 aa, Artificial Sequence
  Synthetic
DVEDEVRRAEESNRDSDRKVHEEVRRVLKSNRDSDTKAHRDVEEAKRRLKTELKDIERKRKGRKLDDIRRVVEEIERRVDTLLERIHRVVEETLERIKRALEEVHDVVRKSLEDIRRLLEEVREKRLVDKVRTEIKRLNDEHRKVLKKVRDLVRKLNEDHERVVRDVRREIKRLRDELRETAR

SEQ ID NO: 2589 - protein, 183 aa, Artificial Sequence; identical to SEQ ID NO: 2588
  Synthetic

SEQ ID NO: 2590 - protein, 183 aa, Artificial Sequence
  Synthetic
DVEDEVRKMKKELDELLKRAEEEVKRVLESNEKSDDEVHKRAREAEEELRRLLDDVRRRRKSEKLRRIEEVAKRVLDLVRELLERVHKVVEDTKETIRRLLEEIREVVREIEERVRRLLEEIRDKKVVKDVEKKIRDLLTKLREVLRRVRREVKKLNERHEDILREVERLIEELRKRLEDTTK

SEQ ID NO: 2591 - protein, 183 aa, Artificial Sequence; identical to SEQ ID NO: 2590
  Synthetic

SEQ ID NO: 2592 - protein, 187 aa, Artificial Sequence
  Synthetic
DIEDEVREAIERLKKLLEDSEREVRESIKRLRDLLREIARESEEANERIKRLLEEIERKVKDEEKLERIREEVERLSETNRRVLEEAADLVRKLIRENEEALEDSKRLVDELIREIEDVLRKIRKDDKEDVRRRLRELVEKVMREIEDSNRKLRKLSKDSEKAVRDAERRNRKLVREIEDRIRKSLK

SEQ ID NO: 2593 - protein, 187 aa, Artificial Sequence; identical to SEQ ID NO: 2592
  Synthetic

SEQ ID NO: 2594 - protein, 187 aa, Artificial Sequence
  Synthetic
EVDKEVRKVLKDIERLLEEIERRVRKSIEDLKTELKKIEDESEKANRELERLLREIKDRVDDEKKLREIEELVRRLSDENRRVLDDARRLVKKLIEENAEALKKARDDVRKLLEEIKRVLERIREDDKEDVRRELRELVDKVRKDVERVMKALEDLSRESRREVRRVKEKNRRLVEEVKKRVEDKAK

SEQ ID NO: 2595 - protein, 187 aa, Artificial Sequence; identical to SEQ ID NO: 2594
  Synthetic

SEQ ID NO: 2596 - protein, 174 aa, Artificial Sequence
  Synthetic
SEDEDMVRDVKRLIDEVRKLIERVKREVEDLIRRLNELDERVVRTSEELARDVKRLVDAGLSREEVEKVVRESIERTRRLAKELDERNRDVLREVKRLVAEVEKVIRDVLKAVEEKLDSEDVERLKEEIKELLDRARRTIEELERRIRENVKRSRKKIEDLVRRHKKILDEARK

SEQ ID NO: 2597 - protein, 174 aa, Artificial Sequence; identical to SEQ ID NO: 2596
  Synthetic

SEQ ID NO: 2598 - protein, 174 aa, Artificial Sequence
  Synthetic
REKEEAVKTVKELIKEVREMVERLHRKNEEMIRTVREVVKELNERNKELIKTVRDLRRRGTDKEDLRRIIEEVLDHIRRSLEELERLAEEVLEHIKRTLEEIERLVREVLDVIKKLVDSEDARRLEREVRELLRDVREKVERNKEKVERLKREVRKRVRDDLERVKRLKEEVDT

SEQ ID NO: 2599 - protein, 174 aa, Artificial Sequence; identical to SEQ ID NO: 2598
  Synthetic

SEQ ID NO: 2600 - protein, 174 aa, Artificial Sequence
  Synthetic
SEDERAVREVEKLIKRVEEVVRRLNERNRRLIEEVRRIVEELHRRNEDLIRKVRELAERGVDKRDVERIVREVLKHIRDSLERLERLAREVLKHIRKTLEELTKLAREVLEAIRRLVDSREMERLEREVERLLREVERRVKEDEERVRKLLEEVERLVRRNARKVEELLKEVEK

SEQ ID NO: 2601 - protein, 174 aa, Artificial Sequence; identical to SEQ ID NO: 2600
  Synthetic

SEQ ID NO: 2602 - protein, 184 aa, Artificial Sequence
  Synthetic
SEKEKLTEDIERIIDKVRREVERLNEENERLIREVRKRVEKLNRENKEAIKRVEEEVRRLRDRDKSDVRKKVEEAIRKLERSVRESLKEVRRLIEELKRSVEETLREIERLAKELKDILDKVRTDGIDEELVKRLEEKIRELLKRARDLVKEDEDRIRKLLEEIERVNRDDKRKIDKLLEEVRR

SEQ ID NO: 2603 - protein, 184 aa, Artificial Sequence; identical to SEQ ID NO: 2602
  Synthetic

SEQ ID NO: 2604 - protein, 182 aa, Artificial Sequence
  Synthetic
KSDEEVRERVERLLREVRRLTREVRRHAKETLDTVAELVDRVRREAERLLREVEELLRRLTDKDVLEEIKKRLDEVLKKLEDIVREVLKEIKRLLDENRRISEETLRRLDDVLRKLEELARRLGVDETEVRDVKRKADEIKEEDKRILEEAEKRHKELLEDLKRLLDRIKEEVKRVREDIKT

SEQ ID NO: 2605 - protein, 182 aa, Artificial Sequence; identical to SEQ ID NO: 2604
  Synthetic

SEQ ID NO: 2606 - protein, 174 aa, Artificial Sequence
  Synthetic
REEDEARKRLKELLDRITKLSKEVRDLIREMLRELEESIERTKREIDDLLRRLEEIRRAGVDKKELKKVADDVLKRIEELLKEDKDVADRVLAVIEKLLRDLERLNRDILREVEEIIDSDEVERVKREIEEHLRRSEEDIRRVAEEIKKLVEESRRVIEEAKDRVRRLVERVKK

SEQ ID NO: 2607 - protein, 174 aa, Artificial Sequence; identical to SEQ ID NO: 2606
  Synthetic

SEQ ID NO: 2608 - protein, 174 aa, Artificial Sequence
  Synthetic
SEEDDARRKVEELLRRDKKVVDEVRDELRKLLEELRRLSEEVEKLIRKLEKELREVRKRGEDKDVLRKVVEDIKREVTRLLKELEEANREVEKRVKELLDRLRRTTEEILKEIRKIIKGETVKKVEDEVRDSLRRAKKIIEDAARAIRKHLEESKRRIEEARKRLEELLKEAED

SEQ ID NO: 2609 - protein, 174 aa, Artificial Sequence; identical to SEQ ID NO: 2608
  Synthetic

SEQ ID NO: 2610 - protein, 175 aa, Artificial Sequence
  Synthetic
SREEEAKKEVKRLLDELKKLSDDSRKRIRESHERLKRVIEEVRREAERSHEELERVIRRGEPREVIREVVRRSRELIKKLLKRLEDVARESKRLIEELLKRNKEMVDEIKKVIKDVVESEKDVRKVDRDVDEILKRSEDIIRKVKEDSERLLKEVRERIEEMKKRTDDLLKEAEK

SEQ ID NO: 2611 - protein, 175 aa, Artificial Sequence; identical to SEQ ID NO: 2610
  Synthetic

SEQ ID NO: 2612 - protein, 177 aa, Artificial Sequence
  Synthetic
RKEETLKRAEEKSKETLERNKRLLERIEEESRKTLEKNKDMLRRVKKRVEDLLREIKRDKPEAEEVRKRVEDLLREVKRSSERSLREDERLLREVKESSERSLKRDKDLLDRVKELIKEVPEEELRRVIEDVLRESEKLHREDEELARRVLEESERLHREDEELARRVEKEIRELKK

SEQ ID NO: 2613 - protein, 177 aa, Artificial Sequence; identical to SEQ ID NO: 2612
  Synthetic

SEQ ID NO: 2614 - protein, 172 aa, Artificial Sequence
  Synthetic
SLDELAKKAKEDSERSVRTDEKRLEEIARRIKELIKENEDLLREVKKEIDRLIEEIKDDRVLKEIERLLREVEKHVTRSSEEIKRLLKEVEDHSRESLREDEKLLEDVADMVKRVDEEEARKLLEDIKRRSEELHKRNDELAREVEKRIRKLIKENRELAEEVRRRIEELRR

SEQ ID NO: 2615 - protein, 172 aa, Artificial Sequence; identical to SEQ ID NO: 2614
  Synthetic

SEQ ID NO: 2616 - protein, 172 aa, Artificial Sequence
  Synthetic
RTDETVKKIEEDSRRSLEEDRKELEEVERRSRESIKENERLLREVAERIKRLIEEIDKREVLDEIRKLLREVEKHVRDSSREDEELLKRVKEHSERSLDEDRRLLEEVADLAKRVDEKTLKELADRIKERSEELHRRNEKLAREVLERSKELIKRNEELARRVIEEIKKLKK

SEQ ID NO: 2617 - protein, 172 aa, Artificial Sequence; identical to SEQ ID NO: 2616
  Synthetic

SEQ ID NO: 2618 - protein, 181 aa, Artificial Sequence
  Synthetic
DVEETLKTVEDESRKTIETLRRSLRKSEEESKRSIDRLRESLERSREEVERLLREIERDKPEAKDVVEKVRKLLEDVRREYERVLEDDRRLADDVRRVYEEVLERDKRLLDEVRKEAKRDTREEAVEKLKKLAEDVRRESEELRRELEELSKDVRRVSEELERRLRKLSEEVKKRIKDLKR

SEQ ID NO: 2619 - protein, 181 aa, Artificial Sequence; identical to SEQ ID NO: 2618
  Synthetic

SEQ ID NO: 2620 - protein, 181 aa, Artificial Sequence
  Synthetic
SVEKILRDVEDTSRRTIEELKRSLEESKKTVTKLLEENKDLLRRIKEDVRRRLEEIKRDKPEMKEVVERVERLLKEVEDSADRTTKEIKRLLEELEKVYREVLETDKKLLDEVRKVAEESTSEEAVERLKELAEEVKRVSKELLEELRKISEEIERRIRRLIEENKELADRVREEIERLKK

SEQ ID NO: 2621 - protein, 181 aa, Artificial Sequence; identical to SEQ ID NO: 2620
  Synthetic

SEQ ID NO: 2622 - protein, 179 aa, Artificial Sequence
  Synthetic
DKVDRVIEEARRILERLRKRVTDVVRELEEINRRLKREVDESVKEVDEILKKLEERVRKRKESERLLEDIKETLERVLRKNDDVVRKVEELVKRSDEKLNKVVEEIKRELDEVLKEIDRLEVRKELVEKLDREVKRLLKEARELSEENRRRSKKLLDELRKSSERIREKVEDLVRRIRK

SEQ ID NO: 2623 - protein, 179 aa, Artificial Sequence; identical to SEQ ID NO: 2622
  Synthetic

SEQ ID NO: 2624 - protein, 177 aa, Artificial Sequence
  Synthetic
SEEEAAKRRIDELLKRLKEVSDKVKEDIDELLKDLERRSREVVEEIKKLLEEVKDRVRKRREEEMLKRLEEELARVLREAERLIDEVDKLSEEVLRRVEELVREVSKLIKEVLERVRRDIDSERLKRVTEEAKRLHEENKKLLDDVRREARRLNEDNRRLLDEVRKRVEEVLRRIRK

SEQ ID NO: 2625 - protein, 177 aa, Artificial Sequence; identical to SEQ ID NO: 2624
  Synthetic

SEQ ID NO: 2626 - protein, 176 aa, Artificial Sequence
  Synthetic
DEDRRALEEVRRVLEEDKRVSKRSRDLIEKVLREVEELIKEVTKRAEDVLRRVREIIKTSGGRVEEVDKVIRELERTVDKLLRDMEEVIKEVEKLVRKVLRENRETTDRVREVVERIVKVRELVKKVEDEIKESEDESEDLIRRADEAVKRLRKRVRDVIEKARRDLEKIVTDAKK

SEQ ID NO: 2627 - protein, 176 aa, Artificial Sequence; identical to SEQ ID NO: 2626
  Synthetic

SEQ ID NO: 2628 - protein, 184 aa, Artificial Sequence
  Synthetic
SIEKLIEDVRREVERIEEESKKLVKKAREDVKRSHDHSKRLMEEATRRVRDILRRAEEMPKSEDELEELRRLVEEVEDRIRRLLKESADVDRDVKRLIDEALERNRKLVEDVRRRLDELKDRLRRKELVDDARRRVEELLRRLEDSLRKSERLVRELLKRSKEVDDRIREEVKRLLEELDDRRR

SEQ ID NO: 2629 - protein, 184 aa, Artificial Sequence; identical to SEQ ID NO: 2628
  Synthetic

SEQ ID NO: 2630 - protein, 178 aa, Artificial Sequence
  Synthetic
DTEEILKRIEEEIRRLLEENEKLLRDAEDTVRKSLEEHERILDEVTKRIRKMLEEIARTDRPGVEDVLREVRDLLRRVREVAKRVIDDNRRLLKEVRDSVKETSEEIKRLLDEVRDLMRKVDDETLKRLAEEVLREVERLLRENERLIREVERRADKTVKDLEKLIEEVERRIDELKK

SEQ ID NO: 2631 - protein, 178 aa, Artificial Sequence; identical to SEQ ID NO: 2630
  Synthetic

SEQ ID NO: 2632 - protein, 178 aa, Artificial Sequence
  Synthetic
DSKEIIDKVREDIKRADEENKRLLEEVRDRIRKLLEENETLLKDSERKARELLEELRRKDSPGVEEVLKRIRKLVEDDKESVDRSTKTIKKLLKEVEDSVRESSKEIERLLREVEDIVRKVPEEDLKRLAKEVKDRIRELLERNRELIKEVEKRVRRLLDENRKSSEEIRKEVEDRKR

SEQ ID NO: 2633 - protein, 178 aa, Artificial Sequence; identical to SEQ ID NO: 2632
  Synthetic

SEQ ID NO: 2634 - protein, 174 aa, Artificial Sequence
  Synthetic
SDEERALKLVEDVIRDVKRLNKRDRELIEKVERDIEKLLEDHRRLVDEVRRRVKELEDKVEDKEEVLKRIKDLLDEIHKLVEEILRRIKKLLEDIEESSRRSLEEIRRLLEELRRRIDSELLKEVEERIKKLLKSNKDLLREVEERVRRALERVKRSDEEVHKMARDALRRVRK

SEQ ID NO: 2635 - protein, 174 aa, Artificial Sequence; identical to SEQ ID NO: 2634
  Synthetic

SEQ ID NO: 2636 - protein, 174 aa, Artificial Sequence
  Synthetic
SEDEDAERLVEEVIRRVKELLDTHKRLVEEVERKIRELDKKDAELVKEVEKRAEDLRRKVDDKDDVLRKVEKLLRELEESSKRSLEEIKRLLEDIHRLVKEIEKRIKELLDELRRRIDSELLERAEREIRRLLREVKESDKEVHRRVRRMLEHNKDLLRRARDSIKKVLDEIRR

SEQ ID NO: 2637 - protein, 174 aa, Artificial Sequence; identical to SEQ ID NO: 2636
  Synthetic

SEQ ID NO: 2638 - protein, 174 aa, Artificial Sequence
  Synthetic
SEREDAERVIERVEREIRELNRRDEELIRRVEKEIRRMLEEHKTLVKEVTRELDRLRREVSDKEEVLRRIEELLRRIHELAKEILKRIKKLLKDLEESSKRSLEEIKRLLDEVRKRIDSEDLKRVDKKVRDVLRSNKELLDEARKRITKVLEEVRRSDEEVKRRAEKVLDEVRK

SEQ ID NO: 2639 - protein, 174 aa, Artificial Sequence; identical to SEQ ID NO: 2638
  Synthetic

SEQ ID NO: 2640 - protein, 174 aa, Artificial Sequence
  Synthetic
SEEEDAERAVREAAELAKKANKEDEELARRAAELAKKALREHEELVERAARLADEAEKKAEDKDTALKLIKEAADRAHKAARDALRVIEDAARKADKSSKESLDLIREAADDARKRADSERAKKAEDDARKAAEDNRRLAKRAKEEARRAAEEVKKSDKEAEERARRAAERVRR

SEQ ID NO: 2641 - protein, 174 aa, Artificial Sequence; identical to SEQ ID NO: 2640
  Synthetic

SEQ ID NO: 2642 - protein, 173 aa, Artificial Sequence
  Synthetic
SLERLLEEVTRRSEETVRTNEEILRRAADEVRKAIESNKDLLRKIKKEVDDVKRRLKDEKALRDIERALDEVRRLVEETIERIRRMLERVRKLAEETIEVDRRLLKKVEDLVRRGLPEESVRTIIEEVERTSREMNERLKKIIDEVRRTIEELNKDLKRILEEIRELVKRLET

SEQ ID NO: 2643 - protein, 173 aa, Artificial Sequence; identical to SEQ ID NO: 2642
  Synthetic

SEQ ID NO: 2644 - protein, 173 aa, Artificial Sequence
  Synthetic
SLEETLEEVDRKSKETVKRLKELLDRIRERVEEAIKSNEDILRRIKAEAEEAERRLKDEEMLKEIRRLAEEVEKLVRKTIEEIKKLLEDVKELVERVIRRDKEVLEEVRRLVEKGLDESEVERIIRELERVSRELMELLKKILEEVRKRIKELNDRLEEILRRVRKRIRELEQ

SEQ ID NO: 2645 - protein, 173 aa, Artificial Sequence; identical to SEQ ID NO: 2644
  Synthetic

SEQ ID NO: 2646 - protein, 173 aa, Artificial Sequence
  Synthetic
SLEELLERIKRDSDRTVRELEELLERAEEISRRTEKSNEDSLRRSTKEVKEAEDRLKDEDALKKIRDLLERDRKLVEDTIRDDRRVLDEVRRLAEEVIKRDKDVLETVSRLVERGLPEEVVKKMLDELRDRSEKLLRTLRDIIRRAKERSDDLNRKNKESTEKVREDIRRLEQ

SEQ ID NO: 2647 - protein, 173 aa, Artificial Sequence; identical to SEQ ID NO: 2646
  Synthetic

SEQ ID NO: 2648 - protein, 173 aa, Artificial Sequence
  Synthetic
KLEELLKRIAEESKKTVEELEKLLEEVERISKKTVEELEDSLRRSEEDAKEAEERLRDEDMLRKIREMVKRDAELVKKVIEEDKKVLDDVRRLAEEVIRADEDALRKVEKLVRDGLPEDDVRRILEEVRRLSEELKTRLRKILEDLRRLSEKLKRENEESTKTVRKVIEDLER

SEQ ID NO: 2649 - protein, 173 aa, Artificial Sequence; identical to SEQ ID NO: 2648
  Synthetic

SEQ ID NO: 2650 - protein, 173 aa, Artificial Sequence
  Synthetic
SLEELLKRIKERSEETVKRLEDLLKRVREDIDRAIKELKKSLDDSRKTVEDIEREIKDEDVLRRIRKLLEDDERLVREIIKEVKKLLKDVEELVKEVIERDKKLLEEVERLVRKGLPEEKVKEIAEEVRRRSEKMLEELKKLVDEVRKRLEDLRKRNEDSTEEMKKRVEEEKR

SEQ ID NO: 2651 - protein, 173 aa, Artificial Sequence; identical to SEQ ID NO: 2650
  Synthetic

SEQ ID NO: 2652 - protein, 181 aa, Artificial Sequence
  Synthetic
SEVEKVIKDNKRSVDEIRKTLKRVLERNEKTLRENEKKIRDIIAEVDKRLKDLEREIDDRDEAREIKKEVKKLVDDLRRDAEEIVKESARLSKELKEKLERIVREVEELSRRLSEEAKKGRDDKAIKEIEEEVRRVDDRVRKLVEKLDRDIKEVDDRSRKLTDDLRRKVEEVLRRIKETVT

SEQ ID NO: 2653 - protein, 181 aa, Artificial Sequence; identical to SEQ ID NO: 2652
  Synthetic

SEQ ID NO: 2654 - protein, 174 aa, Artificial Sequence
  Synthetic
REVEEIEKELRKIIRDLKELLRELRERLEKLDRDLKDLLRRLREENREILDRLRKEPKDKDVEKKIEDLLRELKKKNKEVLERIKEIMERSRREVEKVITTIDELIKRVKEKVRRNNLDEKVIRDADRMAKELKKDLRKVLEDNRRTVEKLKRDLEEVDKESDEEARKLREEIR

SEQ ID NO: 2655 - protein, 174 aa, Artificial Sequence; identical to SEQ ID NO: 2654
  Synthetic

SEQ ID NO: 2656 - protein, 180 aa, Artificial Sequence
  Synthetic
SESEKIEREIRKLIDDSRKNSERIRREIEKLIRDSEETSKEIKKEIEDLLRELKEMLDEIKKRDDDRLKEELKKRADDVERRIRELIKKNKDRLDEILERVERLVRENKERLDKIEEDIRRKGVPEEVLRRAKKALEEDKKRNDEVLDEVRKALEEDKKRNDKVLEDARRVIKKIKDELK

SEQ ID NO: 2657 - protein, 180 aa, Artificial Sequence; identical to SEQ ID NO: 2656
  Synthetic

SEQ ID NO: 2658 - protein, 180 aa, Artificial Sequence
  Synthetic
KDEETIRRRIEELLKRSEDNSERIRRTIRELLERSKKLSEEVRKRIEELLKRLDEKVKEIRKREDERLVRDAKRELERILDEVRRLVEKTKRDLEDMLRRIKELVRRNKEEIDRMLEEIRRSGVPEEVLKEAEKRLREDKKRNDEVLKRVTEAVEEDKKRNDDVLEKVERAIREIARKLD

SEQ ID NO: 2659 - protein, 180 aa, Artificial Sequence; identical to SEQ ID NO: 2658
  Synthetic

SEQ ID NO: 2660 - protein, 174 aa, Artificial Sequence
  Synthetic
SEEEKVIRDLERLLEENEEHSRDVERKLRESDKRLREMVKKVSDEIRKLDEEVEELLRRGTDSDRLRKVLEDILKRSKELADKLKKDIDKSLDEVKKLIDRDDEHVKDIEKKVRELRVSEDALRRVKEALERSKKRLDKVLKDHEDSVRELKKEIDDVLKRNEETVREIEKRAR

SEQ ID NO: 2661 - protein, 174 aa, Artificial Sequence; identical to SEQ ID NO: 2660
  Synthetic

SEQ ID NO: 2662 - protein, 174 aa, Artificial Sequence
  Synthetic
EEVERVKRELERLLEENDEHSKEVEKRIRDLDRKAEELLREIEERLRRSDERLKRLLERGTDEDELRKRIKKSEDEVRELIKKLTRVLEEILKRTKELADRDKKHVRDVEKRVRELDVEERVLKKVEDDLRESEKRVEEVLRKNEETVRRLKEELRKVLEDHKRTVEELRRRLT

SEQ ID NO: 2663 - protein, 174 aa, Artificial Sequence; identical to SEQ ID NO: 2662
  Synthetic

SEQ ID NO: 2664 - protein, 174 aa, Artificial Sequence
  Synthetic
SREEEVEKRIREVLKRLEELLADVERRARELNRRLEKVVRDVKKEIEDLDRKLRKLLKDGVDSEELKKVLKEVKKRSTELAKELEELIREVNRRVEKLVRDLREAIKRVEEEVRRLDVREKVLKDVTDMARELERRLEEVLRKHRKSSEDLKRRIDEVLKRNEETLREIDRRLN

SEQ ID NO: 2665 - protein, 174 aa, Artificial Sequence; identical to SEQ ID NO: 2664
  Synthetic

SEQ ID NO: 2666 - protein, 177 aa, Artificial Sequence
  Synthetic
SEREKAKRELERLLEEDRKHLKDVERELKELDEEDERHLREVEKELKELDDRAKEALDRRPDQKDKLRELLKRIKDRSEELVRRHEETNKRIEERTKELLDRHEESNRRIKKRLEELKDVVEEEVLKEVKRLSEKSKTDLEKIVRDNKRSSDDSRRELERVIRENEETLRRLAERIK

SEQ ID NO: 2667 - protein, 177 aa, Artificial Sequence; identical to SEQ ID NO: 2666
  Synthetic

SEQ ID NO: 2668 - protein, 177 aa, Artificial Sequence
  Synthetic
KEEEEAKKELDDLLRRLKDLYRRIREELERLDRRLEEAYRRIKEDLKRLDEELRRLLEKDRDDRERIETLLEEILRRSEDLVRKLKKLNDEINTRTEELLKRLKKLNDDINKRLEDLRDVIDEKVIRDVRKASRDTEREIRKVAEDNRKSSEDSRRKLEDVLRKNKETLDRLRDELR

SEQ ID NO: 2669 - protein, 177 aa, Artificial Sequence; identical to SEQ ID NO: 2668
  Synthetic

SEQ ID NO: 2670 - protein, 177 aa, Artificial Sequence
  Synthetic
DEKETVEEELRRLLEELKKHIEDTERKLRKLDTDLEDVYRRIEEELRRLLEELKKMLDDRKEDREELRRLLEEIERRIRRLAEELKKLNKDINDTTKDLVRKNERLLREILKRLRELRDLVDEKVLRDVEEALRRAKKRSDDVVRENEKSSRRSEERLERVLRDAKRVLKELKERID

SEQ ID NO: 2671 - protein, 177 aa, Artificial Sequence; identical to SEQ ID NO: 2670
  Synthetic

SEQ ID NO: 2672 - protein, 185 aa, Artificial Sequence
  Synthetic
SELEEVLKRVAEVVERVSREDEKVNRKNDAAVKKVTKDDRKVLEDLERKLRELEKDAKDRGVDKELVDRIREKIETIKEEIRDLNKKLKELIEDTLRDNRRLNEEVRRKVERILEKLEEIRRRGSDEDVIRRLEKEVRDVLKDWEEKSKEAEEKNKTVNKRWEDESRRLKKKVDRLIEKIKEDLR

SEQ ID NO: 2673 - protein, 185 aa, Artificial Sequence; identical to SEQ ID NO: 2672
  Synthetic

SEQ ID NO: 2674 - protein, 177 aa, Artificial Sequence
  Synthetic
RSEELLREIEERIKRLKEKNEELVKEIRRRARELEREDDRAKKEIDDLARKVEEKIRRTIRDKDRARELEKRLRDILREIEDLSRKSEKAIRDVERKVEELSEENKRLIEEIADRVRRKRMDDDVVREVRKLIEELDRHLERLVEEVRRVVKELLEISKEILDRVREVITRLREEVK

SEQ ID NO: 2675 - protein, 177 aa, Artificial Sequence; identical to SEQ ID NO: 2674
  Synthetic

SEQ ID NO: 2676 - protein, 179 aa, Artificial Sequence
  Synthetic
SEVEDAVRKIRELAKEIARAIDELLKEHEELIRTVADALEKLVRTSDKLAEDIARVIDGGVSEEALKEALKRWREATEEVRKRLEDVLRRTKEHLREVAETIREALERLERAIRRVEEEGTIGRELLEELKRILEDLERRAKEIVDRARELNKRAEDEIRRLIEDSKRKLEEIRKRIEE

SEQ ID NO: 2677 - protein, 179 aa, Artificial Sequence; identical to SEQ ID NO: 2676
  Synthetic

SEQ ID NO: 2678 - protein, 179 aa, Artificial Sequence
  Synthetic
KEAEEAVKRLRDLVRRVEEETKRLLRESRESLKTLEEITDRLLKRSEESVKEIEKVITRGRPEKDVKDALDKHRDTNREVLKRLTDLNREHKELNEKVARDLERIDEELKKALDEVTRRGTIGRELLTEVTKLIKDHHDKVREILRESDKELDRHHKDVERILERSKRELERLEDEVRR

SEQ ID NO: 2679 - protein, 179 aa, Artificial Sequence; identical to SEQ ID NO: 2678
  Synthetic

SEQ ID NO: 2680 - protein, 171 aa, Artificial Sequence
  Synthetic
SREELLKEIKKKIDDIKRENEKLLRDIERLIRELEKRDKELLDEARKTSEELVRRAGTEDEKVKKLLEESERLIEEVERVSREMVERARRLLERVKRASERLTRKLEDILRRKGADRDVVRDVDRILTEWKKESEDLVEEVKELIKRWKDTSEELVRRVRELNERIDRETR

SEQ ID NO: 2681 - protein, 171 aa, Artificial Sequence; identical to SEQ ID NO: 2680
  Synthetic

SEQ ID NO: 2682 - protein, 178 aa, Artificial Sequence
  Synthetic
SEVETVEEKVKKVIEDLRRLLKEVRDRNRRIIEEIKRLLERVAEKNKRIVDEIRDLLRRRSTEEVLKDIERLLREAHETNKEVLERVKRLADEAHRRNEKVLEEIKRLADTIDKELKDINVDEDIIRRIDELFREILKEVKRLNEESKRRLEKLEEDIKRLDDRSREEAEKLRDAVRR

SEQ ID NO: 2683 - protein, 178 aa, Artificial Sequence; identical to SEQ ID NO: 2682
  Synthetic

SEQ ID NO: 2684 - protein, 178 aa, Artificial Sequence
  Synthetic
SEVEKVARDVEEVIRTSEDKTRKLEKRNKDIIREIKKLLDDLARENKRIADEIKRKLDERREERVLEEIERLMRKLHEDNKRVLKRVDELLRKLHDENRRLNEENKELAERVEDTLRRKNVDKRLIDEIRREMERSHRRDEEVNEKSKREADKLRRDVEKLDEDSARELKKLEDEVRT

SEQ ID NO: 2685 - protein, 178 aa, Artificial Sequence; identical to SEQ ID NO: 2684
  Synthetic

SEQ ID NO: 2686 - protein, 178 aa, Artificial Sequence
  Synthetic
SEVERVERELDKVITDLRRLLDDLKRKNEELVRRIRELLKKVKERNKKIVTEIDDLLRRRKTEEVLKEIKKLLEDAHRDNTEVLKEVRRIVKEAHDLNKKVLDEIKKLLRELLEDLKRLNVDERIIRRIKELADRIEERVKELNERVREEVRKLEEDIKKLDDESREEARKLEDKVRQ

SEQ ID NO: 2687 - protein, 178 aa, Artificial Sequence; identical to SEQ ID NO: 2686
  Synthetic

SEQ ID NO: 2688 - protein, 177 aa, Artificial Sequence
  Synthetic
SSEEIRREIERESEDTRRRLDRVLEDIERLSRETKEHIKESLERVRREHDRLRRELERKAKDKDTVTELAKHIKRSLEEVERIHEELLRDDERVLKEIKEIADELRRRDDEVVKRIRDREMTEEVRREVRKLIEESRRAIDEVKRRVEELIKESRDRNRRIEERVKELVKENAERIR

SEQ ID NO: 2689 - protein, 177 aa, Artificial Sequence; identical to SEQ ID NO: 2688
  Synthetic

SEQ ID NO: 2690 - protein, 177 aa, Artificial Sequence
  Synthetic
KSEEIRRKIEEDSRRTKKELDDILDEIRKLAEKVKKEIEELLRKVRRRHEDMKRRLREKVKDKDTVTELEKHIRRSLDEVRKLAEELKKKIEEVKRELKKLADELRRRDDEVVKRIRDKPVTEEVAKEVKKLIEESRKLLEELKDTVRRLIKRLKELLEELERRVEELIKENEERIR

SEQ ID NO: 2691 - protein, 177 aa, Artificial Sequence; identical to SEQ ID NO: 2690
  Synthetic

SEQ ID NO: 2692 - protein, 177 aa, Artificial Sequence
  Synthetic
RSEDILREIEDLSRETKEKIDEILERIRKLAEEVKRHIDESLKEVRRRHEEADRELDEKMRDKDTVKRLKEHIRRSLTEVEDLHRKLREEVERVLRKVERDIDKLRETDDRVAKRIRSKRADEEVAKEVRDLIRRSEDLLRRILETVDKLIKELRKLNEDILERVRKLIKKNKDDIK

SEQ ID NO: 2693 - protein, 177 aa, Artificial Sequence; identical to SEQ ID NO: 2692
  Synthetic

SEQ ID NO: 2694 - protein, 177 aa, Artificial Sequence
  Synthetic
KSEEIERRIRERSRETRRELEEVDKKVKKRHTELREHLKRSLKKVKEDHDDLKRKLEEKIKDKDTVRRLDEHIKRSLEEVKRLHEELERHLTTSLRKVEEEAKRLKKRDDDIERRIESKPMTEEVEEEVKRLIEESKELIKRLEEEVDKLIRDNKKLNDDILRRVKRLAEENDERIR

SEQ ID NO: 2695 - protein, 177 aa, Artificial Sequence; identical to SEQ ID NO: 2694
  Synthetic

SEQ ID NO: 2696 - protein, 177 aa, Artificial Sequence
  Synthetic
SSEDILRDIERIARKLREDLKRVLKRVKELSDDTRREIERLVEEVERIHERLRRELERKVSDKDTARRLKKHIDDSLREVRKLAEDLERTDKKVLDEIRKLAEDLKRKIDKIVEDVRRKRMDERVADEVRKLIAELEKLIRDLKRRVDELIRRSRELLERIRDRVRKLIEENKRAID

SEQ ID NO: 2697 - protein, 177 aa, Artificial Sequence; identical to SEQ ID NO: 2696
  Synthetic

SEQ ID NO: 2698 - protein, 179 aa, Artificial Sequence
  Synthetic
SKVEEAKREVDRVIKELREDIKRVEEEVDKLIKDHEKLNKELEDESRKLAERVEKLRRDGVPREDVRRALDDWRRRSEEALRRSEESLKRIKERVRELLERIRKLLKEIDDRVEKLREAGVIDEKIVRDIKELLRDLRREVEKVIERIDRLIKRLEEESRRLFEESEKAIRELKRRVDK

SEQ ID NO: 2699 - protein, 179 aa, Artificial Sequence; identical to SEQ ID NO: 2698
  Synthetic

SEQ ID NO: 2700 - protein, 179 aa, Artificial Sequence
  Synthetic
KKVEEAKKEVKEMIRRHRERNKEVEKEVKDLARKHEKENRDVAETSKRLAEKVKKLRDDGVDRKDVRRVLEDWRRRSKELLDRSRKSLEEIRKRVEDLVRESKESLKRIEDRVRELEERGVIDEEIVKDIKREIEELEDESRRILEEIREDIDRLRRRSEKLFEDSRELIERMKREVDR

SEQ ID NO: 2701 - protein, 179 aa, Artificial Sequence; identical to SEQ ID NO: 2700
  Synthetic

SEQ ID NO: 2702 - protein, 176 aa, Artificial Sequence
  Synthetic
DEIEKVRKRAEDLNREDKRLSERAFEESKEVVEEHRRLSDRARRESDRVVEEVEKTLKDKREKKEDLEKLLRDWKRISEKLKEESDKSLKDWEDRTRELMERSKKSLDELEEVLRRIPVDRKILEEIRKAIDRNRDENRRLVEESKKELDELRKEDEELVERSKRKLEELDRRAKK

SEQ ID NO: 2703 - protein, 176 aa, Artificial Sequence; identical to SEQ ID NO: 2702
  Synthetic

SEQ ID NO: 2704 - protein, 176 aa, Artificial Sequence
  Synthetic
SRIETVKDELRRIAEDVRRALEEIEERLKDLNRRDEELTKRIEDTSRDILRRVEEVLRRNREKKEEAETLLRDWDRVSKELKKESDRSLEELRREIERLREEIERLLRELDKLIKDIDIDEKILKEVADRLRELKRRAERLIEEVTRLLKENEKRNKEVVDTSREALREIRDRVRK

SEQ ID NO: 2705 - protein, 176 aa, Artificial Sequence; identical to SEQ ID NO: 2704
  Synthetic

SEQ ID NO: 2706 - protein, 177 aa, Artificial Sequence
  Synthetic
SKEDILREIEKRIRKIEKEAEELLRESRKILEELEERDRRLLERVKREIDRLLEETGEDDDLRRLLRELEKALEDMERVSRTVLREIERLIKESEDNIRELIERLEELLREVERRVRDEELLRRVERELKKLIDEVRKVLKDNFDRNRELAKEWEDLSRELFKRAKELIEKVEEASR

SEQ ID NO: 2707 - protein, 177 aa, Artificial Sequence; identical to SEQ ID NO: 2706
  Synthetic

SEQ ID NO: 2708 - protein, 177 aa, Artificial Sequence
  Synthetic
SKEDILREIKKRIEEIERDARRLLEESKRILDELRKTDEKLLRESEERVEELERKSGRDEKVEDLLRRLKRLIDESKKDSDRMLKEAKKLIEDSKRNIEELLKELRRLLERVRREVRDEELLKRVMEELRELIERVERELRRNARENRELARKWKKLSEENKKKNDDLIREVDEASR

SEQ ID NO: 2709 - protein, 177 aa, Artificial Sequence; identical to SEQ ID NO: 2708
  Synthetic

SEQ ID NO: 2710 - protein, 174 aa, Artificial Sequence
  Synthetic
DEKERIEEEIRRILEELERKVDEAREEIKRMDEELKRRIEEIARRSRELDDELRERVDKDKDKDKLEKIVEDILRTSRKLIEDLKKLIDDILRRSKELVDRLRELVDRVRERVERLPVDEEVRKEAERVLRKIEEDIDRVLRENEDSVRKLRTEIDRVEEENRRSAKRIRERLK

SEQ ID NO: 2711 - protein, 174 aa, Artificial Sequence; identical to SEQ ID NO: 2710
  Synthetic

SEQ ID NO: 2712 - protein, 176 aa, Artificial Sequence
  Synthetic
DEVRDVVTRIRDLLRRIKERLEELTERIRRLLEKIHKTTEDLARRNRKLIDEIRKEIDKGVEKEEVDKMIEELKKHTDETLRRIEELNDRSDKLVKRVLEEIERLIREAEKEVKKAERVIPEDVKREVKELLDKIREDLERVREEAKRSNEENRKRLEEVVEESERLLEELKRRST

SEQ ID NO: 2713 - protein, 176 aa, Artificial Sequence; identical to SEQ ID NO: 2712
  Synthetic

SEQ ID NO: 2714 - protein, 180 aa, Artificial Sequence
  Synthetic
DEVREVLKELKKVLREIEKAVRDVLEEDREMHERIARKVKKVLDENKKSLDDLRRKVDSEKLKEIEKVVEDTLRELKELLDRARELNERTKRRLEKLLDEIRKVIKRLLEELDELRRRGASEKKLKEIADKIRELLERLKDRLEKIAREIRDVNRKLDEDLEDIVRRIRDVDKKLDDKTK

SEQ ID NO: 2715 - protein, 180 aa, Artificial Sequence; identical to SEQ ID NO: 2714
  Synthetic

SEQ ID NO: 2716 - protein, 188 aa, Artificial Sequence
  Synthetic
SVLEEIEREVEEIRRRIEKVLKELNDDDRRVIEDSKRLNEKLEKEVRDIERKARDLLRKLKDTDDDREMKKILREVEKMVEELKRRSDEVVKRTRRVVDRLREKNKDVLRRIEKKIRELKDKIEKISAPREELEKLKRRLDEELDRVREKVEENIRRTDKAVEDSERENERLKRELDEKVKRIRDELR

SEQ ID NO: 2717 - protein, 188 aa, Artificial Sequence; identical to SEQ ID NO: 2716
  Synthetic

SEQ ID NO: 2718 - protein, 171 aa, Artificial Sequence
  Synthetic
SDEEDVERLVKELIDRVRKTDAELERKVDEVIRELKEVIKRIEDHSRDSIRKLRNEPMTEDVLRKAEEVHERNRDLLRKISERIKKLLEDLNKESRKNEDRVRRLVEELERRAKTLRELIKRLRDAVRESEKENKRINERLRRVIEKAKRDLEKILEEDRRVLEEMAERAK

SEQ ID NO: 2719 - protein, 171 aa, Artificial Sequence; identical to SEQ ID NO: 2718
  Synthetic

SEQ ID NO: 2720 - protein, 181 aa, Artificial Sequence
  Synthetic
SEVETIKREIDKLMKELTEKIKRIKEEDDKVHEELKRAVDRSRERLEEVLKELRDRGVPDKKLRELEKLIEELKRRNDDLLRKLKEVNEKTREDLERLLRDLRRLLKELRERLKELKDRNSDEKEIRDLMREIREVAERAKKRVDELLERIRRINTKLKEELKELHKRTEDLIKKAKEEVN

SEQ ID NO: 2721 - protein, 181 aa, Artificial Sequence; identical to SEQ ID NO: 2720
  Synthetic

SEQ ID NO: 2722 - protein, 181 aa, Artificial Sequence
  Synthetic
KEVEEIDERLKRVLEELRRMLEESRKEDERVHDELRKEAEKIKRELDKAVEELRARGVPKDVLRELKRLIDELRKEIKDLLDDLRRVNEETLRENERLLRELEKLVRELEEELKKVKDERRDKKVIDDLLRKIEKLIREMKKRLKDLHEETKRINEELERRLRDLERRVRDLLRRAREEAN

SEQ ID NO: 2723 - protein, 181 aa, Artificial Sequence; identical to SEQ ID NO: 2722
  Synthetic

SEQ ID NO: 2724 - protein, 181 aa, Artificial Sequence
  Synthetic
SEIERIKEEDEEVHKRLKEINDRINKEDKDVHDKLRDEARKIEERLRRVMEELRANGVPKSLLDEARRVIDELRRKLEKVLDELEKLNRKTEEDNRRLHEETRKVNEDTKRKLKEVKDNRSDEKVIRKLLEEIRRINEELERRNRKLMKDIREINERAEEKLRRLAEEIEELIKKLKEEVK

SEQ ID NO: 2725 - protein, 181 aa, Artificial Sequence; identical to SEQ ID NO: 2724
  Synthetic

SEQ ID NO: 2726 - protein, 181 aa, Artificial Sequence
  Synthetic
SEVEEIKREDDKVHEDLKKAADDIRKRDEDVNRKLTEAIEEIRREVDKALEDLERRGVPKDLLDRARRLAEELRRRLKELLERMHKVNEDTKRLLEELLRRLEEVNRRTRKELEDVKRRREPEEVIRRLMEKIRRINAELRKALKRLLEEIEDINRKLEEEVKKILEEIRRVLEELRRRAN

SEQ ID NO: 2727 - protein, 181 aa, Artificial Sequence; identical to SEQ ID NO: 2726
  Synthetic

SEQ ID NO: 2728 - protein, 182 aa, Artificial Sequence
  Synthetic
SEVEELVKELRRLIEEWDRRSKRLMEELKELAERIDKTTKELLKELEDLVEKIKRELDKKGGEDERLKEDVERLLRELREALKRVEDTVDRLNRESEEVLKEVKKTNEELVRRLEELLKRAKENGVEERVAEEVKRAIERAKRESDKIERDVRELNRRNREILKKIKKRVEDVLRKLRKDLE

SEQ ID NO: 2729 - protein, 182 aa, Artificial Sequence; identical to SEQ ID NO: 2728
  Synthetic

SEQ ID NO: 2730 - protein, 174 aa, Artificial Sequence
  Synthetic
DEVEELKERLRRLAETIARRIRELVERLRDSARKIEKRVRELAKKLRDSVREITKVIKDGVDERTIDEMIERHKRTSEEIAREIRDLLRRHKEVSERILEEVRRLIEELDRVVKEVTRTEEIREEVEKAVRDLEELLKELKRESEETIRRIEKLVRDLERESEEAVRRLKEEKD

SEQ ID NO: 2731 - protein, 174 aa, Artificial Sequence; identical to SEQ ID NO: 2730
  Synthetic

SEQ ID NO: 2732 - protein, 174 aa, Artificial Sequence
  Synthetic
SEEEKLKKELEDLARRIEKRLRELVEELERSVREIERRIEKLHKELEESVDRIKKVVDKGVDEDAVRKLLTDHDRISRETVRRIEELIKKHEEDSRRVVKEIEDLIRRLEEVVRRVTRTDEIRRRVEEVVRRLEKIVKELEERSREVLKRLREEIEKHKKRSEETKERIRTRAT

SEQ ID NO: 2733 - protein, 174 aa, Artificial Sequence; identical to SEQ ID NO: 2732
  Synthetic

SEQ ID NO: 2734 - protein, 174 aa, Artificial Sequence
  Synthetic
SEVEELLKRLEDLIRKIEERLKELVKRLKESAKEIEERLEELHRRLKESVDRIREEIEKGRDKEDVKRLVKRHKELSEETVRRIKKLLEDHKRLVDKILREIEKLLKELKDVAERVSRTEEIKKEVKKALERLKKIVEDAKKVSEETMERIRKLVEEHKDTSRKTVEDLERATK

SEQ ID NO: 2735 - protein, 174 aa, Artificial Sequence; identical to SEQ ID NO: 2734
  Synthetic

SEQ ID NO: 2736 - protein, 174 aa, Artificial Sequence
  Synthetic
DEVERLMEELRRLLEEVRKRIEDLIRENRKLVKEIKDRLEKLLRDNERLAREIEEVIRSGTEEEKVRELLERLERSSRKTLKEIRELLEKLRKKNEDSTREIERVLRELEDVVRKVVREERIREEVKRAIEKLKELVEDSNREVTEALKEIEDLLRKLKERSEELLRRIKARTD

SEQ ID NO: 2737 - protein, 174 aa, Artificial Sequence; identical to SEQ ID NO: 2736
  Synthetic

SEQ ID NO: 2738 - protein, 182 aa, Artificial Sequence
  Synthetic
KEVDELDEELKKHAERIDRELERLDRENEKHVEDVRRELERLREENERHARRIEDEVKKRTDEEEVIKRLIDDHRRLSKRTEDEIKKLLDDHRRLSEETKERIKELLKDHRRLLKDVADKIEDRKTLEDIRRKVEKSLRELEKKLEEIDKKNRDTLEEARRELERIRRENEEVIRRLDKRRR

SEQ ID NO: 2739 - protein, 182 aa, Artificial Sequence; identical to SEQ ID NO: 2738
  Synthetic

SEQ ID NO: 2740 - protein, 182 aa, Artificial Sequence
  Synthetic
KEVEELVRKLREHVRDIKRKLEELLKENEDHARRAEDRLRELTKENRDHVKEMEDVLRRDTDSRETIRKLLEDHKRLSKETAERIEELIRDHERLSRETSKRIKELIDDHRRLLEEAAKDIRDKDTLERLEREVRKSIKELEDKLREIRKRNKEVIDKLRDILEKIKKENREALKRLRDTEE

SEQ ID NO: 2741 - protein, 182 aa, Artificial Sequence; identical to SEQ ID NO: 2740
  Synthetic

SEQ ID NO: 2742 - protein, 182 aa, Artificial Sequence
  Synthetic
SEVEKLTEELRRHVEEIERDLDRLRKENERHAKKIKDELKRLLEELEEVARRIEAELERDTDDEDKIRKLLEDLEELLERIADTIRRLIEDHRRLSEETMERIRRLIEDHKKLLDDIARRIRDKDMLRRIEEEVERSIRRLEELLERIRERNEKVIEDLKELLKRIRDRAEEVKDRLRRTRK

SEQ ID NO: 2743 - protein, 182 aa, Artificial Sequence; identical to SEQ ID NO: 2742
  Synthetic

SEQ ID NO: 2744 - protein, 182 aa, Artificial Sequence
  Synthetic
SEVEKLKKELEDHVRDIEKKLRDLMRENEEHAKRARERLKKLLEDNEENVKDIEDKVRKKRDKEEVIKKLIDHHRKLSEDSVRDIEELIKDHKRLSEETSERIKRLIEDHRRLLKEISDKIRDEDTLRKIREDAKRSEKKLEEILRTIRKRNEKVIRDLRRLLEELRKRNREAIERLRKELE

SEQ ID NO: 2745 - protein, 182 aa, Artificial Sequence; identical to SEQ ID NO: 2744
  Synthetic

SEQ ID NO: 2746 - protein, 182 aa, Artificial Sequence
  Synthetic
SEVERLAEELRKHVEEIKKELRKLKEKLEKLARDIERELKRLRDENKKHADDIRDKVEKRKTDEKTIEDLIRDHERLSEETKKRIEDLIRRLEELLREVAKRIKELIEDHRRLLKDVADKIEDKDTLRRIEEEVKKSERELREELKRLEERVRRVIEKLEDLLRRIEKENEEVKRDLERRRK

SEQ ID NO: 2747 - protein, 182 aa, Artificial Sequence; identical to SEQ ID NO: 2746
  Synthetic

SEQ ID NO: 2748 - protein, 182 aa, Artificial Sequence
  Synthetic
SEVDELKRRLDEHAKDIRDKLRKLVKELREHAKRAEDELRRLLKENEDNAREIRELVKTLRDDKDKIEELIKHHKKLSEDSEREIKRLIEDHKRLLEEVEERIRRLIEDHKRLLEDVARKIRDEKTLRDIKRAVEKSIRDLERILEELRKEVEDTIKRLEDILREIRKRNKDVIDDLRRRMK

SEQ ID NO: 2749 - protein, 182 aa, Artificial Sequence; identical to SEQ ID NO: 2748
  Synthetic

SEQ ID NO: 2750 - protein, 182 aa, Artificial Sequence
  Synthetic
SEVDRLVRELDKHVEDIERTLKKLREENEKNVEEIKRTLKKLVDELRKLAREIIDTVDKNRDIREEIEKLIEDLRRMVEEIAKRAKDLLDHHAELSRRTREEIKRLLEDHDRLLKEIARKIKDEKTLRDIKRRVDKSLEDLKRTLEEIKRENERTLEEIKKILEDMEREVRDIERKLREKEK

SEQ ID NO: 2751 - protein, 182 aa, Artificial Sequence; identical to SEQ ID NO: 2750
  Synthetic

SEQ ID NO: 2752 - protein, 182 aa, Artificial Sequence
  Synthetic
KEVEDLVRELEKLIEEIKRRLEELDKELKKHVEDAERRIKKLLDENRENAERILEKLRRDKDDDDKARRLVKHHRELSEESSRRIEELIRDHRRLLEEISRTIEELLDRLRRMLKKIADEIKDEELLRRAKERVREALEDLRRILEEIRRKVEETIRRLEKLLKELRDRNRRVLEELERTLK

SEQ ID NO: 2753 - protein, 182 aa, Artificial Sequence; identical to SEQ ID NO: 2752
  Synthetic

SEQ ID NO: 2754 - protein, 180 aa, Artificial Sequence
  Synthetic
REKEEIKREVEEAKKRLEDLLREIAEEVKRALERLRELNERNNDRARRVLKRLTDELRRVDNEDLKRDARRLLEELKRINRESNETHKKLLEELRRLLREVEKTVERLLRRLDEMLERVERTEPDDRLSERLRRLVREIEETLKELLKALRRLLERIREVSEELHRRSEELVERILRKLK

SEQ ID NO: 2755 - protein, 180 aa, Artificial Sequence; identical to SEQ ID NO: 2754
  Synthetic

SEQ ID NO: 2756 - protein, 180 aa, Artificial Sequence
  Synthetic
REKEDIEEKVKRVLERLERLNRENNKESERLLRRLEELNKRNNEAVKELLDRLREILKRVRDEKKKREVEELLERLRRINEESNRVHRRLLEELRKLNEESNRVHKRLLELLKTLLDEIRKREPDDRLMEELKRLAREAERVSEELHDRTRRLAEEIEKVSKELHKKSEKLAREIKKRLD

SEQ ID NO: 2757 - protein, 180 aa, Artificial Sequence; identical to SEQ ID NO: 2756
  Synthetic

SEQ ID NO: 2758 - protein, 175 aa, Artificial Sequence
  Synthetic
KEAEELIKELKDLAERIRRENRRLLEELKKLVEEIRRRIRELIERSEDSVRKIEETVKRKKEKREELEKLLREHEKLNEEILEEIKKLLDDLRKTVKEAIDRSRKLNKELKDMVEKVSRDEKAERELKKISEDDERSIKELEDLLRKVEEDIRRLLDELRDIMKKTKEKVDELRR

SEQ ID NO: 2759 - protein, 175 aa, Artificial Sequence; identical to SEQ ID NO: 2758
  Synthetic

SEQ ID NO: 2760 - protein, 182 aa, Artificial Sequence
  Synthetic
DEAERVKRELERLVKEIKEENRRLLRELRELSKRSREVLERLLRKLEDLVRKIREVLERLKRVKEVVKRLKEELKKLLDEAEKVIEDLKRENDKLLEEVHRVNEKLDRDLEALLEEVRRINLPKKVLDEIEKEAEEIKRENKDFNRRIEREVRESKREIEEVVKRIREIAERVDRDIDRTRR

SEQ ID NO: 2761 - protein, 182 aa, Artificial Sequence; identical to SEQ ID NO: 2760
  Synthetic

SEQ ID NO: 2762 - protein, 182 aa, Artificial Sequence
  Synthetic
DEEREVKERLRDLTRRIRETIKRLLDKNKDLARRIREVNKETSEELERLARDIERVLEELKDVDEVVKRLKERLRELLRRSEEVNRRLDEENKKSNKETEDVARRLLKELRDLLEEVRRINLPKKVLDEIREAAERVKREIEELLKEVHRINTELNKDNTELNKRNREIVERVKRRIDERAR

SEQ ID NO: 2763 - protein, 182 aa, Artificial Sequence; identical to SEQ ID NO: 2762
  Synthetic

SEQ ID NO: 2764 - protein, 182 aa, Artificial Sequence
  Synthetic
DEVEEVKKALEDLAEKIRDLNRKILEKNKKLADDIRRLNEKLLRELRKLVEEIERVLRKLKDVKKVVKELKDRLKRLLEELERVNRELDERNKKLHKETEDLNRELDERLKKLEDDVRRVNIPKELLDEIRRRVEEVKKDNERVNKEIEELNRKLDEDNERANREIRDTVEKVRRRIDEEEK

SEQ ID NO: 2765 - protein, 182 aa, Artificial Sequence; identical to SEQ ID NO: 2764
  Synthetic

SEQ ID NO: 2766 - protein, 181 aa, Artificial Sequence
  Synthetic
SEIEEIEKEIRRVLEEIERLLRTLKKINDDVKRESEKLVRDDKKKIDDALRELRKLAAERGKDEKVIRDIEKLIRDVKRHSEEVLERLKRLNEETRKTNEEVIRRARRLIDELEKDIRRIRGDEVVRRAEKLLKEIRDTVETALKELEDKNERSERENKRVAEESERKLRKIKEEVDKAAE

SEQ ID NO: 2767 - protein, 181 aa, Artificial Sequence; identical to SEQ ID NO: 2766
  Synthetic

SEQ ID NO: 2768 - protein, 182 aa, Artificial Sequence
  Synthetic
RKVEEIKKRLKELKERLEESVKRIKDRLRKLEEDNRRLAEEVKKRLEELLKRLEDLVKRREGDKTDLRRSVEKVVREIRELIEELKRHTEESADEIRKLLEEHKRLSDEVVREIRELIRDLDDEKAVKELEDELRRIEKTSRDVLKELEDILRRLREESKRVADELRELLRRVKEKVERETK

SEQ ID NO: 2769 - protein, 182 aa, Artificial Sequence; identical to SEQ ID NO: 2768
  Synthetic

SEQ ID NO: 2770 - protein, 182 aa, Artificial Sequence
  Synthetic
SEDDRIRERLKELVDRNDELVKRIKRALDELLRELRKSVEDIKRTLDDLARKLEELARRREGDKTDLRRVVEKIRRDIEKLLKDHEDKSREVVRTIRELLDKLRRHTERTAREIRELIRRQDSREVVEDLKRILRELEKRSEDVLRELKKKLDDVEKESRDVLRELTEKLKKIEEDVRRAEK

SEQ ID NO: 2771 - protein, 182 aa, Artificial Sequence; identical to SEQ ID NO: 2770
  Synthetic

SEQ ID NO: 2772 - protein, 182 aa, Artificial Sequence
  Synthetic
REVEEIERRIRELLETNREIAERTTEEIKRLKKELEDSLEEIKKRLKELVDELRKLATDRRGDKTDLRRSVRRVEEEIRRLLDEHRKLSEEVMRTIEKLNEDSRRHTRETVEEIKELIKRLTIEEAVRRLEELVREIEDRSERLNKENEDELKKIEETSRKALKELEDRLREVKKEVREAER

SEQ ID NO: 2773 - protein, 182 aa, Artificial Sequence; identical to SEQ ID NO: 2772
  Synthetic

SEQ ID NO: 2774 - protein, 181 aa, Artificial Sequence
  Synthetic
DSDRELEKKIRDSLKRLEEALRELEERLKRSLEDDERVHEELRRRAERIRETIKKRLSDKDTLDKLKKEVDKLLTDLERVNRDTKRLNKELLDKAREVVKKLKEDNRRLLEDLKEIIKKPTRSELVKRMKERVDELHKRTEELLERLKEELKKLHDETRDINRELKKRLEDLERKIEEAAK

SEQ ID NO: 2775 - protein, 181 aa, Artificial Sequence; identical to SEQ ID NO: 2774
  Synthetic

SEQ ID NO: 2776 - protein, 181 aa, Artificial Sequence
  Synthetic
KEAEELRRLIEESKRTDKKVHEDLKEEVRKIEEEDDKAHEELRKEVERIKKKIDDDMSDEDTARRLRKEVEDLLRRLKKLNEETKRELERLDEKLRKVNEKTKEDNERLARELEEIIKKPTGSELIKRLKDEVKKLHDETERINRELKKELDDLLRRVRKINKELKEELKKLERKIEEAAR

SEQ ID NO: 2777 - protein, 181 aa, Artificial Sequence; identical to SEQ ID NO: 2776
  Synthetic

SEQ ID NO: 2778 - protein, 181 aa, Artificial Sequence
  Synthetic
SSREELEKRIRESEKRDREMHERLRRTAEKIEKEDKEMHDRLREKAERIEERIDKEVSDEDTARRLKEELKRLLEDLERVNRRTKEELERLLKEAEELNKRTEERNRKLEKEIKDIISRDTKSELIERIAERIERLNRDTERINRELEEKLRRLLKRIREINTELDKRLKELLDRIEEASR

SEQ ID NO: 2779 - protein, 181 aa, Artificial Sequence; identical to SEQ ID NO: 2778
  Synthetic

SEQ ID NO: 2780 - protein, 178 aa, Artificial Sequence
  Synthetic
SSEEKIEKASEDNERKVKEVLREIEELSKKDKTDVERVLRELEKRLEEIKREVDRRDRRREEMERLREEIKRLLDRLRERIEEVDKRITELNKDANDTVRRVVKEIKELNDRLRRRVREVDSEEDLKRELDEIDKRTEELARELRELMREIHERTKRLADDLRRAIDEIRKKIEEDAR

SEQ ID NO: 2781 - protein, 178 aa, Artificial Sequence; identical to SEQ ID NO: 2780
  Synthetic

SEQ ID NO: 2782 - protein, 181 aa, Artificial Sequence
  Synthetic
DELEDLLRRHRELVKRSLERLKDLLERNRELIEDSERRAEELLRELRRLIEEIKKVLDEGIDEKDIKKMLDELRRTAEEILKELEEVNERLNRASRKTLEEIKDSNRKLNDSVKKIEDRIKDKKVLEELKRSNDEANERHKTVLRRLEEENKRANDSHRKIKEELKDLLRRVDETVKEKRR

SEQ ID NO: 2783 - protein, 181 aa, Artificial Sequence; identical to SEQ ID NO: 2782
  Synthetic

SEQ ID NO: 2784 - protein, 181 aa, Artificial Sequence
  Synthetic
SRLEELLKTHKKLVEDSVDEVRRLLERNRKLIEDSKERLKELLRTNEELIRTLKEVLDRGTSEEDIKRLLDELEKHVRETNERSKRSNERLNRHVEETNKRTKELNDELNRSVKEIEDEIKDEEVLRRLKESNKKANEDHRRLNEENKDLNRRANEEHKKVNDRNKELLDRARRTADEKRR

SEQ ID NO: 2785 - protein, 181 aa, Artificial Sequence; identical to SEQ ID NO: 2784
  Synthetic

SEQ ID NO: 2786 - protein, 181 aa, Artificial Sequence
  Synthetic
DEVDELVKTHERLVEESERRIEELLERNRRLIERITERAKELLKENKRLIEEITEVLKRGSDEKDIERLLRELEKHVRETNEESKRMLDELRKHVEDTNRETKKLNDDLNDSVKKIEDRIKDKDVLERLKDSNRKANERHKRMNEENKRLLEDVERRIKELNKRNEDLLREAEKRVRDERR

SEQ ID NO: 2787 - protein, 181 aa, Artificial Sequence; identical to SEQ ID NO: 2786
  Synthetic

SEQ ID NO: 2788 - protein, 181 aa, Artificial Sequence
  Synthetic
SELEELLKTHKKLVEDSVERVRDLLRENKRLIEESEKEIRKLLDELRELIERIIELVERGESEETIKEVVDRLRRTVERIEKRLRDSNRELNDHVRRTNEETKRLNEELNRAVKEIEDRIKDKEVLERLKKSNKEANDEHRRLNDENRELNERANRKHKEVEDRLKDLLRRAEEKLTEDAK

SEQ ID NO: 2789 - protein, 181 aa, Artificial Sequence; identical to SEQ ID NO: 2788
  Synthetic

SEQ ID NO: 2790 - protein, 181 aa, Artificial Sequence
  Synthetic
DEVERLITKHRKLVEDSRRRVEELLRRNAELIKTSKRRVEELLERNRRLAEELRRLLKEGQSEETIKELLERLRKHVKETDDELRESNKRLNDHVKRTNEETEKLNRELNKVAKEIKDRIKGDEVLRRVEDSNRRANETHKDLNRKNKELNEEANRTHEELLRRNEKLLREIEDTVDRETK

SEQ ID NO: 2791 - protein, 181 aa, Artificial Sequence; identical to SEQ ID NO: 2790
  Synthetic

SEQ ID NO: 2792 - protein, 181 aa, Artificial Sequence
  Synthetic
SEVEKLLKELEDESRKSEDDNRRLLEELRRLSEESLRDLRRLLEDLKRLAEEIEREVRKRPEKELLEDLLRKLEKILRDIRRAIRRNIEENRRVLEEWKKRTDKNRRDNEDIVRRIRERIRGDELKKRVDEVLETSRELLRESKRKIEEIARRSEEELKRVKDEVDDTARRIKRKIEEAEK

SEQ ID NO: 2793 - protein, 181 aa, Artificial Sequence; identical to SEQ ID NO: 2792
  Synthetic

SEQ ID NO: 2794 - protein, 174 aa, Artificial Sequence
  Synthetic
DSERRLDEILERAREVNEESSRRLDKLLRETEEKNRKSTEELRKIVEDLKRTVKDESRTDEIEDLVRKIEEEIKKLIKESNDLVEEILRRSKDALRESNERVREILERIRDMKERGEDAETVIRRIEKLLEDLKRVDDKILEEHKDLSKKLDDVDREIKERIKKLIKDLKDTAR

SEQ ID NO: 2795 - protein, 174 aa, Artificial Sequence; identical to SEQ ID NO: 2794
  Synthetic

SEQ ID NO: 2796 - protein, 174 aa, Artificial Sequence
  Synthetic
DSEEELKDILRKAKEDNDRSSDKLRRLLEETEKRNRDSTKRLEELLEETEREVRRRSRREDIERLVREILTRSRKLIEDSNRLVKRILDESEKLLRDSNRLLEEVERRIKDLKDRGEDAETVKERIKKLLKDLREVDREILERHKKMSDDLKRVDEEISKTHKELSRRLKETAR

SEQ ID NO: 2797 - protein, 174 aa, Artificial Sequence; identical to SEQ ID NO: 2796
  Synthetic

SEQ ID NO: 2798 - protein, 174 aa, Artificial Sequence
  Synthetic
SKEEDLKRILEEAEKTNKESSDRLRELMDRTRRENEESSRTLKEIVKDADRRVAEIIRTDELRKLVRDIKETIKELDERSNRLAEEILKTSKKLDEDSNRLVEDVVRRIKDMVDRGEDVERVKEDIERLLDELRKVDREILETHKKLSEELRRVDEEIIKRVKDLIRTLEKAAE

SEQ ID NO: 2799 - protein, 174 aa, Artificial Sequence; identical to SEQ ID NO: 2798
  Synthetic

SEQ ID NO: 2800 - protein, 174 aa, Artificial Sequence
  Synthetic
SSEERLRTILREIEKTNRDSSKRLRDLLRETKRENKESSDELRKLLEETRDEVEKRRRDKEIERLVREILKTSEDLDRRSNREVERILRTSERLDRESNKLATKISEDIKRMTDKGEDSDTVAERIRRLLEELKRVDEEILKTHKDLSDRLRELDEEIKKTHEKLSEELRRAAN

SEQ ID NO: 2801 - protein, 174 aa, Artificial Sequence; identical to SEQ ID NO: 2800
  Synthetic

SEQ ID NO: 2802 - protein, 181 aa, Artificial Sequence
  Synthetic
KEVEEILETHKEIARELREVAEEIIRDHERILRDLEKKIRELRRTHERMVEELDRVAKEGVSEEELKRLLDELHERVKEILETLKRLLDKLHKTVEELKRTLEELLRDLHRLVKELEDRIKDKDALDKLRDSDRRVHEDVRRMLKRLDDSDKRVHDRVRKVLEDLKRSNDELRRTVEERER

SEQ ID NO: 2803 - protein, 181 aa, Artificial Sequence; identical to SEQ ID NO: 2802
  Synthetic

SEQ ID NO: 2804 - protein, 181 aa, Artificial Sequence
  Synthetic
SEVEKILEDHKRIVDELEKEAKKIEETHTELVKRLREEVEKLKEELRRLLEELKDMARRGVREEELRELLDRLREMVERILRRLRKLNEELNKVIEELKRRLEKLLEDLHRRVEELLREIKDEEALRRLKKSDEEVHRRVREILKRLEKSNRDLNDDSRKVEEELKRILRRIEEEAKRTED

SEQ ID NO: 2805 - protein, 181 aa, Artificial Sequence; identical to SEQ ID NO: 2804
  Synthetic

SEQ ID NO: 2806 - protein, 187 aa, Artificial Sequence
  Synthetic
SEAERLLDELRRLLEEIKRRIEELLEESKRSLEEVEKRSKELLDRLEDLLRKIKEEIRKDGTSDEVAKKIKELLERLEDSIRKVKEEDEKMLREHEETNRRIEKEIKDMLRKLEDDIKKVKDRLKDSPEEVKERLERLRERIKREIDRVIRELRELDKRAKEVSKRTKEELEKILEKVRRVIEEVKR

SEQ ID NO: 2807 - protein, 187 aa, Artificial Sequence; identical to SEQ ID NO: 2806
  Synthetic

SEQ ID NO: 2808 - protein, 187 aa, Artificial Sequence
  Synthetic
DDVDRLLDELRELIDRIRKDLERLLKESRDSLEELRRRSEELLKKLEEEIREVVERIRREGTGDEVREKIDRVAKEVERSVRKVKEEDKDLLRRHNELNKDIKRKIDELLKRLEEVVRRIKKRIEKDPDELKRRAEKLLEDLRRVIEEIKRRLDKVNDEVREVSKETTDRLDDLVRKARELIRRVEK

SEQ ID NO: 2809 - protein, 187 aa, Artificial Sequence; identical to SEQ ID NO: 2808
  Synthetic

SEQ ID NO: 2810 - protein, 179 aa, Artificial Sequence
  Synthetic
SEREKLLTDLRDLLKKVVDTLRRLNEELKKSIEESKETLERLNRTLKKLLDEVKKKLEDDGGEDKRVLDKIRDLLRKLRRAVEETKKTNKRLAEENEKLAKKSKEDLKKLLDDLEKVVKEVEETDELRKIVEEIRTELDRVRETNERILKEVRDEHRRVDKTNTDIERDIERVIKEVET

SEQ ID NO: 2811 - protein, 179 aa, Artificial Sequence; identical to SEQ ID NO: 2810
  Synthetic

SEQ ID NO: 2812 - protein, 182 aa, Artificial Sequence
  Synthetic
KKDEDLKKLLKDNEDVMKKAADEVKRLNDENRDLMRRVAEKIEDLLRRLEKLLRDILRRRGEEDERAKRLEELVREILERIERLLRESEKVHRESNERSKRLLEESKKLHKRIAEEIDELRRRGSDSKTVKDRIKRLTDELERVNRELSEEHKRVLDELRKRNKEILDRLKELLKRLKEEAD

SEQ ID NO: 2813 - protein, 182 aa, Artificial Sequence; identical to SEQ ID NO: 2812
  Synthetic

SEQ ID NO: 2814 - protein, 181 aa, Artificial Sequence
  Synthetic
SSEEELERLLEELRRITEEAKERMERSSKELEDVSREAEKRLEKSSRDLDKTVRDIKRRIKDKDTLREIDRLAKELKERNERLLEELRRSSEELKRRNERLIEESRKSSEEIKKRIKDLRRDSDDAEDVKRRVRELIEEHKRLNKELLDESRELLKTHAELVKRILDESRRLLEELEKAAR

SEQ ID NO: 2815 - protein, 181 aa, Artificial Sequence; identical to SEQ ID NO: 2814
  Synthetic

SEQ ID NO: 2816 - protein, 175 aa, Artificial Sequence
  Synthetic
SEREDATRRLRDIIRRLRDLIRRLTEESEESIKEIRERIERIIRTSEESLKELEERIRRNRDKRELLEELLRRHHELNKRLKEELKRILKEHAELNKRIKEELKRILKEAKERIDRLERTEDLERLREEIEDVVRKAEKRLDELHDEIRRTIEDAERRLDESNERAEKVVRDAEK

SEQ ID NO: 2817 - protein, 175 aa, Artificial Sequence; identical to SEQ ID NO: 2816
  Synthetic

SEQ ID NO: 2818 - protein, 175 aa, Artificial Sequence
  Synthetic
SDEERALEKIRRLIEDLRRMVREMLERSKKSLEEHKELAREILRRSRESLERLKDVARRNKEKEEDLKRLLKEHADLNRELKKRLRDSNREHNELNKDLKRKLRELLKELKKRVDELPRSRELDKLREELEEVVRRVEEKLDDSDRRANEVTREIEKTLDDLHREAEEVVKEIRR

SEQ ID NO: 2819 - protein, 175 aa, Artificial Sequence; identical to SEQ ID NO: 2818
  Synthetic

SEQ ID NO: 2820 - protein, 181 aa, Artificial Sequence
  Synthetic
SVEETLRRLLEESERVNRRVKEDLDRIRRESEEVNKRAEEMAKELLDEIRKDIDRVRKRNVDEDTLRKLLEEIKRLVDEWRRLVEENHKRNEDLIRKWEKLVRENHERNKTILKEVEERIRTEELAKEVIKTLRKLIEESKRNHEDLRRELRELIEESKRDHERLLRRLRELIKRIRDTTK

SEQ ID NO: 2821 - protein, 181 aa, Artificial Sequence; identical to SEQ ID NO: 2820
  Synthetic

SEQ ID NO: 2822 - protein, 181 aa, Artificial Sequence
  Synthetic
DEIEDLLRRAEKLIRDLKRKNDKLLKESEELLERLRERAKEVLDESKKLLEELRELVRRRGKTEEIEELVKEINKRNRELLKELSDLVKEINERDKEVLDRLRRDHERTLKTIDDLLKEIRDERAARDVERLKRRNKKVVEDSEDLARKTNKKSEELLREIRKRVEDSNRETKEILDRVRK

SEQ ID NO: 2823 - protein, 181 aa, Artificial Sequence; identical to SEQ ID NO: 2822
  Synthetic

SEQ ID NO: 2824 - protein, 174 aa, Artificial Sequence
  Synthetic
DEDEELLKRLRDLIREVRDRVRRLLEEDKDSLRRIRERVEELLRRSEESLKDLEKKIREGSPEEEIERLLREHEELNKRVLDEIRKLAEDNRDLTRRIKEKVEELIERVRDALRKLTPSEELKKIADKVEEVLREVEKELDKSRRTSDEILKKVEKAVRDLDRRVKEVIDRARR

SEQ ID NO: 2825 - protein, 174 aa, Artificial Sequence; identical to SEQ ID NO: 2824
  Synthetic

SEQ ID NO: 2826 - protein, 182 aa, Artificial Sequence
  Synthetic
SEAEELLKRLERLLRESKKDLERLRKELKDLLEESRKDVTRLLDEIRRLLEEIKRRLDKRNEDEKLDKLRKELKELVDRARRVLERNVRENEELIRDIERNLKKNREDNERAIKEILDELKDLEEVKRMIEKLKKESEEVIRKAKEDLDRVTKESRRVIEEVERRLDELRERLREVVERVKT

SEQ ID NO: 2827 - protein, 182 aa, Artificial Sequence; identical to SEQ ID NO: 2826
  Synthetic

SEQ ID NO: 2828 - protein, 182 aa, Artificial Sequence
  Synthetic
DEAEKLLKELRDLLEESRKDLERLLKELEDLLEESKRDLERLLEEITELLKRIKETVERRNEREKLEKLLRELKKVVERLKDNLKDNERRNKEAIERVRKKLKDNERENKKVIEDLRAKLKDLEEVKRKIDRLEEESRRVIEEARKRLEEVEEKSKKIIDDARRALDRIDKELRRVVEETRK

SEQ ID NO: 2829 - protein, 182 aa, Artificial Sequence; identical to SEQ ID NO: 2828
  Synthetic

SEQ ID NO: 2830 - protein, 180 aa, Artificial Sequence
  Synthetic
SVEETARRLLDENRKLLEEAERIHTEINERNKELLKRADDLHRRVLEDLRKLLDKVAKEIDSRRLERIEELVKRILEKLEKSNRDSNKEHKDTNERSKRSNDESRKVHEKTLKEIEDVTKEGQDADTVVKRIKKVIDELEELNRKSKKELKEVIEDLERRNRDSIRRAEDLLRRLEEEVR

SEQ ID NO: 2831 - protein, 180 aa, Artificial Sequence; identical to SEQ ID NO: 2830
  Synthetic

SEQ ID NO: 2832 - protein, 180 aa, Artificial Sequence
  Synthetic
KDEETVEKLLRELEELLKEAEERAKDLNRRNKELLDEADRRHEELLRRLEDLLRDVRRRIDSERLERLERLAKEIRERIKKSNEESNRLHEETNKRIEKLLRDLRKTVKEVLERIKDMKDRGEDSDTVSERIRKVIREIERLIKEIVKEIEKLIRDLEKRNRESLKEIKDLLKKLKDEVD

SEQ ID NO: 2833 - protein, 180 aa, Artificial Sequence; identical to SEQ ID NO: 2832
  Synthetic

SEQ ID NO: 2834 - protein, 173 aa, Artificial Sequence
  Synthetic
SRKEKLLTELKEILKRLKEEVEKIVKESEKSIEEHHRRSERLKRESKKSLDDLAKILERSDKKVIDEIAKEHHDLNREILREDKKLLDDHHRLNKDLLKTIKELIDEARRRMEELDQDEELEKIRREVEELLRRAEEELRRLNREIEENHKRVKRELEKIDKEMKDLLREAKR

SEQ ID NO: 2835 - protein, 173 aa, Artificial Sequence; identical to SEQ ID NO: 2834
  Synthetic

SEQ ID NO: 2836 - protein, 173 aa, Artificial Sequence
  Synthetic
DRKERLKERLERLLKEHHDRSRELLRTSEESIRRHHEESRRLLRRSKESLDRLRDELRRLREEDIDKLMREHHKLNRDLLKEDEDLLDTHHKLNRKILREDEELLRKIREEIEKLDKDEELRKLERRARENHKRVREALERLNRRIEENHKRVRRRLEDLDRAAEELLREAKR

SEQ ID NO: 2837 - protein, 173 aa, Artificial Sequence; identical to SEQ ID NO: 2836
  Synthetic

SEQ ID NO: 2838 - protein, 173 aa, Artificial Sequence
  Synthetic
SRKEDLKRRLEEIIKRLEEVVRRILRTSEESLKDHHEASKRLLEESEKSLKRLEEELKRKDERVIEELVRRHHDLNRRILEDDKRLLEEHHDLNKKLLEAVDKLLKEAEDVLRKLDKDEELRKIEERIRELAKRAREELDKLDKEVRKNHERVKRRLEELDRRAKELVREERR

SEQ ID NO: 2839 - protein, 173 aa, Artificial Sequence; identical to SEQ ID NO: 2838
  Synthetic

SEQ ID NO: 2840 - protein, 173 aa, Artificial Sequence
  Synthetic
SEKEKLLKEIERLIEELRRVVKKAVEDSKESIDRHHERSRELLRRSRESLKDLERRLKDSDESVIEKLVKEHHDLNRRILKEDRDLLREHHELNKKLIDKIRRLVEDVRRKLEELRKDRELEELEKRVRELERRIRETLTRLNEEIEKNHRRVEERLRDLNREAEKLAEEAKR

SEQ ID NO: 2841 - protein, 173 aa, Artificial Sequence; identical to SEQ ID NO: 2840
  Synthetic

SEQ ID NO: 2842 - protein, 173 aa, Artificial Sequence
  Synthetic
SEKEDLSRRLAELLKEHHDRSKKLLDESRDSLRKHHKASRDMLRRSDESLKRLDRVRKERDDEVIKELVKRHHELNRELLERDKKLLKEHHDLNEEIARRDETLLREIRKKLEEADKDEELDRIRKEVKKNHDRARRALEKIDKEAKENHERVREALRKLNEDLEKLEREKRK

SEQ ID NO: 2843 - protein, 173 aa, Artificial Sequence; identical to SEQ ID NO: 2842
  Synthetic

SEQ ID NO: 2844 - protein, 173 aa, Artificial Sequence
  Synthetic
REKEELIKRLKRLIDELRRVVKTLLADLERLLKEHHDRSRRILEESKRSLEELEKTLRRSDERVIEELLKRHHDLNRRLLEEDRELLRRLTEMIDRILEELERLLKELDDEVKKLDKDDELRKLKEELEDLARKARKEIEDIKEKLRRNHERVKKALEDLNRTAEELLDRARQ

SEQ ID NO: 2845 - protein, 173 aa, Artificial Sequence; identical to SEQ ID NO: 2844
  Synthetic

SEQ ID NO: 2846 - protein, 173 aa, Artificial Sequence
  Synthetic
SREEKLLKELKDIIDTLRRRVEEILTESEKSLRDHHRESRKIVEELRKLLEDLRRLLERKDERVIEEILKRLAERIRDLTRKDEKLVEEHHRLNRRLIDEIRKLFEELKEVLDRLDKNRELDKIEEEARELVKRAEEKLREIDKRARDNHKRVRDELKRILDELKKLIDERRK

SEQ ID NO: 2847 - protein, 173 aa, Artificial Sequence; identical to SEQ ID NO: 2846
  Synthetic

SEQ ID NO: 2848 - protein, 188 aa, Artificial Sequence
  Synthetic
SVEDSIDKIDKELEKNSERTKRTIDRIREESRRLIEEIKDRVRRLLREAERTIEDVKRKLKDDERARERIKELEEKVRRLIEKVRRRIKENLDRNDKLLREVEKVDKELNERLKELIKEVEDVLRKTRERRVVEELRERLKRLLEKHHDLMRRLTEDLKRLLEESERDARRLVKELEDALREIREDTR

SEQ ID NO: 2849 - protein, 188 aa, Artificial Sequence; identical to SEQ ID NO: 2848
  Synthetic

SEQ ID NO: 2850 - protein, 180 aa, Artificial Sequence
  Synthetic
SREDKVRELEERLKRLNERLNREVKKVNEDNRRLLKRAEDTARRLAERIRRLLERVDREIDSERLERVRRTVERIERELKRLLDELRKHVRETDEESRKVNEELNEMSERTLRELRKLKDNNVPDEELERRVEELLKRNEKLIREVKKRLEELLRRNEELIRRILEEVEKLLKDLEDKVR

SEQ ID NO: 2851 - protein, 180 aa, Artificial Sequence; identical to SEQ ID NO: 2850
  Synthetic

SEQ ID NO: 2852 - protein, 180 aa, Artificial Sequence
  Synthetic
RREERVKEALERIRRLNKRINERVEEVNRENKRLLDEAKRTHEELEKEADRLLDDVRRKIDSERLERIERKVKEIKERIRESNKRLKEHVEDTDRRSKELNERLNRSSEKTLEDIKRMKDSNVPEEELEKEIRKVLETNRKLAEDVRRDLERLLRRNRRLIEESKKEVEKLLKELEEDVR

SEQ ID NO: 2853 - protein, 180 aa, Artificial Sequence; identical to SEQ ID NO: 2852
  Synthetic

SEQ ID NO: 2854 - protein, 180 aa, Artificial Sequence
  Synthetic
RRDDKVRKLEKELRDSNRKANDESKKLRDELRRLNEEANRRVRELERRIERLLEKVKDDIDSEELERIERKAREVKKTLEDLNRKLNDTSRRSEEELKELNRELNRVVRELEEELRAMLENNVPEEELKKRVEEALEEHRRLVEEVRRRVERILERNDELIKRIEETVEDLLRRLEEEVR

SEQ ID NO: 2855 - protein, 180 aa, Artificial Sequence; identical to SEQ ID NO: 2854
  Synthetic

SEQ ID NO: 2856 - protein, 175 aa, Artificial Sequence
  Synthetic
SEIDEIVKEVERLLEKLKEDSRRTVEEVKKLLDELRKHSEDSVREIEELIERLRREIERDGDTEEVEKKIRDIKRRIEELLRRNEKLVKEIKDRLKKLLDENRERLKKIEKELRDKARAEEKLRRLEEELREILKRSEDLARKLDEDLKRILERTRREIKRLEEDLDRLDEEVRR

SEQ ID NO: 2857 - protein, 175 aa, Artificial Sequence; identical to SEQ ID NO: 2856
  Synthetic

SEQ ID NO: 2858 - protein, 175 aa, Artificial Sequence
  Synthetic
SESDEIIKEVDELIKRLRKHSKETVKEIEEILTRLEERSRKSVKEIEDEIRKLEDIVRKRGNTEEVRELIKKILEDIERMLEENERLAKEVKDRIEKLLRDNERLVRDIKRKLREKLSVEEKARTLERKLDKILEETKREAEELKKRLDELVEKTRRLIEELKRRLKELLDRAET

SEQ ID NO: 2859 - protein, 175 aa, Artificial Sequence; identical to SEQ ID NO: 2858
  Synthetic

SEQ ID NO: 2860 - protein, 175 aa, Artificial Sequence
  Synthetic
DESRKIVRDVEELIKRLEEHSRETVKRADRVLREDHKKSRDSVREIEKLIRDVKDKIDKRGRTEEVEKLLRDIIRKVEKLLEENRRHNRRVKEELKRALEENRRLLEEIKKEIEKKASVEEEVRRLKKELDDLLEETKDLIRRLEEKLDKNVKETEDEIRRLIEELKKILEDATR

SEQ ID NO: 2861 - protein, 175 aa, Artificial Sequence; identical to SEQ ID NO: 2860
  Synthetic

SEQ ID NO: 2862 - protein, 175 aa, Artificial Sequence
  Synthetic
REIDEIVKEIEKILRELKKRSDETVREIERLIEEDHRKSRKSVRDIEKLIDDLRKDVERRGDTEEVKKLIEDIDRRIKELLDRNRKHNTRVLKRIEDLLRENERLAREVEKRLKDDMRAEEKLRKLEEELRRLLEESKREADRLKKELRDNLKTTDELIKELKERLDKLKEDIER

SEQ ID NO: 2863 - protein, 175 aa, Artificial Sequence; identical to SEQ ID NO: 2862
  Synthetic

SEQ ID NO: 2864 - protein, 175 aa, Artificial Sequence
  Synthetic
DESDRIVEEVRRLIKTDHDNSRRSVRKIEELIARDHKKVKEIVDEIRRLIRELEELIRRDGDTREIEKLIRDIEETIRRALEELERHNERVKREVEKMLRDNEEHNKEVKERIRRKLRVKEKLDRLEEEIDKNVKRTREEIERLKRELDKNLEDVRRLAKELEDELRKLDEDAKR

SEQ ID NO: 2865 - protein, 175 aa, Artificial Sequence; identical to SEQ ID NO: 2864
  Synthetic

SEQ ID NO: 2866 - protein, 175 aa, Artificial Sequence
  Synthetic
SEIDRIIEDAERLLRELERNSDRSVEEIEKLIRDDHDNSRRTLEKIEKVIRELRKDVKDRGDTEEVERKIREILREIEELLRRNEKHNREVKERIKEVLRRNKELLDEIKKRLEDRVSSREKVKRLEEELRKILKKTREKAEELKRRIDRNVEETRRRARELKEELDRLLKEART

SEQ ID NO: 2867 - protein, 175 aa, Artificial Sequence; identical to SEQ ID NO: 2866
  Synthetic

SEQ ID NO: 2868 - protein, 175 aa, Artificial Sequence
  Synthetic
DESRKVIKEIEDLLEEWKRRSERMIRESEKLIEELRERVDKILEDIDRLIRTLDELRKAGVPREEIRKLAEEVRKRIEDLKREIKKLAEDIKRTDEKLLKESRDIVRKIEEIIRRKLSVEEEAKRLKDELEEILKESEDLSRRTKKELEDLLREVEKEIKKLEDKLKKLLDETDK

SEQ ID NO: 2869 - protein, 175 aa, Artificial Sequence; identical to SEQ ID NO: 2868
  Synthetic

SEQ ID NO: 2870 - protein, 175 aa, Artificial Sequence
  Synthetic
SETEKVIREIEKLIDDIRKESERSIEESRKLLKELEEIVEKAIRDSRRLLEDLRRLVEDGVDRDEIRKLAEEVERSDRELVKRIEDIARELKKRDEELLRENEKIVRTLEETIKRELSSEEKADTLRRKLEKLLEDTKRMSEKTKKEIEDLLKRVRELSEETKRRLDRILEDVER

SEQ ID NO: 2871 - protein, 175 aa, Artificial Sequence; identical to SEQ ID NO: 2870
  Synthetic

SEQ ID NO: 2872 - protein, 175 aa, Artificial Sequence
  Synthetic
SESDKVVKEIEELLRELRKRVEEIIRESEALIETLKKRVDDAVRESRKLIKDLRELIERGVPEKDIRKIAKDLEEKNKKLTDEIRRLAEELRDRDRRLLEEIEKLLRDIERTVDRKLSVREKAKKLREELRKLMEEVRRLSKETKDKLDELLKTVEELSKELRERLKRLLDEAET

SEQ ID NO: 2873 - protein, 175 aa, Artificial Sequence; identical to SEQ ID NO: 2872
  Synthetic

SEQ ID NO: 2874 - protein, 175 aa, Artificial Sequence
  Synthetic
SESDEVAKRIKELIDRLEERSRRSIRESDRLIKELEKEIEKAVRESEKLIRDLEELIRRGVDTREIEKLARELKKRNDDLTRKIEDIARKLKKRDEELLKENEDLVKEIDDSIKAALSVEEKMRTLEEDLKRLLEETRDMSRKTKEKLEELLKRVRDLSKKLAEDLRRLLEEVRR

SEQ ID NO: 2875 - protein, 175 aa, Artificial Sequence; identical to SEQ ID NO: 2874
  Synthetic

SEQ ID NO: 2876 - protein, 175 aa, Artificial Sequence
  Synthetic
SETDEVIKTLEELLERIKRRVEELVKRNKDLIKALEEEVRRIIKESKKLIDDLAELAKEGVPKKDIEKIARDLEKRDEELLDRIRKLAEELRRRSKKSLDEVRKIVRELEEEIDRRLSDKDKADRIREEIRKLEEEVKRLHDELKKELDDLLRRVEEDSKRTKERLRKLLTDVKK

SEQ ID NO: 2877 - protein, 175 aa, Artificial Sequence; identical to SEQ ID NO: 2876
  Synthetic

SEQ ID NO: 2878 - protein, 179 aa, Artificial Sequence
  Synthetic
SEVDDLIRRLEKLLEDIKRRVEELVRRDEKITKDWERESERLIRELEELLKTIADLVRRRKESKEEVEKVIRDAERKIREILETSKELLRRSKKHTKEVLEEVERLIDEARKMIEEVRKRNVDKKKLDEIRKRLEEILKRVRELLERLDRENEDLARKSKELADRIRKELKRILDEVRR

SEQ ID NO: 2879 - protein, 179 aa, Artificial Sequence; identical to SEQ ID NO: 2878
  Synthetic

SEQ ID NO: 2880 - protein, 179 aa, Artificial Sequence
  Synthetic
DEVDELVKELEESLRRSREEIERLVREDEELTKTIREEVKKLVKTDEDLSKKIEDTVRRRREADEKIKEMIDRSKKHTDEVLERVEELIKRSKDHTKEVVDRVEESIKRNDERLDEIRKRNVDKDKIKELKERNDKLLEEARRLAKELKERNDTLLKEVREELRRLRERNDRILKEAKK

SEQ ID NO: 2881 - protein, 179 aa, Artificial Sequence; identical to SEQ ID NO: 2880
  Synthetic

SEQ ID NO: 2882 - protein, 179 aa, Artificial Sequence
  Synthetic
DEVDKLIRDLEELIRRIRKRLKELVDRDRELTREIRRRIRELIEESKEALERIDKRVKERKEVREEVEDLARELKRLNDEVLKEIEDLLRESKKHTDDVRREVERLIKEIREKLEEIRKRNVDKDKIKKLKDDLDRLLKEAEDRLRELEERNKRLLDEARKEIEKSDRRLEEILERVRR

SEQ ID NO: 2883 - protein, 179 aa, Artificial Sequence; identical to SEQ ID NO: 2882
  Synthetic

SEQ ID NO: 2884 - protein, 179 aa, Artificial Sequence
  Synthetic
DEVDELIKTLKKLLEDIRERVERLVTDSKRSLDEIRETVRDLVRRDKELLKRIEDTVRERKEVREEVEELIKRSEEHTEDVERRVRKAIEEHKRLNDEILREVEELIKRIEEAIREVAKRNVDKDKLEKIKRDLEKILTEVREALRELDERLKKLAEEAKRLLEELRKRNRDILEKVRK

SEQ ID NO: 2885 - protein, 179 aa, Artificial Sequence; identical to SEQ ID NO: 2884
  Synthetic

SEQ ID NO: 2886 - protein, 179 aa, Artificial Sequence
  Synthetic
DEVDKLIKEIEESLRRSEKEVRDLVRESERSLKEIEKRVRELVKRDEDLLKEIEEVVRKKKEAREEIEEMAKRSEEHTEEVRKEVEELARRHKERNKEILKRIRESMKRNDELIDEIAKRNVDEEKLKRLRKENKDLRDRVEEELRRLDKELDELLETVRRLLDELRKRNKKLLDEARK

SEQ ID NO: 2887 - protein, 179 aa, Artificial Sequence; identical to SEQ ID NO: 2886
  Synthetic

SEQ ID NO: 2888 - protein, 179 aa, Artificial Sequence
  Synthetic
RLEEEIERLRREVEELIERSKDLIRRSHTKSRKLIEDVKRELDRLRREVEELIKRAEDRTRREEVDKKLKDLLRELEKILEEIDRNIRRNMKENEDLNRRWKEVTEELLKELEEILKRIRDRVEDRVVREAEKLIRKIAEDNRKALEESDELIRRSEKDVRDMVRRAEELIEEIKRRVD

SEQ ID NO: 2889 - protein, 179 aa, Artificial Sequence; identical to SEQ ID NO: 2888
  Synthetic

SEQ ID NO: 2890 - protein, 181 aa, Artificial Sequence
  Synthetic
SKDEEVERLKEELDRLLEEVRRLSEESKKRNDELLKRAEEIIEELKKELDEIREEVERRGLPEEKLERIERLVKRIKERIEDLLKKSREEHEKSKRRDEELLRRLEEVAKEVKRRLDEMARKGEDKDTVVRRAKKVIDELRKDVERVKRESDEVLKELEKLNREIEREVRKLLKELRDTVR

SEQ ID NO: 2891 - protein, 181 aa, Artificial Sequence; identical to SEQ ID NO: 2890
  Synthetic

SEQ ID NO: 2892 - protein, 181 aa, Artificial Sequence
  Synthetic
RSEEEARKLERENKKLVDDARKLSEESRRRNDKLVEEARRIAEELKRELDRLLEEVDRRGLPEERLRDIRRLIEEIKRRVEELLRRSKKMHEDSKKRDDDLLRRSEELHEEIRKAIEKMRKDGEDTKTVVDRVKKLLDDLREVNREILRESDKVLRDLKRLNDEIKREVEELLERLEREVR

SEQ ID NO: 2893 - protein, 181 aa, Artificial Sequence; identical to SEQ ID NO: 2892
  Synthetic

SEQ ID NO: 2894 - protein, 181 aa, Artificial Sequence
  Synthetic
SAEEDAERMKDRNRRLLEKVRRLSEESKRRNDKLVEDAKKLSEDTRRKLEDIARKVRKRGLPEDKLRRIEELVKEIEKRNRELTKRSEDAHRESKKRDEKLLRDSEKRHREVLKRIEDLLRRGEDKDRVSEEIDRLLRDLERRNREILKESKEVLDRLKKLNEEILKESEDLLRRLEEEVR

SEQ ID NO: 2895 - protein, 181 aa, Artificial Sequence; identical to SEQ ID NO: 2894
  Synthetic

SEQ ID NO: 2896 - protein, 176 aa, Artificial Sequence
  Synthetic
SEIEKVVKDVDKLLKELEDHTRKSLEDSKRLLDELRKHTEDTSREVKELLERLEEVIRRNKEMKEELRRIAKKIDEDIKRLVERNKKIADDIRREDKKLLDRNRELVDRIREEIDRRIRSKEDADRLRERLDRILEESERLSRETKEELDRLLEDSKRKIRELEERLKKLLDDAER

SEQ ID NO: 2897 - protein, 176 aa, Artificial Sequence; identical to SEQ ID NO: 2896
  Synthetic

SEQ ID NO: 2898 - protein, 176 aa, Artificial Sequence
  Synthetic
DDSDKVLKELEKLLEDLERHTRESLRESDELLKELKEHTKTTLRRSERLLRELKRLVDENKEAVERIEEAARRIEEEDRKLLKRNEELVREIEKRDRELLERNRKLAEEIKEAIRRKVRVEKDVEEVRRKVEELLKDSERLSKETKERLRDILRDSRRLSRETKEELKRILKEVRD

SEQ ID NO: 2899 - protein, 176 aa, Artificial Sequence; identical to SEQ ID NO: 2898
  Synthetic

SEQ ID NO: 2900 - protein, 176 aa, Artificial Sequence
  Synthetic
RESEEVIKEVEKLLEELKENTKRTLKESRDLLKTLEDHTRETKKTVEKMLKELEDKVRKRKESEEEIRKVVEDIKREIERLARENERIAREIEERDRELLDRNRKLAEDIEEKIRRKIRVEEEADRLRRELKKILDRSRELSRKTKEDLKKLLKESEDIIRELDRRLEEILKEVER

SEQ ID NO: 2901 - protein, 176 aa, Artificial Sequence; identical to SEQ ID NO: 2900
  Synthetic

SEQ ID NO: 2902 - protein, 176 aa, Artificial Sequence
  Synthetic
EEIERVIKEVKDLIEELRRNTERTLRESEELLKTLKKISDDSKEEVERMLRELRELVKSNKEAKEEIRKVADRIRKVIKRLMDENKKVADEIRKRDEDLLDENRKLIDRIRREIDKKIRSKEDADRLRREVDKLLEESKRLSEETKRELDRILEETKRTLERLKEELDKILEEVER

SEQ ID NO: 2903 - protein, 176 aa, Artificial Sequence; identical to SEQ ID NO: 2902
  Synthetic

SEQ ID NO: 2904 - protein, 174 aa, Artificial Sequence
  Synthetic
SEKEKLVEEVRRIIERHKRVTEELLKELRRILKEWEDVSRDIERRVREILERLERAARDGEDKRLVRELVKDIERLLKKLLDDSKKIVKEIDEVLKELLKTDEELVRRIREKLERADKDKDLEELKKELEDSARRSKKLADDVREELKTLLRESERIIKELRKELEKLLREVEK

SEQ ID NO: 2905 - protein, 174 aa, Artificial Sequence; identical to SEQ ID NO: 2904
  Synthetic

SEQ ID NO: 2906 - protein, 178 aa, Artificial Sequence
  Synthetic
TLEEVLKEVKRRVERVNEEDKRVLDESRKRAKEINDEDRRLLEESKRKAEELLERLRRKDKDAKEVEEKIKRVLEELAREHEKINERIKEEVKRLEEEHKKINERTKRLLEDLKRLVESGLDEDRLRREAERILREIRELSRELKRKNEELLRTIRRVSEELRKKNEEILERVDREIK

SEQ ID NO: 2907 - protein, 178 aa, Artificial Sequence; identical to SEQ ID NO: 2906
  Synthetic

SEQ ID NO: 2908 - protein, 173 aa, Artificial Sequence
  Synthetic
SAKELLDDLRKKIEDNVRETEKLLRRLREKVEKIEREIKELVRKLREDLERLLEKVKRRGVEEEVERLIREIIKKIEELVKRLEELLKEILERIEKLAEDNRRHNEEVKKDIDDKRIEKEVVDTVRELIERDHKKSRDSVRRVDELIDRARKDVRRVVEEVRKDLEKLDEDVK

SEQ ID NO: 2909 - protein, 173 aa, Artificial Sequence; identical to SEQ ID NO: 2908
  Synthetic

SEQ ID NO: 2910 - protein, 175 aa, Artificial Sequence
  Synthetic
REVEEVLKDLKRLIDEAKKRVEDAIREIDRLIREWERLNREMLREIKKSNDEVRELVKAGVPKEDIERLLREDNKLIEELLRRSEEIARDIERKIRKILEDLKRIIEELKKRVKDALRVEEAVRDVERRLEKLLKEIKDLIDRLKEKVDRVKREVERSIEELKRHNEEVLKEVRK

SEQ ID NO: 2911 - protein, 175 aa, Artificial Sequence; identical to SEQ ID NO: 2910
  Synthetic

SEQ ID NO: 2912 - protein, 175 aa, Artificial Sequence
  Synthetic
KEVEDVLEELDRLIETWARLNRELVERIRRLLEEWREENRKVVEEVRRSNETLRELVERGVPKEDIRRLAKEDNERIEELLKRSRKIADDIRRAIEEIVRRSREILRELEKRVDDKLRVEEVVRRVKDKLREVKREVEETARELRERVDDLLRKVEESVTRLKRHNEDLLREVER

SEQ ID NO: 2913 - protein, 175 aa, Artificial Sequence; identical to SEQ ID NO: 2912
  Synthetic

SEQ ID NO: 2914 - protein, 175 aa, Artificial Sequence
  Synthetic
SEVEEVLRDLKRLLEEWKKRNEDLVRDVERLLREWKEANDRALKKSRDSNKELERLARDGVPEKDVEELAKRDNEENKRLSEESARIVERIREKIEEALKRSTDIVREIEKRVEKALRKKEMVERVRREIKRLEEEVKKTITDLKERLKKLKEDADRSSRESEEHNKKVVEDVRR

SEQ ID NO: 2915 - protein, 175 aa, Artificial Sequence; identical to SEQ ID NO: 2914
  Synthetic

SEQ ID NO: 2916 - protein, 175 aa, Artificial Sequence
  Synthetic
REVEEVLKELDRLIDELRKEVEKIVREVERSNDEWRRRNKELVDEVRRELDRLRKLVDDGVDKKDIRRLLDEIRKLIERVLKESRDILRKDNERIKELADRIRRLVEDLERKIEEKLRVKEVVDDVKRKLEDLKRRVDELVRRLEEHNKDLRRKVEESAKDLRRKLEELRERVER

SEQ ID NO: 2917 - protein, 175 aa, Artificial Sequence; identical to SEQ ID NO: 2916
  Synthetic

SEQ ID NO: 2918 - protein, 176 aa, Artificial Sequence
  Synthetic
SEKDEVRKTIERLLKEVEKMIRRVLKEVEDLLRELKKRTEKLKRELDESHRRVKEVIERRKEDRDLLRRLIEENERLIEEAKRELDEVDERVRRRIEELLKELEKIVRDVEDMLRRLNLPRELLEEVERALKKLKEDVDKVIEELREKLKRHHEDVKRAIDRVREESKRLKDEAEK

SEQ ID NO: 2919 - protein, 176 aa, Artificial Sequence; identical to SEQ ID NO: 2918
  Synthetic

SEQ ID NO: 2920 - protein, 176 aa, Artificial Sequence
  Synthetic
REDEEVVKTLRELLREAKERTDRLLRELREIIKTMRKRLRDIEEDLRRSHREIEKLIRDRKEKREELRDIVRRNDELIRRLTEDLERLIEEARKVLKDIERDLERVDEELEDTLDKANLKRELLEEVRKELERHHREARRAVEEVKKLIDDLMREVRKLIDEVRKDSERLRREVER

SEQ ID NO: 2921 - protein, 176 aa, Artificial Sequence; identical to SEQ ID NO: 2920
  Synthetic

SEQ ID NO: 2922 - protein, 176 aa, Artificial Sequence
  Synthetic
DEDEEVKRRLEKLLEDADRVTEKIRKDLKETHDRVKRAIDELKKELEKSHRTIKEVIERRKEKRKDLTKIVRDNERLIEEVKKRLEELIRKNEEIIKELEKELKKIDDDLDKKIKDANLKRELVEEVRDRLRKHHKKVRDIVDDVDKRSKDLERTARRVIEDVKEKSDRLKEEVDR

SEQ ID NO: 2923 - protein, 176 aa, Artificial Sequence; identical to SEQ ID NO: 2922
  Synthetic

SEQ ID NO: 2924 - protein, 174 aa, Artificial Sequence
  Synthetic
EDEERVKEKLKRLLEKAEEALRRSKRRNEENKKEHERVLKEIDERLKRLEEKVRRGNLERRTVEEIRRILEDIKRKLDKLTKESEDLHRRNDERVKEVFRRIEKLIRDIEEDIKAGRSREDIERLLKELDDRIRRIIEELKRSDEELHKENRRKIKELEDLVREADKRIEDKRK

SEQ ID NO: 2925 - protein, 174 aa, Artificial Sequence; identical to SEQ ID NO: 2924
  Synthetic

SEQ ID NO: 2926 - protein, 174 aa, Artificial Sequence
  Synthetic
DDEKEIKDRLDDNKRKDDEMTKRAEDELRKNLETTKEALRDIKRKLDRLREKVERNNLDEKTLKEIEDVLRTIEEEARRLLEDSKRVHREIEERMKRLNDDSKRVHEDIKRALDGGVRREELEKIVRDLHKRNKEVIDDIRRLIDELHKRDRETIKRLEEIVRRADEKIKEKAR

SEQ ID NO: 2927 - protein, 174 aa, Artificial Sequence; identical to SEQ ID NO: 2926
  Synthetic

SEQ ID NO: 2928 - protein, 174 aa, Artificial Sequence
  Synthetic
SDEERIEERLKRNEETDKRATDENEKRNDDLLRRAKEALDRNRERNDELRDKVRKENLDDETVKRIEKLLRDNDRRLKELLRELEKRLRDNREKLKELNKESKKRHEEVRERLRAGVRREELSKLVKELHDDNREKIKDSDRSDDDIRREIERMIRETNKSDEDIARAIDESAR

SEQ ID NO: 2929 - protein, 174 aa, Artificial Sequence; identical to SEQ ID NO: 2928
  Synthetic

SEQ ID NO: 2930 - protein, 174 aa, Artificial Sequence
  Synthetic
SERERVEERLKELAKRVEDAIRRLKKDLERTKEEHKEADRRVKEKLKRLKEEVDRANVDEDLRRKIEELLKRAKDENKKLNEEVERILRELEKRYEELKRRIDRLLDTLRKKLEEGTRDTEVEELLKDVKRKIEEMIKELKRLNDELNKRSEEMIRRNDDLIKRLEEEIRKDSK

SEQ ID NO: 2931 - protein, 174 aa, Artificial Sequence; identical to SEQ ID NO: 2930
  Synthetic

SEQ ID NO: 2932 - protein, 176 aa, Artificial Sequence
  Synthetic
SSEDEVRKTVDELRERSERTIRDLERVDRELKKEHEELIKELREIVKELREKVKRASKEPTSEREIERLKEELERTMRELHKKNKRVREKHEELLEELRRRNRKLNEEVKKTVREMRDKVDKRIEEELRKLHKENKEAVERSERTNRDILRRNDEADKEIEKELRELIEKLERDRK

SEQ ID NO: 2933 - protein, 176 aa, Artificial Sequence; identical to SEQ ID NO: 2932
  Synthetic

SEQ ID NO: 2934 - protein, 175 aa, Artificial Sequence
  Synthetic
SEKEDLKEKLKRNEEEHRRAVEEIRKRLDENRRRHEKVIKEIEDALKKDEDDVDKENLDEELRKELKRLHDEIRRRLEELNRRSKKRHKEVEDKLRRLDEESEKMHRRVEDLIRRGELDKDELTREIEKLHRTNREMVRDLRETLKRLHEENKRLVDELRRLLEELHRRTREASR

SEQ ID NO: 2935 - protein, 175 aa, Artificial Sequence; identical to SEQ ID NO: 2934
  Synthetic

SEQ ID NO: 2936 - protein, 174 aa, Artificial Sequence
  Synthetic
SEEEEVRKALERLRRELKRVLERSEELLKEWEDRLRRVLEESRRLLERWREELEKDGIDEDVLRELEKDIKKVKEDHDRDAEKLRRIIEEIRKRHEEVFRRLEDLLRKVRERLERGRRREELKEILKRLEDTLREIEKEAKRLNDELARVLEEIRRKSERENRRLKELIDRLRK

SEQ ID NO: 2937 - protein, 174 aa, Artificial Sequence; identical to SEQ ID NO: 2936
  Synthetic

SEQ ID NO: 2938 - protein, 171 aa, Artificial Sequence
  Synthetic
SDRERLEEMLKRLKEELEKVRRDNERSLEEIKRSVDRVLEEHKRTLEELKREVDRANVDEDLKRELKELLEDSKRRVEELKEKHERLLRKNKKELDELKKRLDDLLKKIRDDDVRGEEADEVVKRLADVLEKAREDLKRSDKRLRDSNRESRKELEKINRDLRRKLEEAKR

SEQ ID NO: 2939 - protein, 171 aa, Artificial Sequence; identical to SEQ ID NO: 2938
  Synthetic

SEQ ID NO: 2940 - protein, 171 aa, Artificial Sequence
  Synthetic
KDEERLETVLREIETRAEKVARDHRDSLRRIREELERVLKENKDTLKRIREELEKTNVDEKLKTEADRLEEENERRLRELEKELDELLKRSEDTLRKLLKELRELLKRVRDRQVRGEEVKRVLKELRDLLEEIRKRLEDINRDLKRKLDEIEEELRRSDEKLKRDLEEARK

SEQ ID NO: 2941 - protein, 171 aa, Artificial Sequence; identical to SEQ ID NO: 2940
  Synthetic

SEQ ID NO: 2942 - protein, 171 aa, Artificial Sequence
  Synthetic
SDEDKLREDLRRLEEELKKVLDDHRKSLKEIEDSLRRVLEENKRTLEKLKRDAEKANVDEELLERLKKLLDDNRKRVEELEERHRRLLKESEERLRRLVEEFKRLLEKIERDQVRGEEAKKVVKALEDVLREIRERLKRINDELRERNKKSSDELRKSDERLKRELDKMRK

SEQ ID NO: 2943 - protein, 171 aa, Artificial Sequence; identical to SEQ ID NO: 2942
  Synthetic

SEQ ID NO: 2944 - protein, 183 aa, Artificial Sequence
  Synthetic
DADKELEKLLREWEKRSEELRKRLEDINRRWEEESKRLKKELKDINADLRRKVEELRRDEDKDRVREVVKRLSERNDEVDRKVKKTSEDIADRNRREDKKIREDSKKIKEDLERALEELREKVSSDVIRRAKEELDRIEKKDRDVLDDNRRLIETWRREDKKVNDDNRRSNEELKRELDKTRE

SEQ ID NO: 2945 - protein, 183 aa, Artificial Sequence; identical to SEQ ID NO: 2944
  Synthetic

SEQ ID NO: 2946 - protein, 183 aa, Artificial Sequence
  Synthetic
SAEEELKELLERWDRDSKRAEEELRRLLEESRERSEKVLRDLKRLLDEMEDAVRKLKRDSDKDRVRRTVEELTKTVRKKLEEIERRTREIKKELERTLKRIEERSREIKKDLERSLERLRKDVSSEVIERFKDVLRRIEKRNKEVIDRAKEVIDEDEKRNREVIERVERKVERLRKEVEDREK

SEQ ID NO: 2947 - protein, 183 aa, Artificial Sequence; identical to SEQ ID NO: 2946
  Synthetic

SEQ ID NO: 2948 - protein, 184 aa, Artificial Sequence
  Synthetic
EEKERMREVLKRLEEEAKKVLDDNRRAVEEIEKKDREVHKRNRDLLERWREEMEEILRKARERVDKEDLDRLEETLRRLIEDNRRKDEEIRKVSEDVKRDNRKKNEDIKRRLEELKKTVADVERKNSREEELKKIIERAREELEKVRRELEEHLKRWDEISKKLSKDLERHNEEVARTLKRSRD

SEQ ID NO: 2949 - protein, 184 aa, Artificial Sequence; identical to SEQ ID NO: 2948
  Synthetic

SEQ ID NO: 2950 - protein, 181 aa, Artificial Sequence
  Synthetic
SVLEEFKKRIEELHRRDRKVLEDHRRRLKEWEEELKRVLDEHRESLKRIKERVDRVKKDLDDEELKRVDKKLKDLEKKSRDLVREVEKILRELRKRSKDAEDKVKKVNEDVRRRAEKLARDLREDSDALRELLREWDKLSKELEKELRDLNREVERSIREAKKKLEKANEEMRRTLEKDRK

SEQ ID NO: 2951 - protein, 181 aa, Artificial Sequence; identical to SEQ ID NO: 2950
  Synthetic

SEQ ID NO: 2952 - protein, 181 aa, Artificial Sequence
  Synthetic
STEEDAERALEELKEELRRVEKENRDSLKRIREKLKEVEDEHRKTLEELKKELDDVMRKIKDERKKRKVEKLRRELEKAKRDSEKLLRDLERKIDEVEKTSKKMLEELERDLRKILDDVRKAKLDKDSLKRLLDEARKKLEELKRRLEKLDRDLDESLKRLKEDLDRLDRELRRLLDELDK

SEQ ID NO: 2953 - protein, 181 aa, Artificial Sequence; identical to SEQ ID NO: 2952
  Synthetic

SEQ ID NO: 2954 - protein, 181 aa, Artificial Sequence
  Synthetic
SVEEEARKALDDLRRRLEEVTRRHRESLKELREELDEVRKENEKSLKKIKDDLEAVRRRITDERKKRKVDEARERIKEVEERSRRKLRRLEEEIDKAEEESERLLETLKEELKRLMDEVEKAKRDEEELRRLLKKLEDDLRRLKKRLDELDRRLRELVKRLLEDLKRLDDELKKLLEETER

SEQ ID NO: 2955 - protein, 181 aa, Artificial Sequence; identical to SEQ ID NO: 2954
  Synthetic

SEQ ID NO: 2956 - protein, 175 aa, Artificial Sequence
  Synthetic
SAEEELKRLLEEHKKESEDVKRRLRDLLRELEDIHRRMTERLRELLKRLDDILRRRNSDDETLKRLVDELRKEIKKVEDDDHRNLERLREELRRLEEDLKRRNEETKEEVDRVRKKGSLTEEILKKLEEISRRVREKVKKELDELKELIRRHARKLEKILEEIRRLIEDLERRAR

SEQ ID NO: 2957 - protein, 175 aa, Artificial Sequence; identical to SEQ ID NO: 2956
  Synthetic

SEQ ID NO: 2958 - protein, 184 aa, Artificial Sequence
  Synthetic
SEAEEVLKRIRDILETLRREHERILKEIRELNEEFKKEVEKALRKIKRELEELEKDAEREGTTEELRKKVEKLLRDIKETLRRLEEKSRELEERIRELLKRLHETVRTLEERIKDLREELRERVDERVEKKIEELLREIRKVNDEVHKRIRKLLEDHRRTVDEARRRIEELLRRLKKTLDDIDK

SEQ ID NO: 2959 - protein, 184 aa, Artificial Sequence; identical to SEQ ID NO: 2958
  Synthetic

SEQ ID NO: 2960 - protein, 181 aa, Artificial Sequence
  Synthetic
SDKDELKRLLDDHERTSTRARESLEKLSREHRKTSREVEERLKRLVDAIRDTARRVDSRRREVEETLKEIEKRLRELKRELEELDKEFEDSVRKLKRELERLNEEVRKRVEDLKRRMAEGTDEEVVRRILRELRELNERAKEMLERILRKLEELNREYKKKVREILERIKELLRDLRRKAN

SEQ ID NO: 2961 - protein, 181 aa, Artificial Sequence; identical to SEQ ID NO: 2960
  Synthetic

SEQ ID NO: 2962 - protein, 181 aa, Artificial Sequence
  Synthetic
SADDEIRKLKKEAEDILRKAREDRERLKEKNRKIDEDMRRTLKKLHEETRELEKKVRREKGEDERVKELLDDLRRKDDDMRKRVTELHEENKKIDDEVRREVERLEEEIRDTIRKLDEDVKRDGVTEELVKEIRELLRRLEEKIEELRRRYEKKLEELKRKVDELIRRYKRKLERVAEEVK

SEQ ID NO: 2963 - protein, 181 aa, Artificial Sequence; identical to SEQ ID NO: 2962
  Synthetic

SEQ ID NO: 2964 - protein, 175 aa, Artificial Sequence
  Synthetic
SEEEELVRRVEEKIKASEKHARELVEETRKKLDESRKKWKDLARRSRRLLEELKDKVDKGTDKKRLAEEIKRVLDEHEDENRKLADEDRELRKRHKEKNKEHEERNRRLREELERRLDETEELRRLEKELRDLNKRVKEESRKLEEDLKDIHERAKEDSKRLKRELEKIKEEVER

SEQ ID NO: 2965 - protein, 175 aa, Artificial Sequence; identical to SEQ ID NO: 2964
  Synthetic

SEQ ID NO: 2966 - protein, 181 aa, Artificial Sequence
  Synthetic
DAERILRELEERLKRLLDEHREISKELRKRNKDLLKEHKERSKRVKEELKELVKEVEDGGKPREDVDRLRKSAEKVEEELDRMDEEFERDNRELDRRLDELDKEIEELVETVRERLERAEERGEPIEELVKEVEKLIKELREKSREVEREVDKMIRDNARKSEKIVRDAKRLLEKLEREVR

SEQ ID NO: 2967 - protein, 181 aa, Artificial Sequence; identical to SEQ ID NO: 2966
  Synthetic

SEQ ID NO: 2968 - protein, 181 aa, Artificial Sequence
  Synthetic
RSEDILRELRERVKRSEERHEKISRDLERKNRELLKEHRERSEKLKRELEELVKRVEDRGLPEERLKELRKIAEEVDRELEEMDRRVEEMNERLDRRLEELDDENRKKVKEIKRKLDEDAKRGEEAEDLARRVDETIKDHERHSEEVKRDVTEKIKENEKLSRDIVRRVEKLLRDLEREVR

SEQ ID NO: 2969 - protein, 181 aa, Artificial Sequence; identical to SEQ ID NO: 2968
  Synthetic

SEQ ID NO: 2970 - protein, 181 aa, Artificial Sequence
  Synthetic
SREDILRDLRRRLEELLRRHKRISDELRKRNKKLLDDAEKRAKELREELEKLVREAERRGLPEEELKRLKEIADEVKKRLDELVKELRRDNERLDKTLDDLNREVEELVRRVEDELRRAAERGEEIEELVKRVDKLIKELKRKSEEVMKRVDELIRRNERLIREIVKEVEKLLEDLEREVR

SEQ ID NO: 2971 - protein, 181 aa, Artificial Sequence; identical to SEQ ID NO: 2970
  Synthetic

SEQ ID NO: 2972 - protein, 181 aa, Artificial Sequence
  Synthetic
SAEETIERLKEEIEKLLREAEEILRRLRERNRRLLEEHKDISRKLEEELRKLMEKVRRGGLPEDRLRELERRLKEVEDRLKDLNRKVEEKNKELDRRLDKLAEELKKEIRDVERELDDLRRKGTEVEELVRRVRELIKRLRDMAKEIEERVDETIRRNRRLSEKVARDVERLLRELEERVR

SEQ ID NO: 2973 - protein, 181 aa, Artificial Sequence; identical to SEQ ID NO: 2972
  Synthetic

SEQ ID NO: 2974 - protein, 181 aa, Artificial Sequence
  Synthetic
DAERILKELEERLDRLSEEAKKILDELRRENEELLREHDERVKKLKEDLKRLEKKVEDGGLPEERLDRLRKLVEKVRKRLEDLNKRTRELNKELDERLERLLEELKRTIEKVKDELRKEAEKGTEVEELVKRVTKLIEDLRRLAKKISDEVRKLIEENRRASKRVEDEARELLKRLEDAVR

SEQ ID NO: 2975 - protein, 181 aa, Artificial Sequence; identical to SEQ ID NO: 2974
  Synthetic

SEQ ID NO: 2976 - protein, 172 aa, Artificial Sequence
  Synthetic
SEIEKMVKDVRDLLKRLKDEVKKISERWEDSLRKLKKRSEDTVKRVKEILEELRRRNLPRDEVREEVKKIKEELDRLNEEFKKRNEEDRRDLERAAEEIKKLLKDIEDELRRRLRKRDALRELERELDKLRKEIKKELDRLRKENREVNERHKELSKRLEEELERVKRELDT

SEQ ID NO: 2977 - protein, 172 aa, Artificial Sequence; identical to SEQ ID NO: 2976
  Synthetic

SEQ ID NO: 2978 - protein, 176 aa, Artificial Sequence
  Synthetic
DEVRELVKTVKKVLDDIRREVEETLRRYEKLVEDLKRRSDKSVKDVDDEIKRAEEEGDKDKELIDRIREEMEDLKRKHEDEHRRIEEELKRLNDEVKKILDELRERLKRLDEDLRRKRLDEELIKRLREEAEKLIRRAKEEHERLEEESKRLLEENEELLDRLDKKVRTLLDKLEK

SEQ ID NO: 2979 - protein, 176 aa, Artificial Sequence; identical to SEQ ID NO: 2978
  Synthetic

SEQ ID NO: 2980 - protein, 179 aa, Artificial Sequence
  Synthetic
SEEDRVRETVKKLLEDHRRKTEKVTEDVRRLLKENREKVEDAVDKARKLLKRLEELRREGELSEDDLRRVIEEIKRRIDEVERRLRKHHDDIRRTLEELDRDNDETLRRIEKELKRLVDEKVDDEKLKRIEEELRKSRERTKRLLEEIRKELEDSKKEVEDLLRRLREELKRLKDEIER

SEQ ID NO: 2981 - protein, 179 aa, Artificial Sequence; identical to SEQ ID NO: 2980
  Synthetic

SEQ ID NO: 2982 - protein, 182 aa, Artificial Sequence
  Synthetic
SEVEELVKRAEELIRELKKLSEDSVRELEKLLDEYRKTTEKLKRELEELLKEVEDVVRKLRDQDDDEKIRKTAEELVKRLEDILRKLEEVNREKKERAKRLLEKHEELLRRLDRRLEDLRRKIKVDEKLLRKIEEDVRRLKETNERLLKRVDEELKRLDEESRRVLKEAKERLKELKDRERK

SEQ ID NO: 2983 - protein, 182 aa, Artificial Sequence; identical to SEQ ID NO: 2982
  Synthetic

SEQ ID NO: 2984 - protein, 178 aa, Artificial Sequence
  Synthetic
DEVEKVLDELEKVIREVEERIKTTNKRLREVVERVERRIDKSDRELEEMIERVERKLEDDERARRLIERLRDLLRRLRKRSKELIDELRKLLKDLEDRSRDLLRELRELLERIKRKVEAGTPSEEVRKEVRRLDKRVKEIVEESRKLVKELAERVEEIVEESKRLVEKLAREVDETRR

SEQ ID NO: 2985 - protein, 178 aa, Artificial Sequence; identical to SEQ ID NO: 2984
  Synthetic

SEQ ID NO: 2986 - protein, 178 aa, Artificial Sequence
  Synthetic
SEIEKALKEAREAIEDAKKKIDDTDRENEKASRDAERRIDKSDKEAEEAVRRAEEEAEDDERARKLIEDLRKLLKELKETSEKLKEEIRRSTEEHRRRSEELKKELEKLADEIEKAARAGRDKDEVTKAARKAADDAREAAERSRKLAEENARRAKKAADDSRKLARELAKEAKKAAD

SEQ ID NO: 2987 - protein, 178 aa, Artificial Sequence; identical to SEQ ID NO: 2986
  Synthetic

SEQ ID NO: 2988 - protein, 175 aa, Artificial Sequence
  Synthetic
KELEDVLDTVRRAIERVKRESKKINDELEKELKKVKDELDKSHEEVRRAVEDVARKLKDVEEVKRDLERLLKEDRELIKRIVDRLRKLLKESKDHSREVVKDLRRVLEELRKLVEEGLDVKDIEKLVRDVVRRAEKVVDDDRKLVRDIVRDAKRVVRDSERTVRDIVKKADENTK

SEQ ID NO: 2989 - protein, 175 aa, Artificial Sequence; identical to SEQ ID NO: 2988
  Synthetic

SEQ ID NO: 2990 - protein, 175 aa, Artificial Sequence
  Synthetic
SKLEKILKDLERAVREVARELERTHRELEEAVKKVKKRLEDTNRRLTEALKRVKDKLDKVEDVKRKLDKLNEDDRRLIREIVEELRRLLEENKRKLDKIEEDLRKLLEDLDKLVKDGLDVSEIKKLVDDIVRRLRKVVKDSEREVREIMKRADDVVRTSEKTVEDIVKEAEDDAR

SEQ ID NO: 2991 - protein, 175 aa, Artificial Sequence; identical to SEQ ID NO: 2990
  Synthetic

SEQ ID NO: 2992 - protein, 175 aa, Artificial Sequence
  Synthetic
SELEEAAKRAREAAKKAKEALKRSLKEAEDAAREAEEDLKRSNDKNRKATREAEERAKTARELLKRLRESTKKHEEDTKKLAEDIRRLLEELRKRSEELAREIDKLLEDLERLIRAGLDAEEAKKAADDLARKAKEAADESKRLSEELAKKAKEAAKTSDKLAKENAEEAKKAAK

SEQ ID NO: 2993 - protein, 175 aa, Artificial Sequence; identical to SEQ ID NO: 2992
  Synthetic

SEQ ID NO: 2994 - protein, 175 aa, Artificial Sequence
  Synthetic
DELERVLEDLKRVMEEVERKLRESNKELEKAVRRVEELLKRSNEKNRKVTREVREKAKTDRELLEELDDSTRKHEEETKKLVKEIRDLLEELRKTSERLVEDIRRLLKELKELIEAGLDAKDVEDLVRRLMEKLERIVEESERLSDELRRRAEEVVKTSEDLVRENAKRVDDAAK

SEQ ID NO: 2995 - protein, 175 aa, Artificial Sequence; identical to SEQ ID NO: 2994
  Synthetic

SEQ ID NO: 2996 - protein, 175 aa, Artificial Sequence
  Synthetic
DELEEIEKKLRDVVREVEEKLRETNRRLREVVKRVEERLKKSNEDLRRAVRKVEESVKTLEEDLRRLKELLRRLEEESRKLVEEIRKLLKDLERRSKELVDRIRKLLEELKRLIEAGLDAKDVEKLVKELMEEAEKIVEESRERVDRLMKRLDDIVRESERLSKELADRADEVEK

SEQ ID NO: 2997 - protein, 175 aa, Artificial Sequence; identical to SEQ ID NO: 2996
  Synthetic

SEQ ID NO: 2998 - protein, 179 aa, Artificial Sequence
  Synthetic
RELEEILRTLEEMIERVKEKHERSKRELEKVITEVKEELRRSNEELRRVIEEVERKLGKESEEAKDVVDEARRLLREHEELVREVEKTARDLLRENEKLVEDSERRVEKLRRELKRLVEEGVPVDEVRKVVEDIVREAEKSVRENEELVKAIMRELKRVVKEAEELSEEIVRRLEERTR

SEQ ID NO: 2999 - protein, 179 aa, Artificial Sequence; identical to SEQ ID NO: 2998
  Synthetic

SEQ ID NO: 3000 - protein, 182 aa, Artificial Sequence
  Synthetic
KELEDVKRRLEKVHRDVNEASKEIVTRLREVHKRANDESKKIIERLDTVLREVARRLADRRRDKKVEKLLRDIAREAEEIKKRVKRLNDENRKRVEEVEKRVTKLNDENRKKVEDLLRVIDRGDLDAEEVERRVRELEKDVRRLVEDIRRLVEELMRNAKEIVDTAEKLVRELERKLEEVVR

SEQ ID NO: 3001 - protein, 182 aa, Artificial Sequence; identical to SEQ ID NO: 3000
  Synthetic

SEQ ID NO: 3002 - protein, 182 aa, Artificial Sequence
  Synthetic
DEVEDIIRRLEKFHREVNEESKRIIEELERVHREVNRKSEEIVRKLEKVLDEVREKAKRRSRSEEVRKRLEEIADEVRRVKEEVERLNRENKREVDRLKKEVEDLNRDNRKKVEEVIKVVEDGKLRAEEVEEVVRRLVRHAEAVVERIERLVEELVRNAEKLVEEVKRKADRLVEEADRTVR

SEQ ID NO: 3003 - protein, 182 aa, Artificial Sequence; identical to SEQ ID NO: 3002
  Synthetic

SEQ ID NO: 3004 - protein, 175 aa, Artificial Sequence
  Synthetic
DELEEVKRRLDEVNKRVEDEHRRVEEELRKVLEDVAREHEEVIKELERVLEKVRRAKGGDEEVLRRLTKKVEDISRDSKRLLDELREDIKRIIEDSKRLLEDNRRHSKEIKDTIDRDKKSDEARKLVKENERRVEETVRRSEKLVRDAMKKAKDTVRRSAELVKELMDRVERVVR

SEQ ID NO: 3005 - protein, 175 aa, Artificial Sequence; identical to SEQ ID NO: 3004
  Synthetic

SEQ ID NO: 3006 - protein, 171 aa, Artificial Sequence
  Synthetic
SEVEKVKKEAREMLKRVTDLLKEVNDRLKEVNKRVREEIRRVIERVREVLKRVAREVDKREMLERLEERVRRAEERVEELLRENERHSKKVSDDSKRLLDELRKIIKEIEDANLPLEDLRRVVEELEKRARDVVEESRRLVDEDRKHVEDVVRRVRDVVRELEERAERITR

SEQ ID NO: 3007 - protein, 171 aa, Artificial Sequence; identical to SEQ ID NO: 3006
  Synthetic

SEQ ID NO: 3008 - protein, 181 aa, Artificial Sequence
  Synthetic
SEVEKVVEENKKSVKTVRERVTELVKRNRDSVEEVKRRAEEMVRRNRKSVEEVRELLARGVSEEVLRKAKEDNDELNKRVRETLKELVKRNDDLLKRVTDDLDKLRRDNERLVEDIDRKNLPEEAKRRVDRVSEELEEVLRRVEEELRRVSKDLRRVLDEVKKEVDRVSEDLERVLRKDTT

SEQ ID NO: 3009 - protein, 181 aa, Artificial Sequence; identical to SEQ ID NO: 3008
  Synthetic

SEQ ID NO: 3010 - protein, 184 aa, Artificial Sequence
  Synthetic
DEVDEIVRRIEEIVRESEEMAERIVRDIKRVVEKSRKDVEDNVDELRKIVEKVEETAKRTRDEELLERLAREVEEVIKKSEESLKRINDTSKRVKDELEKKNTDLNDRTRRVAEELKKEVSRLRDRDAERKVRDLLRDLERVNTEADEKSKKLIKELEKVNKEAEDKSRKLIKELEDVLREARR

SEQ ID NO: 3011 - protein, 184 aa, Artificial Sequence; identical to SEQ ID NO: 3010
  Synthetic

SEQ ID NO: 3012 - protein, 184 aa, Artificial Sequence
  Synthetic
SSVDEIVKEAEKVVEDSREEAREIVERAEEIVRDSARKVDENVRRLEEIVRKVKEVADRTRSDELLEALAREVEEVEKESKESLRRIDEKTRKVIEDLKKLLEELDRKSEKVVRDLERKVDRLRDRDAERKVREVIERLKKVNDEVRKKLDELTRRLEDVNRKANERSTDLVRKLRRVLEEARR

SEQ ID NO: 3013 - protein, 184 aa, Artificial Sequence; identical to SEQ ID NO: 3012
  Synthetic

SEQ ID NO: 3014 - protein, 178 aa, Artificial Sequence
  Synthetic
SADRKIEEMRKEIKRSTDEARRLVEELIRKIERSNEKVKRDVEKLIEDIRRVIRRVREDNTLDEKDVKRVEDEVEKIIRKLEEDLKRISEETRKLLEELKKRLKEIEEKSKKLIEDLEREPNSEELKKKLEDIVREDEKLVEELTRLAEDIVRRDTKLVRELLERAKRVVDRVREEVK

SEQ ID NO: 3015 - protein, 178 aa, Artificial Sequence; identical to SEQ ID NO: 3014
  Synthetic

SEQ ID NO: 3016 - protein, 178 aa, Artificial Sequence
  Synthetic
DAEELVRELEERIKRSHERLEELLREVKRLIERSHEELKRLNEEVLRELDRVLDEVRKRKKDVEELLRELEERVRRIKERSKESYRRSKESLDRAKEVLEELYRRSKRSLEEFERELREKGVDKDVVRELERIVKENSELAERVFREVEKIVRENTKLAEDSVRELKRLVEELKKRVK

SEQ ID NO: 3017 - protein, 178 aa, Artificial Sequence; identical to SEQ ID NO: 3016
  Synthetic

SEQ ID NO: 3018 - protein, 176 aa, Artificial Sequence
  Synthetic
SDVEDVVRKLRELVKTNLKKVEDRVRKLKEEVEENVRRAEKIVRELEEEVERLLKLVADGRVDKDELRRLVERIKRELKRVLDEDKKTVDEIDKEVKRLVEEDRETVDRIREEIKKRVRGREVAEEVERRLERSHRESRKLADEVRRALEKSNRKTRELLRRVDERVEEVREELDR

SEQ ID NO: 3019 - protein, 176 aa, Artificial Sequence; identical to SEQ ID NO: 3018
  Synthetic

SEQ ID NO: 3020 - protein, 177 aa, Artificial Sequence
  Synthetic
SMEELVDKVEKELEESSRRSKELLDEVRRLLEESNKKTEDLLREVEELLKDVEREAEEKGSSEEKKDRLRKLADRIRDELKKVRREDEKSLEEIEDRLRKAEKEDRDSNREIRDKLRKDGVDEDVVRDVERLVEENRERVKRIADEMRKLVKENEDRARDVVRRLRELVKRLRERVE

SEQ ID NO: 3021 - protein, 177 aa, Artificial Sequence; identical to SEQ ID NO: 3020
  Synthetic

SEQ ID NO: 3022 - protein, 175 aa, Artificial Sequence
  Synthetic
KELEDIARDLERLLRENKKLIKEIVDRLRRLLEDNTRKVKKIVDEVKKLLDDLDKLRKDGVDEKEIEDVVREIAERLKRVLEEIEESIRRIEKVIEEVARESEKLSEDIEREIRKKITGKEVADKVREDLERSNDEMRRVIEKIREDLRRSLKEAKERLDEIKERIDRLLDAARK

SEQ ID NO: 3023 - protein, 175 aa, Artificial Sequence; identical to SEQ ID NO: 3022
  Synthetic

SEQ ID NO: 3024 - protein, 181 aa, Artificial Sequence
  Synthetic
KLEELLTEVRRRIEEVSRDLERVLREVEEDIKRTSDELDRVNRKVETEIKEVTERAEEKGVDRRDLKRLKDEVDKMSKESRDRNEKTIREVRELLKRIRDENRKSNEEVRRVEEDIKRKVRDEELVREVIERLKELVKKDKKLVEDVLRELKRLVDEDRKLVEDSLRRAKEIVDRARERVK

SEQ ID NO: 3025 - protein, 181 aa, Artificial Sequence; identical to SEQ ID NO: 3024
  Synthetic

SEQ ID NO: 3026 - protein, 179 aa, Artificial Sequence
  Synthetic
SIEDVLREVERLLREVIERNRKVHEEVNERSREVERELKRVHDEANRESEEVIREAKRKGIKDIERVEEKVKELNRENAERIKRVVEEVRELNERNRESSERVEEEIKKLLKTLADLVRAGVPVEELERRAREIVKRVRELVDTHRENLERIVERAKELIKELEENLRDIVREIRERVR

SEQ ID NO: 3027 - protein, 179 aa, Artificial Sequence; identical to SEQ ID NO: 3026
  Synthetic

SEQ ID NO: 3028 - protein, 176 aa, Artificial Sequence
  Synthetic
KEVEEVADRSRRVVEESKRRLDDVVRRVKEDSDRLRRDIERMVKRIKEIVKRVREEIGKDKRELVERVREEADKVVETARKLLDEVEKHARDIVRRIEELARRDKRSVERSEEEVKRVDDRKILKELLDRDRKSVKESEDEVKRLLDSNHELSRRIREELKRLLEKVKELVDRVRT

SEQ ID NO: 3029 - protein, 176 aa, Artificial Sequence; identical to SEQ ID NO: 3028
  Synthetic

SEQ ID NO: 3030 - protein, 176 aa, Artificial Sequence
  Synthetic
KEVEDVKRKLEKIARDSEEALRRVVDELRKIVTESKKKLDKAVKEVKDDSKRVEETIGKDKREVVDEVRRHAEEIVKRIEDLAKKDKDLVDEVVKTIEKLMTDDKRLVDEVVRRLEKTRDRDIMRKLLEEVKRSIDESKKRVKELVDEVRDSVRRSEEEVERLLRSNHRLSDEVRK

SEQ ID NO: 3031 - protein, 176 aa, Artificial Sequence; identical to SEQ ID NO: 3030
  Synthetic

SEQ ID NO: 3032 - protein, 176 aa, Artificial Sequence
  Synthetic
DDVERVIEEVKRVVDDSKRRAEEVVEESRKIVTDSERKVREMVRDVRRIVKEVEERIGKDKKDVVEEVKRVAKEVVETAERLVREDKRSSEDSVRKIRRLVTEDERLAREVAERLKRTRDRRIVKKLLEDVRKSVKESKDTVDKLVEENKRSVDRSLRELEKLLKEVEDLIREVTR

SEQ ID NO: 3033 - protein, 176 aa, Artificial Sequence; identical to SEQ ID NO: 3032
  Synthetic

SEQ ID NO: 3034 - protein, 176 aa, Artificial Sequence
  Synthetic
DEVDEVVKRSRDVVTESEKRLRDVVRRSKEIAEDSRRRVREVVERLKEIVREVEERIGKDKKDVVREVRERVKKVVEELERLVKEDEDSSKRSVEEIRRLAERDKRSADESVKELRKTTDRRVVEELLRRDEKSVEDSLRRVEKLVEDNRKTSEDIEREVRRLEEEVRKLVEDVTK

SEQ ID NO: 3035 - protein, 176 aa, Artificial Sequence; identical to SEQ ID NO: 3034
  Synthetic

SEQ ID NO: 3036 - protein, 177 aa, Artificial Sequence
  Synthetic
REVDEVVERMKELVATVKRENDEVVKELKKLVKELEDDNRRVVEESKKSVEDLARRVGKDKREVVEEVRRTSKELVERNEETAKRVDDLVRRLVEENRRSVTEVEELVKELVKELRRESTSRDLVREVEKRVRDIVEESRKLAEETRKKVEDIIEKSKRIAEDTLEKNKEMVERLER

SEQ ID NO: 3037 - protein, 177 aa, Artificial Sequence; identical to SEQ ID NO: 3036
  Synthetic

SEQ ID NO: 3038 - protein, 175 aa, Artificial Sequence
  Synthetic
REDELVERLVDKVRRSSKEVRDRAEEMVRRNEKLVRDVEEDLDRLVEENKKLVDSVSRLRGEKAEEAVRRSKKVVDDIRERVKRALDRSRKVVEESREELERLLKRDKELVDEIKERVRIKEVVDRLRELVERSEKDVRKVVEEDKRITDKLEKRVREVVKRNEEITDELRERVR

SEQ ID NO: 3039 - protein, 175 aa, Artificial Sequence; identical to SEQ ID NO: 3038
  Synthetic

SEQ ID NO: 3040 - protein, 188 aa, Artificial Sequence
  Synthetic
SSIERVAKLVEEVERHVRKSIKDVEKLVRDVERHIEESVKTVSKLVEDVKRAVEELRRKVKEKEELDELVREVKRRIEDVVRRSRDLVRKNEELLRRVAEEVRRLVDENRELAERVVEEVRRIGTSEDVERLVREVVKRLEEIVERSERLVREVEERLKEIVERSRRLSKENEDELRKIEKEVRDRVK

SEQ ID NO: 3041 - protein, 188 aa, Artificial Sequence; identical to SEQ ID NO: 3040
  Synthetic

SEQ ID NO: 3042 - protein, 173 aa, Artificial Sequence
  Synthetic
KDVEDAERRLKELLDRLKRFVEESVKTSKKIVDDSKRVVEESAKRSRDIVREVKDRVPEDLVREVEKLARDTERRSEKLVTDNAEIVKRTVEESKDLLKKVEEVVREVVKRARDENVREKIEELVKEVDKLIKDVVRRMEKLNREVKKSADDSAREVEELNRRVREVVERVRT

SEQ ID NO: 3043 - protein, 173 aa, Artificial Sequence; identical to SEQ ID NO: 3042
  Synthetic

SEQ ID NO: 3044 - protein, 173 aa, Artificial Sequence
  Synthetic
DEVEEVEKELRELVKRSEEVAREVKDRLRKLVEESERVVRESRRKSREIVEEIRKKVREDLVREVEELVKRTIERSTELMEDNKRLVEEVEDRARKLVKENEDLAREIVKEVRDRNVKDEARRLVEEVKRSVEKSVKELEDLVEEVKRSVEESVKEAKELNDRVDETVKRRAT

SEQ ID NO: 3045 - protein, 173 aa, Artificial Sequence; identical to SEQ ID NO: 3044
  Synthetic

SEQ ID NO: 3046 - protein, 173 aa, Artificial Sequence
  Synthetic
RSVDEVEKELRELVERITRFVEKSVRDSRKIVEDSKREVEKVKDDLRKIVEEIRRKVPEKDVERVKRVVEEVERRVETLAEENRKIVERTERRSKELVDTVREVVREVVEKVRKDNSEEDAKRLVKEVAELIKRVVEEMKKLNDEVEESARRSVEEARRLVEEVKRLVDEVAT

SEQ ID NO: 3047 - protein, 173 aa, Artificial Sequence; identical to SEQ ID NO: 3046
  Synthetic

SEQ ID NO: 3048 - protein, 184 aa, Artificial Sequence
  Synthetic
EVEELVERVLRELERLVRENKESSDRIKEELRKLVEDNEKSVRDTKRTAEKLVDDLRRKKDEERVEELARRIAKTVEKLVEEDRKSVEDTIKRVEDLVREDEKSVRDSVRKVRELVKRVEENVKDERVVRKVREDVKRVERLSKEIVDDSKREVEKVVETSRRIAEKSTDVVRRVKRELEEITR

SEQ ID NO: 3049 - protein, 184 aa, Artificial Sequence; identical to SEQ ID NO: 3048
  Synthetic

SEQ ID NO: 3050 - protein, 180 aa, Artificial Sequence
  Synthetic
SMKELIKRVKDLVDEVRKKVERLIEEVSKLVDDVKRHIRELIETVKRLVKEVADLLRAGREKEEVVKLLEEVVRRVKKLSKENEERLRTVVERSKKLVDDLRRDAERVAEEVRKLVEDVNDEEARRLVEKVERDLKDIVRRVEELSRRNVERLKEIVKESRELVKEVVERLKRIAEEVTT

SEQ ID NO: 3051 - protein, 180 aa, Artificial Sequence; identical to SEQ ID NO: 3050
  Synthetic

SEQ ID NO: 3052 - protein, 175 aa, Artificial Sequence
  Synthetic
KEKEDVKRRLEELIRRLEEHSKKVKRDLERVIKELDDEVRRVKERHEDVIRRLKDRDTSEKVLRDEAERIRRESEEINKRLEEKAERIKKEADDLLRENEERVKKIERELERLRTEGKLDDDVVRRVKELLRRVLEHTRKVVEDVRRLLKRIREKLEEISRKLDELLRRIEEKRR

SEQ ID NO: 3053 - protein, 175 aa, Artificial Sequence; identical to SEQ ID NO: 3052
  Synthetic

SEQ ID NO: 3054 - protein, 177 aa, Artificial Sequence
  Synthetic
DREDEVRKDIERIERELRRVVDELRKEVEDSMRKLDEEVKRLEEHIRESVERLEERVSEDRDDRVVKTIVKEADRDHKELERELDRLRKEVKKTNDDLERKIRKLEKEAEDVLRELAKRGIDEKVLRDLKRVVDEVRKELKDVLDRHNKVVREVERKLEEVIDKHRKAVEKVKRDAK

SEQ ID NO: 3055 - protein, 177 aa, Artificial Sequence; identical to SEQ ID NO: 3054
  Synthetic

SEQ ID NO: 3056 - protein, 177 aa, Artificial Sequence
  Synthetic
SREEELKKEVERLVREAEKHVEDNRKHVEDSVRELEKLVKELADKARESADRLDKKVKEDRDKRVVEKILREAEKINKDLKDTVKKILDEIREDHKRLEDNIRRLEEELRKVLKELKDRGIEERVLEELKRVVDDIRKKHKDILKRHRDVVRKVEKELRDILREHNEVIREVKDKLE

SEQ ID NO: 3057 - protein, 177 aa, Artificial Sequence; identical to SEQ ID NO: 3056
  Synthetic

SEQ ID NO: 3058 - protein, 183 aa, Artificial Sequence
  Synthetic
SEVERILKEAKRRLDEVVERLRKSAETLRRMLERVSRELKKSHDELDRVLRRVEDALRKRNLDEKSVRRIKKEIDEARKKSKKVLDEIEERAERVKRESREVLERIKKRIEDVIRRLAEIVREQRRDAEELRKEVEDMVRDLERLVREHSDRVRKIVTDLDRLVKEHNEEVRKIVERLDEEVK

SEQ ID NO: 3059 - protein, 183 aa, Artificial Sequence; identical to SEQ ID NO: 3058
  Synthetic

SEQ ID NO: 3060 - protein, 179 aa, Artificial Sequence
  Synthetic
SELDEILERLKEVLERVKRKLEESNRRLEEVLDRVLKKLTESVKRLEDELRRVLKELRENNRPDDRLKEKVERVREESEEMRDRLRRLIERVREESKRILEELERRAREVKKRAEDVRRRGKPIEEIKKDVERIVRELEDLVRRHEKRVEDIVRELEKIVRDHNERLKEIVRRAEEDVR

SEQ ID NO: 3061 - protein, 179 aa, Artificial Sequence; identical to SEQ ID NO: 3060
  Synthetic

SEQ ID NO: 3062 - protein, 179 aa, Artificial Sequence
  Synthetic
RELEEILKRLEEVLERVLRELRKSVERLRKELERVLKELRDSNRKLDKVLREVLEELRKKNKDATDLKRRLDEARKESKDVIKTLDERVKRVKEESDEMLERLKELLDRVREEAERVARRGEPAEDLERRVKEIERRLKRLVDEHNRRLREIVRELEEIVKRHKERVEEIVRELKRRVD

SEQ ID NO: 3063 - protein, 179 aa, Artificial Sequence; identical to SEQ ID NO: 3062
  Synthetic

SEQ ID NO: 3064 - protein, 179 aa, Artificial Sequence
  Synthetic
SELDDIVRRLDEMLKRVEDELRKSDERLDELLKRVKKELEKSNRDLERALREVLKELEDRNRPNDELKRRIDEVREESRRVIEELDRTVKEIKRRSEEMSKELKRTADEVRKRADEVRKRGKDARELEEEVERIVRELEKLVEEHKEELERLARKLEEIVRRHEERVRRIVKELEDRVK

SEQ ID NO: 3065 - protein, 179 aa, Artificial Sequence; identical to SEQ ID NO: 3064
  Synthetic

SEQ ID NO: 3066 - protein, 179 aa, Artificial Sequence
  Synthetic
RELDEILRRLREELKRVREELEKSLKRLEDELRKVEEDLRESNERLERMLERVLRELRKRNRPDDELKKKLDKVRKESEDMSRRLKETADRVREKLKDSKRKLDEKVKRVEKRLEEVRRRGKDVDELRKELEKIAREAREYVKRNKDDLRRIVEELRKIVKKHKDKVEEDVRRLKKDVD

SEQ ID NO: 3067 - protein, 179 aa, Artificial Sequence; identical to SEQ ID NO: 3066
  Synthetic

SEQ ID NO: 3068 - protein, 173 aa, Artificial Sequence
  Synthetic
RELEEILKKLEEVVRTVEELHKRTNEKLEKAVDEVRELHRKTNEDLKRAVDEVEKAGLPKELVDRLRELLKDNKRRSDEIIRKIEKVLEDNKRKSEEIVKRLREELKRLADVIKDLEKDRLDEEVKRLVEEARRSVEDDDRNIRRLVEEAKDSVRRDEETIKKLVDELREATR

SEQ ID NO: 3069 - protein, 173 aa, Artificial Sequence; identical to SEQ ID NO: 3068
  Synthetic

SEQ ID NO: 3070 - protein, 173 aa, Artificial Sequence
  Synthetic
SDLERILKRLREVIKRAEELHRKTNEEDERVVREVIELHRKTNEDLREVIERVARGGLDEKMIERLERLLKENTERSKEISERLKRETEENIERSKRIVEDIERLLEELRRVVKDLDKEELRKAVEELEEKLERSVREDKKTSDDSARRAKKSVEDDRRTIEKLVEEAERSRK

SEQ ID NO: 3071 - protein, 173 aa, Artificial Sequence; identical to SEQ ID NO: 3070
  Synthetic

SEQ ID NO: 3072 - protein, 183 aa, Artificial Sequence
  Synthetic
KDLEKLLDDIRKVLEEVTRRLKRISDELRRVLEEIKKRLDKDNEDLKRVIDEVKKLLDKKVRDEKRVKDLVDRAREIHRRHAEEVKRLVDKLREIIRRDEKSVEDWKRRLEKILEDLKRVVDRNERSREEIEKEIRDVEEELRRAVEENAELVKRVKEDAERVVRDSEKKSKEVAEELKDAVR

SEQ ID NO: 3073 - protein, 183 aa, Artificial Sequence; identical to SEQ ID NO: 3072
  Synthetic

SEQ ID NO: 3074 - protein, 182 aa, Artificial Sequence
  Synthetic
SELEKILKELKDASREVEKRLRDILREDKKMLKKVVEELEEILRRLDEEVKKVKERLKNKEVLERLEEEVRRLKERIKKLIEDLKRESERLEDTIRKLIRELRENTKRLEEKIRRLKKKGEPREEVVDRAKKEVDDHVKKAEDVVREVEKRSRESVKRLRDIVEELERLVKRLVDEAEREVK

SEQ ID NO: 3075 - protein, 182 aa, Artificial Sequence; identical to SEQ ID NO: 3074
  Synthetic

SEQ ID NO: 3076 - protein, 175 aa, Artificial Sequence
  Synthetic
SETEKLLEEVRRIIEEIKKRIDRSLEEVRRSVEEAKRRIEKSLEDVEKSVRRVKKILDEGDSSERLKRENDEHLKTHHEVVKKILKDNREHLRRHHETLKDIKRRIDKVVEDLRRAGLDDRVLKEVEDLAREVKKRIDEVDKRVAELHKEVEDRLREVDKTVEELHRRVKKRADD

SEQ ID NO: 3077 - protein, 175 aa, Artificial Sequence; identical to SEQ ID NO: 3076
  Synthetic

SEQ ID NO: 3078 - protein, 180 aa, Artificial Sequence
  Synthetic
SIEDVEREVKRLIERTKRHNDRVLETIRRLLEETKKHNEKVLREIRELIKRVEDTMRRRGVDERLRDELRKILEDLERESRKLKEDNKRALEELARMSKKLKDDNDRALERLKDTVKEERSEETIKRLLDEVREYVRKSEEDSERLLRDVERYVKESKERSERILKEARRLVKEVEDKIR

SEQ ID NO: 3079 - protein, 180 aa, Artificial Sequence; identical to SEQ ID NO: 3078
  Synthetic

SEQ ID NO: 3080 - protein, 180 aa, Artificial Sequence
  Synthetic
SIEEVLEEVRDLLRKTKEDTKRILDEIRRLLEETKKRLEEVLREATKLLREVEDLVRKSGVDERLLEEIKRIEDELRKKIETIRRRNDEALKRLTDLVEENKKRNDDILRKLKEERDEDRDEEEVKRLLEKARKLVEESKRESKEILDRARKYVKESLEEIERLLDELRKLIEELRRRIE

SEQ ID NO: 3081 - protein, 180 aa, Artificial Sequence; identical to SEQ ID NO: 3080
  Synthetic

SEQ ID NO: 3082 - protein, 176 aa, Artificial Sequence
  Synthetic
SSEEILKEVKELIEESNRASEEVLKEVKKLLDESKKRSDEVLEEVERELKRLEESASRIDDEKRLREVRDVLRRIRERLDRVRKENEKILKEVKDTLKKVKEDNEDISRRLEEEIKKKGADEDVVREMRRLVEEDKRRIKEALDRLRKLVEDDKRRIEEVLREMRELIRELEERIR

SEQ ID NO: 3083 - protein, 176 aa, Artificial Sequence; identical to SEQ ID NO: 3082
  Synthetic

SEQ ID NO: 3084 - protein, 175 aa, Artificial Sequence
  Synthetic
KEIEDILERLKETIKEIEDHIRRDLEELKKVIEELKRSLEEWKKRAERLIEELERLIRETGPTKELEKEARDRLRELEEAMKRNVEKIDKIKRENEKNSEDLKRRLERVLRELRKSGLEERVLREAEERIRRLEEKLKEVNKRSEEMLRRLKEEHERVLREVKELIREIDDKARK

SEQ ID NO: 3085 - protein, 175 aa, Artificial Sequence; identical to SEQ ID NO: 3084
  Synthetic

SEQ ID NO: 3086 - protein, 182 aa, Artificial Sequence
  Synthetic
GEDEVLRKVEKLLREVKERAEKSVERVERLLKDVEDKLKESHDRAKRLLEEVKKAADRGDLREEELDRLRKKIEDAYKRSEDILREIKKEIKRVLDRSRETLKRVEEELKKVLDTLADLVRRNEEDLKDLDRRIEEVVKRLEDEVRRHTKEVEEMVKRLRELVREHTERVKKIVEDLKREVD

SEQ ID NO: 3087 - protein, 182 aa, Artificial Sequence; identical to SEQ ID NO: 3086
  Synthetic

SEQ ID NO: 3088 - protein, 175 aa, Artificial Sequence
  Synthetic
SEVEDVERRIREIIERLRRIVERHKEEVKKIIEKLEKLVRDHTERAKRIIERLKEVVDRKMPRELIKEELDRVREDSKRVLDELRRKLEEVRERSRKALEDIKRRLDEIRDELRRRISNEEVLKEVERLLEEVKELVERSHKEAEDLLKRVLDAMKRSVDEVEKLLEELKRRADK

SEQ ID NO: 3089 - protein, 175 aa, Artificial Sequence; identical to SEQ ID NO: 3088
  Synthetic

SEQ ID NO: 3090 - protein, 175 aa, Artificial Sequence
  Synthetic
SKVEKVEEDIDKIIRRLEELVEEHRTEAEKTVKKLDDDVRRHNEKVEKIIRDLEEVVRRRKPEKDIEDKLRRVKEESERVLEEMDRRLRRVEEESRRLHERAREELERVEDELRKKIENRKVLEDAKRLLERVMDEVRRSNEELKKLLEEVKRKLKKSVEDAERLLDEVRKRVEK

SEQ ID NO: 3091 - protein, 175 aa, Artificial Sequence; identical to SEQ ID NO: 3090
  Synthetic

SEQ ID NO: 3092 - protein, 175 aa, Artificial Sequence
  Synthetic
SEVEEVDKRIREIVTTLKRLVEEHNDRARKIIEKLRRLVKKHEDEVEEIVRRLDEAVERRLPREEIERKLREVEERSKEVHKRLEDELEKVKRESEKMKREADERLKKVEKDLRDTISNEEVLKKVKELLKEVKRRLERSLEELERLLEEVLKLMKESNDKAKELLERVREKVER

SEQ ID NO: 3093 - protein, 175 aa, Artificial Sequence; identical to SEQ ID NO: 3092
  Synthetic

SEQ ID NO: 3094 - protein, 177 aa, Artificial Sequence
  Synthetic
DFVERVKEEIKRIVERLKRLVKEHEDEVKRILDELRKLVETHKELSKDSLRKLEEVGDGSEDDIRRLLEENKKMDKEVNDKVRKLAKDVRDIDRRMNERVERLLREIEKTLEDLRRENKVDERVLEELRRLVKEVKERADRSSEKLNELLRKAEEDAKRSSEENNRRLEEVERRVRK

SEQ ID NO: 3095 - protein, 177 aa, Artificial Sequence; identical to SEQ ID NO: 3094
  Synthetic

SEQ ID NO: 3096 - protein, 181 aa, Artificial Sequence
  Synthetic
DEERKIEEIIDKSRRDWERLLREAREIIKRSEDEWRELLERIKRLIEETRKRAKDLKKADGRERVVEEIEERVRRINEETKKLVRELLEKDRKLIEDLRKKLRELREKDKRLIERIKEERDTEEIRRLLEEMDKLSREASKRVEDILRELEERSRRMADEVRKLNEENKKLLEEAKKELKD

SEQ ID NO: 3097 - protein, 181 aa, Artificial Sequence; identical to SEQ ID NO: 3096
  Synthetic

SEQ ID NO: 3098 - protein, 181 aa, Artificial Sequence
  Synthetic
DKEEIKEKLEELVERVVRELEKLLKELEDLSREVARRIKKIARDLEKLTKEVEEKLRRRPKTEELTELVKRLKEHSERLRRRIEELLRRLEEDSRRLVERIKKLVKDLRDDVRRLKELIDRGELSEEELERLIKELVDRARKLLEEVKKLIEDHREKLKRVLDEIKDLLRKHKETLDRTDT

SEQ ID NO: 3099 - protein, 181 aa, Artificial Sequence; identical to SEQ ID NO: 3098
  Synthetic

SEQ ID NO: 3100 - protein, 181 aa, Artificial Sequence
  Synthetic
SKEDILRELRDRVERIKREIEKIFRDAKRLSEEVKRRIEDLLRKLKKVSDDVRERLARKPDTEELRKLVEELERDSERLKKEIKDLVRELDEHSKELLTRIRKLLKELEERVRELEELIKRGDLSEEELKELIKRLVEDAKRILEELKKLLDDHERKARRILERIEKLIKEHEDKARERER

SEQ ID NO: 3101 - protein, 181 aa, Artificial Sequence; identical to SEQ ID NO: 3100
  Synthetic

SEQ ID NO: 3102 - protein, 181 aa, Artificial Sequence
  Synthetic
SEVEKLEEEVERSVRDLERELRDSEEKSKELMRRLDELVRRAKDHVRRSVEELRKTLSKGLDEDEVRDLERRVREDHEKLKEDLKRIVREAREALKKHRRRVEEIVKRVKERLEELRRRIGDDEEVRRILRDAERVIEEIKRRLEEDHKRLEEVIRRVEEKLRRILDEHDKVVKEIKEALR

SEQ ID NO: 3103 - protein, 181 aa, Artificial Sequence; identical to SEQ ID NO: 3102
  Synthetic

SEQ ID NO: 3104 - protein, 181 aa, Artificial Sequence
  Synthetic
SEVEEAEKEVEDIMRRLKRKVEENKRHVDESVKEAEKLLRDSETRTRDIARRLKEELDKGLDEEEVKRLAREVDRLLREHREEVKKIIERIDRDNDRNREHVEKVVREVEELLRDLERKIGRDKELTRILTRLREVIERVKRALEKSHDDHRRAVEEVRKELKRDHDDLRRVIEKVRRDLK

SEQ ID NO: 3105 - protein, 181 aa, Artificial Sequence; identical to SEQ ID NO: 3104
  Synthetic

SEQ ID NO: 3106 - protein, 181 aa, Artificial Sequence
  Synthetic
SEVEEAKRRVDDIVRKLEELLKDSRRESERIMRELKRLLEELKRHVEDSVRKLREVLSRGLDEEKVERLIREARKDNERLKRELERILREVEKALKRHRERVEKIDREVRERLKDLERRIGDDRELREILRRAKEVIDKIREDLERDHDRLREVIEEIKKTLDRIHEEHRRVVKEVEDTLK

SEQ ID NO: 3107 - protein, 181 aa, Artificial Sequence; identical to SEQ ID NO: 3106
  Synthetic

SEQ ID NO: 3108 - protein, 181 aa, Artificial Sequence
  Synthetic
SEVEEAEKEVREIMKELDKLLEDSKRESDDIRRDLDRVLEENKRHVDKSVTDLERVLSRGLDEEAVRELLRRAREDNRRNKEHVDRLVKKAKDKLDEHKKKVDDIIEKARRELKRLEDEIGDDKELRRILRELEEVIKRVERTLREDHKELKRVIDRMKEDLERSHEEHERLVEEVERKLR

SEQ ID NO: 3109 - protein, 181 aa, Artificial Sequence; identical to SEQ ID NO: 3108
  Synthetic

SEQ ID NO: 3110 - protein, 181 aa, Artificial Sequence
  Synthetic
SEVEEAKKDVERIMRELEKLVRDNKKHVDDSVRKLKKLLDDLRKHVEDSREELERVLRRGLDEELVKELRKRAEDDNRRLKEELDKIKEEADRDNEENAKHVKKVVDRARKMLEDLRRKIGDDRDLRKILEDLERIIRRVEEELRRSHERHKEVVDRIKKVLDEIHRRHREVVKEVEKELR

SEQ ID NO: 3111 - protein, 181 aa, Artificial Sequence; identical to SEQ ID NO: 3110
  Synthetic

SEQ ID NO: 3112 - protein, 181 aa, Artificial Sequence
  Synthetic
KEVEEAEDKVRRIVEDLKRKLEDLERHVEESVRRLEDLLRRSKKKSDDIMEKLTRTLSKGLDEEEVKRLTEEVERLLREHRRELRRIVEEARKDNERLETRLRKIKREVEELLKELEREIGDDKELRRILKRMKDAIERVERELRRIHTRHKEAVDRVREELKRNHDELAKVIRKVREDLK

SEQ ID NO: 3113 - protein, 181 aa, Artificial Sequence; identical to SEQ ID NO: 3112
  Synthetic

SEQ ID NO: 3114 - protein, 181 aa, Artificial Sequence
  Synthetic
DEVERADEDVERIVRELRRVLEENRRHVKESVERLERLVRKSKKDSKKIMEDLKRVLDRGLDEESVKKLRDDARKELEKHREELRRIEEEAEKDNRRNEEHVRRLEKRVEEELRRLETEIGDDTELRKILKKMKDAIREIKRTLDESHREHRRVVEEVKEELERNHKELKEVIDKVAKDLE

SEQ ID NO: 3115 - protein, 181 aa, Artificial Sequence; identical to SEQ ID NO: 3114
  Synthetic

SEQ ID NO: 3116 - protein, 176 aa, Artificial Sequence
  Synthetic
DEVEDILRRVREAVERARESLERIHREHKKVVDEVRKALEKVLEDHARVVDEFRRKSGSESEEAKKILDELRRDHEELKKRLEKIEREVREDNERLERELRELEERVRRKLEELERRNVRKDELKKEVEKLEEELKKELKRLKDHVKKSKEDLRRKLEDLKRHVERSVKRAEEEAR

SEQ ID NO: 3117 - protein, 176 aa, Artificial Sequence; identical to SEQ ID NO: 3116
  Synthetic

SEQ ID NO: 3118 - protein, 176 aa, Artificial Sequence
  Synthetic
SEVEKVLRDLERAVKEVSERHRRNHEELRKVIKRVKEEHDRIHDEHRKVVEDLKRKIGTESEDAKRILDKLEEDNRRLKKHIDDSKERVDRVVKRHKEHLDRSLKRVKEMLDELRKANVPREEIKKEVDRLKKELDENLKRLERDSERLKKELEDNLKRLEEHVRRSKEEAERDAK

SEQ ID NO: 3119 - protein, 176 aa, Artificial Sequence; identical to SEQ ID NO: 3118
  Synthetic

SEQ ID NO: 3120 - protein, 176 aa, Artificial Sequence
  Synthetic
SDLEEVLKRLEDVVRRLEEELRRIHKEHRDVVRRVTEEHKRILEELKRVVERAREKDGEESREVKEILRELEEVLRDLKRHIERSRKELEDDNRRLKKRLDEILKKIREVLERLRRKNVDRDRVTKEVRDLEEELRELLERLRAHVKRSEKKIEENLRRLEKRVEDLKKKIDDRTR

SEQ ID NO: 3121 - protein, 176 aa, Artificial Sequence; identical to SEQ ID NO: 3120
  Synthetic

SEQ ID NO: 3122 - protein, 179 aa, Artificial Sequence
  Synthetic
RELEDIKRKHKKVVDDVREKLKESHRRLKEVIEEARRRLDEVRKKLEKVIREILTSAGTEDERLKRVEETVRRVLEELEELIKRLDDKAKRMLDEHRKILEEIVKRADKSHKELDEMIKRRLPIEDLKRYVEEVKRDLDDLIRRSEELVRRIKEDLDRALKELEELVRRIKKKLEEDRK

SEQ ID NO: 3123 - protein, 179 aa, Artificial Sequence; identical to SEQ ID NO: 3122
  Synthetic

SEQ ID NO: 3124 - protein, 182 aa, Artificial Sequence
  Synthetic
SELDELRERVERHSRELRRTLEEAKKLVDDHKRTLREVLERIKKRVEDVKRELEKLVRDGVDERFLERLKKKLEDIVRDIERRNKELNEHSKKLAEELRRILKKLEDHSRELEKRMREEGGELREELKKIIDELRRVNEEAAKTLDEIIKRLEDVNREVNRTSKEVIDRLRKVLEEAERRTK

SEQ ID NO: 3125 - protein, 182 aa, Artificial Sequence; identical to SEQ ID NO: 3124
  Synthetic

SEQ ID NO: 3126 - protein, 182 aa, Artificial Sequence
  Synthetic
EELDRIRKEVEDHERKLREVVKDIERKVEEHAKRLKKVIEDDERRVKEWKDTLEELIRRGVSEEVLKRLAEELEKHKERSKKLNRELNKHSKELVDELRRRLKRLKEHSDELEEKIRRRGGELKDEVRRVIKELRDVNRKVADALRKVEEKLKRVNDEMNKESKRTLDELDKALEEAERRAR

SEQ ID NO: 3127 - protein, 182 aa, Artificial Sequence; identical to SEQ ID NO: 3126
  Synthetic

SEQ ID NO: 3128 - protein, 182 aa, Artificial Sequence
  Synthetic
DLLRELEARVRKHKRDLEEVLKKIEEEVRRHKKKLEDVLEELRRLVEDLMRELKELLEKGVPEKVLKELADKLRRLVEDARRLLRELKEHSRKLEEDIRRRNTELNKHSEKLEEDMRRKGGELREELKRIIDELREVNERVNDESRKVIKELRDANKEADKKVRDIIRRLEDILRKAAEDTR

SEQ ID NO: 3129 - protein, 182 aa, Artificial Sequence; identical to SEQ ID NO: 3128
  Synthetic

SEQ ID NO: 3130 - protein, 182 aa, Artificial Sequence
  Synthetic
KDLERLEKEVKEHKEDLERIVREAEKLVEDHERELEKVLRELEKTVRDVKRELEDLLRRGASEDVLRELAKKLKKIVEDMEKKNEDLNRHSEELLRRLDKILKELNKHSEDLMRKAREEGGKLKEEVDRVLDELRKVNKKAADDLERVIRELEDVNRRVNERSREIIETLKRVLDEVREKTR

SEQ ID NO: 3131 - protein, 182 aa, Artificial Sequence; identical to SEQ ID NO: 3130
  Synthetic

SEQ ID NO: 3132 - protein, 182 aa, Artificial Sequence
  Synthetic
DELRELKRKVDEHTRELERILKEIEDRVRRHKEKLDETVKRDKDRVDEWLRRAEELVRRGVSEEVVKRLAEELEKHKRTSEELNRKLNEHSKKLEDDIKTKLDELNKHSKELTEEMRRRGGELREEVEKIERRLREANKRAADALKKVIDELRRANEEVNRKSEETLKTLDKILEDVERKTR

SEQ ID NO: 3133 - protein, 182 aa, Artificial Sequence; identical to SEQ ID NO: 3132
  Synthetic

SEQ ID NO: 3134 - protein, 182 aa, Artificial Sequence
  Synthetic
DDLERLAEEVKRHSEDLDRIVEEIRDRVRRYKEKLDEVVKEDEKRVREWRDRLEKLVRAGVSEEVLRKLAEDLEKHKEDSDRTNEKLREEVKRLEEEIRKTLEDLNRHSKELVERARRRGGKLKDELDKIITRLEEANRKAAEDLRRVVEELRKAHEEMNRKSEKTKKDLDEVLEEAERRTR

SEQ ID NO: 3135 - protein, 182 aa, Artificial Sequence; identical to SEQ ID NO: 3134
  Synthetic

SEQ ID NO: 3136 - protein, 182 aa, Artificial Sequence
  Synthetic
DDLERLKRRVEEYRRKLEEVLKTIEEEVRRYKKEAEKVLDEDRRRVEDWKRKLDEMVRRGVSEEFLERLARALEDHKRKSDRDNDRLREKVRRLEEKIKELNDRLRKEVEEIVKRARDRGGSLEEDVRRIIDELRRVHKRANEDSKRVVDELRDVHRKVNETSEETKKRLDKVLKEAEDRTR

SEQ ID NO: 3137 - protein, 182 aa, Artificial Sequence; identical to SEQ ID NO: 3136
  Synthetic

SEQ ID NO: 3138 - protein, 182 aa, Artificial Sequence
  Synthetic
KKLDDIRREVERLTDKLEKIVKRIKELVDRYRRKLERVLEEDDRRVKEWKRRMEELLRRGASEDVMREIAERLERHKEESKRLNDELREELKKLEREIEKTLRDLAEELEKLKEDIKRKGGELKEEVDKVLKDLDRALKKAADDLKRVIDELREVHERINRTSERTLTKLDRALEELEKRLR

SEQ ID NO: 3139 - protein, 182 aa, Artificial Sequence; identical to SEQ ID NO: 3138
  Synthetic

SEQ ID NO: 3140 - protein, 182 aa, Artificial Sequence
  Synthetic
KELDEIRELVKRHKDKLKKIVDEVKERVDALKRKLKEILDEDRERVKKWVRDMEELVRRGVSEEVLKRVAEELEKHKKKSEEDLRRLAEDLRRLEEEIRKRVEDLNRHSKELVEDIERKGGKLKEDVDRVIRDLERVNEEANRRAKKVIDELRRVLEEAERTLRKTLEDLDRALEELARATK

SEQ ID NO: 3141 - protein, 182 aa, Artificial Sequence; identical to SEQ ID NO: 3140
  Synthetic

SEQ ID NO: 3142 - protein, 183 aa, Artificial Sequence
  Synthetic
DEAEKILEELRKVVRELEEELRRNHEELKRVIEDVERKLRESNRRVEKVIKEVTDEKGSEDDEARKVLKELKEKLDEHKKRVDEVKKKLEEELEKHKRKLDKVVKEVEKFLREAEDRLRKEGTDEDVVRELEKLVEELKRRVTEVVETVARDSERLREELRRIVEESKRLVEELKRRAEEASR

SEQ ID NO: 3143 - protein, 183 aa, Artificial Sequence; identical to SEQ ID NO: 3142
  Synthetic

SEQ ID NO: 3144 - protein, 179 aa, Artificial Sequence
  Synthetic
SELERVVEDLRRAAKKLADDLKRVIEEHRKYARDNKERLKKVLERLKRLAEELKKELERDGKSDEVRKRLEELLDRLRRLVEEAIRENKKSVDDSRKNSKRVEDELRDRLRKLDEKLKRDVKDSREVLEDVRRLIEDLERLITELRKENERVIRESEKLSRDIEREVERVIRELEETIR

SEQ ID NO: 3145 - protein, 179 aa, Artificial Sequence; identical to SEQ ID NO: 3144
  Synthetic

SEQ ID NO: 3146 - protein, 171 aa, Artificial Sequence
  Synthetic
KEVEDVKREIDKVLEDARRLLKESDDTLKKILDKARRDLEESDRRLKEILDKVRKDGLDEELLRRIEEYAKRHHDRNREILERLRELVKRHHDRNRDIVRRLEELVDKLKKDNIPFEELKDTVDKLRREIERRITESRRHVEELRRRVEEMLERSERNVREAEKKLEEDKK

SEQ ID NO: 3147 - protein, 171 aa, Artificial Sequence; identical to SEQ ID NO: 3146
  Synthetic

SEQ ID NO: 3148 - protein, 182 aa, Artificial Sequence
  Synthetic
DEVERVEEELKKSDDELRRRMEEVKRALDKDNEDAKRMLDEVKKELEKILRKVEKEVKDKESVDRLRKKLEDIKRELERILEELSKIHEDIKKRLDDLLRESEEHSRRLIEEIRDLERRGSDKKEVVERLDKLVKEHHERNKRIVEEAKRLVEDSREKTRRIAERAKELVRRLKELVDRLSK

SEQ ID NO: 3149 - protein, 182 aa, Artificial Sequence; identical to SEQ ID NO: 3148
  Synthetic

SEQ ID NO: 3150 - protein, 182 aa, Artificial Sequence
  Synthetic
DRIEDVKRKVKEIKEKVDRLLEESSKKVDDLNKKVRDLLTESNKRIEDIVRELRELAKRDLKEEELRKVLEDLRRRIEKIIKDNEEINREHEKVVRDIVKENKEINDELRKEIERIREELGTESEEAKEVLERLKRILEESRRASEENKKKLEKSHEELKRASDENKRKLERILDELREALR

SEQ ID NO: 3151 - protein, 182 aa, Artificial Sequence; identical to SEQ ID NO: 3150
  Synthetic

SEQ ID NO: 3152 - protein, 171 aa, Artificial Sequence
  Synthetic
SAKEKIDKTLKDIYRKHEEVVRRVEKKHRDIHREHEEVVRRVEEEHRRILDELRKAPVDEDVIRKIEKNVEEVKREIDKSDDDIRRNIKEVKDEMDKSNEELKRKIDELRKANLPEEEAKKFLDKLDKEVRDSMKRLEDHVRETKKRVEESVRRLEEHVKRTEEEVRETAT

SEQ ID NO: 3153 - protein, 171 aa, Artificial Sequence; identical to SEQ ID NO: 3152
  Synthetic

SEQ ID NO: 3154 - protein, 171 aa, Artificial Sequence
  Synthetic
SVEDEVRRDLKRIYEKHEEAVRRVEERHERSNERLEDVIRKVEDKHREILKKLEDEPVEEEFIKELEKNVRTVKKKAEDKLRESEKNSRDLKRKIDESNKRLRDKIEELERANLPEEDVKRVLDKLDEEVKDSVRELEEHVEKNERDVEEIAKDLERHVEETRKEVDKTAK

SEQ ID NO: 3155 - protein, 171 aa, Artificial Sequence; identical to SEQ ID NO: 3154
  Synthetic

SEQ ID NO: 3156 - protein, 171 aa, Artificial Sequence
  Synthetic
KVEEKVRETLRRIYERHRKIVKEVEEKHRESNERLRREIERVKRKLDEILKKLEEAPVDEDVIRRLRKELRDLEEKMERKLRESERNSEEVKRRAEESNKRLRDKIKTLEEANLREDRVAEVLKKLKDDVDKSAEELERHVKRNRDEVRKIVEDLDRVLEELRTKVDEEAR

SEQ ID NO: 3157 - protein, 171 aa, Artificial Sequence; identical to SEQ ID NO: 3156
  Synthetic

SEQ ID NO: 3158 - protein, 171 aa, Artificial Sequence
  Synthetic
SVEDKVRESLERIYKKHEKVLRDVERTLKEIHEEHREAVERVRRELERIKRKLEELPVDKDMIRRLEELIKELERRADESDDDLRRKIDELRRRAEESNKKLKRDIDRLREAKLPDKDVERVLKKLDDDVRKSVKELTDVLKRLREEVKRSVEELEDVLRKLDKEVDDTAK

SEQ ID NO: 3159 - protein, 171 aa, Artificial Sequence; identical to SEQ ID NO: 3158
  Synthetic

SEQ ID NO: 3160 - protein, 171 aa, Artificial Sequence
  Synthetic
DVEDRIRKSLEEIYRRHETEVRKIKRKHDESHRRHEKVVREVTEDLERIKRRLEELPVDEEAIKKLEEDIKRLRERIKESDKRNEDNIREVEKEARKSNDELRKDIEKLDRDRLPEEDAKRVLDELEEKVRRSVKKLREHVEENEKRVEDSVEELKRILEELRKAVDETTR

SEQ ID NO: 3161 - protein, 171 aa, Artificial Sequence; identical to SEQ ID NO: 3160
  Synthetic

SEQ ID NO: 3162 - protein, 182 aa, Artificial Sequence
  Synthetic
SKKDEVEKLLKESERHSKKLVEDAKRLSDESKKHVEELVRRAEEELEKSDRDVKKVKDDNRPKDELKKVVEDLERENERLNRKIKEELKRHKDENERLTKELRELVKRHTDEVKEITDRLNVPEEVMDRVRRRLERDIRELRKALKRVEDTNEEITRELEKAMKEVKDTSDRILEKLRRARK

SEQ ID NO: 3163 - protein, 182 aa, Artificial Sequence; identical to SEQ ID NO: 3162
  Synthetic

SEQ ID NO: 3164 - protein, 182 aa, Artificial Sequence
  Synthetic
SVKDKLKELLKDSKRNSDRLVERAKELLDRSRKHSKELEDRARKLLEDSRRKVEELERANLREDELTRVVRKLEEENKRLNTELEKLVRDHERDNKRLVDELTKLSKEHEDRVREIAKKLDVEREVLEKARRDLERDLRENKKALDEVRRTLEEDSRRLREVLEEVKRISTKIIERLREIRR

SEQ ID NO: 3165 - protein, 182 aa, Artificial Sequence; identical to SEQ ID NO: 3164
  Synthetic

SEQ ID NO: 3166 - protein, 173 aa, Artificial Sequence
  Synthetic
SEKEDAEKKLRDILTDLARIVREVEEALKKILDDIRKVSEESKRASDESLKRARDAGIDEKLLEELERHNRKLKRDDDRLLKELEEDIRRLKEDIDRLLEEVAREVDRLREELDRLRGEELEELLRRLEEAVRRIAERLRKLLKELEEKARRLAEESKKLLEKDKEDVKRAAE

SEQ ID NO: 3167 - protein, 173 aa, Artificial Sequence; identical to SEQ ID NO: 3166
  Synthetic

SEQ ID NO: 3168 - protein, 173 aa, Artificial Sequence
  Synthetic
SEKERIKEESKKSLDDLRRASERSKEELDRILKRIDEASKRSKEESDRSLKEVKDRGIDEELLRELKRHNEELKERDDRLLEELKRKVEELKRTDDDLLRRSKEKHEKVERELKDLDGEELKDVLRELRETNRKLVEDSRKLLEELDRDVERLADESRKLLEDDKRKVREVAR

SEQ ID NO: 3169 - protein, 173 aa, Artificial Sequence; identical to SEQ ID NO: 3168
  Synthetic

SEQ ID NO: 3170 - protein, 173 aa, Artificial Sequence
  Synthetic
SDEERIDELSKKSLEDLKRVSDDSKRKLDDILKKIEDASRESEDKLRRILEKARRDGIEERLLTELERKVRELKKDDRRLLEELRKKVERLKERDDELLDRSRRKHEEVKRRLKDLDGRELERILEELRTDNDRLAKESDKLVKELEEEVRELIKRSETLLEELRKDVEELAK

SEQ ID NO: 3171 - protein, 173 aa, Artificial Sequence; identical to SEQ ID NO: 3170
  Synthetic

SEQ ID NO: 3172 - protein, 171 aa, Artificial Sequence
  Synthetic
DAKERVDDALKKILDDHRRVLKKVEDDHRDSHREHRRVVEEVKRELEKVLKKLRDAGVPEEIIREAKELVEELVRRAEESDKRNEDNIREVKERAEESHRRLRRLVEEIRKANLPKEDLDRMLEKLREIVERSRDKLRRHLEKNKREVDDSKRRLEKMLRDLEKKVRDAER

SEQ ID NO: 3173 - protein, 171 aa, Artificial Sequence; identical to SEQ ID NO: 3172
  Synthetic

SEQ ID NO: 3174 - protein, 171 aa, Artificial Sequence
  Synthetic
DDEERVKRKLEEVLRKHKEVVDEVIERHRRSHKRHRDMLREVDKKHRRILTELEKAGVDEKIIREAKEHVDRSREKLKESDERNEENIKKVTKELRESHKRLRDKVKELAEANLPVEDLKRVLEDLDREVRESKERARKHVEDNERKVEESKKRADDNLRRLERKIREAAR

SEQ ID NO: 3175 - protein, 171 aa, Artificial Sequence; identical to SEQ ID NO: 3174
  Synthetic

SEQ ID NO: 3176 - protein, 171 aa, Artificial Sequence
  Synthetic
SVEETVDEELKKIHETHKRVVDKVRREHEKSHKKHRDILKRVEEVHRRILTDLERAGVDESIIKEARDHVERSREELRKSDEDNKRNIETVDDKARRSDEELKKDIDELRKAKLDKKDLDEMLRRLKRKVDESERDLKKHLDDNKRAVEKSREDAERNLKELRDKIREVKR

SEQ ID NO: 3177 - protein, 171 aa, Artificial Sequence; identical to SEQ ID NO: 3176
  Synthetic

SEQ ID NO: 3178 - protein, 180 aa, Artificial Sequence
  Synthetic
REEEEARKVLEELKRDVERNERESKEILDKDKRDVEEWVKELEKMLEESKKLVDDVRKAKKDLREEELEREVRRIEDTNRKLNTDVEEIVRRHVDKSEKLVERDKRLVEEWERKAEEIKKRLSTIEELKKAVEDIIRTLREVLEKSRKTLKDSNDRLRRALEKAREDSKRSIRRLREELR

SEQ ID NO: 3179 - protein, 180 aa, Artificial Sequence; identical to SEQ ID NO: 3178
  Synthetic

SEQ ID NO: 3180 - protein, 185 aa, Artificial Sequence
  Synthetic
SVREDAKRLLEELERAVRELVERLKKLIERHRRASEDTRRELEKLLRELEKAVEELKRGNKEEEKVRDVLRKLKERAEEIKKRLREIHEELRKHSEDLKRRLTEALDTLRKDIERIKRELTRDVRGTKALEDVKEALDRILERVKRAIEEARKKLDDVDEHNREVIERVEKEIDRILKDVEDAAR

SEQ ID NO: 3181 - protein, 185 aa, Artificial Sequence; identical to SEQ ID NO: 3180
  Synthetic

SEQ ID NO: 3182 - protein, 185 aa, Artificial Sequence
  Synthetic
SVEEEARELIERLRKLSEDTMRRLTELLKEHERLSRETKKEAERLLDELRKKVDDLTRDNRDDEEVRRVDEKLKRDVEKIKRDLRKIHEEVKKHSEELRRELEKIHKDVDDTVKEIKDRLDKKVKDDEVLERVKRELDRILDHNKKVVDEAERALRRVDKHNEDVLREVEKTLERILDKVKESAR

SEQ ID NO: 3183 - protein, 185 aa, Artificial Sequence; identical to SEQ ID NO: 3182
  Synthetic

SEQ ID NO: 3184 - protein, 178 aa, Artificial Sequence
  Synthetic
SVEEKLEKIVRDLERRVRKSEEDLRRMVEEVERTVEKHREELKRVVDTLRKIVRDKGADEDLIRELEKLKDDLRKRNDEARRRAEELKRRLEDLIRRSREESERLRKELDDVIRDDVKDEKVARDIKDKVREIIRRNEEVLEEVDRRARELIERLERTIEKSERDVERIIRELRERAK

SEQ ID NO: 3185 - protein, 178 aa, Artificial Sequence; identical to SEQ ID NO: 3184
  Synthetic

SEQ ID NO: 3186 - protein, 176 aa, Artificial Sequence
  Synthetic
SKEEEAEKLVRDLEDSSRKHKDRLRKLVRDLEELVKEHERDLKRIVEELKKLVDDASRSKREDVLKTVEDRLRELEEKLERSTRTIREVVKRVEEDLDRSTEEHEKLVEDIRRELEKRGGIKELEEELRRNLKEVREVTEDAKRKLRDILRKVEDASRRVKEMLDKILKRVEEEIR

SEQ ID NO: 3187 - protein, 176 aa, Artificial Sequence; identical to SEQ ID NO: 3186
  Synthetic

SEQ ID NO: 3188 - protein, 177 aa, Artificial Sequence
  Synthetic
KLDEDIRKLLKEALDRNKEMLERLKKTLDEALEKVKKLLEDLRRVNKEVEDELRRAGLPEDSLRKVKKESDRSLREIEREVREAERRLKEILDELKRVLDRSKEILDELKKDLDRVRGEDVLREVIRRIRKVIEDTDRTWKRLIDEIRKEVKDVLDKARRLIRESEKLMEDIKRRTK

SEQ ID NO: 3189 - protein, 177 aa, Artificial Sequence; identical to SEQ ID NO: 3188
  Synthetic

SEQ ID NO: 3190 - protein, 177 aa, Artificial Sequence
  Synthetic
DMEKRIEKLLKDMLDRVRELHKRVREVNKEVNKRVKELHDEVRKVNEKVNKAVKDRGLPEELVERVRRKSETTRKTNEEKLERINEESRETERTNEKLLDDIRRRLEELRRDLERVRGEEVLARVIERIRKDVEKVLREAEKHIEESRRLARKVLEELRRHIEENRRLLEEVDRRRR

SEQ ID NO: 3191 - protein, 177 aa, Artificial Sequence; identical to SEQ ID NO: 3190
  Synthetic

SEQ ID NO: 3192 - protein, 171 aa, Artificial Sequence
  Synthetic
EVEKKVEELLKRIEDDNKRVADRSRKLLRELKKRLEDVVRESRELLRRILKKLKEAGGRDEVEREVRRVVEENERRLEEILRRVEEVVKRNEDELRKSHDRLRKAVEKMRRAKIREDEVADRLRKLRKESEEVVERSDRHLKDLERRIEEMAERSRRHLKRLEDKIREDAR

SEQ ID NO: 3193 - protein, 171 aa, Artificial Sequence; identical to SEQ ID NO: 3192
  Synthetic

SEQ ID NO: 3194 - protein, 178 aa, Artificial Sequence
  Synthetic
SMEDRVREMLRTIKRVIEEAHERSKKILDEDRKVLKAVEDAVRDVLTKIKKLLDDARRRGQVSDDLVREITEKIKRILDEVRRIIEKNERELERWRREDEEILKDLERLLRELEKDVRTTKVDEEVVKRAKKLLEEIEKLARESLERLRDNLRKTEKLLKDLLDEAKRLLEEIKETVD

SEQ ID NO: 3195 - protein, 178 aa, Artificial Sequence; identical to SEQ ID NO: 3194
  Synthetic

SEQ ID NO: 3196 - protein, 178 aa, Artificial Sequence
  Synthetic
DIEEEVKKILDEIRERIKKMKRDLERLSKEDEDVLRKVKKDVDEVLKRAEESLRDVKRRGRVDDEVVERLKRRLDRLREDVRRIVEDNKRRLKEWNERTEEVIRRLKKRLDDVRREVRTTKVFEEVLRKLEEILRDIKRKADELRKRYRENIEETERLLEELLRRAEELLRRLDETAR

SEQ ID NO: 3197 - protein, 178 aa, Artificial Sequence; identical to SEQ ID NO: 3196
  Synthetic

SEQ ID NO: 3198 - protein, 181 aa, Artificial Sequence
  Synthetic
SEAEKLLEDIRRIIKEVKENVERSLEKIKRLIEELEKNARDLVRRIRKLIEDLERKVRRDGNTEELRREVEKLEEELREHVKRHEEKTEKLAEELKEHNERHKTESEKVERKLREDLKRIEDEKVIRDIEKLIEDLKRISEKANEDNKRLIDDMRRISKEVARTIKELIERLRKIVEEARK

SEQ ID NO: 3199 - protein, 181 aa, Artificial Sequence; identical to SEQ ID NO: 3198
  Synthetic

SEQ ID NO: 3200 - protein, 181 aa, Artificial Sequence
  Synthetic
SEAEELLERIKKLIEDLKRDAERLLREIEEMIKDIRRHVEEDLRRLREVIKEIKRLVDERGNTDDLERRVEEISRRNEKNIKDLEDKVREIVRRLEEVLKKHKEDTDRLVEKLKEDLKRIKDEEVEREIRRLIEEMKRISEEVRKEIKRLIDELEEIVRRAKEALKKLNEELKRIVDEAKR

SEQ ID NO: 3201 - protein, 181 aa, Artificial Sequence; identical to SEQ ID NO: 3200
  Synthetic

SEQ ID NO: 3202 - protein, 178 aa, Artificial Sequence
  Synthetic
SKVEEVLKRLERLIRELKRLMDEVREDNREVLERLERYAERNERENRELLKKLEDVARRRSPREELRRELKEIHDRNRKSIEELEDRLRKVHERNRDIIRRLRETLRKIEEDLKELTKDGVSKEELDKMLKTAERVLREIEKDIEKLDRDLKRVVERIRDRSRRLDEAAEEIVRRIED

SEQ ID NO: 3203 - protein, 178 aa, Artificial Sequence; identical to SEQ ID NO: 3202
  Synthetic

SEQ ID NO: 3204 - protein, 178 aa, Artificial Sequence
  Synthetic
SKMEEVLKRLEKLLRELEEYVERNERENRKLLEELEDYVRRNEKRNKEILEELRDVVRRRSPREDLRRKLEEAHKENRKSIEDLRRKLERIHERNKRSVEELRKRLDEIKKEVDELRRDGVSDEELRKALERLRRVVEKVEDISRELDDRLRRVVEKAEEISRRLDEEIKEVVDRAEK

SEQ ID NO: 3205 - protein, 178 aa, Artificial Sequence; identical to SEQ ID NO: 3204
  Synthetic

SEQ ID NO: 3206 - protein, 178 aa, Artificial Sequence
  Synthetic
SKVEKVLDDMRRIIEEAERLLEEVKRRHDEIIERVKRYAEENRRRNEELIEDLKRVAEKRGPREDLRDKLRRIHKENEDSTRELRDRVRRVNEESRELVERLERKLRDVARRVDELRKDGISKDDVRRLLEELRKVVEDVKRLSKKMNDRIEKIAKEIEEESERLDRTIAEIVKEIEK

SEQ ID NO: 3207 - protein, 178 aa, Artificial Sequence; identical to SEQ ID NO: 3206
  Synthetic

SEQ ID NO: 3208 - protein, 181 aa, Artificial Sequence
  Synthetic
DEVEKVLEELRRLLKEDEDIVRELLKRLKELLEDIDRIAKETEKEWRKILREIEELRRKPIPEEDVKRLRERVERVLRESEKRVKELRERLKELLKKIEEDLRRSEKRLKELRDDIRRKGLPEDAEREVDRVVRTIEESTKDAREKVKRMADEIERIIKEVEDLNRKLVEEIERVIREVER

SEQ ID NO: 3209 - protein, 181 aa, Artificial Sequence; identical to SEQ ID NO: 3208
  Synthetic

SEQ ID NO: 3210 - protein, 173 aa, Artificial Sequence
  Synthetic
DSEETLRELVKTIEDSSRKVKKRNEELARELRRRIEEAREANDRLVETIRKEIRELPVPEETVRRLEELIKTLKERSEELVRKLEDKIRRILEKSEKLLRETKKELKELTDKLKDLRREELEKTARKLIEDDEKKARDTEREWEELIRDIERLVRESLEAWKRLREEIRETVR

SEQ ID NO: 3211 - protein, 173 aa, Artificial Sequence; identical to SEQ ID NO: 3210
  Synthetic

SEQ ID NO: 3212 - protein, 173 aa, Artificial Sequence
  Synthetic
KSEEELRKLVRELEELIERMERTNEKLLRELKEVLDRARERNEELVRRLEDLIRRLPVDKDTVEELKRLIEELKRKSEEILRRLEKKLRDHRREVKKLADDLRRKIKELEDKLKDLREEELRKEAEDLIREIEEKVRRSKRNLEELIREIRELVERSEDEWRKLIKRIADAVK

SEQ ID NO: 3213 - protein, 173 aa, Artificial Sequence; identical to SEQ ID NO: 3212
  Synthetic

SEQ ID NO: 3214 - protein, 173 aa, Artificial Sequence
  Synthetic
SSEETLERLLREIERVLEEARKRNEDLVRKIREVIKEALERNKRMLEEIKKEIDRLPVEEELVKDLRDKLDKHRREVEKIITELKRLIDELKKESDDLLDEIRKKLKDLKDLLKDLRSEELLRTAKRLLEDIERIVRETLKKWRDLEREIRKLVRESTENLKRIIEEIRERAR

SEQ ID NO: 3215 - protein, 173 aa, Artificial Sequence; identical to SEQ ID NO: 3214
  Synthetic

SEQ ID NO: 3216 - protein, 174 aa, Artificial Sequence
  Synthetic
SKVDEVIRDLARLLDELRRHVDDSVRRMDEVVKRSTREADELAKRLDELVKEVEKKPGDKRVERMVREIERLVREVLEELKKKYEKLKREVEENLRRLEETVRDIVEKARKVTEDGVSKEKIDRIIRELERILEEAKKKHEDVLRRLEDSLRRVAELLKAALDRLREIVDRLRR

SEQ ID NO: 3217 - protein, 174 aa, Artificial Sequence; identical to SEQ ID NO: 3216
  Synthetic

SEQ ID NO: 3218 - protein, 174 aa, Artificial Sequence
  Synthetic
SKADDVIRKLRELLEELRTHVEKSIRDLRKMLEDSTRHAKRSIEELERLLEEVRKKPGDEEVRKTVEEISRRVKENVKRLEDEYRRLEEEVKKNLDRLRKRVEDIIREVEEMRKDGVDEEKLKDLIRKLRDILRRAAEAHKKLIDDARESLERAKREHEKLIDRLKKILEELER

SEQ ID NO: 3219 - protein, 174 aa, Artificial Sequence; identical to SEQ ID NO: 3218
  Synthetic

SEQ ID NO: 3220 - protein, 174 aa, Artificial Sequence
  Synthetic
SKVEEVVRTLDELLKRLEEHVKESIRRIKKVIDDSNREADELIRDIDRLLKELEKKPGSKELTDEARKIAEKIRDVLRRLKEKYERLEKDIRDNVRRITEEVKRIEEDVERLKEDGVDKDRVERIIRELRRILEEIRDLHRKLEEELRRSLKEVEDRLRELLKKLEDILRELRR

SEQ ID NO: 3221 - protein, 174 aa, Artificial Sequence; identical to SEQ ID NO: 3220
  Synthetic

SEQ ID NO: 3222 - protein, 180 aa, Artificial Sequence
  Synthetic
DEVEDLLRKLKDTIRRLKAHADRDLKKLEEILEKLRRHVEKNLRDLERILKELKDLSRTIDDEELRRRVEEVIKKDRDNNRRLNDESRRASEENRRNLETLAREVERVVKELEDELSRVRVEEVAERVRRVIKELRKLLEEIARALEDVNKKAKEINDKADEDSKRVNDELKRIIKEIRD

SEQ ID NO: 3223 - protein, 180 aa, Artificial Sequence; identical to SEQ ID NO: 3222
  Synthetic

SEQ ID NO: 3224 - protein, 180 aa, Artificial Sequence
  Synthetic
SEVDELRRRAEESSKKIRKIAEELTKRLKDLLETIRRLMRKIEEDMKRTSEEIKDLIRRGNTEEVLKRLEEKSRDLLEKVRKILEELKRELERLEKEVEERLEKLKRESEDLERRVSNATDDRLRDVVKKLHKKNKDILDEIRDIVRRLKEEVDTILKEIKERLEELHKNNERLLREAKR

SEQ ID NO: 3225 - protein, 180 aa, Artificial Sequence; identical to SEQ ID NO: 3224
  Synthetic

SEQ ID NO: 3226 - protein, 181 aa, Artificial Sequence
  Synthetic
SAKEKLEDLLRKLKRILDELEKTSREMKERVERIIRELEKTVREVHERIKRLIDEALKRNRGDDRVREIVEEIRKKSEDVNRETEEIAERLRRELKKLDDEDKDILRRLKERIEELRRKAEETSISEELKKELEDLLRKIEKLIKESEEKWRRLLEEIKREIERLRETYAEILRDVKRRDK

SEQ ID NO: 3227 - protein, 181 aa, Artificial Sequence; identical to SEQ ID NO: 3226
  Synthetic

SEQ ID NO: 3228 - protein, 181 aa, Artificial Sequence
  Synthetic
SAEETVRKLLEEIKEIIKRMEDRVREVLEENRKSIEDLEERVRRLHEEVERIIREALEDLRGDKRVDEIVKELRERSDRLNKRVEEILRELKKESEDLDREVKKIVEELRKRLEDAAEEVKRTKIDDEVKRELKRILEEIEKLIEELLRRMKESNKKIRKLAEDLTREYKRLLDEIRKRRK

SEQ ID NO: 3229 - protein, 181 aa, Artificial Sequence; identical to SEQ ID NO: 3228
  Synthetic

SEQ ID NO: 3230 - protein, 174 aa, Artificial Sequence
  Synthetic
REVEEVVKRAEEVIRRLEKEVEDIVRRVAKHLKDNEDHARRSVERLRRDIEELKKEDGDDEVRERIRRLKEDVDRDNKELRDNVERVKREIDRMVDELRKKLEDLKRRIDDVRRRGLLDELVKEVKKKIDDVLKKAEDLARKLKKEHDEVVARITEAHDEVKKRVEKVLKELED

SEQ ID NO: 3231 - protein, 174 aa, Artificial Sequence; identical to SEQ ID NO: 3230
  Synthetic

SEQ ID NO: 3232 - protein, 174 aa, Artificial Sequence
  Synthetic
SKVEDVIREIRELIKRLEKHVKDSVREVRKHIEDNKRKVEKLVKEVEDVIRELRKEDGDERVEEKVERLKRRIDEMLKDLEENLRRVKREVREDNRRLKKLIEDVKKKITDVERDGLMRELAEELRRRLDEVLEKATRLHRELEKRHDDVLREAEKRLRDLKREIDKVLDDLRR

SEQ ID NO: 3233 - protein, 174 aa, Artificial Sequence; identical to SEQ ID NO: 3232
  Synthetic

SEQ ID NO: 3234 - protein, 175 aa, Artificial Sequence
  Synthetic
EEVERVVKELRDHLAETKKKIDEIIKRLDDHIEENRERVERMVEELRRILKEIRDSNVREDEVRKLVEELLRRAREVLRESEKNIRDVKKEAEDVLRDLERNIRDSERKLEEVLRRGLAREVVDEVRKEHRDVLREAEELIKRVEKDHEKSHREVKKLIEDVERRLREVLKELRD

SEQ ID NO: 3235 - protein, 175 aa, Artificial Sequence; identical to SEQ ID NO: 3234
  Synthetic

SEQ ID NO: 3236 - protein, 175 aa, Artificial Sequence
  Synthetic
KEAEDTIRKVSKHIEDNKRKVEEMIKKLKEHLKETEEKIRRIVKKVRDEVRKLEENNVPEDEIKELVDRLRKELKDVLDDLKRNIEEVEKEAEDILRESEKNIRDVEKELEEMRRNGLDEKLVRDLKRRHKESHDEARKLIEEVRREHEEVLKRAEDLIRELDKRLKEVLDKLRK

SEQ ID NO: 3237 - protein, 175 aa, Artificial Sequence; identical to SEQ ID NO: 3236
  Synthetic

SEQ ID NO: 3238 - protein, 175 aa, Artificial Sequence
  Synthetic
SEAEEVVRRVEKHIRDTEKKIRDIVRRVKEEVDRNSERVREMVERVRKEIEELERAQVPEDRIEEEAKRLEEELKRILEEDKRNIDRLKEELDRELEDLRRNIREVERRLDELTRRGLKKEVVDELKKRHREVLEEARRLIEELKERAERSHRESKKLIDELREEIRRVLEERRR

SEQ ID NO: 3239 - protein, 175 aa, Artificial Sequence; identical to SEQ ID NO: 3238
  Synthetic

SEQ ID NO: 3240 - protein, 178 aa, Artificial Sequence
  Synthetic
SEVEDIVTKLRDKVERHREEVKRIIDTLKKLVEEHKRRVDDEVKKLDDTVKRLREANVDEETLREVEERIDERLRRVLDRSREVKKRLDKALDEVRKRSKEVHEELRRALEEVRKRSRDKRVDDLLREVEERLERSNREARKLLEEVKREMEESHRRLKKLLDEVREKVRRVVEELRK

SEQ ID NO: 3241 - protein, 178 aa, Artificial Sequence; identical to SEQ ID NO: 3240
  Synthetic

SEQ ID NO: 3242 - protein, 177 aa, Artificial Sequence
  Synthetic
KVEELVKEVDERIKKVLDDLRRALEDVRKKAEDSVRRMEELSEKVKRDLDRVIAKAEEKGLDEKDLDELRRILERLRRENKKLNEESRRDLEEVRKELEEVLKRAEEMVKRLKDTLRRDGVDEEVVKRLEEILRRLKETIDRVLERLKRRVEDHDRKVEKRVRENEKAVEDLKRRID

SEQ ID NO: 3243 - protein, 177 aa, Artificial Sequence; identical to SEQ ID NO: 3242
  Synthetic

SEQ ID NO: 3244 - protein, 179 aa, Artificial Sequence
  Synthetic
SVEEVLEEARKDIDRLIRRMEEISERAKEKIERLIDELRKISEEANKKNEEVLRELREKGGDNKERVDEIEERLKRHNEEHRRRTEDLERKLRKHVEEHKERTREIKEELKRLLKELEEANIPREDIKREVDRLLEEIRRLIERLRENVKKLLDEIRKLIEELDENVKRSLKKLRDDIR

SEQ ID NO: 3245 - protein, 179 aa, Artificial Sequence; identical to SEQ ID NO: 3244
  Synthetic

SEQ ID NO: 3246 - protein, 188 aa, Artificial Sequence
  Synthetic
SLDDILREVRRTSRELNEESRRIVDRAKRESEELLKELETILRDATRRLDDLLRKLDEKRQDEEVKKILRDLREEIKKLREDVKRELDRLRKHTEDLVRKVEELNRRSEEHLKKLEEEVDKAKKEGQDRETVVKELEDKVREHLRTNRELIERLEKEMRDHLREIKRKIEELERRIRKLVEEVKRRID

SEQ ID NO: 3247 - protein, 188 aa, Artificial Sequence; identical to SEQ ID NO: 3246
  Synthetic

SEQ ID NO: 3248 - protein, 175 aa, Artificial Sequence
  Synthetic
DELEDLVRKAEKLVRESEKKIKEIVDDARRLIEDSEREIREIVKKLRELSKRVEEELRRDGPTEELEKKLRRITEELDKLLEDLRDKNRRINEKLRKDIKELERENRDINRELTKRVRMKDLLKELRDKSKRVLEKLRRLLEEINKRSRDVLEKLKRLADEVRESNREVLDRARK

SEQ ID NO: 3249 - protein, 175 aa, Artificial Sequence; identical to SEQ ID NO: 3248
  Synthetic

SEQ ID NO: 3250 - protein, 172 aa, Artificial Sequence
  Synthetic
RELEEIVKDAERLVKKDTEDIRDKVRRAEEVVKKDTEDLEESVKRVKDKVKELEDANIRRDEARKVAEEMKKELKEVLDDNERKSRDLKTKLRKVLEENKKKVDEIREDLERRMKSEELLREIEERIKRSLDESRKLVREIEKKVDESNERSRKLVEDVEREIEEVLKRLAD

SEQ ID NO: 3251 - protein, 172 aa, Artificial Sequence; identical to SEQ ID NO: 3250
  Synthetic

SEQ ID NO: 3252 - protein, 177 aa, Artificial Sequence
  Synthetic
SSEDILREVKKLLDDSLDKLRRLIEKIKEDLDRSVDRHRKLSEEIRRRHERVREAVERRGSSEEKKERIERNIREVEEEIKKVDEESKRIVDKLEKELREVLRKSEETIKKIRKDIKDEGVDEDVARKLRELVREHSKEVEDKVRRAARLVEEHTERSDRVADKLRKHIEETKKRID

SEQ ID NO: 3253 - protein, 177 aa, Artificial Sequence; identical to SEQ ID NO: 3252
  Synthetic

SEQ ID NO: 3254 - protein, 177 aa, Artificial Sequence
  Synthetic
SKEEILKEITDRVRESRKRTKKLLDDVREELERSHRRLEKLIREVEKRLREVKRKVDESGQSEEMVKRVEDVVRTLTEELKKVLKENRDEIRRIEKRIKEIDEENDRTIRRIEDRIRREGADEDVVRDLRRLVKEDTDRARKVVRELEREVERDKEEVERIVDKAEKKVRELEERIR

SEQ ID NO: 3255 - protein, 177 aa, Artificial Sequence; identical to SEQ ID NO: 3254
  Synthetic

SEQ ID NO: 3256 - protein, 178 aa, Artificial Sequence
  Synthetic
DEVEKAVADLRRLNEEHTRDIDKAARDLERLVKKHTDEVRKLVRDLEKLVKDLKDANLREDEVEEVVRRIDETLKRILKRSEDVVREIERELDKIRRKSEEAVKRSEDMLREIARRSRDEKLEELLKEVEETTRRSLRRLEELLRKVERAVRESHKELKKLLDEVREKVKKVLEELRR

SEQ ID NO: 3257 - protein, 178 aa, Artificial Sequence; identical to SEQ ID NO: 3256
  Synthetic

SEQ ID NO: 3258 - protein, 178 aa, Artificial Sequence
  Synthetic
DEVEKAVRDLEKLNEEHTRRVEKVVTDLRDLVRRHTEEVRKLVDELRELVERLRRAKLDDKTVKKVADDLRKKLRDIEERSKEMVKKAEETLRRILEDSKRAVDESRDRLREIARRRRDKKLEKLLDDVRKTTETSHERLKRLLEEVEERVRRSHEELKDLLRKVKELVEKVLRELKE

SEQ ID NO: 3259 - protein, 178 aa, Artificial Sequence; identical to SEQ ID NO: 3258
  Synthetic

SEQ ID NO: 3260 - protein, 178 aa, Artificial Sequence
  Synthetic
SEVEKLAKELRDLVREHTKRVRELIDELKKRVEDHTRKVEEIVKRLKKLVDDLRDANLDKDEVRKALEEAKRRLDDVRRRSKEVTDRLDKTLKDIERESERAVREMDRRLREIERRSRDKKLEKLLKEVRELVKRSHDELKKLLDRVREAVEKSKRRLEKLLDTVRRLLEKVVRDLER

SEQ ID NO: 3261 - protein, 178 aa, Artificial Sequence; identical to SEQ ID NO: 3260
  Synthetic

SEQ ID NO: 3262 - protein, 178 aa, Artificial Sequence
  Synthetic
SEAEKLVEELRRLNERHTRRVEEVVRRLDEEVKKHRKDVRELVRELRKLVDELRKANLDEDTVRKVAEEAKKRLDEIRRKSERVVERMRRELKKIKDESEEMVKESRKRLTEIARRSRDEKLEELLREVEETTEKSHRDLKRLLDRVREKVEDSHKELEELLKEAKDRVDRVLEELRR

SEQ ID NO: 3263 - protein, 178 aa, Artificial Sequence; identical to SEQ ID NO: 3262
  Synthetic

SEQ ID NO: 3264 - protein, 178 aa, Artificial Sequence
  Synthetic
SLEDKVRDDVRKLLAEAKKVADDLRKVVEDHRKTVEDVIREIRRRVEEHLKKLKELIDAGVDERVLEELKRHSEKLVEDIERLLRELNKHSERLLREAEKILRELEKKVRDTKKELRDRGVDDRVLKRIEEEIRRLLKELREIVKDLERLDRELTDELRKLVEEVRRLSETVLDEARK

SEQ ID NO: 3265 - protein, 178 aa, Artificial Sequence; identical to SEQ ID NO: 3264
  Synthetic

SEQ ID NO: 3266 - protein, 182 aa, Artificial Sequence
  Synthetic
SLDEDVAEKMKELEKENKDLLDTIRRLIEELEKHARELLKRIEDLIRELTEDAKRLEDSNLREDELKRELDRLRDKVRKVRKEIEELLKEHEDRSRKVVRDIEEKLKESNRKVKELLEELKTRGVDRRILEEIRRTNEELTERVRDLVEEMRKTSEELLKEVRKIADEVRRTVEEALKRLEK

SEQ ID NO: 3267 - protein, 182 aa, Artificial Sequence; identical to SEQ ID NO: 3266
  Synthetic

SEQ ID NO: 3268 - protein, 179 aa, Artificial Sequence
  Synthetic
DEAEKILRDAKRLVEELSKKLEDNLREIKEVIDRLSEELDRNLKEHRDLIRKLEEDMDRKGVDDKEKKKLREDHDRYRKEVEERKKKLRDELKKYKERVEEMIEKLKRRLEEIEKRIRDEGKITEERAREVEEDIKRAEEEVERSIRESKKRTRDAEREVRESKKKSEDHIREVEKRIR

SEQ ID NO: 3269 - protein, 179 aa, Artificial Sequence; identical to SEQ ID NO: 3268
  Synthetic

SEQ ID NO: 3270 - protein, 183 aa, Artificial Sequence
  Synthetic
SELEELLKELKEIVERSADHLRRSNDDLRKIIEEVTKTLEKILEDLKRIVEEVVDRARKKVSDKDRVRELKKRLEEDLRRVEKKVRDIKKEAEDSLRKSEEDVREYKRKLKEDLDRLKEIIERNEDREEELKKKLKELKDRAKETNERHRRDVERLMEKLRRDLERLDREVKDLEKKLREEEK

SEQ ID NO: 3271 - protein, 183 aa, Artificial Sequence; identical to SEQ ID NO: 3270
  Synthetic

SEQ ID NO: 3272 - protein, 172 aa, Artificial Sequence
  Synthetic
SDREEIKRRVEEEAKKSRENLKETLREVDERVRDSERNLKRHHEEVKKAIDDLRRSDVPREEITKRLRELLRRSEKKIEEAMRDHDRILKEIKERADKAERDHDDRLRKLEERGLEKRILDDVRRLLEELKERYRRIVDEIKKLLERLKEAYKRNLDRVRELIERIEKEIRD

SEQ ID NO: 3273 - protein, 172 aa, Artificial Sequence; identical to SEQ ID NO: 3272
  Synthetic

SEQ ID NO: 3274 - protein, 180 aa, Artificial Sequence
  Synthetic
SELEEVKERIERLVRRHKEELEKVRREIEREVKKHEKDLEDLERRSREHIETAERLLAENRVREDEVRRILKENRDEAREVEKKSREHLDRLKKRLDKLREDSKRHLEDVERDLKRLKDRGDVDDRILEEARRLLDRLREENEKVLKEAEDMLKRLEDENRKMLEENEKLLKELKKEVDK

SEQ ID NO: 3275 - protein, 180 aa, Artificial Sequence; identical to SEQ ID NO: 3274
  Synthetic

SEQ ID NO: 3276 - protein, 180 aa, Artificial Sequence
  Synthetic
SEVEEVLKTIEKKDEEHKRELERVKEEVDEDAKRHRERLKKVDRDVKEEIKRLRKLLEDRTVDEEEVREELRKLTERLDKLRKDSEKHLRDVEDKLRRLRERSERHLDTVRKELEDMRRRGDIEEKILEEIKRRLDELRKRNEDLLRRVKELLDELREENRRLLEDAKRLLEEVLKRARD

SEQ ID NO: 3277 - protein, 180 aa, Artificial Sequence; identical to SEQ ID NO: 3276
  Synthetic

SEQ ID NO: 3278 - protein, 180 aa, Artificial Sequence
  Synthetic
SELEEVEKKVREDARRHKEELRRVEEEVKRNAEKHRDELRRVREDIERKIRTLRELLKERRQSEEDVKRRLDKLRDELKKLKERSKKHLDDVERRLEELRKESERHLREVEKELEELRTRGDVSEEILRRVKKLLDELRDENRRLLERVRELLERLREENERVLREVKKLLDEVKREAEK

SEQ ID NO: 3279 - protein, 180 aa, Artificial Sequence; identical to SEQ ID NO: 3278
  Synthetic

SEQ ID NO: 3280 - protein, 182 aa, Artificial Sequence
  Synthetic
SEREKLLKELKDNLDESRRRVEELLKRIKENLEEVKDRAKKTLDDLKRDIEELRKLVERRETREEEIKKKLKEHDEKTEKIKRDLRDHLRRHKEDTKRLVEELKKHLEDHKRKIEDIERKLKDEDVKRRLRDLSRRLAREHEKVIEKLRRLSDELEKIHREIEERLERLSDELRKEADKARK

SEQ ID NO: 3281 - protein, 182 aa, Artificial Sequence; identical to SEQ ID NO: 3280
  Synthetic

SEQ ID NO: 3282 - protein, 182 aa, Artificial Sequence
  Synthetic
DEARELLKRLREINEKLKKDVEEIERRLEKYNRDVKRKLDDSIRELKEKLDRLRERIRDEGTGREDLERVKKDVEDYLEENRRRAEESKRELERLLREVREKLKRSVERLDEALEKVDRDGLPEDVRRAVEELVRRHKDTVKKIEESVRRLVEEHKRTVKEALDRSRRIAEEIKRVLDEAAR

SEQ ID NO: 3283 - protein, 182 aa, Artificial Sequence; identical to SEQ ID NO: 3282
  Synthetic

SEQ ID NO: 3284 - protein, 182 aa, Artificial Sequence
  Synthetic
SEEEKLLTELKKLNDDLERRVRKSLDEIRRYNEKMREDVRRSDREVREEKKRLDEKLKKDGTDDDELRRVKKKLEDYLRRNEEEVRKSREEVRRYLTKNREDVRRSKEELRKLLEKVKKDGLPEEALKKVRELVERHKRTVDEALEKSERLLREHERTVDEVLDRSRRAVEEVKKTLDDARK

SEQ ID NO: 3285 - protein, 182 aa, Artificial Sequence; identical to SEQ ID NO: 3284
  Synthetic

SEQ ID NO: 3286 - protein, 181 aa, Artificial Sequence
  Synthetic
REAEEVRRRIEESHEEVRRRARKDERDLEESHKRLEEKAKELKDELRKILKDIDDLAKSNVSEESVKKLKEDLDRKLEEVERRMREDKKRHEDHLRESEKDMRRLKKEHRDRLEELRRAGLPEDVLRDIEKLVRDNEEALDRILKRTKELVDRNLEAIDRILKEVEELVRRIKELLDRAKK

SEQ ID NO: 3287 - protein, 181 aa, Artificial Sequence; identical to SEQ ID NO: 3286
  Synthetic

SEQ ID NO: 3288 - protein, 179 aa, Artificial Sequence
  Synthetic
SEVEEVLERLKRKLDEIERESRESAKKIRREIERIEKEARDSLRRLKKLIKEIEDRVRRDGRRRDELDELLKRLEDYVRRSVERLERLLEDLTKKVRDHERTLRRRLKRVRDDIERLKEAGIDREELEKLLKRLEEVVRESEKEIEDLLRRVRELIERIKREHEKILKEAEEVIRRVKK

SEQ ID NO: 3289 - protein, 179 aa, Artificial Sequence; identical to SEQ ID NO: 3288
  Synthetic

SEQ ID NO: 3290 - protein, 179 aa, Artificial Sequence
  Synthetic
REVEEVLRELEEHIERSKRKSEESLKEIRRRIEEIEERSRRSLTELKKRIDDIKRRVEKDGPREKELDDLLKDLKRKADEHAKRLRDLLKELEDRVREHERDLERNLKEIKEKIEELERAGIDKEDLKRLLDKVTEVHKESAKEIRKLLDEARKVIEDSLRAIRDILRKIKETIDRDKT

SEQ ID NO: 3291 - protein, 179 aa, Artificial Sequence; identical to SEQ ID NO: 3290
  Synthetic

SEQ ID NO: 3292 - protein, 179 aa, Artificial Sequence
  Synthetic
EEVERVLEKLKRHIDDSRRKSKRSVDEIRKHIERSKRRSEESVERVKRELERIEEKVRREGNRRDELKTDLDRLRRYVRKHVEDLRENLKRIDERIKEHEDRLDKNLEDLKREIEELRKAGVDEEELKKLLEEAEKVHRDSKRELRKLVKEARDVHRESMETVKRLLDELEREIRRAET

SEQ ID NO: 3293 - protein, 179 aa, Artificial Sequence; identical to SEQ ID NO: 3292
  Synthetic

SEQ ID NO: 3294 - protein, 179 aa, Artificial Sequence
  Synthetic
SEDEEALKKLKEHIDRSREESKRSLDRVKREIERIREEIERDLRRLREELKKIEDRLRRDGPRRDDLERLLRRVEEEVERLKKKLDKLLEELRKYVEDHKRRLDENLERIRDEIRRLREAGIDEDELRKLLEDAKRVHKRSKDELKRLLEEAEKVIRDAKRKIKKLLDELRKVLEDARR

SEQ ID NO: 3295 - protein, 179 aa, Artificial Sequence; identical to SEQ ID NO: 3294
  Synthetic

SEQ ID NO: 3296 - protein, 179 aa, Artificial Sequence
  Synthetic
DEVRRVLEELKEHIKRSEKRVRENEEEIRRHIEKSKRDSDESLKELARLIKKIEDDVRREGTREKDLDKLLKDLERYVEEHKKRLDDNLRRLEEHIKRSKEELEKNLRRLREEIEELKKAGIDEEELKKILDEAEERHRRIEERHKDLLRKAEEVHRDSLRRLREILRRAEEVIRREKT

SEQ ID NO: 3297 - protein, 179 aa, Artificial Sequence; identical to SEQ ID NO: 3296
  Synthetic

SEQ ID NO: 3298 - protein, 179 aa, Artificial Sequence
  Synthetic
KEVEEDLERLKKHTEDTRKRARDNLERIKEELEEIRKESEDSARKVRRDIEEIKRRVDETGPDRDELDRLLRRLEEYVKRHKDRLRELLRRVEEHIKKSIRELREDLRRLREEIEELKKAGVDERELEKLLKEHEKTIRDIEEEHRRLLKELKDVVRESSRELEELLKEAEDVIRRVKK

SEQ ID NO: 3299 - protein, 179 aa, Artificial Sequence; identical to SEQ ID NO: 3298
  Synthetic

SEQ ID NO: 3300 - protein, 182 aa, Artificial Sequence
  Synthetic
DEVREALKRLEDETRKNKKESDKSLERLKEESKKNKDESDKSVKNIEDKIKKLKEDLDRDGPDEDRLREVLKRLRDYLREHKERLDRSKRKLDEELKKHREDLKRSKDRLDEELKRLDKEGLPEEVKRALDELVKDHRRVLEESARRIDEIVERHRRLLDDSLRRIAELVRRVEETLREERR

SEQ ID NO: 3301 - protein, 182 aa, Artificial Sequence; identical to SEQ ID NO: 3300
  Synthetic

SEQ ID NO: 3302 - protein, 182 aa, Artificial Sequence
  Synthetic
DEVEKALKELEDDLRELKKRSEESLKNVEEEIKRAKKELDESLDNLRKKIEELKRRLEKDGTNEDDLRRVLEELRKYLEDVRRKLEEVLRKLRDYLRKHEEDLRRVERELEKKLEDLERAGLPEEVLRKLETIVRKIREELDRSKKKLEKLIEEAKRELERVLKEHEDLVKRVRDVLEDARR

SEQ ID NO: 3303 - protein, 182 aa, Artificial Sequence; identical to SEQ ID NO: 3302
  Synthetic

SEQ ID NO: 3304 - protein, 182 aa, Artificial Sequence
  Synthetic
DDVRETLTRLRKETERNKRESDKSLENLKRKSEDNKRKIEESLKNMKRRIDEVKRRAEKDGPNEDELRKLKEELKRYLDRLREELERSVKEATEYVRRHERRLRESLKDLKRKLEDLDRRGLPEEVKKELDEILRRHKEVLRESERRLEKLLRDHRRRLEEALEEHKKLIDEAEETLKRIRD

SEQ ID NO: 3305 - protein, 182 aa, Artificial Sequence; identical to SEQ ID NO: 3304
  Synthetic

SEQ ID NO: 3306 - protein, 182 aa, Artificial Sequence
  Synthetic
SEVEKALKELEDKTRKNKEDSERSLDKLRKDIEELRKKAERSIRNMRDKLRKLRDDVRKEGPDKDRLEEVLREVERYLEELRKDLERVLEELKKYLEEHKRRLEESRRRLKEDLDKLEKDGLPEEARRKLKELVDRHEEVLRRSLERLKRLVEEVRRTLEKILRDHERLLDELRRDLEKDRK

SEQ ID NO: 3307 - protein, 182 aa, Artificial Sequence; identical to SEQ ID NO: 3306
  Synthetic

SEQ ID NO: 3308 - protein, 182 aa, Artificial Sequence
  Synthetic
DEVEERLRELEETTKENKRRAERSLENVRKKSRDNDKRIKESLDNIRREIKRLRDKVRKDGPNREELKEVLDRLRTYLKEVEKDLRRSLKELEDYLRKLEKELRESLEDLKKKLEDLRREGLPREVLEKLKEIVERHEEVLRRIKKKHEDLVREHRKRLEEARKRHEKLVREAEKTLDDVRR

SEQ ID NO: 3309 - protein, 182 aa, Artificial Sequence; identical to SEQ ID NO: 3308
  Synthetic

SEQ ID NO: 3310 - protein, 182 aa, Artificial Sequence
  Synthetic
EEVERILDELRRRNEDMRRRSEENERELRKRNTELRKKVEDSLRRLREDLKRIKKLVEEGRVDEETLRKLLEDVERYLKEHRDRLRKSLEDAKKRFKEHEDRLKKSLEDVERKLEELRREGLPEEVTKALEELVRRHRKTLEESLRKAEKVLRDHKESLERSEKKLKELMEEVKKLLDDARR

SEQ ID NO: 3311 - protein, 182 aa, Artificial Sequence; identical to SEQ ID NO: 3310
  Synthetic

SEQ ID NO: 3312 - protein, 178 aa, Artificial Sequence
  Synthetic
SREDEIRKRLEESLERVKKIIEDIKRRIDESLERIKELLKEIDERSKRSLEKIRRKIEREPRSEKVEKEAREHMKRLDELLREVEEYIERSIKELRELLDELRRYVEESEERLKELRRRGGSEELLRRARKAHEDLLREVKRRIERAEEEHKRLLDELRKVVERSKTEIKKLLDELRK

SEQ ID NO: 3313 - protein, 178 aa, Artificial Sequence; identical to SEQ ID NO: 3312
  Synthetic

SEQ ID NO: 3314 - protein, 185 aa, Artificial Sequence
  Synthetic
SRVEDVERKLRRKLEELKEDIERLREESRRSLEELERDSDRNRRESEDSLRRVEERIRRIKDDEDKERVTRTVEEELERHERRLRESKKRLDDEERKHKKRLEEVRREVTEKVRTIREELEELERDGVDRETLRRVEREIERLLRELEETLKRSEEELKRIVDEHRKLLERSKRELEKLVDEVRK

SEQ ID NO: 3315 - protein, 185 aa, Artificial Sequence; identical to SEQ ID NO: 3314
  Synthetic

SEQ ID NO: 3316 - protein, 186 aa, Artificial Sequence
  Synthetic
REIEEVLKRVEKVVRDDSRRNKEVLTRNRRKVERWKETLEDVLRRVEKAVRELRKDAEDRLREKKEKIAKVEDLLDKIRKTVKKVLDEVKKLLDDSIRLSEEMLRESERTLRDIEREVDEVSKKTRTEDILREVEKKLKELLDRSRELSDEVRKRSDESNKEIKKELDRARDELRRLLERIEEELN

SEQ ID NO: 3317 - protein, 186 aa, Artificial Sequence; identical to SEQ ID NO: 3316
  Synthetic

SEQ ID NO: 3318 - protein, 186 aa, Artificial Sequence
  Synthetic
DEIEKVLEEVERVVEEDERRNRKVLEENKRLVDEWDRRVREVLKDVKRRVDELDTRARRDLRENEEKIRKVRKLLDEIREVVERALKKVRELLERSIELSKRVAEDSKRTLDDIRRVVEEVARKTKDKEILDRVKERLERLLEESRELSERVKREIEETNERIARELERVMETLKKLLKDIEDELK

SEQ ID NO: 3319 - protein, 186 aa, Artificial Sequence; identical to SEQ ID NO: 3318
  Synthetic

SEQ ID NO: 3320 - protein, 186 aa, Artificial Sequence
  Synthetic
KEAEDVLKKVDTDVTRDDEDNRKLLEDNRRSVEEDERRNRRVLEEVEKRVRDLAERVKRDLREDSKRLEEVERLLRRIEERVTRALEDTKRTLEESLKLSEDVLRDSHRTNRDIKRVVEEVTRKVRTREILKRVTEELERLLAESERLSEEAEERVRRSDDTSRRLSEEVRKELEELLRRIEERLR

SEQ ID NO: 3321 - protein, 186 aa, Artificial Sequence; identical to SEQ ID NO: 3320
  Synthetic

SEQ ID NO: 3322 - protein, 186 aa, Artificial Sequence
  Synthetic
REVEEVLKRVKETVEKDREDNTRVLERNRESVKEDDDRNRKVLKRVRDEVRKLLEEAKRDLKDDEKKLREVTDALRRIIEEVERVLKESHDTNRESIKLSEKLIRDSERTLERIERRVDELVKKVRTEEILKRIEEELKRLLEESRELSKEVEDRVRKSDKKSRDLSEKVKKDLKELTDEIRKRLK

SEQ ID NO: 3323 - protein, 186 aa, Artificial Sequence; identical to SEQ ID NO: 3322
  Synthetic

SEQ ID NO: 3324 - protein, 186 aa, Artificial Sequence
  Synthetic
SEIEDILERVREEVDKDRRKNDEVLRENERLVKKDDDDNAKADEDVRRKVTELEKRARRELKDNREKLKKVKELLERIKERVKEVLRRSHKTNRDSERLSEKVVRDSRKTLREIEEVVEEVSRRIRSEEILKRVAKRLKELLEESKRLSDEVTKRSRDTDEESERLSRKVDKEVKDLLKEIERELE

SEQ ID NO: 3325 - protein, 186 aa, Artificial Sequence; identical to SEQ ID NO: 3324
  Synthetic

SEQ ID NO: 3326 - protein, 185 aa, Artificial Sequence
  Synthetic
SEVEEMEERLRKLDEDSRRLSEDVKRRLDKINKEIKDLLDDVRRKLKEMLDKLTKDLRDLKGKEEDVERVVREIEEDVKRVLKEVKRLVEESRRLSEKVLRDSERSVRESRELAKEALKRVKEKRAEDKVRDVLRDNERTLKKDEDDNKRVLDEDEKRLREWEERARRVLEEVRRRLKELVEEVR

SEQ ID NO: 3327 - protein, 185 aa, Artificial Sequence; identical to SEQ ID NO: 3326
  Synthetic

SEQ ID NO: 3328 - protein, 185 aa, Artificial Sequence
  Synthetic
REVDKAREDLRRVDDELRKILERVRRELEKLDKESEERSRRLARDLDRLLEELERDLKDNKGKRERVDRVVREIKEKVRRVLETSKKLVEKSRKLAEDVLREVEELVRRSKTLAEDVLRKVKEREVERKVREVLKDNERTLRELRDTIRKVLEDNDKTLREDVRRNEEVLRRVDETLRELKKRVE

SEQ ID NO: 3329 - protein, 185 aa, Artificial Sequence; identical to SEQ ID NO: 3328
  Synthetic

SEQ ID NO: 3330 - protein, 185 aa, Artificial Sequence
  Synthetic
SEVDKVKEDLDEVDKDSRRISREMEERLKELDKRSREISDRVVRELEKILKEIEDLLRDLKGRSEDVREMVRRLRELVKRVLKESKELVDRSRKLSDDALKESKRVADESRKLVEDALRKIDRKEARDKIRRVLEDNERTLREDIEDNRKVLEDNDKRLKDDERKNREVLKRVDETLKELDERVK

SEQ ID NO: 3331 - protein, 185 aa, Artificial Sequence; identical to SEQ ID NO: 3330
  Synthetic

SEQ ID NO: 3332 - protein, 186 aa, Artificial Sequence
  Synthetic
DELRELEERLRRSVEEIKRDLKRIHDENREAVERSERKSKKILEELKREVEDVKRELREKLKDDKEKVERVTRLLETVIKELRELVERNREELEESDREVDKLIKEVEKVLEDAERDLEDLVRRSRDEKLVREIERRVRKMEEDVRELVKTIEKRSRDVIKKSEDILKRIKERVEELEKRVRDAVR

SEQ ID NO: 3333 - protein, 186 aa, Artificial Sequence; identical to SEQ ID NO: 3332
  Synthetic

SEQ ID NO: 3334 - protein, 186 aa, Artificial Sequence
  Synthetic
DELRELLETLRDEVRKDDKRNEDIHRENRKRVEESRRRSEKILRDLREVVKRLEDELRKKLKDDKDKVRKVKRLLDEVIKTVEEIIRRNEKVLRDSDKTVREAIRRTHELNRRIIEDLEELVRKTRSEELLKRIEKRVRDMIRRSRTLSARLEDLSRELDERSKRVVEDLKRRIDEAIKELEKEVE

SEQ ID NO: 3335 - protein, 186 aa, Artificial Sequence; identical to SEQ ID NO: 3334
  Synthetic

SEQ ID NO: 3336 - protein, 180 aa, Artificial Sequence
  Synthetic
DETEEVAKKIKELIERSRELVKKVKEKIDRLNEEIEKLVREVEKTIKELTDRIEELRKRGVDAKDIERLLKEIEERVRKMLEDVKRILERSIRESEKALERNEEVLKRIKEEVEEALKRVDREEMKKLLDDLRKAVDESRRRSEEILKENRKRVEKWREDLRRLLEKVKEDLDRIRERLR

SEQ ID NO: 3337 - protein, 180 aa, Artificial Sequence; identical to SEQ ID NO: 3336
  Synthetic

SEQ ID NO: 3338 - protein, 180 aa, Artificial Sequence
  Synthetic
SEVEEAKKTLDELNRDIAKKVEDVEREIKRMIEESERLTREVEERIRRLTKKIEDLRRGGVDRKDIKELLERILKDVDKALKDSHKSNREIIRRVEEALKTIEELLKRSDELVKRVLDRVDEERVKKILEENKRDAERWKRRLKKLLDDVRRLVKEDDDRNEELLREVTERVRRIEEKLD

SEQ ID NO: 3339 - protein, 180 aa, Artificial Sequence; identical to SEQ ID NO: 3338
  Synthetic

SEQ ID NO: 3340 - protein, 180 aa, Artificial Sequence
  Synthetic
SEVEKVKEELKKLNKEIADSSDEVDKDIERLIRESRKLTEDVRREIKRLIERIDELRRAGVDEKELDRLLKEIIKRVEDALRKSHESNRRIIKRVEEALKRDKELLERSDERVAEALKRVDDEEAKRILDENKKLVREWEEKSRAVLEKVKKLVKRDDDENKKLLDDVKKLVDEMRERAR

SEQ ID NO: 3341 - protein, 180 aa, Artificial Sequence; identical to SEQ ID NO: 3340
  Synthetic

SEQ ID NO: 3342 - protein, 180 aa, Artificial Sequence
  Synthetic
DLEREIRKIIEEAKKELERVNDEIRRIIEEMRRRSEESNKRIREIIERARRRLEELIRRGVPKEDVERVLEEAIRRVEELLKESRRILEEVIKRVDKLLKDSERILKRVEDLVRELLRRVDTEEVKKLLTDLKRLVDEIRKHNKRLLDELRKEVEKSERENRRLLEEVRRTVDEMRERAR

SEQ ID NO: 3343 - protein, 180 aa, Artificial Sequence; identical to SEQ ID NO: 3342
  Synthetic

SEQ ID NO: 3344 - protein, 180 aa, Artificial Sequence
  Synthetic
SAEDKARKIAEDAKKEAEDSNRDAHRIAEEAKRRARKINEEARELIERAKKELTRLRREGADKRAVKKAAEEAIEIAERALRESDKAARDAIRLAEEALRRSKRIAEEARKLARDALEKVKAEEAKKLLDELRKAAEDIRRNNEEALKDLRRAAEEIRRHNEELLRRAREAAKKARDDAE

SEQ ID NO: 3345 - protein, 180 aa, Artificial Sequence; identical to SEQ ID NO: 3344
  Synthetic

SEQ ID NO: 3346 - protein, 185 aa, Artificial Sequence
  Synthetic
SAEEAVKRVEELVRRVKERNKRLVEDVEREVRRVKKRSEETNRRVKKLVERVKEDLDKRVSDEEKVKRIEDLLREILDTVRRLDEDSKRLLDEILERARRLIKKSDELLDRILKRARDMVKDLKDDKDKLEEVLREVRDRLADVERKSERVVEEVERLLREVVRKNEDVLRRIEELLRDVEEKAR

SEQ ID NO: 3347 - protein, 185 aa, Artificial Sequence; identical to SEQ ID NO: 3346
  Synthetic

SEQ ID NO: 3348 - protein, 185 aa, Artificial Sequence
  Synthetic
SVEELVREVEKRARKVKRDSDKTNKDSTKLVKEVKDRSRRTNEEVKKEVERVKEDLEKRVSDKEKVDRLKKELEDILRRVTKLDEESTRELKKINEEVTRMDEKSKKELDRILEELRRMAEKLKDDEDKLKEVVDRIRKLLEDVKRENEDVKRRSRELAERVREENDKVSKEIRELLEEVERRAK

SEQ ID NO: 3349 - protein, 185 aa, Artificial Sequence; identical to SEQ ID NO: 3348
  Synthetic

SEQ ID NO: 3350 - protein, 185 aa, Artificial Sequence
  Synthetic
SAEEMREEVKRLVDKNRKDNREVEKKSTRLAEDVKRKSEETNRKIREEVERVKKDLEERVSDEEKVRKLKDDLRKILETVDRMDETSVRELEKINRDLRKLVAENDELTDRVLKEAEKLVKDLREKEEKLKEVLDEVRRLIKEINDHSREVSKTSEKLLRDVLKKNEDVLREIERLLEEVRRRIK

SEQ ID NO: 3351 - protein, 185 aa, Artificial Sequence; identical to SEQ ID NO: 3350
  Synthetic

SEQ ID NO: 3352 - protein, 178 aa, Artificial Sequence
  Synthetic
REVEEITKEIREMNEESKRLLEEVREKIERLSRESNRLLEDSKREIDEAIRRVEELLDKEDKKDVVEKLKEVVKRAHERNEKIVKDDRDVVREVKRLLEEIVRRDRELAERVIRRLKRDGDDKDIITEIERTNDETEERVRDIERRIKESSDRNDKRAKEISERIKRLLEEVDKKVKE

SEQ ID NO: 3353 - protein, 178 aa, Artificial Sequence; identical to SEQ ID NO: 3352
  Synthetic

SEQ ID NO: 3354 - protein, 184 aa, Artificial Sequence
  Synthetic
DLEELVKEVERRVRRNKTETDRLVEEVERSVRENRRRIEELVRRVEKEVRRIKEDLKRKLSDEDKVRRILEELDRVLREARERLKRVEDKNREVLERVRELAKESVRRTEDALRRAKELIDNIRDKDVLEKVAREIKRLIEESNRLDKEVEDEVREMSKDVNRELERIAEEIEKVLRDVERKLR

SEQ ID NO: 3355 - protein, 184 aa, Artificial Sequence; identical to SEQ ID NO: 3354
  Synthetic

SEQ ID NO: 3356 - protein, 173 aa, Artificial Sequence
  Synthetic
SLEELLKEVKKLVEDVHRKNKKNVEDVRRLVERLRKENEENVEEVRREVKKVKEEIGDKDVLDKLEKALKEVERLNEESTRRLEKVLREIEELNRKSSEDLKRVVDEVRKLINNNAPLEEVRRRVEELVTDVDRSSKENHRRIRKVVREVERTTEENHRRIRDIVRRVREEAK

SEQ ID NO: 3357 - protein, 173 aa, Artificial Sequence; identical to SEQ ID NO: 3356
  Synthetic

SEQ ID NO: 3358 - protein, 176 aa, Artificial Sequence
  Synthetic
SEIEKAVRELEELVKDNERKSKKSVEDSERIVKEIRDRVRRVVERVRKVVEDIARAGVPEEVIKEIKRIVEEAEKLLRDVIRRIETVVDENRRLLERSNRKIRKVVREAKELLDRLRDDELRKVVERARDLIRKIREESKRSHDRITKLAEDIKRELEKIERRLEKLAEELERKAR

SEQ ID NO: 3359 - protein, 176 aa, Artificial Sequence; identical to SEQ ID NO: 3358
  Synthetic

SEQ ID NO: 3360 - protein, 176 aa, Artificial Sequence
  Synthetic
SEVDELRKEVEEMVKRNKDETDKSVKESKEIVDEIRKRIKEVVDEVRRFVEDIRREGVDEKVIREIDKVVEEAKKKLDDVLEDIKRVVDENRKRLDDSNKEIRDVVKKADDLLKKLRSRALEDVARRLRELLKRINDKTRESHKEIKRLADEIRKKLEDIVRELEKLLREIKERAR

SEQ ID NO: 3361 - protein, 176 aa, Artificial Sequence; identical to SEQ ID NO: 3360
  Synthetic

SEQ ID NO: 3362 - protein, 176 aa, Artificial Sequence
  Synthetic
SEVDEVRERLERVVRRIEREVEKSERDSERIVEKNKRDTDRVDREIEKVVKKIRDRGVDERVVREVERVVEELRELLERSNEELRRVVKENKDLLREVIERVRKVVREIDDLLRKLRSRALEEIEKRARELLKRITELLRESHERIKRLAEEINKKTEKVVRDIRKLLKEIEDKVT

SEQ ID NO: 3363 - protein, 176 aa, Artificial Sequence; identical to SEQ ID NO: 3362
  Synthetic

SEQ ID NO: 3364 - protein, 176 aa, Artificial Sequence
  Synthetic
SEIERLREELERVVRAIERTVTESVRESKEMVDRNKRATEKSVRDSEDMVREIEERGVPKEVIEKIRRVVKENKELLEESNRKLEDVVRKNEELLREVERAVRDVVRRIEKLLRDLRSRELERVAKEARDLLREIKKLLDESTETIRRLVKEINDETERSHRKITELAKRLKEEAK

SEQ ID NO: 3365 - protein, 176 aa, Artificial Sequence; identical to SEQ ID NO: 3364
  Synthetic

SEQ ID NO: 3366 - protein, 176 aa, Artificial Sequence
  Synthetic
DEVRELVEEVERVVKRNKDESKKSEEESREIVREIEKRVEDLVRTVEEVVKEIERKGVPEEVIKKIREIVKRVKKLLDDVRRKIEKVVRENKELLERSNREIERVVDRARELLKKLRSRELEKVADTLRKLLKEINEKLERSVRRIRELAKEIKDELRRIEEELRKLAKELDDEAK

SEQ ID NO: 3367 - protein, 176 aa, Artificial Sequence; identical to SEQ ID NO: 3366
  Synthetic

SEQ ID NO: 3368 - protein, 174 aa, Artificial Sequence
  Synthetic
DRTREVMERIERLLEDSRRKTDKVRREIRKLLEDVHDKTRRVAKEIRDLLDEIRRLLESGVDSKEVERRVREVFDRLRRLVEESERLLEEILRRLEDMARRSKETSERIVRELEREGIEEEVVKKARKKVRENAEEAEEVRRRIRRSVEENRKELRRLEKELKDVLDEIRERVR

SEQ ID NO: 3369 - protein, 174 aa, Artificial Sequence; identical to SEQ ID NO: 3368
  Synthetic

SEQ ID NO: 3370 - protein, 174 aa, Artificial Sequence
  Synthetic
RELEEVRKDIERLLKEVEDTNRRAKERVKRLLEEVHDDTRRAVERIRKLLDEIRKLLEGGVDDRDVRKLLEDVLRELERLVRRSVEELERVLKELEDLNRTSIRLLEKIVDDLRRAGIDEEVVKEIEKMLEKIARHARKSDKEAKESVEDNRRRLEKVRKEVEDMLDEIRERAR

SEQ ID NO: 3371 - protein, 174 aa, Artificial Sequence; identical to SEQ ID NO: 3370
  Synthetic

SEQ ID NO: 3372 - protein, 174 aa, Artificial Sequence
  Synthetic
DREKEVADRIRKLLEEIREESERVAKEIRELIKEVHKRTKEVAEEIRRLLKEVEELLRNGVDSEEVRRLLKEIVDRLRELVKESEKELDRILDRLKKLVEKSKRESEKVVKELRDAGIDEEVVKEIERRLRENERKLRELEKEIKKLVEDNRTRLRELEDEIRRVLKKITDEVT

SEQ ID NO: 3373 - protein, 174 aa, Artificial Sequence; identical to SEQ ID NO: 3372
  Synthetic

SEQ ID NO: 3374 - protein, 180 aa, Artificial Sequence
  Synthetic
SELEKAVEDSRRLDRRVEETLRDVTRRVRETNKEVEDMLEEVRERAERLLREIEEKLTDEAVERVLKKIIDDIERLLREIKKLLEDSNRELRRVVKEIRKLLEESLKRSRDAVEEVRRKGLEDELRKVIDENRKSVETIEEELRRVEKEDEDTLREIEEKLRKAIEELEKKLKEILDRLR

SEQ ID NO: 3375 - protein, 180 aa, Artificial Sequence; identical to SEQ ID NO: 3374
  Synthetic

SEQ ID NO: 3376 - protein, 173 aa, Artificial Sequence
  Synthetic
REREELVERVRELLKEVEDRDREMVERSERLNERIRERDKEVEDRSRKLDEDIERLLRAGARDDEVRRLLEESLRTTEKAVEDTERLLRESLERSKEVVKETKRLLDEIAEEIKRIGGEEVLKEVKDAVDTLKKHSEDVIRKDEESVRDLRRHSEDVLRKNKEMVDDIKAKAE

SEQ ID NO: 3377 - protein, 173 aa, Artificial Sequence; identical to SEQ ID NO: 3376
  Synthetic

SEQ ID NO: 3378 - protein, 181 aa, Artificial Sequence
  Synthetic
DEEDKLREVLKDVERRVREMLRENNELIREVAETSERLLRENNELIERVRKEVTRLLKELEKVSDKRLVKEVVDRVRKLVDELKKHADKLVEESTRLVEELKKHADDLVRRVRELVERVERKIKDIREIVETIRKILREIEEHAERNKTRLEEENKKVREHVERNKKDLEETLKEVEDRAR

SEQ ID NO: 3379 - protein, 181 aa, Artificial Sequence; identical to SEQ ID NO: 3378
  Synthetic

SEQ ID NO: 3380 - protein, 181 aa, Artificial Sequence
  Synthetic
SKEDKLREELKEVEKTVRELLKRNNELIERVREEVERRLEENNRLIKEVKDRIDDLLRKLKDDSDERSVRRVRETVTRLVEELKRHADRLVEEVRRLVEELKKHADEVLERVKRLVDDVTRKAKDIREIVKTIKEILDEIRRHLERNKDRLEKELTRVRETAEKNKRDLEKVLEDVDRKAK

SEQ ID NO: 3381 - protein, 181 aa, Artificial Sequence; identical to SEQ ID NO: 3380
  Synthetic

SEQ ID NO: 3382 - protein, 182 aa, Artificial Sequence
  Synthetic
DEAEKLEREVRKELEENREELERSTEESERLLKHNEDELRKSEEESKKLLREVEKELRRVPKEKLDKVERDARDILRKNKEMVDRVRKTVEDILRDNRRVVDESRRLSKEIERRVREVSESSDKRVLDEVVKEIRRLIEEVKRTTKEMNKKIRKLFEESNRKLEEAHRDIRRKAERVKRELK

SEQ ID NO: 3383 - protein, 182 aa, Artificial Sequence; identical to SEQ ID NO: 3382
  Synthetic

SEQ ID NO: 3384 - protein, 182 aa, Artificial Sequence
  Synthetic
KELDEIREEVDRVLRENERRLRTVKKEARDVLEHNRKRLEELRRKIEEVLKEIEEELKRVPEKKADEVRKRIRDILEDLRRVLREVAETAKRILDELDKVVRESEKLSRKIKDDVTKILKSKDEEVLRRVLERIRRLIERVKERTKRMTDDMRRLIEESNDKLRRAEERIRKLLEEVKRTLK

SEQ ID NO: 3385 - protein, 182 aa, Artificial Sequence; identical to SEQ ID NO: 3384
  Synthetic

SEQ ID NO: 3386 - protein, 182 aa, Artificial Sequence
  Synthetic
KKVEDIKREAEKVIKESEESIRRNERELDEVIKESERSIRRNERELERVLKELRDSVARLRGEELERAKRVVDELEEFVKESKELLKRSLDELDKAVKDSKRLLEESLKRLEKVVREIEEKLRERPDDRIREELKKVADEIRETNKRIHEESKRVVDEVRRTNEEIHKRSAKVVKDIKDKIK

SEQ ID NO: 3387 - protein, 182 aa, Artificial Sequence; identical to SEQ ID NO: 3386
  Synthetic

SEQ ID NO: 3388 - protein, 182 aa, Artificial Sequence
  Synthetic
EEVERITEDAKRVIDESRKTIKRNEDDLRRVIEESRETVERNRKRLEEVLRELEERVRRLRGEELERARRVVEELRKMVETSVRLLRRSLEELKKLVKESVELLKRSLDELRKLVEEVRERLRERPDKRIEEELKRVAEEVKKINEDIHRRSKEEVDRVREINEKIHRDSERVAEEVRRRIK

SEQ ID NO: 3389 - protein, 182 aa, Artificial Sequence; identical to SEQ ID NO: 3388
  Synthetic

SEQ ID NO: 3390 - protein, 177 aa, Artificial Sequence
  Synthetic
EELERLKEEVEEIVRRLKRELERIEEEIAKMVRDSEKSLEEDEREVRKVVEELRRRGNGGEIEKLVEELRRLSREAVRRSEKLLEEIRRLVEKVVREVERVVDELRRRVEEVVRKIETEEILRRVKEEVEKVARDIKAIIEKVAREVKEVLDRIREVNKRAHEETRKVADEIEKRAK

SEQ ID NO: 3391 - protein, 177 aa, Artificial Sequence; identical to SEQ ID NO: 3390
  Synthetic

SEQ ID NO: 3392 - protein, 179 aa, Artificial Sequence
  Synthetic
DEVERIAKELTDVLDRIRKAVETDKEEIKRVLKEIEEAVRTNEEKLKDALRKIREGPVDEKIVRTAERLAEELVRNSRKILTDISDLARKLAENSERILRKIEKLIRDLVKELEDLRKESERALERVEEKARELVRRVDELLRRSHERTKELAERVRRLLKKSDEETERLARDVERKIK

SEQ ID NO: 3393 - protein, 179 aa, Artificial Sequence; identical to SEQ ID NO: 3392
  Synthetic

SEQ ID NO: 3394 - protein, 179 aa, Artificial Sequence
  Synthetic
SEVERITERLKEVLKEIKELVETNSEKLKRVLEEIKKAVEDNTRTIKKVLEEITRAPVDKDIVKDIREELERLVEESRRILEEVERLIRELMKNTERILEEAERLAERLVRKLEALRDGSEEMLKRVEDEARRLTERVRKLIEDSDRETEKLVRRVRELVKRSHEKVKELVDRVRKRIE

SEQ ID NO: 3395 - protein, 179 aa, Artificial Sequence; identical to SEQ ID NO: 3394
  Synthetic

SEQ ID NO: 3396 - protein, 179 aa, Artificial Sequence
  Synthetic
SEVERIAEEVKRVLEKIRRDVEENRKRIEEALKRIEKELRDNERRLREVLDEIRKRPVDEEIVKEVKKRAEDLVRNSERIVREVERLARELLKKTEDILRKIKRLAERVLKKLEELRDSSEDALRAVEEEIRKLEDEVRRLIETSHKEVEDLAKEVTDLLRESNERTEDLRREVDAKRR

SEQ ID NO: 3397 - protein, 179 aa, Artificial Sequence; identical to SEQ ID NO: 3396
  Synthetic

SEQ ID NO: 3398 - protein, 184 aa, Artificial Sequence
  Synthetic
SDEERLLRTITRVLEENKKSVDDDLKKNEDVLDENRRRVERWEEALRELLKRVEDKVKDLKKDGRDEELKRVIELVRRALDRVRDELKKSLDESKELVDESRRTLDESRRLVEEVLREVKELLREGVDTDEIRRVLEKVKEELDRTDEKSRDLSRKVRDRIRESNREIEKLLEEVRERLERETK

SEQ ID NO: 3399 - protein, 184 aa, Artificial Sequence; identical to SEQ ID NO: 3398
  Synthetic

SEQ ID NO: 3400 - protein, 184 aa, Artificial Sequence
  Synthetic
READELRTRAEKALRDNRESVERLKRELDRVLKENERTVRELKERVKEVLKDVDKKVKDLKKEGRDEDLRRLKDRVRRVLRRVEELLERSRRESERMVREVRRLLEESKRLVEEVLREVEELLRRGKPREEIRKVLEDVRREVEETDDRIRKVLERARRESEKVDRELKKELERVRKELEEETK

SEQ ID NO: 3401 - protein, 184 aa, Artificial Sequence; identical to SEQ ID NO: 3400
  Synthetic

SEQ ID NO: 3402 - protein, 175 aa, Artificial Sequence
  Synthetic
DRERRVLEELRKLSEDSKRLLERIRERMRRLAEETKRRARDILREVEELSRRVKELLDGGKDAREVLEDNKRVVDEVREKLKRLLEENKRIVDEVEKLLREVIRDNERVVEKVARDVREIEEVKDDVRRSSEEVKEEVERLIREAKKSTDEVRELLKELEKRLRESIEESKRKAE

SEQ ID NO: 3403 - protein, 175 aa, Artificial Sequence; identical to SEQ ID NO: 3402
  Synthetic

SEQ ID NO: 3404 - protein, 178 aa, Artificial Sequence
  Synthetic
EEVKRMEDRLEEVAKRADEESKKVMDELEKIVRDVLRESKRLTEELRRIADRVRKELRTDEVVRRVVKELDDVSKRNEEVVTKVLEELDRIVEKVEEINRRVLDELRRIVDEIRRRVTDKKELDRIEKRVREIKKRSEDSVRTIRERVRDAKRKLERSVEEDKREVKEIKERLEREAR

SEQ ID NO: 3405 - protein, 178 aa, Artificial Sequence; identical to SEQ ID NO: 3404
  Synthetic

SEQ ID NO: 3406 - protein, 178 aa, Artificial Sequence
  Synthetic
SEVDDLKRKLDEVVRRAKEESKEISERLEEIVRDAERLLKELHEEDERIVDRARKEIRTREMVEEFVRRSEDVARKTTEIVKKVVEELRRVSETNERVVERVLRELDEIVRKIEEDVTDRDKLEKIRDAVRKVKEELERSLEKDRKRVTEIEEKLKKLVEENRRTSKRVKEELEEKVR

SEQ ID NO: 3407 - protein, 178 aa, Artificial Sequence; identical to SEQ ID NO: 3406
  Synthetic

SEQ ID NO: 3408 - protein, 179 aa, Artificial Sequence
  Synthetic
RELEEIKKRVEDIMRRIEDLLRENEKKIDKVRKDIRKSLEENKRKVEEVRKDLKRLLDEREDDRLRELIKDAERLLKEVLDHSRKSVRDVEDLLEKLLRHSKELVERAKKALTDVLRKVEERPEEEVKKEIERLAKKLEEELERSNRESDRLVREARKHNEESDRRSEELARRVRERLR

SEQ ID NO: 3409 - protein, 179 aa, Artificial Sequence; identical to SEQ ID NO: 3408
  Synthetic

SEQ ID NO: 3410 - protein, 179 aa, Artificial Sequence
  Synthetic
KREEDVKRDLKRVADESRKSDEDIKRRLDRLVKEIRELHKKTTDELKKVADEVRDRLRKVKDDKDVLRKILDDLRKMLEEVKRTDDRIVERLEKLVREVERLAEESLKRSKDKLREVIKRVKDIDELREDVKRVEDENRTSLREIKRAIEKVLDESRKLVEENRRRAEKIIKEVEDTLR

SEQ ID NO: 3411 - protein, 179 aa, Artificial Sequence; identical to SEQ ID NO: 3410
  Synthetic

SEQ ID NO: 3412 - protein, 179 aa, Artificial Sequence
  Synthetic
REEEEVTEELKRLADKSRKSDEDIERTDRRVTEEIERLHEETTRELEKVRRDVDRELKKVKDDKRVLEDILRKLDELLKRIKKKDEDILKELRELLEKSIRDLERSLEESRRALEDVVRKVKDIDELKKEVRKILEENKRSLERIRRHSTRVEEKSRKLIKENDDRLKKVIEDVRRKLK

SEQ ID NO: 3413 - protein, 179 aa, Artificial Sequence; identical to SEQ ID NO: 3412
  Synthetic

SEQ ID NO: 3414 - protein, 179 aa, Artificial Sequence
  Synthetic
SEKDKVTKELEDVARESRESDKEIKRELDEVVEESERLLREIRRRLEKVAEEVRRALEKVKDDKRVLKEILDRLREVVEEVKRLAEEVVKRNREVTRRIKELVRKSLEDSERVAREVIKKVREIEELKRRVEEIIRENEESVRRIAKRADDSNREIERLVDEIRRRAEEAIRRVTEKVR

SEQ ID NO: 3415 - protein, 179 aa, Artificial Sequence; identical to SEQ ID NO: 3414
  Synthetic

SEQ ID NO: 3416 - protein, 179 aa, Artificial Sequence
  Synthetic
KEEDDVRRKLEKVVREIDKLHKESTERDRKVREDSEETDRRIKEELKKVVKEVRDRLREVKDDKEKLRKILDDLRKMITDAKRLAEDSLRRSRELLKRSVETDERITDRLRKLLKEVIDEVDKIEELKDEVRKATEKSEDLVRRNEEHSRRVIEENERTLKDIADEAERVIKEVEDRLR

SEQ ID NO: 3417 - protein, 179 aa, Artificial Sequence; identical to SEQ ID NO: 3416
  Synthetic

SEQ ID NO: 3418 - protein, 179 aa, Artificial Sequence
  Synthetic
REDEEVTKELEEVIREIEELHERSTRKLKEVVDRSRELLDRVRRRLKEVVDRIRELLERVKDDKDVLREILEELRRVVKEVKDLLREILERNTRVTEDVVRTDEEITKRLRDMAREVIKKVREIEELRKRVEEAIRKSEELVKENTERAKKSNEELERRVRELEERAKRAIEEVKEKIR

SEQ ID NO: 3419 - protein, 179 aa, Artificial Sequence; identical to SEQ ID NO: 3418
  Synthetic

SEQ ID NO: 3420 - protein, 179 aa, Artificial Sequence
  Synthetic
SREEDVDRKLDEVIERSRRIDEEILRRDKEVVDEIRKLHKESTDRLKEVVDRVDKELKEVKDDKEKLREILKELREMVRRVEKTDDDISKELEDLLRESVRLAEESLKESEELIRKVIEEVKDIEELKKKVTEAIEENRESVEEIRRHSEEVKKESEKRVKENRDRARRAEERVEEMLR

SEQ ID NO: 3421 - protein, 179 aa, Artificial Sequence; identical to SEQ ID NO: 3420
  Synthetic

SEQ ID NO: 3422 - protein, 178 aa, Artificial Sequence
  Synthetic
DREREVKKRLDEVRERIERLLRRVEEESRRVAEEIRRLIEEVRRRNKKVTEEIRELLKRLKDKEEVRRVLERLRKLNKESDELLERILERLRRLVEKTNRLVKKIIEELRRLVEKIVREVPDVKELREELKKLERKIEKVAKEIHDHDKEVTERLEDLLRRITEHARKSDREIEETAR

SEQ ID NO: 3423 - protein, 178 aa, Artificial Sequence; identical to SEQ ID NO: 3422
  Synthetic

SEQ ID NO: 3424 - protein, 178 aa, Artificial Sequence
  Synthetic
DEEEKITRDLEKVEDEIRRLLEEVRRLSKKVKEEITKLLEDVNRESEKAVRKVRETLKRLETKEEVERVLRELEKLMRESDKLLKDIVERLRRLLEETNRLLKEIVDRLRKLLKELVERLDKVERLRKRVTDVIRKLEEVLKDIHRHDKEAIEEAERRLEDNHRRNRRVLEELKRRAD

SEQ ID NO: 3425 - protein, 178 aa, Artificial Sequence; identical to SEQ ID NO: 3424
  Synthetic

SEQ ID NO: 3426 - protein, 179 aa, Artificial Sequence
  Synthetic
SEEETVEELVRRAEEKSRRILEDSKKKVRDIERENDEILKRSRDRVKKAEDDLRRVVEKRDEEEVRKILEDLKRLLEKVIKTDEDIVKTSRDLLREVIKKDEEIVEKLKRLLRDMLEKAKDRGDERILRELERVVEEIDREHERTKEELKKVADESRKAHRESERDLERVIREVRERLR

SEQ ID NO: 3427 - protein, 179 aa, Artificial Sequence; identical to SEQ ID NO: 3426
  Synthetic

SEQ ID NO: 3428 - protein, 179 aa, Artificial Sequence
  Synthetic
SEVERVRKTVEEIKEKNERILKTSKDEVRRILEESERMLEESKKRVDEVREEAADVVRKRDEERVRRILRELEDLLRRVIEEDKRIVERLRRLLKRVIDTDRRILEESRKVLEDVIREAEERPDDRILEKLEEAAKRSDELHKRSRDDLRRVAEEIKKLHEETRRKLKKVVDEIRKKLK

SEQ ID NO: 3429 - protein, 179 aa, Artificial Sequence; identical to SEQ ID NO: 3428
  Synthetic

SEQ ID NO: 3430 - protein, 188 aa, Artificial Sequence
  Synthetic
STLEEVRERVDRVKKKLKKLLEEVTEINERSKKEIDEILKESEDRVRKVKEDLKRVVKEDKDGDRVRKIIEEAKKKLDEVLENSERIAREVKKDNDDSNREVKRVIEDIERKLDEIVKKIEDLERKGMDEEVLERVLRELEELTRRVEKEIRDLLKRIEDSSRRVRELATESRKKLEDLVREIKERLT

SEQ ID NO: 3431 - protein, 188 aa, Artificial Sequence; identical to SEQ ID NO: 3430
  Synthetic

SEQ ID NO: 3432 - protein, 183 aa, Artificial Sequence
  Synthetic
SSEEKVREEVERVREEITRLLRENEDTVRRVDEKAEKALRENKERVDRLREEVRKLLEKDKDKRLEEVLKRVEELLKRSIDKSREVLDRLRKMLEKSLKLSKDILKELEKLLRDIERRVRALTEDDFVRKVTEELKKVTDRIRKLLEESRKHTERVRREAEKLLKEIKDETKKVEEEVRRRAK

SEQ ID NO: 3433 - protein, 183 aa, Artificial Sequence; identical to SEQ ID NO: 3432
  Synthetic

SEQ ID NO: 3434 - protein, 181 aa, Artificial Sequence
  Synthetic
SSREKIKDDLRKAVEENRRLLREVRELLREMLERDERILREIERRLDEARKRLEEVARNNVPEKVVKRLVERVVEEVKRLLETSKKTVKEVVEEIKRLLEEIEKSSRDVVEEIRRLLEETGEGRAVEELKKELRRLEEESRRAVEDLKRLLDELKERTDRVVKKLDETLRKLKEDVDRKAK

SEQ ID NO: 3435 - protein, 181 aa, Artificial Sequence; identical to SEQ ID NO: 3434
  Synthetic

SEQ ID NO: 3436 - protein, 182 aa, Artificial Sequence
  Synthetic
REIDELRKELDEIRKRIEKVIEELKRHLDEVDKRAEDLAKELDDLTKTIERDAERRIREDKKSKEVVERVKRLLDKSNTDSDRVVKTVKRLLDENNKTSDKVVKDVKKLLDEVLKKVRDGPVDDKVIREVEERVKRIKEDVDRVLEDNSREVERVKRKVDKMLKRNKDEADRIRKKMDDDLR

SEQ ID NO: 3437 - protein, 182 aa, Artificial Sequence; identical to SEQ ID NO: 3436
  Synthetic

SEQ ID NO: 3438 - protein, 182 aa, Artificial Sequence
  Synthetic
SVIERLKEELKKIEEDARDMAKKLNKETEDILRRARKLARELEKHLEDVKRKIDELIKEDKKSEEVVKEVKKELDRNNEESKRVVEEVRRRLDESNKKSREVAEDVKRLLDEILEKVRRGPVDKKMIEEVERDVRRIKKEVDRLLEENTERIEEIKKEVDELLKRNTDEVEKVKKKVDEDRK

SEQ ID NO: 3439 - protein, 182 aa, Artificial Sequence; identical to SEQ ID NO: 3438
  Synthetic

SEQ ID NO: 3440 - protein, 179 aa, Artificial Sequence
  Synthetic
KIEEDLERSLKKSEDELKELRDRLRKSNKEVTDDAERIKKEVEDSNREVEKRVRDLERRGVDKDELRRVLEELSKIVEEIKELIERLLEELTKIVEDLERELKELLKESRRIVEELRRLRSEEARKVLEENEEVVRRIVKKVEDILDDHRRVVKEVRDRIERLLKEHKKIVEDADKDLT

SEQ ID NO: 3441 - protein, 179 aa, Artificial Sequence; identical to SEQ ID NO: 3440
  Synthetic

SEQ ID NO: 3442 - protein, 173 aa, Artificial Sequence
  Synthetic
REEEEVAKKLERAAEESRRLHEESKRDHERATDEIRRKAEATLRELKRVIDEIERLADERDKEDVRRRAEELLRRVKKASEDIVKELRDLVERSLRRDKEIVDRSKKVLDEVIREVDVEEIRRRVETLERENRKAEEESRDKVRKSERRLEELNKRHEDLVRELEERLERKRK

SEQ ID NO: 3443 - protein, 173 aa, Artificial Sequence; identical to SEQ ID NO: 3442
  Synthetic

SEQ ID NO: 3444 - protein, 173 aa, Artificial Sequence
  Synthetic
DEEEKVLRELEEVIRTSRRLHKRSLEELDRVLEESKALHRESKRALEDVTREITKLADDRDKKDVVRRLKELLERILRTDEKIVRDSEEALKRIEEEDKKIVRRSEEVLKRVIDKVDVERIRKLVDDLRKENEKALRESKKRVEEIRRRNEEAIKDSKKDVEDLERDLERKRK

SEQ ID NO: 3445 - protein, 173 aa, Artificial Sequence; identical to SEQ ID NO: 3444
  Synthetic

SEQ ID NO: 3446 - protein, 173 aa, Artificial Sequence
  Synthetic
SDEERVLEELKKVIKESRDLHKESLDDLRRVIEKSRRLHEESLERLRRAIEEIERLMDERDKKDVVREAEKILREVRKEDEDIVRDSERVLERVKRTDREIVKRSKEVLKRAIDKVDVEEIRDLVRTLEEDNKRMEERSRRTVRKLEKENDDARKESERLVEELERRLEEKRR

SEQ ID NO: 3447 - protein, 173 aa, Artificial Sequence; identical to SEQ ID NO: 3446
  Synthetic

SEQ ID NO: 3448 - protein, 183 aa, Artificial Sequence
  Synthetic
RDVEEVKKRSDTTLKRIEELIRRVNERSKKSIKEIRDRAKEVEDEVRELARKIEEDARRRKESKELLEELLRRIKKLVDEIVDEIRRLLEKNKRIVEDSKRILEELVEENSRRVEEIKKRNKELDEVVRELEKINDKSRKRVEDAVRSNEKLLEDSERDIRRVIERLKKLLEDLKRKLEEIER

SEQ ID NO: 3449 - protein, 183 aa, Artificial Sequence; identical to SEQ ID NO: 3448
  Synthetic

SEQ ID NO: 3450 - protein, 183 aa, Artificial Sequence
  Synthetic
SDAERVMEESRRTIEKIKKDAKEMNERSRKTVDEIRERLERLLRELERIAEEIRRELEKRREVKDEVRRLLEEVEKLAREIEETVRRLVEKNTDLVRRSLERLDELVKTNHDLVEKIKDRNKELEEFVRELKKLNDKSRKDVEDLKRSNEEINEDSKRKVEEIIRRLEELLKEIRRELEDVER

SEQ ID NO: 3451 - protein, 183 aa, Artificial Sequence; identical to SEQ ID NO: 3450
  Synthetic

SEQ ID NO: 3452 - protein, 184 aa, Artificial Sequence
  Synthetic
SVEEDLKRLVDEIRRRVEKVKRDLERIVDENRKRVEESKEESKKSVEEIERRVREAAKRISDERLIKTLRRIVEEVERVNREVLRKDDELLRESEKVVTEVVKRLDEIVERARKVVEEVAKRIRDEKVADEVRKRLRKMIRDLEEVAREVKRELERLHEETERSSRDAKRRSDKMARDLERTEK

SEQ ID NO: 3453 - protein, 184 aa, Artificial Sequence; identical to SEQ ID NO: 3452
  Synthetic

SEQ ID NO: 3454 - protein, 184 aa, Artificial Sequence
  Synthetic
SSEEKLRELVKRIKRRVEEIIRRLEESVERDRDEVRRSKERLEALVEEIRRRVDDIEKRIDDERLIRTLREIVRRAEEVVRRAVEEDRKISDENEDVVRKVVKRLEKILREIEKVVKEVADRLRSEKAVREVEEELRDMERKLEKVAEEVTRRSKEVTEKLRESSDRVEKELRRIIEELERVAK

SEQ ID NO: 3455 - protein, 184 aa, Artificial Sequence; identical to SEQ ID NO: 3454
  Synthetic

SEQ ID NO: 3456 - protein, 184 aa, Artificial Sequence
  Synthetic
SVREDLKRLVKEIEDEVRKSKKDLDDSVREDKREVRESKEDSKRSVKRSEEEVRKIKKRTDDDELVKRLEDILRENKRVNDEAMKRDDKVSKENEDVVRKVVREDEDVLRTARRVVKEVSERIRDEEVAKRVRELLEEIMRRLRKTSEEARRRSKKITDDLRESSKKVREDSERLRKRLEEEAK

SEQ ID NO: 3457 - protein, 184 aa, Artificial Sequence; identical to SEQ ID NO: 3456
  Synthetic

SEQ ID NO: 3458 - protein, 187 aa, Artificial Sequence
  Synthetic
DAERKITRLLEEIRRESKRSSEEIKKSLKENEDEVRRVVEEIRKRLREIEKEVKEVLDRLRDQREVVDLLRRVLERVREIVRRIEDELRRVLEKSERSVEEIHRRNEEVVKKVEDVVREVRKLAKENSEKLVEEVLREVKRIIEENRTLSERVKEHNEKSHRESEELAKRVKELLKEIERDIRRLEK

SEQ ID NO: 3459 - protein, 187 aa, Artificial Sequence; identical to SEQ ID NO: 3458
  Synthetic

SEQ ID NO: 3460 - protein, 181 aa, Artificial Sequence
  Synthetic
SDAERVLKESKESLEELERRVTEALKRSRDSLRRLKEVADEARRRLEEVLERIARKKDSREELRELLERLRELVEKVVRDVREMLKRDEDLNRRVVEEVREILDRDRKLVKRVMDELDKDKNSEVKERLKRSLEETEKRVREVEERLKKTVEDTRKVVEDIERELERLLREVEEVVRRIEK

SEQ ID NO: 3461 - protein, 181 aa, Artificial Sequence; identical to SEQ ID NO: 3460
  Synthetic

SEQ ID NO: 3462 - protein, 181 aa, Artificial Sequence
  Synthetic
EEAERMLRESEASLRRIEKIVREALEASRRTVEELKKVVERVLREVRKLIEEIEKKKDVREELEKLLREVEERVRRVEEEVKEVLDRDRELVDRVLRRVRELLERDEKLNRDVVRRVDKDNMDEVRERLKKTVEDSKRVVEKAEEDLRRSLEDTERLVREASRRLRDLLRELRRIVEEIKR

SEQ ID NO: 3463 - protein, 181 aa, Artificial Sequence; identical to SEQ ID NO: 3462
  Synthetic

SEQ ID NO: 3464 - protein, 181 aa, Artificial Sequence
  Synthetic
SEDEKALRESKKTTDEIRKRVTEMEKRSREVVKEIRDIIERVLREVRRVLEEIRKKKDSREELDKLLRELEKLVKDVVKEVTELVDRDRELNKEVVKELRRLLEEDERLVEEVVRRIEKDKNSEAKKRLKDSLDRTRKTVEEMTRRLEKTVKETEDLLREARERLEELLRELERVADEKRR

SEQ ID NO: 3465 - protein, 181 aa, Artificial Sequence; identical to SEQ ID NO: 3464
  Synthetic

SEQ ID NO: 3466 - protein, 181 aa, Artificial Sequence
  Synthetic
SEDEKVLRDSRKVLREIEEVVKEVLKRSKKLVEELEDIARRVLKESEDSNKEARDKKDLREELRRLLEEDERLVERVTREVREVLDRDRRLNKEAVERVERLLEEDEKLNRDALRKLSKDNNDEVERRLRKTVRDTKEVVDRAREKLERTVRTTEETVKEIEKRLEESLRRSREDVKEREK

SEQ ID NO: 3467 - protein, 181 aa, Artificial Sequence; identical to SEQ ID NO: 3466
  Synthetic

SEQ ID NO: 3468 - protein, 182 aa, Artificial Sequence
  Synthetic
RVEDALRKLLDDVRRLVEEAERRLRTSNDKSRRLVEEAKRRLEESNERSEKLVRDVRRRIRDEDVKRVLEELLKRDHDVVRRVLERIDEMLERNSRLVKRVLEDIRRLLKRVREVVERIKRVRSKVVEEVLKELEELIKTAKKIIEDVLRASEDTIRRLEEIIRKVEEDSKRIIEEIERAAR

SEQ ID NO: 3469 - protein, 182 aa, Artificial Sequence; identical to SEQ ID NO: 3468
  Synthetic

SEQ ID NO: 3470 - protein, 182 aa, Artificial Sequence
  Synthetic
SAEDKLRKLLDDARRTVKEVEERLKKLNKKLEEDVKRVKRELRESNKKSRELVEKVKREVTDEDVKKKVEDLLKRDHDVVRRVEKELDDMLRRNHKLVRDVLRELRKLLEDVERVVERARRVRSEVVEEVLEELKKLIETVKRRAKEVLDRSEETIREIRKRAEDVLRESERIIEDIERMTR

SEQ ID NO: 3471 - protein, 182 aa, Artificial Sequence; identical to SEQ ID NO: 3470
  Synthetic

SEQ ID NO: 3472 - protein, 183 aa, Artificial Sequence
  Synthetic
KVEKRLTDLLKTVADEVKRVEDELRETVRESKEVVDKSRRDLERTVEESEKTVKDAERRVSEDLVRRIRKVLDENREVNDRVVKEDERILEENERVNRKVVEKIRDILRKIEEVVRRAAEEIRDEEVVKKVEKEIRELLERLKEEADRVRERSKKILTDLKKSSEDVKRESERMLKKLEDEIR

SEQ ID NO: 3473 - protein, 183 aa, Artificial Sequence; identical to SEQ ID NO: 3472
  Synthetic

SEQ ID NO: 3474 - protein, 183 aa, Artificial Sequence
  Synthetic
SVEERLEDLLREVTETLDTSRRRLEKLDREVDKKVKEVEKRLRETLKESEDTVRDVERRVSEELVKLVRDILERNEEVNREAVKRIRDILDEIKKLVEEVVRRDAEIVKEAERVVERVARDIRSEEVARRVEKELEDILRKLRKSSEEAERRIEEMLRRLDKVVKEMLKRSRDLLRTLEETTK

SEQ ID NO: 3475 - protein, 183 aa, Artificial Sequence; identical to SEQ ID NO: 3474
  Synthetic

SEQ ID NO: 3476 - protein, 181 aa, Artificial Sequence
  Synthetic
SIREDVERLAEELDRKSREIATRAKRELDEILRKDKEISDRARKELEEILKKLKEIADRDKDERKIRRVLEEAEDLVRRVVELNKKSLEEARKLVEDVLRLLEESLKESKDLVERAKERITGKEVEKRLDDALKRNAEEVEDVKRKLKDVLREVERTVRESEKDLRRVLEEVERAVREIRR

SEQ ID NO: 3477 - protein, 181 aa, Artificial Sequence; identical to SEQ ID NO: 3476
  Synthetic

SEQ ID NO: 3478 - protein, 182 aa, Artificial Sequence
  Synthetic
SEVDEVLKRSRDVLKRIDEIVKKVLTDSKRVLEDLRRIVKEVLDESKKVLEEIRKIKDSREDVTELVKRLHKRNKDVLDRVRKVVERNHRLNKRALEEVARLVKELHDLNKRALDEVRSDERAEEVERAMRKSSDDLRRKLEEVERRLRKSSEESKKVLKDAEREIRRSSDELRKVLEDIRR

SEQ ID NO: 3479 - protein, 182 aa, Artificial Sequence; identical to SEQ ID NO: 3478
  Synthetic

SEQ ID NO: 3480 - protein, 182 aa, Artificial Sequence
  Synthetic
SEVEDVLTKSRKVLKEIEEIARKVLEESKRVLEEIRRVVEEMERRSEDVLRELRRIKDKREEVREVVKDLHKKNEDVLRRVKKMIEENHRLNETVLREVRRLVKELHELNKDALRRVKDLERADEVRDEVRKSSEELRRVLEEAEERIRRSSKESKELLKRVKERIEELSRRLEKVLREIEK

SEQ ID NO: 3481 - protein, 182 aa, Artificial Sequence; identical to SEQ ID NO: 3480
  Synthetic

SEQ ID NO: 3482 - protein, 184 aa, Artificial Sequence
  Synthetic
DAEDELKKAEDRLRKSDEEAKKSIEDVKRELRRLLEESKKEIEKLIEELRRLLERAKEKPKDETILRRLEEIVRRIEERLRRAVEENAEIVKRIEERADRVVEESEESVRRIVEEIKKAKDRLRTEEVVERVLRKVERLLEENERLVKEVEDELRKLLEDLKRSSKKVRDEVKELAKRLRDEVR

SEQ ID NO: 3483 - protein, 184 aa, Artificial Sequence; identical to SEQ ID NO: 3482
  Synthetic

SEQ ID NO: 3484 - protein, 184 aa, Artificial Sequence
  Synthetic
SAEERIEEVKERLRRSDEEAKRKIDRLVEELRRLLEESKKEAEKVKKELRKLLEEVKRKPKDEKILKKIEEIVREIERTVEDMLRRNAEIVKRIEDRARRVVEESNDSVRRIEKRVDEALREVRTEEVVKRVEDELRRLLEENKKLVDDILDEVRRLLEELEKSSRKVKEDLDRLLEELRREDK

SEQ ID NO: 3485 - protein, 184 aa, Artificial Sequence; identical to SEQ ID NO: 3484
  Synthetic

SEQ ID NO: 3486 - protein, 179 aa, Artificial Sequence
  Synthetic
SAAEEVKKRITDLLRKDEEVVKRASEAVERLLEDDKRVVEDVRREIEEILRTLEKVTREGKDKKAIRTIVRDLERVIRRVLEASARTVKRIEDLIEKLLRESRETVDELRRVLEEAAREGSIDKDDVKRAEDEVRKSHKKVEDDLRRLKEEVERSLKDTEDKARRAKEEVERLLRESER

SEQ ID NO: 3487 - protein, 179 aa, Artificial Sequence; identical to SEQ ID NO: 3486
  Synthetic

SEQ ID NO: 3488 - protein, 179 aa, Artificial Sequence
  Synthetic
DEDDRVRKEVEKMLRDDDRIVKEIEKRLKDLLDRDRKVVREVRELVEELLRRLEKVIKDGAPEEVIREIVERIRKRLKELLEKSAKTVDEIRKLIEELLKKSKKSVDDLVKRLEDVRREGSISEEDVDRLRREVDKSNKDTKKILDEVRKEVEDSLRKTKKIIDDALRRVDELLKEAER

SEQ ID NO: 3489 - protein, 179 aa, Artificial Sequence; identical to SEQ ID NO: 3488
  Synthetic

SEQ ID NO: 3490 - protein, 182 aa, Artificial Sequence
  Synthetic
SVEERVEDIKRSNEESNKRLREEVEKIKEELKEINKRVEDTVREIEKRLEELLRRVRSDKEEKFKDVKKLVEDIVRRLREIVKENHEIVKEVLKELDELVEKSTRTVEESKKRLDEMLRKIRDERVVEEIDKIAKEVNTRNKKVVDEIRKRAEEVKEESKESLKRLRKIAEEVLEELKKRAT

SEQ ID NO: 3491 - protein, 182 aa, Artificial Sequence; identical to SEQ ID NO: 3490
  Synthetic

SEQ ID NO: 3492 - protein, 175 aa, Artificial Sequence
  Synthetic
DLAEEVRKDVEDLERTNEKVVRDIRKLLEDLNREHKRVSDEIRKRIEELKEKLKRIKDEDEVRKVVEELERTLERVRKRVKDTVDKSKELLKRLLERSRETVERVKKKLDDVRRDGAIDDDDVRRIKKRAEDSHDRVKKELDRIAKSNEELLRKTEEEVRRLLEELEEILRRTRK

SEQ ID NO: 3493 - protein, 175 aa, Artificial Sequence; identical to SEQ ID NO: 3492
  Synthetic

SEQ ID NO: 3494 - protein, 179 aa, Artificial Sequence
  Synthetic
DEVEEALRRVEESNRRVKEEVERAVERVKRSDDDVRRLVEEMEREVRKLIDDIRRLAEAGKSADVVRKLIKEVEDKLKEVLERVRKLVETSKKLLDEILKRVEELVRRSKEELDKVLKDGSADKDEITELKKHSERLLEEAERLVRDLKRHSDELLEEVEERLRRLREDLKRLLDEVET

SEQ ID NO: 3495 - protein, 179 aa, Artificial Sequence; identical to SEQ ID NO: 3494
  Synthetic

SEQ ID NO: 3496 - protein, 179 aa, Artificial Sequence
  Synthetic
SAVEKAVRDVERTNEEIRRVVEEVRKEAEKTHRDIRRVVEEARETAERLLREIEELAKKNAPKEAIEELVRRVLDLLRRALEEVREAVERSDRRLEEALERVRELLERSNKLVDDVRREGSISEEAVKRLKDENKKTLDEVREIVKRLAEENKRLLEEVEKTVRDLKRELEKLLREVAK

SEQ ID NO: 3497 - protein, 179 aa, Artificial Sequence; identical to SEQ ID NO: 3496
  Synthetic

SEQ ID NO: 3498 - protein, 182 aa, Artificial Sequence
  Synthetic
KEVEDVVKEIEEVLDRLRKEVKKIKEDSDRLNEEIEKVVTDLVKELDRLLREIDDLIRKLKGDSEAVRRAVEELKREVDRVLREVEEMVKETKRLNDESNEKVRRVVEDLRRLIERVLRDATDDRARKTLEDLKRRIEELLRRVDETNERLKRHSDDLLRDVKRRLDEVRERIDRLLDKAER

SEQ ID NO: 3499 - protein, 182 aa, Artificial Sequence; identical to SEQ ID NO: 3498
  Synthetic

SEQ ID NO: 3500 - protein, 182 aa, Artificial Sequence
  Synthetic
DEVDEAVKRLREILRRIREIVEKVRKESEDVNDEIRRIVEEVTKRSEDALRELRELIRRNKGREEDVKRVADRIRELDDRSNDTVRRLVEKTRRLNDESNKTVRKLVEELKREVKKVEARVTDERVREELRKVEEDIDRLLKEVTELNERLKRHSEKLLRDVTRENRRSKEAVTRILEEARR

SEQ ID NO: 3501 - protein, 182 aa, Artificial Sequence; identical to SEQ ID NO: 3500
  Synthetic

SEQ ID NO: 3502 - protein, 182 aa, Artificial Sequence
  Synthetic
SEVEELLDRLREVNKRIREEVRKVTEESKKAIEEIKRIVDDMVDKVRKILEKLKELIRDNRGDRESVRKVVEELRELIRRVLEEVRKLIERVKKRNDESNDTVRRLVEETERIVDEAEKRVKDDKAREDLRRVKEHSERLLREVTKLNKDVEKELKELLDEVRERLKDLKRRIDKILEEAER

SEQ ID NO: 3503 - protein, 182 aa, Artificial Sequence; identical to SEQ ID NO: 3502
  Synthetic

SEQ ID NO: 3504 - protein, 181 aa, Artificial Sequence
  Synthetic
SVRERVKDEMEKVLRDDKEVSKRVTDEARKVLEEHRKITDEVRRRSKELIRELKKVRDEGRPEEKIKEIADRIREVDDRSNRRVRESVKKLEDLLRRVVKESEETVRTLRKLLEDVLREVDREEVRRTVDEVRRRIDKSLEESKKLVEDISREITELLRRTTERNKESKREVDKILEDARK

SEQ ID NO: 3505 - protein, 181 aa, Artificial Sequence; identical to SEQ ID NO: 3504
  Synthetic

SEQ ID NO: 3506 - protein, 181 aa, Artificial Sequence
  Synthetic
SIVERAEKELRRLLKEDEEVSDRVRKEVKRLLKEDKEILDDVRRRIEKILREIEEVARRGEDKRAIRKLVEELKRVIDKAVEESRDSVRRIKDLLDKALRESEETVRRIKTLADDLLRKVDREDVRRIIKEIKERVKKSLDESREIIERAKREVDKSLEESKKVAEDAKRRIERLLREVER

SEQ ID NO: 3507 - protein, 181 aa, Artificial Sequence; identical to SEQ ID NO: 3506
  Synthetic

SEQ ID NO: 3508 - protein, 179 aa, Artificial Sequence
  Synthetic
SEVEKVVREVEKLIREIERHSKEVNKRSKEDIDRIREKIERAIRRVEELIRKVKEVTERGDRRKEEVLEELDRIVEEVETMAKRVREELKEIVDKSRELMRRSEELLDEILKRAAELARRVGVKEDLDRIRERLERLKKRTKELLERDEREVERVERELEELIRDIRRKIEKLKRDIEK

SEQ ID NO: 3509 - protein, 179 aa, Artificial Sequence; identical to SEQ ID NO: 3508
  Synthetic

SEQ ID NO: 3510 - protein, 175 aa, Artificial Sequence
  Synthetic
SDLEDVIKKIEELLRRVEERLRDAVRKIEELLRASDERLREINEESRELLRRVKELKDAGIDKRDVERILRDIVRRSKKLLDEVHRTNEEILRTIERVVEEVKKELDKILKEVEDKVRDRKLVDDIRKEVERIVEEARKLLERIKREVKESSERAERLHEEDRKRVEDALREVKK

SEQ ID NO: 3511 - protein, 175 aa, Artificial Sequence; identical to SEQ ID NO: 3510
  Synthetic

SEQ ID NO: 3512 - protein, 175 aa, Artificial Sequence
  Synthetic
KEAEDVLEKAKRLLKRSDEVVEEANDESRRLLDKIRKLVDTVNEESKRLLDRVRELREAGTDKKDVKKILEDIVRRSEEMVERVERLLREVVERSRELVERVHELNKEILERIRREVEDKDAVRDVEREVRRSSKRLKELHEEDKRRVRKILERLKRLHEKDRRDLEKVMKEVED

SEQ ID NO: 3513 - protein, 175 aa, Artificial Sequence; identical to SEQ ID NO: 3512
  Synthetic

SEQ ID NO: 3514 - protein, 175 aa, Artificial Sequence
  Synthetic
DDLDEVIKDIERLLKESDDDVERVIREIKKLLDEVRKRVRDANEDSKRLLREVERLAEAGLDRERVEEELRKIVEKSRKAVEEVKRLLDEILKRVTDAVREVHELNKDILRRVRERVRDERLVREIERRVRKSSEDLRRRLEEIRERVEDIERELRKLHEEDKKRVEDILTEVRR

SEQ ID NO: 3515 - protein, 175 aa, Artificial Sequence; identical to SEQ ID NO: 3514
  Synthetic

SEQ ID NO: 3516 - protein, 174 aa, Artificial Sequence
  Synthetic
SEKERVVEEVRKKLEEIRRRTEEMIERVERLLDEIRRRNKELVERNKELNKRIAEIVRDRNNKDEVKELIDRSKKSTDDVNEESRDLARKVKELVDRANKESRRLVEEVRKEVEDLIDSELARDIKRKLEKILEDSERLVDEIRKRIEKIKRESDETVRESRESSRRLLEEVKR

SEQ ID NO: 3517 - protein, 174 aa, Artificial Sequence; identical to SEQ ID NO: 3516
  Synthetic

SEQ ID NO: 3518 - protein, 179 aa, Artificial Sequence
  Synthetic
SEVERLLEDNRRTIREDEERNKRVVDTWRELTRRLEERIEKVLTDNKKTVEDLVRKRGRDRDVLRIIKELEDLSKKIEDDLREIIKRDRELARELKERSDELLKRLRELSKRIEKVLRDRRRDDDELRKDLERLDEESKRASEKLEEEVRREIKRSKELIEEVERKVEEIDKRADERLN

SEQ ID NO: 3519 - protein, 179 aa, Artificial Sequence; identical to SEQ ID NO: 3518
  Synthetic

SEQ ID NO: 3520 - protein, 179 aa, Artificial Sequence
  Synthetic
SEVERVLEKLKRDVEKNERDNRRVLKKLREDVKKDADDNRKVLEDLRRAVEELRREVGRDRDVERILRELEEALRRIEEESKKLIRRLEDLLREIERKSRELLKRLRDLLRRIAEVLRANTNDTKDLVDEARKVLETSKRLSDELKKEVEKMLRESREMSKRLKEEVDRILKEVRDKAR

SEQ ID NO: 3521 - protein, 179 aa, Artificial Sequence; identical to SEQ ID NO: 3520
  Synthetic

SEQ ID NO: 3522 - protein, 174 aa, Artificial Sequence
  Synthetic
DELEEVIDRNRKSLKEIEERNKKVIEDLRRAIKEIEDRLKEVLDRVKKRIEDIERRVPGKEILDKVREMVKELEDRVRELVKELRKLVKELEDKVREHSKKVRKLSKELEDELRKEGPVEELRKKIEDVDRKVRKESEDLKRELKKLLDEIRRKVRELEERAKRVEEEVDREAK

SEQ ID NO: 3523 - protein, 174 aa, Artificial Sequence; identical to SEQ ID NO: 3522
  Synthetic

SEQ ID NO: 3524 - protein, 174 aa, Artificial Sequence
  Synthetic
SELEEVIRDNERSLKEIEDKNREVTKTVREEIKRIAKKLKEVLDRNRETVRDIERRVKGEEILREVRELSDRLEEDARRILEEVKELLERLEREVEKHSREVRDLSRKLADRLRKEGPVDELRRRIKEVDKEVEEKSEKLKREVKAVLDRVEKLAEEIRKKVEDVDRTVEEKAR

SEQ ID NO: 3525 - protein, 174 aa, Artificial Sequence; identical to SEQ ID NO: 3524
  Synthetic

SEQ ID NO: 3526 - protein, 174 aa, Artificial Sequence
  Synthetic
KEMEDLEREVERVLKRLEELVRELLETVRRTLTRLKRKLDEKKKELDKVNEDLDRVTREGRDRREIIKEAEKSLEDLKRDLERIKREIDKINDELRKRVKEIVDRARKILEDLRRNNLEERVVKKLEDAIEEIKRKLEKVHDEHRRTVEKIEEDIRRVEEEHRRTIKEIKEKLK

SEQ ID NO: 3527 - protein, 174 aa, Artificial Sequence; identical to SEQ ID NO: 3526
  Synthetic

SEQ ID NO: 3528 - protein, 174 aa, Artificial Sequence
  Synthetic
SESERLAKEVEKKLKDAERLVKELHEEVDRMNRDLERKLREISERAKKTTEDVERVAERGEDRREIDKDLRRVNKEVKDLIDKLEDEARKSHEEHARVLKEIEDRLREVLKEVEANNLPEEVIKKVRKDIEEITRKLERSNREHERTLREIKKRAEKVHEDHRREIDRIREELK

SEQ ID NO: 3529 - protein, 174 aa, Artificial Sequence; identical to SEQ ID NO: 3528
  Synthetic

SEQ ID NO: 3530 - protein, 174 aa, Artificial Sequence
  Synthetic
RESEELEREVERVLRELEELVKRLHDDVRRVDEELDRKVRDLHKKVRDVLRRVEKLVRDGRDAREIRKELEDAHERHRRMLEKIEDEARKSHEDHKKVLEDIKRRAEEILKKLRDENLEDRVVDRLRRKIEEIARRLRKSNEDHRRSLKEIKDKLEESNERLRRALEEIAERLR

SEQ ID NO: 3531 - protein, 174 aa, Artificial Sequence; identical to SEQ ID NO: 3530
  Synthetic

SEQ ID NO: 3532 - protein, 175 aa, Artificial Sequence
  Synthetic
SEKDEVITRVETELRRVKTEDRDVARRVKEELEDLKRRLERVIEDNERTLRELKKELKERNKPDDEAERLLEKSREVAERVLRKLEEIIKRIEEEIKKMLDESEKIVEEIRDVVRRKGVDEDVVRELEKLLRDWEKRSREVEEKLRRLLDELRETLKEIEKELRRLDKEIKERLR

SEQ ID NO: 3533 - protein, 175 aa, Artificial Sequence; identical to SEQ ID NO: 3532
  Synthetic

SEQ ID NO: 3534 - protein, 175 aa, Artificial Sequence
  Synthetic
DREEKVKRRVEEELDRVRRTDDRVLKRVEERLREDEKRNEEVIRRNEKTLRELEKRLRDNRKPDDRMRELLERSRRKAEEALRKTKKIVRDVREKMREAKEESRKIEERIKETIREKGVDEDVVRELEELLKRWKETSERVKRELTDLLRKSEETSKEVTKTLRELDKRIEDELR

SEQ ID NO: 3535 - protein, 175 aa, Artificial Sequence; identical to SEQ ID NO: 3534
  Synthetic

SEQ ID NO: 3536 - protein, 174 aa, Artificial Sequence
  Synthetic
SREEDLKRKIDEVDKEWKKLTKKLEEEIREVEKEWRKLSKELERKIREVEKRLKEAKDRNVDKDDVDRRARELVERIKREAEKINEDVERLLKEIEDRIREINKDVDRLLKELEAAGVPEEVIKTLRERVKDIHREDKEIIDRLREKAERIKEHDRKLLEDLKRTLDKLRREME

SEQ ID NO: 3537 - protein, 174 aa, Artificial Sequence; identical to SEQ ID NO: 3536
  Synthetic

SEQ ID NO: 3538 - protein, 174 aa, Artificial Sequence
  Synthetic
DEREEIKKELDRIIRESEELVKKIKDVIRKLIEESKRLVEKIREDIKRSNDKLDEVTRRGVSKEDVERVLEKSREDSKRLLEKNRKLIEEVKREIRRLIEENRKLIEEVREEIERRNVEEEVKRRAEDLLRRSDEKSKRIAEEAERRLDRSDEESEKILRDNEDMVRKWREKEK

SEQ ID NO: 3539 - protein, 174 aa, Artificial Sequence; identical to SEQ ID NO: 3538
  Synthetic

SEQ ID NO: 3540 - protein, 174 aa, Artificial Sequence
  Synthetic
DETEKITKDLEDLIREDEKLVKDARDTLAKSNEDSRRLVEDLRRLIKESNEELERVVREDVDERELKKLADESRERSKDALRRNKELIDRSREESKKIITRSDELNREIRKRVEDINVEEDVVRRLERLSEESRERLERILRDNKRRLDKSLEDSKRLVEKNDRDLKKWKEDRR

SEQ ID NO: 3541 - protein, 174 aa, Artificial Sequence; identical to SEQ ID NO: 3540
  Synthetic

SEQ ID NO: 3542 - protein, 177 aa, Artificial Sequence
  Synthetic
DERETVREELKELIERLRDLNRKIEELLRRSNEEIRRLVEEIRRRLKEMNDEIRRVLKKVDREIIRKLVRESEKLTEEVRRELKTIVDESRKLVDKVRRENERLVREVKKRLEDAKRKGSIDDKVLKEAKELLDASEKHLRDLIETNERVLKRWEEELDKIAEENERVLRKWEEEAK

SEQ ID NO: 3543 - protein, 177 aa, Artificial Sequence; identical to SEQ ID NO: 3542
  Synthetic

SEQ ID NO: 3544 - protein, 175 aa, Artificial Sequence
  Synthetic
SEREEVLKKIREMSKRDNEKNKRILDDVRRLSKEDNKDNDRLVEEHRRKITELEDRVRKEGPREEIRKESRRVLEKTAEDFKRSIDRNRKANKEVRDKVKKSIDENKKVLDDAKTEVGEDEVLREVEELSRRDEKRSKEILEEVSKLSKDDEDRSRDLLRKAEEENRRLEEKLRK

SEQ ID NO: 3545 - protein, 175 aa, Artificial Sequence; identical to SEQ ID NO: 3544
  Synthetic

SEQ ID NO: 3546 - protein, 175 aa, Artificial Sequence
  Synthetic
SEKETVLEDIRRMSKEDNEKNERIVERARRILEKIEEKNRRVKEEAKKMLERIKKLVKDRGPDKDLKRELEEVVKTLEELHKRLIDELRRVVEEVERLVRESIKENRKVLKDAADRVGEDRVVDEVRKRSEEDERRSRELLEEVRRAVKRVEDKSRTTVREIRERVKEVKKRLDD

SEQ ID NO: 3547 - protein, 175 aa, Artificial Sequence; identical to SEQ ID NO: 3546
  Synthetic

SEQ ID NO: 3548 - protein, 178 aa, Artificial Sequence
  Synthetic
SEVEDVVRKVRKLVEKSTRDNKRVLEKVRKLVKESSDKNKKVLDEVEELIERLREKLERIRNDKEKEELKKEIDDVLERVERLHKELKKENDDVLREVEEVSRELKKRNDEVLKRVKEAGVDRDALEEIRKRVEDNKRRSDESLEEIRRLVEENKRRSEKTLKEIREKAKRLKDEIDR

SEQ ID NO: 3549 - protein, 178 aa, Artificial Sequence; identical to SEQ ID NO: 3548
  Synthetic

SEQ ID NO: 3550 - protein, 178 aa, Artificial Sequence
  Synthetic
SEVEKVEREVDEMVRDSTKENEDILREVRERLKKIKEDLDRTVTEVRRLLKELEEKAREVRDERLKRRLEEELDRILKEVEELAKKLKDDVEEVLKEVKKLSKRLKDKNDKVLKEVEEAGVTKDMLDRVREKVKRNKEESDKSLDEIRRIAEEVKRRIDELLKEIKKRAEELKRKLRK

SEQ ID NO: 3551 - protein, 178 aa, Artificial Sequence; identical to SEQ ID NO: 3550
  Synthetic

SEQ ID NO: 3552 - protein, 178 aa, Artificial Sequence
  Synthetic
SEVEEVLKRARELVERSTRENRKILERARKMLEDARKTNEDVLRDVERLLDELRRELEKIKEDRLKEELKKKIDDILRKVEKLHREIKKRIDEVLEELAKLSKELKEDNDRVLKEVEEAGVDKEVLDEIRELVKENKKRSDDSLREAEKRLRELKEESDKTLDEIRRKLEKLKEEIDR

SEQ ID NO: 3553 - protein, 178 aa, Artificial Sequence; identical to SEQ ID NO: 3552
  Synthetic

SEQ ID NO: 3554 - protein, 178 aa, Artificial Sequence
  Synthetic
DEVETVRKDVERLVRTSNDENRRILETARKLIKEVREKNKEVTDRVRDLLRRIEEEVKKVKDKELKDRLKKKIDEVRERVERLHKEIKDELKEILDELERLSTELKEKNKKVLKEVEDAGVDERILEEIRRRVEENKKRSDESLKEARELLRDVERESDETLKEIEEEARRLKEEIDR

SEQ ID NO: 3555 - protein, 178 aa, Artificial Sequence; identical to SEQ ID NO: 3554
  Synthetic

SEQ ID NO: 3556 - protein, 175 aa, Artificial Sequence
  Synthetic
DEVKKVVDEARKLVEDDKRTNEEVLRRTRELLERDERKNEEAVKRIRDLLKEIKKLVEAGVDKRELKKRIDELLERLERLVRDSERLNEEILKEDRKVVEESEERNERIKDRLRKLPVDEELLKRIDELIKESKRRTKEAHRESEELARKTKKSTRDLLREVEKRLREIKEEIKR

SEQ ID NO: 3557 - protein, 175 aa, Artificial Sequence; identical to SEQ ID NO: 3556
  Synthetic

SEQ ID NO: 3558 - protein, 175 aa, Artificial Sequence
  Synthetic
SDVEKVVDEVREKVKRDKEDNRRVAKEARELVKESSEKLERLVTEVKKLIKTIEKLVRDGVDKRDLERKLREVEEEVKKMADRLREENEKILRDLEEMVKESRERNERIKDEVRKLNVDDELLKEIDKLIKESKKETDDLLKEIKDLIDENKRRIDKLLREIEKLARKVKRDIEK

SEQ ID NO: 3559 - protein, 175 aa, Artificial Sequence; identical to SEQ ID NO: 3558
  Synthetic

SEQ ID NO: 3560 - protein, 175 aa, Artificial Sequence
  Synthetic
SDVEKVVEELRRLVRKDEEDNRRAVEETRRLVEDSSRKLEEMVRRVRDLIRKVEELVKSGKDKRELTKRLDDILERVKEAAKRLRDINERILERDREMVKRSRDTNEEILDRARKLRVEERLLREIEKLIRESKKKTDDLHRESKKLIEDNKKRIDDLLKEIKDRVERVKEEIRR

SEQ ID NO: 3561 - protein, 175 aa, Artificial Sequence; identical to SEQ ID NO: 3560
  Synthetic

SEQ ID NO: 3562 - protein, 175 aa, Artificial Sequence
  Synthetic
DEVKKVVDEVRKKVEEDKDDNRRAVKETRELVEESSRDLKRLVETSRRLIEEVERLVEKGVDKRRLKELLEEILREDRRAVEELDKKNREILRRDRKAVEDSEKKNEDIRKEVEELDVEERLLREIRKLITESKKTTRDLHRDSKRLIDENRKRIRDLHEETRKLVKEVLDKIRK

SEQ ID NO: 3563 - protein, 175 aa, Artificial Sequence; identical to SEQ ID NO: 3562
  Synthetic

SEQ ID NO: 3564 - protein, 175 aa, Artificial Sequence
  Synthetic
SDVEKAVDEVRKLVKDSNEKVERVLREVRKLIEEDERKNREVFERVRKLIEDILRLVKGGTDKRELEKRLRDVLRRVKEAVEDSRETNERILTDVKRIVEELRKENEDIEDRVRKLRVDEKLLRDIREEIERNRRELEKALREIKKEIEKTKRKTDRLLETIKELIDRVVEEIKR

SEQ ID NO: 3565 - protein, 175 aa, Artificial Sequence; identical to SEQ ID NO: 3564
  Synthetic

SEQ ID NO: 3566 - protein, 175 aa, Artificial Sequence
  Synthetic
DEVETVKRRVEELVKRSNEELKRIVEETRRRVEDDERDNERIIREIKKKLKDIEELVKSGTDKRDLKRKIEEILRELKEAVDRSRELNKEILRKDREKVEELRKRNKDIEDEVRKLPVEEEILKTIRRLIEKNREDIDRLHEESKREIDRTKERTDRLLDDVRRIAERIKEEIDK

SEQ ID NO: 3567 - protein, 175 aa, Artificial Sequence; identical to SEQ ID NO: 3566
  Synthetic

SEQ ID NO: 3568 - protein, 175 aa, Artificial Sequence
  Synthetic
REVEEVLKEVDELVRKSNEDLKDIVRRTRDLLRKDKERNDEVVRRSEELIRRVEELVRRGRDKRELTKRLKEILDEDREAVKESKKLNEEILTEDREAVRELEKKNRKILRDVERLPVDEEALERIKRKIDENEKEIRELHKESEKRIRDTLRATDKLHKDTRRRVEEVKEEIKK

SEQ ID NO: 3569 - protein, 175 aa, Artificial Sequence; identical to SEQ ID NO: 3568
  Synthetic

SEQ ID NO: 3570 - protein, 175 aa, Artificial Sequence
  Synthetic
SDVERVVERARDLVRKSDDDLRKMVAETKRLVEESSKKLDKIVRESRELIRDVKRLVEEGKDKRDLRRELKKILDRDRRAVEELRKDNERILERDRRLAERDDELNRKIEDELRKLNVDEELLKEIKKRIDESREKTKRLHEESRKLIEDNKRRIDELHKETKEEVERAKKEIED

SEQ ID NO: 3571 - protein, 175 aa, Artificial Sequence; identical to SEQ ID NO: 3570
  Synthetic

SEQ ID NO: 3572 - protein, 179 aa, Artificial Sequence
  Synthetic
EEVKRALEELDELVKRIEEDSRRMVKEAEDLVEKIRKEIEDLLRRSRKLNEDIRRLIDRDNEDKTVERLLRRDEELNEEIKRRVDEVLKRIKELLDRMNKRSEDLLRRLKERLEELAKDGKISEDILRRADELLKRLRRKDEELTKKIERLLEKVAKEVEDINRESKRSADEVRKRVRK

SEQ ID NO: 3573 - protein, 179 aa, Artificial Sequence; identical to SEQ ID NO: 3572
  Synthetic

SEQ ID NO: 3574 - protein, 179 aa, Artificial Sequence
  Synthetic
SSVKEVRDELKRLVDEIRKESEDMVERLRRLVEEIRKRNEELVRRSEELNERARRLIERDNNDKEVERLLDEDRKLNERIKRESDDLLRKLEELVKEINRRSKELLDRLEELLRRAKKEGKVDDKILKEAEDLLRDLERRDRELTREVEKLLEELRRTSEETNKRSKESADRVEDEVRR

SEQ ID NO: 3575 - protein, 179 aa, Artificial Sequence; identical to SEQ ID NO: 3574
  Synthetic

SEQ ID NO: 3576 - protein, 179 aa, Artificial Sequence
  Synthetic
KEVEEALKRVRELVKRAEDMNEELLRRSRKLNDEIRRRIEEMLRRLEEVVRRIKELVDRDNDDKTVRELLKKIEELIERVIRTVRKLLKRDKELNDRLRRESERVLREIRKLLEEARKDGKVDEKILTEIEKRLKDLEKKSRDSNRESEESLERIRRKVEEIARRVRELLDRLRREVER

SEQ ID NO: 3577 - protein, 179 aa, Artificial Sequence; identical to SEQ ID NO: 3576
  Synthetic

SEQ ID NO: 3578 - protein, 178 aa, Artificial Sequence
  Synthetic
SRLEEVTRRARKLVEDITRELRKAVEDSRRVVDKIRRLNEELTRRSRELVKEVKDKVRDKDKLKEVEERIRRLNEESRRLSKEVADELRRINEESKKLLDEVAERIRKLLEDLRAESDTEKVREILEEIRRLLEELEREVKELNEESKRRLDELEKRSEETNKESEDLLEKVRRDVEK

SEQ ID NO: 3579 - protein, 178 aa, Artificial Sequence; identical to SEQ ID NO: 3578
  Synthetic

SEQ ID NO: 3580 - protein, 178 aa, Artificial Sequence
  Synthetic
SELEDVVRRLDELVKRIKEENRETLERSRRLVEEAKRTNEETEDRMRRLVEEIEKKVRGDEELERVREEIERANEDDRRRVDEMAKTIRKVNEEDKRRLDKVRREIEELLEDLRRKSDTEEVRRLLEEIRRKLEDAKRHVEELSEESKKLLKELEEHVREVNKKSEKLLRELKDKVKT

SEQ ID NO: 3581 - protein, 178 aa, Artificial Sequence; identical to SEQ ID NO: 3580
  Synthetic

SEQ ID NO: 3582 - protein, 178 aa, Artificial Sequence
  Synthetic
SELEKLVEDVRRLVEKIKRDNRKTLKELEELVREIVERNRDTLRRSRELVDRIKKRVRGEKLLDDVVKDIERVNRDDERRLREVMREIERANDEDRKRVEEAAKRIEELLEDIRRKSDTEDVRRVLKEIKELLERVREHVERLNRDSERLLKDLEEHARRLSKESKELLRELEERVRT

SEQ ID NO: 3583 - protein, 178 aa, Artificial Sequence; identical to SEQ ID NO: 3582
  Synthetic

SEQ ID NO: 3584 - protein, 178 aa, Artificial Sequence
  Synthetic
SEVEKIREDVKKLIEESKKLNRDILEEVRKMIERWRDTTRRIRERIRKLIEEAEEEIKRSTDEELIERIKKKIDDVLKEIEDLLRKTKEEARKVLEDVERLLREDKRRNDKALEDVERAGASSEVLEEVKRLVEESKRESDEILKRVKKLVDDLARTDDKVLEDIKREVDRLKKELED

SEQ ID NO: 3585 - protein, 178 aa, Artificial Sequence; identical to SEQ ID NO: 3584
  Synthetic

SEQ ID NO: 3586 - protein, 178 aa, Artificial Sequence
  Synthetic
SEVEKIKKDVDRMITEWEKRSRDIAKTVDELIEDSRRLNETIRRDVDRVARELKERIKRTTDEELIERIERRIDEILDEIRELLKRDEEKNERVLREAERLLRETKERVKEVRKRVRDKGVSDDVLKKIEEALKRLADRDDDILRRIETLVRKTRRESEELLKEVEDKMRKLKEELRR

SEQ ID NO: 3587 - protein, 178 aa, Artificial Sequence; identical to SEQ ID NO: 3586
  Synthetic

SEQ ID NO: 3588 - protein, 178 aa, Artificial Sequence
  Synthetic
SEVEKLTEDVKRLIEKSKRNNRDILRKVKEDIDEWRKRTKKIADEVRKTERDLEEKIKRTKDEEIIKRIKKEIDEILKRVEDLVRDTKERVKEVDTEVKKLAEDNKRENDDVLKKVREAGVSDEVLRRIEEDLKRSKKETDDILKEVKDLLTDLLRRDDEVLEEIKRRAERIKEEIDR

SEQ ID NO: 3589 - protein, 178 aa, Artificial Sequence; identical to SEQ ID NO: 3588
  Synthetic

SEQ ID NO: 3590 - protein, 175 aa, Artificial Sequence
  Synthetic
REVEKILTDVRRLIEEWRKKTEDIKREVDKLIEEWRKRSDEIADRSRKLAEEIERLLREGVPREDLRRMIKRILDEDRRLLKESRDKAKEIRDRVEKLVRETDKKVKEIEDRVRKAGVEERVLRKIRRDLERLKKTDDDVLKTIEKKLRELEERDRRLHKESREIAEKLKEDIDR

SEQ ID NO: 3591 - protein, 175 aa, Artificial Sequence; identical to SEQ ID NO: 3590
  Synthetic

SEQ ID NO: 3592 - protein, 175 aa, Artificial Sequence
  Synthetic
DEVETIMEKVERDVKRWEELTREIKRRSDKLIEDWKKRSEEVLRESTELIKTIEKLLREGAPREDLDRLLKEILKRDRDLLKESRDRVREAEKEDEDLLRETKKRVKEIKDEVREAGVDESVLRTIDELVRRLEEEDRKVHEESKELARRLEKEDKRLHEESKKLIDELEKKIRD

SEQ ID NO: 3593 - protein, 175 aa, Artificial Sequence; identical to SEQ ID NO: 3592
  Synthetic

SEQ ID NO: 3594 - protein, 175 aa, Artificial Sequence
  Synthetic
SEVEKILDEVRKLVKKWDDETRKILEEIDKLIEDSERLLEKIERRSKKLADEIRDLLRKGAPREELKKRLEEILKEDEDLVREDEKLNEEILRRLEELVKRTDDEVRKIDKRVKEAGIDKSVLDEIRERVTRAKEKDKRVLERVKREVERTKEESKRVHEKSREIIERLKKEIDK

SEQ ID NO: 3595 - protein, 175 aa, Artificial Sequence; identical to SEQ ID NO: 3594
  Synthetic

SEQ ID NO: 3596 - protein, 174 aa, Artificial Sequence
  Synthetic
DEVRKVRKELDDAVRKLRRDHERVIRESEKVSKEIEDRARDVERRLDKVVDELRKKDVKEEIEREVERIREEVRKKLEEILDRVRKINEKAREHSERNKRDVERVKKEVADRLRDGDSREEVMKRLRDMIRRLKEDAEKLKRELKRRHERVKELLDKVRRELEKLEKEVDDKVK

SEQ ID NO: 3597 - protein, 174 aa, Artificial Sequence; identical to SEQ ID NO: 3596
  Synthetic

SEQ ID NO: 3598 - protein, 174 aa, Artificial Sequence
  Synthetic
DEVREVERESEELSEELRRRHEEVVKESEEVSKEIEERIREVIRDLRRVLRKLEEDGVRKEILEEIEKVVRDVEREAERILREVERVNERVRELSKRNIKETEEVNKKVRDELRDGDSREEVVKELRELHDRSRKKVEDIAREARDMHRKAADKLRRLMEDLKRVLEEIRKKVE

SEQ ID NO: 3599 - protein, 174 aa, Artificial Sequence; identical to SEQ ID NO: 3598
  Synthetic

SEQ ID NO: 3600 - protein, 171 aa, Artificial Sequence
  Synthetic
SRVDKIRRELRELLERDREDLERAMRELRKIDKDIDERLKEVVERLRRIDERIDREDRDREELEELLRRSEDTVKKISDEIEDLLRRSEERLRRVLERSKKTNDEIRERLRRVDVSKEVEKEVEDAIRETEKRAREVEEENRKSVEDVRRKMKKVEEENRKSVEDVRRKAT

SEQ ID NO: 3601 - protein, 171 aa, Artificial Sequence; identical to SEQ ID NO: 3600
  Synthetic

SEQ ID NO: 3602 - protein, 171 aa, Artificial Sequence
  Synthetic
SRVDKIRKELEDLLREDEKRIRDMVKRLREIDEKIDRELEKVARELRELLKRVEDSPDDREEVERMLDEIRRRLDEILERIERLLRESERAVKEVEKESRRTNDEIKKRLEKVDVPEEVEKKVRELVERTEETVRDVERENKESVKRVREKAETVKREVEKRAKEVRDKAK

SEQ ID NO: 3603 - protein, 171 aa, Artificial Sequence; identical to SEQ ID NO: 3602
  Synthetic

SEQ ID NO: 3604 - protein, 179 aa, Artificial Sequence
  Synthetic
SEMEEVEERLKELDDKDKRDVDEARKRLEKLDRDIDRRIKEVTKRLRDLNRRIEEELRRNKEKKEELDKLLRESEETTRRILDEVRKLLERSRREVRKIVEENKETIERSRKEVEKIRREGVLTEEVEKKNRKSADDSRETAKRVEEENERTIKRLEEELREVEEEDRKTVEDLRRTLK

SEQ ID NO: 3605 - protein, 179 aa, Artificial Sequence; identical to SEQ ID NO: 3604
  Synthetic

SEQ ID NO: 3606 - protein, 179 aa, Artificial Sequence
  Synthetic
DEVREVTKELRDLDREDKKRVEEATKRLRDLNEEDKRLVKKVADDLREDLKRIRERLERNKEKKEDLERLIKEIEEKLEKIKRDNDKTIRESRRTTEELRRENRKTIEDSRRRVKEIRDRGVLTEEVEKENERSVKKSEEDLKRVKDEDEESVKESRKAVREVEEELRKRLKELREELK

SEQ ID NO: 3607 - protein, 179 aa, Artificial Sequence; identical to SEQ ID NO: 3606
  Synthetic

SEQ ID NO: 3608 - protein, 170 aa, Artificial Sequence
  Synthetic
SEDETVRREVRELIRRLRKHSEDVKRESDKLLDEIRRRVKEVEDRVKEAVERLDRKKRDERLRDVVEKIDRLLEEVKDRIRKVERDSKEMNKKDEERVERVVRKLEEILDREGVDEDVVRKIRTVVKKIEEDNKKTADELRKLHKDIKKEVDDMEKRIRKVLDEIDKEIK

SEQ ID NO: 3609 - protein, 170 aa, Artificial Sequence; identical to SEQ ID NO: 3608
  Synthetic

SEQ ID NO: 3610 - protein, 170 aa, Artificial Sequence
  Synthetic
DEEERARRELEDLLRRLREHSERVAKEVEEVVERNRRKSEEVEKRVREMLKRLDEKKRDEELKRVVEEVKEMLKRLRELNEKVVEEVRRILEKDRRLVDKVRRDLERLLREKGVDKDVVKEIRDRVREAERRNREVVEEIRKLLKEIDKTTRDVEEEIRKLLKRIDEEIN

SEQ ID NO: 3611 - protein, 170 aa, Artificial Sequence; identical to SEQ ID NO: 3610
  Synthetic

SEQ ID NO: 3612 - protein, 170 aa, Artificial Sequence
  Synthetic
DEERKARTEVKKEVDDLKKHVKDVADEVREAVKKNRRKSEEVSREVRDLIRRLKETKDDEELKKAIKKLEELLERMRRLNEKVVKEIKKLLDDDDRLVEEVVEDVKRILREKGVDEDVVREIRELLKRIREENRRTVEEIRKLLKRIDEATEELVREIRRVVKEIEDKIR

SEQ ID NO: 3613 - protein, 170 aa, Artificial Sequence; identical to SEQ ID NO: 3612
  Synthetic

SEQ ID NO: 3614 - protein, 170 aa, Artificial Sequence
  Synthetic
DREEKLRKELKKLIDDDRKKSEDVEREVRKLIKENEDKSRKVEEEVRKLAEELDTKKRDKELEKVIRDLERLLEELKELNDRVRRTLEELLKKLKELNERARKELEDILRDKGVDEEVIKEIRTVVKRVNEESEEMTKRIRDVVREADKTTEDVRRKIEDMVRRIDERTN

SEQ ID NO: 3615 - protein, 170 aa, Artificial Sequence; identical to SEQ ID NO: 3614
  Synthetic

SEQ ID NO: 3616 - protein, 185 aa, Artificial Sequence
  Synthetic
DELRRIEEEVRRRFEEMARRHRKVKRDIEELVKEVTKRNKDTEREIEELVKRMKDEIDRIKEDEKLERLLREAAERLKELLKRDKKLVEDIAREIERVIKELRKINEEVSEEIERLLRELEKLRAEEEKVRRVVKKAREAVERSSREVEKVEREVKKLLDDLKKHSEEVEKKVRELLKRLEDRAR

SEQ ID NO: 3617 - protein, 185 aa, Artificial Sequence; identical to SEQ ID NO: 3616
  Synthetic

SEQ ID NO: 3618 - protein, 185 aa, Artificial Sequence
  Synthetic
SELEEIVKTAREIMDRVRREHDRVATEIRELVKRLEEANRRVREEIKRLVKEVEERIRKIKEDKRLREVLEEIARELEKLLKEDKDLLRKAAEDLKRLIEDLRRINEEVEDIARKVIEELRKSRAPREEVEKVVKEIEDVVRESSERVRRVVEEVKKLLRELAKHSEDVEREVRELLKKLAREVD

SEQ ID NO: 3619 - protein, 185 aa, Artificial Sequence; identical to SEQ ID NO: 3618
  Synthetic

SEQ ID NO: 3620 - protein, 185 aa, Artificial Sequence
  Synthetic
DELKEIRDRIKKRVEELRRENEEVREEIERIVRKAREDHRRVERELEDLVRRARDKVEKIKDRETLKRLLDKVEKDIRKILDELRRLNEEVARTLEKLLRDDKRLVDKAAEDLRRLIEELKKSRADEEEVRRVVKEVEELLEDLKRHSEKVKEEVKRLLEESSREVERVEEKAREMLERLRERAR

SEQ ID NO: 3621 - protein, 185 aa, Artificial Sequence; identical to SEQ ID NO: 3620
  Synthetic

SEQ ID NO: 3622 - protein, 185 aa, Artificial Sequence
  Synthetic
SEAEKLRDEIRRIVEKAERDHEDVKKKIEDLVKRVEERNREVTKRIRDLVRDARRRLDEIKEDEKLERVLRKVERDLRELIKEDEDLLRRIAEALEDMLRKLEKLNRDVAEILKELLRKLRETRIEKDKLKKVEEEVEELLKKSNRKVREVKRELKELLDRLAKHSDEVRREVEELLRDLARRAT

SEQ ID NO: 3623 - protein, 185 aa, Artificial Sequence; identical to SEQ ID NO: 3622
  Synthetic

SEQ ID NO: 3624 - protein, 185 aa, Artificial Sequence
  Synthetic
SELEKIREDMRELVERLKEANDRMREKIRKILEDVDREHEEVRKRIEELVKRARETIERIRDKRTLDEVLKKVEEELRRALKRLDEINERVKRDIRRLLEEDKRLVEEAARRLKKLLEDLDKSRAEKDKVKKVKEDVKRLLDELRKHSEKVIREVEKLLRESNEKVKRVKEKLEELLRRLRERSR

SEQ ID NO: 3625 - protein, 185 aa, Artificial Sequence; identical to SEQ ID NO: 3624
  Synthetic

SEQ ID NO: 3626 - protein, 179 aa, Artificial Sequence
  Synthetic
DEIETIKKEIDDMLREIKREVERSKEEIDRALKRIREEVKKSEEEIDKALEELRRNGVPEEILRKIEELLRRLKDEHRKLLERIEEVLRRLKRRHDKLLEDAERLLRELKEELDRNKDKSEEIIKRLLEKIRREARKVKELIRTSNEEVRKRLKDLEELIRKSHEDVRRTLETLERETR

SEQ ID NO: 3627 - protein, 179 aa, Artificial Sequence; identical to SEQ ID NO: 3626
  Synthetic

SEQ ID NO: 3628 - protein, 175 aa, Artificial Sequence
  Synthetic
DKERELDKEVRDMIDTLRDSNRRINERSERVLRELDESVKKNEEDIRRAIEELKAEVRRDDLPRGLVREAVERLKKLLERDRRLVTEVKERSKKSNEDDKRLSEEVVKELRRLVREKGVDEKVLKEIRDLARKIKEDNDRSLEDNDRLAKEIKERNKRVHDETRKMLEDIKRELT

SEQ ID NO: 3629 - protein, 175 aa, Artificial Sequence; identical to SEQ ID NO: 3628
  Synthetic

SEQ ID NO: 3630 - protein, 178 aa, Artificial Sequence
  Synthetic
DEDKEIDERVKTVKEEIRRRSKKDKEEVDRVLKESDETLKRILEEVKKVLKEIEERVPDLDEVRKKVEDVERKVATELEKNLRRVDKAVKEVRELNKELERELDEIRKEVRDLLKRIRREEELRRIVERVRERVTELREKLKEIHKRTREVADELRKNNRRWEEDVRRLVKELREREE

SEQ ID NO: 3631 - protein, 178 aa, Artificial Sequence; identical to SEQ ID NO: 3630
  Synthetic

SEQ ID NO: 3632 - protein, 178 aa, Artificial Sequence
  Synthetic
DEEERIRTKVEKVKRELEEKSERDKRALEKVEDESRRTSEEDERELERVIEEIIREVDKLDEVREKLERVLRKVRKLNRDSEERLKRIKEEVEEANREIRRRLEEVERRVKDLLDRVRREEELRRIEREVDRAVKELDRLLRELHRRTREVVKELRDLDRRIHEDTRRVVREAREEVR

SEQ ID NO: 3633 - protein, 178 aa, Artificial Sequence; identical to SEQ ID NO: 3632
  Synthetic

SEQ ID NO: 3634 - protein, 178 aa, Artificial Sequence
  Synthetic
SEREEIEERVERVERESEDTSRRDEEALERVLRESEDTSRKDREALRKALEDIERELPNLEEVKRKVERVVEEVEKLNRDSERKVKEIAEEVRRLNEESRRELKEMVRRVRELLKRVRREDVLRRIMEDVKRVADKLRELDKKIHEETRRAVDDLRRLDKEIHDRTRKLVKELREEAK

SEQ ID NO: 3635 - protein, 178 aa, Artificial Sequence; identical to SEQ ID NO: 3634
  Synthetic

SEQ ID NO: 3636 - protein, 174 aa, Artificial Sequence
  Synthetic
SEIEEITKDLRRLVEEIERLNKRVEDENERTAKELRDRVREAEKKNRKTVDDIRKLIEDGVRREEIREVIERDREEVEKVVRDLRDLLRKDRKRVREAVETSERLLEDIKRRLEEVDVSDEVRREVDELIKKSRETLKRIERRSEEVAEELERRLRDIKRRSEDMVRELEERAK

SEQ ID NO: 3637 - protein, 174 aa, Artificial Sequence; identical to SEQ ID NO: 3636
  Synthetic

SEQ ID NO: 3638 - protein, 174 aa, Artificial Sequence
  Synthetic
DEKEKVTKKIEELLKAIEDKIREVEKRSRDSAKEIEDRNREVEKRNKDTVRRIRELIERGVREEEIKKLIEEDKERVRKMVEETKKLVKRSTDEVRRVVDEARKLIERIKEEVERMPVDEEVRKRLEDAVERIKKELKRIKDENDEVVKKSRDSLRRIKEDSERVVRELEERAK

SEQ ID NO: 3639 - protein, 174 aa, Artificial Sequence; identical to SEQ ID NO: 3638
  Synthetic

SEQ ID NO: 3640 - protein, 174 aa, Artificial Sequence
  Synthetic
KRKEDIERRIEKLVRDDRRLVREAEKRSKESVDRLRDLVDKARKESDESARTIDKLIKDGVERRDIERMIRESSKRVKDVIERLKKLLEESTRTVEELVRRSKRTLDEIREEVERLDVEERVRKRLEDVVRESKKRLDEIKKRNEDVVRELEERLRRIEERNRRVAEELKRKAK

SEQ ID NO: 3641 - protein, 174 aa, Artificial Sequence; identical to SEQ ID NO: 3640
  Synthetic

SEQ ID NO: 3642 - protein, 175 aa, Artificial Sequence
  Synthetic
SEIEDIERELRESNKRHEDTLRKIKRDLEDSNRRHRETIRDIEARLEEVIKKLREDGVSEEVLKEIKRMLEEIVRDIRRSHEEHKKLLDEIKREAEKSHEEHRKLLEEIRREAEKNKVREEELRELVKRVHERAERVNRDLKRKVKEVHDRVREVNKELRRKVEELKRRAEERRR

SEQ ID NO: 3643 - protein, 175 aa, Artificial Sequence; identical to SEQ ID NO: 3642
  Synthetic

SEQ ID NO: 3644 - protein, 175 aa, Artificial Sequence
  Synthetic
SEIEDIKRKLDDVIREHARTLKEIKDELKKSNERARERIEDIDRKLRDVERRLRESGVDDDVLRDLEDKARKIKRKLEKIHEEHRRMLEEIEKEARKSLKELKEIVEDIKRKADDNRVRVEELEDLVRRLKKRVEEVNKRLREKVKRLHDEVDRVLRELEEEVKKLKEDVERAAK

SEQ ID NO: 3645 - protein, 175 aa, Artificial Sequence; identical to SEQ ID NO: 3644
  Synthetic

SEQ ID NO: 3646 - protein, 175 aa, Artificial Sequence
  Synthetic
SEREKIEEDIKKALKEAREVVERIKKKLDDSNREHKRTLDEIKKKLDEVIDEVRKSGVSEKMLREIEEVVKKIEEDARRSHEEHKRVLDKIVEDAKRILDRLRELVTRLLEELKKNKRREEEIREDLERIVTEVKKVLDELDKLVKDLHDEVRKVNEELDRKVKKLRKEAEEKTR

SEQ ID NO: 3647 - protein, 175 aa, Artificial Sequence; identical to SEQ ID NO: 3646
  Synthetic

SEQ ID NO: 3648 - protein, 175 aa, Artificial Sequence
  Synthetic
SEIEEIKRRLEDSNRRAREVIKRIEDELRRSNEEHRRTLKEIKEELDRVLEELKRKGVDESVLDRIRELIERIAREAEKSHEEHRKLLEEIRKRAEDIHRRHKEILDDILRKAEDNRTREDELREVVKRVHDEVRRELKKLEELVKKVHEDAKRVNEELRRKVKEVKERAERDVR

SEQ ID NO: 3649 - protein, 175 aa, Artificial Sequence; identical to SEQ ID NO: 3648
  Synthetic

SEQ ID NO: 3650 - protein, 174 aa, Artificial Sequence
  Synthetic
RREEEVEKRLDDARRRLEKSNRDDERLTRTVEEELKRSNDEIRKRLETAMRELKKLVKDGVDKDDVERVLDRVRRELEELVKENKEIVREIRKRNEKSKRDNERLLRKVEEDIRRLDRSEEVERRLEKVEEDSRRELKRSEKRSDEVARDSERLLDEWRRRLEEVIRRVKEETR

SEQ ID NO: 3651 - protein, 174 aa, Artificial Sequence; identical to SEQ ID NO: 3650
  Synthetic

SEQ ID NO: 3652 - protein, 174 aa, Artificial Sequence
  Synthetic
SREETVRERLREVAERLKKSNREIEELLKKAAEELKESNTRDKKLSEDVSRRLEKLSRDGVDKDDVRREIERIKRKNDDTERRNKELLDKIREDMERMARRNKELLRRIEEEIRKMDASEEVEERLKRVIEESERRLDKWRRDLDRVIKESEDLLKKSREDSERVVREVEKKEK

SEQ ID NO: 3653 - protein, 174 aa, Artificial Sequence; identical to SEQ ID NO: 3652
  Synthetic

SEQ ID NO: 3654 - protein, 185 aa, Artificial Sequence
  Synthetic
SEIEEVERMLEDLERRVREADKRVREESKKLEDEIRREDKRVEEMIDEVRKKVDELDRDVRGRERLKEVVERLEEEAEEIVKRVRELSKRLEKKVRDHTREVRRLSEELERRARDIKRRVRERLRDKDEVRRIEEEVDRVIEENRETVKEIEERNRRVLEANRESLRELEERLKRILEEVRRRSK

SEQ ID NO: 3655 - protein, 185 aa, Artificial Sequence; identical to SEQ ID NO: 3654
  Synthetic

SEQ ID NO: 3656 - protein, 185 aa, Artificial Sequence
  Synthetic
SEIDEVRREVEELERRAEEVDREVERRSKELKERVDDVDRRSRELSKRLKDTADEVRKRVRGREDLERVVRDLEKKVEEVVETSKRLSDELRKEAEKHTEDVERLSRKLVEELREIVDRVRKRLRDKDKLETIRRRLEEVLKRNKETVDEIRRRNEDVIRRNEESLEKNERDLRRVLDEVRRSAT

SEQ ID NO: 3657 - protein, 185 aa, Artificial Sequence; identical to SEQ ID NO: 3656
  Synthetic

SEQ ID NO: 3658 - protein, 185 aa, Artificial Sequence
  Synthetic
SELEKVDELVKRLMKEVRDVDRRSEKLTEELERKVREMDRKSKKLSEDLERDARRVEKEVRGKERLEKVVRDLERKVREVVKESERLSRELERDAKRVVEESRRLSEELRRKAEELVRRAREELRDKDALRAIEKKLEDILRRNEETLRRNEDKIRRIIETNKRSLEENRRRLEEVLRRVKESAR

SEQ ID NO: 3659 - protein, 185 aa, Artificial Sequence; identical to SEQ ID NO: 3658
  Synthetic

SEQ ID NO: 3660 - protein, 185 aa, Artificial Sequence
  Synthetic
SITEKVERLIRELERKVKEIDDDLRRTSEEIMKRARKADEDSERLSERLRELVDRLDREVRGKEKVKKVVDDIKREAKRIIEKTDELHEETRRLVEENKRRIDELHKEIRETVKEIEKRIDDDGVPRESAERLKEELRRVLEENRETLERLREENERVLEENKRRVDENREKIKEVLRRVEERTR

SEQ ID NO: 3661 - protein, 185 aa, Artificial Sequence; identical to SEQ ID NO: 3660
  Synthetic

SEQ ID NO: 3662 - protein, 185 aa, Artificial Sequence
  Synthetic
SITERVEEDIKRLMEEAKRVDDKVRKLVEELMRDVKRVDKELAELVEELERRVKDLTRRVRGKERVKEVVKDIERKAREIIRRIRKLLDESRKKAEEIIKELRKLHEDIDRKVKEILRDIDRAGVSREEAERLKEELRRVLEENRRTVEEIERRIKRVLEENEETVRRLEKRIEEVLRDVREKTK

SEQ ID NO: 3663 - protein, 185 aa, Artificial Sequence; identical to SEQ ID NO: 3662
  Synthetic

SEQ ID NO: 3664 - protein, 174 aa, Artificial Sequence
  Synthetic
SKVEELKRRLKKVRDDDRRSVEKLRETLRRVLARDRDEIREAERELREALKRLEDAGADEKLLRDMKKVIDEMKEHLKRNNEELKRVVERVERDLERSHDELRRVIEEVEKRLADGDTREDVLRDVERVVREVLEKNKKILKEVKEVVEESLRNVRDLIRRAREIVKEIVDRVK

SEQ ID NO: 3665 - protein, 174 aa, Artificial Sequence; identical to SEQ ID NO: 3664
  Synthetic

SEQ ID NO: 3666 - protein, 174 aa, Artificial Sequence
  Synthetic
KEVEDLRRELEEAKKRDKDLIDKLKRRAEEVKEEDERSIRENKKALRKAEEDLRRKGADEKLKEDLKRIIEESERNNEDSHRRLEEMIEKVRRHLDRNNEDLERFIKDVDELLRRGDTRERVLEEVRKTLKRSMENVEELEKELEELVTRVRDHNRRDHEETRRLLEEIKRRVD

SEQ ID NO: 3667 - protein, 174 aa, Artificial Sequence; identical to SEQ ID NO: 3666
  Synthetic

SEQ ID NO: 3668 - protein, 174 aa, Artificial Sequence
  Synthetic
DEVERLKEKLEEVRRRDEEIIRKLEEDLERVKRDDDRLVRENEEELKRVEEKLERDGADESLLRELKDVIRRSRDHLTRNNEDLERVIRRVEEHLKRNNDTLKDVLRKVDELLRRGDTREEVLRRVEEAAKRSLDNVDKLEKDVADLVRRSMENVRDLHRRTRRLLEELKEKVK

SEQ ID NO: 3669 - protein, 174 aa, Artificial Sequence; identical to SEQ ID NO: 3668
  Synthetic

SEQ ID NO: 3670 - protein, 176 aa, Artificial Sequence
  Synthetic
SEKEKVLEDAERVLREIKKKNEKALREAEEVARRIAEEVKRIHDRSKEVVDDIKRLADAGEVDEKELEERLKRVIDTVRKLNEDLRKKLEDAIRRLEKLLKESKEELKRVAEELRKDLKDDKDVERRVREAKKENDKSVDEIREEVKRVKDELDRLSERNEEELEKVERDLRRRAK

SEQ ID NO: 3671 - protein, 176 aa, Artificial Sequence; identical to SEQ ID NO: 3670
  Synthetic

SEQ ID NO: 3672 - protein, 171 aa, Artificial Sequence
  Synthetic
DEEKKVLDKLRELATRLSRRVEEAHRESEKIAEEIRRRAEKVLRESRKTVEEIKRSPDDRKDVRRVVKEDEDRSREVVKDLERLLKELEDRSRKLEEELRRIMKKIEEEVRRAGVDERIKDDVRRMKKELEDLIEENRRRVEKVKEDIRRLIRELEARNEDVDRELRRKED

SEQ ID NO: 3673 - protein, 171 aa, Artificial Sequence; identical to SEQ ID NO: 3672
  Synthetic

SEQ ID NO: 3674 - protein, 171 aa, Artificial Sequence
  Synthetic
SRLEKVEKELEELAREDKERIKRVIDDIRRLVREDEERIKEMHKKTEDIVRAIEEEDRDREELKRLLERLEEESRRMADESRRTNEEIRRKVEKVVEESKKTNEEIRKRVEDAGADERIKKRVEKLKRDSKRLIDELRKELEEVVKRSEDLIKENRDTVKEVSDRIREKAR

SEQ ID NO: 3675 - protein, 171 aa, Artificial Sequence; identical to SEQ ID NO: 3674
  Synthetic

SEQ ID NO: 3676 - protein, 171 aa, Artificial Sequence
  Synthetic
DDEERVLKELKKLVEDDRKKIEDVIETIERLAREDVERIKRVIEELRRLVKELEDGDLDKEVVRRLLEEIKRAVKEAVRESEKTNDKIRRDVDRVVKDSKRTVKDIKRKVDEAGADEEIKEDVKRAADESEKLIRELRKAVKRVEEESRRLIEELEREVKEAEERLKRRTK

SEQ ID NO: 3677 - protein, 171 aa, Artificial Sequence; identical to SEQ ID NO: 3676
  Synthetic

SEQ ID NO: 3678 - protein, 181 aa, Artificial Sequence
  Synthetic
EEVERLLEELKELVRRIEERLKRAHDEMEDLVRRIKEEIKKLHEDTKRVVEEIRKLIERDNIDKLLERLIEELKRIHEKINRDIKRAIEELKRLSDRIEEEIRKLIKELEDVLRRITETAGRDERVKEAEDRVRDAVRRLKRLLEEHKKASEKVVRELERLLEENRKTVKEVVDRLREESR

SEQ ID NO: 3679 - protein, 181 aa, Artificial Sequence; identical to SEQ ID NO: 3678
  Synthetic

SEQ ID NO: 3680 - protein, 181 aa, Artificial Sequence
  Synthetic
REVEELIKELRRLAEEIRDRIRKLHKEMEDLARDIERRIEELDRELERVATEIAKLIERDNIDRLLDELLERLDRLSKKIEEDVKRLIDESRRLSEEIAKRIKDLIEELKRLLEEVAKRKGRDEDIKRLEEEVRKVEEELKKLLKEHRDANKEVVDRLKRRIEEHKRKTKDLKEELERRMR

SEQ ID NO: 3681 - protein, 181 aa, Artificial Sequence; identical to SEQ ID NO: 3680
  Synthetic

SEQ ID NO: 3682 - protein, 181 aa, Artificial Sequence
  Synthetic
DEVEEVIERLRRLAERIEERLREMDRRLEELVERAKRTIERLHEELEKLVREAEELIRRDNNDKLVEELIRRSEDLSRKIEETIRRIIERLRKLSREIEEEIRRVIEELKRLLDKIRADRGDDKDVTRLEEELRRVVKKLEDLLREHKEKSDRAVEDLERLLTEHKKRNEDVIRRLKEASD

SEQ ID NO: 3683 - protein, 181 aa, Artificial Sequence; identical to SEQ ID NO: 3682
  Synthetic

SEQ ID NO: 3684 - protein, 174 aa, Artificial Sequence
  Synthetic
SEVEEIRKKAEDVMRRLEELDKRLDEVLKKVSRELEKSDKDLEDRIREVIRELEERGGKKRETLKKVIEDLRKLVEEHKELIERVKRELKRIVDEHHRLIEEAKKRLRDILDKITKDTKDEMERRLEEVVKEAERRSEEVLRRLEKVVKDIKKKSKEILDRLEELVREIRERVR

SEQ ID NO: 3685 - protein, 174 aa, Artificial Sequence; identical to SEQ ID NO: 3684
  Synthetic

SEQ ID NO: 3686 - protein, 177 aa, Artificial Sequence
  Synthetic
SESEEIDREAKKVEREVREMSRRNDEELRRVAKESEDSVRRVEDRVREVSEEVEARGVDDKVREELERISRRIKKLLDESRERLKKMVKESKELNEEIRRKLEEILREVRELLKRVRREKELTEILKRLKDLADELRKLLEDVHRRSKKAADEDRKLNEDILKELEDLARELRKKTK

SEQ ID NO: 3687 - protein, 177 aa, Artificial Sequence; identical to SEQ ID NO: 3686
  Synthetic

SEQ ID NO: 3688 - protein, 177 aa, Artificial Sequence
  Synthetic
DEEKKVRDEIRRAEEESRRSSKRNEDELRKVKEEIERRLEEVRRKAKEVEEKVRREGVPEEVEKRLKEILDEVRRLLEELRERLDRVLRRSEELNKRSEDKLRKVAKEVEELLRNVRREEELRRILERLKEMVERDKETNEEIHRRSKDVVDKLRRRIEDIKRRLDELAEKLKEDTR

SEQ ID NO: 3689 - protein, 177 aa, Artificial Sequence; identical to SEQ ID NO: 3688
  Synthetic

SEQ ID NO: 3690 - protein, 177 aa, Artificial Sequence
  Synthetic
DDERRIRETLKRADEEVEKALREVREHTKDVERENEKLSKENKERLEEVKKRVDDSGVDETVKDELRRIVETSKRLNDESRRKSEEIKKDTEKLLREIKEKVERVLERIERLLDKIRRKDVLRKIEKEIEEMVKDLRRLLKEVEDKDRTLAEELRRINEDIHRRSEEMKKELDDRTR

SEQ ID NO: 3691 - protein, 177 aa, Artificial Sequence; identical to SEQ ID NO: 3690
  Synthetic

SEQ ID NO: 3692 - protein, 182 aa, Artificial Sequence
  Synthetic
KEVEDVEEKIREIVERIRDEARKAEERNRDTVRRIEDVARKLHKRTKEIVDEIRDVLTKRREVEEELRKLLTKLREMNERARRRIEELLRRDKKVTKEVKDKLEKLLRELEEELKKIAKEVDSKEMLETIKRKVEKVKEDLRKKIEDIEKHTRDVEDKVRKELERNEKKSRDVKEEVERRLT

SEQ ID NO: 3693 - protein, 182 aa, Artificial Sequence; identical to SEQ ID NO: 3692
  Synthetic

SEQ ID NO: 3694 - protein, 182 aa, Artificial Sequence
  Synthetic
SELEKAEKENKDSADEIREVLKRLEEENRETAKRIEKHTRDAHRKTEDIVRRIEEVLRRRKEVREEIRELLKRLREVNEEVHRRNEKLVREDEERTKRAEEELRKLLEDDKRRVDEVEREVDAKEALKRIRDHVEEVRREVEELLRKIREHTKEVAEKVRRENEKNKKRSEDVRKKVEDDER

SEQ ID NO: 3695 - protein, 182 aa, Artificial Sequence; identical to SEQ ID NO: 3694
  Synthetic

SEQ ID NO: 3696 - protein, 182 aa, Artificial Sequence
  Synthetic
SEVERVLEENRKSAKEIEDELRKVLRENEKSAEDIEREIDKAEKENRETVKDLRRVLTERKEVREEIERLVREDEKKTKDLIEKLRKLLEDDRRRTEEVKRRIRKLVDEDRERVKEAKRRVDSKEKLETIERHVRKVEEDVERMLKEIERRTRDVMRKVDKLIKEIEKHTREVAKEVKEAED

SEQ ID NO: 3697 - protein, 182 aa, Artificial Sequence; identical to SEQ ID NO: 3696
  Synthetic

SEQ ID NO: 3698 - protein, 178 aa, Artificial Sequence
  Synthetic
SLVEDLERKLEESTRRDEESMKRVREILKELEDRDRKSVKEIEDELRKARKEVKDSRVSEEIRKELEKAVEEVERLLRESHEELKRVIDELEELLKESHKRNKKVVDDVKDVLDKLREIEEMAREVIKTLEKVSRELEETNRRVIDRIRKLAEEILRKNKEVLERLRKIVKEIKEKAK

SEQ ID NO: 3699 - protein, 178 aa, Artificial Sequence; identical to SEQ ID NO: 3698
  Synthetic

SEQ ID NO: 3700 - protein, 178 aa, Artificial Sequence
  Synthetic
SLVETLKKILDDSTRRNEELIRRLEEELKRIKETNERTVRELERELKRAEEEIERQNVSEEIRKEVKDVVDEVRKLLEESKERTKRTIDKVRKLLEESHRDNRRVVKEVEDLLRKLREDEEAAKRVIERLRRLSERNVRTLEEIIKTLRDLARRSKERDDEVLEELKEMIRRIEEKSK

SEQ ID NO: 3701 - protein, 178 aa, Artificial Sequence; identical to SEQ ID NO: 3700
  Synthetic

SEQ ID NO: 3702 - protein, 176 aa, Artificial Sequence
  Synthetic
DELEKVVRELEELAKEILKKLDEIIRDTERLVREAVKRLRELIERTRRLMDEVRKKVRDKDLLKEVKERLDRSHEEAERLVRKLKKDLEDSNRRAEELVRRVEEELKDLVRRLRGTDEKVMRELEDTVRRVREELRKLLEEHNRRVKKVLEDLDRLLDEHRKIVEDIKRDLDRREK

SEQ ID NO: 3703 - protein, 176 aa, Artificial Sequence; identical to SEQ ID NO: 3702
  Synthetic

SEQ ID NO: 3704 - protein, 176 aa, Artificial Sequence
  Synthetic
SEIEKVLEELRELVKKAVTDLRRIIEESKRLADEAAKALKDIIRRSEELADRLRKEIRGREVLEEAKKKLDTSNRDAERLVRELKERLDDSHRRLEELVKRLKDDLDRILEELKGTDEKLARELEDVVRKVKETLDRLLEEHKEIIERIKRTLDKLLKEHNEIVERIKRDLDRRRK

SEQ ID NO: 3705 - protein, 176 aa, Artificial Sequence; identical to SEQ ID NO: 3704
  Synthetic

SEQ ID NO: 3706 - protein, 176 aa, Artificial Sequence
  Synthetic
DEMEKVIRDDEKLLEDVLRRLAEIIRRTEKRAEEMVRELEKLIEDSKRKADDVRKRVRTDEVVKRVKEELDESNEKAEKLVRDLKRELEDSNRKAEELVRRIKKENKRTVEEVKGTDEEVVKRLDDIARDVNRTLDKLLKDHNEIVERIERTLDELLKEHNEIVKRIKEDLDRKRK

SEQ ID NO: 3707 - protein, 176 aa, Artificial Sequence; identical to SEQ ID NO: 3706
  Synthetic

SEQ ID NO: 3708 - protein, 176 aa, Artificial Sequence
  Synthetic
DDAETVIERDRKLADEVAKELKRLIEETRDLARRIREELRRLIEELKTLAKRAKDEVRGDEVVEKVKKELDEILKTIEDLVREVKRELDESNERAKELVRRIKKRNDDTVKEVQGTDRDVVRELREIARKINEDLDDLLRKHNEIVEKIKRDLDRLLEEARKILEEIKRELDETKK

SEQ ID NO: 3709 - protein, 176 aa, Artificial Sequence; identical to SEQ ID NO: 3708
  Synthetic

SEQ ID NO: 3710 - protein, 178 aa, Artificial Sequence
  Synthetic
DEEERLRDSVRRSRELIKEIRKRLEESIRRSERINERVREELRRSVRESERSAEEARRRGDLREELLKELEEVNKALEDMLRKNEKKSEDVNEDLRRRIKELEEELERVNDTVRKLIERNRDTETVLEEHKERVKRILDRARDLLRKHRELVEDSRRHLEKLLRDHRKVVKEIEDKIR

SEQ ID NO: 3711 - protein, 178 aa, Artificial Sequence; identical to SEQ ID NO: 3710
  Synthetic

SEQ ID NO: 3712 - protein, 178 aa, Artificial Sequence
  Synthetic
SEEERLRESLERSRKRLEEVKRELERKLEEWEEIVEESRRRAEKSLRESKERIDDLKRRGELREKLEEDLKEVNKEIREMIKRSKDEVERKIREVERRAKRLAEKLEELNKKMKDLADNNRDTEEVLRRHEKVVRRIDEELEELLEELERVIREDTERNKKLLDEHREVVKEIEERVR

SEQ ID NO: 3713 - protein, 178 aa, Artificial Sequence; identical to SEQ ID NO: 3712
  Synthetic

SEQ ID NO: 3714 - protein, 178 aa, Artificial Sequence
  Synthetic
SSEKRLRDSVRESRDRARKIEEDHRRLVEEWERLVKRSEEEVRKSVEESREEVEKAKKEGRLREELRKELEDVNEKLKKDIKRSKEEVKKVIDRSRESVKTLLDRLEKMNRDLEELLRNNSDTDKVLEDHKRLVEKILKEAEDNLRRSRKMIREDEERNRDLLRRHREVVKEVKRKVD

SEQ ID NO: 3715 - protein, 178 aa, Artificial Sequence; identical to SEQ ID NO: 3714
  Synthetic

SEQ ID NO: 3716 - protein, 178 aa, Artificial Sequence
  Synthetic
DKEERLRESLEKSDRDIRRIKEELERLLREWEKRVRDSEKELRDVLRKVTEEAKELKKQGKLREKLLKELDDVRKRVEKVMRKSKEDVKRVIEEVKRRADELKRRLEKVNRDVEEALKRNVDTDDLLRRHKEVVEKILREIEELLRELREAIRRDKKRNDELLKRLAEVAEKIREDVR

SEQ ID NO: 3717 - protein, 178 aa, Artificial Sequence; identical to SEQ ID NO: 3716
  Synthetic

SEQ ID NO: 3718 - protein, 178 aa, Artificial Sequence
  Synthetic
SEKETLERSIRESERILEEVLRELKKVLDEWRRRVEESEKRHRDLIEEVRRRAKKLREDGKLREDLLRELERILRESRESVDKSKKEVEEVIKRVEDKAREIAERLKRMNDEVREAADKNVDTDDLLRRHKELVEEIKELLERLLRELEEVIKRDKDKNDENLTRSKRLIEEIEERVR

SEQ ID NO: 3719 - protein, 178 aa, Artificial Sequence; identical to SEQ ID NO: 3718
  Synthetic

SEQ ID NO: 3720 - protein, 178 aa, Artificial Sequence
  Synthetic
DSEERLKESVKRSEDDLKRLRDEHRKLVEEWRRRIDESERRHRKLIEDVRRRLTEFRKRGDLREELEKRITEAERRSKESVEESRREAEEVIRRSERSVDKLAEELREVNKRLEEAARRNVDTDRLVEEHKKMVKEIRDRVKANLERSRRMIKRDKEKNDDNLRRSKELIDKLEEDVR

SEQ ID NO: 3721 - protein, 178 aa, Artificial Sequence; identical to SEQ ID NO: 3720
  Synthetic

SEQ ID NO: 3722 - protein, 178 aa, Artificial Sequence
  Synthetic
SKEERLRESSRRSEKAVREVEKRHKESVERSKEEIRRLAEELRKSIEDSERRIKEIRERGKARDELLEELRRVNDEVRDRLRRLKERLEEVNKESKDSVDDLKRKLREVNERAKELITRNVDTDRLLEEHRKLVERILEELEKNLERHRRVVKEILDRVKELLDEHRRRVEEIERKIE

SEQ ID NO: 3723 - protein, 178 aa, Artificial Sequence; identical to SEQ ID NO: 3722
  Synthetic

SEQ ID NO: 3724 - protein, 178 aa, Artificial Sequence
  Synthetic
SKEETLKRSSEESKKELKRVDEELEKIIREWEEDVKRSEKELEEVIERAKREAEKLRTRGELREELKRELERVLRDVRRRVEDSKRDVKRELDKLKKDLDAIRRELEKLNKEVEEAMKRNVDTDTLLERHKRLVEEVREKLERLLRRLRKVIKEDRERNKRLIKRLKEVIDEIRERVR

SEQ ID NO: 3725 - protein, 178 aa, Artificial Sequence; identical to SEQ ID NO: 3724
  Synthetic

SEQ ID NO: 3726 - protein, 178 aa, Artificial Sequence
  Synthetic
SERERLEDSSRKSKERLERIARTLEKLLRDWRREVEKSEKRHRELVEKVRRDLDDLRRRGKVREELERKLEELIKESEKSVKRSKDEVEKVIREMEEELKRLVEELERVNTEVREAAERNVDTEKLLRDHKRLVDDLDRRAKELLEELKRVIDEDKKRNEKNLTDSRRLVEELKEEVR

SEQ ID NO: 3727 - protein, 178 aa, Artificial Sequence; identical to SEQ ID NO: 3726
  Synthetic

SEQ ID NO: 3728 - protein, 178 aa, Artificial Sequence
  Synthetic
SSKERLEESSERSERSIERIDREHERSSEESERRLKKMVDDLRRSSEKSKDDLEKLKREGKVREDLERELREVNKELERLARELAEKLRKVNKDSKESVRELEERLRDANRRLEELLRRNVDTDELVERHKRVVEEIEERAERNLRRHKKVVEDILREARKVLEDHKELVERLKERVE

SEQ ID NO: 3729 - protein, 178 aa, Artificial Sequence; identical to SEQ ID NO: 3728
  Synthetic

SEQ ID NO: 3730 - protein, 178 aa, Artificial Sequence
  Synthetic
DAERRLKKSSEDSKRAIDELRKEHEDSSRESKERLDKIKRDHEELVRRARERAEELRRRGKLREELVKELEKAIEESERNVEKLARDLERANEESRRSVEELVKELEEANRRLEELLARNVDAEKLVTDHKRVVETILDKARKNLDRHRRAVEDLLRKARENLKKTEELVRKLDEDVR

SEQ ID NO: 3731 - protein, 178 aa, Artificial Sequence; identical to SEQ ID NO: 3730
  Synthetic

SEQ ID NO: 3732 - protein, 178 aa, Artificial Sequence
  Synthetic
DAERRLREILRRVTERLKEVKERHKRSSEKSKKSADDVRREHEKLAEELRRKVEELKRRGELREELEKEVEDLLRESEESVRRLEEELKEINERSKRSVDKLERELEEVRRTVEDLIKRNVDTDTVIEELKRRIRELEKRLEENLRRHEELVRRIEEELKRNLKRSRDLLKEIEDKVR

SEQ ID NO: 3733 - protein, 178 aa, Artificial Sequence; identical to SEQ ID NO: 3732
  Synthetic

SEQ ID NO: 3734 - protein, 182 aa, Artificial Sequence
  Synthetic
SEAEEVLRRLEELAKRDREENKKVLDDLEKLVREDEERNKEVLKDLEKFIDELDKELRSEGREVVEELEKKLREVVRRVRKKAEDSHRRLEEIVERVKRLLDESSKKVREIVERVKKEVKDLDKDVVRELERLLREWERDNERSREEIDRVIEEARKRNEDSERELDRLIKEVKDRLDEKAR

SEQ ID NO: 3735 - protein, 182 aa, Artificial Sequence; identical to SEQ ID NO: 3734
  Synthetic

SEQ ID NO: 3736 - protein, 182 aa, Artificial Sequence
  Synthetic
SDAEDVLRKLKELIDRDTKENDEVLRKHKRLTDEDRRKNEEVVRELRKIITRLDEKLRAEGKELVDEVAKEVDKVVKDVERLLDESHEENKEVNRDLKRLLDESSKKVEKIIREVEEEARRLDKEVLDRIRDLLRRWRERNEESRRRAEKSIRDSDETNKRSREEIKRIIRKLREILKERKR

SEQ ID NO: 3737 - protein, 182 aa, Artificial Sequence; identical to SEQ ID NO: 3736
  Synthetic

SEQ ID NO: 3738 - protein, 182 aa, Artificial Sequence
  Synthetic
SDVEKVLRELEELIDRDRRDVEKVIEELRKLIKEDEEENREVLKRAEKMLREIREKLRNSGKEFLDELKRELEKVVEEVERLVKRSHDKLRKIERDVEEVAKRSTEDVKRVVDDVERKAKDIDEKFLRDIRETLKRWKERNEELTRRLREIIREVEERNEESKRRLDELIREAEEDMRRRRT

SEQ ID NO: 3739 - protein, 182 aa, Artificial Sequence; identical to SEQ ID NO: 3738
  Synthetic

SEQ ID NO: 3740 - protein, 182 aa, Artificial Sequence
  Synthetic
SEAERVLEDLKRLIDEDRKKLREILEDHKRLTDEDRERNRRVLEELDKIIKELDERLRSEGRELLKKVREELDRVVRRVEDMVRRSHETNKEVNERLKRLLRESTEDVKRIVREVRERARKLDKDVLDKIEKSLRDWERDNERMVKEADRSVKRSDETNEKSREDLERLIEEARRRLKERER

SEQ ID NO: 3741 - protein, 182 aa, Artificial Sequence; identical to SEQ ID NO: 3740
  Synthetic

SEQ ID NO: 3742 - protein, 182 aa, Artificial Sequence
  Synthetic
SEVERVLEELEELARRDEEKNKRVEDRLRKLIEDDRRDLRRILERLREIAERLKEEAESEGKEVLDEVRKKVEDVIREVEKLLRESTKRLEDVKREVEELLKRSREEVEEIRERVERKVKDIDEEFVRRIRDLLRRWKEEVDRSEDRIRRELEKWERENEEAEKRIRKIIEDLRREIKKKAD

SEQ ID NO: 3743 - protein, 182 aa, Artificial Sequence; identical to SEQ ID NO: 3742
  Synthetic

SEQ ID NO: 3744 - protein, 182 aa, Artificial Sequence
  Synthetic
SKLERVLEELERLIREDEDENKKILDRLKKLIDEDKKENDEIMETLKEIARKLTEELRSEGEELLEEVKKRADKAVEDVKRLLEESRRKVEKIVREVRKLLEDSNRKLEEIIKRVEEELKEADEEVLRRIRELIKEVRRRNDESRERIERLLKEWRERVDASERTIREIIKEIKERVRRARK

SEQ ID NO: 3745 - protein, 182 aa, Artificial Sequence; identical to SEQ ID NO: 3744
  Synthetic

SEQ ID NO: 3746 - protein, 182 aa, Artificial Sequence
  Synthetic
SKAEDVLRKLKELIDRDRDENRKVLDELRRLIERDREKNRRIMEKLKKIVRELEEALKVDGKELVKKVEEELRRVVEEVKKLLKESTDELDKIVRDVEELLKRSEEKVEDIERKVREEARELREDVLKRIEDELERWKEEVERSKREIEKLIKEARDENDKSRKTIEKIIREAEKILRDRDR

SEQ ID NO: 3747 - protein, 182 aa, Artificial Sequence; identical to SEQ ID NO: 3746
  Synthetic

SEQ ID NO: 3748 - protein, 182 aa, Artificial Sequence
  Synthetic
SEAERVLEELKELIERDEEENRRILEEHKRLTEEDLRENREVMKRLEDIIRELEEKLRTEGKEELDEVKKEAEEVAKEVKRLLEESTEKNKEVNERLKRLLDESNKKLREIVKKVREDARRLSEKVLTDIERLIREAEKRNRDSKREAEKSVKKSDELNERSRRRIEKIIEELRRLVDTRRT

SEQ ID NO: 3749 - protein, 182 aa, Artificial Sequence; identical to SEQ ID NO: 3748
  Synthetic

SEQ ID NO: 3750 - protein, 182 aa, Artificial Sequence
  Synthetic
SDVEKFLDELRELIRRSKERVDRMLRKLEELIRRSSEDVERLLKELKELIDDIRRLLDENREKREDIRRLVEELRKRVEDIIRKMEESNKRLRDEVEKIIRELEKLNEEVARVIKKAEDDIRGDELRERIKRLLEEHHKRLREAVEELRKLVEDATEEHERLSERAKRLVEEVKKRVDERER

SEQ ID NO: 3751 - protein, 182 aa, Artificial Sequence; identical to SEQ ID NO: 3750
  Synthetic

SEQ ID NO: 3752 - protein, 182 aa, Artificial Sequence
  Synthetic
DEVEKVLRDLEELIRRSETDIRRLLEELKKLIDDTRREVKKVLDDLRRRIKEVLDRIRRNPEKREEIERLVRELKRKVEEIEKRLERLNEEVERKIREIIRRIRETNKTLRKKVRELEKRLRGDEARERLKDTVTKASRRHEKVERDLEKLLEEHHRAIEKLRKELRDLVRKAKEDIDRARK

SEQ ID NO: 3753 - protein, 182 aa, Artificial Sequence; identical to SEQ ID NO: 3752
  Synthetic

SEQ ID NO: 3754 - protein, 182 aa, Artificial Sequence
  Synthetic
DEAEKVRREHRELVEDSLRKAEEALKRLDELIKRTEKRVKDVEEELKRLIKRVLDEVRKNREKREDIRRLVKELRDKVREIEDEMRKMNEEVRREVKKVEDDLRRTNRELHEKVKDVERKLKGDEVKRRLRTSDKKVSEKHKELLDRLRELLRRHHESLKRLEERIRKLVTDATRRIEEEEK

SEQ ID NO: 3755 - protein, 182 aa, Artificial Sequence; identical to SEQ ID NO: 3754
  Synthetic

SEQ ID NO: 3756 - protein, 182 aa, Artificial Sequence
  Synthetic
DEVEELLKEHRELVKESKKTVEKMLRELEELIKRTRDEVEKVERTHEELVRRVDEVLKRRREVAEDIERLLREIHKFVEDVKEKIKKLNEDVAKVLREITEDIKRTNKELHDVVERVTRRIEGDELKERLKESDKEASDLHEKAREDLERLLKKHHDDLRKIMERLERSDKEAKKRLEEEKT

SEQ ID NO: 3757 - protein, 182 aa, Artificial Sequence; identical to SEQ ID NO: 3756
  Synthetic

SEQ ID NO: 3758 - protein, 182 aa, Artificial Sequence
  Synthetic
DEVEKLLKELEDLRRKTREDLERVKKELEELVKRSKDRLREAEDELRRLVEDIERVIREDREAREDIRRLVEELKKKVDDIRRTLEESNEELRRKVERIIRELERANRDVREKVKEVERRIKGDELKKRIRELVKEHTDELRKVKRELEALVEKATEDHERVLRRLEELVERIKREVDKAEK

SEQ ID NO: 3759 - protein, 182 aa, Artificial Sequence; identical to SEQ ID NO: 3758
  Synthetic

SEQ ID NO: 3760 - protein, 182 aa, Artificial Sequence
  Synthetic
SDAEDLLREHRELVERSKREVERVLDELRRLIEKSLREVEKVLKELEKLIREILDRVRKNSEKEEEIERLERELEKIVEEIERRIETSNRELKRIVKEIIDEIRRTNKELHDKVRDVERKLRGDRVREELRRSDEKVSRDHEELVKEAERLVDEATKEHRKLKRRIRELVRRAKEEIEKLRK

SEQ ID NO: 3761 - protein, 182 aa, Artificial Sequence; identical to SEQ ID NO: 3760
  Synthetic

SEQ ID NO: 3762 - protein, 182 aa, Artificial Sequence
  Synthetic
SKVEDILRRHRELVKKSLDEIRDLLRKLKRLIEESLRRVEEVLRDHERLVREIEDRVRKNREKREELRKLLEDLHRKLEEVEREIRESNKKLAEEVRKIEETIRKTNKELHDTLRDAERKIEGDELKRRLRESDKRVSERHKRATEEIKKLLDRATEEHKKLVKRLRDSDKRVADELDKAEK

SEQ ID NO: 3763 - protein, 182 aa, Artificial Sequence; identical to SEQ ID NO: 3762
  Synthetic

SEQ ID NO: 3764 - protein, 182 aa, Artificial Sequence
  Synthetic
DDVDRVRKEHEKLVRDSLDTARKLLEELEDLIRRDKEDVERVLEELKRLIEEIDDRVRRNREKREELRELLKELEKRVRDIVKKNEESVDELRKKVEDIIRRLAETNKRLHDRLRDVERKLRGDELIERLRRSDKRASEEHKRLMDEAKRLVEKAEKDVTELNKDIKRLVKEVEDRLREAER

SEQ ID NO: 3765 - protein, 182 aa, Artificial Sequence; identical to SEQ ID NO: 3764
  Synthetic

SEQ ID NO: 3766 - protein, 178 aa, Artificial Sequence
  Synthetic
DEVKKVLDESRELVDRIRRKAKEVDDRDRKLIRDVLEELKKLLEENRKLVEDIRRLLEAGVSEDELRRLLEESRELIKRVKERLDDALRRLEESSKTWKEELDRLLEENEELIRRAEEAGVDKETLRRLHEETERILRDLKRHNDELNDEARKRLKEVKERLDESHDRVRRELEAKER

SEQ ID NO: 3767 - protein, 178 aa, Artificial Sequence; identical to SEQ ID NO: 3766
  Synthetic

SEQ ID NO: 3768 - protein, 178 aa, Artificial Sequence
  Synthetic
KDVEEILRKLKELIDEARRRLEKTLRDHEDIVRRAKRRLEELLKRHRDIMDEVRRKVRTKELLDTVREDSKRVVKEAREILEELKRISEKVVEEHKRLSEELKRRLDKILEELERRGVPEEARRRLEEEVRKVRKEIEDVNRRLEKSHKEAEETLRRVEEELKKSHDELERILREIER

SEQ ID NO: 3769 - protein, 178 aa, Artificial Sequence; identical to SEQ ID NO: 3768
  Synthetic

SEQ ID NO: 3770 - protein, 178 aa, Artificial Sequence
  Synthetic
DDVEEILRTLRELIKKIKKDLKKVLDDHERIARRAKEELERILRRHREIVERVDRKVRTEEVATRVAETSKRVVDDARRILKRIAEISREVVEDLKRILKEAAEALRELLRRLEEAGIPDEARKKIEDIVREVEDDLRRVAKAAEDSNRKLEKDLREVAERLRKSHEEAEKALRDREK

SEQ ID NO: 3771 - protein, 178 aa, Artificial Sequence; identical to SEQ ID NO: 3770
  Synthetic

SEQ ID NO: 3772 - protein, 178 aa, Artificial Sequence
  Synthetic
DDVRRLEEELRRLMEEAERRLRKTLEDHKRIVEEAKRRLEEILREHKRILEEIDKRVRTEEVLDEVLRESKRVVDDARRILKELKETSERVEERHRRLSKELKKLLDEILERLARRGAPEELKKRVEDLVREIRRRLDKVNEDLERSNRELEKVLRDVLRELKKSHDDLERSLRETRR

SEQ ID NO: 3773 - protein, 178 aa, Artificial Sequence; identical to SEQ ID NO: 3772
  Synthetic

SEQ ID NO: 3774 - protein, 178 aa, Artificial Sequence
  Synthetic
DEAEKILDELRRLIDEIRRRLRKTLEEHKRILERIRRELEKMLEEHRRIVDEMRRKLRTEELIKEAEDRSREILRRVKEIVDRVREESRDVVRRHEELSRELKKLLDEILERLKKTGLPEEVTRRLEKLVRDVDRDIKRVNKELEKSNRELEKDLRAVEKRLEDSNRDARKKLEDTRR

SEQ ID NO: 3775 - protein, 178 aa, Artificial Sequence; identical to SEQ ID NO: 3774
  Synthetic

SEQ ID NO: 3776 - protein, 178 aa, Artificial Sequence
  Synthetic
DDAERILEELKRLMEEVEKRLKDTLDTHREIARRILERARESLKRHEDIAREIERDVRTEELLKRVLEDSERVVRDHERLSREVAKDSKRVLKEHEELSRRVARRLEDILRKLEERGVPEDVKRKIRELVERAKKRLKEINDELKKSDEDLDRKLEDLNRRLEESNEELKRRLDETRR

SEQ ID NO: 3777 - protein, 178 aa, Artificial Sequence; identical to SEQ ID NO: 3776
  Synthetic

SEQ ID NO: 3778 - protein, 178 aa, Artificial Sequence
  Synthetic
SDAEKLLEDIRKLTEDVERDLRRSLEELKDLIRRLKKEIEDLLERHKRIVDKVVREVRTEEVLREVKKESDKVLKELEELVDRIKKRLDELLKRHRELSEEIKRRLRELLKRLRDRGVPEEVKERVERLVREVEKRLDEVDKELEEEVDKARKELEKLLEDIDRSDKEARKRLEDKRR

SEQ ID NO: 3779 - protein, 178 aa, Artificial Sequence; identical to SEQ ID NO: 3778
  Synthetic

SEQ ID NO: 3780 - protein, 174 aa, Artificial Sequence
  Synthetic
SKEDEIRRLIEDLERRNKEVEETLRELVRETRERIERIKRRLEELIKKSKDEVDDARRKGKVKEELEKKVREIVDESRRLLERLEERVREAVEESERLVERDKEDSRRIKKEIEDIPGSEELLERLERLIDKSRKNVEDIVKRHEDLSRELTERAKAILERHKELTDELREDVR

SEQ ID NO: 3781 - protein, 174 aa, Artificial Sequence; identical to SEQ ID NO: 3780
  Synthetic

SEQ ID NO: 3782 - protein, 174 aa, Artificial Sequence
  Synthetic
SEEERIERLIDELRRDNDEVRKRLDKLVKDTERENEEAERRLRRLIEESRREVEKLKAEGKVKEELERDVERIVKESEDLLRESHKEVEEMVRKSRELVEDDKRRSDEVVERVERIKADEELARELEKLIEDSRRNVKRIKEEHEELSRRNRKLLEDILERHRRLTEELRKKVK

SEQ ID NO: 3783 - protein, 174 aa, Artificial Sequence; identical to SEQ ID NO: 3782
  Synthetic

SEQ ID NO: 3784 - protein, 174 aa, Artificial Sequence
  Synthetic
SKEREIEELIKELEEEVERLKEELRRIIKKLRDDNKRAEEELERLIRESKEDLDRARKEGKVKEEIEKKLRRIIEESERLVEEDKKKSEEIVKRIEELVKKLEKKVRDVAERVRRIPAAEELRKELEDVRRKLKEEIDRILEEAKRVVDDSRRNAEEITRRHKEATKRLREEVE

SEQ ID NO: 3785 - protein, 174 aa, Artificial Sequence; identical to SEQ ID NO: 3784
  Synthetic

SEQ ID NO: 3786 - protein, 186 aa, Artificial Sequence
  Synthetic
SIAERLKELIDRMREDNERAAKELRELIRKAKEESKEVEERLRRRLKELRDRVEELVRRNSEGDKKVREIRKKLEEIIEEIERLLRENEKLVREIEKRIKELIDRDRKRSKEIEDRIRDLIRKLKDLKEMLDRILEELKKLIKESRENLRRILEDLKRLLDESRRHAERITRRLEELIKELKEKAD

SEQ ID NO: 3787 - protein, 186 aa, Artificial Sequence; identical to SEQ ID NO: 3786
  Synthetic

SEQ ID NO: 3788 - protein, 186 aa, Artificial Sequence
  Synthetic
KARERLKRLIEEAKRRNEEMEKELDRRLDELRRESKTLEEDLRRSLEELEERIRRLVKRNSEGSEKIERLKRLVEEIKRRVERAIEENKELVRRIIERIKRLIKENRKLSEDIERRIDDLIRKLKDLREMVEEILRELRKLVEDSLEVLERILDDLRRLIEESRKHLEEVKRRLEELKKRLEDEAR

SEQ ID NO: 3789 - protein, 186 aa, Artificial Sequence; identical to SEQ ID NO: 3788
  Synthetic

SEQ ID NO: 3790 - protein, 178 aa, Artificial Sequence
  Synthetic
KEVEKILEEIERLIREIDREVKRVKTENEKTVRDIRKRVEEIKEEHKDLTRKLEKLARDGVPEERLREVLKRIEDRTREVIEELRELLRRDEKKVRDMIRKLKDLVKKIEDRVRKVELSDEARKRAEDLLRDAKRRVDEVVEELKKTVEELKEEVRKVEEELKELVKRSEDKVRETER

SEQ ID NO: 3791 - protein, 178 aa, Artificial Sequence; identical to SEQ ID NO: 3790
  Synthetic

SEQ ID NO: 3792 - protein, 182 aa, Artificial Sequence
  Synthetic
SEVDKVLKEHEDLVREDKKRLEEILRELKDRLRRDEEELRRIMEELEELLRRLKDVVDKRREDRETLRRLLEELRKKVEEVKRRNDRSVRELEKVVRKVVKENEDSLREVHKRLRDVEKDLRKKEMIDRLRRSDEELKKEADRANEEAKRIVEKIRDTLKKANDKLDEIVERIEDELRRAET

SEQ ID NO: 3793 - protein, 182 aa, Artificial Sequence; identical to SEQ ID NO: 3792
  Synthetic

SEQ ID NO: 3794 - protein, 182 aa, Artificial Sequence
  Synthetic
KEAEDVEEEHKRLVEDDRRKLEEIKKTLERLVEEDRRRLEEVVRELKRLLDEITDVLTKRREVEKDLEKLLEELERLVKKVVDENKKSVETLTRTVEKVSRDNKRTLKEVHDRLRDVERKIKDDEVRKRLRKSDKELRDEAREVNKELEAIVKRARDEVKKVNDDLRKIVDEVRETVKEARR

SEQ ID NO: 3795 - protein, 182 aa, Artificial Sequence; identical to SEQ ID NO: 3794
  Synthetic

SEQ ID NO: 3796 - protein, 182 aa, Artificial Sequence
  Synthetic
DEVREVKKRLRDLIRDDERELRRVLEELKELVKDDVDKLRRLIEKLRKLLEELRRVATKRREVREELRKLLKELRDEVRKASEENRESVERLERRVREISERNKKSLKELRDVVEDVTRKLRDEKAREELKRIVEEVEEKSRRANKKLKDIVDEMRERVKRANEELDDIVKKITEDLERMRK

SEQ ID NO: 3797 - protein, 182 aa, Artificial Sequence; identical to SEQ ID NO: 3796
  Synthetic

SEQ ID NO: 3798 - protein, 182 aa, Artificial Sequence
  Synthetic
REVDEVRKEHERLVKEDEDKLRKIIEDLKKLLREDEKRLREALKRHRELVEEARDVVRKRKEDRERLRKILEDLHRMVRKVSKDNKKSVEDLEREVRRVSTENKKSLEDIHRMLKDVAEKLRSDKVKKELEESDRRVEEKSRRANETLKRIVEEIRKKAEEINRRLKESDDRAAEDIKRVEK

SEQ ID NO: 3799 - protein, 182 aa, Artificial Sequence; identical to SEQ ID NO: 3798
  Synthetic

SEQ ID NO: 3800 - protein, 182 aa, Artificial Sequence
  Synthetic
DEARRVKEELDKLRREDEELLRRLMEKLKDLIRRDTEELKRIIDELRELVERLEDELRRRREDRERLRELLRRLEDRVRRVSDKNRKSLEDLERVVEEVSRENEKTVRRLEKKVKEVEKDLKDEKVREELRRIVDRVKKEVDRANRELEDIRREVEEISKRANEELERIVTEAADRLRKVAE

SEQ ID NO: 3801 - protein, 182 aa, Artificial Sequence; identical to SEQ ID NO: 3800
  Synthetic

SEQ ID NO: 3802 - protein, 182 aa, Artificial Sequence
  Synthetic
SEAEKVIREHERLLEEDRRRLEEALRTLERLAERDEERLKEAEERHRDLLRKLEETVKKRREVREKLRKILEEIHRTVKKVSEDNEKSLRELKEKVDRISRDNEETLERAHRRLRRVEERLEKDEVKRRLRKSDEDVKRRAEEINKEAKEIVDDVKKKSDEANKRLKDSDKRVAERLKEAED

SEQ ID NO: 3803 - protein, 182 aa, Artificial Sequence; identical to SEQ ID NO: 3802
  Synthetic

SEQ ID NO: 3804 - protein, 182 aa, Artificial Sequence
  Synthetic
SEVEKVIEDHDRLLKRDEELLRKIAEDLKDLVRRDEERLRRATEKLKRLLETLEDVLRKRREVREDLRRLLKELKEAVKRISTENKKSLDKLREDVERVSRANEKSLRDAHRKLKDVEDKIKDKEVKDKLRRSDERVEKRSRDANRELEEIVRRARKKSEEANRRLEEIVERAEKRLKEAED

SEQ ID NO: 3805 - protein, 182 aa, Artificial Sequence; identical to SEQ ID NO: 3804
  Synthetic

SEQ ID NO: 3806 - protein, 181 aa, Artificial Sequence
  Synthetic
SEVDKVVEESKTSMRRLERRHREATKESKKSIEEIEETVERVKRESEKSVKKLDDLVKNGSDKSALERALEENRRLIEEIKRTLDRLLETNKRLIEEISRESKELLEENKELIERIEKDVKDEEVRRRLRKIHKELEERLRRMNKRLRELHRELEEKVKEVKKELEDIHRKARERVEKAKE

SEQ ID NO: 3807 - protein, 181 aa, Artificial Sequence; identical to SEQ ID NO: 3806
  Synthetic

SEQ ID NO: 3808 - protein, 181 aa, Artificial Sequence
  Synthetic
EELKEVRERSKESIKRIKEEHERVEEELKDIKRDIDRRHKEVVDESRESVKRVEDLSRADVDEEELRKLLERNKELIDRASEESKRMLEDLERVVREASEKSKRLLEENKKLIDDIERRVKDEEVRRELREIHDELRKRVEEANKRLEDILREIDKRLKELNEELKRIHDRARERLEEERR

SEQ ID NO: 3809 - protein, 181 aa, Artificial Sequence; identical to SEQ ID NO: 3808
  Synthetic

SEQ ID NO: 3810 - protein, 181 aa, Artificial Sequence
  Synthetic
DEIREVIKESKKSVEDVKRRHEEAKRESERSLKEIRELAEEVKERLRDLLRRIRKLVKDGVDEKTLEELLRRIEELLKRIKDRLDEMLERNRELIKKISDDSERLLRDNERLIRDIERKVKDEEVRRRLRKIHKEAEERLRRANDELRKLHEEIKKTVEKIKRELDKIVEEIERDVRRDRK

SEQ ID NO: 3811 - protein, 181 aa, Artificial Sequence; identical to SEQ ID NO: 3810
  Synthetic

SEQ ID NO: 3812 - protein, 181 aa, Artificial Sequence
  Synthetic
SRVEEILRDSKRSMDEARKEHERVLRELRDRLRRLDERHRRLLEELKRLLREVRELTRAKVSERELREALKTIRELLRKISEESKRLLEEIEEVLKRISDTSKRLLEENKKLIDDARREVKNEEVLRRLDDIHRRIKRELKEVNDRLEEIVREIRKRLKEVNERLKEIVDAVEEVVRRAEK

SEQ ID NO: 3813 - protein, 181 aa, Artificial Sequence; identical to SEQ ID NO: 3812
  Synthetic

SEQ ID NO: 3814 - protein, 181 aa, Artificial Sequence
  Synthetic
KRLEDVARESKKSIDEIRKRHKEATDESNKSIEEARRIHEEVLRTLKELLDRVRKLIESGVSERALDEALRTIKELLERISRTSEELLRRNRELIERISKESKELLDTNRKLIEDIEREVDEEEVRRDLRRIHERLREEAEEVNERLERNHEELEREARKVNEELRKIVEDARREVERAKD

SEQ ID NO: 3815 - protein, 181 aa, Artificial Sequence; identical to SEQ ID NO: 3814
  Synthetic

SEQ ID NO: 3816 - protein, 181 aa, Artificial Sequence
  Synthetic
DDVEEIKRRLEELLERLKEDHKRMLEESRKSVEDAEKIVEEVKKESEDSIREIKKLLKDGVDEDTLRELLDRNRRLIERIKEDLDRLLKENRELIKKISERSEKLLREIRKVVKEAKDRVKDEKVKRELDEIVKRIEDEARKVNEELKRIHDDAERKVRKVKEDLERIHRELKKRVEDDRT

SEQ ID NO: 3817 - protein, 181 aa, Artificial Sequence; identical to SEQ ID NO: 3816
  Synthetic

SEQ ID NO: 3818 - protein, 181 aa, Artificial Sequence
  Synthetic
KEDERVEEELRKLLKELEDRHKKASEDSRDSIRRIRERARTVLEELKRVLEDIDRLIKADVREEELKRALEELEKLVREIKKELDDLLDKNRKLIEKISKESRELLEKIERVLEDIRRRVKDEEVKRRLDKIVDDVRERLKEMNDRLRRLHEELKRELERIKEELDKILEEVKRRLEEARR

SEQ ID NO: 3819 - protein, 181 aa, Artificial Sequence; identical to SEQ ID NO: 3818
  Synthetic

SEQ ID NO: 3820 - protein, 178 aa, Artificial Sequence
  Synthetic
ELEERLTRSNDELRKELKRMNEELRRKLEEIRKELERLNEKLREIIERIKEDLDRRARDKDKVKRVTDELRELLKRAHDISRELLKTLEKLIREIHKLSKELLEESDRLLDEARKKVKGRELAEEFLRRHKELVERIREIHERLRERLEELLRRIEELHKRLEDELREVLKRIEDEIR

SEQ ID NO: 3821 - protein, 178 aa, Artificial Sequence; identical to SEQ ID NO: 3820
  Synthetic

SEQ ID NO: 3822 - protein, 178 aa, Artificial Sequence
  Synthetic
KKEEDLDESNKRARDELKEMNDRLRKIVKEIEDELRRLNEEARRSNEELRRRVEERLKDKETADRVLKESEDLLRTIHKLSRDLLKELEDLLREINKRSRELLEESDRLIDRIRKEVKGDELAKKVIKEHEDLVREVLKRHEDLLRRARELLKKIKEIHDRLLDEHRKLVEDIEREAT

SEQ ID NO: 3823 - protein, 178 aa, Artificial Sequence; identical to SEQ ID NO: 3822
  Synthetic

SEQ ID NO: 3824 - protein, 178 aa, Artificial Sequence
  Synthetic
DRERELEKSNRELERELREALKRVKEIIDRIRKTLEDMNRRLKRSNEEAERRLREKARDKDKVDKIVTESKKLVEDIHRTSRELVRELEKLLREMERILRELKRRSEKLIKEIRDKVRGDELAERVIREHRRLAEEIRRLIEKLKREIEELLERARRTHEDLLRKHKELVKKVDEEIR

SEQ ID NO: 3825 - protein, 178 aa, Artificial Sequence; identical to SEQ ID NO: 3824
  Synthetic

SEQ ID NO: 3826 - protein, 178 aa, Artificial Sequence
  Synthetic
DDEEEVKRSNDELRKEIKEAEERLEKSNRELEEDLRRMNRELEESNKRLRELLEREARDEEKVRRVIRESERLVEEIHKRSKELEERSRELIKRIRDELRKLIERSDRLLKDVKDKVRGKELAEDMLRRHRDLVREIRELIDKLTRDHDRLVKEAREIHKRLTERHRKLVEDIKRETD

SEQ ID NO: 3827 - protein, 178 aa, Artificial Sequence; identical to SEQ ID NO: 3826
  Synthetic

SEQ ID NO: 3828 - protein, 178 aa, Artificial Sequence
  Synthetic
SKEEELEKSNRKLKEDLERMNEDLKRILREVEDVLRRIEEELEKLVRELEEILKRRVKDEDKVREMVKRAKDLLDEVREVLKRLRDRLEELIRRIHERSKDLLRESKRLIDEIRRKVRGDELAEEVIDRHRDLVRRIKDEHRKLTDELRKLLEDIERLAEEAKRKLEKLIEDVEREAN

SEQ ID NO: 3829 - protein, 178 aa, Artificial Sequence; identical to SEQ ID NO: 3828
  Synthetic

SEQ ID NO: 3830 - protein, 175 aa, Artificial Sequence
  Synthetic
SSEERVKKVVEELEDLIRKIREEHKDSIRENRKVVEDIRERVKELITELKKELEDKLKDDKDIVREVEKILKEVKEALDRVAEENEEVDRRSEESLRRIEEKVRRAIRTVEELVRRNVDTEDLLRRLRKLIEDVFREARENLKRHKKMSKEAKEKLEELLKRLRDLIKEAREKIK

SEQ ID NO: 3831 - protein, 175 aa, Artificial Sequence; identical to SEQ ID NO: 3830
  Synthetic

SEQ ID NO: 3832 - protein, 182 aa, Artificial Sequence
  Synthetic
SEADEVLRTHEELVRELEERAKEILRRHRKLSEESERKAREVLKTLRDLIRELKKLADEGSRRREDLSRRAERIKEEITRVVEELERENRRIDEELKKLVKELEDRMKEINDRLRELLKRDKDEEIARRIEESEDKSRRIIDEVRERVRKSIEENKRVVEEVRERVERLIKELDKIVEDIRR

SEQ ID NO: 3833 - protein, 182 aa, Artificial Sequence; identical to SEQ ID NO: 3832
  Synthetic

SEQ ID NO: 3834 - protein, 181 aa, Artificial Sequence
  Synthetic
DELEKVIEELKRRIEEVKKELTELNKELKDVSKEIEDVIRDLNRELKKLSDRIKELADRDNNDDLLRKLHKRLEDLHRETKERITEMLERLERLHRDTKRRIEEVLREIEKRVDEIKKKTTDEEIRRRLDEVLRKAEEDLRRAEESNDEHLRKSKEDVERARKSNDKHLDDNRKTLEEATR

SEQ ID NO: 3835 - protein, 181 aa, Artificial Sequence; identical to SEQ ID NO: 3834
  Synthetic

SEQ ID NO: 3836 - protein, 186 aa, Artificial Sequence
  Synthetic
SDVEDLLRRLRKLTKDIEERVKELNKKLEDVSRDIKRRVEEVLKKLEDVLRKARDEVRKLGDDGGAEELLKDILRRIAELLRELDETLKRVDKKIEDIVEESKELLRKVNEEVKKVVDEIRERNKDLDRAEKELRKILEDHKEISDRVRRSNEKLLRDHRRTSETVKRRLEKVLEDIRKELEDAKR

SEQ ID NO: 3837 - protein, 186 aa, Artificial Sequence; identical to SEQ ID NO: 3836
  Synthetic

SEQ ID NO: 3838 - protein, 180 aa, Artificial Sequence
  Synthetic
DVEERVKTIVDDIERTLDEVRRRLEESHKRLEDALKEVDDRLKKLLKETEEVLKRIEDERGKREELDDVRRRAEKSARDLKRLLDEIRKESRRILEELRKLLDDIRKEVREVLERLARVKEKEKVEELLRRLREILERVTRRLEEVLKRHRDLVEEVKKELERVLEDHKRLSEDAERRAR

SEQ ID NO: 3839 - protein, 180 aa, Artificial Sequence; identical to SEQ ID NO: 3838
  Synthetic

SEQ ID NO: 3840 - protein, 180 aa, Artificial Sequence
  Synthetic
SVEEALEKSVKESEEVLKKAEKELRESHEDAKRVLKEVRDELERLMEETKKELRDVERKRGRRDELERIKKRVEDSLRKLEKLLKEVKERSEDLLRKLKTLLREAKKRNDEVREELARVRDKEKVDRILKKDKDLIDRVRRELKKMLDRHRKLVEDVKRELEEALKEHKDDSKRVRDKLK

SEQ ID NO: 3841 - protein, 180 aa, Artificial Sequence; identical to SEQ ID NO: 3840
  Synthetic

SEQ ID NO: 3842 - protein, 180 aa, Artificial Sequence
  Synthetic
DIEDRLERVVRDAKRVLADVEDKLRKLLEETERMLRRVKRELERSHEEAEEELRRVEEERGRTEDLERVKRESEEVVKRVKKILDEIREKAKDSMRKLKELLKRVEERVREVLEELARVDDKKLLEDILRKLRKIIEEVKRTLEEALKRHRDLTRKVVEELEDLLRKHRRIVEEVKKRLK

SEQ ID NO: 3843 - protein, 180 aa, Artificial Sequence; identical to SEQ ID NO: 3842
  Synthetic

SEQ ID NO: 3844 - protein, 180 aa, Artificial Sequence
  Synthetic
DIEDELRKSVKRSEEVLREVEERLKRLLEETKEVLTRARETNEKSHRELEDKLRKIEEERGEDRTLDEVRRESEELLKESEKTLRELLERAKKSVKELKELLDEVRKRNKEMEERLRRVTDESKLRELLKRDKKEIDDVKRELERLLEDHKRLTEEIRRRLKRLNEKHREIVKRVEKELK

SEQ ID NO: 3845 - protein, 180 aa, Artificial Sequence; identical to SEQ ID NO: 3844
  Synthetic

SEQ ID NO: 3846 - protein, 180 aa, Artificial Sequence
  Synthetic
DVEDRLRESEKRSEKTLKDVEERLRRSHEDLEKKLREVEKRLRDSHREAEKTLKRVKEEKGERETLREAEKTSRKVLEDLKRLLDEIREESKRIVKKLKDILDEARKRNEEVREELARVDDKEVVRKILEDDKRLIEEVKKELERVLEEHRRLVEKVKRELEEVLKRHKEIVDDVRRRLE

SEQ ID NO: 3847 - protein, 180 aa, Artificial Sequence; identical to SEQ ID NO: 3846
  Synthetic

SEQ ID NO: 3848 - protein, 180 aa, Artificial Sequence
  Synthetic
SIEDELRKIADEARKVLDKVRKDVERSHREAEKKLREIDKRLKDSARDSKRVLDEVREERGEREELEKARKENEEMLEKLRDLVRKVKKESEEMVRRIRKILEEVKREVEKVLEELARVKEEEKLERILRKLKKIIKDVEDELRKLLEEHRELVKKVEKDLRDLLERDRELIEEVERRLR

SEQ ID NO: 3849 - protein, 180 aa, Artificial Sequence; identical to SEQ ID NO: 3848
  Synthetic

SEQ ID NO: 3850 - protein, 180 aa, Artificial Sequence
  Synthetic
DIEDRLRTSVKKSRDVLEEVERKLRDSHRRAKEVLDKAREDLRKSKEDSKRVLDDVRRKRGDREKLDKARRDNERVEERAREILDRVRRDSERLLKRLKDLLDEVRKRNEKVREELARVKEKEKLEDVLRRDEELIDRVRRRLERILEEHEELVKRVEEELRRVLEEDRKLIKRVKEELE

SEQ ID NO: 3851 - protein, 180 aa, Artificial Sequence; identical to SEQ ID NO: 3850
  Synthetic

SEQ ID NO: 3852 - protein, 180 aa, Artificial Sequence
  Synthetic
DIEDALRDSERESEEVLKRAREELEKSHKEVKKRLDEVEKTNKDSVDESKKVLDDVRRKRGELEKLKEATERNKRVLDTSRTILKRLLEESEEMVKRARRILDEARRRNEEVAEKLKRVTDKELLKKILKEDKELIKRVEEILRRILEEHRELVRRMKKELDELNKRDKELIDRVREELT

SEQ ID NO: 3853 - protein, 180 aa, Artificial Sequence; identical to SEQ ID NO: 3852
  Synthetic

SEQ ID NO: 3854 - protein, 180 aa, Artificial Sequence
  Synthetic
DLEEEAKKSVRESERALDEVRKRLDRVRKEVERELRKVEEDLRRSHRKLEDILRRVAEKRGPAEALERIEEDSRRVLEELKKLLDDLRRRLTELAKRLEELLRRLEEDNRRVLEEAKRVKDEEAARRILERDKALIEKAREDLKRILDEAREILKEAAKRLEDILRKHKKIVEDVARELE

SEQ ID NO: 3855 - protein, 180 aa, Artificial Sequence; identical to SEQ ID NO: 3854
  Synthetic

SEQ ID NO: 3856 - protein, 188 aa, Artificial Sequence
  Synthetic
KIEEEVEKLIRDARRIIEEMRESTERLIERNEEVLETVRREVEKLLRDLERILEKIKRELEGDERVKELLRRVEKLLREVKKRVEELERENREELRKLEERSRKLLEDVKRLADELRRRVEKMSKDNVPEEVLRRILEEIRKIVEDVRRELDTLNRELEELTKESRRRAEELLRRLKEIVKKVERDAE

SEQ ID NO: 3857 - protein, 188 aa, Artificial Sequence; identical to SEQ ID NO: 3856
  Synthetic

SEQ ID NO: 3858 - protein, 181 aa, Artificial Sequence
  Synthetic
REVEEILKEVETLIRENKKKLEEWLRTHEKLNEDLERKAREILTRHRRENEDLKRVADDGKDKRDIKRKIEKLERETRKLIDELKKEVEEVIRRSKEAVKRNNDEDREMVEKLKEDLKRVDKDEVKRRIEELIKKSKRVNDEANRRVDKLVKDTRDKIREIEERIRKLIEESKKLLEDKRR

SEQ ID NO: 3859 - protein, 181 aa, Artificial Sequence; identical to SEQ ID NO: 3858
  Synthetic

SEQ ID NO: 3860 - protein, 181 aa, Artificial Sequence
  Synthetic
REVEEILRRVRELIERNRKEVEDWMRRHRRVNEELKRKAREILERIKEMLKTLKEVLERGRDKREIAERVKKVEKEVEELLRRLKEEVERLAKESEDVVRKNNKKDDEVVKELRELLKRVKDDEAAKRIEKLIKESRERNEEVNRKIKKLIEDTRRVVEDVRRKVEELVKRLRTELDRARK

SEQ ID NO: 3861 - protein, 181 aa, Artificial Sequence; identical to SEQ ID NO: 3860
  Synthetic

SEQ ID NO: 3862 - protein, 181 aa, Artificial Sequence
  Synthetic
SEAEEIAKRAKEAIERNRKLAEEWAKRARDAAERLKELYKRIAERHRKANEELRRAAERGEDLDKIREDAERAIEETERLIEKANRETRKAIEELKKAAKENNDEDRKAAEEAKKLAEKVKDDEARKRIRELIERSKKANKEANDRARKLAEDAKRLNEEANERAKRLAEESREAIKEAER

SEQ ID NO: 3863 - protein, 181 aa, Artificial Sequence; identical to SEQ ID NO: 3862
  Synthetic

SEQ ID NO: 3864 - protein, 182 aa, Artificial Sequence
  Synthetic
REVEEVAKELRELIKRTEDLIRRALERNRKLVKETRDLIEKVLRDLRDLLRRLEEEARRRGKDEDVLRTLRRLLEELKKKVDEVLKELRRSHEELKKHSDKVLKELKESHDRLKEKVDEVRRRGVDDKTLRDLLREHKELVEEAKRRLEESNDEHRREVEDAERRIEEIVRDAKRVVDEIER

SEQ ID NO: 3865 - protein, 182 aa, Artificial Sequence; identical to SEQ ID NO: 3864
  Synthetic

SEQ ID NO: 3866 - protein, 182 aa, Artificial Sequence
  Synthetic
SEVEKVVTELRRLIERLEEVIRRALDTNRKLLEDTEKEAERMMRKLEELIKDLERDLREKGRNEEVEERLDRLLETIKRVVEEVKERLERSHERLKRHSEEVLRTLERILEEIERRVREVERRGVDKETLRKLLKELREVLDKAREDLERSNRDHRRAVEEIKERLERLLKKLEDVVRKAKE

SEQ ID NO: 3867 - protein, 182 aa, Artificial Sequence; identical to SEQ ID NO: 3866
  Synthetic

SEQ ID NO: 3868 - protein, 182 aa, Artificial Sequence
  Synthetic
KEAEEAAKKLKDLIKEDRERARRALEENKRLIDELRKAAKEALDRNRELLERLRDEARKRGNDEEAAETLDRLLKELRDHSKKAAEELEKLLEDINRHSEKAARENEESLKRIREEAKKAKDGNADKDTAEDLLRRATRDSEEAKKKLKKSNEEAAKAVEEAKERLKRSVDEATKAVEEAKR

SEQ ID NO: 3869 - protein, 182 aa, Artificial Sequence; identical to SEQ ID NO: 3868
  Synthetic

SEQ ID NO: 3870 - protein, 178 aa, Artificial Sequence
  Synthetic
SEVEKALEESKESLKTIKKIAKDVLTESEESLRRTKKLIEEVLEASKRSIEELKRLSEADTREKDLDKLLDDNRRLVEKIKKELDDSHRDNRRLVKEIKETLERLLRENKKLVEEIRKAGVDEDELRRLHEDVKRLVEEIAKRLDELHDRHRETVKRAKEELDKLHDRARKEVEDDKR

SEQ ID NO: 3871 - protein, 178 aa, Artificial Sequence; identical to SEQ ID NO: 3870
  Synthetic

SEQ ID NO: 3872 - protein, 178 aa, Artificial Sequence
  Synthetic
SEVEKVLKDSEKSIEDAERIARDVLRKSEESIDRIRRIAEEVLKESEKSIRDAKKLAEDGVSEEALKRVLDTNKELVDRIKKALEDALRRNEELVRRIKATLDDLLRKNKELVDEAKKAGVDERELDRLHEKLRRVVEEIEKELRESNRKLEEVLRDIKRKLDDLHRKAREILERIRK

SEQ ID NO: 3873 - protein, 178 aa, Artificial Sequence; identical to SEQ ID NO: 3872
  Synthetic

SEQ ID NO: 3874 - protein, 178 aa, Artificial Sequence
  Synthetic
SEVEEVLKRIRDVIKTMEDRAREVLKESEKSIKEIRDTIREVLKRSEDSIRRIDEELKKGVDEKDLDKLLRDNRELVRKIKEELDELLKENEKLVRDIERELEELLRRIEELVKEIKKRGVDKDRLDELLKRAEEVLRKIKEDLRRSNEKLREEVKEAKKRLDDLHRELEDVLREAKR

SEQ ID NO: 3875 - protein, 178 aa, Artificial Sequence; identical to SEQ ID NO: 3874
  Synthetic

SEQ ID NO: 3876 - protein, 178 aa, Artificial Sequence
  Synthetic
KETEEAEKLAREAARRSEKLAEEAEKRAKEAIDESKELADRARDTARRADEDLERLAREGADEEALERARERARRLVEKAKEDLKRSHEKAKKLVEEAKKRLDESNKDAERLVREAKKAGAEREKLDDLLRRHNEKVKRAKERLDRLLEEHEKRIRDAERDLERLERELKKKAEDKRR

SEQ ID NO: 3877 - protein, 178 aa, Artificial Sequence; identical to SEQ ID NO: 3876
  Synthetic

SEQ ID NO: 3878 - protein, 178 aa, Artificial Sequence
  Synthetic
SETEEALERLRKMIEDSRRLAKKIREDLREMIERSRRLAEKVRRDDEKSSEDLRRVTEEGRDSEVLRKLLEENERLVREIKADLDRSNEEAERLVRRVKRELDKSNEELKRLVERIKERGVDKDRLDRLLEEHNRIVKEIKEDLDRLLREHNEIVKRIKDDLDRLHEENRRLLEESER

SEQ ID NO: 3879 - protein, 178 aa, Artificial Sequence; identical to SEQ ID NO: 3878
  Synthetic

SEQ ID NO: 3880 - protein, 177 aa, Artificial Sequence
  Synthetic
SKEDLVRELKKKLEEVVKRSREESERSLRKLEKVIRDFRRESERLKKESRDVVKKAREDGLPEDVLRDLERLLREDEERNREANREIEKLLREIEKRNREVNRENEDTLRRIEDKLRKDGADEEVLKEIDDLIRRDEERLRRVLRESEELIKEIKKRAEEMLTRSKKLTRDIEEKTR

SEQ ID NO: 3881 - protein, 177 aa, Artificial Sequence; identical to SEQ ID NO: 3880
  Synthetic

SEQ ID NO: 3882 - protein, 177 aa, Artificial Sequence
  Synthetic
RDREELRRLEEELRRVFEESRRRSERSKKELDKIVKEAEKASKRSLDKLKRVFDELRRRGLPEEVLDELKKLLDEIERVNRDVLKKIRELLREIEELNREVIDRNKKTLDKITEDLRRRGADEDVLRDARELIERDREELERVLRDSDRLVREIKKRIEEMLKRSEDLIEEIERRAR

SEQ ID NO: 3883 - protein, 177 aa, Artificial Sequence; identical to SEQ ID NO: 3882
  Synthetic

SEQ ID NO: 3884 - protein, 182 aa, Artificial Sequence
  Synthetic
SEVERVLKEIEDLIEEIERRAKTVLEEIDKLTKEIEEVVKRMLDRDRELIKTAEDLLRKNKESREELKKMLEDSRELNTRLKKRIRELHRESKELVDKIRKELDDLLKRIEKRVKEIKDRLRDDRVRKALEDLLRKVEEVVRRVREELKKLERKDREVVRKVEEDSERSLRELEKVADEARK

SEQ ID NO: 3885 - protein, 182 aa, Artificial Sequence; identical to SEQ ID NO: 3884
  Synthetic

SEQ ID NO: 3886 - protein, 182 aa, Artificial Sequence
  Synthetic
SEVEKVLRELKELTRRIREEAERLLREDERLLREAERIARELLETNKRLIEEIERRLRERKESKEELDKLLKESEDLNREIKKTIDDMVRKSEKLNREITETLDRLHKESKKVVDDIKKRSRDERVKKDLEEVRKRDREVVEEVRRRSEKSKEDVRRLVEKIRKDSEDSLKELKEVVEEARR

SEQ ID NO: 3887 - protein, 182 aa, Artificial Sequence; identical to SEQ ID NO: 3886
  Synthetic

SEQ ID NO: 3888 - protein, 182 aa, Artificial Sequence
  Synthetic
DEVEKMLEELKRLTDKIREDAERLLKRSEELTEEIKRLIDELLKEIEELIKEARDIVRRNPESREELDRVLEEIKRLVEKILRDIEDMLRKNEELVRRIKETIKRLHDESKKRVKEVEDRLRDERVRRELEKVEREDRKVVRDAEEELKKSRKKSEDVVKEAKERLEELLRRVKRVVDEVRR

SEQ ID NO: 3889 - protein, 182 aa, Artificial Sequence; identical to SEQ ID NO: 3888
  Synthetic

SEQ ID NO: 3890 - protein, 182 aa, Artificial Sequence
  Synthetic
SEVERVLKEIEELTRRLREEAEELLERSERLTEKIRRRAEELLKRNEDLIEKIERDLRRNREKREELEKMLKTSEDLNREIRDELKKLLEENEKLLRDIKRRIREMHKRSEDLVREIERRLTDDRVKKALDELRRRDREVVKRLEEELEKSKKKSEDVVREVEEKSERSKRKLERVADEARR

SEQ ID NO: 3891 - protein, 182 aa, Artificial Sequence; identical to SEQ ID NO: 3890
  Synthetic

SEQ ID NO: 3892 - protein, 179 aa, Artificial Sequence
  Synthetic
SEAEKLLKEDEDLIRKARDEIRKVLEDDERLIEEVERKSREMLKRIKEIIDDMRKRIRGDELLEEARERIERLIKTLEDLNRKSEKENRDSLRRLERLLEELDRLNAKSLDELRKRIGELKEVVEEVRKSRKKSEDVLREVERELKKSFEKSKRVNDDSKKKLDELKREADEVIKRLKD

SEQ ID NO: 3893 - protein, 179 aa, Artificial Sequence; identical to SEQ ID NO: 3892
  Synthetic

SEQ ID NO: 3894 - protein, 179 aa, Artificial Sequence
  Synthetic
SRAEELLKRDEELIDTVRRRIEKMLREIKEIIDRVKRKSEKMLEDDERLIREVEKRVRDEDLLREVAERNKKTIKEIRDLNDRSRKEIKDLIRRLKKLLDEAREENEKSIRELRKEAGQLEEVLRELEKSRKKSEEVLERVKRELEKLERRAEEVNKESEDRLRESEKESKKVIDELRR

SEQ ID NO: 3895 - protein, 179 aa, Artificial Sequence; identical to SEQ ID NO: 3894
  Synthetic

SEQ ID NO: 3896 - protein, 179 aa, Artificial Sequence
  Synthetic
RRAEELLRTIKEIIKRIDDELKRVLDDDDRLIDELRKESERLLEEIERIIRRIEREVRGEELLKRVTDIIRELERRLEELNKRSRDLNKRSIEKLRELLERVKREIEDLIRKLEKEIGEREEVLRELRKLEEEAKAVIDKARRELERSERKSEELNRESKRRLEELSRRAKRVIDELRK

SEQ ID NO: 3897 - protein, 179 aa, Artificial Sequence; identical to SEQ ID NO: 3896
  Synthetic

SEQ ID NO: 3898 - protein, 179 aa, Artificial Sequence
  Synthetic
DEVRRLLKEIEDIIRRIEEDIRRMLEKDRKLIEEVERKSKEMLDRDKRLIEELEKRLRGEEFLEEAERRNRKTIEDIRRLNRESEKENEKSIRDLEELLKRVEEEIRRLVKKLTDRIGELEEAVRELDRLRREAEEVLDRVRKKLDKSRKDSERVNEESERRLERSAEESKRVLDELRR

SEQ ID NO: 3899 - protein, 179 aa, Artificial Sequence; identical to SEQ ID NO: 3898
  Synthetic

SEQ ID NO: 3900 - protein, 187 aa, Artificial Sequence
  Synthetic
DVREELKKVVDKAEKVSRKSRDDLDKVRKRVEEVNRDNERRLREIAKKVKEVLRDIDRKRRDESLKRLIDTIEKLLRDLERTNEKLDDESRKLLEDLARKVEELNDRARKELERLRERVKKVEEDNKPKEVVKRLLEDVDRLIREVEKESKRLLDEIEEMIEELKRRAEENLKTIEDIIKDVTEKAT

SEQ ID NO: 3901 - protein, 187 aa, Artificial Sequence; identical to SEQ ID NO: 3900
  Synthetic

SEQ ID NO: 3902 - protein, 179 aa, Artificial Sequence
  Synthetic
REVEEVLKTVRKLIEELERSSRKSLKEVKELLEKLEEDARRSLKRVKELLKELEDRSRTVDSKDIKRVVEEIEEDIRRSNKELEDLLREIRRKIEESNKENRKRAEDIIRELAKALKDVDEEAKKRIEDLIRELEELLRESSDRHRKLDEELKKLLKDVTDAHRRLMEELRKLLEDIET

SEQ ID NO: 3903 - protein, 179 aa, Artificial Sequence; identical to SEQ ID NO: 3902
  Synthetic

SEQ ID NO: 3904 - protein, 179 aa, Artificial Sequence
  Synthetic
DEVETILRDIKRLLREIEELARKSSKKFKELLERLEETARRSLTRIERLLEEVEDISRTVDRKEIEDKVREIKKEVDEMNKRLEDELKKIKDDLERSNEELRRLIEEIKDRVAKRLKDVDEDAAREIEKLKRELERLLEEASRTHEELTRRLEKLLEDATREHERLKRELEKLLEDIKK

SEQ ID NO: 3905 - protein, 179 aa, Artificial Sequence; identical to SEQ ID NO: 3904
  Synthetic

SEQ ID NO: 3906 - protein, 179 aa, Artificial Sequence
  Synthetic
REVEEILRKIRELLEELRKRVEESRRRIEELLKKLEEEVRESEKDVRRLLRELEEISRTRRREEIARRMEEIKEKARKSNEELKKLMEEIKERVKRVNDELRKLAEDIKEKVRKDLKDVDEEAAKEIEKLVKELEELLKRASDKHRKLSKDLEDLLREVTERHRRLEKELEDLLREIER

SEQ ID NO: 3907 - protein, 179 aa, Artificial Sequence; identical to SEQ ID NO: 3906
  Synthetic

SEQ ID NO: 3908 - protein, 179 aa, Artificial Sequence
  Synthetic
SEVEKLLEEARRLLKELEDSSRRSVEEAKRLLEELKRRVEESVRRIRELLKDLERLSSRVDREEIEKEVRRIEEDVRRSNDELRKLVEDILRKLRKVNEENADLVRRIITRLRDALKDVDERAKEALRELEKRLRDLLRDSSRLHEDLARDLKRLLDEVTEEHDKLRRELRKLLEDIKT

SEQ ID NO: 3909 - protein, 179 aa, Artificial Sequence; identical to SEQ ID NO: 3908
  Synthetic

SEQ ID NO: 3910 - protein, 179 aa, Artificial Sequence
  Synthetic
SEVEKVEEDVKRLLKEIEDSSRRSLEKAKRLLEELRRSSEESLKRIRDLLEELRELSRTVDSKDIADRARKIAKEVDDSNKRNRELVKRIIEELERVNRENEEKLKKIKEDLRRSLKDVDEEAKKRIEELKRELEELLKKSSEEHKKLVKELKELLKKSTEDHEKLKRDLRKLLEEIRT

SEQ ID NO: 3911 - protein, 179 aa, Artificial Sequence; identical to SEQ ID NO: 3910
  Synthetic

SEQ ID NO: 3912 - protein, 178 aa, Artificial Sequence
  Synthetic
DSEDLMRRVKEELDKLVKDSRKRSEDLKRENEELLRRSEEALEKSVRDADRLFEEIKRTKDKKEELLRELKKLLDELREHSKRVLERNREILERNKKRNKEANDRNKEILDRIREEIKRKGADRDVLKTLKDLIRELKRHSEEVEREDKETTDRLRRHSEKALRTNEEIIRRIEERAR

SEQ ID NO: 3913 - protein, 178 aa, Artificial Sequence; identical to SEQ ID NO: 3912
  Synthetic

SEQ ID NO: 3914 - protein, 182 aa, Artificial Sequence
  Synthetic
SVDEALRDIERKVEELMRESDERLRRVKKEVEDNVRRSEEELKRIADEMKELLDRARERGVDEEILRRVEEELRRLAEEIKKINRDAEERLRRLIKEVREINEDVRRKLEELREELRRDGGKVEDLVREVLKKLKELIDRWRDLSRRLKERLDTLIKEHHELSKRLLERLKRLIDEARKKLN

SEQ ID NO: 3915 - protein, 182 aa, Artificial Sequence; identical to SEQ ID NO: 3914
  Synthetic

SEQ ID NO: 3916 - protein, 182 aa, Artificial Sequence
  Synthetic
SEVEELKREADDVNRRAEELARETLKKIEKVNREVKRRLEEALREIEELLRRAEEIVRRNEDKDRAIEEVRRRLDELRRKVEKVNEDNRKLLEELTEEVKRVNDENKKLLDDLADKVEKKLTTEEARKRLEEVVRHNKKLDDEHRKALDELRKHNEDLDRRSKEELDKLRKRLEDLLRKVKE

SEQ ID NO: 3917 - protein, 182 aa, Artificial Sequence; identical to SEQ ID NO: 3916
  Synthetic

SEQ ID NO: 3918 - protein, 182 aa, Artificial Sequence
  Synthetic
REVEELLKEIEEVLKKSERLSRESLKKIREVLERIERLARENVKRMKEVIDRVRELAERNEDRERLIEDVKRLIKEVSDSNRELDERSKKLLKELRDENERLSEESKKELERIRKKVEDKLTTEDARRALEELRKRVEEVNKKSRDDLERLTREAEELNRKNEEDLRRLEKEVKDLLDEIRR

SEQ ID NO: 3919 - protein, 182 aa, Artificial Sequence; identical to SEQ ID NO: 3918
  Synthetic

SEQ ID NO: 3920 - protein, 181 aa, Artificial Sequence
  Synthetic
SSRETVKRLTEEARKLLEDWKDRNRDVERKVEEIIERIRRTNEKSERDARRKLEEVDKRRRDEEVEKVREELERLLEESHRKVEEVVKEVEELVRESTEKVRRIVEKVKRLLEELTRLMEAGERDTEELKREIERILEELRRLMKEDKEELERILERLRRLAEEDKKENEEILDRVDKKAK

SEQ ID NO: 3921 - protein, 181 aa, Artificial Sequence; identical to SEQ ID NO: 3920
  Synthetic

SEQ ID NO: 3922 - protein, 181 aa, Artificial Sequence
  Synthetic
STEETITDLKREAEEILRRWREENKRVSDEAAESVKESDKTNKKSKDDLKRVLDEVDTKERSERVKTVIRKAEDLARRSHEKNREVNERLKKLLEESTRTVDTIIRELRRILDDIKRKVDAGERDAKELEDEVREALKRIRKLIEEDRRKLKRILDEHRRLTEEDRERNERVLRELREDTR

SEQ ID NO: 3923 - protein, 181 aa, Artificial Sequence; identical to SEQ ID NO: 3922
  Synthetic

SEQ ID NO: 3924 - protein, 181 aa, Artificial Sequence
  Synthetic
SVDESLEEIRKEVERLLRKWKEDNKEMRKRIRELLEDWRKKVEDSKKRAKDLIDEVKKRRDDERVEKVRKELEDLLKESEEKVREVERRVKKLLDESTKKVKEIEKEIRDIIRELDKRLKAGKRDTRELEKEAEDALRRLKKLIEEDRRELEKILKELEDLMREDTKENEKILREAEERSR

SEQ ID NO: 3925 - protein, 181 aa, Artificial Sequence; identical to SEQ ID NO: 3924
  Synthetic

SEQ ID NO: 3926 - protein, 181 aa, Artificial Sequence
  Synthetic
SVEDEIRRLTEEIERTLRRWREEVKRSEDRAEESIKRSDEKNKESKERLDKVLDEARRRRDDEEVKKVIKEVEELAEESNRRNKEVNDRLKKLLEDSKRKVEEIVRRVKKAMEDLKRLLDAGERDLRELLKEVEDVLEELKELIKRDTEENKRILDEHKRLTEEDEKRNREVLERLKRKTD

SEQ ID NO: 3927 - protein, 181 aa, Artificial Sequence; identical to SEQ ID NO: 3926
  Synthetic

SEQ ID NO: 3928 - protein, 181 aa, Artificial Sequence
  Synthetic
ESEETLKEVKKEIEKLIKRAEEINRESAERLKRILEEWKKEVDRSEKRLREVLDEVRRRRNTEEVEKVIREVEELVKRSRDKVRKIEKEVRDLLKESTDELKRIVEEIEEAVRDIERKLRAGKRDRRELLEELKRVLDRLKKLIDDDRRKNEKVLRDLEKLMREDADENREVLKRLEDKAR

SEQ ID NO: 3929 - protein, 181 aa, Artificial Sequence; identical to SEQ ID NO: 3928
  Synthetic

SEQ ID NO: 3930 - protein, 179 aa, Artificial Sequence
  Synthetic
SDEERVIKEVEDLIRRIREDNKRLLDEAEKIIRRVAEDNKKLVEDHRRMLRKIDEEAKRGRDEKFLKDLVERSERVVEESRRHVERNEREIREMLERLREHVERNERELREILERVVRKVGKETEDVKRLEEKVRKLLEESKRKLKRLAEEVRKLIKDSRDKIRELERENKEIIKKVKD

SEQ ID NO: 3931 - protein, 179 aa, Artificial Sequence; identical to SEQ ID NO: 3930
  Synthetic

SEQ ID NO: 3932 - protein, 179 aa, Artificial Sequence
  Synthetic
DREKEVVDTLRRLIEDARRDNKDLVETHRRLLEDLERDNRELVRTHEERLEEIERRARRGDDDTFLKKLEDESRDVVRDSERHLEENKRKSTKIVKDTKDHVDRNRKKIKKILDEAVREVGKEAEDVRRLEKEVEELLRESDRRVEDLERKNREILKRSEDLIRRLKEENRRIIEKVRK

SEQ ID NO: 3933 - protein, 179 aa, Artificial Sequence; identical to SEQ ID NO: 3932
  Synthetic

SEQ ID NO: 3934 - protein, 179 aa, Artificial Sequence
  Synthetic
DDERRVVEELERMIRELEKKIREIVKRHEEALKRLKEDNDELSKRHKKMVEEIKRRADEGRDDTFLKKLVEDSERVVEESKRHVDRNKEKSERIVRTTAELIKRLKEEIKKVLEDAVRKVGKDTEEVRRLKREVEELLKRAEELLKRLEDRNRKILRESEEDIKRLERENREIITRVRT

SEQ ID NO: 3935 - protein, 179 aa, Artificial Sequence; identical to SEQ ID NO: 3934
  Synthetic

SEQ ID NO: 3936 - protein, 175 aa, Artificial Sequence
  Synthetic
KELDEIIRRVEELIKDDERRNREVLKRSDESTKESHDKARRILEESEKTTEDIKRKVEKDGNTEKVERDIRRNNEELRKVLRELEKEHRENNKRLDEMLDRSRKNNDDIRKEIREKVKDEDKIRRLERESRELLRDSEDKVRKSKRKDEENLKRIEEEARRSEKRDEELLREAAK

SEQ ID NO: 3937 - protein, 175 aa, Artificial Sequence; identical to SEQ ID NO: 3936
  Synthetic

SEQ ID NO: 3938 - protein, 175 aa, Artificial Sequence
  Synthetic
RELDEIIKTLEKLIEDSHREAREIVKEVKKRLDDDKRRNEEVLKESRETTERIRKEIEERGRTEEIEEKIRRNNRRLEKLLDESEKNNRRIIDTIERLLRKLEELHKKIIDEIRKKVKSEEKIRRLEERARRNVEEMRKLAEELEKESRRILKESAEAVKRSKDEDRKLLEEAKK

SEQ ID NO: 3939 - protein, 175 aa, Artificial Sequence; identical to SEQ ID NO: 3938
  Synthetic

SEQ ID NO: 3940 - protein, 175 aa, Artificial Sequence
  Synthetic
SETDKVIEESEKTNRDIKRHSEEVVKDSKRTNTEIERTVEKMIRELEEILERIKRLADNGVPKEDLKRLVDELKERIDRILKELEELLRTDKKRISDALRRDEELAKKDKDEIDKKLDDKDKAKKLKDETDRILETSERLLKALRDETDAIKRKVEELVRRVKEELDRILKKTED

SEQ ID NO: 3941 - protein, 175 aa, Artificial Sequence; identical to SEQ ID NO: 3940
  Synthetic

SEQ ID NO: 3942 - protein, 175 aa, Artificial Sequence
  Synthetic
SETDRVVEESERTNKEIERHSEEMVRDSERTNKEIEEHSREVIERLREILERIERLVRKGVPKDELKKLVEDLRRRAKEALDRDRELLRRDKEKIDEVLKRDTELAERDKREIDKKVRDEEKMRRLKEETDRILDKSRRELKRLKDETDKLLEDSERLLREVEKTLRRILEEARK

SEQ ID NO: 3943 - protein, 175 aa, Artificial Sequence; identical to SEQ ID NO: 3942
  Synthetic

SEQ ID NO: 3944 - protein, 175 aa, Artificial Sequence
  Synthetic
SETEEVVKTLKRLLEEIKKHSDDAVRKSEETNKRIREEVERVIKRLKELIEEISELVKSGVEKERLKELVDRVKTALDRALDELRKLLEDDERKIKTVLDEDKKLVEEVKKRADEKASDEEKLKRLKDALDRILEESKRLADELKKRTKDILDEAKDALRKIKEELDKLVEDAER

SEQ ID NO: 3945 - protein, 175 aa, Artificial Sequence; identical to SEQ ID NO: 3944
  Synthetic

SEQ ID NO: 3946 - protein, 175 aa, Artificial Sequence
  Synthetic
SETDKVVREVEELIRRLEEHSRRVVEKSERTNEEIERHSRDVIRRSKEINDRIEELARNGVPEDDLRRLVKKNKEDNDRALEEDKRLLDTDKEEIDRALKRDEEIVRRIKEEIDKKVTDKDKMKRLKEELDKLLDDSRRLMKRLKDETDKILDKSRDLLAKTKRESDRILEEAER

SEQ ID NO: 3947 - protein, 175 aa, Artificial Sequence; identical to SEQ ID NO: 3946
  Synthetic

SEQ ID NO: 3948 - protein, 175 aa, Artificial Sequence
  Synthetic
SETDKVVDDSRKTNEDIKRHSEEVIRRLEELIREVEEHSRRVEDEVRRILDEIRKLAEDGVDERDLRRLVKKLEEEIDRVLEEDERLIREIKKEADRVLETDKRLAEEDKKRIDDKATDKDKATELKKDTDRILKESEDALRRIKKELDDLLRTSKRLAEELKKELREILERAKR

SEQ ID NO: 3949 - protein, 175 aa, Artificial Sequence; identical to SEQ ID NO: 3948
  Synthetic

SEQ ID NO: 3950 - protein, 175 aa, Artificial Sequence
  Synthetic
SETDEVVERLEKILKDIREHSERAIKKLEDILREIERHSRKVIRDSERINTEIKKLAEAGVPEKDLTKLVEDNKKRNDDVLDEDRKLVEELRERAERILRTDKRLVDDLKRKADEKLTDKDKLTTLKKKLDDLLDTSRRLVEKVEEDLRRILEASKRMLEETKKRSKEILDRIRK

SEQ ID NO: 3951 - protein, 175 aa, Artificial Sequence; identical to SEQ ID NO: 3950
  Synthetic

SEQ ID NO: 3952 - protein, 175 aa, Artificial Sequence
  Synthetic
SESEEVVREVDKILKEIRKHSKDVIEKLKKLIDDIRRRVRKVIRDSEEINKRIEDLAREGVPEEDLERLVEENKRRNDEVLKRLKELAERVKEEADRALERDKRLVEELKKRIDDKVTSEEDMRRLKERLDKILDDSREMLKRLKDELDEVLEEVERLLRETKKRSDEILKRIKD

SEQ ID NO: 3953 - protein, 175 aa, Artificial Sequence; identical to SEQ ID NO: 3952
  Synthetic

SEQ ID NO: 3954 - protein, 176 aa, Artificial Sequence
  Synthetic
SEIEDVIRRAEELIKEDKKRVEDVVREIEKLIRDDARKVRRAIEELKRLLREIEERVREEKEKRDVLERLVRTIKEEIDRLLKDNEDSIRRITKRLRDILRENRESLERIRRELDRRLTVKEEAERLRRELEDLHRDVKRLIDELEKDLRRLLEESKRRADRVKEELRRLREEVRK

SEQ ID NO: 3955 - protein, 176 aa, Artificial Sequence; identical to SEQ ID NO: 3954
  Synthetic

SEQ ID NO: 3956 - protein, 176 aa, Artificial Sequence
  Synthetic
SEADKAAEDAKRLIDKDREDVERAVKRAEDLIEKDREDVDRAIKESEELNKRAEDEARRRKDAREKVKRLADEDKKRNEEALRRNRKSIEDIRRDLEKALRDNEKTIEDIRREIEKLASDEEKARRLKEEADKVAKESKELADRLKERADRLHKRARELAERTKEDTDRLVEEAKR

SEQ ID NO: 3957 - protein, 176 aa, Artificial Sequence; identical to SEQ ID NO: 3956
  Synthetic

SEQ ID NO: 3958 - protein, 176 aa, Artificial Sequence
  Synthetic
SEIDEVVKEIEKILEDDKRRVDEAIEELEKLIREIREEVRRVIKESEDLNKEIRDRVRKNKEKREDLDRLVEEDRKKNREILETLKELIERIRREIERLLRENEETLRDIERKIREKMTDKDKAERLRRELKKIMEDSRRLADEIKKRLDRLLEEVKEEIERTKRETDRLLEEVRR

SEQ ID NO: 3959 - protein, 176 aa, Artificial Sequence; identical to SEQ ID NO: 3958
  Synthetic

SEQ ID NO: 3960 - protein, 176 aa, Artificial Sequence
  Synthetic
SELDRVVEEIDRLIREDEKEVRDMIRESEKLNRENEETNRKLLEDWDKLSKDIRDRVDKNKEKEEEAEKLLRDSERLAEDVLRRDKETVERDREKNKKVKERNERTIKEIRDRIEKKMEDDKKARELKEKLDELKKRSEKLLEDTKRETDKLHERSRRELEKLRRKDEELVKRVKD

SEQ ID NO: 3961 - protein, 176 aa, Artificial Sequence; identical to SEQ ID NO: 3960
  Synthetic

SEQ ID NO: 3962 - protein, 176 aa, Artificial Sequence
  Synthetic
SEIEEVVERIERLIKRIKEEVERALKESEDLIRDIERRVRELLEEWDRLSERIREVVERNPEKREDLKRLVEESRREAKRVLDELRRLVEEDRRRNEELLRRLEELIREIEDRIEKLAEDKDELRRLKEELRKLLEDVKKLLEESKKKTDDLLKRAEDELRKLKEKDDDLLRKVKD

SEQ ID NO: 3963 - protein, 176 aa, Artificial Sequence; identical to SEQ ID NO: 3962
  Synthetic

SEQ ID NO: 3964 - protein, 176 aa, Artificial Sequence
  Synthetic
EELDRVVEELDRLIRDNKRRNDEALKESDRLIRENERRNRKAARDWEELSKEIEDRVRKNKEKEEEVERLVRRSEKELEKIERADEETVRRDRELNKKVRDDDRRTIEDIEKKARELLEDKDKLTTLRKKLDDLHKESRRELERSKKKTDDLHRKSREEVRKLREDDERKLREIKK

SEQ ID NO: 3965 - protein, 176 aa, Artificial Sequence; identical to SEQ ID NO: 3964
  Synthetic

SEQ ID NO: 3966 - protein, 176 aa, Artificial Sequence
  Synthetic
SEADEAAKKIEKLIEDNERKNRKALKEWDELTRENEKRNRDAIKESEDLIKEAADEVRRRKDAREKAKKLAEDDKRRNEKALEDDERTLRESKKRAEEALREDRETLRRIEEEIKKLASDEEKARRLREEAEELHRRSEEAARRAEKKDREAHKRSREAIKRTKDDTEELLKEAER

SEQ ID NO: 3967 - protein, 176 aa, Artificial Sequence; identical to SEQ ID NO: 3966
  Synthetic

SEQ ID NO: 3968 - protein, 176 aa, Artificial Sequence
  Synthetic
DEIDKVVRKIEKLIDDNRRENEEMLRESEKLLKENEKKNEKAIRESEELIRRIEKRVRENKEKEEELKELVDRDRERNKEVEKEDRETVKRDRDLNEDALRRDRETLERIKREIEKRAEDKDKARRLEEELKELHKRSKEELEKSKEKTDRLHDKSRRLIEETERRTEELLERVRR

SEQ ID NO: 3969 - protein, 176 aa, Artificial Sequence; identical to SEQ ID NO: 3968
  Synthetic

SEQ ID NO: 3970 - protein, 183 aa, Artificial Sequence
  Synthetic
SVEDEVERLERDAEEISRRSETELRRLKKEVEDLNRESKKLLDELREEMEKILKKVREDSDEEELERLIREARKLLKDLADKIRRVDEESKRILDELARRIKKVNDDLKELVERLSRRAREIKDKDEVKRLVEEIERLLKRAEELSRELVRRIEKLIRELAEESRRLVDEIREVLKRLKDRAD

SEQ ID NO: 3971 - protein, 183 aa, Artificial Sequence; identical to SEQ ID NO: 3970
  Synthetic

SEQ ID NO: 3972 - protein, 176 aa, Artificial Sequence
  Synthetic
SEIETVLEKLKRLLEEDRELVKRVEDKIRRIIEEDEKTVRDIKKRLDDILREIRDVLEKRKEVREELKELLERVEEVIKDVLRKNEETLERLERELKRALKRNDDTLKRLREEAARLLEVEEELKKVEDELDRVRKETERIIKELREELEELHKRARDLLKEVRDELRKLLEEAKK

SEQ ID NO: 3973 - protein, 176 aa, Artificial Sequence; identical to SEQ ID NO: 3972
  Synthetic

SEQ ID NO: 3974 - protein, 176 aa, Artificial Sequence
  Synthetic
SEIEDVVRRIDELLREDKRRVDEVLERNRKLIEDDERLSREIARELDEIIKRLREVVKSNKEDRDTIRRLAEEAREVIERVDRENEKTKRELEKHSREALRENEDTIRRITEELKTRIKVREEVRKLKERLDKILEDTRRLLEESKRRLDRLHERHRETSEDMKRRIDKLLEEVRK

SEQ ID NO: 3975 - protein, 176 aa, Artificial Sequence; identical to SEQ ID NO: 3974
  Synthetic

SEQ ID NO: 3976 - protein, 176 aa, Artificial Sequence
  Synthetic
KEAEDVVREVEELIDRDRKLVERVLRENERLLKEDRDTVKKVLEELEEILKDIERVVRERKEVKEEVDRLIKELRDLIEKVLRDNKESIDRIREHSKRALETNERTNKELEETLRRLLDIEELLRRLKEEIERLLERSRRLVKESEERLDRIREETKRELDRVEEKLRRLLEEVKR

SEQ ID NO: 3977 - protein, 176 aa, Artificial Sequence; identical to SEQ ID NO: 3976
  Synthetic

SEQ ID NO: 3978 - protein, 176 aa, Artificial Sequence
  Synthetic
SEIEKVVEEIKKLLKELKETSERILRRNEKIIKEIEETSREVLKELERILEEIEDVVRKRKEVREEVEELIKELEERIRRADKRLEELIKELRDHSEKANKKIEDIVRRIEERLRRLLRDKDRLKRLRDELERILRDHERLSRESKDKLDKLLERHKELSDEVRKKLKELRDRADT

SEQ ID NO: 3979 - protein, 176 aa, Artificial Sequence; identical to SEQ ID NO: 3978
  Synthetic

SEQ ID NO: 3980 - protein, 176 aa, Artificial Sequence
  Synthetic
REIEEVEKEIERIIERIERTSRRVKEENDRLLEEIKRRSEEVKKRNDDIIREIRRVVEEDKKNREEVKRLIEELRKHSRDADEELRELIKKLKRHSDEANKTLEELIKELRKRLEERARDERRLKELKRKLDKLREDHERLSRRSDEELRRLEEEHKRLSEDSKRELDKLLDEVRK

SEQ ID NO: 3981 - protein, 176 aa, Artificial Sequence; identical to SEQ ID NO: 3980
  Synthetic

SEQ ID NO: 3982 - protein, 176 aa, Artificial Sequence
  Synthetic
DEIERVLEEAKKLIRDLEEHSRRVEEENKRLLKEIRETSERVKRELDRILEEIRKTVERRKEVREELDELIKTIRKRIKEADDELRRLIEELEEHSRRALETDKKILDEIEKRLRDLFKDDEKLRRLEEELKRLLDESKRLLEESEDELRKLEEEHRKLSEEVKRRLDELKKEVET

SEQ ID NO: 3983 - protein, 176 aa, Artificial Sequence; identical to SEQ ID NO: 3982
  Synthetic

SEQ ID NO: 3984 - protein, 176 aa, Artificial Sequence
  Synthetic
REIEEIVERVKEIIDRIRRHSKEVEKENEKIIERIRRRSEEVLRTNEKALRDIERRVRERKEVREELRKLIEDLRRHSDRADEELERLIETLKRHSKEALDRDRELIKRLEDDLRRAAKDKDELKRLKEELERLLRESKKLVDESKRRLEELLREHRELSKRSRDKLDELLRRVEK

SEQ ID NO: 3985 - protein, 176 aa, Artificial Sequence; identical to SEQ ID NO: 3984
  Synthetic

SEQ ID NO: 3986 - protein, 176 aa, Artificial Sequence
  Synthetic
SEIEEVVRRIREIIEEIRRLSEAALERNKRIIDEIRRTSKRVKEEIERIIRDIRRVVEERKEVREEVERLIRELKKTIEDANEELKRLIKELRDHSEKVNEEVRRALEELKERLDRLLRVREDVRKLKEDLKELLKEHKRLSEESKKRLERLLEEHERISEELKRRLEKLLKEAED

SEQ ID NO: 3987 - protein, 176 aa, Artificial Sequence; identical to SEQ ID NO: 3986
  Synthetic

SEQ ID NO: 3988 - protein, 176 aa, Artificial Sequence
  Synthetic
SEIEEVVKKVKKIIDEIRERSREALERNEKILEELKRHSEEVTRRAEKIIEEIKRVLEKRKEVRKRLRELARKLEELLKRALRRDEEIVAKLRRHSEKVNRELEEDIKRLKEELKTRMKDKDELTKLEKELEDLREEHRKLSKDSKDRLKKLLDESRELIERLKEKLKRLLEEAER

SEQ ID NO: 3989 - protein, 176 aa, Artificial Sequence; identical to SEQ ID NO: 3988
  Synthetic

SEQ ID NO: 3990 - protein, 181 aa, Artificial Sequence
  Synthetic
SEVEEMLKRLDDILKKHRELVKEMKEELDRVIETHRRLVEEVRRRLEKSNDEIDKLVKADVREDELRKLLTDNERLNREINRTSKDVVRKLEDLLRRAEEESRRVVKEVRKVIDDIRRRTRDERVEKALKEVRERLERSHKKAKEDLDRVREEARKSHEDVKRLSEEDRKKSEDLADEVRR

SEQ ID NO: 3991 - protein, 181 aa, Artificial Sequence; identical to SEQ ID NO: 3990
  Synthetic

SEQ ID NO: 3992 - protein, 181 aa, Artificial Sequence
  Synthetic
REVEEALERLRKLIEDDRELVKRAKEKLDKLLKDDRKLVEDVLRELKRSNDEVKKLVDSGVSEEELKRLLDENRRLNEKINRENEESIKRVEELLEEIERRNRETLERIKRLLDDVRKKTTDKRAEEELRRVKEEVDRVLEESKRRLDEVRRRLERIEEESRTKSEEDRKRSEDLVREAER

SEQ ID NO: 3993 - protein, 181 aa, Artificial Sequence; identical to SEQ ID NO: 3992
  Synthetic

SEQ ID NO: 3994 - protein, 181 aa, Artificial Sequence
  Synthetic
SEVERLVEDAERVIDEHRKLVTEMERRLERVNREDEKLVRKVLEELKKSNEEIKKLREDSVSEEELEKMLRKNEELNKEANERNKDSTRKNKELNKRINEDSKRVVKKLRDLLKEVEDRTTDERAKKLLDEIRKKLDDSNREVEKRSRDDERHTERVVRESKRLSEEDKKRSDELADETRK

SEQ ID NO: 3995 - protein, 181 aa, Artificial Sequence; identical to SEQ ID NO: 3994
  Synthetic

SEQ ID NO: 3996 - protein, 181 aa, Artificial Sequence
  Synthetic
SRVEEVKKELDDLIRRHKELVEKVRKELKDLLDKHERLVEEAKKEIEKLIETLKRLAENGVSEKDAEEILKEIEKLLKRIEEDSKRVLDEIKKLLDDIRKESKKVLDDIRRVIDRARKETTDRRAEDELRKVRKEVERSNKEVEEILDDVRRKVEESDKRVKEILKKLREDVKKLLDEVRK

SEQ ID NO: 3997 - protein, 181 aa, Artificial Sequence; identical to SEQ ID NO: 3996
  Synthetic

SEQ ID NO: 3998 - protein, 181 aa, Artificial Sequence
  Synthetic
SEVEKLVADADKLIKDHRKLVEEAKKRLDEVNERHRRLVEEVERRLDKSNKELEDLVRSGVDEDDARRVLEDNERLNKEANDRSKEMLDRNRDLNRRINETSERILKKIEDLLEDVRRRTDDRRADEELRRISERVKRSNEDVRKKSEDDKRHTDESDRDVKRLSKEDRERSETLMDRVRE

SEQ ID NO: 3999 - protein, 181 aa, Artificial Sequence; identical to SEQ ID NO: 3998
  Synthetic

SEQ ID NO: 4000 - protein, 181 aa, Artificial Sequence
  Synthetic
SRVEDVERELEEEIDKHRKEVEDAKRRLDELIRRHKEEVKKLKKKLDDLIEELERLARNGVDEKTIEEVVKRIREELEAIEERSRRVLKKIEDVIDELRKRSEEVVRRLEKLLKDVEREVDDERAKRSLDRVREKIEKSDRTAKDLLKKVEEEVRKSNERVKELLKRVKDAVDDLLRRRRK

SEQ ID NO: 4001 - protein, 181 aa, Artificial Sequence; identical to SEQ ID NO: 4000
  Synthetic

SEQ ID NO: 4002 - protein, 181 aa, Artificial Sequence
  Synthetic
DEVEEVVKRAEDVIRTHKELVKKAKEDLDKIIEDIERELKKMLEDLERSNRRVEELVRGGVDERELDKLLEENRRLNEEINDRLEKLVKEVRKVLEKIKKDSDDVVRKLEKLLKDVERRSTDERVKKILDDIRRELEESNKKVEEDLRKAEEDLEELLRRARELSKEDEKKSRKLVEDARR

SEQ ID NO: 4003 - protein, 181 aa, Artificial Sequence; identical to SEQ ID NO: 4002
  Synthetic

SEQ ID NO: 4004 - protein, 181 aa, Artificial Sequence
  Synthetic
DEVDEVVKRLEDIIRKHETLVKKAKEDLDRVNEEDTKLIRDVLRRLKESNEEMERLVRSGVSEDDARRLLDENRKLNEEANRRNKKSLEDNSRLNEKLNRDSKRVLDEIRELLKDIERRSTDERVKEELRRVEEDVKKSDEDARRLSKEDRDHTRENFKRSEELSRRDEETSRRLMEEVKR

SEQ ID NO: 4005 - protein, 181 aa, Artificial Sequence; identical to SEQ ID NO: 4004
  Synthetic

SEQ ID NO: 4006 - protein, 187 aa, Artificial Sequence
  Synthetic
KDVEDLVRKAEELLKRHREDVTRLLERLKKVNKDHERLVKELKRRLEELLREVRELVERDGGESERAKEILRRLVEKAKKLLKEVEERSRKVNRDSEKLLKEIRERSKEVEDRVRKLLKEIEERVRGKDEVERRLRRLEEELKKSHEEVERRLDEVRRHSKRSHDELRKVLRKLEEDLRRLAEEVKT

SEQ ID NO: 4007 - protein, 187 aa, Artificial Sequence; identical to SEQ ID NO: 4006
  Synthetic

SEQ ID NO: 4008 - protein, 187 aa, Artificial Sequence
  Synthetic
SDLEELVKRAEKLLEEHKELVKRLEDRLRELDKRHKEIVERLRKELERLLREIRRIVEEKGGESEEAKELLKKLREEVRKILEEIERTSEKMERDSERLNEEIRKRSKEMLDRAAELLKEIESRIRGVDEAKRKLDELEERLRRSNKELEEKSEENERRTRESNEELERRLEDVRRKLERLREEVER

SEQ ID NO: 4009 - protein, 187 aa, Artificial Sequence; identical to SEQ ID NO: 4008
  Synthetic

SEQ ID NO: 4010 - protein, 187 aa, Artificial Sequence
  Synthetic
KDVEDLLRRLEEIIKDHRREVEELLRELTKLDEEHKEEVRRLTEELERLLDEARRLVEEKGGESEEARKIVKDMEERVKKVLDDIRRESERVVRESERLNKEIEKRNDEVRRRAEKVLKDITDRIRGVDEAERELERVEREVRKSSDKLRRDSKRNKERTRKSNEELERRLEEVERELRRLVAEVEK

SEQ ID NO: 4011 - protein, 187 aa, Artificial Sequence; identical to SEQ ID NO: 4010
  Synthetic

SEQ ID NO: 4012 - protein, 177 aa, Artificial Sequence
  Synthetic
KKVEDLEERLERLLRDAERRVRELLDEARRLLETHRELSKRLLERLEKVNRDIREKAKEKKEEVLTELLKESERLLEEVKKINKEAEDRIRELLKRVDDILKDLKKRIEDLLDEVRKRGLDERLLRRVEKEVEDLLRTVKDLLRRIEEEVRKSLEESKKLLKEVEDHSRKLLEEIRK

SEQ ID NO: 4013 - protein, 177 aa, Artificial Sequence; identical to SEQ ID NO: 4012
  Synthetic

SEQ ID NO: 4014 - protein, 177 aa, Artificial Sequence
  Synthetic
DEDEEVLRRLKELLKTHRKLSEDLLREAEAINEDHRRLSEELLRRLEKLNEEIRRKAKEKDRRVMEKVRKESRDLLEEVKRINEEAKRRSEEVAKKVRKINKEAKDRIDTLLEDLKRRGVDEELLRRVEEEVKKSNEESKKKIKELEEHSRRSNEESERRLREVEEHSRRLLEEIRK

SEQ ID NO: 4015 - protein, 177 aa, Artificial Sequence; identical to SEQ ID NO: 4014
  Synthetic

SEQ ID NO: 4016 - protein, 176 aa, Artificial Sequence
  Synthetic
SEVEDIVRKVDEIIRRLERHNEELRKRVEEVLDRLRRHNEKLDRDVKEIIKEIERVIRGNTDDARELTKRLKEALDRHRKASEDNIRDIRDALRKVEEVSRKNVDDLRDALREVREKLGKKDLLREIEEKVRRLVRKSEELLRRIAEDVKKVIEDSKDSHKKIEDELRELEERLRK

SEQ ID NO: 4017 - protein, 176 aa, Artificial Sequence; identical to SEQ ID NO: 4016
  Synthetic

SEQ ID NO: 4018 - protein, 176 aa, Artificial Sequence
  Synthetic
SEVEDIVRKVDEFLERLKEHNRKLDKEAKELLDRLKRHNEKLDEEAKRLIEEIKRVADENSMDKDRLLAELRKVLEEHRRVSEDNVRRIRKLLDDHRRRSEENMRRIDAVLDKVRKELEDKDLLREIAEKAERVKEESKRSHDEIADEIRKVEEESERSHREIAEELERLSRRLKK

SEQ ID NO: 4019 - protein, 176 aa, Artificial Sequence; identical to SEQ ID NO: 4018
  Synthetic

SEQ ID NO: 4020 - protein, 176 aa, Artificial Sequence
  Synthetic
KDVEDIVREVERLIKELREHNKELVDRAREVLKELKDHNEKLVEDVKRLIEDITRKIRANTDDKEKLLRDLERVLREVKRVSEENIRRIRKVLEKVAEDAKRNVEELRKVLKEVREKLKKKDLLRDIERKVEKLERDSRRLLREIEEEIRKVIERSKELLERIEKELRDLMRELRK

SEQ ID NO: 4021 - protein, 176 aa, Artificial Sequence; identical to SEQ ID NO: 4020
  Synthetic

SEQ ID NO: 4022 - protein, 176 aa, Artificial Sequence
  Synthetic
KEVEDIVEDVKRVLDELRRHNEKLVREVDRLIRELDKHNKELDDRATEIIKRIEEVVRRKSRDKRELVRELEEVLERHREMSERNVRRLERILKEVAREADKNVKDIRRALERVKRELEKKELLERIDEEVKRVEETSRRLLREIAEKVKTLKEKSKRSHEEIRRRLEELADEIRK

SEQ ID NO: 4023 - protein, 176 aa, Artificial Sequence; identical to SEQ ID NO: 4022
  Synthetic

SEQ ID NO: 4024 - protein, 176 aa, Artificial Sequence
  Synthetic
SEVEEIVRRVEKLIEDLKRHNEKLVDEVKKVIDTLRKHNEDLVRRVEEVIKRIEEVIRENRVDKRELLKRLEELLKRVAEEAKRNVKRLREALKEVAERSKENVKRLEDVLEKVKRELEDKDLLRDIAEKVKTLKEDSRRLLEEIADRVRRLEEDSRRLLEEIRKEVERLKEELKK

SEQ ID NO: 4025 - protein, 176 aa, Artificial Sequence; identical to SEQ ID NO: 4024
  Synthetic

SEQ ID NO: 4026 - protein, 176 aa, Artificial Sequence
  Synthetic
SEAEEAAREAKEAIDRLEEHNKKLDEDAKRAIEEARKHNKELDERAKRALEEIEKAARDNREDKEELKKKADRALEEHRKAAKRNIDEARRALDEHRKASEDNAREAREALKRVRRDLRDTDAARRIAEEVKKLEKKSEDSHRKIAEDVKKAEEDSERSHRDIARRAEEVKKKADD

SEQ ID NO: 4027 - protein, 176 aa, Artificial Sequence; identical to SEQ ID NO: 4026
  Synthetic

SEQ ID NO: 4028 - protein, 176 aa, Artificial Sequence
  Synthetic
SEVEKIVREVEKLLEELREDNRDLVRRADKDLERMERHNRKLVKDVEDVLRRIEEVRRANTEDKRELEKEVRRVLKEVADMAKRNEEEIKKVLDKVTRHSEDNVRKIREILEDVRRKLEDKDLLREIERKIREVEEKSRELLREIKKKLEDVARESRRLLEEIARKIEKLSDELRK

SEQ ID NO: 4029 - protein, 176 aa, Artificial Sequence; identical to SEQ ID NO: 4028
  Synthetic

SEQ ID NO: 4030 - protein, 176 aa, Artificial Sequence
  Synthetic
SRAERIVEEVEKVITDLERDNRELVRDVRRLLERLERHNKELDDRITEIIKEILRLAERNERDKRELEKELEKVLDEHRRVLEENIKEIRDVLREVAEHSERNMRKLRDALRKVERDLEKEELLREIKRKVEELEKRSKELLEEIARRVKEVEEKSRDSHRKIRERLKELVRKVRE

SEQ ID NO: 4031 - protein, 176 aa, Artificial Sequence; identical to SEQ ID NO: 4030
  Synthetic

SEQ ID NO: 4032 - protein, 178 aa, Artificial Sequence
  Synthetic
REMEEVLKEAKELLKESNKKAREIDRKIKELLDDSHRKVKETVDRVKRRIEELDRKVKEVKEERLKEELKEEAERVRRDVERLVEELRRENDEILEEHRRLIKELEDENEEVLDRLRKKLRVEEVLREVEKELEDNKRELRESHKEIARELERNKEDIDRLVEEIKRRIEELKKRIDK

SEQ ID NO: 4033 - protein, 178 aa, Artificial Sequence; identical to SEQ ID NO: 4032
  Synthetic

SEQ ID NO: 4034 - protein, 178 aa, Artificial Sequence
  Synthetic
DEMEKVLKEAEDELRRVEKEVREVDKEAEELLERSHRKVRDIVRRVTEELKRLKDKVEKIREERVKKRLKEEIDEVLTRAKKLIDELRKENDDVLRRHRELVKRIKEKLERIREDLERKLRVREMLEKLRREVERVKKEVDDSHREIAKKVERNKKEIDKLVREVEREVEELKKRIDK

SEQ ID NO: 4035 - protein, 178 aa, Artificial Sequence; identical to SEQ ID NO: 4034
  Synthetic

SEQ ID NO: 4036 - protein, 178 aa, Artificial Sequence
  Synthetic
SEVEEVLEDAKRLLKEVEKRVREIDRRAEDLLRRSHEKVRRIDKDVKRLLREVEKKVEEVKEDELKKRLEEELEEILRKHKELAEELKKENEDALKEHEDLIRRLREELEDVLRRLRERLRKEEVLKKVEDDVRRLDEEVRRSHEDIRKKVEDNKKRIDESHEEIRRLAERVKKEIRK

SEQ ID NO: 4037 - protein, 178 aa, Artificial Sequence; identical to SEQ ID NO: 4036
  Synthetic

SEQ ID NO: 4038 - protein, 178 aa, Artificial Sequence
  Synthetic
SEDEKVVKEAKRLLDENRRENKEIDERAEKALEDSHRKVRKIDKEAKELLEKLRRDVEEVKEEELKKELRKELERVLRRHKKLVDDLKRENDEVLKRHRDLVEESKRKLEEILKELEERLRSRELLDKVRREVERLKEESKKSHDRIREELRRNKEEIEKSHDEIRRRVEKLDDEIRR

SEQ ID NO: 4039 - protein, 178 aa, Artificial Sequence; identical to SEQ ID NO: 4038
  Synthetic

SEQ ID NO: 4040 - protein, 178 aa, Artificial Sequence
  Synthetic
SEVEEVEREVRKLLKESNDKVREIDKEAKKRLKDVEDKAREIDERITKLLKDIEDEVRKVKERELKEDLKRKIEDVLRDHERLVRELERELEKILEDHKRLIEELKRENDRVLEELRKKLRKEEVLRKVEKEVEDNKKELDESHKEVKREVEEVRERIDESHKRIRERADRVKKKIEK

SEQ ID NO: 4041 - protein, 178 aa, Artificial Sequence; identical to SEQ ID NO: 4040
  Synthetic

SEQ ID NO: 4042 - protein, 178 aa, Artificial Sequence
  Synthetic
KELEDVLEDVKRLLKESNDEVKEIDDRARRLLEESHRKSEEVDRRAEKRLREIEDKVRKSDKEEVKEELKKEIKKVRDEHEELSRRNTEENKRVLDEHRKLVEELKKKNDDVLRELRKRLRKEEMLREVEERARKNKEDIEKSHDEIRKEVEDNIRRDRESHKRIEEEARRVMAEIEK

SEQ ID NO: 4043 - protein, 178 aa, Artificial Sequence; identical to SEQ ID NO: 4042
  Synthetic

SEQ ID NO: 4044 - protein, 178 aa, Artificial Sequence
  Synthetic
SEVERVLKEADKLLKDNDEKNERVDREVEKLIRDSHEKSKKVDERAKRALDKLDDEVRKVKDEELKRELKERIKKVLEEHKRLSDENRDENRKVLERHKELVDRSKKELEEVLKELRKKLRKEEMLREVEKKVETLKKKSDDSHKEIEEKIRRNIEEDDKSHERIREEAEKLKKKIDD

SEQ ID NO: 4045 - protein, 178 aa, Artificial Sequence; identical to SEQ ID NO: 4044
  Synthetic

SEQ ID NO: 4046 - protein, 184 aa, Artificial Sequence
  Synthetic
ELEELMKKIEDDSKKNDEDTERLVKEIRDRSKRNREESKKLHDEDRREAKRVLDEARRDVRDEEKLKRLEDKLEKILRENAEVHKTSEEKNRRINKRLDDLVREDKKKNEDILRKLRELARRVKREEDVRRAIEEVRRLLEKSHRDSRRVIEEVRRLLEKSHRDNRKVNEDSRRLLKKVREDAE

SEQ ID NO: 4047 - protein, 184 aa, Artificial Sequence; identical to SEQ ID NO: 4046
  Synthetic

SEQ ID NO: 4048 - protein, 184 aa, Artificial Sequence
  Synthetic
SLEDLVREIREESERNKKETRKLLRRIEEESKRNLDESERLHREDKKRLEDIAERLERRVRDEDKLRRLKEELERILKRNKDLVDEDREENERIITKLRKLVKEDEDKNRKIITDLEDVLRKVKDEDLVRKVITEVKRLLEESHKESREVIREIKELLEESHEKSKKVNEESKKLAEDVLRKAD

SEQ ID NO: 4049 - protein, 184 aa, Artificial Sequence; identical to SEQ ID NO: 4048
  Synthetic

SEQ ID NO: 4050 - protein, 184 aa, Artificial Sequence
  Synthetic
SLEELLKKIREESKRNLDETRKLHREDKEESRKNLEESRKLHEEDRREAERVKRRADREVRDEEKLRKLRELLKRILDKNKKVLDDDKRLNEKILKENEERVRDDKETNDRIIEEADEALERVKDEKLVREVVERLRELLRESHERSREVNKRSRDLLRRSHEKSRRLNEESRRLLEEVERRVK

SEQ ID NO: 4051 - protein, 184 aa, Artificial Sequence; identical to SEQ ID NO: 4050
  Synthetic

SEQ ID NO: 4052 - protein, 184 aa, Artificial Sequence
  Synthetic
SADELLKKLRDESEKNKDDTRKLLEELRRRAEKNKKDIEDLLREIEKKLREVLEDIKRKVRDEEKLRRLKEMLERILKRARELVEELKKENDKILKELEDMVEDDKRDNKRIIERVEELRKKVRDEEEVKRAVDEVRRLLEESHKKSREVIKRIKKLLEDSHKKVREIVTELDKLIKEVEKKVE

SEQ ID NO: 4053 - protein, 184 aa, Artificial Sequence; identical to SEQ ID NO: 4052
  Synthetic

SEQ ID NO: 4054 - protein, 184 aa, Artificial Sequence
  Synthetic
DLKELVDELRKKSDDNLKETERLVREIEKRLTDNKRESERLVREIEKELRDLRERIERTVRDERKLRDLERKLKKVDEELKEMHERSKRENEEIRRELKKLVEDDERRNREIKKRVEDLLRKVKDKDEVRKAIKEAEELLKRSHEESRRVIERVRKLIEESHRKNREAIKRIRRLIEEIRKEVD

SEQ ID NO: 4055 - protein, 184 aa, Artificial Sequence; identical to SEQ ID NO: 4054
  Synthetic

SEQ ID NO: 4056 - protein, 175 aa, Artificial Sequence
  Synthetic
SEIEKVREELKELLERDEREVKRVIDDLRRLIKDLRERVKEVNKRDDETVKEIKKVIEERGDTEDVKRLLTENKKRNDRMLERLEKILEDIRERVRRALETSEKTNREIDERVKRKIKVEEVAREVEERSRRVKRKLEELIREIKTELDRVREEIERLSKRDREKNERLREEARR

SEQ ID NO: 4057 - protein, 175 aa, Artificial Sequence; identical to SEQ ID NO: 4056
  Synthetic

SEQ ID NO: 4058 - protein, 175 aa, Artificial Sequence
  Synthetic
SEIEDVLRELKKLLTDDKREVERANRDDERTLRDIRRKVEEAIKKLEDLLRDVKRRVDEEGNTEEVEELLRRILKDVERVLRELEKLIRDNKRRNKEMLDRSRRTNEKIKEDADRKLKVKDVAEEVERESRKVEKELEDLSERDKERNDRILRTIEELIKRVEEEIRKVKEDVER

SEQ ID NO: 4059 - protein, 175 aa, Artificial Sequence; identical to SEQ ID NO: 4058
  Synthetic

SEQ ID NO: 4060 - protein, 175 aa, Artificial Sequence
  Synthetic
SEIEDVLRKLRKLLREDEKRVEDANRRDRDTVRKIEKRSEEAFKESKETNKRIEDKVRKTGPTDEVRKELEDDKKRVDDAHRKSEEDIRRNDKENEEFLEESRKTNEDIKEEVDRKIKVKEVVEEVRDDSRRVEEKLRRLSKEDKEENDKIRRRDRKLVEDLRRDSDRILRKVET

SEQ ID NO: 4061 - protein, 175 aa, Artificial Sequence; identical to SEQ ID NO: 4060
  Synthetic

SEQ ID NO: 4062 - protein, 175 aa, Artificial Sequence
  Synthetic
DEIERVVEEVRELLERDKRRSDEVIERLKRLLEKDEEDVDDVIRRSKETNERIRDKIEKEGPTEEVEKLLRDDKRRVDKLLEDSKRTNDDIVRRLDEAHEESEKTNRDIDEEIERKAKVKEVVDDLKRLSKKVYDDNKELIDRVRERSREVLRRLKELADELRKLSEKIKRDADK

SEQ ID NO: 4063 - protein, 175 aa, Artificial Sequence; identical to SEQ ID NO: 4062
  Synthetic

SEQ ID NO: 4064 - protein, 175 aa, Artificial Sequence
  Synthetic
DDIEEVVKEVEDLLRRDAEDVERAIKELRKLLEDDRDRVRKVNEESRRIIEEIRKAIERRGDQEDVKRAVKEVKDRNRKANDESRRTNTDIKRALDEALKRSRETNKDIEDKIREKAKVKEVVDKLREDSERVKKKAEDLVEEIRRASEEVKKEVDDLSREDEERLEKLKEDARR

SEQ ID NO: 4065 - protein, 175 aa, Artificial Sequence; identical to SEQ ID NO: 4064
  Synthetic

SEQ ID NO: 4066 - protein, 182 aa, Artificial Sequence
  Synthetic
SEAEELEDRIRKLLREVEETSRRILKRARELNKRIEEESRRIIKRIKELIDEIKELVRTRGDDRGVEELLKKVLKEIEEVNDEHRKRIEDVTRKSEKVNEDHRKTIEEMEERLRRLLEDLRRRGIDERLLRKLEREVRRLSEEVTRLDEETRRHSDDLRRRVERLDETTRRELEKLADEVRK

SEQ ID NO: 4067 - protein, 182 aa, Artificial Sequence; identical to SEQ ID NO: 4066
  Synthetic

SEQ ID NO: 4068 - protein, 182 aa, Artificial Sequence
  Synthetic
SEAEELIKRAEDLIREIKKRSDDLVREMERLNEEIKRVSDEIIKRIEEVLEEIKKLVKKVRDDRGVEERVREVKREIERLNDEHRKIIEKVLRESRDVNRRHEEEIRRVLKEIEDLLREAEERGIDRRLLEKLKRELKDLERRVREENERSKRHSEELVRRARKLNEKTDKDLKRLEEETRR

SEQ ID NO: 4069 - protein, 182 aa, Artificial Sequence; identical to SEQ ID NO: 4068
  Synthetic

SEQ ID NO: 4070 - protein, 175 aa, Artificial Sequence
  Synthetic
REIEEVRKEVERVRKRYKDEVRKIVEDARRVLEEHKRRVEKLLEELERILREAKRLTDEGDRREEVIERLKELLKRIKERIERLNKRLREVVERIARDLKRLVEESKRELDRIREEVRDEDMLREIEKAVRELNEESKELLERIEREVRKSEERSKEVIKEIAERARKVVEDTKT

SEQ ID NO: 4071 - protein, 175 aa, Artificial Sequence; identical to SEQ ID NO: 4070
  Synthetic

SEQ ID NO: 4072 - protein, 174 aa, Artificial Sequence
  Synthetic
SEAEKVLTDNRDTLRRLKEELKKVLDENRKTLEELDKRLEEVHKRHNEELDRIRKDGLSEEVLREVEKINEELRKELEDLSREVKKLHEDLEREIRELAKEAEDRHKDLERKVRDTKADERVKEELKRIDEDLKRVVDRIKEKAEDIDRKLKKRVKEIMDKARESLKTLEERVK

SEQ ID NO: 4073 - protein, 174 aa, Artificial Sequence; identical to SEQ ID NO: 4072
  Synthetic

SEQ ID NO: 4074 - protein, 174 aa, Artificial Sequence
  Synthetic
DEMREVLKRLRELVEELRRELEEVLRRNRETLKRLEEELRRVHKEHNDVLKEIRDKGLDEDRLREVTEINKRLKKLLDELRERAKKLHEDLKRLIDELDRRLRELLKRLKERLRDTRVDERMKDELKKILDEARRVVERIDREAKRIDDELREVVERISRDAKRSLDELDERTR

SEQ ID NO: 4075 - protein, 174 aa, Artificial Sequence; identical to SEQ ID NO: 4074
  Synthetic

SEQ ID NO: 4076 - protein, 174 aa, Artificial Sequence
  Synthetic
DEMREVLRELEDELRKIKERLKRVLDRSRELLEEWREELERVHRRNEETLRRIEKNGLSEEVLREADELNKELKREADELLDTYRRLLEESEKEAREIIKTVEELVKRLREELRDTKTDEEIKRRAEDILRELRRLVEELERRNEEINRRLAKRIKELMEKIRREDERLKKEVE

SEQ ID NO: 4077 - protein, 174 aa, Artificial Sequence; identical to SEQ ID NO: 4076
  Synthetic

SEQ ID NO: 4078 - protein, 178 aa, Artificial Sequence
  Synthetic
DKAKRVRTELERRLEKLKRDARKVIEEHEKSLRDLEEEVRRVREEHERSLKELKEELDRKPKREEEKKRLKDEMEESRRRLDKLTEDLKRELDKSRDRLRKIDKELDDSAKKLRDELEKKGVDEDVTRELERVLDELRREVDRVRRELEKIDRELRELVKRIEDELRKINKELKEKSD

SEQ ID NO: 4079 - protein, 178 aa, Artificial Sequence; identical to SEQ ID NO: 4078
  Synthetic

SEQ ID NO: 4080 - protein, 179 aa, Artificial Sequence
  Synthetic
DEVEELVKTVRKLVEDHNRKLEEVVRRLREIVKELEDRTRRALEEARRTVKRIEEEVRKRGKSDKLAEDIRRKLKELEKRLKRVKKELDDLHRDSKKKLDDVKRESEEDLRRIDEALKRVDIDERLLRELKDLLEKSKRRVDELVKEIEKRNRDHKEKVRKIVDEIRRLLRELEERVKK

SEQ ID NO: 4081 - protein, 179 aa, Artificial Sequence; identical to SEQ ID NO: 4080
  Synthetic

SEQ ID NO: 4082 - protein, 183 aa, Artificial Sequence
  Synthetic
KLEEILRRIRELLKRHHEKNKKILDDIREKSKKLKKKVDDILTRITEIIKDLEREVDGRPRDRRLEELKRELRDLLDKLRKRVERIAEEHRRLDEELETKVRKLNEELRKLTKDLEERVREGNDERVLEDLRRKADDIIRRADEESRKIKEEADDIFRRSDELLKRLEDEAKRIADEVRKKTK

SEQ ID NO: 4083 - protein, 183 aa, Artificial Sequence; identical to SEQ ID NO: 4082
  Synthetic

SEQ ID NO: 4084 - protein, 183 aa, Artificial Sequence
  Synthetic
DSDRIEETIKKLLKELSDKSKEVLDEIRKRLKDHHDRNRKVLEEIRRILKRLEEEVRRKPNDERLEELKKRLRELAERLRTEVEEINKRLDELRKELEEKVRRLNEKLKKLADDLRKELRKGNDKRALKEMLDRVRKIIKEYEDSLRRLKEEVDEIIERADRLSEELRRKAEKIIRDITDAVR

SEQ ID NO: 4085 - protein, 183 aa, Artificial Sequence; identical to SEQ ID NO: 4084
  Synthetic

SEQ ID NO: 4086 - protein, 183 aa, Artificial Sequence
  Synthetic
DSEELLREIRKRLEDLSRKSEEIKRRIDEISRDLERKVEEIKKRIEELVRRVRTEADKRPKTRELDRLKEELDRLRRELEKEAEKLMEDHRRLNEELREEVKKINEELKRKTDTLTERLRRGNDRKVLERIREEADEIDKDYDRLLKEIRKKIEDIARDTERRLRELKDRVDKIIKKVEEDER

SEQ ID NO: 4087 - protein, 183 aa, Artificial Sequence; identical to SEQ ID NO: 4086
  Synthetic

SEQ ID NO: 4088 - protein, 179 aa, Artificial Sequence
  Synthetic
REIETVTKKSRDLNREIDKKLKELTERVDKLIEEWKRKTDRVREEAKRAVKEIEDKNVREDEFEKLTRELEKRLEDVKEESRKDKERIEKRLKEAEDDLRRLDKEHREELKEVRERLPETEELRRVIEESKRSNDELKKKADELSKRVKEALDRLEEEDKRVLEEIKDILRELRERRRK

SEQ ID NO: 4089 - protein, 179 aa, Artificial Sequence; identical to SEQ ID NO: 4088
  Synthetic

SEQ ID NO: 4090 - protein, 179 aa, Artificial Sequence
  Synthetic
SEIEEVEKKSRELNRRVKERLDEVEEESRRLNEKWERDTRRVRERVEEEIKKIEERNVREDEARRMLEAIKEDLERAERESERTDEEHRRRLEEVRKEVEDMDRRHREELKRVAERLPRTEKLDEVLKRSEDSNRELKRRAEELLRDSERTNEELRRRDEEVKREVEEKLKELEKEIRR

SEQ ID NO: 4091 - protein, 179 aa, Artificial Sequence; identical to SEQ ID NO: 4090
  Synthetic

SEQ ID NO: 4092 - protein, 187 aa, Artificial Sequence
  Synthetic
SSKEILKEIDERVEELKRRNEKVDREIKEKVKRLEEENEKVDREIKEILKELEKEAEKRPRTEDLERKIREVRDTLRRLHEENKEVNDRMRETVRRLHEKNKRMDERAKEEIEKIKEDIKRLEDKGTTEEVLERLRREVRKRIEDYKRKLDKIARDVDETIERYKRKLEEIKRRVEDEARKIKEEIR

SEQ ID NO: 4093 - protein, 187 aa, Artificial Sequence; identical to SEQ ID NO: 4092
  Synthetic

SEQ ID NO: 4094 - protein, 179 aa, Artificial Sequence
  Synthetic
SRKEELKRRLDEALKKYEADLDELRRRHEEDVRRSKEENERLLKELEDAVRRAKEEVKKAGKDKKDLDRLEEELRKLVEDIKRESEKLERDIDRHHKEIKKHMDKSRDELKKVREEIDRRDDEDRRVEKEIREAIERLKRNLERIKRNIEKVREDSKRVNKELRDKIREIIERIDRRLK

SEQ ID NO: 4095 - protein, 179 aa, Artificial Sequence; identical to SEQ ID NO: 4094
  Synthetic

SEQ ID NO: 4096 - protein, 183 aa, Artificial Sequence
  Synthetic
SRKEKLLDDARKILKRAEEELKRLYDKHRRIIEEVKRDLERLKKEHEDVVRRVEDVLRKRVTEEERVRELKRKIEENHKELKERIDKLKEELDRINEELKKRLDKIKKEADELLRRLKEVADRNEKDDKELEEDIRRIEDRLRRLLEELEKLIEDSMRELKRVLDELEKHIREVDEELEEDLK

SEQ ID NO: 4097 - protein, 183 aa, Artificial Sequence; identical to SEQ ID NO: 4096
  Synthetic

SEQ ID NO: 4098 - protein, 184 aa, Artificial Sequence
  Synthetic
SEAERVKRELDEALKKAKKALEDNKRKLEEALRKHREDAKRWKEELEKALKEAEKAAKDLRRDADKEELDRLREDLERKAKKLKDEIEKINRELEELAKRHEDTNRKLEEDLRRLAKKLREEIEKDGADKEAERKLRELEKRAKEALERSKEHSDELEERARKANKEIEDKLKRLAEEAEKEAR

SEQ ID NO: 4099 - protein, 184 aa, Artificial Sequence; identical to SEQ ID NO: 4098
  Synthetic

SEQ ID NO: 4100 - protein, 179 aa, Artificial Sequence
  Synthetic
SEAEKIKKDLDKIREDLKRLDREAEERVRRLSEELDRKDRELRKRIDEILKRMRDEERSDDELRKEEKKVRDELEEMAEDLRRKNEEIREILKRIAERLKKRNDDVRKRLEDIARKKSVPDEDLKRLEDELRKVEEDNRRTLEELRRRVEEVSRRNKESLEDIRRKLEEAIRRLREKTR

SEQ ID NO: 4101 - protein, 179 aa, Artificial Sequence; identical to SEQ ID NO: 4100
  Synthetic

SEQ ID NO: 4102 - protein, 179 aa, Artificial Sequence
  Synthetic
DGAEEVDDRLKKADEELRRKDKESDEKTKRIAEELRKLLEESKKKTEDLVRRLDEEDQRDELVRRTLREIEEDHERIDRRLKEKEEEVKREHEKIARELEKKNKEIRDELKEIADRNSVPEKRLRELEKKVEDVSRTNKKTLEDNRKKIAEVVKRLDEEIKRNKDTVRRVVERVKKDTD

SEQ ID NO: 4103 - protein, 179 aa, Artificial Sequence; identical to SEQ ID NO: 4102
  Synthetic

SEQ ID NO: 4104 - protein, 180 aa, Artificial Sequence
  Synthetic
ERKERLKERLDEVKKEHERLVERWHRENREVLRENRETVERLERELERVLRELRDALREQNRDEKAEKILRDLERKVRELKERAKRLHDKLEEENREVNKKIKKDSDDLREELEDETRKIKERRDEELEKRIEEVERKLRDTNRKIEELLKRLKKRHEEVDRELERLLEKLEREAEETRR

SEQ ID NO: 4105 - protein, 180 aa, Artificial Sequence; identical to SEQ ID NO: 4104
  Synthetic

SEQ ID NO: 4106 - protein, 180 aa, Artificial Sequence
  Synthetic
SEEEELEKELEKVLRENEESVRRLHKRNRDVLKKNRETLEKLEEDLKRVLERLKRALDRKNTPDEARKIIKRLKEKLERLVEEARELHRRLEEKNRDLNRRLKEKHDRLRKEVEDLRRELKARREKEARDEVRRLKKKMDDVDKDVERLVRELEKEHEEVDKDLRRKLDEVRKELEDARR

SEQ ID NO: 4107 - protein, 180 aa, Artificial Sequence; identical to SEQ ID NO: 4106
  Synthetic

SEQ ID NO: 4108 - protein, 182 aa, Artificial Sequence
  Synthetic
SEEERLEKELDEVLEDHKRRVEEWKKKMDEVNKKHKESIDRLREELDRVLDEVRKAGLDEKKLRELEKKARDLKEKIKKRTEEIKESNKRIKDEIKKLSDDLEKEARDLKREIRDLKRRGEPREEALKRLEELVRKLKEKLERINRRIARIVDKNTKEIKDTNDTLRKEVRDLMKELKDRTR

SEQ ID NO: 4109 - protein, 182 aa, Artificial Sequence; identical to SEQ ID NO: 4108
  Synthetic

SEQ ID NO: 4110 - protein, 175 aa, Artificial Sequence
  Synthetic
REDEEVKKELRKILEDHKRRVEDWKRRLKKNLEEHRRRVEEWKRRLDELLEKVRRAGLPEEVLRELEKVVREIKERIDRLDEEYEDLLRKIEEEAEEMNRRLEELVRELERLIERKDLSEEEIKRVIERLARDARRINERLRELLERLSEISERINREIEKIIDEARERLEREER

SEQ ID NO: 4111 - protein, 175 aa, Artificial Sequence; identical to SEQ ID NO: 4110
  Synthetic

SEQ ID NO: 4112 - protein, 175 aa, Artificial Sequence
  Synthetic
SEKEEVKKRLKDNMRRAEELIRRDDREVEENRKRHDELVKEWDKRLREILKKAEDSGLPEEVKKELKEIVDRIREEMKRLNEEYKRLVEEHKKRNEKVLRDYRDLLRRIEELIERNDLSEKEIKEVLEELSRTSKRLIEDSKRSSERLSERSKRTNEEIERIVRAAKRTIEERER

SEQ ID NO: 4113 - protein, 175 aa, Artificial Sequence; identical to SEQ ID NO: 4112
  Synthetic

SEQ ID NO: 4114 - protein, 183 aa, Artificial Sequence
  Synthetic
SVAEELEERLKEIKRESEKSIRDLRRLLEEIERRLRDINRKLDEIVKRVAEKIKDAETKGAPKEELDKELDKDRRDLERRADESRRELRRLEEEMKKKEKESRDRLDELRRRMEDRLRKNKEVDKKVVDDVERKLREIIRRHEEELKKIKEDLDKIREDHERLLREWKKELDELITRVAESAR

SEQ ID NO: 4115 - protein, 183 aa, Artificial Sequence; identical to SEQ ID NO: 4114
  Synthetic

SEQ ID NO: 4116 - protein, 183 aa, Artificial Sequence
  Synthetic
SVSKKLDDELRKMEREIEKSNETIKKLIEDIRRRSKESRDRLKELLEEIKKRLKEAEERGEPKEELDKKLEKMVRDAKRELDESRKELDKLKKEIEKVLRDSRKKLKKIEDELRRELEENKEIDEKVVEDIERRVEKVLTDHERELERVERELDDIIRRHEEELEKIERELEKIKEDVDRSAK

SEQ ID NO: 4117 - protein, 183 aa, Artificial Sequence; identical to SEQ ID NO: 4116
  Synthetic

SEQ ID NO: 4118 - protein, 181 aa, Artificial Sequence
  Synthetic
DELDRLRELLEELKRRSETVIKEAEELLRKLERELRELIREWKEITERLARRMEDLSRKGVDERTVEKLAREVKEANKRLEDRLREVKKKITRDRERLEKRSEELERRAKEELDKLRKGGLQREDLKRIEEELREILKRHRDANKRIKDEVEELLKRVEEMLRRLHEEDRKLLEDLKRETD

SEQ ID NO: 4119 - protein, 181 aa, Artificial Sequence; identical to SEQ ID NO: 4118
  Synthetic

SEQ ID NO: 4120 - protein, 181 aa, Artificial Sequence
  Synthetic
RETEEVKKDVDRIRKASEDVARKMEKITRDVAKELRDLIEEWRRRSEELKKELEDLSRRGVSKEDLKRVAEKIEKINEDIKRRLEETSRKNEELNRRLKEESDKLAKEVEDRLRRLREGGLPEDELKRIEEELRKILKEHEDKNREIKKENDRLNKEVEEEAEKATREDKRLLEKADRDRQ

SEQ ID NO: 4121 - protein, 181 aa, Artificial Sequence; identical to SEQ ID NO: 4120
  Synthetic

SEQ ID NO: 4122 - protein, 174 aa, Artificial Sequence
  Synthetic
SEKEEIEKRLDKLLKEHEEENDKIRRTLKEINDRSKEEVERIEERLKDLLRRLRERIEPREELKKIEDEVREVIREAREELEKLNRKDREIEKTLKKLSDELRKKVDDLKKELRTDEDTKRARDRLEELRRESEELIKTARDLVRRSEKEHRDLIERLRRILEELREKLERKTT

SEQ ID NO: 4123 - protein, 174 aa, Artificial Sequence; identical to SEQ ID NO: 4122
  Synthetic

SEQ ID NO: 4124 - protein, 185 aa, Artificial Sequence
  Synthetic
SVKEEVRTLLRRLERVSRELIRRLKEMLKTLHEENKKLIDDSRKLIRKIKRDLERVAERRARDEELKDLLRKLEELVRRLKEENDRLTDESRKKLDELRKEIKKLSDELRRDIKELEDRLDEKLRDKDTVKKVKEDLKDILRRHEEANERIRDELRRNLRKHEDDSKKSKEELDRILKKARDDAR

SEQ ID NO: 4125 - protein, 185 aa, Artificial Sequence; identical to SEQ ID NO: 4124
  Synthetic

SEQ ID NO: 4126 - protein, 185 aa, Artificial Sequence
  Synthetic
DIEDELRKELEKHHTKSREVKRRLTELLKRHEDRVEEVERRLRKDLKELRDRIEELSKIREEEMVERARRELKKIKEDVKKETEDVERESEEIEKELRERLKRVEEESRRVEEELRKKIEKNKDLDEKVAREVEERLKRDHDDLRRVIEEIRKRLEDSHRELKKTIEDVKRRVEELIEEAERRMK

SEQ ID NO: 4127 - protein, 185 aa, Artificial Sequence; identical to SEQ ID NO: 4126
  Synthetic

SEQ ID NO: 4128 - protein, 185 aa, Artificial Sequence
  Synthetic
SIREKLREVLERHHRTSRKVEEDLRRKLEDHHRKTREVAERLKEKVDRLREEIKRASRIREEEVVREIEERLKRMKEEIKTLADKVRDTSRRVKEELDRLLEEVERRSEKVERELEKRLRENKDLDERVVRKIEKDLRDDHRRLKEIAKRIDDEARRDIKRLEEIIKKIEEEVDRLIEEVRRRDK

SEQ ID NO: 4129 - protein, 185 aa, Artificial Sequence; identical to SEQ ID NO: 4128
  Synthetic

SEQ ID NO: 4130 - protein, 178 aa, Artificial Sequence
  Synthetic
DKDREIERLAKEAKDRHDKTLEDDRRRLEEVRRKIEETIRRIKKKLDEAKKRLKELVRDKPVEEELEKDVERRLKELEDELRELLRELEERVRESEKRFKELTDELKALIDRLREDIKREGVTEEILKELEEIVRRVEEKNKRLHDENEKDTRRVEAVLEDIKRRIDEIVRRLEERIK

SEQ ID NO: 4131 - protein, 178 aa, Artificial Sequence; identical to SEQ ID NO: 4130
  Synthetic

SEQ ID NO: 4132 - protein, 178 aa, Artificial Sequence
  Synthetic
DEKDRIDKRMKEVLKKIEELIRRDERRLEKVRKDHEELVRRIEDELRRVLEELKKLVEEKEVDKKLEEDVRRVVEEIKRKIEKHHEELERLVRESEKRLKKLLEDAKKELDEIREEIKRDGVTEDIERKIRELEEKVERELKKIHDENEKLAEKARRDLERIEREIDKLVKDVEDAIR

SEQ ID NO: 4133 - protein, 178 aa, Artificial Sequence; identical to SEQ ID NO: 4132
  Synthetic

SEQ ID NO: 4134 - protein, 178 aa, Artificial Sequence
  Synthetic
SEKDKITKTLEDAKRDHRKLVEEDEKALEEVERRHEEIVRRIEEKLKEAKEELDRLVRDKPVPDDLKREVRKLLEDLKRRLKKHHDELRKLVKESRDRLKEHHDRLEEELRRIKDRIRKTGVDEKILREIEERIKEVKENLRRVHEENRELAKKVLKDLERILEEIKKIIKELRERVK

SEQ ID NO: 4135 - protein, 178 aa, Artificial Sequence; identical to SEQ ID NO: 4134
  Synthetic

SEQ ID NO: 4136 - protein, 178 aa, Artificial Sequence
  Synthetic
SKKDEIEETIRRARERIKTIVDRIREELKRIRDKHKKLVDEDKKTLEEVLRTLRELVRDKPVDDRLLREVEKLLEDSKEEIKKHHEELARRLREIEEKIKRLLEEAEKKVEDVRDEIRKTGVTDEILEKVKELVREVEEVLRRIEKEIEDLVRKVEEDLRRIHERNRELAKKADDDIK

SEQ ID NO: 4137 - protein, 178 aa, Artificial Sequence; identical to SEQ ID NO: 4136
  Synthetic

SEQ ID NO: 4138 - protein, 178 aa, Artificial Sequence
  Synthetic
SKEEEIEKTLKKIEEDHRELVRRIERALDDARRRHKELVDRDDKELRDAERELDRLVREKPVPEELKERVKRLVKESKEEIDRHHKELEKRLKEIKEEIDKHHRELKERLDRIRERIRKDGATEEILKEIRDLADEARRNLERILRDIERVVEKVERDLKRIHDKNKRDVERVRREVK

SEQ ID NO: 4139 - protein, 178 aa, Artificial Sequence; identical to SEQ ID NO: 4138
  Synthetic

SEQ ID NO: 4140 - protein, 178 aa, Artificial Sequence
  Synthetic
KEKDDIDRDLKRAEEEHKRLVDEIRETLKEIEREHRERVKRIKEKLDEAKRRLEKLKRDRPVEDKLEKDLERRLREIEKKLRKHHKEVKDILRAIEEEIRRHHRTVRERLRAIRERIKKDGVTEKILEDIKREVDRVRKNLKEIKEKIDKEREDVKRDLDRIRKEIEELVEKVDRDVK

SEQ ID NO: 4141 - protein, 178 aa, Artificial Sequence; identical to SEQ ID NO: 4140
  Synthetic

SEQ ID NO: 4142 - protein, 178 aa, Artificial Sequence
  Synthetic
DKARKIEEDIRRAEEEHKELVKRNEERIKEVAERHEETVRDIERKAEDIRRELKKLVDEKPVPEELKRDFEELIKELREELRRHHEKMKRLLDEMRKRHKEHHDRVRELSKRVKDDIDREGVTKEILDEVKKLVDEVRANLEKSHEDIERLVEKVREDLKRIEERLRKIAEDLRRRVK

SEQ ID NO: 4143 - protein, 178 aa, Artificial Sequence; identical to SEQ ID NO: 4142
  Synthetic

SEQ ID NO: 4144 - protein, 178 aa, Artificial Sequence
  Synthetic
EEEREIEDTIRRAEEEHRKRVEDNKRRLEEAEKEHRKRVEDNKRRAEEIRRKLKELVDRKEVDERLDKRADEVLRRLEKRHRDHHEDLKKKLDDLRREHEEHHRRVKELERRVKEEIRREGVTEEILKKVKELVDRVRRNLERSHEKIKRIEDKVRRDLERSHKELEDLMRRMEEEIR

SEQ ID NO: 4145 - protein, 178 aa, Artificial Sequence; identical to SEQ ID NO: 4144
  Synthetic

SEQ ID NO: 4146 - protein, 175 aa, Artificial Sequence
  Synthetic
EKKERIEERAKEVEREHREIVKRDEEELERVREEHEESVRRDRKALEDVERDVRRDGIEKEVLDEIKKRLERSREKLDKLSRDVEKELEESKRKLEKLSRESKKKLEDLRRELTRGEVPMEDMLRKVKEVADENRERLKELHEENERTARRLRKLNRELHEENKRLVEEIKKEAK

SEQ ID NO: 4147 - protein, 175 aa, Artificial Sequence; identical to SEQ ID NO: 4146
  Synthetic

SEQ ID NO: 4148 - protein, 175 aa, Artificial Sequence
  Synthetic
SKAEEIRKELDRVRREIEKRAEEDKRTLEEVRREHEKLVRENEETIKRVEEDVERAGIDEKKKREIKEALDDLRRKHEKLSRESEDAIRRSEKELRDLKEEIDRLLDRLRRILDEGRVPMEDALREIKEVADEVRKKLRELHEKNKKLMDDNRRKLDKSHKDVREVEREIRERIK

SEQ ID NO: 4149 - protein, 175 aa, Artificial Sequence; identical to SEQ ID NO: 4148
  Synthetic

SEQ ID NO: 4150 - protein, 175 aa, Artificial Sequence
  Synthetic
DKERRIEEELEKARRDHKEDVDRDRERLKEVREEHERLVRENKKRLEEIRKELEDRGIERELLEEARKLLEDLKRKHEELSRRSEELIKRSEEKLKRLSDESERLLRELREKLKRGEVPMEDLLREVKRVVEKNKEDLKRLHDENEKLAEENRRRLKKSHDEVEKVAEDLKRKAK

SEQ ID NO: 4151 - protein, 175 aa, Artificial Sequence; identical to SEQ ID NO: 4150
  Synthetic

SEQ ID NO: 4152 - protein, 175 aa, Artificial Sequence
  Synthetic
EKKERIEDDLRRVKEEIDDLLRKNEKRLREAEDEHRKRVEDDRRRLDEVRKEVDDEGIDERVKREIERLLRESEEELKKLSDESRRTMKKLRDKHREDEEDIKRLLEELKRELDRGEVPMEDALRKLKRVADEIRKRLDESHKEIKKVVDDNRKKLEELHRKNRELERKIREDAR

SEQ ID NO: 4153 - protein, 175 aa, Artificial Sequence; identical to SEQ ID NO: 4152
  Synthetic

SEQ ID NO: 4154 - protein, 171 aa, Artificial Sequence
  Synthetic
KDEERIKKKLKKLVDENRDLNRRIEETNRRVAEDLDRRLKEIEKRNRDMAEELRKSDRSRETVKEMLKRLEDEDRKLSKEIRDRLRDLEREDERLHEEDKRHLERVDEELKRSNIDDEIRKRAEDAERETRETNRRIRDHTRRVAERVEKVLDEIRRHTEEVKKEVDEKER

SEQ ID NO: 4155 - protein, 171 aa, Artificial Sequence; identical to SEQ ID NO: 4154
  Synthetic

SEQ ID NO: 4156 - protein, 171 aa, Artificial Sequence
  Synthetic
SDEERIKDKLEKLVKENEDKNRRILEENKRVADENRRLNEEIEKRLEEMVEELERRDDSEESVKKALDDLEKELRDLNREDREHLRKLSEDLRKMKEEDKKHAEDVRRDLERANIDEEIRKRVKEAEDKTEETNRRIEKHHREVKKESEESNKRITDRLEEVKERVTRKRK

SEQ ID NO: 4157 - protein, 171 aa, Artificial Sequence; identical to SEQ ID NO: 4156
  Synthetic

SEQ ID NO: 4158 - protein, 171 aa, Artificial Sequence
  Synthetic
KREEDIKRRLEKLAKENRERNEEIKRRLDELVDRNREENEKILRELEKMVRELERSDRDRSVVEKELRDLEERIRRMHERDKEDLRRIEETLRELKERDKRHLDEVEKRVEDDNLDEEARKRLEELKKETEDTNRRIDEAVERAKEETRRTNERIKEELKRVKKKVTDKRR

SEQ ID NO: 4159 - protein, 171 aa, Artificial Sequence; identical to SEQ ID NO: 4158
  Synthetic

SEQ ID NO: 4160 - protein, 178 aa, Artificial Sequence
  Synthetic
SEVETAKEDLKKKVEENEKRIKDVEDKLRKTVEDNRKRLEDVLEELRRSVETLRDLLRKGTREEELETMLRDHRRKDKEVEDENRKSIKEHREENRRVEEENKKSKEELRRRLEDLRRKGVVDEELEKRLREAEEKSDRLLRRLKEESRKAEEDSKRLLKELKEESRRAEEEVRRARD

SEQ ID NO: 4161 - protein, 178 aa, Artificial Sequence; identical to SEQ ID NO: 4160
  Synthetic

SEQ ID NO: 4162 - protein, 178 aa, Artificial Sequence
  Synthetic
DEKEEAKERLKELRRRLEETDKRVDEELEKLMREMEDTDRRVKEKVDRSRREADEVLRRGTDDETLKRLKEKHERDDKDIEDKNEELERRLERRLREIEKRNRELNERAKRELEDLERKGVVDEELKRRLRKVSEENKESNERLRRKVKRVVDENRRTNKELKETSKKVKEDIERKRK

SEQ ID NO: 4163 - protein, 178 aa, Artificial Sequence; identical to SEQ ID NO: 4162
  Synthetic

SEQ ID NO: 4164 - protein, 181 aa, Artificial Sequence
  Synthetic
SELEEVTDRLRKLAEKARRLDKEYEEKSRKLKEEVERIDEDLDRLLKELTDEVREIAERGTDEEVVKDLKRKLKKLKRDIEELHKRLHDRNRELERELEEIHRRLREELDKLRDDIRKAGLPEEALRRIEKEIREVEKENRDTLERLRRHDEEVNRTNKETLDRLDEKLKRVEREIDERRK

SEQ ID NO: 4165 - protein, 181 aa, Artificial Sequence; identical to SEQ ID NO: 4164
  Synthetic

SEQ ID NO: 4166 - protein, 182 aa, Artificial Sequence
  Synthetic
DEEEDLKEKVKKVETEHEETLKEIRRKLEDVKREHEKTVEEIRDHNRKVEERIRDVERRKDDKSRELEERSERLKRKLEKHNRELDELSKELEELIERLKRDIDRVTEEVRRKLRKLERDVDREGATERIRERLEELMRDARRLNRELDEKVRKLVEKARRDNTRVKKKSRELMKEIDDELR

SEQ ID NO: 4167 - protein, 182 aa, Artificial Sequence; identical to SEQ ID NO: 4166
  Synthetic

SEQ ID NO: 4168 - protein, 182 aa, Artificial Sequence
  Synthetic
DEEEELKERIERVKDENRRSVERLRRELKRVEDDHRETVKDLERRLREVKKEIEELVRRKDDRDERLKKILKELEEELRKLKEDIDRVSKELKERIEELKKRVDRIHKELKKKAEDLEREVRRDGATEELKKKLEELMKEVRDLDRELKREVEELEREIRRLNKEIRERIEDLVRKAREAIR

SEQ ID NO: 4169 - protein, 182 aa, Artificial Sequence; identical to SEQ ID NO: 4168
  Synthetic

SEQ ID NO: 4170 - protein, 182 aa, Artificial Sequence
  Synthetic
REEEELKKKLDDVRRENEESVKKIKEDIDRVRREHEKTVEEIRRHNKKVEEEIRAEVRRKDDRDSRLERILRELKRLLEEHNKELDELSERLERELRAVEEKIERIHDDLARKLEKLAEEIKKDGADDRIREEIEKLAEEIRRLDERLEEELREIVRKMRELNRRVAEKSKELTEDARRRLK

SEQ ID NO: 4171 - protein, 182 aa, Artificial Sequence; identical to SEQ ID NO: 4170
  Synthetic

SEQ ID NO: 4172 - protein, 178 aa, Artificial Sequence
  Synthetic
SEREEIRERLRRNLEELRKSIKKIEDDLRRLEKRHRDAVKEIEDRLRRLEEKLDEMAKRDSDEETVRKIKEEVRRKVEKIKEEIRKHHEEIEERLRRIRKELKEVEDEHRRRVEKLERDDLPREDVKRAVDEIHKHTKEKEDRLRKLLKDLEKNIEDAIRRLEKLLRDLEEEIKEAAK

SEQ ID NO: 4173 - protein, 178 aa, Artificial Sequence; identical to SEQ ID NO: 4172
  Synthetic

SEQ ID NO: 4174 - protein, 181 aa, Artificial Sequence
  Synthetic
EESERILEKIRRAAEEDKERIRKAIEELRKLAEEDERKLRKANKEARDSARELRRLLKEGLDREEVKEVRERHRRRSDEVHRENEEERRRVDEKLKRVHEENRKIEETLKRELEDVLRKTGEAEVVEEARRLIKKWREEVERLNEEIKKLVEDWDRRVKELNERHRDDDRKIEKEVEDEEK

SEQ ID NO: 4175 - protein, 181 aa, Artificial Sequence; identical to SEQ ID NO: 4174
  Synthetic

SEQ ID NO: 4176 - protein, 181 aa, Artificial Sequence
  Synthetic
SELEKALEEIKRLAEDDMRRIKKVIKELEKLARDDEKRLREVIERLETEVRKLEELLKRGLSDEEVRRILERIKRELKRVHEENERITRKVETDLRKVHEDNKRSLEELKKKLDDLVRKTGDTEVVDELRKRLKEVKERAEDLNRKLEELIRRWKERVERLNRELEKRMRDVEEKVRREEK

SEQ ID NO: 4177 - protein, 181 aa, Artificial Sequence; identical to SEQ ID NO: 4176
  Synthetic

SEQ ID NO: 4178 - protein, 181 aa, Artificial Sequence
  Synthetic
SDLEKILEELKRLAEEDKRKLEEVIKKLEEAARKDAEDLKKVNEEAKKSARELEELLKRGLDRKEVREAEERHERRSRDVHRRNREKKDRVTKELRKVHEDNKRSLEELKRKVDDAVRRTGDAEVVREIEELLKKIEEEVRRLNEELKRLADEWRREVRRLNEEHKDTDRRIKERVKRAEE

SEQ ID NO: 4179 - protein, 181 aa, Artificial Sequence; identical to SEQ ID NO: 4178
  Synthetic

SEQ ID NO: 4180 - protein, 181 aa, Artificial Sequence
  Synthetic
KDMERMLKEIEDLARKLREELKRVLDELRKTAKRDEEELKKVNKEAKESARELEEKLRRGLSREEVEKDVRDHRKKSEEVNRRNRERRKKTREDVERVKRETRRKEEALERRLKEVVDRKGDTEVVKELRKLLKKIKDDVRRLDKELDELLRRWEESVERLNREHKKTDEKVEEDVKRTTT

SEQ ID NO: 4181 - protein, 181 aa, Artificial Sequence; identical to SEQ ID NO: 4180
  Synthetic

SEQ ID NO: 4182 - protein, 182 aa, Artificial Sequence
  Synthetic
SEEEKVEKELRDLVREDDRRLREVEERVRKVVKEAEDDHRRVKEDIRRMVEEIRKKLDKDGKSDRIARELDELLKRLEERLREVEKRSKELNEKLKREIEKVHEENKKLLDEIRKRLEDATRRGTSSERLEDEVRKVEDRSRRMNERIDERLKRVEEESKKAIEELRRELERVKREVEERKR

SEQ ID NO: 4183 - protein, 182 aa, Artificial Sequence; identical to SEQ ID NO: 4182
  Synthetic

SEQ ID NO: 4184 - protein, 182 aa, Artificial Sequence
  Synthetic
SEVEEVKKELEKLAREDEKRLEDVKEEVKESARRDKRRLEEVEEDLDRLVKELEDKLRDDGKDDKLKKEVEDLLRKLEERLRRVHEENKKILEEHKRRSDKVHEENKETLKDIRRRLKEAEDRGTSTDELKRKLKRVEERSREVNRELRERDKKIEEDSRRINKRLKKKVDEVKEKVREDTR

SEQ ID NO: 4185 - protein, 182 aa, Artificial Sequence; identical to SEQ ID NO: 4184
  Synthetic

SEQ ID NO: 4186 - protein, 182 aa, Artificial Sequence
  Synthetic
DEEEDVRRKLEELARRLKRRLEEIEKRLRDSVKEDRRKLEEVKEKLRELIKKLEDEIRKKGTDRRLRDEVKKILDEIKEEITRVHEDNKRRLKEHKETSEKVKREIEDALRKIEDELRKAEERGTSTEKLKEDVERVKRDVRRVIRELEKTDERIERESRKVNEELKELVERVERSVKKADE

SEQ ID NO: 4187 - protein, 182 aa, Artificial Sequence; identical to SEQ ID NO: 4186
  Synthetic

SEQ ID NO: 4188 - protein, 182 aa, Artificial Sequence
  Synthetic
DEDREARKKVEALLKEVEDRVRESKKRTKDLLREIEKRLRDTTREIDELRRRIEDLSRRGEPKEDVLRELKKKLEELLRKDEKINRDLRRKLERLRREHEKILKRLEELLKELEDELREAGLPEEVLRELKELLDKIRETIERASKENEELLREIEKRIEDANRENTERLRRIEKRIDDDAR

SEQ ID NO: 4189 - protein, 182 aa, Artificial Sequence; identical to SEQ ID NO: 4188
  Synthetic

SEQ ID NO: 4190 - protein, 171 aa, Artificial Sequence
  Synthetic
SEKDELRKRVEDIKETAKKVVEELREASRKIHEDNKRVNDRLRKESKRIKDKADKLDIPEESLKRLKKEHEDTDRRIRETDKKLNDDHEDKNRKIEEELDRLIKEIKERDERKPVDERAREEVRRIEKTIRDTARRVRERVRDSERRFRKLVREWEKLVEDSERKIDELSK

SEQ ID NO: 4191 - protein, 171 aa, Artificial Sequence; identical to SEQ ID NO: 4190
  Synthetic

SEQ ID NO: 4192 - protein, 171 aa, Artificial Sequence
  Synthetic
SAKEEIKERVKRIEERLRRLLKELEEKVKRIHDENRKVNKELTDRSKEIKDRLKDLDIPEEALRDLDRRHDETNKRIREEDEKLNREIKERLERLKRKAEKLREEVEERDKRKPVSEEVREELKRIEERLDRTLREVRKTLEDIERRIRKAVEDWRRLVKESEERVKRLTD

SEQ ID NO: 4193 - protein, 171 aa, Artificial Sequence; identical to SEQ ID NO: 4192
  Synthetic

SEQ ID NO: 4194 - protein, 178 aa, Artificial Sequence
  Synthetic
SEEERVRKDLKELHEHLKREVDKARKDLEDMHRHSEELAREVRERHERSKRELDELERRGTDEKTIRDVERKNRDTNRRIREEMERHKKKLDEILERIRKSLEDHTKRVREVLKELAKENVKSEEIEERVRRNEDTLRRVLKELRERAKRNKDDIRRVLKELEDRSREIEKKLREAER

SEQ ID NO: 4195 - protein, 178 aa, Artificial Sequence; identical to SEQ ID NO: 4194
  Synthetic

SEQ ID NO: 4196 - protein, 178 aa, Artificial Sequence
  Synthetic
TEEERARETLDRLNKHSKELVDRVREKLKRLVEHSRELLRRVDRKHKESEKRVREVSRRGADSKTMREIEKDNDRTNKEIKERLDRHKKKLDEILEEIRDELRRHKEKLDRILERLAENNVKTDEIERRVERNKREIDKVLKELEERVRTNKDEIDKALEKLKRLSEEIKRKMREDET

SEQ ID NO: 4197 - protein, 178 aa, Artificial Sequence; identical to SEQ ID NO: 4196
  Synthetic

SEQ ID NO: 4198 - protein, 178 aa, Artificial Sequence
  Synthetic
KEKEELDETIRRLEEHSKKKVDKVRKELKEMDEHSRDEARRVRREHEKSEEKVRRASEEGRSKEVMKRLKEENRDINRRIRERVKEHKRRLDEIEERIRRTVEDHKRKVEEVARRVRERGVESEEARERLRKNEEEIKKVLEELERRVRENKERIDDVERELEDLSRKIEEKLDRDDT

SEQ ID NO: 4199 - protein, 178 aa, Artificial Sequence; identical to SEQ ID NO: 4198
  Synthetic

SEQ ID NO: 4200 - protein, 178 aa, Artificial Sequence
  Synthetic
KEEEEARRTLERIERRIRKALKEIDETLKRLNDHSAKRVKEVREKHEESRRKVDDVSRRGTDDDVARRLKRENDEINKRIEDTVRDHKRRLDKILKDIKKRLDDIKRDLDRVAKELRERNVQTEEIRERVKRIKEEMDRALKRLKDKVKENKERIDEVLKDLRRTSKEIKERLDRSTK

SEQ ID NO: 4201 - protein, 178 aa, Artificial Sequence; identical to SEQ ID NO: 4200
  Synthetic

SEQ ID NO: 4202 - protein, 174 aa, Artificial Sequence
  Synthetic
SKKEELERLLEEAKKKHEESERRLRESSKKLEEEIRRMKEHSKKSSEDAEDKLRRNRASEELLKEVKKMNEELKKKHEDLEREIEESNRRIEEKLKRNKDKSRKEEEDVRKILEDGDTGDELLERIKDLVRRSEEENKKLLDEHRKIVKTLKERLEKLNEEHERIVREVERRTR

SEQ ID NO: 4203 - protein, 174 aa, Artificial Sequence; identical to SEQ ID NO: 4202
  Synthetic

SEQ ID NO: 4204 - protein, 174 aa, Artificial Sequence
  Synthetic
SSEDELRRLLKEARDTHRESEKRLRDSSKRAEDMHEKSKEDVERSSRELEKELRRRRADEELKRKVKEKNDEIKKKLEDNEDKSRKENEKLRDKLRKNKEESDRLVKRLEDIARRGDTGERLLDEVRKEMKRSEEENRRLLREHEEVVKKSIKENKELLDKHKEIEDRLREEIR

SEQ ID NO: 4205 - protein, 174 aa, Artificial Sequence; identical to SEQ ID NO: 4204
  Synthetic

SEQ ID NO: 4206 - protein, 174 aa, Artificial Sequence
  Synthetic
SEKETLKRLLDEIKKRHKESEDRVRKLVEDAREELDRVADELRKSSEDLRRDLKRANADEELKKKVEKLNRELEKKLRDLRRRMKEEEEELRRKLEENKKESDERVKRLEKIAKDGDTGSKLLREVEKLMEESRKRNEDLLKELRDIIEDLREKLRELLREHREAAKRLRDEIR

SEQ ID NO: 4207 - protein, 174 aa, Artificial Sequence; identical to SEQ ID NO: 4206
  Synthetic

SEQ ID NO: 4208 - protein, 174 aa, Artificial Sequence
  Synthetic
DERETLEKLLKEVRDMHEESKKRLTDSSRKLREDLRRVKEELDKTLRDIEERAKEENISEELKRKLDDLKRRLKEKVKKIEDEVEEKNERIRKKVEENETKSAEIEKRLRDIVRRGDTGSRLLEEAKKLIEESKRENEELLKEHDKIVKELIKKLRDLLKEVEDRARDVTEEAK

SEQ ID NO: 4209 - protein, 174 aa, Artificial Sequence; identical to SEQ ID NO: 4208
  Synthetic

SEQ ID NO: 4210 - protein, 174 aa, Artificial Sequence
  Synthetic
SSRETLDELLRRAEEIHRRSEEELRRSSEEVRRKHEKSERDLEKLLRDAEELLRRENVSDELRDEMRRKVEEVKKKADRNREESEDSNRKVDEDVKRNKEKSRELVKELRKIADAGDTGDKLLDTVRKLVETSRDENRKLLEDHKKMVKESEDRNRELLRDLERVIEELSRRIR

SEQ ID NO: 4211 - protein, 174 aa, Artificial Sequence; identical to SEQ ID NO: 4210
  Synthetic

SEQ ID NO: 4212 - protein, 179 aa, Artificial Sequence
  Synthetic
SEVEEILDRLRREVERSKKKVEDILRELKKLAEDTKEKVERVLDRNRKTIEELKKARLPDEELERALRKDRDELRRIKEDLERRHEEIARRVKEVEDRLRKEHERLEKELREVERDLKISEDLVTKLRDLLRRHHETLRRLAKELRDLLKKHHEELRRLIERLEKSLEDLERELDKTRR

SEQ ID NO: 4213 - protein, 179 aa, Artificial Sequence; identical to SEQ ID NO: 4212
  Synthetic

SEQ ID NO: 4214 - protein, 179 aa, Artificial Sequence
  Synthetic
SEVEKILEDLKKLIKESKDEADRILTDHRRLVKETEEEARRALERNRKTVDDLRKANLREDELRDALRRDEKELEDIVRRLRKLHEDLHRKLKKVTDKLRELHEELKRRVEEVERDLKISEEALRELRRLLKEHHEILRKVEEELRRSDEEHHRRLEEVERRLRKSLRELEETVRETTR

SEQ ID NO: 4215 - protein, 179 aa, Artificial Sequence; identical to SEQ ID NO: 4214
  Synthetic

SEQ ID NO: 4216 - protein, 179 aa, Artificial Sequence
  Synthetic
SEAERILEKLDRLVKETDRRVKEVLEDNRRTVRRLEEEVKRILKENRETARELEEANLPKEDLERRLRRDEEELRKMVEELRERLKRDAEKLEKIKRELRELHERLKRDVEDVTRRVKLDEEVLRRLKKLLDEHNERLRRLERDLDRSLKEAKETLDELERRLEKSLRELKESVDRTRK

SEQ ID NO: 4217 - protein, 179 aa, Artificial Sequence; identical to SEQ ID NO: 4216
  Synthetic

SEQ ID NO: 4218 - protein, 177 aa, Artificial Sequence
  Synthetic
SSEERLKEEFKRAAEKVRKVEEELRELHERVEKSSRDSKRRIRELLKRAEEEVKRVEDRGTDRRKKEEIKRVVDELRKDVRRVEKENDEELKKHNEDLKRVTDEIRKILKEMKEELDKRGASDEVLRDLKRLIEELEDKARRVLDKSRRIIERLRRKDEEVLRKLEKEIRELKKKAN

SEQ ID NO: 4219 - protein, 177 aa, Artificial Sequence; identical to SEQ ID NO: 4218
  Synthetic

SEQ ID NO: 4220 - protein, 177 aa, Artificial Sequence
  Synthetic
DEERELRRLLEDVKRRVREVEEELRRLHEEIKRTSKRSKEELRKLHKELEDAVREMAKRGTSKEKLDELRKELKKHNDRLRKVEEENDRKLERHNRRLRKVERELRELVKKLEEDVRRRGASDKVLRDLEELVKELKRRLDEVLETSRREAEKLKRDDEKVLRESKKIMEDLRRRAE

SEQ ID NO: 4221 - protein, 177 aa, Artificial Sequence; identical to SEQ ID NO: 4220
  Synthetic

SEQ ID NO: 4222 - protein, 177 aa, Artificial Sequence
  Synthetic
SEEDELRKLLEELRRRSKEVNDRLRKLHDELRRRVEDLKRKLRELHKEAAKIVEEMKARGTPEEKLRELEKSLEDHNRDLKRVEDEIDDKLRRHNEILKEVHKRDRDSLRRIEEEVRRRGASDKVLEDLRRLVEENTRRLEEMLKRSEKIARDLLEDVKRFLDESKKKIDTLRRRAE

SEQ ID NO: 4223 - protein, 177 aa, Artificial Sequence; identical to SEQ ID NO: 4222
  Synthetic

SEQ ID NO: 4224 - protein, 177 aa, Artificial Sequence
  Synthetic
SLEDELRRLLTEAEKRSKDVNERLRDLHREVRELSEDVNRKLEELHRELEERVKELKREGRDEEELRKIEETLKRHNEELKRVHERDRDTLREHNEKVKKVHDDDRRSLEELRERLKREGASDEVLKKLKELVRRNEEELEKALKESKDIVEKNKRDLDEVEKKSREIVRELIERTK

SEQ ID NO: 4225 - protein, 177 aa, Artificial Sequence; identical to SEQ ID NO: 4224
  Synthetic

SEQ ID NO: 4226 - protein, 177 aa, Artificial Sequence
  Synthetic
SLEETLEKLLREAEDISRKANKRLEEAHERIKRTLEDLERKLEKLNKEVRDRVERVKERGTPEEKLKDIERRLREHEKRSKEVRERLREDLEDHNRDLKRVHDEDKKSLDRLREELERKGVSDKVLEKLKRLIEENKKRLERVLEKSDKILDDLRRKVEEVLKRLEKTVKDLEDEAR

SEQ ID NO: 4227 - protein, 177 aa, Artificial Sequence; identical to SEQ ID NO: 4226
  Synthetic

SEQ ID NO: 4228 - protein, 179 aa, Artificial Sequence
  Synthetic
SEDEELLRRLEETIRRATERVKRLLDTLRKLAEDVRKELERLLDTHRELAKRIEDELREGRSKEVSDKVREENKEHHKEVERRLREIEERIRRHHKKVDEILKEIEKRLKEIIEEILRTRGRTPEEVERVLREVTKRLRDLKREHRKLLEKVKRELEKVEEDHRDSSRKLEEIIKEAEK

SEQ ID NO: 4229 - protein, 179 aa, Artificial Sequence; identical to SEQ ID NO: 4228
  Synthetic

SEQ ID NO: 4230 - protein, 182 aa, Artificial Sequence
  Synthetic
SEAEKLAKDIREAAKRLREHAERDKEELKKAADKLRDEARRDAEKLKRAAEKLKDLARRTGNTEELEKEAREIHERNKRNLERLEKEAREIHEENKKNLERLDREAERIEKEVRDAVRREQLDEEAAKRIKELLDKARKDLEDAKREAEELNRRAREELEKAKKDAEDLNRRAKEELDKARK

SEQ ID NO: 4231 - protein, 182 aa, Artificial Sequence; identical to SEQ ID NO: 4230
  Synthetic

SEQ ID NO: 4232 - protein, 182 aa, Artificial Sequence
  Synthetic
DDKDKLLEELRKVIEELEKKLEDNNRELEKVLEKLKREAERDLERLREMIRRLEELLRRDGPTEELRKDVERIHRENRENLKRIKKEVDEIKEKSKRSLEELKKEVDKIEEDLERLAREKNLSEEVLDRLRRIIEELRERLKRAEKSNRDILERIDRELEKLKRRAEELNEELRRRLKERRD

SEQ ID NO: 4233 - protein, 182 aa, Artificial Sequence; identical to SEQ ID NO: 4232
  Synthetic

SEQ ID NO: 4234 - protein, 182 aa, Artificial Sequence
  Synthetic
SRTEEVLKELRTLMRELRRRLEEVIKELEKSAEELERIAREVAKRSRKVIEELKRKADKDGTSDRLLEEVDKLLEEHNEELERVKKKLTDDLREHRRRSKEVKERLEKKLREIEKRLKEVVDRDGPREELEDLLRRIRETLEDMKRRLDELDTELEKRLREVARTLDELHKELEETLRRLKK

SEQ ID NO: 4235 - protein, 182 aa, Artificial Sequence; identical to SEQ ID NO: 4234
  Synthetic

SEQ ID NO: 4236 - protein, 175 aa, Artificial Sequence
  Synthetic
DAEDELRELSKRNKDEVREVKERLKKLSEENRRDLERVKRKLEKDSEENREALERENKENKEVVDRVEKVHRDIEERVKKIKREVDKLHREVEEEVERIERDLERVHRELEEDVKREGVTEELKKRIEELIRRSRKLAEDLKKKLEDIHRETERLVRELAELVRDLHRRTKEKAR

SEQ ID NO: 4237 - protein, 175 aa, Artificial Sequence; identical to SEQ ID NO: 4236
  Synthetic

SEQ ID NO: 4238 - protein, 175 aa, Artificial Sequence
  Synthetic
SAEDRLRELSKRNREEVEEVEKRLRELMERIRRRLREVKEDLRRLSEENRKTLERKNKDQRELVKRVEEEHRKIEEEVERTERRVEKVLEDIEREMDRIKKKLEDDHRKLEDEVRRRGVTEEIEERIKRLIKESRDLARELEEKLRKLLEELEKLAKRLREKVKELHDDTERAAK

SEQ ID NO: 4239 - protein, 175 aa, Artificial Sequence; identical to SEQ ID NO: 4238
  Synthetic

SEQ ID NO: 4240 - protein, 175 aa, Artificial Sequence
  Synthetic
SEEDELRELSRRNEEEVKKAKRDLEKLSRENEEDLKRVKRKLEKKSEDNRRILERDNREAEEVVRRVEERHKELRKRMEEIEREIRKVHEELRREVEEIEKDLRRVHDEIKKEIEDKGVTEEVKKKIEDLIRRSRELVERLKRKVEELHKTTKRLVEELEKTIDRIIEETRERAR

SEQ ID NO: 4241 - protein, 175 aa, Artificial Sequence; identical to SEQ ID NO: 4240
  Synthetic

SEQ ID NO: 4242 - protein, 183 aa, Artificial Sequence
  Synthetic
SAEDELRRLLRENRERNKKADKDIKKLLDDNRRDLERLRRELERILREIEKRLKDVEKDVEGRRLEEIRKRLERLRREARRELERLERHNRELLEEHKRKNEENEKHNRELEKEAEELSRRGTTEDVVRELMKKVDDDHKESEKLVRESEEKLERDNERTRRIADKLRKELDDTREEIERDAK

SEQ ID NO: 4243 - protein, 183 aa, Artificial Sequence; identical to SEQ ID NO: 4242
  Synthetic

SEQ ID NO: 4244 - protein, 181 aa, Artificial Sequence
  Synthetic
DSEERAEDVARENKEILERVDEKARKLLDDNRKVVEELKKTNEESSRELKRVLDELNIDEDLLREIEKLNRTLKKKTEDLAKDNKKIDDDLRRELEELKRENKEKDKRLREELEDLKRKGSSEETVEELLKKMRAISRDSERKVKELLDKIRELSDRSRRRAEELNKEHKKIVDDIAERRR

SEQ ID NO: 4245 - protein, 181 aa, Artificial Sequence; identical to SEQ ID NO: 4244
  Synthetic

SEQ ID NO: 4246 - protein, 181 aa, Artificial Sequence
  Synthetic
SVEERLRELVKENRDVVRRAEEEFRRLVEENKRILEEIDRRARESSRKLKDVLDKLNIDEDALRRIEERNKDVERKLEELKKRNKDKDEKLAREIEKLKAENEKEDRDLEREVRDLKKKGSSEETMERLLRKAKEISRRSKERLKRLLDKVKKLSEDSERELKKLLDEHEKIVEDIEREAR

SEQ ID NO: 4247 - protein, 181 aa, Artificial Sequence; identical to SEQ ID NO: 4246
  Synthetic

SEQ ID NO: 4248 - protein, 181 aa, Artificial Sequence
  Synthetic
DDERRLREVSDRNRRILDRIKKEVERLLDEVRKILKEAEDRLRRSSERLEELLRKDNIDEDKVREIRRLNEEIRKKVEELRKEIRDLLEELRKRADKLTEENKDTDDKLRRRAEDLKRKGSDEREVKKTLDEMRRRSRESEEELKKLLKEIKEIVEELKRKLDTLLKEHKEIVEEIKRRTT

SEQ ID NO: 4249 - protein, 181 aa, Artificial Sequence; identical to SEQ ID NO: 4248
  Synthetic

SEQ ID NO: 4250 - protein, 181 aa, Artificial Sequence
  Synthetic
SDEERVRRLEEEVDKTLEKVERELRKVSEENKRTLDRLRAEMEKSSKELERVLEELNIDEELRKEIKRRNDELRKELEELLTRNRKKDEDLKRRAEKLKREIERLKEELKRELEDLKRKGSDERDVERTLRKIEETVKKLAEDLKRLLDEIKKISEESKRRAEELLRKHKKIVDDIDKRTR

SEQ ID NO: 4251 - protein, 181 aa, Artificial Sequence; identical to SEQ ID NO: 4250
  Synthetic

SEQ ID NO: 4252 - protein, 182 aa, Artificial Sequence
  Synthetic
SMKEELDRLLKELRERNKEIEDRAEELLRRSTDSLRKVKEKLDKLLEESTRILRKVEKENRVSEDTLRELREIHERLRKELEDAKRDLDRDHKELAEKLEEIIRRNRENLRRLEREVEEMKKRNDLSEKVLKDIKRVIDEDEERLKRVLDDYERRVRELEDKVKKILDRYKTEVDKLRERAR

SEQ ID NO: 4253 - protein, 182 aa, Artificial Sequence; identical to SEQ ID NO: 4252
  Synthetic

SEQ ID NO: 4254 - protein, 182 aa, Artificial Sequence
  Synthetic
SVEEEIRDLLRKLREIVDRVRRRLKEILEESTRRLEEVTRRIDESNEDLKRAVDDVKRRNTRDEEVKRELDRKLKKIHDEDKREKDKLEKIHRDLTDKLEKAKRKLEELVKRIEKEVEDVRRENKLDKEVLRKLEEEIEKLRKEAKKILDEYRKLVEDLADKIKKILDRNRKLIEELVREVK

SEQ ID NO: 4255 - protein, 182 aa, Artificial Sequence; identical to SEQ ID NO: 4254
  Synthetic

SEQ ID NO: 4256 - protein, 182 aa, Artificial Sequence
  Synthetic
SESEKTLKDLDEISKRYEKKVREMLERHKRLSEETKKRDDEALERLTRLVKELKDVARRGDISEDEIRRTLEELRELVKDVKRRNDETNRELEERSDRVNKDLERINRDLKRLVDEAAKRGISEDVKRRLDELLERHKRISEEVEKRNEDLLREHEEISRRSKKRIDDLLREAERILDEMRR

SEQ ID NO: 4257 - protein, 182 aa, Artificial Sequence; identical to SEQ ID NO: 4256
  Synthetic

SEQ ID NO: 4258 - protein, 182 aa, Artificial Sequence
  Synthetic
SESEKVLRDLEKISEDTARRLEDELRKHKEIVDRIKEEDDEMLDRLRKLVETLKRLAERGDISDKVIRDMLRELRKRVREVEERNKRLNEELKKRSDEVNKELEETNRKLERDVREAERRGTSEEVKRRLEELLKRHKEESDRARERNERLLKEVRDLSEESRERIERLLRELEERVREDER

SEQ ID NO: 4259 - protein, 182 aa, Artificial Sequence; identical to SEQ ID NO: 4258
  Synthetic

SEQ ID NO: 4260 - protein, 182 aa, Artificial Sequence
  Synthetic
SRSEKSLKELREISERTRKRLEDKLDRHEKESKKVEDKAREVLKELEDLVRTLEEVARRGDISEEMIDRELKKLRERVKEIKDDLKRLNDELRERSKRVNDRLKEENEKLKRKIDEVEREGIDEEVRRRLRELLERHKRISDEARKRNEDLLREHEKRSRDIEKRLDDLLKEAEDRLRERKR

SEQ ID NO: 4261 - protein, 182 aa, Artificial Sequence; identical to SEQ ID NO: 4260
  Synthetic

SEQ ID NO: 4262 - protein, 183 aa, Artificial Sequence
  Synthetic
SDEEELRRLIEEHEKILKEIEDRVRESSKRNKEILKRLEDEVRKLLETVKDRLEKARERVDERLVKRVEERLEEIKRRVEELLKENEETDERLKKRVKETLDRSREEVKRVEERLRDLKRKGSSSETAKRVLDELKERSERSMEDLKRLLKEHKERVDEMRRRAEELLKRLREVIRKVEEEIR

SEQ ID NO: 4263 - protein, 183 aa, Artificial Sequence; identical to SEQ ID NO: 4262
  Synthetic

SEQ ID NO: 4264 - protein, 183 aa, Artificial Sequence
  Synthetic
SRDEEVKRLKKEHEDILEEIRKRVDESSKRNEKILREIKERVKRSSDDLKRLLEELRERVREREVERVEDENRRMEERVDRTLEKNRDLDRRLKEEVDRTLEESKKTVEELEKKLRDLKRKGSSEEDVERVLREFEEVSRRSEETLRRLLEKHKELVERAARELETLLKEHRERVRKIEEEAK

SEQ ID NO: 4265 - protein, 183 aa, Artificial Sequence; identical to SEQ ID NO: 4264
  Synthetic

SEQ ID NO: 4266 - protein, 174 aa, Artificial Sequence
  Synthetic
SSKERLEKLLRELEEDLRRAHEEHKRLIKRLREILDEIRKRVEKLNRDLDRVLERAREEGKLDEDLRREVEDIKRRNKENLKRLEDEVRRTEREIEELNKKLEKEVRDIAEDLKRKPVDEELLKEVKEMIKRLRKKIKKSLDDVRRVIRELEEHARRDLRKLEKDLKDIEDKLR

SEQ ID NO: 4267 - protein, 174 aa, Artificial Sequence; identical to SEQ ID NO: 4266
  Synthetic

SEQ ID NO: 4268 - protein, 174 aa, Artificial Sequence
  Synthetic
DSEERLKELERRLRELLKRVSERSKKLNKEHEEINRKAEEEVERLNRELERDLEDAARKGLLDKDLKKKVDDIRRDNRRNLEDSKRRSEKVSRENRERNERLRDRVRKIEKRLRERPVTDELLREAEKMLKELEELVREDEKRLKDISKEVEEHYRKDLEDVKRAIKEIRDRLK

SEQ ID NO: 4269 - protein, 174 aa, Artificial Sequence; identical to SEQ ID NO: 4268
  Synthetic

SEQ ID NO: 4270 - protein, 174 aa, Artificial Sequence
  Synthetic
DSERRLEKLLRELKELLKRVEESLRRLNEEHKRINDEARERSKRLNEELEETLRKAREDGRLDEELRKKVEEIRKRNEDKNRESEKDSERVRKENEDNLKRLKEKVEEIERRLRAKPVTEELLKEIKDRLKELAEHVERDERRLKRISEEAEKRYREDVREVKEMIEEIERELR

SEQ ID NO: 4271 - protein, 174 aa, Artificial Sequence; identical to SEQ ID NO: 4270
  Synthetic

SEQ ID NO: 4272 - protein, 174 aa, Artificial Sequence
  Synthetic
ESEERLRDLIRKIRELLEEIERRLRDLNRRLREILKRIEEESEKLNRELKKILDEARERGLLDKDLEREVRKISKDNKKKNDDLRRDVERISRENRKNLEKLKKKVKDIEEELRRKPVTEELLKEVRERLRELEEHARRDLETLKRMIRKLEEEAKKDLRELEKMIKDIRDKLK

SEQ ID NO: 4273 - protein, 174 aa, Artificial Sequence; identical to SEQ ID NO: 4272
  Synthetic

SEQ ID NO: 4274 - protein, 179 aa, Artificial Sequence
  Synthetic
SLEEALRKLEEELERLNEEAKRRIDRLIEELRRLNEEARKKIERLIEETRELLKRLAEEGKVDEELEKEVRRIEKENKEALDRSREETKRIEEEIKRVEEDSRKKTEEIKEELKELIRRDGGIDREILERAKELLKKLEREYRELLKKIEKVVRDLEEKYRELLKRHRKETERLDREVR

SEQ ID NO: 4275 - protein, 179 aa, Artificial Sequence; identical to SEQ ID NO: 4274
  Synthetic

SEQ ID NO: 4276 - protein, 179 aa, Artificial Sequence
  Synthetic
ELAERVKRLIEEHRKTDKEVEDRIRKLIEDHDRENRKVEDEIRKLIKELREIVDRARKEGKVDERVEEKLRRLEEEIERVLRELREESKRLEEEIKEVLDRLKEESKKLEEDIKEVLRRDGGIREEILDKIREVHRRVRKKARDLAERIKDAHRKLRKKVEELLRRIKEMIRRLEEELR

SEQ ID NO: 4277 - protein, 179 aa, Artificial Sequence; identical to SEQ ID NO: 4276
  Synthetic

SEQ ID NO: 4278 - protein, 179 aa, Artificial Sequence
  Synthetic
SDRERLTRLIEELRKLLEKWEREVKKINDEIRRTVEKVEEDSKKSIEDLRRLLKEMEDRGSVDEEMRKRVEEVERRNEKVLRDLRETLKKVHEDNKKITREVRERVKEVEKRLEDLRRRQEEDTKDLERRIEDVIRRLKKLADDDLRDLRRFLKELKERADKLRKEDEEALKELRDRAE

SEQ ID NO: 4279 - protein, 179 aa, Artificial Sequence; identical to SEQ ID NO: 4278
  Synthetic

SEQ ID NO: 4280 - protein, 179 aa, Artificial Sequence
  Synthetic
SREDDIRRLIEEARKLVEDAERRSKKSIDDIRRLVKEWEEEVKRINDDLKRLIDEARKRGDVTEEIEEDLRRMHKKNREIADRVRRELKRVEDDNKRVLDELREVLERIEREIEDLRRRNREPDKDLKERIKKLLDELRRLVEELEKRDKEMLDRIKKLADDDRRELERILKKLEDDLR

SEQ ID NO: 4281 - protein, 179 aa, Artificial Sequence; identical to SEQ ID NO: 4280
  Synthetic

SEQ ID NO: 4282 - protein, 179 aa, Artificial Sequence
  Synthetic
SAEDTIRTLLERHDDLDREVEERSKESIRELRRLIKEWRERVRKLNEELKRLLDDLRRKGLVDERLTKKVKDVHDDNDRIKKELTKRLREVEERNKEDLKRHKRESDEVKKKLTDLRRRKRNRKEELIEEIKEMNKKAKKSVDELEKKDRDVLDEIRKMAKEDLDRLRKALEDLERDAR

SEQ ID NO: 4283 - protein, 179 aa, Artificial Sequence; identical to SEQ ID NO: 4282
  Synthetic

SEQ ID NO: 4284 - protein, 179 aa, Artificial Sequence
  Synthetic
SSEDRVRDIERRHKEEDDRVEEESRRSTREIRELLRTAKERSDDSIRKLRKLIDDLRKEGLVDERLKEKLKRVEEENEEVLRRLEKRLRDVERENKKLLDDHKKKSKEVKDRLRKIETDQKRRTEELEKELEDVNRDVDRSAKRLKERDEEALKTLEDEIRKLEEKDKKVLEDLEREAR

SEQ ID NO: 4285 - protein, 179 aa, Artificial Sequence; identical to SEQ ID NO: 4284
  Synthetic

SEQ ID NO: 4286 - protein, 181 aa, Artificial Sequence
  Synthetic
SDKEEVDKLKERNERVLEEVRRRLEKLEKDNKDTLKKIRDDSERLREKIKRVRDREQISEEVEKKIKRDEDENTRHNEELEEDNRRKTERVKEEMKRIEDENEKKDRRFDERVKRAKENNSSREFVEKALREYEELLKRSRETLEELLRRYKKLLDESRKTAKEDLDRSEEIIKKLADESK

SEQ ID NO: 4287 - protein, 181 aa, Artificial Sequence; identical to SEQ ID NO: 4286
  Synthetic

SEQ ID NO: 4288 - protein, 181 aa, Artificial Sequence
  Synthetic
SDEEEVKKLHDENKKVNDEMREESKKLHDENDRVNKEVKERAKKVSKELEDMLRREQRPEEELKRIEEELRRLAEKVKDLNKKNKEIDDRNKDHNRELNKENKELDEELKKELDRAKRENSSEETVRRLLEKVREEIRRSKKRADDDLKTTKELIEKSEREVDRLLEEIKKIIEELERRAR

SEQ ID NO: 4289 - protein, 181 aa, Artificial Sequence; identical to SEQ ID NO: 4288
  Synthetic

SEQ ID NO: 4290 - protein, 179 aa, Artificial Sequence
  Synthetic
SELEKVLREVEENLREVKRENEEKLRRNEENIKRLEEEDRRRLEEIEKMIEEIERARIREDELDRRLRELRERVKKIEKKNRDHLRRDEKELRDVLRKHKKHAEETEKRVEDAKRRVLDGKEVEEELRRLREEYEEVSRRSKEELEKSLRRLEEVHKESRKRLRDLLKKLDDVAREERK

SEQ ID NO: 4291 - protein, 179 aa, Artificial Sequence; identical to SEQ ID NO: 4290
  Synthetic

SEQ ID NO: 4292 - protein, 179 aa, Artificial Sequence
  Synthetic
DELRELLKDIKRTTEDVEREVEEILRKVEEMIRRLEEEDRKVLEDIRRKIEDIRRANIPREELEEELKRLEEEIEKILRDNKRKLDELKEEVDRARRKLEKLSRDLEEKIKELARRVLDGEEVRKEMERLRREHEDVDKKVRDELRKLEEELRRVHRESEKALRDLLRKLREVAEREKT

SEQ ID NO: 4293 - protein, 179 aa, Artificial Sequence; identical to SEQ ID NO: 4292
  Synthetic

SEQ ID NO: 4294 - protein, 179 aa, Artificial Sequence
  Synthetic
DELEDFLRKVERVIKELRDDDKRALDRIREVTKDVERKAREILKRVEEVIRRIEESNIREDELKEVLERLKEEARRLKRELEKLSEELKKEIKEILDRNRKKLRDLEEEVKEVRKRVVRGREAEEALERLKTRLEKVHRDSKRALEKLRRDHEEVDKRITEELRKLMERLKRVVDELRR

SEQ ID NO: 4295 - protein, 179 aa, Artificial Sequence; identical to SEQ ID NO: 4294
  Synthetic

SEQ ID NO: 4296 - protein, 181 aa, Artificial Sequence
  Synthetic
SADEALRELEERNRKVNEDVKREDERLHREDREVNKRIREEDKKLHKTLRDVLEELRKKVSEEELKKIEERLKRVNDTNEDLHRRNEEKVRRLNEENRKKHEENEKKSRDLKEEFERDKDGDERRVEKLLRRYKKVLDEVKRELKESLDKAERVTRKSEDDARRSLEEIKKEIEEVRERIR

SEQ ID NO: 4297 - protein, 181 aa, Artificial Sequence; identical to SEQ ID NO: 4296
  Synthetic

SEQ ID NO: 4298 - protein, 181 aa, Artificial Sequence
  Synthetic
RVDEELRKLVEDNKRKNEEVKKELKKLKEENERVNKEVRERDRKLHEKLRRVLEEVRRTIREDELREIEETLKRLNDRNEELHRRNEEESKRAEDKVRTELEKNRKISEEIKKKAEDRKDGDEEEMRRLLEEYEELVRRVLKRLKEILEEYERLVRRVEEEVKKSLEDIERKIKEAKDRVD

SEQ ID NO: 4299 - protein, 181 aa, Artificial Sequence; identical to SEQ ID NO: 4298
  Synthetic

SEQ ID NO: 4300 - protein, 181 aa, Artificial Sequence
  Synthetic
DVEEEVKKLKDKNRRINEEVKKRMRELEERNKELNKRIREEDERLHRELRKVLEEARKTIDEKDLKRIEDELKKMNEENEKETEENERRSKEVKDRVREELERNRKESRDIEERLRRIKDGSREEVEKLLREYEERLERVRKRVEEILAKYKELLDRVEERARKSLKEIKETIEDARRRIK

SEQ ID NO: 4301 - protein, 181 aa, Artificial Sequence; identical to SEQ ID NO: 4300
  Synthetic

SEQ ID NO: 4302 - protein, 181 aa, Artificial Sequence
  Synthetic
SMDEELDKLTRENEAVNERVEREARRLKEENRKVDEEVRRAVEELKERVRRVLEEVRRKISEEKLRKIEEDLKRIEEEIERLEERNRRESEKFEKEVEDKLRENDKKSKEVRRDVERIKDGDEEDVRRLLEEYARLVREAEREVREILRKYEELVRKARKDAKKLLDDIERKIEKIKRDVD

SEQ ID NO: 4303 - protein, 181 aa, Artificial Sequence; identical to SEQ ID NO: 4302
  Synthetic

SEQ ID NO: 4304 - protein, 181 aa, Artificial Sequence
  Synthetic
SMDEELKKLVKENEDLNRRVREEAERLRKENEKVDEDAEREDKRLHDKAERVLRELRRRIRKEELDRVRRELERVNEENRELLERNKEESKRFREEVERTLEENRKLSEELKKKMEDIKDGDERTVTELLKEYRELVRRVEERVKKILKEYKEEVEEVKRRLEESLKDIERKIDEIRRRAT

SEQ ID NO: 4305 - protein, 181 aa, Artificial Sequence; identical to SEQ ID NO: 4304
  Synthetic

SEQ ID NO: 4306 - protein, 181 aa, Artificial Sequence
  Synthetic
SMDEALEELTRRNEEVNKRIEEEDRKLHKRNKEVDDEVRKRDKDLHDELRRVLEDARRTIREEELKRIEDKLRRLNERNEERLKRNEDRSREVNRRNKKLLDENRERSKRMKDDADRIKDGDEDEVEKLLREYKRRVEEVKKRAEDSLKRYEEEVKELEDEVRESLERIRRDIEDVKRRID

SEQ ID NO: 4307 - protein, 181 aa, Artificial Sequence; identical to SEQ ID NO: 4306
  Synthetic

SEQ ID NO: 4308 - protein, 181 aa, Artificial Sequence
  Synthetic
SMDEAVEKLKKENKDIDEEVRRRLDELRKRNEEVNKKIKEDDDRLHKEAKEVLEDVRKTISEDELRRIKERLEEINKRNEELLRDNRRRSEEMTRRVEELLKRNEDESRRLEETLKRVKDGDEDIVRKLLREYEKLLREVRERARRILEEYKRLVKEVRERAERSLEELKREIKKVRDRAK

SEQ ID NO: 4309 - protein, 181 aa, Artificial Sequence; identical to SEQ ID NO: 4308
  Synthetic

SEQ ID NO: 4310 - protein, 176 aa, Artificial Sequence
  Synthetic
SEKEELLRKAKEVIDRIRKELEELLRRAREVNKDSRRTVEEVLRKAREVSERVRKASERGTDDKEELAKENERLVRELEEEVKKLHDDDRKKDETLRREVEELARRIRKLLKELEEEVGRDEELDDLRRRAEELLKRAEDEIRKLHEENKRSNEEAERAIRELAKRNKELDDKTRE

SEQ ID NO: 4311 - protein, 176 aa, Artificial Sequence; identical to SEQ ID NO: 4310
  Synthetic

SEQ ID NO: 4312 - protein, 176 aa, Artificial Sequence
  Synthetic
KEKEDLIEKMKKVLEDIRKRLEELLKRARKVNEDSRKLVKEVLDKIKKVNEDVRKVATESTDDKKKLAEENRKLVEELRKELKEVHDEDKKLDDELRDRLRRIEEDIRRLLRDLEREVGRDEELTRLAREIEKLLEEARRRVEKLHEENKRSNEEAKERMERLRDHNRKLDDDTRK

SEQ ID NO: 4313 - protein, 176 aa, Artificial Sequence; identical to SEQ ID NO: 4312
  Synthetic

SEQ ID NO: 4314 - protein, 176 aa, Artificial Sequence
  Synthetic
REREELIKKVRTVHKRSEEELRRHSEEVKKVNRDSRERVKEHLKRVKEVIKELEDVARESTDDKKKLLEEVRKLLEDLDRHLRELHKRDEKLDRELDKHLRDLKRDNERLLRELEKEVGRDRELKELADRNKKLLEDIEREHKKLHEDNRRSNEDARRRHEELKREVEKLLDELRK

SEQ ID NO: 4315 - protein, 176 aa, Artificial Sequence; identical to SEQ ID NO: 4314
  Synthetic

SEQ ID NO: 4316 - protein, 183 aa, Artificial Sequence
  Synthetic
SLEEEIKRLVKHHEELLREVRKRLKELEDHHRELDERHRRMLEELVREARKLIKDVKDDIDRKLVEELRKKLDDLARELEELNRESNRKLKKLVEEVEKILEESLRRVEELKRDVERKRSKPTDEETVERILRTLKTTDERTTDTVREILRKIKRTNEESKETADRTVKRAKDLIREIRERVR

SEQ ID NO: 4317 - protein, 183 aa, Artificial Sequence; identical to SEQ ID NO: 4316
  Synthetic

SEQ ID NO: 4318 - protein, 183 aa, Artificial Sequence
  Synthetic
SAREAIKEIKKHHKKLLEDVKETIDRIEEHHRKLDKDHRDELKKLLEEVRELLRDIRSRIDKKLVDDLERKLRELEKKLEEENERSNRRLEKLKREIEDELRESEERVRRKEEEVKKTESKPTDERTVEKILEELKDMNRATKRRVEEILRRLKKTNDESEKRARDTLTRIKELIEEVERRAR

SEQ ID NO: 4319 - protein, 183 aa, Artificial Sequence; identical to SEQ ID NO: 4318
  Synthetic

SEQ ID NO: 4320 - protein, 185 aa, Artificial Sequence
  Synthetic
DESEELKKEAKEILDRLEKVLRELTDRNREMLKRIEKLIRENEKRLEDILREIAKRASEDRDERVLREIVRDVRRLIKENREEDDRIRRDVERYLRKSRRDMEELTRRLEEVIKRLEDKVREARVPEEVEKELKRIKDELKRLVEKAERSLRESEERLRRLLEEAEKRNRKVEREIEKLLDDTRK

SEQ ID NO: 4321 - protein, 185 aa, Artificial Sequence; identical to SEQ ID NO: 4320
  Synthetic

SEQ ID NO: 4322 - protein, 172 aa, Artificial Sequence
  Synthetic
SKEEKITRDAEEVLRRSEEIIRRLLRRLEEVLKDLERSARENKKRLDKILEDLAKLDTDRSVLKKAVEDVHKRDRETLKRHDEESKKVKDELEELLRRHNKELRDVRDELRRRGADEKRVKRMEEELRRLHEEVRRRVEKVKRDMDRLNKKIKEDSRRVNEEIRKLLEDKTR

SEQ ID NO: 4323 - protein, 172 aa, Artificial Sequence; identical to SEQ ID NO: 4322
  Synthetic

SEQ ID NO: 4324 - protein, 172 aa, Artificial Sequence
  Synthetic
SEEEKVRKELEEVLRRSDEDIERNRRRLEKVLDDLRRSAEENKRRLKEILDRLKDTDTEERVLKKIAEEVHRKDRKTEREHEERSKRVHDEDERSLREHNKKLKKVKEDLDRRGADEKEVRKVKDRLDKLHEKVKRISEEVNERIRRLNKRIKEISKRLNEELEELLRRRRT

SEQ ID NO: 4325 - protein, 172 aa, Artificial Sequence; identical to SEQ ID NO: 4324
  Synthetic

SEQ ID NO: 4326 - protein, 172 aa, Artificial Sequence
  Synthetic
DELEKFKEDVKEVIKKLAETIKRLLDDVRRVLEKLRKLAEENKERLDRILDELRRLRTDEREVERKVEEVHRRDKKTLDELRRDVKEVKERIEEVLKRHDEDSERVDKELKDRGADEKEVARLREEIKKLNERLKREVERLKRELEKLLRDIEKTSEDANRRLKELLDRTRK

SEQ ID NO: 4327 - protein, 172 aa, Artificial Sequence; identical to SEQ ID NO: 4326
  Synthetic

SEQ ID NO: 4328 - protein, 172 aa, Artificial Sequence
  Synthetic
RREEELLERAEEVLEKLERIIEETERELKEVLDRLRKSIEDNLRRLKKVLKELKDNDTDRETLRRELDKVHKEDRDTLREHKRESERVKKELDEKLRRAEEEVRRVEEELDRAGLDEKDLTEVKKRLRDLLKKMEDVLREVKKRLDDLNREMDDRSRKANEELRDLVRRKEK

SEQ ID NO: 4329 - protein, 172 aa, Artificial Sequence; identical to SEQ ID NO: 4328
  Synthetic

SEQ ID NO: 4330 - protein, 181 aa, Artificial Sequence
  Synthetic
DVERKLREVEERHKDVLKKAKELLDKVEEDHKKSSKEVEDVLEEMRRRAEKLVRDAVRKKGGSPRDLEELKKELEETLRRIRERNKRHHDEVKKRLEEVEEELKRHHDEVKKTLETLKDIRGDELARRIEEELEKLLRTLEELVTEIIKELEKLLKTHEDLLREVEKTLRRIIEELEKRDK

SEQ ID NO: 4331 - protein, 181 aa, Artificial Sequence; identical to SEQ ID NO: 4330
  Synthetic

SEQ ID NO: 4332 - protein, 181 aa, Artificial Sequence
  Synthetic
SVEETLRTVEEEHRKSSKEAEELLEEVERRHEESSKRLEDTLREAEKEVRRLAEDVVRRRGGSPEELRKIMEDIKRKLDRIREENKKHHEEVRREAEEIRKRNKKHHEEVKRVLERLKDIRGKELVDEARRELKELLETHKETVKRVLDKLRDLLRTHEEKMKDVEETLRRLLERLKEETR

SEQ ID NO: 4333 - protein, 181 aa, Artificial Sequence; identical to SEQ ID NO: 4332
  Synthetic

SEQ ID NO: 4334 - protein, 181 aa, Artificial Sequence
  Synthetic
KVEDSLREVKKRHKDKVDEVRKRLREAEEENKRLLDEVRRELERVEERIRRIVEEIVRKKGGSPKELERIKKEIEDELRRIEKELEDSERRNRELLREIEKRLEDHHRKVEKVLRDLKDIRGDEEARDIERRLRDLERTLEELVKEADERLKRSNEEDEERIRRVRKKLEELLRELEKRDE

SEQ ID NO: 4335 - protein, 181 aa, Artificial Sequence; identical to SEQ ID NO: 4334
  Synthetic

SEQ ID NO: 4336 - protein, 181 aa, Artificial Sequence
  Synthetic
DEDRDLKRELDRLLREHEELVDRSTKRLEKLLRKHEREARESKKELEKLNDELREIARKPTEERDLERSKRRLDKLKKELEDKNREARKELEDLREELREINERVRKKVKELEDDIRRKNSSEDVKRKLEEVRRRIEESVKRHRETVEEMRRRVDESVRRHERTVDELRRTHEELIERVRR

SEQ ID NO: 4337 - protein, 181 aa, Artificial Sequence; identical to SEQ ID NO: 4336
  Synthetic

SEQ ID NO: 4338 - protein, 181 aa, Artificial Sequence
  Synthetic
KDEEKIIEDLKRLLRKHEKLVEESRERLKRLLETIRKIAKDIVERLKRLNEELREIAKRPTPDEDLKRSKEKLDELEREIRELLEELEKRLRELEKELREINETVKREIEELRKEIERRNSSEEAREKIKRVVEELKESVERHERDVDRVRREAERLLEEVTRRIETVRRTHERLIEEIKK

SEQ ID NO: 4339 - protein, 181 aa, Artificial Sequence; identical to SEQ ID NO: 4338
  Synthetic

SEQ ID NO: 4340 - protein, 181 aa, Artificial Sequence
  Synthetic
SEKDEIKRELEELLREHEKLAEESRRRAEELLRDIERRARESLTELRELNKKLREEARRPVPDEVLEKSEKELEDRLRELEERNRKLKEDLDRLREEVEKLNRDVERKVEKLRKDIEERRTSEDVEREIRKVREDLKRSVDEHRKDLERIRRELEELLEKHHEDLRDVERTHRELLKEIKR

SEQ ID NO: 4341 - protein, 181 aa, Artificial Sequence; identical to SEQ ID NO: 4340
  Synthetic

SEQ ID NO: 4342 - protein, 179 aa, Artificial Sequence
  Synthetic
DVEDELRRLHEENKDLLREAEEELERLHRENKKLLEDARRLLERLEEELERIERRLKTDERDRREIRREADELRKRFEKLEKENRDINRKLREEFKRLKERNEKEDEDAKRRVEEKRGGDREEVEREVRKIEKLIRDSRERVRELIEKIERTLRDSERRVRELVKEVEKRLREIERKVE

SEQ ID NO: 4343 - protein, 179 aa, Artificial Sequence; identical to SEQ ID NO: 4342
  Synthetic

SEQ ID NO: 4344 - protein, 179 aa, Artificial Sequence
  Synthetic
DVEKELKELHDKNEEILERARRLLERLHKENEEINKRVEEALRRLAEELRRLKEELDDDESVKDKIDKLLEEAKKEVKRLNEENRELNRRLEERMRDLERRNRETNERLKKEAEEKRGGDRREVKELIRKIDELLRRSKEEVDRLVKEVERLLRESKRRVEEVIEKLRKIIEELEREVR

SEQ ID NO: 4345 - protein, 179 aa, Artificial Sequence; identical to SEQ ID NO: 4344
  Synthetic

SEQ ID NO: 4346 - protein, 179 aa, Artificial Sequence
  Synthetic
REVEEVIKDARRLLEELRKHSEDEVRKVEEEIKRLRDDNKRAVDDIERLLRELEEANLPEDEVEKVVREIRERAKEIKKRHEDKLRELRKKLEEVKKKHKKLVDDIKTKLKRVRDELVRDRRAETKLEELRRRLDEILRTTEELLRRLKRELEKLSEESKARLDELKRKLDEILKETRR

SEQ ID NO: 4347 - protein, 179 aa, Artificial Sequence; identical to SEQ ID NO: 4346
  Synthetic

SEQ ID NO: 4348 - protein, 174 aa, Artificial Sequence
  Synthetic
DEAREIVRELEKRIKDIEDRARKLIRELEKSLEDLKRRVEEMLREWEEESKELERRNVPRERVKEVKEKSDEKVTRIREELKKVNEENERRLREIEEELKKLAREMEKRLEEARDKIDREKVKEIKKRLDELLKRIEDELRRIREEDKRIHDEVEKELRKLERRDEELLKRLED

SEQ ID NO: 4349 - protein, 174 aa, Artificial Sequence; identical to SEQ ID NO: 4348
  Synthetic

SEQ ID NO: 4350 - protein, 174 aa, Artificial Sequence
  Synthetic
SEAEDIVRKIEELLKRHHDRVEEMLRRWEELTRRHSEKAEKIVREVEKLIDELREAKVPREEVERVARELEEKHKRVDEEHKEVTERSKRRAEEIRKESRDVAEDLKRRLSEVRDTIDEEEVKRLEKEIRDNLREMEERLKELEKRDKDNLDRIRELHRRLREELEKLLEDARR

SEQ ID NO: 4351 - protein, 174 aa, Artificial Sequence; identical to SEQ ID NO: 4350
  Synthetic

SEQ ID NO: 4352 - protein, 183 aa, Artificial Sequence
  Synthetic
SMDELLKRLEEEDRKLNEESKETLERLRKHDEDLNRKNREKLKELKDRVDRVLEDAKKRVPDEDLERIKKRLEELRRTNEELDRENEKLAEDLAREVKKTNEENRRTSKRIKEEADKLKKRKISEDDVRREVEDVKRRIEDSREKLRKLTEKWKKLNRESDEKVKKHVEDVEREIEKVRKEAE

SEQ ID NO: 4353 - protein, 183 aa, Artificial Sequence; identical to SEQ ID NO: 4352
  Synthetic

SEQ ID NO: 4354 - protein, 183 aa, Artificial Sequence
  Synthetic
SSEEELKKLSDKARRLNDENRKILERLKEHDERLNKRNKEELKRLREDVERLLEDARRRVDERVLRTITEILKRLEESNEELTRKNEREMEKLARTNEDEDRKARKKLKELEDEARRLRERNTSEEDVKRKLDTIDKVIRDVRRRIEEHVRRWEELNRRSKKEIEDHVKTVEDVIKEAKDRID

SEQ ID NO: 4355 - protein, 183 aa, Artificial Sequence; identical to SEQ ID NO: 4354
  Synthetic

SEQ ID NO: 4356 - protein, 175 aa, Artificial Sequence
  Synthetic
DEDEEVDREVREMIKRLEEHVKRDEDTLEEMLKRLRDHVERDRRRLEELLKDLERLVRERGRDEELEKKVKKIIRENRENLKRLEERVEKIRRDNEKNNEDLRREVEDIRKKLRDKVDDKEELKRLDREAEELLRRVDRLNEEVEKKLRKLLEEVRRENKRLEEEAKRLLDKAEE

SEQ ID NO: 4357 - protein, 175 aa, Artificial Sequence; identical to SEQ ID NO: 4356
  Synthetic

SEQ ID NO: 4358 - protein, 175 aa, Artificial Sequence
  Synthetic
DEDEEVRKKVEEEIKRLKKEVEEDRRDVERLDEESKDKVRRDEKKVKDLLKELEDLVRRDGRTEELRKRMEEILKENDEINKKLRKENEKINDENDKKNKELRKRVKEITERLRKEVDDKEELKRLEEEAKDLLRDVERLNRELHKRNREILEEATRRNEELKRELKELLDRARK

SEQ ID NO: 4359 - protein, 175 aa, Artificial Sequence; identical to SEQ ID NO: 4358
  Synthetic

SEQ ID NO: 4360 - protein, 175 aa, Artificial Sequence
  Synthetic
SEEERVKEELDKAIKTLEKLVKDDLKKVADALRRLREHVEKDLRDLEEVLRELKELVDKTGRTEELRDKVRKIEEDNERNNKKLADEVKRIADENTEINEELRRRVEEIKRELRERVRDTEELKRAERELDRLLTEADRRNDELRREAERLLEKVNEDNRTVKERARRLLDDARR

SEQ ID NO: 4361 - protein, 175 aa, Artificial Sequence; identical to SEQ ID NO: 4360
  Synthetic

SEQ ID NO: 4362 - protein, 175 aa, Artificial Sequence
  Synthetic
REDEEIVKEMERLLERLEELSRRIMEEVKRIDKESEDHIKRDEDKLREELERLRDLVRREGTTDELRDRVRRIKEENTENNKRLEDKNREANKRLKDLSDKLREDVKRIRDELRKKVDDKEELKELEERAKRLLERHERTNEELHRRNEEILRKANELNEEVRRRLDKLLDEVRT

SEQ ID NO: 4363 - protein, 175 aa, Artificial Sequence; identical to SEQ ID NO: 4362
  Synthetic

SEQ ID NO: 4364 - protein, 175 aa, Artificial Sequence
  Synthetic
DREREVRRRVKEALDEIKRHVDRDRKKAEDMDRRSRELSDELRRRVDDLIKRLKELVDRDGRTEELEKTVRKIERDLTEESRRLKDENRKINEENKDNNRRLRERVEDIKRRLKEEVPDTEELDELRKELDKLLTEVDETNKKLHEDNKRILDDHDRINEELRRRMEALLREATR

SEQ ID NO: 4365 - protein, 175 aa, Artificial Sequence; identical to SEQ ID NO: 4364
  Synthetic

SEQ ID NO: 4366 - protein, 175 aa, Artificial Sequence
  Synthetic
SEEEDMVRRVREMIKRLRDHVRRDKDKLDKEDKRSADHVDRDRKRLEDLLKELRDLVRDTGRTEELARRVERIIEENRENNERLRRENEKINRENDRNNKKLEEEVRRITEELRRKVDDTEDLKRLEKELRDLLDEVNKENEKVHRRNREILKRADELNEEAERRLRELLREAEK

SEQ ID NO: 4367 - protein, 175 aa, Artificial Sequence; identical to SEQ ID NO: 4366
  Synthetic

SEQ ID NO: 4368 - protein, 175 aa, Artificial Sequence
  Synthetic
KEDEEVKDKVEKLIRKLEKESRDISEEVKRLDEESKKLARDLTEEVDRVIKRLRELVERDGDTEELERRVREIEKELDKRLRDIEDRNEKANRELKRLSEELERRVEEIRRRLRKEIDDKEELKKLEKKLEELLERHRRDNKRLHEENRRILEELRRRIKELKERLRRLKEEARK

SEQ ID NO: 4369 - protein, 175 aa, Artificial Sequence; identical to SEQ ID NO: 4368
  Synthetic

SEQ ID NO: 4370 - protein, 185 aa, Artificial Sequence
  Synthetic
ETDERLDELRRRLEKSLKDHKKLLDEVRKKAEELLDRNARLLEELKRELDELLKKVEEDNRMRKDELKKIREDVERLREENRKTDREIRERLKELERRAEEIDKRAKETLDEIEREIERLKREGTTREVVEELLRRAEEEIRRHRKKVKESLDRLEDEIRKVEEDSRRSEKKVRKLIEDVKRRVK

SEQ ID NO: 4371 - protein, 185 aa, Artificial Sequence; identical to SEQ ID NO: 4370
  Synthetic

SEQ ID NO: 4372 - protein, 185 aa, Artificial Sequence
  Synthetic
STEETLEKLDRDLKDSSRRNEELLKRVDDRLRESSKENRKILKELSDRLRDLLEKVKKDNRAEEEVLERIRKEVEDLMRKNEDTNRRARERVKELEERNRKTNKDVEKRLEDLKREIKRLREEGTTDKVVRELVKRAEDEIRDHKRLSKESLDRLDEEIKRHRELSKESMEEADRLIKTVKERVR

SEQ ID NO: 4373 - protein, 185 aa, Artificial Sequence; identical to SEQ ID NO: 4372
  Synthetic

SEQ ID NO: 4374 - protein, 185 aa, Artificial Sequence
  Synthetic
ELDDLLREVEKRVRDLNRRNEEELRRVEDRMRESLRKSEEDLRRVEERLKKTLTRVKTERRVPDKDLDEIRKRVEKLSREIREINKDAKRRLKELVDENRKRDDEIRREVKKRKDDVKDLARKGDDRRSAKKILDDLERTLEDVERRSRESVRRLREEIETHRKLVEELKKRLDDLEEEVKERVR

SEQ ID NO: 4375 - protein, 185 aa, Artificial Sequence; identical to SEQ ID NO: 4374
  Synthetic

SEQ ID NO: 4376 - protein, 180 aa, Artificial Sequence
  Synthetic
SSDEILKRVKEELDRLLEENKRLLEEARKRLEDLIRKNREDLKRVEEKMRRLLEETPEDKKLEEIRERLKRLKEENERLNDEARRRLEKLRKENEETNRRIEEEVRRLAEEVERLKREGTTEEVVRRLAEELRRLIEEVKRKIEESERRLKETLDRYRKLVEDSLRKLEETIRRVREESR

SEQ ID NO: 4377 - protein, 180 aa, Artificial Sequence; identical to SEQ ID NO: 4376
  Synthetic

SEQ ID NO: 4378 - protein, 180 aa, Artificial Sequence
  Synthetic
SSEELLRKVKEDAKKIIKENEELLRKVDKDMRDIIKENRDLLEELTERVKRLLDRTPESDDLDRIRKIVEKLRRENEKLDEDAEKKLEDAKRRNKRTDRELEKRLKKLAEEVKDVRDKGTTEEVVKRILEELKKLLDEAERLSRESLKELEKMLREYRESVERSLRKVDDTLRRVEEKSR

SEQ ID NO: 4379 - protein, 180 aa, Artificial Sequence; identical to SEQ ID NO: 4378
  Synthetic

SEQ ID NO: 4380 - protein, 188 aa, Artificial Sequence
  Synthetic
DDKRLLEEIRRRADELIKENEELLRRLEKLNEDLERRNKELNERLAERVKRLEEDVRRRGLPREDVRRKIEDLRRLARELHEEDKKLNEEAKRLTETSRKRNKELNDEIRKLVKEIEERIEELERRGSDRRIVEEEVDRVRKTIEELKRKSEDLVREHEEIVRDLERKSRELVKKVEKLLRDVRERAR

SEQ ID NO: 4381 - protein, 188 aa, Artificial Sequence; identical to SEQ ID NO: 4380
  Synthetic

SEQ ID NO: 4382 - protein, 181 aa, Artificial Sequence
  Synthetic
SVDEMLKEIRDRAKKVDEDNRRLVERLEERNRELDERNKRLLDDIRRKVEEVMRIADERVDKKEELDRLKDELRRSLKRLEDLSKENHDRNRELNKRSKDRSEELHEELRRLLKEITDIIRAGDSGKELVDRVRKLLEEVRRKSEKLVREHEDLVRRNEEHSRRLVEEADRILERAKRELD

SEQ ID NO: 4383 - protein, 181 aa, Artificial Sequence; identical to SEQ ID NO: 4382
  Synthetic

SEQ ID NO: 4384 - protein, 181 aa, Artificial Sequence
  Synthetic
SVEEMLRRLRERDEEINDRLRRLAEDLKRENKRLDDENKKLVDEIREDVERLKEKLDRKLRDKDRMRELKRELEELLKELEEKSKRNHDRNKRENEKSEKILRELHKENREEVKRATEILEEGDTGSELLKRWEELLRRLEKRIRDLVEDHKRLVEENERHSRKLVEEVKKALTDAEKKVE

SEQ ID NO: 4385 - protein, 181 aa, Artificial Sequence; identical to SEQ ID NO: 4384
  Synthetic

SEQ ID NO: 4386 - protein, 181 aa, Artificial Sequence
  Synthetic
SVEELLEDIRRRVEKVKEDNKRMLEDLERKNRELKKEADDLAREIKKRVRDLEKELDEKLTDEEKVERLKRRLKKKLDELDRKLKENEDRNREENEKSKEDSKRLHEKLERLRERIERIVRAGDSGSKLVEEVRKLLEEARRESEELLRRHKKLVDDNRRHIRKLFEDVKKILDDARKEVE

SEQ ID NO: 4387 - protein, 181 aa, Artificial Sequence; identical to SEQ ID NO: 4386
  Synthetic

SEQ ID NO: 4388 - protein, 175 aa, Artificial Sequence
  Synthetic
SEEEEIVKDVERVIRELEERHKDLVRRAREDIKRLREHIRRSIRALDEDIKRIEEKIRRDGDDREVEEHIKRSKDELRKDEKRIEDHIRRSREKLDRDVERMEEEHKRLEKELRDRGLSEDLVRDLERKNKRVIDESRRLLEELRRRYEELLREYRELLEDLRRKYKRIEDEAKR

SEQ ID NO: 4389 - protein, 175 aa, Artificial Sequence; identical to SEQ ID NO: 4388
  Synthetic

SEQ ID NO: 4390 - protein, 175 aa, Artificial Sequence
  Synthetic
SEKEEIVKTVKTVIDRLEEEHRKILEDLRDDIRRADEYIKRSIDEVEEDLRRIEETVRRDGNTKEVEKHIEDSKRELEKNADKLRRHIEESRKELERLIREADEKHKKLDEDLKRAGLEERLVRELEKENEKLKRRSERMLEELEKEYRRLLKKYEDLLRELERKYEEIKDKLRK

SEQ ID NO: 4391 - protein, 175 aa, Artificial Sequence; identical to SEQ ID NO: 4390
  Synthetic

SEQ ID NO: 4392 - protein, 175 aa, Artificial Sequence
  Synthetic
SEDEDIVRKAKEDIERLKREVEETIKRVEDDARKVEKEVRDIVERTRKEIKKLEDEVRERGNTKEVERKIEELKKEHEDRNKKLVDHIKRSEEELRRLAKELEELIRRLKEELEKAGLKEKLVEELRRELEKLKKEIDDLLRDLEKKYDDIRKKIRKLSEELKKLLEELKRKLDE

SEQ ID NO: 4393 - protein, 175 aa, Artificial Sequence; identical to SEQ ID NO: 4392
  Synthetic

SEQ ID NO: 4394 - protein, 175 aa, Artificial Sequence
  Synthetic
SELEKIVEEVRRDIKRVRERVEEIIRKTDEMIRRLEEHIKRSIERVRKDAEDIERTVRRDGNDKELEKHLEKSKRELDKDAREVDERLKDLERRHREANKRLEDHIRRSEEELRRRGLDKDLLDELRRRYEELEERIRRLSRELEEKLKKLRKRYEDLLEELEREYRRIAEEARR

SEQ ID NO: 4395 - protein, 175 aa, Artificial Sequence; identical to SEQ ID NO: 4394
  Synthetic

SEQ ID NO: 4396 - protein, 175 aa, Artificial Sequence
  Synthetic
SEEEKIVEEVKRDIKKVDDEVKDIIRRTDKAIKDLRREHKELIDRTRKAIEELEDEVRKRGDDEKLRRKIRELEKRHERANEELERKHRKLETDHREMNERLKRHIRESEKKLEKDGLREDLVDELRKLYDTIREKIKRLSDRLREKNEKLKKESDDLSRRLRKELEKLEREVRR

SEQ ID NO: 4397 - protein, 175 aa, Artificial Sequence; identical to SEQ ID NO: 4396
  Synthetic

SEQ ID NO: 4398 - protein, 184 aa, Artificial Sequence
  Synthetic
SKEELLKEIRDELRKLKKKHDDLLEEIKREYDRLREKVRKDLEDIERKLRKLEEDVERKDVREEEKTDLDRLAKELREELKRIKKKIDDHIRRSEEELKRHHDEIRKILKKLKEELDTAASQDLREEEVKRVVERVKELIKRLEDNIREAIRKLREDIKRLEEEVEKARKDVEDFLRELRKKVK

SEQ ID NO: 4399 - protein, 184 aa, Artificial Sequence; identical to SEQ ID NO: 4398
  Synthetic

SEQ ID NO: 4400 - protein, 184 aa, Artificial Sequence
  Synthetic
SSDELAEELKREYDRNKEEHKKLLEELKKEYKRLLDEHRDLLRRIKERLDRLLRRIEEKDVREEDLKRLRKLVDDLRKRLKKHHEEVKEHIDRSRKELEDHHRELDEDHRRAEEKLRRMRSQDLREELVERVIRDVRKHIEDNTENIRRDIERVRKDIETLEENVKDAAKKVEDILKTLEDEVK

SEQ ID NO: 4401 - protein, 184 aa, Artificial Sequence; identical to SEQ ID NO: 4400
  Synthetic

SEQ ID NO: 4402 - protein, 184 aa, Artificial Sequence
  Synthetic
DKERLAEELRRLYERNKREHEKLLKKIEDDLRKLEEDHERLLREIEEAAERLRREIERKDVDEEKVRRLETELRKLREELKKHHEEIKRILDKLRKDLKKHHEELKRDHDKAEEELRDVESRDLREELVKRVVDRVRRHIEENTKNIEEAIKRVEDVIRELRKNIEEAIKRVREVLKRLKDEIK

SEQ ID NO: 4403 - protein, 184 aa, Artificial Sequence; identical to SEQ ID NO: 4402
  Synthetic

SEQ ID NO: 4404 - protein, 184 aa, Artificial Sequence
  Synthetic
SEDELLDRLREKYERNKERHKRLLDELRKRYEDLKREHEKLLRDIEEELKKLEDKIRRKDVPEEDLKRMKKLADDLRRELEKHHEDIKDHIRRSEEELREHHERVKDDHRKAEETLKDVRDRDLREDLVRKAIEDVDRHIKENTKNIEDTIRKVKKNIEDLKRNVEEAIKKVKEVLREIEERTR

SEQ ID NO: 4405 - protein, 184 aa, Artificial Sequence; identical to SEQ ID NO: 4404
  Synthetic

SEQ ID NO: 4406 - protein, 184 aa, Artificial Sequence
  Synthetic
SKEELLKRLKERNERLNEDSERLAREIKRRLEELRKEHRRLLKEIEERLKELEEDIRRKDVPEEKLERLKREIDRLREELKEHHKRVKDELDRLKKRLEDIKKDHDRKDRKVKEELEDMARRDLDEEDVKRVIRRWEELLKELEKDNRRVVKEAKELIDRLERNIRERIKEVRDALREIRKKVK

SEQ ID NO: 4407 - protein, 184 aa, Artificial Sequence; identical to SEQ ID NO: 4406
  Synthetic

SEQ ID NO: 4408 - protein, 184 aa, Artificial Sequence
  Synthetic
STDEKLKELEKRNRDLNEESRKLAEEIRKRYEDLKKEHEDLLREIEKRLRDLMREVERKDVPEKDLEELKEDARRLREELRRHHEEIERHIRESEKELRRIEDEHRKEDEKVKKELKDVRERDLDEKSVDDVIRRWEELLEELRRRNEEAVRRMERNIDELRRNVRETIDRVRKLLEEIKRKVD

SEQ ID NO: 4409 - protein, 184 aa, Artificial Sequence; identical to SEQ ID NO: 4408
  Synthetic

SEQ ID NO: 4410 - protein, 178 aa, Artificial Sequence
  Synthetic
SEAERVVEELERLLKKNRDDNERVIRRLEELLDRLREKNERAIEELRKLLDELKKVVDRGDVSERVVDKLLKEIKEKIDRVREEHRKLLEDIERTIRKVEKEHKESIERIRRRAEELKDLIRRELLREIEERLKTLSEESKRLIDRIREELKRLTKESEDLLKDIERLLREVKERART

SEQ ID NO: 4411 - protein, 178 aa, Artificial Sequence; identical to SEQ ID NO: 4410
  Synthetic

SEQ ID NO: 4412 - protein, 180 aa, Artificial Sequence
  Synthetic
DEMEDLRRDVERIHEESRKLSEDSVRTAEKIHRESEKLIDDLRRKVEKILKEVEDVVRRGDSDEKLKTRLRDLKRKLEKEAKEIMDRHERLAEELKERNKRINDDHRRKNEELKDELRRKRVGPEEELKKLEDRSRKLLEENKRLNEDLDRRSEELKARLKDILRRIDERLRDLEREADR

SEQ ID NO: 4413 - protein, 180 aa, Artificial Sequence; identical to SEQ ID NO: 4412
  Synthetic

SEQ ID NO: 4414 - protein, 180 aa, Artificial Sequence
  Synthetic
DEVEELKRRAEEILRKYDEDSKRIVEEAERIVRTSAEKIERLRKKAEDILREASKVVDDGRSEEELARRLTELTKRLEDEAKRIADEHDKLDEEIKRKIEELNKELKKLADDLRDRLEKERAGPERDLEKIETDVERLERKSKKLLEDLREKSERLKKRLEDILKRIKEEVERLKRKVEK

SEQ ID NO: 4415 - protein, 180 aa, Artificial Sequence; identical to SEQ ID NO: 4414
  Synthetic

SEQ ID NO: 4416 - protein, 180 aa, Artificial Sequence
  Synthetic
DEMEELKKEVEEILKEYEKRSRDLFKELKEILRRSKELSEDSKREADKILRDAEKVVADGDRREKLMETLERLLRRLEERNKRINEEHDKRDKDIEERVKKLNKELRDLVRRLREELRKRRAGREDDLRRIEEKVKKLEKESRELLKRIKDESEELKRDNKRLNDEVREELEKLKERVRK

SEQ ID NO: 4417 - protein, 180 aa, Artificial Sequence; identical to SEQ ID NO: 4416
  Synthetic

SEQ ID NO: 4418 - protein, 180 aa, Artificial Sequence
  Synthetic
DEMDELRREVKEILKTTEELIKRLEDKVRDILRRYKEVSDDIVRKAEDILRKAEDILRRGDSREEVSRELKRLLDELEKEIRKLNEDLKRLLDELREELERIVKTHRKLDKDLEDRLRKRRAGEERELEEIKKESEDLERRLKKVLERIEREVRRLEEETKELLKRIAEEVERLIREAEK

SEQ ID NO: 4419 - protein, 180 aa, Artificial Sequence; identical to SEQ ID NO: 4418
  Synthetic

SEQ ID NO: 4420 - protein, 180 aa, Artificial Sequence
  Synthetic
KEAEDLVREVERILEDYDRVVKELKDDADRILEESRRLIEELKKKAEDILRRVRKVVEDGDSRDDLKRELDKLAEDLAREAKEIADRHRKLDEELERRIRRLDEELKRLARELEERLARDRVGPEELLERIKDRLRKLHEKSKKLLTDIKRESRRLEKRLEDILKRIKEEADKLKEEADR

SEQ ID NO: 4421 - protein, 180 aa, Artificial Sequence; identical to SEQ ID NO: 4420
  Synthetic

SEQ ID NO: 4422 - protein, 174 aa, Artificial Sequence
  Synthetic
REEELERRVREESEELNRRLAEVHKRLRKKSKELNDRHKELDDRIRREADRLRKDIRRQGKEDDKLDREIKEIERELRKRSEELHDTNRKILRENEENLRRLHKENRDIERDLERKRLDDEVLKELKEMHDRLREHVKRDSERAERMHEELKRLSDELERRVREALKRLKEKVR

SEQ ID NO: 4423 - protein, 174 aa, Artificial Sequence; identical to SEQ ID NO: 4422
  Synthetic

SEQ ID NO: 4424 - protein, 174 aa, Artificial Sequence
  Synthetic
KKEEVRKRIEEELRRLKKDHRRLDEEIKRKLKKLDEEIKEVHERLKKAARDLEDEARRNGKRDDKLTEEIKEIIRRNKKNVDDLRRELKRIDEELKKESEKLERKADEIEERLRRREQTKEVEKDVEDLLKELEDDSRRLEEEVERLIERVKRHVERDERRVREMLREIKEKIK

SEQ ID NO: 4425 - protein, 174 aa, Artificial Sequence; identical to SEQ ID NO: 4424
  Synthetic

SEQ ID NO: 4426 - protein, 174 aa, Artificial Sequence
  Synthetic
SKEDLDRELRRLSEELNREHKELDERIRRELEKLRTRIDKVHEDIRREMKRLEDEVRKRGREDDRLRTKVKKILDDNKENVDRLRDELRKIKEELDRESKKLHDENEKIKRDLEARELTEEVFEDAERLHRELKKKSRDLEERVKKLLEEIEDHVRRDETRVRKVLRDIEEDIR

SEQ ID NO: 4427 - protein, 174 aa, Artificial Sequence; identical to SEQ ID NO: 4426
  Synthetic

SEQ ID NO: 4428 - protein, 174 aa, Artificial Sequence
  Synthetic
SKEDMLREAEERSRRLNEDHKRLDDELRKESEKLNRRHRDLDEKIDRELRRLKKDIRRRGKQDERLEREMKEKKDELDRLSKELHDKNREIKERLDRLSETLHKENEDIKEELRRRELTRELLERLRKVHEDLKKKSEDLKRTAEKLHRELEKESRDLVRDVERALDELRRKVE

SEQ ID NO: 4429 - protein, 174 aa, Artificial Sequence; identical to SEQ ID NO: 4428
  Synthetic

SEQ ID NO: 4430 - protein, 177 aa, Artificial Sequence
  Synthetic
SSEELLRDIERRLEEMNRDTERVVEEIRRRLEELRKRHKETIDKIREELKKVEDLVRRRGLDEDTSRELKELMRRLEEKLKEHHERLRELLERLEKELREAKERLDRKTEKIKKDLRKDGADEDVLRRAKRLIEKYKEDTKRIKEKLEKVIEDLRKNIEDFEEDVRRVLEELKKRIK

SEQ ID NO: 4431 - protein, 177 aa, Artificial Sequence; identical to SEQ ID NO: 4430
  Synthetic

SEQ ID NO: 4432 - protein, 177 aa, Artificial Sequence
  Synthetic
SSRELLERIKEELKELEDRHRDLLRRIEEKLERLNRRTREVLERIKRKLDELKKRVEEAGLDEDSRRRLEKKLKEIRDKLDEIRRRLEDETRKIKEELRRHHEEVRKRLRDVERRLREKGVDEDLLREVKELIERLRENIKRAKDKVEELIKKYKRDTDEAKKEVDEEIKRLKEEVD

SEQ ID NO: 4433 - protein, 177 aa, Artificial Sequence; identical to SEQ ID NO: 4432
  Synthetic

SEQ ID NO: 4434 - protein, 177 aa, Artificial Sequence
  Synthetic
DSERLVREIRERLKKLEKEHRELLEEIKDRLRRLNEESKKLLDDIKRRLEELRDRIRRAGLDEKTLTDLERILRKIEEDLKRMKEELDRLTREIERELEEHHKDIKRRLDEVRKELEKRGADEDVLRDLEKLIEDLKRNIERARAKVEKLIKEYEDKLEKIVRDAEELIKDLDRKVK

SEQ ID NO: 4435 - protein, 177 aa, Artificial Sequence; identical to SEQ ID NO: 4434
  Synthetic

SEQ ID NO: 4436 - protein, 177 aa, Artificial Sequence
  Synthetic
SSEEILRKIEEELERLEREVRKIHRDNERKSEELNRRSKKILDDIRRELDRLKKEAEEKGSSEETKKDLERLRRELEERLKEVEKESEELRREDKERNDRVREKLKELKKDIKRLLDEKGIDKEVVKEMRRALEEIKKEIEKVRKELEKRNREYRKRSEEVREEAERKLEEIKRRTD

SEQ ID NO: 4437 - protein, 177 aa, Artificial Sequence; identical to SEQ ID NO: 4436
  Synthetic

SEQ ID NO: 4438 - protein, 177 aa, Artificial Sequence
  Synthetic
RSEEILREIRDRLRKLNEESEKVHEENERRSRELNERSREILKRIDEELKRLKKEVDDKGADEKLKDELRRLVRRVEEELRRVEEESERLKREDDRKNEDVRRKSEELARDIERATREKGIDDDVVRDLKKKLERYKRETDRVRKELRDLNKKYEDRSREIKRELERLLRDIKRRID

SEQ ID NO: 4439 - protein, 177 aa, Artificial Sequence; identical to SEQ ID NO: 4438
  Synthetic

SEQ ID NO: 4440 - protein, 184 aa, Artificial Sequence
  Synthetic
SLEEVIKTVRKLLEEVERRLREVVERAERMLEEVRRRTREVSEEAREMLKDVEKALRDKNVSEEIEEKLRKIKEELERDNEKVNRDNERSVETLRRLLDRVRKEVKDIAKELEERLKEVERKSRDDRIVEKLLRDAERIVKRLRELIEKLREEVEKIVDENRKTVEELRRRNEEIVRRLRREIE

SEQ ID NO: 4441 - protein, 184 aa, Artificial Sequence; identical to SEQ ID NO: 4440
  Synthetic

SEQ ID NO: 4442 - protein, 184 aa, Artificial Sequence
  Synthetic
DVKEVLDDAERKLREVLKLIEDSLKKLKELSDEVIERIARSLEKLEKLIRDVDEELKRKVSDKDKLKRLKEKLDKVLRENEKLVEDLRRENKKVNDRNKRLVDELRRRLKKVKEDLERRVAEEDDKEVVKEIKERVDKVVDEARKLVEESERSIRELVERSKKVVEESERSIEELRRELKETVK

SEQ ID NO: 4443 - protein, 184 aa, Artificial Sequence; identical to SEQ ID NO: 4442
  Synthetic

SEQ ID NO: 4444 - protein, 184 aa, Artificial Sequence
  Synthetic
DLEEVRERARRLLRKLEEDLERVHKEMEELLRELEERIKASLERLDELLKRLADKLRRDVKDDDKLRKLDKKLKEAKKTNKDLADELRKELEEALRESRRSIDELRKDLERVTEEIEDILRKRKTKEVVKEIEDRVRKVAEKVREVIERNRKLVRDVLDKIRRMLKESERSVEEVLKRLDDELK

SEQ ID NO: 4445 - protein, 184 aa, Artificial Sequence; identical to SEQ ID NO: 4444
  Synthetic

SEQ ID NO: 4446 - protein, 181 aa, Artificial Sequence
  Synthetic
SLDEVVKRLEDLLREVEEKSKESSKRMEDLNREVNERLRRSSERLKRLNDEVKKRLEDAGRDDKIRRTLERLSEDTKRKSDKTNEDLKRLSDETRERSKRLNEELRRLVEEVRRRLEDLRRKGSPVEEIKKLADKVVTELEKLVEDDRRLAEESFERARKIVEEDERLARESVDRARRLVD

SEQ ID NO: 4447 - protein, 181 aa, Artificial Sequence; identical to SEQ ID NO: 4446
  Synthetic

SEQ ID NO: 4448 - protein, 184 aa, Artificial Sequence
  Synthetic
KLDEVIEEIRKLLRRMEEELRRSVEEIDKLLREVRELLRESSEKVKELLRRVTEELKKRGVPEEVKERLDRLVETLRRLSEETLKELDKLVREVKELSKESLKRLRELVERLRRELEEIKKRGEDEKLVEDLKRRAEEVIRELREIVKRNTEIAREVVERAKRIVEKNEKLLKDVVEEAKKIVK

SEQ ID NO: 4449 - protein, 184 aa, Artificial Sequence; identical to SEQ ID NO: 4448
  Synthetic

SEQ ID NO: 4450 - protein, 173 aa, Artificial Sequence
  Synthetic
SELEKAKEDVDRLLEDVNRVSEEVEDRVRKLLADSDRVLEEVERRVREVLKRLKDAGVPDEELERARRTLEDIIERLREKNKEVKERLRKIIKEDREVNERVEERVERLTREAKDKDVKTVADELRKVVKELLEINRRSLEELTKLVDESRRVNEKVMEELKKLVDDLRRRIE

SEQ ID NO: 4451 - protein, 173 aa, Artificial Sequence; identical to SEQ ID NO: 4450
  Synthetic

SEQ ID NO: 4452 - protein, 178 aa, Artificial Sequence
  Synthetic
SEIEKVKEVVREVIERSRKLLKEVRDTVEKVIDESRKLSDTVRRRVEDAIRDVLERRGDEDDELRRVKEELKKVIDENEDLNRRVEETLREIIKRLAEENKRVEDSLRKVIKDIERVRSREEVKKVIEDLTREAKRSLERNREVVKELKKLADDLKDLNKKSVDRLDDLVRRLKERTE

SEQ ID NO: 4453 - protein, 178 aa, Artificial Sequence; identical to SEQ ID NO: 4452
  Synthetic

SEQ ID NO: 4454 - protein, 184 aa, Artificial Sequence
  Synthetic
KRAEDVLEKLREDAKRVLKRNRDSVKEAEDLVRKSLRTSEEVVKTLRTELKKLLDELDRVKSEEARKRVEDVRDRLKREVDKLDRVSEEVEKTLEDLNRKNTEDNKRVVDRLREELDRLRREGLPEKVLRDIEREVRKIIKELEDMDDELRRILEEVIERSRRVNERLKELLKEADDRLREKLR

SEQ ID NO: 4455 - protein, 184 aa, Artificial Sequence; identical to SEQ ID NO: 4454
  Synthetic

SEQ ID NO: 4456 - protein, 181 aa, Artificial Sequence
  Synthetic
DAAEELLRLVEDVARELKRLVDELLKENRETVERLKKVVKRSEEINREVVRTLRELVANNGDKKEIDRIIKELKDANDKVAEDLRRVIEEDRRRNDEAAKTLRKIIEDLRRALEDVVRKRGEDEKIKEVRRSIEEARRRVEEALREVNEASKEAERTVREALKRSREAVEKAVRDVTEAAR

SEQ ID NO: 4457 - protein, 181 aa, Artificial Sequence; identical to SEQ ID NO: 4456
  Synthetic

SEQ ID NO: 4458 - protein, 178 aa, Artificial Sequence
  Synthetic
KELEDVLRESEKTAEELLRRVKKSIDRTRDVVRRLLEEIRKSIEETKRVADEAKREDRDEEVLKKIIRELEERSKKVEEDLERIIRELREESRKVEKELRDLIRRNEEKIKRVIERRGETDLVRRLERISEEVRRRVEKLVREDRKILEDVARALRELVKEDEEILRRVVKDLRDKTR

SEQ ID NO: 4459 - protein, 178 aa, Artificial Sequence; identical to SEQ ID NO: 4458
  Synthetic

SEQ ID NO: 4460 - protein, 175 aa, Artificial Sequence
  Synthetic
DEDKKVVRKVERIIKRVKELHDKSVRDSEEVVREVLKRHKESVEKIKEIVRRIVEIAARGDFREEVKKRLEEVIRELREENAKIHRELKELLERSRRRNDEIHRELKERLKEILEEAKDIEELKEVIRRVEKLSEDVKRENEKSNDEVRKLSEDAIRENEEVLRRARKLVDDLRR

SEQ ID NO: 4461 - protein, 175 aa, Artificial Sequence; identical to SEQ ID NO: 4460
  Synthetic

SEQ ID NO: 4462 - protein, 175 aa, Artificial Sequence
  Synthetic
DEEKEVVKKLRDIIREVERLHTESVRKVEEIVRRVLRLHKETVRELKEIVKRIVDIARNGDRREKVEDELRRRLEEIERKNKEIRDELKRLIDEVRKENTEIHDRLKKELKKILDEAREIRELEKVAKEVEDRSKELLDRNEEVLDRVRKLSEDVLRENREVIERVREEVKKESK

SEQ ID NO: 4463 - protein, 175 aa, Artificial Sequence; identical to SEQ ID NO: 4462
  Synthetic

SEQ ID NO: 4464 - protein, 180 aa, Artificial Sequence
  Synthetic
SEADKVVAELEKIVKDVVDAHKDSVRKLREIVRRAVERLRKDVDDTRRVVKEIVDIARSGDMREEVRKRLEELLRRSEEHSEKVERDLERVLKEVEDTNRDIKRRLEKRIREIEEKIKDLDERVRRKLEEVVKKVRDLSRRATEEVEEVIKEVRELVRRLKEENKRVVDEVRKRVEDTRK

SEQ ID NO: 4465 - protein, 180 aa, Artificial Sequence; identical to SEQ ID NO: 4464
  Synthetic

SEQ ID NO: 4466 - protein, 182 aa, Artificial Sequence
  Synthetic
KSMEDVVRKLDELVKTDKEIADRVVKELKDIVKRVEELVEDIVTKSRASVERVRDVVTRGVSEEELKRIHDENRRLIEEAKKRLEEIRREIEELVRRVEEESKRLNEELKRLIDDVTDKKRDVREAKELLDRLKRRLEKSTEEVKKKLETVLRELEEVIKRVKEELERVNRELRKVIEDAKK

SEQ ID NO: 4467 - protein, 182 aa, Artificial Sequence; identical to SEQ ID NO: 4466
  Synthetic

SEQ ID NO: 4468 - protein, 177 aa, Artificial Sequence
  Synthetic
ELEKLIRDVVRENEESAKEAHRRIKEVVRTSEDLVREVRERVRRIVESSKRVVEEVRKKMDEEELRRLVEESRRNVEEVRKALKKVEEDSRRNVEKVERDLEKLDRDNEREIRELRKRVKDMEKLLRDLKKLIEDNERVVRELKKNLDDDSERVKRVADELLKNLKKDTKKVKDTAK

SEQ ID NO: 4469 - protein, 177 aa, Artificial Sequence; identical to SEQ ID NO: 4468
  Synthetic

SEQ ID NO: 4470 - protein, 186 aa, Artificial Sequence
  Synthetic
DEAEDVVKRADDIVKRNRELLERVVRDLERIVRKNKDIVRKVVDEAKKLVKTVEDLSRQDNKREELRRRLEEVKERLERLVDKLRRESEKSKRELEKLLKELRDLSRKTEEELRKLVEDLRRKLKNVKEVEDLLRRVEEKLRKSVKEVEELLDTVRRRLEDSSRDVKRLLKEVLDRLEDVLDKEEK

SEQ ID NO: 4471 - protein, 186 aa, Artificial Sequence; identical to SEQ ID NO: 4470
  Synthetic

SEQ ID NO: 4472 - protein, 186 aa, Artificial Sequence
  Synthetic
SAVEEADKEVRRILKKNTDLVRRVVEEAKKILDRNEKRVREVFKELTRLLDELRKLIEEGNREERLRELLDRVRKRLKEEMDKVRKEDEKSREDLRRLVRELEELSKRTKEELDELTRALRKDLKDVEEVERLLRELERRLEDSVRKARELLKDIERRLRESIKRSEELLRDVERRLKELEERLEE

SEQ ID NO: 4473 - protein, 186 aa, Artificial Sequence; identical to SEQ ID NO: 4472
  Synthetic

SEQ ID NO: 4474 - protein, 177 aa, Artificial Sequence
  Synthetic
DVEEELKRVVEKLRDVERKVRELNKRVTDKNEDVVRTVRELNERVTRENRRVVEDIDRKKRTKDLKKLLEDSERNVDRVNKESERLIRESKKNVKDVNEESERLIRKVAKDLERLTERVSDLDDVLRRLEELVKDLERLIEESVRYLERNVERSRELVERSLRYLKENVDRSRKLAE

SEQ ID NO: 4475 - protein, 177 aa, Artificial Sequence; identical to SEQ ID NO: 4474
  Synthetic

SEQ ID NO: 4476 - protein, 175 aa, Artificial Sequence
  Synthetic
DEVREVVERARKLVKDNLDAARKAVKRLRELVKENLDTVRDVVRKLRKLVEDLKRLIRSGGSEEAVKRLKEELERLIKEVKERSDETRKRLEDLIRELEERSKRTAEELEKLIREKAKGKELADEVRELAKRSHEELKRLLDEVRKLLKDSERALRKLLEDVRREADKVAEEVRT

SEQ ID NO: 4477 - protein, 175 aa, Artificial Sequence; identical to SEQ ID NO: 4476
  Synthetic

SEQ ID NO: 4478 - protein, 175 aa, Artificial Sequence
  Synthetic
SEVDEVVRRARELVKKNRDDVKKVVEDLRRIVKEDLDTARRVVKRLRELVEELKELIRSGGSEELLKKLKEDLKRLLDKVREESKRTNDRLEELIEKVARDSRKTLEELKDLIRKKVRGKELADEVDELMKDSDRELKRLLEEVRKLAKRSTDELERLIEEVRKELEDVLDEARQ

SEQ ID NO: 4479 - protein, 175 aa, Artificial Sequence; identical to SEQ ID NO: 4478
  Synthetic

SEQ ID NO: 4480 - protein, 179 aa, Artificial Sequence
  Synthetic
SREEELLERLRRVVERNKKLVDDLADRADKVVKENEKLVRDLLEESRKTSEILDRLVKNRGDERRLEDIDREDRKTLKDVKDTSRESKKRLEDELKKVEDESRKLTRELEERLERAVRERGREPELVEEVRRLSEKSNRDLKELVKDIERKLDKVHKDLEKVIEEVERSNERVKEEVKT

SEQ ID NO: 4481 - protein, 179 aa, Artificial Sequence; identical to SEQ ID NO: 4480
  Synthetic

SEQ ID NO: 4482 - protein, 182 aa, Artificial Sequence
  Synthetic
SDAERIVEEAKRLVEENTELVERVLEKLERLVRENRTLVERVIEELDDLVRRIEDVVRRGVDEKDIAKLEKELRERIKEVRDRSKKTRDDLEKLIREVEERSKESTRKLEELLRDVTRKNKDSKKLEKLLREVERLMEESHKRLKEVADTARRLMDDSERELDRLLREAEKKIRDVREEIRR

SEQ ID NO: 4483 - protein, 182 aa, Artificial Sequence; identical to SEQ ID NO: 4482
  Synthetic

SEQ ID NO: 4484 - protein, 182 aa, Artificial Sequence
  Synthetic
SLVDEILKDLDRLVEENEKLVKKIVEDAEELVKRNTDLVEEVLRELKEIVETIRDLVRRGVDEDTIKKLEDDLRRKEEKVRRESKRSVERLEELAEEVRRESKRLTEELKRLVEDVLRRAKDVEELKDVLRRVEEKIRKSNEKLEKLLEEVSRLAKRSDERLKKVLEDIKEEIRKVKEDLER

SEQ ID NO: 4485 - protein, 182 aa, Artificial Sequence; identical to SEQ ID NO: 4484
  Synthetic

SEQ ID NO: 4486 - protein, 181 aa, Artificial Sequence
  Synthetic
SLEEVVKKAEDLLKRVNDELKKVSKKVRDDLRRVNEKLKTVVEDVLRKLEAVVDKIRKSGVDEERLRELKELIERAKRELERILEESEKTTRDVERESEESLDRSRRTTEEAKRELDDVRRRGVDVKDVDKRIRDVVRRHEEVVETNARRVDEVVKRHDKLVKDLERRVEKVVRELEEKVR

SEQ ID NO: 4487 - protein, 181 aa, Artificial Sequence; identical to SEQ ID NO: 4486
  Synthetic

SEQ ID NO: 4488 - protein, 181 aa, Artificial Sequence
  Synthetic
SLDEIVKRAEEELKRLNEELKRVSDRVKERLDRVLDELRRISERIKELLERVKRKLEREGVDEDTLRELARELKELEDRSRESLKRVEDLIRKVEEDSKESLKESKRLTDDARRRLDEIRKAGVDAEDLRREVEEIIRRHKEVIRKNEEDVKRVLDTLREMLKKNKKLVDDMVRKLDETIK

SEQ ID NO: 4489 - protein, 181 aa, Artificial Sequence; identical to SEQ ID NO: 4488
  Synthetic

SEQ ID NO: 4490 - protein, 177 aa, Artificial Sequence
  Synthetic
SEAEKVLEKVERVAREVLERIKRIVEHTKRVVEDVIRRADESVRRSEEIMEDVRRKVDSEKVEEIERRVREVVKENRRLVEELRERVRRVVEENKRLLEEIERIVREVVRRVEELARRNGPKEDVERLVRTVKEELDRLVDESRKLSRDVRETLEELVKRSEDVTRRVEETLREIVK

SEQ ID NO: 4491 - protein, 177 aa, Artificial Sequence; identical to SEQ ID NO: 4490
  Synthetic

SEQ ID NO: 4492 - protein, 177 aa, Artificial Sequence
  Synthetic
DELERILEEVKKVVEEVVRRAEESVKKTEDVMRKVVERVARSLEESRRVAEEVERRIRSEKLRRVREIVKEVVRINEELVKRVKDIVREVLERNRDLVRRVRDIVRRVEEEVKKLADNNGPEKDVKRLVDEVRKELEELVRRSEELTKEVKKTLEELVKESKEVVKDVEKKLREIEK

SEQ ID NO: 4493 - protein, 177 aa, Artificial Sequence; identical to SEQ ID NO: 4492
  Synthetic

SEQ ID NO: 4494 - protein, 181 aa, Artificial Sequence
  Synthetic
REVDEAVKNNEEDAKESRRVVEEAVKRDEDIARDIERRAREVVERDKEIVDEVRRRVKDEKKLREVVTLSKKIVDETKEIADRVLELSKRIVKETRDIAKRVLKLNDDSVKDVRRIAREVRSKEVKDLLDENSKRSNEISREVKKDLERTVRENKKIVDEVRKKLEDTVDKNRRIVEEVTT

SEQ ID NO: 4495 - protein, 181 aa, Artificial Sequence; identical to SEQ ID NO: 4494
  Synthetic

SEQ ID NO: 4496 - protein, 181 aa, Artificial Sequence
  Synthetic
SEVDKMLKRSNDIVREIARVVEEAVKTDERIMREILEHARKVVEEDKEIVDRVRKEVEDEEKLREVVERSRRIVKETEESAEEVLRRSAEIVKDTKRIAEEVRRRSKRISDEIRRIAREVRSEEVVRRLRTLVEENRKIVEDVKRELERTVRDNRRIVEEVAKRNHDTVRENKEIVDRVKT

SEQ ID NO: 4497 - protein, 181 aa, Artificial Sequence; identical to SEQ ID NO: 4496
  Synthetic

SEQ ID NO: 4498 - protein, 180 aa, Artificial Sequence
  Synthetic
KEAEDVIELVRRILEEVDRRVRDVLRKDEESLRRVKKTVEEVLKRHKDIEDEVRRRVRSEKLRRLVKKVRDMLKNVEKLARELIEKVARSIEKTKKIAEDLIRKAEEVLREVERVRDELDSEEVKRVLEEIVKKVEEIVKDVERKLRKTVEENEEVVRRVKRYLEKSVEDLEKVVRDVTT

SEQ ID NO: 4499 - protein, 180 aa, Artificial Sequence; identical to SEQ ID NO: 4498
  Synthetic

SEQ ID NO: 4500 - protein, 177 aa, Artificial Sequence
  Synthetic
SAEDILREVEELVRRTRKHLEDSLREVTKLVEETKREADRILKEVRDRVKEVIERGRDKKDLVRELEKAIEEVERRIRENVRRNEKVVEDHERLIRENEKKNDDAIERIRKIVAETKDEEVLKTVREELRDIIRRSVEHNRDSLRRLREIIERSLRHVEEVLERVRKEIERIKRETK

SEQ ID NO: 4501 - protein, 177 aa, Artificial Sequence; identical to SEQ ID NO: 4500
  Synthetic

SEQ ID NO: 4502 - protein, 177 aa, Artificial Sequence
  Synthetic
SAEDILREIKRLVEETERLLKRILEEVRKLVEETRRRLETILRRVEEKVRRLVEKGRDKRELKKRLEDVIEEIRKIIEDNIRRNDRVVEEVERLIEEDLRDNRRLVRRIEEIIRRVKDEETLKRALDEARKIIEESKKHVKDVLRKVTDEIRESKKDVERVEDEVDKRIREVDERTK

SEQ ID NO: 4503 - protein, 177 aa, Artificial Sequence; identical to SEQ ID NO: 4502
  Synthetic

SEQ ID NO: 4504 - protein, 181 aa, Artificial Sequence
  Synthetic
SIDEVAEEVERLLEEVKETSREVLERVKRELEKIIDTSRRILEEVRRLLERVLEEVERRKKNRERVRELVRRLLERARKVLEDNKDSVRRILEKLKEVLKRNEESVARIKEELERVRRDVKDDRDVKRVLDKVRKKIEENKDTVRRVEEEIKKLIEDNKRTSEKVRKEVTDIIEEIKEEIK

SEQ ID NO: 4505 - protein, 181 aa, Artificial Sequence; identical to SEQ ID NO: 4504
  Synthetic

SEQ ID NO: 4506 - protein, 176 aa, Artificial Sequence
  Synthetic
DVEDVVREAEDLLRKLEEKSRKVVEDAKRLLDEVKRKMEESVKEAKRLLDEVLRKSDEEKIRELVKRLEEINRRSLEEIKKLVKTLEEKLREMNERNKESVERLRRELTEARKRIRDKKIVEEVRRRVEEVVRRDEKSVEDLKREVDRVITELDRLVKRNTEEVERVIRRLDEETR

SEQ ID NO: 4507 - protein, 176 aa, Artificial Sequence; identical to SEQ ID NO: 4506
  Synthetic

SEQ ID NO: 4508 - protein, 179 aa, Artificial Sequence
  Synthetic
SEEEDAERLLRDLKRRADEVVKESEKILEDIVRDAERVLRESKRISEEIVRRADEIRRKVRGEEELEKVVRELEKLTRENKERVDRIMKKLAKLVEENERRVRELEEELKRILEEIVRRIGRESRLVEELRRLVEEVRERLDRSVKKTKELLKEVIKELEKLLKKDEDDVERVIRRLED

SEQ ID NO: 4509 - protein, 179 aa, Artificial Sequence; identical to SEQ ID NO: 4508
  Synthetic

SEQ ID NO: 4510 - protein, 178 aa, Artificial Sequence
  Synthetic
SEVEDILRRVEKRARDSLKHLEDVLRKVDKRVRESLDNLRRVLEEVERIVRELERLLDEGTDIEELLRRMEEMIRRIEEKVRRNLDDNRRVVEEVRKEVAKDLRDNERVVKDVRREIRDERLLEEIVRRLEDSLRKVEEIARRIEKRLRDSLRETKRIADEIRKRLEDALRRVEERAR

SEQ ID NO: 4511 - protein, 178 aa, Artificial Sequence; identical to SEQ ID NO: 4510
  Synthetic

SEQ ID NO: 4512 - protein, 178 aa, Artificial Sequence
  Synthetic
SDVEKILDDVRKDAERSLENLKEVLEKVEEEVRRSLEDLRKVLEDVERIARKLEELLKEGVDIRELKKELERVLEEIRRIAEENLKRNKDVVREIRKIVKENLDRNRRVLEKVRREIKDEELLRRIERTLRESLEAVKRIAEEIERTLEESLREVERIVKEMEDLVRAALKRVEDKAR

SEQ ID NO: 4513 - protein, 178 aa, Artificial Sequence; identical to SEQ ID NO: 4512
  Synthetic

SEQ ID NO: 4514 - protein, 178 aa, Artificial Sequence
  Synthetic
SEVEEILRRIKEEVRESLEDLRRVLEEIEKKAKESLRELKEVLERVKEIADKLKRLLDEGRDIRELEEELKKVDEEIDRIARRNKEENRRVLDEVRKVAKRNKDRNKEALRRVEKDIRDEKLLRDIKRDLERSLEAVDKIVKEIMERIKESLKATERIVKEMKDLITRVREEVKRRAE

SEQ ID NO: 4515 - protein, 178 aa, Artificial Sequence; identical to SEQ ID NO: 4514
  Synthetic

SEQ ID NO: 4516 - protein, 177 aa, Artificial Sequence
  Synthetic
DEVEELKERAKRSNEELKRKVEELKKRAKKAIDDVRRVVDENKKLVKEAIDRLRKTDVDEKIIEDLKRKLEKSVKESEDLVRRLEELMKEVVERLKKLVETNKRLTDEVVKKLARVREKETLKKLLEELKKLVDESRRRLDELRKEVEKKVEEMLERARRLLKKTEDLVREVKRRVD

SEQ ID NO: 4517 - protein, 177 aa, Artificial Sequence; identical to SEQ ID NO: 4516
  Synthetic

SEQ ID NO: 4518 - protein, 177 aa, Artificial Sequence
  Synthetic
DELKELEDRLRRAEEEARRLLEEIKKRLKESNEELKRLVEENEKLVKEALRRLENTDVDKKIIETLKRLLEESVERSRRLVERNREESEKVVERLKRILEELRRLLRRVVEEAARVKDKDVLRKLLEEVERLVKRVLDELRALLKEVEDLVRKSVEDLRKLLEETRKLVREMEERVR

SEQ ID NO: 4519 - protein, 177 aa, Artificial Sequence; identical to SEQ ID NO: 4518
  Synthetic

SEQ ID NO: 4520 - protein, 177 aa, Artificial Sequence
  Synthetic
SLVEKLEKRLRDVIKTIEDIIRENEERLRRSNRELEKLVDENRKLVEEVLKRLADTDVDKKIIEELERRLKESLDRSRELVKENKRLSEESVRRSRRLLEELKKLAEEVIERLRRVKDERVLEKLLREVEELAKRVLTELRRLLRETERLVRESEKRLRDLLRDTERLAREVEKRVE

SEQ ID NO: 4521 - protein, 177 aa, Artificial Sequence; identical to SEQ ID NO: 4520
  Synthetic

SEQ ID NO: 4522 - protein, 177 aa, Artificial Sequence
  Synthetic
SLVEDLKRELEKAKEEIEKIVRDLERELDRVIKENERLIRENEDTVRKALERLRRQDVDERIIRELEKKLRESVEESKKSLEEVEREVDEVRKRLDELVKELEKRVREVIEELRRVREEDVLRELKDRVRRIVEEVARRLEELLKKVKDLVKKSLKTNEDLLRKTEELVRRAEERVK

SEQ ID NO: 4523 - protein, 177 aa, Artificial Sequence; identical to SEQ ID NO: 4522
  Synthetic

SEQ ID NO: 4524 - protein, 181 aa, Artificial Sequence
  Synthetic
SEVEEVLKRLKELVDTVLEELKDVIRRIEELLERVRRDNERTIREDEELVRKVLDELRKISDKKTIERIVRRITRESERLLEENHRINKRITEELERLVRELERVVEEIIERLKELLERVKSGELAEEIERVIREAERRLKKLLDELRRLVEEVRRELEELDERLKRSSEEAKKRLDELVK

SEQ ID NO: 4525 - protein, 181 aa, Artificial Sequence; identical to SEQ ID NO: 4524
  Synthetic

SEQ ID NO: 4526 - protein, 181 aa, Artificial Sequence
  Synthetic
SEVERVLEDLRRLVRDVEEKLRRIIERDRRLVEEVERENRKTIRKIEELLRKVLEELKDISDKKTIERIVREIIKEARDLVRRNHERNREIVDESRRLVEELRRIVEEIIRRLRELLERVKSGELAERIEDVVREAEKRLRELLKELEKTSRDLKKRLEELDRELKALVEKVERDLEELRK

SEQ ID NO: 4527 - protein, 181 aa, Artificial Sequence; identical to SEQ ID NO: 4526
  Synthetic

SEQ ID NO: 4528 - protein, 185 aa, Artificial Sequence
  Synthetic
SEAEELLRRLKELVDEVLKRLRDMIKRSEDLARDVLRKHEDLIRKLEELMKKVEDLADKISDKDTVRELVKEVKKRLERLLRESEKLSKRVKEELKRSLDRSKELVDRVVETVREILKRLRDAGVPEEVVREIERIVREVTERLRRLVEENAEVVKRVEKELKELNDELRRVVEEIVRKAKEKTK

SEQ ID NO: 4529 - protein, 185 aa, Artificial Sequence; identical to SEQ ID NO: 4528
  Synthetic

SEQ ID NO: 4530 - protein, 185 aa, Artificial Sequence
  Synthetic
SEAEELLKRLEDRAEEILRRLEEILRTSRKLAEDVLRELEKLLRESERRIREVLEELRRIKDKKELEDVIREVEKELDESLERSRELLKDVLKKLDDNLKESERLVEDIDRELRKILEDLKKAGVPKEVVDEIKRIVDEVRERLKRIVDENRKIVEDARRKLEKIVKENEEILRRLKKELRELRK

SEQ ID NO: 4531 - protein, 185 aa, Artificial Sequence; identical to SEQ ID NO: 4530
  Synthetic

SEQ ID NO: 4532 - protein, 183 aa, Artificial Sequence
  Synthetic
DMRKELEKRVEEIRRAVTELVKRNEDIVREVKKRVEELVKRNEDITKKAEDDIRDLVRKRDREELRRLVERLKKLLKESNEELRRLVRELEERLRESIRNSRRVVEDLERKLEEIRKEISRVDEEEKLRRLLERLEDIARRVLKYLEEDLRETEKLAKEVLDRARKILEETKELVKDVLEKAR

SEQ ID NO: 4533 - protein, 183 aa, Artificial Sequence; identical to SEQ ID NO: 4532
  Synthetic

SEQ ID NO: 4534 - protein, 183 aa, Artificial Sequence
  Synthetic
DMDEELRRVVKEIEDELRRLVEENRDVVRKVEKLNRDLLKRNEDITDEARKRVEDLVRKRDDERVRELVRKLTEELKESNERNRKVVEESKRRLEESIRNSERVVEELKRLLREIIRTIDDVREREKLEKLIRRLREIAKEMLEYAKRDIERTKELAKRSLERHKESLDRTEKLVKEVLDKAR

SEQ ID NO: 4535 - protein, 183 aa, Artificial Sequence; identical to SEQ ID NO: 4534
  Synthetic

SEQ ID NO: 4536 - protein, 183 aa, Artificial Sequence
  Synthetic
DMVRDLERIVEKIKEDIKELVKRNREVTEKVVRDVEELVKTNREVVREATRRVEKLVEEEDREEVRRIVEELRRRLTKSIENSERVVEKLKKDLEKSNRDLEDLVRRLTELLKKIIEEIRRVKDEDTLRKLLKTLRELARRVLEEARKIIERSKELAERVLRYLKRDIEESKKIVKEIEDRAR

SEQ ID NO: 4537 - protein, 183 aa, Artificial Sequence; identical to SEQ ID NO: 4536
  Synthetic

SEQ ID NO: 4538 - protein, 183 aa, Artificial Sequence
  Synthetic
DMERELDDVVRKAEEDNRRLLKENEDIVREVVDRNARLLEENRRVVEEAVRRVEDMLRRRDRERLRDIVDRLRKELKKSEDNSRRSLKESEDRLRESIENSRRSIEESRKLLEEIRETIRRVKDERKLRKLIDDLRKLVRESLEYNKDDLEKTKELARRSLKYNKEDIDRSREIVRDVRRKAQ

SEQ ID NO: 4539 - protein, 183 aa, Artificial Sequence; identical to SEQ ID NO: 4538
  Synthetic

SEQ ID NO: 4540 - protein, 183 aa, Artificial Sequence
  Synthetic
SVIEALEEIAEKIERDVRKLVEENREVVKEAEKRVEEILRTNSKRSEEVRREVEDLVRKDDREEIRKLVEDLTRRLEESNRELKKLLEELKDLLRRSIENSERVVEKLRREARTLIEELSRVKEERVLEELLRRLEEIAKRALEYLTRDIEETKRLVEEVLKRLKEILDKTDDLAREVLERAR

SEQ ID NO: 4541 - protein, 183 aa, Artificial Sequence; identical to SEQ ID NO: 4540
  Synthetic

SEQ ID NO: 4542 - protein, 185 aa, Artificial Sequence
  Synthetic
SEVEKIEEDLKRLVKRLREINEESKKRLEELIRTAEEINKKTTDELERLAEEVDRLVKRVTSKEVKDLLREIEEELKKLLRKNREINEDIVRRLEELVRRNEKINKEIVERLDKTVKDVKKDLRSVREAVDRLRRVVDEIRKEARKLNEEIRKRVEDVVRKLDKMDEDLRKRVEEIERKVREATR

SEQ ID NO: 4543 - protein, 185 aa, Artificial Sequence; identical to SEQ ID NO: 4542
  Synthetic

SEQ ID NO: 4544 - protein, 185 aa, Artificial Sequence
  Synthetic
SEVEEILERLRRLVKEVDKRNTDSLDTLKRLIDELERKNRDSLRRVDELAKELEKLARRVTSEEVKKLAEDVVRRLEELVKENKEENERIVKRLTELLEENRDENRRIKEELEELLRDLKRKLRSVKDAVTELEKDVREIKKRLDEMDKRLKDVVDEVRRRAEEVNRRIERLVREIEKRAREEVR

SEQ ID NO: 4545 - protein, 185 aa, Artificial Sequence; identical to SEQ ID NO: 4544
  Synthetic

SEQ ID NO: 4546 - protein, 185 aa, Artificial Sequence
  Synthetic
SEAEEVLERLKRLRETVKEENDDSLRKDRELVDRLEKDNRDSLRKLKELIERVREILKRVTSEDVRRLLRRIVEELKELVERNKERNKRIVETSKRLVEKNRKRNEDITRDLRRLVEDLKRRLKEKKDVVETVKRVVEEIEKELEEANRRLEKSSREVEDRIRKANKRLEEVVDEVREEVDKATR

SEQ ID NO: 4547 - protein, 185 aa, Artificial Sequence; identical to SEQ ID NO: 4546
  Synthetic

SEQ ID NO: 4548 - protein, 185 aa, Artificial Sequence
  Synthetic
DEVREVLTRLEELVRRVTKELEDSLRNTERVRRTIRKLAEEVNRDSKRLKDEVKKVLEKIKDKDTLRKVVDDVEKELEELNRTLERLVREVSRYLRENNDRSRKLVEEVIERARRIVDTLRRAGVPEEAVETLKRKVEEIERRLKRMVEEDRKTIEEIEEEVRRLVKTNREIIKEIVETLREAVR

SEQ ID NO: 4549 - protein, 185 aa, Artificial Sequence; identical to SEQ ID NO: 4548
  Synthetic

SEQ ID NO: 4550 - protein, 185 aa, Artificial Sequence
  Synthetic
KEVEEVRTRLKKLRDDVKRLLDEVNEESKRLAEEVRRRLEESNRNTERVVEEIERVIERIKDKDTLERMVREVKRYLEENNKRSEALVDKVEKDLKRLNDKLREDVKRVIERLRRLVEELKRAGVDDKVVDEVRRRVEEAEREVKDMVRTNNEIVRRIVEEARRLVDEDRDRIKKIEERLRRELQ

SEQ ID NO: 4551 - protein, 185 aa, Artificial Sequence; identical to SEQ ID NO: 4550
  Synthetic

SEQ ID NO: 4552 - protein, 185 aa, Artificial Sequence
  Synthetic
SEAEEVLREVDELAKRLERVATESLKNTKKVVDDVRREVKRVNERSEEIMRRIEDVLRKIKDKDTLRRTVEEVIKELEDLNRELEKRVREVIRYLRENNRTTKEKVDEVRRRLEKLLDDARKAGVPEELIREIERIVREIDKRARELVERDNREVERIVEELKELVKTNNDIVRRVVEKLKETVR

SEQ ID NO: 4553 - protein, 185 aa, Artificial Sequence; identical to SEQ ID NO: 4552
  Synthetic

SEQ ID NO: 4554 - protein, 183 aa, Artificial Sequence
  Synthetic
SEAEKILEDLKRIVRRIKEELRRVLDHTRELVERIRRLAKKILDDTEKIVRDIRDKAEKVRDKDDLRRLVEEIRERLRRSDEELRKLVEKIARDLDKNLEDSERLVEKITKELEELLEDIRRLPEDVVRELKREVERIKREVKKMVDDNRRTVEKIKRDAEKMVRDNEELSRRIEKDVDDKTK

SEQ ID NO: 4555 - protein, 183 aa, Artificial Sequence; identical to SEQ ID NO: 4554
  Synthetic

SEQ ID NO: 4556 - protein, 183 aa, Artificial Sequence
  Synthetic
SEAEKIEERLKRVVEKLRRDATRVRKHTDDLVKEITDLAEESKRRVEEIRERVKRLRERVTDKDTVRKLVEEIKKRLDDSDKTLEDLVERIERLLEENLKDSERLVTEIEKELRRLLEEVRRLDEKVVKRLEDEVKRIKDEAKEMVDENKRKVDEIRKELRRLVEENRRESEKIKKKLDEDLK

SEQ ID NO: 4557 - protein, 183 aa, Artificial Sequence; identical to SEQ ID NO: 4556
  Synthetic

SEQ ID NO: 4558 - protein, 183 aa, Artificial Sequence
  Synthetic
DEIREILRRIREVVADATRRAKESLDNLKRVVEEVDRRVKESLDRLKEIVDRVRELSKRVTDKETVKELVERIRKELDDSNEELRKLVRDVEKYLKDNVRRIAELVKKIEKELRDLLREISRLPKDVVKRVEDEVRDIRRVLEEMVRRDKKVVDEIRERLKEAVRRNEEVSRKIKKDLKDETK

SEQ ID NO: 4559 - protein, 183 aa, Artificial Sequence; identical to SEQ ID NO: 4558
  Synthetic

SEQ ID NO: 4560 - protein, 177 aa, Artificial Sequence
  Synthetic
SMEERLREVVTEIRKKVEKLLRDNRKSNKEIKETVDDLVRRNRELTERAKRRVDARGIREDVVRRLEKRLRESNEKVERVVEEIEKRLRESDKKVEEVIERLDRLLKELIKRISRVTREREAEELLRELADVVRRAEELAERSLRESEKVMEDITREAERILRDTKRLIEEIERRAR

SEQ ID NO: 4561 - protein, 177 aa, Artificial Sequence; identical to SEQ ID NO: 4560
  Synthetic

SEQ ID NO: 4562 - protein, 177 aa, Artificial Sequence
  Synthetic
SLREDLEKDVRDIVREIDEAVERNRRSVEEVDKRVEDMLKNNRDSNKKIEEDVRRAGIPEEVVEELRRRLEESDREVERILKELRDRLREIIERSEDLVRRLREELKRLIDTIDRITREEDAKRLKDELREVVDKIRRDLKKSNDDIRRLVEKIKRELEELNKRSRELVERARETVR

SEQ ID NO: 4563 - protein, 177 aa, Artificial Sequence; identical to SEQ ID NO: 4562
  Synthetic

SEQ ID NO: 4564 - protein, 177 aa, Artificial Sequence
  Synthetic
SLEETIEEKVRRIREEVRRMLENNRRINEEVDRRVTEMVERNRKTVEEVVREVDRDGIPESVVDELRKAVEAVIRKSEKIVEDLRREAEKSDDELRKVVEKISERLEDIRRKVRKLTREEDAKRLLEEVEDIVRRLRKELEDSNRKSRKLVEEIRKRAEESNRELRELIKRIKDRAR

SEQ ID NO: 4565 - protein, 177 aa, Artificial Sequence; identical to SEQ ID NO: 4564
  Synthetic

SEQ ID NO: 4566 - protein, 177 aa, Artificial Sequence
  Synthetic
DVLERLAEVVRRVVKEAEDLVRNNRRLNKEVEDEVDELVRNNRRLTKDVVKKVEDAGVPEEVVDEIRKLLTTSNERVERLVDELKKRVETSDERAKRIVDRLRKIVEKLIREASKVTSKEEVKRLEDELRKVVDKVRKDMKRSNDDSERLREDITRKAKRLNEETRKVMEDVTRRAT

SEQ ID NO: 4567 - protein, 177 aa, Artificial Sequence; identical to SEQ ID NO: 4566
  Synthetic

SEQ ID NO: 4568 - protein, 185 aa, Artificial Sequence
  Synthetic
KEAEELIREIERKAEEVRKENERSIRENERLAREVEKRLKRTNEELKRLVRELEEKLKRDDDGETVKREVKKIDEDLRRLVEESERIVKEIVERSRKSVEDNRRRNEEIERDLRRLVEELKRRGVDEELIRRLEEVVKRIREDLKKLDDDLKRSVEEIERRLKKVIEDNRETLERARRRLDERVK

SEQ ID NO: 4569 - protein, 185 aa, Artificial Sequence; identical to SEQ ID NO: 4568
  Synthetic

SEQ ID NO: 4570 - protein, 183 aa, Artificial Sequence
  Synthetic
DEAEEILEELRRLIEEDKKTVEEVLRRDEETIKRLEEENREALKDNRRLIEELEDIVRRIKDKDTLREILKRVLEESEELLRRVHKRNREVIEENRRSVEELKKINEDSIKRIEDLLREIRRVDEKVREKVERILDDLRRVVEETVKRAEDLLRKSREVVKRVDEELKESHDRLDERIKRDLK

SEQ ID NO: 4571 - protein, 183 aa, Artificial Sequence; identical to SEQ ID NO: 4570
  Synthetic

SEQ ID NO: 4572 - protein, 183 aa, Artificial Sequence
  Synthetic
DEAREILKTLKDLIKELEDRNREVLERDKKTIEDLERRNARVLEENKKLIDEIRRIAKDIKDKDTLSEILKRVLRESEKLLRKIHKENREVIKRNEDSLKEVHDENRKVREEIKRLLDDARRVDRSVEEALKKILRELEKKVEEVDRRLKRILEDSRRVVRRVDEEARKSHEELKRELDRIRK

SEQ ID NO: 4573 - protein, 183 aa, Artificial Sequence; identical to SEQ ID NO: 4572
  Synthetic

SEQ ID NO: 4574 - protein, 183 aa, Artificial Sequence
  Synthetic
KEAEDLLRKLRELIKKLDDTNRRVLERDRKTIEELERRAEKILTDIERLIRELEDRVRRTKDKDTLRELLRRAKDTIRKLLKDLRDELEKVIKENERSLREVHKRNKEVDEDAERLVAEVRRVDEKVVEKARRILKELRDRIREVDKRLRELLEESRKRVEEVERELERLVRELEKKVREAEK

SEQ ID NO: 4575 - protein, 183 aa, Artificial Sequence; identical to SEQ ID NO: 4574
  Synthetic

SEQ ID NO: 4576 - protein, 182 aa, Artificial Sequence
  Synthetic
SEVEDVVRKIKEILERLKKEVDDVLDRNRKLLEELKKRADEVLKRNKDLLETLKREADRDGKDEDVVRRARKILKELRDHSKKVVEDMERILEESKKHSEDAVRRLREIVKRLAEEVDEVTKRGVDKDELKRLLDELREIVKEAEERLRKSDEDLERIIREVKKRLKESNEELERTIREVER

SEQ ID NO: 4577 - protein, 182 aa, Artificial Sequence; identical to SEQ ID NO: 4576
  Synthetic

SEQ ID NO: 4578 - protein, 184 aa, Artificial Sequence
  Synthetic
REVEEVVKEAEDLLRKLRELAKEFLTRHKKLIRDVTEKVKEVLKRSADSIRELEKIIDKVTSDEVRRLLEEINKRNREEIERLLRELEKILRESRELSKELKKILDEILKRIRELVEKVKARGLPEDAVRKLEEMVERLARIVEDVERKLKKLNKELEEIVRDAKRRLERLNEELRRRIREAER

SEQ ID NO: 4579 - protein, 184 aa, Artificial Sequence; identical to SEQ ID NO: 4578
  Synthetic

SEQ ID NO: 4580 - protein, 184 aa, Artificial Sequence
  Synthetic
DEDEDIERKLKELIDRLREEVKKAEDEHKELIKRDHRRVEEVERRSEKSIKDLRDLAKKVSSEEVERLLEDINRRNRELIDRLRKELEKTNEESKRLSEELKRKLTEVLKRIRELVEEVRKRGLPEDVARRLEELVEELEDIVRKVKESLRRLNEELRKNSETVKKKLEDLNRELRKDIEEKRR

SEQ ID NO: 4581 - protein, 184 aa, Artificial Sequence; identical to SEQ ID NO: 4580
  Synthetic

SEQ ID NO: 4582 - protein, 184 aa, Artificial Sequence
  Synthetic
SEAEKVLEEAKRLIEELERRVREVLKRSKKTIEDLRREVDRVVKEHKKLIRELREIIKRVTSREVEKLLEDILRDSRRLTKELDEKLKEINKRNAELIEELKRILDKIRKDIKRLIEEVEKRGLPEEVAKRLKDVLRELKDLVEKIEEEARRLNEELKEIIDRARKTLEDLNRELEEVVRRARK

SEQ ID NO: 4583 - protein, 184 aa, Artificial Sequence; identical to SEQ ID NO: 4582
  Synthetic

SEQ ID NO: 4584 - protein, 178 aa, Artificial Sequence
  Synthetic
SEVDEVRRELERVITDDKRLVDESRRKNEKSIRDDEELIKTSRRINEESIRRLKELVERGVPEEELERIVKENKEKVARVVEESKRLVERNKREAEKVVEESRRRVKRLREELKDVVRKGVDEETLRRLVKRLDETSEELEDENRRLNETLKRSSDELRKTNEELNKRLKEVVDRAKK

SEQ ID NO: 4585 - protein, 178 aa, Artificial Sequence; identical to SEQ ID NO: 4584
  Synthetic

SEQ ID NO: 4586 - protein, 178 aa, Artificial Sequence
  Synthetic
SVEEKIKEMVDKIKDSVRRSTEENDRLVKEIDKVLKEAEKRNRDLLKEAADVLKRVLDKRRESEELRRIVEEVEKTHRDLLKKTADLVRKVREDHDRLLKESKELNDRSERRAEELERKVDDIDTVLKDMKKILDDNKKLVDDSRKKHKESIDRLRKLVKDSLDEHRESIERLERAAR

SEQ ID NO: 4587 - protein, 178 aa, Artificial Sequence; identical to SEQ ID NO: 4586
  Synthetic

SEQ ID NO: 4588 - protein, 179 aa, Artificial Sequence
  Synthetic
REVEELERELEESNKELRKLIKELDDLLRETNKRLNDLIRELKERLDRVLEELRKIIKDDRRLVEELRRLVEDVRRELKKAIDELKKIVEDSERELERMIKRLRDIVDESRKRLKEVSRTREVEKLVEEAIKRNEDLVRTVERKVDEAIKENRRSVEKVAEEVKKAEEELERIVDTVRR

SEQ ID NO: 4589 - protein, 179 aa, Artificial Sequence; identical to SEQ ID NO: 4588
  Synthetic

SEQ ID NO: 4590 - protein, 179 aa, Artificial Sequence
  Synthetic
REVEELKKEADKTNEDLNRLIKELEERARESNRELKRLIDELRRRLEEVLKRLKDIIDKERRSTEELRKLVKDVEDELEKVIRDLERIVDRSRKELERVIRELEKIVRESERRLKEVSRTEEVERLVTEMIKRNRTSVDAVRRKVKEMIDRNKALVETVRDEVRRAREKLRDILRKAEK

SEQ ID NO: 4591 - protein, 179 aa, Artificial Sequence; identical to SEQ ID NO: 4590
  Synthetic

SEQ ID NO: 4592 - protein, 180 aa, Artificial Sequence
  Synthetic
SIEEIVRKVKEDLKRSLDELRKVSEDMARRLRESLKELEEVVREMEERLKRILDDIRRKVPEDRVRELERRVRELIERLRKKVKENKERLEKIVKDSDDHVERNVEELEKIVRELEKLVRDGRDERDLKRRVDEVLTRSKESVDENKRTADRVLEESRESIKELKERAKRLLERLEEERK

SEQ ID NO: 4593 - protein, 180 aa, Artificial Sequence; identical to SEQ ID NO: 4592
  Synthetic

SEQ ID NO: 4594 - protein, 178 aa, Artificial Sequence
  Synthetic
KEVEELEREARRMLEHTKRLIDEVRDRAKKSLDNTRRVDREVEKLVEDTERRLDELRKRGEPEERLKDIHRENRELVKRIEEYLKRDLDRSRKLVREIEERLRENLETSEDLVRRLVKGEELKRTAERMIEENRRLVETLKRVLEEAIRRNEELVKTLLRKLEESDKKIRKLIEETRT

SEQ ID NO: 4595 - protein, 178 aa, Artificial Sequence; identical to SEQ ID NO: 4594
  Synthetic

SEQ ID NO: 4596 - protein, 178 aa, Artificial Sequence
  Synthetic
SELEELRDRLKEILEHTKKLIKESVERLEESLRNTRRVIRKVEEEVERTRTKLDDLRRRGEDETKLREIHRENRELVRRIVKYAEDDLRRSRKLVEDSKRRSKKNLDDSEELVRRLVRGEEMADVARRVIEENKRLVEENEDRLRKAIERNRELVEEVKKRLEDSDREIERLIREVKK

SEQ ID NO: 4597 - protein, 178 aa, Artificial Sequence; identical to SEQ ID NO: 4596
  Synthetic

SEQ ID NO: 4598 - protein, 178 aa, Artificial Sequence
  Synthetic
DEVETLRREARKLLERIKREIEEVRRRLKESLDNTKRVEDEARKLVKETKDKLKRLAERGSPKEDLERIHRENRDLVRRIEEYLKRDLDESRKLVEEIERRLEELLRTLEDLVRRLVRGEEMRKVAEDMEREIRRLITDLRRELEEAIERNEELVRRLARELERSDREIKKRIDEIET

SEQ ID NO: 4599 - protein, 178 aa, Artificial Sequence; identical to SEQ ID NO: 4598
  Synthetic

SEQ ID NO: 4600 - protein, 178 aa, Artificial Sequence
  Synthetic
SELDELRKRAKRSLETTEELIRRSRKLMRESLDNTRRVEEKVRRLVEKTLRDLEDLKRRGVPEETLREIHKENRELIRRIEKYLEEDLRRSRELVKESKKRSKDDLDRSRDLVRRLVRGREMEETAREAIERNRKLVEDNERDLKKAIEDNEKLVRDLKRELERSDEEIKKLIREVKN

SEQ ID NO: 4601 - protein, 178 aa, Artificial Sequence; identical to SEQ ID NO: 4600
  Synthetic

SEQ ID NO: 4602 - protein, 178 aa, Artificial Sequence
  Synthetic
DSREELRREAKRLLDDIKRLEEKVERLAREVLKHTEELDEKLKRLVEETLKKLEDLRRRGEPDESLRRIHEENRRLVDEIRERLKENLRTSKKLVKEIEERLKELLEELRDLVRRLVRGEELKRTAEEMERRIRELIKRLKDRLEDMIRRNKELVDRLKKKAERSDEEIERLIRETKK

SEQ ID NO: 4603 - protein, 178 aa, Artificial Sequence; identical to SEQ ID NO: 4602
  Synthetic

SEQ ID NO: 4604 - protein, 182 aa, Artificial Sequence
  Synthetic
KEIEDVVRELERKVRENKRRNDEVIKRLERLVEKNTELVRRLIRTLEKLVEDLEDIVRRIKDKDELEERLERIRRRIKELVRKLEELNKKSLDDIRRLVEKLERENERSLREIKRDVDELVRSEEAKKVAEDVERRIRRSVEEARRLLEEVKRKMEESVEESKRLLKKVEDEAKDVVDRARK

SEQ ID NO: 4605 - protein, 182 aa, Artificial Sequence; identical to SEQ ID NO: 4604
  Synthetic

SEQ ID NO: 4606 - protein, 182 aa, Artificial Sequence
  Synthetic
SEIDKVIEELKDLVRKNEKRNRDVVRRDDKSVKDNTKRVEDVIRDLDRLIRELREIVERIKDKDTLRRILKEIKDRIKELVRRLDEENKKSIRDNERSVEEVEKENRESLKTIRELVRNLVNDKRAAELAKEVIDRMEESVKEAERLLRELKRKSEDSVRKSKELLDEVEKKVEEVVREAER

SEQ ID NO: 4607 - protein, 182 aa, Artificial Sequence; identical to SEQ ID NO: 4606
  Synthetic

SEQ ID NO: 4608 - protein, 182 aa, Artificial Sequence
  Synthetic
EEIERAIEKVEREIRELEERVREIIERDRKSVEDNSRRVRTVIKELEKLVEELRKTVKDIEDKDTLRKILDEIRRRIEELVRKLKRENDESNKKNKKSVKDLEDELETILKRIEDEVRKLVNSEEARKLAEELRKEIKRVVDEVRKLLRDLERKSKESVREAEELLKRVRDELKEVVDRTEK

SEQ ID NO: 4609 - protein, 182 aa, Artificial Sequence; identical to SEQ ID NO: 4608
  Synthetic

SEQ ID NO: 4610 - protein, 177 aa, Artificial Sequence
  Synthetic
SLREAVERLRKRHEDVVRELEKLVRRVKEELERVNKDLRKVVEEVRRRLEKVLEDAKDVERIKEIKDEVERVIRELKKIVDESRKNSKDLKEELDDVLKKSEDNVRRVTEELKDVVRRGGPVTDLLKRADDNVKRNRDLIRRLKEKADEIVKRNEDLIEDARRKADEMIKDLEEKAR

SEQ ID NO: 4611 - protein, 177 aa, Artificial Sequence; identical to SEQ ID NO: 4610
  Synthetic

SEQ ID NO: 4612 - protein, 182 aa, Artificial Sequence
  Synthetic
SEVDELRERAKRIVDDLRRKIEEVVKRLEDSDEENKKLIEKAVRELEKIIRDLEEVIRRGVDREEVRRIEKELRDKLEKVKEESKRTIDENRKIVTEVIKTVEEVLKRLREELDRVIKEKKDVRELKELVDRLDKEATDVLRKVREDLRKAIERSERSHRRLEKLIEEIERELKRVVDEVTR

SEQ ID NO: 4613 - protein, 182 aa, Artificial Sequence; identical to SEQ ID NO: 4612
  Synthetic

SEQ ID NO: 4614 - protein, 180 aa, Artificial Sequence
  Synthetic
DIEELLRKVAEEITRSVKESRDRLDEVEKKAREVVERSEKRLREVEEKIERVVRRIVKSDELRDLARKVLDEIRKLVEKLRRLNEKSLRDIERLVRKLEELNKRSLDEIRKLVEELKRVDREEDADKVLKEAEELVRRNRRLVEEVLRRLEEIVKRDEDLVRKVLKEADEIVRRLEEAAR

SEQ ID NO: 4615 - protein, 180 aa, Artificial Sequence; identical to SEQ ID NO: 4614
  Synthetic

SEQ ID NO: 4616 - protein, 182 aa, Artificial Sequence
  Synthetic
SRVEDVVRRLKELNDENSEDSRRVLEKLKDEVRKNSDEIEKAAEELKEKLTRLKRLIEGGVDEETVRRVLEEIRKDLEDLLRRSKESVERIKRELEKSLKRSEESLRKSDEDLKRLLDESRDVKEVKELVKRVRETSKKSLKEDEDMVREVKKKLDDSLRRVDELVRRVEEEARRVLEEVKK

SEQ ID NO: 4617 - protein, 182 aa, Artificial Sequence; identical to SEQ ID NO: 4616
  Synthetic

SEQ ID NO: 4618 - protein, 182 aa, Artificial Sequence
  Synthetic
DEVERVVKELRDKVDRNSREIEKAVTELRKIVKRNSDESKEVIERLEELLRRLEELIKSGVDEKTVREVLEEIDRRLKESERRSEESKDEIRRLLKRLLERSKESLDEIEKELKRLIERSKTSSRVKTLVDEVRKRAEDSLDTVKKLVDRVRERLDESLRDDKRLVDRVREEAERVVREVEK

SEQ ID NO: 4619 - protein, 182 aa, Artificial Sequence; identical to SEQ ID NO: 4618
  Synthetic

SEQ ID NO: 4620 - protein, 182 aa, Artificial Sequence
  Synthetic
SDVEKIFDELRKLLEDLRRKVEEVFRRLKELVERNTRLNREVVKELKKTSDDLRDMVRRTKDKDTLDDLLKKVKKEHEDLVKRLEDLNDRSEKEIRRILKELRDTLRTITRRIEDLVRKAEKDEKVRKLVKEIRERIEKVLRDAEELLKEIEERVKESKKEAKKLLDEVRESVDDVKRKAEK

SEQ ID NO: 4621 - protein, 182 aa, Artificial Sequence; identical to SEQ ID NO: 4620
  Synthetic

SEQ ID NO: 4622 - protein, 182 aa, Artificial Sequence
  Synthetic
SDVEEIVRKLDKLVEDNTRENEEAFKRLDETSKKLEEEVERVFRELKKLVDDLEKIIRDIEDKDTLRKIVKEILKEIEEIARELEKRLEDVLREHKKLLDDIRRRNERSKREIERLVREMEKDEKVRKLVREVEKKVDESTERAERLLKRVEDSVRDVLRRAKELLDEIRKRVKDVERKAEK

SEQ ID NO: 4623 - protein, 182 aa, Artificial Sequence; identical to SEQ ID NO: 4622
  Synthetic

SEQ ID NO: 4624 - protein, 179 aa, Artificial Sequence
  Synthetic
DEAREIRRRLKEVVDEVRKRLEDSLEEIDRRAKEVLEKVKRSLDRLRKVAEEVLDKLRRKGVDEKKIRELKKKVEDLEDKNRRVLREVEEIAKKNKEDHKRVLKELEKEVKDLEDELRELKELDERVKRRVDEVVRKLREIVRKLTEENKRTVEDLERIVERLDRDNRKMVEDMEREVK

SEQ ID NO: 4625 - protein, 179 aa, Artificial Sequence; identical to SEQ ID NO: 4624
  Synthetic

SEQ ID NO: 4626 - protein, 181 aa, Artificial Sequence
  Synthetic
REVEELKKRLEKIVEELKRIVDDHKRKVERIVEELEKLVEDHKRTVEEIVERAKRIVEKDKEKREELDKLVERVKRISDEVRKELERITKRVREESKKVLKRLEEIVKEVRDELDKVKRERDDERLEEVAREIEEALKKVKRDLKESNRELEEVADRVRKELDRSDEDLERRMREVREELK

SEQ ID NO: 4627 - protein, 181 aa, Artificial Sequence; identical to SEQ ID NO: 4626
  Synthetic

SEQ ID NO: 4628 - protein, 182 aa, Artificial Sequence
  Synthetic
SVLETLAERVKEVKDNLRKLVEDLKRLVDRIKETLDKLVEELRELVERLDDRLRKNDKSEEMLERLAEEAERRAKEIEDRLEKHVDESRKRAEELLRRLEDHVRKSKRELERIREEVNSTRDLLKRLEEIMRRLEKEHKDVSKLLRDIEREIDRVHREVKRKIEEIVRKVRKSLEEVKRRAK

SEQ ID NO: 4629 - protein, 182 aa, Artificial Sequence; identical to SEQ ID NO: 4628
  Synthetic

SEQ ID NO: 4630 - protein, 172 aa, Artificial Sequence
  Synthetic
SRAETVLKEVTDKIKKLKDSSDELLRRNKENIDELKKSSEELLRRLTKAIEEIEKANVDEKTLEELIRRVEEELERHHRELEKNSREDEKRNRDHHRKLEEEMRRVEERLEREGIDDEVVKRVRDLLDTVRRRNEKVNEDVKRMNDKLRRDNEDVIRRVEKLLRELEEKRRT

SEQ ID NO: 4631 - protein, 172 aa, Artificial Sequence; identical to SEQ ID NO: 4630
  Synthetic

SEQ ID NO: 4632 - protein, 182 aa, Artificial Sequence
  Synthetic
DLEEVVKEARRLLDTVRKKLDESIKEARELLREIEERFKKSADEVREELKRVEDELRRKRVPEEVERRLDELRKRLEELTRRLKKELDDLKEELERRNERTKRELKRLIDELERRLRRVTRDKDDDVRELRKEVEDIIRRLDELVKKNTEDNRRVIKELRELVEEHTRRVKKIIEDLEREVR

SEQ ID NO: 4633 - protein, 182 aa, Artificial Sequence; identical to SEQ ID NO: 4632
  Synthetic

SEQ ID NO: 4634 - protein, 182 aa, Artificial Sequence
  Synthetic
SVEEVVEEAKELLKEVEEELKRSAEEAEKLLRDVARKMEESVERLRRLLKDVERALREKNVDEKVKKKLRDLLKELEDINRKSKRDLDELVEELRRRTEELERRLRELVRRLEEDLDRFRRDKDDDLRRLREKIEEIVRRLRELVRRHNEEVRRIIETLEELVRRNTETVEREVRRLRDEVR

SEQ ID NO: 4635 - protein, 182 aa, Artificial Sequence; identical to SEQ ID NO: 4634
  Synthetic

SEQ ID NO: 4636 - protein, 182 aa, Artificial Sequence
  Synthetic
SVEKVLEDARRLLEEVKDRLKKSIDDAEKLLRELEKRLRESADEARRLLRRVKELLERKNVDDKLRRDLDRLIKELEDRTKKLIDELRRLIEEVREENRRTKEELERLIRELEEKLRRFKRDKDDDLRELKREIEEIVKRAEDLVRENTEKNKRVVDTVEELVRRHNEEVRRVVKELEERVR

SEQ ID NO: 4637 - protein, 182 aa, Artificial Sequence; identical to SEQ ID NO: 4636
  Synthetic

SEQ ID NO: 4638 - protein, 184 aa, Artificial Sequence
  Synthetic
GLDEIIKRLREVLEKIREELRKSSEELERLLKRVDDDLERSNKELEELLERVRKKLEDSRIDRKLLEDVRREIKRVKEESKEIRDTLKTLLDRLRELSKKIEDDLKRKLEKLDEDLRTIRRKPQSEELLRELEKEIKRVDEDLKRLVEEHEELVRDVLRKLEKLVREHKEKVRERVERADDKVR

SEQ ID NO: 4639 - protein, 184 aa, Artificial Sequence; identical to SEQ ID NO: 4638
  Synthetic

SEQ ID NO: 4640 - protein, 182 aa, Artificial Sequence
  Synthetic
SLEEVLKELKKIVEDVTRRLEEMLRESKETSKEVEKELKKLDDEIREIIERAEEDLRRANKPEEELDKARRRLEKILEDNNRKNREITKRSRTENKRLEERLEEIVRRLKTELDKLRKVLEEGKVDEEILKEVAERLKKTAEEVKRELEKFIEDDRKRADEVRRENEETLKRIEDIVRELKR

SEQ ID NO: 4641 - protein, 182 aa, Artificial Sequence; identical to SEQ ID NO: 4640
  Synthetic

SEQ ID NO: 4642 - protein, 183 aa, Artificial Sequence
  Synthetic
SALEKIMKDLEKSIEDVRRKLEDILRKLRKSSEEVKRRIEDIERKVDRAAKEILRSKGTESEEVKKLDKELKDVRDTLRRIMERLEEINRRIEEELRRLLKELEEENDKVKKELKDRIDKDGDDEDVVRRLKRTVEEVHKRNEDVVREAEKLVEKLSRINEEAVRRLADIVRRLEEELRKAEK

SEQ ID NO: 4643 - protein, 183 aa, Artificial Sequence; identical to SEQ ID NO: 4642
  Synthetic

SEQ ID NO: 4644 - protein, 172 aa, Artificial Sequence
  Synthetic
REKEDVLRRIERIVREIERRLRESLKRNREIVKDLERLARRVLKESEDNLRKLKEDRKELEEVLDELRKKNKELEDDIRRLLRELEERTERWEDELRRILRELEKRLEEIERADVSREKLRKRLEEMKEELRKADERAKEIDTRTKRLVDEAVRKLEKLVEEHRRMTDEIRR

SEQ ID NO: 4645 - protein, 172 aa, Artificial Sequence; identical to SEQ ID NO: 4644
  Synthetic

SEQ ID NO: 4646 - protein, 183 aa, Artificial Sequence
  Synthetic
REDETLEKILRRIEEIVRRLVREAEDVVRRDRETIERLVRENEKAVKEIKDIVDELTRLKKDKREEELERMLKKLEEEVKRIIEESERKLEDNRRKVEEIIRRLEDVLRRLEEEIRKMIKDLPDTESVREAAERLKDILRRLEELLRKVAKDLKKSNDELERLSEESVRRLREILKRLEDALR

SEQ ID NO: 4647 - protein, 183 aa, Artificial Sequence; identical to SEQ ID NO: 4646
  Synthetic

SEQ ID NO: 4648 - protein, 181 aa, Artificial Sequence
  Synthetic
SEVEKILEDLDRSAKEAADRIKEIVDRLTELVKDLKKKNEESLEELDRLVKELADLLRRGEVDEEALKRAVETLRRILKRDKEAVDEAVRTLEKIIEDLKRELDEHTRRLEEILKRARDEVEEDKLRDIARRVREVNKRLEDLIRTVARAVRKALKDSEDLVREIAKRVEKALEDVRRAAK

SEQ ID NO: 4649 - protein, 181 aa, Artificial Sequence; identical to SEQ ID NO: 4648
  Synthetic

SEQ ID NO: 4650 - protein, 175 aa, Artificial Sequence
  Synthetic
REVEEVIRKLERILEEAERMSRESERKLREILEKLERAIREIREELERIHKELEEKAGRDEEVREILKRNRDNIRKLEEDARRILEDLKRLIKKLTDENKRILDELRRRIDELRKANVDRDRLDKAVEELRKEIEEMLRRSDELVKRLDEKVKKVLKELREHVKRDKEKVDKDAE

SEQ ID NO: 4651 - protein, 175 aa, Artificial Sequence; identical to SEQ ID NO: 4650
  Synthetic

SEQ ID NO: 4652 - protein, 175 aa, Artificial Sequence
  Synthetic
SSRERVIKKLEESLERLERLARKIKEDLERINRDLERLARKVEEELKRIHEELERRSGDDREVREILRRNRENIRDIKRKIEEIHRENEKNIRKLVEEAKDILRRSEEKIRRLREAQIREDELDKRVKDLHRENEREIRRLEDHVRRDRERLEEALRDLEAHVKRDKDKLDKDAK

SEQ ID NO: 4653 - protein, 175 aa, Artificial Sequence; identical to SEQ ID NO: 4652
  Synthetic

SEQ ID NO: 4654 - protein, 173 aa, Artificial Sequence
  Synthetic
SEIEDVARRLEEINKKSEDMARRIKEELEKVDEESERLVREVAKRLDEVLKRVRDDGVDEKKLKELEDKVKRIKDEARRLLEESKELTRRLVEEVRRLLEDSRRAVEEIERKLKDGTAEELKKRVEDLKRKNEDLIRRLEEKVRRLKKRNRDLIEELKKLVKELKDEAKKTSD

SEQ ID NO: 4655 - protein, 173 aa, Artificial Sequence; identical to SEQ ID NO: 4654
  Synthetic

SEQ ID NO: 4656 - protein, 173 aa, Artificial Sequence
  Synthetic
SEEERIEKRLREIHERHKRMLDEIKKRLDDSLKTLEDLIRDVTRELEKVLKKAEDDGIDEKLLRELKKEVEEIKRRAEKLLDESRRKVEELARRAKEINERLKKMIEDLRRELKDGTAEDLDREVKRLEREIERSIKELEELVRKLHKENEELIRELEELVERLKRKIDETSR

SEQ ID NO: 4657 - protein, 173 aa, Artificial Sequence; identical to SEQ ID NO: 4656
  Synthetic

SEQ ID NO: 4658 - protein, 182 aa, Artificial Sequence
  Synthetic
SEVEDAERVVRELEREVREEVKKLRKHVKETRDRDKDTVRRVEEKVKRLREKVKRVEDARRPKEELRRVLEELKKEIDKLTKELEEIEERNRRNIEDVERKLKKILRDIEEKIKELVRKIGSEDRAVREVLKELERVLRDAKRELDRVREEHERSHKELRDMLDRVKKELEKILEKLERALR

SEQ ID NO: 4659 - protein, 182 aa, Artificial Sequence; identical to SEQ ID NO: 4658
  Synthetic

SEQ ID NO: 4660 - protein, 171 aa, Artificial Sequence
  Synthetic
EDKERVEEKIKRSLEEARREAERVRDKLRKSEEEIDRVMKRVLAEIDRVLKEVKEAGVSEDVDRRLEELLRTLERKVRELRKDSDEVRKTLEDLVRRNEEDNRRILEELRREDRDSKELEDIVRRLEERNRRTVEEVERLVDEHNKRLREAAKELKKLVDDLERKLREDTR

SEQ ID NO: 4661 - protein, 171 aa, Artificial Sequence; identical to SEQ ID NO: 4660
  Synthetic

SEQ ID NO: 4662 - protein, 175 aa, Artificial Sequence
  Synthetic
SEIEEVKKKLEKILRDHNRVVEEVAKEHEKILRDHNRVIREVKEELDRVLKKLRDDGVDEKLVREMEERLRELAERVKKKNKELEDNIRRVRREAEEINKELEKKIRDIEEKARRRRDDAEKLERLVKRIKEEVEESVKRLKDHAKENREDVKRSVEELRDVVRRLEERIKESAD

SEQ ID NO: 4663 - protein, 175 aa, Artificial Sequence; identical to SEQ ID NO: 4662
  Synthetic

SEQ ID NO: 4664 - protein, 175 aa, Artificial Sequence
  Synthetic
SEIEEVARRLDEILERHNDVLRKVKEKHEEILRRHRKRVREVEEELKKILKELREKGLDEKDVRKTEKEVREIKKKAKEDHERLKRNIERMERELEKRNEDLRREVEKIKREARDDREDAKDLKRKVDELRRKAEESMKEVERHVRENAEHVKRSVEELEEDVRRLRKKLEEKER

SEQ ID NO: 4665 - protein, 175 aa, Artificial Sequence; identical to SEQ ID NO: 4664
  Synthetic

SEQ ID NO: 4666 - protein, 175 aa, Artificial Sequence
  Synthetic
DEKEKVKEDLDRILEEHRREVEDVERKHRKILKDHEEVVRRVREEHEKILKRLKDNGVDRRLLEELRRNIERLEKEARDDHRRLKENIERMRREIEKDHEDLKREVDKIARRAREDTDDAKKLEDLVRRLKEHVDRSRERLEKHLRENKRHVEESAKRLEKHVRDNEEDVKRKST

SEQ ID NO: 4667 - protein, 175 aa, Artificial Sequence; identical to SEQ ID NO: 4666
  Synthetic

SEQ ID NO: 4668 - protein, 177 aa, Artificial Sequence
  Synthetic
KEEEDLEREVKRLEDKVREDAKKLEEVVKTVEKLVRDDARRNEEVVKEVADRVRRLTERKLDEETLRKVKEDLKRTLERLKRENEKSLEELRDILRRLKKENDDTLKELRDELKRLTDSGASEDVIRKMEEIIKRLEEVSREVEKRLRRIIRELERVSKEVLDRLREIIEKLDRDAT

SEQ ID NO: 4669 - protein, 177 aa, Artificial Sequence; identical to SEQ ID NO: 4668
  Synthetic

SEQ ID NO: 4670 - protein, 171 aa, Artificial Sequence
  Synthetic
SVEDDVRRKLKEIEDEHRKVVKDARDELEKSHRRLRKVIEDVKRKLDRVLEELERSGVDEKIIRKAKELVERLTKKAEDVLREHKEKLDRIEKKAEDSHRRLREDLERLDRAKIDEKDLEEVIRRIRKKVEDSKRDLERLLEKSKRDVEEVMKDLKRRIEELEKLVRDETT

SEQ ID NO: 4671 - protein, 171 aa, Artificial Sequence; identical to SEQ ID NO: 4670
  Synthetic

SEQ ID NO: 4672 - protein, 185 aa, Artificial Sequence
  Synthetic
SLKDELEKLLKELKEHVDRSEKKARENLKRLEEHVRKSKEELEDRLRRIEEKVKRLTESNLRKEDVKRVLEEVRKELKRILDDVRADHRRLEEHLKRSVKELEDDNEKLERDARRIEEKLRRSNVPEEMVERAIRKLEDIHRRHREVVERVEREHRRIKEEHEKVVREAEETLKRIIEDLRRSAD

SEQ ID NO: 4673 - protein, 185 aa, Artificial Sequence; identical to SEQ ID NO: 4672
  Synthetic

SEQ ID NO: 4674 - protein, 185 aa, Artificial Sequence
  Synthetic
KLEEEARELLRRLEEHVRKSKKEAEDNLRRLEKHVEDSKRRLKELLDRLRKTVEDLKRANLDKKDVKRVLDKLRRDLEKILEELRRDNERLERHLRKSTKRLEDDNKDLRDKLEEIKDRLRRSNVEEDVVRRAADALRRVHEAHKRMVEEVKRRHDEIHKRHEKVVRDAERALREVLKRLEEAAR

SEQ ID NO: 4675 - protein, 185 aa, Artificial Sequence; identical to SEQ ID NO: 4674
  Synthetic

SEQ ID NO: 4676 - protein, 179 aa, Artificial Sequence
  Synthetic
SLRETADKRLRDVNRDLKRVIEELRERLKESNKKLEDLIRELRERAERILDDLRRSGVDESILRELEERIRRIEEELERIHREHEREVREVKKDLDRIHEEHKRRLDEARRELEEGRRPEEDLARRLEEIVKESKEIVDRARRRLEEIVERSEDRVRRVEERIKELVKRLEDIVRREKT

SEQ ID NO: 4677 - protein, 179 aa, Artificial Sequence; identical to SEQ ID NO: 4676
  Synthetic

SEQ ID NO: 4678 - protein, 182 aa, Artificial Sequence
  Synthetic
KEIEEVLRRLEELIRRVREELRKNNEDIEREADKLRKELKRVNDELEKKIKDVKDRARRDGAREEDIDRIRKDLKKSKEDLERLIKEALDRLKKNLDDLKKRVEEVEKRLEDLIRDVERKGLPKEVLDELRRVVEEVTREIREVLETSRELVRRIVETVKEVLRSHDEKIKKVEEELDRDRQ

SEQ ID NO: 4679 - protein, 182 aa, Artificial Sequence; identical to SEQ ID NO: 4678
  Synthetic

SEQ ID NO: 4680 - protein, 175 aa, Artificial Sequence
  Synthetic
DVDEKVRELLRKIEEDLRRSVKELRELAKRIEEDLRRISKKSKDLLKKIKDDVKRAGLPEDILRRLDELAKRLEKKNEDIRRDLERVAREIDKENEDMRKKLKEDVDRLEDLLRRGEVKEEDLKRVIEELKKEVEELHRRNEKIIRELEDKVRRVREDNERVIEELARDVERAER

SEQ ID NO: 4681 - protein, 175 aa, Artificial Sequence; identical to SEQ ID NO: 4680
  Synthetic

SEQ ID NO: 4682 - protein, 185 aa, Artificial Sequence
  Synthetic
SLREEAEKIIRDLEDHVRRDEERVKEMVDRSRKLVKELEKRLRDLIREITRRVDKLRKDNIDEDKLRKIIEDLVRDLKRILDELEKLIRELDKRNKKILEDNERNIRELEERAKRILDKLREDGVDEKVLRKAEELLKRIIAELKKIHEELRRLSKESKERLERILDEARKMLEEVKKRLEDIEK

SEQ ID NO: 4683 - protein, 185 aa, Artificial Sequence; identical to SEQ ID NO: 4682
  Synthetic

SEQ ID NO: 4684 - protein, 185 aa, Artificial Sequence
  Synthetic
SLEEKLEKLLKELRDHVRRDKKEVREALERLKDHVRKDREKLERAIAEIKKAVEKLKRDNIDEERLTRIVKELSDRLREIHRDNRENIKRLEDELRRILKKNKENIEDLARKARELLKRLEEDGVDEKVLRKLEKAAREVAEAVKKVHEELKRALEEIRRELEDINRKLKEAADEVRKKLRDIAE

SEQ ID NO: 4685 - protein, 185 aa, Artificial Sequence; identical to SEQ ID NO: 4684
  Synthetic

SEQ ID NO: 4686 - protein, 185 aa, Artificial Sequence
  Synthetic
SLEEELREVIKRLRDHVRRDKERAKEAIKRAEDHVRRDEEAVEEVIKELKRLVDELRKAKLDREDLERVVRDLDRKIKEIEERNKRNIDELRKELERIHRENEKNIRDLDERLKREREKLARDGVEEDVLRRATKALEDIRRELEKINEELKRAAERIEKRLKEIHDRLKKALDDVRRELEETRR

SEQ ID NO: 4687 - protein, 185 aa, Artificial Sequence; identical to SEQ ID NO: 4686
  Synthetic

SEQ ID NO: 4688 - protein, 185 aa, Artificial Sequence
  Synthetic
SLKEKLEREIERLRKHVEDDERRLREVIRRLEEHVKRDEDRLKKELDRLREEVERLRRANIDKEELKRIVERRTEDMDRIRKENEDNIRKLDEELKKIHEDNRKNIERLKTEAEKILRELAEDGVEEEVLKEAEDLLRDVTRALEEVNRRARKLLKEIKEKLDEIHKRLNKMLEEVKRRLDEIRR

SEQ ID NO: 4689 - protein, 185 aa, Artificial Sequence; identical to SEQ ID NO: 4688
  Synthetic

SEQ ID NO: 4690 - protein, 178 aa, Artificial Sequence
  Synthetic
SRAEEMIKDVRRIVEEVRRENKRVLEEIEEIIKRSKEEWEKILKELRDIIEEVERRNLDDERLREILERLEKKLKDVDDRAKEINEELKDLLRRVHERNREILRRLEEKVKEVKREGIDEELLRRIKEVVDRARDTLRRLDEELKRIVEAVHDTDDKVKKELEKIVREVEEIARRRSK

SEQ ID NO: 4691 - protein, 178 aa, Artificial Sequence; identical to SEQ ID NO: 4690
  Synthetic

SEQ ID NO: 4692 - protein, 179 aa, Artificial Sequence
  Synthetic
SEAERVVRENEENLERIKREVERDLRRNEEVLEDLRRKVKKVLDEIRETLRRLREAKLDSEELRKVLEKLKREIEEIRRRLKKTLDDLRKANEKSEREIRENLKENRKRNEDIIEKLKEVEEAVRKLDDLDRRLEEIVRRASEALKRSLEEIERILRKAEEDLRRLLKRLEEIIREVER

SEQ ID NO: 4693 - protein, 179 aa, Artificial Sequence; identical to SEQ ID NO: 4692
  Synthetic

SEQ ID NO: 4694 - protein, 179 aa, Artificial Sequence
  Synthetic
SVEDTLREMLKRLEEIVRRAEETLKRLNEEIERVVREAARRLDKLNKELRDIVRDIKRRKPDKEKLVRELEKILKEHNDELKKIKDDLRRILKKSREDTEKILRELEDILRRLEKEIRDNDKRKDDLKRRLEEILKELKRIVDEAEERHREIIKRLRDIVREATEKSREVLKRLEDKAK

SEQ ID NO: 4695 - protein, 179 aa, Artificial Sequence; identical to SEQ ID NO: 4694
  Synthetic

SEQ ID NO: 4696 - protein, 185 aa, Artificial Sequence
  Synthetic
KVREKLERALRRSTTSSRDIERRLKELLDTNREIVDRIVKRLKEMLDRLREEIRRIEERRKEAEDRIRELREKLRDLERKVRRVVREMEERTRELEKRLEDILRRNDEENKRVEERLREIEKRPQDDELVKRLEDDLRRWEKESKEIVDRVKEEIDRVNRESKETLKELEKEAKRVLDELERDER

SEQ ID NO: 4697 - protein, 185 aa, Artificial Sequence; identical to SEQ ID NO: 4696
  Synthetic

SEQ ID NO: 4698 - protein, 185 aa, Artificial Sequence
  Synthetic
DVERTLDEMLKRSEDVTDEVREELKRALESNNKLIKEIVDTADKVLKDIEDTVRKIIEKKREDKDLVDDLRRLIEEVRRIVEKIKRDLKKLNDELEDRIRKIEEDLKRKNDEVRKMVETIKKKPESEKLVKEVEDRARKWLKDLRDKIERLREELEKVNRDTERILEKVERDLRRLLEEVRKRDR

SEQ ID NO: 4699 - protein, 185 aa, Artificial Sequence; identical to SEQ ID NO: 4698
  Synthetic

SEQ ID NO: 4700 - protein, 178 aa, Artificial Sequence
  Synthetic
DEVEKVLREIEEIIKELKKEVDKDLEELKRTIERLKKKADEVVKRNEEVIRTLREGNIDEEKLKEILKRLHDENKEILDRIRELLKKLSRDNEKKLDEIREMLERLERRARKILARTKIKEAADKLRELLKRLEEVVRRWKEAIEDINRKLEKVVRDIERLLRDLDRKAREVLERLRK

SEQ ID NO: 4701 - protein, 178 aa, Artificial Sequence; identical to SEQ ID NO: 4700
  Synthetic

SEQ ID NO: 4702 - protein, 178 aa, Artificial Sequence
  Synthetic
SSVEKVLRELDDLIRRNRDLVEEDRKELKRTSDENRERVERIVRKNEKAIRDLRRNNIDEKDLRKKLEELHRENKKFVERNAESSKKLSDDNKELVDRSREKLKRLADKIRDILRKERIKKAADDLKRVLDKLRKSHREWNELIKKANKENTEILREAEERLRELDRRLRKVLEDLRR

SEQ ID NO: 4703 - protein, 178 aa, Artificial Sequence; identical to SEQ ID NO: 4702
  Synthetic

SEQ ID NO: 4704 - protein, 180 aa, Artificial Sequence
  Synthetic
SEVERVLKELKELLDRLRELVEEILRRLEKIIKETKREIEESLRTLEEIIRRLEELAERVDEKKLREILKKLEDHIRRSREKLERSNKKLRELLERAEREMKKLIDTARRIVDEVRKQDLREDADRALRKVLEDIKEIVKKAKEDLERVYKKHKKLVDEVKKAHEDVLKKAREVLEEIRR

SEQ ID NO: 4705 - protein, 180 aa, Artificial Sequence; identical to SEQ ID NO: 4704
  Synthetic

SEQ ID NO: 4706 - protein, 180 aa, Artificial Sequence
  Synthetic
DEVEDVLRKIKEIIKRTEDKVRESLKTLKEIIRRTKEEVKKILKEIKELIERVEREARRVDRRELEKILKDLKKLVDDAVRKLKRSDEELERHIEESERDLERSNRELKRLIDDVKRRDARERAETKLRELYERHRKVIKEVRERHKEVHKRHRDVLEEIRRRLEKLLKDLEDVIREIER

SEQ ID NO: 4707 - protein, 180 aa, Artificial Sequence; identical to SEQ ID NO: 4706
  Synthetic

SEQ ID NO: 4708 - protein, 172 aa, Artificial Sequence
  Synthetic
DEEKDVVRRLKRNVEENTKNVERMVRELERNIRENTENAKEVITRLKKIIDELRRRELDRKLVRKILEDVRKLSEDHLRESERNLRRMEEESKRHIKESKENLEEVEREAERDVRDQEDVKRVRKLARESLERVRRLHREVLEKLKKSHDDVKRLHEEIDERAKRVVEEREK

SEQ ID NO: 4709 - protein, 172 aa, Artificial Sequence; identical to SEQ ID NO: 4708
  Synthetic

SEQ ID NO: 4710 - protein, 176 aa, Artificial Sequence
  Synthetic
DAEELLKEIERELKRSIEEARRLLEEVEKRLRKSKRDVEKLLKEVREKLEKVVREIPKDDRLEKVKEDLERILDTLRRRTEELERRVRELIERLERRNEETERRLKKLVDDVKDVKDRDVVRRLVEEARKLVEENTRENRDMIEKLRRLVKRHSEEVEEIIRRLDKLIDDVRREAE

SEQ ID NO: 4711 - protein, 176 aa, Artificial Sequence; identical to SEQ ID NO: 4710
  Synthetic

SEQ ID NO: 4712 - protein, 179 aa, Artificial Sequence
  Synthetic
SLEELLREVERRLRELNKKLEDMIREVEERLRKVIRETEKLIEDVKRELEKILEKARERVDEDTLRRLRKELEDAIRKVAEDVKRLEEENEKSVRELRKKLREIHERNRDTVRKLAELLETIDEKELEKEVRDDLRRTDEDIRRLLDEARKDVERHKEELKKLLEDAKRLLERVERTIR

SEQ ID NO: 4713 - protein, 179 aa, Artificial Sequence; identical to SEQ ID NO: 4712
  Synthetic

SEQ ID NO: 4714 - protein, 173 aa, Artificial Sequence
  Synthetic
RELEEVVKKVREEVKEHTEKVKRLVEEAEELNRRYEEEVKKLVTTAKRLNDEARKRNSKDETVVRELKRLNEELNRRSRKLVEELKKLNEELARKAEESKEELKRRLEDLARRMIDSKELLDEVAKLVEESLRRLDRLLEEIKRTSDELIEKNERLNRELNKTSDKVVEDMRR

SEQ ID NO: 4715 - protein, 173 aa, Artificial Sequence; identical to SEQ ID NO: 4714
  Synthetic

SEQ ID NO: 4716 - protein, 184 aa, Artificial Sequence
  Synthetic
SLEDLIREVEDRNRKSVEEVERLLEEVRRKLDESRKRLEELLKRVEEKLERVIEEAKRRLKNVKDVEERLKEVRKTLKRLKERLEERTDEVRRRLERLIEELRKRSKEHSERLRDRVEKVRDVKDEKVVEELAREMKKSVEEHTREVRRMVAELEKLVKRHTEEVERAVREAEKLVETLREELR

SEQ ID NO: 4717 - protein, 184 aa, Artificial Sequence; identical to SEQ ID NO: 4716
  Synthetic

SEQ ID NO: 4718 - protein, 184 aa, Artificial Sequence
  Synthetic
SLEDLIREVEKRNKESVDTARRLLDEVRKKLKDSIDRSRKLLEEVRRKLEEVIKDAKRKLKTDKDVEKELKDVTDTLEKLIRKLEEENERSRKRLEDLIKRLRDESRKHSDDLRRKVEDARKVSDERVVEEIMRRLEKSVERHTEEVKRVVREAEELVKDNTRKVEELVRRAEKLVEDLERRTR

SEQ ID NO: 4719 - protein, 184 aa, Artificial Sequence; identical to SEQ ID NO: 4718
  Synthetic

SEQ ID NO: 4720 - protein, 184 aa, Artificial Sequence
  Synthetic
SLEELIREVEERLRKSVDDSRKLLEEVKRKLEDSKREVDRLIEEVKRELERVIEDVTRKLKDVKEVRRRLDEVRRELEERAERVRRENERTDRELDELIKRLEEINRETEERLRELAREIRRVKDEKVVKELADEMRKLVRTNTEIVKDVVKKLDELVERNTRTNRDVVRRARELVEELERRER

SEQ ID NO: 4721 - protein, 184 aa, Artificial Sequence; identical to SEQ ID NO: 4720
  Synthetic

SEQ ID NO: 4722 - protein, 172 aa, Artificial Sequence
  Synthetic
RELERVVEEARRLVEEHTEEIERSADKARKLNEEHSRRVDEIFERLERLIREAEKKNSKDDKVIEDLKRKLEDITEKVKKSIDEMRKLTKDINDENRESIKRLRDEIRKIEKDVRNRELLEEIRKLVEESVERVKRLNEDVNRTSKESVKRLEDLVDEIRKRVEEVVRRLKK

SEQ ID NO: 4723 - protein, 172 aa, Artificial Sequence; identical to SEQ ID NO: 4722
  Synthetic

SEQ ID NO: 4724 - protein, 172 aa, Artificial Sequence
  Synthetic
SELERVAEEAERIVREAEEKIKKSVTELKELVKRHSERVKRIFKELEELLRRLREKNSKDDRVIKRAEEELRRIEEELRRSLEELKRRLEEINKENEKLIKELRDRIRKIEEEVRNEDLLREVRKKVEEVVKKIKRLNEEVNRDVKRSAEELKRLIDDIRRILKKVIDDLKT

SEQ ID NO: 4725 - protein, 172 aa, Artificial Sequence; identical to SEQ ID NO: 4724
  Synthetic

SEQ ID NO: 4726 - protein, 172 aa, Artificial Sequence
  Synthetic
DEMEEVVKRAEEIVKEARERIEESFRRLREENKEALERLKRIAEEMRRLLKEVLERNSKDRRVIKELKDLLDEIRKRVEDEIRELRKRTETINDENRKLIETLKRILEDIKRKLRNEELLRRVEKEVRRVEEEIRRLNKEVNETSDRVEREAEKLVRELEEAVRKVVEDLER

SEQ ID NO: 4727 - protein, 172 aa, Artificial Sequence; identical to SEQ ID NO: 4726
  Synthetic

SEQ ID NO: 4728 - protein, 181 aa, Artificial Sequence
  Synthetic
DLEEVIKEARKRLEDSHRRLEKLIREVEKEHEDSHRKLRELVERVKKKHKEVEEKIKRNGVSEKDLKRIEDNIRKSEKELRDALKRHKENVDRSRKKLEDILRRHRKKLEEVERKLEEMRRKGSPVEELLKDLERMVRELNEEIERALEDAKRNVDRLDDEIRKLEERVDRNVKRLEEDIK

SEQ ID NO: 4729 - protein, 181 aa, Artificial Sequence; identical to SEQ ID NO: 4728
  Synthetic

SEQ ID NO: 4730 - protein, 181 aa, Artificial Sequence
  Synthetic
SLEDVAREAKKRLEDLKKKITDLIREARRKHKESHDRLRELVEKIKEDLKRVLKKLEDDGSSREKLERLKRKVDELARELEEVLKRHKENVDRSDEELKRVLKRIEEEIKRLEDELEEVKKDGSDVREVKEKLRRTVEALDERIDKLRKELDENVRRLDKEIEDMVRKAKKVVDELREEIR

SEQ ID NO: 4731 - protein, 181 aa, Artificial Sequence; identical to SEQ ID NO: 4730
  Synthetic

SEQ ID NO: 4732 - protein, 181 aa, Artificial Sequence
  Synthetic
DLDEVVKEVDRRLEESHERLRRLIKKVDEDHRRSHEDLKRVIDEARRLLEEVLERLRRNGKEEETLERLKRTVEKVEEELKRVLDRHEENVRRSRKELEDVLRRHKEKLDELKKKLEEVRRRGMPVEEVLKEVKKAVEKLNEDIDRLFEKARENVKRLDEDIKRLLEELRRKVKKAEDEIR

SEQ ID NO: 4733 - protein, 181 aa, Artificial Sequence; identical to SEQ ID NO: 4732
  Synthetic

SEQ ID NO: 4734 - protein, 181 aa, Artificial Sequence
  Synthetic
DLERVVEEVKKLLRDSHEEHKKVVKEVKERLDRSHKESKRVSDEVRKKLEEVLKELEDRGVSEDLLRRLEKTVRDIEDENREVNERHERKLREVERELKESNDRHEKMVRDLREELKRIRKDGKDVEKVLRDVRRVVTELNKHIEDLKRKVTEDVERLNTEIKELKKRNDEAVRRAREEIK

SEQ ID NO: 4735 - protein, 181 aa, Artificial Sequence; identical to SEQ ID NO: 4734
  Synthetic

SEQ ID NO: 4736 - protein, 174 aa, Artificial Sequence
  Synthetic
KEDEDLDRDVKRHIEETEKRVKEVEKRHKDEIRKVREDVKDVERRHKEKIDDVRRKLRDGRLSEEVIKDLERDLRRSKDEVRRRVEEARRKLKESDEEIKRTVRENEEKLRELRERGLPEEILRKLRKRTEEIKREAERIHDRTREEIEKIKRDLDEIHKRTREVIKELEERSR

SEQ ID NO: 4737 - protein, 174 aa, Artificial Sequence; identical to SEQ ID NO: 4736
  Synthetic

SEQ ID NO: 4738 - protein, 174 aa, Artificial Sequence
  Synthetic
KKEEDIEREIRDHIRRTREKLEKLAKELRDDIRRLREELKRIEDEIREESKRLEDILRKGRLSEEVIEELKERIKTIERDVERLIKESEDELRRLKREIEETLRENEKKIKELAEEGLPEDILRRLREETEELRKEAERLLREYKRLTEELARELRELVKKLEEEVRDLERRSR

SEQ ID NO: 4739 - protein, 174 aa, Artificial Sequence; identical to SEQ ID NO: 4738
  Synthetic

SEQ ID NO: 4740 - protein, 174 aa, Artificial Sequence
  Synthetic
SEEERIEEDIRRHIKRTRDRLDELRRRLEEDIKRLRERVEDLKRDLERNIRELRDRLRRGRLSEKVVRDSREKLERLREEMEREVKESRDRLREVKEEIEDLIRRNKEKLDRLRERGLPEEILRRMERLTRELAKDADRLLKKYRKLTEDLKRELEKILKTYRDLTEELKERSR

SEQ ID NO: 4741 - protein, 174 aa, Artificial Sequence; identical to SEQ ID NO: 4740
  Synthetic

SEQ ID NO: 4742 - protein, 182 aa, Artificial Sequence
  Synthetic
SELDELRKRIEEAAKELKKRLEDHKRRLEEAEERFERDLERIHRRSREVVRDLKERPLEEEEIKKRVKEVREEYDRVREELKRKIEELRRRNDKTRRELEEDVRRLEEELRDAKRKVNSEDRILREVEDIVRKLKEILKEVRDRLRELSKRLEDRLKEVEDKLDKDVKDVEEELRRILEERK

SEQ ID NO: 4743 - protein, 182 aa, Artificial Sequence; identical to SEQ ID NO: 4742
  Synthetic

SEQ ID NO: 4744 - protein, 182 aa, Artificial Sequence
  Synthetic
SRLEKAEEDIKRYIEEHKRRSEETLKELTDKAREITRRLDESLKTVEDTSREIKKDVEDRGNDKDTMEKVKEDYKRLVRRLEELIEEMIREADKSVKDLERETEESKRKIEEEAEKLREESDDEDLRRVIKRIRELLERLEREDRRIIEEIKKLLDRLKKKVEDIIERIERSLKRLEEELRR

SEQ ID NO: 4745 - protein, 182 aa, Artificial Sequence; identical to SEQ ID NO: 4744
  Synthetic

SEQ ID NO: 4746 - protein, 178 aa, Artificial Sequence
  Synthetic
SEEELLRKLEEISRRVTRALEKLLEDHERLSREVAERLEDLLRRHKKLLEELIKLAEERVSDKDKVRELKERLRKNLDDLREHVRRDKERNEKNIEDLERHIRRDKKENEEALDDVRKTKQPEEELDERIRRLKDKNKKNLDDLREHSKEVLERNKENLDELRKHSKKVLDEARKELK

SEQ ID NO: 4747 - protein, 178 aa, Artificial Sequence; identical to SEQ ID NO: 4746
  Synthetic

SEQ ID NO: 4748 - protein, 174 aa, Artificial Sequence
  Synthetic
DEKERAKEEVKKLRDDAEKTDRDLEKEVEDTARELKETLERLRREVERLEEELERISRRGNKDDETLKRIKEKLEKLKKKAKDDNDRLEERIRRKREELKKHLDDLRKTLDELRRRVRDKDLTEELKRVLDDHERTLRKIEEDLRRILEEHKKETKKITEELERILEKMRKDEE

SEQ ID NO: 4749 - protein, 174 aa, Artificial Sequence; identical to SEQ ID NO: 4748
  Synthetic

SEQ ID NO: 4750 - protein, 171 aa, Artificial Sequence
  Synthetic
STKEELLERAKEIIKRLEELLRRNNRTLREILKDLKKRLEESNREIKRLIDEVTRNGLDRKLVEKLREALEKHDEDVKRLLEELERIIRTHEKKAEELLKRLKDEIEKLAREERDDEDLRRELERLKEEVDRAHKESEEIVKKLEKRIRDAIRRSKKRVDELEKELREAEK

SEQ ID NO: 4751 - protein, 171 aa, Artificial Sequence; identical to SEQ ID NO: 4750
  Synthetic

SEQ ID NO: 4752 - protein, 173 aa, Artificial Sequence
  Synthetic
SEKEEVDETLRRLEEEHERVVRDAKRRLEEDHEKLRRVIRDSDRINDEINKKAEEDRLEEELLKRLRDKSKKLREDLEDLLRRHKEKLDRIDEELKEDHKRLKEEAKRLRERLDELDAEELKRILDETRERIRESMEEIKRKLEESRRESEDIRRKLKEDNDRLKKELDDRAK

SEQ ID NO: 4753 - protein, 173 aa, Artificial Sequence; identical to SEQ ID NO: 4752
  Synthetic

SEQ ID NO: 4754 - protein, 182 aa, Artificial Sequence
  Synthetic
SSEEEIRETVKRLKEIVKKHKKDVDEIAEELRRIVEELRRRNEEEIKKIRKILRELEEKRSGDRRKIKELVDRMKKRLDDHKKTLEEIKRKAKEELEKSKKRTDEIVEELRRRLRELEKKGVDEKLVRELERIVEEIKEELEKSDRELEKIIREIAKRLEEIHEETERAVREVKKRLDEVAK

SEQ ID NO: 4755 - protein, 182 aa, Artificial Sequence; identical to SEQ ID NO: 4754
  Synthetic

SEQ ID NO: 4756 - protein, 175 aa, Artificial Sequence
  Synthetic
SEEEKLLERLERTVERLEREARRLLEKSKEKLKRLEDSSRELLDKLRKEVERLRREERDREELKTELERLKREIEKYVEEMKEELKKHKKESRDFVERLKKELEELKEEIERSNVPEDFLRELEKLLEEIKRKIEEARERLERSNKELEDVIRDSERRLRKLLKEIEEVIRRKAT

SEQ ID NO: 4757 - protein, 175 aa, Artificial Sequence; identical to SEQ ID NO: 4756
  Synthetic

SEQ ID NO: 4758 - protein, 175 aa, Artificial Sequence
  Synthetic
SEIERLLERLKKALEEIKRSSERLIRKLEEVLRDLEREVRKLLEDSRRTLERIRKEDKSDEELKRELDEHKDRTRKAERRLEEKLKTLAEEIKEYTRRLEEDLKRLREEIRRANVPRDAVEELERLLKEIEKTIEESRRRLEELLERIERLIRKVIEELRRSNEELERVIREKSK

SEQ ID NO: 4759 - protein, 175 aa, Artificial Sequence; identical to SEQ ID NO: 4758
  Synthetic

SEQ ID NO: 4760 - protein, 183 aa, Artificial Sequence
  Synthetic
KVEKRLRELVERIRESHERVLREVERLVEEHRETLKRILDRIREILKRIEEDIESIRRRVDERKEKKLRERLKRLEDELRKIEKRIRDSLEEVRKKLEELVRKLRKNLEEIKRRLEELKRTKLDEEVVREELERLERNIKESRDDIRRALKELKDTNEKAKEELERKLEELDRDLKRLREEAR

SEQ ID NO: 4761 - protein, 183 aa, Artificial Sequence; identical to SEQ ID NO: 4760
  Synthetic

SEQ ID NO: 4762 - protein, 179 aa, Artificial Sequence
  Synthetic
SEVEDELRKSRKEIEDLAREAERELEEIKRHIERSERKAKEDIDRIEREIEELDKLRKENSSSEKTLDDDLERLKRKIEKIKREMEKSLRELEKRIREIVEKMRRTLDRHREKLEDLRRRGIDEKALRKSHKELEDLVREVEKKLRELLERYRKRIEEVAKKLDDLLDKLREVVDRAKK

SEQ ID NO: 4763 - protein, 179 aa, Artificial Sequence; identical to SEQ ID NO: 4762
  Synthetic

SEQ ID NO: 4764 - protein, 179 aa, Artificial Sequence
  Synthetic
SEVERELKRIKDEIRELAREAREDLERIKEHIKRSKERVEEELRRSEEEIKEIERLARERRVSEKTLDDRLRDHRRKVKKIVDDLRKSIEDLRKEIEDIVRKLKEDLDRLREEIDRLRKRGISKDDLDRLLEELERVVREVKKRLRKLLEDYKELVDRVRKKLEDSHRRLKELAERTKK

SEQ ID NO: 4765 - protein, 179 aa, Artificial Sequence; identical to SEQ ID NO: 4764
  Synthetic

SEQ ID NO: 4766 - protein, 186 aa, Artificial Sequence
  Synthetic
DVERELDRIHREHEELLRDIEKKLREILREHEELLKRIKEELDEILERLRKLVEDVKREKPDIKDLMKKLDDKLREVEERLRRIKEKLEEHHKEAEKLVEEIKRKLDDHNRRLKEKLKRVKDRGKVDEEEVRDILRRLKEEIDRSRREAEEILRRLKKEIEDTKREVDETKKDLKRTLDEIREEAK

SEQ ID NO: 4767 - protein, 186 aa, Artificial Sequence; identical to SEQ ID NO: 4766
  Synthetic

SEQ ID NO: 4768 - protein, 186 aa, Artificial Sequence
  Synthetic
SEVEEEVERIDRNIDRLRKEVEDNIRRSEEEIKRIKEEVEKNLEDLRREIDRIRELVEANKQSEDDLERVLKRLKDHLEKSKRDLERKLRRHEEHVRRSAEELEKDNRKNKRRVEEILRKLKDSEDMERMKRKLKELLDKHKKLVDDAKKKHDDSNRKLERLIREATKEHKKALEDLKKLIDDSRR

SEQ ID NO: 4769 - protein, 186 aa, Artificial Sequence; identical to SEQ ID NO: 4768
  Synthetic

SEQ ID NO: 4770 - protein, 183 aa, Artificial Sequence
  Synthetic
KDTEEAEERWKAKDKKLEDDVRENLKRLREEITRLEKEVKDNVRRIKELIDKLRRDVEREGTDDETLKEVEKRLRDNIEESRKRLEEMLKKIEDNIRKSKKKLDDYKRELEKELREMERRVKDLEEAKDSLRKLKKHSDDTVRRVKEEHERVLKEAKELLDKVEKEHRRLLEELERLLREARK

SEQ ID NO: 4771 - protein, 183 aa, Artificial Sequence; identical to SEQ ID NO: 4770
  Synthetic

SEQ ID NO: 4772 - protein, 183 aa, Artificial Sequence
  Synthetic
SEEDKERKKWERRDEELRKRVERNEREWERADKELEEEVKREVERIRREIEELRRRVEKDGTDDKELRDLLRRLEEELRKLDERLKEYLRRLEENLKRSDEELKEYLRDLEEKLRRIEEKVKDLDEARKELERLLEHSRKLLEDVRRSHEELVKHSKERADRIRETLKKLLDDLRKLLEDARK

SEQ ID NO: 4773 - protein, 183 aa, Artificial Sequence; identical to SEQ ID NO: 4772
  Synthetic

SEQ ID NO: 4774 - protein, 183 aa, Artificial Sequence
  Synthetic
SDIERRKEEWKREDEKLEKRSRKNVEDWERRDEELKRRSEENVRRIKEMIERLEDRVRRDGKDEDELRRVEEELRKNLEENDKRLKEYLDRLRKNLEKNRRDLEEYLKRLEEELREAEERVKDLEEARKELEKLLRNSKRLVDESERRLRELERHSRELLKRSRRELERLMKELEDLAREIRR

SEQ ID NO: 4775 - protein, 183 aa, Artificial Sequence; identical to SEQ ID NO: 4774
  Synthetic

SEQ ID NO: 4776 - protein, 183 aa, Artificial Sequence
  Synthetic
RESEKIKEDMDRSNEKHNKEVEETLKRLEEELKRLEDEVRDAKRELDELLERLERRARDGDRSEELLDRDLKDVLKKLEEKVRKIEEDLKKFKDDLRKIIEKLVTDSKRHHDELKKEIDRRTRTKELEDLARDVAKKNKESVDRVKKELKRVDEEVKRLLDEVKKDLDKVREDLKRVIDEIRR

SEQ ID NO: 4777 - protein, 183 aa, Artificial Sequence; identical to SEQ ID NO: 4776
  Synthetic

SEQ ID NO: 4778 - protein, 177 aa, Artificial Sequence
  Synthetic
SEVEKVITEVEELVREYRKRLEDKRREAKKRVDEYEERLKRMEDEVRKLLEEIERRIRKDGGASEKTEDEIRRLLEELKRRVEKLIEETKRLNEEIDDESRREMEELRERLEEIADKSISSKDALRRAEEKLKKLIKENKEINDEINERSKELNERSKEVLKKIEEDLRRLIEEVRR

SEQ ID NO: 4779 - protein, 177 aa, Artificial Sequence; identical to SEQ ID NO: 4778
  Synthetic

SEQ ID NO: 4780 - protein, 178 aa, Artificial Sequence
  Synthetic
SREDLVREVRERLKKLLKHSAELIKRVKEELEELLRHSEENVREVKKRLDEIKEEAKKRGKSEDALKKLDEKLRKVTRKSKEYLDDLRRRVEEVERKLKEYLDRLREEVKKVEERLEKSRRPIEDERRAVEETEERWRRKDDTVRKEVEEEKEKWRREDEKHHRDVERALRKLKRDIE

SEQ ID NO: 4781 - protein, 178 aa, Artificial Sequence; identical to SEQ ID NO: 4780
  Synthetic

SEQ ID NO: 4782 - protein, 178 aa, Artificial Sequence
  Synthetic
DEDELVREAKDRLDKLLEHSRKNVEEAEKRLRDLLEHSKKNVEEAERLLEEIEEEARRSGKSKEVLDRLRKKARDLKEESKDYLRKLEEEVRRIVRKSEEYLKRLKDRVDEVKERLDKGRRPLEEVRKEVKKEIDDWRARDEEHHRDVKRREEEWERKDEEHHRKVEEVIERLKRELK

SEQ ID NO: 4783 - protein, 178 aa, Artificial Sequence; identical to SEQ ID NO: 4782
  Synthetic

SEQ ID NO: 4784 - protein, 177 aa, Artificial Sequence
  Synthetic
SVEELIKEVEERLKRLKEHSEDLAREVRERHKKLIEELRRILEEVKKRHKDLTEKLEKDGGSEELLDRIRRNVEKSKRELERVLREAEKNLERSDEELKEYLDRLRKRLERVREELKREPADEEMKKRVEEEEKKWKRDDERLEKRVRENIERLRRLLERLRKRVEDNIKRLDDERR

SEQ ID NO: 4785 - protein, 177 aa, Artificial Sequence; identical to SEQ ID NO: 4784
  Synthetic

SEQ ID NO: 4786 - protein, 177 aa, Artificial Sequence
  Synthetic
REEDLIREVERILEELLKHSKRLIDEARDSHRRLLEHSKRLVEEVERLHKELLDRARENGGSEELLTRIKKNIDESRKELKEYEDDLRRNLRESDERLRRYLDDLRREKKEVEDELRRRKADDRMREEVRKTEERWRDKDRELEKRVRDNERRWEDRDRKLEKRVRDNIKRLRDELE

SEQ ID NO: 4787 - protein, 177 aa, Artificial Sequence; identical to SEQ ID NO: 4786
  Synthetic

SEQ ID NO: 4788 - protein, 177 aa, Artificial Sequence
  Synthetic
KAEELVEKVRRDLEALLEHSKTLAEKVRRDHRKLKEELKELLERVKRRLEELKKRLEDSGGDEKKLRELERRLKEVEKELRKVLEDIDRNLRRSDEELKKYLEDLRERLKRVEDELRREPADDELRKKVDEDRRRWEEDDRRLEKRVRENLRRLEKIIKDLEDRVRREVEKIDKDRK

SEQ ID NO: 4789 - protein, 177 aa, Artificial Sequence; identical to SEQ ID NO: 4788
  Synthetic

SEQ ID NO: 4790 - protein, 177 aa, Artificial Sequence
  Synthetic
DREKLIEEVKDRLRRLLKHSRELLKEAEDRHRELLKHSERLVRESERRLEELLRRARKSGGSEELLKRIEENVRDNKRRLDKYKEELRRNLKASKEELDRYEEELRRRLKEVEDELDKKEADDEVRKEVKKDEDDWRKADDDLRKRVEDNVRRWEERDRELKERSERNLEKLERERK

SEQ ID NO: 4791 - protein, 177 aa, Artificial Sequence; identical to SEQ ID NO: 4790
  Synthetic

SEQ ID NO: 4792 - protein, 177 aa, Artificial Sequence
  Synthetic
SREDLVRRVDKALRDLTRHSEELMRRSDETLKELLKHSRRLAKESEDRLKELLDEARERGGSEELLKRIKENVDKNKEELEKYIRDLERNLKENRERLKKYEDELREELRRVKRRLEEEEADERLEEKVRREEEEWKKKDEELKKRSEKNVDEWRKRDDKLRRDSKRNLDKLREEIR

SEQ ID NO: 4793 - protein, 177 aa, Artificial Sequence; identical to SEQ ID NO: 4792
  Synthetic

SEQ ID NO: 4794 - protein, 180 aa, Artificial Sequence
  Synthetic
SLVDEIRERVRRLDEDVRRLIEEIEKRIREIDKRAEDLIRKIEDDSRRTLEEVAKQPRDEEVLERVERIARDSLRLLEEVIEEVRRIAEKTRRDLTRVIEEVKRTVTDSIRKLEEVIERVKVEELEKVVEENERSLRELVKTLEDVLRKNDKTVKELEKRLREVLDRTRRFMEELIRRAR

SEQ ID NO: 4795 - protein, 180 aa, Artificial Sequence; identical to SEQ ID NO: 4794
  Synthetic

SEQ ID NO: 4796 - protein, 180 aa, Artificial Sequence
  Synthetic
SLKDKIREDSERTLKTVERLLREIEKEIRKLDRDIERLIEEIRRRIEKLDKDIERQPRDDEVLKRVEDIVKKTRELIERVIEEVEEILRETKELLDTVLKEVERIIRESERRLREVIERVKVEELEKVLKDTRDEAERLKEEVRRVLEDNDRTAKELRKTLEEVLKRNEESARELKKRIT

SEQ ID NO: 4797 - protein, 180 aa, Artificial Sequence; identical to SEQ ID NO: 4796
  Synthetic

SEQ ID NO: 4798 - protein, 170 aa, Artificial Sequence
  Synthetic
DEERRVEEELREVDKRLKKLLEESKRKLDEVIRRVREVVKKLKKRLDDVNRLVARDVKSEELERLLRESSEEVKEVIKKLKRLLEKVLREDEKSVDEIRREAEEVLKRVRDAGIDEKILRTVEKLVRDIERELRETNKRVREDVEKIIEDLKRILEENDKRADDWRRADK

SEQ ID NO: 4799 - protein, 170 aa, Artificial Sequence; identical to SEQ ID NO: 4798
  Synthetic

SEQ ID NO: 4800 - protein, 170 aa, Artificial Sequence
  Synthetic
DESEEVARELEKVDRDVDKLVKDSRKELEDSNREVEELLRRSTERLKEVNTLVARDVRGEELEELLERLDRENEETIRRVEELLRRSLKKNEETLERLERLAKELLERLKRAGVDEKLVREVERRVEDIKRKAEKTLDDNRKLIEEWVRRLEKSLEDNRRLAKKWKDEDK

SEQ ID NO: 4801 - protein, 170 aa, Artificial Sequence; identical to SEQ ID NO: 4800
  Synthetic

SEQ ID NO: 4802 - protein, 178 aa, Artificial Sequence
  Synthetic
SELDELKKEVDDVAREVRRHNKKLEEEVEREVRRMRRHNEENVKRVEESAKEARKDVDREELLRRLEKLVEELRKLNEESLRKVEKLAEEIADVLRRSKKAVDEVVREIARLLEEVKRRNEDLREVKKLVEEVTRRLERINKELERLIREVRKRMERVNDELHKRNRDVERKLREVVR

SEQ ID NO: 4803 - protein, 178 aa, Artificial Sequence; identical to SEQ ID NO: 4802
  Synthetic

SEQ ID NO: 4804 - protein, 171 aa, Artificial Sequence
  Synthetic
SELEALEEDVKRVVKEIKDHNEKLIRELEETIRRIDRHNDENIRRTEEEIKRVLDKKPDVKEIEEVLKLAKEVNKRSKEEVKKVAEEVKRVLDESRKRVDRIVEEAKRVLERGLPEEDLRRLLEKLKEDLRKVNEDLERLLREAKRRLERVNEKLHELSRRIREKLEEVDR

SEQ ID NO: 4805 - protein, 171 aa, Artificial Sequence; identical to SEQ ID NO: 4804
  Synthetic

SEQ ID NO: 4806 - protein, 171 aa, Artificial Sequence
  Synthetic
SELEKLVEKIKERVERARRHNERLREDVERVLTESDKENKDLIDDARRAVKEVLDRKPDVREIEKLIREIEEVLKESKRLVKEIADELRKVLDDSKRLVDEIEEKVKRVADRGLPEEELDRLIREIIKELEDVNRTLRKLLEEIKRRSKDVNRDLRRLLEEIKEKLRRKSK

SEQ ID NO: 4807 - protein, 171 aa, Artificial Sequence; identical to SEQ ID NO: 4806
  Synthetic

SEQ ID NO: 4808 - protein, 184 aa, Artificial Sequence
  Synthetic
SEIDELKKDVERRVREVEETNRRLEKEVRERLERSRKHLKELIEDARREVERVEREVKEDEVLRLLRELARELEEMLKRVEDESRRVAKELERVIKESEERIKEVVKELKDVLDEVRRLMKEDDKKKVLDELKKVIKEVEDRLRKIDEELKKVIDEVRKELEKINRDLERVIREVKKRAEEVRR

SEQ ID NO: 4809 - protein, 184 aa, Artificial Sequence; identical to SEQ ID NO: 4808
  Synthetic

SEQ ID NO: 4810 - protein, 184 aa, Artificial Sequence
  Synthetic
REIEELAKTVRKEVDDSRKHLKELREDAKRTLDEVKRETKKLEEDVRREVERVKREVKEDRVLEELEKLVEELKTVLERIKRKDEESARRLEEVLKRIKEESDRVVRELERVLRDVRRLVEEDDKEKVLRELKKVIDEVRKLLEDINRELEEAIRDVKRKNEDTLRELRKVIKEVEKRLKDVTR

SEQ ID NO: 4811 - protein, 184 aa, Artificial Sequence; identical to SEQ ID NO: 4810
  Synthetic

SEQ ID NO: 4812 - protein, 173 aa, Artificial Sequence
  Synthetic
KEVEDVVRELKKSLEENEKRVRDIERELREVVKKIAKRVEETREEVERMLEEIRRRSGEDEIVKEITEVVETVVRLDRESLEELKRVVDRIVELLKKNVEDLKRAIEEVERLLREDDIKKVVDEARKVLKEVHENTERIVDEARKLLKRMEEKNRKTEEDIRRVADEVREKAR

SEQ ID NO: 4813 - protein, 173 aa, Artificial Sequence; identical to SEQ ID NO: 4812
  Synthetic

SEQ ID NO: 4814 - protein, 173 aa, Artificial Sequence
  Synthetic
SKVDKVREEVTRSLEDNKRKVEEIEREARESLERNRKKVEDSIREARKVVEEIERKKGQDRIVEEVRRVVEENERRLRENVRELRKVLEDIRRLLKRNVDELERVVREVRDLLEKEDIDTVTRRIREVMKKVHDNTRRIAEELRRLMKRVHDNTERSHEELKRLLEEVKRKAD

SEQ ID NO: 4815 - protein, 173 aa, Artificial Sequence; identical to SEQ ID NO: 4814
  Synthetic

SEQ ID NO: 4816 - protein, 173 aa, Artificial Sequence
  Synthetic
REVEEVVKELKKSLDDNRDEVRKIIEEVTRLNKRNEEDVKRVTDEAEEVVKRIVEKKGDDEIVRKVREVVREIKERLDRVVEENKKVVDEVVKYLKENVEDLERVVRTVKELLRRDDIRKVVEEARRLLERVHRNTKRVADEIRKLDKRSSELLDKILKDLRKLLEDVEREAR

SEQ ID NO: 4817 - protein, 173 aa, Artificial Sequence; identical to SEQ ID NO: 4816
  Synthetic

SEQ ID NO: 4818 - protein, 181 aa, Artificial Sequence
  Synthetic
DEKDEVRRRVDRELEDVHRETKKSSDDDKRLLEDVHRKLKESEKEVRRIADEVRKKLEDVRRREDLERVARELLRELEEVVKENHKSVRKSLEDIERSARTNRDIVEKTLERIERVLEEIARRIKVREVLEKIKRSLDENKERVEKSKKDSDDSLRENKDRVDKTDEEAKEMIKDLKRKTD

SEQ ID NO: 4819 - protein, 181 aa, Artificial Sequence; identical to SEQ ID NO: 4818
  Synthetic

SEQ ID NO: 4820 - protein, 181 aa, Artificial Sequence
  Synthetic
DEKEKVTREVRRILEEVDKRLEESRERVERIAEEVHRRTEESHRRDEEVVERVKEELKEARRDSRLKDVVRELLRKVEKSARDNKRIVDTTLKLIERVIRENHKSVTKLLRELEDVIRRLKEEINVREVLEELKRELRRLEEDVRRTDRKLEESLKDNERKVRRSKEESDRLLRELEERTR

SEQ ID NO: 4821 - protein, 181 aa, Artificial Sequence; identical to SEQ ID NO: 4820
  Synthetic

SEQ ID NO: 4822 - protein, 181 aa, Artificial Sequence
  Synthetic
KEVEDVRRRVEKILEEVHKKTREVTERVRRILEEVHRKTEESHRRDEEVMRRVRDELEKARRREDLERVVRELTKRVEDSLRENEKIVERTLEEIEKVLDELRKIAEDTLRLIAEVLRRAKEEINVREVIEKVKESLRENERRARKVEKEIRDSLERNRERVEDSKRTSKKLIEDLREAVR

SEQ ID NO: 4823 - protein, 181 aa, Artificial Sequence; identical to SEQ ID NO: 4822
  Synthetic

SEQ ID NO: 4824 - protein, 181 aa, Artificial Sequence
  Synthetic
DEEKELVRELRDILKKVHKETKESSDTDREVLKRVHEDTERSHRDDERVVEEVKKELDKIRDREDLERVVRELLEIVKRSAEENKRIVEETLKEIERSARENERIVRETLDKIRKVIEELRRRVRVREVEDEVRRSLEDNRRRVEESKRRSDESLRRNKRKVERSKEESDRLLKELEDEVR

SEQ ID NO: 4825 - protein, 181 aa, Artificial Sequence; identical to SEQ ID NO: 4824
  Synthetic

SEQ ID NO: 4826 - protein, 175 aa, Artificial Sequence
  Synthetic
REVEEALKRNEAVVEESREAVERALRENETMVRESEKEAKRVKDENRKSIEELKRSNVSDRVERTLRETLKELEKVVEELKDIHRRTSERLKDVARKLKKIHDDTRKELEDFGDVPEEVLERVVRKLKELDDKSREDLEKVKKELRDVDTRSEELLREVEKRLREVDDRLRREEE

SEQ ID NO: 4827 - protein, 175 aa, Artificial Sequence; identical to SEQ ID NO: 4826
  Synthetic

SEQ ID NO: 4828 - protein, 175 aa, Artificial Sequence
  Synthetic
SEVEEVEKENKKMVEESERELEKLERENDKLLKESEDEARKVEEELKRVVEELDRSNVSEEIREELKKAIEKVKRVLDDVLRKHEETKKELKEVVKELREIHKRTSDELRKFGEVPEEVLREVVKDLRRVDKESKERLKRMADKLRDVDRELKEKLKRALEDLRRIVTELRERAR

SEQ ID NO: 4829 - protein, 175 aa, Artificial Sequence; identical to SEQ ID NO: 4828
  Synthetic

SEQ ID NO: 4830 - protein, 180 aa, Artificial Sequence
  Synthetic
DEVETVTRELEDTNRDIEKKVEEVERELRKTDREIREKVKRVEEELTRSDRELAEIVKKKNTEDRIVKEVVRLNEDIVRRLREVVKEVEELNKRAVERLREVVKKVKRLNREIVEELRRVRGEDVKRIVEKARKINEDVRREIEKITEEVRRINEEVDDRIRRIAEEARRINEKVKRRLT

SEQ ID NO: 4831 - protein, 180 aa, Artificial Sequence; identical to SEQ ID NO: 4830
  Synthetic

SEQ ID NO: 4832 - protein, 180 aa, Artificial Sequence
  Synthetic
KEVDDVAEELRRTNKEIKDRVKDVLRELEELLTDIEKTVRDVERELRESDERLEREVRRKNTSDDIVREVKELNKEIVERLKKVVEEVTRRLKKLVDEAEEVVKEVVDLNREILKELRDVRGEEVRRIVEKARKINTEVKKKIEEIEKTVRKILKEVRKIIKDIRDEARRINEEVRKKLE

SEQ ID NO: 4833 - protein, 180 aa, Artificial Sequence; identical to SEQ ID NO: 4832
  Synthetic

SEQ ID NO: 4834 - protein, 180 aa, Artificial Sequence
  Synthetic
KEVEDIVRELEEEVEKIRDHSRRVSEELDKSVKDNKRRVDEVKKTLEKSVRDIRRKVRDDSLREIVERLKEKVDRMVRRLEEITEELEDKVRKVVENSRRIVKEVEDKVREVVRELERIKDGEVLKDVARRAREMLEEVRRKDRENTERARRLLEEVHRRTEEVERRAREVLKKADEDVK

SEQ ID NO: 4835 - protein, 180 aa, Artificial Sequence; identical to SEQ ID NO: 4834
  Synthetic

SEQ ID NO: 4836 - protein, 185 aa, Artificial Sequence
  Synthetic
SELDELRKRVRDLDERLKESDDTLRKLVKELIERVKKSDTELERLVERVIEEIERVLRDRKDSSEEVRRLLDTLRKIIEENIKRSTDLAREVTRIIEENIKTSRRLAEDAERTLEEVIRRLKDKSVKDRLRELEEELRKRMKESDERNRDLRRRLEEMIKDSKRTNDELKKRVEKVAREAEEKLR

SEQ ID NO: 4837 - protein, 185 aa, Artificial Sequence; identical to SEQ ID NO: 4836
  Synthetic

SEQ ID NO: 4838 - protein, 185 aa, Artificial Sequence
  Synthetic
DELERLEEEVEEVRRRLEKSDDDLRKLVDEVERRLRESDKRLHDLSEEVIRRIEDVLRKNRELRERLRTLAEELERISEENMRRVERLLEELERIIEENIKKVEELAERLRRRVEDVVRRLKDKSVKDELRKLKEKIKKVADESRRRNEELRRKVDKVIKDSRETNKRNTEEVRKVAKDVDDTVK

SEQ ID NO: 4839 - protein, 185 aa, Artificial Sequence; identical to SEQ ID NO: 4838
  Synthetic

SEQ ID NO: 4840 - protein, 174 aa, Artificial Sequence
  Synthetic
SEEERIAKEAEDLVRRVKENNARTIKEAREVARKVEAETKKIHDDARKLVEDVKRKVERRGVEELLEELREMVERSKKLSEDNVRESRRVSKEVKERDTESLKRLRDLVREVIKKVDKVRELKERLERVIKEIEETIRRSARELDEVNRRNEKMVKENEDELRKVIEEIERRIR

SEQ ID NO: 4841 - protein, 174 aa, Artificial Sequence; identical to SEQ ID NO: 4840
  Synthetic

SEQ ID NO: 4842 - protein, 174 aa, Artificial Sequence
  Synthetic
DEEEEIKKELRRVAEDVKRETKRIHEEIRRVLKEVKERLKRVHDELRRVAREVKEKLKKRPVERILEELRKVVKDSEDLSRRILEEIRRVVEESRKRSEDNVRESRRVVEKVIRDVDKVRELTEEAKKLIKENEEEIERNEREARKVIEELERVVRTNKEDVKRVEKEIEDATR

SEQ ID NO: 4843 - protein, 174 aa, Artificial Sequence; identical to SEQ ID NO: 4842
  Synthetic

SEQ ID NO: 4844 - protein, 178 aa, Artificial Sequence
  Synthetic
KEVEEIAKEAEDVLRRLDETVKEIADEAREVLRRLNESSKRIEEEARKAIKELRDRAREKEEILREVVEKLKRVIEELKKTDEEVERKLREVIKRLKDTNDEVRKKLKEAIDRLREITDKDELRKILKEVRDVLEEVKRRNEDILRRLRKIAEEVKRRNDKIREELERVLKEAEDRLR

SEQ ID NO: 4845 - protein, 178 aa, Artificial Sequence; identical to SEQ ID NO: 4844
  Synthetic

SEQ ID NO: 4846 - protein, 177 aa, Artificial Sequence
  Synthetic
SRLEKIKDDVKRLDDDSRRTLEEVHRRNKETARRVERLLEEAHRLNKKTVDEARSKPNDEDVARRLREIVKESLKLSKDVLKEIKDILDKSLKDSEDVVRLNEDILRKIERTVDSVERSDEIRKIKTDVKEMVKKNREDVKRNNEDVKRVEDKLRKELKKNDDDVRRVLEELERRLR

SEQ ID NO: 4847 - protein, 177 aa, Artificial Sequence; identical to SEQ ID NO: 4846
  Synthetic

SEQ ID NO: 4848 - protein, 180 aa, Artificial Sequence
  Synthetic
SEIEEVTRRLEELVKTVREVLREAHERTRRLVEKVRKLIEDVIRTNRKIKERVRELLERVRSEELKRLVEEVAEEMKKSDKELRDRVRRVVEELRRVTEEVRRLVEEAAKELRRVVDELKPGDEIRKLRRRVEEVVRELEEELEKDRREVEKVIEELEREVDRSNEETRRVVKRLREEVE

SEQ ID NO: 4849 - protein, 180 aa, Artificial Sequence; identical to SEQ ID NO: 4848
  Synthetic

SEQ ID NO: 4850 - protein, 174 aa, Artificial Sequence
  Synthetic
REKEEVRRKLREAERRVEEIDRRLEKLIRDVKRRVEEADRESEETSDRVRKEVERVDRRGERFEDLLRIVRRVLEENKRRLDETLEDVRRVVEEVERLVEETLRTVEEVIKELERDGVDEEVKERLKKVLEDNRRSIDELRRRIEEVLKENKRTVEEDKKRLEKVLEDVERRAR

SEQ ID NO: 4851 - protein, 174 aa, Artificial Sequence; identical to SEQ ID NO: 4850
  Synthetic

SEQ ID NO: 4852 - protein, 173 aa, Artificial Sequence
  Synthetic
SDTEEVEKLTEEIVREVKRLDEEVKELIKEIRKESRRTLEEVRRLIEEVRDRVEKISDDEKVRRLLKKVIEEVEEIARRSLRLLKEVIDEVRRIVEESKELLRRVIREVEKRVDSKDLERLRRELEEVLKENADSIRKLETELRDVLRRTREEAEKLKEELKDVLRRVEEKAK

SEQ ID NO: 4853 - protein, 173 aa, Artificial Sequence; identical to SEQ ID NO: 4852
  Synthetic

SEQ ID NO: 4854 - protein, 179 aa, Artificial Sequence
  Synthetic
DEERKIREEAKRADDEIRRLLEENKRALDESNKRAEELVKRLADEVREALKRIEDLLRERPRKEMEDLLRDLKRVLEEIKEELKKVLEDNRRVSEESKRRLEKVVRELRELLKEIEDLVKKDDVKKVVERLRRLIKEVKKRLEKIHEDSRRMVEESEKLLKEIVRKLRELIKEVEDKVK

SEQ ID NO: 4855 - protein, 179 aa, Artificial Sequence; identical to SEQ ID NO: 4854
  Synthetic

SEQ ID NO: 4856 - protein, 179 aa, Artificial Sequence
  Synthetic
DEKEDLKRTAEESDREAKKLLDENRKRLEESNKKAEDLVRRNEETLRKVDTDIKDLLRKRDTERAKRLVEELERVVRESLRLLRELLERNRELSKESLKRLEEVVRRNHELLKRIEELIDRDDVKKVLDELRRLVEESKELLKRIHDESEKMVEDSERLLEEVHRRSREVVERVREKIR

SEQ ID NO: 4857 - protein, 179 aa, Artificial Sequence; identical to SEQ ID NO: 4856
  Synthetic

SEQ ID NO: 4858 - protein, 179 aa, Artificial Sequence
  Synthetic
SEKDRLSKRAAESDEELERLVRRNAEELDRSNKEIADLLKESKDTLKRAEDEIRRLLAERDTERAKKIVRELEERLKEVEKHDRRSLEENTDVTRKSKERAERVLRENHRVLREVRKLIDEDDVEKVLKELEDVVKKSKELLERIHKESKEMVERSKRNNEKSLEDVRRLIERVLEKLK

SEQ ID NO: 4859 - protein, 179 aa, Artificial Sequence; identical to SEQ ID NO: 4858
  Synthetic

SEQ ID NO: 4860 - protein, 179 aa, Artificial Sequence
  Synthetic
DEKRRLKEEAKKSDDELRKLVKDSADRLEDATRRIEELLRENAKRLEEAEKRIREELDKRKRERMEKLLEELRKVVTDSKEAARKVVDDLREMLKRVKEHDRRSLEENHRVLREVEKLIDEEDVEEVLRRLKDLVERSKENNKRSLEEVERLIKEVEERLKRIHDESEKVVRTVEERLK

SEQ ID NO: 4861 - protein, 179 aa, Artificial Sequence; identical to SEQ ID NO: 4860
  Synthetic

SEQ ID NO: 4862 - protein, 185 aa, Artificial Sequence
  Synthetic
REAEEIKKRLERVREEVEKELERIHRETDKIAKDVKRELDEIDKESKKVAEEIKKVAEEIKDKEELKRRVDEVTRELERLNEELERIVREVVRRLEALNERLEEIVRRVVETLRRLVEEVVRRTGRGSKVDELKRRVEEVKRDLERKVRENNETIKKVKEDLRREVERNHKTIEDIKRELDERVR

SEQ ID NO: 4863 - protein, 185 aa, Artificial Sequence; identical to SEQ ID NO: 4862
  Synthetic

SEQ ID NO: 4864 - protein, 185 aa, Artificial Sequence
  Synthetic
SEAEELLDRIRRVAEEVKRRLEEIHRTTRDIVRRIEELLKEIHERTREIVERIKRVLEKIKDKDTLREEVKRVVKELEKLNKELEDIVRRVTRELERLNEELERIVREVAEDLKRLLEEVRRRTGDGDKVKRLEEEIRKIKRELEKIVRDNNEDIKRAKERLRKINKRNHDEIKKVKDELDETVR

SEQ ID NO: 4865 - protein, 185 aa, Artificial Sequence; identical to SEQ ID NO: 4864
  Synthetic

SEQ ID NO: 4866 - protein, 185 aa, Artificial Sequence
  Synthetic
SEAEDLRRRIEEVARRVAEKLKKINRDTERIVRDVKKKLEEIHKRTEEVAEEVKEVLRRIKDKDTLRKVVEEVAEELRDLNRKLEEIIRRVADELRKLNEELKRIVDEVVDELRKLIKEVVDRTGPGDEVEELRKTIEDIRRRLEEEVRRNHDEIRKAEEELRELNRRNHERIKEIKEELDREVT

SEQ ID NO: 4867 - protein, 185 aa, Artificial Sequence; identical to SEQ ID NO: 4866
  Synthetic

SEQ ID NO: 4868 - protein, 183 aa, Artificial Sequence
  Synthetic
SEVEKIDKRAKEVEKELEESNRRNRERIKEADERLRDLLRRNKEEIDRARKRLDEIVRRDEKDEVREIVRELDERLKDMNARLKEIVEELRRLLKEINDEDRRIIEELKRLLKKILEDAARLTDKKRLKEVERRMEEIVKTVKKRSEDSHRESDEIVKRVLERLRKVHEETKEIVKRVEDRLR

SEQ ID NO: 4869 - protein, 183 aa, Artificial Sequence; identical to SEQ ID NO: 4868
  Synthetic

SEQ ID NO: 4870 - protein, 174 aa, Artificial Sequence
  Synthetic
EEAERIDKKLEDEVREVERELEDVHRKVKEILEDVKRKHKKVHDELKKVIDEVKRKLEERPDERIVRELKEKLRESNERLNRLTEKVKKELADSNKLLEDIVRRLKERLEEVIREVDKIKELEEKVRRIVRKLERRVEKNKDDTRRAVEEAEKLNEDNKRTSEKVEEDLRRTTT

SEQ ID NO: 4871 - protein, 174 aa, Artificial Sequence; identical to SEQ ID NO: 4870
  Synthetic

SEQ ID NO: 4872 - protein, 174 aa, Artificial Sequence
  Synthetic
SEAEEIVRELRKAVEDVAREHKRIHEEVRKAAEDVKRKLKEILDRLERVVEEVARALEERGNEEIVETLKRKLEEAIKRARDVLDELRRKLEESNKALNRLSETLEKKLEEVIRRVDKIDELREEAKEVVRDVRRLNEENRKATEDILRELKEIVERLERRAREVVKELKERAR

SEQ ID NO: 4873 - protein, 174 aa, Artificial Sequence; identical to SEQ ID NO: 4872
  Synthetic

SEQ ID NO: 4874 - protein, 174 aa, Artificial Sequence
  Synthetic
DEREEIRRRLREDVKRVKRRLEEIHDEVRRLLEEVDRRLRKVHKELKEEVTEVEKRLRERPDKRIVEELRRRLKESIERTRKILETVAKKLRDSNRKLEKVVKDLKKRLDDVIRAVSDVRELKKEIDDVRKELEETVERNKRETERALRKAKEDLDRNREEVKRVVDELEKRTR

SEQ ID NO: 4875 - protein, 174 aa, Artificial Sequence; identical to SEQ ID NO: 4874
  Synthetic

SEQ ID NO: 4876 - protein, 174 aa, Artificial Sequence
  Synthetic
SEKDEIRDELEKILRRVEELNRRIRKKLEEIRKEVERLLREIHEKLEEVVKEVEEKLRERPDSRIVKELKDKLRESIKETADVLRKLEKKLRDVIREIRKTNKEVEEKLRDVIRRVDKIEELKRRVEEVLKRARESLRELEEDVRRVLEEARKELERNRERVERVLRRLEETVR

SEQ ID NO: 4877 - protein, 174 aa, Artificial Sequence; identical to SEQ ID NO: 4876
  Synthetic

SEQ ID NO: 4878 - protein, 179 aa, Artificial Sequence
  Synthetic
DEVEDLERRLKEVVDRSRRLDEELKRRDKKSVEDVRRKLEEVRKKLEDVARKLADLLRQGRDAKRVLDEIERVVRDVERVLEEILRDVKRSIDEVREVAKASLKLTEEVIRRVRKVAKERGVPLEKLERDVARAREENDRTLKEISKHSEKVLREVADMARKLRKEVKRIEDEIRERAR

SEQ ID NO: 4879 - protein, 179 aa, Artificial Sequence; identical to SEQ ID NO: 4878
  Synthetic

SEQ ID NO: 4880 - protein, 184 aa, Artificial Sequence
  Synthetic
KLVEEVKREIEELVRRLEEVLDRVRRENERLAEELKKVVKDVEDNNERIARTVTELLKKVDSKELERLLRKVVEDSRKSVKDLEKLLREFVRRSEESVKRLEDELRKMVETVRRVVEKLERDGVPKEKVDELKRDVDRAEEKVRELIERIKRRSEEVKKRAEELLKKLEDDSRRVKKKLDDDAR

SEQ ID NO: 4881 - protein, 184 aa, Artificial Sequence; identical to SEQ ID NO: 4880
  Synthetic

SEQ ID NO: 4882 - protein, 184 aa, Artificial Sequence
  Synthetic
SEVDEVRKEIKRLADEAREVVKEVRKNNEKIADDSRKLNERSIRESKKVTDTVRELLKRVRSRELDRLVKEVVERSNEIVEESERLVREMNKRSDDSVEKLREVLERIVRELERVVEEAARAGVPEERVKELKERVDEVSKELRDLLKKLRDDSERVVEENEKLLRELKERSDRATKELDDASK

SEQ ID NO: 4883 - protein, 184 aa, Artificial Sequence; identical to SEQ ID NO: 4882
  Synthetic

SEQ ID NO: 4884 - protein, 184 aa, Artificial Sequence
  Synthetic
KKAEKVDKEIEDLAREVREVLKEVEKDSDRLVKEVEDVLRRVKENNEDIRRRVSELDRRVRSEELRRLVKEVVDRSDESVRRLEELLKRAVKRSDDVVKKLEDELREIVKELRRVVEELERAGVPEESVERLRRKVKEIEDELRELLERLRKKSEDAKRKLRELLERIKRDSERAKRELEERDK

SEQ ID NO: 4885 - protein, 184 aa, Artificial Sequence; identical to SEQ ID NO: 4884
  Synthetic

SEQ ID NO: 4886 - protein, 184 aa, Artificial Sequence
  Synthetic
DTAREVKRKVKEIADEVRELIRRVHEETKKTSETVKKLIKEVHDTTEKIVREVRKLADEVDSEELERLVREAVRRLEETNRRLRELVERVVRENEKSSDELRKRVEEVVRRLRKVVKELDDAGVDKKLVEELKREVDRISEELKRLLERNEREVRESKKTLERDLERNHEEIERAKRELDERVR

SEQ ID NO: 4887 - protein, 184 aa, Artificial Sequence; identical to SEQ ID NO: 4886
  Synthetic

SEQ ID NO: 4888 - protein, 184 aa, Artificial Sequence
  Synthetic
REVDEVRKRVEKVAEEVRRLIEKVHRETERTSREVEKRIRDVHRRSDEVAREVDDLSRRVDSKELKELVEDVARRLEEINRRLEKLVKEAVDTNRESSERLRKLVREAVEKLKKIVEELDRRGVDKKMVRTLAERVKEISEELKRRLKRNKDEVEESSRRLRELLKRNHDEIRRIKEKLKEETR

SEQ ID NO: 4889 - protein, 184 aa, Artificial Sequence; identical to SEQ ID NO: 4888
  Synthetic

SEQ ID NO: 4890 - protein, 178 aa, Artificial Sequence
  Synthetic
EEVDRVKRKLEEVEKRVTEISKRTEELVEEVRKEVERISKRTEEDDRRVAKEVRERLKSGKDLKRLVDEVRRLLEETNRDNKRVIDEVVRELEEINERNKRVIDKVEEELKKIVEEVKRAEKAKEIKEKVDEVIERLRRSNRKLHERIREVEKKLRELNERLHRHSREVIKELEERAR

SEQ ID NO: 4891 - protein, 178 aa, Artificial Sequence; identical to SEQ ID NO: 4890
  Synthetic

SEQ ID NO: 4892 - protein, 179 aa, Artificial Sequence
  Synthetic
KEVEDILRDLERLSEESLRRNEEIHRELEELLRRVDEKNREIHKTLEEMVRRALTELRKRPDERILDELRRVLEEVLRLSEESDRELEDVLKKVLELSKESLDRNKKLLDEVRERIRTADEKVVREVDRRVEESRKRLEKLLRENEKRVRDARRRARKLSEENERTVREVEKRAREEVK

SEQ ID NO: 4893 - protein, 179 aa, Artificial Sequence; identical to SEQ ID NO: 4892
  Synthetic

SEQ ID NO: 4894 - protein, 179 aa, Artificial Sequence
  Synthetic
DEVEEIKRKLDKVADESRKLDEDIRDKLRRVADEIRRLHEESRKELEDVVREIERLLRERDIKEVLKRLKEMLDRIIRRDEEILKRLREMLKKVIEEIERSIERSRKLLEDVLREAKDVPEKVIKEVRDTVEKILRENEKSLEEVRKTVKRIEEESRELLETSRDEVRRVLEKAEETEK

SEQ ID NO: 4895 - protein, 179 aa, Artificial Sequence; identical to SEQ ID NO: 4894
  Synthetic

SEQ ID NO: 4896 - protein, 185 aa, Artificial Sequence
  Synthetic
SVADEIRKDLKRVADEVEERLRRLLEHNKKVRDEVKERVDESKKELKEVEEEVTEKLERIKEKERVKKVIDDVTKRMREIVEKNRRVSEEVKRLSEENVRESRRISDKVRKDLKRILDEIRRAGVDEKVVREIEERIRRVIRRLDEVDKTNEKISRDAARELEESDEELRRRVKEVKDRLDEKTK

SEQ ID NO: 4897 - protein, 185 aa, Artificial Sequence; identical to SEQ ID NO: 4896
  Synthetic

SEQ ID NO: 4898 - protein, 185 aa, Artificial Sequence
  Synthetic
DEAEKIKKELDDVAREVERRLKELLDDNRRVAEEVEKRLRDSKRELEEVTRRVRKELERIKNKEDVKRVVDEVVKEAEDILRKNEEVIRRVKDLSRRNVETSKRISEEVKRLLEEILKKAEDDGLDKKLVDKIRDDIRRIARRLDEMNKKNKKLSDELEERLKKSNEEHRRRVEKVKEELEKKVE

SEQ ID NO: 4899 - protein, 185 aa, Artificial Sequence; identical to SEQ ID NO: 4898
  Synthetic

SEQ ID NO: 4900 - protein, 185 aa, Artificial Sequence
  Synthetic
SEAEEIEKELREVAKEVRELMREMLKNNKEVAEEVKRRLERSRERLEEVEETVRDLLEKIKDKKTVRDVIRTVKKLLKEILDRNKKVIDEVKELSRENVKRSEDVSRDVLRRLEEILRKVRAAGVDDKVVKKIEDDIREVEKEARKLNRENRELSKKLAEELDRSNDRHRREVERVERELEKAER

SEQ ID NO: 4901 - protein, 185 aa, Artificial Sequence; identical to SEQ ID NO: 4900
  Synthetic

SEQ ID NO: 4902 - protein, 184 aa, Artificial Sequence
  Synthetic
SLQERVRDKVRKVKKDLEDLNRRHREEIERVVRELDKSNEDHEREVRRVEKELEELIRRNKERDEIREVVEELRKLLEEVLKENSDVIRELRELLKELHEKNRKVVKELDDLLRDVIDKLEKINDKKFVEDVDRALKRIADEVKRRSEESKKELDDIKKEVEERLRESKEKLKRIVDEARERLR

SEQ ID NO: 4903 - protein, 184 aa, Artificial Sequence; identical to SEQ ID NO: 4902
  Synthetic

SEQ ID NO: 4904 - protein, 175 aa, Artificial Sequence
  Synthetic
SELEEVIKRAEDELRDDERENKRVLEKSDRDIKRWEEEVKRVLKKARDELDKLRKEGIDEKVLREVEKIIRDVEEEIKKILEELRRITKKVEDESREILERVRRVIERVRRRANEDKDVVEKLREELEKVLKESRDESKRLKEELDKVNDDARKRLEDLMRKLERVLEEVRRRRK

SEQ ID NO: 4905 - protein, 175 aa, Artificial Sequence; identical to SEQ ID NO: 4904
  Synthetic

SEQ ID NO: 4906 - protein, 175 aa, Artificial Sequence
  Synthetic
SELERVIEEIRRALEEDHERNRDVLREAKEELERDKRRNDKVLTDIRKLVKDLERKGAPEDVLRELEEIIDRVLKRSEKILEEVKRVIDKVKRDSERINKEVEEMIKRVEERANEDEETVRRLTEELRKVLDEVTKRSKELSDRLREVLRRSKELSKELEKELRKVIKEADDRVK

SEQ ID NO: 4907 - protein, 175 aa, Artificial Sequence; identical to SEQ ID NO: 4906
  Synthetic

SEQ ID NO: 4908 - protein, 175 aa, Artificial Sequence
  Synthetic
SEIERVLKEARDELRKDEEKNRDLLRRAKKVIEEDHKRNRDVLRRVKEELDRLREAGVPEEVLKRVRKALEDVRKESERLNEELRDVLRRVAEASRRILEEVRKIIEDVERRANEDKDALDRLRRELEEVLRRSKEESDRLAEELKRVLREIEERSRRLAKELKEVLDTAKRDKD

SEQ ID NO: 4909 - protein, 175 aa, Artificial Sequence; identical to SEQ ID NO: 4908
  Synthetic

SEQ ID NO: 4910 - protein, 174 aa, Artificial Sequence
  Synthetic
SELERVIRENERTIREDMKKNEDVLREWEKLTRDLEDTIRRVLKKNRESLKRLKDKGVPEEVIKELEKVSEEIRRRLEEIIRDDRRVLKEAEKRSRDLLRELKKISEEAVELLRRNVDRRELVKRLRDVDERSDDTSRKLKEELERVIRRTEELIRRVMEDAKRVDDEARKKTD

SEQ ID NO: 4911 - protein, 174 aa, Artificial Sequence; identical to SEQ ID NO: 4910
  Synthetic

SEQ ID NO: 4912 - protein, 174 aa, Artificial Sequence
  Synthetic
SKVEEVLRELERRVKEDEDENRKVVRENERTVKEDEDTNRDALRRNEESIDKLRRDGVPEEVIRKLERLSRKIEDDSRKLLEELRELTRRIKKASEDLLRRLRELLERIVRLLERNVDVDTLKRELDEALKRSEEESRRLKEEVTRIDERSKRESDRLVEEAKRLDKEAKDRSD

SEQ ID NO: 4913 - protein, 174 aa, Artificial Sequence; identical to SEQ ID NO: 4912
  Synthetic

SEQ ID NO: 4914 - protein, 186 aa, Artificial Sequence
  Synthetic
SELEEVLKKAAEVIKEIEKRLRKVLEDSRRLTKEDEKRNKEVLKKLKEKIDEIEKRARDKGLPEKDVERLKRELDRALEDVERISKELKETNEDVDRKTEDIIRRIKKKLKEVLDKARDIVEKLKDVDEVLRRLDRELKEVLDRVEREVERLKEENDRMNKKSKDDSEKLERDLERVAERLERELK

SEQ ID NO: 4915 - protein, 186 aa, Artificial Sequence; identical to SEQ ID NO: 4914
  Synthetic

SEQ ID NO: 4916 - protein, 186 aa, Artificial Sequence
  Synthetic
SEAEKVLKEAREAAKRIEDEARKVLRESRELAKKAEEDDRRALKRAKEAAEKIKRDADRKGLEDKEAKKIEEKLRKALEDLERLSREAKKEAEKVDRKTKKIAEDIKRELEKALRDAEDIAEKLKTADKAIKEAADRLKKVLEDAEKKAREAAEENKRANEEWKKKSKRAAEEAKKVLDEAKKELD

SEQ ID NO: 4917 - protein, 186 aa, Artificial Sequence; identical to SEQ ID NO: 4916
  Synthetic

SEQ ID NO: 4918 - protein, 175 aa, Artificial Sequence
  Synthetic
SDKERIKERVKKVHKESAKHIEDVRRRNEEINKRIKEEIDDVERRNREINEDIRRLVRERRVDEKEIRKRLKDVRDETKRIVERIKRELERVLEETEKALEDNDRKAKKVRDELRELNLPERVIEDLERLIEENKRTLTEVIKRHRELLEDWKRRLDEVLKDHERSAREIDEEAR

SEQ ID NO: 4919 - protein, 175 aa, Artificial Sequence; identical to SEQ ID NO: 4918
  Synthetic

SEQ ID NO: 4920 - protein, 175 aa, Artificial Sequence
  Synthetic
DEKEEVRRTVEERLKRVEDRVRELEKENEDINRELKERLKKVRRENEEINERLKKLLDENRVDEKRLREELKKVKEKTDRMLEKIAEDAERVLKKTRDELEDIRRRAEKVLEDLRRLNLPEEVIRRVEEEIKRIEKRLRDVIKKHEDSVRKIRTDMERVVRDHERLAKKWEDDAR

SEQ ID NO: 4921 - protein, 175 aa, Artificial Sequence; identical to SEQ ID NO: 4920
  Synthetic

SEQ ID NO: 4922 - protein, 175 aa, Artificial Sequence
  Synthetic
DEAKEIEDRVRTEIRDIERKVREARERSKRSDDELKKHSEEVARELEEILRELEEALRRNEVDRRELERRLREALRRAKEVTERNEREVKKNLDELREILKRITDRLKKVLKDLKDLNLDKSVIDEVRKAVEDIARKLKKVLEDNKREIDKDRKRNEEVLRTAREKAEKIKEDAR

SEQ ID NO: 4923 - protein, 175 aa, Artificial Sequence; identical to SEQ ID NO: 4922
  Synthetic

SEQ ID NO: 4924 - protein, 175 aa, Artificial Sequence
  Synthetic
DEKEKIKEDVRRVIRRIEEIVKRVDRESERSDRELEKHSRDVERRLREINDRLRRLLEENRVDRREVRKRVEDSLREARRVTEENKKTVDRNLREVKRVIDEIDDEARKVLEELRRANLDERVIEEVKRLIDRIREELERVLEKNARLAKEDEERNERVLTENRKLIEDWEREAK

SEQ ID NO: 4925 - protein, 175 aa, Artificial Sequence; identical to SEQ ID NO: 4924
  Synthetic

SEQ ID NO: 4926 - protein, 184 aa, Artificial Sequence
  Synthetic
SKLEEVVRRVDKDARDIRRRNEEVKRRNEKSAREIEKKVKKVLEEFRRLVEEIRKRLEEEGIPDSLIRTLERIATEVLKRIKEVLERLKRILDDSRRLLEEVSERNDRSLRDLKRELEEVSNSTDERVLKELEERVRKVLKDNRDTSKELEERVRRIDEELDKTLRKAKEELRKIIRELEERLR

SEQ ID NO: 4927 - protein, 184 aa, Artificial Sequence; identical to SEQ ID NO: 4926
  Synthetic

SEQ ID NO: 4928 - protein, 184 aa, Artificial Sequence
  Synthetic
SELEKVLERVKREAERIEKKNKKVLEENKKSAEEIHRDNERVLREVKDMADKIEDELRKRGIPKSLEKTIRDILERLKDRLKKVNDENRESAERSLKEIKDVSRENRRSIKELLDELREVKRTTDRKVLRDVERRVKKILDDNKRTSDEMKKRLDRLDETNKRTSEKLEEDVRRIIEDLERRVK

SEQ ID NO: 4929 - protein, 184 aa, Artificial Sequence; identical to SEQ ID NO: 4928
  Synthetic

SEQ ID NO: 4930 - protein, 184 aa, Artificial Sequence
  Synthetic
SKLEEVLKKLERLAREIERRLRDVIRRNKESADRIRKRNEEVLRKVEDVAREIEDKVRRGGVPKSIIERLRRIAKEIAREIERASRENEKSAKRSAERAEKALRELAKILRDIAEELRRVSNDKDEEALRTLDKRVEDIIKRLKEEVDRVVRDLEELDKENEKSSREVEERLKEIIRELEETLK

SEQ ID NO: 4931 - protein, 184 aa, Artificial Sequence; identical to SEQ ID NO: 4930
  Synthetic

SEQ ID NO: 4932 - protein, 184 aa, Artificial Sequence
  Synthetic
SKLEEVLKTLRRLIEEIKKRLKKVKDDNKKSLEDIHRKNKRVLEELEKRLRDIDKKLKDKGIPRTRIEELKKIVEEIRRTVRKVNEDNKRSVDESRRELEDALRELDRILKELEALIRRVKNTTDERVLKEVEERVERIIRELRRRVEELKRRVEELDRRNEKTSDDLEEELKRIDKELKDRTD

SEQ ID NO: 4933 - protein, 184 aa, Artificial Sequence; identical to SEQ ID NO: 4932
  Synthetic

SEQ ID NO: 4934 - protein, 184 aa, Artificial Sequence
  Synthetic
SKVEDVVRRVAEVAERIRRRNEEVAEENERSLKEIHDENKEVVERARKMAKRIEDEVRRKGVPKELIKRLEEIVRRVEKRLKEVNEENRKSAEESRELLRRVNKRNDESLKRLLEKLERVKNTTDEEVLKTVADEVREILERNEKTSEELAERVRRLDEENRRTSREVEKRVEEVIEDLKRRLK

SEQ ID NO: 4935 - protein, 184 aa, Artificial Sequence; identical to SEQ ID NO: 4934
  Synthetic

SEQ ID NO: 4936 - protein, 181 aa, Artificial Sequence
  Synthetic
SEVDKLEEDLRRIIKEIRRLVEEVKRKSEEIDRELKRLLEEAERTLEEIDRKLEDELRKKGNDEDVRRELKEIVERSETLVREVLKTLREVARRSEELNKDVHRRLKELVEEVRKRLEDLPEDDKVREVKKDVEKKLKELEEELRDITRRNRESLKRLEERLKEVAKKNRKTVDELRKELD

SEQ ID NO: 4937 - protein, 181 aa, Artificial Sequence; identical to SEQ ID NO: 4936
  Synthetic

SEQ ID NO: 4938 - protein, 181 aa, Artificial Sequence
  Synthetic
DEVDDLKRRLEKIITEDEKLVKEVKDRSEKLDREIAKLLEDARRALEKLDKELEEILRKKGDDEDVRRELKKIADDSRRLAEKVLKELDDILKKSEEENRRVHEDSERSMREVEKLLRALEEDDKVREVVKRVRDEADKSRRKLEEITRRNRDSLERIKRKLERVLEENDRTLRELEERAR

SEQ ID NO: 4939 - protein, 181 aa, Artificial Sequence; identical to SEQ ID NO: 4938
  Synthetic

SEQ ID NO: 4940 - protein, 177 aa, Artificial Sequence
  Synthetic
SELEKVVEDSRRKLDAWDDESRRVAEESRRRLEEWRKRLEEVAKRVEERLRDLKRKAGDREKLREAKKELRRVVERIKKLVDEVEKRSEEILDRNRKLNDKVRKESEKLAEEIKRVDDEELVKKMARELDELNKDLDRLNKESKRELERLNTELAELIKEVERELRELLRKLEEDLR

SEQ ID NO: 4941 - protein, 177 aa, Artificial Sequence; identical to SEQ ID NO: 4940
  Synthetic

SEQ ID NO: 4942 - protein, 177 aa, Artificial Sequence
  Synthetic
DSLEDVVRRVKKKLDDNRKDVERVAKESEELLKRWRDRVKKVVRDVERRAEELRRRRGDDKSLRDVEERLRRIVRDLERLIEEVERRSRKILKDLRKLNKDSVDEAERLVEEIKRVTDEELIKTFERTLEELHKTNKKLNEEVKKRLEELNTRLAKLIEDVRKELEKVLKELEDRAR

SEQ ID NO: 4943 - protein, 177 aa, Artificial Sequence; identical to SEQ ID NO: 4942
  Synthetic

SEQ ID NO: 4944 - protein, 177 aa, Artificial Sequence
  Synthetic
DELDEVVREVKDRLRENKEEVKRVMDESRRLLERWNEESERVAKKVEEAVRKLTKDKGDDDLLREVKKALKRVLDENRRLNEEVEERSRRIVDRLRRLNEESEKRAEELTKEARRVNREDDIRRITKRLRDLHRENEKLNRDVKKELRELNERLAKLNRDSTRELEELLRKLEEDAR

SEQ ID NO: 4945 - protein, 177 aa, Artificial Sequence; identical to SEQ ID NO: 4944
  Synthetic

SEQ ID NO: 4946 - protein, 177 aa, Artificial Sequence
  Synthetic
SELDKVVEESKRLLEEWDRRSKDVAKKVKEMLDRSRKASKEVVKEARDELERLKRETGDVEEVREMEKRIEKIVREDEELNKDSVRRAEEIVRENEELNKEVKKRSKDLVDEARKVTDEKDIREIKERLKRLNETLAELNERSKKRLKRLLDEDKKLNDDSSKELKELLKELEDRTR

SEQ ID NO: 4947 - protein, 177 aa, Artificial Sequence; identical to SEQ ID NO: 4946
  Synthetic

SEQ ID NO: 4948 - protein, 177 aa, Artificial Sequence
  Synthetic
RELEDVARRARKKLEDNKRRVEEVAEEVERRLDESRKESDKVVREVEEVLKRLKEERGDVRSLDRVTERAEEIVRDDKRLNKRSKDELRKVLKRLRELNKRSVETIEKLLEEIKRVKNEELVKRMTEELERVHRENEKLNRDVRRELEDILRKDEELNKRSKKRLKDLLDELRRRLT

SEQ ID NO: 4949 - protein, 177 aa, Artificial Sequence; identical to SEQ ID NO: 4948
  Synthetic

SEQ ID NO: 4950 - protein, 177 aa, Artificial Sequence
  Synthetic
SELEEVVKKVRTDLDRIDEKSKRVAKEVDRVLKESEDRSKKVAREVEEVLRKLKEEAGEVDELKRVMKELKEIVDRDERLNEESSKRLKEVVKDNERLNEEVRRRAEKLVEEIKRVKDEDLVRRAVETLERLIRELEKLNDESKRRLEEILREDKRLNKESTEELRRLLEELRKTLT

SEQ ID NO: 4951 - protein, 177 aa, Artificial Sequence; identical to SEQ ID NO: 4950
  Synthetic

SEQ ID NO: 4952 - protein, 181 aa, Artificial Sequence
  Synthetic
SEVERVAEELKRVLKELEDLDRESEKKLKRLNEELARLIEEVRRRLEEVLRTLEELAKRVKDKETIDRILRRIEEALKKLADEARDILREAKKASEDLARENKKLLDDARETIERLARNLERTREVEEVIRRIDEAIKRIEKHSREVIERSRERVEDWRRKVERVIEEVERRARKLREDTR

SEQ ID NO: 4953 - protein, 181 aa, Artificial Sequence; identical to SEQ ID NO: 4952
  Synthetic

SEQ ID NO: 4954 - protein, 181 aa, Artificial Sequence
  Synthetic
SEVEKVAEEAKRVLDELEKLDRDSAKELKDLNDELRKRDKESEDALRKITRDLDELDKRVKDEKTARDIEREIDKRLEEIARTNEELLKTAKKRSKDLARKNKEILERIARALKELADKLRRDKDVEKVIRDLKRELERLAKHSEEVIRTSEELLKRWEDHSRKVIEEVKERARDIKRRTK

SEQ ID NO: 4955 - protein, 181 aa, Artificial Sequence; identical to SEQ ID NO: 4954
  Synthetic

SEQ ID NO: 4956 - protein, 177 aa, Artificial Sequence
  Synthetic
SELEKVVKEVEEALERNNRENRRVIRRSRELLKRWREEVEEVVRRLRERAKKIADDVDKREVLERLKEMIRRVEEKLERILEKAERDSRRIEEEIRRLNERLKELVERIKRKMDRVTREEEVRKLEEDLRRILEEIDRESDRLVKRIEDLNRRVAELLKRVEEELEDLARKVEEEAK

SEQ ID NO: 4957 - protein, 177 aa, Artificial Sequence; identical to SEQ ID NO: 4956
  Synthetic

SEQ ID NO: 4958 - protein, 184 aa, Artificial Sequence
  Synthetic
SIEEIVEEIERELEKLKRKLDELIKRSEELSRRLAEKTRRSNEEIKREIDKVADDIRKTLSDREKVERIRKKLEEVHERHRKIVKESEDHLKEVNDRLREILRELAERLEEAIKKIRDIVRRTTDEDTIRRVLEEAREEIKKLERDVDKVRKEVEDAHRKNSELNKTVHDEVRKIIDEIRKEVK

SEQ ID NO: 4959 - protein, 184 aa, Artificial Sequence; identical to SEQ ID NO: 4958
  Synthetic

SEQ ID NO: 4960 - protein, 184 aa, Artificial Sequence
  Synthetic
SIEEILREIEELIKDLLRKAEELLKESEKRSKELKDEMKRSNEEIRKLIEDLRRRAKDRVEDKDKVKRLEDDLRRVHEEHKKRLDELAKKLEDANRRAREILDKIRRRLERLLEEAEDIVRKVKDEDVIRDLLRRVREDIDRLRKELEKVVRELRRIHEEVRRDLKRVHEEVRKRIEDLEEELK

SEQ ID NO: 4961 - protein, 184 aa, Artificial Sequence; identical to SEQ ID NO: 4960
  Synthetic

SEQ ID NO: 4962 - protein, 179 aa, Artificial Sequence
  Synthetic
KEVEDVVRRVRKLIEDNERRNKEVHEEVEKRARENVERNRELLEKIRRTVEEIRRELEELRGDERVVKKVEDDLRRLLEEAKEVLKKSEKNLDELLKKHEKVLRDSEEDLKRVLDELRERGLDKDLLDEVRRLLERVKRRTEESNRRVKKIVDDVKRTSEEILREVEELLRRLIDDARK

SEQ ID NO: 4963 - protein, 179 aa, Artificial Sequence; identical to SEQ ID NO: 4962
  Synthetic

SEQ ID NO: 4964 - protein, 179 aa, Artificial Sequence
  Synthetic
DEVEKVFREVKKRIDENREKNRRVHEKVEREARRNSEENRRVHEEVRKTVEDIRRELDEKRGDEKAVREIEKKLKELLEKHKRVVEESRKNLTELLEEHKEVMRDSERDLRRVLKEVEKAGLDEELLRRIEKLAREVRDETRRSNEKVKEIIRRVEKESEDSNREVKRLLDELTRDARR

SEQ ID NO: 4965 - protein, 179 aa, Artificial Sequence; identical to SEQ ID NO: 4964
  Synthetic

SEQ ID NO: 4966 - protein, 179 aa, Artificial Sequence
  Synthetic
SEVEDVVRKAREILKRNEDENRRVLEKVREDLKRLTDENDKVVEDVREMVRRIKEMLDRNRGDERVLEEVERKLREVEDRVREAKRRDEEKLKRLEEELRRVVEESRRDLERLLEELKRAGVREELLREVDERIKDVKRKTDEILREVRERIKRNEERTERLRREIEELARRLLEDAER

SEQ ID NO: 4967 - protein, 179 aa, Artificial Sequence; identical to SEQ ID NO: 4966
  Synthetic

SEQ ID NO: 4968 - protein, 177 aa, Artificial Sequence
  Synthetic
DEEDLLEKIERILEEVKRRLEDVIRRVRKSNEDIERELKKAVDRSRELLRKVEEDLRRNRVDERLLDRLRKIKDENRKLLETLDRELKKISKEDEDRLREVEKRVEKIMRELRERIRREGADRDVFERLERIARRLTEEIEKALRDSDKLNEELKRKVEEVLRRSEESIRTVLEELR

SEQ ID NO: 4969 - protein, 177 aa, Artificial Sequence; identical to SEQ ID NO: 4968
  Synthetic

SEQ ID NO: 4970 - protein, 175 aa, Artificial Sequence
  Synthetic
DEIEKVRKDVDEIIRRLEEELEEVAKRLEDLNREIERILREVKKESDDTIRTIERLRKEGVDRRDIKRISEEDERKLEEVEKTLKRIADKSRELTEDVKRRLKEALDRLEEELKRVNVDESIVKEVRDKLRRLEKRLDDLAKRNEESLRELKRTLEEIIKRSRKENKRIEDEVRK

SEQ ID NO: 4971 - protein, 175 aa, Artificial Sequence; identical to SEQ ID NO: 4970
  Synthetic

SEQ ID NO: 4972 - protein, 184 aa, Artificial Sequence
  Synthetic
SEVEEVEKELRELIREDKERLDRLRKELKESIDTNKEKLDRVKEDLERLIEEIREEARRRNIDKETMDRLDEKLRRLKKELEEVIKDSRKKLEELLDELRKVVEENKRRLDEVEKELKEVKKLKDRERLTKLVEKIREVLERSKEHSERVAKKIRDELDKLHKETERVDRKLKTEARRLKEELR

SEQ ID NO: 4973 - protein, 184 aa, Artificial Sequence; identical to SEQ ID NO: 4972
  Synthetic

SEQ ID NO: 4974 - protein, 184 aa, Artificial Sequence
  Synthetic
DEVERVEEELKESIDRNDEELRRVRKENRESIEKDRRDLKRVEDDLRRLIKKIDEEVRRRNIDEEDVRRLKEKLDRLLKELRDVVKENADRLEATLRELEEVIKRSREKAKRARDELREVKRDSREEALREVVRKLRKLLKELHEETKRVMEKLRKLDRESEEHTKEVDERIKKTIEDLERELK

SEQ ID NO: 4975 - protein, 184 aa, Artificial Sequence; identical to SEQ ID NO: 4974
  Synthetic

SEQ ID NO: 4976 - protein, 184 aa, Artificial Sequence
  Synthetic
SEVDEVRKELRKVIKEDEDTMRKLEEENRKSIEEIRKELEKVEEELERVIRRIEDEIRKRNIDKRIADRLRKELKRLLEELRRVIEDLKRKLDKTREKLKRVADENRREAREVEEELKKVAKEDRREVLETLVRKIREELKRSKEHSKRVADDLRRMDEEIRREVKRVVDKVRELLKRLEDELK

SEQ ID NO: 4977 - protein, 184 aa, Artificial Sequence; identical to SEQ ID NO: 4976
  Synthetic

SEQ ID NO: 4978 - protein, 184 aa, Artificial Sequence
  Synthetic
DEVEDVLRRLKELAEEDKTKLKEVEKENKESIKEDRKRLEDVRRELEKLIEEIRREVTERRIDEKEVRKLEEKLKRLAEELEEVVKENERTAEKTERRIREVIKRNEDKLRRLMDELRKMKRSKDEKVLRDVSRRIKEEVEKSKKHSEEVKKELEDADRESKRHTEEVEKKIRELIERLKRETK

SEQ ID NO: 4979 - protein, 184 aa, Artificial Sequence; identical to SEQ ID NO: 4978
  Synthetic

SEQ ID NO: 4980 - protein, 184 aa, Artificial Sequence
  Synthetic
DEIDRLREELKRLIDKDKTDLDRVRKENEESIRDDERKLREVEKELRDLIEEIRRKAKERNIEEEIMRRLDEKLKKLERDLEEVKKKNETNARENRKELERVIEKNKEDADRLRRELDEVARDEDRRVLEEVARKIRELIRRSEKHSEDVMEKVRRNDERSKRHTEDVTRKIRTEIEKIDRELE

SEQ ID NO: 4981 - protein, 184 aa, Artificial Sequence; identical to SEQ ID NO: 4980
  Synthetic

SEQ ID NO: 4982 - protein, 175 aa, Artificial Sequence
  Synthetic
KEKEDVKKRLDEEAEKNKRTSEEAKRRNRESIRRNKETSKRVKEENRRSFEELDDLLRRGDGRREDLRRLLEANLETNTRVHEENDKSAKDNERTNEKVHRENDESLKEIKKRVREENLDKRVEEELDKLMEEIRRHNRESNEELKRLVEEIRKHNRESNEELKKLLEEIERKTE

SEQ ID NO: 4983 - protein, 175 aa, Artificial Sequence; identical to SEQ ID NO: 4982
  Synthetic

SEQ ID NO: 4984 - protein, 175 aa, Artificial Sequence
  Synthetic
DEDKDVEKKLRDIIKRNKETSRDVARRLEEIIKRNKKTSDEVATEVRKLIKEIEDVLRRGDGSREELEKLLEEVRKRLEDVHRENKESLKKVEDELKEVHRRNDESLKRVRERIEKENLDEKVKEELRRLIEEIKEHNERVLRKLRKLVEEIERTNEDIRRELKELVEDIRRKAK

SEQ ID NO: 4985 - protein, 175 aa, Artificial Sequence; identical to SEQ ID NO: 4984
  Synthetic

SEQ ID NO: 4986 - protein, 175 aa, Artificial Sequence
  Synthetic
SEKEEVRKRLRDKVEDNKRTSKEVADKLRKIIKENKDTSKKVMEDLRRIIEEADELLRRGDGSEETLRKIAEDLERDLDRVHEENRKSVEDLEEELREVHRENKKSADDIRREVDRENLDDDVRRELDELVKRIAEENKRVEDELRRLVKEIEDHNEEVKRELKELVKRIEEKTR

SEQ ID NO: 4987 - protein, 175 aa, Artificial Sequence; identical to SEQ ID NO: 4986
  Synthetic

SEQ ID NO: 4988 - protein, 175 aa, Artificial Sequence
  Synthetic
SEKEEVEREVEERLRDNKRTSDKVVEENRDSVRRNKKTSEDVKRENEESVRRIDEVLKRGDGSEETLDRLAEENRRTNEEVHERNDRSLRKNDETNKRVHEENDRSLREIKKKLDEKNVDEDVKRKAKRMVEEIRERNRKSNEELKKLAEEIRKHNKDSNKKLKELVDEIRRKAK

SEQ ID NO: 4989 - protein, 175 aa, Artificial Sequence; identical to SEQ ID NO: 4988
  Synthetic

SEQ ID NO: 4990 - protein, 175 aa, Artificial Sequence
  Synthetic
DEERRVREKLKKIIKDNEDTSRKVREDVKKELDDNRRTSEKVARDNERSIEEIKKALERGDGSEDDLRRLARENEETNRDVHRRNDESLRKIERRLEEVTKRNKESADRAREEVERANLPEEVRRELDKLVKEIKERNDEVIEEARERVKRIREKNERSNRKLKKEAKKIEEEAR

SEQ ID NO: 4991 - protein, 175 aa, Artificial Sequence; identical to SEQ ID NO: 4990
  Synthetic

SEQ ID NO: 4992 - protein, 175 aa, Artificial Sequence
  Synthetic
DEDREVERDLKKIIKDNKRTSEEVEKKLRDIIRKNEKTSKEVEKELRDIIRRADELLRRGDGSREDLKRILDELRKKLEEVSKRNKDSVDELRKELKEVHDRNKKSLDEVREKLEREKLPEEVKKDLDRLAEEIKKRNEEVRKDLDDLVRKIEKRNEEVKEELDRLAREIEEKAR

SEQ ID NO: 4993 - protein, 175 aa, Artificial Sequence; identical to SEQ ID NO: 4992
  Synthetic

SEQ ID NO: 4994 - protein, 175 aa, Artificial Sequence
  Synthetic
SEEDEVRRRLRRIIEENRRTSEEVRERLRKIVEDLERTSRDVRRKLREIVERIKEVLTRGDGSREDLERILKEIEDRLEEVTRELKRIADEARRTLEKVTEDNRRSLEEVKKEVRKDKLPREVEEELRRLIEEIERRNKEVREELDRLIEKLEDDNRKVHKELRELAKEIKDRAD

SEQ ID NO: 4995 - protein, 175 aa, Artificial Sequence; identical to SEQ ID NO: 4994
  Synthetic

SEQ ID NO: 4996 - protein, 188 aa, Artificial Sequence
  Synthetic
RELEEVVKRIRDILREIHERSEKSAEENRRLIEKAEEDSKRSAKRIREIIREIREEVKRIKDKDTLRKLLEDLERELKKLIDDNRKMVEDLRRESKRSIDDNRRLNEEIHERLRRIIEELRRRLRERDVREKLERVAREVEKSNKDNRDHSKRVEEESRELLKKLRKHSEDVAREVKKLLDELREETR

SEQ ID NO: 4997 - protein, 188 aa, Artificial Sequence; identical to SEQ ID NO: 4996
  Synthetic

SEQ ID NO: 4998 - protein, 188 aa, Artificial Sequence
  Synthetic
SELEKVVEDIRRLLRKIHEDSKRSVRKNEELVEELKRLSEKSEREIEELLRRIKELLKRIKDKESLKRALEELEERLRRIIEKNRELVDRAEERSRKSVKENEDLNRRIHEELKRVIDDARKKLRDERVKRKLDDVEREVRKSNEDNRKHSDEVRRKSEDMLEKLRRESERVADRVRKVLKELEDERR

SEQ ID NO: 4999 - protein, 188 aa, Artificial Sequence; identical to SEQ ID NO: 4998
  Synthetic

SEQ ID NO: 5000 - protein, 188 aa, Artificial Sequence
  Synthetic
SELEKLAKEIEEILREAKERSKESAERIRKLVRDLRELSRESEERIRKIETDVKKKIDDIKDKDTVRRLLEELRKRLEEMIKRNEDLVRELARLLKEMTDRNRRLVEELEREIRKLIEDLRRRLREREVRRKVEDVERRVTKVLKELEDRSREVEEEVERVLRDLKRHSDEVRREVEEVLRRLTERTK

SEQ ID NO: 5001 - protein, 188 aa, Artificial Sequence; identical to SEQ ID NO: 5000
  Synthetic

SEQ ID NO: 5002 - protein, 175 aa, Artificial Sequence
  Synthetic
SEREKIAEDIRKLVDESRRNLEDVVRRARELAERVRRNLKRVMETLERLAEEIRRIIESGDRSDRVLRELKKLLDDIDKYLKENHRRLEELVKEIEKYLEDDHRRLRELIEDIRRKLSDDKDLERELKELLDKHKKDLDDVREEIRRMLETHKEELDRVKKRVEDVLREAAERTR

SEQ ID NO: 5003 - protein, 175 aa, Artificial Sequence; identical to SEQ ID NO: 5002
  Synthetic

SEQ ID NO: 5004 - protein, 175 aa, Artificial Sequence
  Synthetic
DERERIREEVRKLARESKENLKRTEEDLKRRLEEVKRNLERVDEEVERLVRTVAEIVRKGDKDDEVLRRADELLKRIEDYLKKNNDRLRELIERVERYLERDHRELERLIEEIEDRLRDDEELKKEAKKLLKEHRDKVKEIKEDLKRAHEEHRKRLEEVVEKLKRVLRDLAEKVR

SEQ ID NO: 5005 - protein, 175 aa, Artificial Sequence; identical to SEQ ID NO: 5004
  Synthetic

SEQ ID NO: 5006 - protein, 175 aa, Artificial Sequence
  Synthetic
SEREEIVKTLRELVKRVKENLKRVTEEARKLADESRRNLERVAEEIRKIAEEVKRIVERGDRSSRVLEEIERVVREIEKYLKEDHDRLRTLIKRIKDYLEENNRRLEELLKDIKDKLSDDKDLEKELEDVHREHKRRLDEVVREMEDLLRKHEDDLRKVKREAEKMLKELTETTK

SEQ ID NO: 5007 - protein, 175 aa, Artificial Sequence; identical to SEQ ID NO: 5006
  Synthetic

SEQ ID NO: 5008 - protein, 175 aa, Artificial Sequence
  Synthetic
SEREEIAERAERLSREVKKKLEDIRREIEELAKRVLDNLRRVLRDVERLIEEVKDIIRRGRRSSEVLKRLEDELRRIEKYLRENNERLKRLIDTIRDLLRRLHEEHRRLLEDIKRKLSDDKKLKDDLDRADEELERRARKVDEDLKELHERHRRLLEDVRRELERVIKELKEETE

SEQ ID NO: 5009 - protein, 175 aa, Artificial Sequence; identical to SEQ ID NO: 5008
  Synthetic

SEQ ID NO: 5010 - protein, 175 aa, Artificial Sequence
  Synthetic
SDRERIAKRARELSERVKEKLEEILKEVRKISKDMKKRLEDILREAEELSRRIKEIVESGDSSDEVLKEHRDLLREIKEKLERLHEDHRRVLEEIKKRLEELHKDHKRLLDDVDDKLRDDDELRKELEEVDDELRRKIEEIKKELETMDKELRDRAKEIEKRLEDSNREVEERRR

SEQ ID NO: 5011 - protein, 175 aa, Artificial Sequence; identical to SEQ ID NO: 5010
  Synthetic

SEQ ID NO: 5012 - protein, 175 aa, Artificial Sequence
  Synthetic
SEREEIAKTVRKLSREMKETLKKITEEARRLSEEVKRALKKIVDDLRELMKDVKRIVESGDRSDKVLRDARELVKRIVERLEELHERHRKLIEEIKKKLEDLHRTHRRLIEDVERKLKDDKDLKKELEDVDRELADTIRRVEEELKKVNEELRKRVEDVREEAERALRELEERVR

SEQ ID NO: 5013 - protein, 175 aa, Artificial Sequence; identical to SEQ ID NO: 5012
  Synthetic

SEQ ID NO: 5014 - protein, 175 aa, Artificial Sequence
  Synthetic
DERERIAEELKKLTEEIRRRVEDVMREAERLAEEIKRKLEDVLEEVRRLSDRIREIIESGDRSDEVLRRHRKLLERIREELKKILEELRRLVREIKEKLKELHERHKRLLDDVDRKLSDDDDLRREAEKVNRKVREDLKRIEDRMRELLKEVEDLLRKIEEEARKSNKELEDRTR

SEQ ID NO: 5015 - protein, 175 aa, Artificial Sequence; identical to SEQ ID NO: 5014
  Synthetic

SEQ ID NO: 5016 - protein, 178 aa, Artificial Sequence
  Synthetic
SEAEKAREDVERAAKESKDKLDEIRKEVEKAARESREEAKRNEKDIKDAAKKLRELARDKKADEKVARRAEKIVEDNERSAKEAADRSEETAKRARDKLRKAAEDSKRTAEKARRDAEKRGADRDVLEELRKIAEDDKRRVDKVARELRELAKRDKEEAKKVHDENKKSAKEAEDELR

SEQ ID NO: 5017 - protein, 178 aa, Artificial Sequence; identical to SEQ ID NO: 5016
  Synthetic

SEQ ID NO: 5018 - protein, 178 aa, Artificial Sequence
  Synthetic
SSDETLRRELEKAVEESRRLLEENRKTIEDMVRESKRLLDRNREEIKKLVEELKKLLRDNNLPKEVADDVREIVRRNEESVEKLIRDSKETVDRDRKSLEDVARESEETVRKLREDVDRRGVDRDVLREIRELLKRDKERLKEVHKRNRESAKRDKDRVKDVHRKNRDSARRVKERLR

SEQ ID NO: 5019 - protein, 178 aa, Artificial Sequence; identical to SEQ ID NO: 5018
  Synthetic

SEQ ID NO: 5020 - protein, 178 aa, Artificial Sequence
  Synthetic
SSDETARKEIEDMVRESKKLLEEIREELDRVVKRLRRELEENEKDIKRLVKRLRDLLRENNLPDEVERRIEKIVRENEKSVKDVAKEVEDIVRELRRLIEEAERRSEKTVRELREKLRREGVDRDVLREIRELAKRDKDTVKKVMEEIRDRLRKLDERIKEVHERNRRSLKDVEDKVR

SEQ ID NO: 5021 - protein, 178 aa, Artificial Sequence; identical to SEQ ID NO: 5020
  Synthetic

SEQ ID NO: 5022 - protein, 178 aa, Artificial Sequence
  Synthetic
DEDREAKRRLDEAVKESRDRLEEIRKEVEKMVRENEELNRRNEEEIRKAVEELRELLRRQKLPEDVVRKIEKIVEDNRESVKRNVDESRKIVKELRDLLKKLFEESEETVRELEDRLRKRGVDRDVLREIEEELTKDRKRVKEVLEELRRIAKRLKERDEESHERNRRSLDKLKKEVK

SEQ ID NO: 5023 - protein, 178 aa, Artificial Sequence; identical to SEQ ID NO: 5022
  Synthetic

SEQ ID NO: 5024 - protein, 178 aa, Artificial Sequence
  Synthetic
SSEDEARKEVDKMAKESEELLRRNEETIRRLVRENEEKNERNRREIERVVRELDRLLKERKLDRTVERKIREIVTRNKKSVDDNKKRSEDIVREDEESVDELVKDSKRTLDELRKKIKREGVDRDVLRELREIAERDKKKVEDVHRENRDSARRLKEEDDDSHRRNRKSMKEVKEDVE

SEQ ID NO: 5025 - protein, 178 aa, Artificial Sequence; identical to SEQ ID NO: 5024
  Synthetic

SEQ ID NO: 5026 - protein, 186 aa, Artificial Sequence
  Synthetic
REIEEVAKRLRKLVKELKERSKESKDRSRKLMTELKKLSKDSLRELRRLLDELRKILKDRRDSEETVKEVEERLKELLERNKRDSERVAREDKKLNDDNREESKKAAEELKKIVKELEDRNRGKRDVKKKLDEIRREVKKVIEEDKRLNDESEKDSRRLIREDEDENRRIKEEIDRAVEELRRRRK

SEQ ID NO: 5027 - protein, 186 aa, Artificial Sequence; identical to SEQ ID NO: 5026
  Synthetic

SEQ ID NO: 5028 - protein, 186 aa, Artificial Sequence
  Synthetic
SDIERVLEELRRLVERLKRETERFAKELRDLARRVKEMSKRSEEELRELATRLKDTLRRRKESKERVEEVKKRLREIIKRNKETSKRVAEELKRIVKESKDLSEEVARRLEEIIKRLEDRNRGKRDVEEKLRRIKRELREVIKEDEKRNREIEREVDKVIRELEKLNKRIEDEVRKLEEELERRLK

SEQ ID NO: 5029 - protein, 186 aa, Artificial Sequence; identical to SEQ ID NO: 5028
  Synthetic

SEQ ID NO: 5030 - protein, 186 aa, Artificial Sequence
  Synthetic
SDIERMRDRLRKLVEEAREKSDRSREELEKLVRELRRKTEKFLKELRDLARRLKETLKRRKDLADEVRKVIKELKEIIDESKKVSKKVADELKKLLEENREKSREVEETLRKLVKDLEDRNRGKRDVKEKLDRIRKEVEEVARDLKRKNDEIEEEIKKVIRDDERRNEEIEKEVRKMAEELRRTLK

SEQ ID NO: 5031 - protein, 186 aa, Artificial Sequence; identical to SEQ ID NO: 5030
  Synthetic

SEQ ID NO: 5032 - protein, 186 aa, Artificial Sequence
  Synthetic
SDIERVRKELRELLERVARRSEKSMRDDKKSMDDLKKEIREVEEELRRLATEVKKTLKDRRDSEDRVRKAIEDLERIIEELEKRVRRVEERNERTVEENKKESEKVAEDLKRIIDKLEERNRGKRDVKKKLEEIEREIREAIKDLRRKNREIERTNREVIKELREELKRIDTEVKKLVKELRETSK

SEQ ID NO: 5033 - protein, 186 aa, Artificial Sequence; identical to SEQ ID NO: 5032
  Synthetic

SEQ ID NO: 5034 - protein, 185 aa, Artificial Sequence
  Synthetic
SELEELERDLERELEEDKRRNEEVMERNERRLRKLKEDVDRVVKELEDLLRKLEKILREEKDKDTIRKILEEIEDEARKILEKVKRLIETIKRESEESNKRLRDENRESEERLERILRKVREDGAPESELERLDRRLKKLIKESRETVDEIEERSERAIRDLERKLKELEERLRKKIKELRDETR

SEQ ID NO: 5035 - protein, 185 aa, Artificial Sequence; identical to SEQ ID NO: 5034
  Synthetic

SEQ ID NO: 5036 - protein, 175 aa, Artificial Sequence
  Synthetic
DETKKVEDDLRRVDTESKKHLDDVHKESKRVADELRKKLEDVHRRSEEMVRRLRRLLEENRTDKRELERALDEVLRESEKVVEEIRRLLEKVLRDSERAMRENRRLLEKVKKEVEDVKIREEVKKRIDDALRENERRAEENRREIERVLKELEDRVDENRRRIEEVRKELRDRAT

SEQ ID NO: 5037 - protein, 175 aa, Artificial Sequence; identical to SEQ ID NO: 5036
  Synthetic

SEQ ID NO: 5038 - protein, 175 aa, Artificial Sequence
  Synthetic
DETREVDERLKEADRRSKKHLDDVHKTSKKVLDELRRKIEELERRVRKVVKELEELLRENRVEEEELKRRAEEVEREIDRIVKEVKDLLEEVKKRSDEVAKENEERLKKVKKDLDDNNIPEDVRRKVDKIIKENRKMLEDNKRTIEEVLRELKERADEIKERVKKVLKKLEEDRR

SEQ ID NO: 5039 - protein, 175 aa, Artificial Sequence; identical to SEQ ID NO: 5038
  Synthetic

SEQ ID NO: 5040 - protein, 175 aa, Artificial Sequence
  Synthetic
DEEEKVERDVERVDKESKEHLDRVHEETRDINRRSEEHLRRVHRDSEDVARRLRDAVRRRTVDERDVERALREVRKKSEDVVRKNEEELKRALEKSKEVVEKNERELRELLDRLEKLNIDEKVKRRVEEAIKRNRDEARRDEEEVKKAIKRNREEADRNRREIEKVVEELRRRAT

SEQ ID NO: 5041 - protein, 175 aa, Artificial Sequence; identical to SEQ ID NO: 5040
  Synthetic

SEQ ID NO: 5042 - protein, 177 aa, Artificial Sequence
  Synthetic
SEKEEVKRRVDEITKRARKKLEDVHRRSEKIDRDSREHLERVHKRTKEILDELRDELRKRRDEDVARRIEDIATKLRRESEEVAKRNEDLLDELRKESEEVSRDLERLLKELRKELDAFNVDEDLRRRLEKVFRELKETLDRNREEIDRMVKRNRKTLRDNKEEIDRAVREARERLK

SEQ ID NO: 5043 - protein, 177 aa, Artificial Sequence; identical to SEQ ID NO: 5042
  Synthetic

SEQ ID NO: 5044 - protein, 177 aa, Artificial Sequence
  Synthetic
REDEEVLKDLKRIVDELRKKLKELHDRSEEIDKRSKKHLDDARRRVEEIMRRIEKRLREERSDKVRETVERLAREVKKEIDDVKRRNERLLRELKKESEKVSREIEEILRRIEEKLERKNVDDKVRKDLKDVAKEMRDRLEENERRIREAAKRNRTELERIERELKEFKDRLDETAR

SEQ ID NO: 5045 - protein, 177 aa, Artificial Sequence; identical to SEQ ID NO: 5044
  Synthetic

SEQ ID NO: 5046 - protein, 177 aa, Artificial Sequence
  Synthetic
SEVEKVMEEAKRIVTELEEKIRELERKVKKIDEDSRRHLKEVHDRTAEIAKTLRDILRKERSEEVAKEIERLLTELEKESKDVARRNEDLLRRLEEEIRRVVEEIRKLLEELRKRLDDKNVDDKIRREIEEAVERLETEARRLRREVEEAVRRNREMLKRNEKEIKDVAKELRDRLR

SEQ ID NO: 5047 - protein, 177 aa, Artificial Sequence; identical to SEQ ID NO: 5046
  Synthetic

SEQ ID NO: 5048 - protein, 182 aa, Artificial Sequence
  Synthetic
REDDRIRDEIRKLVEDNRRLLREILERLKTLADRLREINKKSNDDNERSADELREVLKKVRSEEVKRLVERVVEENRDSNRKDREISKKVVRELEELIERLREESKRSAEELERLIEDVVRKKGRDLEEVRREVEKAIRDSKEKLDELEERVRRMIEESEKLVEDNHRRIEEVEREMEEALR

SEQ ID NO: 5049 - protein, 182 aa, Artificial Sequence; identical to SEQ ID NO: 5048
  Synthetic

SEQ ID NO: 5050 - protein, 182 aa, Artificial Sequence
  Synthetic
KDEEEIKKAIEELVKRNEDIVEEIKRRSDKLADDLRDINRRSNEDNDRSLKTLEELLRRVDSKDVKELVERVIKRNTDSNREDEERSKEVVRRDEKLNEDLRRISEDSARKLEDLIRKIVERSGRDLKEVRDRVRRAIEKSKEDLDKSEDDSRKVIEESKRLVEENHRRIRKAVRKAEEATR

SEQ ID NO: 5051 - protein, 182 aa, Artificial Sequence; identical to SEQ ID NO: 5050
  Synthetic

SEQ ID NO: 5052 - protein, 176 aa, Artificial Sequence
  Synthetic
SEEEEARKKLKEAADRNRKVNEDAKKKAEDAARKNKKANEELAKKLKDAAEELKRVSRDEREEALREAAKKAKKIAEDAKREAKKVAEETAKIAKEIEDELRKALEESKEIAKRLEDEGAAEEIKERAKEVLERHKRSAEKIKEEAKRVLDEHRKRARDWEEEARRVLKEAEEEAR

SEQ ID NO: 5053 - protein, 176 aa, Artificial Sequence; identical to SEQ ID NO: 5052
  Synthetic

SEQ ID NO: 5054 - protein, 176 aa, Artificial Sequence
  Synthetic
REEEEVRKEVKKLKKENEDVNDKVRRDLEELLERNRKVNKELEDKIRDAKRRADEMLRVEDKDVLRRVLEEIRRLIEELKKELEEVLRRSREIIEKIREDLERVLRESKKKIDELRRRGVTEEIEEELRKVLKEHKELVERWKREAEEVLEESKRLIDKWKEDLERVLEDFRRKAE

SEQ ID NO: 5055 - protein, 176 aa, Artificial Sequence; identical to SEQ ID NO: 5054
  Synthetic

SEQ ID NO: 5056 - protein, 175 aa, Artificial Sequence
  Synthetic
SEAEEIEKRLKEVLDRHDKSAREIKDRLRKVIEEHRKLVEEWEKEARDVVKELKDENSELKDVLRELERILREIVKRLEDVLRKTEKILKEIERRLEEVKRRTKEILDEIKELLRRGEDTRRLRERLRKMEEDNRKINKEIRDEVKELEKENREINKRVEEELKRVRDELKRTAD

SEQ ID NO: 5057 - protein, 175 aa, Artificial Sequence; identical to SEQ ID NO: 5056
  Synthetic

SEQ ID NO: 5058 - protein, 175 aa, Artificial Sequence
  Synthetic
DEVEDIKRELEEVVKEHEKSVEDDERKNEDVVRRHDELVKKWEEDLRRVIEKLKRDNKDAREVLEELKEILDRLKKEADEALERTRRMTERNKKTAEDVRRDTERILREIDELVRRGRDERDLRRRVKDLKRRNKEMNERSKKHSDEVKEENKRINEEVEKKLRDVKEKLDRDIK

SEQ ID NO: 5059 - protein, 175 aa, Artificial Sequence; identical to SEQ ID NO: 5058
  Synthetic

SEQ ID NO: 5060 - protein, 182 aa, Artificial Sequence
  Synthetic
SELEKLIKEVEDLAKEVADKLRKSNKELRELVRKIAKALEETNREIEKVVRRVKRLLESGDRSSKLLKELEEIIRRAAKAHKDILDELEELVKTAARAHERILEELERLAKEIEDKLRERGLDKSKLKKIKEDLKRIADEIRKIVEDSKRDLERVADEARKIVEKSKEDLKRAKEEAEKETK

SEQ ID NO: 5061 - protein, 182 aa, Artificial Sequence; identical to SEQ ID NO: 5060
  Synthetic

SEQ ID NO: 5062 - protein, 182 aa, Artificial Sequence
  Synthetic
DELDELTKRARELVERNRRHIERSNRELKRLVKEVLDRNRENHKTVEELVKTVLKLAKDGDKSDELLRRLEKLIRESEEHLERSHEELDRLIRKADKDHEKNTRDHRRLVEKIDDDLRREGVDRSDVERVRKELKDSTDDIKRLVDKSREDLKRAKEKDEKSVRDNRERLRRVLRRLEEEVR

SEQ ID NO: 5063 - protein, 182 aa, Artificial Sequence; identical to SEQ ID NO: 5062
  Synthetic

SEQ ID NO: 5064 - protein, 182 aa, Artificial Sequence
  Synthetic
SELEKLTKEVRDDVRRVMERLKRSNDDIRRLAEEVIRRNDESRKKLEKLVEEVKDLFRRGDKSDKLLREAERLIEEARKEHEKLLRELRELVKRVTRKHEEILREVEELVERIKRSLEEKGLDDSKVREIERELDEVRKRLEDLVRKSKEDLDRVREELERLVEKSKRDLDKARRDLDEARR

SEQ ID NO: 5065 - protein, 182 aa, Artificial Sequence; identical to SEQ ID NO: 5064
  Synthetic

SEQ ID NO: 5066 - protein, 182 aa, Artificial Sequence
  Synthetic
DELEELEKKVREDVRRVKEKMERSHRETEKLARDVKKRLEDTNREIKKLVKEVEDILRRGDKLDEVLRRLEELIRKVLKDHEDILRELAELVERVERRNEEILREAEKLVRDIERELERNNLDKSKVEKVRRDLDEARKRLEELDRRNRKRLEEVRKEIREIVEKSKEDLKRAKDRARETVR

SEQ ID NO: 5067 - protein, 182 aa, Artificial Sequence; identical to SEQ ID NO: 5066
  Synthetic

SEQ ID NO: 5068 - protein, 182 aa, Artificial Sequence
  Synthetic
SEAEALIEEVKTLVRRNKEHAKRSHEKTEKLVRDVADALRKTNDEARKLVEEVRRILESGDKASRVLKRLEDLARELARAHKEILRTLEELVRRAKRDNERNLDEHRKLIEEIERRLEKDGVDKSKLERLKRELTRSAEELRELDKRNEDELRRAAKRIRDIVRKSEEDLKKVRDDAREKTR

SEQ ID NO: 5069 - protein, 182 aa, Artificial Sequence; identical to SEQ ID NO: 5068
  Synthetic

SEQ ID NO: 5070 - protein, 182 aa, Artificial Sequence
  Synthetic
KDVEEVRKELDEIARRVTEEIKRVHDETARIVDRLRERLEKVTRDNRRSVRELEKELERNKEKAERVKEIVTRNRETTKRVKDEVRKIIRELERKSEELEKRVREIEEKLKELLKRLAERGVPEKKLREAKKRLDELAERLKRLIDRNREEIKRVAREADERIRENEKEVEEVEERLDRKIK

SEQ ID NO: 5071 - protein, 182 aa, Artificial Sequence; identical to SEQ ID NO: 5070
  Synthetic

SEQ ID NO: 5072 - protein, 182 aa, Artificial Sequence
  Synthetic
KDAEKVVEDLERKADAVMRKLEDVSRRHREIAKRIKDRLEKVHRDNEKSVEDLKRILKRNRESEEEVRRIVEENRRSSDELRKEVEKIVKEMEDTSREVAKDVEKIVRELREELKRLRERGVPEEIVRRAEKKVEDFERRLRKLIEDNKREVDKVEKELRDTIRRNEERIREAVEELKRTSD

SEQ ID NO: 5073 - protein, 182 aa, Artificial Sequence; identical to SEQ ID NO: 5072
  Synthetic

SEQ ID NO: 5074 - protein, 182 aa, Artificial Sequence
  Synthetic
EDVRRVVEELRKIAEDAKEKARRVHERDRERVRKVEEDAKKVHEENEESVTRLERLLDRRRESDKDVRKIVEDNERSSKEVERRLEEIVRRSRKHSTDVEEDLKRIVEELERKLRELATRGIPEDDVRRIREEVEKVRKDLKDIVKRNKEANDEVEKRLRDIVRRNRERIEEMRRRLEEKKR

SEQ ID NO: 5075 - protein, 182 aa, Artificial Sequence; identical to SEQ ID NO: 5074
  Synthetic

SEQ ID NO: 5076 - protein, 182 aa, Artificial Sequence
  Synthetic
EDVKRVVKELEDIAEEVRRRLEKVNRENRESMKRLEEELRKVHEENRESIERLKRTLKDRRESKEEVRKIITEDKKTSEELKRRVEEISERNKDTSRRLEEDVKRIIDKAREDLERLARRGIPEEIVKEAKERVDKVKDDLRRLIEENERDIRRMDRKLEDEIRRNDEELRRVVREAEETVR

SEQ ID NO: 5077 - protein, 182 aa, Artificial Sequence; identical to SEQ ID NO: 5076
  Synthetic

SEQ ID NO: 5078 - protein, 182 aa, Artificial Sequence
  Synthetic
SDVERVRRELREIAETVKERLREVNERNRKSVRDVEEIVKKVHEEDKDLARKVEEILERNREADEKVKKIVRESEETSKELERRLREIIKDNERTSKELEEEVRKITRELEKKLEDLARRGIPKERVDDIKREVDKAREDLRRLIEENKRDIKEVVERLEKLIKDNRDDNDRLRRRLEEKSR

SEQ ID NO: 5079 - protein, 182 aa, Artificial Sequence; identical to SEQ ID NO: 5078
  Synthetic

SEQ ID NO: 5080 - protein, 182 aa, Artificial Sequence
  Synthetic
SELEKVEKELKRIVDEVKKELKRVHEDDERLVRELEESLKKVTEDDRRLARELEDTLRKRRESEREVERIIDESRKTSEDLEKEVEDIVRTSEETSKKMEKRVRDIVRKLEETLRRLREAGIPEEDARRAEERVRRVVKELKELIERNKKRNKEAVERLRRLIEENKRENREVEKRARDTAR

SEQ ID NO: 5081 - protein, 182 aa, Artificial Sequence; identical to SEQ ID NO: 5080
  Synthetic

SEQ ID NO: 5082 - protein, 182 aa, Artificial Sequence
  Synthetic
KDAEEVLERLKKIAEEVAKELRDVDEENRRLLKRWAEILEEVTREDERLARELEERLERRREASEEVREIERRSRETSEELERTVRDVLRKDRKSSKELEERVREIIKRAREELKRLAERGVPEEKLRRAKEEVDRAEKELRELIKRNKDNLERAVRELEKLIEENERRNREVEKRLEDRER

SEQ ID NO: 5083 - protein, 182 aa, Artificial Sequence; identical to SEQ ID NO: 5082
  Synthetic

SEQ ID NO: 5084 - protein, 182 aa, Artificial Sequence
  Synthetic
KDVEDVVRRLEEIAKRVKERLKEVDKRNKDKAREWLKEVKEVHERNEKLAEEVRRTLKDNREKSEKVRKITEESKKSSDTVRKRLEDLSRDDKRSSEELRREVEKIVRELRDILRRLRERGIPEEIVREAEKRVREMERELRELIERNKRNVEEMDRRLEELIKENEERNKRVEEDLRRKTK

SEQ ID NO: 5085 - protein, 182 aa, Artificial Sequence; identical to SEQ ID NO: 5084
  Synthetic

SEQ ID NO: 5086 - protein, 181 aa, Artificial Sequence
  Synthetic
DEVEEAKRRLTELVDRLRKTLEKVSREDRELEERVRKITKDSHDTTEEILKRLKRELEKGVDKEEVERVREELEEITKRNEDESRRVIEESEESTKRLEEEVERVEREVRRLLEELRRRGVDEKDLRELEERVRRAVKKLRDDLRRNKKESEEVKKKLEDENKKNRDRVAEAEEELRRRTT

SEQ ID NO: 5087 - protein, 181 aa, Artificial Sequence; identical to SEQ ID NO: 5086
  Synthetic

SEQ ID NO: 5088 - protein, 181 aa, Artificial Sequence
  Synthetic
DEVREMLRTLDEIARRLKKRTKESIDTDRRLVKKLREETDKSIEDDKKLVKEVEELLDGGADEKIVREVIKRSRDLNRENKERSRKVIKESRELNKRNSEETKRVIEELRELLRKLKDDGVEERKLRELEKRIRKAEEELRRDNERSKKETEDVERDLERKNEESERRTREAEKRLKERSD

SEQ ID NO: 5089 - protein, 181 aa, Artificial Sequence; identical to SEQ ID NO: 5088
  Synthetic

SEQ ID NO: 5090 - protein, 181 aa, Artificial Sequence
  Synthetic
SEVEEVLKRLRDIARELEKLIEEVIRRDRKLVEELKRRSERSIETDRRLVKRLKEMLDGGADSKDVKRVIERSRELNDENTRESERVIEESERLNRELEERIKEVTERLRRLLKELRDRGADEEKVRRAEEEIREVERRLRKLLRDSKEETKEVVKELRRLNEESKKETEKVVREAEKRTK

SEQ ID NO: 5091 - protein, 181 aa, Artificial Sequence; identical to SEQ ID NO: 5090
  Synthetic

SEQ ID NO: 5092 - protein, 181 aa, Artificial Sequence
  Synthetic
KDAEEVVRRLTKLVEDLKRKIEEVIREDKELVDRVRDTSRKSDETLEKLVREVKKLLREGATSEILEKVIRELEEILKKNTEDSKDAIRKSRELNERLARDIERVIRELREIVKRLAERGVEEEKLKRLEDRVREAEKELRELLERSEDTTRRAERELEELNRRLEDKIRRVVEELKEESR

SEQ ID NO: 5093 - protein, 181 aa, Artificial Sequence; identical to SEQ ID NO: 5092
  Synthetic

SEQ ID NO: 5094 - protein, 181 aa, Artificial Sequence
  Synthetic
SEVEDVLRRLERLVRELEKETKRSLEENEKLARRLKKKLEDVVRDNKRLVDEVKELLKEGADERTLREIEKRSDDTLEELKRDVDRVIKESKETLEDNSRKTKEMIDRLRELVKRLRERGAEEEKLRRLEKLVRDAARRLKELNDRLRKRSKEVKEELERILRELKERSDRAKEDLRRAAK

SEQ ID NO: 5095 - protein, 181 aa, Artificial Sequence; identical to SEQ ID NO: 5094
  Synthetic

SEQ ID NO: 5096 - protein, 188 aa, Artificial Sequence
  Synthetic
SELEKVEKDLEKLIRDDEEENKRVLEELERLVREDKEKNKRVHDETRKLEDTLRRILEKSKDKDTIRKILKEIEDRLDDLNRKLHEKNRESTERLKRLIDELRRTNKRSVEELERLLKELAERLDKEEAKEKLRRLKERIREAEEKSRKSLRDIEETLKKVKRESEETDRRNRDTLRRAKKRLKDETR

SEQ ID NO: 5097 - protein, 188 aa, Artificial Sequence; identical to SEQ ID NO: 5096
  Synthetic

SEQ ID NO: 5098 - protein, 188 aa, Artificial Sequence
  Synthetic
DEVEEVKKTIRDLLRRNKEISRETLERLKKLVDENRERNKKVHDETKKLTEEIKKILEEIKDKDTLREILREIKERLKELNKRLHETNKRSREELEKILRENHEISKESVRRARKLLEDLRRRLDKEEAEKELRKLEKEVKDAKEESERSDRRLEKEIRDVERDSERSDRENRDEIRRVAEELDERSR

SEQ ID NO: 5099 - protein, 188 aa, Artificial Sequence; identical to SEQ ID NO: 5098
  Synthetic

SEQ ID NO: 5100 - protein, 188 aa, Artificial Sequence
  Synthetic
SEAEKVLRDLEELVRENEEKSERSLRELEKLVRDNEEKNKEVVKRIKDLAERIRRILEEIKDKDTLEKILRKIDDDARRLLERLERINRESDERLRRLNKRNEDLSRESVKRMEELIRDLERKLDDEDAKRKLEEIRKTLEEVKRRSEDSNRELRRRLEEVKRRSEKSLRDLEELVRRIKKELDDRSR

SEQ ID NO: 5101 - protein, 188 aa, Artificial Sequence; identical to SEQ ID NO: 5100
  Synthetic

SEQ ID NO: 5102 - protein, 185 aa, Artificial Sequence
  Synthetic
SEADKLREDLERRVREIEKRSRDSDKRLEELLEEIRRRSKRTLDELERRLREVEEELEREKDKETVDRLLKEVEERLRKILEDNKRLIEDITEKLRKILEENERLIREAVKELERLLEDLERKGVDKKKVDRVRDEVRKVKRKLEEEHKKLERKVREARKELEKSHRDLNREVKKAKERLDRKRD

SEQ ID NO: 5103 - protein, 185 aa, Artificial Sequence; identical to SEQ ID NO: 5102
  Synthetic

SEQ ID NO: 5104 - protein, 185 aa, Artificial Sequence
  Synthetic
DEVEKLRKELEDLAEKIKRESEKTLRELKKLADEIRKLSEDTLRRLKELLDRVEELLRETKDKETVRRLLEKVREELRKISEENRELIERLARRLDEIAKRNKELIERIARRADELLKRLKDKGVEERKVRELEKTVEKIKRELEKSHEDLNREVEKIKRDLERSHKELNELVKRAEERLRRETK

SEQ ID NO: 5105 - protein, 185 aa, Artificial Sequence; identical to SEQ ID NO: 5104
  Synthetic

SEQ ID NO: 5106 - protein, 185 aa, Artificial Sequence
  Synthetic
SRVEELKRRLEELIERIDRESKRTLKELKDLAREIKELSERTLRELERLAKEVKEELDRIKDKDTVRRVLEEAERMLKEISERNKRLIEDIARKADEIHKRNRELIEDIRRKLEEILRRLRTEGVDEEKVKELEERVRRVDEELERSNERLRREVKKIKEELKESHERLNKRVEEIRRELRERSR

SEQ ID NO: 5107 - protein, 185 aa, Artificial Sequence; identical to SEQ ID NO: 5106
  Synthetic

SEQ ID NO: 5108 - protein, 185 aa, Artificial Sequence
  Synthetic
DEAERLEEEIRRLAEEIKRLSKESLERVEKLLEEVRRESKRTLEDLERLVRDVEDKLRKIKDEDTVRELLKRVEDELRRILEENKKVIDDVEKELREINEENRRLIEDAARKLDTLLRDLERKGVDEEKVRRLKKRIDEIKEELKKSNEDLHRRIEEAKRELEELHERLNRDVERVKEKLRRDAK

SEQ ID NO: 5109 - protein, 185 aa, Artificial Sequence; identical to SEQ ID NO: 5108
  Synthetic

SEQ ID NO: 5110 - protein, 185 aa, Artificial Sequence
  Synthetic
RELEELLKTLEELLKKIEEESRRSLEELKRLVDDIRRKSEESLERLERLAERVKEVLDREKDKETVDRLLKEVARRADRINEENRELIDRARKELDRILRENAELIRKIVEELRRLLEKLKKDGAPKEKIDRLEKRVRDAKKRLEDLHRELNKRVEDVKRDLEESNKRLHDTVREIKKELRERTR

SEQ ID NO: 5111 - protein, 185 aa, Artificial Sequence; identical to SEQ ID NO: 5110
  Synthetic

SEQ ID NO: 5112 - protein, 185 aa, Artificial Sequence
  Synthetic
DEVRELEERIDRILKKIEDESRRTLEEIKKIAREVEKRSEDTLRELDDLVRRVEELLERIRDKETVDRLLKKAKKDLEDIHRRNREVIERAARELDRMLEENKRLIDKIIEELKRMLDELRKRGVDEKDVRRLEKKIREAEKRLRESNERLEKTIRDIKKRLEKLNKELKDRVDEVVKRLRDKTE

SEQ ID NO: 5113 - protein, 185 aa, Artificial Sequence; identical to SEQ ID NO: 5112
  Synthetic

SEQ ID NO: 5114 - protein, 185 aa, Artificial Sequence
  Synthetic
SELEELLERLKRRADEIRKESEKTLEELDRDARRIEKESRETLEELKKRLDDVRRALEETKDKETVRRLLEKVAEELKRISDRNERLIREAAKKLDKIHDRDRRLVEKAREELKKLLEELEREGVDKKKIDDLRRKVEEIEKDLKRSNDELRKRVKEIKDRLKELHDKLNEDVKRARKELEERRK

SEQ ID NO: 5115 - protein, 185 aa, Artificial Sequence; identical to SEQ ID NO: 5114
  Synthetic

SEQ ID NO: 5116 - protein, 185 aa, Artificial Sequence
  Synthetic
SEAEELLERLDRRLRRVEETSKRTLDELKRLLEDIERKSRKSLKELEDLVRKVKDMLRREKDRETVRRLLEEAREVLREINERNRKLVEDIRRLLEEIHRRDKELVERVRRELEKLLRDLERKGVDEKKIRDLERRVEEAARRLEKSNRDLAEEVERAERRLDRSNRELRRRVEKVLKELEDTER

SEQ ID NO: 5117 - protein, 185 aa, Artificial Sequence; identical to SEQ ID NO: 5116
  Synthetic

SEQ ID NO: 5118 - protein, 185 aa, Artificial Sequence
  Synthetic
SELEELEKRLEDLAREIKRRSRESLKELEELVKRIEETSKRTLDELKRLLDEVVKELRRIKDKETVRRLVEEVEKRLEEIHKEDEKLVREATERLRRINEENKRIVKEAVDELRRLLKELRKRGVPEEDIRRLEERVEKIREDLERLNRELHETVKRVKKRLEDSNRRLKEEVRKAKRRLDEELK

SEQ ID NO: 5119 - protein, 185 aa, Artificial Sequence; identical to SEQ ID NO: 5118
  Synthetic

SEQ ID NO: 5120 - protein, 185 aa, Artificial Sequence
  Synthetic
SEAEELTERIRKILKEIRELSEKSLRELRELVKTITELSKESVERLKRRVEEVKEELRRIKDKETVRKRLEDVERELERINKENRRLVEEAERRLREINKRNEKLVRDIKRELERMLRDLRRKGVDESKVRELEERIRRAEEELKKRNEDLHREVRKVLKELRDSNKELEKEVKRVKKELRDESR

SEQ ID NO: 5121 - protein, 185 aa, Artificial Sequence; identical to SEQ ID NO: 5120
  Synthetic

SEQ ID NO: 5122 - protein, 185 aa, Artificial Sequence
  Synthetic
SELEKLAEDLERLAEEIKRESDRSLEELRELAERIKRESRKTLEDVKKLLKEVKEVLDREKDKETVERLVRDVEKKLREINKRNRELVEKIARDMRRINEENRRLIEEIRRLAEELLKRLKDEGVDDKKIEDLRRRVEEIIKRLEKSNRDLRKEVEDIKRELEKLNKELHDTIREAKERLDRTTK

SEQ ID NO: 5123 - protein, 185 aa, Artificial Sequence; identical to SEQ ID NO: 5122
  Synthetic

SEQ ID NO: 5124 - protein, 186 aa, Artificial Sequence
  Synthetic
REVEELLKELEKVVRENEKKIEDLHKRNEDVVRKIEKDHRDSEKELKEVADRVRELLERKPNIDELLKRILEELKRIAEEVEKRNEEIIEELKERVRKSREDAKRSLEEHERIIRELERRLEERGVREDDVRRLKKRAEESLKKIEDDLRRDEDRLRRVIEKSKRLVDKLREELERVLREIEKRIR

SEQ ID NO: 5125 - protein, 186 aa, Artificial Sequence; identical to SEQ ID NO: 5124
  Synthetic

SEQ ID NO: 5126 - protein, 186 aa, Artificial Sequence
  Synthetic
SEAEKLKEDLDRVVEKVKEDLKRLHDENRRVAEKNERVIEELHRRNREVTKELEKRLEEKKDDKEELERIIREAEEIVKKSLKRLKESLEEHRKIIEDSKRELRKILERLKKIIEELDDRLRKRGVEEEKVKRLRDAVRKVLKEIEEELERDERAVAKTLRKIEELLKRDKKELDKVRKRLEERLR

SEQ ID NO: 5127 - protein, 186 aa, Artificial Sequence; identical to SEQ ID NO: 5126
  Synthetic

SEQ ID NO: 5128 - protein, 186 aa, Artificial Sequence
  Synthetic
SEAEKIEEELRRAAETAKKRHEDSERELEEAAKTAEERAKRIHDRNERAAEEAKKRAEDDKDADELAKRILEELERIARKSEEDLKRILEELRKIAEDAEKRNREINEELKEIAKRAEDRLRKRGAEEEKATRIKREADEARKESKKLAEKLKKRADEARRKLEEEAKRDKERADRAAKEIEDRAR

SEQ ID NO: 5129 - protein, 186 aa, Artificial Sequence; identical to SEQ ID NO: 5128
  Synthetic

SEQ ID NO: 5130 - protein, 186 aa, Artificial Sequence
  Synthetic
SEVEKLKEDLKRVVERVKRDHERSLKRLEDVAREVEKRIRDLHERSKDVMRRLKDLIDKKKDDTELLERIIRDAARIVKESKDRLREILRDLEKIIEDLKRENEEINRDLRRIVKELKERLDERGVEEDELRKLAEDIKRAEDESRKLVERLKKKAEEVRRKIKKLLEENEEELKRILDRLREAAK

SEQ ID NO: 5131 - protein, 186 aa, Artificial Sequence; identical to SEQ ID NO: 5130
  Synthetic

SEQ ID NO: 5132 - protein, 186 aa, Artificial Sequence
  Synthetic
SEVEELLERLKKVADDIRREIEKLHKRTKEVADEVRKRHEDSRRELEKVADEVRDRIEKDKDADELLERILRELREIIKRLRERNERINRELRRIAEESERELKRILDEARKIVKELRDRAERRGVDSKALKRLSDEIKKIEDEIRKLLEDNRREVEEAEKESRKLVEELERRAKEVEEEIKRARD

SEQ ID NO: 5133 - protein, 186 aa, Artificial Sequence; identical to SEQ ID NO: 5132
  Synthetic

SEQ ID NO: 5134 - protein, 186 aa, Artificial Sequence
  Synthetic
SEVEKILEDLKRVVDEVRKRHKESLDRNKKVADEVRELHERSDKELEDVVREVKDKLEKNKTDKKLLEDIRRELREIVDRVRRDNERINRELKKISDKLDKENEDINRELREIAERVRDKLRKDGIDSKDVKRIEDELRKANEESRRLVEELRKHSEDVNRESRKLVEDLERKLRKAEKDIEDDAR

SEQ ID NO: 5135 - protein, 186 aa, Artificial Sequence; identical to SEQ ID NO: 5134
  Synthetic

SEQ ID NO: 5136 - protein, 186 aa, Artificial Sequence
  Synthetic
SEVEDLLRRLKEVVEEVERLIKKLHKETKEVVDEVRRLHEKSLRELKKAADDARDALRRNKDITELLDTIIRDARRILEELARRNEEINEKLKRIADRSAKRLEEILERLRRIIEELKDELRKRGVEEEKVRRLAEEVKRALDRIKELIKRNRDELKRANEESKRLVERLREEAERILRDLRRKLD

SEQ ID NO: 5137 - protein, 186 aa, Artificial Sequence; identical to SEQ ID NO: 5136
  Synthetic

SEQ ID NO: 5138 - protein, 186 aa, Artificial Sequence
  Synthetic
SEVEKIKKDLEKVADEVRRLHKESLDRLKKVVREVEERLKRLHEESEKVAKDVRRKVEEKKDDKDRLKKILDELREIIERSIRAFKKILDELEEIIKRLREENEEINRRLKEIAEEVEDRLRKRGVDEREVKKIKDDLDRVNEESRRLVEKLERDVTRVRKKIKEELKKNADRLKEVEEDIKRRAK

SEQ ID NO: 5139 - protein, 186 aa, Artificial Sequence; identical to SEQ ID NO: 5138
  Synthetic

SEQ ID NO: 5140 - protein, 186 aa, Artificial Sequence
  Synthetic
SEVEELERELKEVVDRVRKLHRESLERNREVVRKVDEDIKKLHRESEEVAKEVEKLIEEVKDDTDKLRKILERLREIAERSRRTLTEILKRLEKISRELLEENKKINEELKRILEDLIRRLRERGVDERDLKRLEDEARKANKESRDLVREIERHSREAMKRIEEELRRNKERLERVLKKIEDKAR

SEQ ID NO: 5141 - protein, 186 aa, Artificial Sequence; identical to SEQ ID NO: 5140
  Synthetic

SEQ ID NO: 5142 - protein, 186 aa, Artificial Sequence
  Synthetic
SEVEKLLEDLKRVAREVEKLLEDLHRRTDEVMKRNEDDIRRLHEESDRVVKRVKDEIEKKKDDTDRLREILRRLEEIAKKSDEDLRRSLDEHDKIVKKSEEDMERILRELRKIIEDLERRLRERGVDERDLKRLKDEAKRIEDKIRELLERNREKARRTKEKIKKLVERNRRELEKVLDEIRRRIK

SEQ ID NO: 5143 - protein, 186 aa, Artificial Sequence; identical to SEQ ID NO: 5142
  Synthetic

SEQ ID NO: 5144 - protein, 178 aa, Artificial Sequence
  Synthetic
KEVEDVEKRNREVHRRIEKLIEENERRLKEVRDRIRKLVREIEDLNRRVREEVDRRNAPEEVRKELEEVTERSRRMARDIERLLDKATKESRDNVREVKADLKRVTEETRRLAEELKDVEEVLRDLLRRNEEVVKRVEDNLRRDTERLEKVAKDVEKKLREVLKRNKEMVDEVRKKTK

SEQ ID NO: 5145 - protein, 178 aa, Artificial Sequence; identical to SEQ ID NO: 5144
  Synthetic

SEQ ID NO: 5146 - protein, 175 aa, Artificial Sequence
  Synthetic
SEEEDVLRKLEKIVTDLRETLKRMHEDSERIVEESRKHARKVHEDSKKIVRELKKVLDEKRVDRREVERTVRDVIRRSEEVFERNRDLLRRLKEKSEEIARRIEKKLKEVKDRLEEARVPEEVRRRVEEIRREIERELKRNRERLEEVERENRKLLRENKEELDKVEKDLRDTAE

SEQ ID NO: 5147 - protein, 175 aa, Artificial Sequence; identical to SEQ ID NO: 5146
  Synthetic

SEQ ID NO: 5148 - protein, 180 aa, Artificial Sequence
  Synthetic
DDIKRLEDEVRKAAEENKDEVRKNREELKRIKDEIDKLVKDVEETIRRAEDEIRKRVKDKETLERMEKLLREVKKEVDEVVKELDELLRRLEEKSRRVVEENKKLLDTIRKRLKDVSNTEDKRVMEKVLRELKEIVDRSRDHLRRVHEDSKRIADELRRKIEELLKRIKKVVDELREAIR

SEQ ID NO: 5149 - protein, 180 aa, Artificial Sequence; identical to SEQ ID NO: 5148
  Synthetic

SEQ ID NO: 5150 - protein, 184 aa, Artificial Sequence
  Synthetic
DDLRRIEKELKRLADRARKINRESDERIKKLEEEIRRINEDSLRRDRDLARRLREMLKRVRSREVEERLKRITDRSRELNEENERRNRRVEERLEKLLKENEDENEKVIRDLERLVEELIRKEGDTREVKKLKEDLDRVKRELEKLNEEIRDRIRRVKEELKRLNDRSKKHTKEVEEEVERRKK

SEQ ID NO: 5151 - protein, 184 aa, Artificial Sequence; identical to SEQ ID NO: 5150
  Synthetic

SEQ ID NO: 5152 - protein, 184 aa, Artificial Sequence
  Synthetic
SEAEDILRRIKRLADENRRILKEILDRIKELADRVRKINEDSLRTLRKLAEELRRVAEKVRSEEVVRRLERIIRELRRLLEENKRRNEEIIRELRRLLDELRRRSEDTVRKIRKLLEDLIRKKGRSEKAERLEREVRKIEKESREMLKRIEDEIRKVEEDLRRLNEELERDVRRVEEEVKRAAD

SEQ ID NO: 5153 - protein, 184 aa, Artificial Sequence; identical to SEQ ID NO: 5152
  Synthetic

SEQ ID NO: 5154 - protein, 184 aa, Artificial Sequence
  Synthetic
DELDDIRRRLEKLEEEAERINRESEKRDRELARRIREINKRSKEEDRRLAKEVDEILRRVRSEEVKDLLRRITEESKKLNEENSRRNEEVDKESKRLNEENEKTNRDMIRKLRELLKDLIDKKGRTEAVEELRKKIEEVEKKLRRLNEKSKKHTKDVRDELRRLNEDSKRHTDEVKDRLEEATR

SEQ ID NO: 5155 - protein, 184 aa, Artificial Sequence; identical to SEQ ID NO: 5154
  Synthetic

SEQ ID NO: 5156 - protein, 184 aa, Artificial Sequence
  Synthetic
DELRKIREDLKRLATEAREINKRSDEDIKRLTDDVRRINKESLERLKKLADDLRDALRKVRSKDVKRTLEEIIRRARKLVEDDKRTNRKIIEELKELLDRNRRINERIARELERLLEDLIRKKGRTEAVKELEEEIRKVKEELKKLNKEIEDKIRDVERELRETNKRLEDEVRRVEEEVRRATK

SEQ ID NO: 5157 - protein, 184 aa, Artificial Sequence; identical to SEQ ID NO: 5156
  Synthetic

SEQ ID NO: 5158 - protein, 184 aa, Artificial Sequence
  Synthetic
DDAERILDEIRRLTEELREINKESLKKVERLAERIREINKDSLRRDKELADRLRRMLEEVRGEEVKEILRRVDKESEDLNRRNSEINKRVTDEIRKLVEDNSRRNREAEKELKKLMDDLIRKTGRTEKVERIERTIRKVARELEKLNEDIRKRVDEVEEELKKLNKESEDHTRRVREEVRRRTQ

SEQ ID NO: 5159 - protein, 184 aa, Artificial Sequence; identical to SEQ ID NO: 5158
  Synthetic

SEQ ID NO: 5160 - protein, 184 aa, Artificial Sequence
  Synthetic
SELETVEERLKRLEEEIRRLLEKVDRDLDRLADEVRKKNKRSHERNKEIEDRIDKLLKDGKDDETVRRVAEELRRTLRRNEEENRRVAEELERILRELRKVVEDIKKRLEDLLKELKDRVDKEELKKMLRKLEERVKEVTRELEDLLKKAEEKVRRVKDELRRSNKKDEDRLREVEEKLREDSR

SEQ ID NO: 5161 - protein, 184 aa, Artificial Sequence; identical to SEQ ID NO: 5160
  Synthetic

SEQ ID NO: 5162 - protein, 184 aa, Artificial Sequence
  Synthetic
SELEEVRKRAKDIADEDRELNRRVHEENKRLADDVRRKNEKSHRDNERIATELRELLRDGKDDRVVRRVEEELKRTLEKNKRDNDRVVEDLKRTLDRLKELNDRSVEKLERLLKELEDRVDKEELKKLLDELRKRVEDVKEESKRSLDRDRRELERVKKELDDSNDEDRKRIEEVIKEVRDRSK

SEQ ID NO: 5163 - protein, 184 aa, Artificial Sequence; identical to SEQ ID NO: 5162
  Synthetic

SEQ ID NO: 5164 - protein, 178 aa, Artificial Sequence
  Synthetic
DEEREVKERLKELIERLRRLHEESLRELKRIADELRRLHEESHKRNEDIARELERLLAEVKDKKVVEELVKRIIERLEKSLEDDRDLSRRAIEELKRLLDEDRKLSEDAKKRLKDLLDTVPRIDELERRVRKVEEESKKLHEEIRKRIEEIERESRKLHEDDRRRIEEVLKRIKDAVR

SEQ ID NO: 5165 - protein, 178 aa, Artificial Sequence; identical to SEQ ID NO: 5164
  Synthetic

SEQ ID NO: 5166 - protein, 178 aa, Artificial Sequence
  Synthetic
SDEDRLREEAKKVADELRKLHEESHKRNKEIADELRKLHKKSHDDNKRIADEITELLKRTKDKRTLEKLIEEARKKLEESLRRDAEISKKIAEDLERSLREDAKISEDIRRRLKKLLEEVDKIEELRDRLRRVEEESRELHKRDREEVERIRRESEKLHREDREDVKRIEKKLRDDAR

SEQ ID NO: 5167 - protein, 178 aa, Artificial Sequence; identical to SEQ ID NO: 5166
  Synthetic

SEQ ID NO: 5168 - protein, 183 aa, Artificial Sequence
  Synthetic
DEAEKVLEELRRRAEKVLREVKKVLEDHKRLADELRKELKRVSDENRDSLRRLLEEIDRNKELKESVKKILDENRESSERLEDTVRKILKESKDRTKELEDKLETILEDLRRKLEDVERRGVLDEDLLRRLRELLDEIRKELRDLIRKLRELNDRVERDLRRIIRENRELVRRAEKELEDRTR

SEQ ID NO: 5169 - protein, 183 aa, Artificial Sequence; identical to SEQ ID NO: 5168
  Synthetic

SEQ ID NO: 5170 - protein, 183 aa, Artificial Sequence
  Synthetic
DEAEEVLERIKDLARKNEEKNRRVLEEHEKLIRESEERDEKSSRDNKRSVDEIRDIIRRKRESKDELKKILDDNKRSSEENMRRVKRINDESKKRTDELEEESRRVLEKVEKEVEDLARSGLVEEEKIKRIRDELARWAEKIKKTIDELRKLNKEAHDRNRKTIKENEDLVREAKEDLERKTT

SEQ ID NO: 5171 - protein, 183 aa, Artificial Sequence; identical to SEQ ID NO: 5170
  Synthetic

SEQ ID NO: 5172 - protein, 185 aa, Artificial Sequence
  Synthetic
SEAEEVLKEIKKLADELRKKNRESVEKVRESSKRLKDEIRKVLEDIKRLAEKLREILREMKDKDTIRKTIEDITEKLKELLDRLRERIEKAKRDHERLVERNRRENDKIRKDLERLLEELRKRGVDEKLLRELEKLIRDIKRELDRSDEKLEELVRRSAKELDDLLDTLREIIERIKRDLDEKLR

SEQ ID NO: 5173 - protein, 185 aa, Artificial Sequence; identical to SEQ ID NO: 5172
  Synthetic

SEQ ID NO: 5174 - protein, 185 aa, Artificial Sequence
  Synthetic
REAEEVLKRIKELADEIRKRNRESLERIRKSSEDLKRENEDSIRRVRELIDTLRRRLEKEKDKKTIEEIVKEIDKRLKELLDRNRRRNEEAVKEHEELLKENRKENEEILRDAERLLRDLERKGVPKELVDRIRDLIRRIKDELKESDDRIKELIDKSKEDLDKSDEDLKREIDKAREELAKAIK

SEQ ID NO: 5175 - protein, 185 aa, Artificial Sequence; identical to SEQ ID NO: 5174
  Synthetic

SEQ ID NO: 5176 - protein, 182 aa, Artificial Sequence
  Synthetic
DEVEELLKEVEELAREIVERLEKNLRDTKKLIDEIEEYARRNEERTRKLIEEAERLARRGDKSDDLKREVEKLLKESEDNVERLIRELEKLLEESRRNVKRIIDELRKRLDDVRRRLEERRADEELERRLRRLLEELERRLKRLEDEHRRLVEEVRDKLRKIEETHREIVERVRRTLDEEKR

SEQ ID NO: 5177 - protein, 182 aa, Artificial Sequence; identical to SEQ ID NO: 5176
  Synthetic

SEQ ID NO: 5178 - protein, 182 aa, Artificial Sequence
  Synthetic
DDARRLLEEVKELLERSKRHLTKNLEDTRRLIKELLDYARRNLEDTRRLIEEVLDLLKRGRRSDELMRRLERLLRESEENVKRLIKALRDLLKESKENVDRNIKRSEELLRRVEELADRRRLPEEVKETLKRLLDEIRRENEKVARDHKKLVDDVERELEDIERRHKELVDRARKVAEDEKK

SEQ ID NO: 5179 - protein, 182 aa, Artificial Sequence; identical to SEQ ID NO: 5178
  Synthetic

SEQ ID NO: 5180 - protein, 182 aa, Artificial Sequence
  Synthetic
SDAERILDEVRKLVEDSKRHLDENLKRTAELSKRSKEYAEENLDRTRRLAKEAADIARRGDKADEVLTRLEELLERSERNVRRLIEENEELLRESEENVRRNIKESEELLRKVERLIDESRLPEKVKEDLKRLLDEIRKENKRAEDAHRDLARRSREELEKAERKHKELVDRIRKALEEIKK

SEQ ID NO: 5181 - protein, 182 aa, Artificial Sequence; identical to SEQ ID NO: 5180
  Synthetic

SEQ ID NO: 5182 - protein, 182 aa, Artificial Sequence
  Synthetic
DEVRKLLKDVRELAREIERRLEENLRRSEELLKRIEDYLRKNLEDTRRLIEEVKELADRGDKVDKLLEDVERLLRESEENVERLIKELEKLLRDSEESVDRIIRELEDLLRKVEKRADDNNLEEEFKDRLRRLMKRIKERLEDVKRRHKELVKKARKSLEEVKRRHRKLVEDVRRTLEEEKR

SEQ ID NO: 5183 - protein, 182 aa, Artificial Sequence; identical to SEQ ID NO: 5182
  Synthetic

SEQ ID NO: 5184 - protein, 182 aa, Artificial Sequence
  Synthetic
DEARKILEDLKRLAEESIRHLEENLRRSEKLVEDVERYAEENLERTKKLVRDVDEIIRRGDNVDKVAKELRKLLKESEDNVKRLIEELERLLRESEESVDRNITKSEEILRRVEELVDKNRLPEEVKKRLEDLAREIRKANEDVKRRHKKLVDDVRKRLKEIEKKHRDLVRKIEEKLRDARK

SEQ ID NO: 5185 - protein, 182 aa, Artificial Sequence; identical to SEQ ID NO: 5184
  Synthetic

SEQ ID NO: 5186 - protein, 182 aa, Artificial Sequence
  Synthetic
SEAEELLKTVRDLVEKSRKHLKENLKRSEELSRKSKEYADKNLERTKRLVKTVADILDRGDRTDEVIKELRRLLKESLDNVRRLIETNRRLLEESKKSVKRNIDESERLLREAEEKLRRDRVDKKLEDELRRLVEEAKRENDEVRREHKRLVEDSERKLEKIERDHRELVDRVEKEMREKKR

SEQ ID NO: 5187 - protein, 182 aa, Artificial Sequence; identical to SEQ ID NO: 5186
  Synthetic

SEQ ID NO: 5188 - protein, 182 aa, Artificial Sequence
  Synthetic
SDVERILEDLDRVVKESKRHLEENLRRSEKLTREVEEELKRNLKESEELVKRVEDIARNGDRVDEVLERLKELLKRSERTVEKLIDDLRRLLDESRESVDKNIKESEEILRRVEEDLERRNASEDAKRRLRELVEKVKEDNKKVKEEHDDLVRKVERRLEEIRKRHEELVRRIRRRLEEEKR

SEQ ID NO: 5189 - protein, 182 aa, Artificial Sequence; identical to SEQ ID NO: 5188
  Synthetic

SEQ ID NO: 5190 - protein, 182 aa, Artificial Sequence
  Synthetic
SDVEELLRRLEELLKESEKHLTENLRRSEKLVRDSKRHLDENLKRSKDLAREVVRLAEKGDRVDRLKEDVERRLRKSEETVRRNIEESERLLRESEKSVKDNIRESEKLLRDVEKKLDDRNIDRKVKERARELVERIKRRNEKVERDHEELAREVRERNKEVEKRHRDLVEELRRRLDERKR

SEQ ID NO: 5191 - protein, 182 aa, Artificial Sequence; identical to SEQ ID NO: 5190
  Synthetic

SEQ ID NO: 5192 - protein, 182 aa, Artificial Sequence
  Synthetic
SEAEELLERVKKLTDESLRYLEENLDRLRKLVKESEDHLKDNLRKSEKRVREVIDLARRGDTTDELTERVEELLKRSEETVRDNIRKSERLLRESKENVERLIRDNERLLREVDEELKRRNLDKDMEDKLRRLVEESRRALEEVLKRHEDLVEEVRKSNDKVRKEHEELVKRVRDALREIKR

SEQ ID NO: 5193 - protein, 182 aa, Artificial Sequence; identical to SEQ ID NO: 5192
  Synthetic

SEQ ID NO: 5194 - protein, 181 aa, Artificial Sequence
  Synthetic
SVEERLEKLLKEAEERLRESEDRTRKLVEEVRRELEKLKKRSKELADRVREELRKFPKSEDLDRILKELEEVVKRVEDTHEESRRRIEDVVRKVEKKHEESRRELKRVADEVRKRLEEKKTDEEELEKILDTLRRIAEKLVRKNEDILRRLKEIVKKVIRENEEILRRLEEIAKELAKRLE

SEQ ID NO: 5195 - protein, 181 aa, Artificial Sequence; identical to SEQ ID NO: 5194
  Synthetic

SEQ ID NO: 5196 - protein, 181 aa, Artificial Sequence
  Synthetic
SLDEEAKRVVEEVRKRLRESKERSREIVERARRELERLKEESKRLADRIREEVKKFRDDEELERILRELEEVLKDVERKHRESKKEIEDVVERIKEEHEKSERELEEVIKRIDEALERNKDDTELVKRLLDDLRRIIRELEEKNRALNETLRKIVEEAIKKNREILEELREEVDRVRKRLK

SEQ ID NO: 5197 - protein, 181 aa, Artificial Sequence; identical to SEQ ID NO: 5196
  Synthetic

SEQ ID NO: 5198 - protein, 175 aa, Artificial Sequence
  Synthetic
SEVEKVLREAREILKKNKRENEEVHKKSKEIAERNREKNEKVHRDSRKIIEELKELADRGKDARELDEAVKRLADENRRVNEDSERDIKRLAEENRRVNDESRKDIERLVRKLEKDGVDEDEARKLVKEVRETLEDSARRDEKLIEDLKRTLDESKKEDDKLIEELERRLREAER

SEQ ID NO: 5199 - protein, 175 aa, Artificial Sequence; identical to SEQ ID NO: 5198
  Synthetic

SEQ ID NO: 5200 - protein, 175 aa, Artificial Sequence
  Synthetic
SEVEKVLREAEEIAKKNEEDNRRVNDRSEKIIEENERRNRKVHKESEDIVRDLERLAAEGKDARDLERKARELVKRNKEVNDTSRRDLERLVKENRDVNKESREDIERLVKELEKAGVDEEEVRKLVEKLERLLEKSKRDDEESIKKARELLRRSEEADKKLIREAEEAIRTRKK

SEQ ID NO: 5201 - protein, 175 aa, Artificial Sequence; identical to SEQ ID NO: 5200
  Synthetic

SEQ ID NO: 5202 - protein, 186 aa, Artificial Sequence
  Synthetic
SRLEELLKKAKKLVEDVEDTNRKMLEKLRKLADDLRRINKRVLDELERLARELEDIARKIRDKDTLKDILRRMEDELRRLLKKLEEDNRRIIEELRRLLKEIHDTNREVLERLKELLRRVKEEVKEAEEVLRELKKLLDEAKKKLEEIDKRLEDELRKIEDDLRRSNERVRRLLEEVRRRIKEETD

SEQ ID NO: 5203 - protein, 186 aa, Artificial Sequence; identical to SEQ ID NO: 5202
  Synthetic

SEQ ID NO: 5204 - protein, 186 aa, Artificial Sequence
  Synthetic
DELEEMLKRLEKLARDLDRINKEVLRRVEEEVRKLEEENEEVLRTLRRLAEEVERILDEIEDKKTLEKIIRDIEEELRRLLRTIHERNKKALDELRELLERLRRTNEEIKKTLRKLIEDIREEVKEAKEVLDKLEKLLEDIARELEKSNRRLEELLKEVERRLREMDERLRKELEEVKRRLEEKRR

SEQ ID NO: 5205 - protein, 186 aa, Artificial Sequence; identical to SEQ ID NO: 5204
  Synthetic

SEQ ID NO: 5206 - protein, 186 aa, Artificial Sequence
  Synthetic
SRVEKVLEELKELMKELDDSNRRVLEELERLVRENTRRNEEVLRRVRELAERLKDELDKIKDKDTLDKRLKEIEKELRKLVEDLRRLNEETIKTLEKLLREVREENERVIEELKRLLRELKEEVKEAEELLRRAKELLKRIKERLEESDRRLKRLLDEARKRSEDIIRALEKLLRDVKRELEEKLR

SEQ ID NO: 5207 - protein, 186 aa, Artificial Sequence; identical to SEQ ID NO: 5206
  Synthetic

SEQ ID NO: 5208 - protein, 186 aa, Artificial Sequence
  Synthetic
KDAERLFEDLRRLVDENREKNEKVLREIEERVERLERENEKVLRDLEDLIRRVREEIDRTKDKETLRRIIEEILRRLAELVKTLRERNKRVLEELEKLLRKVRELNKETIRRLEELLERMRERVKEAEEMLRELKKLLDRAREESRRIIEELERTLEKVKERLDRTDKEIEELLKRAEEELREKER

SEQ ID NO: 5209 - protein, 186 aa, Artificial Sequence; identical to SEQ ID NO: 5208
  Synthetic

SEQ ID NO: 5210 - protein, 186 aa, Artificial Sequence
  Synthetic
DDLERLLKEVKERIDEVKRRNEEVLKRLRELVKRNKEKNDRVLREAEKLMKKLRDIVRKIKDKDTLRRILEEIKKRLKELLDTVRELNKRTIEELEKLLRDLDRENKRIREELEKLLRDIKEKVKEAEEVLRRLRELLRTAERELEESNRRAEELLKDARRKSEEIIRRLERLLEEVDRDIKRALK

SEQ ID NO: 5211 - protein, 186 aa, Artificial Sequence; identical to SEQ ID NO: 5210
  Synthetic

SEQ ID NO: 5212 - protein, 185 aa, Artificial Sequence
  Synthetic
DDVRELLRTLRKISEDTLRRVEEINRKLERLSRETLKRVEDINRKVKELMEEVLKELDRIKDKKTLKDVIREAKKRLDETLERLERVIRESEKRARDTLRELEKVIEDSRKTVEELKKELERRGVEEDALRELKRLVDDNETKLRRLRDTHRELLERNRTELEKLKRTHKKLVDEAEEELRKKDK

SEQ ID NO: 5213 - protein, 185 aa, Artificial Sequence; identical to SEQ ID NO: 5212
  Synthetic

SEQ ID NO: 5214 - protein, 185 aa, Artificial Sequence
  Synthetic
SDVERLLEKLRDLSRRTVRELERINEEVREIIKTLKKELDRTNKELRDIIEEIKKELDKIKDKRTLEKIVDRLDKELKRSLEEDRKVVEDAKRLLDDTLRKLEEVIRRSKELLERILRELERRGVDEKLLDELRRLLEENEKTLEDVRRTHEELVKRAKRELEKNIEEHERLVRDVKEKLERKIR

SEQ ID NO: 5215 - protein, 185 aa, Artificial Sequence; identical to SEQ ID NO: 5214
  Synthetic

SEQ ID NO: 5216 - protein, 185 aa, Artificial Sequence
  Synthetic
SDAEELLKEAREVSKRTKDTLDEINKDVKRISEETKKRLKKTNEEIKEIADRLRKELERIKDKKTLEDVVREVERRLEDSLRRDRKIVEESRRRLKETLDRLEKVIRDSERRLKEILEELERRGVSEDILRELKKLVDDNRKTLKEVLETHEELLRDNSRKLERNVERHAKLVRDIKEELKETTR

SEQ ID NO: 5217 - protein, 185 aa, Artificial Sequence; identical to SEQ ID NO: 5216
  Synthetic

SEQ ID NO: 5218 - protein, 185 aa, Artificial Sequence
  Synthetic
SDAERLLKEVEEIARRLEKKMRETNKEVDRIVKEIEDDARRLNKELREIAERIKDELDKIKDKDTLRELVRRIKKELDRTLKELEDVIKRLKDLLKETLDRDKELVDRAARRLEKILEDLERRGVDEKVLKELKRRLEEIKKKLDDNLRRHKKKVDDVARELEKIVKTHRDLVEEIRRRLRKKEE

SEQ ID NO: 5219 - protein, 185 aa, Artificial Sequence; identical to SEQ ID NO: 5218
  Synthetic

SEQ ID NO: 5220 - protein, 185 aa, Artificial Sequence
  Synthetic
SDAERLLEELKRISEETKRRLAETNKKVKKIMKELTETLTETNKKLKKIIDDLRDRIDKIKDKETLRRVLDEADKRLRKSLREDEELVRRAEKRLRDTLREDERIVRESEKRLRELLERLERRGVEERVLKELRRLLERNREELRRNKEKHKELVERIKRRLEENKERHKRLVDEARKELKEKEK

SEQ ID NO: 5221 - protein, 185 aa, Artificial Sequence; identical to SEQ ID NO: 5220
  Synthetic

SEQ ID NO: 5222 - protein, 185 aa, Artificial Sequence
  Synthetic
KDAEELLKTLERLSRETKRRLERTNRELKEISKETEKDLERTNRKLKEIIDRLREELDKIKDKRTLEKLMTEAKKTLKKSLEEDRDIVRKSDEKARRTLEEDKRIVEESEKRVKKLLDDLRRRGVSEEMLRELRRLVEENKKRLRENIRRHERLLEENRRKLEKNIRDHERRLEKADKDLEDKRR

SEQ ID NO: 5223 - protein, 185 aa, Artificial Sequence; identical to SEQ ID NO: 5222
  Synthetic

SEQ ID NO: 5224 - protein, 185 aa, Artificial Sequence
  Synthetic
KDAERLLEEARRIVKEADDILRELDEEVRRIVEKIKRDAERTNEEIREIAKRIRDEIERIKDEKALEKLLEDLRRKLEESLRKDERLVKEAARLLKETLEDLERVIKELADLLERILREIEKRGVSEDVLRELRKLVEDVKRRLKEVADHHRELVRRAEEELKKNRDEHERLVREIEKELRKARE

SEQ ID NO: 5225 - protein, 185 aa, Artificial Sequence; identical to SEQ ID NO: 5224
  Synthetic

SEQ ID NO: 5226 - protein, 185 aa, Artificial Sequence
  Synthetic
DEAERLLERVKELMERLTEEARRTNETLREIVERAERRLRELDERVRKIAEEIRRRLEKIRDKDTLRKLVEEIEKLLRDSLRELEKVLKELKDLLDRTLREDERLVREAEETLKELLRELEERGVDEKVLTKLRKLLEDIRRRLEKNLKDHEELVRRVEEKLKRVREHHEELVRRIKEELDKAEK

SEQ ID NO: 5227 - protein, 185 aa, Artificial Sequence; identical to SEQ ID NO: 5226
  Synthetic

SEQ ID NO: 5228 - protein, 187 aa, Artificial Sequence
  Synthetic
RDAEELLRTMEEITRRVKKELEDLLRTDEELSERVKEEARKLDEKLKELARDVTEKARDIKKGPEEKLRRIVEKLRRELEESRRELEKLIRESKKLNEDTKREIDKIIDDLRRLIERIERELDERNVDDEVKKELKRLIEEVRDRLKKVKDTLEKLIKENEDELRKVEEHHEKLLREIEETLERMRK

SEQ ID NO: 5229 - protein, 187 aa, Artificial Sequence; identical to SEQ ID NO: 5228
  Synthetic

SEQ ID NO: 5230 - protein, 187 aa, Artificial Sequence
  Synthetic
EEAERLLKKAEDLSRDTARKAKELLEEDEKLVRDAEKKARELDRELEKLAEEAARAATRAKKDDKRKLDKIAKEAKELADRSLERLRKLAEDLERLNEETLRRLEELIKENKERADRALEELEKDNAPEEARKRAEDLIRESEKRARDAKRRAKELIDRSRKSAKEAKEHHEKLIKEARDELEKAKK

SEQ ID NO: 5231 - protein, 187 aa, Artificial Sequence; identical to SEQ ID NO: 5230
  Synthetic

SEQ ID NO: 5232 - protein, 187 aa, Artificial Sequence
  Synthetic
DEAEKLLRELEKLSRETEKRVREIIKKDRDLSEEVRRRAERLDDELRKLVEDAERELRRIKSDDETKLDEIVRELERLLEESLRRLEELVKELDRLNKETLEELETLVRENRKLAKEVKDRLDEQNVDDKVRKRLEELIRESDERLKELTKELRKLIEDNRRELEKIIRHHKRRVDEVRKRMTELRR

SEQ ID NO: 5233 - protein, 187 aa, Artificial Sequence; identical to SEQ ID NO: 5232
  Synthetic

SEQ ID NO: 5234 - protein, 182 aa, Artificial Sequence
  Synthetic
SEVEDLLRRLEEIVKRNDDELRADEERTRKIIKENKETLDRLLEDLKRILRELEKIVRDKGNDRDVVRELRKIVREAEEKLEEVTRRSRESLKDLHRRNRESIRRSEESVEKIKRDVRRLELSEEAKRRAEEKLKRLEERSREIERRLKKLNEELKRISDEVEKTAREILERIKRRIEEEER

SEQ ID NO: 5235 - protein, 182 aa, Artificial Sequence; identical to SEQ ID NO: 5234
  Synthetic

SEQ ID NO: 5236 - protein, 182 aa, Artificial Sequence
  Synthetic
SRVEKLLDDVRKILEDNERRLRDDMRRTEEIIRKNKRDLERLKERHEEIVKRLDEIIKKEGTDERVVTELRELLRRVHEELKEVIRRSEKSLEELHRTNERSIRKSEKSLEDLRETLERLDLSEDARREAERLLKEVEDTSREAEKRLRELNEELERRSRKVEEELKKSDEELKRRIEEAER

SEQ ID NO: 5237 - protein, 182 aa, Artificial Sequence; identical to SEQ ID NO: 5236
  Synthetic

SEQ ID NO: 5238 - protein, 183 aa, Artificial Sequence
  Synthetic
SIEDRLRKIVRDLEKVLRDLKREHDDVVRELEKRLRDIEERHRELVEELKKRIEEIERERDTEDVRRLKEEAERLLEEARRNLKRLEEEVRRLLKRSAETVKELVERVKKMLDEVKTKLRKIDKEKDLEELLKELEDIIREVRKRAKENLDRTRKLIKDIEDYLKKNLDRVRKLIEDITRALK

SEQ ID NO: 5239 - protein, 183 aa, Artificial Sequence; identical to SEQ ID NO: 5238
  Synthetic

SEQ ID NO: 5240 - protein, 183 aa, Artificial Sequence
  Synthetic
SIEERLREVERRLREDLKRLEKAHRDIVRDIERTLRKVEEDHRRVKEKLKRTIEDVERRRDTEDVRRLVETAKKLLEDSDRTVERLRRELERILDEVRRNVEKLKRDVKKRLDEVRRRLEDIRDEKELEKLLRDLKRIIDEVRKYATRNLEELKRVLKRVKEEAEKNLERTERLIEEIRRRAE

SEQ ID NO: 5241 - protein, 183 aa, Artificial Sequence; identical to SEQ ID NO: 5240
  Synthetic

SEQ ID NO: 5242 - protein, 183 aa, Artificial Sequence
  Synthetic
SIEETLREIVKDLERVLEEIERRHREIKKELEDILRELKKRHEDVVREAEKELRDAKRRRDTEDVRRLIKTLEDLLRESEENVKKLREEVKKTLKESEDNVRRLKDEVRKLLKEVEDKLKDIDKREELKRLLDELKKLIDRVREEAKKNLDRSKKMIEDVERYARENLRRTKELIDDVKEKLR

SEQ ID NO: 5243 - protein, 183 aa, Artificial Sequence; identical to SEQ ID NO: 5242
  Synthetic

SEQ ID NO: 5244 - protein, 183 aa, Artificial Sequence
  Synthetic
KIEEEVDKVRRTLEKELKEIDERHKRIVEKLREELKEAEKRHEELVKRAKEELDDVKRREDSERVRELIKELKKLLDESRENMKKLREDVEELLRRSDKSLEDLRRKVEEDLERVRRRAEEIRDEDLLRKLLEELDRIRKEVRERLKRNLDRLKKLIDEVREYLERNLRRTKKLIDRVREDAR

SEQ ID NO: 5245 - protein, 183 aa, Artificial Sequence; identical to SEQ ID NO: 5244
  Synthetic

SEQ ID NO: 5246 - protein, 183 aa, Artificial Sequence
  Synthetic
DVEEELRELIERLKEVLDRLREESKRVIKELRDTLRELEERSRDIIRKLEETLRDVARKSTDKDKLDEVREKIDRLRRENKEVNDDLRKKIEDIEKRNRDVNRDLERKVRELEKELRDMSRNKDDEFLRRVLERAKKIVRKLEEDARRVLEETEDLIRRLREKAERVHEKTKKIIKEITEELK

SEQ ID NO: 5247 - protein, 183 aa, Artificial Sequence; identical to SEQ ID NO: 5246
  Synthetic

SEQ ID NO: 5248 - protein, 183 aa, Artificial Sequence
  Synthetic
SVEDALRKLIEELKRVLKKLEDDSRRIIEELRKVLKDLEDRSRKVIEEIKDDLRKIAEKSTDEDKLRKLEEKVRRLMRRNERVNRELKKKVEKLEKENEDVNRELKKKVDELVKELREVSRDRREEVAKRLLDKARDIVRTLKEEAERVHERSRRIIEELRREAEEVLEETRDILRRLREEAK

SEQ ID NO: 5249 - protein, 183 aa, Artificial Sequence; identical to SEQ ID NO: 5248
  Synthetic

SEQ ID NO: 5250 - protein, 183 aa, Artificial Sequence
  Synthetic
SELEKVLEKLKDLLRKVREKNERVLREVEERTRRVKRDLERVLKEAKDILRKAKKLADDGKVSERSLREILKKLKERLDRVIKKWEDISRKVSEDLEEVIKDDKRTVDEAKEELKRVLDKVDKKEEIARRIKKVLDDWKRVSEESKRRIEELLKRDKEELEKIKRAAKKVIDELKRLLEEAER

SEQ ID NO: 5251 - protein, 183 aa, Artificial Sequence; identical to SEQ ID NO: 5250
  Synthetic

SEQ ID NO: 5252 - protein, 185 aa, Artificial Sequence
  Synthetic
SRAEEILKRLEELIKRLKEENDRVLEENKRLIEELEKKNRDALRRIEELLKELKDIARRIEDKDTLRKILEDVRRTIEELVKEIEKENERVRRESKKLSEELRKKNKDVNEEAKKLVDDLRRDEGDEDLEEKLRRLLDELRKISEEVEERSERSNKELEDVSEDSKRKLRKILEDLRDLLRRTEK

SEQ ID NO: 5253 - protein, 185 aa, Artificial Sequence; identical to SEQ ID NO: 5252
  Synthetic

SEQ ID NO: 5254 - protein, 185 aa, Artificial Sequence
  Synthetic
SRAERILEEMERLIEEVRKENERVLRENRRLIKELKEENERILRELKRLIKEAKEIVERIRDKDTLRKILREVLKRLKELLDELKETNERVLRESEELSKDLRRKNEEALRRLRKLVKDLRDDEGDEEVDERLERLLKTAEDDSRRSDKRSEDSNRELRKVSEDSRKRLEELLKDAERKLREDEK

SEQ ID NO: 5255 - protein, 185 aa, Artificial Sequence; identical to SEQ ID NO: 5254
  Synthetic

SEQ ID NO: 5256 - protein, 185 aa, Artificial Sequence
  Synthetic
DDVDRILEELKRLVEENRKRNEDIERELEKLIKEVEDSNRTMLERMEDLIRELRDIVRRIKDKDTLDEILRRIREELRRLLEELKKENERALEELKRLLDELKRTNKRSLEELKKLLDDLRRREGDEDAERRLKELLEDAKRVSDEVLRRLTELLKKAKDVSDESRERLRRLLEDLERDLKRERT

SEQ ID NO: 5257 - protein, 185 aa, Artificial Sequence; identical to SEQ ID NO: 5256
  Synthetic

SEQ ID NO: 5258 - protein, 185 aa, Artificial Sequence
  Synthetic
SDAERLLRELERLVEENRRRNKKVLDDNERLVEKLEKSNRRALEELKELVDRLEDIARRIKDKDTLREILKRIEDELEKLLRRLEEENKEVRRESEELSKRLDDINRRSLEELDRIVKDLERREGGERVREELERLLEEAKRDSDEVRERSKKSNKKLEDVSRKSKKDLRDLLKKARDILKETER

SEQ ID NO: 5259 - protein, 185 aa, Artificial Sequence; identical to SEQ ID NO: 5258
  Synthetic

SEQ ID NO: 5260 - protein, 185 aa, Artificial Sequence
  Synthetic
SDAEEVLKELERLIREVEERNKDILRKAKELVRDNERKNREVMERLKKLIEDLKKIAKEIEDKDTLRKILEEILRRLKKLLEDAERTNEESLKELRRLLEELRKRNKTILDELRRLLRELKEREGGEEVEKRLKDLLREAEEVSRRSEERLRELLKELEDVSREVKRRLERILEELKRILDEVEK

SEQ ID NO: 5261 - protein, 185 aa, Artificial Sequence; identical to SEQ ID NO: 5260
  Synthetic

SEQ ID NO: 5262 - protein, 176 aa, Artificial Sequence
  Synthetic
DEVEELTERLKRVLEDNRRTAEEVKERTRRVIDKVRRDYEELEKRLKKILKEIEDLSRENRTDSRELEKTVREVEKELRREDKRLKDEIDRVREENEDMNKKSRDHVEEVARELEKRGIDEDTVRRLIKEAKDDNDRMEEENRRLIRELEEVSKRAHKRLRELIRRIEELLRREET

SEQ ID NO: 5263 - protein, 176 aa, Artificial Sequence; identical to SEQ ID NO: 5262
  Synthetic

SEQ ID NO: 5264 - protein, 181 aa, Artificial Sequence
  Synthetic
SAEEEVRKIKREIEKVLRESEREIERVEKEIRDVLRKSEREIERVKREVDKVLEEVRRAGIEEEKLRELEREAREVIKRLRRIVEESAKHLEKVVRELKEALKRSAEHLKKVIDDLKKALDDNGRLEDLLREVKKAIEKNEKDNRDVLREVEEKIRRDEKRNKEVLEDAKRKIEELKKRAD

SEQ ID NO: 5265 - protein, 181 aa, Artificial Sequence; identical to SEQ ID NO: 5264
  Synthetic

SEQ ID NO: 5266 - protein, 181 aa, Artificial Sequence
  Synthetic
SAEDAIREVERKAREVLKRSKEEIDKVVKKAEEILKRSKDEVKKVADEIRRILEEVRRAGADEKKLRDLARELEEAIRKLDEIVRRSEKHLRDVVRKLEEVLKKSAEDIKRVVRELREAAKRKRRLEDVLRRIEKIIRDNAEENKRVLEEAEEVLKKDEKDNRDVLEELKKILEELKRKAD

SEQ ID NO: 5267 - protein, 181 aa, Artificial Sequence; identical to SEQ ID NO: 5266
  Synthetic

SEQ ID NO: 5268 - protein, 181 aa, Artificial Sequence
  Synthetic
SVEEAVKRLADEIRKVLERSKEELERVAKEAEDVLRRSREELKKVADEVRKVLDDVRRAGLDEKKVRELAEELKELIERLKKIVEESAENIKKVIKDLRDIVKRSAEKLEKVIRELEKALRDKKPLEDALRRLKEIIDENKRENEEVLKRAREIIEENKKRNKEVLDEAKEIIDRVREKAR

SEQ ID NO: 5269 - protein, 181 aa, Artificial Sequence; identical to SEQ ID NO: 5268
  Synthetic

SEQ ID NO: 5270 - protein, 181 aa, Artificial Sequence
  Synthetic
SAEDAIRKIAEDAKKLLEDSRRELRRVVEKVKRLLEKSKEDLDRVAEEVKKVLEEADRAGLDKEKLKRLKEEIEEVIKRLKEIVERSEKKLRDVIKKLEDIVRESAKNLKEVIDKLKKLADDKKRLEDAVREVREVLKKNKEDNDRVLREAEEVLKRNEEENRKVLEEAKRIIDELKKRID

SEQ ID NO: 5271 - protein, 181 aa, Artificial Sequence; identical to SEQ ID NO: 5270
  Synthetic

SEQ ID NO: 5272 - protein, 186 aa, Artificial Sequence
  Synthetic
SVREELTRVKKRARDVLERSREEAERVAKRAEEVNRESEREIERVLEEVERILEDIREKVKEERAEEILRTLAKEVEDLKRELREVLRRSKEETEKLIKKLEEVLKRSEDDIRRLARELDEADRAKDEEAVRDVLRKVREIIRRNRKENEEVLRDVERLIRELEERNRRVLKKAKEILKRIRDKAE

SEQ ID NO: 5273 - protein, 186 aa, Artificial Sequence; identical to SEQ ID NO: 5272
  Synthetic

SEQ ID NO: 5274 - protein, 186 aa, Artificial Sequence
  Synthetic
SVEEELEKVKRKAEKLLEDSDREIKRVTKKAEKVLEDSRKAVEEVEKEVKEVLDEIRANVREEDLKRILEELTEKIKRLTDRLREVLKDSERNVRELKKELERMLEESKKDIEELVRELEEVSRVSDEKKAREVLKKVEDRIEENRRRNEEVLEKAEKIIEDNRRKNKTELDKVKEIIRRIREEAR

SEQ ID NO: 5275 - protein, 186 aa, Artificial Sequence; identical to SEQ ID NO: 5274
  Synthetic

SEQ ID NO: 5276 - protein, 184 aa, Artificial Sequence
  Synthetic
SAEDALRKLKEDSKRVNDESRREAERLKREIEKINEDSDREVEKVKKKIEELLEKVERDGVDKKDVDRLRERVEEIKRRLEEVRRDSKRLVEEMRKTLEEVLERSRKISEDIARRLDRVKDEVKDERELKRVLEEVERLIEKVKTDNKRVLDEIRKILEEIERKNRKVLKEVEDLLKTMEDEAR

SEQ ID NO: 5277 - protein, 184 aa, Artificial Sequence; identical to SEQ ID NO: 5276
  Synthetic

SEQ ID NO: 5278 - protein, 184 aa, Artificial Sequence
  Synthetic
SLEEAVREVERKAKKVNDDSREEVKKVKKESKDVNKKSEDDARRVVEEIKKILKRIAEKGVDEEILKRLEDTVRKIEKELRDVLKESRDKTKEIEERLDKVLKESEEMVDEIRKRLEEVTRRVKDERLAKKVLDEVEKIIEDIKRRNEEVLRRVREDIKRVEEENKKVLKRVKERVEEMRRRAD

SEQ ID NO: 5279 - protein, 184 aa, Artificial Sequence; identical to SEQ ID NO: 5278
  Synthetic

SEQ ID NO: 5280 - protein, 184 aa, Artificial Sequence
  Synthetic
EMEDEARKVIKKIKEVNRRSREESEKLSRKSERVNRESKRASEELREEIRRVLEEIRRKGVDEKILTDLERIIEEAERENKRVNEKSEEITRRIRERNERVNRRSEKEVEDIKRRLEEVKRRVKDRRKMKTVLDEVEKEIRRIEEENKKVLKESEDLIREVEKENREVLERTKRIIDEARKRAD

SEQ ID NO: 5281 - protein, 184 aa, Artificial Sequence; identical to SEQ ID NO: 5280
  Synthetic

SEQ ID NO: 5282 - protein, 184 aa, Artificial Sequence
  Synthetic
SVDEAVKEVEDRLRKVNEESTRESKKVVDKARDVNRKSEEASRELEDRIEKVLTDIRRKGVDEKKLKKLRDIVREAKKRNDEVNKESRDIVRELTDKNRRVNEESKRESDDLKRRLEEVSRKVKDERLAKRVLDEAKRILDEVKEKNRRVLEDSERIIKEVEDRNRRVLEETRRIIEELRKEAD

SEQ ID NO: 5283 - protein, 184 aa, Artificial Sequence; identical to SEQ ID NO: 5282
  Synthetic

SEQ ID NO: 5284 - protein, 184 aa, Artificial Sequence
  Synthetic
SVEEMVKELIRKLREVNKRSADELDRVRKRMKKLNDDSRKAVKEVREKIERLLDAARRRGVREEDLKRLKEEVDKAEEELRRVLRKSEEIVKELEKRARKVLEDSKEDSRRIEEELKEVERRVRDERLAEEVLRRVEKKIEDIRRRNEKVLRELEKILREVSEENERVLRDLERKLRKLAEDDR

SEQ ID NO: 5285 - protein, 184 aa, Artificial Sequence; identical to SEQ ID NO: 5284
  Synthetic

SEQ ID NO: 5286 - protein, 184 aa, Artificial Sequence
  Synthetic
SVEDEIRKVKDELRRVNEKSTRDSKRVRDRMETVNRESEKRARDVKKRIKEVLDKIRERGVDEEKLERLREIVERIEEELDRVLEESKKLVKDVEETNRRVNRDSERESERIMTELDKVKDDVKDKRLADDVLRKVRDEIRKIEEDNREVLRRSEDILRKIKERNKKVLDDVRRKIDKARRDAE

SEQ ID NO: 5287 - protein, 184 aa, Artificial Sequence; identical to SEQ ID NO: 5286
  Synthetic

SEQ ID NO: 5288 - protein, 177 aa, Artificial Sequence
  Synthetic
KAEEAAERIKKKLEDILKRAKEESEKILDKLREVLERSKRKHEELIRRAEEVLKDIARKGVSEEILERLRKIVEELKKKSEEDIKRVEDILRRNAELHEEVLRRVEDIVKELEDRIRKDGVDRDVLTELEKIIKELEKRAKEVLDTSRKSIEDLERRNEESLKRLTDDLKRAKEEAD

SEQ ID NO: 5289 - protein, 177 aa, Artificial Sequence; identical to SEQ ID NO: 5288
  Synthetic

SEQ ID NO: 5290 - protein, 181 aa, Artificial Sequence
  Synthetic
SEVEEVLKRLEELLRDSERKVEEMERRLKEIIDRLREEAKRVLDESKESSKRLDELAKKGIDRKDLRENHERNKDLVRRLEKLLEKVLKELEDLARKLREMLKRSNEELKRLVDRLRERRDREEADRALRDLERKHEKRVREVDDRLKKIEDELKRVVEEIRKRLEDLKEENRRIVDRTAT

SEQ ID NO: 5291 - protein, 181 aa, Artificial Sequence; identical to SEQ ID NO: 5290
  Synthetic

SEQ ID NO: 5292 - protein, 181 aa, Artificial Sequence
  Synthetic
SDVDEVLKRSEDSTRRLRERAERMLEELERLIRESKRTADEVLKRSRESSKRLDEEVRAGVDRESLKRNHEENRELAEELRRRLKESNDRLRELVRRVEEELRENHRRNEELVKELLRRRDEEEVRKELERLRRENEKVVREAKKRLEDIIRKHEKIVKEIKEALDKLLEDNKRIVDRTSK

SEQ ID NO: 5293 - protein, 181 aa, Artificial Sequence; identical to SEQ ID NO: 5292
  Synthetic

SEQ ID NO: 5294 - protein, 183 aa, Artificial Sequence
  Synthetic
DELEDVLRKAKELIKRDRDEVRRVLEELKRSTEDLRRKVRDVERRLKELIDELDDIARKIKDKETLRRLLREIEERLKRLAEELRRLLKKALEEHEKLVRDLDKKNKDSLRKLEELLRDIVRRAGRRLKELEKIKKELEDVIRETRERLKKVLDETREDIKDVDRRLRKLEEEIRRKVEEDER

SEQ ID NO: 5295 - protein, 183 aa, Artificial Sequence; identical to SEQ ID NO: 5294
  Synthetic

SEQ ID NO: 5296 - protein, 183 aa, Artificial Sequence
  Synthetic
SELEEIIERIKRLIEEDRETVKEVLERLRRLSDEDRKEVKRVLREIKELIKELEDLRRRIKDEETLRRLLEDIRRRLEELVRRLEEKNRRSHEEHKKLAEELRKKNDDSMRKIERLVEKAVEDAGRPLEELERLKEEAKRVIKRTRDELEKILRENRELIDRSRKELRDLEKELRDVVRESER

SEQ ID NO: 5297 - protein, 183 aa, Artificial Sequence; identical to SEQ ID NO: 5296
  Synthetic

SEQ ID NO: 5298 - protein, 187 aa, Artificial Sequence
  Synthetic
SVREELEKLVRELRRLLEKSKRDTDRLSEEMEELNRRAEELIRTIERRLRELLRKIRENVDKEELKRILEELEETVRRVIEKAKKVLEESKRHSDEVRRRLEEINRRIEKKIRDLERELEKVERELKTEKLVEELKRRAKKVIRELEELSRRATEEVKRVLKENEDLVREVEKDLEEILKRIKDRAD

SEQ ID NO: 5299 - protein, 187 aa, Artificial Sequence; identical to SEQ ID NO: 5298
  Synthetic

SEQ ID NO: 5300 - protein, 187 aa, Artificial Sequence
  Synthetic
SLEEELKKLEEEVRRLLEKSKEDTDRLKKEIEDLNKKAEDDVREIRKELEKLLRDIARNVDEERMRKKLEELRERVRELEEKVREVLKTSKENSKRLIEDLKRINDELEKIVRDVTRELDEVAKRLTTEELAKRLSDKFRRILEKLEEDSKRALDKAREILKRNEELLRELLEELRRILEEIERRAR

SEQ ID NO: 5301 - protein, 187 aa, Artificial Sequence; identical to SEQ ID NO: 5300
  Synthetic

SEQ ID NO: 5302 - protein, 187 aa, Artificial Sequence
  Synthetic
KAKEELDRLRKEARDLLEDSKTKTKRLVEEMDKVNEDSKRESKKLLDELEKLLRDIEKRVREEELRKTLKELEDTVRRLEEELRKIDKESEENSRRLDERLKKINKELEDEIRKLDERLKRVEDKLKDDKLVEKLREEVERILERVKELSKKAIDEVKEVIKRNRDLSKRVIERAKEILRRIEEKAR

SEQ ID NO: 5303 - protein, 187 aa, Artificial Sequence; identical to SEQ ID NO: 5302
  Synthetic

SEQ ID NO: 5304 - protein, 182 aa, Artificial Sequence
  Synthetic
SVEDELRRIEEEMKRLNEKVERDSRRVLKEVEDLNREIKKRSDDLEREIRRLLEEVKRRKSKDEEKLRRIKELVERLKEENRKMNEDSKRSTDRLREENKKVNEDSKRSSEEIKRRADDVRKRNGDIRELLKELRKILDDNRETARKVLEDSKRIIERNKREAEKLERRSRKILKDIEDEAR

SEQ ID NO: 5305 - protein, 182 aa, Artificial Sequence; identical to SEQ ID NO: 5304
  Synthetic

SEQ ID NO: 5306 - protein, 182 aa, Artificial Sequence
  Synthetic
SVEEELRRLEKRIEELVREIERRLRELKKEVEELNERIKRASDEILDRIRRLLEEVRRRKREAEKVLREIEELIRRLKRENEEVNRDSKRSTEKLERDLRRVLEELKRTVEELKKRLREVERRNGDVRDVLREVERIIRELEERARDLLRRIREIIRRNEEKLERLLRRSKEILKEIEERAK

SEQ ID NO: 5307 - protein, 182 aa, Artificial Sequence; identical to SEQ ID NO: 5306
  Synthetic

SEQ ID NO: 5308 - protein, 179 aa, Artificial Sequence
  Synthetic
STERKLEELEKEAEKDLKEVEDRLKELNDHHDKRVKEVEDRLRRANKHHRDRLEDIRRRNISEELDKKLKDTLRELKRTTDRLRRILEKSKRDLERTTERLKRILDKIRRELKELSDKVKDRDTDEVLKRLKDLIKELRDEVRKVLTEHREIDKRVEEEVKRVLDEHREIDKRLDEETK

SEQ ID NO: 5309 - protein, 179 aa, Artificial Sequence; identical to SEQ ID NO: 5308
  Synthetic

SEQ ID NO: 5310 - protein, 179 aa, Artificial Sequence
  Synthetic
SSKEKIERLREKLEDLVRRVRKRLRELNEHHKELVKRIEDTLRELLRHHDELLKEAERRNIDKKLLDRLRETKERLKRLAEELRKILKESLDELRRTTEELERILEEILRRLEDLIRKMDERDTEDVLRRIEELIERLKREVDRVEREHERIDEEVRKRAEDIERRARDIDREVKETTR

SEQ ID NO: 5311 - protein, 179 aa, Artificial Sequence; identical to SEQ ID NO: 5310
  Synthetic

SEQ ID NO: 5312 - protein, 179 aa, Artificial Sequence
  Synthetic
SVRETLERMLRHHAELVERVRRELRKLNKHHRDEVKRVEERLDELRKHHEELLRRAEKDNVSEDLLREAERTKRELEKLVRDLREILKRSLETLEETTRRLEKRLDESLEELKKLIKDVDERDAKKVVEDLRRINERVKDEVRRALREHERIDKEVREIVEEIERRAEKIDEELKRTID

SEQ ID NO: 5313 - protein, 179 aa, Artificial Sequence; identical to SEQ ID NO: 5312
  Synthetic

SEQ ID NO: 5314 - protein, 179 aa, Artificial Sequence
  Synthetic
SVEEALTEIKKRLDKKVEDIERELKKLLDHHKELVDDVRRKLEELNRHHDRLLDEIRKDNSSEELEEKLKKTKDDLRRTTEELERRLEKSLDRLRKLVETLRRILERIKKELKELIDRVKDRDKDEVLKRLEDLIRELDRRVKEIEKRAEEIDRELEDRVRKVLDEHRKIDERAARETD

SEQ ID NO: 5315 - protein, 179 aa, Artificial Sequence; identical to SEQ ID NO: 5314
  Synthetic

SEQ ID NO: 5316 - protein, 179 aa, Artificial Sequence
  Synthetic
ETKERLDEILKHHEEEVKKVRKRLDELLRHHEELVKEVDKRLKEMNDHHRRLLDEADKDNIDKKLKDKLDETRDELRRTTERVKKRLKESLETLRKLVEDLRRELDKSREELKRLIDEVKDRDKDDVLRRLEDINRRLEERVRKAERRLEEIDEKAERITEKVKREHEDIDRRVEDIKR

SEQ ID NO: 5317 - protein, 179 aa, Artificial Sequence; identical to SEQ ID NO: 5316
  Synthetic

SEQ ID NO: 5318 - protein, 179 aa, Artificial Sequence
  Synthetic
SVKERLDEVRRHHEDEVRRVDEKLKEILRHHEEEVRRVDKELKELLDHHKELLDDAERRNISEELRKRLEDTEERLRELAKELREILKRSLEELKKLLDELRRILEESLRELEKLIRDVKDKDAEEVKKRLDDINKRVEEIVREIEERLRRIDEKLKEIVRKAAEDIRRIDKEVEDEIR

SEQ ID NO: 5319 - protein, 179 aa, Artificial Sequence; identical to SEQ ID NO: 5318
  Synthetic

SEQ ID NO: 5320 - protein, 184 aa, Artificial Sequence
  Synthetic
SLEELLKKIEERLRDLSRKVAEELKRILDELRELSERAKDLNRRVNETLRKLVEDITRRDKDTEELKEILREVEDRARKISERDKELNEEVNKEVTEIVRRLEKLNEESKRKVEKLREELKRVDSEEDVKKVLDELEKLLKDNEELNRRVRKELKDLLETLRKLNERSKEELDKLIKELEDRAR

SEQ ID NO: 5321 - protein, 184 aa, Artificial Sequence; identical to SEQ ID NO: 5320
  Synthetic

SEQ ID NO: 5322 - protein, 185 aa, Artificial Sequence
  Synthetic
REVEEILRKLKEITDRTRDLSRRNEEELRRIIRELEEMSKRNKREVEEIIKEAKELAKRTKDKKELEDIVREIKKKVDDSKEKDKELVKRIRERIEESRKRDKRIADESRRLVEEVAEELERKGVDEKAREDLDRLRRENEELIERSERINKKIKEELERVIKRSEDLNKKLEEDLEKLIRDETR

SEQ ID NO: 5323 - protein, 185 aa, Artificial Sequence; identical to SEQ ID NO: 5322
  Synthetic

SEQ ID NO: 5324 - protein, 185 aa, Artificial Sequence
  Synthetic
EEVERILTKAERVTRETERLSRENEKELKKITDETRRLSEKNIEDIERIIEEMERLARTTKDERELEEIARRIEEEIRKSIERDKEIARESRELLKESKKKDKKIMDDSRRLVEELRRELEEKGVDEDARRELKRLEEENRRLLEESEERNRRIEERNEELIEESERRNRELEKRLRDLIKETRD

SEQ ID NO: 5325 - protein, 185 aa, Artificial Sequence; identical to SEQ ID NO: 5324
  Synthetic

SEQ ID NO: 5326 - protein, 182 aa, Artificial Sequence
  Synthetic
SAEDSIRRAEEEARRLIKRAEEEAEKSARRHKELNERARKRAKESAEEAEKLIREAARSGRVDKKELDKAAEEAKRAIEDSERDLERAAKEDRESIEESKKDLERAAKELREVIEDLKRAAKEGADARDLEEKAKKALEKAERIARKNAEDNERNLEKSKRIAERNAKKNEEALREIAKKAN

SEQ ID NO: 5327 - protein, 182 aa, Artificial Sequence; identical to SEQ ID NO: 5326
  Synthetic

SEQ ID NO: 5328 - protein, 182 aa, Artificial Sequence
  Synthetic
SAREDIERLVKELKELVERAREAIKRSAEEHKKLNKELKDRIKEVVERLKKLIDDARRDGRVDEKRLRDVVREVARVLRDAEERVKELHKRDRDSIDRSRRDLDRLVKELKDVIDDLRDLLRRGVPAEELLKKAKRVIEKAEKILRENKEENERNLATSEKIARDIEDKLRKVLKRIADEIR

SEQ ID NO: 5329 - protein, 182 aa, Artificial Sequence; identical to SEQ ID NO: 5328
  Synthetic

SEQ ID NO: 5330 - protein, 181 aa, Artificial Sequence
  Synthetic
SAEDKLREVEKHHEKLVRDIRRKLEKNLRDHAEKVDRVRKKLEEAERRLKELVDRVRKDNVSEELLETIERLLEELKRLLRELERLLKKTLDEDREILERAERELKRTLDELRKIVEDVRRRGRDDERVDRDLERLDREVEEIARRLTRLMEESNKRLEDIVRTIEERIKEILERLKRTAK

SEQ ID NO: 5331 - protein, 181 aa, Artificial Sequence; identical to SEQ ID NO: 5330
  Synthetic

SEQ ID NO: 5332 - protein, 179 aa, Artificial Sequence
  Synthetic
SDVEKIIKDLEKVIDDNRRTNEKAIRDAEDIIRRSEEHSRKVIEKLKKIIKEVKEEAERLKGDERVVKELEDELRKVKKEWEDVSKENRDTNRRVLEELKKILEDSKRHLDKALKKVRDDGVDEEEVRRVEEEIKKLLEDSRRLLRRIEEESRRLDEEDERLMKEIDDEIRELLERIRR

SEQ ID NO: 5333 - protein, 179 aa, Artificial Sequence; identical to SEQ ID NO: 5332
  Synthetic

SEQ ID NO: 5334 - protein, 179 aa, Artificial Sequence
  Synthetic
KEVEDIVDEARKRIDTVRKESKRVVEEVERRIEENKRRNEEVIKRVREDIDRVRKEADKLKGDDKVVKKLEDDLRKVLEDLKRIVDESAKHLKDLTRKWEEISKRLKDRLEEVIRELERRGVDREELERLRREVEKLEEDDRRLLEELEKRARELLERSKKLLDEIRREMEELLKRIRT

SEQ ID NO: 5335 - protein, 179 aa, Artificial Sequence; identical to SEQ ID NO: 5334
  Synthetic

SEQ ID NO: 5336 - protein, 179 aa, Artificial Sequence
  Synthetic
KEVEDIIREVEKRIRDSERHSKEVLDRAEEVIDDNRRKNEEVIKEAEEIIDRIRREADRLKGDEKVVRELEERLRRALEKLRRILKESTKHLKKLIEDWKRRSEEDERRNRDVLRELERRGVDKDLLKEVEERSRRVIEKDRELLKRLEDKVRKLVEDSRRMVKRIEEEIRKLLEDIRR

SEQ ID NO: 5337 - protein, 179 aa, Artificial Sequence; identical to SEQ ID NO: 5336
  Synthetic

SEQ ID NO: 5338 - protein, 183 aa, Artificial Sequence
  Synthetic
SELEKIIEDIKRLIDELRKLVEDVERRNRKLSEDDKRLVEEVLKRLDELIRRLREIAKKIKDKDTLRKILRDILEELKKLLETLRRLNEDSLEKSKRSVEELRRLLRRIKEELKRLLEEAATRAGRKVERLDELRERLKRLEDEVRRRLEELERENRKIIEETEEALRRIEEKARKELEEVDR

SEQ ID NO: 5339 - protein, 183 aa, Artificial Sequence; identical to SEQ ID NO: 5338
  Synthetic

SEQ ID NO: 5340 - protein, 183 aa, Artificial Sequence
  Synthetic
SELDDIIRKIEELIRDDERKVRKAVRENEDLSRRDEERVRKVIDEARKLLKRLEEIAREIKDKDTLREILEEIKKRLEELVKTLKDTNRKSKRDSERSVEEVRKTNEKSRRDLERLAKELADREGRKSEKLDELRKRLEDLIRETEKELRRLERENDEIEKRTEDLLRRLREELRRIVEEVER

SEQ ID NO: 5341 - protein, 183 aa, Artificial Sequence; identical to SEQ ID NO: 5340
  Synthetic

SEQ ID NO: 5342 - protein, 183 aa, Artificial Sequence
  Synthetic
DDLERIIEEIERLIRTLEELVRDALRKSKRLLEENKKLNEEVLRRIKDLIRRLEEIARRIEDKKTLEDILKEIEDRIKELAERARRINEKSLRDNKELVKDVRRKVEEIKRRIEELVEEIVRRAGRKLEELDKLREELKRLVDRVEEMLRKSEEDTERIIRKSEEDLERLERDLKRLVEEVRR

SEQ ID NO: 5343 - protein, 183 aa, Artificial Sequence; identical to SEQ ID NO: 5342
  Synthetic

SEQ ID NO: 5344 - protein, 183 aa, Artificial Sequence
  Synthetic
KELEDIIREAEKLIEENSRKNKEMLDRSKELIERNERKNRDVIRRLEELIEDLRRIAEEIKDKDTLRKILREILEELKELAKRLRDTNRESEKRNRDLVKRIREENEKSKRDLKRLIDDAVRRAGRKSEELDRLRKKLEDNIRESEKELRRSEEETKKLIDDSERELERIERRARELLERVRR

SEQ ID NO: 5345 - protein, 183 aa, Artificial Sequence; identical to SEQ ID NO: 5344
  Synthetic

SEQ ID NO: 5346 - protein, 186 aa, Artificial Sequence
  Synthetic
SDVEDLLRKIKKILREIAEESKRTVRENEELTDRVKKKIREIVERIRRIIKELEERLRRIKDKRDLERVLRDAERRIRELIETAERLLEEVKERSKRSVERNEELLDKIRKEIEDLVRTLRERAKNVKDVEDKLRELERELKKIEDDSRRLLKRLEEENRTLVKEVRERLKRLEDDVRKLKEDVTT

SEQ ID NO: 5347 - protein, 186 aa, Artificial Sequence; identical to SEQ ID NO: 5346
  Synthetic

SEQ ID NO: 5348 - protein, 186 aa, Artificial Sequence
  Synthetic
DEVDKLVEEIKKIIEDVRRESDKTVRDNEELTKKLAEDSKRSLDEIKKLIEELRKEIERIKDKETLDRVLREATKRLKDLVDENERLLRDAKRKSDESVKRNEEVLRRVRKEIDDLVRELRERAKTSEEVERKLKKLKEELERLVEESRRKLEELKKRNEELVRRSREELDKLRREVKETLERVKR

SEQ ID NO: 5349 - protein, 186 aa, Artificial Sequence; identical to SEQ ID NO: 5348
  Synthetic

SEQ ID NO: 5350 - protein, 186 aa, Artificial Sequence
  Synthetic
SDAEEILKEIERLIREVEKTSRRTVEEDERVTEEVRKKSEKSVRDIEELLKEIKRELEEIKDKDTLDKLLRDIRETLRKIVEDNRKLLEDVKRESEKTVRDNKEILRRVKEELRKLVEKLRRRADKSERVERKLEELKRRLEELEKESERELDRLRKENEDLVRRSEEELRRLRRELEEIVREARE

SEQ ID NO: 5351 - protein, 186 aa, Artificial Sequence; identical to SEQ ID NO: 5350
  Synthetic

SEQ ID NO: 5352 - protein, 172 aa, Artificial Sequence
  Synthetic
SEAEKVLKEVEDIIREVEEENRRLIREIEEEIRRVKEEVERLLRKSEKDIKEVEESPKSKDLERRLEEVDEELKREIERIERELDKVLRELEERSRESVERLRRVLKEVRERNGMDEKLLREIERRMRELEKTSRKLLKEIKKKAKELKEKAEEVLRRSRKRTEELVDRLRK

SEQ ID NO: 5353 - protein, 172 aa, Artificial Sequence; identical to SEQ ID NO: 5352
  Synthetic

SEQ ID NO: 5354 - protein, 183 aa, Artificial Sequence
  Synthetic
DVEDLIRELRKRLDELRKESEELLRRSKRKHEKLLTDSRKLLRDIEREARKLLEDVKRKGASESTVEKIKRDLDRLIKELEKVHRDSRRKSKEDLDRLKRVHDESKKKIDELRKELDEMSRVKDREMIETLIRKAKEIIDRLREENRRAVRRSDETLRRLKEENDKVITDVKRKIKELRDEVK

SEQ ID NO: 5355 - protein, 183 aa, Artificial Sequence; identical to SEQ ID NO: 5354
  Synthetic

SEQ ID NO: 5356 - protein, 183 aa, Artificial Sequence
  Synthetic
SIDEEITRLEEESRRDEEESKRLLEKSRDDHRRLLERSEKLLRELEKRARDLLEDVKRKGASKSTVEKLREDIERVLDKLRKVHERSRRKSEEDIRRLEEVHERSKRKHEKLRRELEDVRRVSDEEMVRRVIEKYERAVERSTEENRDAFRRSEETIRELAKENEDAIREVKEIIDKLREDVR

SEQ ID NO: 5357 - protein, 183 aa, Artificial Sequence; identical to SEQ ID NO: 5356
  Synthetic

SEQ ID NO: 5358 - protein, 183 aa, Artificial Sequence
  Synthetic
DVEELIKELERRLRKLLEDSRRLLEESRREHKKLIDDSRRLLDELRRRLERLLEKVRRRGASESKVERIERRLRDLLRRLREVHERSKENSKRDIERLERVHDESRKEIKELLDELREMSKMSRREVIEAVIRKAEDIIRRLRRKNEKAVEESRENIKEIKRENKRVIDEAREIIKRLEEELE

SEQ ID NO: 5359 - protein, 183 aa, Artificial Sequence; identical to SEQ ID NO: 5358
  Synthetic

SEQ ID NO: 5360 - protein, 183 aa, Artificial Sequence
  Synthetic
SVEDLLRRLEEESRKDLDDSRRLLDESRKRHEDLLRKSEELLRELEERLRRLLEKVKKKGLDDSDVKRLEKKARDLLKELREAHKRSRDNSERDIRDLERVHRESEKRHRDLRKKLEDVRRSRREDVIRKLIEDYERLVKESTDRNRRAVEKSRENLKRLDKENRDVIEKARRIIEELEKEVK

SEQ ID NO: 5361 - protein, 183 aa, Artificial Sequence; identical to SEQ ID NO: 5360
  Synthetic

SEQ ID NO: 5362 - protein, 183 aa, Artificial Sequence
  Synthetic
SVDELIEELRRRLEKLLREAEELLKESRKRHEELKKRSKELLDELEREVERVLEELRRKGVSDDKVKRVEDRLTELIRDLRRAHKESEKNSRDDIRRLEEVLKKLEKKIRDLERELEEMRRSKDEEVIERVIRKADEIIKRLKKELREVVERSKENIKKLEEENRRVIKKAREELRKIEEEIR

SEQ ID NO: 5363 - protein, 183 aa, Artificial Sequence; identical to SEQ ID NO: 5362
  Synthetic

SEQ ID NO: 5364 - protein, 179 aa, Artificial Sequence
  Synthetic
SEVDEVLKTLKELIERLRERVKEVLKRLEKLLKELEDLSRETVRELRETNDDLRRKAEKTRDKDTLRELVKRVLDENKKIITRNRDTVRRAMERIEDLIRELERTVEKIRRDIERIIRELIRKREAAEKVRRDVDRLRKEVEEMLERVKRKLDELRKDSDRLAREVEDSTRKIERDVEK

SEQ ID NO: 5365 - protein, 179 aa, Artificial Sequence; identical to SEQ ID NO: 5364
  Synthetic

SEQ ID NO: 5366 - protein, 180 aa, Artificial Sequence
  Synthetic
SELEEMVKKVKEIIDRARERIRELIERHKELDRESRKRIEDIIREARELNKDVKRVIKEIKKEEEEKLKKILEDLKRLSDEVKRRLERILEENRKLVRESEKRLEDVLKELKELLRDVERKARVDEALEELKRRVKRLEEKLREDIKRLRENNERIREDVERLAEELDRHTRKLMEEVKK

SEQ ID NO: 5367 - protein, 180 aa, Artificial Sequence; identical to SEQ ID NO: 5366
  Synthetic

SEQ ID NO: 5368 - protein, 180 aa, Artificial Sequence
  Synthetic
SELEDIVEKAKKIIEDVRRRIEKLIRDDKRLNDESKKTIEELIRKARKLNEEAERIIRKIKEDDEKKLREILKRLRELSEEIIKRLREVLDRDRRLNKKTVDDARRILRELKELLKEVEKRIRVRELLEKLRRDVEELEREVRELLERLKENSKRIEDEVRELMKELKRHTEELEREAER

SEQ ID NO: 5369 - protein, 180 aa, Artificial Sequence; identical to SEQ ID NO: 5368
  Synthetic

SEQ ID NO: 5370 - protein, 180 aa, Artificial Sequence
  Synthetic
RELEEIVERAKEIIRRVAEKIKKLIEEAERLDRDSKRKIDELIEKVKKLNEDVRRTIEEIKEDDRKTLREILETLKDLSRRAIEEARRILEENKKLSKEIEDRVREVLRELKKLVDDIRREMKVEEMLRRLTELLKELADEVKKLLDRLKENNEKIREDVERLLRELEEHTKKLEEDVTR

SEQ ID NO: 5371 - protein, 180 aa, Artificial Sequence; identical to SEQ ID NO: 5370
  Synthetic

SEQ ID NO: 5372 - protein, 179 aa, Artificial Sequence
  Synthetic
SEEERVLKELEDVLREHKRKADESSRKLEEVHRRHRKRMEESKRELEEVHKEAKDRITKNRDDTKLLEDIIRTLRKINKDVARRNEESIRELKEINKRVLDENKKSREELEEILRRVIERVGETEELEDVERKARELEERNKKLLKDSEEATEELRRENEEMLEESKRRTEKLEREVRT

SEQ ID NO: 5373 - protein, 179 aa, Artificial Sequence; identical to SEQ ID NO: 5372
  Synthetic

SEQ ID NO: 5374 - protein, 175 aa, Artificial Sequence
  Synthetic
DKVREVLRESEKLLEDWDRELKEVLKDFKRTLDELEERLRDVLRKNKKSLEDLKRRGLDDRVVRKVEEEHRRVAEEIKRLVREAEKLLEDVKRELERLKREAEEENKRVRDKVRKDGDADDRIMRELRELNRRLDESVKEIRDRLRRILDKLRKMIEKLKKELEDTDRELEERVR

SEQ ID NO: 5375 - protein, 175 aa, Artificial Sequence; identical to SEQ ID NO: 5374
  Synthetic

SEQ ID NO: 5376 - protein, 175 aa, Artificial Sequence
  Synthetic
SKAEEVLKTSEKLLEEWRRRVKEVEDRNEETIKRLKEELDRALKENEESLRELEKRGLDEEVKRRVEERHRKIEEEIEELRKKLREKHKKVKRDIERLVKKMKDDNEEVKKRVDKRGDLDDRISEELKKLNEELERELRKLSEELKEVDREAKEEIRRLVEELREIDKRLEEETK

SEQ ID NO: 5377 - protein, 175 aa, Artificial Sequence; identical to SEQ ID NO: 5376
  Synthetic

SEQ ID NO: 5378 - protein, 175 aa, Artificial Sequence
  Synthetic
SEAEKVLTDFRDALEKDRERNERVLRENEETIRRDKEENERVLRENDKSLKELRKRGLDERVADKVRKDHEKVKRDTERLVRELRRVHEKVRKETERLIREMRKALEDVRDDVRRRGSADDRIKKTLERLLRESKKASEKLKDDLRKLDKRSKEESRRLTERLREIDEELRRRVD

SEQ ID NO: 5379 - protein, 175 aa, Artificial Sequence; identical to SEQ ID NO: 5378
  Synthetic

SEQ ID NO: 5380 - protein, 175 aa, Artificial Sequence
  Synthetic
SEAEDVLRRFEEELRRDDEKNERVLRRNEETNRRDDETNRDVLRRNKESLDKLRKRGLDEEVVKRLREVHERVREETKKLNREHKKAHEDVKRDTEDLKRRMEDELRRVEDEVRKRGSADKRIKDELRKLLKRSEERSEELRRRLEDLDRRSKETSDKLREELERLDRDVERKVN

SEQ ID NO: 5381 - protein, 175 aa, Artificial Sequence; identical to SEQ ID NO: 5380
  Synthetic

SEQ ID NO: 5382 - protein, 175 aa, Artificial Sequence
  Synthetic
SEAEKVEDDVRRVLETDEKKNRDVLDTNRRTIEEDRKRNEEVLRKARKMLEDLKRRGLDKDVVKRVEEVLERVKRETERLTRELRKFHEEVRKETEDLKREIEKLLRDLRRDVERRGSADERLRETLEELLRRSDERSRRIMEDLKRLDTDSKRVSEELKRRLEELLKDLERKVR

SEQ ID NO: 5383 - protein, 175 aa, Artificial Sequence; identical to SEQ ID NO: 5382
  Synthetic

SEQ ID NO: 5384 - protein, 185 aa, Artificial Sequence
  Synthetic
SEVDEITKELEESLKDLDRVVRELREKIKKIDKELAETVDKLTEEAKEILKTLRDIIRRGNNTEEVSREAEELLKELKKRLEELEREVERLHEELRKEIEELEREAEKRNKDVKEKIDRGNLDKKLKEKVDRVHKRHKDRLDEIKRKLKKVLEDNRETLERIKRKLRKVLEDLKRMLDELERELR

SEQ ID NO: 5385 - protein, 185 aa, Artificial Sequence; identical to SEQ ID NO: 5384
  Synthetic

SEQ ID NO: 5386 - protein, 176 aa, Artificial Sequence
  Synthetic
KETEDLVRRLRKVLKELEERVRTLMRDNERVNKEIADKIRRLREKLREEDERVDEVVKRREVDEKDLKRRADESREELKKVLKDLEDTVKRLEEKNDKVRRELKKIVDELRRELEREVKEAREVLREMDERVKELEERLERVLRKSKTDADRWRRELKRVLEEHDKTVKEIREKTR

SEQ ID NO: 5387 - protein, 176 aa, Artificial Sequence; identical to SEQ ID NO: 5386
  Synthetic

SEQ ID NO: 5388 - protein, 178 aa, Artificial Sequence
  Synthetic
KEKDEVVKRYEDRIKEIRERLKEVVTEHEDRLRKWRKDLEEVVERNRRSIKKIDEEVKRRGVPEKVKRELREIEKRSEEIIKKVREELEDLARKSRERIKRVEEEHDKNTDKARKDITKEGVDEDVVRKLDEDLKRNEDHLEEVRKELERLNEEIEKLIRDLLEILRRIDKELRDKLE

SEQ ID NO: 5389 - protein, 178 aa, Artificial Sequence; identical to SEQ ID NO: 5388
  Synthetic

SEQ ID NO: 5390 - protein, 178 aa, Artificial Sequence
  Synthetic
DEEKDVTRRVREVIKRLEEELEEVVRRHRESLKRLKERLEEVVRRNRKSIREIEKEVKDAGLPDEVKRRLDEIKKESEKRIDDARRREEEVEKDSERRIKEVEDRLKRKAERIEKAREERGVDEDVDRELARMLEELRDLLRRLAEELKRIDEELEKELRDVARELEKIDRDMREELR

SEQ ID NO: 5391 - protein, 178 aa, Artificial Sequence; identical to SEQ ID NO: 5390
  Synthetic

SEQ ID NO: 5392 - protein, 178 aa, Artificial Sequence
  Synthetic
DERKEVEERYRREIERIKTKLKEVVKRHEDSLKKIEDDLEEVRRDNERSIKEIREEVRKKGAPEKVEEDLRRIEEKSRRDIKRMEEDLKRMTEESRREIEDVERRHRENEERVEREIEKRGIDEDVDRELKEDLERNERHLEEVTRRLRKIDKDLKEKLKRLEEELKKIDREARERLR

SEQ ID NO: 5393 - protein, 178 aa, Artificial Sequence; identical to SEQ ID NO: 5392
  Synthetic

SEQ ID NO: 5394 - protein, 181 aa, Artificial Sequence
  Synthetic
KEIEDVKRRLEELDRRIKELVDRVRRKLEEVDTRAEKELRDVRRRLEELLERLEELIRRGTSEETLRRLAKEIRKIADEARKKLKKIKDDLKKEHDRVREKLEELARRSRKVLKEVRDRTGEVKELRDVIKENEDTLRRLKEEVEKVTKENEETLRRIERELDKVERDVERRIRELEEERR

SEQ ID NO: 5395 - protein, 181 aa, Artificial Sequence; identical to SEQ ID NO: 5394
  Synthetic

SEQ ID NO: 5396 - protein, 177 aa, Artificial Sequence
  Synthetic
SEVEKVLEDNKRSIDRLEEELRKVTRTSRELLKEWAKRLEDVLRDVKRAVDELETRGVDEKTLRELRKRLTDIEREIRKKLEEAEKKLRESERDVEDTLRRLREKSRRITEEARKGGDSDEIRKLKEELKRLDEEAARILETIMRRNKDLNDRLREIIETLKKRLKDLLKEVEDRAR

SEQ ID NO: 5397 - protein, 177 aa, Artificial Sequence; identical to SEQ ID NO: 5396
  Synthetic

SEQ ID NO: 5398 - protein, 178 aa, Artificial Sequence
  Synthetic
DAEKLREDVERTLRRLRKELKDSIKRNREELERLERKLRKSIKETEDEVRKLEEKLERRLKDDEEVRRRAEELAKRLKELNEDVKRKADRLKEESERLDEELEKRLRDLEREVKKLEKDQDVDDDVRRLVEKIEREVRKLIEDHKKKSEDIVRTVEKLIEDHKRRVDRISEEVEEELR

SEQ ID NO: 5399 - protein, 178 aa, Artificial Sequence; identical to SEQ ID NO: 5398
  Synthetic

SEQ ID NO: 5400 - protein, 178 aa, Artificial Sequence
  Synthetic
SKEDLKRKVKKILEDVERELRRSIEDTERLLREVEKRLEDSVRENRRKLREVEEKLRRRLKDKREVMEKLRKIVTESEELDKDVKRKVEELERRARELNRELKEKLEELKKEAEELDRREDVDRRVDELVKEIEERARKLIKEHRDRVRELLRELEELIERHKELSERILKELEELLK

SEQ ID NO: 5401 - protein, 178 aa, Artificial Sequence; identical to SEQ ID NO: 5400
  Synthetic

SEQ ID NO: 5402 - protein, 174 aa, Artificial Sequence
  Synthetic
SEKEEIARRLEKVHREHREELKRLEDRLREVLKRNRETIEDIRRKLEEVLRRLRERLVDDEEVLRELTEEAEELERRVRRRHEELERLVEELKRKADKINKDLERLIRELKERLDDGDEEKLRRDVERIVKEAEDTLRELERVVRELEKEVRETDKRLDERVKELEEKVRRAAK

SEQ ID NO: 5403 - protein, 174 aa, Artificial Sequence; identical to SEQ ID NO: 5402
  Synthetic

SEQ ID NO: 5404 - protein, 178 aa, Artificial Sequence
  Synthetic
SEEEDARRLLEEVERALREIKKRLKELLERHRRAVEELKKRAEDLLDEHRRAIERIADERGDRDTIADKVRKEIERSHTELKKLEEEIERISRDADRRVKEIAREAEELLRELEERLERKRVSEEIKRRLKELAKDLRRAIKEVKERLKESHDELKRAIEDVKRKLEELDEKLKRDED

SEQ ID NO: 5405 - protein, 178 aa, Artificial Sequence; identical to SEQ ID NO: 5404
  Synthetic

SEQ ID NO: 5406 - protein, 172 aa, Artificial Sequence
  Synthetic
SERERVERSVEELIRRYREVLEESERRNRKLLKRYEDALKKSREDNKRLLDELRRANRGPEEFLERMERESRRIIRELEKNLERLKRESEDILRKLDKNMKDIERELKKLRDDDLPREDAERLLERIERHLRRSEKTSEELNRRLEDHARRSIEESKKLNEELERKLRELER

SEQ ID NO: 5407 - protein, 172 aa, Artificial Sequence; identical to SEQ ID NO: 5406
  Synthetic

SEQ ID NO: 5408 - protein, 182 aa, Artificial Sequence
  Synthetic
SSEETLRDINRKISKAIEEIEREAREIDRELRKAVEDLKREAEEIDERVREVIERIGTRDEDLKRLEEEIERLHRELEKKARDLARKARELHRRLEEKIRELADRLRRLSEEAEKRDGRDTEVKKVLDKNEELLKRWEDRLREVLERNRKTLREIERELEEVLRKNRESIKKLKRELEEASR

SEQ ID NO: 5409 - protein, 182 aa, Artificial Sequence; identical to SEQ ID NO: 5408
  Synthetic

SEQ ID NO: 5410 - protein, 182 aa, Artificial Sequence
  Synthetic
SSEEDLKRIDDELDKMVKDIERKIRRIDTELERVVKELKEDIERSLERLREVVERIGTREEDLTRLDKEAKDINKRLEEEARRLVDEAKKLHKRIEEEIRELEKRMEDLHKRVRDEVGDDRDVRRVLDENRKTLEDLKRKLKEVLDRNRETLKRIEKELREVHEKHNRALDELRKELEDRRR

SEQ ID NO: 5411 - protein, 182 aa, Artificial Sequence; identical to SEQ ID NO: 5410
  Synthetic

SEQ ID NO: 5412 - protein, 182 aa, Artificial Sequence
  Synthetic
SVEEEAEDILRRLDKTVRDLEREAEKIDEDLERVVRKLEEELRRSLEELRKVVEEIGSTEKDLKRLTEEAERKNKELRDRAEELADRARKLHEELRKKLEELLKRARELLKDLERRSGRDRDVTRVLRKAERVLKEIEEKLRDVLRRNRETLKRIEDELERVHRDHNRKLKRLKEELDERRR

SEQ ID NO: 5413 - protein, 182 aa, Artificial Sequence; identical to SEQ ID NO: 5412
  Synthetic

SEQ ID NO: 5414 - protein, 175 aa, Artificial Sequence
  Synthetic
DEDRDVEEKIKKIIKAAEDVNKESEERITELKKRLREIHERSERLIRRIEEEAKKKNRSRDVKRELERLERELRRLNEESERRLDELTKELRKENDEMLRRLKELTKRLRDVLRRGELDKKKLDEIIERLRKLLEDLEERNRRVIKELEDLIKENEELNRKVIRDLEKLVEDAER

SEQ ID NO: 5415 - protein, 175 aa, Artificial Sequence; identical to SEQ ID NO: 5414
  Synthetic

SEQ ID NO: 5416 - protein, 185 aa, Artificial Sequence
  Synthetic
DEEDEVRKRVEESERESRKLLTDVKREADRLKEHDKRLLDEVKKLLDKIREDLKKLPSEDEEKRKRLKELLDRIEKELRDLAKEVKERNERLDEELERLADEARKLHEEVKRRLDDLRRKSKDVDREELKRELDRIIEELKELNKRLEERLRELIRDWERVSRELAERLKRIIDKARRLLEEVAR

SEQ ID NO: 5417 - protein, 185 aa, Artificial Sequence; identical to SEQ ID NO: 5416
  Synthetic

SEQ ID NO: 5418 - protein, 176 aa, Artificial Sequence
  Synthetic
DEVEELLKELKDLSRESVRELRRLDEELKDLSRRSLKRLTDLDEELRREVEERRKENSKDDRVEEEVEEALKKSEEDLDRIIKEHRDAVRDSRRRLRRVLERHEEELDRLRREVEREGVGDERLKKLADDSRKRLRDVERHHEKLVEDSERRLKTIKDHHKKAVEDIRRDLRETKR

SEQ ID NO: 5419 - protein, 176 aa, Artificial Sequence; identical to SEQ ID NO: 5418
  Synthetic

SEQ ID NO: 5420 - protein, 175 aa, Artificial Sequence
  Synthetic
SEIDEVLKEIKRIIDELRERNRKHNEEVKDRIRRLEEELRKDLKDLKEIVERLAKSNVDREELDRILEELRKRVKEVEERLEEIRRDLERSHEELDRENRRVHKELKERLDRTNVRGEAADRARELEKELKDISDTSRKSNEELRKRLEEIKDRVRKEIEKLLRELEEIVKEKRR

SEQ ID NO: 5421 - protein, 175 aa, Artificial Sequence; identical to SEQ ID NO: 5420
  Synthetic

SEQ ID NO: 5422 - protein, 179 aa, Artificial Sequence
  Synthetic
DEEKETIKRHRESVREAERRLRDTLRRNRELVERLKRTLEDILRKHEKLVEELEEMAKRGEVDEDTLREVEKRSKDLEERLREILEKVREESERLTEELKKESEKHERDSRRLTEDLRRRSSDPEELKESHKDLKKIHEDAERRVRESHTDLRRIIEKVKEDLERSHRKLKRIADETRK

SEQ ID NO: 5423 - protein, 179 aa, Artificial Sequence; identical to SEQ ID NO: 5422
  Synthetic

SEQ ID NO: 5424 - protein, 179 aa, Artificial Sequence
  Synthetic
SEMEEVLERDERKVRELEREIEKNLRDHKDEVRRLREDLERVLREDEKLVRELRKKNSKDDRLAKEARERNKKLNDEVRKKLEDVRRKSERNKEEHKRRLDEVRRDNKRLNDDLKDRNISEELEDRMRRSSKRLEEVLRESEERLKRSDEDLRRVIDEIRRRLEESTRRLEETIKELKD

SEQ ID NO: 5425 - protein, 179 aa, Artificial Sequence; identical to SEQ ID NO: 5424
  Synthetic

SEQ ID NO: 5426 - protein, 182 aa, Artificial Sequence
  Synthetic
SEREEVLKDIRRLLDEVRRRIEDLLEKLRRLNEEVKEKVKESEKRLRDLMRKAKELMKRGLDEDTLRKVLKEVEDRLRENHKELKRVEEESRRALEDIRRKLKKVTDDLRKRLREIAEELERRGIRDEDIKRLIEELEKLLKEAKEKAEDLTREHDDTLKKIRERHKEIIKDIEDKLDTDRQ

SEQ ID NO: 5427 - protein, 182 aa, Artificial Sequence; identical to SEQ ID NO: 5426
  Synthetic

SEQ ID NO: 5428 - protein, 182 aa, Artificial Sequence
  Synthetic
DEEEELKKKLKAILEDLKREMREHEEKLRRSLERVARTAERHKETIKRIIDRLRKEAEDVPKDRRAEERLEEIRRELKKKDEDTERRSRKNEKELKDLNDETDKRLKDIEEEVKRTIKRLKDESDTSEEVKRIAEDIKRVLEEIRKRSREILEEVKRLHKKIKDDSRKLLKDLEKLVREIRK

SEQ ID NO: 5429 - protein, 182 aa, Artificial Sequence; identical to SEQ ID NO: 5428
  Synthetic

SEQ ID NO: 5430 - protein, 172 aa, Artificial Sequence
  Synthetic
SVEDEARRLEEKLRELTKRAREALEESNRRHRKSVEEVRRSLKKNHEKLEELARRVSRIDERRVREIKRRHEELLERLKDELDKSEEEHERLIEELERLLEEARREVERLRREREVDERLLKELEDLIEEVERELRRVLTESKRLNEELRKRVKEIEERSEELIERLDREVR

SEQ ID NO: 5431 - protein, 172 aa, Artificial Sequence; identical to SEQ ID NO: 5430
  Synthetic

SEQ ID NO: 5432 - protein, 172 aa, Artificial Sequence
  Synthetic
SMDESMETLTRELEDLLRKVEKKLRDSNEHHRELLEEVKRRVEENHKELDELLRRASRVPEEVLKKIRRDHDELRKELDKLLRDSERRHRELLEELKRRLEEVKRRLDKLRKDEDVTEELLTKIRKLIRDVEETVREAERESRALDERLERTVRDVEEKSKRLIEELRRRAD

SEQ ID NO: 5433 - protein, 172 aa, Artificial Sequence; identical to SEQ ID NO: 5432
  Synthetic

SEQ ID NO: 5434 - protein, 178 aa, Artificial Sequence
  Synthetic
DAEEEIRRIDKHHEENVRKAEEDIRRLIEHHKENVERVDRELRKIIREVEEVIRRVKELDERKVREVEDRLRRIKEEADRLSKESTDRLREIKKELERISEESKKELDKLRRKAREVRDERLVRELIRRLERTDEEHHKKVRRILEELKRIDEEHHRLVRRILKALKDIIKRLREEVK

SEQ ID NO: 5435 - protein, 178 aa, Artificial Sequence; identical to SEQ ID NO: 5434
  Synthetic

SEQ ID NO: 5436 - protein, 178 aa, Artificial Sequence
  Synthetic
SLEEEIEKIERHHRKLVEEARRELKRLEDKLEKLNRDSRKRLKELAERLKKLIDEIKKLDEELVKEVKRRLEELSKDLERKHRKVKKEVKELIDDAERILRESERELERLTEKLKEVRDERVARRVLDELRRLNEKLRRMVEELVKEIERLIKKVKDDSEDVMRKLKELLKRLEDRAR

SEQ ID NO: 5437 - protein, 178 aa, Artificial Sequence; identical to SEQ ID NO: 5436
  Synthetic

SEQ ID NO: 5438 - protein, 179 aa, Artificial Sequence
  Synthetic
REKEELLERLKKVLERTERVIRDLERRLREVLERSRKLAEDLVERLERSLKTLEKLAREGRVEERLLKRNHDELRKLLEDAKDKLRRINEELEKLLRDVKRELDRINEELKRLIDDATRRTGEREELREIYKRHEDLLRTAEERLRKVYDDHRDLLRKIDEDLKRLKERHEELLREIRR

SEQ ID NO: 5439 - protein, 179 aa, Artificial Sequence; identical to SEQ ID NO: 5438
  Synthetic

SEQ ID NO: 5440 - protein, 180 aa, Artificial Sequence
  Synthetic
EEKDRLKKRLEELNREHEELVRRISERVRRLLEKAEREIRTLKKRLDELNKELEEIIRRDNARDEVIKRVERIHEELEKELKELLDRLRDEMRRLEEELKRLNDEMRERHDRLRKEVKDVDEKVKKELEDVERHSRDSSRRVKEELERLKEELDRRLRKVKEDLERVKRHSKKLVDDAKR

SEQ ID NO: 5441 - protein, 180 aa, Artificial Sequence; identical to SEQ ID NO: 5440
  Synthetic

SEQ ID NO: 5442 - protein, 180 aa, Artificial Sequence
  Synthetic
SEREDLRRELEELLREHEEVVKEVKRRLEELLREHEEIVRELTERLKTINEDLKRVIKRDKASDETARELEKRHKKLEDEVRRSNERMRRTLEKLRKDLEDKNRDLERKLRRLEKDAKDISEEAEKELRDVAKRLRESSREVRETVRDVADKLRESSKKLEEELRRVKKHSKKLLDEAKK

SEQ ID NO: 5443 - protein, 180 aa, Artificial Sequence; identical to SEQ ID NO: 5442
  Synthetic

SEQ ID NO: 5444 - protein, 185 aa, Artificial Sequence
  Synthetic
SLEDLLRKVEEDAKRSIEKLEKDLKRVEDKHRELVERVKRRLDDVRRKLEEIIRDAERKGTSDEVREFLKEVERRVEKIADELRRKLERNHEELRRLADELRKKSEEVTRRLRDIMRKLREENTTDERVVREVLDELRKLLDDHNKKVKTVLDELKRSLDKLREEVKKVEDKLEEILKTLKETVR

SEQ ID NO: 5445 - protein, 185 aa, Artificial Sequence; identical to SEQ ID NO: 5444
  Synthetic

SEQ ID NO: 5446 - protein, 181 aa, Artificial Sequence
  Synthetic
SLEELIREIEKELDDLLREHEDLLRKIKEEIERLIREARELIKRLEEENEELRRNLRTDKETLERLEKRSEELKDENRKNLRKVEETLKRLEEKLRKHNEDLRREIEKLKKELRDAAREGMSEEEVKREIDRVRRVIEELRESVERLREEVRETLRRLKEHVKKDVEDHKETVKEVERRTR

SEQ ID NO: 5447 - protein, 181 aa, Artificial Sequence; identical to SEQ ID NO: 5446
  Synthetic

SEQ ID NO: 5448 - protein, 177 aa, Artificial Sequence
  Synthetic
DTEDLIREIRRRLEESVRENKELLDRLRERLEESIKRNEDLLKRHRENSKRIADRVRSDEELERVKKEAERLHKESRDKDRDLRKKVEDLARRSEELDKELRKRLKDLERELREAKKTRELVKEMIDRLRDLLRRHKEESKRLVEEVKKLLDRHREESERLVRELDKMNKDLEDRAR

SEQ ID NO: 5449 - protein, 177 aa, Artificial Sequence; identical to SEQ ID NO: 5448
  Synthetic

SEQ ID NO: 5450 - protein, 173 aa, Artificial Sequence
  Synthetic
DTKELLDELRKRLEDSARRVEELEKRVKDELERLKKRSEELLDEIRKRMKDVRDRGLVSEEVLRRLEELLRRVTEKVKRLNEELERKTREIRKKLRESVEELRRRLEDAERLKERLDKDELVRRLDETLKDHDRKLKELVDEAKELLRRYEEESKRLKRELDEILRRVREEAK

SEQ ID NO: 5451 - protein, 173 aa, Artificial Sequence; identical to SEQ ID NO: 5450
  Synthetic

SEQ ID NO: 5452 - protein, 178 aa, Artificial Sequence
  Synthetic
REIEEVRKKVEKILRDYDKVVKDIVEKVRRILEEYRRKSEKLTREIEEILRRLREVIKRDLRKEELDELKERVRELLDRLRDKLRKLNEELRKLLRDLEDEIRRLDEKLKELIRDLERKARDEDSLREIRKEARRLHEKSKKLLDEIRKRAEDLERETKKLLDDIKRELEDVVRELEK

SEQ ID NO: 5453 - protein, 178 aa, Artificial Sequence; identical to SEQ ID NO: 5452
  Synthetic

SEQ ID NO: 5454 - protein, 172 aa, Artificial Sequence
  Synthetic
RELEELLKRAEEVIKELKKSIDTMKEENDRLITELAKRVEDLKKRNDDVLERLKKDNIDEKTLEKIIRKLRRENEEAMKTLKKLVDDIRKRNDEHNKELKKLARDLREDLKRKVKSEEVLKEIDKRLKELEKEHEKVNRESEKRLEELLRRVEKVNRDSERELERLREERET

SEQ ID NO: 5455 - protein, 172 aa, Artificial Sequence; identical to SEQ ID NO: 5454
  Synthetic

SEQ ID NO: 5456 - protein, 174 aa, Artificial Sequence
  Synthetic
SEIEEVLERAERLLRRVAEALRRTTKELEDLNREVADLLRRTTEKAERLIRRVKSKIDKEEVKTRIDRLLDRSKDLTKKIKKRSDDSVKRSRELTDEIRRDLERLLRTLKKLADDGVPVEELKRVADEVVKKADDLVDEDRKLAKDSVDELRRLVEKDEKLAKDVVEEVEKLAE

SEQ ID NO: 5457 - protein, 174 aa, Artificial Sequence; identical to SEQ ID NO: 5456
  Synthetic

SEQ ID NO: 5458 - protein, 177 aa, Artificial Sequence
  Synthetic
SLEDAVRKARELIKRAEDILRRAVEEAKKLHKRSKEILEKAVEDAKRLYEEAKDAARKAGADERVIKELEENAKRVEEEAKKVKDDNDRLAREIKRRAEEVEKRARDLARKLDEEAKRNADAKTILDKAREVAERVARLARKLLEDSRKVARESAELAKRLLEYAKKSAEDAKRKAK

SEQ ID NO: 5459 - protein, 177 aa, Artificial Sequence; identical to SEQ ID NO: 5458
  Synthetic

SEQ ID NO: 5460 - protein, 185 aa, Artificial Sequence
  Synthetic
SIDEVLKELEDVARKSKEKNKRVHDDDERVVREVHKENRRVLRELEEMAERVRRELEKRGVPEEVLKRLEELIEELKRDLERSDDELRRSVEESEKRNRETNKRLDDHVKEVRRTVEKIKRDNQEEEKVVRRVKDIARHNLELADRSVEESRKSVKENKDLVDRSVKKVEDLVRELKRLVDEIKR

SEQ ID NO: 5461 - protein, 185 aa, Artificial Sequence; identical to SEQ ID NO: 5460
  Synthetic

SEQ ID NO: 5462 - protein, 185 aa, Artificial Sequence
  Synthetic
SIDEALTRLERAVEESHKRNEDVHRRDEEAVREVHKRNREVVKKLEDEVRKVIERLRRRGVDERVLRRLEEEIDKVRDELRRSDEELKKSVDDSKRRNKESDDELKKHVDELRRTIKTMKDSRVREEEVVRRIDELVEHNKDLVRRSVDESDKSVETNKDLVEKSVRRVDKLVKDLRRLVDEIER

SEQ ID NO: 5463 - protein, 185 aa, Artificial Sequence; identical to SEQ ID NO: 5462
  Synthetic

SEQ ID NO: 5464 - protein, 185 aa, Artificial Sequence
  Synthetic
KIDEALKRLREVVKRSHEENEEVHKEDEKVVRELDKENKDVLKELDEAVKRVEKKLRDRGTPEKVLKELKDLIDKVEKDARKTNEELKESVKRSAEENKKSNEELRDHARKLDKTVRDMKENRVREDEVVKRIDELVTHNKRLVEESVERSKESVDRNRRLAEKSVEDVRRLVEELKKLVDDITR

SEQ ID NO: 5465 - protein, 185 aa, Artificial Sequence; identical to SEQ ID NO: 5464
  Synthetic

SEQ ID NO: 5466 - protein, 177 aa, Artificial Sequence
  Synthetic
SLEEVLRRLEKVVRDSDKRLEEVLTRLAKVVRESNKRDEDVHKELRDVVRRVEELLERSNVPGEALKELRRLLEEVEKRNRDSKRESEKSEEEIRRRAKKVLDDSRKSLEEIRRLVENGVSEETVDKLVEDNERLVREIVKEVDELVKRNEDRARESVDESRKLVRRIEERVREETR

SEQ ID NO: 5467 - protein, 177 aa, Artificial Sequence; identical to SEQ ID NO: 5466
  Synthetic

SEQ ID NO: 5468 - protein, 173 aa, Artificial Sequence
  Synthetic
SVEDVLREAKRVLDEVRERLREVNTETNKVIKDVKKESDDVNRETNELIERVAREVPRTRELEEIEKEVRELDERNRKTSKELVDTVRKLDDENRKRIEEVEKEVEDRLRELRKRRLTEEVERLVDEVRKLVKRLVEHVKKLAKEIKELLERNVRHVEEVAERIKRLIKETKD

SEQ ID NO: 5469 - protein, 173 aa, Artificial Sequence; identical to SEQ ID NO: 5468
  Synthetic

SEQ ID NO: 5470 - protein, 177 aa, Artificial Sequence
  Synthetic
ELREDVERVVDEIRRLVEENVRRIDEVAKDIKRLADDNVRRVKELVRKIEEDIRRLKEEGVTEVVDELREEVRKLSEDNRRHSRELIERVKKLLKELEEHSRDLKRRVKELLEDLKRKGVDERVLKKLKEVIEDVERKSRDALRRLEEAIRRVRRESERVNRELDEVIKRVTEELKK

SEQ ID NO: 5471 - protein, 177 aa, Artificial Sequence; identical to SEQ ID NO: 5470
  Synthetic

SEQ ID NO: 5472 - protein, 181 aa, Artificial Sequence
  Synthetic
SAREKVEKVVKEVEELVKRDVEEVERIVEEVKKLVTEDLKISEEIVERVDRLIRELKKEPKSDEFRKKVEEVRERVRRLLEENRRHTEELERRVEELLKELEKHTRKVKDDIKKLLDRLREDGVDERVLKKLEDVVRRVEKESEDALRRLKEVIKKVKRESEEANRKLEEVIRRVVERVRR

SEQ ID NO: 5473 - protein, 181 aa, Artificial Sequence; identical to SEQ ID NO: 5472
  Synthetic

SEQ ID NO: 5474 - protein, 174 aa, Artificial Sequence
  Synthetic
SRSEKLVDEARKMVERSKEIVDKSEREVEDVVRRARRNVEKVLKDAKKVVDEVDELTKRGTDKETLKERLREILERIERYIEESKKDLDRILEELERKHRENKERLRRILEKIRRDGVGEDVLREVEELVRRVEEENDRVLKRAKELVEDVKRKHDRVLETVRKLVEDVTRRLK

SEQ ID NO: 5475 - protein, 174 aa, Artificial Sequence; identical to SEQ ID NO: 5474
  Synthetic

SEQ ID NO: 5476 - protein, 174 aa, Artificial Sequence
  Synthetic
DEVDKVKEELERVIKEVDERNKRSSERLEEVNRKIRKEIKEVVERLKELIERVLRKVEGRREVKRLTDEVRKRVEDLRRKVEDVSRKSKEDNERSNRRSKELVKRVRELLKSARRREGVDEIRRLVEEVLRRARKLVEEDKELIKKSLKDLKTIVDELRKLLEDVIREAERTAR

SEQ ID NO: 5477 - protein, 174 aa, Artificial Sequence; identical to SEQ ID NO: 5476
  Synthetic

SEQ ID NO: 5478 - protein, 170 aa, Artificial Sequence
  Synthetic
EEVERILEDVRRMIEDHRRKVEEIVKRSEDMARRLIEEVKRIVEESKKLADELKKEDGSEELRRKIDKRHKESEELLKDIERKLEEVHRDSERRLKENKERIDRTREEVEKRGVDEDVRRELKRLVDEVKKRNDEVRERDKEVVDRVKEVLDRVRETDRRLVEEVRRRAN

SEQ ID NO: 5479 - protein, 170 aa, Artificial Sequence; identical to SEQ ID NO: 5478
  Synthetic

SEQ ID NO: 5480 - protein, 170 aa, Artificial Sequence
  Synthetic
SRVEKILEDVKEEIKKHKEEVDRIVKRSREMAKRHIERVDEILERSRRMIEELKKREGSEDLERELERVHRESEKLLRENEKRIKETHEKSKRDLDENRKAIARTEEEVRKAGVKEDVERELRRLVEEVEKRNEDVEREDRRLVEEVKKRNDEVRKEDRRLVEEVKERAR

SEQ ID NO: 5481 - protein, 170 aa, Artificial Sequence; identical to SEQ ID NO: 5480
  Synthetic

SEQ ID NO: 5482 - protein, 183 aa, Artificial Sequence
  Synthetic
DELEKVEKDVRRLLEKVRKRIDEVRKEVERLSRESEEVTRRVLETVEKLLKDVERVIRETLKDDDEKLRDLERLIREIREKVRRAVETDEERNKRLNDKLKKLLEDLEDKIRKLEEELRKAKETGKPVEEVLETVKRLIERIEEEIEKVVKDVERLVRESIKHSRDVLKEVDDLIKRIRERVK

SEQ ID NO: 5483 - protein, 183 aa, Artificial Sequence; identical to SEQ ID NO: 5482
  Synthetic

SEQ ID NO: 5484 - protein, 174 aa, Artificial Sequence
  Synthetic
DDDKRIREILRRVHEKSEKVLRKVRKRLEEVRRESEEVVRRVKKDLDRVLEEVRRKGVSEELLKELEKIIEDIERHLKKNRDDVERKVREIEKKLRKLLEDDRRVVKEIEEKLRSGDGREDVAREVEEIAKRTIDRVEAIVREVERIARESIDNVRRVVEEVKRAVTELIKRVE

SEQ ID NO: 5485 - protein, 174 aa, Artificial Sequence; identical to SEQ ID NO: 5484
  Synthetic

SEQ ID NO: 5486 - protein, 174 aa, Artificial Sequence
  Synthetic
SEDETIRRIVRTVHEESRKSTEDVRREVERVLRESEEVVKKVKKKVDDVLKRVEETGISEELEERMRRIIREIREHLKDNLRRVREVIERIERKLEETERRDEKVLREIEKKIRDGDGREEVAREVTKIARDTIRENEEIAKEVREIVERSIKNLEEVAEEVERVVRELIEARR

SEQ ID NO: 5487 - protein, 174 aa, Artificial Sequence; identical to SEQ ID NO: 5486
  Synthetic

SEQ ID NO: 5488 - protein, 174 aa, Artificial Sequence
  Synthetic
SRDEKIRDILRRVLKEVRDSTKKVEEDLEDVHRRTEEELRKVKKRLDEVLKRVRDEGASEELKRRMEEVVRRIEELLKKLLKEDRDVVKEIRDKLDETRKEMEEVAERIKDKIRRGDGREKVAEEVKRIADRLIDLNRRIAEEVDKIVRDSIKKVEEIVTEVEKIVEKLIRDVR

SEQ ID NO: 5489 - protein, 174 aa, Artificial Sequence; identical to SEQ ID NO: 5488
  Synthetic

SEQ ID NO: 5490 - protein, 170 aa, Artificial Sequence
  Synthetic
DRLEKIVEEVRRLADELIRHVERNVREVEKAVRESIEHVRDVAEKVERAVRELEKREGSEDLDRELDRVRREIEELLKRNKDRITRVVDKSRRSSEENKRELKKVEDEVERRGISEEVRKELKRVIREVEKVNKESNDVTRKVKEESEKVLKEVEKRLREVIRRVKEKIR

SEQ ID NO: 5491 - protein, 170 aa, Artificial Sequence; identical to SEQ ID NO: 5490
  Synthetic

SEQ ID NO: 5492 - protein, 170 aa, Artificial Sequence
  Synthetic
SEVEDVVRKVEKLVRDLIKHVEENVRRVEEVVRKLIEEIKRIAEEITRIAEELAKEPGSEDLLRKLEKVLKEIDDKLKELEDRLRDMVRRSRESSEENERRLKRVEDEVRRNGISEEVEKVLREVVKEVEKVNRESREVTRRVLEEAKEMLERVKKIVKEVIEKVRRVVK

SEQ ID NO: 5493 - protein, 170 aa, Artificial Sequence; identical to SEQ ID NO: 5492
  Synthetic

SEQ ID NO: 5494 - protein, 184 aa, Artificial Sequence
  Synthetic
SADREVEERLREVIERVKEALKRSKDVTDEVTRRVEKLDKESNDTSREVIRRVEDMLSRVSDEDKVRRIKEELERVRRESEETSKKNKRELDEVRKDSRRTLEDIRRKLEEVERRIREELREVRDDELVKRIVEKVDKAVKDLEKLVRENVERVRRAVERSRKTVEDNVKRSRDVVRELRERVR

SEQ ID NO: 5495 - protein, 184 aa, Artificial Sequence; identical to SEQ ID NO: 5494
  Synthetic

SEQ ID NO: 5496 - protein, 184 aa, Artificial Sequence
  Synthetic
SSIDEVREEIRRVIEEVRKLLEESKKDTDRVRREAEDMDRKANETVEEVERRVREVLRSVSDERKVREIEKKLEDMLRELKKRSDDNKRRLEDLVRRSDKTLDEIREELERALREIEEVLEKVDKEEVVRRILKRIEEVLKKLRKAIKDNVDRVRDAVRRSRRTVEDIVRRVREVLERLEREIK

SEQ ID NO: 5497 - protein, 184 aa, Artificial Sequence; identical to SEQ ID NO: 5496
  Synthetic

SEQ ID NO: 5498 - protein, 175 aa, Artificial Sequence
  Synthetic
SLAEEVERRLEESHKRARKLVKEVKEALEESHKESDRLVREVEKELKRVAEEVRKEGIDEKRLKEIKELVDTIRKEIKEVLDEDRRTVKEIKEEVEKIVEDLERLHREIRKEIEKVKEAVEKVRDLVRKTTEKVEEVVRRLRELVKENLDEAKRVVEDLKRKVKEIEEKVKEDSK

SEQ ID NO: 5499 - protein, 175 aa, Artificial Sequence; identical to SEQ ID NO: 5498
  Synthetic

SEQ ID NO: 5500 - protein, 178 aa, Artificial Sequence
  Synthetic
SMAEKVDEVSKRSKEELKRVVKEVHEVSTRVEKVVKDVLREVEKVSKESTDVVDRVGVDSETLKDLKRRDKELLDRIRDKLRRMLEDLRRLNKEAEDLIRRLETEDEKLLRDIRRKVRGREVVDKVVRDLEKTVKDVKEVVDRAVTASKELVDRIRRLAEEVVRALERTVDKVRRDAK

SEQ ID NO: 5501 - protein, 178 aa, Artificial Sequence; identical to SEQ ID NO: 5500
  Synthetic

SEQ ID NO: 5502 - protein, 178 aa, Artificial Sequence
  Synthetic
DAREEVDEVSRESKEELKRVLDEVDDVSEKSRKTVRDMLRKNKEVVDEVEKTLEDVGVDSRKVDELRKRIKTLSRKSEEDVRKLLKRDEDLLRRIREEVKRLLDEDEKLLKDIRDKVRGKEVVKDVVRKLRETVKRVREVAEEVVRELEKTVDEVRKRADDSVKKHRDLVKEVKEAAD

SEQ ID NO: 5503 - protein, 178 aa, Artificial Sequence; identical to SEQ ID NO: 5502
  Synthetic

SEQ ID NO: 5504 - protein, 178 aa, Artificial Sequence
  Synthetic
SAEEDVERVVREVEREVREALRRVREVSERSREDVRRVVDENRKVAEEVEKRVRDVEVDSEDLRKLLEDIRRVSEESERLARELLKEDEDLLRRIEDTVRRLLERLKDLLEDIRNKVRGEEVVREVVKKLREIVKDIRRLAEEVVRRLEDTVRKVREIAKRSVDAHRELVRRVEERAR

SEQ ID NO: 5505 - protein, 178 aa, Artificial Sequence; identical to SEQ ID NO: 5504
  Synthetic

SEQ ID NO: 5506 - protein, 174 aa, Artificial Sequence
  Synthetic
SSAEEVERVLRRVEEEDRRLVAEVRRVLKESRRTLEELVRRVKEVLEEVRKEVERIEVSEEVLREIEELLERLDRELDEVLKESEDTLRAIEKKLEEVHRRTKKLLDELREVLERGKDAKELIKRVEEIVEESRKLIDEAIREVEENVDRSRKKIKELIDRVREILKRARDRAR

SEQ ID NO: 5507 - protein, 174 aa, Artificial Sequence; identical to SEQ ID NO: 5506
  Synthetic

SEQ ID NO: 5508 - protein, 174 aa, Artificial Sequence
  Synthetic
DSEEEVKKVLDEVRRRDEKLVEEVRKVNEDSLDTLRKLAEEVKRKLDEVRERVERLEVSEDVLRRIEELLKDLKRRLEEVLRKSEETLRRNKEEIEKTHKDTRDELKELEELIKAGKDAEELIREVERIVKKSEDMIREHIRKVEENVEESKKEIEELIRRVDDILREAKEAAD

SEQ ID NO: 5509 - protein, 174 aa, Artificial Sequence; identical to SEQ ID NO: 5508
  Synthetic

SEQ ID NO: 5510 - protein, 174 aa, Artificial Sequence
  Synthetic
SGEEDLERVLDEVRRRDKKLVEEVRKRNEDSLRRLERLAEEVERVNEDVLKKVEELRVSEEVLKEIEEELRRNKEAIKRTLKRSKETLDKNERDIERTHERTKKKLDEIRELIKAGKDASEVRKLVEEIVTDSRRRITEHIRRVEENAKDSERVIREHKERVKEILEKVRRAAE

SEQ ID NO: 5511 - protein, 174 aa, Artificial Sequence; identical to SEQ ID NO: 5510
  Synthetic

SEQ ID NO: 5512 - protein, 181 aa, Artificial Sequence
  Synthetic
SEVEKLVEDVKKAVKEVLEEAKENVRKVEDVVRRVLERAEDNVEEVKKVVATLVDLVRRGDRRERLEERAKRINDESRKHLDKLERDVERMSKESEKHLRELEKKVEEILKEVEDRLSRVDGEELMREVRRVIKEVRDRVRDVLDEVRRVNEEVNRRVRKVLEDVRRVNERTKEDLDRESK

SEQ ID NO: 5513 - protein, 181 aa, Artificial Sequence; identical to SEQ ID NO: 5512
  Synthetic

SEQ ID NO: 5514 - protein, 181 aa, Artificial Sequence
  Synthetic
SEVDKLVREVDELVKKSKDNIDKLVKRVREMVEESKRKADRNVEEVERVVREIKDLARRGDRDERLRREVRRRNEESRRHLEKNKKESDDMLKEVKDHLDRNLKESEEELKRVEDKLKDVRGDELVKKVRDRLEEVERRTRKALEDVKRVLEDVKRLTDTALREVERVNRKTEEEVDREIR

SEQ ID NO: 5515 - protein, 181 aa, Artificial Sequence; identical to SEQ ID NO: 5514
  Synthetic

SEQ ID NO: 5516 - protein, 181 aa, Artificial Sequence
  Synthetic
DKVDRVVKEIEEAVKENLDRVREIVKEVRDLVRENLEEVRKSVEDVKRLVKEILELVRAGVPEEDLKRTLDEVVKRSEESLKRLKEHTERVEERLDRLLRELKKHTDDVKRRVEELRKDSTDEDAVRKVEEVLREVEKRSTEALKELRDVLREVRRESEEALDENRRVTEEVKKKVEDERK

SEQ ID NO: 5517 - protein, 181 aa, Artificial Sequence; identical to SEQ ID NO: 5516
  Synthetic

SEQ ID NO: 5518 - protein, 181 aa, Artificial Sequence
  Synthetic
SEVEEIVREIRDLVRKNEERVKKIVEDVRRAVEEILELAERSVEKVKRLVDDLRRLAENGVPREKLREDLRKIVEESKESLRRLERKLEEVKDTLRRLLEELKEHTDRVARRLEELRRRTTDEEAVRKVDRVLEEVEKRSRDALKELEEVLKEVERLAREVLEKNERVTEAVEDLVTKAAK

SEQ ID NO: 5519 - protein, 181 aa, Artificial Sequence; identical to SEQ ID NO: 5518
  Synthetic

SEQ ID NO: 5520 - protein, 178 aa, Artificial Sequence
  Synthetic
DEEERVREELERVNEEVKELKKEVETVNKRVHETLEKVIREVKKVNDDVHRTVEDLRRRGLLTEEVIRDLERASRESEDELRKVREKLRRASEESRDKLREVEERHEKLSRDIEEELRAGGDVEEIVKKIKEVVDRTRKLAKELVKESRDLAEDVKRLIKRLVEDSRRLVEEIKERAR

SEQ ID NO: 5521 - protein, 178 aa, Artificial Sequence; identical to SEQ ID NO: 5520
  Synthetic

SEQ ID NO: 5522 - protein, 178 aa, Artificial Sequence
  Synthetic
SEEERVEKRLREVNKDVKRLVKKVRDVNRKVHEDTKRLVEEVRRVNRDVHRRVKELREAGKLDEEVIKDLEKASEDSKRELEKVVRESEDSSRRSEEKLRRVEERHKRLSEEIRRKLESGGDVDKIVEEIDKVVTETRELAERLVKESEDNVERSRDLARKLVEKSERLVKEIDDRAR

SEQ ID NO: 5523 - protein, 178 aa, Artificial Sequence; identical to SEQ ID NO: 5522
  Synthetic

SEQ ID NO: 5524 - protein, 178 aa, Artificial Sequence
  Synthetic
SAAEKVREELERVNRRVEELLKKVKKVNEEVRDIVRKVVREVERVNKEVEEEVKRLVDQGRATEEVKKTVDKLSEDSRRKLKEAIEELEKRSRESEKELEDVKREHDRLSEEIERELESGGDVEEIVKKIKDVVKRTDELAERLVETSERLARTIKKVAEDLVRDSKRIVDEVRTRIT

SEQ ID NO: 5525 - protein, 178 aa, Artificial Sequence; identical to SEQ ID NO: 5524
  Synthetic

SEQ ID NO: 5526 - protein, 178 aa, Artificial Sequence
  Synthetic
SDEDRVRRRLEEVNREVEELLRDVERVNEEVKRRVKKVIREVEEVNKRVEEEVKRLRDEGRLDDKDIKRLKEASDKSREDLKRVEEKVEKLSRDNKKKLDDVKRRHDELSKRIDEELKSGGDVEDIVRKIDDVVRETRELAKELVKHVRDVVEDVRRLVKELVDLSEKLVKEIRDKVE

SEQ ID NO: 5527 - protein, 178 aa, Artificial Sequence; identical to SEQ ID NO: 5526
  Synthetic

SEQ ID NO: 5528 - protein, 182 aa, Artificial Sequence
  Synthetic
SEVEKVVKEMEDLARENERLAREIVKDVERLVREIEDTVRRSVETTRRLVEEIRELAERGVDERELERFLKEIEERNRKSREDLDRLLEKIERKVRKVDRDSDRSLERIRRRIDDVRRKINSDERVLELLERVLRELEKVVEDSKRRIKEVLDELRKAVDKVKKEDKKVHDELRKVVEEVRT

SEQ ID NO: 5529 - protein, 182 aa, Artificial Sequence; identical to SEQ ID NO: 5528
  Synthetic

SEQ ID NO: 5530 - protein, 185 aa, Artificial Sequence
  Synthetic
RVEELLRKVITELDRVLEEVRRRNEASIEELDRVLKEVERLNKEVDEELKKVLEKVRKDVSDEKKVRELEREVREISRRNEKLLRELREEVKRIKERNKRLLEELERTARRIKKRLEDLLRKLKDVEEVVRRIVEEIKKVIDELREESRRTVREVEKLVKEILDRSRKTVEEVKRLAEEIERKAK

SEQ ID NO: 5531 - protein, 185 aa, Artificial Sequence; identical to SEQ ID NO: 5530
  Synthetic

SEQ ID NO: 5532 - protein, 178 aa, Artificial Sequence
  Synthetic
RVKELVDEVKRKVEESMRESTERNRTATEKVEKSLRDSEKLNRDATRKLKKVVDDVRREGRVPEEVERRVKEILDKNNEDMKKVLEETRRILKDNNEELKRVLKETRDLLKELDDEVRETKIDEEVVKKVEDVVERNKDLVRKSVEHIDKVVKENRELVKRSVEHIDRVVKEARERAR

SEQ ID NO: 5533 - protein, 178 aa, Artificial Sequence; identical to SEQ ID NO: 5532
  Synthetic

SEQ ID NO: 5534 - protein, 178 aa, Artificial Sequence
  Synthetic
SAEELVKRVLDDVRRSAEESERLNREATEEVKRSLEKSRKDAERVLRDLERVVRKVKTEGAVSDEVVKEIEDIVRELRKEAEKVHRETEKLLKDNNDDARRVHEETKELLERLRREVRETRIDERVVRKVEAVVERNRKLVEDSVRHIREVVKRNEDLVRRLVEEVKRVVKKAEDKAR

SEQ ID NO: 5535 - protein, 178 aa, Artificial Sequence; identical to SEQ ID NO: 5534
  Synthetic

SEQ ID NO: 5536 - protein, 178 aa, Artificial Sequence
  Synthetic
DVEELVKKVEDMVRKVIEEVKKRNTDVTRRVEESLRKSTELVREAEERLRRTLEELRRRGLAPEELVERLRRLLERVKREVERVHEETKRLLKRNNEDMKRVVEELKKLLDRLREEVRDTRISEEVVRKAEEVVKRAKELVARSVKHVDEVVRRNEELVTRLVRELDELVKEVRETAR

SEQ ID NO: 5537 - protein, 178 aa, Artificial Sequence; identical to SEQ ID NO: 5536
  Synthetic

SEQ ID NO: 5538 - protein, 178 aa, Artificial Sequence
  Synthetic
RAERLVREVARRLEEVLKEVEKLNKDATDKVKKSLEDSRKKNEDVTREVRRVIEELRTRGDISKDVVKRIEDILRENNRRIAEVHRETKELLKRNNDEARKVKKKAKEDLERLTREVRDTKIDEDVVRRAEELVERLRKIAEDSVRHLEEVVRKNERLVKESVDHVRTAVEELKETAR

SEQ ID NO: 5539 - protein, 178 aa, Artificial Sequence; identical to SEQ ID NO: 5538
  Synthetic

SEQ ID NO: 5540 - protein, 178 aa, Artificial Sequence
  Synthetic
DAEEKVKEVEREVEKVIEEVKRDNTRVTEENKRVLDTVRERNKRVTDELRKVLEDVRREGSVPEEVVRRAEEILKRNNDEVREVLRESERRLRENNERMKRVEDDIRKLTKELREEVRDTKIDEEVVKRIADVVKTVKRRVDESVKDIKRSVKETEDRVDRSVRHVEEVLKELRKASE

SEQ ID NO: 5541 - protein, 178 aa, Artificial Sequence; identical to SEQ ID NO: 5540
  Synthetic

SEQ ID NO: 5542 - protein, 178 aa, Artificial Sequence
  Synthetic
SAEDKVRKVKKEVEKVIKDVKEENRRVTRENEEVLDRVKKDNERATRKLRKVVEDVRREGRVPEEVVRKVTEELRENNKRMKEVLDKSRKKLEENNKRVDEVVEELRKLLEDLDREVRDTKIDERVVERIKRVVERVDELVRRSVKDVKDSVRETRKLVDDSVKDIDRVVKEARDRAK

SEQ ID NO: 5543 - protein, 178 aa, Artificial Sequence; identical to SEQ ID NO: 5542
  Synthetic

SEQ ID NO: 5544 - protein, 178 aa, Artificial Sequence
  Synthetic
DAKDKVRKVLEEVKKVIEEVERRNRTVTRENERVLKEVKDRNTEVTKELKKVVEDVKRRGDVPEEVEDDIRRKVEKNNRDVEKVLDDSRRLLEENNKKAEDVKRKLEDELRKLEEEVRRTKIDEEVVDRVRRVVEEVTELVRRSVEEIKESVKTTRDLVRKSVKNIRDLVEEAKRRAD

SEQ ID NO: 5545 - protein, 178 aa, Artificial Sequence; identical to SEQ ID NO: 5544
  Synthetic

SEQ ID NO: 5546 - protein, 174 aa, Artificial Sequence
  Synthetic
DEVETVVRDVKRLVRENERKVREIVKTVDKLVKENEDLVKRSVEELKKLAKEIKDLADEGVDKRELDEVLKRIRERSERSKRESDRTLEKITRDIERVKRESRKSLEDVRKRLEDFPESEDLRRVKKEAEDVVRDSERLIEEVKRRVKKVVDDSRRKDEEALRDVERVIEEVRR

SEQ ID NO: 5547 - protein, 174 aa, Artificial Sequence; identical to SEQ ID NO: 5546
  Synthetic

SEQ ID NO: 5548 - protein, 174 aa, Artificial Sequence
  Synthetic
SEVDDVVRRVKKLVKEDRDLVRDSVRKLDELVRDDKRLVDEVVERLERIVKEIEDLMREGVDERTLREVLKKAEEVVRESKERHDTTLERVKDVVRRSREEHKRTLDEAKKEIDRVPRSEKLEEVLKMLEKVSDEVKKENDRALKKVEDVSREVKELNKEVLKRARDVVERVRT

SEQ ID NO: 5549 - protein, 174 aa, Artificial Sequence; identical to SEQ ID NO: 5548
  Synthetic

SEQ ID NO: 5550 - protein, 178 aa, Artificial Sequence
  Synthetic
SSKEKVKKVLDKVKEVLDRVRELVKRVDRESEKVVEDVRRKNKRASEKVKTVIRDVEEKKQVPEKVVKEVEELLKRNNDTMKRVVDESKKTLDKLREEVKRVREDIKRLLRELEDVVDRGKDVDDVLRKVEEIVRKVKDMVRKILEKAERNVEETERVVTESKENADRIVKEVEDRAR

SEQ ID NO: 5551 - protein, 178 aa, Artificial Sequence; identical to SEQ ID NO: 5550
  Synthetic

SEQ ID NO: 5552 - protein, 178 aa, Artificial Sequence
  Synthetic
SAREAVTEVLRKVREVLKRVEDENRKVSKELRDLLEEVERRNRDLTEKVKRLIDELKERGRIDDKAVRDLEKLLEDNNRDVKRLLEEIDKLIKDNNKKVEKVLREIRRLLERLEDVVDRGVDVERILEEAERIVKELEEVLEESLRNVKEILKKLEDALRKSEEDVRRILERVEEEAR

SEQ ID NO: 5553 - protein, 178 aa, Artificial Sequence; identical to SEQ ID NO: 5552
  Synthetic

SEQ ID NO: 5554 - protein, 178 aa, Artificial Sequence
  Synthetic
REVEEVLRRIKEMVKRIEELVRRSEDRAKKLVDTNRDLVRRSEERFRELVKEIEDVAREGVDEKELDKIRKKVKKESDKSKRTLEESLERVEEDSKRVEDELERILREIKEEVDRMREEGVDVEELERVLREVEKVVRDVRRRNEKATRDVRRSVEESRRLDKRALDEVRKRIEEVRT

SEQ ID NO: 5555 - protein, 178 aa, Artificial Sequence; identical to SEQ ID NO: 5554
  Synthetic

SEQ ID NO: 5556 - protein, 174 aa, Artificial Sequence
  Synthetic
RVEEVLKRVLDKLRESNKDSERLVREALKEHEEVNKEVEDRIREVLRRVEEVLKKVEKDKGRDKELEKIRKVLKDLADEVRELLKRLNDVLDRIRKEVKKLSDESNELIKELERANLPAEDIKRLVDEIVDTDRKLVEEVKREAKESVKESEELVERVKRKADRIVEEVEKTVK

SEQ ID NO: 5557 - protein, 174 aa, Artificial Sequence; identical to SEQ ID NO: 5556
  Synthetic

SEQ ID NO: 5558 - protein, 174 aa, Artificial Sequence
  Synthetic
DEVEEVRKTIERLVDRIEDVVRRVLELSRDTVRKNEDLVRRIEEELTKLVEDIKDVSRKREPEEVIETLAREAERILEEVKRLDEESKRESEKKLEEIKRELEELAEELKRISDSVERAELLEEVERLLEEVLRKAEKVIEDARKLDEDVNRKSNKVIEDVARRLEKVLKEVKD

SEQ ID NO: 5559 - protein, 174 aa, Artificial Sequence; identical to SEQ ID NO: 5558
  Synthetic

SEQ ID NO: 5560 - protein, 177 aa, Artificial Sequence
  Synthetic
SVEDVIRRVKEKSEEVLKRLKEVIDEVKKRSEDVLKEVEDAIDEVRRRSEEALDRVRRAGLDKKDLERLRRHSEELVKRVRKLLEDLRDHSRKLVEEVRKLLEDLRDHSRKLVERARRERKSEEARDLADRDVEDVERVVTDIRRLVEKNVRDVRRVVREIEDAVRRNVKEIDRRVK

SEQ ID NO: 5561 - protein, 177 aa, Artificial Sequence; identical to SEQ ID NO: 5560
  Synthetic

SEQ ID NO: 5562 - protein, 177 aa, Artificial Sequence
  Synthetic
SVEELIERVKRRSEKVLRDAEKTIRDLKKDSKRVNDELEKVIRDVMEKSKTALDEVRRRGVPKEVLERLERSSRKIKRDVEKLSEDNRRHSEELERRVEELLRKLKKHSEELEEEARRKRVSEEARRLVERDVEDVKRLVEEIKKLVTDNVRTVEDLVRRIKREAEENVKEIKEEVR

SEQ ID NO: 5563 - protein, 177 aa, Artificial Sequence; identical to SEQ ID NO: 5562
  Synthetic

SEQ ID NO: 5564 - protein, 178 aa, Artificial Sequence
  Synthetic
SDVDRAVETNDKVVTEIVERVKEVVERNREIVERISTTVDEMVRRNRDIVRRVAERVSDKEKVDRVVKHVEDTVRTIRDLVRRIREHVRRTVERIRKLAEEITERSKRLSDEIRKVGSDKDVRDLVREVLERSDELVKRVEEEVKRLLERNKKLLDDVTEAAARLLKRNKEVVEELDK

SEQ ID NO: 5565 - protein, 178 aa, Artificial Sequence; identical to SEQ ID NO: 5564
  Synthetic

SEQ ID NO: 5566 - protein, 178 aa, Artificial Sequence
  Synthetic
SEVDRVVEENDRVVRKVEEVVREAVERNETVAERVKDTVDRMVRENEKIVDKVRKDVKDKDKVDTVKKHVEKLVREVKELVERIVETSRDLSRKIKDLVDKVKERSKRLSEEIRRVGDEKDVEKLVRDVLRESEKLVDDVRRAVKKLLEDSEELVREVKEAAEESLRRNKKIVEDLTR

SEQ ID NO: 5567 - protein, 178 aa, Artificial Sequence; identical to SEQ ID NO: 5566
  Synthetic

SEQ ID NO: 5568 - protein, 170 aa, Artificial Sequence
  Synthetic
DELETVLREVERVVTEVKKLNERTVRDDKEVVERVLREIDKLLKEIREKVKEVKKKLRTEEVAERVVKEIKDRVDDIERRVDEALKESKRTVDESEREVKEMVERIEEMARRVKGEDVERTVRKLLEEIKDSVRKSKEDVRRSVEEIERLVRKVKEDVKRLLRDIRERAK

SEQ ID NO: 5569 - protein, 170 aa, Artificial Sequence; identical to SEQ ID NO: 5568
  Synthetic

SEQ ID NO: 5570 - protein, 185 aa, Artificial Sequence
  Synthetic
SKVEKALKKIEDVLEDIKRLVEEVVERDERLLERLEEENKRADEKSKELVKRLTDLVRENKGKEETVKRVVDRVTEEVKRVVDKTREVLKKIEDSSRRVLEEVERLLREVEKEVTDILDEIRKDNLREALERIREILEEVRKAVEDLLRKIKETLKRIRERVKRLIENLEKSLEDARKEVDRLRK

SEQ ID NO: 5571 - protein, 185 aa, Artificial Sequence; identical to SEQ ID NO: 5570
  Synthetic

SEQ ID NO: 5572 - protein, 177 aa, Artificial Sequence
  Synthetic
DVDERIEELLRRIERLVEESERDVRRLKREIDDLVTKSLKTVEESLKRIKELVDRVSEEAKDEDKVRTVKTKVDEALKRSKRTAEESKRLVDEARKEIEDVVKKSREIVKRVIDEIKKIRNKDDVERVVRRVLKEIDDSTKEIRRIVKRVLEEIERTTRDDKRVIDEVRELIKETSR

SEQ ID NO: 5573 - protein, 177 aa, Artificial Sequence; identical to SEQ ID NO: 5572
  Synthetic

SEQ ID NO: 5574 - protein, 178 aa, Artificial Sequence
  Synthetic
DADELVTEVRKRVRETLEEIRTILDEVRKRVKKTVEDIRTEAERVKREVDKLVKEVRDNNLPEEMVEKIRRMVDTVAREVEEAVKRSEDTLDRIRKLVEKVLDDSRKTLEEIEKLVKENKGKDREIEKLLDDNRRLIEEVLRRIDELVREDEELVKRVLDRIRTVLDRIREEVDEVRR

SEQ ID NO: 5575 - protein, 178 aa, Artificial Sequence; identical to SEQ ID NO: 5574
  Synthetic

SEQ ID NO: 5576 - protein, 178 aa, Artificial Sequence
  Synthetic
DVRELLKKVEDEVRRTLKEIERILKEVKTESDKTLKEVAELLERLDRDVKRLVKEVRDNNVPEEVVRRIEKVARDVKEEVKRLLKELERSVEELARRVKDALRKSARTLEEIRRLVEENQGKKEEIRKLVERNKELVRDVLRRIKELLKRDKEMLEEIRERIKEIEKRLKELLERAKR

SEQ ID NO: 5577 - protein, 178 aa, Artificial Sequence; identical to SEQ ID NO: 5576
  Synthetic

SEQ ID NO: 5578 - protein, 185 aa, Artificial Sequence
  Synthetic
SEIEEVLKRVEEMIRRSKKLTDKVLREVEKMIRELDKKTDEVLERSERLARELKELVRRDVPDSEKVERIREKIDRLVKESRDSVKKNKDENREIVRRVRDLVRENKERLDKVLEDVDREVKRVRRRERIEEILRRVTEAIKRSKEDSERIRETVTRLIRESEENSKRNLERVKKVIDELREEIR

SEQ ID NO: 5579 - protein, 185 aa, Artificial Sequence; identical to SEQ ID NO: 5578
  Synthetic

SEQ ID NO: 5580 - protein, 185 aa, Artificial Sequence
  Synthetic
DKLEEVLKRVEEMLRELDKETDDVLKTVEDLLRRLDELTDEVLKESRRAAEELKRKVDRDIDRSERAERIKRKIEELVKESERSVEENKRRNREVLDRVTKLAKRNKERNREVLKRIAEDVKDIRREEKIREIEKKARKLIKDSRKNIRDILETVKRLIEESDKNIKENEKRVRKVIDELDKEIK

SEQ ID NO: 5581 - protein, 185 aa, Artificial Sequence; identical to SEQ ID NO: 5580
  Synthetic

SEQ ID NO: 5582 - protein, 182 aa, Artificial Sequence
  Synthetic
REKEEIIKKVKDVVKRVKEELKKIVEESERLVREVEEELKRSNEKSRDLVRRAEEELEKKSTDKDVRERVKEIVKDLRRLLREDKRLVEEILKRLRELLERDRRTIEEILKELEDLLRRIEESDRREEELDRLIKRVEDRARKVLEDSKRTIEEIEKVARDVLRRSEETVKEVEEKARRALK

SEQ ID NO: 5583 - protein, 182 aa, Artificial Sequence; identical to SEQ ID NO: 5582
  Synthetic

SEQ ID NO: 5584 - protein, 189 aa, Artificial Sequence
  Synthetic
SAVEEIVKEVERIVREAEKALKKSVDDNRRIVEDAVRTLKRLVEEAARLVDEARKELTKKSTTEDVERRVREIVRDLERLLEEVEKRVEDIIEELKKSLEESERHTREVVKKLRELLEEIKRVVTEKGTDEDVLRELKRLLKELERVVEEVLRRDRKWLEDTRREVKRVVEELKRLLDELREVVERARR

SEQ ID NO: 5585 - protein, 189 aa, Artificial Sequence; identical to SEQ ID NO: 5584
  Synthetic

SEQ ID NO: 5586 - protein, 185 aa, Artificial Sequence
  Synthetic
KELEDLVREIEDTVDRIEREIRKLVEDDHRSVRKAEEDNRRLVKESEDLVRRIEEEIRKKETTEEVKERAERVIRELRELLKRNREIVERSIRKLEDINRRSKEIADRVIEELRRLLKEVRKVVKDGVDEEVMRRLKEDIERLMEEIRREVEKLNETTKEVVKESLETHKRIIERIREVAEETRR

SEQ ID NO: 5587 - protein, 185 aa, Artificial Sequence; identical to SEQ ID NO: 5586
  Synthetic

SEQ ID NO: 5588 - protein, 175 aa, Artificial Sequence
  Synthetic
SSLEELLKEIRKRVERIKEELDRALKEDHDIVRKALRELDEMLKKNEETVRRAMERIKDKREVIKELEDSLRKSEEIVRRLKETLKRSNEDSERLVREIKKKLEELARTIEDLVRRGVPEDVVRKVLEELEEEARRVLRELRESLKRTEELVRRALETLKRSDEETKKLVEDIER

SEQ ID NO: 5589 - protein, 175 aa, Artificial Sequence; identical to SEQ ID NO: 5588
  Synthetic

SEQ ID NO: 5590 - protein, 175 aa, Artificial Sequence
  Synthetic
SSLEELIKEDHRVVREAEKRLEELLKEDHDRLREAKEELERVLKRDHETLKEVVERIREKREVIEELKRSNEESRRLVEDAKRRLDESNERSEEIVRRLKEELKRSNDDSRRVVEEGVPEEVLKKIIERTRDLVRRALRTMEESIKRTEELVKKLLDELEASIRKTEEDADRIRK

SEQ ID NO: 5591 - protein, 175 aa, Artificial Sequence; identical to SEQ ID NO: 5590
  Synthetic

SEQ ID NO: 5592 - protein, 175 aa, Artificial Sequence
  Synthetic
SSLERLIEEDHETVRRVKKTLDDMLKRDHEVVDEARRRLDELLKRDTDIVRDAVKRIRDKREVIERLRESNDDSRRIVEEIKKTLKRSNEKSKRIVEELKRRLEESNERSRDVVRKGVPEEVLKKIIKETKELAKEAVERLEESIKETEDLVRRVLKEMEESLRRTEELVREIER

SEQ ID NO: 5593 - protein, 175 aa, Artificial Sequence; identical to SEQ ID NO: 5592
  Synthetic

SEQ ID NO: 5594 - protein, 180 aa, Artificial Sequence
  Synthetic
SIEEVIERIREEAERLLKELEEVNRESTRLAEDLREELRRVLENSRALVKELKERIRKESLLKEVDELAKRLTEEHERLLREVEDIMRKVNKHDTELLRTVEELMKEVKRRLEELRRRNVDDKSLKELLRDVERKIREVRKRLKESLERVEREIRRVREEIKRLNDESRERIERVKRRVD

SEQ ID NO: 5595 - protein, 180 aa, Artificial Sequence; identical to SEQ ID NO: 5594
  Synthetic

SEQ ID NO: 5596 - protein, 176 aa, Artificial Sequence
  Synthetic
DAEELLRRLDKSSKETLKRNEESLRRSEETSKRSLDTNRRSLEKIEKIATDLRRKLSERKIRELLKRIEEILRKVAEDVRRNSEHNKRLLDRSRENVRRISEHNRKLLEELAELAKRGDVDERVVREAEKLDEDNTRHSRRNLEESKRLDEENIKRSEDLLRDVRRLIEEVLEEAR

SEQ ID NO: 5597 - protein, 176 aa, Artificial Sequence; identical to SEQ ID NO: 5596
  Synthetic

SEQ ID NO: 5598 - protein, 188 aa, Artificial Sequence
  Synthetic
SKLDEILERAKKLIDDLRKESDDVLRRDRELIERIRRKSEEVLERVKRLIEELEDRVRKVRDEDLKRKLEEEVKKILEDVDDVIRRITEEIRRTARESEKVIEDISRKIDEVLDRLRKLIEELRKESDEDEVRRVLRELERLVKELKDKNKESLDELKKTNDRLEEENRESLRRAREEARRILEEIRR

SEQ ID NO: 5599 - protein, 188 aa, Artificial Sequence; identical to SEQ ID NO: 5598
  Synthetic

SEQ ID NO: 5600 - protein, 188 aa, Artificial Sequence
  Synthetic
DELEEILKRVEKLIRDSIEKIRRILEEDRELIKELIKESREVLERVRELIKTLEKKVKDVDKEELKKRLEDEVRKVEEDVRRLIEEITRKIEKTLRESKKKADEDKEENKKILDEVRELIRDLREKTDRRTVEEVLKRIEELVKRSLEESDRVAKEVRKTNEEVKKTNEDSLRKIKELVKRILEKIRK

SEQ ID NO: 5601 - protein, 188 aa, Artificial Sequence; identical to SEQ ID NO: 5600
  Synthetic

SEQ ID NO: 5602 - protein, 188 aa, Artificial Sequence
  Synthetic
DELEDVLREVRKLIKELEKKSREVLKRDKELIDRIRKESEEVLKRVEDVLRKLEDEVRKVREERLKEELKKKVERVLREVERLIKEISDKIRKTLKESRDVIREISEEIKDILRRAREKARDLADKSDKRRVDEVLEEIERRVTELNKKNEESLRRAEKTNKELDEENKESLERIRKLIEDILRKIEK

SEQ ID NO: 5603 - protein, 188 aa, Artificial Sequence; identical to SEQ ID NO: 5602
  Synthetic

SEQ ID NO: 5604 - protein, 188 aa, Artificial Sequence
  Synthetic
DELERILEEVKRRIERLIERLREVLERDKKLIEDIRRESEDVLRRVEEVIKKIREELERIRDRRLREELMKKIEKLLREVDKVIKDISEKIRRTLERSREVIERLKEEVEKVLREVEDMIRKLAERSDRETVKDVLRKLRKIADEVRRDIERVLDEARKTNKRLDEENKDSLKKLRDRAKELLDEVRR

SEQ ID NO: 5605 - protein, 188 aa, Artificial Sequence; identical to SEQ ID NO: 5604
  Synthetic

SEQ ID NO: 5606 - protein, 174 aa, Artificial Sequence
  Synthetic
RELEEVLKEAEKLIREITEEVKEALRRDEKTVRDNIRDLRRVLEEVRKLIEEILDRVRRRGPRDELERDVERIADKVRRAITRSRKHVEDSVRTTKEMIDRLRRKVEKILTEVRKKIDSKFLERLEELITRLKERIDKALRDLEKTNDELRKRSEEVLRRLERLLERLREEIRR

SEQ ID NO: 5607 - protein, 174 aa, Artificial Sequence; identical to SEQ ID NO: 5606
  Synthetic

SEQ ID NO: 5608 - protein, 172 aa, Artificial Sequence
  Synthetic
SEVERVLEDSRRTNEEIIKRLRDALRESEKTNRDIEKRLREMLKKSKETNERIKRSDRDKDELKKLVEKDKKEVEDALKDLEDLVREDKERVDEALERMRKLVEDDKEALERRIKDKKVLDKARELVRRTEEIVKDVIRKSRELVKESKERVDRVITESRRVVKKTLDDIRK

SEQ ID NO: 5609 - protein, 172 aa, Artificial Sequence; identical to SEQ ID NO: 5608
  Synthetic

SEQ ID NO: 5610 - protein, 172 aa, Artificial Sequence
  Synthetic
SEIEEALKRSKETNERIIRKLEEVLRRSRKTNEEIIRRVERVLEDSERTNREIEKSDRRKEEVAKLVDDDRRKVEKALEEARRLVEEDKERVEKALRDMRELVKEDKERLDRTIKGEEFLRTVKKLVDDTRKAVEEVITRSRRLVEESERRVREVIDRMRKLVEETKRKLDK

SEQ ID NO: 5611 - protein, 172 aa, Artificial Sequence; identical to SEQ ID NO: 5610
  Synthetic

SEQ ID NO: 5612 - protein, 172 aa, Artificial Sequence
  Synthetic
SEIEKALKESEDTNRKIKDDLRKVAERVRKLIEDVIRTLERVLRDSERTNREITRSDRDKDELRKLVERDRERVEKVLRDAKRLVRTIKEDIRRALEEMKKLVEEDEEKVKKKIKDEDVLRKAKRLVDETLKEVERVIRELEKLVEDLEETVKEVIKRSRELVDETEKRIRD

SEQ ID NO: 5613 - protein, 172 aa, Artificial Sequence; identical to SEQ ID NO: 5612
  Synthetic

SEQ ID NO: 5614 - protein, 172 aa, Artificial Sequence
  Synthetic
EEIERALKKSEETNRDIIRKLREVNERDKRAVERDEEELKKALDESRKTNEDIRKSDREKEELRKLVEEDRKRVEKVLTDSKRTNEELLRHSEDVLRKLRKLVKEDEKRLKDEIKDKDVLETVRKLVEDTLREVERVITHSLKRVEDTLRKAKEIADRMRTLVRKTLEDIER

SEQ ID NO: 5615 - protein, 172 aa, Artificial Sequence; identical to SEQ ID NO: 5614
  Synthetic

SEQ ID NO: 5616 - protein, 172 aa, Artificial Sequence
  Synthetic
DEVERVLEKSKRTNEDIIRRLEEVNKTDRKLVEDDIRRLEKALRDARKTNEEIRTSDRDKDLLRKLVEDDKKRVKDVLRESRKTNDDLRRHSEKALEEARRLVDEDRERLEREIKDEDVLRKVRELVERTKERVERVIDHSRKVVETTLREVERVIREIEELSKDSERKIRK

SEQ ID NO: 5617 - protein, 172 aa, Artificial Sequence; identical to SEQ ID NO: 5616
  Synthetic

SEQ ID NO: 5618 - protein, 172 aa, Artificial Sequence
  Synthetic
SDAERALKESEDTNREIIEKLERVNKRDKDIVDKIREDLKRVLERVRDTNRRIRESDRRKEELKELVERDKERIEDALRRLEELVKRLEDHSRELLKDAERLVRTDDELVKRRIKDERVLREVKRLIDETKRIVDEVIKHSKEEIDKLREEVERVIKELRELSDKSLDDIRK

SEQ ID NO: 5619 - protein, 172 aa, Artificial Sequence; identical to SEQ ID NO: 5618
  Synthetic

SEQ ID NO: 5620 - protein, 172 aa, Artificial Sequence
  Synthetic
KEIEDVLKKSEDTNRRIIERLRKANDTDRRLIEDTIRKLREVLKEAEKTNKDIKDSDRDTSVLRELVRRDERRVEEVAREMHKLNEDIREHSERVLRELRRLVEEDRDRVRREIKDEDVLRTVEELIERTEREVERVIAHSEDLIRRSNEDVKRVIKTIRELSEDSKRAADK

SEQ ID NO: 5621 - protein, 172 aa, Artificial Sequence; identical to SEQ ID NO: 5620
  Synthetic

SEQ ID NO: 5622 - protein, 174 aa, Artificial Sequence
  Synthetic
DEERVLKELEDLLREILKDIERTVRESRKLVKTILDEIEEVARHNRKLIEEIRREVKKKEVLDEVEEALRRSVKNLEDILREVERLVREDEEKNRKLVEDITRIADTLVKVLEAGTRDLKELLETVRRVIEEVKKVLKRSLEESKKVIDDVRRHLEKNNRDIKTVIDRVREKAK

SEQ ID NO: 5623 - protein, 174 aa, Artificial Sequence; identical to SEQ ID NO: 5622
  Synthetic

SEQ ID NO: 5624 - protein, 174 aa, Artificial Sequence
  Synthetic
SVEEVVEEVKRLIEEVEKTNKKTVEDSKRLIDDIRRRIEEVMRHNRELIKKIEREVTKEEVVRKIRDVLRKSEENLKELLREITERVKKDEKDNEENLRRTRELLEEMERLARAGTIDLRELLERVRRLVEESKRNAEESLRRSEKVIKEATDHLRRNNETIKRVIDRVREEAK

SEQ ID NO: 5625 - protein, 174 aa, Artificial Sequence; identical to SEQ ID NO: 5624
  Synthetic

SEQ ID NO: 5626 - protein, 174 aa, Artificial Sequence
  Synthetic
DTERVLKTLRDLIDTILKRNEEILRHNEKLSRDSKRRIEEVARHNRDLARRVEEEVTKEEVVRKAREMMKRSLRNLEELLKEDDKVLRDSLRHVEENLRRTEKLLRELEELLEAGKRDLRKLLEDVKEIIKTSKENVDRNNDRIRRVVERSEKHLEDNNRDVKRVVDEVREEAR

SEQ ID NO: 5627 - protein, 174 aa, Artificial Sequence; identical to SEQ ID NO: 5626
  Synthetic

SEQ ID NO: 5628 - protein, 174 aa, Artificial Sequence
  Synthetic
KEEEDIKREIEKRITEIKKKNEEVLRRVEELIKRIHELNKRIEDTIDEEIRRIEDLVRRGTDKEDLKRRVKEIEDRVRRLIEDSRKKIKDIEEEVKDLARRSRKEIKEIKDEVRKKVDDDVLRKLKRLLDEIIKHSEDVLRKIKELLDEIKRDSDRVFKKLKELLDRIAREIEK

SEQ ID NO: 5629 - protein, 174 aa, Artificial Sequence; identical to SEQ ID NO: 5628
  Synthetic

SEQ ID NO: 5630 - protein, 174 aa, Artificial Sequence
  Synthetic
RELEEIDRKIKKLIEDIHRENRDILRRIRELIERIKKKNEDILREVRKLIKEIEDLVREGAPKEELKKRIEDIMRRVEKLAKESRDEIDRILEEVERLAERSRRKIDKIMEDVKREVDDKVLKKLEDLLREIKKDSDRVLEEARKLLEEIKRHSDEVLEEIKKLLDDIKKRVET

SEQ ID NO: 5631 - protein, 174 aa, Artificial Sequence; identical to SEQ ID NO: 5630
  Synthetic

SEQ ID NO: 5632 - protein, 174 aa, Artificial Sequence
  Synthetic
SELEKIDDEIRKLIEDIHRLNREIARRNEKTIREIRKKNEDVLRRNKRSADEIDRLVKEGVDKRELRKEIKKSNDESRELIDRSRKEIKKSNDETRRLAEESRKLIEDIRREVERRIDSEALRKLKRLLEEIERDSRRVLDELHKTDEDIERHSREVEDRAHKTDKTIKDRVET

SEQ ID NO: 5633 - protein, 174 aa, Artificial Sequence; identical to SEQ ID NO: 5632
  Synthetic

SEQ ID NO: 5634 - protein, 174 aa, Artificial Sequence
  Synthetic
SEDEKILEEVRREIERIHEENRKVRERIERLIREIHKLNREVLERNKESIEEIRRLVEEGAPKEELRKTVRKSNEDSKRLAKESKDRIDEIEREVEKLIRDSEREIERIEEEVRRKIDSKFLEDIERLLREIDKDSKRVLEELKRLLDEIRKDSDRVLKTAHDTDDKILKDIDK

SEQ ID NO: 5635 - protein, 174 aa, Artificial Sequence; identical to SEQ ID NO: 5634
  Synthetic

SEQ ID NO: 5636 - protein, 174 aa, Artificial Sequence
  Synthetic
KEEDEVREEIKRRIEEIARLNKEIEDEIRELIKRIHELNREILKKVRKLIEEIEDLVRKGVPKEELRKRIEDIRRDVERLLRESEDRIRRIEERVDRLLKDSRDKIDRIKEEVKKKVDSEVLRELDELLRRIKKNSEDVARKLKDLLRRIREDSERVAKEIRRLVEEIKKKVDK

SEQ ID NO: 5637 - protein, 174 aa, Artificial Sequence; identical to SEQ ID NO: 5636
  Synthetic

SEQ ID NO: 5638 - protein, 182 aa, Artificial Sequence
  Synthetic
DEVKRIVDEVRRLVEKVHRVNEEVVKESEDLVREVHRKNKRVLDESERLVEEVERVLKRDVSDRRKVEELVEELRRLNEETRRAVKRSSEELKRINDETRRELEDNSRKLKEVLDRVEKELRKGNGDERVLRTAEEVIRRLEKHSKDLLDTSRRLAEEILRKSDDLLRRSKEKIDDLKRKIK

SEQ ID NO: 5639 - protein, 182 aa, Artificial Sequence; identical to SEQ ID NO: 5638
  Synthetic

SEQ ID NO: 5640 - protein, 182 aa, Artificial Sequence
  Synthetic
SEVDRIKEEVRKLLEEHHKRNEDIVREVTRLLEEHHKKNEEVVRESEKLVKKIREILRDRVRDEDKVRDLERRVERLNRETRRELTESSEEARELVKRVTDELRKSSKELTDVVRDVERLLDEGRGDERVLEEARKVVRELNRRSEELLKRARELVERLDRKSEELLRKSERIIKKIEEDIR

SEQ ID NO: 5641 - protein, 182 aa, Artificial Sequence; identical to SEQ ID NO: 5640
  Synthetic

SEQ ID NO: 5642 - protein, 182 aa, Artificial Sequence
  Synthetic
KEVEEIVRDVRRLVEEHHRENRKIVETVEDLVRKVHRENKRVVEESERLVDELTKILRDTLSDKDRVDDLKKKVDEINEETRRHVERNSREAEKLLRDVEKEVRKSSERLRDLERRVRKLLRDGRGDEEVLKRVREAIRRLNEDSKRLLKEARDVVERIKRNSDKALEESKRKLKEIEERIK

SEQ ID NO: 5643 - protein, 182 aa, Artificial Sequence; identical to SEQ ID NO: 5642
  Synthetic

SEQ ID NO: 5644 - protein, 178 aa, Artificial Sequence
  Synthetic
SKMEEVRRRIKEEADRDEEDNRRVLEDIRRLIEENKRRNEEVLKRIEKKARDLLERIKKDGRTEEIERLLRELEREVDEAVKRSEKNNRDSNRKIEELAKRSRERNRTTNEDIKEVLRRGEIKEEIIKEVSTLNEKLKRDTDEILKEVTRLNERLKEETDRILEEVKKLIDKVRKAVE

SEQ ID NO: 5645 - protein, 178 aa, Artificial Sequence; identical to SEQ ID NO: 5644
  Synthetic

SEQ ID NO: 5646 - protein, 178 aa, Artificial Sequence
  Synthetic
KEADDVKRRLDDLIRRNEEKIRDVRRRVKELVDRNRKKIKEVLDKVKEIIDRLKDEIDKTGRDEKIEKKLEDVRREVTEAVKRSREDNRRSNEEVRRLVEDSRRNNKKSNDEVREVLRRGEIEERIIEEVTRENDRLRKESDRVLDEVSKLNDEARKETDDVLKTVDELVREVAEKAK

SEQ ID NO: 5647 - protein, 178 aa, Artificial Sequence; identical to SEQ ID NO: 5646
  Synthetic

SEQ ID NO: 5648 - protein, 185 aa, Artificial Sequence
  Synthetic
SDAERLLETVRRIAKRLKELNEEVLREAKRIIDRVREENERSRETIREIMKKLKEDIDRIGGRDEEDLRKLLEDAKRIIEEILRRNEELLKEIEKEVDTVLKKNERLLERAEEEVRRMIEEIRTRDGPGVDEILRDVERLLEEVRRSVKESTRRIKRLLDEVRKSVKESTKEIKKLLKDVEDAAR

SEQ ID NO: 5649 - protein, 185 aa, Artificial Sequence; identical to SEQ ID NO: 5648
  Synthetic

SEQ ID NO: 5650 - protein, 185 aa, Artificial Sequence
  Synthetic
KDIEDLRRRIEEIIEEAKRLDKTSLELIRRIIKRIKDENKKMLDEAEKIIRDALKTIDDVGGRDEEELRRLLRKAEEDVRDVDRRNEKLMRDVDKEVAEVLERNKRLLDEIRKRVERVIEDIERRRGPGVEDVTRRIEELLEEVRKSSEDSIRDIRRLLKEVRDSFKRSSDELKRLLDEVRKRAE

SEQ ID NO: 5651 - protein, 185 aa, Artificial Sequence; identical to SEQ ID NO: 5650
  Synthetic

SEQ ID NO: 5652 - protein, 185 aa, Artificial Sequence
  Synthetic
RELEEVVKELRRLLEEVRKRVEDSIKRLDELLDEVRRSNKKSSEDTRKLLKELEDEARKVMERVPDERVRRVLDELRKLVDDNHRENEEISRRMKELVDRSRKHVEEVLRRLEELVKRIEDELRKGERDVREVREEIERIVTKARKVVKEDDDLVKRIVAEARRLSKESEEKVREIVKRAEEKVR

SEQ ID NO: 5653 - protein, 185 aa, Artificial Sequence; identical to SEQ ID NO: 5652
  Synthetic

SEQ ID NO: 5654 - protein, 174 aa, Artificial Sequence
  Synthetic
DEVEELREELERLLKESEDRLREVKKRSDDSLKESRELIKKVRDTLERLLREVEDKVEDERIVEKVRKAVEEVERHLRENEKTIARVVEETRRLLKRNLDEARRVVEEVRELLKRNKDVETVAREVRERVERSKRHIEKVLKEDEEMVRESKKNIEDLLRRVKEDIDRLKEEVD

SEQ ID NO: 5655 - protein, 174 aa, Artificial Sequence; identical to SEQ ID NO: 5654
  Synthetic

SEQ ID NO: 5656 - protein, 174 aa, Artificial Sequence
  Synthetic
SKADRLREELDRLLKEVKELNERSKRESDRSLEEIKRLIEKVERESEKTLREVRAKVDDERIVREAEKIVRETKEELKRLEKRVEEVVRRTKKANDDNLKAVTDMVRRVRDLLARNVDIDTVVEEVKKLIKEILDHIRELVEDDKRKIKEILEEIKKLAEDDRRKVEEVKRKVD

SEQ ID NO: 5657 - protein, 174 aa, Artificial Sequence; identical to SEQ ID NO: 5656
  Synthetic

SEQ ID NO: 5658 - protein, 174 aa, Artificial Sequence
  Synthetic
SDVEDLKKKLDELLEEVERTSREVRKTSERSLEEVEKLLRRVKEESKRLLEEVERDIKDESIIDEVRRLVERSEENLREILRRITKVVEDTERRLKESLDEAREVVERVRDLLERNVDVKKVLDDVKKLVDDVKRKDKKLLDDDRRRVEEALEHIKRNLDRSRDLIRRIKEKAK

SEQ ID NO: 5659 - protein, 174 aa, Artificial Sequence; identical to SEQ ID NO: 5658
  Synthetic

SEQ ID NO: 5660 - protein, 174 aa, Artificial Sequence
  Synthetic
DEVKKLKDDLDRLLDEIRRKIEKVRKDSEDSLKRVEELIRRVEEESRRLLEDVKREISDEEIIREAKKAVEESKKNLDDIRREVKRIVEETERLLKKLDDDLKRVVERVKELLDRNKDIKKVLDDVRREIRRIDEEIKRVEEEDRRMVTELLKHIERNLERSKRLADEVKEKAR

SEQ ID NO: 5661 - protein, 174 aa, Artificial Sequence; identical to SEQ ID NO: 5660
  Synthetic

SEQ ID NO: 5662 - protein, 174 aa, Artificial Sequence
  Synthetic
KEVDELRKALKELLDEVRETSKRVLDETRRLLEEVRRELERVKRESDETLKRIKDRVKDKRLIEEVKRVVEKTRRDLRKIEDEVRRAVEESKKNLDESIKTVEKVVREVKELLDRDRDVDTVLEDVKRKIDELKEHDKRNLDESRRLITELLERIKKLAEDDRRVIEEIERRIQ

SEQ ID NO: 5663 - protein, 174 aa, Artificial Sequence; identical to SEQ ID NO: 5662
  Synthetic

SEQ ID NO: 5664 - protein, 184 aa, Artificial Sequence
  Synthetic
KTMDEIKKEVTDLVRRIRELNERVERTVEDLVRKSRRLNERVLREVERLVKEVRDALRDKDEKDAKRIKDKLDEILRRVKKVLDDNSRHTDKVLEEVRKLLEDDTRELDRILEEVDDVIKKVGKDDETLEKVVDDVRKRIKRSKEHSDEVLEDAKKKIDENLEHSRRVLEEAKKLIDDLKDEIR

SEQ ID NO: 5665 - protein, 184 aa, Artificial Sequence; identical to SEQ ID NO: 5664
  Synthetic

SEQ ID NO: 5666 - protein, 184 aa, Artificial Sequence
  Synthetic
EKAERIIEEVTDLVRRVRETTKTVKEEVRKLVERSKRRNEEIRREVKELVDEVEKKLREKDEKDARRIRKELKEVLDRVDKLLTDDSRKVEEIRREVEERLDESRKRIEKILKDVEDLLRKIGTDKDALEKVRRDVERLIRELEKTDRDVLEEVKKLIEESERNSDRILEEVRRIIEELKKKIK

SEQ ID NO: 5667 - protein, 184 aa, Artificial Sequence; identical to SEQ ID NO: 5666
  Synthetic

SEQ ID NO: 5668 - protein, 184 aa, Artificial Sequence
  Synthetic
SVVDEIRERVERLLREVEKTTEELRDTVRKLVEESEELTKRIEDEVRKLVEKVRRELRRKREDEVTRIRKELEDILKEVKRLLDENRDKVRRVLERAKRLLEDSKRRLDEIVERVRDLLEKIGTDEDKLREVLEEVKERIDRLKELDKKILEDVKRLVKESKEELKDILRRARKLIRDLEEKIK

SEQ ID NO: 5669 - protein, 184 aa, Artificial Sequence; identical to SEQ ID NO: 5668
  Synthetic

SEQ ID NO: 5670 - protein, 184 aa, Artificial Sequence
  Synthetic
SEVEKMLKELKELVERALERDKDALRKLRDLVRESLERDKRMVDKLDELVKEIEDRIRKRKESREDVKRLLKRLREELDKIRKENEELVRRLKEELERIKEENKKLLEELKKRLEDAVRKVGKDKREKVDKIRRDVKRLLDESRESLERSEKDVEKLLEDSRDSLRKSKKRVEELVKRVEEALK

SEQ ID NO: 5671 - protein, 184 aa, Artificial Sequence; identical to SEQ ID NO: 5670
  Synthetic

SEQ ID NO: 5672 - protein, 184 aa, Artificial Sequence
  Synthetic
REVEEALKESTDTIKKILDDDRKAMDELKKLVDKSLEDDKRAVDRLRELVKEIKKIIKKRKDLEEKVKELLRRLEEELRKIEEENRRLVEELKRKLEEIKKKNEKLVRDNEERLKEVVERMGKDKKEDVDRIEEESRRLNEESRDSLRKSEDTVRKLLEESKESLDRSRREVEKLLKEVEDALR

SEQ ID NO: 5673 - protein, 184 aa, Artificial Sequence; identical to SEQ ID NO: 5672
  Synthetic

SEQ ID NO: 5674 - protein, 185 aa, Artificial Sequence
  Synthetic
SELEELDREVEELVERSKRTNERVVEESKRLVDESRRDIDRLLEEVRKLVKDILERIKEEGGESEKAEKEVRDLIRRIKELLDEIRKRVERSNEENEKLLRENKKLDEKSVRDLEDVARKIAKRVRSEDVRRLLEKIERLIEESNRSLERSREESERLSKESEDRLRELEKTVKELLKRVEEALR

SEQ ID NO: 5675 - protein, 185 aa, Artificial Sequence; identical to SEQ ID NO: 5674
  Synthetic

SEQ ID NO: 5676 - protein, 185 aa, Artificial Sequence
  Synthetic
DEIRELLKKAEELVERSLRDNEKVVDELKKLVDESLRRIREMLKRAEDEVRKILEDIERKGGESDDAKRRVEKAIREIEDLLDKVRREVEKSNEELKRVLDENRRRDRESVERLRKELEDVERRIRSDEVDTLRRTVDKLVKDSNRSLEESKRTLEDLIRRSKEELDKLEKDVRRLLDEVRKALK

SEQ ID NO: 5677 - protein, 185 aa, Artificial Sequence; identical to SEQ ID NO: 5676
  Synthetic

SEQ ID NO: 5678 - protein, 174 aa, Artificial Sequence
  Synthetic
DELEDAMRRVEEMAERSERNIRRSIRKVEELVTRSKKNIEDSLREVEKVAREAEELLRRNVDTDEVVKRVEEVVERIKRHNDENNKTSDRLVKEIEKENRENNKRTEEVVRDVARRVTGEEVKRRLDELLKRVTDLDRDSEKKLRELLEEVTKLDKESKDRLDELLEKVRRDRE

SEQ ID NO: 5679 - protein, 174 aa, Artificial Sequence; identical to SEQ ID NO: 5678
  Synthetic

SEQ ID NO: 5680 - protein, 178 aa, Artificial Sequence
  Synthetic
SEVDKLLDRLTKLAKRSIDEARRLVERDREVLEKSIRDAEKLVERDEKVLEDIKRLIEREGPSEELLKRVEDVVRRSREDLEELLKRSKEVVKRSDEALRRLLERSKDVVREVEDELRKKNLDETVRRLVTELNKASKKVVDDVRRESEKSNRDSEDVVRKVKKASDKSLEDVERDIR

SEQ ID NO: 5681 - protein, 178 aa, Artificial Sequence; identical to SEQ ID NO: 5680
  Synthetic

SEQ ID NO: 5682 - protein, 181 aa, Artificial Sequence
  Synthetic
EEVERIVERLKRLAEEDSREIKEVMDRNRESVRRILKRIKDIVEELRRLVEEIKKKIEKDGPTEEVEKRVKELEERVDEEVKKLKELVKRNHDEVRRVLERSRDTVRRIREDVERVAREISDKEKVERLEKDIRRLEKESEDALRRLEDTSKRTDDEIERAIEELERTITDLVREIRERVR

SEQ ID NO: 5683 - protein, 181 aa, Artificial Sequence; identical to SEQ ID NO: 5682
  Synthetic

SEQ ID NO: 5684 - protein, 182 aa, Artificial Sequence
  Synthetic
REVDEIRKELDDRVREIKKRIEEAVEDSRRTVEEIKRRVEEVDKTDRKLVEDIKREIDRRKDAREKVERLLEELKTHSDDSERRIRELIREDEETVRRVLEEIRKLIRDLEEKVKRVEKDISDRKKAEELRDRVRKLVEEIERLLEELRRTLEKTRREIERVVEENRRSVEELIREIKERVD

SEQ ID NO: 5685 - protein, 182 aa, Artificial Sequence; identical to SEQ ID NO: 5684
  Synthetic

SEQ ID NO: 5686 - protein, 174 aa, Artificial Sequence
  Synthetic
DDERRVKEEIKRILTEAKKVIDENKRRSEEVLDRVRKLVKENKDENDEVLKTVDELVRRGSPKEEVLRRVEELLERSKRKIKEVLDRVTKLNEESKRHSDEVLEKVERDLRRLAEEARIEEVRKELKRVLDEVRRLVKETEETDRTSNRTVAELAKDLEKKTDDIEREVRKKVT

SEQ ID NO: 5687 - protein, 174 aa, Artificial Sequence; identical to SEQ ID NO: 5686
  Synthetic

SEQ ID NO: 5688 - protein, 186 aa, Artificial Sequence
  Synthetic
DRVERILKKIEDALRKVEELIRRNKKKIDDVLDEVRRLVEESKKRIDEILDEVRDRITKLKDDEKVVREIEKEVRRLIEEARKDDERTNRKVKKEVEESERDNERSNREVDKVIRDIKREIERDIGGKKEAKRLKDLLDTVRETVKRLNDELRKRSEEVLRRVDKLNKESKKRLDEVLRTVREELR

SEQ ID NO: 5689 - protein, 186 aa, Artificial Sequence; identical to SEQ ID NO: 5688
  Synthetic

SEQ ID NO: 5690 - protein, 182 aa, Artificial Sequence
  Synthetic
REIEEVKKENDKSLKEIEKIIREVKEENKRSLDKIKRIIERALEEIKRMLEKAKKLADEGVDRSVVEKAIKDIERLLEEIRKEVERVLEENEELLRRIERRVKEVIKKDKKLMEDVARKLKELDKFLTEVKRSFEKSVEDIKRLLKEVSESVKRSTDEIRRLLDEVRRAVEEVLRRIRELLR

SEQ ID NO: 5691 - protein, 182 aa, Artificial Sequence; identical to SEQ ID NO: 5690
  Synthetic

SEQ ID NO: 5692 - protein, 179 aa, Artificial Sequence
  Synthetic
SLVEELRRVVEEVRKTLEELVKRLEDSVRRSAEEIRKLIEDAERSVRESERAVKETGDGKILEEAKELVERSERKVRKLLRDLERLVEESEREVRRIADEVRRVLDDLRRKIEDLERKRVTKEIKELLEEIKEMLRRLKKKAEDIDRTNRELEKEVRELVERLLRDNRRLLKEVVERAK

SEQ ID NO: 5693 - protein, 179 aa, Artificial Sequence; identical to SEQ ID NO: 5692
  Synthetic

SEQ ID NO: 5694 - protein, 179 aa, Artificial Sequence
  Synthetic
DKIEEAKKNVDESKRRVEELIRELRESVERSKRDVERLVRELEESVERSLETVKRDGDSRILREAERLVEESEKKIRELLRRAEKLVEDSARKIEELLREAEELVKESEDLIRDLERKNVTKEVKELLKRNSDLLRRVEELVKKLDKENRDLLRKVREDAKKLLKENEDLLEKVKRDAR

SEQ ID NO: 5695 - protein, 179 aa, Artificial Sequence; identical to SEQ ID NO: 5694
  Synthetic

SEQ ID NO: 5696 - protein, 179 aa, Artificial Sequence
  Synthetic
DEIEKAEKNVRDSRREVERVVKKLKESVDKSREEVERLVRELERSVEESRRLVEERGDSKILKEAKDLVDESRKEIEELLRRAEELVRRSEEEIRRLLKRARELVKESRDRIEELAKRGVTKEVDRLLERNSRLLEEVEERAKELDERNKKLLEEVRRRAEEVDKRNKDLLRTVDRRAR

SEQ ID NO: 5697 - protein, 179 aa, Artificial Sequence; identical to SEQ ID NO: 5696
  Synthetic

SEQ ID NO: 5698 - protein, 179 aa, Artificial Sequence
  Synthetic
SLIEEARENVKDSKKKVKELVDRLRKSVEESRERVREVVRRLRESVDTSADAVRKAGDSRILEEAKRLVDTSRKKIDDLLREAEELVKRSADKIKRLLEEATKLVEKSRRDIEKLAKDGVTEAVKRLLEENSKLLADVADEARKLNEENERLLREVEKKAKKLDDENRKLLEEVIETVR

SEQ ID NO: 5699 - protein, 179 aa, Artificial Sequence; identical to SEQ ID NO: 5698
  Synthetic

SEQ ID NO: 5700 - protein, 179 aa, Artificial Sequence
  Synthetic
DEIEELKKNVEDSRREIDRLIKELKESVEKSRKDVEKVVKELRESVKDSLDKLEKTGDSEILKEVRRLVERSEREIERLLEEARRLVDTSREEIDRLLKKARKLVEESERKIEDLRRKGVTKEIKELLKENSDLLERVREEAETLDRKNKELLERVKRKADRLNEENRRLLKEVIEKAR

SEQ ID NO: 5701 - protein, 179 aa, Artificial Sequence; identical to SEQ ID NO: 5700
  Synthetic

SEQ ID NO: 5702 - protein, 181 aa, Artificial Sequence
  Synthetic
SEVEKLLRDLERLLEEIVKEAEDLDRENKERLKEIARKARELNEENKDLLRRVKELVDRNVDKDTLRDEVRKAVEDTKRRVDDLLRDVKRVADETKKKVDELLERVERVLRRVKEEVRRIDDERLVREVERVIREVRKRVEEVVRKVEESIKESEERVKELVKRVTDSLERSKKEVEDAIR

SEQ ID NO: 5703 - protein, 181 aa, Artificial Sequence; identical to SEQ ID NO: 5702
  Synthetic

SEQ ID NO: 5704 - protein, 181 aa, Artificial Sequence
  Synthetic
SEVEELLKRLEDILRENERRARELNRKNKEVLKDNRRRAEEVNRRNKRMLDEAERLAEDNVDKRELLERVKKVARETRELVKDLLRHSEKVVRDTRKVVEDILRHSEEVAERVRREVKKISDEKLVREVETKIEEVRRRSEELVKEVEKSLKESEDDSRRLVREIEESIRESEERIKRRVE

SEQ ID NO: 5705 - protein, 181 aa, Artificial Sequence; identical to SEQ ID NO: 5704
  Synthetic

SEQ ID NO: 5706 - protein, 178 aa, Artificial Sequence
  Synthetic
DEVEEILEKSRRTLEENKRRAKEAVRRSRETLRESEERVKRVVEELRDRLRRIEEEPRRREEIRKVLEELARDVERVLKELEELSKRDEDEVKRVIDENRKSLDKDRRDVEKVIREIQDEDALRKIKKVLDETETESRRTLEELRKVLEETHRRNEKLIRDLREVLKEIEEAVRRREK

SEQ ID NO: 5707 - protein, 178 aa, Artificial Sequence; identical to SEQ ID NO: 5706
  Synthetic

SEQ ID NO: 5708 - protein, 178 aa, Artificial Sequence
  Synthetic
DEVEEALRRLEDLLRRNVEEAKEVVKDSERTLREDAERVKRVVEKSKRTLEAIEKRDLRRELIKEVLDKDREDVDRVLKDSKRTLEEDKERVKRALERNKKSLEDISRRVEDVIRKVTDEEAVRRIEEVLKKIREDSKRTIDELRRVLERTEEETRRLIKELEDVLRRTEEEVKRRLK

SEQ ID NO: 5709 - protein, 178 aa, Artificial Sequence; identical to SEQ ID NO: 5708
  Synthetic

SEQ ID NO: 5710 - protein, 186 aa, Artificial Sequence
  Synthetic
SEVEKVLEEIKRLLDRIKERVDETDRRNKELLKKIKDEVRRAVEEIRRLLEEIKKSADEKGGERKEVRDEAKRVLDRIRDLLRKLREEIERVLRESRKLNEESNKEIKDLLKEVEDRVEDIKRKIGDEKLVREVEEVVTRVRKTIEDLVKKDNDSVRKSEERIKEVVKRIEEEVKRVLEDVDRLAK

SEQ ID NO: 5711 - protein, 186 aa, Artificial Sequence; identical to SEQ ID NO: 5710
  Synthetic

SEQ ID NO: 5712 - protein, 177 aa, Artificial Sequence
  Synthetic
DEVRELLERNRRLLEEIKKTVKDLIRRNEELLKRIEDDAKRLIDRNEELLDELEKRLKDDRLIREAKERLKKSLEDVKRRVEEVKRRLEKSLEEVETIIREAEKRNRDSLREMERRVKGEELEELRRVVEESDETIKRLLEEAKESVDRSLDRIRKLLEDVRRSVERSKKRIDEKRK

SEQ ID NO: 5713 - protein, 177 aa, Artificial Sequence; identical to SEQ ID NO: 5712
  Synthetic

SEQ ID NO: 5714 - protein, 177 aa, Artificial Sequence
  Synthetic
DEVRKILKDIEDILREIEERVKRVIERNKRILEKIREDVKRVDDRNKKLLEELERKLKGRELIKRAKEELDRTLEDARRLIEEAKRTLDESLEDIRRLIEEVSRRIERLLEEIRRKVKGDDLRRVEEVAKRIKDRIRELLDEIRRSVERSKRDVKRLLDELRRSVEESKRRIDEREK

SEQ ID NO: 5715 - protein, 177 aa, Artificial Sequence; identical to SEQ ID NO: 5714
  Synthetic

SEQ ID NO: 5716 - protein, 177 aa, Artificial Sequence
  Synthetic
SEVDKLLRENEKLLEDIERTVKRMLERIKKLNDDVHREIRRIDEENRRLLDEIEKKVRDERMVREVTERLKRTLDEIRDIARKAAEEHDRLLEEAEKIIRDVREESDRSLEEIERKVKGRDLDRLRRVVEKSKKRIEELEREARKVAKDVKKNLEELLEEVKESVRESEKRIKETEK

SEQ ID NO: 5717 - protein, 177 aa, Artificial Sequence; identical to SEQ ID NO: 5716
  Synthetic

SEQ ID NO: 5718 - protein, 184 aa, Artificial Sequence
  Synthetic
SLKERIEEELKKVKDTSDRLNEEVRRSVEDTRKRSEDLNEEVRRSVEESRRRVESLLKRIEDEDKARELRKKVEKVARDTRRLIKEDKDRSDKMVRDTERLIEEDARESEKAVREVEELVRRVDKEEEVKKIIERIEEILERSERRNREIIKRDEEALKRSEERNREIIERDKEMLERLEREVR

SEQ ID NO: 5719 - protein, 184 aa, Artificial Sequence; identical to SEQ ID NO: 5718
  Synthetic

SEQ ID NO: 5720 - protein, 184 aa, Artificial Sequence
  Synthetic
SLIETIKEVVKRVAETSKRLNDRVREELRKVEREVEELNREVERVLREVETAVDDLVKKIEDEEKVRRVEELVREVAREVRELIKENKEEVDRIAKEVEELVETDKRDVDRVVREVEELLKRVRRREEAEDIIRKIEEVLKKSKELNDRIIERIKKMLEDLRRHNEEIIEKIRRALKRLEDEAR

SEQ ID NO: 5721 - protein, 184 aa, Artificial Sequence; identical to SEQ ID NO: 5720
  Synthetic

SEQ ID NO: 5722 - protein, 184 aa, Artificial Sequence
  Synthetic
SLKETIRELLKRVEEESRKLNEDVARSVRETKRRSDRLNEEVERSVRRSEEEVRRLLKRIEDEEKARRLADKVRRLVERTKKLIDEDRDEVRRVVEETKELIKDSKKKVDELSEEVERLVDKIDRKEKAEEIIRRIKEMLRRDEEENRRIIERDERALDKSRRLNEKIIEEDKKAMRDLEEEVK

SEQ ID NO: 5723 - protein, 184 aa, Artificial Sequence; identical to SEQ ID NO: 5722
  Synthetic

SEQ ID NO: 5724 - protein, 181 aa, Artificial Sequence
  Synthetic
SEVEEIIKENRRTLERDRREVEKVIEENKRSLEEIERKVREIIKDNDRSAKEITELAKAGVPRKDLKRFLEEDKRRVEKVLDELRKLLEEDRRKVEEALRKSEKTLREDERRAREVIRRIDDEELVDRLRKSLRDVREESKKLIDELRRSLEESDRRVKELIDRLRKSLDDSRKLVDDLRR

SEQ ID NO: 5725 - protein, 181 aa, Artificial Sequence; identical to SEQ ID NO: 5724
  Synthetic

SEQ ID NO: 5726 - protein, 181 aa, Artificial Sequence
  Synthetic
SEVEEIIKDNERTLEEIRKRVEDVIREIRRLLERIERRVREAIKRNEESLRRIKELVERGIDRRELEKLLRKDEEDVRRMLEELKRLLDEIRKRVKEAIDELERLLREDEKRADEVIRRIEDDELVRTLRESLRRVAEEVKRLLKEVEDVAREVEDRVKKLIEDLRRSLEKSREDVERDSK

SEQ ID NO: 5727 - protein, 181 aa, Artificial Sequence; identical to SEQ ID NO: 5726
  Synthetic

SEQ ID NO: 5728 - protein, 188 aa, Artificial Sequence
  Synthetic
DRVREIIKRLRDLLREIRTVVRKIIEDNRKSLEEIEEHNRRVIRELRELLKEIKETVEREGRNDEVKERLDELLRRLKKRVEEIVRRNEKLLEEDKRRIDEALEELERLLRRLKRVVEKAVDELAKENKEEMIRTVKKVITEIAEEVKRLADEVRDSVRRSEEAVRRLTKETKEVVDDIVRRVRELIE

SEQ ID NO: 5729 - protein, 188 aa, Artificial Sequence; identical to SEQ ID NO: 5728
  Synthetic

SEQ ID NO: 5730 - protein, 188 aa, Artificial Sequence
  Synthetic
KKVEEIIEELKKLLREIEEHNKRVIEENERSLEEIKRHNEEVIEELRELLERIEEVVKRKGKNERVVEELEKLARDLKKRAEEAVERNKRLLDEDRDRMRKVLERNERLLRRLRTRVEKVLRDLKRDRKEDMIRTVEDVVRRIERRVRELSRESEESIRRSTETVKKLTKDTRDVVRRILKTVRDRIK

SEQ ID NO: 5731 - protein, 188 aa, Artificial Sequence; identical to SEQ ID NO: 5730
  Synthetic

SEQ ID NO: 5732 - protein, 187 aa, Artificial Sequence
  Synthetic
SLEERLREVLKDIERRVRELNETNKRVLDKSKTTVDELLKRLREVLEEIREEVRKLIEELARRGKREVLEKIKKDLEELRKTVEEAIKEIERLLREDEKRVREALRDSERLLEELRERVRKAIEEVKGREMIEKVLRDLEELAKRIEDKNRETIKESEKTLEEIRRRVDRLLEELRRLLKEIAKEVK

SEQ ID NO: 5733 - protein, 187 aa, Artificial Sequence; identical to SEQ ID NO: 5732
  Synthetic

SEQ ID NO: 5734 - protein, 187 aa, Artificial Sequence
  Synthetic
SLEETLEKVLRDITERSERLIRENEKNLRDVKREVEKLNERNRDVLKKIREKVRELIEELRRKGKKEVLEEIEERLKRIEEEVRRALERSREILREIEKRNDETLKTSKDTLERIREEVEKISDKVKGEEAIRKVLEELKKLLEEDERRAKRVSEESKELLDRLAEDNERTIRKLERLLEELERRTK

SEQ ID NO: 5735 - protein, 187 aa, Artificial Sequence; identical to SEQ ID NO: 5734
  Synthetic

SEQ ID NO: 5736 - protein, 182 aa, Artificial Sequence
  Synthetic
SEVDKVLEELKKLLDDDRREVERLLRELRRLLDRDRREVEKSIRTLEKLLKEIEDIVRERKEAKEELRRLLEEIEDVSRKSLEDNEKTLRDIRRTVEKILRDNEKTARDIKKRVEEIERRIKDKRALERVREVLERAEDESRKLSERIKKVLEDIERESKRLSEEDREVLKRIKEEVERLEK

SEQ ID NO: 5737 - protein, 182 aa, Artificial Sequence; identical to SEQ ID NO: 5736
  Synthetic

SEQ ID NO: 5738 - protein, 182 aa, Artificial Sequence
  Synthetic
SEVDKVLEELKELLKRLEEDVKRSSKESEDLLRKDEEDVRRSIRELERLLEEIEERVRRRKDAKEELRRLLDDIRRKSEDSLRRNTETMEENRKKSEESLKRIEDAAREIAERVKDIERKIKDERALREVRKVLEDIKKSVDELLKEDKDNLRETARESERLSREDKKVLERIEERVKELED

SEQ ID NO: 5739 - protein, 182 aa, Artificial Sequence; identical to SEQ ID NO: 5738
  Synthetic

SEQ ID NO: 5740 - protein, 182 aa, Artificial Sequence
  Synthetic
SEVEKVIEELKKLADDDRRRVEKSLRELRKLLEELEKRVRDSLEKLKKLLKEIEDRVRRRKDMKEELRKLLEDIERESRKSLEDIKKMLEKIERKSRESLKENEETARRITRRVEDIERKIKDEKLLREVRKVLREARETSRELSRADEKVLRDIRREVKRALDADKKVLDDIRERVKELEK

SEQ ID NO: 5741 - protein, 182 aa, Artificial Sequence; identical to SEQ ID NO: 5740
  Synthetic

SEQ ID NO: 5742 - protein, 184 aa, Artificial Sequence
  Synthetic
DEVEKILKEIDDAVKDLKRKSDKSLTDDRRMVEELKKKSEESLREVEEMVRRLEDEASRTTDEEKLDRLRKKVETVERKIRKTIRDLEDDVRRIVETTKKTIKELKDKARKIVEDVKRLVDRLEDEKVVRRVRDILDKLRKTVERLVEENEDSARRTEETIRKLVKDNEDILRELRRLIEERRT

SEQ ID NO: 5743 - protein, 184 aa, Artificial Sequence; identical to SEQ ID NO: 5742
  Synthetic

SEQ ID NO: 5744 - protein, 182 aa, Artificial Sequence
  Synthetic
SEVEEMLERLKELLRRIEKVVRDSLRRLKELMRRDEEEVRRSLRRLEELLKEIERVARERKEVQEELERLLREVEKVVRTSTEKNKRSLEEIREVVRRSSERLKKLLEEVKRRVKEVLDRLGDKKVLDEVKELLERIEETVRRLIEENERVLEEAEELSRKLSEDNEKVLEDARREAERLTK

SEQ ID NO: 5745 - protein, 182 aa, Artificial Sequence; identical to SEQ ID NO: 5744
  Synthetic

SEQ ID NO: 5746 - protein, 182 aa, Artificial Sequence
  Synthetic
DEVEEVLKELEKLAREDEDRVRKSEKKLRELADKDREDVERSLRRLERLLEELKRVVEERKEVKEELERLLERIEEVVRKSTEDNKRSLEEIERVVRESSKENKDTLDRIRERVEDILRRLGDKDMLERVERLLREAEKLSEKLSRDNEDLLRRARDLSRELSKENERLLEDIRRRVEEAIK

SEQ ID NO: 5747 - protein, 182 aa, Artificial Sequence; identical to SEQ ID NO: 5746
  Synthetic

SEQ ID NO: 5748 - protein, 182 aa, Artificial Sequence
  Synthetic
REVEEVLERLKRLLDTLEREVRKSLEELKRLLDELRKESKKSLDELRKLAEELERVVRRLKEVTERLDELVRRIEKKVRDSIRRLKKLLEEIEKKVRDSSKKLEELLETIKRVVEEILRRLGDEKMLREVKRVLEEAERRVRELIEENKRLLKEIKEEVKKLIEENEKVLEEARRLAEELKK

SEQ ID NO: 5749 - protein, 182 aa, Artificial Sequence; identical to SEQ ID NO: 5748
  Synthetic

SEQ ID NO: 5750 - protein, 182 aa, Artificial Sequence
  Synthetic
DEVREVLKKLEKLADELREEVRKSLEDLKRLLREDEERSKESLKDLERLAREIEEVVKKKKEVEEELEKLLREVRKKVKESLDRNKKSLDDIRKRVKESSDKLRELLKRIKEEVEDILRKLGDEKALRDVEELLRRIEERVRRLIKENEDLLREIEKTSEKLSRDNKELLKEIEERVRRLRQ

SEQ ID NO: 5751 - protein, 182 aa, Artificial Sequence; identical to SEQ ID NO: 5750
  Synthetic

SEQ ID NO: 5752 - protein, 182 aa, Artificial Sequence
  Synthetic
DEVEEALKTLEELMRRDKEEVDKSLEKLRRLLKEDEDRSRESLERLKRLAEELEEVVKKEKEVKEKLKKLLDDIRRLVEESLERNKRSLEEIERTVRESSRKNKETLEEIKKVVDDVLRRLGDRRVLERVKKLLEDARRLSERLSEENERVLEEAKRRSEELSKRNEDLLREIEKKMKEDTR

SEQ ID NO: 5753 - protein, 182 aa, Artificial Sequence; identical to SEQ ID NO: 5752
  Synthetic

SEQ ID NO: 5754 - protein, 182 aa, Artificial Sequence
  Synthetic
SEVEKVLEELKKLADDLRRTSKRSEEELEKLARELEKRVRESEKRLRDLLRELEDVVRKKKEVKDELRELLKRIEDVVRRSTEELKKLLDDIRRRVKESIDTLRRLLEEIERRVKKILEDLGDKDALKRVKELLDRIREEVEKLIRRNEKLLRDIEEKVRTLLERNERVLEEIKKKVDDDIK

SEQ ID NO: 5755 - protein, 182 aa, Artificial Sequence; identical to SEQ ID NO: 5754
  Synthetic

SEQ ID NO: 5756 - protein, 182 aa, Artificial Sequence
  Synthetic
DEVREVLEELRRLMKELRDVSEKSLRDLRKLAEEDKDRVRKSLEKLRELLRTLEDVVRKRKEVREELDKLLEDIEREVRTSTKENKESLERIREVVERSVRKLERLLEEIKRVVDDILRKLGDEKMLREVEDLLRRAEKEVRRLIEENKKLLKEAEETSRKLSKENEDVLRDIRRAVEELKR

SEQ ID NO: 5757 - protein, 182 aa, Artificial Sequence; identical to SEQ ID NO: 5756
  Synthetic

SEQ ID NO: 5758 - protein, 182 aa, Artificial Sequence
  Synthetic
SEVEKALEDLERLAKELEKVSRESLRRLEKLLEDDRRRSKRSLEELEELLDRLRDTVRRRKEVKEELRKLLDRIRERVKESLDRNEESMREIKEVVDRSIDRLRRLLERIRRVVKKVEDDLGDEKALREVRDLLRRIEERVKKLIEDNRKLLEDARRESERLSEENKRVLEKIEREVKKLED

SEQ ID NO: 5759 - protein, 182 aa, Artificial Sequence; identical to SEQ ID NO: 5758
  Synthetic

SEQ ID NO: 5760 - protein, 182 aa, Artificial Sequence
  Synthetic
SRVEEVLKKLEDLLRRLEEVSERSLRELRELVKRLEDVVRRSEKKLKELADRIEEVVRRRKEVREELRELLKRVEDTVRRSNEELKKLLDEIRKKVEESIRTLKKLLDEIREEVERILRELGDKKALDDVRRLLEEIEKRVTELIERNRRLLEEAEDRVRKLLRDNEELLKRIEKLVRDLER

SEQ ID NO: 5761 - protein, 182 aa, Artificial Sequence; identical to SEQ ID NO: 5760
  Synthetic

SEQ ID NO: 5762 - protein, 182 aa, Artificial Sequence
  Synthetic
SRVEEVARKLEDLLRELKRVSDESLKTLEKLMTDDERRVRESLDKLRELAREIDEVVRRRKEDDEKLKRLLERVEEVVEKSNRDNRESLERIRKVVEESIRKLEKLLERIRREVKKIEEELGDEDALREVRRLLERAEELVRELIKRNEDVLREAKRTSDELSERNRRLLERIKETVDRKRK

SEQ ID NO: 5763 - protein, 182 aa, Artificial Sequence; identical to SEQ ID NO: 5762
  Synthetic

SEQ ID NO: 5764 - protein, 177 aa, Artificial Sequence
  Synthetic
REVEEILKRIEELLRRIKKLSEETLREIAKLLEDIKRLSEETLKSNKDLLKRVRDELRTEEAIKKVKEENDKNLKDSEKIIREVAERIKRALEKSREIIKKVKKEIEDLLDEARKKIDSRMLREIERIIKELKELVDKLLEDNERLIERLDREVKRLLEENEKSVREASREIDERRR

SEQ ID NO: 5765 - protein, 177 aa, Artificial Sequence; identical to SEQ ID NO: 5764
  Synthetic

SEQ ID NO: 5766 - protein, 177 aa, Artificial Sequence
  Synthetic
DEVEELLRRIERLVEEARRLVEELLETNKKLLKDIEKLSRDTLKSNEELLREVKDRVRTEELVRRVAERNRKNLEESERIIREVKRRNEENLREAERIIRELERLIKELEREVREKVDSEMLRRLETIIREAERDLRRLLKEARDSVKKVSDEIKRLLEENKRSVDRVSREIKRVEK

SEQ ID NO: 5767 - protein, 177 aa, Artificial Sequence; identical to SEQ ID NO: 5766
  Synthetic

SEQ ID NO: 5768 - protein, 181 aa, Artificial Sequence
  Synthetic
DEVEELLKEIRELIEEARRRIEELLKEDRDIVRRVTELSRRTLEKIKDLIRKIKDIADRNDKRERAVEKVAKEIKELKDESKKVIDDIDKLIKESDEKAKKLIEEMKKRIKELKDKVRRDVDSEMLRRLEELIKEIEDLVRKLLEELKRSVRETEERVRKLKEDNDELIKRIDELVKEREK

SEQ ID NO: 5769 - protein, 181 aa, Artificial Sequence; identical to SEQ ID NO: 5768
  Synthetic

SEQ ID NO: 5770 - protein, 185 aa, Artificial Sequence
  Synthetic
SSLDDLRRLAEELLRTNKKLMEDLRRTNEKLIKEIEDVLRRIRESSKRIKEEVDKLTRDVRGDEELKRVIDELRKKVEDNLERVKRLIDRLRELVDRNHERVKTLVDDSRKKLEDLRERVERLPIDRKVLERVKEAVDEVRRSVEESLRDAKRMDEETRKTVEDVRREVTKSVEDVKRRIDESRK

SEQ ID NO: 5771 - protein, 185 aa, Artificial Sequence; identical to SEQ ID NO: 5770
  Synthetic

SEQ ID NO: 5772 - protein, 184 aa, Artificial Sequence
  Synthetic
DEVDEVVREVERLLEELRKENDKSVEEDKRLVDKLREEVKRILEEVRKLLEDLARKAKEDKREKVVEELRREAKKILDDIRRVIEELKKKITEILERTREAIRRSEEAARKIVEDIERVASKLKDKDVLRKLREVIKEVERIAEEVVRKNKDSADKSRKIIEDVVRALKKVVDDVRKIAEDLSR

SEQ ID NO: 5773 - protein, 184 aa, Artificial Sequence; identical to SEQ ID NO: 5772
  Synthetic

SEQ ID NO: 5774 - protein, 181 aa, Artificial Sequence
  Synthetic
DEVEKAVRESEETVKDIRRRNDETVRRLRELAKRLKERNEESVRRLRDLLRRLDEEVARRGRREEVEKVLKRIKDEVRRTLEESRKILEDIERDIERSLRDSRRLVTEDLDRLDKLLRKTTDERVLRDIRRVMEDSERIVKEVLDRNRKVAEDVRRIVEEVLRVNEDVLRKIEKRVRELKK

SEQ ID NO: 5775 - protein, 181 aa, Artificial Sequence; identical to SEQ ID NO: 5774
  Synthetic

SEQ ID NO: 5776 - protein, 181 aa, Artificial Sequence
  Synthetic
SELEEIKKRVDRALEENNKLLKEIEERVRKSNRDNERLLKEIEDRVREVTERIKKVEEEGRDRSVLEKIVRKVLDDIRRVMEESEELNRRSNKEIRRVLEESRELLKRVREEIEEVLKKVTDEDVLKKIRDLAREVEENVRESERKIKKLAEDDNRSVAESLREIKRLADEVKRRVDEARK

SEQ ID NO: 5777 - protein, 181 aa, Artificial Sequence; identical to SEQ ID NO: 5776
  Synthetic

SEQ ID NO: 5778 - protein, 182 aa, Artificial Sequence
  Synthetic
SELEEVRKRVKDVNRKNKELLDEIERTVRELLEDDRRLVDEAKKELDTLLRDIERLRREGVDREVLDRVLKRVKEIADRVKELLDRSLERLRREIERLKELVERSREEIERLIRKVETELKDVEDALREIRRLLEEVRKSIEDSKRLIEELLRRLKKVTDESRKKVEDLLREVEREVREAKK

SEQ ID NO: 5779 - protein, 182 aa, Artificial Sequence; identical to SEQ ID NO: 5778
  Synthetic

SEQ ID NO: 5780 - protein, 182 aa, Artificial Sequence
  Synthetic
RELEEIEKELKRMLDENRRLLERIEEEVRRLNEDNRRLLEEIEKTVEDLLEKIRKLSKEGVPEEVLRRVLREVEKIIKDAKKLLETTAERIRTIIEEARKRSEESLRRVTEIVKEVLRKLKDVREALKRIEELLREIEEVVKRSKTEIERLLRELEESVRRSDERIERLLKRVKDVVDEEER

SEQ ID NO: 5781 - protein, 182 aa, Artificial Sequence; identical to SEQ ID NO: 5780
  Synthetic

SEQ ID NO: 5782 - protein, 182 aa, Artificial Sequence
  Synthetic
EKEKEITKTLEDLIRKNRKLLEEIERRVKEVLKRDRELLEEIERRVADMLRRIRDVLRKGVPEEVLDRLLKEVKRIADKARRDLDRSLDEIRRIAEEAKKRNRDSLEEVKRIVEKVATEVKDLREVLERIKRLLEKVEKVSTESAKRIEELLEEVKRVTDDSKRRVTELLREVERVVDEVRR

SEQ ID NO: 5783 - protein, 182 aa, Artificial Sequence; identical to SEQ ID NO: 5782
  Synthetic

SEQ ID NO: 5784 - protein, 180 aa, Artificial Sequence
  Synthetic
DTLRELAKKAKELDDRNRKLLETVEELVRRVNEKNKDLLRRVRELARELLDRLRKLAREGSGKALRDIKKEIDRLLEELRRLVKESADEIDEILKEARRLVDESREEIKRLLDEVRDKVEDEEVRRELERLVRKLEESVRKSRKDVEDLITELKKSVKESLKEIEDLVRRLREVVKEIER

SEQ ID NO: 5785 - protein, 180 aa, Artificial Sequence; identical to SEQ ID NO: 5784
  Synthetic

SEQ ID NO: 5786 - protein, 182 aa, Artificial Sequence
  Synthetic
EEVDRILKESEDTIREIRDRVRKMLETSKKTVEEIKRRVDRALERDKKLVEDLRERVERTGRDKEVEKIVTDILRHSRELVREIEKLITEDKREVERALEEIERLVREDEERVRRVVEELRELKEAVEKMRRIVRESREVVARIREDIKRVLDESDKVVKDLKRAADRSVEEVKKVVDDIKK

SEQ ID NO: 5787 - protein, 182 aa, Artificial Sequence; identical to SEQ ID NO: 5786
  Synthetic

SEQ ID NO: 5788 - protein, 184 aa, Artificial Sequence
  Synthetic
SELERLKETSKDTIKKIKDLLRELKKTVDDVIERDKTLLDDLREKVERVIRRIEELLKRTRDDRLLEKILREIKEALKKLEEDVRKILKENKDALRELEDRVRKIKDDNRKALRRLEEEVARLKDEKVRDEIRKLIETNKRVADRVEEEVRKLIEDSERSLRKSEKDVKELIKKVEEVMEEVRR

SEQ ID NO: 5789 - protein, 184 aa, Artificial Sequence; identical to SEQ ID NO: 5788
  Synthetic

SEQ ID NO: 5790 - protein, 184 aa, Artificial Sequence
  Synthetic
SIEETVKRLIEEIERVLRDARRESKRLSEEDKKVLDEIREEVRKLEEKIKTVLDKARKDISDEDKLRRVKERVEEAIRRLRKLLREIEERSRESLRDNERTAREIERKVREIIKELRELLERLRTEKLLDEVRRRVEEVIKELEELLRRDKERVDRSIRELEKLLEEIKERVDRMIKELEDRLR

SEQ ID NO: 5791 - protein, 184 aa, Artificial Sequence; identical to SEQ ID NO: 5790
  Synthetic

SEQ ID NO: 5792 - protein, 182 aa, Artificial Sequence
  Synthetic
REVEEADKTVKELIKRNKELLDRIKKEVDELIRRDKELLDKAERDVDRLIKELRDVAREGVDRKVIDELRRDLERLIKKLAEDNKRSLDEARELIREVEERDKRSLDEARKLIRDAERRVKDGKEVVDEIRRLLRELEKVSEDTKREIRELLKRAEESVRRVTERIERLLKELRDVIREIEK

SEQ ID NO: 5793 - protein, 182 aa, Artificial Sequence; identical to SEQ ID NO: 5792
  Synthetic

SEQ ID NO: 5794 - protein, 182 aa, Artificial Sequence
  Synthetic
DELEKIKKDVKKMIRDNEDLLRRVEERVRELNRRNEELLKEIEKRVEELIKRLEDVARRGEPEEVITTLEKEVRRLIKEVAERDEESLRENRKLIKEIEERDRESLRRAEKLIREVEKEVKDKREVLEAIRRLEKEARDVSRRSTRKIEELLETSETSSEKSKRRIEELLRRLERVVEEARK

SEQ ID NO: 5795 - protein, 182 aa, Artificial Sequence; identical to SEQ ID NO: 5794
  Synthetic

SEQ ID NO: 5796 - protein, 186 aa, Artificial Sequence
  Synthetic
EELERAAERIEELLRSNRDLADKITKLSRETLEKIKDLLRKIEKEVRELLERIKDLERRLKDKDTLRREIERLLREVTEIIKRVKKEVDELLRESEEIMTRVKKENEDNLRKAEEIVRDAERRVKDKEEVLRELERLLRELKKSVDELSRLIEELLRENKRLIDEVKKRIDELLEELKKLIEKVKK

SEQ ID NO: 5797 - protein, 186 aa, Artificial Sequence; identical to SEQ ID NO: 5796
  Synthetic

SEQ ID NO: 5798 - protein, 181 aa, Artificial Sequence
  Synthetic
EIEKVVEEVIRRVRKVLEEVERSVRDTIERIKDVLRRVEEVVRRTDKTIRDVLDRIRKEISDKDKLARVKEIVDEALERSRRSLDEVRKRVEDVVRDSERSLEEAERIVREAIKRLEELLRQKVRDEDIRRVLEDIRRELKRIVDENRKLAEEIIRTLERMVEKNKELMKEVVKKLEEDSR

SEQ ID NO: 5799 - protein, 181 aa, Artificial Sequence; identical to SEQ ID NO: 5798
  Synthetic

SEQ ID NO: 5800 - protein, 181 aa, Artificial Sequence
  Synthetic
RIKETVDKVIEEVRRVLEEVRTTVKRTDERIKEVLEEVEETVRRTLEEIRRVLEELERAIKDKDKLDKVRKKVEEVLRRSERSLERAEEIVRKANKESKDSLDEAERIVREVIKELERVLKDNVRDEDIRDLVRKIKEELRRIVEKNRELMEKVERELRRIVEENERLARRIKEELDRDMK

SEQ ID NO: 5801 - protein, 181 aa, Artificial Sequence; identical to SEQ ID NO: 5800
  Synthetic

SEQ ID NO: 5802 - protein, 181 aa, Artificial Sequence
  Synthetic
RIEEIVERLIREVEKVLRDVERTVDKTDRKIREVLEEVRRISDESIKEVREVLEDLERKIKDKDKLKEVRDEVREVIKELEDTLRKAEKIAREVNKESKKSLDDIRKEVKDVIERLEDLLRNKVRDEDIRRLAEEIKKKLKRMVERNKELMERIEREIREIVERDKELVERIKRKLRELAR

SEQ ID NO: 5803 - protein, 181 aa, Artificial Sequence; identical to SEQ ID NO: 5802
  Synthetic

SEQ ID NO: 5804 - protein, 181 aa, Artificial Sequence
  Synthetic
SIEDVVREVIKRVEDVLRRVEEVSRETIERVRRVLREVEERVERTDERIRRILDKLAKSIKDEDKLRKVEEEVKRVEEESRESLERIREIVERVIRELERTAEKAREDVERVIRELEELLARNVRDEDIRRLVKKIEEDLTRIVERDKELLEDIERELRRMVEENERLLEEIERRARDEER

SEQ ID NO: 5805 - protein, 181 aa, Artificial Sequence; identical to SEQ ID NO: 5804
  Synthetic

SEQ ID NO: 5806 - protein, 175 aa, Artificial Sequence
  Synthetic
EELERLARDVDKRVEDLKDDIRKIREEVKRLLDDNRRRAEEILEESRKSLETLTDLMRRNRVDKRELEELAEESKREVKRLLEESEEHIERIKERVDRLLKELKRKVDKIKEDVKRDARSEIVKRVLEKLDEVLKDLKRTIDELKKRLEDVLRESRDIARRALEENERVLDELRK

SEQ ID NO: 5807 - protein, 175 aa, Artificial Sequence; identical to SEQ ID NO: 5806
  Synthetic

SEQ ID NO: 5808 - protein, 175 aa, Artificial Sequence
  Synthetic
SEEDRIAEESRESLEKLKDDIRKIEDRVRKLLEDNKRRAEEILREVEEDLKRIEELFKQNRVDKEDLRRKVEEIERKIRKLMEESKKHVEKIIREVKKLLDELRRKVEESLKEIKKKLRSEIVRRLLEENKRVLDELEKRIEELLRRLDKVLKESERIAREAERKIEEVLRKLEK

SEQ ID NO: 5809 - protein, 175 aa, Artificial Sequence; identical to SEQ ID NO: 5808
  Synthetic

SEQ ID NO: 5810 - protein, 181 aa, Artificial Sequence
  Synthetic
SAEEIIDRVTKEAKKSIDRTRDRITKLRRELEESIRRSRDIITKLLEELRRVVEEVKRDKRELEELVKKIKEVIDRLREKIERNVRKTEDMVRKLEEKIDRIVRRTEKRVEELKEEAKRVRTEKVVEDLERKVEEIVREDEDLVRRLAEEVKRVVEDDERTAKKLEDDVRRIIEAVKRELK

SEQ ID NO: 5811 - protein, 181 aa, Artificial Sequence; identical to SEQ ID NO: 5810
  Synthetic

SEQ ID NO: 5812 - protein, 173 aa, Artificial Sequence
  Synthetic
SLEELLEEARKTVERLIRESERVLRESEERVRRLIEELERVVRETRKRVKEVIERVEDEEALKELEKLLREDSKRVKEVLDDLRRDLERNKRRNEKVLRELEELLKRLEELVREGVREEELEKLLREIEERVKEMLKRDEDTLREIERKVKEAVRDSERTLEEIEKRVTEEKT

SEQ ID NO: 5813 - protein, 173 aa, Artificial Sequence; identical to SEQ ID NO: 5812
  Synthetic

SEQ ID NO: 5814 - protein, 181 aa, Artificial Sequence
  Synthetic
SITEEIKDIERKVEKLIRELDEENKRILETLEREAKDVLRRIEDINEKLHRRARDLKRKGVDRREVDKLIREADKLHRDLKELIDRLATEVKDRLRKSLERVKKLIKEIRELVERLAEKVTREELKRVLDRVLKKVEDLLRKLEKSVRDSERRLEELLRELREVVKRVRDNIEKVLEELER

SEQ ID NO: 5815 - protein, 181 aa, Artificial Sequence; identical to SEQ ID NO: 5814
  Synthetic

SEQ ID NO: 5816 - protein, 181 aa, Artificial Sequence
  Synthetic
SIREEAREELKRLEEEAERLDRENREILKELTREFKELLKESRDINREIHERIRKLKKDGVDRKDVRRTIEDAKRKHEESHKKVEDLIRTVTERLKKSLEDVKRLIDEVRKRVDELRKRSTDRKLDKVLKEIEERLRELLKRLEDSVRESEKRLRDLLRELAKVDEEAKRNVEKVLKELED

SEQ ID NO: 5817 - protein, 181 aa, Artificial Sequence; identical to SEQ ID NO: 5816
  Synthetic

SEQ ID NO: 5818 - protein, 179 aa, Artificial Sequence
  Synthetic
SIKDEIRKLLEKVKREVEEIDDRNRRLLEKVKREAEELLEKNRRLLEEVRKRAEELKDSSEEMVEKLLEDATRLVKTSEDEIRALLKRAEDLVRDSRRRIEEILRTARRALERLREKFTDKDLERVVRDVERRIEELIRKLERSVDRSEEEVRRLIEELRKSVEDSKREVDRVVEELRR

SEQ ID NO: 5819 - protein, 179 aa, Artificial Sequence; identical to SEQ ID NO: 5818
  Synthetic

SEQ ID NO: 5820 - protein, 179 aa, Artificial Sequence
  Synthetic
SILEDVRRLLDEVKKLVEELLRENRRLLEEVKKEVEKLDRKNRELLREVRELVKELKDSSEEMVETLLRRAKKLVDDSREEIDRLLEELRRLVEDSRRKIEELLERAERLLEEVRRRFTDRKLEEAVREVEERVRDLIRKARESVDESRKRIEDLIRELKKSVEESLRDIERLIKELRD

SEQ ID NO: 5821 - protein, 179 aa, Artificial Sequence; identical to SEQ ID NO: 5820
  Synthetic

SEQ ID NO: 5822 - protein, 179 aa, Artificial Sequence
  Synthetic
STREDARRLVERVRKEVKRLLKKNSDLLREVTERVKTLNERNRRLLEEVEREAKRLKDSDERDVERLLDRARKLVKESEDLIRKLLKDLRELVRRSEKDIDELRKELKRLLDELRARATDKDLERVVREIEKEIRDLIRELEENVKTSEKLIEDLIRELEKSVDESRKRVEELVKELRT

SEQ ID NO: 5823 - protein, 179 aa, Artificial Sequence; identical to SEQ ID NO: 5822
  Synthetic

SEQ ID NO: 5824 - protein, 179 aa, Artificial Sequence
  Synthetic
SAEDVVREIEKTVRELMRRVEESVRKVEEDVKRLIKEVKDSADESEKKVERLLEEVKREKEEDEEVIRKLERLVEEDKERIRRAVRRLEELLKRDRERVEDVLRKLAELLERLKDRATKRKESEEELRRLLEEIKKEVDKVIRENEETLKRIKEVVERVIEDNKRTLREIEEEVRRIRK

SEQ ID NO: 5825 - protein, 179 aa, Artificial Sequence; identical to SEQ ID NO: 5824
  Synthetic

SEQ ID NO: 5826 - protein, 180 aa, Artificial Sequence
  Synthetic
SVEEVVKRILETIKDLMRRIKKNSEDVLETIKRLADEIRESVKRSNERIRELIKDIRETRKGDKVERIVRRLEELLRRNTRLVEKIERDLDRLLKENEDLLREIIKTLEKMLRDVRRIAEEGVGTDELEKLLREVEEIVKDVSRKSDTSLKKAEERVRDVKRKDEKTLRDAEEVVRREKK

SEQ ID NO: 5827 - protein, 180 aa, Artificial Sequence; identical to SEQ ID NO: 5826
  Synthetic

SEQ ID NO: 5828 - protein, 182 aa, Artificial Sequence
  Synthetic
SVEDLVRDVRDKAKRTSDEIRKLIERSKEIFERSSREIRRLIEESRDTARRVVEKLKKNGVDEELIRRLEKLVRELEKKHEDILRKNEELMREVVKEHERILERNEELMRELDDKARKNKDKSEEEIARLVEEVKRLVKESLELIEELHRRSEKLVRDSLREIKTLNDESRKIVTDVLREVT

SEQ ID NO: 5829 - protein, 182 aa, Artificial Sequence; identical to SEQ ID NO: 5828
  Synthetic

SEQ ID NO: 5830 - protein, 182 aa, Artificial Sequence
  Synthetic
KVEELVREVTEIARKVREDLERLVRESERRMRESSEKIKRLIEESRRRMKEVVEELKREGIPEELIKDLERLMREVDEEHKRILKKNEDLARELIEEHKDLIRRLEKLAEDLIREAEKNKDKSEEEIKRLREKVKRLVDKVKREIERLNRKSRELVKKSEEDIEKINRESRELLRKVLEDAK

SEQ ID NO: 5831 - protein, 182 aa, Artificial Sequence; identical to SEQ ID NO: 5830
  Synthetic

SEQ ID NO: 5832 - protein, 182 aa, Artificial Sequence
  Synthetic
DVEELIKEVKDKAKRTSDEIKKLIDESKRVLDEVVRRLEELVKRIKESADRVLEEIAREGVPEEILKKVEDLVRELKKRLEDLIERVKTVVRELKKKHDKILKENEELLEEVVRRAEENRDKDRKIAKKLVDDVERRLRKSLRLIEELNKESRDIVRELLRLIEELLKEVEELVERLLREVK

SEQ ID NO: 5833 - protein, 182 aa, Artificial Sequence; identical to SEQ ID NO: 5832
  Synthetic

SEQ ID NO: 5834 - protein, 175 aa, Artificial Sequence
  Synthetic
SELEKVLDEVRKRAKESLRRSEELAKRVEEMDERNLRNSKELRERVEEVIKRLLEVARQNRSDKKDLLRRIEEVLEEVRRHIEENLRHNEKVLEEVERVSEKNLRDVKRVLEEVRRKARSRVLEEVERIVKRVLDEDKKVLDRLRRSVERSSRESEKVLDELKKRVDRVLDEVRR

SEQ ID NO: 5835 - protein, 175 aa, Artificial Sequence; identical to SEQ ID NO: 5834
  Synthetic

SEQ ID NO: 5836 - protein, 175 aa, Artificial Sequence
  Synthetic
SELEKVFEDVKRRLDESLEKSKELLKRVRDTDRENLKNSKRLLERNKRLVDDLLRVVEANTRDKRELEKKNKDVADETREHSRRNVEHNKEVLRRVEEESRKNLEEVKEVLKDVRRRVRSRLLEELEKRAKKVLDDDKRVLDEARRSSKRVTDEDRKVLKTAEDINREVSKRIRD

SEQ ID NO: 5837 - protein, 175 aa, Artificial Sequence; identical to SEQ ID NO: 5836
  Synthetic

SEQ ID NO: 5838 - protein, 175 aa, Artificial Sequence
  Synthetic
SELEKVVDDVRRRLDRLLETSEKLLEDATKRLKDSERKSDEIVKTNEELLERLKTVLERRETDKRELLKENKEILERTRELSERNLKEVEDILREVEEEVRKNLRRIEKVLEEVRRKLRSELLKRVEERIKRVLDESKKILKEIADEVRRVLERDKELLKRLEDKNREVSERIRK

SEQ ID NO: 5839 - protein, 175 aa, Artificial Sequence; identical to SEQ ID NO: 5838
  Synthetic

SEQ ID NO: 5840 - protein, 174 aa, Artificial Sequence
  Synthetic
SELEKVVKEVADLLRRNLEKSKRVLEEVRRRLEENLRESEKVHDDNRKTARRILELVREGKDKRDLTRLLEEDDKRVKEALDKSRENNERILKEVRRALRESEEDNRRILKEVREKVDSRLLEELEERVRESIERSRRFIEELEKIVEETLTESEKLARASSEITKTVLDEIRK

SEQ ID NO: 5841 - protein, 174 aa, Artificial Sequence; identical to SEQ ID NO: 5840
  Synthetic

SEQ ID NO: 5842 - protein, 174 aa, Artificial Sequence
  Synthetic
RELEEVFKEVEKELRDNLRKVEEVLREVRERLKENLDRSKEVLKDVRRRIKELLDLARGGKDKRELEKRVRKIEKDVRKLMEESKENNKRILERVEEAMKDSERDNRRILDKVRKKVDSKLLERLERKVEETLRRSREVIEDAKRIVEETLRRSEDIIREAKEIIDDVLEKIRR

SEQ ID NO: 5843 - protein, 174 aa, Artificial Sequence; identical to SEQ ID NO: 5842
  Synthetic

SEQ ID NO: 5844 - protein, 180 aa, Artificial Sequence
  Synthetic
STDDALRKIERRHKELTKEVRDMLRKVDEEVKRLIEENEDVLRKLREEVDRVIKDIRRADTPNVDELLDEVRRLLEEVERHNKKTLDDLEKRLRDIREKARKLLEDNERALERIKRVVEAGKVDLEDLRRDSERIIEEVKRRLDELRREVEKVIDDVRRLSEKNEKDARRIIEEVKRRLD

SEQ ID NO: 5845 - protein, 180 aa, Artificial Sequence; identical to SEQ ID NO: 5844
  Synthetic

SEQ ID NO: 5846 - protein, 180 aa, Artificial Sequence
  Synthetic
STEEVLDEIRKLHKTLTEDIKRVLREIEELHRRTIEENKEVLDKIREDYKRVIDDVRTKDTPNVEKLLKDLEKSAKENEEHNERTLREDDRVLKEIRRRATELLKANEEMLRRIEEVMRAGKVDAEELLRESKEAIKEVKRVLEELRKESKRVVDETRKLSEENLEHSERVLRKVEEDLR

SEQ ID NO: 5847 - protein, 180 aa, Artificial Sequence; identical to SEQ ID NO: 5846
  Synthetic

SEQ ID NO: 5848 - protein, 180 aa, Artificial Sequence
  Synthetic
DEDKVLRKVKKLVEDIRREIERILREAERLHKELTRRNEEVLERIRRLVDKVIKEIRKADTPDVDRLIKEVRDALRRLEEHNRETLRENETVADEIRKKVEELLKRVEEVLETIRKVIEEGKRDLRELLERVERVIREVRRDLKRLLDESRDVVRRVEERSRRNLEEVKRDIERVKRELD

SEQ ID NO: 5849 - protein, 180 aa, Artificial Sequence; identical to SEQ ID NO: 5848
  Synthetic

SEQ ID NO: 5850 - protein, 180 aa, Artificial Sequence
  Synthetic
SKEEVLREIERLHKETIRRIEEVLREATELHKRLTETNKRVLEDLEREAREVIEDVRRADTPNVEELLRELKDALDKVRDHNRKTLKKNEDVVREIEKEVRELLKEDEDVLRRIEKVMRDGRVDARELLEESRREVERSEKEVERLLRKSRKVVEEVRKLSEENDREVKKILEEVKRRLD

SEQ ID NO: 5851 - protein, 180 aa, Artificial Sequence; identical to SEQ ID NO: 5850
  Synthetic

SEQ ID NO: 5852 - protein, 180 aa, Artificial Sequence
  Synthetic
SKEEVLDEMRRLHETTKRDIRRVLKEIEELHERTLRENKRVLEEIKELVRRVIEDIKRKKTPDVEKLVRRVEEMLKELEKHNKKTTDDDKRVLDEIRRRADELVKEDERVLREIEEVVRAGKVDLKELLDESRRVVKESKEDLDRLLKESRDVVDDTRRKSEKNLRDAERVIREAEEAVR

SEQ ID NO: 5853 - protein, 180 aa, Artificial Sequence; identical to SEQ ID NO: 5852
  Synthetic

SEQ ID NO: 5854 - protein, 180 aa, Artificial Sequence
  Synthetic
DRERVLREMERLVRELLRENREVLDEIRKLHERTVRRNRELAKRLEEEAKEVIDRIEKTKTPNVEELLEKVRRALERVKRHNEKTTRDDERVLRELEKHNEETTRELKEILDRILERVRDGKVDVKKLLEEARDVIRRAKEKSKRNLDESRRVVKETDDLSEKNREDVRKIIKEVEEELK

SEQ ID NO: 5855 - protein, 180 aa, Artificial Sequence; identical to SEQ ID NO: 5854
  Synthetic

SEQ ID NO: 5856 - protein, 180 aa, Artificial Sequence
  Synthetic
DVEEVLREIEELHRRTIERIKKVAKKVREDVKRVLDENKKVLDELRRRVEEVIEKIKKADTPNVEELLKTVEKMLEDVKRHNEETTRRAADILRKIEDKARKLLEEDERVLREIEKVARDGRVDMRELKKRSDDVVRESEKELRRLEDEIRKVIEDLKKLSEDNEREVEKVIRKVEEDLR

SEQ ID NO: 5857 - protein, 180 aa, Artificial Sequence; identical to SEQ ID NO: 5856
  Synthetic

SEQ ID NO: 5858 - protein, 184 aa, Artificial Sequence
  Synthetic
DMERIVDTLRKLNTDSNRRSKEAIDRLRKTNKDSLDKVEEVLREAERLAEDVLRKVEEKVTSEKLERIRREIERVVEEVRKRIEEIKRKIKESLRRVDKLITENSKKNKDSLDRVEDIIRKVGSKKEVLKKLLEEVKDSNRRSEEDVRRMEEEVKRSNDELLKELKEILDKVREAIKKLEEKVK

SEQ ID NO: 5859 - protein, 184 aa, Artificial Sequence; identical to SEQ ID NO: 5858
  Synthetic

SEQ ID NO: 5860 - protein, 184 aa, Artificial Sequence
  Synthetic
SAEDIIRRLRDLNRRSNKKSRDVAEKLRRDNKRTLEKVERKARELKKLAEEVVKEVRDKVTSEKLRRIEKEIRDVVDRVRRLIEEIAREIERSLEEVKRLIKENERKNEESLRRVDDIIKKVGDLEEVLRRMLKEVEDSNRDSDRDVRRIEEEVRRLNEELDKKLEDLEREVRRMIEEIRRKVK

SEQ ID NO: 5861 - protein, 184 aa, Artificial Sequence; identical to SEQ ID NO: 5860
  Synthetic

SEQ ID NO: 5862 - protein, 178 aa, Artificial Sequence
  Synthetic
SELEEVKERVERVLKRIRDLTRELEDRVDKILEKSKRTLDELEKRVREVIARIKELVKRLKDDRRAVKEILDEIREMLKDLEKKARDNLKEVEDRRKELEKLSRDSIKEVEEVLKELRDKVRSEVLKRLEELAREVIEEDKRALERLDRKIRRVLDESRDVLRKIRKLIEDVLREVEK

SEQ ID NO: 5863 - protein, 178 aa, Artificial Sequence; identical to SEQ ID NO: 5862
  Synthetic

SEQ ID NO: 5864 - protein, 178 aa, Artificial Sequence
  Synthetic
SESETIEKEADEMLKRSKKTLEELRKTVKRILERIEKLTRDLEKTAEDIIRKIEDDLRRLKDDERVVDEIIERIKKELRKLEERSRESLRDIKRVLDELRRRMEENLKRVEEILKRLEERVRSEVAKRISEKIRRVLEDSRRVLEELEDLIRRVLERDKRALERIKEDIDRIIRRVRT

SEQ ID NO: 5865 - protein, 178 aa, Artificial Sequence; identical to SEQ ID NO: 5864
  Synthetic

SEQ ID NO: 5866 - protein, 177 aa, Artificial Sequence
  Synthetic
SELEAVLDELRKLVKELEDRLRKVNEESRRLIKELLDRLREVDERSRKLIKDLAEKARRRGVDEKLLDELRRRLEEHNKENRKLEERIRKLLEEHNRENRKITKELRDLLKELEELLDEVDTDELRKRVRDLVRRVDELIKRSKRHAEELTREVEEKVRESEEHVRRLVKEVEDRIR

SEQ ID NO: 5867 - protein, 177 aa, Artificial Sequence; identical to SEQ ID NO: 5866
  Synthetic

SEQ ID NO: 5868 - protein, 171 aa, Artificial Sequence
  Synthetic
DEVEEADKRVEDEVRRLKRLVEEHTKRVEDKVRTLKKLVKEHTDEVRRAVEELKRRRDDEESVRRKIEEIKRRSDKIRRDVERKIEEVYRDSERELRRIKKEIEDVLREMKRRDIDEDVLRKVKELLEDVARLVEESHEEARKLLKEVEDRLRESVREVEELLRDVERRTR

SEQ ID NO: 5869 - protein, 171 aa, Artificial Sequence; identical to SEQ ID NO: 5868
  Synthetic

SEQ ID NO: 5870 - protein, 174 aa, Artificial Sequence
  Synthetic
DEVEKVKEEIRRIVKELEDRVEEHKKEAKKIIDELRRLVKRHREEVEEIVKKLEELVRRNSPREEIEKELDKVRRRSDELHKDAKKKLDEVREDSKRMAEEIKRTLEKVRDELRRKISNEEVLKEAEKLLEDVERKLRKSHEDLERLLKEVEEAVRDSNEEVRERLDRVREKMR

SEQ ID NO: 5871 - protein, 174 aa, Artificial Sequence; identical to SEQ ID NO: 5870
  Synthetic

SEQ ID NO: 5872 - protein, 174 aa, Artificial Sequence
  Synthetic
DEDRKVEEDIRRIVKRLREIVEKHNREAREIIKRLRDEVRKHRDKARKIVTRLDELIKRNTPEEEAKKEVDDVRRRSKEEHDRFDKELKEVRERSKEMADKIKEDLDRVRDELRRKIKNKDVLKEAEELLEKVKRDLDRSHEELEELLKRVREELEDSNRELEKLIEEVERKVR

SEQ ID NO: 5873 - protein, 174 aa, Artificial Sequence; identical to SEQ ID NO: 5872
  Synthetic

SEQ ID NO: 5874 - protein, 174 aa, Artificial Sequence
  Synthetic
SEVEDVDDRIRKIIKKLEDLVRKHNEDARRIIDELRELVERHNRRAREIVRELEDLVRRNKPRERIEEKLREVKKESEDVLKEAEDRLREVRKRSREVHEEARRRLEDVRKKLEERIDSEEVLKKVEKLLKEVLDLMKESNEELEKLLEEVKREMEESVKELKKLLDEVREKVK

SEQ ID NO: 5875 - protein, 174 aa, Artificial Sequence; identical to SEQ ID NO: 5874
  Synthetic

SEQ ID NO: 5876 - protein, 179 aa, Artificial Sequence
  Synthetic
KEIEDVLEKVRKVVTDLKKKLEDVNRESEKLVREVVKELKRVDDESRKLVERVEKEADEKGVDETLKRKLREYLKEHHKRNKKIIDDLKKYLDEHHDKNRRIIEELDRLLKEMEEIIRRNELSEEELDRRIKELKDRADKLIKDSKDNVEELRKKAEELIRRSRKNVEDLVRKATEDVR

SEQ ID NO: 5877 - protein, 179 aa, Artificial Sequence; identical to SEQ ID NO: 5876
  Synthetic

SEQ ID NO: 5878 - protein, 179 aa, Artificial Sequence
  Synthetic
RELEEVLKKVEDLHRDVMKKIDDVVREASELHKKVKEDIDEVVKRAEDVLRRVKRELDKRGGIEEVKRRLDKVLKDLRKEVEDIKRKLDEDNKTLRKKAKEIKDELKENLKRLEDVVRRGDLDKDELDEHIERSLRKVTELVKDLKEHIERSLEEAKELVRRLEELIEELLRRLAEEVR

SEQ ID NO: 5879 - protein, 179 aa, Artificial Sequence; identical to SEQ ID NO: 5878
  Synthetic

SEQ ID NO: 5880 - protein, 177 aa, Artificial Sequence
  Synthetic
SEVEEVLREAEELLKEVRDRLRESVEKSKRLLDEVRRKIEESHRRHKELSDEIRRLAEERNLDKTLEEKIKKVNDENRRRLRELERTLEEVLERNKETVRRLEDELRKVLERLRRLAKDVDIEELRKEIKKKIDEMRRLVKEDTERLERVAEELRRRVEEDKERSKDVVRRLREDVK

SEQ ID NO: 5881 - protein, 177 aa, Artificial Sequence; identical to SEQ ID NO: 5880
  Synthetic

SEQ ID NO: 5882 - protein, 177 aa, Artificial Sequence
  Synthetic
SEVEEVLKRAEELLDDVRRLLERSHRETERLLDEVRKRVEDSHREHRKLSDEVRRKAEERNLPEELDERLKTVNEENKKLIEEIKDRLDRVREEDEKSLKELKDKLDEVRDRLERLKKDVDIEELRKDIERAVKELRERVEENTRRVEELVRRLRELVEEDRKRSKEVADEMDERVR

SEQ ID NO: 5883 - protein, 177 aa, Artificial Sequence; identical to SEQ ID NO: 5882
  Synthetic

SEQ ID NO: 5884 - protein, 177 aa, Artificial Sequence
  Synthetic
KEVEEVLDTAKKLLDEVRRELERSHEEHKRLSDEIRERLERSHEETERLLKEVKEEVDDKNVEEELKKKLDEIRKEDEETLRELEERLKRADDKNEKIVRELEKRLRDVEEELRKLMKDVDIEELKRRIDDMVRRLRELVERDRRESKKVADDLRRLVKENTERAREKIEELRKDVE

SEQ ID NO: 5885 - protein, 177 aa, Artificial Sequence; identical to SEQ ID NO: 5884
  Synthetic

SEQ ID NO: 5886 - protein, 177 aa, Artificial Sequence
  Synthetic
SEIEEVLKEAEKLLREVEKELRRSHEELKRLLKEVRDKVRRSMEESERLLEEIKKKADERNLEDELRKRLEKVLRDNRETIRRIEEAIKRVEEENRKTIRDIERTLREVLERLKELKDRVDIEELKRRIEDAARKLEKLVKDDRERIERKVRELERLVEEDKKRLRDRVRKMDEDVR

SEQ ID NO: 5887 - protein, 177 aa, Artificial Sequence; identical to SEQ ID NO: 5886
  Synthetic

SEQ ID NO: 5888 - protein, 174 aa, Artificial Sequence
  Synthetic
REVEEIVKKVRKEVTRLLREVEEDMKRNRDTIRELLKYVKKDLEENKDIIRRLLELIRRDGSTKELRKTLEDKLKESEDNLRRVAEELREKEERSKRNLDRIEREARERVKRLEEEGVSEEARKDIERLLEEVRTKLRENEEDLRRLVKEVDRELKRNRDELERLAKEVRDELK

SEQ ID NO: 5889 - protein, 174 aa, Artificial Sequence; identical to SEQ ID NO: 5888
  Synthetic

SEQ ID NO: 5890 - protein, 174 aa, Artificial Sequence
  Synthetic
SEAEEIAKEVEKRIRELLDRVRRMVEESEKYARDSLRKIKRLLDEVRRRIEELLRKIRRDGPTEELRKELERIKEEIDELLKKIRKENEDAHRRSKELIDRMKEELDKIKEEIDRKNLPSEVAKKVKELLDEVERILREWEKEDRRLLKESEDLLREVEKEVRKLLRRVEEELK

SEQ ID NO: 5891 - protein, 174 aa, Artificial Sequence; identical to SEQ ID NO: 5890
  Synthetic

SEQ ID NO: 5892 - protein, 174 aa, Artificial Sequence
  Synthetic
SESEKILEEAKRRIRKLLEDVKEMVKRSRDYARESLKRIKDLVEESKREIDKLLEEIKRSGPTEELEKRLREINRRSRELVKKIREENERLHRRSKELVKEMEDRLREIEEEIRKKGLPSEVEEDLKRLLEEVKRELKRWEEDDKRLLDDSERALKEWEDTDRRLLKRVEDELR

SEQ ID NO: 5893 - protein, 174 aa, Artificial Sequence; identical to SEQ ID NO: 5892
  Synthetic

SEQ ID NO: 5894 - protein, 174 aa, Artificial Sequence
  Synthetic
SEVEEIVKDAERYIKESLDRIRKAVEESRRRITELLKEVERLLREVRKRIKELLDEIRRDGPTDELRRKLEKIEREIKKRLDDLRRELEEIHKRSDELVRRMEEENKKAEEEIRRRGLGSDAERKLEELLEESRELLKRWRDDDKRLVDDVRRKLKEVEEEVRKLLKEVEDELR

SEQ ID NO: 5895 - protein, 174 aa, Artificial Sequence; identical to SEQ ID NO: 5894
  Synthetic

SEQ ID NO: 5896 - protein, 174 aa, Artificial Sequence
  Synthetic
SEVEEIVKEAKRRIDELLKKVDELLKESERYARKSLKDNKDMVRRSEERIRELLEKIKRDGPDDKIREELKKINKESEDLIRKNKEDNERFHKKTEDMLKRLKEELDEIEERIRRKGLGSEAEKRLKDLLDRVKEKLDEVRRRDRELLEESKDLSRRWKERDDRLLEEVEKALK

SEQ ID NO: 5897 - protein, 174 aa, Artificial Sequence; identical to SEQ ID NO: 5896
  Synthetic

SEQ ID NO: 5898 - protein, 176 aa, Artificial Sequence
  Synthetic
REIEKIREDLERLLEEVKRAAEEWRRRDEELVRKLEELIKRVLDEDRRLLRELRDKGKGERLKEIERRSEESRRRLKRLLEEIRRLSKRSKEELDEALKRVEEEVRRIEDKLRKVRGREVIKKVLEEIRDKIRKILKTIEDLVRKSEDLIRRVLEEIERILDESRRDVEEVKRREE

SEQ ID NO: 5899 - protein, 176 aa, Artificial Sequence; identical to SEQ ID NO: 5898
  Synthetic

SEQ ID NO: 5900 - protein, 174 aa, Artificial Sequence
  Synthetic
DEDRRVKTEIKKLLEELTRRSREVEEDDRRLLDELTRETERIEEDLRRLLEEVRRSGVPEDKLREIEREIRELRKRLEDLNKEIKDLSEKTRKELRDLNRRLKEIVDRLKERIDKEGATDEIEREVRKVEEDYRRSLRRVLEESRKIAERYKKKLDEMREEVRRRAKKVKDEVR

SEQ ID NO: 5901 - protein, 174 aa, Artificial Sequence; identical to SEQ ID NO: 5900
  Synthetic

SEQ ID NO: 5902 - protein, 177 aa, Artificial Sequence
  Synthetic
KSVEKIVEDIKRVADKILEDIKRSEDRVREIVDRHRREIDKVVKEIVKRVEDLKRNNIPREEAERVLRDVERKVEEINRRMEEHLRKLEEEVKRSHDEIRRKLEELEKRVRDIKKDVDKDEMEDLKRRVDELKKEIERALKEHKDKVKKLLDDLRRLNEELRREVRRVLEEVRETTR

SEQ ID NO: 5903 - protein, 177 aa, Artificial Sequence; identical to SEQ ID NO: 5902
  Synthetic

SEQ ID NO: 5904 - protein, 191 aa, Artificial Sequence
  Synthetic
DEIERVEEALKKVEKDLRRLIRELEKLNDKIERDIRRLHEETNKRLKEVREKVEDMIRRVSARAPEEDLRRLKEEIDKLVRELEKKDRDLAKENERKIRELRKHLEELLREAEREIKRIEDKVREAKKRGEDRRVVKKLLDEIEEILRRLKKLVDDHARESKRILRESERKVEALLEEIEEILKRLEEKVK

SEQ ID NO: 5905 - protein, 191 aa, Artificial Sequence; identical to SEQ ID NO: 5904
  Synthetic

SEQ ID NO: 5906 - protein, 180 aa, Artificial Sequence
  Synthetic
DEIERVLREIDELRKKVEKVIEDSRRNAKRWLDRVKRTAEELNKLSDELLEEVTRLAEAGIPEEKVKELRDRLEELDRRSKEKIKKLKRDLERNLRETERTIEELKRELERLVEKIRREIDSRAMEEVRKTAEEVIKTVDKLLKELRKTYEDILRDIDRLLKEHHARNRRVLEEVERLTQ

SEQ ID NO: 5907 - protein, 180 aa, Artificial Sequence; identical to SEQ ID NO: 5906
  Synthetic

SEQ ID NO: 5908 - protein, 171 aa, Artificial Sequence
  Synthetic
SEREEVKKRLDDVRREAKRLLDEVRKRLEESHRKHKKLLDEVRKRLKEVEEEAKRRGVSEDLERELKRLLDELDKKLKESLRENEKTIRDIEESLKTVLKKLEDLVKKLRDDNVRKEKVTKIIEDLKRELEEMFRKLKRLVEEDDRRSKESLEEVRKLVEDARRKIEEDTR

SEQ ID NO: 5909 - protein, 171 aa, Artificial Sequence; identical to SEQ ID NO: 5908
  Synthetic

SEQ ID NO: 5910 - protein, 181 aa, Artificial Sequence
  Synthetic
SSIEKLKKVVEDIKRRSEDLNRELEKVVRDVKKRSEELNEELRKVSEEIERRLRELLKRISDEKKLRDAARLIDELRKNSERVSRENEELVRRLKKKVDDVSRKNKEIVKDLERRVDEVRKRGPAEERFVEELRRALKKDEDDMRRVVEDIERLLEEDERRMKKAVEDHRRLLEELEERAK

SEQ ID NO: 5911 - protein, 181 aa, Artificial Sequence; identical to SEQ ID NO: 5910
  Synthetic

SEQ ID NO: 5912 - protein, 174 aa, Artificial Sequence
  Synthetic
DESEELKKVLKEIEDEVRRLIREIERVLEEIERRDRELLKRDEETLKRIEEEVRKLRLSEELKKEAKKRLDESRRRLRELHEESKKRLDDIRERLERLLRELEKRLTEVDKRIKREGAREEIIEELRRILKEAEDVIRRIIEEVRDVLRESEKRVRESIDENRKILEELRRRAK

SEQ ID NO: 5913 - protein, 174 aa, Artificial Sequence; identical to SEQ ID NO: 5912
  Synthetic

SEQ ID NO: 5914 - protein, 170 aa, Artificial Sequence
  Synthetic
DEEDRLRRELEKVRRDADRLLEEIRRVLEEVERRSKELLKRDEDSLREIVRTVTEETKRDEIKREVDKIAEDTRDHLRKHEEKTRRIKEEVKELLKRLKDKVDKVRKEVEAKKVTDEVLEEIRRILEELRKEAEDIIRRIRELLRELEKNVTDSIRRNEEMLKELRRKVK

SEQ ID NO: 5915 - protein, 170 aa, Artificial Sequence; identical to SEQ ID NO: 5914
  Synthetic

SEQ ID NO: 5916 - protein, 180 aa, Artificial Sequence
  Synthetic
SEAEKILEDMKRYIEEHIERVKRSLEENKKKDRELIEKSRKSLEDARKKIRELLELVRQRKTSEDVLRKSIRELEEDLKKHEEDSERDKRRLEEDHKRHEDESKKSLDDLERRLEEVERRGLVSEEILKRIRDLVKELEERDRRVIEEMKKSNKRTEDTDREVLERIRRLVERLADEARK

SEQ ID NO: 5917 - protein, 180 aa, Artificial Sequence; identical to SEQ ID NO: 5916
  Synthetic

SEQ ID NO: 5918 - protein, 185 aa, Artificial Sequence
  Synthetic
SELERVIEEIKRLLERLKRENEEVKKRVKKLLDELRKINKDVEDTVRELLKRVKELVDRANLDEKSRRDLEKKREETKRELEEIKKKSDKNLTDLKRELEKIMEDSKRDIEKIERETKKLEEDRLGKDEIEEALRRVEEHIKRHLKTVKELAEKAERHIREHLKEVKRMLEKAKRTIDELLKKIK

SEQ ID NO: 5919 - protein, 185 aa, Artificial Sequence; identical to SEQ ID NO: 5918
  Synthetic

SEQ ID NO: 5920 - protein, 175 aa, Artificial Sequence
  Synthetic
SLREAAKEVLERVRREVEKLRKSNEEVLTRVREEVKKLLETNKDVLRRVAEILKTANVDKRIADRVRDELRRYEERLKEEADRIRKMLEDYERESRELRERIERTIKALEDRVEKKGEVSEEDIREIEDILRKIAETVETLNRRLEDILREIRKSSKKTIDELREKAKELEDRTR

SEQ ID NO: 5921 - protein, 175 aa, Artificial Sequence; identical to SEQ ID NO: 5920
  Synthetic

SEQ ID NO: 5922 - protein, 182 aa, Artificial Sequence
  Synthetic
SEVDEDLKDIKRYLDEHRKRVEEVVKRLEDRSRETAREVEEDVKRIERKVEEAKKEADERGNRKERLEELRKELKKERDDLRKRNEDDRRDLDRERKRLEKELEDSRRKLDKKEDELRKKNLDEDAKRRIEEVLERVRRELERSEEKLRRVLEKHREDNDRLEEELDRVLRELEKILDEVAT

SEQ ID NO: 5923 - protein, 182 aa, Artificial Sequence; identical to SEQ ID NO: 5922
  Synthetic

SEQ ID NO: 5924 - protein, 182 aa, Artificial Sequence
  Synthetic
DEVRKILKELKELVKRIEDKLRKYLEDVRREVERIEEEVRRNLERIKRLAEEIERRVRRDGKSKELAEEVKRKLTENEKEDRKRERDVREKNKEDKRRLEEEMKKVEETLKRKEDDVRRRNLSEDVKRKIDKVLDEVRRLLEDIKRRVEKINTDTERLLKKLAEDSKRALEEVKETLERAER

SEQ ID NO: 5925 - protein, 182 aa, Artificial Sequence; identical to SEQ ID NO: 5924
  Synthetic

SEQ ID NO: 5926 - protein, 179 aa, Artificial Sequence
  Synthetic
ELRERIKRALDEHRRVSEELERRVREANKRHNEVSKEVKDDLKRSHDELRESLERIKRRGDLSEEMEKKLRERLERSKREIEKKEKENRDEHEKSRKKVEDKKRDNERRVKEMEDKIEKDGRVEEEDLKRIREETERLKEDVRRYLRELEKLSRDLRRKVEELLKDNKRKVKEIEDEAK

SEQ ID NO: 5927 - protein, 179 aa, Artificial Sequence; identical to SEQ ID NO: 5926
  Synthetic

SEQ ID NO: 5928 - protein, 182 aa, Artificial Sequence
  Synthetic
DELETLEERIRRSVERVRRELKRYKEEMDKHSEDLKRLVDKNLEDVRRELEEIRKLATDGRFDEDVERTVEKRLKDNEDRDRERSRKVEDDNRRSREELEKLKKESDEELERTKKEVEERNLDEDMEKKLRELLERHERENKKAREDVEEANRRNEEVLKDIERRSKKALDDVRRELERVRK

SEQ ID NO: 5929 - protein, 182 aa, Artificial Sequence; identical to SEQ ID NO: 5928
  Synthetic

SEQ ID NO: 5930 - protein, 178 aa, Artificial Sequence
  Synthetic
SLKEVLDKIEEDHRRMSKRNEEVLEEVKRRAEKLLKDAEEVLRRVRERIEELIRRVEETKGRTERLRELEERIRKRDEEIERKLRKELERLKERLRRYRERTKELNKKFEEDLRELRKKGVDVKELKKRADESRKTVERLSRELKKELRKVEEDVKREVEKIEEDLKRIARRVREESR

SEQ ID NO: 5931 - protein, 178 aa, Artificial Sequence; identical to SEQ ID NO: 5930
  Synthetic

SEQ ID NO: 5932 - protein, 180 aa, Artificial Sequence
  Synthetic
SELERLLEEVERLLEKLERDNKRLLDDVRRLLERLRRDNERLLEKNKRLLDRLREEVSRVSDEKFLREVEKKLRDNEREAERVAEESEKHLRDVKKRLDELLETSERNLREVRERLERVRRDEDIEKLAREVKRHIERHKEELDRLRKEVEKNARKHEEDLRRLEERSKKHVEDIERETR

SEQ ID NO: 5933 - protein, 180 aa, Artificial Sequence; identical to SEQ ID NO: 5932
  Synthetic

SEQ ID NO: 5934 - protein, 180 aa, Artificial Sequence
  Synthetic
SELEKLLEDVKRLLDELRERNEKVLEDARRLLEELRKRNEDLLRRNRELLERLEREVSKVEREEVLDRVRRELEKNERRVDELRRESEKHLREVKEELDRLKEKSETNLRDAERELTELKDDEDIDRVRRRVERHIREHERDLREVKKRIEEDAKRHRDRLKKLEEDSREHVKRMEDRTR

SEQ ID NO: 5935 - protein, 180 aa, Artificial Sequence; identical to SEQ ID NO: 5934
  Synthetic

SEQ ID NO: 5936 - protein, 182 aa, Artificial Sequence
  Synthetic
KLEELAKELRRLLEELRKRSKEVIDRLRRLNEELRKTSEEVIRRLRELNRRLTEKARRRLKDEGEKLKEAEKLSEDHRRKVEELLKKSEEDSRRHREKLEELERRSREDLRRLREEIERVLKDRDIKEEVLRKVREEVKEHERRLEDALRRSKKEIDDHKRELEELLKENAEEVRRVEERIR

SEQ ID NO: 5937 - protein, 182 aa, Artificial Sequence; identical to SEQ ID NO: 5936
  Synthetic

SEQ ID NO: 5938 - protein, 182 aa, Artificial Sequence
  Synthetic
KAEELVRELKRLLDKLREESKKVIEELKRRLDEVAKKSEDVVEEMRRLLEELKEKIERRLKDKGEDLKRAEEKLKDIEREIDKLEKESRKNLEDIKRDLERLLKESEDDLKRLEDEIDTVRKDGNIREEVLRDVRRKVEDHRRKLDEIRKRVTDEARRHERELEKALEKIRRDIRRIEEELR

SEQ ID NO: 5939 - protein, 182 aa, Artificial Sequence; identical to SEQ ID NO: 5938
  Synthetic

SEQ ID NO: 5940 - protein, 182 aa, Artificial Sequence
  Synthetic
KVEDLLREAKALLDELKRESERIIKELRKLNDDLTKKSEEVIRELEKLLRDLKKIVDERLKDRGKDLEEVRRRLEEIKKEIDDALEKSRRNSEKHRREVEEVLERSERDLERIREELERLAKKGDIKEEALKKVRKEVEDHKRRLKEAVDRNRKKIKDHEEELERTLRDIRRKIDKERRELE

SEQ ID NO: 5941 - protein, 182 aa, Artificial Sequence; identical to SEQ ID NO: 5940
  Synthetic

SEQ ID NO: 5942 - protein, 176 aa, Artificial Sequence
  Synthetic
EELERLLKRVRDESKKNRDKVREDLERSRRKSKRHEDELRRLLKEARDDIDRVRDLRRKNSQRREDLKRILDTLREKLKKMMEDSERDLRRWEEENRKLNKESKEELDRLKEEIDKSPIGEEVVKEAEKILDDNRKENERVSEEDKELLERNKKKAEDVLRELEELIRKLAEELKK

SEQ ID NO: 5943 - protein, 176 aa, Artificial Sequence; identical to SEQ ID NO: 5942
  Synthetic

SEQ ID NO: 5944 - protein, 179 aa, Artificial Sequence
  Synthetic
SELEELLKRIRDKSKENEDEVRTDLKRVRDYARRHEERLRELLERVRDELRKAEELRRAGEVSEKVVKEIVDKLRKMIEEIKREVDESKKRLDDDLRKIADTSRRKAEELKKDLDKVRTDGADERVLEEIERIMRENKRRNEEVIKEIKELIDRLRRKSERVIEEIKKRIDELRDKARR

SEQ ID NO: 5945 - protein, 179 aa, Artificial Sequence; identical to SEQ ID NO: 5944
  Synthetic

SEQ ID NO: 5946 - protein, 179 aa, Artificial Sequence
  Synthetic
EEEREIEERLRKKIEEIRREDKRHHDEVRRKVKEIKEEDREHHERVKRKAEEVKKRIETTGPRREEVEKIEREVEKNSRDHKRRLDEIRRELEKDSEDHKRRVKEIEDDIKRDLDEIRRKVKDDKDVLRELKRLLDELRESARKNNEDLKRLLEELEESVKRNNDELKKLLDELKERAR

SEQ ID NO: 5947 - protein, 179 aa, Artificial Sequence; identical to SEQ ID NO: 5946
  Synthetic

SEQ ID NO: 5948 - protein, 186 aa, Artificial Sequence
  Synthetic
RELEELAERVKRLLERDEELLRRLKDAVRRLSEKDRRLLERLAREVKRLLDELRDLVRKRLKDKREDLERVEKMLREIKRDLEDHKRRVEETNRRLEEEVRKHEEEVKKDNDDIRKELREIEERKLDKELLERVITELERKARESEKKHEDSLRELERLARESEERHKRSLEEVERKIEEIKRDLD

SEQ ID NO: 5949 - protein, 186 aa, Artificial Sequence; identical to SEQ ID NO: 5948
  Synthetic

SEQ ID NO: 5950 - protein, 178 aa, Artificial Sequence
  Synthetic
RELEKLEDEIRRELRRIEKELKDYERELEERADKDRRDIEDYRRRLEERVKEIEDRLRRDGSDEEELRRIREESRKTLEELKRHLDKSRKESEDTLRRLEKRLRDIEKRAEEIKRELDRAGVSEELRKILEDALKRVREEVKRILDRNRELLRESEELVRRVLKRNRDLLREVDERVR

SEQ ID NO: 5951 - protein, 178 aa, Artificial Sequence; identical to SEQ ID NO: 5950
  Synthetic

SEQ ID NO: 5952 - protein, 182 aa, Artificial Sequence
  Synthetic
DKVREALKRLKDKMETYERRSKKHIEDHKRKLKEYEERVRRNIKRLREELKKLEEDAKTRGPREKDVTEILKRIEDHLEEHHRRSEEVKRDLERNLEEAHKDSRRVLEELKKELEKIRRGDLSEELLKRVDELARRIMKRIKELNRENERVVRESLKRVDELNKRSEKVHKEVLDRLEELRR

SEQ ID NO: 5953 - protein, 182 aa, Artificial Sequence; identical to SEQ ID NO: 5952
  Synthetic

SEQ ID NO: 5954 - protein, 178 aa, Artificial Sequence
  Synthetic
SLKEELEKLVRDIIRDNRRLLEENEELVRRSEESNKRLLEENEETARRIKAELERAGIPEEELKELVKRLEEELRRIKEEADRLDEKHKDDLRRIREEAKKIDDELKKELDEIKRKDDSEKLVEEVKRKLKRKLEEIRREHRRTKEEIKKTNEDIKRRHDETLRRLEKTLEDIKERTR

SEQ ID NO: 5955 - protein, 178 aa, Artificial Sequence; identical to SEQ ID NO: 5954
  Synthetic

SEQ ID NO: 5956 - protein, 182 aa, Artificial Sequence
  Synthetic
SEVEKILEELKREVREHERRVEKLVRELEDYVRRHREKVKRIEERLRDKLREIEELVKEGRLDDSEVERLKREVEDEARRLEEEHEKSLRRIEEKLREIEKDHKRSKEELDKRLEDIRRRGLPEKAVREIETLADEIRERIERSLKRIRDLIREIKEDLRRSLERIREIIREIKKAIDDRRK

SEQ ID NO: 5957 - protein, 182 aa, Artificial Sequence; identical to SEQ ID NO: 5956
  Synthetic

SEQ ID NO: 5958 - protein, 182 aa, Artificial Sequence
  Synthetic
SEVEKILKEIRDENERLKKEIEEILRELERKLREHRREVEEVLKRIREKIETLKDESRREDRGSERVDKVRRELEETLKRIKERHDESRKELREKSERIKRRIEEYKERNDRKLEEIERANLPEEMLREMERISREDRETLKRLTDRIREMIRRLEEEIKRSEREAREIIKEAKKVLEDEAT

SEQ ID NO: 5959 - protein, 182 aa, Artificial Sequence; identical to SEQ ID NO: 5958
  Synthetic

SEQ ID NO: 5960 - protein, 179 aa, Artificial Sequence
  Synthetic
SRVEELIKDLRRSTKELEDRVRKLLEELKDKTRRTEKRNREKLEKLKEELRKLEEDVKREGPRETDLDERVKELEKAAEDSKRELDENLERVTREIEKIKREIDKYRKDSERRIEEIRKSGDDDEKVRKVMEDDRRKLKKILDDVEDVLRKHKKVLEDLKRTNDDVLREARKLAEKIRR

SEQ ID NO: 5961 - protein, 179 aa, Artificial Sequence; identical to SEQ ID NO: 5960
  Synthetic

SEQ ID NO: 5962 - protein, 181 aa, Artificial Sequence
  Synthetic
SAEERLKEALKRLDDVSKRSEEEIRRMIKRIERISRESLKRLKDLNRRIKELVERIERRLKVDDELRRLRKRVEKLNRDSEETAEREREDNERMIRELEKRLREEKEDNKRFLKELEERLRRGPVDERLLEEIKRYIDEHKRRLDELRKDIERYLEEHKERLRELEKRHEELLRTLDREAK

SEQ ID NO: 5963 - protein, 181 aa, Artificial Sequence; identical to SEQ ID NO: 5962
  Synthetic

SEQ ID NO: 5964 - protein, 185 aa, Artificial Sequence
  Synthetic
SAEEDLDRMRKKVEDVIREDKERVRKLLERAKEVIRESEKKHEDLRRRIRKVIKEIRERTNGSSDELRKIEDLLRRLEKHVDDSEREVKKNEEEIREEVERHLKRSEDNAEEIRKEIEEVERRKVSDTDLERELRRIDKHLRDHKDEARKSEERVEDHLRRHRERVRRNEEDVEDKLKKLKDETK

SEQ ID NO: 5965 - protein, 185 aa, Artificial Sequence; identical to SEQ ID NO: 5964
  Synthetic

SEQ ID NO: 5966 - protein, 175 aa, Artificial Sequence
  Synthetic
REEEELKRRNKDHNRRHREDTKRIAEDVDRKLREWKKKSDEAREEVKRLLERLKELADRNEVEEREVERLLKELRDRVKELKEESDRDLERLRRTVEELLKKLDKNLKESEDELRKKPESEDLRRLMKENRETIRESAEILERLRERVEDLVRRDREILEKLLRDIEELAERIKR

SEQ ID NO: 5967 - protein, 175 aa, Artificial Sequence; identical to SEQ ID NO: 5966
  Synthetic

SEQ ID NO: 5968 - protein, 184 aa, Artificial Sequence
  Synthetic
SVEDELRKLEERLKRIADELRRLVEKNIEDNKESLKEIEKLIRENIERNKEVLKRIAERGKREDELRDIERKIRESIEKLKDLLRRAEEKVRRSIRRLEKILKELKEKVDKLKEELKDLTDKRLDKDELKKALDDVDKKLEDLRREVEDRDRKNEEDNRRLRKELEERSRENKEFLDKLAREAD

SEQ ID NO: 5969 - protein, 184 aa, Artificial Sequence; identical to SEQ ID NO: 5968
  Synthetic

SEQ ID NO: 5970 - protein, 175 aa, Artificial Sequence
  Synthetic
SEKDESARDIEEKLERHLRKSDESRRRNEKRIKEHRDRSDESRKKFETDLKRIEDEVRKRGPNRDELDELLKRLKDELDDHRRRTEKSARESKKHLDEHRKRTEDSLRTFEEELKKLEPDEKLKDLERKVREVIDRDRDILRRLEEEHRKVITEDEEILKRLEEKAREAIERIRR

SEQ ID NO: 5971 - protein, 175 aa, Artificial Sequence; identical to SEQ ID NO: 5970
  Synthetic

SEQ ID NO: 5972 - protein, 175 aa, Artificial Sequence
  Synthetic
SEKDERLEEIKRRLKEHKRRSEEAVKDNDRKLEKHKRDSDRSAEEVKKKLEEIEKRVRKDGPRETELEELDRRLRKELEDHARRTDESMKRSEEHLRKLKKEIDESLKEFKKELDKLEKDKKLDDLEREIRKVIEESKRLLEELERRHRRVIEEDKRILDELRRLIEELIEDAKR

SEQ ID NO: 5973 - protein, 175 aa, Artificial Sequence; identical to SEQ ID NO: 5972
  Synthetic

SEQ ID NO: 5974 - protein, 175 aa, Artificial Sequence
  Synthetic
SEKDEELKRIKEDLERHERESEDDVRRNEEKIRRHRRKTEEAVKEVEEELKRLEEDVRREGPGRDELEKASEDMKRRLDELRRRIEESMKESDKHLRELEEKVRRSSRRFEEELKKLERDRDLERLRKEIREVIEKSKDLLRELRRRHEKVIEDSEDILRKLEKKIKDLVDKIRK

SEQ ID NO: 5975 - protein, 175 aa, Artificial Sequence; identical to SEQ ID NO: 5974
  Synthetic

SEQ ID NO: 5976 - protein, 175 aa, Artificial Sequence
  Synthetic
SRKDEEVKRVKEKLKKHEERSRDMVRKVEDKSRRHREKIKEAEREVRRRIEELEEDVRRRGPRRDELERVKRELEKRLEELEREIRKSLEDAKRDLERLKREIDKSLEELKRELEKLEEDKKLEDLREEAERVIRRSEKLLEELREHVERNIDEVREILRELAELVKRVIDEIRR

SEQ ID NO: 5977 - protein, 175 aa, Artificial Sequence; identical to SEQ ID NO: 5976
  Synthetic

SEQ ID NO: 5978 - protein, 184 aa, Artificial Sequence
  Synthetic
SVEDILRTLRRLLEELEEESERILKRLREIIETNVRRVKELLRRLKERLDELAERLKAKVREEEVLRRLAEELKRAEDELRKLEEDVKKSVKELRDKLETLRRDVRRNLEEIRKELEKIEKDRVTSKELDDLLKKVEEHLRRHKRKLEKALKDVEDESREHEKELRRALKRIERLLRELERKAD

SEQ ID NO: 5979 - protein, 184 aa, Artificial Sequence; identical to SEQ ID NO: 5978
  Synthetic

SEQ ID NO: 5980 - protein, 180 aa, Artificial Sequence
  Synthetic
DEEEVIREIEKRFRDLIRRAEDVLRRIAEKMKRLKDKTRRLLEELRESNRKLIKELRDRIRDERLRKEVEDLEKTSRDRLDAIREELRESEERAREILDRIRRLIEELRRTAKERLDELRDTRRSKEVRDRVEEELKRIEDRLRKLDTDVDRYLKEHEDRLRKLKEDNERDLKRVEERAR

SEQ ID NO: 5981 - protein, 180 aa, Artificial Sequence; identical to SEQ ID NO: 5980
  Synthetic

SEQ ID NO: 5982 - protein, 177 aa, Artificial Sequence
  Synthetic
DIEELLKEVKKEVDRVEKKVKELIDRNKERVDRVREENERVADEVRKLIKELRDRIRDDEEVVREVEEVLRRVEKKLDELSRHVDEVLKESEDRLRKVLKLVREVLEDATKLLKDIETRELVEKVAREAREKLKKVEDLLRKISRRSEELLRRNREATKKILKELRELLRRVEEKRR

SEQ ID NO: 5983 - protein, 177 aa, Artificial Sequence; identical to SEQ ID NO: 5982
  Synthetic

SEQ ID NO: 5984 - protein, 185 aa, Artificial Sequence
  Synthetic
SEAEEALKRHRKLNKEAEKRAKDATDDSKRLLDEIRKRAKEASEDSKRLLDEARRLREAGARKEEVEKIIDEAAKKSKKAAEEARKAADDAARKSRKAAEEAKKLADDSARDAERAAREAKDREDKERVRRILEEAKKTARELRERIKKLLKENEDAAKKLRDEIDEAAKKNKKAADEAREEARR

SEQ ID NO: 5985 - protein, 185 aa, Artificial Sequence; identical to SEQ ID NO: 5984
  Synthetic

SEQ ID NO: 5986 - protein, 185 aa, Artificial Sequence
  Synthetic
SELEKVLEEHRRLNDEIRKELEDVTRKSEETNKRIEEDLRRVTKEAKDLLERIKEKLEAGRRKEEIREEVKKVLEDSERVIEKVKRLLDESLDRSRKMIKKVEDLVRDSLRKAEEVIRRVRDKEDRRRVEEILRDMKETVDKLKKEIEKLLEENKESAKELRERIKENLETNRDLVRKLEEDIKR

SEQ ID NO: 5987 - protein, 185 aa, Artificial Sequence; identical to SEQ ID NO: 5986
  Synthetic

SEQ ID NO: 5988 - protein, 175 aa, Artificial Sequence
  Synthetic
DEAEKALEEVRDLIREIRERDRKVTEDVERLNREIREKLKEVTERVKRSNDDIRRLLEEGRDKREIKKLIEESNELVRKVVKEATELIRDSNRLVKEAVDTSRKLIKEVLDRVREMPVDKSILEELERLVRELRKESEKSLEDLERLNKKLEDEVRDILRKLNKLNEDLLRKVEE

SEQ ID NO: 5989 - protein, 175 aa, Artificial Sequence; identical to SEQ ID NO: 5988
  Synthetic

SEQ ID NO: 5990 - protein, 175 aa, Artificial Sequence
  Synthetic
SEMDEARKEVKKLLDEVRKRDEDVTRKVEELNKRIEERAKRVAEEVEKLIREILKRLRDGSRKEEARKLLEEVKRTVDKMIKELEELVRRSNRVVKEAVKESRELIKRILERVEKVPVDEKILEDLRRLVKKLKEESDRSLERLERLNERLERRIREILKRLEKLVRELRKEVER

SEQ ID NO: 5991 - protein, 175 aa, Artificial Sequence; identical to SEQ ID NO: 5990
  Synthetic

SEQ ID NO: 5992 - protein, 175 aa, Artificial Sequence
  Synthetic
SEAEEALRKVEELIRRVKKRDDEAVKEVRELNKRIADILREVLETVRKLLEDVEKALRDGSDKREARKLLEEILEAVKRAADRIEDLIRRSNEAVRRVVEESRDLIKRILEEVERAPVEEDILRTLRELVRDLERKSEESLKELNRLNEDLKREVKRVLDELEELVRRLKKKVDD

SEQ ID NO: 5993 - protein, 175 aa, Artificial Sequence; identical to SEQ ID NO: 5992
  Synthetic

SEQ ID NO: 5994 - protein, 185 aa, Artificial Sequence
  Synthetic
QVEDVIRESKKLTEDSEKRVRDIIRRLKKTIKDSEDRVRRMVEELRERIKRLRERLESEDERVVREVERVVRELEKLVKEAEDRARKFLETSDRIVREIEKRAREMLEESKRVLEEIKRLADEGVSDEVIETLLRKDRDLNRRVNEELRKLEEEVEELNRRVNETIKEILRRIAELIRRILEKTK

SEQ ID NO: 5995 - protein, 185 aa, Artificial Sequence; identical to SEQ ID NO: 5994
  Synthetic

SEQ ID NO: 5996 - protein, 185 aa, Artificial Sequence
  Synthetic
KVEEILKELEELIKRSKETVDEVIKRSKDLVDESRRRIEDVIRELEKLIRELDKKLETDDKDVVKEVKEAVKRLRDEVKRIDDEVRRAVEKSKEVLDEIRRRVDELVKRSKRLVDDIRRLLAEGVSEEVVRTLVKEIRDLNKRVNEEIKRLLDEDKKLNEEVNRLIKELKKEIEDLIREVLEDKR

SEQ ID NO: 5997 - protein, 185 aa, Artificial Sequence; identical to SEQ ID NO: 5996
  Synthetic

SEQ ID NO: 5998 - protein, 185 aa, Artificial Sequence
  Synthetic
EVEDIIRESKKLIEDSKERVKEVIKESKRLIEELERTVREVIKELRERVDRLRKKLRDDNEEVERRVTEAVERLKELIERIRREVEEAVRRSEETLEELKRRADKLVEDSRRVLEEIKRLADENVSKEVLDTLLKEDRDLNEDVKRRITELLEEDRRLIEEVKKRIRELRERIKRVIEEVDRATT

SEQ ID NO: 5999 - protein, 185 aa, Artificial Sequence; identical to SEQ ID NO: 5998
  Synthetic

SEQ ID NO: 6000 - protein, 175 aa, Artificial Sequence
  Synthetic
STAEEIVRRIRDVNRRINEAIERLLEEDEKVIRDVERRIEEVLERDRRVIEEVKRRVRTEEVVERVIRRSEKTIEDLKKLVEKLLRDSARTIEKIERLVREVIKETKRLLEEIKRRNVDERIIEEIKRILKESEDRLRRILETSRERLKELKKKLERVLEDSKKKLDELRRELRK

SEQ ID NO: 6001 - protein, 175 aa, Artificial Sequence; identical to SEQ ID NO: 6000
  Synthetic

SEQ ID NO: 6002 - protein, 175 aa, Artificial Sequence
  Synthetic
REAEDLVRKVREVNKKANRDIKELLDRDEKVIREVARAAEAIVDEARRIVEEVERKIREERVAKEVLERLKKILDELAELAKRVLERSEETIERIERLAREVLRATRDLLEKIRKNNVDERIIKEIKETLDESRKRAEEVLEKSRRLLEELRKRVEEIVKRIKELIDELERRVRK

SEQ ID NO: 6003 - protein, 175 aa, Artificial Sequence; identical to SEQ ID NO: 6002
  Synthetic

SEQ ID NO: 6004 - protein, 187 aa, Artificial Sequence
  Synthetic
SAEEIIKTLEELVEKLKRDAEETLRKIEELVRRLEEEARKSSEKIRKLVEDLAKEARERTRSKEVEKIVEEAKRRLDEIIKRNNEVVKRVLRELEELIERNRKVVEDALRELKKLIEKLEDLVRRNTGDEVLTEVLKEITELVKRLKELSDRTLEEVRKLVERVKRESKRTLEEAEEVVRELKERLR

SEQ ID NO: 6005 - protein, 187 aa, Artificial Sequence; identical to SEQ ID NO: 6004
  Synthetic

SEQ ID NO: 6006 - protein, 187 aa, Artificial Sequence
  Synthetic
DAERLLREVEELVRRLEEEMEKTDREIKELIKRLEERLRTTSREIKKLIEDLEREARERTRSEEVDRIVKEVIERLKRVLDKNNEIMERARERLERLLEENKKIVDEVLKELKELIDRLKDLVDKNGGREVLKKVIDEIRKLVKRVKDESKRSLDEIRKLAEEVDRRSKKVLDEIRRLVDEVRERLR

SEQ ID NO: 6007 - protein, 187 aa, Artificial Sequence; identical to SEQ ID NO: 6006
  Synthetic

SEQ ID NO: 6008 - protein, 187 aa, Artificial Sequence
  Synthetic
DAEDILREIKKLADDLKREADKSLKEIEELARRLEEEAERSLREIEELARRLKKRADEKTTDKKAEKIAREALKLAKEAAEENKKVAEEAAELAKRAADEDKKVAEEALKLAREAAEDARRLAEENGGREALKRAAERARELADRARKLSEDTLRKAKKLADDARKLSRETLEKARELAERAERRLT

SEQ ID NO: 6009 - protein, 187 aa, Artificial Sequence; identical to SEQ ID NO: 6008
  Synthetic

SEQ ID NO: 6010 - protein, 178 aa, Artificial Sequence
  Synthetic
DEAEEVRERVKKLIEESKRLIEEVRRRVRTISERSAELIEEVERRVDKMARDVERLLKDNVDKRELKRVVDDILRLVETVIARLRDTVRDLDRLVEEVIRRLHETDRRLKEEIDDAFRRLQDDEVLRRLEKLVRDSNDEIRRVLKELKEVVKKNRDEIERVLKEARKKVEDLLREIER

SEQ ID NO: 6011 - protein, 178 aa, Artificial Sequence; identical to SEQ ID NO: 6010
  Synthetic

SEQ ID NO: 6012 - protein, 178 aa, Artificial Sequence
  Synthetic
SEVERVRRENEETIRRIDEVIKKIEEDNKRTIDEIRDVIRRVKETVEKTNREIEKVRRDNRDKRDLDKLIKDSNRLVREVIERLRRLVKESLDTVKKAADELKRLVKESKELVEDVIRRVRDDEALRELRKSNEDLERRIRKVLEDLKRSNDELLEEIDRVLKRLHKSDEDVRKRVTD

SEQ ID NO: 6013 - protein, 178 aa, Artificial Sequence; identical to SEQ ID NO: 6012
  Synthetic

SEQ ID NO: 6014 - protein, 174 aa, Artificial Sequence
  Synthetic
RELEEAEKTVEELIRRIKEIIDEVLKRDRDVSERSKELIDKVKREAEKIVEEIERLLKNNVDRDELRKMVERLRELVKKVLEELRKTVRELEETSRRALERLRRLLKRLREIIEKDVRSEVLRKLDKKVKDLKREIDDVVRESKELIKRNRRRVEEVAKELERLIKEVKDRIDT

SEQ ID NO: 6015 - protein, 174 aa, Artificial Sequence; identical to SEQ ID NO: 6014
  Synthetic

SEQ ID NO: 6016 - protein, 174 aa, Artificial Sequence
  Synthetic
DELERVREEVRRLIKEIEEIIERVERRDEEVSRKSEDLIRRVLKRDEELAKEIEDLKRNNVDKKELRKMVKKLEESSRRALERIRRTVKELEETSREALKRLEDLLRELEDVIRKLVRSRVLEELKRLVEELEREIRRVFEKSKKLIDDNRKKADDVVKRSEDLLREVKKEIDR

SEQ ID NO: 6017 - protein, 174 aa, Artificial Sequence; identical to SEQ ID NO: 6016
  Synthetic

SEQ ID NO: 6018 - protein, 178 aa, Artificial Sequence
  Synthetic
SESEEVERLVEDVSRRNTKAVRDIEEHSKDVSRRNKKLVREVEEHTREVIERAKELTKRRKTEEVIKRVLDTLERLMRESVKLLEETVERLRRLVEKSKRLIEKTMKELRDLIKKVVEDITGRDVVERIRRLLRENVEENKKVLKRSDDLLKKNERENREVVKKSEKDARDLVEEIKT

SEQ ID NO: 6019 - protein, 178 aa, Artificial Sequence; identical to SEQ ID NO: 6018
  Synthetic

SEQ ID NO: 6020 - protein, 178 aa, Artificial Sequence
  Synthetic
SEEEDVRRKVEKVSRENKDMVRRILEHSRKVSEDNRRLVKEILDRARKAIEDVKELIERLKREEDIERVVRELRKLVKTVLDLIRETVKRLRDLVRKSKELIKETVKELERLIEKVIRDITGRDVVREIKELLDRNREENRKVLEDSERLVDENEKDNKRVLDELRRLLKRAEEEARR

SEQ ID NO: 6021 - protein, 178 aa, Artificial Sequence; identical to SEQ ID NO: 6020
  Synthetic

SEQ ID NO: 6022 - protein, 184 aa, Artificial Sequence
  Synthetic
SIDKALRDLKEILDRNRKHSEDLLREAEELVERSNDHSRRVLEEIRKLLRELEEEIRKRVKDEKKLRELKEIVDRIRELAEELFRRSNESDKRIKETVEDMIRKSRESVKRIEELIREVIERIRDEKLVREVEKTVEDLSRENKKLNEDVKRTVDELIKKSEKLNEDAKRTIDELLKRVKERIE

SEQ ID NO: 6023 - protein, 184 aa, Artificial Sequence; identical to SEQ ID NO: 6022
  Synthetic

SEQ ID NO: 6024 - protein, 184 aa, Artificial Sequence
  Synthetic
SVEDLLRKLKTIVDENRERVKKSLEELRRILDENRRRVERSLRELRESNERLRKEIEDTVKDEEKLRRLRDLVRRSAERVEDAVRRSRETVREVEDRVEKLADESRKTVERVRELIEEAIKRITDEEVLKKVEETVKRLSDENRELNKRIKEEVDEMSKRNKELNKRIKEENDKLIKEVKDEIR

SEQ ID NO: 6025 - protein, 184 aa, Artificial Sequence; identical to SEQ ID NO: 6024
  Synthetic

SEQ ID NO: 6026 - protein, 183 aa, Artificial Sequence
  Synthetic
SVEDVLRELKELIDRNREEAKKTEKELRELIKRNDDEAEKVAKESKKLTEDLEKEAREKVRSRKLEEIKRILDENREVLRRVLEDSKRSVRELKELVDRVIRKSEKIVDDLRKLVERLAREVRDEKVLREAKERAKEISKRNKDVNEEARKRIKEISDKDKRILDEVRRESKEIEKRLKEALK

SEQ ID NO: 6027 - protein, 183 aa, Artificial Sequence; identical to SEQ ID NO: 6026
  Synthetic

SEQ ID NO: 6028 - protein, 174 aa, Artificial Sequence
  Synthetic
DDEERVREVVKRVKEDNERVDREIREIVKRLLEHDRELLEEIKKEVDRVAEELRKLKEDGVPEEDLRKVVKDIEELVRRLIDELRKSTDDARRTVEDLIERLRETVRKALELIERVVRSEVLERLRKTLEELEKRNEELLEEARRLLEESREEVRELLERAKKILEDLEREIRR

SEQ ID NO: 6029 - protein, 174 aa, Artificial Sequence; identical to SEQ ID NO: 6028
  Synthetic

SEQ ID NO: 6030 - protein, 174 aa, Artificial Sequence
  Synthetic
SREERVREVVKRMLERDEELLRRIREEVERALRRNDEVLREIERVVEEMEERVERLKREGVDRKDLERLVEEALRVVREAIKELERTTRELEDLIRKLIEELRDSTRKVDELIKRKVTDEVLEDLRRLLEESVRRVEDLLKKLTDIVRESRKRVRDILRKAKRIVDKLREEIKK

SEQ ID NO: 6031 - protein, 174 aa, Artificial Sequence; identical to SEQ ID NO: 6030
  Synthetic

SEQ ID NO: 6032 - protein, 182 aa, Artificial Sequence
  Synthetic
DVEREAKRLLEEVAEHVRRSIKELRKLLEDVARHVEKTLRELEKLTDDVRKRVEKLKRDVKEEEKLKEVVERLKRELDKVSEDAKKLVDENRRLLKTVVDTVRRLVEENRRRLEEVVRRVEEAGVDRKVVEDIREKVKDLKRKHDTVLEEIKKEVRRLEKEHKEVLDKSNEDARKLEEDLRR

SEQ ID NO: 6033 - protein, 182 aa, Artificial Sequence; identical to SEQ ID NO: 6032
  Synthetic

SEQ ID NO: 6034 - protein, 177 aa, Artificial Sequence
  Synthetic
SEREEAKKLLRENEEDNRRVDREVEKLTEENERINRRVNEEVRKLTEDIKRKVESVKRLSDKRMLDKAIKEVEELSERSKDTIRRVIEESKRLSEESKRTIKEVIKRSTDLMRELDKRVTTRDIVEDIRRKADRLRERNEETLKRDEDKLKKLEESNRKVLKEDEDELRRLADKLRK

SEQ ID NO: 6035 - protein, 177 aa, Artificial Sequence; identical to SEQ ID NO: 6034
  Synthetic

SEQ ID NO: 6036 - protein, 177 aa, Artificial Sequence
  Synthetic
SEAEEAAKRSRDTAKRAEEIAREAAERLKKNAEDAERIAREAKKTSKKTAKEAEDAARSNAPEKAIEDAARKNEELARRAAELIERAARTNRKIAEDAARLVREAAERNKELADRAIKTRDADELRELAKRTEDKARKLADELRKLADETEKKARKLAEEVKKLADDTRRKAEEARR

SEQ ID NO: 6037 - protein, 177 aa, Artificial Sequence; identical to SEQ ID NO: 6036
  Synthetic

SEQ ID NO: 6038 - protein, 177 aa, Artificial Sequence
  Synthetic
DEVEKAKEESRRTLKKIEDRVRKVAEDLKKNLEDIERRVREVLEELRRLLEEIEEVVRRNIDKKEIDRLAEEIKEIAKRIIDEIRELLETNRKIVEEILEEIKRLVDENKKLVDRVKETSDKEELERLVEKTEDKIRKLLEEIKELLKETEKKIRKLLKRIEELMKEIEDKIDEDKK

SEQ ID NO: 6039 - protein, 177 aa, Artificial Sequence; identical to SEQ ID NO: 6038
  Synthetic

SEQ ID NO: 6040 - protein, 177 aa, Artificial Sequence
  Synthetic
DEVERVKEELKRNLKEIREDVERVKEESRDTVRKATEIVKRVLEELKKSLEEIKKLVDDNAPERMIEEVLRHNKKLVERIEREIRRLVEENRRLVERVLRRVEELLESNRDIVRDIIRRRDVEELRDTLRKSAEDIERLLREIEDLVRKTTEDAKRLADEVRRLVKESERTIKERAD

SEQ ID NO: 6041 - protein, 177 aa, Artificial Sequence; identical to SEQ ID NO: 6040
  Synthetic

SEQ ID NO: 6042 - protein, 177 aa, Artificial Sequence
  Synthetic
SEVEKVDRELKDNLRRIEEEVRKVDEELRRLLEEIRRTVEEFKERSKRTVEEIEKVARENAPEEVIKEVLRRNRDLVRKVLKTIKDLLDEIRRRAEEIIKKVEDLLESNRRIVEEATKTRDVEELRRTLEESERRIRKLLEDLKRLLEEIEKDIRRLEEEVDKLVRDTEKRIDDLRR

SEQ ID NO: 6043 - protein, 177 aa, Artificial Sequence; identical to SEQ ID NO: 6042
  Synthetic

SEQ ID NO: 6044 - protein, 183 aa, Artificial Sequence
  Synthetic
SLEDELRRRITEAEKRIRDLLRRVRELVERSKKTIKDLLRKLEETARETKDEIRKLEEEVKEEELKELIRRVLEESDKTLEKARKELKEALDRSERSVEKIERLIEEVVKRLREVIERVRDVKEEEKVRRVEREIKEILKKIEEDVTRLLEENKKILKEVEDLVRELEKEDRDVLKKVRDDVK

SEQ ID NO: 6045 - protein, 183 aa, Artificial Sequence; identical to SEQ ID NO: 6044
  Synthetic

SEQ ID NO: 6046 - protein, 183 aa, Artificial Sequence
  Synthetic
DLRERLEEEIERARRDIEDLLRKAEELAKRSKDDIKRLMDEVRRLVEKTRRDIEKLLREVKDKSVKERIKEVLRESEKTMRDIEREIKEVLDKSDESLKKVKEDLERVVRTLDKLIEDVRRVTEEEKVRKVEEEIRRVLEKIRRDARKLLEENKRITDEVRKRVKELLEENRKVLKRIKDEVD

SEQ ID NO: 6047 - protein, 183 aa, Artificial Sequence; identical to SEQ ID NO: 6046
  Synthetic

SEQ ID NO: 6048 - protein, 183 aa, Artificial Sequence
  Synthetic
KLREELEKLAEEAKKRIEDLAREAREAAKRASESNKDLARRLRELAKRTEDEIKRLLDDAKEERAKKLAEDALRRSRETAERADKLAKDADKHDKEIAEKAEELAKKALKDLEEAARRARRADKEEAARKAAEEIKKILEEAERLAREALKELERSNEESERLARRAAEEDKRVADEARERAR

SEQ ID NO: 6049 - protein, 183 aa, Artificial Sequence; identical to SEQ ID NO: 6048
  Synthetic

SEQ ID NO: 6050 - protein, 183 aa, Artificial Sequence
  Synthetic
SLREELRKKIEEAKKRIEKLMDDVRKEAEKAKRSNEELLRRLRKLAKETKRRIEELLERVKDESVKERIRRVLEESDRTLREAEELIRRVNEHDDRILRKIEEEIKRVLEKLEKVIKDVERVDDEEKVRRLLKEIEEILRRIEDKVRKLLKELRDSNRDSKRLVDELMRRDKEVLRRIEEEVK

SEQ ID NO: 6051 - protein, 183 aa, Artificial Sequence; identical to SEQ ID NO: 6050
  Synthetic

SEQ ID NO: 6052 - protein, 183 aa, Artificial Sequence
  Synthetic
DLERELEELIKKAEKKIRDLRKEVEDVVRDASRSNKELLREAEKLAEETRKRIDDLRKEVKDRSVKERIKEVLRESEETLKEVRETLKRMDEHDRTIMREIEERIRRVVEELRRLIEEVRRVDKEEKVRELEKRIRDVLRRIEEEVRRLLKRLKDSNDDSRRRLEELLRRDKKVLEDIERETK

SEQ ID NO: 6053 - protein, 183 aa, Artificial Sequence; identical to SEQ ID NO: 6052
  Synthetic

SEQ ID NO: 6054 - protein, 183 aa, Artificial Sequence
  Synthetic
SLREELERLIKEAEEKIRRLLKEVKDLVRELSRTNKKLLKEVRDLAKRTKERIKRLLDELKEERAARLIEEALEASDRTLKKIEDLIRRVNEHDEEIARRIEEEIKKAVDELRRLIDTVRRVTDEDKVRKLLEDIERLLREIERLVRELLEELKDSNRRSEELVRRLLKEDKDVLEKAERDVR

SEQ ID NO: 6055 - protein, 183 aa, Artificial Sequence; identical to SEQ ID NO: 6054
  Synthetic

SEQ ID NO: 6056 - protein, 174 aa, Artificial Sequence
  Synthetic
DEEEELRRLVRRLMEEVKRLLEENKKLADELRKTVKKLLEDNEDLARRLREEVERKVKSRIMEEVKRLIDEVLRHSKKVIEEVEKEIRDVLRKSEKIIKEAEDLIRRVLELAESGRRDVEEVKKELEELLREVEELSRRSLKELKELLERVKKRSEESLKELEDLLREAERKSR

SEQ ID NO: 6057 - protein, 174 aa, Artificial Sequence; identical to SEQ ID NO: 6056
  Synthetic

SEQ ID NO: 6058 - protein, 174 aa, Artificial Sequence
  Synthetic
SEKEELKKEVDRLAEEVERLLRENEKRARDLERKIRKLLEENRRAADEVRKEVDRTVDSEKADRVRKEIEKVLRHSEKVIREVTKRIRKLLEDSERIIRTAKRLIDEVLRAAEAGEVDVEEVKKRLEDLLEEVKELSKRSEDTLRKLAEDVKRLAEDSNKKLEDLLEEAKERAR

SEQ ID NO: 6059 - protein, 174 aa, Artificial Sequence; identical to SEQ ID NO: 6058
  Synthetic

SEQ ID NO: 6060 - protein, 174 aa, Artificial Sequence
  Synthetic
SEKEELRDLVRRAKEDVDRLRRENEELNRRIEEDIERLLKENEDRNREVKDDIDKRVSSEIVKDARRLNRENHERSKRIIERAKRLNEENHRTSRKIIEEAKKLIDDVLKKAESGSVDVEEVKKELEELLRRVRKLSEDSLKHLRELLKEVRELSERSLRHLDELLRRVREKAR

SEQ ID NO: 6061 - protein, 174 aa, Artificial Sequence; identical to SEQ ID NO: 6060
  Synthetic

SEQ ID NO: 6062 - protein, 174 aa, Artificial Sequence
  Synthetic
KDEEDAERRARESDKSIEELRERNEREAKRLKEEVEKLLEENEKKVDELRKRVEKTVTSEIVDEVRKLIEEVLENSKRIIDEVRKRIEDVLRESEEIIRRVKKLTKRVLDLVKSGSRDMEEVKEELDRLNKEAEELSRRSLRKLEELLREARRLSRESKERLKKLLEDARRKSN

SEQ ID NO: 6063 - protein, 174 aa, Artificial Sequence; identical to SEQ ID NO: 6062
  Synthetic

SEQ ID NO: 6064 - protein, 174 aa, Artificial Sequence
  Synthetic
SDEERAREEARRSKESIERLLEENRRLAKELKKEIRRLLKENEDLVRKLKEDVDREVDSEIAREARKLIKEVLDESEEIIRRVDKKIDDVLRNSERIIREAKRLTERVLRLVDSGSRDIEEVLEELDRLNKEVEELSRRSLKRLEELLEEVRKLSEDSLRKLKELLDRVREKSR

SEQ ID NO: 6065 - protein, 174 aa, Artificial Sequence; identical to SEQ ID NO: 6064
  Synthetic

SEQ ID NO: 6066 - protein, 181 aa, Artificial Sequence
  Synthetic
DERERLRKALEEVRRTVEKLVRENEELLKKVEERVRRLNDEDRRLVEEIKRRADELRKRGEATDEVIERIRKVLTDSERISREILRKLEEMLDRSRKIVEEILRELERVLREIEELVKRVTNDEVIRRVEDELRKVLEDIKRLSDKNKRDLEEALRDIERLVKENNKRLKEALDDLERAAT

SEQ ID NO: 6067 - protein, 181 aa, Artificial Sequence; identical to SEQ ID NO: 6066
  Synthetic

SEQ ID NO: 6068 - protein, 181 aa, Artificial Sequence
  Synthetic
SEREDLKRELDEVRKDVARLNEEDRRLLEDARRDLEKLVRDNEELVERVKKTLKELEDRGELTEEVVEELDRVLDESRKIVEEILREAEKVLKESEEISKAIVKRAEDVIREIEELVKRVKTDEVIRRVRDRLRRVDEELKELVKRNNERLREVLERIRKLSRDNSERLKAALEKIKEEVR

SEQ ID NO: 6069 - protein, 181 aa, Artificial Sequence; identical to SEQ ID NO: 6068
  Synthetic

SEQ ID NO: 6070 - protein, 181 aa, Artificial Sequence
  Synthetic
SLKEKIEKLLEESRKDIEELNERDKKRVKESEDTVRRLNEEDEELVKRVREELEKLRKEGRLDDRVVEDARRMLERSRRISEEILKENRRVLEESKETSKRILEDNERAVREIKELIDRVRTEEVIKEVEKRLRDVTKTSREKVRENNRRLEEMTEDTKRLVEENNKDLDKALKDIRKKAE

SEQ ID NO: 6071 - protein, 181 aa, Artificial Sequence; identical to SEQ ID NO: 6070
  Synthetic

SEQ ID NO: 6072 - protein, 181 aa, Artificial Sequence
  Synthetic
KEREELEKLLEEVERDVARLNKEDKDLVDEIRRRVDELVKRDKELLDRVRDRLRELSERGDLDERVEEKLERVLRESEKITREIRERVREVLRESEKISEEIVRRARKVIEEIERLLRKVTDSRVIEKVKRDLRRVLEELRRLAEENNRRLDKALKELEDLVRKNNKKVEDALRKIEEEVR

SEQ ID NO: 6073 - protein, 181 aa, Artificial Sequence; identical to SEQ ID NO: 6072
  Synthetic

SEQ ID NO: 6074 - protein, 184 aa, Artificial Sequence
  Synthetic
ELAEDLRRLLKEVEDRSRDLLRKNRKLLEEVRERTERLIKELEDLLEEITRRVKDLIRKIKDEELLKKLEDLLREIEKLVREALERSRKTLEDIRKRVEDMVRRSKEVLERIRRLVKEAIEKLRDEELVRRVKEEIKRLMEEDKKLNKKSVEEIRELLKRDRDLIEEVKKEAERLLKEIEDEVR

SEQ ID NO: 6075 - protein, 184 aa, Artificial Sequence; identical to SEQ ID NO: 6074
  Synthetic

SEQ ID NO: 6076 - protein, 184 aa, Artificial Sequence
  Synthetic
DLERELEKLLDEVRRRVEELNKRNEDLARKVAEDTKELLKELRELLEEVKRRVRDLIRKITDEKLARELEDLLRKIEEDVKEAIKRSEETLERIIRDIERMIRESERLLREIEELVKEVIAKLRDREVAERVKEEIRRLLKEIEELNKRSEERIKKLLEDDRRLIERVKERIEDLLRRIEERTR

SEQ ID NO: 6077 - protein, 184 aa, Artificial Sequence; identical to SEQ ID NO: 6076
  Synthetic

SEQ ID NO: 6078 - protein, 179 aa, Artificial Sequence
  Synthetic
DEVDELLKRLEDSSRKAEEDVKRMLERLEDSTRDAARRVKEMIKRNEEVSDEAEKRIRTEEVVERVLRTSREIIERIREVVKETNKRDKEIVDEVKEVVRETNERDKDIAKKLRDRVRNLDKVVKEIDDLLRESERRNRELLREIEELLKESERINRELLKEVDKVLRDSEERVERRRE

SEQ ID NO: 6079 - protein, 179 aa, Artificial Sequence; identical to SEQ ID NO: 6078
  Synthetic

SEQ ID NO: 6080 - protein, 184 aa, Artificial Sequence
  Synthetic
DLERRLDKILRDIEEAARDNIRRNEELLKRSEENVRRNLEENKKKLEEIKREVEELERRVKDKDLLKEIRDVLERIRRVVERALKEIKDLLRRSEELVRKSIEDIRRVLERIRRVVKDVKERIRSEELAKRAEERLRELLKELHEISKKMLREIKRVNDEINKVSKESLDELDELVKEIKERTR

SEQ ID NO: 6081 - protein, 184 aa, Artificial Sequence; identical to SEQ ID NO: 6080
  Synthetic

SEQ ID NO: 6082 - protein, 184 aa, Artificial Sequence
  Synthetic
SLEEELRKMLEKVERDVRRNIERNKRLLDRSRENVKENIKKNRELLKEIEKDVRKLETDVKDKKLLDEIRKILEEIAKLVEESIRRIEEALEKSERLVERSIREIKRVLDEIRRLVEEVRKRIRSEKLAEDAKRRLEELVREIHKISEDALEEIKRVNKEINDVSKEMLDRLRELLKEIKERTR

SEQ ID NO: 6083 - protein, 184 aa, Artificial Sequence; identical to SEQ ID NO: 6082
  Synthetic

SEQ ID NO: 6084 - protein, 184 aa, Artificial Sequence
  Synthetic
SLEEELEKLLDEVRKEVKKNIDENKRLLDKSREEVRKNIKTNEDLLRRIEEKVRRLLEEVKDKDLLEKIKEMLKRIKELVEESIRRIREVLKRDEELVKKSIDDIRRVLKRIEDLVEDAKRKIRSEELAERAKRELKKLEEEIHRISREALERSKKTVEELHEISKRMLDELKRVDKRLEDETR

SEQ ID NO: 6085 - protein, 184 aa, Artificial Sequence; identical to SEQ ID NO: 6084
  Synthetic

SEQ ID NO: 6086 - protein, 184 aa, Artificial Sequence
  Synthetic
DQREDLDRRLREIEERVEENLRTNEELLKEVEKNAKENIDRNRKTLEDIKRRVDDLRRRVKDKDLLKRIEEMLRRIERMVRESIKKIKKVADDIRRLVKKSIDDIRRILEEIRRVVEEVKRRLRDDELVERVKDELRKLVKEIHDVSKKALEDLERLLRELNEISERALRTLEKLLRKLEEDTR

SEQ ID NO: 6087 - protein, 184 aa, Artificial Sequence; identical to SEQ ID NO: 6086
  Synthetic

SEQ ID NO: 6088 - protein, 184 aa, Artificial Sequence
  Synthetic
SLEETLKRILDKVREEAKRNIKENEDLMRESRRNVEENIRRNEKTLEDIEEEVRRLREEVKDEDLLRKIEKVLKEIRDLVRESIRKIRELLEEDKKLMDTSIRIIEKLLKELEELVDDIIKRIRSEELAKRVKEELDKIVRRVHEISRRALEESRKTVEELNRESEKVLRELERLLRRLEEEVR

SEQ ID NO: 6089 - protein, 184 aa, Artificial Sequence; identical to SEQ ID NO: 6088
  Synthetic

SEQ ID NO: 6090 - protein, 184 aa, Artificial Sequence
  Synthetic
SDEDDLRRILEEIRRNVERNIRENERLLDEIKKRVDENIKTNKKTLEDIREEVRKLEEEVKDKDLLRTIREMLRRIEEMVRESITRIRKVLDDIRKLVEESIKEIKRVLEEIKRAVEEVARRLRDRELVKRVEDTLRDLLRKLNEISKRALEELKRAVERIHRISRDALRELDRLRKELEERTR

SEQ ID NO: 6091 - protein, 184 aa, Artificial Sequence; identical to SEQ ID NO: 6090
  Synthetic

SEQ ID NO: 6092 - protein, 184 aa, Artificial Sequence
  Synthetic
DDEERLDKILRDIEENARRNIERNRTLLERSRENVKRNIDENRRKLEEIRRDVEDLKRKVKDEDLLREIEDVLRKIEEVVKRSIDKIRKMLEDDERLVEESIRRIREVLKRIRDLVEDVKRRLRDKELVKRAEDELRRLLKELNEISERMLRRSEETVRRLNEVSERALRELDRLRKKIERRTR

SEQ ID NO: 6093 - protein, 184 aa, Artificial Sequence; identical to SEQ ID NO: 6092
  Synthetic

SEQ ID NO: 6094 - protein, 184 aa, Artificial Sequence
  Synthetic
SLEETIRRILEESERNVKRNIDENRKLLKEIRDNAKRNIDENRRLLEEIERTVRDLERRVKDKDLLKEIRDVLERIRKLVEESIKRIEDLVRDVERLVEESIREIKRVLDEIRKLVKEVEDRIRSEKLAEDVLRELDKANKDINEISKKMLEDLKKAVEDVNRVSKEMLERLKRLREEIEKRTR

SEQ ID NO: 6095 - protein, 184 aa, Artificial Sequence; identical to SEQ ID NO: 6094
  Synthetic

SEQ ID NO: 6096 - protein, 184 aa, Artificial Sequence
  Synthetic
KDEERLDEILDRSRRNAETNIKRNKDLLDESRENVKENIKKNEDLARRIRERVEDLERKVKDKDLLKEIRDILREIEKVVEDSIRRIREMLRRDEKLVKDSIDEIRRVLKRVEDLVEDVKRRLRDEELVKRVEDELRRLNEEVNKISEEMLKRSKDTVRELNKVSEDALRKLDELRERIERRTT

SEQ ID NO: 6097 - protein, 184 aa, Artificial Sequence; identical to SEQ ID NO: 6096
  Synthetic

SEQ ID NO: 6098 - protein, 184 aa, Artificial Sequence
  Synthetic
SLEEDLRRILKEIRDNVRENIRTNEELLKRSRENVKENIERNKKLLREIEEEVRRLEREVKDEKLLRDIRRVLEEIRRDVERTIREIKRVLDEIAELVERSIREIKRVLDEIDRMVKEAEDRIRSEKLAKEVKDRLRDLLRKLNKISEDALRELKRLNDEINRISEEALERLKKLLEDLERRVR

SEQ ID NO: 6099 - protein, 184 aa, Artificial Sequence; identical to SEQ ID NO: 6098
  Synthetic

SEQ ID NO: 6100 - protein, 184 aa, Artificial Sequence
  Synthetic
SLEEKLRKILEESRENVERNIRRNEDILRKSRRNVEENIKTLEKILEDIKRTVDKLKKDVKDEELLKRIEEELRKIEDRVRRVIREVEKLLRDSEELVKRSIEEIRRALERIKELVEEAERRIRSEELARKVERELREMNKELNRISEEALKRIEEVNRDINRVSKEVIEELERLVEKIREDVR

SEQ ID NO: 6101 - protein, 184 aa, Artificial Sequence; identical to SEQ ID NO: 6100
  Synthetic

SEQ ID NO: 6102 - protein, 184 aa, Artificial Sequence
  Synthetic
DLERELRKAAKESRENAEKNKEDNKEAAKRSKENAEKNIRDNEETARKIEEDARKLEKDAEDEDLARTIRKAADEARKAAKESIDEIRRAAKESEDLARDSIRKIDEAAREAKKLADEAEKRARTEDLARKALRDLREANKRANEISKKALDEIRKANEDANRASKKANDDLRRLAEKAKRDAE

SEQ ID NO: 6103 - protein, 184 aa, Artificial Sequence; identical to SEQ ID NO: 6102
  Synthetic

SEQ ID NO: 6104 - protein, 188 aa, Artificial Sequence
  Synthetic
DLERELRELLERVRKDVRDNLETNKKLLEESRKNAEDNLRENDRLLKELEKRVKDLLDELRKDKEVLDKIKKLLDKLREVVERSLKLIEDLLREAEEVVRESLRLIEELLERVEEVVKRAAELIKRGLPEEVVKRVLDDIKRIVDEINRISKEMLDKLKRINDEANKISKRMLDELRRIAEEIEREVR

SEQ ID NO: 6105 - protein, 188 aa, Artificial Sequence; identical to SEQ ID NO: 6104
  Synthetic

SEQ ID NO: 6106 - protein, 188 aa, Artificial Sequence
  Synthetic
DLEERIKKLLEESRKNVEDNEKKNKDSLRRSREEVKRLSDENEKLLKRIRERAEKLKTDLKDDKDLLERIERALREVEDLVRKSKELNDRLLKKSEEVVKRSLDLIKTLLKRIDDLAKKILELLKEGRDKRVVETVLRELERINEEINDISRKMLKENEKILRDIKKINEDMLKRLKEALERVDREVN

SEQ ID NO: 6107 - protein, 188 aa, Artificial Sequence; identical to SEQ ID NO: 6106
  Synthetic

SEQ ID NO: 6108 - protein, 188 aa, Artificial Sequence
  Synthetic
SLEEEIRDILRRAEERVKELTKENERSLRESKKRVEDLSRENEKTLEEIKRDVDRLLKELKDEEEVLRLIEKMLRDARKVVEDARKLNEDLLRESERVVEEVKDKNRRLLEELRRVVEEIKRLIDRGEPEDVVREMLKDLERIVREISEDNARTLEENERILREIEEENKKTLERLREILKRIREEVT

SEQ ID NO: 6109 - protein, 188 aa, Artificial Sequence; identical to SEQ ID NO: 6108
  Synthetic

SEQ ID NO: 6110 - protein, 188 aa, Artificial Sequence
  Synthetic
SLEEEIRKILKRIREEVKRLTEENDKTLKDSERNVRENLTEIERILREAADDVRRLEEELREDERVLELIKRADKKLKDLVRDILRRIDEMLKRSREVVREVKRTNKEMLERIERIVKRATDLIREGRPEEVVERVLRELERLLEEIRDRNKKTLDDLRRINEEVNRISKDALEELRRLLRELRELVK

SEQ ID NO: 6111 - protein, 188 aa, Artificial Sequence; identical to SEQ ID NO: 6110
  Synthetic

SEQ ID NO: 6112 - protein, 188 aa, Artificial Sequence
  Synthetic
SLEDEIRKILDELRKNVRENLEDNKRVLREAEEEAKKLSEDNRRLLKELKERVKELKDRLRSDKDVLKEIDELLKELERVAKEVEDRNRRLMERVRDVVRRSLEEIKRLLEKLEDVVRRVERLMDEGRPEEVVRRALEEIERINRDINRRSKEVLDELREIVREAKEDNERTLRKLKKILEEIEEKVR

SEQ ID NO: 6113 - protein, 188 aa, Artificial Sequence; identical to SEQ ID NO: 6112
  Synthetic

SEQ ID NO: 6114 - protein, 188 aa, Artificial Sequence
  Synthetic
RLKEELERILREAEKNVRENLRRNRESLKESKETVDRLSEENKKTLEEVRTTVEELLKELKDKREVLKRIKEMLDTAKELVERALELNRDLLRKSERIVTESERLIKELEEELRRVVETVTRLLAEGRPEEVVRDALRKLEEINRRINEISERMLKENKRLLEEIKRINKETLDRLKELLEEIKEDVR

SEQ ID NO: 6115 - protein, 188 aa, Artificial Sequence; identical to SEQ ID NO: 6114
  Synthetic

SEQ ID NO: 6116 - protein, 181 aa, Artificial Sequence
  Synthetic
SDVERVEKELKKTNDELRKIVDEARKLLEKTNKEIRDINRTMMEELRRTNEDLKRVVERGEDRSVLKEILERSEKLVRESIKKNEDLLRESKRVVDKVIREIERILEKSRELVREALRRLTDRRVIERIREIARKNEEDVKKLLKELKDLLEKNKRDVEKASEENKKLLEDNERDVRREST

SEQ ID NO: 6117 - protein, 181 aa, Artificial Sequence; identical to SEQ ID NO: 6116
  Synthetic

SEQ ID NO: 6118 - protein, 181 aa, Artificial Sequence
  Synthetic
KEAEEAAKLLEDTNRRLKEIAEEAEELLRRTNEKAKKINDESREKIKDAARRAEDAARRGRPEKDLEKAARDAEEVAKRAIEESRRAARESEELAREAAKRLKKAADDSRRLAEEAARRLTDEKAIREIKELAKKNKEDAERALERIKRLADKNREDAKRADEDNERAAEEARRKAEELKR

SEQ ID NO: 6119 - protein, 181 aa, Artificial Sequence; identical to SEQ ID NO: 6118
  Synthetic

SEQ ID NO: 6120 - protein, 181 aa, Artificial Sequence
  Synthetic
DEAEDVERKLEATNKELNEINERSRKELETSNRELNRINTESEEEIRRIEERIDRVKKRGEPREVLRKIVKEIKDVVKRAIDLSREVLERSERIVREVIKDSERILRESERLVREALRRLDKKELIERIKRLLDKNREDVKRMNEDNKRLLKENRDDVKRMDEKNKKILDEVDEKAKEKEK

SEQ ID NO: 6121 - protein, 181 aa, Artificial Sequence; identical to SEQ ID NO: 6120
  Synthetic

SEQ ID NO: 6122 - protein, 177 aa, Artificial Sequence
  Synthetic
SEEEELKKLLDRVRERVERSLDEIRRLAREVEEHVKKVNDDIRRLLDEIRREVEDIERRVKDKDVLKKLREVLDEIEKLVRKVLEESTRSLEKARELVKKALERNERLLEEIEKLARDIPAGDEVRELVRTLEERIDDSTREVKKLIEDLKRENKRILDTVRDLVRRLREKIKRIAD

SEQ ID NO: 6123 - protein, 177 aa, Artificial Sequence; identical to SEQ ID NO: 6122
  Synthetic

SEQ ID NO: 6124 - protein, 177 aa, Artificial Sequence
  Synthetic
DEEERLAELLERVKRDVDRSLKRIRDLLKELEKHAKEVNDDIRRLLEEVERRVREMEKRVKDKDVLKKLKDLLDEIRRRVEDALRRSTTSVDKVRKLVERVLENNKRLLEEAEDLVRRIPAGREVEELIRRMLKRIRDSTKKVEDELRRILEENRRILEEVRREIDELKKAIDEISR

SEQ ID NO: 6125 - protein, 177 aa, Artificial Sequence; identical to SEQ ID NO: 6124
  Synthetic

SEQ ID NO: 6126 - protein, 177 aa, Artificial Sequence
  Synthetic
SEEERLEELLRRIEKHSRELIRELEKSLEDSEREVRKSLKRIEELLRRAERKVREIRKRVKDKDVLRELERLLREAEKRVREVLRNNERLLREDEELTKEVIKKSKKILDEIRDLVRRIPAGREVKKVLDDLLKRDRDAIDEARKLNEEMLKRIEDSSREVEKLLADMEKTIEDIEK

SEQ ID NO: 6127 - protein, 177 aa, Artificial Sequence; identical to SEQ ID NO: 6126
  Synthetic

SEQ ID NO: 6128 - protein, 185 aa, Artificial Sequence
  Synthetic
SIDDKARKDLKRILDENRDIVRRVEELIRRSDELLKRILDDVKRRIDELRKKLEDIARKVKSKDMAELLERVLREIEDLIRRVLERIKKVLDESRKLVEEVLKENKKSLEKVERLAREVKTRIKDDEDVLRDIDRLLKEIKKHAEDSLRKIEKLLRESEEKVKDILRKIKKLLDEARKEVEDRRR

SEQ ID NO: 6129 - protein, 185 aa, Artificial Sequence; identical to SEQ ID NO: 6128
  Synthetic

SEQ ID NO: 6130 - protein, 185 aa, Artificial Sequence
  Synthetic
SIAEEVEELIRRLETKNRKIVKDVEDAIRASDDKNRRVLDKVRKDVERLKRELDRIAKEVKSEEALKLLTRILEEAEKLARDAERLNKETLDESRDLIRRVKELNKTSLREARRLAEEALRRIKDDKEVLDRIKELLKKLEKHVKDSLDKIDDLLRKSEKHVRESLETIKRLLEELEREVERLAR

SEQ ID NO: 6131 - protein, 185 aa, Artificial Sequence; identical to SEQ ID NO: 6130
  Synthetic

SEQ ID NO: 6132 - protein, 185 aa, Artificial Sequence
  Synthetic
DEKREVERLIRELIEENRDIVRRVEKLVRESNKKLDEILEEIRERLERLREKLKDIKRRVKSKDALKLLEDVLKEARETVTRVEELLRKLLEESRKLVEEAKKRNKDSLRKVEELVRDAETKLKDNEEVLRRIRELLERVEKHVRDSLRRIDELLKRSEERVRRIIREVRERLKRLEEEVREAKR

SEQ ID NO: 6133 - protein, 185 aa, Artificial Sequence; identical to SEQ ID NO: 6132
  Synthetic

SEQ ID NO: 6134 - protein, 185 aa, Artificial Sequence
  Synthetic
SISEDAERLVRELLRKNKEIRDRVEELVRRSNDKNRRVLEEVEKRLRDIIRKLEDIERRVKSEEMKKLLEEVLKEAEDLVREVLKLNDDTLRESEELVKKAKEDNERSLEEIRELVERVERRVKDNEEVLRRIRDLLRRVTEHVEKSKRDIEKLLRESRDHVRRSKEKIKRLLDEARERVERSKK

SEQ ID NO: 6135 - protein, 185 aa, Artificial Sequence; identical to SEQ ID NO: 6134
  Synthetic

SEQ ID NO: 6136 - protein, 176 aa, Artificial Sequence
  Synthetic
DEEDKLRKLLEEAREAVKRALERVDKLLRDSEREVRRILEEVKKLLDESRKAVEDIRRKATDEEALERIDRVLENSEKIIRDIAELIRKVLEESRKIAKEARELIKAVLKEAEDIIREVSSEEAEELIRRVIRKAEKLLREVEELLRRSNDKLRKLTEKVRTDLERSKKRLEDEAR

SEQ ID NO: 6137 - protein, 176 aa, Artificial Sequence; identical to SEQ ID NO: 6136
  Synthetic

SEQ ID NO: 6138 - protein, 187 aa, Artificial Sequence
  Synthetic
SILEKVRELLERIRDTVRKILREIEKSLEDNKRHSDEVLKEIEDLLRDLERRVKEIEERIKDKDVLKKVKEIVDDVRRRVREVLEKNRRIAEDSERLVEEVLRRLKELLDEIKKRVDDVLRKLEERETEEILEEIERLIREVRRRLKKILDDVRELSRRANEKDRKSLEEVRKLVEDVRRELERVAT

SEQ ID NO: 6139 - protein, 187 aa, Artificial Sequence; identical to SEQ ID NO: 6138
  Synthetic

SEQ ID NO: 6140 - protein, 187 aa, Artificial Sequence
  Synthetic
DVEEEVKKLLEDLERHSRKVLEEIKKLLKELEDHNRKTVEDIEELLRELEKEVRKLEEDVKDEDVLRKIRKILDKIRKDVDRVLKLLDESMKEIEKLVRDVLRKNEEVLEEAKERVTRVLRKLRDRETEEILEEIRRLAEELEKEDRKTLKEARDLAREVKKRNEEIKRRVEELIKKVDRELKEVAR

SEQ ID NO: 6141 - protein, 187 aa, Artificial Sequence; identical to SEQ ID NO: 6140
  Synthetic

SEQ ID NO: 6142 - protein, 176 aa, Artificial Sequence
  Synthetic
DEDEDVRRLLRRLREKVRRVKKKIDDSLRENRKKVRKTNEEVKKLLEDNRRRIEDVKRKRQEKEVLDLLEEVERHVEDIVKKVSELDKESLKLSDDLAKKARELIKRVEEKIEKVVKDRRSEEARKLMRELEKELKEIEDEVDKMSEEINRKNDEILRRARELIKRNNELLEEIRR

SEQ ID NO: 6143 - protein, 176 aa, Artificial Sequence; identical to SEQ ID NO: 6142
  Synthetic

SEQ ID NO: 6144 - protein, 176 aa, Artificial Sequence
  Synthetic
SEEEEVRKLLERLERTVEKTNRDVERSLRENEKRVRETNDEVRRLLEENRRRIEDVERKLQDEDVLRLLEEVKKHVEEIVRRVSELDRESLEESKELAKRASKLDEDTRRLIDRVIEERRSEEAKRLIEELEKRNREVKKEVEEMSRRINKKNEEILREARKLIEENNKLLKDIER

SEQ ID NO: 6145 - protein, 176 aa, Artificial Sequence; identical to SEQ ID NO: 6144
  Synthetic

SEQ ID NO: 6146 - protein, 181 aa, Artificial Sequence
  Synthetic
SELDEIAKAIRRLLEEVRRKNERIDEDIRRLLDELREHSEKVLREIEELLRRLEDAVRKRKDADDILRKIKKLIEDVAELLRKSLEEARRLLEEVARLLKTSVDDIKRLIDRVAEELSRVKDKDARKRAKDVLRDLEKKVEDLKRRNDKTLTDAKRELDDSRRRVKRVLDELEKVLRDLKR

SEQ ID NO: 6147 - protein, 181 aa, Artificial Sequence; identical to SEQ ID NO: 6146
  Synthetic

SEQ ID NO: 6148 - protein, 181 aa, Artificial Sequence
  Synthetic
DEAERILEEVKKLLEEVERLNKKIDDEARRLLREVERENEEIDRDIKRLLDEVRKDVERNKESDEILRKIRELIERVARRLEESVRRIRELVKEVRKLVRTSNEDLRRLIRDVAEKMRRVKDEEVRRRAEEVLRELEKVVEDSRRRNEKTLRDMERRIKELEDRNRDTLRKLREVVKELER

SEQ ID NO: 6149 - protein, 181 aa, Artificial Sequence; identical to SEQ ID NO: 6148
  Synthetic

SEQ ID NO: 6150 - protein, 174 aa, Artificial Sequence
  Synthetic
SEEERVRELIERMREMLERLEESNKKVLEEIERVLEKSERDVERVIREIERTLEEVKDNDEVRELVKRVLDDLRRFLDESRKLVKEIVDRLREMAKESKKLVKEVLDRLRELLERNGDTDRVIREAERVLEEVRRRNEKVNKEARDLLKEVEKHSRDVLEDIKRLLEEIRERAR

SEQ ID NO: 6151 - protein, 174 aa, Artificial Sequence; identical to SEQ ID NO: 6150
  Synthetic

SEQ ID NO: 6152 - protein, 174 aa, Artificial Sequence
  Synthetic
SEKERIEDVIRRIEKVLKESRDEADRVKKEIEKRLRELEKRHKEVTTEVKRVAEEVKDNEEVLKEIEDALRENERMVEDVRRLVEDILRKLDKFMRESEELVRRIVKRLEDLLRNNGDSETVLREAEELLRRVKKHSKEVLDRVRELLKRVEEKSERVLRELERVLREIREKAR

SEQ ID NO: 6153 - protein, 174 aa, Artificial Sequence; identical to SEQ ID NO: 6152
  Synthetic

SEQ ID NO: 6154 - protein, 174 aa, Artificial Sequence
  Synthetic
KDEERIEELLRRNEENLRRLEDSNRKVLRENEEILKELKRRHEKITEDLKRELEKVKDNDEVERLVREVLKKNEELAKKVEDLVRRTTERLKRLVDKSRKLVREITERLRRLLEQNGDTDTVLREATELSKEVHKENRRVNEEAKDLSRRVAEESDRILRELKKLLDEIRKRAK

SEQ ID NO: 6155 - protein, 174 aa, Artificial Sequence; identical to SEQ ID NO: 6154
  Synthetic

SEQ ID NO: 6156 - protein, 174 aa, Artificial Sequence
  Synthetic
SDEERIRRVIEDIERKLRELEKRHKEVTRENKENAKELKERHDRVTKDIKKTLDDVKDNDEVRRKVEKVLDENRKMVEKVLELLERISRRNEELMKDVRRLVKEILERLKRLLDNNGDTDRVLEEIKKLLREVEERSDRALREAKKLSKRVHERSKEVIDRLRELLREIKREAD

SEQ ID NO: 6157 - protein, 174 aa, Artificial Sequence; identical to SEQ ID NO: 6156
  Synthetic

SEQ ID NO: 6158 - protein, 178 aa, Artificial Sequence
  Synthetic
DSAREMERRIRELLKRVEDKSEKALRDSKKLTKEVEEESERALRRTEKLLREVAELARRVDKKEIEDIAREIIKDNERVLEDIRRLSEESVRDNRRVLDEIRRLIEEIIEDLERVLRKGDLDEKRVRDVLREIEEVLRRLEERHERLTRDDERVLRELEDRHRKLSERVKKLLEELKK

SEQ ID NO: 6159 - protein, 178 aa, Artificial Sequence; identical to SEQ ID NO: 6158
  Synthetic

SEQ ID NO: 6160 - protein, 178 aa, Artificial Sequence
  Synthetic
DRAEKAEREIRRLLERVKEDSERVLRESEELTRRVEEESRKILEETKKLTRTLEELSRTEDKRLVEKISRETIRRNEEMLKDLKRLSDESVKRNEDALDDLRRLAEEIIRRLEEVLRRGDLDEERVKRVLEEIERLLRELEERHKRLTERDKEVVKRLADRHREVSEEDRRVLEELKR

SEQ ID NO: 6161 - protein, 178 aa, Artificial Sequence; identical to SEQ ID NO: 6160
  Synthetic

SEQ ID NO: 6162 - protein, 178 aa, Artificial Sequence
  Synthetic
DEMEEVIRRIETLLKRVVDESDKVLEDIKRLLDRVVEESEKALETTRKLLEEVAELARTVDKREIAKIIREIIERNRTVLEEIARLIKEIIDRNKKALDELRDLARRIIRDLAEALKRGDLDEDEVRRVLERVKKVLDELAERHKELSKEIKRELRRLEKEHEDLSEEVKRLLRELER

SEQ ID NO: 6163 - protein, 178 aa, Artificial Sequence; identical to SEQ ID NO: 6162
  Synthetic

SEQ ID NO: 6164 - protein, 178 aa, Artificial Sequence
  Synthetic
DEMREAEEEIKRLLDTVKTESDRVLEEARKLTRRVEEESERVLRETKKLTDELRKLSRKRDKELVKKISEDTIRRNEEAVKRIRELSKESIKRNEDALERIKRLIKEIIDRLEDVLRRGDLDEERVRRVLKEIREVLDRLEKRHKKVSKDDKEVLERLEKEHKRLSREDEEVLRELER

SEQ ID NO: 6165 - protein, 178 aa, Artificial Sequence; identical to SEQ ID NO: 6164
  Synthetic

SEQ ID NO: 6166 - protein, 178 aa, Artificial Sequence
  Synthetic
SRMEKVEREIRTLLKEVEERSRKVLDESRKLTEDVERISRDALKKIKELLEEVRDLARTVDKKILRKLAREIIERNKEMLKEVRRLSKESLDRNERALEELADLARRIIEELEKALRRGDLDEKDVRRVLREIEELLKDLERKHKELTRRDEEVLKKLEDDHRRVSEEIEEVLRRLEK

SEQ ID NO: 6167 - protein, 178 aa, Artificial Sequence; identical to SEQ ID NO: 6166
  Synthetic

SEQ ID NO: 6168 - protein, 178 aa, Artificial Sequence
  Synthetic
SRAERVKEEIKKLLEEVRKESKRVLKEVKDLTKEVDDKSKKVMRDIRELLKEVEELARTVDKKEIRDRIRKIIERNERMLEELKRDSEESLKRNEDALREVKRLIEEIIERLERALRRGDLDAEEVKKVLREIEETLRKLEEEHRRLSDRDREKLDELAKRHKKVSRDIEEKLKELER

SEQ ID NO: 6169 - protein, 178 aa, Artificial Sequence; identical to SEQ ID NO: 6168
  Synthetic

SEQ ID NO: 6170 - protein, 177 aa, Artificial Sequence
  Synthetic
KEVEDVLDKVKKALEEIRERNKRVNDEIRRLLDEVRRRNEDADREIEEILKRVADEVRDTDLERIIEELKKRVEEVIRRSRRLAEEIKKTIEEAVRRTRKLAEDLKREIDDVLKRVETEELRERIKAVVEEVERVMDELRRSNEKVVREVEDVMRRLEERNRRTLERIEEVLERLKR

SEQ ID NO: 6171 - protein, 177 aa, Artificial Sequence; identical to SEQ ID NO: 6170
  Synthetic

SEQ ID NO: 6172 - protein, 181 aa, Artificial Sequence
  Synthetic
EEVERLLTKVRELVRRIEEENKKANDDSRKSLKEIKDRVEKALDDSRKSLEEIEKIVRRDNIKEKVRELAKRDRDLNREVLKEVRELLKRDEDLNRRVIDKTKKLMEDVERKLKEVLDRVDKEELKRRIETVIKEVRETIEELKKSNEESVRDSERTIRELEEEIKRTVRESEKEIKRLED

SEQ ID NO: 6173 - protein, 181 aa, Artificial Sequence; identical to SEQ ID NO: 6172
  Synthetic

SEQ ID NO: 6174 - protein, 181 aa, Artificial Sequence
  Synthetic
EEVERMADEVRRLNEEVRRRNEESIEEVKRLNDEIRKTNEKSIEDVKELLKRVKEVRERNQDKRRIRELIKRILERDEALVRKSERLAREVNRRDKEVVEESEKLIRDINKRIDEAVKRVDGGDAREKMKRLVEENTKSVEELKKRNEETSRRNTKSVREVTRRNEKTSDDVRRLVREEEQ

SEQ ID NO: 6175 - protein, 181 aa, Artificial Sequence; identical to SEQ ID NO: 6174
  Synthetic

SEQ ID NO: 6176 - protein, 181 aa, Artificial Sequence
  Synthetic
DEVEEAKEKVRRLNKELRRVVKEVEDEVRRLNEEVRREVEKVRDDVRKLRETIREVKARNVDDREIRKLAEEVIRRIRTVIEKIRRLIEEINKRIRRVAEEVKRIAEEINEEIKRVLDRVKSGSLEREIEKISRENTKSLRDLLDRLRRLVEENTKSVEELVRRLEELLERVEEEMRRLET

SEQ ID NO: 6177 - protein, 181 aa, Artificial Sequence; identical to SEQ ID NO: 6176
  Synthetic

SEQ ID NO: 6178 - protein, 177 aa, Artificial Sequence
  Synthetic
SRVETMVKDIRRLLEEVKERVERALRDNERVLEDIRRRVDELLKTNEKINRDIERRVRRGLDRDEIRKLLKESEDSVRRALRDVEELLRKSRETVERVKRLIERLLEEVKRIVETVARESDVEEIKEVLRRVEEEAERLKREIEESLKRSEDLVRKLKERIKRSLEESRKRIKKLED

SEQ ID NO: 6179 - protein, 177 aa, Artificial Sequence; identical to SEQ ID NO: 6178
  Synthetic

SEQ ID NO: 6180 - protein, 177 aa, Artificial Sequence
  Synthetic
SEVEEAVKRIRKIVKEIEERVRRLLEENRRVIEEVERINKEMLKRNKEINKEVEELVRRGEPRKVIEDLVDRSRRSVEESERLNEELVDESRRTVEEIETEIERLREELKRVVDKVREKREVKEIEDILRRAEETVEDLKRRIRRSLEDSRRVVEELAEENRKSLRESKKKVDELKK

SEQ ID NO: 6181 - protein, 177 aa, Artificial Sequence; identical to SEQ ID NO: 6180
  Synthetic

SEQ ID NO: 6182 - protein, 177 aa, Artificial Sequence
  Synthetic
SRVEDFVRRIRDLLRKIEEIARKALKENKDVLREIKRINDEMLRRNEEILKRAEDLVREGRDRTVIERMLEESERSVRDSERLNRELLRKSEETVRKLKKLIDDLLREIEKIVREVARERDVEEIKRILEEAKKTIDELRKEIEKSLREVEKAIRELEERNRRSLERSEDLVRELKR

SEQ ID NO: 6183 - protein, 177 aa, Artificial Sequence; identical to SEQ ID NO: 6182
  Synthetic

SEQ ID NO: 6184 - protein, 177 aa, Artificial Sequence
  Synthetic
RRVEEAVKRIKEILERVTRRVEKVLRDNKRVLDDIRRINEEMLKRNKEINRKVEELVREGRPRKVIKDLLKRSRESVEESERLNRDLLRKSEETVRRALKEIEDALKRIEELVREVERESDVEKIKEILEEVRRTIEELKERIRKSLEEVKELIKRMDEENRKSLEESDERARRAEK

SEQ ID NO: 6185 - protein, 177 aa, Artificial Sequence; identical to SEQ ID NO: 6184
  Synthetic

SEQ ID NO: 6186 - protein, 181 aa, Artificial Sequence
  Synthetic
SELEEIRERVKRVEEELRKNLKDAERRVREAKRRSEESLKDIEKKVKEVRDELKELARRGADRKDIRRIVKEIEKRIRDAAKRNEDIVRRVEEEIKRLVESNRTLADDISRRVKELLDRVTDGSAREDIKRLLKELEELLKRSEDEARRLLKEVRDLVDTTKKRIDKLLKEIEDLLREIER

SEQ ID NO: 6187 - protein, 181 aa, Artificial Sequence; identical to SEQ ID NO: 6186
  Synthetic

SEQ ID NO: 6188 - protein, 180 aa, Artificial Sequence
  Synthetic
KIEEKVEKLVRELLKELETVDREVNERVKRSNEKLEKIDRDVNKLVEDSNRKLKEISDRVKSDEARELIKRVLEESRKLVKEAKDLTKKVLDESEELIRRVLKVSRDVLDKAKKLIEKVLEERDVEKIKRLLEEVKKLVEDSERNIRELLKESRKKVEDSKRNLDRLLKESDDRVDRERR

SEQ ID NO: 6189 - protein, 180 aa, Artificial Sequence; identical to SEQ ID NO: 6188
  Synthetic

SEQ ID NO: 6190 - protein, 180 aa, Artificial Sequence
  Synthetic
ETEKEVEELVKRVLDKDKRISDESEERIRRLMEKNKKILEDVKRLVDEVREKLEDIRRRVKSKEMKDLIERVLEEAKELVTRAKKLDEDSLREVDKLVKDVDRLNERSLEEAERLVREVLRKRDVEKIKKLLEDVRRLIKRSKEKNDELLEELKRLSEETRETLDRLLKDLEDKIREAKK

SEQ ID NO: 6191 - protein, 180 aa, Artificial Sequence; identical to SEQ ID NO: 6190
  Synthetic

SEQ ID NO: 6192 - protein, 173 aa, Artificial Sequence
  Synthetic
DEKEDVDRLLRELEELVERSERSIRKLLEDNRKLAEDLKRTVEKLLEDNRRKVEEVRRTGADERKVDEVLKHSEEVIRRVKEDIDRVLKHSEEVIDRADKLTKAVLKEARDIVREVDSEELRKLIKRVLKKLRDLNRRVKELSRRSAEELKRLLDEVRKLSEDSLRELDKLRK

SEQ ID NO: 6193 - protein, 173 aa, Artificial Sequence; identical to SEQ ID NO: 6192
  Synthetic

SEQ ID NO: 6194 - protein, 173 aa, Artificial Sequence
  Synthetic
DEEKRVRDLLEEVREEVERSDKSIEELLRELEKAVKDSERTIRKLLEDNERMVREVRRKGVDDELVRRVLEHSEKLIREAKRLTDEVLREAKRIITEAKKLTKEVEKKVREIVKKVKSKEAEDLIREILEELKRLNEDVKRLIREVLETLKELNERVKKLVKESNDELRELAR

SEQ ID NO: 6195 - protein, 173 aa, Artificial Sequence; identical to SEQ ID NO: 6194
  Synthetic

SEQ ID NO: 6196 - protein, 173 aa, Artificial Sequence
  Synthetic
REEEKLDKLRKDLEKRVEESKRSIDKLLEDNRRRVEESKKTIEKLLEDNKRRVDEIKKRGVDDELVRRALEHSKKLVDEAKELTKRVLEKSKRIIDRAKELTKRVERKVREIIKKVDSDEAEKLIRDVKKELDRLNEEVKKLSEDSLKELDDLNREVKELMERSNRKLDEDAK

SEQ ID NO: 6197 - protein, 173 aa, Artificial Sequence; identical to SEQ ID NO: 6196
  Synthetic

SEQ ID NO: 6198 - protein, 175 aa, Artificial Sequence
  Synthetic
KEVEDVLREIKKLIKEIHEKSKRALDETRELLERIHRTTRRVLEEIRRLLKEVEELAKAGMDKREVRRRVKEIIDRLREMLERSRKLWKDIEERDKRLLEEVERLWDEIRRELRERAGDKDRVEDLVRELERVVKEDKDRSKESEERIKKLVEDDTREAEKLIRELEKILEDTEK

SEQ ID NO: 6199 - protein, 175 aa, Artificial Sequence; identical to SEQ ID NO: 6198
  Synthetic

SEQ ID NO: 6200 - protein, 175 aa, Artificial Sequence
  Synthetic
SEVEEVLRDIDRLAKEIHKRSRDVLRDIDRLLKEIHERSRRMLERIKRLLDEVRRLVEAGVRKEEIKELIERILRDLKRVVDEVAREWEEVIKKLRKALEESRRLWEEIIKKLEREAGDRDRLRELVERLERLLETDKREIEKLIKKLEEMLEEDERRARELLEDIRRILEEIKK

SEQ ID NO: 6201 - protein, 175 aa, Artificial Sequence; identical to SEQ ID NO: 6200
  Synthetic

SEQ ID NO: 6202 - protein, 175 aa, Artificial Sequence
  Synthetic
SEVEEVTKEIKRLVEEIHKRSREALEETRRLVETIHRDSKRVLDEIERLLEEVRKLAEDGVDKRDIKRLAKEILKRLEDMMRRVTELWKEIIERDRRLLEESKKRWDEVIEELRRKVRDEKRVRDLLEKLREDAKRDEDASRKSEEDIRKVVEEDKREAEKLLKRIEDELRKTEK

SEQ ID NO: 6203 - protein, 175 aa, Artificial Sequence; identical to SEQ ID NO: 6202
  Synthetic

SEQ ID NO: 6204 - protein, 175 aa, Artificial Sequence
  Synthetic
SEVEKVLKDIRDLVKKIHDESKRVLDEIEELVRRINKRSRDALREIRELLRTVTELAKAGLDKREVEKLAKRILERLREVLEESRELWERVIRRLKEAMERVRELWERVIRELRKKVGDKDRVRKLVEDLERMLRRDEAEAEKLIKKLRELLEKDRDDIRRLLEDIKRILDEIRK

SEQ ID NO: 6205 - protein, 175 aa, Artificial Sequence; identical to SEQ ID NO: 6204
  Synthetic

SEQ ID NO: 6206 - protein, 175 aa, Artificial Sequence
  Synthetic
EEVERALDRARRLLERIHETSRDVLRRTEELLRRINEESRRVLKEAKELLDRVEKLVRDGLDKREVRRLIEEIVRRLEKVLKESEDLWREVIRTDKEMLDEVRKLWEEIIERLRREVGDKDRVEKLERELEKVVREDEEESKKSIRRAEEMLRKDREDIRRLLEEIKKILEDIDK

SEQ ID NO: 6207 - protein, 175 aa, Artificial Sequence; identical to SEQ ID NO: 6206
  Synthetic

SEQ ID NO: 6208 - protein, 175 aa, Artificial Sequence
  Synthetic
SEVEDVLRKAEELAKRIHDRSRKALKETEELLERINRDSERVLRESEKLLEDVRRLAEAGVRKEEIKKLAEEILREDKRVLDESKRLWEEILRRDRKLLDEVRRLWEEIIRRLRRELGDEKTVRRLVDKLRRLVEEDTDESRKSEERIKKMVEDDKRESEKSLKRIKDIMKEITD

SEQ ID NO: 6209 - protein, 175 aa, Artificial Sequence; identical to SEQ ID NO: 6208
  Synthetic

SEQ ID NO: 6210 - protein, 176 aa, Artificial Sequence
  Synthetic
SEVERVLEENERTLKRIEETAKKVLEEIEKLSKEVEDRAREVLDRVRRISEEVRRDVRSKEVERIIREIDKESERVLRELEELIKEISRKIEEVLREIERLARESKDRVRKAMKDIDEEMRDRVRKLIKRNDEVLDRVRREIEKLHRRNKKILDDLRREIERLNRENKRLLDELRK

SEQ ID NO: 6211 - protein, 176 aa, Artificial Sequence; identical to SEQ ID NO: 6210
  Synthetic

SEQ ID NO: 6212 - protein, 176 aa, Artificial Sequence
  Synthetic
SEVEEVLKRNEKTLKEIEERAREVEETVRELSERIRKRNEEVNRELEERSKRIRRDVRDKDVERLIRKVDEDSKRTLAETEKLIREVSEVIKRALEEIERLIRDSLEKVKEMMRDVDKEARDRADELLKRNREVLERLRKRIEDLHRDNKRVLDELRRSNEETNRRNRKLLEELRK

SEQ ID NO: 6213 - protein, 176 aa, Artificial Sequence; identical to SEQ ID NO: 6212
  Synthetic

SEQ ID NO: 6214 - protein, 176 aa, Artificial Sequence
  Synthetic
REVEEVLKENEKTLREIERRMEEVLKRVEDLSDEVRRRVDEVLRRVEETSKEIAKRVRGEDVKRLIEDVDRRSREALREVEELIKRIDEVSERALRELEELIKRSLDRLAEVMKDVDEEARKRAKDVLDRNRDVLRRLKDAIDKLNKRNKEILDRLRRKIEDLNRRNEELLRRLEK

SEQ ID NO: 6215 - protein, 176 aa, Artificial Sequence; identical to SEQ ID NO: 6214
  Synthetic

SEQ ID NO: 6216 - protein, 176 aa, Artificial Sequence
  Synthetic
REVEEVLDKNRKTLREIRKRAKEVLDRVEELSRRVREENERVNRELRKISEEIARKVRDKEVEKLIREVDERSKRTLETTERLIREIDERSKKVLDELRKLVKESLELVERAAKDVDEEMKKEADKLLKENRDVLRELERRIEELNERNRRVLKELEESNRRTNEENKRLLDELRR

SEQ ID NO: 6217 - protein, 176 aa, Artificial Sequence; identical to SEQ ID NO: 6216
  Synthetic

SEQ ID NO: 6218 - protein, 176 aa, Artificial Sequence
  Synthetic
DEVETVLDENRRTLKRIRERVDKVLKDVEKLSREVEDEIRRVLEEVEKELKDIERDVRDKDVERLIREIEEKIKRALEKIEELIRRIDERSREALEEVKKLIEDSLKRVEDAMRDVDEDAREKAKRLLEENKRVLKELEERVKRLNDKNRRILERIKKRIEDLRRRVKELLKKLRK

SEQ ID NO: 6219 - protein, 176 aa, Artificial Sequence; identical to SEQ ID NO: 6218
  Synthetic

SEQ ID NO: 6220 - protein, 176 aa, Artificial Sequence
  Synthetic
DEVERVLEENERTLRRVREIIREVLEEVRRLSEEVKRRIDEVLKENEDTLKKIKDEVRSEDVRRLIEESLELVKRVLEEVRRLIEAVDRESERVLKEVEDLARESERLVREVAKDVDKKARDRVREVEKRNRDVLEEVKDEIRKVNKDNRDILRRIKKDVEELLKRNEKVLRETEK

SEQ ID NO: 6221 - protein, 176 aa, Artificial Sequence; identical to SEQ ID NO: 6220
  Synthetic

SEQ ID NO: 6222 - protein, 176 aa, Artificial Sequence
  Synthetic
RELEELLKRNERTLRELAKRVKRLLEENKETVRRIEERLRRVLTEVEKISRDIRDRVDSEDLRRLLEELDKRSKEVVEEIEELLRRSLKRLKEVLDEIRKLVKESLEEIRRAAKDVDEEVRERVKKVEDENRKLLERAEREIKKVAEENRRLMEKMKDDVRKANKRNKELLERRTK

SEQ ID NO: 6223 - protein, 176 aa, Artificial Sequence; identical to SEQ ID NO: 6222
  Synthetic

SEQ ID NO: 6224 - protein, 176 aa, Artificial Sequence
  Synthetic
SEVEKVLRENEKTLREIEREIDRVLRDNERTLKEVRERNEEVNRRVEEDSKRVKDEVRSKKVEEVIKRIDERSKETLRETVERIEESLRRLKKALDDVRDLIRRSLKRVEEAAKDIDEKARERIKRILDENRKVLREIERKIREVLERNKKVLEEVRKSNEETNDRNRKLLEELRR

SEQ ID NO: 6225 - protein, 176 aa, Artificial Sequence; identical to SEQ ID NO: 6224
  Synthetic

SEQ ID NO: 6226 - protein, 183 aa, Artificial Sequence
  Synthetic
SVDERVEDLRRDVERVLRELRKSNEESIRRSEEIVTRLEEELKRNSKEVEEVLKRLEDELKDDEDKLREVRELIERVKKTNEDVLRRVRELIERDEEVNRRSLTETDDLIRRVRKVVEEARRLTSKDLEKALRDVEKLIREIRERNKEMLRRSEEILKEIEKRARDMSRESKRLIEDIERRTK

SEQ ID NO: 6227 - protein, 183 aa, Artificial Sequence; identical to SEQ ID NO: 6226
  Synthetic

SEQ ID NO: 6228 - protein, 183 aa, Artificial Sequence
  Synthetic
SVEEKVDRLKRRVEEVLKELKKSNEDNTREVREALKRLKKAIEESIDRSRKILEDLRRKLKDDEKKLREVEELIKRDEETNRRVLRRVEELIRRVEEFNEESLRRTERLIEEVKKVVDEARRLTDEDLERALKEVEELIRRIREENKEMSERSKKIIRKIEKDVKKALDDSERVLREIAERTK

SEQ ID NO: 6229 - protein, 183 aa, Artificial Sequence; identical to SEQ ID NO: 6228
  Synthetic

SEQ ID NO: 6230 - protein, 183 aa, Artificial Sequence
  Synthetic
DVEKKVKELLDEVRDALRRLRKSNKDNTDEVDRALRELEETNKKSIEDSRRIVEDLKRKLKDDEDVLREVEELIRRDEETNKRSLEEVKDLIKRVRDVNEESLRRTEDLIRRVEEKVKEIERLTDREADKVLKRVKEEIERIERENRRMSEKSERLIREIRKRNKEMLDRSKKLLEDIKRRVT

SEQ ID NO: 6231 - protein, 183 aa, Artificial Sequence; identical to SEQ ID NO: 6230
  Synthetic

SEQ ID NO: 6232 - protein, 180 aa, Artificial Sequence
  Synthetic
KEVEEILTESEDMNRKIDKLVKEILDESEEMNRRIRELVKRIVEELRELLREIRRLAEERDKDDVLRRLKELLKEIKEKARKVIDELRRLSEEIKKKIDDVLDELRRASEEVERKIREDKNEEVRDRLRRSHEKNKEVLDRIRKRVKESHEKNEKSLREIEETVKKLERDVERLLREIKR

SEQ ID NO: 6233 - protein, 180 aa, Artificial Sequence; identical to SEQ ID NO: 6232
  Synthetic

SEQ ID NO: 6234 - protein, 180 aa, Artificial Sequence
  Synthetic
EEVERILKESRDANERIKKLVEDILRRSKELNERIRDEVRKILAKSEEVNRRIRRLAKERDKEEVLRRLEEMSKKVKKEIDEVIEKLERLSEEIRRRIEEVLERLKRMSEEALEKIKEDKNEEVKEKAKESHKENKKVLDRIKRELEKSHEENKKSLDEIRDRVRRSHEKNRKVLEEIRK

SEQ ID NO: 6235 - protein, 180 aa, Artificial Sequence; identical to SEQ ID NO: 6234
  Synthetic

SEQ ID NO: 6236 - protein, 180 aa, Artificial Sequence
  Synthetic
EEVERILKESEDMNRRIRDLVRRIAEESDKVNREIRKLVDEIRRKLDRVLREIEDLIRKRDKEEVLRRLRKLLEEAKEEIERVLKRLEDASREVAKKIRDVLEELRKMSEEVLEKVKEDKNEEVKKRAEKSHRENEKSLREIRKELEELHRKNKKSLEEIRKTLRKLEEKVRKLLEDLRR

SEQ ID NO: 6237 - protein, 180 aa, Artificial Sequence; identical to SEQ ID NO: 6236
  Synthetic

SEQ ID NO: 6238 - protein, 180 aa, Artificial Sequence
  Synthetic
SRVEEILRESKRMNDEIREKVKKILKTSRDMNKRIEDRVREILKKSEDLNRKIRKLIDDRDKKEVVDTLRELSKEIEKEAREVIEELERISKEVHDRAREVIKELEEISDDVRRKAERDDKEEAKRELEKSHKTNEKVLRDIERRVEDSNRENEDSLRKIERAVTESHRRNEEVLERLER

SEQ ID NO: 6239 - protein, 180 aa, Artificial Sequence; identical to SEQ ID NO: 6238
  Synthetic

SEQ ID NO: 6240 - protein, 180 aa, Artificial Sequence
  Synthetic
EEVERILEESKRLNDEIRRKVDEILRKSEEINERVRRLVEKIRTDLERVLEEIRDLADKRDKDEVLKRLEDALKEALDRARKVIRELEEMSKEIEDEIRKVLEELERLSREVERKLREDDKEEVKRRLEESHKDNDRVLKEIERRVRESLRRNRESLRRIDEKVKELERRVEKLLREIKK

SEQ ID NO: 6241 - protein, 180 aa, Artificial Sequence; identical to SEQ ID NO: 6240
  Synthetic

SEQ ID NO: 6242 - protein, 180 aa, Artificial Sequence
  Synthetic
EEVERILDESKKMNDDIRRKVKEILDESEKLNEDIRRLVKEILEKSKRVNDRIRKLAKDRDKEDVLRELKKMSEDVLDDARKVLETLKKLSEDVRRKIREVLKELEKASREVERKVREDKNDEVRRRAEKSVRENDKSLKEIEDEVRRSVEKNEESLKRIEDEVRKSHEKNKKVLDEIKK

SEQ ID NO: 6243 - protein, 180 aa, Artificial Sequence; identical to SEQ ID NO: 6242
  Synthetic

SEQ ID NO: 6244 - protein, 180 aa, Artificial Sequence
  Synthetic
SKAEEVLKEIRERIERIRKRAEDVLRHDEESLKRAEEVNRKMEKESRRINEEIRDRVRKEGGRDKEKVDRLLEELHRVDEESIRIVERLLEHNRKSTEDIKDEVRKLLERLKEVIDEVRRAGVDEKDVRKVEDDIRRVIKKLKEELDRSADKSRDVVRRLRDSNKKLNDKNRRDIEEIKK

SEQ ID NO: 6245 - protein, 180 aa, Artificial Sequence; identical to SEQ ID NO: 6244
  Synthetic

SEQ ID NO: 6246 - protein, 180 aa, Artificial Sequence
  Synthetic
DSEEEVRERIRKIIEDVKRIIEEVLRRDDKILKEIEKRNRDMLKRSKEINKEARDRVREAGNRLKEEIRKLIKELHDVDRESIKRVEDLIREVRKSSDKAEEEVRRMLKRLKDVVDTVRKAGVDDRSVRELERRIKEVIDELRELVERSKRKVDKLLKDLTRSNEKVNRENREDLERLEK

SEQ ID NO: 6247 - protein, 180 aa, Artificial Sequence; identical to SEQ ID NO: 6246
  Synthetic

SEQ ID NO: 6248 - protein, 174 aa, Artificial Sequence
  Synthetic
DDERRAKKAAEDAAKRLKEIAEKAHRISEKALEELKRINDDANKISEDALRRLEKLKKEGAPEEAAERAARDSLRLIREAAERSREAAERSLRLIEEAAKEAEDAARDALEIIKTLAKSEEAKELAKKIKEIADEARKRAEDNARTNKEAAERSKENADRNAEENKKAAEKAKR

SEQ ID NO: 6249 - protein, 174 aa, Artificial Sequence; identical to SEQ ID NO: 6248
  Synthetic

SEQ ID NO: 6250 - protein, 174 aa, Artificial Sequence
  Synthetic
KDEDEVRRRVEELLKRNKELVEEIHKLSEDALRDLERINEEVNRISDEMRRRLDKLKKDGIPEEVLEDVVRRSLELIERLLRESRKVAEDSLRTIKEMLKRSEDIVRRVLEEIDRKIKSEEAKKLKERVDRSLKESEKEVRENLERNRKLLDESRRNAEENLRENKRVLDELRR

SEQ ID NO: 6251 - protein, 174 aa, Artificial Sequence; identical to SEQ ID NO: 6250
  Synthetic

SEQ ID NO: 6252 - protein, 174 aa, Artificial Sequence
  Synthetic
SEEDEVRERVKRVLDELRKINEDLNRISREMLERNKDILRRIHEISKRALDKLKKLKEDGVPEDDLRRVVEDSLRLIKEALERSERLVRTSLKLIKDMLRRSEEVARRILDDIRKRLKSEEVRKLLEEVKDSLRKSEENARRNLDENRRSLKKSEDEVRRNLEENEDTLRKLEK

SEQ ID NO: 6253 - protein, 174 aa, Artificial Sequence; identical to SEQ ID NO: 6252
  Synthetic

SEQ ID NO: 6254 - protein, 182 aa, Artificial Sequence
  Synthetic
DEMDEVRRTIKKLDKDSRDKVRTVEEKIRRLDEESRRENEEIVRKIEELLEEIERRVRSSTDERVLRELVRRLKEVLDRVEKDSRETIKKNKRALDKARREIEEILKENEKALDDAKKVVDELNIDEKEVKKIKEESDESLKEIEKLLREIEEESKRSLREMEKTLEDIERRVRRVLEEIKR

SEQ ID NO: 6255 - protein, 182 aa, Artificial Sequence; identical to SEQ ID NO: 6254
  Synthetic

SEQ ID NO: 6256 - protein, 181 aa, Artificial Sequence
  Synthetic
SIEELAKRNEEENEKAAEDVERLAEEVKERAERVARESEKLAREAEKEAERVAREIRRDRSDDKDAARLVEEAAKEARRAAEESARLIEEAAKKAEKAAEDVKREIKKTAEDLKRAADKAETEEAAKRASEENRKAVRDAREKARRAAEEAKKLLDEARKHSEEAAKRAKELLEEAKKRAD

SEQ ID NO: 6257 - protein, 181 aa, Artificial Sequence; identical to SEQ ID NO: 6256
  Synthetic

SEQ ID NO: 6258 - protein, 181 aa, Artificial Sequence
  Synthetic
KIEELMKRNEKENREVLERVKELADRNRRENEEVVKKSKKELDDLKRKIEEVLERIKRERKEMKEVEKLVREVLKRIEDLIRESVDRIRRTVEELEEVAKDVERKIRETIRRLRELAKRLETEEVVEKVSRENKKLVADIEDEVRRASTRNKKLVKDIEKHSEDVVRELEKLLKDIKDKVD

SEQ ID NO: 6259 - protein, 181 aa, Artificial Sequence; identical to SEQ ID NO: 6258
  Synthetic

SEQ ID NO: 6260 - protein, 181 aa, Artificial Sequence
  Synthetic
SIEDEARRNEKRNREVLKRSKDLLDEIARKIEEVEKRIRDLVKRVKEEIDEVLRRIKRERPDLKDVIELVKRVAKTARDMIEKLEDELRKILEEVTKLIEESEKRIKETVDRLKEAVKNIEDDELLRRVSKENEDLVREIEDHTRRVLETIERKLRRVEEKVETVVREIKRRLEDIERRVK

SEQ ID NO: 6261 - protein, 181 aa, Artificial Sequence; identical to SEQ ID NO: 6260
  Synthetic

SEQ ID NO: 6262 - protein, 174 aa, Artificial Sequence
  Synthetic
EEVDRVIERIKRLLEEVERKIRRASEKNRRLIEKSRKELEKVSKENKDLIDRVRELRDAGVDKREIKDLLRRISEEMKKVIDELKRSNEKVSEELRRMLKEIREDLKRIVDEARERVKGEKVKTVEKEIREVIERADEIIERNERENKKSVEEIEEILERNKRRNEEALREVDK

SEQ ID NO: 6263 - protein, 174 aa, Artificial Sequence; identical to SEQ ID NO: 6262
  Synthetic

SEQ ID NO: 6264 - protein, 170 aa, Artificial Sequence
  Synthetic
DELDRAIEEVKRLLDEIRRRLEKVVREVRKLNEEIREDLRRVVEEVRRTNKEIRDRVRSEEARRLAEESLRLLEEALERIRRLIERSLRRIRRLLEEIEKLARDILEEIRRIIDSDKVRRLEREVEELLKTVEELIRRLEEHTRRVLKEVDEEIKRLKEHTEKVLRDVEK

SEQ ID NO: 6265 - protein, 170 aa, Artificial Sequence; identical to SEQ ID NO: 6264
  Synthetic

SEQ ID NO: 6266 - protein, 187 aa, Artificial Sequence
  Synthetic
SAEELVKELERRIEELLKELEEIVRRNRKHSEDVLRKIKELVRDVLRRVKEALKDLTKKVRTREVRKLVEELIERLEELIERIDRTAERLITESRRTLEEIRRRIKELIDDLRRLLREIKKEVDRGLDEDVVRKLIKEIDDRLKEVKKEVEKLSDENRRLNEDVERRIKELLDDIERLLKEIRDTVT

SEQ ID NO: 6267 - protein, 187 aa, Artificial Sequence; identical to SEQ ID NO: 6266
  Synthetic

SEQ ID NO: 6268 - protein, 187 aa, Artificial Sequence
  Synthetic
DVEDIVRRIRERVKEALERLRKTNDDNRKHSEEVLRKLAESDKRTMERIERVLEELRRRSRTREVTKLVEDAIEKLRRRVRESHERVKRLFEDSKRTVDESLERVERAIEELKRVIDEVEELARRGLPKEVVREMKRKIEELLKRIEDENKRLSDENRELNKRVEEDNRRLNKEIEDELRKVEEDVK

SEQ ID NO: 6269 - protein, 187 aa, Artificial Sequence; identical to SEQ ID NO: 6268
  Synthetic

SEQ ID NO: 6270 - protein, 187 aa, Artificial Sequence
  Synthetic
DLEELVKELEKRIEDVLRTLRKTNKDNEKAVEESLRKLEDELRKLKEKIDRLLDKLTKESRTEEVEKLVRELIRELREVVRRIEELIRDMARRSKESVETSLELVERLIKKLEELLRRVLELVAKGLPEEVVRRIIEDIRRLLEEVKKVNEDLSEENERLNRDAERRVREAIKEVEDLLDEIEKTVR

SEQ ID NO: 6271 - protein, 187 aa, Artificial Sequence; identical to SEQ ID NO: 6270
  Synthetic

SEQ ID NO: 6272 - protein, 187 aa, Artificial Sequence
  Synthetic
SVEDELRKLEEKIRRLLEELRRTNDENRRHSEKVLEELRRELEKLKRRIEELLRKLREESRTREVTKLVEDLIRKLRELVERIEREVEKLVRDSRRTVEESDKLVKDVIKRLRELVREILKLAREGRPEEVVERLIRDVERKLREVKKENDRASKENEDLNREVKRRAEKLLRDVERLLREVEKTVK

SEQ ID NO: 6273 - protein, 187 aa, Artificial Sequence; identical to SEQ ID NO: 6272
  Synthetic

SEQ ID NO: 6274 - protein, 187 aa, Artificial Sequence
  Synthetic
SAEDRLRELEERIRRALKELEDTNRRNEEHSKKLLEELARSDRETEEEIKEALKRLTERKRDEEVEREIKEMIRDLERVVRESHRTVRELVKESERTVKESLERVKRAIDELRRIVEEIRKLIEEGLPEEVVDRLIREVEERLRDVRRLNEELSKRNKELNDRVREVNEELNRRIKKRLEEIKRRVE

SEQ ID NO: 6275 - protein, 187 aa, Artificial Sequence; identical to SEQ ID NO: 6274
  Synthetic

SEQ ID NO: 6276 - protein, 187 aa, Artificial Sequence
  Synthetic
SLEDLVRTIREEIERLMKEAEDTNRRNKEESEESLRRLKKLVEDIDREVKEVLDRAEKNTRTDEVREKVRRMIESLRRDIEEIRKRIEEAVKKSEDVVRKSLEEVRRAVKRLRDLVDKILELVEKGLPEKVVEELIRRIKDELKKIRERNKELSDRDKKLNEDVEREVRKLIDEIRKKLEDVERTVK

SEQ ID NO: 6277 - protein, 187 aa, Artificial Sequence; identical to SEQ ID NO: 6276
  Synthetic

SEQ ID NO: 6278 - protein, 180 aa, Artificial Sequence
  Synthetic
REVDKVREDVKRLIKEIEDRVRKVLKEDEDLIRELRERVKKVSKENKEVVKTLRELVRDLRGKRERIREVIKRADELLERAEKEVRKVIDDLRKTTEDALRDLERIIREAKKTVDDVLRRRGIREELVKELEKRIREVLERLRRLIERSKEEIDRVLREVEEDVRRNKEENKRLLEEAER

SEQ ID NO: 6279 - protein, 180 aa, Artificial Sequence; identical to SEQ ID NO: 6278
  Synthetic

SEQ ID NO: 6280 - protein, 178 aa, Artificial Sequence
  Synthetic
DEKDKVRKTVEDILREIEKIVEDLVRRNERVDREIRERVRELLRRDDEILKRMEEVKRRRAPEEVLEEIAERLRRSSEEVLKLIRELIRRLKETVKDAERLIRELIKRLAEVVDTARKEGVEEREVTKLKEDIDRLLEKLERDLDELRKRNDELLKELEDRVRKSKEKVEKILRDVRR

SEQ ID NO: 6281 - protein, 178 aa, Artificial Sequence; identical to SEQ ID NO: 6280
  Synthetic

SEQ ID NO: 6282 - protein, 181 aa, Artificial Sequence
  Synthetic
SIEDKLRELKERHKELSKRIKEELERLTEEHRRVSEKIRKSLEEDKRRADKVLERIRRERSDSEKLVRDLEKVLRDVERLYREVIKRNEEALDRVRRLVEEIIERNERMLRKVEELARRIKTEDVLRKVEEDSREVLKDSKRLLDEVATRSEEMLRRSEELLKRIHETSKKVLDEIKTKLK

SEQ ID NO: 6283 - protein, 181 aa, Artificial Sequence; identical to SEQ ID NO: 6282
  Synthetic

SEQ ID NO: 6284 - protein, 181 aa, Artificial Sequence
  Synthetic
SIEDLARDLERRHKELSEDDKRKLDELRKRHKDVSDEARRSLERDERRVEKVEREITKRRSDDKDVVTELRKVLEEIRRLYETVVRDNERVLRDIERLSRRTIEENKKVLDELRELARRIKTEKVLDDVRRRSDKMLEDSRRLTREVEETSKEMLERSRRLLEEIHKESDRVLREARERDR

SEQ ID NO: 6285 - protein, 181 aa, Artificial Sequence; identical to SEQ ID NO: 6284
  Synthetic

SEQ ID NO: 6286 - protein, 177 aa, Artificial Sequence
  Synthetic
RIEDILRRLEEHHRRLDKENKEILERLKKHHEEVLRKIKEILERLEREARDIERKIRELEEVLRKIREILERVKELADRLLEEVERSLREVEKLIRTSSDLIRRSLETVKRAAERLETDEVVEKVVREVEDTNEKIRRRSDEVRKEVEDTNRRIDKRLKEVEEEVRRLLDEVRKESE

SEQ ID NO: 6287 - protein, 177 aa, Artificial Sequence; identical to SEQ ID NO: 6286
  Synthetic

SEQ ID NO: 6288 - protein, 175 aa, Artificial Sequence
  Synthetic
SELEDVAKKAEDLLTKSAEILKEVVDRHRRLNERSEDEARRVEEEHRRTNKKLLDLARRGDRDKEEVKRIIERSLDRVREVFKRVKRLNDESLKEVERVIEEVRRLNEEILKTVERDVDSEELRKLKKRIEDISREHERILRELREHVERVSDKHRKILKELEEDVERILREVTK

SEQ ID NO: 6289 - protein, 175 aa, Artificial Sequence; identical to SEQ ID NO: 6288
  Synthetic

SEQ ID NO: 6290 - protein, 175 aa, Artificial Sequence
  Synthetic
SEIEKVVEDIKRLLEESKDRLRKAEEEVRDLSRRSREKLRRAEEDIKRLLDEIERMLRAGERDKKEVEDIIKEIVDKVRTVATDVERLNKEILERVDRLIEELRRLNEEILDRVRKDIDSDELRKLAEEIERVSEEHKRILDELRDHLRKNTKDVRDILRELEKEAERLLRELRR

SEQ ID NO: 6291 - protein, 175 aa, Artificial Sequence; identical to SEQ ID NO: 6290
  Synthetic

SEQ ID NO: 6292 - protein, 175 aa, Artificial Sequence
  Synthetic
KDVEDVLKRVKDVNREVEKRLEKVIRDDEKINEEINRRLDEMAERVKRVNETVEDIARKENIREKLEELIKESEDTIRKVLREVEELVRELRKTVDDALEEARDLVRKSEELIERIVRKEKLVEELRRESDTSKKRVEKLIRELKEKNKRSEERARRIIEKLKKESKDSLKRVKD

SEQ ID NO: 6293 - protein, 175 aa, Artificial Sequence; identical to SEQ ID NO: 6292
  Synthetic

SEQ ID NO: 6294 - protein, 174 aa, Artificial Sequence
  Synthetic
EEKEILDELEKEVRDLNRKNKEILRRLEETARDLHRRNEEILDRIRKRVEELKRRVREVRELLDEIRRILEEIKRLIEAVSRKIKKVLDDVRRLIKEVDDKSRDVLRRVERLIRQNVDKDTVAKEAKRLIRDLERLSREIEERVRRLIEEVKEESERIRERVTRLIKEVEDRRK

SEQ ID NO: 6295 - protein, 174 aa, Artificial Sequence; identical to SEQ ID NO: 6294
  Synthetic

SEQ ID NO: 6296 - protein, 174 aa, Artificial Sequence
  Synthetic
DDEEILKELEERVKKLHEKNKRILEKLKREVERLNDENRRILKEVKEDVDRLLKEVKEDKDLLEEIKRALERIERLMREVDKRSREALERVKDLIRKVSRRIEEALEEVRKLITQNVDSETVARRVEEMIKEVEELSKEIEERAKRLIDRLRELSKRILEELKRLLEEVREKRR

SEQ ID NO: 6297 - protein, 174 aa, Artificial Sequence; identical to SEQ ID NO: 6296
  Synthetic

SEQ ID NO: 6298 - protein, 174 aa, Artificial Sequence
  Synthetic
REEDEVLEDARRLSEESRKKLREVERRAKELSDRSRKRLRDVKRRVDDALRKIEDLRRRGVDKRDVLRVVEKVRDDVEKLIREVKDLNRRILEEVRRLIKEVEDLNKEVLDKVRRELKSEKLRELEEEIRRNSKDVKEVMKELDKHIKRNSEEVDKVLKELEERLKRLLDRVRK

SEQ ID NO: 6299 - protein, 174 aa, Artificial Sequence; identical to SEQ ID NO: 6298
  Synthetic

SEQ ID NO: 6300 - protein, 174 aa, Artificial Sequence
  Synthetic
SDEDRVKDKAEELSRRSREELERVKEEAKRLSDESKKRLEEVTRRIEKVLREIRELRERGVDKREVKRVVDEVVDTVRKLIKEVEDLNREVVERIKELIKEVERLNKEVLDEVERELKSEKLRRLREEIKKNSDEVKKVLRRLEENLRDNTRRVREVLERLEDEARKLLKDVKK

SEQ ID NO: 6301 - protein, 174 aa, Artificial Sequence; identical to SEQ ID NO: 6300
  Synthetic

SEQ ID NO: 6302 - protein, 174 aa, Artificial Sequence
  Synthetic
SEVDDVLRRLKELSERSEKTLEDIRDEAEKLSKESEDLLREVLRRSEKVNEDIRRLREKGVDKRDVAKVVEDALRESEDLIRKVEKRNEEVLRRVEELIKRVEDLNREILRRVDEELKSRRLEKLRREIEDNSRRVREVLKRLKENIKRNTDRVREALKRLEREHEEVLREVET

SEQ ID NO: 6303 - protein, 174 aa, Artificial Sequence; identical to SEQ ID NO: 6302
  Synthetic

SEQ ID NO: 6304 - protein, 183 aa, Artificial Sequence
  Synthetic
SIEEAITRLRKEVEDSNKRSEDVIRELHERDKESLEEVREIIKRLKDKVRTLLEEVDKRVKSERLERVRRLLERVDRVVDKVLRELKKLVEDSNELVKKVATESHKINEDIKKVVDDAARRIETEEILKEVLKRLRKLLEDNERVLDEARRRVEKTNEEIKEVLKRVAEEVDRLIKEVREEVE

SEQ ID NO: 6305 - protein, 183 aa, Artificial Sequence; identical to SEQ ID NO: 6304
  Synthetic

SEQ ID NO: 6306 - protein, 184 aa, Artificial Sequence
  Synthetic
SIDEIIEELRRRIEELRKEAEKIIRDSKKHLEDNKRDADRVIKESKEEVDKLLKEIEEAPISEELLRRVRDVIRRIEESTKKALEDIKRTIDEIKKSTDDALRTVREVIKRIRDLVDDVRKRIRTEELLEEVRKRIEDLLRELRDILRKLLERDKRLSKESERLVREMLREDRRLLDELRKEVK

SEQ ID NO: 6307 - protein, 184 aa, Artificial Sequence; identical to SEQ ID NO: 6306
  Synthetic

SEQ ID NO: 6308 - protein, 184 aa, Artificial Sequence
  Synthetic
SIEEIIRDLRRHIKENAEEAEKVIKESEDHLRENKKRAEDVIRRLEEELRKLAERVRRAPISEELLRRLEELIEELEKLVRDALRAIEKTIKDIEDSTRRVLEKIKETVKRLKELVDEASRRIRDEELLKRAVDAVRKLSEDSKRLVEEALRRDEELSKRSRDLVEEVRRRAEELLRRIEETVK

SEQ ID NO: 6309 - protein, 184 aa, Artificial Sequence; identical to SEQ ID NO: 6308
  Synthetic

SEQ ID NO: 6310 - protein, 178 aa, Artificial Sequence
  Synthetic
SSKDDVRRRMKEINERDKRLLDEVLRRLEKLIEELKRHTEEVERDADRIIEEIERMLRNGASEETAKRLLEELREKLEDVRRRDEKILEDIRRDVERALRESEKSLDELRRALEKVKDDGSVEERIIKEIRDLIRENEERNKEIVRRIEELLRELEKRSRDVIKRIREKLDRLRKRVE

SEQ ID NO: 6311 - protein, 178 aa, Artificial Sequence; identical to SEQ ID NO: 6310
  Synthetic

SEQ ID NO: 6312 - protein, 178 aa, Artificial Sequence
  Synthetic
SKVEEIERRIREEVTRSEKEDRDNVREIRKLVEELRRESKRILDESRRLVKRLIDEAKDLEELIRRIREMLKRSEENNKRIIDDLTRALEELEREHRENNKRLRELLRELEEKAKRIKDDEILKRIEEEVRKILEDSRRSTEESHEKVRRIITKIRKLLEDDERRNRKVVREAEEAMR

SEQ ID NO: 6313 - protein, 178 aa, Artificial Sequence; identical to SEQ ID NO: 6312
  Synthetic

SEQ ID NO: 6314 - protein, 178 aa, Artificial Sequence
  Synthetic
SKLEELLRRAREVARRLKEELERILKEVEDRVRKSEKEDEDNVKRITDEMRKLKERVPDLKELLDRIDEMLERLRKLHEDNNKRLRDEIKKLEDVVEEILRRLEKVLRELEEKVARVKEDRVIKRIEEDVRRVIEEIKRLLRELEEEIRRILDESRESTERSHRTARKIVEEVERAAK

SEQ ID NO: 6315 - protein, 178 aa, Artificial Sequence; identical to SEQ ID NO: 6314
  Synthetic

SEQ ID NO: 6316 - protein, 178 aa, Artificial Sequence
  Synthetic
SKMETIERRVEEAIRESEELNERDEERVKKVIDELKKLIDDIRRRLEEALRELKKVTDDGSPREDIDRKIKTVLRELEELIKRIRERIKEILRENEKTVRDDRRRNEELRAELKKLVDEGAVTEEILKKVRELIEETKRRTDDLHKKVKERVDDIKRRLDELLEEAKRALDEIRERVK

SEQ ID NO: 6317 - protein, 178 aa, Artificial Sequence; identical to SEQ ID NO: 6316
  Synthetic

SEQ ID NO: 6318 - protein, 178 aa, Artificial Sequence
  Synthetic
SAVEEIKRRLEEIIRDLERLIDDDRKRVEEMVKRIEDLIKKDEEDVREALKKLEEVVTRGEPREDIKRKIRELLARNRDTLRRIKEELEKILEENKESVREIEKKIEDAKRELRKLVEDGVLEEEILERADRLVKEIKEKLDRLVKTSEELIRRLEEELRRLHEKVKELMKRAEEKVR

SEQ ID NO: 6319 - protein, 178 aa, Artificial Sequence; identical to SEQ ID NO: 6318
  Synthetic

SEQ ID NO: 6320 - protein, 181 aa, Artificial Sequence
  Synthetic
SREDVLREIRRLVEETKKENEKILERLRRLVRTVERRNDEVVKKVRTLVKRLEEEIDKTVKDKDKVEKLRRELDKIRRKLEELARRSKEDLKRILEEVDRLSEEDKRKNDRVLEEAKKAIDNDVDLDELLRKLKEDLDRSKEELKEIEKRVRELLERNKRKTEEVEKEVKRDLDDIRRKLK

SEQ ID NO: 6321 - protein, 181 aa, Artificial Sequence; identical to SEQ ID NO: 6320
  Synthetic

SEQ ID NO: 6322 - protein, 181 aa, Artificial Sequence
  Synthetic
SEKEALDEVRKRVEDVRRDNKRILEESERLNRESRKRNRDILERLRKEAEDLKREIDETVKDKDKVKELDDRLKKVLKEVEDLVRESERDLERIHKRSRDLVRESERDLDRIEKEIKDAADRDVDLDKLLEDLERLLKENLDRLRKILEEDRRLNKENNDKLKEIEKRVRELLKDIKDKLK

SEQ ID NO: 6323 - protein, 181 aa, Artificial Sequence; identical to SEQ ID NO: 6322
  Synthetic

SEQ ID NO: 6324 - protein, 178 aa, Artificial Sequence
  Synthetic
KEVEDVLRKIRDLVRKNLEDAERVVEEAKRLIDENRERLREVLREDEELNREILKRLRELKDEDALRDLERKLKEVHDRTKKLIEDSERHLEEVLRKVEKVIKDSEKHLREVLDEVEKAGLDEEALKEVRRLIDELRKANKRILEEIRDLVRRLREENEEILRRLKRKNERTADEIRK

SEQ ID NO: 6325 - protein, 178 aa, Artificial Sequence; identical to SEQ ID NO: 6324
  Synthetic

SEQ ID NO: 6326 - protein, 178 aa, Artificial Sequence
  Synthetic
SEVEDVLRRIRELLEEIKRRLEDVRRRIKELLDRNRRESEDVLRRDKELNDEVRDKLRKRKDEKVLEELEREIKKIHDDTKRAVDRSREDNKRILDEVERAIEELERELERVLDEARKAGVEERMLKTVEDLVREVSKEVRRILEELRDEVRKSEEENRRILDKLEKENRKTAEDVKR

SEQ ID NO: 6327 - protein, 178 aa, Artificial Sequence; identical to SEQ ID NO: 6326
  Synthetic

SEQ ID NO: 6328 - protein, 178 aa, Artificial Sequence
  Synthetic
SEVEEVLRRIKELLDRNREELKKVRERIKRLLDRNREKSEEVRERDKRLNDEIKKRLDEDKDEKVLRKLKRLLEEVHKRTKEMADRSREDNKRILDEVEDVARRSKEDNERILKEAEEAGVEKRVLEEARRLVKKSEEDNRRILKELRELVKESERENEEILRELKKLNEDTKKRIED

SEQ ID NO: 6329 - protein, 178 aa, Artificial Sequence; identical to SEQ ID NO: 6328
  Synthetic

SEQ ID NO: 6330 - protein, 178 aa, Artificial Sequence
  Synthetic
DEVEEVLRKIEELIRENIKRAREVLEEDKRLNERNKRESEKVLEEDERLNREIEKELRKLKDEEVLRRLKEKIDEVHKRTREMFERSRDDNRRIHEKTRRAIEKSREDNKRILDEVRKAGLDEEVLRRIKKLIEESMEDNERILRDAERLNRESKERNERILKRLKKRNDETRKEVEK

SEQ ID NO: 6331 - protein, 178 aa, Artificial Sequence; identical to SEQ ID NO: 6330
  Synthetic

SEQ ID NO: 6332 - protein, 179 aa, Artificial Sequence
  Synthetic
SSAEEVKERSKRINEEIEKTLEKMLRESRRTNEEIKKTLKRLAEEAEKLLRDVERLVRAGVPKEDLKRLLKEIKERVEKLLRELEELIKRDNDRVEKALKDLRDLIKDDTDKVEDVRRRGDLDEDIIREIRELNKRTRDKIEEIIERIRKLNKETRDRIRKIMREIEKKIRDLAEEIRR

SEQ ID NO: 6333 - protein, 179 aa, Artificial Sequence; identical to SEQ ID NO: 6332
  Synthetic

SEQ ID NO: 6334 - protein, 179 aa, Artificial Sequence
  Synthetic
KSMEEARKKSKEINDRILDRLKKVLEESRKINKDIKDTVERLRERSEDINRRIKELVDSGRDKKDLRRLIEDDNTKVRKALEDLRELIRRDNERVKKVLRELRELIKRDTEEVEDVLRRGDLSEEIIKEIRKLNEETRKEIERIAREAEELNKRTADKIETIIREIEKLNKKLKDDIEK

SEQ ID NO: 6335 - protein, 179 aa, Artificial Sequence; identical to SEQ ID NO: 6334
  Synthetic

SEQ ID NO: 6336 - protein, 176 aa, Artificial Sequence
  Synthetic
DEVRELVKEIEELIERIERTLRKMTKDSRDLNRKINEKLKKVLEDSRRLNEEIKRTIDSNPEKKERARELLERDEELIRRVREELKRLLEEDNERIKEAEDRLARLLEEIERRIREIDVDESILRRLEKLLEELRKRVEDIIRELEKLNKESREEIDKIIREAERLTEETERRARK

SEQ ID NO: 6337 - protein, 176 aa, Artificial Sequence; identical to SEQ ID NO: 6336
  Synthetic

SEQ ID NO: 6338 - protein, 178 aa, Artificial Sequence
  Synthetic
DEMEELLERIRRLIREIDERLKEMLKRSRELNRELNERNKDVLRRIKELIDRIRRLIERDNDKKLVERLLEELERVIREDHKRVRKLLDENRKLSKELEDEARRLLKELEEVIDRVRRAGADERILRELKKLVDDLRRRIKKILDESKELLERSEKKADESNKELRKLVEELRKEADD

SEQ ID NO: 6339 - protein, 178 aa, Artificial Sequence; identical to SEQ ID NO: 6338
  Synthetic

SEQ ID NO: 6340 - protein, 178 aa, Artificial Sequence
  Synthetic
SRVEEIERRIRELIKRIEDRNRKMLETSRRLNEDINRRLRELLERIRKLIEEIEELIKRDNDKDTARKLLKEIEDLIRRLSEEAKELLDENRRLSEKDHREARRLLKEIEDLIRRAEEDGVDEKILRDLEELLKELARRLERSNEESRRLLEDSRRKMEKIIRELEKLLDDLRRKIEK

SEQ ID NO: 6341 - protein, 178 aa, Artificial Sequence; identical to SEQ ID NO: 6340
  Synthetic

SEQ ID NO: 6342 - protein, 177 aa, Artificial Sequence
  Synthetic
DEKEIDEEIERLVRDSKRRSRKVLRDIEELAKRVKEENDRVLEKLRKLIEDLKRKIDETIEDKDTVKRLTEKLETALRELEELSKENRRRLEEITKRVRELVRRDEEKNRDVERRVKEIPVSERLKEEVDRVIADSRRLNKEILDEVKRELDKLRKHLEDVLRRAEKMIRDIDEELR

SEQ ID NO: 6343 - protein, 177 aa, Artificial Sequence; identical to SEQ ID NO: 6342
  Synthetic

SEQ ID NO: 6344 - protein, 175 aa, Artificial Sequence
  Synthetic
SEVDKVREDVERLSARSEEKVREVLERVKRLLDKSKRDNEDVKRRVRELAERLRDLRRKGVPKEELKKRLEDIRREVEDLARRDKEKNKKILDEAEDLVKKLRDDNRRVEREVERAGIDKEVLDRIRRRIEENSKKIDDMVKKVRTLVKRSEEESERVLKELRDLMRDVERRIRE

SEQ ID NO: 6345 - protein, 175 aa, Artificial Sequence; identical to SEQ ID NO: 6344
  Synthetic

SEQ ID NO: 6346 - protein, 177 aa, Artificial Sequence
  Synthetic
SEVERVEKEIRDLSRKSNEDLKRILDEARELSKKSNEDTKRVLKETRDLLKEIADRLREVRDKRLKDRLREDLRRILERHKKLSEEDKRKNDEVLRDLRRKLEELKRRNEKVRDDVEKKGLDEEVKKRVEESLRENEKLLRTIAKEIEDLVRENRKVNEDVNREVEKLVRELEERIK

SEQ ID NO: 6347 - protein, 177 aa, Artificial Sequence; identical to SEQ ID NO: 6346
  Synthetic

SEQ ID NO: 6348 - protein, 183 aa, Artificial Sequence
  Synthetic
REVEELLKRIRELVKRNNEKTKRLLDESRRLNEEANRRLDKVLKELRDLAKRIKEELDEKGGEDERAKKRVEDMLRRLEELLREATKDSERMLKENRELVDRIREEDKRVLEELDKLVKEILERNKEDEDLEREVKKLLDENRESSERVIRESEKSLRDHAERTRKVREEIRKLLEELKRAVE

SEQ ID NO: 6349 - protein, 183 aa, Artificial Sequence; identical to SEQ ID NO: 6348
  Synthetic

SEQ ID NO: 6350 - protein, 174 aa, Artificial Sequence
  Synthetic
SEKEDIKRKLDDLLRRHREVSRESNRELKRLLEEHRRTSKRLDDEIKRLLREIEEAGASEELRRELEEIVTEVKKLIEEINRRLEDAVRKVHENNRKLDRELEEVVKTLRDLLRRNVDTETVRKEIEDIARRSKEKLEKNTRDVKRMVDRSKEELKRILKELEDAIREIKKKVD

SEQ ID NO: 6351 - protein, 174 aa, Artificial Sequence; identical to SEQ ID NO: 6350
  Synthetic

SEQ ID NO: 6352 - protein, 177 aa, Artificial Sequence
  Synthetic
SEKERILERLKELVERSNEKLERILRRSEKLFTDSNKELKDILDRARKLIEEIDDRIRKVKEKELKDELRKRLEEILKEARDLSEEDKEKSERVHRESRELSERDEEESRKVLEEVRSRDLDKKIRDDAERLITENKERNERVNKRDEDLLRRNRKENEELNRELERLVKEIREKLK

SEQ ID NO: 6353 - protein, 177 aa, Artificial Sequence; identical to SEQ ID NO: 6352
  Synthetic

SEQ ID NO: 6354 - protein, 177 aa, Artificial Sequence
  Synthetic
EEKERILETAKKLAEEIKRRAEEILKRSEELVRDSNKKLREVLEEARRLIKKIEDEIREIREDELKRRVREKLERILRRLRELSKEDLKRSEEVHRRSRRLLEELLEKLEEILRRLKSKPLDKEIEDEVRRLVREIEELLRDIERRDKELLDENRKLNEEVNRDAERLVRKIRKALE

SEQ ID NO: 6355 - protein, 177 aa, Artificial Sequence; identical to SEQ ID NO: 6354
  Synthetic

SEQ ID NO: 6356 - protein, 177 aa, Artificial Sequence
  Synthetic
SEVEELLRRIRELSKRSKDEIKRMLKEIRELSEKSKRDIERMLRRNEDLARKIKELIDRDNNDELVKRLNEESEKLAREARKRVERSIREIERLLEEIRRRVEESLRTLKEVLKEVEKNGVTEEIKREVEKLLEENRKLLEDLEEDVKRLIEENKRALEEVERESKRLNDESRERTK

SEQ ID NO: 6357 - protein, 177 aa, Artificial Sequence; identical to SEQ ID NO: 6356
  Synthetic

SEQ ID NO: 6358 - protein, 178 aa, Artificial Sequence
  Synthetic
DDLERVLKEIKKAADKIREDNKRTADKIRKRVKELDDETRDMLRRIRKLVKEIKERVRGREEARKVIEELKKLVDEVRKRNEKSIEELKKLLKEDRDLMRRVIEELEDLVRRLREEVRDDEALRRVEEEVERLIRDLRRVLKETSDRVRELIDKHRRLSEEVEKDVKRLIDELKKKTD

SEQ ID NO: 6359 - protein, 178 aa, Artificial Sequence; identical to SEQ ID NO: 6358
  Synthetic

SEQ ID NO: 6360 - protein, 187 aa, Artificial Sequence
  Synthetic
SEIEEILERIKKISEDSKRRLEDILRKAKKISDESRETNKKTLEDVRRIADEIRKRLEEAGGRDERDLRRLMKEVKERLEEMLKRDDELAKESIKILKDVLKELRELVKRSETELRRVIEELRRRVRDKDKLERVEREIRRLIKENKDIVERIERAIEELVRRNEKSVEDSKKDIKRLVDELDREAR

SEQ ID NO: 6361 - protein, 187 aa, Artificial Sequence; identical to SEQ ID NO: 6360
  Synthetic

SEQ ID NO: 6362 - protein, 180 aa, Artificial Sequence
  Synthetic
SEVERIKERIDKLVEENRKLVEEIEEEDRRLLEENREIVKRIEEEIEKLLRDLERRVKSEKAKEIRKKIKKARDELREVLKRSEEISKETIDRLKRLLEESKKELERLKRTLDEMAKRNEPEDVLRDILREIERLSKESKDRLKDLLRKSEELSKESKKLLKDILKKVEDLIREAREEAR

SEQ ID NO: 6363 - protein, 180 aa, Artificial Sequence; identical to SEQ ID NO: 6362
  Synthetic

SEQ ID NO: 6364 - protein, 184 aa, Artificial Sequence
  Synthetic
EEKERLKKSLEDLAKRIRDILRKHEEDSRRLSKEIRDVLRRHREASRKLVEEIKELIKSVRDEELVKELEKLLRELEKRSEDLLRELEKRLKELEDRSRDILRRLEELLRRLEERVKKALREVDGEEMLKRVLEELERIVRDIERRIKEASERIRKIVEDIKKRIKEADDRIKDIVREIAERIR

SEQ ID NO: 6365 - protein, 184 aa, Artificial Sequence; identical to SEQ ID NO: 6364
  Synthetic

SEQ ID NO: 6366 - protein, 177 aa, Artificial Sequence
  Synthetic
DEEEEALKDVERLLRRNEKLIEEHERRSEKLLRELEDVVRRHEERSKELLERIRERIKRLTDEDRVRDIERLMRELEEESRRTAKTARELLEELRRRSKETVERIEKSLEDLRRTVEREGVDEEVLKKLRKLSKESEDDIRKMSEEVEEIVRRIKRLLEEATRKLEELVKRIEERID

SEQ ID NO: 6367 - protein, 177 aa, Artificial Sequence; identical to SEQ ID NO: 6366
  Synthetic

SEQ ID NO: 6368 - protein, 177 aa, Artificial Sequence
  Synthetic
DEDEEAKREVERLLRENEKLIEDHKRLSEELVRRLEDLIRRHEETSERLLRELREIIKRQTDEKRVREIEDLLRRLKKRSDDTVRDIKRLIKELKDKSERIVREAEKSLKKLKEVVDRKGVDEDVLRELRDLSRRSKEEIKKMSEEIEKLARDILKRIREMTEEAKRIVKEIKDRIR

SEQ ID NO: 6369 - protein, 177 aa, Artificial Sequence; identical to SEQ ID NO: 6368
  Synthetic

SEQ ID NO: 6370 - protein, 186 aa, Artificial Sequence
  Synthetic
SEIERVLKELDEVSKKSLEEIRRMSEESRRLSKESIDRIREMLERAREKADRIRETIKREGGESEEARDRIKKLIDELRELLREVDERIKKSIEDLERLARETEERIKTSIRDLEEKVKEIAKRITDKDKLRRLRERVEELKKRNEDLLKEHRDENKRLIDENRDLVDKLRKTIKRLIDDLERRVR

SEQ ID NO: 6371 - protein, 186 aa, Artificial Sequence; identical to SEQ ID NO: 6370
  Synthetic

SEQ ID NO: 6372 - protein, 179 aa, Artificial Sequence
  Synthetic
SKVDELRKTVEKLLRELRDSLRRYEEESKRLLEELDDSLRRSKKTVEDLLREIKEILKRVRDEEVRKTVERVLRELKEILDRDKERVDRVKEENKRLLEKDRKTVEDVLRELEDLLEKIRKRPDDRAKERLERLVRKIKEDNKRSLTENERLVRKIKKENEDAIRRLKDVAKKIKEELT

SEQ ID NO: 6373 - protein, 179 aa, Artificial Sequence; identical to SEQ ID NO: 6372
  Synthetic

SEQ ID NO: 6374 - protein, 176 aa, Artificial Sequence
  Synthetic
SEKEELKKEIRRNLEENKDVLRRHEEENRRLKKRIKELLERHARTNKRLKEEIDRTIRDKDTAERVKRELDKLHKEAEELIREVLRRLDELHKTAEDIVRTSEKLLKEVEEELKDLDSRLLEELLRKLEKLSRDSKEKLKEISKRSKELVKRIERELEKMTKKSRDLVKKIKEEEK

SEQ ID NO: 6375 - protein, 176 aa, Artificial Sequence; identical to SEQ ID NO: 6374
  Synthetic

SEQ ID NO: 6376 - protein, 178 aa, Artificial Sequence
  Synthetic
SEVEELRKELERIVKETKDVAEELSRESEEVLKKSEENLRRLTEKSDDVLRRVAELIRSNRDTDTVVTEARDLLRRSDEHLEENLRRTDKELRDSDEKLKRLEEEHRKLSEEIKRRLDERGGVKELKERIERVNREVREEARKHHDKNRDIRRRVTELHKRHKERNEEIRRKVEEDAK

SEQ ID NO: 6377 - protein, 178 aa, Artificial Sequence; identical to SEQ ID NO: 6376
  Synthetic

SEQ ID NO: 6378 - protein, 178 aa, Artificial Sequence
  Synthetic
DEIEDLRRKVEKVVRDAEKVLRDLSRKSRKVHEDSRENVDRLLKEVEDVVKRVADLIRSNQDRDTVVKEAREVAKRIKEHLDRNLERVKKMMRDSDKELRDLLETIKRVVEEIKKRLEDKGGVEELKRTLEELLKRVEDLVRRHHEENKKLTDDNRRLHRRLRERLKEVLREVERRRD

SEQ ID NO: 6379 - protein, 178 aa, Artificial Sequence; identical to SEQ ID NO: 6378
  Synthetic

SEQ ID NO: 6380 - protein, 182 aa, Artificial Sequence
  Synthetic
SDVERIEEELRKLTEENRKLTETLKTELRKIRREVEKILKELEDRLRELSERVKDLIRKRNVPEDLKRKVDEIRKTIKTLLEEIERRVRKVEEEIKELLKDSNRKTERVIREIKRLLKDLGDKKEVLDDIRRKLKKLHDESKKTHRDILERLKEALKRLLELAERVLEELERRAEELRREIK

SEQ ID NO: 6381 - protein, 182 aa, Artificial Sequence; identical to SEQ ID NO: 6380
  Synthetic

SEQ ID NO: 6382 - protein, 182 aa, Artificial Sequence
  Synthetic
DDVERLEERLKELDKRNKELTKDLEDKLRKLTRDNRELLKKIEKRLEEVRREVKRLITERNVPERLEDKVREIEKEIRDLLDELRKRSDKVIRDIERLLEESNEKTERVIERIRRLLEKLGSLKEVAERIREELERLHEESKRLHEKILEDLERAHDETRRIVEDILRRLEKVARELKEEIR

SEQ ID NO: 6383 - protein, 182 aa, Artificial Sequence; identical to SEQ ID NO: 6382
  Synthetic

SEQ ID NO: 6384 - protein, 177 aa, Artificial Sequence
  Synthetic
DELRELIKTLREILERLLDRSRRLNDKLKEILERIERASKKMNDDDRRRVRRLEEEVRTEDLAREAEKTNKKTLEESEELIRRVEDELERVLDRSRTLIKEAKRIIEKLLDEIRKTVDSRRLEDVERVVEEAKRALERSLRENEKSVEDIKKRIRESVEENKKSVRDTLERLKRTLE

SEQ ID NO: 6385 - protein, 177 aa, Artificial Sequence; identical to SEQ ID NO: 6384
  Synthetic

SEQ ID NO: 6386 - protein, 179 aa, Artificial Sequence
  Synthetic
STEEEVRKRVEEIERTLRESLERNRETVERSEERLEELLRRARRVVEESKKRLDKEIKDERLLREVTDLNRKSLERIEELIKEADERNKRSLERSERIIRRAEELLRDVLRKAEELSDVTDEVMRDLIRKLEDILRRLKEESDRLNEEHKEILKELVRRLEEIIKEHREIVERILKKTR

SEQ ID NO: 6387 - protein, 179 aa, Artificial Sequence; identical to SEQ ID NO: 6386
  Synthetic

SEQ ID NO: 6388 - protein, 174 aa, Artificial Sequence
  Synthetic
DEEEEVKRLLDRIREEVKRLHDENKKRLDELRRTVDKLLRESERENKRVNDEVRKDGIPKEVLDELKEMSDRDREENERIVRDARKKIDDIERRSKKLLDDVEDALRRLEELLRRNTDVETLKRRIEDVLRRVEEESRRLNKELEDVLRRAKELVDRSKKKLEEVLRRVKEKAK

SEQ ID NO: 6389 - protein, 174 aa, Artificial Sequence; identical to SEQ ID NO: 6388
  Synthetic

SEQ ID NO: 6390 - protein, 174 aa, Artificial Sequence
  Synthetic
DEEREIEELLRTLTREVKRLLDESRKLNEEILRKVKRLHDENRKRIREVLEDVKRRGLPEEVVREVKRVLEEILRKSEKLLRDVERLSEEDKKRNEEIVDRAREVLKRVEELLRRNTDVETLKEEVKRALEEVEKRVRDSKRDLKRVAEEVEETSRRLNDELRKVREDVRRRAT

SEQ ID NO: 6391 - protein, 174 aa, Artificial Sequence; identical to SEQ ID NO: 6390
  Synthetic

SEQ ID NO: 6392 - protein, 188 aa, Artificial Sequence
  Synthetic
EEAERIADEARKVEEDVRRMVEESKRKLKKVLDDSKRLIDELKRRLEDIRRKVAEMAKRLRDDRDVVREVVRRVEELLDDIRRRLEDIHRRSRELSERDKEENRRVLERVERVLRELRKKLEDVKDRIDERVLRDIERLLEEIRRELERLARESEKVNERVNREDRRLLEEIRELLERIRKELEERTR

SEQ ID NO: 6393 - protein, 188 aa, Artificial Sequence; identical to SEQ ID NO: 6392
  Synthetic

SEQ ID NO: 6394 - protein, 179 aa, Artificial Sequence
  Synthetic
SLKEEVDELLRRIEEEIRRLADKSRRTNERVKEEIDRLARESEETNKKLKKKIEDIDVDEEIVRDARRLLEESHRRNRKLLEDAKKLLRESHEKNKKILKDAERLLDEIRKRAEANKDKDAKIVKKLLEDLKRLLKEVKELMERINKETKELLERVAREVKRLNTDTERLLKEVEDRVR

SEQ ID NO: 6395 - protein, 179 aa, Artificial Sequence; identical to SEQ ID NO: 6394
  Synthetic

SEQ ID NO: 6396 - protein, 176 aa, Artificial Sequence
  Synthetic
SEREEIEELSRRSRRSLEELKKEIRKVNERNKRLLEELEREIRRVSKESRDRLRELRRRLSEELAKRVDEVNRRVKREVEELVRRNEEVDKRSKEVVEKLAREVEKMNKDAKDLVDRNVDTKDLIRRLRELTRTIERRATELIKRLEEVSREIAERVRKLIKELRDMTRKIDEDAR

SEQ ID NO: 6397 - protein, 176 aa, Artificial Sequence; identical to SEQ ID NO: 6396
  Synthetic

SEQ ID NO: 6398 - protein, 182 aa, Artificial Sequence
  Synthetic
SEVEKLLERLKKILEEIARLVDRSNTEDDKILRKAEEDVRRLLDKLKKILERAAELLARNEEKERLIEEIERRLREVLKEVRRLLKKLKEDNKKSLEDNKKLLDDVRKTLDDLLRDAERTVRDEKLRREIRKLVKELKETIKRLEKKSRDTVKRTEDELRRLEEEAERLITELKERLDELRK

SEQ ID NO: 6399 - protein, 182 aa, Artificial Sequence; identical to SEQ ID NO: 6398
  Synthetic

SEQ ID NO: 6400 - protein, 175 aa, Artificial Sequence
  Synthetic
REDEEMLKDLKRVLEDAERVSRDTLRELEDAVRRLHELSEDTLDKLRKVLEEADRLIRSNQDKDEVVKRLEDILRKILEETKRIIDEARKILKKVEDDTRKLIKDVERLIERIKKDLEGNEDVRRILERVRKELKRLLEENEKLLRRVEKELEENERRNEEEIRRVKKTVEERAK

SEQ ID NO: 6401 - protein, 175 aa, Artificial Sequence; identical to SEQ ID NO: 6400
  Synthetic

SEQ ID NO: 6402 - protein, 181 aa, Artificial Sequence
  Synthetic
SRVEEVLKENRDTNEELKDTVRKILETNRRTLERAEEEVRKILEDLRDIARKIEEMVENGASEKTLKDLLDELRRTVEEVLRKLEKLLRKDEEDVRRALEKLEKLLRDDERRVKEVEDEIKDKEMLERLRRSLEESKETVKRLLEELRKSLEKSKRDVERLLKELEDLLRELEKKVDDRRR

SEQ ID NO: 6403 - protein, 181 aa, Artificial Sequence; identical to SEQ ID NO: 6402
  Synthetic

SEQ ID NO: 6404 - protein, 178 aa, Artificial Sequence
  Synthetic
DEAREILTRIRKLLEEIRKEAEEVSERHKRLVDELDKEVKDINKRAEDLLRELAEIVKRGDVDKRRIEEEVRKINEEHKDRVRRIADRVKKINKELEDIVRELKKKVEDVLRELARLIKDVDEKEVRKVLEEIKRVLEELKRHAEDNLRRAREVLKKLADEAKRVNERSEELLRELKK

SEQ ID NO: 6405 - protein, 178 aa, Artificial Sequence; identical to SEQ ID NO: 6404
  Synthetic

SEQ ID NO: 6406 - protein, 178 aa, Artificial Sequence
  Synthetic
SMADEILRELKELTEEIERRVREASREHRERLEKLRREVREINKELKRRLDELREIVERGEVDKEEITRTVEEINKEHKELLKRIEERVKKINEDLRRLLEKLTDESRRVLERLKRLLKDVDKDRVEKILRENKERTDRLRRHIEKNLEDARDLLRKLKEEVKRVNEESEKSLRDLRK

SEQ ID NO: 6407 - protein, 178 aa, Artificial Sequence; identical to SEQ ID NO: 6406
  Synthetic

SEQ ID NO: 6408 - protein, 181 aa, Artificial Sequence
  Synthetic
SLEEDIRRILDENRRSTERIKEEIREINERDKRSLEDIERRIRKVLEDLRKLLEDLAREGLDEEIRRRVKEILDEIRRLLEELKRRVEEINKRTTDLLKTLERESEKILRRIEDLLRKLKDIEEAVRKILKEVRDVNEELKRRVEKILEDIRDANRRLRETVEEIIRRAKEAVDKLRDEVR

SEQ ID NO: 6409 - protein, 181 aa, Artificial Sequence; identical to SEQ ID NO: 6408
  Synthetic

SEQ ID NO: 6410 - protein, 179 aa, Artificial Sequence
  Synthetic
SEKERVDDLLRRVDELLKRSKREVEKLLEDNKRLLERIERENRRLTKELEDKVRRLKEKGLVDDEVLKEAEKLLEENNRKSKEILEENKRLLEELKKEVEEIHRKTKKVLDELADIVRRGERDVEEIAKEIRDVLREHKELIDEIRKKAKKISDKSRKLMEELERHLRRVIKELDEKAR

SEQ ID NO: 6411 - protein, 179 aa, Artificial Sequence; identical to SEQ ID NO: 6410
  Synthetic

SEQ ID NO: 6412 - protein, 179 aa, Artificial Sequence
  Synthetic
SEEEEVEELLRRNRKKAEEVDREIDRLLKEVEKLVKDSRKRIEDLLRRAREKVEDLRRKGDVSEEVLKRAEDLLREIEEKVERIHETTKKVLEDLKRRVEEVLRDNERLIRELEKIVRAGKRDVREISEEIERITRETEDRIRKIAEEIRRVLKRHKELIEELEKEIRDVLKKLDDDVR

SEQ ID NO: 6413 - protein, 179 aa, Artificial Sequence; identical to SEQ ID NO: 6412
  Synthetic

SEQ ID NO: 6414 - protein, 178 aa, Artificial Sequence
  Synthetic
SEIEKLLKDLRDLLKKSEETVREMLKRLEEIVRRAEEDHKRLLEKLKRLLEKLRRDVRTDEVIKRAREDIERVLREIRKLNKEVEDEIRKIIEDLEDILRRSHETIERILREIRRRSRREEVRKRLEDLADEVDKRNRDIERKIRELMKRAKEVSERLNKELEDLAREAEKLLRELKK

SEQ ID NO: 6415 - protein, 178 aa, Artificial Sequence; identical to SEQ ID NO: 6414
  Synthetic

SEQ ID NO: 6416 - protein, 178 aa, Artificial Sequence
  Synthetic
DEIEELLKRLRDIVRKIREDHERLSRESERINKDARRRHDEMLRRLEELLRKVEKEVRTEELIKRVEEEIRRIIEEARRINEEVDKRSEDVVRTMKELNDRVDKDIDRVIDELRKRIRDEKVKRDIERIRKEVKEESKRLNDHIRDNERRNKESSEELNRRIKKIADEVRELLEKLKT

SEQ ID NO: 6417 - protein, 178 aa, Artificial Sequence; identical to SEQ ID NO: 6416
  Synthetic

SEQ ID NO: 6418 - protein, 175 aa, Artificial Sequence
  Synthetic
REEERLRELMDESRKRIEAVEKRARDLKRKSDRLIEDAARKIKTILDKIRKLIEDLRTDERVLEKIRKLLEELEKEARDVLERWKKLLEDSLRELEELLKKWRELTERLKEELDAGEKDLKDVEKKIREVNKTVKEEVDRLVEKNERLNDEARRVVKELLDKVERMLEEVEREAR

SEQ ID NO: 6419 - protein, 175 aa, Artificial Sequence; identical to SEQ ID NO: 6418
  Synthetic

SEQ ID NO: 6420 - protein, 174 aa, Artificial Sequence
  Synthetic
SEKEDMARKIKELIDRDRERIERVIREIEKLIKELRDHNKRVLETDKRLLDDLKRVADDGIDRSELERLAEEIIRHTERVTERDKRIVDEIRKKIKEILEDNERTNREIRDELEKAPKDEDLRRLKEEVDRVAEETRRLLEEIKKKVDKVVREVETSNRRSEEEVRRLLDEIRR

SEQ ID NO: 6421 - protein, 174 aa, Artificial Sequence; identical to SEQ ID NO: 6420
  Synthetic

SEQ ID NO: 6422 - protein, 174 aa, Artificial Sequence
  Synthetic
DEKEEAARRVEKLITELRKHNEDVLRDIKRLIDELRRHNEEVLKRDRELLERLRKVAEEGVDKDTLDELAKRIKDHTDEVTKRDRKILKDIKKKIEEVSRRDEKIFREIERVLAELPKDKELDDLRKRAEDVLRDLRRTNRKILEDVRRVIEELERSNERSLTEVERLLREVRK

SEQ ID NO: 6423 - protein, 174 aa, Artificial Sequence; identical to SEQ ID NO: 6422
  Synthetic

SEQ ID NO: 6424 - protein, 174 aa, Artificial Sequence
  Synthetic
SEKERVLTELEKILEELRRRVEEILKEIEKLIEELRRHNERALERDKKLLEELKEVRERGVPEKEIEKLLKELEKHTRDVTRRDREIMKRIEKRIEDVKDEIRRMIKKARDRVRSLPKDRELEKVKEKLDRLMKDIKEKLDRVKEKVRRVLKELEESNRKSEKDAKELIDRIRK

SEQ ID NO: 6425 - protein, 174 aa, Artificial Sequence; identical to SEQ ID NO: 6424
  Synthetic

SEQ ID NO: 6426 - protein, 178 aa, Artificial Sequence
  Synthetic
SEVEDLLRDIERLIEESRRLVERLLERLEELIRRHTRLVEELIRELERMLKKVADEVDKRELIERAEEEIRKLVKDLRRINDEANKRVEKLVRELEKILKESHDKVDEIRKRVEKDIRRDEIRTEIKKVVDKAREVNKRIKELIDKIKREAEENSKRANELIERITREIRRLLEDLRR

SEQ ID NO: 6427 - protein, 178 aa, Artificial Sequence; identical to SEQ ID NO: 6426
  Synthetic

SEQ ID NO: 6428 - protein, 186 aa, Artificial Sequence
  Synthetic
SELEELRKRVKDLIRETKKLVEEVAEKVERLNKETKKLLEDVARIVEELIRRAEEVAERIREDEKLKRALERLEEEIRRLVEEAERLLRESHEKNERLVREAKELLDRSHELAKELIEDAKRKLKDLEEVLRDIERLAREIEKVNREAEERIRRLKKKSEETNERVKRAIDKLAEELRRVLEEIRR

SEQ ID NO: 6429 - protein, 186 aa, Artificial Sequence; identical to SEQ ID NO: 6428
  Synthetic

SEQ ID NO: 6430 - protein, 186 aa, Artificial Sequence
  Synthetic
SELEELAKAVEKLLEDLRRMTREVEEKVKEINERTKKLLKDVAERVKTLLREIEELAKKIKEDKKLDDALRRLEEKIRKLVEELKRLLDESHKRNRDLVREARKILDDIRRRAEKLIRDAEEKLKELREVLKAIKELMERIKKTLDEIRKRIKELEDESEKTNRELKKKIEDLKRELEELLREIKR

SEQ ID NO: 6431 - protein, 186 aa, Artificial Sequence; identical to SEQ ID NO: 6430
  Synthetic

SEQ ID NO: 6432 - protein, 182 aa, Artificial Sequence
  Synthetic
SEIDEVIKTLEKLLEDLRRELEELSRRNKKVLEDILRRVKRLSDENRRLLERIKRTVDKRGTTEEILEELKRAVEKTRRDAEKLLDEIRRATKKLRDDIEKLKEDIERIERDAKDKIDKLSRDEKIEKKVKEVRERVKEVLERIERLVDENRRENKEVVDRIKKLLKENEEEVREVLKRIRD

SEQ ID NO: 6433 - protein, 182 aa, Artificial Sequence; identical to SEQ ID NO: 6432
  Synthetic

SEQ ID NO: 6434 - protein, 182 aa, Artificial Sequence
  Synthetic
SEIDDLVKKNKELVKKIREDVERLSEENKEVLKDIERKVRKVSEENDRLLEEIKDTVRKRGTTEDILRKLKRALERTTEEIKKILRELEEADKRLDKAIEELKDRIRRVSEDMRDKIEKIRRDRKVEKKVRENKKENEDVLRDIERLVKENKDRNREVLKRIEDLLRKNAERVKRVADEIRR

SEQ ID NO: 6435 - protein, 182 aa, Artificial Sequence; identical to SEQ ID NO: 6434
  Synthetic

SEQ ID NO: 6436 - protein, 176 aa, Artificial Sequence
  Synthetic
KEVEDIVDDVRRVIEELKRKVEEVSKKNEKLVREIEERVERISRRNKKLIKELKEIVDRGDRDKREIREELKRISKEMRDLARKLVKELKDVNRELDEDIREIDREIEEVLRELAKKLGKEELLRKIARDLEKVREEIKELVKENRKTNEEVVRRIEKLAKENDDENRKVLKEIED

SEQ ID NO: 6437 - protein, 176 aa, Artificial Sequence; identical to SEQ ID NO: 6436
  Synthetic

SEQ ID NO: 6438 - protein, 176 aa, Artificial Sequence
  Synthetic
DEVERIVEDIRRLLDEVRREVEKVSRENKELVDRVREKVKEISKRNKKLAKDLTDLVREGSRDKRELERDLERINEEMRKLIRDLERELREIDKRMDDLVREIEEKLRRIIEKLERELGDKELLDRIKEEIERVIKEIRELVEENKRTNEEVLRRIRELARRNEEENKRVLEDIRR

SEQ ID NO: 6439 - protein, 176 aa, Artificial Sequence; identical to SEQ ID NO: 6438
  Synthetic

SEQ ID NO: 6440 - protein, 183 aa, Artificial Sequence
  Synthetic
SVEELIKEVKDRLRKVLREIEELIRENEEENRKNVEDVKRTADKLRRDLEKVVDEIDKRVDSDKLERLRKKAEEIIRTLDRMLEESKKINREIDERLKRAADRLRRRVEKVIREVDRVAREVKEKEVIDKVVKRVEDLVREIKEEVDKISEENKELVKRDTRRVEEVRERIRKLVEELRREVT

SEQ ID NO: 6441 - protein, 183 aa, Artificial Sequence; identical to SEQ ID NO: 6440
  Synthetic

SEQ ID NO: 6442 - protein, 175 aa, Artificial Sequence
  Synthetic
SEIDRVIEKSDKTNEEIKRDVDRAVRRSEETLKRIRETVEEIVKTVEKLIRDLRRRVEDKGQDKEIEEIVKKIKKDIDDAKEELRKLAEEDKERVKAVKKKVEDLVREDKEEIDRRLTDKDKAKELRDRLERSLREIAKKIKKVLDDTDRVLRDIERTIEELKKRLREVLERVRK

SEQ ID NO: 6443 - protein, 175 aa, Artificial Sequence; identical to SEQ ID NO: 6442
  Synthetic

SEQ ID NO: 6444 - protein, 175 aa, Artificial Sequence
  Synthetic
SEIDDVIKKLKDLIEELEREVKEMSDENKRLLEEIEERVKEAIKRSKDTLEEIADRVRKKGPDKEIEELIREDKKRIKDVLKELRELVARTKKRVDDVTKKLREEARKIEEEIRRRLSDKDKATKIEKDLRDVLRKIEKTMEDNRRENEELLKKVEEEVRRLEEETEKVLRDLRR

SEQ ID NO: 6445 - protein, 175 aa, Artificial Sequence; identical to SEQ ID NO: 6444
  Synthetic

SEQ ID NO: 6446 - protein, 179 aa, Artificial Sequence
  Synthetic
SEVDEILKRIEELIRRIEDEVEKMIRESEDTIRRDEKEVKDAVRELADLIRRIEKRVRERKDSREEVEKLITDIADALRRFLERNEKSVTDDLDKNRRLLEKVERLIERIERVIREARKRNIDEKKVREIDKRLKDALREIRKLIERSKEESRRALKRSRELMKRLEEELRRVLKEIRD

SEQ ID NO: 6447 - protein, 179 aa, Artificial Sequence; identical to SEQ ID NO: 6446
  Synthetic

SEQ ID NO: 6448 - protein, 179 aa, Artificial Sequence
  Synthetic
DEVDKVLKRIKELIDEDKKEVEKVIRDSKRTLREDEERVRRAAKEVEDRIRDIEDIVRRRKEAREDVEKLVDDLRKKIKRLLDENEKSFKDDERKNEEVVRRNEKSITDIKRVIKEAEDRNLDKKKLEDIDRELDRVLEESKKEIEKSKRESEEVLKKSRDLVKRLAEELKRVLDEIRR

SEQ ID NO: 6449 - protein, 179 aa, Artificial Sequence; identical to SEQ ID NO: 6448
  Synthetic

SEQ ID NO: 6450 - protein, 179 aa, Artificial Sequence
  Synthetic
SRVEEVLKEIDKLIKEIKERVKRLIEESKRLNREDEERVRKVIEESKKTLEEIREVMERNKESREELEKLIEDDKEKNRKAKKDNDDSLRDDKRKNDEVEKEVRKRAKDIERAIKEIAKRNVDKDLLREIERRLREMLKEIEERIRRSKREVEESAERSERLIRKSEEDSERVLRELRR

SEQ ID NO: 6451 - protein, 179 aa, Artificial Sequence; identical to SEQ ID NO: 6450
  Synthetic

SEQ ID NO: 6452 - protein, 179 aa, Artificial Sequence
  Synthetic
DEVERILERIEELLRKIRKDVEEAIKDSERLNKDDLKRVRDAVETLRELIRRIEEEVRRRRESREEVEKLIREIEERLRRLLEENEKSVREDKERNRKLLKEVEELVKTVKDLIEEAKKRNIDKDLARDIDEKVRRLLEDIRRLVEESEKKVDESTEESRRLVTELERELREVLKRIRD

SEQ ID NO: 6453 - protein, 179 aa, Artificial Sequence; identical to SEQ ID NO: 6452
  Synthetic

SEQ ID NO: 6454 - protein, 178 aa, Artificial Sequence
  Synthetic
SRVDELVKEAEDLLEEAKKANAESIRRIEELLKRVAEEIRRLSEEDKKLVEEVRKRVKDKDAIDEVRERSRESLDRIRRIIDEIRRRAEKLLREDEELIRRLAEELRKLLEKLKRELRDKRAEDKLRRVEEDARRVLEDLKRTLKRLEEEVRRVLEEARDILRKNAEENRKVLEDLRR

SEQ ID NO: 6455 - protein, 178 aa, Artificial Sequence; identical to SEQ ID NO: 6454
  Synthetic

SEQ ID NO: 6456 - protein, 178 aa, Artificial Sequence
  Synthetic
SRVEELVEELKRLLRTVEKENEDSIREIERLLREVKRRNEESSREDEKTIRTVRREVRGEELIEEVRDRSRKSLDDDRKLIEDIKRRLEKLLREDEELIKEIRDRARRILEKIKRELREKRAEEILERLRKEAEEVLKKLEDTLRELRKRAEKVLRDMEETLKKNKKDNEKVLRDLRK

SEQ ID NO: 6457 - protein, 178 aa, Artificial Sequence; identical to SEQ ID NO: 6456
  Synthetic

SEQ ID NO: 6458 - protein, 178 aa, Artificial Sequence
  Synthetic
SEVDKIIKEIEDLLDEARKTNEKSSRDDKRLVEEVKELNKESSERNKRLVKEAREKIRGDEMIEKVRRDSEELLKDDRRLIEEVKRRSEKTLKEDKELIEDLARKLKKLLDDLRKDLKDKRAEDKIRRIAKDAEDVLRTMEKTLRDNERENREVLKELEKTLRENEKENEKVLRDLKR

SEQ ID NO: 6459 - protein, 178 aa, Artificial Sequence; identical to SEQ ID NO: 6458
  Synthetic

SEQ ID NO: 6460 - protein, 172 aa, Artificial Sequence
  Synthetic
EEIERVEEKVRRLIKELEDELRKIEERIERLLRRSRERNKEISDRNRRLLEEMRRSDRDKDVLRKRLEDIDRELRKLLKDDEDLMREIKRELRELLERLRKVAEDIRDEIRKDLSSEEKARELEEELRRAVERVDRKIEELEERLDRVLKESRDTVDENEKRNEKVLRELET

SEQ ID NO: 6461 - protein, 172 aa, Artificial Sequence; identical to SEQ ID NO: 6460
  Synthetic

SEQ ID NO: 6462 - protein, 172 aa, Artificial Sequence
  Synthetic
KEIEDVVETVRRLLRTSEELNERISRDNEKLLRDSEKLNREISERNRKLLKDLKDSDRDKRVLEEEARRIDEILRELLRRDEELAKRVNDRLKDLLRKDEELNRRVLDRIRKDLSMEEAARDLARKLKEVHDRSRETIKRNEDKNRRVLEESKKTARENEERNKRVLDELRK

SEQ ID NO: 6463 - protein, 172 aa, Artificial Sequence; identical to SEQ ID NO: 6462
  Synthetic

SEQ ID NO: 6464 - protein, 177 aa, Artificial Sequence
  Synthetic
SEEDRVLEDVERLLRELKKETDRIAEKNKKLNEDVTRETEEIVRRVRELLERLLDLVRKVRDDRLRKELEERLKEVVDRVRELSKTTKRKLDEITKDTRRASRETEERLKKIVDEARKRIDSEKAREVEREVRRIREEDERILRELEERNRENKKRDEDILKELEDRAERVLEEIKR

SEQ ID NO: 6465 - protein, 177 aa, Artificial Sequence; identical to SEQ ID NO: 6464
  Synthetic

SEQ ID NO: 6466 - protein, 177 aa, Artificial Sequence
  Synthetic
SEEDRVLKEAKDLLEEIERELDEVAERNKELNKRLTDETRKIERRVRELLRELKDKVRKVKEDRMRERLEEELEKIVRELEEASKETEKKLEEITRETRELIKRLEDKLRKVEKELREKIDSRKLEKLEKEVREVEKRIRDILKKLEDDNRANRKRDEDIIDELRKEADRVREEIKR

SEQ ID NO: 6467 - protein, 177 aa, Artificial Sequence; identical to SEQ ID NO: 6466
  Synthetic

SEQ ID NO: 6468 - protein, 175 aa, Artificial Sequence
  Synthetic
SEVEELVRRVEKSNRDIEEMVKKIDKRNRDLLRKIEKDLREADRRNEELLREIDDLVRRGTDKRDLERLIRRVTRELEDMVEKLERLIEEVSKELEDAARELEERIRDSLRRVKEAGIDEKLLKEVEDRNRESAKEVKRLADENRKANEELKRRVEKLVRDNRRKNEELKKKVKD

SEQ ID NO: 6469 - protein, 175 aa, Artificial Sequence; identical to SEQ ID NO: 6468
  Synthetic

SEQ ID NO: 6470 - protein, 175 aa, Artificial Sequence
  Synthetic
REVEELLKEIRKRIEDVRRRVEEIDRRNRKLLKEVEERLEKVRREVEKSNTDIKELAERGTDKRELAKEIKKSRERVERLVRELRRRLKRISDELEKVARDLKRKLEEILDRAEKAGIDEDLLRRVREEIERVIREVKRLLEENKKRNDEVRKRVEDIVRRLEEHHRELKRRVEK

SEQ ID NO: 6471 - protein, 175 aa, Artificial Sequence; identical to SEQ ID NO: 6470
  Synthetic

SEQ ID NO: 6472 - protein, 172 aa, Artificial Sequence
  Synthetic
KDIEDILKESEKTNREILKRAEDASEENERINKRITDRVDRVRKEIERLLEELTRRDEDREELDRVLKKIEDDLKKAMEELRKLIKELDERLEKVLEELERLIRRDREEIERRLRVKKLVDELRRRVEETLKRLRKLIADNREKNKDNLRRIEEEVKKLEEEIKKIKDEMKR

SEQ ID NO: 6473 - protein, 172 aa, Artificial Sequence; identical to SEQ ID NO: 6472
  Synthetic

SEQ ID NO: 6474 - protein, 172 aa, Artificial Sequence
  Synthetic
KELEDIARESEKTNRDIKRRVDEVRKTIEDLLRRIDEEVKRAAEESKDTNRRIREEDRRKEEVEKLLRDDNKRIDDMLERLRKLLEEVERRLDKALKDLEKLIRDDKERIDRLLRSEDLMRKLKREVEETDKEIKDIIRRLKEEIEKIKRKIEEIIKKLKKENEDTRREADK

SEQ ID NO: 6475 - protein, 172 aa, Artificial Sequence; identical to SEQ ID NO: 6474
  Synthetic

SEQ ID NO: 6476 - protein, 172 aa, Artificial Sequence
  Synthetic
SDIDDILRESRKINKEINDTVTEMMKRSKKTNDEIREKVKEVREESEKTNEEIRREPRRKEEVRELIKRDKERIDKALRELRELIKKDEEEIKRALRDLERLIRENRERIKKLLKDEKLVKELEDELRKSEERARRIIERLKEELKKTRKEIEDIIRELRKKLEDTLRDVEK

SEQ ID NO: 6477 - protein, 172 aa, Artificial Sequence; identical to SEQ ID NO: 6476
  Synthetic

SEQ ID NO: 6478 - protein, 172 aa, Artificial Sequence
  Synthetic
SDIEKILRESKDINRRINERVDRVVERSKKTNEDILKKVKDAAEESKKTNDDIRKSPDSEEDVKRKLDDDNRKIRKAMEELKKLLEDDERDVRRALEELRKLIEDNADDIRRKLKVEELVRELRRLVEESLKRIEKIIKDLEELIKETKRRLEEIIERLEKKNEDTEREARK

SEQ ID NO: 6479 - protein, 172 aa, Artificial Sequence; identical to SEQ ID NO: 6478
  Synthetic

SEQ ID NO: 6480 - protein, 172 aa, Artificial Sequence
  Synthetic
DEIREIVKESKRINEEINRKVEEVVRRSEKTNEDIRDTVRRLVRESDETNRRIEESPQDREEVKKAIKDDERRIEEALEELRKLLKEDNDLIEKAARELEELIRRNKKRIEDLLKDEDLVRELRKEVKRSEDRIRKIIRDLDELNRRSKEDIKRKIDELRKRVEETKRRVTK

SEQ ID NO: 6481 - protein, 172 aa, Artificial Sequence; identical to SEQ ID NO: 6480
  Synthetic

SEQ ID NO: 6482 - protein, 172 aa, Artificial Sequence
  Synthetic
DDIEEILKDVKRLLDEILAKVKKASDDNKRILDEIERKVEEMVRRSEKTNEDIRRSDRRREEVRKLLDEDNRRIEEAFKELDELIKRLDKTLTDLMRDLERLIKEVKDEIDKKLKVEELVRELKKRVDEIKERARRLIEENRERNKEIKERAERIIERLRKINEDTKREAEK

SEQ ID NO: 6483 - protein, 172 aa, Artificial Sequence; identical to SEQ ID NO: 6482
  Synthetic

SEQ ID NO: 6484 - protein, 172 aa, Artificial Sequence
  Synthetic
DEIEDIVRRVKKLIRDLEERVKKLEEDSDRTNERIRREAEKASKRNKEILDKLRKSDRRKEEVREVIKTLDEELKRVAKKLRELLKKDNEEIDRAAEELKRIADEIKEAIDRLLKVEELVKELRKELEEVKEEIRKIIEELKRRNDKSRRDLERLIRDNEDKNRRLKKEAED

SEQ ID NO: 6485 - protein, 172 aa, Artificial Sequence; identical to SEQ ID NO: 6484
  Synthetic

SEQ ID NO: 6486 - protein, 172 aa, Artificial Sequence
  Synthetic
EEIERIIRESEKINKEINRTVKEVEKRSEETNRRIREELKRISKRNKEILDRLRKEPRDKEVVEREIRKLDEELKRALEELKRLLEDDNRKIEEAMRRLEKLIRENEDRIRRLLRDEKEVEKLKRKVEKSEEDIRRIIEKLREENKRSEEEVRRLITENEKRNRKLLEEAKK

SEQ ID NO: 6487 - protein, 172 aa, Artificial Sequence; identical to SEQ ID NO: 6486
  Synthetic

SEQ ID NO: 6488 - protein, 172 aa, Artificial Sequence
  Synthetic
SELEKIAEDSERINKEINERVKRISDENKRILEEIEKAVEEASRDNKRILDELRKSPRRREEVKRVIEELDKRLEDALRRLRELIKELDDRLRKALEDLRKLIEDNEREIRKLLKAEELVRELERRVDESRKRAEDLIRDNKKKNDEARRRVEELIRRNREENRRIAEEARK

SEQ ID NO: 6489 - protein, 172 aa, Artificial Sequence; identical to SEQ ID NO: 6488
  Synthetic

SEQ ID NO: 6490 - protein, 179 aa, Artificial Sequence
  Synthetic
SDAERIMRESEELNERINDVVRRVAEESKRLNDRINDVLREVSKRNKDLIKRIKEVVDRNPEKKEEIKRLIDKLDKVLEDVERRIRKLIEDDKRRIEEVKRRLERLIKEDKRKIDEARKEGVEERIIERLDRLTKKSLEELKRIIEDLKRRTKESEDRARELIKRNREENKRLLEEAEK

SEQ ID NO: 6491 - protein, 179 aa, Artificial Sequence; identical to SEQ ID NO: 6490
  Synthetic

SEQ ID NO: 6492 - protein, 179 aa, Artificial Sequence
  Synthetic
DEAERIREESEELNERINREVDKMIDEDRKLNEDIRRTVEEMVREIKELLDRIRKVLEENPEKKEEIEKLIRRVKEKIRKAKEDLERLLRELEDRNRKVKKKLEDLIREDEERIRRAEEAGVDKEIIKELRETTERSRKRLEELIRDSEEKNRRTEDELEKIIRELDERLRRLEEEARK

SEQ ID NO: 6493 - protein, 179 aa, Artificial Sequence; identical to SEQ ID NO: 6492
  Synthetic

SEQ ID NO: 6494 - protein, 179 aa, Artificial Sequence
  Synthetic
DEAEDIARKSRELNERILRRVKEMIDEDRDLNREIEKTLRRVSERNRELVEEIKREVERNREKREEVEKLIKRLDDELRRILEELTRRLRELEKKNEEVRREMEKLLKEDRDRIRRAEEAGVEERIIEELRRLTEDTKRRADKLIKDSEDENRKTLRRARELIEENRDRNRKLEEDVRR

SEQ ID NO: 6495 - protein, 179 aa, Artificial Sequence; identical to SEQ ID NO: 6494
  Synthetic

SEQ ID NO: 6496 - protein, 179 aa, Artificial Sequence
  Synthetic
DEVREIVKRSDDLNDTIREVLKRVADDSRRLNEEIRRKVTEASRENEELIKEIEDRARKNPEKKEDLRRLVRELDEKLKEVKRDLERLIEEDKRKIERVLEELRRLVEEDRKRIDEAREAGVDEEIIKRLRDRTKKTLDEVRKIIEDLKDESRKTSEELRELIKRNKEKNDELLERLER

SEQ ID NO: 6497 - protein, 179 aa, Artificial Sequence; identical to SEQ ID NO: 6496
  Synthetic

SEQ ID NO: 6498 - protein, 179 aa, Artificial Sequence
  Synthetic
SEAEKIERESRDLNRRIREVVERASEDNERLIREIRKRLEEVVRTIEKLIRDILERVRKNPEKKEEVKKLIDDIRREIDRIKKELEELVREADKRLEEVLERLERLLEEDKRRIDEARRAGVDEEIIKELKKITDKTRRELERLIDENRKRNEELLKRVEDIIRELKRRLEKLDEEVKR

SEQ ID NO: 6499 - protein, 179 aa, Artificial Sequence; identical to SEQ ID NO: 6498
  Synthetic

SEQ ID NO: 6500 - protein, 179 aa, Artificial Sequence
  Synthetic
SEVERIEKESRDLNREIKEEAKRASEDNRRLLEDIRRKLEKVSEENKDLLRKIEEEMRRNSEKKEELRRLVKELDDKLTEILKDLTRLVEELDELLKEVLKRLKDLLREDREEIDRARKEGVDEEIIKKLKRLTDETEKELEKLIRKNEKENRDLEREIRRLIKENRDRNRELKKRAED

SEQ ID NO: 6501 - protein, 179 aa, Artificial Sequence; identical to SEQ ID NO: 6500
  Synthetic

SEQ ID NO: 6502 - protein, 179 aa, Artificial Sequence
  Synthetic
SEVEKAVREIEELIKRIEDRLREMARRVEETNKTLLRDVERLSKENEELVREIKERVRENPEKKEEVEKLIRELDKKLKEAEEEVRRLATEDAEDIKRAMKEITDLIEELRERLKRIRERGLREELVRELERKIKTVLDRVEEIIRRLDKKTKDTVRRVRELIEDNKRKNKKILDEVRK

SEQ ID NO: 6503 - protein, 179 aa, Artificial Sequence; identical to SEQ ID NO: 6502
  Synthetic

SEQ ID NO: 6504 - protein, 179 aa, Artificial Sequence
  Synthetic
SEVERIVKESEELNEKITRDLEEAEKEVRKTNDEIRRVVEEMSRRNEKLIRDIDDEVRKRPEKKEDVDELIKRVDELLERALRELEKLIRDDRELIEEVSRRIEKLVRDDEEKIRRAKEAGVDDEIIKELEKKTRDNLDKVRKIIERLRRETDKTEKELRDIIRKNEDENRKLEEKVRR

SEQ ID NO: 6505 - protein, 179 aa, Artificial Sequence; identical to SEQ ID NO: 6504
  Synthetic

SEQ ID NO: 6506 - protein, 179 aa, Artificial Sequence
  Synthetic
SKVEKLAKEVEETNRRILDEVRRASEENKDLVRRIEETVKRAVEEIKRLIEKIDDVVTKNPEKKERVKELVEEIRERIKRILRELERLIEEADRRLEEVLRKLKKLIDDDRRKIDRVEEAGVDEEIIKELRKRSEDSEREARKLIRRNEEENEKLRKKLKEIIDRLREELEKVLDRVRK

SEQ ID NO: 6507 - protein, 179 aa, Artificial Sequence; identical to SEQ ID NO: 6506
  Synthetic

SEQ ID NO: 6508 - protein, 181 aa, Artificial Sequence
  Synthetic
SEVERAAEESKRLNKTIRDENREVLREIRDLIRRMKEENRRMVKRVDEVLKEIRELFRRDKIDKLVEELLRRVRDIIRRDHERVRRVLERIERLIRKDHERVRRVLKEDERLIRELEKKRTDEKVREILERLERESRKTAKELDESNREAEELLKRVADEAKKSNETLRERLERLAREAEK

SEQ ID NO: 6509 - protein, 181 aa, Artificial Sequence; identical to SEQ ID NO: 6508
  Synthetic

SEQ ID NO: 6510 - protein, 181 aa, Artificial Sequence
  Synthetic
SELEELIRKIEELIRRIEEENKEMVRRSRKLNEDLERRLDEVRRRVEKLIREIEELLKRDKIDELIKKLVRELEEVIKRIEEEIRKLLEEDKRLIDADHERVKKVVEDLDRELKRIADERRDERAKRLLDELKRLIKELEDKLRESNEELKRRSDDSARKAEKILRELKKKVDEMADRARK

SEQ ID NO: 6511 - protein, 181 aa, Artificial Sequence; identical to SEQ ID NO: 6510
  Synthetic

SEQ ID NO: 6512 - protein, 181 aa, Artificial Sequence
  Synthetic
DEAEKLAEDVRRVIKRIREDNKRLSDRNKELLEEVEKDNKKSEEDVKRVIEDIERRVRELRDDRGVDELIKRVLEELEKLSDDDRRRLKRMIEESRRSLEEDRERIERVTTELRELLERLKEKVSRELLDELRRRIEELRKRLEDSNRENEEELRKIADKVRKTNKRLNEEVEDMFRRAKT

SEQ ID NO: 6513 - protein, 181 aa, Artificial Sequence; identical to SEQ ID NO: 6512
  Synthetic

SEQ ID NO: 6514 - protein, 175 aa, Artificial Sequence
  Synthetic
DEARELLRDDERLNRELNDLDRDSSKKDEDLNRKLNEDDKESVERADTLLERIKREVRTEDVVREVRRRLREMLEENRKLTKKAKDDVKRSLDENRELTKKMEEDVRRTLRRIEKDGVDRELIRELEERNRDSVRKSRKSNEDNERTNRESIERSRRSNEELRRRAEELIKDLRR

SEQ ID NO: 6515 - protein, 175 aa, Artificial Sequence; identical to SEQ ID NO: 6514
  Synthetic

SEQ ID NO: 6516 - protein, 175 aa, Artificial Sequence
  Synthetic
SEVEELLERDKDLNRRVNELNEKTSREDEKLNDEINKRIDRLVERARELLERIRREVRTEDMVRKVLEELKRLLEELRRLIETADKEVEDSLRDDERLLKKIKEDAERTLKEARDRGLDERLIRELEERNRESVERVRRSLKENEDRNRESKKRLEDLLREVKRLMDKLEEDLRK

SEQ ID NO: 6517 - protein, 175 aa, Artificial Sequence; identical to SEQ ID NO: 6516
  Synthetic

SEQ ID NO: 6518 - protein, 175 aa, Artificial Sequence
  Synthetic
SEVEELLERDKRLNDEANRLNRELVERDKRLNEELNKELKRMADEIKRLLEEIRRKVRTEEVVEKVTRELRELLERLRRLLEEMSKEARKSLETDKKLLKELKRRAEETLREIRERGLDERLIEKLERENRESEKRARDSNKELEKRNRESEDRARRILKKLEDDVRRLKKELET

SEQ ID NO: 6519 - protein, 175 aa, Artificial Sequence; identical to SEQ ID NO: 6518
  Synthetic

SEQ ID NO: 6520 - protein, 174 aa, Artificial Sequence
  Synthetic
SELEKVRTDVERVIRELEKELKEIDEENKKVNKDVEEEVKRIEEENKEMNDRLDDLRRRGLDKKDLLREIEKAHRESRKKIEDIKKKIEDALRETEKKIKELEKKIRDVLREAEKRIKSKEMEEVREELERLLRRIKKILEELRDENRKSLERLEDVLRRLEKRNRDTLEEVKR

SEQ ID NO: 6521 - protein, 174 aa, Artificial Sequence; identical to SEQ ID NO: 6520
  Synthetic

SEQ ID NO: 6522 - protein, 174 aa, Artificial Sequence
  Synthetic
KETEDVERDVERVIREIDTKLKEIEKKNDKANKELEEKLKKIEEDNKRVNERLKRLREEGLDKRDLERELRDVLRRTRDLIRELEEELERIVRDTRRLAEEIERELKRIVEELDKKIKSEEMRRVREEAKRLLDKVKKILRDLERRNEEVLKKIKDIMRRLEKRNRDTLEEIRT

SEQ ID NO: 6523 - protein, 174 aa, Artificial Sequence; identical to SEQ ID NO: 6522
  Synthetic

SEQ ID NO: 6524 - protein, 174 aa, Artificial Sequence
  Synthetic
SEEEKVLEEVKRAIDELKKELEEVEERNKRVNDDIRRLTDEIRKENKTANDRLRKLLEEGLDKKDLLKEIKEILERTERLSEETREKLKDVLRKTEKLIKEIKDKIDEIKKRADEKIKSKKLEEVRKEVKRLKDEVEKILKDLRKRNKDLLEEDKRVLDRLRETNEKTLDDVRR

SEQ ID NO: 6525 - protein, 174 aa, Artificial Sequence; identical to SEQ ID NO: 6524
  Synthetic

SEQ ID NO: 6526 - protein, 178 aa, Artificial Sequence
  Synthetic
KEEEDITRRIDKILRDLREKLRDVNRRVEELSKRLHDKLEKVLKRIKDEAERLRKEIREKLRDERRVREIEREVREIVERVEEVVRRLKEENKEIEKENRRNSTRLKEEMDRVKEDIDRKRVTKELEDKVEKDARDVERHIRKDLTDVRRRHEDLDRKIKELLDRVRKAIRDVEEKIK

SEQ ID NO: 6527 - protein, 178 aa, Artificial Sequence; identical to SEQ ID NO: 6526
  Synthetic

SEQ ID NO: 6528 - protein, 178 aa, Artificial Sequence
  Synthetic
SKAEELLRRVEELLKRVKDKVDDIVRKIEKSNRDLERRDEEVLREVEETNRRLEEELRRRGSDEDKLRELKEESDRSKERLDDAIRKSRKLSEESERELREITKELRKELDKIREELDRDGADEEVLRRLEELIRRAERKLEKMLEDLTRLNKEWEDRTRKLLEDLRRINEEIKRKIK

SEQ ID NO: 6529 - protein, 178 aa, Artificial Sequence; identical to SEQ ID NO: 6528
  Synthetic

SEQ ID NO: 6530 - protein, 178 aa, Artificial Sequence
  Synthetic
SEKDELLRDVRRLLKEVEKELEEIRRRVTESNRELEKLVREVLEESKRSDDKLREDLERAGLEKERLDKLEEDLKRHNEKLKKAVEDLKRTSEDSRKKLEDLARDVKRLLEDVERKLRKDGADKDLLERLKELIKRLKDKLKEIADRLRRINEDIERKIREILEDSRRFNEEIKKKID

SEQ ID NO: 6531 - protein, 178 aa, Artificial Sequence; identical to SEQ ID NO: 6530
  Synthetic

SEQ ID NO: 6532 - protein, 184 aa, Artificial Sequence
  Synthetic
STLETLEDEVRKIVTDIERVIRESNKHLKKSIDDVERVIEEIERRAREIVKKVRDVISEDRSEDDVRDLKRELEELLKRLEELVRDLERKAEEDLDRLRKEYEKLKEDLERLLKELKDKADRDGTDEKLERILREIKRIVEDLKKKVEDSLKRYEEELERLKEDLRRLLKRIRDEVEELKKESD

SEQ ID NO: 6533 - protein, 184 aa, Artificial Sequence; identical to SEQ ID NO: 6532
  Synthetic

SEQ ID NO: 6534 - protein, 184 aa, Artificial Sequence
  Synthetic
DEEEKLRDEVEKIVKKIEKAIEDLRRHAEKSVTDIRKVLKELEDHIRESVKDAERFISEDRSEESVERLVRKLERNLDELRRRAEELKKRIDEDLERLKELVRRLKEELEKMLRDLREKVRRLGTSEKLEKILREIERIVEKLKEDLDRLLKRYEDELRRLKEELERILDTYRRLLEELERRLR

SEQ ID NO: 6535 - protein, 184 aa, Artificial Sequence; identical to SEQ ID NO: 6534
  Synthetic

SEQ ID NO: 6536 - protein, 184 aa, Artificial Sequence
  Synthetic
DTARELEREVKKIVDEIEDVIRRLRRHIEESVKRAEKVLREIEKHARESAKRIADVVSKDTSEETVEKLKEEIRRDFKRLEDEVRRLKKELEDNLERLREIVKELEDRLREALKKLREKVRRDGTTEELKEILERIEEIVKRLEEELRRLLEEYKKRIEELAKRIKEVLDEYRKILKRLEDETK

SEQ ID NO: 6537 - protein, 184 aa, Artificial Sequence; identical to SEQ ID NO: 6536
  Synthetic

SEQ ID NO: 6538 - protein, 176 aa, Artificial Sequence
  Synthetic
DEAEELRKDVKRVLDEIKKRHEELLRKVREDLDRIRRKLEELAKRHRELLKEVKKIVDRDGTTEKLKRELDELNKETEKRLRDLKRELEELLRELKKRLKDSNDELKREVERLRRENLVDDKIRREIDELIKKLEEESRRIEEEIKKLVEDLKREADKIMEELERETDKLKKELDK

SEQ ID NO: 6539 - protein, 176 aa, Artificial Sequence; identical to SEQ ID NO: 6538
  Synthetic

SEQ ID NO: 6540 - protein, 172 aa, Artificial Sequence
  Synthetic
SEKEKILEEIREVLKRILDRLKKELEDDKKSLDDNKRRTEEALREDKKSLEEIRRANVREDEVKKLLEDNKRRNEEVRKRSEDDLKKNKERNERLAEELKKEVDKLREDIERANLDDKILRDLEKALDKLRRDIEEILKRSRDLNKKLEDDNREALRRSEELNRELEERERK

SEQ ID NO: 6541 - protein, 172 aa, Artificial Sequence; identical to SEQ ID NO: 6540
  Synthetic

SEQ ID NO: 6542 - protein, 172 aa, Artificial Sequence
  Synthetic
SEEERIRREIKKILDDIKEEAERRLEEDKKSLDENRKKTEEVLKKIRDDLKRIEEAKIPREEIKDELDRLRREIEKIARESEKDLRRNKEENKRLAEDLKRKLDKLKEDLDRANLDDEILRRIEKLIEDLKRTIDKILEDSERLNRKLEKENREALKELRDLLRELEERLKK

SEQ ID NO: 6543 - protein, 172 aa, Artificial Sequence; identical to SEQ ID NO: 6542
  Synthetic

SEQ ID NO: 6544 - protein, 172 aa, Artificial Sequence
  Synthetic
EELERILRKITEMLREIARKLKKLLEDDKESLDRNKEKTEDDLRRDKESLDRLRKSNIPEEEVRKRLKENKDRLRKRSKESKEDLERNEDENDKAAKDLKRLLDELREEIERRNLDDKILRDLEELLKDLERKIRRILDESRKLNDELRKENKKAEDTSRRLNEELEERLRT

SEQ ID NO: 6545 - protein, 172 aa, Artificial Sequence; identical to SEQ ID NO: 6544
  Synthetic

SEQ ID NO: 6546 - protein, 172 aa, Artificial Sequence
  Synthetic
SELEEILKRVEDVLRDILRKLKEVLDRAEKVIRDNKRKTKKMLDDDKRSLDEIRKAKIPRDEIKDVLRRNKDRNRKLAEESDRDLERLREELERIAKELEDLADELRKEIEKANLDDKILRELEKRLEDLRKRIKDILDDLKRKLEELKRENEKFLRRSKKLNEDLERELET

SEQ ID NO: 6547 - protein, 172 aa, Artificial Sequence; identical to SEQ ID NO: 6546
  Synthetic

SEQ ID NO: 6548 - protein, 172 aa, Artificial Sequence
  Synthetic
DELEEIRDRIKRKLEKLKEETKRTLEEDRKSLDDNRRKTEEALRRDRESLERIERAKIPSDKIREVLERNKTELRKIFERSREDLRRNKERLKKANEDAKKKIEDLREEIKKNNLDRDILEELTRLLDKLRRDHERVSEESKRRNDELEEENRRVLKESEDRNRELEERLRQ

SEQ ID NO: 6549 - protein, 172 aa, Artificial Sequence; identical to SEQ ID NO: 6548
  Synthetic

SEQ ID NO: 6550 - protein, 175 aa, Artificial Sequence
  Synthetic
SELEKLLDDVKKDLKRIEEHLRRDEEDSKRRIEELERHLERDKKEVEKAIRELDKKPRDDDLKRELEEILDRNKKNLDELRRELEKIDRDNKKNLDELKRELEEIEKKIREIVKRDKVDEKVVRTIEKLLTDLERKIREIEKRSKELLTRLEEKIKKAERESRKLLRELTERIDR

SEQ ID NO: 6551 - protein, 175 aa, Artificial Sequence; identical to SEQ ID NO: 6550
  Synthetic

SEQ ID NO: 6552 - protein, 174 aa, Artificial Sequence
  Synthetic
DELKKLLDDVREVSKRLNDELRKIMEEIRKVSEDLNKELDDIVRKIKKVIDDISEKIKRDGPREEVKEELKRLEEELRRLLKRLRDEHRRLRERLERLLKELEEKHEELADRVRKANVDEEIEKEIRELLKENRRRADEIRRRAEKSLKDNERRVEKVEREAERLLREIEKELK

SEQ ID NO: 6553 - protein, 174 aa, Artificial Sequence; identical to SEQ ID NO: 6552
  Synthetic

SEQ ID NO: 6554 - protein, 174 aa, Artificial Sequence
  Synthetic
SELEKLAEDVKRKLTEIREKIKKLLKETRDVSRELNKELEDLLRRTTEVIDEIRKKIEKEGPREEVRELLKKLEKDHRKASEEVERKHEDLRRRHDKASKEVEKELRDLKDEVDKANVDEDIKKEIEDLLRDLERLLRDVNREVEELLKENRKRLEEINRTVERLLEEIEKRLR

SEQ ID NO: 6555 - protein, 174 aa, Artificial Sequence; identical to SEQ ID NO: 6554
  Synthetic

SEQ ID NO: 6556 - protein, 174 aa, Artificial Sequence
  Synthetic
SELEELVRRLREVSKRLNEELDRILDRTRRLAERISEDIKRLADETKEVIERIKEEIKKKGPDERVKRKLEELKRRHDEASKTVRKKIEDLLKEHRDLSKELEDKHRDLEDKLRKANVDEEIEKEARELLRDNRRRIEEINREVEELIRRLEKLLKEVNETVKRLLEEIRKDLD

SEQ ID NO: 6557 - protein, 174 aa, Artificial Sequence; identical to SEQ ID NO: 6556
  Synthetic

SEQ ID NO: 6558 - protein, 174 aa, Artificial Sequence
  Synthetic
SELEKLMKDVKEVIDEIRKKLRKILEDTTRVAKRNEEKLKRIADEAEKVIREIRDEIEKKGPRDEVERRLRRLETELRRLLDESRKENERLRREHEKLSKELRDLLDDLRRRVEEANVDEEIKKRIDDLLRRIEKEIEEINRRVEELHKRLEDLHKEIEDKVRELLTRIEERLK

SEQ ID NO: 6559 - protein, 174 aa, Artificial Sequence; identical to SEQ ID NO: 6558
  Synthetic

SEQ ID NO: 6560 - protein, 171 aa, Artificial Sequence
  Synthetic
SEVEEILERIERLIRDDNRKLKDVERRNRENIKEDNERLKRMMEELKKIADEIRKADVDKDTLEKLLRDLRRKVEKIKRDNERHNDEDRKTLKRIHEDNKRILEEIKDRIDKAPVDDSIRRTVEKLLEDNRRRNEEILKESEDLLRKNREKTKEIVERAERLLDKLRRERK

SEQ ID NO: 6561 - protein, 171 aa, Artificial Sequence; identical to SEQ ID NO: 6560
  Synthetic

SEQ ID NO: 6562 - protein, 174 aa, Artificial Sequence
  Synthetic
DEAEELKERIERLSRRIDEEYRRLLEDYERLLRELEKKIEDLKRELEKLVEELRREGTDEKLDRRLEEMLRELERELRELVERLRRDLEEIRKHIKRSRDRHERANRELERELKETGVTEELKEKVKEIVKRSEEDIRRLKKHLDESIRTAEEVIRRLREKIKRIIDTVRDAKR

SEQ ID NO: 6563 - protein, 174 aa, Artificial Sequence; identical to SEQ ID NO: 6562
  Synthetic

SEQ ID NO: 6564 - protein, 174 aa, Artificial Sequence
  Synthetic
SELEELEKRIRRLSEEIKKLLDDLRREYEELVKELRRRLEELRKEIERLSEELKAEGRREELDRELRKLEKELEDKLRELKKRLDEDKERVEKMIRDLEERHRRANKELEDELRRDGVTDEMREKVDEIVKRSRDVIKELREHIEESIRRAEKVLRDLEREVRKIIEDARERTR

SEQ ID NO: 6565 - protein, 174 aa, Artificial Sequence; identical to SEQ ID NO: 6564
  Synthetic

SEQ ID NO: 6566 - protein, 174 aa, Artificial Sequence
  Synthetic
REVDELRKEIERLSRKIEDDLKKLEDRYEELLEKLERDLEKLKEDYDRLLRKLEEDGDDEKLKRELDKDREKIERDLEDLKRKLRTDEKEVRDRVKELRDRHREMNERLKTRLRRDGVTEKAEEDVRRTVTESKKVIDELREHIKKSIREVEEAIKRLREHVERSIRRAEEATK

SEQ ID NO: 6567 - protein, 174 aa, Artificial Sequence; identical to SEQ ID NO: 6566
  Synthetic

SEQ ID NO: 6568 - protein, 177 aa, Artificial Sequence
  Synthetic
SEEEKLDEDLERLREEIRELHRELEELIKKLREEVRRIIEKVRTHLKRDRDRAKEVIEKVRGEKDLTKVDEENERNTRDLERKLEEVKKEIKKLADDLKRRNEEIKKELKRKAEELKKRIKDERMREKLEKIKKDVDKLSKELHDKLDKVLKEIEELLRDVKRAIKKVNDDIKERLR

SEQ ID NO: 6569 - protein, 177 aa, Artificial Sequence; identical to SEQ ID NO: 6568
  Synthetic

SEQ ID NO: 6570 - protein, 182 aa, Artificial Sequence
  Synthetic
DEIRELVRRFEELVRRNVEHLKKLLRDAEKLVKENEKHLEDLLREIEETVKRLLDKIRREGPTEELKREAEKKAKELEERLKKNKEDHEERDKRIRDALKRNEDEHRKRSERLKEELDRDIKDKDKARDVEKRIEDLNREIKEIIRRVEERLKELNKRIEKLLEEVRDTLRRLKEELDRAMT

SEQ ID NO: 6571 - protein, 182 aa, Artificial Sequence; identical to SEQ ID NO: 6570
  Synthetic

SEQ ID NO: 6572 - protein, 182 aa, Artificial Sequence
  Synthetic
SEIEELLKEVERRVRENKKHLKRLLEDIKRLVERNAEDLERILRDAERIVRELIKKIRRDGTDKKLRDEAKEASDRIREKLEENERRHREESERLKEKLERNKRTHDDEDRRVRRRLERDIKDKDKLRRIEKALEDLNREIEEILRRVKEEIERLNREIEELLKRVEEELKRLEKELEEELK

SEQ ID NO: 6573 - protein, 182 aa, Artificial Sequence; identical to SEQ ID NO: 6572
  Synthetic

SEQ ID NO: 6574 - protein, 182 aa, Artificial Sequence
  Synthetic
SEIEELLKEVRKRVKENAEDLKRLLDEAKKLADDNVKHIEDLIREVEDIIRRLKERIKRTGNTEELRKEIKDKADEVREKLERNKRRHDELDKRLKDELRRNKKEHEEESKEIEDRLRRDIKDKDKARRLREELRKLNEDIERLLKRVEDELRKLNKKIKDILEEVEEVLERLLRELREEER

SEQ ID NO: 6575 - protein, 182 aa, Artificial Sequence; identical to SEQ ID NO: 6574
  Synthetic

SEQ ID NO: 6576 - protein, 187 aa, Artificial Sequence
  Synthetic
REKEELKKELKKLIEELKRSHDELKEELKRLLKRIEDILRENRKTTEDLSRELKKLLEELRKKVSEEELKRLRDELERLKKEDEEMNRRIEEKLRRLSKRVKDYLDTSRKRLEDLVRRVDEAASQDRRREELKRLLEELRRMIKELKDRNRKALEELEKVIREIEEEIKDINRRLREEIRRLEEEAR

SEQ ID NO: 6577 - protein, 187 aa, Artificial Sequence; identical to SEQ ID NO: 6576
  Synthetic

SEQ ID NO: 6578 - protein, 187 aa, Artificial Sequence
  Synthetic
SKEEELRETLKRLVDEIRRMLEEDRRSDEELVRRIERVLEEDKREDDRLHKRLRDELRRLRKDVDEKTLKEIEEKIRELNKRNEDSLKKIEDDLRRLNEENRKSLEELEKKLEKLARDAEEVLKRDKREDELRRLLRELEEMAKKLEKELRDNNRDLRRVAEELKELIDDNTRKLKEVIEKLEREIK

SEQ ID NO: 6579 - protein, 187 aa, Artificial Sequence; identical to SEQ ID NO: 6578
  Synthetic

SEQ ID NO: 6580 - protein, 187 aa, Artificial Sequence
  Synthetic
SEKETVRDELRKLVETIRKLLEEDKESDKRLADRIRELNEENKEDTERLIRELEKVLEELRKKVSEDELRKLRKRIEDLRRRDEELNKRSREKLEDLNERNKDSLRRIEDELRKLVEEAREVEKRDNDEERLRKLLERLERVIRDLLRKIEENNKRLRKAIKELLDELRKINKELREVIKKLLDDAR

SEQ ID NO: 6581 - protein, 187 aa, Artificial Sequence; identical to SEQ ID NO: 6580
  Synthetic

SEQ ID NO: 6582 - protein, 187 aa, Artificial Sequence
  Synthetic
SEKERLKEELEKLSKEIEDILRDDKRSDDELRRRLRELLEKDRREDERLNEELKRMLEEARKRVSEDELRAIKKEIEDLNRRNEESLRAIEEKIKRLNDENRKSLEEIRRRLKRLVEEVDELRKRDNREELLRRLLEKLKRMAEKLKRDIEDNNRKLRKVATELAKEIEDNSEKLREDAKRLSEKIK

SEQ ID NO: 6583 - protein, 187 aa, Artificial Sequence; identical to SEQ ID NO: 6582
  Synthetic

SEQ ID NO: 6584 - protein, 187 aa, Artificial Sequence
  Synthetic
DEEEELRKRLEKLSKEVRELLRRDEEEDRRLNRELEELLKDHERTVRDLSREVEDLLRKARRKVSEEELTRLRKKLRDLEEESKEALRELRRRVEELNKENKKSLDDLERRLKELEDRAREVEKRDRREDELRELLRRLEDVIRKLAEDLKRNTEDLRRVIKELAERLEELNKRLKREIRRLKEELR

SEQ ID NO: 6585 - protein, 187 aa, Artificial Sequence; identical to SEQ ID NO: 6584
  Synthetic

SEQ ID NO: 6586 - protein, 181 aa, Artificial Sequence
  Synthetic
EKSERLRERLRDLLRKHKELLDRNEKTLEEAERRVEKLLEDNERELKKIEDEVRELLKRLEDDETLRRLLEEAKEVLERIRRKNKKLREDLKRVLERIKEENDRHHEKVKEDLKRIEDRIRKDGVTKEILREIEERFKRLAEDLKRSNDKVRELVDKAEKDIRKSNEELRKLARDVRERVR

SEQ ID NO: 6587 - protein, 181 aa, Artificial Sequence; identical to SEQ ID NO: 6586
  Synthetic

SEQ ID NO: 6588 - protein, 181 aa, Artificial Sequence
  Synthetic
SDEDRLRELLRKLREDHERIVRELRKRLEEVLREIERLLKKNEEDLERIRREVEELLKRISDDEELRRLEKRAEEALRKIREENKKLRKEVRDTLRDILRRIEEHHREVDERLRRIEDRIRKEGATEDIEREIRDTLRRLREDLERIKEDVERLRREIKKRIEDSNRKVRDLLRRVKEAVR

SEQ ID NO: 6589 - protein, 181 aa, Artificial Sequence; identical to SEQ ID NO: 6588
  Synthetic

SEQ ID NO: 6590 - protein, 181 aa, Artificial Sequence
  Synthetic
DEERKLEKSLKDVEDTHRRLLEKNDEDLKELRKRVEDMLRRLEDALRRILEDIEEKLKRIEDDETLKRLRKRVKELLDEIRRRLERLEREVDKRLEEIKERNDRHHEEAKKELKRIRDKIRRDGADEKILREVEDLLRKVAEDLKRSNDEVKELAERLEETIRDLLRRIEEILKEIEERVR

SEQ ID NO: 6591 - protein, 181 aa, Artificial Sequence; identical to SEQ ID NO: 6590
  Synthetic

SEQ ID NO: 6592 - protein, 181 aa, Artificial Sequence
  Synthetic
KDEERLKRFLEDIRRRHRELLERNERALDEIRRRHEELLRRNEEAIKDIERRVRELLKRLEDDDTLRKLEKKVRDDARRSRKRNEEHHREVKEELDRSRKRNEDHHREAEREMRRIEEKIKKDGATEEILKEIEELLRRLEENLRRNHKEVRELLEKVRRNIEENHREVRRLLEEVERRAR

SEQ ID NO: 6593 - protein, 181 aa, Artificial Sequence; identical to SEQ ID NO: 6592
  Synthetic

SEQ ID NO: 6594 - protein, 181 aa, Artificial Sequence
  Synthetic
DEEETLEDVLRELEERVEKLLRDLTRDLERVEKEHKELLKRNKEAIDEIEKRIEELLKRIEDDEKLRRLKEEVRKLVEESRERNKRHHKEVREVLERIRELLERLEKELRRALEEIRDKIRKDGATDEILRKIEELLRRAEEVIRDLERKVRKLERDIRENIKKNHREVREILRKIEEDVR

SEQ ID NO: 6595 - protein, 181 aa, Artificial Sequence; identical to SEQ ID NO: 6594
  Synthetic

SEQ ID NO: 6596 - protein, 175 aa, Artificial Sequence
  Synthetic
KDEERLRELIKRINTEVKKSLDENKERLDKVEEDIRRSLKENEDRMERVRREVEKANVDEKVKKEAEDALRELKRKHDELRKEVEKLVKELEDKHKELEERHREASKDVERVLDKEIDKIEEIKKRLEDILEETRDMSRRLNEELRRILERVKEVSKELNRELEEILKRVEDARR

SEQ ID NO: 6597 - protein, 175 aa, Artificial Sequence; identical to SEQ ID NO: 6596
  Synthetic

SEQ ID NO: 6598 - protein, 175 aa, Artificial Sequence
  Synthetic
SEKEDLERELEEVRRRVEESLRKNEEDVKRVRDELKKLLDENRKELERIRREVERANVDKRVLDEADRLLKELEDDHKKLEEDAKKALDELREEHKRLEETLRRMLKRIKEVLDRESDKMEEIKKEIEKILRDIERVSRELNKKLEEIVRRLKKVSDELNRRIEEIAERVRRRRK

SEQ ID NO: 6599 - protein, 175 aa, Artificial Sequence; identical to SEQ ID NO: 6598
  Synthetic

SEQ ID NO: 6600 - protein, 175 aa, Artificial Sequence
  Synthetic
KDEERLDEELKRVNDEVRRLLARNEETLERIEREVKRLLDENEKRAEDIRKEVEDSNVDERVKTEAKKALDELRERHRELKKELEKLAEELRRKHEELEKRHRDKSRRIKEMLDKETDKIEEIEKTIREELKETRKVSEELNRELERILRELRKVSEELNKDLEKILRRVKKERK

SEQ ID NO: 6601 - protein, 175 aa, Artificial Sequence; identical to SEQ ID NO: 6600
  Synthetic

SEQ ID NO: 6602 - protein, 175 aa, Artificial Sequence
  Synthetic
SEEERLREILKDINRRVEELLKENEERMERIREELEELLERLKEELERIRKRVEEENVDEEVKRRFDEVAEEIKRRLEELKKEAEDKLRRLREEHKKLKEEHERASERIEEVLDKESDKVEEIEKDIRRLLRETERVSEELNKKLEEIARELREMIKEIKERLKRILEEVEKRRR

SEQ ID NO: 6603 - protein, 175 aa, Artificial Sequence; identical to SEQ ID NO: 6602
  Synthetic

SEQ ID NO: 6604 - protein, 175 aa, Artificial Sequence
  Synthetic
SEEDELRRLLKEVNERVERLLDEIRKELEKIAEELRDLLKKNEDKLREIKRRVEENRVDEEIKKDAERALTELKEEHERLDREAKKDLDRIRKELERLEEEHRRVSERIEEVLDKESDKTEDIAREIRELMERTRRVIEEIKKELRDILEKLRRVSEELNKKLDEILKRIEDRTR

SEQ ID NO: 6605 - protein, 175 aa, Artificial Sequence; identical to SEQ ID NO: 6604
  Synthetic

SEQ ID NO: 6606 - protein, 182 aa, Artificial Sequence
  Synthetic
REIEKLIRDYRRILRELSEKIRRLAEEHEDIVRKLIETLKRLIDEIRKIMEDLSRLLRRDGSTEELRKRARKSLEDLRRKIREIKKRLEEEHKKTRKKVKELEDEAREKTKELEKRLKDANVPKKLMDELRRVSEEVNTRLEKLLRDLEKKLRDSEERAKELIRRIEKTLEDIDRRLKEEEK

SEQ ID NO: 6607 - protein, 182 aa, Artificial Sequence; identical to SEQ ID NO: 6606
  Synthetic

SEQ ID NO: 6608 - protein, 184 aa, Artificial Sequence
  Synthetic
RELEKLMEDAERYAKRSMEAFEDLIRKHDELLKRLEKKLRDLIKRIEKLLREIKEKIERTGTTEDLEREVREIVKRIREFLERLDRDAKRIEKENRDVDERLKRENEKVSRRLREVLEELRKDVSEELLKRAKELIETIEERSKRVVDENKRVVERSRRRLKKLLEDIERVLERIERRLTEAKK

SEQ ID NO: 6609 - protein, 184 aa, Artificial Sequence; identical to SEQ ID NO: 6608
  Synthetic

SEQ ID NO: 6610 - protein, 184 aa, Artificial Sequence
  Synthetic
SELEKLLEDIERYVKRSKEKARELIKRHKEYVRRSEERLRRLIEKLEKLAEKLKELIRRTGTTEELEKELKDIAREVREVLKKIKEDNKRAEDKNREEDERLKRENEKMKEDVRKILADLKKDVDDSLLKEVEDLLRKVEEESRRVIEENKRVVEESRKRSERLLREIEKELRRVEKEFRDEKR

SEQ ID NO: 6611 - protein, 184 aa, Artificial Sequence; identical to SEQ ID NO: 6610
  Synthetic

SEQ ID NO: 6612 - protein, 184 aa, Artificial Sequence
  Synthetic
SELEDLMRDVKRYADESARRIEEIIKRHRKLVREISKKIEELIRELRKLIERILELIRRDGDTEELKKEVEKIREEVEEMLERIKREVDKVKDENRRLDEKVRRDNERKKRDLERLLRELRDKVDEELLDRARKLIREIEERSKELSKRNKEEVDRSEERIRRLLKRAEEELRRVREELKEASR

SEQ ID NO: 6613 - protein, 184 aa, Artificial Sequence; identical to SEQ ID NO: 6612
  Synthetic

SEQ ID NO: 6614 - protein, 181 aa, Artificial Sequence
  Synthetic
SREEEIRELLKRSKESLEKLLRELDKEHKESEKSARELLKRNEKRLREIREEIRRLNITEDLLKEIEDLLKRLEDKNRKVAKEYEDLLRESKRHLDELRKEYERLLKELEDKLEDLRRRRKSEEVMKRLLKEIRDVNKEITERLEEHRKRLEEINRDVERIIRELNEEHKEVLKRIREKAK

SEQ ID NO: 6615 - protein, 181 aa, Artificial Sequence; identical to SEQ ID NO: 6614
  Synthetic

SEQ ID NO: 6616 - protein, 182 aa, Artificial Sequence
  Synthetic
SEREELRKLLRRIEEEAKRLLEELKRTTDDTRRENEELLRRLEELSKETKKRVEDLLRELDRDKTVKDRLRTELERLERRDRELLERNKKHNKDLEDTDRDLIRKLKKLLDELKERAERVEKTGEDVKDVLKKLEDVLRELKKAVEKIKRDNKRAVDENRELVERIMKENKDAMKKLEEDVR

SEQ ID NO: 6617 - protein, 182 aa, Artificial Sequence; identical to SEQ ID NO: 6616
  Synthetic

SEQ ID NO: 6618 - protein, 182 aa, Artificial Sequence
  Synthetic
SEREELRDLLRRIKEDAERLLKEHRDLLEEVRKEVEKLLRELRKLSKETEDEAERLLRELRRDETVKEKLKRRLDELRKRDEDVERRLKEELDELRRRNKKIEDDLRKKLEDLEREMREVDRRGEDIKDVLKKLKEVLKKLRDDVEKSKRDTKRVLDRLRDTVRKIMEENRRALKEIADEVK

SEQ ID NO: 6619 - protein, 182 aa, Artificial Sequence; identical to SEQ ID NO: 6618
  Synthetic

SEQ ID NO: 6620 - protein, 182 aa, Artificial Sequence
  Synthetic
DDEERLREEVERVERTVRDLLRRLRELTKKTDEDNRKLLKEHEDLLREVVKRVTDLLKDLQRDEEVKRKLKEDLDRLREKNKEILERNKRHNDELRKKDEKLLRELEELLERLKKRIKEVEETGKDVKDVLKEIKEVLREVTERAKEIADDNRRALEENEREVKRSKEDTKRALRKLEEEVK

SEQ ID NO: 6621 - protein, 182 aa, Artificial Sequence; identical to SEQ ID NO: 6620
  Synthetic

SEQ ID NO: 6622 - protein, 181 aa, Artificial Sequence
  Synthetic
SSSEELEKLLEEVRRELRRLAEEVKRLNEEIDKDIDRLAEENDRLHKEVKKDLDRLNLPDESLRRIEEELRRNLERTREILEDLKRRLDESRKEAEKILDELRRTLEKLKRDIDDSDTKGNTEEVVKRILDEIRRTLEEIKEIARRYLEKNKKEMREIRETMKRDNDHLEDLLRKIRETAR

SEQ ID NO: 6623 - protein, 181 aa, Artificial Sequence; identical to SEQ ID NO: 6622
  Synthetic

SEQ ID NO: 6624 - protein, 174 aa, Artificial Sequence
  Synthetic
SDEERIRKKLREIEERHKKLSEELKELLRRSEESVRRLLEKNRKDLDEVRKRIEDLNLTEDILKKLREELDRHRRELERLAREYEKLLRELEREVREVNKRVEETMREIKRRLRETKVDEEVERRLDRLLDESRRLAEELKERIKRVNKRARELVRESEEHLRELLEKVERDAT

SEQ ID NO: 6625 - protein, 174 aa, Artificial Sequence; identical to SEQ ID NO: 6624
  Synthetic

SEQ ID NO: 6626 - protein, 178 aa, Artificial Sequence
  Synthetic
SDKDELKTRLDRVREIIERLARESEELHKELKKRLEDLKRDSERLHRKNLEDIRRSNLPREKLERLEESNRRNLRRSEDTLRKLEEEIRRNEERTKKLLDDLRRLVEELRDKIRRVGDEKEVTDRIREDIKRVIEEVRRLAEEDKESVKEILKKIEKLADEDRRSVEKNHKEVEDTRR

SEQ ID NO: 6627 - protein, 178 aa, Artificial Sequence; identical to SEQ ID NO: 6626
  Synthetic

SEQ ID NO: 6628 - protein, 175 aa, Artificial Sequence
  Synthetic
RDEERAEELLKEIKDTVDELKKEVEKVLDESRKRDKKLNDELRKLLEDSRRTIERDVREDDDLRKEVEEKNRETEKRLKEINDDNERLNKESEDKLRELKKEAEEKLKRIRKIIKDGDRGDKLLEELRKILEELRKKVKDLIEEHRRLVKTSADRVKRLLDEHRRILKELKDRRK

SEQ ID NO: 6629 - protein, 175 aa, Artificial Sequence; identical to SEQ ID NO: 6628
  Synthetic

SEQ ID NO: 6630 - protein, 182 aa, Artificial Sequence
  Synthetic
DEAEELIKRIEDLLRELARRMEEILRRHEEYVKKSAEDVKRLLEEVEKLADDLRREVERDGTTDELRKKVKKIADELRKVLEDLKRANKKVEDENRKLDDDIRKTVEKIEKDVRDALKDLNLPEEVARKIEEVLRRVKEELTKLVEENERKLRESRERSKKLAKEVEDLLREIKRRVEELER

SEQ ID NO: 6631 - protein, 182 aa, Artificial Sequence; identical to SEQ ID NO: 6630
  Synthetic

SEQ ID NO: 6632 - protein, 174 aa, Artificial Sequence
  Synthetic
SERETLEELLERVERLLEKLKRELDEAHKKNKEDLDRLRDKNRKRLEDIKRTIDRIDVREELKKEADRLLKELEELTREIVRRDEDLNRRLAEKVERLKREVERRLEEIRRRVDKDGVTEELLKELKEVLERIRKEVEKLLRTLEEINKTTRKLVEETNEKADRILEKVKRDAK

SEQ ID NO: 6633 - protein, 174 aa, Artificial Sequence; identical to SEQ ID NO: 6632
  Synthetic

SEQ ID NO: 6634 - protein, 174 aa, Artificial Sequence
  Synthetic
SEDEKMEELIKRSEDKLRKLEEDVRRLLEEIRRRAEDNTRRNERTLREIERTLREIPNDKELADRLRELLERLRRRNEELKRELDKLLRDLERKLEELKRRHKEKLDRLRDRVRKTGVTEELVRELEKIDRETTEVVKKLLEELKDIMRRVHERSEESLREAKKILREVEERAR

SEQ ID NO: 6635 - protein, 174 aa, Artificial Sequence; identical to SEQ ID NO: 6634
  Synthetic

SEQ ID NO: 6636 - protein, 179 aa, Artificial Sequence
  Synthetic
SEEEELDKLLKEVREKDERLKREVEELLRRIKKRLEELKRENDELLKEVREVLKKLAKETDVSDEIIKRIEELLRRLEKTSEELRKDVERKRKELEEEARRLHEESEELLKELRRILERGDLPVEDVLRRIEEVARRIERLYEELLKKLRDVVREIEKRVREHNEDVKRVVREIEKRIK

SEQ ID NO: 6637 - protein, 179 aa, Artificial Sequence; identical to SEQ ID NO: 6636
  Synthetic

SEQ ID NO: 6638 - protein, 178 aa, Artificial Sequence
  Synthetic
DEVEKVKEEIKRLNEDVRRLVEEYRKRLEKLNRDHRDYVKKSEKRIRDLIREVRRRPVTDEVVKRVEEELEKIERENREKSKEDEEKNKELEDELRRRKKESEDVLRELKDRVRKAGLDEDATREIDKALEDHRESVERLVRELERLNEENRKSVKKSEEDSRRLLEEVRRELRRKRK

SEQ ID NO: 6639 - protein, 178 aa, Artificial Sequence; identical to SEQ ID NO: 6638
  Synthetic

SEQ ID NO: 6640 - protein, 175 aa, Artificial Sequence
  Synthetic
DEEERVEELLRRDRESDKELRERLRKLNEENRDETEKLIRELEDSLRRLKEELEKKGKDIEELLRDVERYLRESRKRVEDLKREDEKLNKESEDKLDELNKRNEKSLRELREKLRRDGATKELEKELRDNNRRLEEVIRRLEEELKRISEELRKVIKKLKRDNEEKLRRLDEATR

SEQ ID NO: 6641 - protein, 175 aa, Artificial Sequence; identical to SEQ ID NO: 6640
  Synthetic

SEQ ID NO: 6642 - protein, 175 aa, Artificial Sequence
  Synthetic
DEEERVKDINRRNEEDSRRLERRIRELNRENRKSSKELADRVRELLKRAEERLRTEGKDKKELLEEAEDLLRKLTDDLRKLEEDDERMNRDIERKLRELKKEDKDRNDRTKEELERDGVTEELVKKLEDINRRLREAIKRLEDTIREINKELRKKIKELLDRLKEIVKRLEDRAR

SEQ ID NO: 6643 - protein, 175 aa, Artificial Sequence; identical to SEQ ID NO: 6642
  Synthetic

SEQ ID NO: 6644 - protein, 175 aa, Artificial Sequence
  Synthetic
SAEERIKRINKKNRDDSEKLKRRIEESNRENKRSSDELVKRLEELLRKLEEDLKRKGKDDEDLLREVKKRAEEIRERIKRLEDDDRRYNKKSKEDLDDLRREDERLNEETKRELDRDGVDKELEKKLRKINEDLKRAIRKLEEDNKRANEELKKRAEDLLREIEEIIRRLEERTR

SEQ ID NO: 6645 - protein, 175 aa, Artificial Sequence; identical to SEQ ID NO: 6644
  Synthetic

SEQ ID NO: 6646 - protein, 175 aa, Artificial Sequence
  Synthetic
DEERRAEEINRRNKKDSDRLAETIEKILKEDEDRDKELHDRLEEILKELRKRLEEEGKDIRELREEAERLIREIREEIKRLNEENKKSLERIRKKLEDLRRKDEKLNRETRRKLERDGVTEELVKELEKINEELRRDIKRLIDEIRENTERLERMIRELEKKIRKILKELDDRAK

SEQ ID NO: 6647 - protein, 175 aa, Artificial Sequence; identical to SEQ ID NO: 6646
  Synthetic

SEQ ID NO: 6648 - protein, 176 aa, Artificial Sequence
  Synthetic
DLEKELTDLMKKHAEENDRLRRRLEELLKRHAEENDRLRDRVRRINEEVEEILRRAPRSEELEKLKRDHERRVKEAEDRLRELHRLVEERVREIKDELRKLHEKVKKILEDLKDIKEEDVIREALERIKRISDESKRTIDEVVKEIEKITKESRDLITKYERDVERSIEEAERRAT

SEQ ID NO: 6649 - protein, 176 aa, Artificial Sequence; identical to SEQ ID NO: 6648
  Synthetic

SEQ ID NO: 6650 - protein, 184 aa, Artificial Sequence
  Synthetic
SLEERIRELLKRHEDLTRKLKKENDESLRRHRELTKKLRKELEELLKRAEDVLRDLEREGLREEDKEEIERRLKELREKAERLARKDEELLRRAEEKSERLRTEDERLLKELEDEARDLRRKGSDAREVDDLLRKIEDISKKSADRNRELNEELEDISRRSKEEMKKLLDELRRDVEEIKKRTK

SEQ ID NO: 6651 - protein, 184 aa, Artificial Sequence; identical to SEQ ID NO: 6650
  Synthetic

SEQ ID NO: 6652 - protein, 184 aa, Artificial Sequence
  Synthetic
DLEDRIRRLLEESKKNLDELKRRNEESLKRSEDLLKDLKRKLDDLLRKAEEVLRELRKRGLDEDLATKIKKELEDLKREIEELVERYKDLNREIKERSDKLVKEYEDLLKELTERAKDLTDKGSDARDVDRLLEDVKRISDTVHKRNEELNRRLREISERAREAVEDLLRRLEEIVRRIKTRTE

SEQ ID NO: 6653 - protein, 184 aa, Artificial Sequence; identical to SEQ ID NO: 6652
  Synthetic

SEQ ID NO: 6654 - protein, 174 aa, Artificial Sequence
  Synthetic
EEIERILEKLRRDLEEVRKKVKKVLDELRELTEELKRKVEKVLRELKRLSEEIARRVEKGLSEEELKRLDEEVEERVERIKRELEEDNRRVEEKVREVKERLDDEAREIEERIKKAPETRELRTVAREIREELKKLREELDKLLREHRETSKELEKRLKEVLDRHRELSDRLRR

SEQ ID NO: 6655 - protein, 174 aa, Artificial Sequence; identical to SEQ ID NO: 6654
  Synthetic

SEQ ID NO: 6656 - protein, 181 aa, Artificial Sequence
  Synthetic
DELREMIRKVREINERSKDEIRKILEAIKKIVEDHRRVVEKLLRDLKDIVRRARETRSRPTPEELIKTIEKLLEELKRELERLERENKRLLEEIKRRVKELEDRNRELDKELRKEVEKLRTSEEARKRLEDLSRENKRSLDELRKRIDDILDENRRAVEESRERAKRVLDEVRETLKRDEK

SEQ ID NO: 6657 - protein, 181 aa, Artificial Sequence; identical to SEQ ID NO: 6656
  Synthetic

SEQ ID NO: 6658 - protein, 183 aa, Artificial Sequence
  Synthetic
SEVDEVEKRIREAIKRHRDRVKKIIDEIKKLLDDHRRRVKKLEDDLKKRADDVRKETKDGDRDKRTLVERVREELERARREIEEDLKRSREELKKIEKKAREVHKKSRDDLERLREEIERKVKGKEARDRIRELLKKYEDDLRRSEKEIEDILRRYERELRESEKRMREVLKRLEDELRRAEK

SEQ ID NO: 6659 - protein, 183 aa, Artificial Sequence; identical to SEQ ID NO: 6658
  Synthetic

SEQ ID NO: 6660 - protein, 183 aa, Artificial Sequence
  Synthetic
DEVKEVEKKIRKVLREHKKLVEELIRKIKEMIDRHKEIVERIIRTIRRELKRAEELARKGDKDKKTLLEEIRRRLRELAERAKEKHDKSREDLKELKRDAERKLRESEKRLKELEDEARRKVRGEEMEKRIEDLLREYREELERSRRELERLLEEYEKVVDESRKRIKTILDEVEKLLRDLDR

SEQ ID NO: 6661 - protein, 183 aa, Artificial Sequence; identical to SEQ ID NO: 6660
  Synthetic

SEQ ID NO: 6662 - protein, 174 aa, Artificial Sequence
  Synthetic
SSRERFKELSDRNKEVVERSRRRLEKLLEENKREVEKSKKRIEDMLRKADDLLRKLPVSEELLRRAKEMLRRIKEEVDKVEEDNERVDRELRKEVKKIEDDNRREDKRLADEVRRDGVTERLSEEIKRLIETHEKLLRELEKKIRDLIRKHREDVERIIKEIDKLLKKIDEDTR

SEQ ID NO: 6663 - protein, 174 aa, Artificial Sequence; identical to SEQ ID NO: 6662
  Synthetic

SEQ ID NO: 6664 - protein, 171 aa, Artificial Sequence
  Synthetic
SEEETLDELNRENEELLRRSKERLDRSHEKLKKILDDISERVKELLKRAEKLLRDENVDEKLKKEFDRRLKELRDKLRRLEEEVKKYLEESKREVRKLEETNRRMDEETRRRRDDKDRVSDRIRRLLEEHERVVRELLESNDRMAERLRRVAEELVKEIKKELDDLRRRTT

SEQ ID NO: 6665 - protein, 171 aa, Artificial Sequence; identical to SEQ ID NO: 6664
  Synthetic

SEQ ID NO: 6666 - protein, 171 aa, Artificial Sequence
  Synthetic
SEEETLERLLRKNEEELKKSKERLKELNRTNRKELRDSERRIKRALEEVEDLIRREKVDEDLLRELKRLLEELRRLVEKLKEENERADEETRKKVKELEDRNRKANEDLRRRRDDKDEVTKTIERIIEEHRRMIEELIKEIRKLIKEHRDKVRELLKRIKDILRRLKEERR

SEQ ID NO: 6667 - protein, 171 aa, Artificial Sequence; identical to SEQ ID NO: 6666
  Synthetic

SEQ ID NO: 6668 - protein, 188 aa, Artificial Sequence
  Synthetic
SLDERIDELRRTLEEMLDRIRRSNEEVLRDSRRVLEEIDERARRVVEEAEKLLREIDKRKGKNEDAERLLREIKKRIEDLRRRIEKLKKEYEEEDDRLEKELRDLHREIDRLKRELETEADRLKKENVSEEDIKRLLEKVREIIEELKRRNDELNKRIKDLSEEMRRRVKKLLDEIKEDLERIKRRAD

SEQ ID NO: 6669 - protein, 188 aa, Artificial Sequence; identical to SEQ ID NO: 6668
  Synthetic

SEQ ID NO: 6670 - protein, 188 aa, Artificial Sequence
  Synthetic
SLEEEIKELIKRAEEVLERLARSNKEVLDRSRKVLKELRETNKRLLEELKRALDKIRKDKGDDEDLRRELTKIREKSERLRKKSKDLEDDYRRLDEELRKRIKELHDKIKRLLEELKEKADDLRRRNVSEEDIKRLLEEVERIIRKLAEENKKLNKEIEDLSRRARERNERLLREVEKIIRDIRERAR

SEQ ID NO: 6671 - protein, 188 aa, Artificial Sequence; identical to SEQ ID NO: 6670
  Synthetic

SEQ ID NO: 6672 - protein, 181 aa, Artificial Sequence
  Synthetic
SEVEELTKKAKKIIEDHRRYVEKSARDVERLIREHERYVEESAKKVEKLLREIKELDKRDLREEDRKRVDETIKRILDKLREENERAKEENKKMLDKLRRDNEKVERENRKLLDDLRREVKDIRDKDKIRELERENEEVIKESRERSERLARKNKKVLEDSERRSRELSERVERLLDESRR

SEQ ID NO: 6673 - protein, 181 aa, Artificial Sequence; identical to SEQ ID NO: 6672
  Synthetic

SEQ ID NO: 6674 - protein, 171 aa, Artificial Sequence
  Synthetic
REEDVLRKLEKEIRDLLERIKRKSEELIERNKRTNDDIRRRSKETIDELRELTKRVDIDDSVRRRVEKVEEELERENEKLSRDDKRSIEENKKKDDELARRVEKVIEDLRRANVPDEDIRREAERLLREMEKRAKENEEDVRRNLKRLRDALKEHKEKVEKLLEEIKKDAK

SEQ ID NO: 6675 - protein, 171 aa, Artificial Sequence; identical to SEQ ID NO: 6674
  Synthetic

SEQ ID NO: 6676 - protein, 175 aa, Artificial Sequence
  Synthetic
SETDDIIRRIRRLIEELLRNSKRTSDDNRRTLEELERNSERAIKKIKDVLEKLSRDRVPEDELKKRLDELREEIKEVEERHEELLERDRRKLEEVEKEHERRLEEIKRRIEKVLRDTSSDEKAEKIRKELEDMARESRKLMRENKREVDRVEKKSRKLLKDILDEIDKVDEDEKR

SEQ ID NO: 6677 - protein, 175 aa, Artificial Sequence; identical to SEQ ID NO: 6676
  Synthetic

SEQ ID NO: 6678 - protein, 176 aa, Artificial Sequence
  Synthetic
SEAERIAREVERVLREIEEEVKRLSEENRELVERIERESRKSIEDIERRLEEVKRKVKREELLKEVEKELRDLDRRHKEKHDEVERESRELLKRIEEVLDRARKELEELEKRAREENRLDRRLLEALRREVEEVLKRIRETLEENRRRNEEVLRRDKELLERIRDKIRRVLEELKR

SEQ ID NO: 6679 - protein, 176 aa, Artificial Sequence; identical to SEQ ID NO: 6678
  Synthetic

SEQ ID NO: 6680 - protein, 177 aa, Artificial Sequence
  Synthetic
DEERELRKLERELEDVVRKDRKILEDLRRTLDTVRREDERILRELEETLKEVVKRVREKGTTEDVDRKVDENRKELEKAKRKSEEETERNKERLDDILRRSERRLEDIKRRLDELERRGEDIRRISEEAKELLKRWEDESRKVEEEHRRSLEEWRERSERIAREHKKSLEKLEKDVE

SEQ ID NO: 6681 - protein, 177 aa, Artificial Sequence; identical to SEQ ID NO: 6680
  Synthetic

SEQ ID NO: 6682 - protein, 181 aa, Artificial Sequence
  Synthetic
SIEELLKKLEEDIERVLRKSEELLKRNEEENKKVLDESKRLLDELKKRAEKVLRELKDEKRRLEDAERKIREMEKEARKVLEDSKRTSEKLKKKAEDVLKRSKEEVEELKRRVKKVREDGTTEEVLKEIVKRVRDDIERHDRESKKLSDENKRVVDEHRKRSEELARKLEELLREIRERVT

SEQ ID NO: 6683 - protein, 181 aa, Artificial Sequence; identical to SEQ ID NO: 6682
  Synthetic

SEQ ID NO: 6684 - protein, 183 aa, Artificial Sequence
  Synthetic
SDIEKLAEEVDRLNKELTDRLERLREEHKRTLDEIRKTLEKLKREVDKELEEVKKIVKDGDNRERLEEDLRRRLEELEKRMKELKDRNRRKAEESERKLRELLKDNKDKLEKIKDDARKADSRDERVKKILDDLKRKNEENDERVERIMRELRERNRKLNEEIDKIVEDIRREVEKVSREARR

SEQ ID NO: 6685 - protein, 183 aa, Artificial Sequence; identical to SEQ ID NO: 6684
  Synthetic

SEQ ID NO: 6686 - protein, 180 aa, Artificial Sequence
  Synthetic
DAVDRVREENKKDSERNKKRVEDVKRRAEERSRRNKKKVKELRDRNREEIKRIKELKDRGEVTEEERKKIRDRYKKDEDRVRKEDEETKRRLEEETKEDDRRNEREEREYEKKAEELERRNIVDRKVEEESRRSFKRNKEENKKVRDEIKKTIEENEAENRKAHEDSKRSFEELEDELRK

SEQ ID NO: 6687 - protein, 180 aa, Artificial Sequence; identical to SEQ ID NO: 6686
  Synthetic

SEQ ID NO: 6688 - protein, 182 aa, Artificial Sequence
  Synthetic
DKEREATRRLRELEKENTKLVKEIRDADREIEKRLREIHKKLEDENRKLEEEIKDMVRRKGDTSEEEKKKLDDLRRRLREAHRELDEERKKSEKKLEDDHRREETRLRRNREETKKTEDDLRREGVDDRIVEEVKKHHERNERRLREYLDESRKYLEDHIRRLEKYLEDSRRLATRIKEETK

SEQ ID NO: 6689 - protein, 182 aa, Artificial Sequence; identical to SEQ ID NO: 6688
  Synthetic

SEQ ID NO: 6690 - protein, 178 aa, Artificial Sequence
  Synthetic
SSVEEVKRKNEKSLREIERASEEHLERLKRELEKSEDEARKHNKKLDDDLERLERKGGGDEDAERELRKLREDSERERKEHKEKLDRARRRSEKMKEDLKRRLEKLDREHREDRRREPDDERVKDLERTHEESKRRVEELMKENDDLLKRIEEESKRLNEENERKVEDIEKKVEDLKR

SEQ ID NO: 6691 - protein, 178 aa, Artificial Sequence; identical to SEQ ID NO: 6690
  Synthetic

SEQ ID NO: 6692 - protein, 182 aa, Artificial Sequence
  Synthetic
SEIERVAKELKDEADRLRKEVEKHRRRSKEELDRLREESKKVNEDLKRMLERIREIAAQGNLEEDILRTMKEEIERRREEYEERLKAVEERLRREHERTKKKLDDDRRRIEKKRKDLTDKLEPNEEFKKLRDLIEDIKRRLEELVKALEETNKKIEDDVRDSVRKNRETLERIKKEIEDTAT

SEQ ID NO: 6693 - protein, 182 aa, Artificial Sequence; identical to SEQ ID NO: 6692
  Synthetic

SEQ ID NO: 6694 - protein, 183 aa, Artificial Sequence
  Synthetic
KDVERILREIRETLRRVEEEAKRSNDEIRKLNEEAERIVREILKEIEKELREVRKRLTEKGPRERLEEELKRRLEKIRERIERAREEYERKVREEEKKHREKEERDRERKERTEDRIRRRQSENDELLRRLKEELDRVERTIRELIRRNEEVLERSDESVEKLLRELEELLRRVEEEIKKAAT

SEQ ID NO: 6695 - protein, 183 aa, Artificial Sequence; identical to SEQ ID NO: 6694
  Synthetic

SEQ ID NO: 6696 - protein, 176 aa, Artificial Sequence
  Synthetic
SEREERAKRLRKILEDLKRESEEHLRRLKTRLDKLREDSKKHLEDVRRKLEDLKRIVEENKVSREELEKRREDIERRVRESEKRTDEREKRDEERHREFRKDLERKVRTMRDETRRGGETDDELRKLVRKVEEDLKRLDEENKKLLEKVKRDLDRLKKENKDLLKRVEEELRREAT

SEQ ID NO: 6697 - protein, 176 aa, Artificial Sequence; identical to SEQ ID NO: 6696
  Synthetic

SEQ ID NO: 6698 - protein, 176 aa, Artificial Sequence
  Synthetic
SEEEERKRRLEEKLERLEEKSRRHLKEVKRTLEELEERSRRHLDENRRLLKRLKEIVDRNEDSEEVIERREEEIDKRNEEEERETRKRAEETDRRVEKSEEKLKRDEDRMDKETKDGGDTSEEIKKLVKDIKEELKRLLEENKRLLEEAKKTLKKLLEDNRRLIEKIKKELDEARK

SEQ ID NO: 6699 - protein, 176 aa, Artificial Sequence; identical to SEQ ID NO: 6698
  Synthetic

SEQ ID NO: 6700 - protein, 174 aa, Artificial Sequence
  Synthetic
REEERLKRELEKDLERIKKLSDEHKKRLEEENRDLRRKSREHKEKLERDLRRVEEIRRREKIREEIEERIRRRDEELERDNERVKEEYDRRREDRRRENEEIKERLKERKEETRKKDTSDEVERLLKEIEDRVRKLEKENEEIARRSTETLEKLLKENRETLKEIRDRVREAKR

SEQ ID NO: 6701 - protein, 174 aa, Artificial Sequence; identical to SEQ ID NO: 6700
  Synthetic

SEQ ID NO: 6702 - protein, 174 aa, Artificial Sequence
  Synthetic
SEEEELKRRLKEILRELKELSERHKKRLRELNEKLKRLSEEHKRKLEEITEDLRRIATREPIREEIDKRYREKVERAKEENKEIEEDYKRAEKELREDNRRIEEEVRKKEEDTRRTPNSEEVKRLLDEIRRELERLKEENRKIVEDSTRTLKELLEENKRILEESSRDLERLKR

SEQ ID NO: 6703 - protein, 174 aa, Artificial Sequence; identical to SEQ ID NO: 6702
  Synthetic

SEQ ID NO: 6704 - protein, 174 aa, Artificial Sequence
  Synthetic
SEEEKIKEEIKRDLEDLRRLSKEHKDRLRKLLEDIKKLSEEHKDKLRRITKELRDVVRREEIREELDEEYKEKAERARRENEEIRKKLEEDVERLRKENERIKREAERRDKETEDTDTSEEVKRLLEKVKEDLKRLLDENKRIIERIEREVERLKRENEEILKESSRDLERAKK

SEQ ID NO: 6705 - protein, 174 aa, Artificial Sequence; identical to SEQ ID NO: 6704
  Synthetic

SEQ ID NO: 6706 - protein, 174 aa, Artificial Sequence
  Synthetic
SKEEKLKEDLKRTLDDARRLAEETKRRLEEILEKLKRLSEKSKEDVKRTTDELRDIVRKRKIDEEIDERYKDKKRKHERRMTEIDKEVRELDEDTRRKIEKIDKELEDRDDRTRKEDTSEEIKDLLRRIREELKRLKDELRRIIEEIRKELERLKRENEELNRRSSEELKKAKK

SEQ ID NO: 6707 - protein, 174 aa, Artificial Sequence; identical to SEQ ID NO: 6706
  Synthetic

SEQ ID NO: 6708 - protein, 179 aa, Artificial Sequence
  Synthetic
SEVEELLERHKRALDKAKKVSEDHKRDLKEKLDDVKRKVEELERRLKRALDELTKEGGGSTDVERKLREVDEKTERDRRRLDEEVKRVEDESREKTERLREEVKRLHDESRDRKEKLRLEEDLVRTLDELHKDIERRLRKLEEENRDILRRIREEIERLKRKLDEIARRIKEEVKKLKK

SEQ ID NO: 6709 - protein, 179 aa, Artificial Sequence; identical to SEQ ID NO: 6708
  Synthetic

SEQ ID NO: 6710 - protein, 179 aa, Artificial Sequence
  Synthetic
SEVEELKKEHKKVLDEVRRASKKHKEELEEMLRDLKRKADELARRLEDALRRLEEEGGGGDRVEKDLRRIEERLKEDEKRDRDKVDELRRRSEEKLKRIKRRMEEVSKKSEDDERKLRLDKKAVDELRELHKEIKRRIEKLLKENEEILRKIEEDIERLLEDLRRKAEEIKRRVDETRR

SEQ ID NO: 6711 - protein, 179 aa, Artificial Sequence; identical to SEQ ID NO: 6710
  Synthetic

SEQ ID NO: 6712 - protein, 179 aa, Artificial Sequence
  Synthetic
SEVEEIEKENKDAVRRMREKSRRHKEELKDALREAEEISRRHKEELKRKLEELTKRGGGDEKLDEDLKRIRDKSKKTTEDLKRKVEELRKRSEETLKELEDDLKRLHEKHKDTEDKMDLEEELVRKLRRLDKRTHEDVRRLLDENRRTLEKIEEDIRRLIKENEDTLREIEKRVEDKKR

SEQ ID NO: 6713 - protein, 179 aa, Artificial Sequence; identical to SEQ ID NO: 6712
  Synthetic

SEQ ID NO: 6714 - protein, 177 aa, Artificial Sequence
  Synthetic
SEDEELKKEIEKLLRELRKRSTESKKEIEDLLDELRRKSERSRKEIEDTLRELEERAKGERSEEEDKRTREDTEEKEKEHRKKLRKEDEELREREKEHERKLREVEKRLREREEETKSRETSEEIKELLERLRRDAERLKKENEDLNRRLREEVEKNKEDNKRLNEELRKKVEEDRR

SEQ ID NO: 6715 - protein, 177 aa, Artificial Sequence; identical to SEQ ID NO: 6714
  Synthetic

SEQ ID NO: 6716 - protein, 185 aa, Artificial Sequence
  Synthetic
SLEETLDKILEDIRRRIRENEERNRRLKEEIDKAIKRNEEENRKTNEDIKRKIDDLERKRGDRSKEVEDTKREVEEEEDRSRKKEDEDRERVKRAKEESERRREEDKKRVEDMERRAEEKKDKEQDKKEVEELIRELEDELRKLEERSKEHLDRLREELKELDERSKKHLDELRKLEEKLRRDAD

SEQ ID NO: 6717 - protein, 185 aa, Artificial Sequence; identical to SEQ ID NO: 6716
  Synthetic

SEQ ID NO: 6718 - protein, 175 aa, Artificial Sequence
  Synthetic
SETEKLLERIRRNVEENEKYAREHLKKLDKNLKDNKEYIDRHVKKLKERLDTLREIAREKDPSRELDKALEETRRDSRRSEENRRRHEKRTRDEAKKSEERLRKHRKDSEKETKDGGDREERIEKLLRELERTHRELKEELDKLHKRLEEEHRRLEKKLRDIHRKVEKDLRDLKR

SEQ ID NO: 6719 - protein, 175 aa, Artificial Sequence; identical to SEQ ID NO: 6718
  Synthetic

SEQ ID NO: 6720 - protein, 175 aa, Artificial Sequence
  Synthetic
EEKERLKKRIRDNVEENKKYAEEHLKRLKEKLEEVRKYIEDHKDRLRRKIEELKKDAERKPDDRELEEKEKKDREEAERSKRRRDEKRRKIEEDSRESRKRRDRHRRESEKEIRDGGDNDEEIRRILEELRRTHKKLEEELEELHKRVEDELRRLEDELREIHERLEETLRRLRK

SEQ ID NO: 6721 - protein, 175 aa, Artificial Sequence; identical to SEQ ID NO: 6720
  Synthetic

SEQ ID NO: 6722 - protein, 175 aa, Artificial Sequence
  Synthetic
SEKEKLKEEIKRNVEENRRYVEEHKRDLERNAEENEKYIREHLKRLKEEAEEVRDRVAKEPPDRKMEKTEKETDKRAKESRDRAERHKEETRKKAEESKRREDRHREESEDRAKKGGDRDKEIERLLRELERTHRELRKDLKRIHDELKKKHDDLRRTLEEVHKRVKEELDRARR

SEQ ID NO: 6723 - protein, 175 aa, Artificial Sequence; identical to SEQ ID NO: 6722
  Synthetic

SEQ ID NO: 6724 - protein, 175 aa, Artificial Sequence
  Synthetic
SEKEELIERIRRNLEENRRYIERHLEELEKKLDDVRRKAKRHLEKLREELEKLKDDARKKPPDREVEKRKEEKDRESERSKRELDRTREEIERETRESEDRERRHAEESEKRIKDGGDNDEEIRKLLEELRKTHEKLKRDLERLHKKVRDTLKKLEDELKELHKRVDDELRKLRK

SEQ ID NO: 6725 - protein, 175 aa, Artificial Sequence; identical to SEQ ID NO: 6724
  Synthetic

SEQ ID NO: 6726 - protein, 179 aa, Artificial Sequence
  Synthetic
DEERKLEELEKENDKLLEDAKRTLEKLLKDNRDLVKRVEDELRRLEEENKKLADDVRRDGKSDEKIERDIDKSRRDTRDEARRARERIKRSEDELRREMEELDKRHKEFKEDERRKRKEKRRSSKELEDRSREHLERLKARLKELEDKSRKHLEEVKKELRELEEKSKKHLKRLEDARR

SEQ ID NO: 6727 - protein, 179 aa, Artificial Sequence; identical to SEQ ID NO: 6726
  Synthetic

SEQ ID NO: 6728 - protein, 179 aa, Artificial Sequence
  Synthetic
DEEETLKRLDEENDKLLEEVKKTLEDSLRRLEELHKRTEEELRKSRRELRELVKDVERKGSLREEIKKELDDYDRRTKEELDKTRDEHEKYKRKVREELKRTDEKVRRSKEDDERVRREKRRSKEELRDKSRRHLEDVKRRLEELKKSNEEALRRDEKKLEDLRRSNEKVLRELKEKAR

SEQ ID NO: 6729 - protein, 179 aa, Artificial Sequence; identical to SEQ ID NO: 6728
  Synthetic

SEQ ID NO: 6730 - protein, 179 aa, Artificial Sequence
  Synthetic
SEEEEVRRLEEELKKLHDDIKRRLEELLRENEKILRDIDREIKKLLEELRKTIDKADKDGVLSEELKKELEKLLKDIEDTLKRLKDESKEDRERLEKELRELSKRSREEDEKRRKATKDGDRDKDELRKIVEELKRDHEKDLRKVEKLSEEHKEKLRRALEELKRLAEEVKKRLDDERR

SEQ ID NO: 6731 - protein, 179 aa, Artificial Sequence; identical to SEQ ID NO: 6730
  Synthetic

SEQ ID NO: 6732 - protein, 189 aa, Artificial Sequence
  Synthetic
SVEERLEEMERRNKDLIRRVEEDLERLLKENRDLIRRIKEELKRLKEELKELVERISREGDRPEEEKERVKERLKKEEKETDEKAERDDRRHRKTEKETRDRVREDRKRHEDEERRRREKARRLKDSGSKEEVLKELEEENRKHEKRLRDALERLRRRSKKHKDEARKILEELKERAKTIKRRLEEDRR

SEQ ID NO: 6733 - protein, 189 aa, Artificial Sequence; identical to SEQ ID NO: 6732
  Synthetic

SEQ ID NO: 6734 - protein, 189 aa, Artificial Sequence
  Synthetic
SVKEDLRKAKEENKRLIEKAEDDLRKLLRENKELLKRIDEELKRLKKELDDIVRRIEDKGDRPKEDRDRVKKEADEIREETDREVEEERRDVKRTEEETKKRAEDSKRRHKKFEDDLDEKARELERSGSKEEVLEKLKRDNEDHKRRLKEDLRRLREESKKHKKKLEDRLKKLEERARRIKEKLKEEER

SEQ ID NO: 6735 - protein, 189 aa, Artificial Sequence; identical to SEQ ID NO: 6734
  Synthetic

SEQ ID NO: 6736 - protein, 184 aa, Artificial Sequence
  Synthetic
DDEERIRKIAEDIKRKLKETLERLRDESRKNKRKLEDLLRKSEEKAKRLKDKLRKMEEEKERKRDEELKREIERLRREKEELHKEFRKRVEDTRRENERRREEVKKRLDTMRKETEDTEEKIRRDGVDNEDVKRLLRELKEITDRIDEEVKRLREENERITRRIEEEHKRLNKELERILREIER

SEQ ID NO: 6737 - protein, 184 aa, Artificial Sequence; identical to SEQ ID NO: 6736
  Synthetic

SEQ ID NO: 6738 - protein, 175 aa, Artificial Sequence
  Synthetic
SSEEKAKELRKRLRETHKRVKDEIKRLKEELEESHKRLEERSRETLRKLEELIKELNVSEEVLDELRRKLERLEEEHKKYKEKSKRELEKIDEDVERYERDSRREEEETEKKLRKDGVVDTELEKDVRRVEEKNRRALEDVRRKVEEVKESNKRALEKNERIVREVERRLREEKK

SEQ ID NO: 6739 - protein, 175 aa, Artificial Sequence; identical to SEQ ID NO: 6738
  Synthetic

SEQ ID NO: 6740 - protein, 175 aa, Artificial Sequence
  Synthetic
SSEERFEKLDRELKRTHEELERAIRELKKDYERSLKRVEEELKRLLDELEELARRVGVDEKVLKEEEDERRRLREEVEKYKKDAKEELKRTDDKVRKYKEKSDRDRERAEDEVRKTGVVDTKVTETVRRVREENKRMLEDVKRDVDRLRTSNEKVLRDIRRTVKRAKERLKELKE

SEQ ID NO: 6741 - protein, 175 aa, Artificial Sequence; identical to SEQ ID NO: 6740
  Synthetic

SEQ ID NO: 6742 - protein, 179 aa, Artificial Sequence
  Synthetic
SAEDELRRLRRELEKSHEELKRRIDELLKRLRELVKRVKDRSKELLDELRKLLEDVKRKGRVSERLEEDIRKHMKRHRERLEREERELKKKLKEMEDRVREYEDRSRREAKKDEEDIRREGVKDTRVRERVKETRRRNEEVLREVERIAKEVEDDLKRILEELEDNVRRVKKKIKDVER

SEQ ID NO: 6743 - protein, 179 aa, Artificial Sequence; identical to SEQ ID NO: 6742
  Synthetic

SEQ ID NO: 6744 - protein, 179 aa, Artificial Sequence
  Synthetic
SSEEELKKLEKELEETHRKLKEDVERLLRDLDRKVKKVEDDSKKLLDELRKLLEEAKRRGVVSEEVEKRVRDHMKRHEEELKRIREELEREKEERREELRRYEEEVKKKREEDRDDIRRRGVKERDVRKRVKEMKEDNRRALEDIRRKTEEVAKKLREILKKLRENVRRVAEEIKRVAD

SEQ ID NO: 6745 - protein, 179 aa, Artificial Sequence; identical to SEQ ID NO: 6744
  Synthetic

SEQ ID NO: 6746 - protein, 179 aa, Artificial Sequence
  Synthetic
STEEELERLRRELERTHERLREESEKLVRELRKLVEEVREALERLRRDLKRLLKEVREKGRASEDVERELKKEDERIEDKARKDKEEADKHERRHREDLKRYEKKSEEDDRRREKKIRDKGVKETEVREEVKRTKEENKRVEEKLRRNVDEMRKKLEEILRRIKEEIDKMRRKIEEIER

SEQ ID NO: 6747 - protein, 179 aa, Artificial Sequence; identical to SEQ ID NO: 6746
  Synthetic

SEQ ID NO: 6748 - protein, 178 aa, Artificial Sequence
  Synthetic
DVEEDLKRLEKKNRDLNKRMEDSNRKLEEDDERVNRKIRKDHKKAEDDLRRVIKEVEEENRSDERDKKRLKKRTDDNRREDKRRDDENKKTNKDYKRRFEKKRRENEDTDRKTKDEVRRRGVTEKTIEDIERHLDRLRKENDKLRKELEDHIRRLEEEVRKNLDRIREEIERARERVR

SEQ ID NO: 6749 - protein, 178 aa, Artificial Sequence; identical to SEQ ID NO: 6748
  Synthetic

SEQ ID NO: 6750 - protein, 179 aa, Artificial Sequence
  Synthetic
RAEDEVRKIKKEIDELIRRLEKLNEDIKREIDELVRRLEELNKRVKEEIKRLIEELKKENRVDERKVRKLEEDLERHDREVREDKERIERTAKRHREDVERNKEETTRRREKTKREIDRDGVGDRELKERLDRMRDHARKHEEKLKESLKRVREHVKRHAERVEESLRRLKRDVDELRK

SEQ ID NO: 6751 - protein, 179 aa, Artificial Sequence; identical to SEQ ID NO: 6750
  Synthetic

SEQ ID NO: 6752 - protein, 174 aa, Artificial Sequence
  Synthetic
SSDEKLEEIERHHRKVEEESRRLDEDIKRHHKEVEDESRELLERIKKKLEDVTRALGREDREMKELKRELDKRREEVKRRDDREREKSKKREDEIEKKDRERRKESEEKRRRLREEGLRDEILEKLERDNRRYKEESEEEVERAKEENRRYLEESRREVEEFDRKLKEIADRAR

SEQ ID NO: 6753 - protein, 174 aa, Artificial Sequence; identical to SEQ ID NO: 6752
  Synthetic

SEQ ID NO: 6754 - protein, 182 aa, Artificial Sequence
  Synthetic
SELEERVKKVEKVNEDLKRRVEEHERRVKRTLERLEEEVRRHAEKVKKRLEELRRLAKDVERETLEREIREDEKRSRDDAERLAREIERVRKESEEDAKRKKEDNERKNRERKDSARRQGRSEERIEDLLRRLDDRNRETEREIEERHKRLKEELDKVEERIRREHEKLKRELEEVERRTRK

SEQ ID NO: 6755 - protein, 182 aa, Artificial Sequence; identical to SEQ ID NO: 6754
  Synthetic

SEQ ID NO: 6756 - protein, 185 aa, Artificial Sequence
  Synthetic
DVVDELRRIAKEVRDRLREIVERLDRIAKEVVKENEEVVRHNDELAKRVVTTAKRIVDEVKDKETVKRRIDRIAEKVEEDTKEHEDRSKRSEEDVERVVKKIREEVKEIVDRVEKFVKEVRDSGTDSEEVKRVVETVRKLLRDAEKEIEEVVKKVRDLLRRVNKELKESVERVRRLLEEVRERAR

SEQ ID NO: 6757 - protein, 185 aa, Artificial Sequence; identical to SEQ ID NO: 6756
  Synthetic

SEQ ID NO: 6758 - protein, 186 aa, Artificial Sequence
  Synthetic
SDLDRVLRKIEELVREIEKESERTNRKSERDTEEVARRSEDSDRDIERLVREIRDRLRKAGVDSREVERVDRELEELLRRLRKENEDSLRESERLNRENKRRSEDSVKKLRDILARVEEKVRKREDLKDVVRELEEIVKELEERAKENVKRSEKSVKEDLDVLADNVRRSKEIVEEIKKRADEVVT

SEQ ID NO: 6759 - protein, 186 aa, Artificial Sequence; identical to SEQ ID NO: 6758
  Synthetic

SEQ ID NO: 6760 - protein, 171 aa, Artificial Sequence
  Synthetic
SEKEKVIKEARELLERLRKRLKDVNDDVTRLLDELRKENEKSREDVEREVKRLEEEVPVEDVIRELKRRLEEVDKKNRDILETLKRELDEVSRRTREELEKLRKELEEVEKAGLPAEELKRVADRLRRRLERLVEENERVVKKILDEIRRSVEENKRIVDKVRKDLDERRK

SEQ ID NO: 6761 - protein, 171 aa, Artificial Sequence; identical to SEQ ID NO: 6760
  Synthetic

SEQ ID NO: 6762 - protein, 171 aa, Artificial Sequence
  Synthetic
DEDEKVLRKIEELVRRLHEKNRKVLEESKRTLEKVEERLRRVLKEIEDLVRDAARRVDKREVIEELKKDLDRVRRKLEKVRKENADLNDRVRRELEEIDKRLKKKLDDVRRSDRDVSELDKIIKELKREADESVKKLKEIVKRSLDHLEEVVKELKKRLDDLKREIDTKAK

SEQ ID NO: 6763 - protein, 171 aa, Artificial Sequence; identical to SEQ ID NO: 6762
  Synthetic

SEQ ID NO: 6764 - protein, 175 aa, Artificial Sequence
  Synthetic
SLEEEVKKVVEEIKRRIEDDVRRIRELVERIKKLIEKDVTDLKRVVDENRDLAEKAKRIPKEDVDRVVREVERSNDELRRHSEEVLRRVERLIRELERHSREVIKRIEDTIRELRRRKVSEELLRELRRVLEEAREDSRRLLEEIRKVLEEAEEKSRRVLEESKRVNDELRERLR

SEQ ID NO: 6765 - protein, 175 aa, Artificial Sequence; identical to SEQ ID NO: 6764
  Synthetic

SEQ ID NO: 6766 - protein, 176 aa, Artificial Sequence
  Synthetic
SLDESAKRVLEEIKRLAKEDLDELKRVLDEIKEILREVLEANRDSVRRIEEEVEKLARVDDERTVKRLEDEAKRILDDNRRKSERVARELERLLEELKRHSEDVLKKLKDLLRELKEEGVDDRVLEEIERVIRKIEEDSRRLLKEIADVIKKVREESKRLLDDLKRVIDELRERAR

SEQ ID NO: 6767 - protein, 176 aa, Artificial Sequence; identical to SEQ ID NO: 6766
  Synthetic

SEQ ID NO: 6768 - protein, 185 aa, Artificial Sequence
  Synthetic
SLEEVLDRVRRESDKVRKTLERVKEEVERVSREVVEDLKRVEEEVRRLIERVKDILRRSNIPEEDLRRLERRLEELERKIKKVVKDNEDRNRDLNRRIDEVIKENERRNRELLKKAEEDIRRKKDKEELIRDVLREAERLVKESLDDIRRLLDEVRRLVEESRRNIERLLEEVRRLVEEIERAAE

SEQ ID NO: 6769 - protein, 185 aa, Artificial Sequence; identical to SEQ ID NO: 6768
  Synthetic

SEQ ID NO: 6770 - protein, 178 aa, Artificial Sequence
  Synthetic
DKVDEVLKRVKRVVEEIEDRVRKLNKEVRDVVKRIEELAREVLDHSRKVVEEIKKTAEDRKDERVLEEIKRKSDEDEKRLEDVLRRIKELLDRLDDKHKRILEEIEKKIRELRERIKKTGIEEEVVRTVKEELDKALEKAERVLEHSRRMLERVLKEAKRVLDEVKELNKRVIDEVRR

SEQ ID NO: 6771 - protein, 178 aa, Artificial Sequence; identical to SEQ ID NO: 6770
  Synthetic

SEQ ID NO: 6772 - protein, 175 aa, Artificial Sequence
  Synthetic
SVEDVAREVDKLLKRANEESKRVLEEVERLLRTVSRELEKVIRDVKKLIDDVEKRVPLKESLEEVKRRIEKLVEDVKRVNDESRRRIEELIKELKDMDRRSKEEIEKLRREVRTSGSETAEKVLRDVERIVRRNEELVREVLRRVKKIVDENRKIAEDALRKVEELVKELEERAR

SEQ ID NO: 6773 - protein, 175 aa, Artificial Sequence; identical to SEQ ID NO: 6772
  Synthetic

SEQ ID NO: 6774 - protein, 178 aa, Artificial Sequence
  Synthetic
SEAEEALERVKELVKRSEELAEESLRRARKSVEEVARRAEEALERVKKSVEEVKEVRKEGQPKEELDKILEKNKRDTERLRRDLERILRENKRKTEKLAEDNKRAIDEIRKRIDDLERKVDGKEVLDKVRDLVRRVDEENRRVIEEAKKLSEDVARRVDKVIKDVERLSKRVEDEVRR

SEQ ID NO: 6775 - protein, 178 aa, Artificial Sequence; identical to SEQ ID NO: 6774
  Synthetic

SEQ ID NO: 6776 - protein, 178 aa, Artificial Sequence
  Synthetic
DEDRRAVEELRRVVEEVNKLNEDTLRELERIVRENIRRVRELLKEAEDVVREVEKEVRRITDKEKVERILRKLEKILDRIRRESERLDRETEEVLRKLHEENKEILKELEKKLRDVKEKVKEAEEVLREAKDLIDHVRKTIEEVNDTVRDLVRKVHEVNKEVLDRIRKLVEEVRKTVE

SEQ ID NO: 6777 - protein, 178 aa, Artificial Sequence; identical to SEQ ID NO: 6776
  Synthetic

SEQ ID NO: 6778 - protein, 184 aa, Artificial Sequence
  Synthetic
SSLDRVRRAIEELVKKVNTDSKRVKDRVRKLLKEVNDTSDRVRRDVKRKLDKVKDDARKAGTPDDVKRKLRRVEEEIKKLIEEDKEKNRRSEREVEELIERLEEANKRSKEELEKLIEDLKRSTDDRVVERVVREVERIVRENEELVKEVVRRAEEIVERNERHSRELLRRLAELVDDLRRKIE

SEQ ID NO: 6779 - protein, 184 aa, Artificial Sequence; identical to SEQ ID NO: 6778
  Synthetic

SEQ ID NO: 6780 - protein, 184 aa, Artificial Sequence
  Synthetic
SSLDEVRKRVTELLKKVDDTSKKVEDDVKRLLDKSTRTSDEVRKAAERLLEEVEESARRKGTPEEVKRRLEDVKRKVRKLIDDNRRTNERVRKRVEDLIRENRKKLEEVKRRVKKLIDELRRSTDDEMVKRVLEELKKIVDDLERHSRKLLKDARRIVEESIEHSDRVLKEATRIVEKLERDIR

SEQ ID NO: 6781 - protein, 184 aa, Artificial Sequence; identical to SEQ ID NO: 6780
  Synthetic

SEQ ID NO: 6782 - protein, 181 aa, Artificial Sequence
  Synthetic
DEIEEVLREMRELVERNVREIEKVVRENEKLVEDNIRLVREVAKELRDLVRKLIERVARTTDKEELKRVLKTIEDEVRKITERLKESSERSERESRKSVDKLRKSTEDIKRRIEELERRVERTEELEEVVKEARRLLKKSEEDLRRVEKRVEELNEKSKEEMERVRDDVRRLLEEVKERAR

SEQ ID NO: 6783 - protein, 181 aa, Artificial Sequence; identical to SEQ ID NO: 6782
  Synthetic

SEQ ID NO: 6784 - protein, 181 aa, Artificial Sequence
  Synthetic
SEVDELLRLADEIVRELRELVRRHDEIVDKLVEENRRIVEEHLRRVEDVVRRLKELVKKIKDKKKLEDKLRDLLKKLRELSREVEKLNRESLETIRRTTEDLERKLETLARKVRELEERVRRDEEAERVVKEARRLLREIEELVKRSVERVERLHREVHERIKESTKRVEELVDEVRKAVK

SEQ ID NO: 6785 - protein, 181 aa, Artificial Sequence; identical to SEQ ID NO: 6784
  Synthetic

SEQ ID NO: 6786 - protein, 184 aa, Artificial Sequence
  Synthetic
SAVDEVRKVIKEIFDRLAELLKHNSDMVRRLLEEIRELVKNNTEIVREVLKKLEDILRELTDKDEVRKALKELVDRLRKVSEEHKRRIEEIERRIRRVSREHEKTLKKIVDDLERLIRDVRERVEEEKLEKVAEDARRAIKDIEDKLRDSNRRLDKLIKEVRRRLEESHKRIEREIKEIEERVR

SEQ ID NO: 6787 - protein, 184 aa, Artificial Sequence; identical to SEQ ID NO: 6786
  Synthetic

SEQ ID NO: 6788 - protein, 187 aa, Artificial Sequence
  Synthetic
DKLDEVKEAARRVVEEAHKKNRRVLEKLDEVSRRAHELDKRVKEKLKEVVKRADDLLKEKGISEEKVKRVRDEARKIERELDRLNEENKRKNDESKKTLRELNERDREVVRKVEKEIEDLRREGGDDVDTLVERLRRLVEELRKHSDDTVRRMEDIVRRNKKHSEESVRKMDDIVKKLEELAREVVR

SEQ ID NO: 6789 - protein, 187 aa, Artificial Sequence; identical to SEQ ID NO: 6788
  Synthetic

SEQ ID NO: 6790 - protein, 187 aa, Artificial Sequence
  Synthetic
DRLDKVKEDLKRSSEDAHRKNKEAIELLDEVSTEAHKLDEDVRRKLEKVVREVRKLLEDKGISEELVKRLDDTAREVRERLERLNERNKEVNKKSKEKLKELNRRDEEHSRRLDKRLDDLARKGGDDIDTIVRDAEKIVEDNRRHSDETVRRIERLVTENLRHSEESVRTLDRLVEELLRTAEEVVR

SEQ ID NO: 6791 - protein, 187 aa, Artificial Sequence; identical to SEQ ID NO: 6790
  Synthetic

SEQ ID NO: 6792 - protein, 187 aa, Artificial Sequence
  Synthetic
DKLERVLRELERSSKEAHEKDKKVLEDLDEVSKRAHKANEEVIARLEDVVRKAEDELRKKGISKELVKRVEDTVRKIRKELEKLNEDDRKKNKESEDRLRKLNEDNKRHSEDVKRKLEDLARKGGDDLDTLVKRIEDIVKENEDHSRRSVEEIRRIVEENERHSRESVKTIKDLVEELERRAEEVVR

SEQ ID NO: 6793 - protein, 187 aa, Artificial Sequence; identical to SEQ ID NO: 6792
  Synthetic

SEQ ID NO: 6794 - protein, 187 aa, Artificial Sequence
  Synthetic
SELEKVLKDLEESSKEAHKADEEVLRRLERVSREAEKELKRVLDDLRRVVEEVERLLREKGISEEKVKRVKDTADEIKDRLKKLLDEVRERNRESEERLRELNERNKKHSEEVLRRLRELRRKGGDDLETLVRDARRIVKENEEHSRDSVRRIDKIVKENADEVRRVVKEIKDIVKRLEELARETVR

SEQ ID NO: 6795 - protein, 187 aa, Artificial Sequence; identical to SEQ ID NO: 6794
  Synthetic

SEQ ID NO: 6796 - protein, 171 aa, Artificial Sequence
  Synthetic
SLDEDVDELVKRVEEEMRRNVKELDKLVKEDKRLAEENVRRLEEIVDRSRKLADRKEGDKEKIKREADKSLEDLEESTRRLKERSDRLLRRLEESTKRVKDRLDEIEEDLKRKGVSEEVLKRLREVIERARRDSERVLRKLEKTTDKVRRDSERVLRENEKSIEDVARKMT

SEQ ID NO: 6797 - protein, 171 aa, Artificial Sequence; identical to SEQ ID NO: 6796
  Synthetic

SEQ ID NO: 6798 - protein, 186 aa, Artificial Sequence
  Synthetic
DELERLLEELKRTTRKIEEELKEVNRRLDDTTREAEKELRRLKEKLEEVVKRAEELLRRRGVSEEKVKRLRDTLDRVRKTVDELLKELKRVSDELRKRTEKSNRESRKRSEEIEREIEELARRGEPEKDVVKRLEDLVRDDDRIAKEDVKRLEDLVREDRTLVKEIVDRLEELVRTVEKLVKEVVN

SEQ ID NO: 6799 - protein, 186 aa, Artificial Sequence; identical to SEQ ID NO: 6798
  Synthetic

SEQ ID NO: 6800 - protein, 177 aa, Artificial Sequence
  Synthetic
SAIEKVKEVVERVLETVRDSVRRSHEESKRLIDKVRKRLEEVREEVKELIERVRRKGIPERMVEKLERDLEELLKEIKDTIDRIEEELRTSNRRLKETNDEIAKRLEELLRELSRDRDKDAVEDVLRRIEELIRDLNKKNDDNVRRVKEVIDRAEKLVRDLLREIRKLIEKLIRDTE

SEQ ID NO: 6801 - protein, 177 aa, Artificial Sequence; identical to SEQ ID NO: 6800
  Synthetic

SEQ ID NO: 6802 - protein, 177 aa, Artificial Sequence
  Synthetic
SVLEEVRRRVEELLKTVKESVDRSHERSERLIEEVRESLKEVKRRVKELVERVREKGIPEDRVKRIEDKLREELERLERENRKIEEDLKRSNDELRRENERIAERLEELLRELSRDTNDKVARDVLEEIERLIREANERNKRNLEDVERVIRELNKENERVLREVEKKIEKLIRETE

SEQ ID NO: 6803 - protein, 177 aa, Artificial Sequence; identical to SEQ ID NO: 6802
  Synthetic

SEQ ID NO: 6804 - protein, 178 aa, Artificial Sequence
  Synthetic
SSIERVEKEVRRLLRESDESLKRVMEEAKELIKSVRESTKRVEEDARDLLRKVVERTGDEREDLRRVLEELRKLIEDNRREDKRSEDELRKLIRDNKEENDRARREAEKLLEDLSRGRSEEEVERVLEEVRRIIEKLKEDDKRSLERIERIVRRNNELNKESVDRIRKIIKEMEERAD

SEQ ID NO: 6805 - protein, 178 aa, Artificial Sequence; identical to SEQ ID NO: 6804
  Synthetic

SEQ ID NO: 6806 - protein, 174 aa, Artificial Sequence
  Synthetic
DESEDVEEKMRRLLEKSKDETRRVKEEVERLNEESKRVTEEVEKRVRDLLREVREKVRDKDVLEEIERRARKLVKELRELNREITERSKRSREELDKLNKKIEDDLRKIKKKLDDGKDVETVLREAKRLIEESIERIERVLKENRELAERSIKVLRDVLREVEDLIRKLEERAK

SEQ ID NO: 6807 - protein, 174 aa, Artificial Sequence; identical to SEQ ID NO: 6806
  Synthetic

SEQ ID NO: 6808 - protein, 177 aa, Artificial Sequence
  Synthetic
RKVEEVKKEAERLLRRSEEVSKKVADDADRLLKRSREVSDRVRRESERLLKEVAEAGVDEKILREIKKRSEESVKRLEDINKRLEDEIRRLKEELKRINDELRKRIERLREDLERDRTDKRVEDVLREARDLVRRSIKKIDEVLKEAKRLVEESIKLSEDNVRRNEEIIRDLERRTR

SEQ ID NO: 6809 - protein, 177 aa, Artificial Sequence; identical to SEQ ID NO: 6808
  Synthetic

SEQ ID NO: 6810 - protein, 177 aa, Artificial Sequence
  Synthetic
SAVERVKEEVDRLLERSKKESERVRKESEDLIRESDEVSRKVEEDSRRLIEEVERSGVDESILEELRRRSKKSKEDLDRINEELKRRSEESVKRLEEINKELKERVERLKEELDKIDDERVVTRLLEEAKRLVERSIEEIKRNVKENRKLVEESIKLSEENVKRNKRLVDEAIRAAE

SEQ ID NO: 6811 - protein, 177 aa, Artificial Sequence; identical to SEQ ID NO: 6810
  Synthetic

SEQ ID NO: 6812 - protein, 187 aa, Artificial Sequence
  Synthetic
SVVEEVVERVKRIAEELKRSSEENVDTVRKVVAEAKKLVEDDVREVEKLARRLKEVVTRDISDKKTLRDDIDKIEEEMRRLNKELEERIRKIERELERSSEENKRRVEKLAREIRKLVEDLERSGRVDERVLKDVKDKADKLIREVEETSKRSEEDVRKVIEEVREVLRESHERVKELIKEVREAER

SEQ ID NO: 6813 - protein, 187 aa, Artificial Sequence; identical to SEQ ID NO: 6812
  Synthetic

SEQ ID NO: 6814 - protein, 182 aa, Artificial Sequence
  Synthetic
SEAEKVAEDARKLAEEVIRLIEEVVERSKELVDRNEKEIRRVIEESDKLVEEVIRLLRRGDIRDEDIKRIEERLKELNTRSRETSKDVERELKELNKRLEEEIRKIEKEMKKLLDDLVRKRGETESVREVEKIVRDVVREIREMLKRSKDETRRVIKRVREVNDRSEKRSRDVVREARETSR

SEQ ID NO: 6815 - protein, 182 aa, Artificial Sequence; identical to SEQ ID NO: 6814
  Synthetic

SEQ ID NO: 6816 - protein, 182 aa, Artificial Sequence
  Synthetic
SEAEEVARRARKLVRELEELIRKSVEDSRELVKRNIEKIKRNVRKSEEDVDRVIKLLRRGDIREEDIKRIKEDLKRSNEESRRDSKRLEDRLRRLNEKLTRDIRRIEEEAEELLRDLVRRRGEAEAVREVDRIVKEVVRRVREALERSREETRRVIEEAKKANKESDDVSRKVAKEIDEEAT

SEQ ID NO: 6817 - protein, 182 aa, Artificial Sequence; identical to SEQ ID NO: 6816
  Synthetic

SEQ ID NO: 6818 - protein, 177 aa, Artificial Sequence
  Synthetic
RVIEEVDKEIKRVIKESEDVTKEVKDTSRKVLEDSKRESERVRRRSEEVLKKVEEEGVDKRILDELRRRVEESSKTLEEINRRLEEKIRDSERKSEEINKRLREELDKLREELKRIDDEDEVRRVAEKVKRLVDESIKRLKDNVKRNKELVDESIREVERNVEENERLATKVIEEAK

SEQ ID NO: 6819 - protein, 177 aa, Artificial Sequence; identical to SEQ ID NO: 6818
  Synthetic

SEQ ID NO: 6820 - protein, 177 aa, Artificial Sequence
  Synthetic
SVIERVEEEMEKVIRDSERVTKEVEDRAREVHERSEKRIREVEETSRRVLEELRRAGVDKRILDELRKRIKDSREDLERINEELRRALRKLLEDSKRINEELRKTLEELRKRLERVDDEEEVKKLAEEVRRLVEDSIRKLEELARRVDELVRESIERVDRNVEENKRLVREAIERRR

SEQ ID NO: 6821 - protein, 177 aa, Artificial Sequence; identical to SEQ ID NO: 6820
  Synthetic

SEQ ID NO: 6822 - protein, 177 aa, Artificial Sequence
  Synthetic
SVDREVEEIMRRVHKESEDVIRKVKDTVRRVLERSREVSERVKRDAERVLEEVKRAGVEKEILDRLREEVKKLEEELRKIDTDLERKIRELEKELEEINKKLREDLKRLKDELDKIKDKDFLKRVAEEVKRLVEESIKRVEDVAREVERLVEESIRLLEAVAKKVRDLVREVKRRRT

SEQ ID NO: 6823 - protein, 177 aa, Artificial Sequence; identical to SEQ ID NO: 6822
  Synthetic

SEQ ID NO: 6824 - protein, 184 aa, Artificial Sequence
  Synthetic
KEIEDLVKKIREIVDRIKKTVEDSVREVRRIVDESAKSVEELVKELKKLAEELRKLVEDGPEEKLRREAKRIIERADKLLKDDHRENKRLIEELRKINRDVREEVKRLTKELKESLDDLVRKRGETELIRTVERELREVEKEVKKMLDESTEVLKEVEERVRRMNDDVRRVLEKVARDVERDLR

SEQ ID NO: 6825 - protein, 184 aa, Artificial Sequence; identical to SEQ ID NO: 6824
  Synthetic

SEQ ID NO: 6826 - protein, 183 aa, Artificial Sequence
  Synthetic
KEVEEVVTKVDDLVRELEERSRRHVERVKEIADRNEKLVREVVKRSRDNVRELEELVRRGLERIDEELKRSAKTNKELVDRLRDKNRRSIEELKRLLDHNKELLDRVRRELERLLEEAERNRLPREVLEEVKKRIRDVLKRVEDASKRVKETIDEVLKRIKELTEDVERKSREVLRRVKEARK

SEQ ID NO: 6827 - protein, 183 aa, Artificial Sequence; identical to SEQ ID NO: 6826
  Synthetic

SEQ ID NO: 6828 - protein, 181 aa, Artificial Sequence
  Synthetic
KEVEDIIRKLRRHVKEIERTIREMVESVKRLADEVVKVLKDALDSARDHVRKILETLRDKGTSEVARRLERSNEEHMRRTEEEIRKLEERLDRHVKETRDVLRELRRSNDKLRDEVDRANLPEDVLRELRKVIEDTERTIKRLVDELEKVHREVKERIRKIAKDLRDKHKKSKRDIRETER

SEQ ID NO: 6829 - protein, 181 aa, Artificial Sequence; identical to SEQ ID NO: 6828
  Synthetic

SEQ ID NO: 6830 - protein, 181 aa, Artificial Sequence
  Synthetic
SAKDEVKDVNDKVRKEVRRVIEESRAVNEEIKRRVDTVLKESEDVNREVKREVEDKVRGEDLKRRVDKLLKELDRHSDELRRRLKEVLREVDEHSKELAERVKRILDKTTEEIKDLTRRGVDEKVAKEIVRKSEDVVRRIVEELKEDAKRSRDLVRELVKEIKEDVKRSRELVKRVVEEAK

SEQ ID NO: 6831 - protein, 181 aa, Artificial Sequence; identical to SEQ ID NO: 6830
  Synthetic

SEQ ID NO: 6832 - protein, 182 aa, Artificial Sequence
  Synthetic
REAEELVKRNEKIVTDIRRLVEKTVRDSRRVVEELKREAEETVERSRRVVTKLKELVERGDGRREEIERVTRELERENEELERRVKKVIDELKELNDRLEETLRRLVEESRRLLKDLIDKRGPDRMVEEVERTSREVEEEVKRVLKKSRDVTREVEEEVRRLLERSRKETDDVRKRLEEAER

SEQ ID NO: 6833 - protein, 182 aa, Artificial Sequence; identical to SEQ ID NO: 6832
  Synthetic

SEQ ID NO: 6834 - protein, 182 aa, Artificial Sequence
  Synthetic
DEAERLVEEIKRVVKEAEDLVRRTVEISRRVVETLRKEAEDLVRDSERVVKELTELARRGDGRREEIEKLIRELRKLNKDLEERVRRVERELEKENKRLEDTLRKLLEELRKLLEDLIRRRGRTELVEKVRRVIEEVEKRLRDMLRKSRDVTREVKERVARMLEKSKKVTDDVEKRVTDEDR

SEQ ID NO: 6835 - protein, 182 aa, Artificial Sequence; identical to SEQ ID NO: 6834
  Synthetic

SEQ ID NO: 6836 - protein, 182 aa, Artificial Sequence
  Synthetic
KEAEDLVRRVEEVVEELERRVEKLVRESEEVVKKLSKEVKESVDTNRDIVRRITELARRGDGREEDIRRLVTESRRLDEELRKRIEEVIRRLRKLNEDLTREARRVEEELERELRELIRKRGETEKVEEVERVIRRVKKRVEEVLRKSKTTTTDVERRVREMLERSEESTRRVKERADRERT

SEQ ID NO: 6837 - protein, 182 aa, Artificial Sequence; identical to SEQ ID NO: 6836
  Synthetic

SEQ ID NO: 6838 - protein, 184 aa, Artificial Sequence
  Synthetic
SEADDVVREIEDLVRRDKELVDEVVKRIKDLVRRDKKLVDEVVKEIKDLVTELEDLARKLDEEELRRVVKRVRDEIRRLADELREHSRRVEKEIEDLRRELEKHSEDVEREIRRLLKELRDRGIPEEMLRKLERVVEEVKRRSTEALKRLREVVKEVKETSKRANEELERVVREVKKRLDDATK

SEQ ID NO: 6839 - protein, 184 aa, Artificial Sequence; identical to SEQ ID NO: 6838
  Synthetic

SEQ ID NO: 6840 - protein, 184 aa, Artificial Sequence
  Synthetic
DEVREVVKEIRKLVEDDKRRVDKVVEDDRRLAKRDLDLVEDVVRRIEDLVRRVLEEARKLDRETLRKVVKDVIDTVDELLKRLERHSREVRKESEDLLRELRDHSRRVKERIKKLLDDLRRAGVDKSVLDELRKVVEEVKERSDRALEEVERSIRESEKESRRANEKLRKVVEEVRKKLEEAER

SEQ ID NO: 6841 - protein, 184 aa, Artificial Sequence; identical to SEQ ID NO: 6840
  Synthetic

SEQ ID NO: 6842 - protein, 184 aa, Artificial Sequence
  Synthetic
SEVDKVVKDIRDLVRRDLKRVEDVVRTDRRLAEEDLRRVKEVVEKIEKDVKELDELARKLDREELDTMLEKVKREIEERRKRLEEHSKRVEDESRRLLEDLRRHSKEVVDRIRELLKDLERRGVDESVLKKLKDVVDEVERESREALRKVEESIKESKRRSEKALEELREVVKRVDRLLEEARR

SEQ ID NO: 6843 - protein, 184 aa, Artificial Sequence; identical to SEQ ID NO: 6842
  Synthetic

SEQ ID NO: 6844 - protein, 184 aa, Artificial Sequence
  Synthetic
SEVDEVVKEVEDLVRRNEELVEEVVRRVEKVVTDDRRLVEEVVREIRKIVKDVEDLARKLDKEELKRVLDEMRERIERLLEKLRRHSKKLDDELKRLLEELREHSRRVEKRLEDLLKELRERGVDEKVLRKLEKVIREVRERSTRALRKVEEVIRRVREESERALRDLERVVKEVEKRMREAAR

SEQ ID NO: 6845 - protein, 184 aa, Artificial Sequence; identical to SEQ ID NO: 6844
  Synthetic

SEQ ID NO: 6846 - protein, 185 aa, Artificial Sequence
  Synthetic
DEVDEIVRRIEKLVTDDLKRVEDLVREVKKLVDEDKRKVDEIVKEIRRLVEEIRKEAERDRDERVLDKIRRDLERMLRKLEEDLRRSVEETKKTLRDLEKRIKESSEETRRELEKLEEELERRRMDEKVKRKLRKVVEEVERRSKKANEELEKKVREVEELSKRVLEKLKKVADEVRKEVKDAKD

SEQ ID NO: 6847 - protein, 185 aa, Artificial Sequence; identical to SEQ ID NO: 6846
  Synthetic

SEQ ID NO: 6848 - protein, 186 aa, Artificial Sequence
  Synthetic
DSVERLVETIREIARESLRRAKELVKSNKKLAEDSKRRVDKLVKELKDLVTRVKETLKRKRDDEETIERLKRELDRAVEEVKKALKESKEKSEEHVERMRRDIERTHRELEDLVRKVREDLKKDDLKGEVLELIEEVVREVKEVNTTVSKEVEDVVEETRKVNEDVAKLIEKVVREVKRVVDEVRT

SEQ ID NO: 6849 - protein, 186 aa, Artificial Sequence; identical to SEQ ID NO: 6848
  Synthetic

SEQ ID NO: 6850 - protein, 182 aa, Artificial Sequence
  Synthetic
SELERLVEEIRRLVREIEERSKKTTEDIKRLAEDIRRRSKEAVDENEDLARKIRKRAEERNDKDLVTELERRIEEIERRNKKLLDELKKRVERIVREVEKINEDLKRRLEELERRVKDVVRKRNEDSREIDKVIEEVRKRLKEVTDSDREVIKEIEEVLREVEERNRRSIEKIRKVLEDVTK

SEQ ID NO: 6851 - protein, 182 aa, Artificial Sequence; identical to SEQ ID NO: 6850
  Synthetic

SEQ ID NO: 6852 - protein, 185 aa, Artificial Sequence
  Synthetic
SEVDELVEKIRTTVKRVLEKHKRNTDETRRLVEEILERHTRTSRRIERVVREATDKLRRRKTEEVKKDLDRLLKELREEVEELKRRTTEILKRSRESSDRVRRESEEILDRLRKDVEDLRRKRKDVTEMLEKLREVLERAAEVLKRAEESDRTVDEEVERRVREVARSDDEVLKEVKREVERVKT

SEQ ID NO: 6853 - protein, 185 aa, Artificial Sequence; identical to SEQ ID NO: 6852
  Synthetic

SEQ ID NO: 6854 - protein, 182 aa, Artificial Sequence
  Synthetic
SEAEEVAKRVKEIAKENADLAREVAKDIKRLADENKKHADDVARDIERLAKELLEAARRGDAREEVAERARRRAEELARRHREENKRSEERARRLAEKAKRDNEKSREDIRRLLEDLKRKGAPERAEKLARDAAEEAKKAAEESNKLIREAAERLKEAARRADKLVEEAARRLEKAAEEARR

SEQ ID NO: 6855 - protein, 182 aa, Artificial Sequence; identical to SEQ ID NO: 6854
  Synthetic

SEQ ID NO: 6856 - protein, 182 aa, Artificial Sequence
  Synthetic
DEVDEVVRRDERLAEENLKRNTESSKRDRDLARENLKDAKRVVERIRKLMEDLKKLFDRGDIRDERARDVEREVEELLRELKRRNEESERRSRELLERLREDNERSKRRSKRLLERLRERNVDEKLTRRVEESLKRSEEVLRRVNESDKRSLEETRKVLEESNKEIEKVVRDLEELLKEVRR

SEQ ID NO: 6857 - protein, 182 aa, Artificial Sequence; identical to SEQ ID NO: 6856
  Synthetic

SEQ ID NO: 6858 - protein, 182 aa, Artificial Sequence
  Synthetic
SEADKVVKEVDDIVARNTEENDKSSKRVEDIIRENDKHAEEVVRDIRRLAEELRELRERGEIREKRLEEVRRRVEELLREHKEENDRSAEEIKKILRDLAERNKDSLRRIRKLLKDLKDKNLPEELEKRLRDVVRRAEERLRDVNRSDEEVVRRAEELLKRVDDRVKTVVEELKKTLDDERR

SEQ ID NO: 6859 - protein, 182 aa, Artificial Sequence; identical to SEQ ID NO: 6858
  Synthetic

SEQ ID NO: 6860 - protein, 182 aa, Artificial Sequence
  Synthetic
EEVDRVVKRDDDLARKNLEENERSSREDDRLVKENEDHAKKVVDDIRKLMEELRELARRGDIREKDADRVRREVDELLKKHRRFNEESRKESKRLLDELRRRNDESTKDSERLMRDLKRKNVPEELEKRLRESLRRSREVLKRVNESDRDSLERTKKRLEDVDREVRKVVEELRKVIRDEEK

SEQ ID NO: 6861 - protein, 182 aa, Artificial Sequence; identical to SEQ ID NO: 6860
  Synthetic

SEQ ID NO: 6862 - protein, 182 aa, Artificial Sequence
  Synthetic
SEAEEVARRVEKIAEDNARHAEKVAKDIEDLARENLELNERTSRRVERLARELLKAARRGDAREEVARRVEREIEKILEDANEANRRSEKEAEELAERHKEENERSKREIDELLKRLEDAGAPEEARKLARKAAEDARRAAERANELVKRAADELRRAAEEANKSDEDAAREARRAAEEAER

SEQ ID NO: 6863 - protein, 182 aa, Artificial Sequence; identical to SEQ ID NO: 6862
  Synthetic

SEQ ID NO: 6864 - protein, 182 aa, Artificial Sequence
  Synthetic
KDVEDVVREDEELAKTNKKHADDVVRRIKELIDRNRRLNEETSKRIEDLVRRLLELARRGDIREDELRRVREEVEKILKDVNEENRRSLRELERLVKEHEERNRDSKKRSEDLAEELKKRNVPERVRKEVERSLRKSDEVLRRVNDKVRRVLEELRKVLEDVNRSDEKVLRELEELLERVRT

SEQ ID NO: 6865 - protein, 182 aa, Artificial Sequence; identical to SEQ ID NO: 6864
  Synthetic

SEQ ID NO: 6866 - protein, 174 aa, Artificial Sequence
  Synthetic
SEDEKVRKVVEEAKEVNRRAEEAIKDVSERLERVNREVTKRSRDVSEEVRKMLERDASDKDEVERVKEKSKKSNEDLKRISERSRDESRKSNETLRRISEETRRRIREIEKLVKAGKDVDEVVKRIKELVDRSLELAERIVERNERLVEKSERDVRKIVEDNKRLADEVAKRAT

SEQ ID NO: 6867 - protein, 174 aa, Artificial Sequence; identical to SEQ ID NO: 6866
  Synthetic

SEQ ID NO: 6868 - protein, 174 aa, Artificial Sequence
  Synthetic
REDELVDKVLRELEELLRRVKKRLEDVSRDLERVNREVRDELRRVSKKVEDMARRDVGDKELVDEVRRESEKSNKELEDISRESKERSDDSNRKLDKLLKDVRDELRRIRKKVEDGKDAETVVRDIRRLAEELLRTVDKIVKDNERLARESRERVRRIVERNEELARDLARKAR

SEQ ID NO: 6869 - protein, 174 aa, Artificial Sequence; identical to SEQ ID NO: 6868
  Synthetic

SEQ ID NO: 6870 - protein, 174 aa, Artificial Sequence
  Synthetic
DDEKKVEDVVRKVKKVAEDVRRRLEKVSREVKKVLDEVRRRVEEVSREVEEILRRAASDKKDVEEVKRRSEDSKRRLEEIIKEIEERSRRSNETLKKLIKELEDRVRKIKEKVDRGSDADEVVKRIEDLVRDLERRVDEIVKRNKELVKRVEEEADKIVEDNKRLAEEVLRKAT

SEQ ID NO: 6871 - protein, 174 aa, Artificial Sequence; identical to SEQ ID NO: 6870
  Synthetic

SEQ ID NO: 6872 - protein, 174 aa, Artificial Sequence
  Synthetic
DSRRKVKEVIKELEEVLRRVKEEVEKVSRDLERLLKEVKEKLERVSRKVEEEIREKASDKELADEVRKRSKDSNDELKRLLDELRKRSEDSDRRLDEVVTRIRKRLKDIEKKVEDGSDADTVVKRIKELMKDVERIVEEIVRENRKLVTDLLREVDRIVEENERLAEELAERAR

SEQ ID NO: 6873 - protein, 174 aa, Artificial Sequence; identical to SEQ ID NO: 6872
  Synthetic

SEQ ID NO: 6874 - protein, 174 aa, Artificial Sequence
  Synthetic
SSKEKVERVVERLRRVNEEVIRLIEKVSRELEEVNKEVRERIERSVKETEDILRTAASDKEEVDDVRRRTEELVRRLEKLSEDSKKRSKESLEEVRRISKDTEDKVREIRKKVEAGKDVDTVVREIEKLMDDSKKKADRIVDENRELVKRSEEAVEELVRRDKKLAEDVFRKAE

SEQ ID NO: 6875 - protein, 174 aa, Artificial Sequence; identical to SEQ ID NO: 6874
  Synthetic

SEQ ID NO: 6876 - protein, 174 aa, Artificial Sequence
  Synthetic
DDERKVKKVVKEVRKVDEEVARRLDKVSKELRDVNREVKKKMEDSVKKTEDLAKKDASDKELVDRVRRETERLLEELEKLSRDSEEESKKSKEELERISRETEDRIRKIERLVEGGKDADTVVKRIKELAEESEKRVDKIVKRNKELVDKSKKDVDELVKRDEELMKDLVEKAR

SEQ ID NO: 6877 - protein, 174 aa, Artificial Sequence; identical to SEQ ID NO: 6876
  Synthetic

SEQ ID NO: 6878 - protein, 174 aa, Artificial Sequence
  Synthetic
SAEEKVRKVLKELREVNERVERELKRVSDESERVDDEVNTRAKKVVRDVERVLEERAGDKEEVEEVRKRIEELLEELKRLSEENKRRSEESEKELKEISKKTDEDLKRIERLVEAGKDVDEVVERIERLARESKKRVERIVRENEKSARESEKRADEIVKTIEELAERVARRAT

SEQ ID NO: 6879 - protein, 174 aa, Artificial Sequence; identical to SEQ ID NO: 6878
  Synthetic

SEQ ID NO: 6880 - protein, 174 aa, Artificial Sequence
  Synthetic
KDEERVKEVVKKLRKVNEDVRRLIERVSRESKRLDEEVNRELDESAKDTERALRERLGDKEAVDRVRDETRRLAEELKELSERNEKRSRDSAREVEKISRDTEERVKEIEDKVKAGADADEVVKEIEKLAKTSEELARRIVRENEESARESLERARKLVEDDRRLVKEVVERAE

SEQ ID NO: 6881 - protein, 174 aa, Artificial Sequence; identical to SEQ ID NO: 6880
  Synthetic

SEQ ID NO: 6882 - protein, 181 aa, Artificial Sequence
  Synthetic
DLEERLATVVRKVEEDLKKLRRDNEKVIREVEKLNEDLNRRNKKLIDEVRKLLEKAKREGSLRDEEVERLEEELDKSNKRLEEISRKNKKELEESHKRLAEIVKRLKDELEKIKEEVKRVDDEKRVRELLEKIKRLLEEVDRRVKESIKEIEDSLRRSKEKADRSIEEIKKLLDDLRERAR

SEQ ID NO: 6883 - protein, 181 aa, Artificial Sequence; identical to SEQ ID NO: 6882
  Synthetic

SEQ ID NO: 6884 - protein, 181 aa, Artificial Sequence
  Synthetic
SVEDLLRRVVEEVRKELERLKRKNEKVVKEVRKKNKEVNDRNEEVIRRVEKRLKKLKEDGRLSDELVEKLKEELRRSNEELRKISDENEKELEKSNRRLKKIADRVEEELKRIKEELDRVDDEEEVRRLVRRIEKIVDEVRKRVDKSVEEIKRSLKRSKELADESLERIRRLLEEIDERVR

SEQ ID NO: 6885 - protein, 181 aa, Artificial Sequence; identical to SEQ ID NO: 6884
  Synthetic

SEQ ID NO: 6886 - protein, 179 aa, Artificial Sequence
  Synthetic
SSDEELKKVLEDMKRVLEKVREDMKRVNDELKEAVERVKKESDDVDRELRRVIEEVVREDTDDEDLKRELDDIHRRNREHTERLLDEARRLLEDSKRHTEETEKTLRRLLEDLKRKIERKEVDVKDLVRTVERLVEEIKDLVRKDVERVKKIVRRIEDLAKKDVEVSEKLVKEIKDRAK

SEQ ID NO: 6887 - protein, 179 aa, Artificial Sequence; identical to SEQ ID NO: 6886
  Synthetic

SEQ ID NO: 6888 - protein, 179 aa, Artificial Sequence
  Synthetic
SAKELLDDVAKKLEEVVERVARKLDEVDERLREMIERVRKELEDVNRRLRDLVRRVVDKDRTDEDLKKRIEDLEERLRRHTEETVKRAEDIHRENREKLREMKETLKELRDRLKEILDRNELRVEEVVRDVERIVDEIEKRAEKVVRDSEKLVRDIEELVRRDVREVERIAEEIEKEAT

SEQ ID NO: 6889 - protein, 179 aa, Artificial Sequence; identical to SEQ ID NO: 6888
  Synthetic

SEQ ID NO: 6890 - protein, 179 aa, Artificial Sequence
  Synthetic
SADEELERVLRELDKVIKDVVEESRDVDRKLERVVREVERLLDDVDRRLKEVIERVVREVTDKEDLRREAEKIHKENTDRLRELKKELKKLLDDSRRHSKEVEDELEKLLRDLKRILDRKELDVKDVVTEVKKLVETVKRLVEENVKRVEKIAEEIRRLVEKVVRESDELVERIERRVR

SEQ ID NO: 6891 - protein, 179 aa, Artificial Sequence; identical to SEQ ID NO: 6890
  Synthetic

SEQ ID NO: 6892 - protein, 188 aa, Artificial Sequence
  Synthetic
SAEELIRKAAEDARRANKEAEDLIREAAKEARRANEEAERLIREAAKRAEDALRDADRKAREKEAKDRARKLAKEIRDLIKKAEEDAKKSHEETEELIRRAEEEIKKSHEEIKKLIERAEEEAEKKKDAEEEAKKLADDIREAAKRSLDRARELAKRIREAARRSLEEAKKLAEEIKKAAEKALRDAT

SEQ ID NO: 6893 - protein, 188 aa, Artificial Sequence; identical to SEQ ID NO: 6892
  Synthetic

SEQ ID NO: 6894 - protein, 184 aa, Artificial Sequence
  Synthetic
SAVERVVREVKKTVDESRKRAEKEKREVEDVVRRIREKVKRVVDDNRRVVETIKELSKERRDEELLRRAEEEVRRVHERNRDILREIAETIRRVEERLRESLEDSRRESKRVKEELEEVLKEDKSEEAREKLDRVRKELDDANRRVEEELRRVARELEKVLREVEELLRKVDEDIRRVLDEERR

SEQ ID NO: 6895 - protein, 184 aa, Artificial Sequence; identical to SEQ ID NO: 6894
  Synthetic

SEQ ID NO: 6896 - protein, 184 aa, Artificial Sequence
  Synthetic
KDVEEVARKVKRVAERSEELVAELVKKNKKVVDESREKVDDVVRRNKELVDTIRDLARRRKDEDLLREAEERVRRVHEENKKAHTDSKEAIDRLEEDNRRVNEESRRLSKRVKEELKEVLKRDRSEEIRKLAEDVKRELERVNKKVKELSDRAAEELKRVNEEVRKKLEEVDREIRKVLEEVRK

SEQ ID NO: 6897 - protein, 184 aa, Artificial Sequence; identical to SEQ ID NO: 6896
  Synthetic

SEQ ID NO: 6898 - protein, 184 aa, Artificial Sequence
  Synthetic
SLMEEVKKEVDKVVREIKELVRKVEEDVKKVVKESRDKVDKVVKENKKVVEKIRDLARRRTDEDLLREAEDEVRKVHEENKRIHKESEDTIREVEKKLKKVLDDIERLVKEVSDRAKRVLDDDRSDEIRKLIKEALDKLKEVLDEARDRLKKVKEELETVNREVEKLLRDVDREIEKVLKEVEK

SEQ ID NO: 6899 - protein, 184 aa, Artificial Sequence; identical to SEQ ID NO: 6898
  Synthetic

SEQ ID NO: 6900 - protein, 190 aa, Artificial Sequence
  Synthetic
SEAEKIVREVERVVEESRRVAKENEKEVDKVVDTIRKLIEDLARRVEDILKKIEEERRKGGDDKEKLLEKIKRLLDELRKLIEELERRVEKIVEDVKRHSEELKERSKDLNRRIKEKIEDVLRKLKDDRDVKRIEDLLREVEERLRRVSEEVKKRLKELHERVEEVLRELRKRLRDLERKARKVLEEAKK

SEQ ID NO: 6901 - protein, 190 aa, Artificial Sequence; identical to SEQ ID NO: 6900
  Synthetic

SEQ ID NO: 6902 - protein, 173 aa, Artificial Sequence
  Synthetic
DVKEVLDEARKVVEDSIRRSKELIDEVRKRVEESVEESKRLAETVAEEVREVIERARGRDSAEELKRELDRLIEEIKRSNEKLRRDIKKLEDDVRRSDERLRREIEKIEELIRRGSDIETVLREVKRLVRENVKRIAELVKTIEDLVRENSERVRRVVREIRELVKELEKKAR

SEQ ID NO: 6903 - protein, 173 aa, Artificial Sequence; identical to SEQ ID NO: 6902
  Synthetic

SEQ ID NO: 6904 - protein, 173 aa, Artificial Sequence
  Synthetic
DVDELLKRVEDEVRRSKEESEKLRKEVRKEVEDSAKTSKDLIDDARRTVEEVIKKVKGRDVIEELKERIERLEKTVRDSDKELRERIRELEREIEESNRRLEEDIKRIKKVIKDGADVDTVVERIRKLVKENSDRVREVVDTIKKLVEENVREVRRLVEEIKRLVEEVKRREE

SEQ ID NO: 6905 - protein, 173 aa, Artificial Sequence; identical to SEQ ID NO: 6904
  Synthetic

SEQ ID NO: 6906 - protein, 173 aa, Artificial Sequence
  Synthetic
DVKEVLKRAEEEVRRSIKRTREVLERVEKMVRDSSRTTTDLIRKVRREVKRVIDEVNGRDLARELKRMLDELDERLKDSDRKLKEKIDRLIKEIEESDDELRRTIEEIKKLIDDGTDIDTVLEDVKRLVKENSEKIDEVVREIRELVETNRKLVEDLVREIKELVEKALRDAK

SEQ ID NO: 6907 - protein, 173 aa, Artificial Sequence; identical to SEQ ID NO: 6906
  Synthetic

SEQ ID NO: 6908 - protein, 173 aa, Artificial Sequence
  Synthetic
DVKEVLKRAKDEVRRSSDRTRRLIEKVRDESERVVEEVKKLNEDVNREVERVIREVKGRDVVEEVRRRVEKLNRDNEKIIKEDRDALEEIRRRLEESDKRLEDVIREIEKVIDDGKDIDTVLREVEKLVRDNERLVEKLVKEVEDSVRETKKRVEESVDTVRRIVEELKRRAT

SEQ ID NO: 6909 - protein, 173 aa, Artificial Sequence; identical to SEQ ID NO: 6908
  Synthetic

SEQ ID NO: 6910 - protein, 178 aa, Artificial Sequence
  Synthetic
SEAEEVLREVKEVVDRSRELAERVLRAVRELVKRDEDLARKILEDVARVVKTIDDLARERSDEEVLRRVKRLVDELRKKLKKVLEDSARLAEDLRRKAEEVKRESKRLSDELREKAKKAGVDKEVVDRADRALREVNKRLDEVVREVEKLLRESLDRSRRVIEEVAKRLEEVLKKLED

SEQ ID NO: 6911 - protein, 178 aa, Artificial Sequence; identical to SEQ ID NO: 6910
  Synthetic

SEQ ID NO: 6912 - protein, 178 aa, Artificial Sequence
  Synthetic
DEMDEVRREVERVVREDEKLARDLKRRVEKVVEDIKRSADEVLKEVKKLVEEIRELMKKRTDREVLERVRRKVEELTRELERNHREIEELVRRVKRELEKALKESEDRVREVKERLERAGVDREVVRRVEEELERSLRKSREVVKRVEKELEDVLREHRKVLEEVTDLLRRVLEELRR

SEQ ID NO: 6913 - protein, 178 aa, Artificial Sequence; identical to SEQ ID NO: 6912
  Synthetic

SEQ ID NO: 6914 - protein, 186 aa, Artificial Sequence
  Synthetic
REAEEILKKVAEVVKEDKKLADDLRKKNKETVDDIRRKAEELLKRVKKVVEELKRRMEEGGDDRKKLTDRVEELLRRVEEELKDLKRKIDEIIERLKRDNERVLRRSEDLVRKVEEELKDVIDKSDTDELRKIAEEVRKRLEDSVRTTRDIIRRVKRENEEVIKELERVMRKVREDLKRVKEEIER

SEQ ID NO: 6915 - protein, 186 aa, Artificial Sequence; identical to SEQ ID NO: 6914
  Synthetic

SEQ ID NO: 6916 - protein, 178 aa, Artificial Sequence
  Synthetic
SREEVAKEVRELIARSEKETRDIIREVEDRMRRSKEETEEVIKEVKRLLEEVKKRLEEKGISEELRESVDRVEETVRRLLTKLREDSERLRRRLRKLLEEIRRESERLKEEVERLIRRNEGDAEEILRTVKKVVDRDRELAKRLLDEARELVRTNRELVKRVLETVTRLVKKIDDEAR

SEQ ID NO: 6917 - protein, 178 aa, Artificial Sequence; identical to SEQ ID NO: 6916
  Synthetic

SEQ ID NO: 6918 - protein, 178 aa, Artificial Sequence
  Synthetic
DEEEVEKRVKDLLRESTERTKEVNERVRRLAEESRKRTEEIIREVRRLAEEVEERLRRRGIDEELKRRVEEVKKRLEELLTDLKRRSDELRKRLEDSSRETEKKSREVVKTVDELRKRREGDVRELLETVKKLVKDDVDIVRRNLEEVKKLVETNVRLAEEVLKEVDRLVKKVEEDAR

SEQ ID NO: 6919 - protein, 178 aa, Artificial Sequence; identical to SEQ ID NO: 6918
  Synthetic

SEQ ID NO: 6920 - protein, 184 aa, Artificial Sequence
  Synthetic
DELDEIRKRVEELIKRSEEDSREVRRRLEEIIERNRKISRDVEREIEKLIKDVRDSNTTSEEAKELLKDIRRKLKELVDRLHKIDEDSLREVERLVKRLKDKNRDILRELEELARDLRRRLRGEELRRVEEVVKRVRELVERSKEETDKIAEDVRRLLKESNDDTERIKRKVEEMLKELEERIK

SEQ ID NO: 6921 - protein, 184 aa, Artificial Sequence; identical to SEQ ID NO: 6920
  Synthetic

SEQ ID NO: 6922 - protein, 178 aa, Artificial Sequence
  Synthetic
RELDEVVKTVRKLVDESKKESDDVAREARELLEKLERESEEVVRRVRELVKELKKKRDDERLDRVVKDILKKVEDLIRELREVNKETRKKVERLVKELERVNREIRERVERIMDVLRRGDVDVDEVLRKAKELIDDSRRLIEDVKRRLKELIDRDRRLIERVLEEAERLIRELDEEAR

SEQ ID NO: 6923 - protein, 178 aa, Artificial Sequence; identical to SEQ ID NO: 6922
  Synthetic

SEQ ID NO: 6924 - protein, 190 aa, Artificial Sequence
  Synthetic
KEIEELDKMVEDIVRELDELVRAHTETVDRLIRDLERSNEELRKLIKKIVDELEDLVRRGGDDKERLLREIKRLVDDLKRLVEKNTRDIKRMADELRETAKEVEERIKELIKRLEDLARDILRKRKDDEEVVRRLKDVERKVKKLAEDVKEKLRRSVERVTKLLKEVEDNSREVEKEAEERVDRVLKKVK

SEQ ID NO: 6925 - protein, 190 aa, Artificial Sequence; identical to SEQ ID NO: 6924
  Synthetic

SEQ ID NO: 6926 - protein, 175 aa, Artificial Sequence
  Synthetic
REVEELVERIERSSRRALERLEDLDRTIKKSSEDARRRLKEMDDRLEELVKRARDNGVDEEVVKEVKKLVEESRRDNEESVKRSEDLLRETERRNRDAIRRSEEEVRKILEVLKKGELREEEIKKVLEEDRKLVEKLERDNKRVLDEDKELVRRNEERNREVLERIRELIERART

SEQ ID NO: 6927 - protein, 175 aa, Artificial Sequence; identical to SEQ ID NO: 6926
  Synthetic

SEQ ID NO: 6928 - protein, 179 aa, Artificial Sequence
  Synthetic
DEVEKLIKDIRDIIRRVEEAVARLVEENNKLVKEVDDRLRELSKENRDIVRKVREGGVGDEVLEKAEDSSRRNDEDVKKLLTELRKSSEDLKRLVDDVRKKLEDKVRRLEEVVRKELSDKRTLLEEAKRVLEDIEKEARDLLRRLEEIIRRTRKLVKDILDRSRDILRRTRELVDRVRR

SEQ ID NO: 6929 - protein, 179 aa, Artificial Sequence; identical to SEQ ID NO: 6928
  Synthetic

SEQ ID NO: 6930 - protein, 179 aa, Artificial Sequence
  Synthetic
KEAEDLLRRIEDLIRKVKKEVEDLVRENNRLVEKVVRELEKLSDELRKLIKRIKDAGVSDEVLRRLEEIVKRNDEEVRKILEEAKKSSRRLEETMRKVLEDLRRLVERLKRVVDEELQDKETLLRDIERIRREIEKLIEELLRRAEEIIRDTERLVEKILRESKELLKEIRELAEREKQ

SEQ ID NO: 6931 - protein, 179 aa, Artificial Sequence; identical to SEQ ID NO: 6930
  Synthetic

SEQ ID NO: 6932 - protein, 184 aa, Artificial Sequence
  Synthetic
DLERVVEESSRLVERVVRRNKKVVEDIRRRVREVERKNEEVTKEIKKILDEVRRRLERDGADSTLLRELEEVIKEAEKRHKDSIDELREILKELEKRHRKSIRELREINKDLRRRVKDLRDKGGIREELKKLLERSREMLEKSERTVDTSREEAKRVLEESEELVERTLREVEEIIRRVIERVR

SEQ ID NO: 6933 - protein, 184 aa, Artificial Sequence; identical to SEQ ID NO: 6932
  Synthetic

SEQ ID NO: 6934 - protein, 184 aa, Artificial Sequence
  Synthetic
SLEEVLRAVRKLAEDVKRKNKEVLDRIRDSSRRSEEKLEDSLRKIEELVRKLEEELKRDGADERLAEELREILDRVRKEHKRLVEENRRVVKKVEDEHRKSEEELDRIVDELRRRVEELRKRGGVDEDLKRLLEEIKRVLEESEEKVERSLREMEEVDKETEKRSRKLNREVREVVKDVADKVR

SEQ ID NO: 6935 - protein, 184 aa, Artificial Sequence; identical to SEQ ID NO: 6934
  Synthetic

SEQ ID NO: 6936 - protein, 181 aa, Artificial Sequence
  Synthetic
SRLEDLLRKVKKVLDEIRRTIEKSLEDVRELIKRIERTIEKLLERSRDVVRRVLEDAERRRRKELVEELEKELRRIDEEVEEEVRRLIEELERIVRESEKLSDKLIRDLERIVKRLAEEVDSEKAKEVLKEVKDRVDEVAKELTDVNRDIRRIVDELRRRAEKVVRESRELSRELREELEK

SEQ ID NO: 6937 - protein, 181 aa, Artificial Sequence; identical to SEQ ID NO: 6936
  Synthetic

SEQ ID NO: 6938 - protein, 181 aa, Artificial Sequence
  Synthetic
SELERLLEEVEKELRKIERTITELLRRSRELLEEIERAIKESLRDSERLLREIEDTVRKRRREEIVDKLVKDLERLDEESKKLSEKLARDLDKANKRVEDTVRELIERLKEIVEELARRLDESKVREVLREVRERVKEVVERLKRVVEESRKRSEEVKKKLEEVNRRSEEESKRVKEELKK

SEQ ID NO: 6939 - protein, 181 aa, Artificial Sequence; identical to SEQ ID NO: 6938
  Synthetic

SEQ ID NO: 6940 - protein, 182 aa, Artificial Sequence
  Synthetic
KLEEVLRTVRKLVEDLREELERVVRTSRELTRRLEEELKEVVKRSEDLSRRLEEILKRDAREDKDLVTEIKRRLEELNRRNRELVKELLRLLDEVDKDLKRLVEELLRELEKVIKKIKDLVDNNVDLTEALKEVKRLVDEIRKTIEEALRDSKRLVDEIRETIKRSLEEVEKEVRKAEERIR

SEQ ID NO: 6941 - protein, 182 aa, Artificial Sequence; identical to SEQ ID NO: 6940
  Synthetic

SEQ ID NO: 6942 - protein, 182 aa, Artificial Sequence
  Synthetic
SIEDVLRAVEKLLRDLKRRSEEVVKHSETELRRLLEEVRRVLEHSREALERLEERIKDVREEVIKRVKELVEKLKKENEDLLTDVRRLLEELKRRNKELTERTKELLDRLKEEAEKAKRDNVSDEVIKEILERVKKLIEEIDERNKELNERTKELIKRIKDRLKELNDKTEKAIDKIRKEVE

SEQ ID NO: 6943 - protein, 182 aa, Artificial Sequence; identical to SEQ ID NO: 6942
  Synthetic

SEQ ID NO: 6944 - protein, 182 aa, Artificial Sequence
  Synthetic
SIEEVLREVEELLKELEKRARDVLRHSEELLRDVIRRSEEVVKHSEDLLRKLKEAAKDVREEVIRDVDRLVRELKERNRKLSDDSRRRVERLKEENEKLLKEVKDLVEELKRRAEKLSRDNVSDEELKKILDEVRKVIKELEDKLRKLNKKTEDVIRELIERNDRLNKDTKRVIDELKEKVR

SEQ ID NO: 6945 - protein, 182 aa, Artificial Sequence; identical to SEQ ID NO: 6944
  Synthetic

SEQ ID NO: 6946 - protein, 182 aa, Artificial Sequence
  Synthetic
SIEEVVEEVKELLERLIRRSEDVLRHSKKLLEELERKSERVVEHSEDLLRKLEEKIKDVKDDVIRKVRELAKKLRTENEDLSRRSREVVKRLKELNEKNLEEVRRLVKKLKEDAERLARNNVDDETLKRILEEVREVIKKLIKSSEDVNRETEELIRRLEDRNRKLNEKTEKVIREIEEEVK

SEQ ID NO: 6947 - protein, 182 aa, Artificial Sequence; identical to SEQ ID NO: 6946
  Synthetic

SEQ ID NO: 6948 - protein, 182 aa, Artificial Sequence
  Synthetic
TVEDVLRELRERLKESEKRDRDSVRKAEELLRRSEKRTDDVVKHSERLLEELEEAVRRIRGDELKTEVEEVRKKIRRSLEELKKHSKEVVDEIRRLLEESERHSKEVVEDIERKLESLRRIEDEDVVRRLLEEVEELLRRNVKKSEELLKEIRERLEDNIRKVEKVNRDNKREIEEILRRVK

SEQ ID NO: 6949 - protein, 182 aa, Artificial Sequence; identical to SEQ ID NO: 6948
  Synthetic

SEQ ID NO: 6950 - protein, 182 aa, Artificial Sequence
  Synthetic
TVEEVLKEAEDLLKESKERSEDSARRAEEILRRSEERTRKVVEHSREMARRLMEKVKEKRGDELKEEVERVLRRIEKSLEELRRHSERVKEEIRRLLEEDKKHSDDVVKTIRELLERLKRIDDEKVVEDVLREVEKLVRDNIEHSKRLLDEIRRRVEENIRRVDEVNKRNEELIREVEERVR

SEQ ID NO: 6951 - protein, 182 aa, Artificial Sequence; identical to SEQ ID NO: 6950
  Synthetic

SEQ ID NO: 6952 - protein, 185 aa, Artificial Sequence
  Synthetic
SKVEEILERVKRLIEENIKRSEEILEEVRRLIRENTEVSKKLLEEVKREITELEKEVREDRDKDRLRKKVEEVKDKIRKELKRNEDHSRRVAEEIRRLLRENERHSKRVADEVDRVLKELDKTTKDERVKDVLRRLKKIVDESKRRSDKVNKEIEDRVRESEKKSRKVNEDIKRLVKRVADEVER

SEQ ID NO: 6953 - protein, 185 aa, Artificial Sequence; identical to SEQ ID NO: 6952
  Synthetic

SEQ ID NO: 6954 - protein, 185 aa, Artificial Sequence
  Synthetic
SDIEDLLKKVEDLIRRNIETSRRLLEEVRKLIEENIRLAERILEEVRRLIEELARLTREDRDKDELRKKVEEVEKTVKDVIDDLRRHSDKVEEDIKKLLDDNRRHSEKVMREIEKVLKELRDRDNDEKVKDALRRLRDLIRRSKEDSERVNEEIKDIVRKSRETSEDVVRRARELLDKVRREVEK

SEQ ID NO: 6955 - protein, 185 aa, Artificial Sequence; identical to SEQ ID NO: 6954
  Synthetic

SEQ ID NO: 6956 - protein, 185 aa, Artificial Sequence
  Synthetic
SELEELLKEVAKLIKRNKDRVRKILDEVRKLIKRNEDVSRRLLEDVERLIKELEREVREDRDKDKLKRKVEEVRKRIEEVLRTNERHSREVAKEIKKVLDELREHSEKVARDIKRMLDDLRRKTRDKKVEDILRTLEELIRESERTSEEVLRELREEAEESKRKSKRVNDRIRELVEKVDREVDK

SEQ ID NO: 6957 - protein, 185 aa, Artificial Sequence; identical to SEQ ID NO: 6956
  Synthetic

SEQ ID NO: 6958 - protein, 185 aa, Artificial Sequence
  Synthetic
SKLERLLEEVEKLIRRNKRIVREILREVRELIERNIRVSEEINRRNRRLIEEIRRLVEEDKDKEKLRKKVEDLAEKVRESLERNEKHSREVEERIKELIRRLREHSEDVRRRIREVLKELAKTTDDERVKRILKEIERLVEESKRESERVLEEIKELVKDSKRRSKEVNDHSKKLVDEVREAVKK

SEQ ID NO: 6959 - protein, 185 aa, Artificial Sequence; identical to SEQ ID NO: 6958
  Synthetic

SEQ ID NO: 6960 - protein, 178 aa, Artificial Sequence
  Synthetic
SRIDELLKEIRKVTEKTRRDVERLLEEIRKVTDKSRKDSERSLDEARKVLDTIRKLLEDGKPKEKLLKELRDLLRRIEERNERILRENKRIVDEIKKEAEKLLKRNKEIVDEVAERAARDGVGEALERIKRSSEELAEEVKRVLDEVRRSSEELEKRARDSLRELRELVKRVEEEARK

SEQ ID NO: 6961 - protein, 178 aa, Artificial Sequence; identical to SEQ ID NO: 6960
  Synthetic

SEQ ID NO: 6962 - protein, 178 aa, Artificial Sequence
  Synthetic
SRIEKLLDEIRKVSKKSIDEVRKILEEVEKVTRDSIRKLRKLLREIEKVLEEIERLLKNGRDKDELVRRLEEIAKKIEEDIKKILEENRRIVREVKERLKAIVRRNEEIVDDVLKKMAKDGVGEALKRIKELSDEVREEVKKVLRKIEESSERLEEEAKKVLDTVRELVERVARRAKE

SEQ ID NO: 6963 - protein, 178 aa, Artificial Sequence; identical to SEQ ID NO: 6962
  Synthetic

SEQ ID NO: 6964 - protein, 179 aa, Artificial Sequence
  Synthetic
REAEEALRRVEEVVRRSKTELKKLLEDVRRLIEESERELRDLLRRVEEVIRRIREELRERKTEEVIKKIEKLVTDVREEVKRLLDRDRKIVTDIKRKVERLLEENERLVERVREEAERDLREVKEMLRTVDELLKDSERDSERVLREIEELLERSKRKSEEVLREIERLLEKIEREVRK

SEQ ID NO: 6965 - protein, 179 aa, Artificial Sequence; identical to SEQ ID NO: 6964
  Synthetic

SEQ ID NO: 6966 - protein, 177 aa, Artificial Sequence
  Synthetic
SEVEEVAREVDELVKESRDESRRIVEEAKRLLKESNKSVKDIERDARRLVKEVEDAVREEELKRLVDELRKRAEELVDESRKLDEDLRRRLDELVKRMEEINEELERRVRRIKELLKRGMDVKKVLDEVRELAERSKDLNRRLLERIRELVRRSKERNKELLKRLRDLVERVKREIK

SEQ ID NO: 6967 - protein, 177 aa, Artificial Sequence; identical to SEQ ID NO: 6966
  Synthetic

SEQ ID NO: 6968 - protein, 177 aa, Artificial Sequence
  Synthetic
DEVEEVKKDAERLNKELHESLRRSNEEAKRLLKESKDASREVVKDARRLTKELRETMNDDRVRDLVRRNEEVVREVEKTLERINEELERMVRRLVREDEKLNEDNKRKLDEAKERLRGGSDVEKVLRDLRRLTEETKRRNRETLEEIRRLIERSKEEIKRLLEELRELTKRTKDRIR

SEQ ID NO: 6969 - protein, 177 aa, Artificial Sequence; identical to SEQ ID NO: 6968
  Synthetic

SEQ ID NO: 6970 - protein, 177 aa, Artificial Sequence
  Synthetic
DEVKEVKDRARKLVEEVKRAVDEVRKRADELNKEVHESLRRSNREAERLVKEVEDTVREERAERELRRLEDRVREVVERDKKINEDNKRVIDELTKRLEDLVRELERVVREIEDRLRRGADVETVLREITELAKKILRDIEELLREITKITEESKRENEKSLRELEDLARRVKEKTR

SEQ ID NO: 6971 - protein, 177 aa, Artificial Sequence; identical to SEQ ID NO: 6970
  Synthetic

SEQ ID NO: 6972 - protein, 177 aa, Artificial Sequence
  Synthetic
DEVERLVEELERLLREVRDSVRRSNTEAKELNKEVHEAIRRVVEEARRLLEEVRRTADDEDVRRILKRLEEVIREIVERLKEINDRNRRVVEEVAKEDEKIVRELEKLVEEVRKVLKDGVDVETVLRRVEEVARRVKKLNEDTLRTLRRITEDSLRKIEKLLRDIEKLVREVVERLR

SEQ ID NO: 6973 - protein, 177 aa, Artificial Sequence; identical to SEQ ID NO: 6972
  Synthetic

SEQ ID NO: 6974 - protein, 180 aa, Artificial Sequence
  Synthetic
SEIEDLERRIKEVVDDLRRLVEENSKKIDDLLRRLKDLIRKVEEMNRKLIREAEELVREERSEELVREAEELVKTVHRENKRVEDEIRRLVEEVERHSEKVIRDIERLVRTIEEEIKSLPDSEELRKVEESVRRLAEEIKKELEDSRRRVEELVREIEKELEDVNRDARRLVDKVREELR

SEQ ID NO: 6975 - protein, 180 aa, Artificial Sequence; identical to SEQ ID NO: 6974
  Synthetic

SEQ ID NO: 6976 - protein, 184 aa, Artificial Sequence
  Synthetic
REVEELKKTLDRLVEESKRESDKVREDAERTVRESEDKSRRVKDEARRSLEEVEEDVKDESAEDILRRVRKVSEDHVKELKRLNDDLRRVSEDHVRTLDKLNEELREMVDRIRKRLDELEKRGGDKDEIKKILEEAEEVVRDSKKKIEDLLRHNKKRVDDSLRKIEEILKHNRDEIERVREEIR

SEQ ID NO: 6977 - protein, 184 aa, Artificial Sequence; identical to SEQ ID NO: 6976
  Synthetic

SEQ ID NO: 6978 - protein, 184 aa, Artificial Sequence
  Synthetic
DEVETVREEAKRLVEESRKESRRVEEELKKLLRRVEEEARKVKEELEKSVDEVRKAVTDKDAKDILKTLEDASRDHMRKLDEIIKRLKEIVEEVKRRLKKLNDELEKVVRDVERTLDDLKKKGGIREEIKKILERVREVVKRSKDEIREILKEVRKMIDKVRKEIKEILDHNKEVVRKIKEETK

SEQ ID NO: 6979 - protein, 184 aa, Artificial Sequence; identical to SEQ ID NO: 6978
  Synthetic

SEQ ID NO: 6980 - protein, 184 aa, Artificial Sequence
  Synthetic
SEVEEVKERAERLVRESEELSDRVRREAEKTIEAVRELVERIRKRLKESVEEVERRVTDKKAEDILRRVRELSKRHVDRLEKILRDVKKLSEDHVRTLEKLNKDLRDMVRKVEKELKELKDRGGVREEIKKLLEEVKRVVDKSKRDIDELLKHNRRKIDEVLRELEEILRHNETRIKEVLDRAR

SEQ ID NO: 6981 - protein, 184 aa, Artificial Sequence; identical to SEQ ID NO: 6980
  Synthetic

SEQ ID NO: 6982 - protein, 177 aa, Artificial Sequence
  Synthetic
SEVEKLLREAEEDVERILKRLEDSMDSNRELVERILETLKRSLDEVEKEIRKIIEELKRRRREEEARKLIEKIKRIIDTNHKLAEDLLRRLERHLRENHREAEELLRRLEELIEDLRRRNVDDKVIKRLEDLLRKVEKVVRDTNRTIKDSIRRVKEVVDTTNREAEKLLRRVEDTVR

SEQ ID NO: 6983 - protein, 177 aa, Artificial Sequence; identical to SEQ ID NO: 6982
  Synthetic

SEQ ID NO: 6984 - protein, 177 aa, Artificial Sequence
  Synthetic
SRVEKLLDEVRRLAEDILRDLERSMRSNEELVRKILEKLKESLESNRRLVKRILERLREERKEELARDLLRKLRKHLEDNHKLAEELLKRLEDHVKRNHERAKELLDELKKMLKELKDRDVDEKVIREVERLIEEVKRVVDDTNRRAEESIKEVRDLVRRTNEEIEKTIEEVDREVK

SEQ ID NO: 6985 - protein, 177 aa, Artificial Sequence; identical to SEQ ID NO: 6984
  Synthetic

SEQ ID NO: 6986 - protein, 180 aa, Artificial Sequence
  Synthetic
REAEEIKKALDKLAEELRELLERSRDTVRKLIKELRDLVRESRRRVKELIDDIRRRVDSKEMEKVLKTATDVLRRNEDLIRRIEKVLREILRKNKELADDIERVLRELEKKIEKLRRDGASREELKRLLEEVERLIERLKERIKRLTEESEKLVRELLKLIEKSTKESEEDVKRLVDEAK

SEQ ID NO: 6987 - protein, 180 aa, Artificial Sequence; identical to SEQ ID NO: 6986
  Synthetic

SEQ ID NO: 6988 - protein, 175 aa, Artificial Sequence
  Synthetic
SEIEDLLRRVRRLIEESEEVIKRVADEVKEIIDRSREKIKRVTEESREIIKRLKKDGKEDRDKLEKLVKELEDKNRESLRDTERLVRELRKLLEESLRLTEEIVTRLEKELRDIDRDRRVEDVERDIRRLVRKLREDNKRIAKTIEDLVRELRELNKRSEDETRKLVKELRDAAK

SEQ ID NO: 6989 - protein, 175 aa, Artificial Sequence; identical to SEQ ID NO: 6988
  Synthetic

SEQ ID NO: 6990 - protein, 183 aa, Artificial Sequence
  Synthetic
SEVERIKKAVEDLVRKLRKVSKETLDESRELVKELKERDKESEKDSRRLAERLRKLLEEKNQTDLRKEVEDVVRDMERSNKESKDKTDEVARELEESNRDNRRKVEEVVERLRRLLEKLKRSTDRKVVKDILDEVKKLIDDIEEHSKRVADRNRRLIEKIKKDTEDVIKRNRDLVTEIEKRIR

SEQ ID NO: 6991 - protein, 183 aa, Artificial Sequence; identical to SEQ ID NO: 6990
  Synthetic

SEQ ID NO: 6992 - protein, 183 aa, Artificial Sequence
  Synthetic
SEVEKIEERVKRLVEELKKSLKESEEETERLARELRDVDRRSKEESRRLAEELEDLLRRRNVDELKREVEKIVRDLDKSNRDSKRLTEKIVEDIKKSNEDSDKKVEDLRKRLEDLLRDLSRSTDDKVVEELLKEIEEEIRKILETNDKVVKENRRLAREILEDTKRVVDRNRELIKRIAERIK

SEQ ID NO: 6993 - protein, 183 aa, Artificial Sequence; identical to SEQ ID NO: 6992
  Synthetic

SEQ ID NO: 6994 - protein, 183 aa, Artificial Sequence
  Synthetic
DEVETIAKEVKELADKLRREVEESRKDSEDLVRKLRESLKESRKRSKDLVDELRKLLERKNTTKLREEVERVAEELKRTNDDSRRKVEDAMRKSKKLNDDLRRRVEKVVEEAKELLKDLKRSTDKKVVDDLRKRVEKLIKEIEEDIERVIRRSRKLIEDILRDNERVVKENEDLIREIEERIR

SEQ ID NO: 6995 - protein, 183 aa, Artificial Sequence; identical to SEQ ID NO: 6994
  Synthetic

SEQ ID NO: 6996 - protein, 183 aa, Artificial Sequence
  Synthetic
SDVERVEEELRKLLKEIEDSVRESERRLEKLLEDLKRSTEKTKKELKELIDRLEERVRERGDEEVKRVVEEVAKRAEDLLRESEELVREVAKRLRELLEESRRLVREAAEDLKRLLEELKRLTDSERVKEILERVRKLVEDVLRRNKRLVEEVERLIEEILRVDERIVREVRELIKRIEERIE

SEQ ID NO: 6997 - protein, 183 aa, Artificial Sequence; identical to SEQ ID NO: 6996
  Synthetic

SEQ ID NO: 6998 - protein, 183 aa, Artificial Sequence
  Synthetic
SSVEEVKKTLEDLLRESDKSVRESERRLRELLRESDESVERSRKTLEDLIRELEDLVRKRGDEEVKKEVDRVAEEAKKLLEDSKRLSDDLRRRLKELLEESEKLSRTLKDLLRRVLEELRRLTDDREVEKILREVTKLIEESLRRDREITEEVRDLIKKSKEKDKEIVDTVRRLIREIKERIR

SEQ ID NO: 6999 - protein, 183 aa, Artificial Sequence; identical to SEQ ID NO: 6998
  Synthetic

SEQ ID NO: 7000 - protein, 183 aa, Artificial Sequence
  Synthetic
RSVEEVVKTLEDLLEKLERSVRESEERLKKLLAESDDSVRKSAEELRRLIEELKDLVRREADEEVERTVREVAKEAEDVLEESKRLSDKLAERLKELLDRSRRLVEEVAETLRRLLEELKRLTDEREVKRLLDEVERLIDEIRERDKDIVREVDKLIKDSKREDKRIVDDVRRLIEEIKRRIK

SEQ ID NO: 7001 - protein, 183 aa, Artificial Sequence; identical to SEQ ID NO: 7000
  Synthetic

SEQ ID NO: 7002 - protein, 183 aa, Artificial Sequence
  Synthetic
SSVEEVKRELEKLLEDSDRSVEESKKTLRRLLEESNKELRRVAERLKDLIRELKKRVKERGTEEVARTVDTVAREAEKVLDKLREDSERLAETLKRLLEESERLSRELAKTLRELLERLRRLTDDREVEEILRRVRKLIEESKTMDKKIVDDVRKLIEESLRDIERIVEDVERLIKEIKERIT

SEQ ID NO: 7003 - protein, 183 aa, Artificial Sequence; identical to SEQ ID NO: 7002
  Synthetic

SEQ ID NO: 7004 - protein, 183 aa, Artificial Sequence
  Synthetic
SSVETVEKELRRLIKELRDSVKKSEDDLRRLLEESNRLVREVERRLRELLEKLRKLVEERADERVEDEVRKVAERLKKLLKELKELSEKLARDLKRLLERSKRLVEEVEKELRRLLEELKRLTDDREVKRILDEVKDRIRRILREDEEIVKEVRRRIKRSEEAIREIAREVDREIEDIERRIR

SEQ ID NO: 7005 - protein, 183 aa, Artificial Sequence; identical to SEQ ID NO: 7004
  Synthetic

SEQ ID NO: 7006 - protein, 174 aa, Artificial Sequence
  Synthetic
SEVEELEERARKLLEDVERLTREVEERAKELVKRVKDSSKRSEDEIRRLLRKLLETSGDNEEVRDVEERAKRVVEESRESNKKLEEDLRRLVEELRKSNEELKRRIEEVRKVLADGKDVEKVIRTLEEEVRRDEEKIREVLERVEDLIREDLRRDEELVKELEKLIREVDEKER

SEQ ID NO: 7007 - protein, 174 aa, Artificial Sequence; identical to SEQ ID NO: 7006
  Synthetic

SEQ ID NO: 7008 - protein, 174 aa, Artificial Sequence
  Synthetic
KEVEDLEEELKKLLKEVKTRTEKVVRDAEKSVRDLEKSSRDSDRTLKDLLRRLMETTGDNEIVEELTRRLKKLKEESDKSNEDHDRKSKKLVKRLEDSNKRLEEEARRLRKVLDDGKDVKKVLDEVRRLVEEDKKRIEEVLKENRESVKRDKELDDRLLERVRELIERALERAR

SEQ ID NO: 7009 - protein, 174 aa, Artificial Sequence; identical to SEQ ID NO: 7008
  Synthetic

SEQ ID NO: 7010 - protein, 174 aa, Artificial Sequence
  Synthetic
SEVERLEEEAKRLLEELKRLVERVVREAERSVEKVRDSVRRSEEEARRLLEEITKDDGRNELVETLERLAEELVRRSKKLVEEHEKRSRDLVRELEELVKRVEEKIRDVVRKLRNGKDVDKVVEDLKDDIRKVKKRIEEVLDENRKSVRKLDEDDRRLVDELRRLVKEVKDKVR

SEQ ID NO: 7011 - protein, 174 aa, Artificial Sequence; identical to SEQ ID NO: 7010
  Synthetic

SEQ ID NO: 7012 - protein, 177 aa, Artificial Sequence
  Synthetic
KEVEDLKEELKKLVEELERLVEKNVREARELVKRSEEESRRVAETARRLVDEIRRAGLDEEVVRRLKEVVDDVIRKLKELDDRLRDVVRKVEEENERLVRELRKVVKRVVEELEKTTDRRTITELLKEVEELVKRVLDAIRKSNREVEKLVRESLRRIEKLLREVEKLVKELLERRK

SEQ ID NO: 7013 - protein, 177 aa, Artificial Sequence; identical to SEQ ID NO: 7012
  Synthetic

SEQ ID NO: 7014 - protein, 177 aa, Artificial Sequence
  Synthetic
DEVERLEEELKRLVKEIEDSVRESKKEAEETLRESRKLSREVEERARRLVEELKRKGVPDELVKRLEEVVREVKKDLERLDEEHERKSEEIVRRSEKLVEDLRRLAEEVVRRLRRTTDEREIRELLEEVRKVVEEIKRRDDELVKENRRSIEESKRRIEELLKEVKELVERVTDTER

SEQ ID NO: 7015 - protein, 177 aa, Artificial Sequence; identical to SEQ ID NO: 7014
  Synthetic

SEQ ID NO: 7016 - protein, 177 aa, Artificial Sequence
  Synthetic
RDVEEVKKEAEELVKKSEESVRRSKEELERTLKRSREESERVKETAKKLVEKIERDGIPDRLVKELEDAVRRIAEELDKLDKDHEDKSKKIVDDSKKNLDELREFVRRVADELDKTTDKETIKRLLDEVRKLVEDSLRHDEELVERNKKSIKDSLDEIERLLREIEELVRKVEEDER

SEQ ID NO: 7017 - protein, 177 aa, Artificial Sequence; identical to SEQ ID NO: 7016
  Synthetic

SEQ ID NO: 7018 - protein, 177 aa, Artificial Sequence
  Synthetic
SDVDRVKEDAKRLVEESKRSVDESAKDMRRTLKRSRDESRRVKEELKRLVDRVKESGLDDKVVRELERAVRRVEEDLKKLNKDHEDKSRELIKRSEKNVRELKKVVEDVAEELDRTTDKDEIRELLERVKKLVDESRRHDKRLVEENRRSARDSLREIERLLREVRKLVEKVLRDRK

SEQ ID NO: 7019 - protein, 177 aa, Artificial Sequence; identical to SEQ ID NO: 7018
  Synthetic

SEQ ID NO: 7020 - protein, 177 aa, Artificial Sequence
  Synthetic
DEVETALEEVKELLERVLRKIEDDLRRVRDLLEKLKRTNEELLRKVREEVRRLADLIRKRRTEDVERELERLLDELRREVERVERENRKIVDELEKHTRRVVEEIKETLRELDRKVKEMNLDETVKREIEKARETLERLLKRSEEEVDRVKKEVEEISRRVKKEVKKLVDEIRERLR

SEQ ID NO: 7021 - protein, 177 aa, Artificial Sequence; identical to SEQ ID NO: 7020
  Synthetic

SEQ ID NO: 7022 - protein, 177 aa, Artificial Sequence
  Synthetic
RRVEEVAKELKRIAEKLKRDIEELLRDDKRLADELRETNKELLRKDKEILDRLAEEIKRRRTDEVREELERRIDESKKEVDEVVKENDRIVKESEERVKDLEKELEERLRRLKEKLKANRVDETVDRKIDELAERIRRLLEKVKRHVEETKRDVRRVSEEVRKHVEETKRDVRRRLK

SEQ ID NO: 7023 - protein, 177 aa, Artificial Sequence; identical to SEQ ID NO: 7022
  Synthetic

SEQ ID NO: 7024 - protein, 182 aa, Artificial Sequence
  Synthetic
SRVEDLVRRIRELVRRDLKRIKDLEEEIKRLAEEIERHSKKVVDELKELADRLRKMLEEGNLREEDIDRVRKEMERLLEENKRESDKLVRRLEELVKDSERHSARVVEELEKLVETIRSEGVEKEKVDDIRREVKRVVRESEEANKRVRKLVEDIVKRAEDSNRRVEELVRELVEDLKRAAK

SEQ ID NO: 7025 - protein, 182 aa, Artificial Sequence; identical to SEQ ID NO: 7024
  Synthetic

SEQ ID NO: 7026 - protein, 182 aa, Artificial Sequence
  Synthetic
SEVDELLKTIEKLARDDVKKIREVVEENKREVRRLEEHSKEVVKEIKDRIKEVLELLRRGELRRKDVKKVEEELEKLVRENKERSKEVVRRMRESNRRSEKHSRDLVRELRDRLREIAERGVEERVLERVERLVRRLAEESRRANEKSKEDTKRLEDRLKKSNDDLEKLVRDVVTRVREEAD

SEQ ID NO: 7027 - protein, 182 aa, Artificial Sequence; identical to SEQ ID NO: 7026
  Synthetic

SEQ ID NO: 7028 - protein, 182 aa, Artificial Sequence
  Synthetic
DEVKELEKRIRKLVREIEEHSKEVVKENRRLVEEDLETIKEVLREIKRRIKKLLELLERGELRREDVKRVEDELKKLLEDSKRHSEDVEKKLKESNDKNEKKSEEVVRELEDLVREIAERGVEKDVLKTIKDTVEELVERLKRSNERSREETKKLVKRSREANKRVEDLVRKVVKELREAEK

SEQ ID NO: 7029 - protein, 182 aa, Artificial Sequence; identical to SEQ ID NO: 7028
  Synthetic

SEQ ID NO: 7030 - protein, 182 aa, Artificial Sequence
  Synthetic
EEVERIVKEIRDLAEKDKEHSKRVEEEIRRLVEEVERHSRRVEEEIRRLAEELKRLLDRGELRDEEVRRVVKEIEDLVRRNKEETRKVVEDLKRLVEENKRHSDEVVRRLEKLVEDIKRKGLPEEKLEDLERKVRKLADESREVNDRLRELVERVVRRLEEVNERLERLVEELRRRLEEAKR

SEQ ID NO: 7031 - protein, 182 aa, Artificial Sequence; identical to SEQ ID NO: 7030
  Synthetic

SEQ ID NO: 7032 - protein, 182 aa, Artificial Sequence
  Synthetic
DEVEELVERIKRLVERDEREIKRVEDEIERLVRRVDEHSKRVEEEIRRLVTELMELLDRGELRDEKVKEVVKTAKELVDRNKRETDEVKKELDKLVEDIRKHSKDVVDELKDLLRRIKSRGVEERVVEKVRRLVDKLAERSRDLLRKLRDLVRRVVKRLEDVNRRLEELVRKLAEELKEKSR

SEQ ID NO: 7033 - protein, 182 aa, Artificial Sequence; identical to SEQ ID NO: 7032
  Synthetic

SEQ ID NO: 7034 - protein, 188 aa, Artificial Sequence
  Synthetic
SEIEKILDDIRREAEKDLRLSEKIVEDIKRLAERDIKRLREIVEEIEKLLREVSDELRKRKEKEELKKRVEEAEERLRRLVRELEEHSKKVVRDLEELVKKNHDHSRRLKEKMEELVKELRKEMDSEDAERLIREVEKLVRDLVRESEKSNEEVRKLVEDLVRESDKVLKDVKRLVDEVVRRAREEVK

SEQ ID NO: 7035 - protein, 188 aa, Artificial Sequence; identical to SEQ ID NO: 7034
  Synthetic

SEQ ID NO: 7036 - protein, 188 aa, Artificial Sequence
  Synthetic
SRIDEIVKRIEELARRDEEVSREIVKEIRDLAKRDEDTSKRIVEEIKELVKKIKEELERSKDKEKLARKVDELVRRLRELVKRNHDHSRRVVREMEKLVEENHKHSKDVVDTMRDLVRRLEEELDSEDAKRLLDKVRKTVEDLVRRSRKSNEDVRREVEKLVDRSRKSNTTVERLVRKVVRELRETVR

SEQ ID NO: 7037 - protein, 188 aa, Artificial Sequence; identical to SEQ ID NO: 7036
  Synthetic

SEQ ID NO: 7038 - protein, 188 aa, Artificial Sequence
  Synthetic
SRAEEIVERIKKLAEDDKRESDRIVEEIKKLARDIEEAIRRIVKEIRDLVKEVRDVLEREKDKEKLDRKVDDAVRKLEKLVRELKELVDRVVKTAEDLVRENHRHSKEVVETLERLVEELRKEATDERAKELVEEVERLVRELVKDSDRSNKEVRRTVKEIVERAEKLVRDVEEDVERLVRDLKRKVK

SEQ ID NO: 7039 - protein, 188 aa, Artificial Sequence; identical to SEQ ID NO: 7038
  Synthetic

SEQ ID NO: 7040 - protein, 188 aa, Artificial Sequence
  Synthetic
SEIEKILKEIEDLARRDEEVSKKIVEDIRRLAKEVEDTSRDIVRKIEELAKRVLDRLRKDRRKEELEKEVREVVKTLEELVKDNHRLIRRAVEEMKRLVEENHRHSREVVKELEDLVRKLRADSTSEDAERLVREVEDLVRRLVRRSEKSNEEVKRTVEELVRRMEESNDRVRDLVRRLVEELKRAVD

SEQ ID NO: 7041 - protein, 188 aa, Artificial Sequence; identical to SEQ ID NO: 7040
  Synthetic

SEQ ID NO: 7042 - protein, 180 aa, Artificial Sequence
  Synthetic
SEIEKLRKTVERIKEEVKRLSDEHKKRTRELERTSERLVEEHRERTEELRRRIEEIVRKKRDRSLEEIVKKLKELLDKLDKELEDSSRDTKRRLKRLDEDSDRSNKELAERLRRIAELIKAGKDIDTLVEEIKELMKEDSERIKKSVKEVDDLAKEDSDRIRDSVRTVKELADEAIRRAK

SEQ ID NO: 7043 - protein, 180 aa, Artificial Sequence; identical to SEQ ID NO: 7042
  Synthetic

SEQ ID NO: 7044 - protein, 180 aa, Artificial Sequence
  Synthetic
SEIERLEDRIRRLIRDSRELVKTLKKELKEIIERLEELSERLRREIERVVREVEDVVRKRRSDKIEDLVRRLKERLDRIIEESRDLNEKTKRELERVIREIERSSKESEDRAKKIEDLIRAGSDIDELLKKLDEIATRDREKIERLREEIRKIARKDEEDIRKLVKEIRDEVRKLKEDAR

SEQ ID NO: 7045 - protein, 180 aa, Artificial Sequence; identical to SEQ ID NO: 7044
  Synthetic

SEQ ID NO: 7046 - protein, 174 aa, Artificial Sequence
  Synthetic
SEVEELRELVKRLIERIKRVVETNERDLEELIKRVKDAVKKNKEDLERLIEEIDRKRVDERLIRELRKKLERLKEENERLVRDLKRAVDEVVKENRRLVDDLRRKLETVERVLDKGEPIKELLDELKRLIDEVEKKLRESNERVRRLAEEVLRRSKESNDRVRDEARKVKETAR

SEQ ID NO: 7047 - protein, 174 aa, Artificial Sequence; identical to SEQ ID NO: 7046
  Synthetic

SEQ ID NO: 7048 - protein, 174 aa, Artificial Sequence
  Synthetic
DEVEALKRTVEELIKRIRKAVEDNERDLERLLKESRDVVKKNEEDLKRLIEEIERIRVDEKLIRELREVVKKVKKENEDSVKESEEVVREVRKRNRELVRELETIVRRVERVVENGEPIEKLLRELERVIEEIVRRLEDSNRRVRDIARRDKERSKRSNDRVRRLAEEVKERAK

SEQ ID NO: 7049 - protein, 174 aa, Artificial Sequence; identical to SEQ ID NO: 7048
  Synthetic

SEQ ID NO: 7050 - protein, 174 aa, Artificial Sequence
  Synthetic
SEVEELKKLVEELRREIRRLVRENEEDLKKLLEESKRMVERLKELVKKLIEDIRRTRVPDELIRRLEEMAKEVERRLKKSVKESEDELRRVVEENRKLVRDLEKILEDVERVVENGEPIKELVDELKRVADEIVRRIRESNRKVRKIAEEDKTRIKRLLEELERLIADVERRAT

SEQ ID NO: 7051 - protein, 174 aa, Artificial Sequence; identical to SEQ ID NO: 7050
  Synthetic

SEQ ID NO: 7052 - protein, 178 aa, Artificial Sequence
  Synthetic
SEVERLLRELERSVTEVKERVRRLVEELERIVREVKKRVDEHKERNKRALEDVKRKVRDRKDVKEVVRELVERLRRIVEESDKNLRELLREVERLVEDVVRKVEELLKRNERLVEEIKKRGVREEVEKRARKTTEDIKRMADKVTKVAEEVLRRVEKVVEEVREVSRRVVEDIERDTR

SEQ ID NO: 7053 - protein, 178 aa, Artificial Sequence; identical to SEQ ID NO: 7052
  Synthetic

SEQ ID NO: 7054 - protein, 182 aa, Artificial Sequence
  Synthetic
KDVEKVIEDIERILTEVRRHSKEILDRIKRILETIREIVKEVKKRNEDLLREARESNVRSEEVRRIVEEIVRRARRSNEELRRIAEEIVRELDRLVKENHELIREVARRLEKLVEDLVRRRGRDKSVEDARRAVERVVREARRSNEEVKRAVEEVAKELERLVKESEDESRRIVEELKKTVD

SEQ ID NO: 7055 - protein, 182 aa, Artificial Sequence; identical to SEQ ID NO: 7054
  Synthetic

SEQ ID NO: 7056 - protein, 182 aa, Artificial Sequence
  Synthetic
DEVEEVIKRIRDILRRVEEHSEKILREIEKLLRDATRHSEEVKRRNEKILRDAENSRVRSKEAEDIVRRIVEEAKKSNEENHRLIRDLERRLRELVKENHDLIRRVEKELEELVEDLVRKKGNDEDVKRVRDEVKKVVERVRRSNKKVEDMVREVERRLRESNKESREDSKRIVEEMDRRVK

SEQ ID NO: 7057 - protein, 182 aa, Artificial Sequence; identical to SEQ ID NO: 7056
  Synthetic

SEQ ID NO: 7058 - protein, 178 aa, Artificial Sequence
  Synthetic
SEVEKIIDELRKVAEEHKRRVKELVDTNRKVLKEVKDRVRDLVRRVREILKDVSDKARRVTDRKTLEELLRRLKEMVDRVRETAERLLRELERISREHKKEAKRLLETNKRRVEEVKRRVREVDEIKEVLKESEEEVRRMLEELEKELRRSRKTVEELLRRLDKTLREVEEAVKRERD

SEQ ID NO: 7059 - protein, 178 aa, Artificial Sequence; identical to SEQ ID NO: 7058
  Synthetic

SEQ ID NO: 7060 - protein, 178 aa, Artificial Sequence
  Synthetic
DRVEELLKRVREILERVEREARRLVEEVEDVMRRHKEKLEELVRHNREVLREVSREARRTRDKETLKRLLDELRKLSKEHKDEAKRLLESNRRIVERVRERVERLLDELRKEVDKVRKAVREVEEVKKVLKEVEDTVRELVRRLEKKLKESIDTVERLLEELERVLRESNKTVEDETR

SEQ ID NO: 7061 - protein, 178 aa, Artificial Sequence; identical to SEQ ID NO: 7060
  Synthetic

SEQ ID NO: 7062 - protein, 178 aa, Artificial Sequence
  Synthetic
DEVRKILRELREALKRHVEEVKRLLEHNERVLKKVKEDVERLMEEVKRALEDVKRDVDRTRDKETLERLLRRLKTIVDRVRETAKELLDRVRKVSKEHEDALRRLKDTNREIVRRVAERLKDVKEVRKVLRESEKLIDDLLRELKRVLEETNRRVEDLLRRLEEVLRRVEKTVRDRAK

SEQ ID NO: 7063 - protein, 178 aa, Artificial Sequence; identical to SEQ ID NO: 7062
  Synthetic

SEQ ID NO: 7064 - protein, 176 aa, Artificial Sequence
  Synthetic
SLKERLEKVVEESLRRVEEVIKKLERRVEESERRVEELVKTLRDVLRKILRELEKEGGRELIEELRKALRRLDETVKKNLDENRELIEEVRRRLKKHLDDNKKVAEKLKEALKRNSSRETVERLLEEIRELLERSRKNVEDLERRIDKLLEDSERNARELLERIRKELRDISEKRK

SEQ ID NO: 7065 - protein, 176 aa, Artificial Sequence; identical to SEQ ID NO: 7064
  Synthetic

SEQ ID NO: 7066 - protein, 176 aa, Artificial Sequence
  Synthetic
SMKEEIDRVVREVAENVRDMIRRLKRVLEESLRRVDELVKEIKKVLDDVRRRIEEDGGDELIAELDKIAEEVKRNAEKHLERNKRLADEVRKELEKHRKENERLIRELKDRADKNSSEETVKRLVEKIRELNERSLDNVKKLLDRIRELLEESERNVKDIVRRIRDLLRRIKEKAT

SEQ ID NO: 7067 - protein, 176 aa, Artificial Sequence; identical to SEQ ID NO: 7066
  Synthetic

SEQ ID NO: 7068 - protein, 182 aa, Artificial Sequence
  Synthetic
DEVERVLEEIERMLREVEEHTRRVVEEVRRVLEEVKRHSERVVREIRRLLEELRKLVERGEITDEKLREVVKRLDDLVKENKRRSEEVVKRLRELVRRNKEKSRKLEEEAKKLVDDVRRSGAPKDLVRKVEEEVRRVKRELERLNKELEDEVRRIEEAAKRSNEELKKVVDEVKRELEKASK

SEQ ID NO: 7069 - protein, 182 aa, Artificial Sequence; identical to SEQ ID NO: 7068
  Synthetic

SEQ ID NO: 7070 - protein, 182 aa, Artificial Sequence
  Synthetic
DEVDEVLKEIRKVLEDVRKHSEEVLREIERVVREVKKHSRKVVEEIKEVVKRLEDLARRGEIRRKDVEDVVRKLRKKVRDNVETSRRVVEELKKLVKRNVEVVKRVVEEARRLVEEVDKGGVDKRLVDKVRKVVEEVERELKKSVDDVRRVVEEVERRLREVNKEVEDVVREVEERVRRAAT

SEQ ID NO: 7071 - protein, 182 aa, Artificial Sequence; identical to SEQ ID NO: 7070
  Synthetic

SEQ ID NO: 7072 - protein, 175 aa, Artificial Sequence
  Synthetic
DEEKEVEKVVRDVEDKLRRLLEENRDVSRKIKRELEELLKELKRSVDDSKEKLERKLREEDEVVKRVLKTSEDLVRELERLIREVEKDLEDSNRKVEDVVRDLKRRLKEIEKLVRDGADIKTVLEEIKKLAKEAEEEIKRTLERVKKLLEEVRRVVEELLRRNRTLLREIVRKAK

SEQ ID NO: 7073 - protein, 175 aa, Artificial Sequence; identical to SEQ ID NO: 7072
  Synthetic

SEQ ID NO: 7074 - protein, 175 aa, Artificial Sequence
  Synthetic
DEERELEEVVKDIERRSKKVVEDNRRVSEEIKRRLEKLLEENRKSAEDSKEMLRRELREKDEVVRRLLKESDDSNKEVKELIDDLTRRLDKSNEDLKRSVDETKEKLDRLLDLLRRGVDVKTIVTEVRDVVRRDKKKAEDTVRTVKELLDRARKKVEKTIRDNRKVLEEVVRKAR

SEQ ID NO: 7075 - protein, 175 aa, Artificial Sequence; identical to SEQ ID NO: 7074
  Synthetic

SEQ ID NO: 7076 - protein, 175 aa, Artificial Sequence
  Synthetic
SELERVEKVVREVKKALEDLLRRNKESVDRSRTEARRLLEELRESVRRSEEMVRRKLREKDEVVRDLLKKSRKLVEDLRELAERLKRKSEKSNEEVRRLVEKLTEELKDLLRLVEAGKDVEKVLKEIRDLLREAAERVERSIRRNKKVLDDLKEVVERLLKENERLLREIVEDAR

SEQ ID NO: 7077 - protein, 175 aa, Artificial Sequence; identical to SEQ ID NO: 7076
  Synthetic

SEQ ID NO: 7078 - protein, 175 aa, Artificial Sequence
  Synthetic
SAREKLRKVVEEIRRELKRLLEENKKVSDDIRRKLDELLKELEKSVKESIDTLRRDLREKTEVVERVERDSRRLIEELRKLVEDLDRRLKKSNDEVRKVVEELKRTLEELLKLLDDGVDVDTIVKELRELLKRAEEEVKKTSDRVADLVRRAEEVVKKLLRENEELLRRIVETAR

SEQ ID NO: 7079 - protein, 175 aa, Artificial Sequence; identical to SEQ ID NO: 7078
  Synthetic

SEQ ID NO: 7080 - protein, 175 aa, Artificial Sequence
  Synthetic
SEKEKVEKVVDEVRRRLEDLLRRNRESVRRSDEELKRLLKRNKEVSDEIRKRLRRELDKKDEVVRELEKRLEESNREVEKLIRDVVRKSEDSNRRVEKLVRDLLRRLEDILRLVEAGADVKTVLREIRELLKEAEERVKKSIKENEDLLDDVRRKVEESTERVERELERVSREAT

SEQ ID NO: 7081 - protein, 175 aa, Artificial Sequence; identical to SEQ ID NO: 7080
  Synthetic

SEQ ID NO: 7082 - protein, 175 aa, Artificial Sequence
  Synthetic
DEDREVEEVVKEVEERLRRLLKKNEDVSREIEKRLKELLEKNKRSVEKSEEMLRRKLREKSEEVKDLKDKSARSNEEVAEIVKDLKRRLEESNREVEELIRRVRKRLDELLKMVKAGKDVDRVLEEIRELLKRVKEEVERTSRDVKEVLRRAEEEAKRTDDENRKLLEEVVEKAR

SEQ ID NO: 7083 - protein, 175 aa, Artificial Sequence; identical to SEQ ID NO: 7082
  Synthetic

SEQ ID NO: 7084 - protein, 178 aa, Artificial Sequence
  Synthetic
DRSKEVVDRLEEELRKVKEDSKESVDRLRRLLEEVERRAEKSLRDSKEVLRRVKEEAERDRDEKTLRDLLRELKKDLERSDRELADLVRRLKEVVDRIRETNEKLIRDLKRRLEEVLDRNREVRELEKVVRDIIDRVRKMLETSEEVIREVLERVRKVLEENRRVNKDIIDKVEERVR

SEQ ID NO: 7085 - protein, 178 aa, Artificial Sequence; identical to SEQ ID NO: 7084
  Synthetic

SEQ ID NO: 7086 - protein, 184 aa, Artificial Sequence
  Synthetic
DEIERLIEEIKTVLDEIRKEAKRMIDENKRLLDEIRELSERVVEENRRLLEEIRDRAEKRRTEELAERVRRLLRRVEEENKRVARELRELLRKSEEDTRRLVTEVRDRLEKLRERVEELVRRKRVKELADELRKVLKDVRREIEKLVRDAEKSNEDSRREVERLVKRNRESLEEIRKRVEDLVK

SEQ ID NO: 7087 - protein, 184 aa, Artificial Sequence; identical to SEQ ID NO: 7086
  Synthetic

SEQ ID NO: 7088 - protein, 175 aa, Artificial Sequence
  Synthetic
SSKETLRKEVERLEKELKKLVDESRRVLEEVEREVRRAVRELEESVKKSAKRLRDRVRGEEILRRVEKKLKESEELVRRATETLKEVLKRLRESSKEVADRLKEVVERLRREVDKGGDDVEKLIRRVEELLERVRELVKKNIREIEELLERLRRLVEKVIEDDKRMLKEVEEEAN

SEQ ID NO: 7089 - protein, 175 aa, Artificial Sequence; identical to SEQ ID NO: 7088
  Synthetic

SEQ ID NO: 7090 - protein, 185 aa, Artificial Sequence
  Synthetic
REVEELIKRIERLLDEAREHSKEVIRRDEELLRRVRKIIEEIIREIERLLREAEDIARKRGGSDEEVLRRLEEIVRRLRELVERVKRELEKIVEESRRLVEKNEDLSRKLVETLKDLVRRLSRDVSEELLKRIEDVVRRVVEDLKRLNEEIRRSSEETEKELRRLLEEIRKVVEDVERRVRELVK

SEQ ID NO: 7091 - protein, 185 aa, Artificial Sequence; identical to SEQ ID NO: 7090
  Synthetic

SEQ ID NO: 7092 - protein, 185 aa, Artificial Sequence
  Synthetic
DEVREVIKAIRKMLEEAEKHSRDVIRADKELLDKIARHSEEVIKEIRRLLRELEKIAKDKGGESRELEELAKEVVERLKKLVEENVRLSRRIVETSRRLVRENKELSREIVERLEKLLRDLAKTVSEDLLRRIEEEVRRVVEALEKLNRDIEESSRRTEDTARKLNERIREVVEEVMRRVRKLVE

SEQ ID NO: 7093 - protein, 185 aa, Artificial Sequence; identical to SEQ ID NO: 7092
  Synthetic

SEQ ID NO: 7094 - protein, 185 aa, Artificial Sequence
  Synthetic
SEVERVIEEIRKLLEDAKRHSDEVIKTDEDILRKVKKHSEEVIREIEKLLEEIEELARRRGGRDKEVVERLREVVRRAEELVKDNKRRSERVVEESRELVERNRRRSEKLVRRLEELVRRLSRDVDEELLRRLEKLVEDVMRTLKKLNDEIRKSVDETEKTLEELNRRIRKTVEEVRKTAEDLVR

SEQ ID NO: 7095 - protein, 185 aa, Artificial Sequence; identical to SEQ ID NO: 7094
  Synthetic

SEQ ID NO: 7096 - protein, 185 aa, Artificial Sequence
  Synthetic
DEVREVIRRIEKLLEDVKRHSERVIREDRKLLRDAERRAKEVIDEIRRVLEEAKEIVRREGGESKKVKDELEKVVRDLRKLVEDLKREVTEIVKKSDELVKENTRESDRVVKELRELVRRLSRDVSEELLKTITDVVRKVEETLKKLNDEIRKSVEDTMRALKKLVDDLRRVVKEVEDRVREEAR

SEQ ID NO: 7097 - protein, 185 aa, Artificial Sequence; identical to SEQ ID NO: 7096
  Synthetic

SEQ ID NO: 7098 - protein, 185 aa, Artificial Sequence
  Synthetic
DVVREVIKTIKKILDEVRDHTRRSIERNEKLLRDIRKIVEDSIRRNRKLLDDAKKVAERDLSDKESLKRKVDEVIKELKDTLDELRKIAEDVIRELEKTLKENHELIREVIERLKELVARLRSQVDEEMVKTLKKVVEDVERELRRLNKEDEDTVREIAEAAERLVRDDERTVREIEEALKELVR

SEQ ID NO: 7099 - protein, 185 aa, Artificial Sequence; identical to SEQ ID NO: 7098
  Synthetic

SEQ ID NO: 7100 - protein, 185 aa, Artificial Sequence
  Synthetic
DVIRDVEKKIRDILERVREHTKKSIKENRDILDDVRRHTEKSIKENEDILDEVRRVAERDLKDKKTLTDVVRRIERELEKTLERDHRRIREVEKRLEETLRENHELIRDVIRRLKDLVDKLRSQVPEEMVKRAKDVVDDVARRLEELNREDKKTVEEIVETAKELNERDKETVERIRKKLEDLVK

SEQ ID NO: 7101 - protein, 185 aa, Artificial Sequence; identical to SEQ ID NO: 7100
  Synthetic

SEQ ID NO: 7102 - protein, 185 aa, Artificial Sequence
  Synthetic
DAVRKVIEDIKRALEEVRRHTKESIKRNEDILREVEKIARDIIREIRRILERVREVVERDLKDKDTLRKAVEDVIKRLEEILKELEDIVRDVIRRLEKTLKENHDLIREVIKRLEDLVRDLRRKVPEEAVETLKRVVDDVAKKAKELNREDEETVRKIVEELKRLLDELRREVERVADEARRAVK

SEQ ID NO: 7103 - protein, 185 aa, Artificial Sequence; identical to SEQ ID NO: 7102
  Synthetic

SEQ ID NO: 7104 - protein, 185 aa, Artificial Sequence
  Synthetic
SVAEEVIRRIEEILKRVEEHTRESIERNKKLLEEVRKHTEDVIRRIRELLERLERVVRRDLKDKETLRDTARRVVEELEKILEEDHRLVRRVEEELRKTLEDNHRLIREIEERLRRLVEDLKRKVPEEMVKRVKDVVDDVVRRLKDLNETDRRTVDEIVKEARRLNDELRKVVEEVEEKARRDVK

SEQ ID NO: 7105 - protein, 185 aa, Artificial Sequence; identical to SEQ ID NO: 7104
  Synthetic

SEQ ID NO: 7106 - protein, 183 aa, Artificial Sequence
  Synthetic
DEVREIIERIKKLLDDIRKVAEESIRRNEKLLEEVRKRVRESIEELKRIKEEVEKLAREGQPKEELKRIVDEIAKRADESNETLKRIVDKLRKDSKKSNEDVKKIIEELKKRLDDLLRDVRRVPEDVVRTIEEVVRRVEKELRRLLEENERVIREIERELKKLVDDNKRVSDEIKDRAERLVD

SEQ ID NO: 7107 - protein, 183 aa, Artificial Sequence; identical to SEQ ID NO: 7106
  Synthetic

SEQ ID NO: 7108 - protein, 183 aa, Artificial Sequence
  Synthetic
SEVEDIIRKIEESARRSEKVVRDSIRENRRLLEEVKREVDRSIERLEDIIRKVEEVARRGEPEEELRRIVEEVKRELEKSNKELREIVKELRERSRRSNEEVERIVRENAKRLDELLRDIRRVEERAVDTIRRVVEKSKTVSKKVLDENREVVREVDERVRELVRKNEDVSRKIEERARRLLK

SEQ ID NO: 7109 - protein, 183 aa, Artificial Sequence; identical to SEQ ID NO: 7108
  Synthetic

SEQ ID NO: 7110 - protein, 177 aa, Artificial Sequence
  Synthetic
DEEEEVERVVKEAEETIRELLERDKRVVKRLREEADRVLDEVREEVKRSEETAEDLRRKGLDERLVDRLRKLSEDHKRKVEELKRRLDEVLRRVEEESKRLLEELREILERVRRLVRRGDPGEKLIKELEDVLRELEERSRKTLEELKDVLRKVKETIDELIRTNRRELEKLERDTR

SEQ ID NO: 7111 - protein, 177 aa, Artificial Sequence; identical to SEQ ID NO: 7110
  Synthetic

SEQ ID NO: 7112 - protein, 177 aa, Artificial Sequence
  Synthetic
SEEEEVAKVVEDVRRRLEELKRAVEEVIRRTDEEAKRLLEADRRVVERVREEVKRLVEAGLDERLARTIEEILKEVLRRSEKLLEDLRRVNEKSDRDVDRLREEVEDILRRLRELVRKGEPGKELIKRLRDELKRLEDDARRILERNKKILEDVERESRRTLKELKDVLKELEERAR

SEQ ID NO: 7113 - protein, 177 aa, Artificial Sequence; identical to SEQ ID NO: 7112
  Synthetic

SEQ ID NO: 7114 - protein, 184 aa, Artificial Sequence
  Synthetic
SLVEELERVVKDVEREARKLNEHNRENSKRVEDRLRELNEHLRKNTEEVKRRLEELIRKKKDSEELLRLAEKLLTESEKLVRDMERENKKSIEDSRRLVKRVVEENKRVLDEARKLVEELKRLTDEDAIREVLRRIERLLEEVKKKNEETSKRSKELLEENAKRNKEVSDRSKRLLEEIKRRAD

SEQ ID NO: 7115 - protein, 184 aa, Artificial Sequence; identical to SEQ ID NO: 7114
  Synthetic

SEQ ID NO: 7116 - protein, 184 aa, Artificial Sequence
  Synthetic
SLTERLREVVRRVEEELKELIRHLRENSERVRKTLEELNRHLKENVEDVKRKLEDLIRKKKDARELERLLRRIIETSEELVRRVVERNKKSIEESERLVRDAMRKLEKLIDEIRKLVEEVSRLTDKDAVERVIEEIERLLDEVKKTVEELSKTSKKLLDENKKENEDVSRKSEELLKKIADEVK

SEQ ID NO: 7117 - protein, 184 aa, Artificial Sequence; identical to SEQ ID NO: 7116
  Synthetic

SEQ ID NO: 7118 - protein, 184 aa, Artificial Sequence
  Synthetic
SLKERLEEVVRRVRKELKKLIEHLERNVEEVRKTLEELNRHLDENVKRVKDTLTRLIEEKRDKKDLVEKLERALEDSKRKVDKLREENRESIRRSKKLVDDAKKKLDDVIRRIKELLERASRLRKKDEFERVLKRIKEVLDEVKREVEELSKESEDLLRKNEERNKRASDRSEDLLKKIAEEVK

SEQ ID NO: 7119 - protein, 184 aa, Artificial Sequence; identical to SEQ ID NO: 7118
  Synthetic

SEQ ID NO: 7120 - protein, 184 aa, Artificial Sequence
  Synthetic
SLLEELEKVVEEVKRSLDEVNKRNKKNTDDVAKTLTDLNEHLERNVRKVEEDAKDLVRKKKDSDELRERLEDIIRRSKELVDELRKLNTDSIERSERLVREAVKRNERAIERIKKLVDDASRLDKEKLAKDVLREIRRVLEEVKRDNDRTSKESKDLLDENKKRNEEVSEESERLLRDIARKVD

SEQ ID NO: 7121 - protein, 184 aa, Artificial Sequence; identical to SEQ ID NO: 7120
  Synthetic

SEQ ID NO: 7122 - protein, 184 aa, Artificial Sequence
  Synthetic
DLLEELKDVVDKVRRTLERLNEENRKNVEDVKRRLDDLNRKLEDNVRRVEERARELIKRKKDAEELREELERVIKTSKDLVDKLRRENEKSIEDSDRLVKKVERDNERVITRIEELLRRLARLTDEKAVRDVLKEIEELLRKVTKENKDTSDESRRLVKTNEDLNREASKRSEDLLARVEEKVR

SEQ ID NO: 7123 - protein, 184 aa, Artificial Sequence; identical to SEQ ID NO: 7122
  Synthetic

SEQ ID NO: 7124 - protein, 184 aa, Artificial Sequence
  Synthetic
SLTERLAEVVKRAEDLLRKLNEENKKNVEDVERTLRKLNKDLKDSVDRSRREAEKLIRRKKDSKDLARKLKKVVEDSKELVDRLMEENKRSIERSRDLVRRVKETNEEVLREIRRLLEELSRLTDKDAIEKVLEDIERVLREVEKRNRETSRDSERLLRRNEEENRKALERDEKVLKEVADEVE

SEQ ID NO: 7125 - protein, 184 aa, Artificial Sequence; identical to SEQ ID NO: 7124
  Synthetic

SEQ ID NO: 7126 - protein, 184 aa, Artificial Sequence
  Synthetic
SLEEALEKIVREVKETLERLNKENRDSVRETADTLRKLNEELRRNVKRVEEALRDLIREKKEKEELKDKVRELLRRSRELVEEVVKENKKSIEESKRLVDEAEKINRDLIRRIKELLDRASRLRKEEEAKRVLRKIEEDLKRVADINRKTIERDKKLLEDNERKNRKVSEESRELLEKIAKDVK

SEQ ID NO: 7127 - protein, 184 aa, Artificial Sequence; identical to SEQ ID NO: 7126
  Synthetic

SEQ ID NO: 7128 - protein, 185 aa, Artificial Sequence
  Synthetic
KEVEEIIEEIKDRLRRLEETVERLLRENREMLRRTREEVKEIIKRIRDLLRELKKIAEKDRRKEELERLARELEERLKRLVDELRRSLEKHDRESEESVKRLEELARRLLEDLDRLVKDLRRKGIDKKLVEDVDKVVKEVEDRVRRLIEALKKVSEDLHRENKKLIEELEEVVKEVKERARELTR

SEQ ID NO: 7129 - protein, 185 aa, Artificial Sequence; identical to SEQ ID NO: 7128
  Synthetic

SEQ ID NO: 7130 - protein, 185 aa, Artificial Sequence
  Synthetic
DEVKEIIKRIEDLLEDLKRKVERILREDERSLEESRKKVEEILKEIEDVLRKLKKDVEEDRDKDRLREEAKRLLEKLEKLVRDLKREVDENVKRSEKLVREAEELAERLVKELEELVRDLERKGVDESAIKELRDVVREVKKRAKELIERLRESVERSRETNERLIRELEDVVRRVEETVRRLIK

SEQ ID NO: 7131 - protein, 185 aa, Artificial Sequence; identical to SEQ ID NO: 7130
  Synthetic

SEQ ID NO: 7132 - protein, 178 aa, Artificial Sequence
  Synthetic
KKEEKIKRSVERSKEENERLIEELERSIRDTARRAEKLIERLEKVVREVDKRLRELREEGRLRDEEVDRLKKELDRLLRTVKELVKELKRRSTELLRRLEEIVRENEKISRDILKLLRDGKDVETVLREDEDTLRRSEEKVDKLIKDDRRLLEELEDKVRELLRTVKELLKRTEERVT

SEQ ID NO: 7133 - protein, 178 aa, Artificial Sequence; identical to SEQ ID NO: 7132
  Synthetic

SEQ ID NO: 7134 - protein, 178 aa, Artificial Sequence
  Synthetic
SSEERLKESIDRSKKRNKEAIEELEKSIRETEKTLEELIKTTRKSIEDVRKRLEDLERKGELDRKMVETLRKRLEDILRRNKTLVDRVKERSEKLLRDLRKIVKENEDRSREILKLVRDGSDIDTLIEEDKETLRRSDEEVRRLIDEDRRLLEEVEKRARESNKEIRDLLRRVEEEAR

SEQ ID NO: 7135 - protein, 178 aa, Artificial Sequence; identical to SEQ ID NO: 7134
  Synthetic

SEQ ID NO: 7136 - protein, 178 aa, Artificial Sequence
  Synthetic
SEEDELRESVKDSERRLRRLIEEDKRVVEEVEEENKRLIDKVREVIKRIEDRLDELRRRGELSEDSVRRLKELLKDILRKVEEIVERNVRRLREMLKESKRLVDRLKEESEEILKLVRAGKDVKEAIRRDRELLKRAEEESRRTLEEMRTSLEESKRRVEELIKTLKRLLDEAEKEAK

SEQ ID NO: 7137 - protein, 178 aa, Artificial Sequence; identical to SEQ ID NO: 7136
  Synthetic

SEQ ID NO: 7138 - protein, 178 aa, Artificial Sequence
  Synthetic
SSEEKVEESIRRSKKRLEELIRDVERVVRKVEEDNRRLEEKLRKSIEDTRRKLEELKRRGELDDELVRRVKEESDRLLDELRDIVRRNVERARRLLEELERLVEDLKRKSEKILELVRRGKDFETLIRDDKRLLRKVEEDAKRLIKEIRDSLRESEKRVEELIDRDRRLAKEVEDRAR

SEQ ID NO: 7139 - protein, 178 aa, Artificial Sequence; identical to SEQ ID NO: 7138
  Synthetic

SEQ ID NO: 7140 - protein, 178 aa, Artificial Sequence
  Synthetic
SSEERLRESIKRSKKRLEELIREVRKRIEEIRRKNEELIREVEEVIRRIREELKRLRDEGKLDDKTVKDLKEKLDRILEEVKRIVDENEKTARELLKRVEEIVRELEKRSKEILKMVRDGKDIDELIKEDERLLREVEKKVKEIIKRLDDSLRDSERRAKELIRELEELLREAEERAK

SEQ ID NO: 7141 - protein, 178 aa, Artificial Sequence; identical to SEQ ID NO: 7140
  Synthetic

SEQ ID NO: 7142 - protein, 178 aa, Artificial Sequence
  Synthetic
SSEDRLRKSIEDSRKRNEELTRALETVIREIRKRNARLIEEVKKVVEEVKRELERLREEGLLSDELVETVLREAERLLEELRKIVEDNVRTADKVLEDLKRIVRRNEEESKKIEELVKAGKDIDTLIKRDRETLKESEDRVRKLLEDLRRSLRESEKEARRLIEEIRTLLEKVAREAT

SEQ ID NO: 7143 - protein, 178 aa, Artificial Sequence; identical to SEQ ID NO: 7142
  Synthetic

SEQ ID NO: 7144 - protein, 175 aa, Artificial Sequence
  Synthetic
SEVEDVLRRIRELLEEVRELVERNLKEIKRLADEIERLAKENLERSRRLAEELRDGNLDEKAAKDVVDDSKRHSREVVETVKKIAEESKRHSDEVVKTLKDIVREIKREVEEKVRGEDAVERVERILRDADEKIKELARESERLNRELDELIKRLVDESRELNRELEEIVRERAR

SEQ ID NO: 7145 - protein, 175 aa, Artificial Sequence; identical to SEQ ID NO: 7144
  Synthetic

SEQ ID NO: 7146 - protein, 175 aa, Artificial Sequence
  Synthetic
REVEEVLKKIEDLARELTKKVRKNLEDIKKLAEEIRELAERVLRTSRELIKELRDGNLRDEELKRIVDRSRELSKEVVERVERIVEESEKHSKDVVDEMKEIVDRVRKEVEDRVRGRELLEEVRKILEEMRRRVDELVRRSEELNRKLRELVERLVKELEDLNDEAKKIVDDRAR

SEQ ID NO: 7147 - protein, 175 aa, Artificial Sequence; identical to SEQ ID NO: 7146
  Synthetic

SEQ ID NO: 7148 - protein, 175 aa, Artificial Sequence
  Synthetic
REVEEILKKIRTLLEEVKRRVEKNLEDIRKLLKELEDRVRRDLDEIRRLAEELRDGNLPEEDVRRVVEESKKHSRDVVETMKKIVTESEDHSRKVAEELKKIVKEIKEEADDKVRGEKLLAEVRKVLKEAEDKIRELVERSKTINTEVKKEVDRLVEESKKLNKELEDEVDRRAK

SEQ ID NO: 7149 - protein, 175 aa, Artificial Sequence; identical to SEQ ID NO: 7148
  Synthetic

SEQ ID NO: 7150 - protein, 175 aa, Artificial Sequence
  Synthetic
REVEEVLKKIRELIETLEELVRDDLRRIEELLRRIEDKVRENLRRIREVIKELRDGNLPEEELRRVVEDTKRHSREVVEEAKKILEDIRRHSERVAREMKKIVDDIRKKVEKDVRGEDLLKRVKELLDDIRRKVDELIDRSRRLLEDLRRRVKELAEESKKLNEEAEKIVEDRAR

SEQ ID NO: 7151 - protein, 175 aa, Artificial Sequence; identical to SEQ ID NO: 7150
  Synthetic

SEQ ID NO: 7152 - protein, 175 aa, Artificial Sequence
  Synthetic
KEVEEVLKEIKDIAEEIRELAERDLKRDKELVDEAEDLVRRNLEDIRRVIEELRDGNLSEEELRRVVEETKKHSDEVRKELEDIVRRSKEHSRRVAERVKRLVEEVKKRVEDRVRGEELLRRVEKLLEDLKRTVDEMVKRSEDSLRRSEETVRELEERSRRLNDEIRRIVDERAR

SEQ ID NO: 7153 - protein, 175 aa, Artificial Sequence; identical to SEQ ID NO: 7152
  Synthetic

SEQ ID NO: 7154 - protein, 179 aa, Artificial Sequence
  Synthetic
SEVDKVVKEIKEKLDEIRKEVEKVVREDERLLEEIERLARKVVRENKELLKDIRREGREDTEKAREMLERSERKVRELIKEAKKILEESRELVKRLTEKAREVLKEIRDEVKKLEDRTDDETVARKLEEVVREVEEEVRRLEEKLKRSVEETEREIRRVVKELEDSVRETEREVRRLSK

SEQ ID NO: 7155 - protein, 179 aa, Artificial Sequence; identical to SEQ ID NO: 7154
  Synthetic

SEQ ID NO: 7156 - protein, 185 aa, Artificial Sequence
  Synthetic
DDVEKLVRDIERLVEKVTRDNKKTVDDDKTLVDEARKENEETVERIKRELEELEKRVRKDRRREALKKELEELEKRIREILKTLHDRNREIIKRSEDLLKELHERNRRAIEEVRRLLDELRRNGVSEEATRKLEKVLRDLEEELKRVDRENEKSLRESRKIVEDLDRTNKRVVDELRRIVEELRK

SEQ ID NO: 7157 - protein, 185 aa, Artificial Sequence; identical to SEQ ID NO: 7156
  Synthetic

SEQ ID NO: 7158 - protein, 182 aa, Artificial Sequence
  Synthetic
DEIDDVLRKIEDLVRKLRELVKKVLEDSKRLLEEIKRLAKEALERSEELVRRVEELARRGDIDEKELREVLETSKRLSEEVRKRAEELLKESRDLSEELRKRLEDVVREIRKLVKDVADKTTIEEVIRKLEEAVKRAEELVKRIEEELRKVDEEVERLVREIEKELREVNDRLRRLIEEIAR

SEQ ID NO: 7159 - protein, 182 aa, Artificial Sequence; identical to SEQ ID NO: 7158
  Synthetic

SEQ ID NO: 7160 - protein, 185 aa, Artificial Sequence
  Synthetic
REIEEALKEIEKIIEDLRKIVEEVLKRLEEIDRELRKRNEDSNREIEKIIEDLKDMVRKKGPDEELKKLVEDIKKKVTDILRRNEKVVEESERLSKELLDDLERVVKKIEEDIKRILDRVREAGLSEEAERRAETVLRKLERVVDKVIKDIRKVLKDNERVVREVRKSAEELLDKLRKVVEEVRR

SEQ ID NO: 7161 - protein, 185 aa, Artificial Sequence; identical to SEQ ID NO: 7160
  Synthetic

SEQ ID NO: 7162 - protein, 185 aa, Artificial Sequence
  Synthetic
REIEDVLRRIEEIIRELEERNKKSNKEIAEIDKELRDRNRKSNEEIEKIIEDLKEAVERKGTNEELEKLIDEARKRLEEILRRNDTVVDESRKRSKDILDRNRELVREIEERLDRILKRVREAGLSEEAEKRIRDVLDKLREVVERVIRSIEDMLRRNEKVVREVKESIERALKRLEETVKRVRD

SEQ ID NO: 7163 - protein, 185 aa, Artificial Sequence; identical to SEQ ID NO: 7162
  Synthetic

SEQ ID NO: 7164 - protein, 185 aa, Artificial Sequence
  Synthetic
DEIEKMLRDIEEIIKRLRKIVEEVRDTLRRIDEDLRRRNEESNRRLEKIIEDLERVARRDGPDERLRKLIKEARETVERLLEENRRRVAKSRETSKKLLDELRRVVEEIEKRLEEILKKVKDDGLDKKAEDEIRKALRKLKEVVKKVLKEIAEMVERNDRELRRLEKSIRESLDKLRETVKRLED

SEQ ID NO: 7165 - protein, 185 aa, Artificial Sequence; identical to SEQ ID NO: 7164
  Synthetic

SEQ ID NO: 7166 - protein, 174 aa, Artificial Sequence
  Synthetic
DLVEEIRKTIEKIVREIRKVLDEVRKHTEDVIRDIRRVLKEVERHSREVVKRIRDERGTEKARDLVRRNKEKSERVVRRARELVKRNEERSREVVKDLRRLVKEIKDLAKKLVDDGIDKDELRKLVETLEKVVREVEEELRRLNEELEKVVREVEKRARESNDRLEKVVREVER

SEQ ID NO: 7167 - protein, 174 aa, Artificial Sequence; identical to SEQ ID NO: 7166
  Synthetic

SEQ ID NO: 7168 - protein, 186 aa, Artificial Sequence
  Synthetic
SEVDEVVKEIRKLVEDDEREVEKAIRDIRRSNEELRERVERLLEELERLIKEVEETVRRMEGKEEIDKLLRELEKRARDVLRELEELLKEDEKRVKEVLDRIKKVNEDTKKRVEELLREIVRRRGEDVEAVEKARKILEEVEKVVTDTEKKLDDIRKHVKEVVDRLRKEIEDVLKRVRDVAERERR

SEQ ID NO: 7169 - protein, 186 aa, Artificial Sequence; identical to SEQ ID NO: 7168
  Synthetic

SEQ ID NO: 7170 - protein, 182 aa, Artificial Sequence
  Synthetic
KVEELLKELLDRVKEVVDRIRRELEKALEESRRVVREVEERVKTANREVRKVVDDVRKRSDEKRLDDILKRVEEESRRSVEELRKRLRKVIEENRKLVEDLERKLERVIREVERLLEELRNVDEEDVRRVLEEIARLVRELEKMVRDVVKTSRDTVRKLREDVKKVVDENRKLAEKLKRDAD

SEQ ID NO: 7171 - protein, 182 aa, Artificial Sequence; identical to SEQ ID NO: 7170
  Synthetic

SEQ ID NO: 7172 - protein, 182 aa, Artificial Sequence
  Synthetic
RIRETLTKLLEDVKEVVRETDELLKRLNRRVREVVRETEERLEDLNREVRKVVRDIERETDDERLRKLLERVIRESERSVEDVRRHSEEVIRRSEKSVEDLKRHSERVIRTAKELVDRLQNVDEETVKDIVRKVKRLLEENRKLAEKITRDNEELLKENKEMLDEVRRRNTELLKRLREEAK

SEQ ID NO: 7173 - protein, 182 aa, Artificial Sequence; identical to SEQ ID NO: 7172
  Synthetic

SEQ ID NO: 7174 - protein, 182 aa, Artificial Sequence
  Synthetic
RIEEDATRLIKEVKDVVKETEERARKVNKEVRDVVRDVERRLKELNEEVERVIRDVKRRSDEKELDDLLKEVNKRSKKSVDDLKERLEDVIRASEKSLRELEKHSREVLKTVKELLDRLKDVDEKIADDVAKEIEDLVRRNREVVTEIEKKNRELVRRLRDMVRKVEEDNKRLLEELKKATD

SEQ ID NO: 7175 - protein, 182 aa, Artificial Sequence; identical to SEQ ID NO: 7174
  Synthetic

SEQ ID NO: 7176 - protein, 178 aa, Artificial Sequence
  Synthetic
SVRELVEEARKHSRKVAEESRKLVEDLTEESKRVIDESREKVERLREEIERVLREVKKEGRVDDKIVEKLRRTAEELRKRVKESNDRNREELEKLREKVEDSNRKNKKTLDELTKKIEDGEPIERVLEEVEESDKRDEERVRKLEREIRESNKRDKEIVDRLLDELRRIVEELRERAR

SEQ ID NO: 7177 - protein, 178 aa, Artificial Sequence; identical to SEQ ID NO: 7176
  Synthetic

SEQ ID NO: 7178 - protein, 178 aa, Artificial Sequence
  Synthetic
SVDEAVDELLKNSEEVIKDTERKARELLRHSREVNKRSERESERLKEEIERVLRKLKRDNKVDDKILEDLRKKLEDLERENRDSVRKNEETVARLLREVEKSNEDNRRTLKELKDLVRNGEPIEELVERIKDSNRRDKEIIKDLERKIRESDKRHKERVDDLARRVEEIVKELEEAAR

SEQ ID NO: 7179 - protein, 178 aa, Artificial Sequence; identical to SEQ ID NO: 7178
  Synthetic

SEQ ID NO: 7180 - protein, 175 aa, Artificial Sequence
  Synthetic
SEVKKVEKEAEDISRRSRELLEKIREEVERLSRRSEELLKDVERKVRKVIKEIEDKRSSEEAKELVDRIDETLKRLLEESRRLVKEAEDRLREVVKESEDLVREMERRLERLREEGSVDEETVRELIRDLRRNTKRVKEEADEMIRHLRENTERVEKRLRELREELKKVVERVRK

SEQ ID NO: 7181 - protein, 175 aa, Artificial Sequence; identical to SEQ ID NO: 7180
  Synthetic

SEQ ID NO: 7182 - protein, 175 aa, Artificial Sequence
  Synthetic
EMVDRATEKVRTLSDESRRLLKKVRDENRKTSERSKRLLDEIERRVKEVLKRIRTERSDEDARRLVDEVRKDLERIIEESERLVREVEDRNRRAIERSRKLVKDIERDLRRLVAEGSVDKDRVKRLIEELKENTERVEKSLRDLDRHNRRNTEEVKRSADELIEELKRVVDEVKK

SEQ ID NO: 7183 - protein, 175 aa, Artificial Sequence; identical to SEQ ID NO: 7182
  Synthetic

SEQ ID NO: 7184 - protein, 175 aa, Artificial Sequence
  Synthetic
DKADEIEETVRRVSETSERLVEEVRKDNERTSKRSDDLLKDIEDKVRKVLERMRRERLDEEARKLVEEVVRRLEELLKTSKKLVEELREKNRRLIETSKRLVEKVEKELKDARDEGSVDEEKVRRLIKELRDNTKKVAEELKKLDDHNERNVEEVKKRLEELIRRLEKVVEDVKR

SEQ ID NO: 7185 - protein, 175 aa, Artificial Sequence; identical to SEQ ID NO: 7184
  Synthetic

SEQ ID NO: 7186 - protein, 175 aa, Artificial Sequence
  Synthetic
DFVKKAKDDVKEVSKESEKLLREIEEEVRRVSKRSRELLETVRRRVEKVLRDMERERKDEKAEELVRRVEEDLKRVLKESEDLVREVEKRLREALERSRKLVEEVREELRRLVEEGSVDEDRVRELIKELEENTRRVEEKLRKLIEDLKRNVREVEERARRLIEELREVVERVKT

SEQ ID NO: 7187 - protein, 175 aa, Artificial Sequence; identical to SEQ ID NO: 7186
  Synthetic

SEQ ID NO: 7188 - protein, 186 aa, Artificial Sequence
  Synthetic
SDLERLKREAEELIERDKRLLRRVEEESRRTLEEDRRSLKESEDRARELIRRIEELAKKIKDKRELEERLRRLLRTLEEIVERNARLSRKLLEDSKKLVKELRELSERLLRTLERLVRELIRKKDKSDEMRDAARRLIEEITRSVEESERELKRLIEEDKRSVERSKKENDKLIEEVRRVVERVTK

SEQ ID NO: 7189 - protein, 186 aa, Artificial Sequence; identical to SEQ ID NO: 7188
  Synthetic

SEQ ID NO: 7190 - protein, 175 aa, Artificial Sequence
  Synthetic
DVEEVLRKLKKEVEEVIRRTEAEVAKVLKEVEKVVTETREEVRRVLEEVKRVVDDVRRRNRADDRLLKEALKRVRDLLRRVEEVSRKHRDDVRRLMEEVKEVSERTRRAIDEIEKKVRDVEEVRKTVEKLIDDNRRMLEEVVKRAKELIEHNRRVVDKVLKEAKKIVRDLEETVR

SEQ ID NO: 7191 - protein, 175 aa, Artificial Sequence; identical to SEQ ID NO: 7190
  Synthetic

SEQ ID NO: 7192 - protein, 175 aa, Artificial Sequence
  Synthetic
SVEEVLKKLLEEVRRVAEETRRRAEKLLDDDRKVAEESKKRAEELLKEVKDRVDDVRRRNTLDDRILKDILRKVAELVKELEEISKRSLDESKRLVEEVEKVSRETEERVRDIARRVKDMEKVARTIKKLIKENRKFLEEVEKRSRETLKTNKKVLRDLEKRAKKIIEDLERTLR

SEQ ID NO: 7193 - protein, 175 aa, Artificial Sequence; identical to SEQ ID NO: 7192
  Synthetic

SEQ ID NO: 7194 - protein, 176 aa, Artificial Sequence
  Synthetic
KIEELMKRLEDEAKRSLDESEKKLEELRRDSERSVREVEELLKELLDRARRVLEKLGDSEEARKVLERVRKLVTEVREHSERVSRENERLVKENRDHSRRLLERVRELVERVSRLTDEEEVKRVAREVEELIERNRRHSDRIAEEVKETLERNREKVRRVLEKLKKELEDVLEKRK

SEQ ID NO: 7195 - protein, 176 aa, Artificial Sequence; identical to SEQ ID NO: 7194
  Synthetic

SEQ ID NO: 7196 - protein, 176 aa, Artificial Sequence
  Synthetic
DIEELARRLEEAVKDSLRRVEEKLRRLEDESRRSVEDSDRKLKELIDRVRKVLKDLGESKEAKDVLREVRRLVEENRKHSEDVSRDNKRLVDEVRRHSEELLKEVKRLVDEVRRLDKDEVVRRVARRIEELLKENDDLVRRVAEEIKRTLKENNEHSDDLRRRIEELIKEITERRR

SEQ ID NO: 7197 - protein, 176 aa, Artificial Sequence; identical to SEQ ID NO: 7196
  Synthetic

SEQ ID NO: 7198 - protein, 176 aa, Artificial Sequence
  Synthetic
DIEELLERLRRRVEKSLEDSDRLLRKLEEDSKESVKRVKRLLEELIKRVKEVLKKAGNSEEAKKVLEDVERLVREVEKHSREVSERNKKLVDDNRKHSEDLLRTVRKLVEEVRRLTDKELVKRALEEIEKRLKDNRDHSRRLAETVKDTLDKNDKKVEEVRREIEELLRRLDEKRN

SEQ ID NO: 7199 - protein, 176 aa, Artificial Sequence; identical to SEQ ID NO: 7198
  Synthetic

SEQ ID NO: 7200 - protein, 176 aa, Artificial Sequence
  Synthetic
DIEDLLRELRKRVEDSLKKSEDRLRRLEEKVKRSLDEVEKELKRLLDEAKKVVDKAGNSEEAKKVLDDVKRLVDRVRRESERLLKEVRDLVRENKKHSKELLDEVDELVERVRRLDKDEEVRRVLERIDRLIKRNDDHSRKLEKEIEDLLRRNNREAEEVAKEVEKLLEDLERRRK

SEQ ID NO: 7201 - protein, 176 aa, Artificial Sequence; identical to SEQ ID NO: 7200
  Synthetic

SEQ ID NO: 7202 - protein, 182 aa, Artificial Sequence
  Synthetic
REIEEVVKELDDLLRRNDERVKRILDELEELIKKHDRRSDEVTKEIRELLRKLEREVERDKSKEDLERKLDELRRTVDELVRDVERHAREVLERVKELVERLERHSRRVLEEVEKLVREVVRTKEARELAEELKKRAKESVDRSKKALEELKKRAREAVRRSREKLKKLKREVEKVVREVRR

SEQ ID NO: 7203 - protein, 182 aa, Artificial Sequence; identical to SEQ ID NO: 7202
  Synthetic

SEQ ID NO: 7204 - protein, 187 aa, Artificial Sequence
  Synthetic
DELREILERVRRVLERSKELSEELLRRVEEVLRRLRKHSRDLEEKVRRILTEIEKRARERRDDDEKLLREVKKVLEDVERELDRSIERSEEVVEELKRRADRSIEESRRLLETVKKELEDLIERRREVKDLREKLDKLRRDLEEVLRRNEEIVREATRRIRKVLDENRKKVEELKRRAERVLEELRR

SEQ ID NO: 7205 - protein, 187 aa, Artificial Sequence; identical to SEQ ID NO: 7204
  Synthetic

SEQ ID NO: 7206 - protein, 187 aa, Artificial Sequence
  Synthetic
DDLRRIAKEVEKVLKTSEDLSEELKKEVKRVVDESREDSKRLREEVRKVLEEVKRLADRNEKDREELLDEVRRLLEEVRRLLKESIDRSKRLLEDVKKKLEDSIRESERLLRTVEERLKELIDKKREVRELKEILKELKKELERVLEDNRRKVKELEDELREVLKRNEKIARELEKELRRVLEEVRR

SEQ ID NO: 7207 - protein, 187 aa, Artificial Sequence; identical to SEQ ID NO: 7206
  Synthetic

SEQ ID NO: 7208 - protein, 187 aa, Artificial Sequence
  Synthetic
DELRELEERAKKVVDESRENSDRLAKKVKEVLKRSRELSDELRKEVERVLREIKERARRKDEPREDLLREVAKVLEEVKRRLEESIRRSKRLLDEVTRELEESIRRSEELVDRLRKKLEELIDRRREVERLRDILDKIAREVERVLEENRRIVTELKKELEKVLDENRKIVEELERRARKVLKELRD

SEQ ID NO: 7209 - protein, 187 aa, Artificial Sequence; identical to SEQ ID NO: 7208
  Synthetic

SEQ ID NO: 7210 - protein, 187 aa, Artificial Sequence
  Synthetic
DELRELLEEVRRMLRESRENSRKLAEEVERVLRESEEDSKKLKRDVEKILEDVRRKLERNEKDKKDLLKEVEDELRKVRKDLEESIRKSKRLLDDVRRRLEESIRRSEKLLRDIDKRLKELIDKRKEVDELRRILDELRRRAKKVLDDNRKIVRDLERELRRVLEENRKIVEELEKLLEKVLEELRR

SEQ ID NO: 7211 - protein, 187 aa, Artificial Sequence; identical to SEQ ID NO: 7210
  Synthetic

SEQ ID NO: 7212 - protein, 187 aa, Artificial Sequence
  Synthetic
KELEELAKTVEDLLRENDRLAEEVLRTVDDLLRKNDEISKRLLDTARKLLKELKDLKRENRGDKKDLLRTLERLLEKLKEDVDRSRKISEDLLREVKRLVDELRERSKRILDEVRKLAEKLIREKDKSEDVKRILEKLIRDVEKSLKDVDDRLRELIRRVEESLRRNEEILKEVERRAEEVVEEVRR

SEQ ID NO: 7213 - protein, 187 aa, Artificial Sequence; identical to SEQ ID NO: 7212
  Synthetic

SEQ ID NO: 7214 - protein, 187 aa, Artificial Sequence
  Synthetic
DDAERLLEDVRRLLEENDRISEEVLKTVKRIVDENDRLAEELLRTVDELVKRLKELRERNEGDKKVLDKEVKKILREVEKLVEELRRISKKLLDDVKRLVDESRKISEKILDDVRKLVTELIRKVKDFERIRKILEKVIKEVEDSLRRNSEIVERAVDRARESVKRVKEIVETVERKIRKVVDEVRK

SEQ ID NO: 7215 - protein, 187 aa, Artificial Sequence; identical to SEQ ID NO: 7214
  Synthetic

SEQ ID NO: 7216 - protein, 187 aa, Artificial Sequence
  Synthetic
SEVEEVKDRVTKLLKENDDISKELEERVRRLLEENDRHSREVEKTVRKLLEDLKRLAEENKGDKKVLTKEAKRILDEVRKLVKENDDLSRKLLEDVKRLVETSKRISEKLLRDVKRLAEDLIDKKRDSKRVKDILRRLVEEAEESLRRNEKKLRELEKRVRESLKRSHKINKELEERVKEVLDRVRD

SEQ ID NO: 7217 - protein, 187 aa, Artificial Sequence; identical to SEQ ID NO: 7216
  Synthetic

SEQ ID NO: 7218 - protein, 187 aa, Artificial Sequence
  Synthetic
DEVERVLEEAKKLLDTNDDLLRKLDDTVRKLVEDNNRISEEVRERVERLLRRLEELVRKNEGDKKKLEKDARDILRKVRELAKESDERSRKILEEVRRLAEKLKRDSERLLRTVERLVRKLIDDKRDSERVKRILDRVIKEVTDSLKRVEDRLRELIRRVEESLKRNREELRRLEERVKDVLDKARR

SEQ ID NO: 7219 - protein, 187 aa, Artificial Sequence; identical to SEQ ID NO: 7218
  Synthetic

SEQ ID NO: 7220 - protein, 187 aa, Artificial Sequence
  Synthetic
DRLEDLLRDVKRLLEENDKHSKEVEERIRKLVEDNNEISRTVARDVEEKLKRLRERTEEKRGDKKVLERDVERLLEEVDRLLKRSEEISERILREVRREAERNDEESERILKEVRDLVRDLIDKFRDSERVRRTLEELTRRVEESLKRSHEINRKVIREIEKSMDENKKELERLIDRARRVLEDVRK

SEQ ID NO: 7221 - protein, 187 aa, Artificial Sequence; identical to SEQ ID NO: 7220
  Synthetic

SEQ ID NO: 7222 - protein, 187 aa, Artificial Sequence
  Synthetic
SEAEEVLKRAEEILRENNKISRDLEEEVRRLLKENDDLLREVEETVERLLEELKELAKRNEGDKKELVKRAEDLLRRVRDLVRRLEERSKEILKEVKRLVEESKRRSEELLKRVRELAKELIDRKKDSERVKKILERVIRELEKSLKDNERKLRELEERVRDSLRRVEESLRRLERRVEEVLERVRK

SEQ ID NO: 7223 - protein, 187 aa, Artificial Sequence; identical to SEQ ID NO: 7222
  Synthetic

SEQ ID NO: 7224 - protein, 187 aa, Artificial Sequence
  Synthetic
DEMEKLRKDVKKLLEDNNKISRDVEKTVEELLRRNDEHSKEVLKRVEDLLRELKKLKDDKDGDKKELLKTLEDILREVAELLKRNDDLSRKILEDVERLARESKKISEEILREVERLAEDLIRKFDKSEDVKRILEELKKRAEDSLRENEKRLRELIREVEKSLRRSHEINRDAERKVRKVLDDVRR

SEQ ID NO: 7225 - protein, 187 aa, Artificial Sequence; identical to SEQ ID NO: 7224
  Synthetic

SEQ ID NO: 7226 - protein, 182 aa, Artificial Sequence
  Synthetic
SEIEELLERVKELLKRNRELVERVKRTVEELNKDNDRVVKEIEDEARRLLDELEKIMRRTSDKRTLDKILREVLERVRKLVEDLEEHSRRILKRTEELVRKLRKHSEDVKRTVDRLVKEVVRDDRMRRIAKKAIDDVRKSVEDSKRILDELRKSTEESVKRTRDILKRVLDEAKKVVEDLRR

SEQ ID NO: 7227 - protein, 182 aa, Artificial Sequence; identical to SEQ ID NO: 7226
  Synthetic

SEQ ID NO: 7228 - protein, 182 aa, Artificial Sequence
  Synthetic
DELEELRTRVEKLLKENNDLVREVLKTVKKLNDENRKLVERILREVERLLRELREIAKTTSDKDTLKKELRRVLEEVKKLLEELREHSRRILETTKELVRRLEEHSKRVLDTVEDLVRKVVRTEEMRKKAEELRKRVDESVKDTRKKLEELRKSTEKSVRDTDRILKDLERRAREVVDELEK

SEQ ID NO: 7229 - protein, 182 aa, Artificial Sequence; identical to SEQ ID NO: 7228
  Synthetic

SEQ ID NO: 7230 - protein, 177 aa, Artificial Sequence
  Synthetic
DVEEAVRELRETLDKSVERSERTVRELVKKLETSVEETREEVERVVEELDRVVEEAKKDVSEKIVDEIRKLVDKLRKEAKKVLEDSKRKVDELRKEAKKVVDESRERAEKLKKDLDERGAGAKEVRKEVKELVERDEDLVRKIREKVEKVVKDNKDLLRRIREAAKRVVREIRERLR

SEQ ID NO: 7231 - protein, 177 aa, Artificial Sequence; identical to SEQ ID NO: 7230
  Synthetic

SEQ ID NO: 7232 - protein, 184 aa, Artificial Sequence
  Synthetic
STMDEIRRIVEKVLKEDKDLAETADRLNRDSVRRDEELAERNKRTNERVVREIEDRLKKEKSEEVVKTIKELIERVVKRNEESIRESERLVRELVKKNEEIIRRSKKLVEEVERRAREILKSSEDKRLEDIVREVKKRLEDSLRDTERIVREVDERNKESLRRSKEIVERVNKLLRDVLERART

SEQ ID NO: 7233 - protein, 184 aa, Artificial Sequence; identical to SEQ ID NO: 7232
  Synthetic

SEQ ID NO: 7234 - protein, 179 aa, Artificial Sequence
  Synthetic
SSKEVADELRKKAEKVLDELRKIIRELERKNEDSLRRTEEIVRRLEEEAERVLRDLVRTRGEDDRLVREVERLLRELKRRLEELIRRSEELIKRSREEVDRVIRTVEKLLEELDRLLRANKGDIEDLRRTVDKLVEEIKDLARKLAKSSDDTVREDEKLVEELRKDVKRIVRKIKKDLE

SEQ ID NO: 7235 - protein, 179 aa, Artificial Sequence; identical to SEQ ID NO: 7234
  Synthetic

SEQ ID NO: 7236 - protein, 170 aa, Artificial Sequence
  Synthetic
SAEEVVRELDKELKKVLEDSRDLVRRLEEELRKVLEDNEEVVKEIERSSDDVLRKLGDSEEAREIVKRSRDELKESIDDSRRIVEKIRRDLERNIRKVEEIIEDIKRKLKDLRGSDELLRRVKELVERARRHSERLLEEVKRLVDEIRERSKELLERARRLNEEMKERTR

SEQ ID NO: 7237 - protein, 170 aa, Artificial Sequence; identical to SEQ ID NO: 7236
  Synthetic

SEQ ID NO: 7238 - protein, 183 aa, Artificial Sequence
  Synthetic
SDLEELFREVKELVDDNLRKSDKLRRDVEKRVRDNERRSEKVHEDNRRLIEKIERLVRRGELREEDVRRALEEIKDSLRRSLETSKKVLDDIREELKRSLDHSREVLEEIERLLEEILRKDKDSDRVRTLVKELRERAKKSLDDNRRMVEELRKRLEESLRRNKRVVEESEKIAKEVLDKVRT

SEQ ID NO: 7239 - protein, 183 aa, Artificial Sequence; identical to SEQ ID NO: 7238
  Synthetic

SEQ ID NO: 7240 - protein, 183 aa, Artificial Sequence
  Synthetic
KDAEDLERRVRELVEENNRVSKRLAEEVTRLVKENEDKVRELEKEVRDRAKELLDMKRRGEVREEEVKRVLREIEELLREITEHSKEVLKTIEKLLRDSLEHSRRVLEEIERLLETILRKSKDSERLKKLVDELRETLERSLRENEKVADELRKRAEKSLEDVKRVVDELRKIVDDVLKRVED

SEQ ID NO: 7241 - protein, 183 aa, Artificial Sequence; identical to SEQ ID NO: 7240
  Synthetic

SEQ ID NO: 7242 - protein, 183 aa, Artificial Sequence
  Synthetic
DDLEELFERVKRLLERNNEVSKKLEDDVRKLIEDNERRVERVHRENEKELRRIEDLKRRGEIREKDVKRALEEIKRSLDELLKHSKDVLEEIEKLLRDSEEHSKTVLKEIEDLLRDILRKDKDSERVRRLVEELRKLLEDSLEKNKRLVDELRKRAERSLREVRKLVERSKREAERVLEEVRK

SEQ ID NO: 7243 - protein, 183 aa, Artificial Sequence; identical to SEQ ID NO: 7242
  Synthetic

SEQ ID NO: 7244 - protein, 183 aa, Artificial Sequence
  Synthetic
SRVEEMFERIERLVRRNNEVSRRVHERNRELIKRNREKVKKVHDDNKKLIDDLRELKRRGEIREEEAKKVLEEIEKSLRELKKHSEDVLREIDKTLRESEKHSDDVTREIDELLKRILDEDKDSERVRRLVEEARRLLKKSKDDNRRVVKRSREEVTRSLREVEKLVDESRREAEKVLEEVKK

SEQ ID NO: 7245 - protein, 183 aa, Artificial Sequence; identical to SEQ ID NO: 7244
  Synthetic

SEQ ID NO: 7246 - protein, 183 aa, Artificial Sequence
  Synthetic
KELEEAFDRVRRLLEENKRKAEEVHRTNEELVRRNNEKSERVHRENEKEIERLDRAKKRGEIREEEAKRVLEKIERSLKRSEEHSEELEREVERTLRELEKHSEDVLKDIERLLKDVLRKDKDSERVKTLLKELRDRLKESRETVKELVDRSREEVKKSKKRNKKVVTDSRRRIKDVLDKVRK

SEQ ID NO: 7247 - protein, 183 aa, Artificial Sequence; identical to SEQ ID NO: 7246
  Synthetic

SEQ ID NO: 7248 - protein, 183 aa, Artificial Sequence
  Synthetic
KEAEDMLRKVRKLIKENEKHSREVADEVRKLVEDNDRKVDEVHERNRKLITDLRRLAEEGRVREKDVKAVLEEIEKSLRELRKHSRDVLKRIDDLLKENEKHSREVLKEIKRLLDELKKEDKDSERLKTVVTELEKRARDSLEKSKEINKRLREELKRSEERVERLVRKSEEEAKKVLDDVRR

SEQ ID NO: 7249 - protein, 183 aa, Artificial Sequence; identical to SEQ ID NO: 7248
  Synthetic

SEQ ID NO: 7250 - protein, 183 aa, Artificial Sequence
  Synthetic
SEIEKLVEDVRKLVEDNLRHSEEVHRRNRRLIEENERKIDELEKRVRKLVEELRELAERGEIREEEARKVLEEIKRLLDEIRRHSEEVLKEIERTLKENLKHSEEVLRRIEERLEDIKRKDKDSERVRTLVDRLREELKRSLDESEKLNRESRKRVTRSLEKVDDLVRELEKLARKVLEEVKT

SEQ ID NO: 7251 - protein, 183 aa, Artificial Sequence; identical to SEQ ID NO: 7250
  Synthetic

SEQ ID NO: 7252 - protein, 185 aa, Artificial Sequence
  Synthetic
SEVEEIFKRVTDLLKRNRDLVREILERSRRLVERNDREAKKILDDARRLIEELEDAVRKERDKDTLRKKVKELRDEVKRLVDRLRKHSKDVLDTDRKLVKELEDHSKELEKEVERLLEELERRSRDERVKKLLDELRERVKRSVEESRRVLDDSRRKSEDSLRRSEELLKRVEEIVERVAREVER

SEQ ID NO: 7253 - protein, 185 aa, Artificial Sequence; identical to SEQ ID NO: 7252
  Synthetic

SEQ ID NO: 7254 - protein, 185 aa, Artificial Sequence
  Synthetic
SEVEEIARRVDKLLKDNKRTVDEILKESRRLVKENNELVDKILREVEELLRRLEDEVRKERDKDELTRKVKELIDRVRKLLEDLRRHSEEVRRRDEELADRLRKHSKELEERVKRLLEDLRRKSTSERVEKLLRELEKRVKESVDTSREVLKRSREDSKRSEDRTEKVLREARKRVEDVADKVRK

SEQ ID NO: 7255 - protein, 185 aa, Artificial Sequence; identical to SEQ ID NO: 7254
  Synthetic

SEQ ID NO: 7256 - protein, 185 aa, Artificial Sequence
  Synthetic
REVEEIVKEVERLVRENDKVAKEIVDESKRLVEENRKRVEEIRREVEELIRRLEDAVRKERRKEDLARKVKELRDTVERLVRELKKHSEEVLRRDEDLVRRLRRHSEKLKKDVDDLVRDLERKSDDKRVKDLLEELRKRVKDSRKKSEELLEESERRSKKSLDDTRRVLKDARDIVEKVADEVRK

SEQ ID NO: 7257 - protein, 185 aa, Artificial Sequence; identical to SEQ ID NO: 7256
  Synthetic

SEQ ID NO: 7258 - protein, 185 aa, Artificial Sequence
  Synthetic
SDVEEIKKRVKELLEENKRLVETIEREVRRLIEENRRLAKRILDEVRRLLEELKDRVDKDRDKDELRKEVERLLERVKELLDALRKHSKDVLDTVKKLLEDLRRSSEELRRTVEELVRRLEERSDSERVKKLLTDARKEVERSLRESKKALDELRRIVEKSLRDTERLLRTAEKEVEDVLREVER

SEQ ID NO: 7259 - protein, 185 aa, Artificial Sequence; identical to SEQ ID NO: 7258
  Synthetic

SEQ ID NO: 7260 - protein, 185 aa, Artificial Sequence
  Synthetic
SEVEKIFRDVEDLLRRNEETAKEILKTSEELVRRNEELVRRILEEVRDLIRKLREVVERSRDKDELRRKVDELRREVERLVRELEKHSRRVLEEDKRLAEELRRSSKELEDEVKRLLDDLRRRSTDRRVEELLRRLAEAVKESLERSERLLRRSEEESRRSLKKTEDILREAREIVRKVAEEVKK

SEQ ID NO: 7261 - protein, 185 aa, Artificial Sequence; identical to SEQ ID NO: 7260
  Synthetic

SEQ ID NO: 7262 - protein, 185 aa, Artificial Sequence
  Synthetic
REVEEIVKEVRRRLERNDEVAERIVRESERLVEENNRLVEEILRRVRKLIEELLDLVRKSRDKSKLKKKVDELRRTVKKLLDELREHSKRVKEEDERLVDELRKHSRKLLEEVKKLADELRKRSTDERVEKLLRDLEREVDESRKKSRKLLERSREESDRSLKTTEDILREAERIVEKVEEDVRR

SEQ ID NO: 7263 - protein, 185 aa, Artificial Sequence; identical to SEQ ID NO: 7262
  Synthetic

SEQ ID NO: 7264 - protein, 185 aa, Artificial Sequence
  Synthetic
SDVEEIVRRAEKLVEDNDRVAEKIHEDNRRSNKRTLDEVRKILEEVRKLIKDLEDEVRRDRDKDRLRKKVKELKDEVERLLRELEDTVRRDKETSKDTARKLRKHSEDVEKTVRDLVTELARRSDDERVKRLLRRVEKSVRDSKRRSEKLLEDSERSSEKVEKDVRDVLKEAREIVRDVAEKVEK

SEQ ID NO: 7265 - protein, 185 aa, Artificial Sequence; identical to SEQ ID NO: 7264
  Synthetic

SEQ ID NO: 7266 - protein, 185 aa, Artificial Sequence
  Synthetic
EEVERIVEDVRRLLEENRELVKRILDEVRKLIKENNRLAREILETVRTELEKLRDLVRKLKSKEDLDRKVKELRRKVKELLDDLRRHSEDVRRRVKELLDRLRDSSRRLREEVRRLLDDLRRKSTSERVEKLLEELERRVEESVEESERVLREAEKIVRDSRKTTEELLEEAKRRVDEVAKEVKK

SEQ ID NO: 7267 - protein, 185 aa, Artificial Sequence; identical to SEQ ID NO: 7266
  Synthetic

SEQ ID NO: 7268 - protein, 185 aa, Artificial Sequence
  Synthetic
SSVDEILKDVRRSNKENLDLVEKILRESKKLVEENRRLVKEILDRVRKLIKELLRLVREDRDKDTLRKKAEDLERTVKKLLKELEDSSRDVIRRDKELVTRLKESSDRNLERVKKLAKELREESTSEKVEDVLRRLKRTSERSLEESKKLLEESEKDSDRSRKESEEVLREAEEIVKRVLKEVER

SEQ ID NO: 7269 - protein, 185 aa, Artificial Sequence; identical to SEQ ID NO: 7268
  Synthetic

SEQ ID NO: 7270 - protein, 185 aa, Artificial Sequence
  Synthetic
DDVETIVERVRELLEENNRLAREIVERVEKLLKDNDDLVKEILEEVDRRIRKLEEAVKRDRDKETLRKKVRELEERVKELAERLKKSSKELKDEVDRLLKELEDHSRDLERRVKELLDDLRRKSTDRRVEELLRKLEEDVKRSLEDTKRLLDELKKKVDESRKRSKDVLDKAREIVDRVRRSVEK

SEQ ID NO: 7271 - protein, 185 aa, Artificial Sequence; identical to SEQ ID NO: 7270
  Synthetic

SEQ ID NO: 7272 - protein, 185 aa, Artificial Sequence
  Synthetic
SEVEKIVRDVEESNKKTKKKVEDIEEEVKDLVRKNNELVKRILEEVKRLLEELKRVKKDDRDKDRLRKKVEELIRTVEELAKELEDHSRRVIETVRRLLERLRRTLEEDLKEVERLLDELRRRSDDERVKRLLDRLRRTSEEVLERVEEVLKKAEEIVRKSFEDSKRVLRKAEEDVKRVARDVEK

SEQ ID NO: 7273 - protein, 185 aa, Artificial Sequence; identical to SEQ ID NO: 7272
  Synthetic

SEQ ID NO: 7274 - protein, 173 aa, Artificial Sequence
  Synthetic
SVDEAAKEAEEIVETVERESRKLLEDSRRIVEEVKKRSEEILEEVRRRVEEVVKESKLKRLADELRKMVKKIKDDVERSNKKTEDDLRKSEEEVKRSNDTTREILKRIREVLKAGSPLERLLEALRRVIDEDRKRSKKLHEENKRVIERDKEISDKLLDDLRKLVADLRRRAK

SEQ ID NO: 7275 - protein, 173 aa, Artificial Sequence; identical to SEQ ID NO: 7274
  Synthetic

SEQ ID NO: 7276 - protein, 179 aa, Artificial Sequence
  Synthetic
REAEELEKEVKKVVDDSKKRLDELDEENRRVDETIKKISEDLTREVKDVIRRIRDGNLREDEVRKVVKEVTDKLEDSNRRVEELIRRTEKKLRDALERSKELSREVLEKARKLLEDKKDLEELRELVERLRRRLETVNRELERRVRELKRSNDESHRENREVIEELIKELKKVLDDVRK

SEQ ID NO: 7277 - protein, 179 aa, Artificial Sequence; identical to SEQ ID NO: 7276
  Synthetic

SEQ ID NO: 7278 - protein, 179 aa, Artificial Sequence
  Synthetic
DELREILRKVEKVVEDIERTSDKLRREVDKVVDDSRRKLEELEKEVKKVIEDIRDGNLREEEVREEVKRVVRKAEKLLEDSRRETEKVVRDAEESNKEVKRLIDEVKKELDRIIEEKDKVDRLKEAVKELAKRLKDVHERNKRLIDTLREKLKRINDELERSVRELKKELEEVIDRVRK

SEQ ID NO: 7279 - protein, 179 aa, Artificial Sequence; identical to SEQ ID NO: 7278
  Synthetic

SEQ ID NO: 7280 - protein, 179 aa, Artificial Sequence
  Synthetic
DEVEELKRRVDRLVEEIRKLSEELLKRNRDVDREIKKRVKDLEDKVRKVIRDIEEGNLRKEEVEKVVRDVKRELEELERRVRELVKRTIEEAERSNEEVKRIIDEVEKEADRLLEEKKEVRELDEVIKEIRRRLEKVHRDNRRVIDEVRRSNRDSERDIAEAVERLTRLLETVLEKVKT

SEQ ID NO: 7281 - protein, 179 aa, Artificial Sequence; identical to SEQ ID NO: 7280
  Synthetic

SEQ ID NO: 7282 - protein, 187 aa, Artificial Sequence
  Synthetic
DELEELRTTVTKLLEDLKKISDDLREEVRRLLEEVEEISKRLEETVRRIIKRVEDIVRRDGGRDERVVREVARILEDIERLLRESLKRSKEVLDEIEKLLRDSEKISRTILEKIERDLERLLRRKKDVKDVKEVVKKLRDELRRVLERNKEVIDRLREKAREVLEKDRKLVDDLREEAREVLERVKT

SEQ ID NO: 7283 - protein, 187 aa, Artificial Sequence; identical to SEQ ID NO: 7282
  Synthetic

SEQ ID NO: 7284 - protein, 187 aa, Artificial Sequence
  Synthetic
DELEEIKKEVEELVKTNERIVDKLREDNKRLVEEVKRISEELEREVRRIIREVREIVKRDGGRDKRVRDTVRKVLRDIEELLKRSLDISREVLERSAESLRRSLEISKEIADRIRKLLRKLLEDLKDVKDVEKLLRELEEEAKRSLKRNRDVIEKLREENKRLLDDDRRVVEELRKEAKDVLDEVEK

SEQ ID NO: 7285 - protein, 187 aa, Artificial Sequence; identical to SEQ ID NO: 7284
  Synthetic

SEQ ID NO: 7286 - protein, 187 aa, Artificial Sequence
  Synthetic
REVDELKKTAEKLIRDDERLVEEVLRTSKKLVREDEDMVRKLRKTIEDLIRRLTDVAREELKDKDELRKMVREVLERVKKLLEELRRHSKRILDEDRRLAEELRRHSDEIKDRVRKLVEDLLRRLDKVRDVKRVLDEVEKLVEDSKRETERVLRESEERSRRSLEETEKALKDLAKLAEDIKREVEK

SEQ ID NO: 7287 - protein, 187 aa, Artificial Sequence; identical to SEQ ID NO: 7286
  Synthetic

SEQ ID NO: 7288 - protein, 187 aa, Artificial Sequence
  Synthetic
REVDELRKRIEDLVRRDEEVARKVLEDVRRLVRRNREKARELLERVEKLVRDLKRVADRDLKDKETLKRMVDRVIEEVKRLVEELRRDSKRVIDEVERLVRELEDHSRRVKDEVEKLVRELLERFKDVEEVKRVLDELRKLVKDSERKTKEVVEKVREDVKDSLRRSEEVLKRVKELVDRVADEVRK

SEQ ID NO: 7289 - protein, 187 aa, Artificial Sequence; identical to SEQ ID NO: 7288
  Synthetic

SEQ ID NO: 7290 - protein, 187 aa, Artificial Sequence
  Synthetic
SDLEKLKERVDELIRRDDELVKRVLEESRRLVDRNKKKVDELRRRARKLIEDLKRVADRDLKDKRTLTEKAKEVEKTVDKLVKDLRRDSKKVKDDDEKLAEELRRHSKEILERVERLLEELLRRLDKVERVKELLDRLRKKVEDSREKTERVLKESRELSDRSLERSEEVLERVRREVREVVERLKK

SEQ ID NO: 7291 - protein, 187 aa, Artificial Sequence; identical to SEQ ID NO: 7290
  Synthetic

SEQ ID NO: 7292 - protein, 187 aa, Artificial Sequence
  Synthetic
DSLREVEKRIRELIRENEELVKEVLERSKRLVDEDRETAERLRKTVEELLKRLREVADKELQDKDTLREMVKKVIEDVRRLLEELRRHSEKILRDDKRLVDELRKHSEDVKREVDKLLKELLEELKDVDEVRKALEDLKRTVDESERRTEEVLKESEDLSRRSLKETEDLLRELEKRVKEVADRVED

SEQ ID NO: 7293 - protein, 187 aa, Artificial Sequence; identical to SEQ ID NO: 7292
  Synthetic

SEQ ID NO: 7294 - protein, 187 aa, Artificial Sequence
  Synthetic
SDLDEVRKEVKRLIDENRTLVDEIRRRIEKLIRENKKKVEELRKRAEELIRRLKEVADRDLKDKETLKRMVDRVLDEVRRLVEELREDSRDLERRVEELVRRLKDHSRELEREVRRLAKELLDRLDKVRDVKRLLDDLKRLVKESLDETERVLRELRKEVKDSLRDSERALREVEDLVRRIKKRVEK

SEQ ID NO: 7295 - protein, 187 aa, Artificial Sequence; identical to SEQ ID NO: 7294
  Synthetic

SEQ ID NO: 7296 - protein, 187 aa, Artificial Sequence
  Synthetic
DEVKKLEEDVRRLIEENEELVRRVKKTSDDLVKRNKEKVEELRKRVEDLIRRLREVERRDLKDKDELRRKAEEVLRRVKKLADDLKKDSRDVLETDRELVERLKRHSEDLKRRVEELLKDLLDKLKDVDEVRKALERLRDEVRRSVTDTDRVLKESEDRSRKSLEDSERVLRELEELVKRILDDLAR

SEQ ID NO: 7297 - protein, 187 aa, Artificial Sequence; identical to SEQ ID NO: 7296
  Synthetic

SEQ ID NO: 7298 - protein, 187 aa, Artificial Sequence
  Synthetic
SEVDRLRETIKRLLEENKELVERLRERVRKLIRENEKKVEELRDRAKKLIDRLREVRTRDLKDKDKLRKVIEEVERRVRKLVDDLRRDSDRLEEAVRRLLKELEDNSRELKKEVERLLRELKERKKDVRDVERALKELRDRIEESLRRSEEVLKELEERVKESRDESRRVLEEVRRLVEEIKRRAEK

SEQ ID NO: 7299 - protein, 187 aa, Artificial Sequence; identical to SEQ ID NO: 7298
  Synthetic

SEQ ID NO: 7300 - protein, 187 aa, Artificial Sequence
  Synthetic
KDVEDLEREIDRLLDEDRKVVEDLERKIKKLIDDNKRLVDKLREDVERLIRRLREVTEKELKDKDTLRKMVRDVKETVKRLLEELERNSREVLKTVKKLLDDLRRHSKRIKEEVEKRVRELLERLKDVKKVKEVLDELRKRVDRSLEEAEKALRRLEKLVRDSLRRSEEALERLKRLVDDVKKKVED

SEQ ID NO: 7301 - protein, 187 aa, Artificial Sequence; identical to SEQ ID NO: 7300
  Synthetic

SEQ ID NO: 7302 - protein, 187 aa, Artificial Sequence
  Synthetic
SELDEVKRRAKELVDRDKKLVKEVLDTSRELVRRNEELVRRILEEVRKLIEDLAEVTKRDLKDKDTLREMVKRVKEEVERVLRELERNSREVLKRDKKLADELREHSREVLERVERLVRDLLEKKKDSKEVKELLDEVRRLAEESRREVERVLRESEKRSRESLKKSEDALERAKKLVEDIKDEVER

SEQ ID NO: 7303 - protein, 187 aa, Artificial Sequence; identical to SEQ ID NO: 7302
  Synthetic

SEQ ID NO: 7304 - protein, 185 aa, Artificial Sequence
  Synthetic
SEEDKIREIVDRVLKESEKLIEEIERRVDKVLKRIKELTDEIKKRAEDVIREIEDIVRKERSERVEKRVKELEKELDEMAKESNERVRRLVEEVKKELREVLKDSRRLSKEVEETLKRLLEEKKEVDELRKVVEEIKRELEKIDKKLEEVVRRIEKKLEDILKENSKAVREIRELLKKVKRELEK

SEQ ID NO: 7305 - protein, 185 aa, Artificial Sequence; identical to SEQ ID NO: 7304
  Synthetic

SEQ ID NO: 7306 - protein, 186 aa, Artificial Sequence
  Synthetic
DEVEELKRRVEKLLEEIERLTKTHEDRSRRLIEDIRDSNRKLKEDAERLIKEIEELKRKVKDKETLTREVERLLRELEEKLKRDLKRVEDVLRDNERSVRESEKRSRELLERLKKLLEELKTKSKDSEELKKVVDDLRREAERILRRDEEAVKRSEKLLRDILEHVKRVVDEIREELKRILDRVRE

SEQ ID NO: 7307 - protein, 186 aa, Artificial Sequence; identical to SEQ ID NO: 7306
  Synthetic

SEQ ID NO: 7308 - protein, 186 aa, Artificial Sequence
  Synthetic
DEVREIEKRVRDLIREIEKSNRDLEREAKRLIDEIDDLSRKLKEDADKLIEEIKELKKKVKDKRELTDRVRKILEEVERLLRESIERSKEVLKELEKLLRDDLKKVEDVLRTVEKILKDLLRRDKDSEEVRRVVEKLRRLLKTITEHVKEVLDRLRREAEDALRRDKEVADRIREEARRILEDVKK

SEQ ID NO: 7309 - protein, 186 aa, Artificial Sequence; identical to SEQ ID NO: 7308
  Synthetic

SEQ ID NO: 7310 - protein, 186 aa, Artificial Sequence
  Synthetic
DDVKRIEKEVRRLLREIERLTREHEKESRELVREIEELSRRLEEEIKRLIEEIEELRKRVKDKEKLTRDVERIKRRVEKLLKESEDRSKRVLDENRKSARESIERSREVLEELKRLLEDLLRRDKDSKEVRDVVKRLEEEIREVLAKDEEVARRSVEALADILRRDKDVVDRIRKLLKEILDRVRK

SEQ ID NO: 7311 - protein, 186 aa, Artificial Sequence; identical to SEQ ID NO: 7310
  Synthetic

SEQ ID NO: 7312 - protein, 174 aa, Artificial Sequence
  Synthetic
DREEVVKEIKKRLEDLNRRVREVVKKIDRELEKLLEESKRVVDDLRRRLEELKKRIKGDDAKRKVEEIVKEVEKILKRVIDDNKRLVDELKRLLEEVIRRSETSVRRLEDVLRREIQDERELERLVKEVEKTNERLLDELRKAAEEVAKRSEDTLRELRDIIKKVEERATDIAR

SEQ ID NO: 7313 - protein, 174 aa, Artificial Sequence; identical to SEQ ID NO: 7312
  Synthetic

SEQ ID NO: 7314 - protein, 174 aa, Artificial Sequence
  Synthetic
SKEDVVREIEKTLKDLLDDSRRVVRESEERLKELNRRLREVVKESKRRLDEALRRITGDELKERVRKLVEDLRKINKESIERSEKSVEELRRHSRKVIRDNEKLVDDLRRVLRRDIQDTEELRRLVDKVREDSERTLERDRRLAKEVSDRNKRLVEENRKIVEEVLKTIEELRR

SEQ ID NO: 7315 - protein, 174 aa, Artificial Sequence; identical to SEQ ID NO: 7314
  Synthetic

SEQ ID NO: 7316 - protein, 174 aa, Artificial Sequence
  Synthetic
EREKVVKKIKEDLDRLNEEVKRVVDESRKLLKRLNERVEEVIREIRKTLEELTRRITGDRMKERAEEIVKRVDDILKKVNKDSERSVRELERHSREVIERSRESVRRLEEVLRREIQDERELERLVAEVAERNKKLLKDDKDLARKVAEDNEDLLRRLRDEVEKVRRTADEIRR

SEQ ID NO: 7317 - protein, 174 aa, Artificial Sequence; identical to SEQ ID NO: 7316
  Synthetic

SEQ ID NO: 7318 - protein, 174 aa, Artificial Sequence
  Synthetic
SREEVVDELRKRLEELNKEVREVVRESERKAERALEEVEEMVKRVREELEKLKRDIKGDEMRREVDEIVRKVEEDLERVIREVKKLIDDLRRHSEDVERRSKESVDRLKEVLERDIQNKDDLRRLLKEVAERNRKLLEDDEELAERVLREVRRLLEELRRRLKEIKERLDEIRR

SEQ ID NO: 7319 - protein, 174 aa, Artificial Sequence; identical to SEQ ID NO: 7318
  Synthetic

SEQ ID NO: 7320 - protein, 174 aa, Artificial Sequence
  Synthetic
SREEVVRRADKLLKDLNKRVKEVIERSERKLRELNERVRDVVRKIEKRLEELERRIKGDELKDRVRRIVEELERKLREVIKRSEDSVEELRRHSEEVNRRSRESVERVKEVLKRDIQDEEELKRVITKVLRDNEELLKTDEELAEDVARKNKKLLDDLEKTVKEVMDRAEELRR

SEQ ID NO: 7321 - protein, 174 aa, Artificial Sequence; identical to SEQ ID NO: 7320
  Synthetic

SEQ ID NO: 7322 - protein, 174 aa, Artificial Sequence
  Synthetic
SREEVVRDIERRLRELNKRVADVADESRRRLEELNEKLRRVVEESRRRLEELRKEIKGDEAKKEVERLVEELERINRESEERSKKSVEDLTRHSKKVNDDSRKSVRRLEEVLRREISDDDTLRREVKKVERENERLLEEDRRLVREVTRRNEKLVKDNREIVKEVLERAKELTR

SEQ ID NO: 7323 - protein, 174 aa, Artificial Sequence; identical to SEQ ID NO: 7322
  Synthetic

SEQ ID NO: 7324 - protein, 174 aa, Artificial Sequence
  Synthetic
SREEVVKEIKDRLKKLNDDVKRVIKESEDLLRKLNEEVRDVVRKIEETLEELLRRITGDRLAEEVKKIVEELTKRLRDVIRESEKSVEELKRHSEEVDRRSKKSVERVEEVLRREIQDEERLKEVVAKVAKENKDLLRRDEELARRVAERNKKLVEDLRRLVEEVRRRAEELRR

SEQ ID NO: 7325 - protein, 174 aa, Artificial Sequence; identical to SEQ ID NO: 7324
  Synthetic

SEQ ID NO: 7326 - protein, 175 aa, Artificial Sequence
  Synthetic
SESERVEELLKEVAKRVKEVSDRSKRLLEEIERRVKEVSDESEELLRRIIDEAKKVDRRREVIKEAADRARDVVRKSRELVRKVVEELRKLLEESRELVKKVMDELRKMIEDLKRTGVEERVVDRVRRELEKLIKDLEENSREVERSLRELIEHLKKNVEDVEREAKRVIDELKT

SEQ ID NO: 7327 - protein, 175 aa, Artificial Sequence; identical to SEQ ID NO: 7326
  Synthetic

SEQ ID NO: 7328 - protein, 178 aa, Artificial Sequence
  Synthetic
SLEEKLRRVLDELRKTIETLLKTNKDVLKKLEEDVKRIIRRNEEVLRDLERKVRDLKKKGGKEEEVRRLLRELRRINRESEKEIEELLRELRRLSEEHKRRVERLLEELERILSEVEPDERLKRVVDELRKRAKKLLEDVERVIRKSEEEARRLLREVEKVVRELDREAEKLVEEVRR

SEQ ID NO: 7329 - protein, 178 aa, Artificial Sequence; identical to SEQ ID NO: 7328
  Synthetic

SEQ ID NO: 7330 - protein, 178 aa, Artificial Sequence
  Synthetic
SSEETLRDILKKVEERSEETLRHNERVLEEVRKEVERILRRNEEVLRRLEKEAKELKKRGGEREKVERLLKELRRINEESRKEAERLVRELKRVSREHLEESKRLLEELDKVLKSLEPDERLKRVVDDLERRIRELLERDERVIRRTEEEARRLLDDVRRVVEELDKRAEDVVKEVKD

SEQ ID NO: 7331 - protein, 178 aa, Artificial Sequence; identical to SEQ ID NO: 7330
  Synthetic

SEQ ID NO: 7332 - protein, 178 aa, Artificial Sequence
  Synthetic
DEEETLKKILDDVRKVSRDTMEENKTFLEELSKVADKIIRDNEKVLDDHRKAAEELKKRGGREEDVKRLLDTNREINERSEREVERLAEELRKISEESLEKSARLLKKAEDVLRSLPPDERLKRVVDDIRRSLEELLKRDEEVVEESRKEVKRLEEEVREVVTRSDKLMDELLKKVKR

SEQ ID NO: 7333 - protein, 178 aa, Artificial Sequence; identical to SEQ ID NO: 7332
  Synthetic

SEQ ID NO: 7334 - protein, 175 aa, Artificial Sequence
  Synthetic
SEKEEVLREAREEAKDIERRLERLLERDKEVIDRVEKDLERLLRENKKLIDDVRRRVEEEGPDERLKKELRDSLRESAERVKDLLRRLEEHLRRTAEELRKLAEDLRESIKRLRERIGDDEVMDEIRRLAERVERRLREVLERSKKLVDDLRERLKEVLKRIEDLYRRLEEEADR

SEQ ID NO: 7335 - protein, 175 aa, Artificial Sequence; identical to SEQ ID NO: 7334
  Synthetic

SEQ ID NO: 7336 - protein, 185 aa, Artificial Sequence
  Synthetic
TAKEVLDEIRKVHEDLNRKIEEVLKHSEDVLREVEERNERSVRHSEDMLRRLEERIDRKGREEELRRELDKDLDRLRREHEEHHRRLKKTLDDLRKEHEELARKVKKVSEDAERKLDEVRRKLKDNEEVLRKLLEENKKEIRRLEEELKRLNEEVKKRIKELEDSSRKENDRVRERIRELDERVK

SEQ ID NO: 7337 - protein, 185 aa, Artificial Sequence; identical to SEQ ID NO: 7336
  Synthetic

SEQ ID NO: 7338 - protein, 185 aa, Artificial Sequence
  Synthetic
TLDEAARTIEELLREVEERARRVLRHSEKVLDKVRKENEDSLRHSDEVLRRVEREAEKKGIDESLLKRLKEVLKRLRDEHREHHEDLKRRLKELKDKHEKLLRDLKRVLDEIRERVKEVKRDLKDEEEVIEKTLRDVERRLRDLEDKLRKLNEEVEKTIRDLRRSSEALNKKVKDLIKKLLDEVK

SEQ ID NO: 7339 - protein, 185 aa, Artificial Sequence; identical to SEQ ID NO: 7338
  Synthetic

SEQ ID NO: 7340 - protein, 185 aa, Artificial Sequence
  Synthetic
TLDEVAKEIEELLRRVEEENRKSLEHSERVLDEVRERNERSARHSEEVLRRLREEVRRKGIEEDKLRELEKRLEELRDDHRKHHEDLKRTLDELRKRHEDHHRRLKEELDRIRDEIRKVRRDLKDNEKVIKETLDRVRETIKRLIKSSRDLNEEVKRRIRELIESSRKKNEDVKKTIEELLRRVK

SEQ ID NO: 7341 - protein, 185 aa, Artificial Sequence; identical to SEQ ID NO: 7340
  Synthetic

SEQ ID NO: 7342 - protein, 185 aa, Artificial Sequence
  Synthetic
TADEVLKEIEDVHRRVNTENRKSIEHSKKVLEEVRRTNEKSIEDIERLLREVEKRIRDKGTEEDLLRKLEKVLDEIRKRLEDHHRTLEEVLRRLEKEHEKHHRELEEVSKDAKKKLDRLRKDLKDDEDVLRKALEENERLIRELEESSRRLNERVKELIRELEKSSKRLLDEVKKLIDELREEVR

SEQ ID NO: 7343 - protein, 185 aa, Artificial Sequence; identical to SEQ ID NO: 7342
  Synthetic

SEQ ID NO: 7344 - protein, 185 aa, Artificial Sequence
  Synthetic
TLEEVVEEIRRRHEEVNRRNRESVENSREVLERVEEDNKDSLRRIRELLERVARKLDERGVDETLKRKLEETLERIERELRKHHEELKETIERLERKHEEHHRRLEKVSRDAEREIEKVKRDLKDDEDAIRDMLRRNEERLRRLIESSEKLNRESRDVIRKLIESSRDLLRKVKETIEKLEEEVR

SEQ ID NO: 7345 - protein, 185 aa, Artificial Sequence; identical to SEQ ID NO: 7344
  Synthetic

SEQ ID NO: 7346 - protein, 185 aa, Artificial Sequence
  Synthetic
TLEEVVRDIERVHEEVNESLKRVNETTTDMHRRLNEEAKRVLEEIEKLLKDVEKKIRDKGTEEDLLRKLKETLDRIRKKLEKLLRDLKRKSDEAKKEDEKLEEELRRRSEDVKRKLEEVRKKLKDDEDAVKRELDRNREEIKKLEKRIRDVLKKNKDLIDKVREELKRLLDEVKKRIDKLAEEVK

SEQ ID NO: 7347 - protein, 185 aa, Artificial Sequence; identical to SEQ ID NO: 7346
  Synthetic

SEQ ID NO: 7348 - protein, 184 aa, Artificial Sequence
  Synthetic
SLDEAAKEIEELLRRSHEELKRVVKEIRDLLRRSHEELRRALEEIERLLDEVRRKLEERNVSEKLKKELEEVVKKVRDDLKRIREENKDDIRRLEKKLDDLRRKNEELIKKLREDLRRLKEEPVDDETVKELLRRVRKLVRESIEEVKTLLREAEEKVRRNERKVEEILRRVRETIRRLEERIK

SEQ ID NO: 7349 - protein, 184 aa, Artificial Sequence; identical to SEQ ID NO: 7348
  Synthetic

SEQ ID NO: 7350 - protein, 184 aa, Artificial Sequence
  Synthetic
SLDEALERIRRMLKRSHDENRRVAEDIKRLLEESHRENERVVKEIRDVLDKLREDAERNNISEELRDRLRRVVEDVERKLRESTKKNKKLIDDLRKRLEESSKRNKERIDELEKRLEDIKRKPVDDEDVKRLLDDVRRTVEENIRRSETELRDVKRRVTETIRESERLLEEVKRIIDKLREEAK

SEQ ID NO: 7351 - protein, 184 aa, Artificial Sequence; identical to SEQ ID NO: 7350
  Synthetic

SEQ ID NO: 7352 - protein, 184 aa, Artificial Sequence
  Synthetic
GLDEVLKEIRELLKESHDRLRRVLEEIEKLLEDSHRRNEEVVRRIRKVLEEVREKAERDNISEELRKKLEKVVREVEKRLEESTRKNRKLIEDVRRELEELKRKNEKVLDDLEKDLKRAKDEPVDERLVKELLDRARDKIRRNIEELERKLRAVEEKVRRTIRESEELLDRVRKIIEDLEREAT

SEQ ID NO: 7353 - protein, 184 aa, Artificial Sequence; identical to SEQ ID NO: 7352
  Synthetic

SEQ ID NO: 7354 - protein, 184 aa, Artificial Sequence
  Synthetic
DLDEALKEIERLLEEVERRNKEVLERIRRLLKRSHEELKRVLEEIEKLLRDLKKRVDDGNVDDELRKRAEKVIREVEDKLRRIEEKNREMIKRLEDELRRSSEELKKEVKRLRDELKDIKDKPVDRDSVRDLLRRAKERLDELIKTSKELLDRARKKVKENEEELRELLKDVRRIIKKLTEEVR

SEQ ID NO: 7355 - protein, 184 aa, Artificial Sequence; identical to SEQ ID NO: 7354
  Synthetic

SEQ ID NO: 7356 - protein, 182 aa, Artificial Sequence
  Synthetic
SELEDLLREVKELIDRLIDDSRRLVKTAEELIREAIKRSEDLLEEVKRLIDRVTEMVERGELDEDRLRELERRIAELIKRSKELSDELRRRIEKIIEDSKRRTEEALERIRRKIEELKKKRDDERVREVLERIKRLLEELKKRDEDSVREIERLLEELKRRNDRVVDEIRKLLKELAERVKK

SEQ ID NO: 7357 - protein, 182 aa, Artificial Sequence; identical to SEQ ID NO: 7356
  Synthetic

SEQ ID NO: 7358 - protein, 184 aa, Artificial Sequence
  Synthetic
DLDEVIRELEKLLKESHEAVKRVIKKSEDLLRDSHKKVKDVIRRSEDLLRKLEEEVRKNGLTEIEKRLRERAKELRDDAKRLEEENRKIIEDLERHARDLERKNRRIIEEVRRLLKEIKDRNSDDRTLLEELRRRIEELLKENRELLKRHEDKSKKLLEDNERLLREHAKKSDEIRRELRERVR

SEQ ID NO: 7359 - protein, 184 aa, Artificial Sequence; identical to SEQ ID NO: 7358
  Synthetic

SEQ ID NO: 7360 - protein, 178 aa, Artificial Sequence
  Synthetic
DEVERAKDVLDELRRRVEEELRRWKETSERLREESERALEKSEARLREAAEKLERVKRNNVSEDELKKLIDELDRILKELRKEHKELVEKWKKTIDEVRETLKRLLDKLEEILEKLARDGVDEEVLRDIREKLRELAERLKRLLDDDKRVLDEVRKANEDLLRKIKEDIEELRKELEK

SEQ ID NO: 7361 - protein, 178 aa, Artificial Sequence; identical to SEQ ID NO: 7360
  Synthetic

SEQ ID NO: 7362 - protein, 178 aa, Artificial Sequence
  Synthetic
DEDEEVKRTIEELRKEVEKTLREIEKSLKESEDKSRKHLEEVKKSLKETEEEVDELKKRNVDKEDLDRVVKKMEDNLKRLEDTARKLVREMRENLKRIKKRLEELTERLERTLDELRRRGVDEKVLRELEERVRRLKKELKRVLDDYKRKLEEAERRNRKVLKEYEDSLRELADRLRR

SEQ ID NO: 7363 - protein, 178 aa, Artificial Sequence; identical to SEQ ID NO: 7362
  Synthetic

SEQ ID NO: 7364 - protein, 178 aa, Artificial Sequence
  Synthetic
DEDREVRKTIEKLKRDSERHLEEMKRSAEESRKEVDKLLKKIKDSLRRTEERVRRLKKNNVSEEEVERLVREARENLERLREELERLERELRANLERLRKTAEDLTRRIRETLKELEDRGVPEEVLRELRKIVEELRKRNEDVLEEYERILRELKERLDRVLKEYEDRLRELEKELRD

SEQ ID NO: 7365 - protein, 178 aa, Artificial Sequence; identical to SEQ ID NO: 7364
  Synthetic

SEQ ID NO: 7366 - protein, 178 aa, Artificial Sequence
  Synthetic
SEAEKAKETIDRLADRVRKLLEEIKRSLDDSRRKSKETVEENEKTLDRMRKEVDAAKERRVSEEELERLIRKLKKTLDELRRRHEKLVEDLRRNLERIKRRLEELTREMRETLERLAREGLDEEVLRTLEEIIRRLTKELEDVLREYERELRRLEEENKRVIDKTEEEIRRLADRLRR

SEQ ID NO: 7367 - protein, 178 aa, Artificial Sequence; identical to SEQ ID NO: 7366
  Synthetic

SEQ ID NO: 7368 - protein, 178 aa, Artificial Sequence
  Synthetic
EEDERADETLKRIKRESDETVKKNERTITELLKRVKRLVDEIRKSLEETARRVDSAKKRNVSEDELRKLVKELEDNLRRIAEELRRLEEELRRILEKLAEDHKRLIDKIRKILKDLADRGVSEEVLRKFRKILEEAAELNKEVIDRSRKIIEDASRLLREVLEDYETKLRELKDKLDT

SEQ ID NO: 7369 - protein, 178 aa, Artificial Sequence; identical to SEQ ID NO: 7368
  Synthetic

SEQ ID NO: 7370 - protein, 172 aa, Artificial Sequence
  Synthetic
SLKEVIDDLERIIRELEKRNREVIKRVRKIVREAEEKNEDVIRKLKETIERLERELDDEDLLRELREKLRRLVEHVKKVIEDLREEIRRLEKHVEDEIKKSKDRLDELTKRLKDLDSRELRDEIRKIKKKNDEHLKRLEDELRKLLEKSDRHVKELEDRIRKAAKEVKDAKD

SEQ ID NO: 7371 - protein, 172 aa, Artificial Sequence; identical to SEQ ID NO: 7370
  Synthetic

SEQ ID NO: 7372 - protein, 172 aa, Artificial Sequence
  Synthetic
SLEDVIRDLARIIEEAERRNKTVLDELRKTIKELVEENEKVLDEDDKKSRELEKRLDKEELLDRLRKENKKLKDHVRKKNEEAKKRLKELEDHVRRVIEELKRELDKLRREAKDLGSRRLREEIKRLLRESEKHVEDLRREIERIKRENEEHLKKWRRDSERLEKEVEDAKR

SEQ ID NO: 7373 - protein, 172 aa, Artificial Sequence; identical to SEQ ID NO: 7372
  Synthetic

SEQ ID NO: 7374 - protein, 181 aa, Artificial Sequence
  Synthetic
DELEKLRDDARRIEEKHRRTVEKDKDVVRRMDKEVKDHVRRLKELAKKLEDDVRKRGDEKVIKELEEKLKRIHEESEKTKRKLKEDADRLEEDNERVKKESEDKLRELRERARKVKEDGIDKRSVDEVLREITEIVERVMELNDKSVEETRRIVERLKEEIDTVNDEIAKIVRKVIEEIKR

SEQ ID NO: 7375 - protein, 181 aa, Artificial Sequence; identical to SEQ ID NO: 7374
  Synthetic

SEQ ID NO: 7376 - protein, 181 aa, Artificial Sequence
  Synthetic
DELERLKEAAKRLADEVKEHVDRSRENAKRLKEEVEEHVKRLEDVARTMDEEVKRRGDDRVVKRLREILKKLHEESERTIRRMRRNLEENHRRTEESKKRLRDKLEELKRRLEKFKEDGVDKESVDRVLKEIEDIVRRLEERLDESNKELKEIVDDVTEKLERVNRKIAEIVKRLSDEIRK

SEQ ID NO: 7377 - protein, 181 aa, Artificial Sequence; identical to SEQ ID NO: 7376
  Synthetic

SEQ ID NO: 7378 - protein, 181 aa, Artificial Sequence
  Synthetic
DELEELRRAAEEMEKEVREHVKRSEKNAKDLEKEVREHVKKLREVLRRLTEKVKRRGDERVIEDIRRTLKELKDESDETEERMRRNLEENHRRTEESKRRLEEKLERLARKVEEVKRKGIDKEKVDRVLEEITREVERLKKELDESNERLERIVRKVIEELRKVDEDAEERVRRLEEEIRR

SEQ ID NO: 7379 - protein, 181 aa, Artificial Sequence; identical to SEQ ID NO: 7378
  Synthetic

SEQ ID NO: 7380 - protein, 181 aa, Artificial Sequence
  Synthetic
DDLDRLREAAERMAREVEDHVRKLKDLIRRVRERVERHVKKLEDDLKRVKEEVDRRGDKKVVDKLRRDLERLRRETEKSKRELEEDLKRAKDESRKTLTRLRDALERLREEVKRVEDKGIDKDKVRKVLEDIKRIVDRLEERIREVDKDLERIVRELMKRLDEVNKRLEDTVRRLSEEIRR

SEQ ID NO: 7381 - protein, 181 aa, Artificial Sequence; identical to SEQ ID NO: 7380
  Synthetic

SEQ ID NO: 7382 - protein, 185 aa, Artificial Sequence
  Synthetic
DLIEEIKKLAEDHHRRVKEVLDRNREVAERLKKRVRRIVEENKRLAEDVTRKIKELKRRVKDRDELRRRVEEIERRLKKHIDDSNRRITELKEEVERHLERSERELEKSKRDLERKLREVEKRKRTEDLRRVLEELREIVTRNEKEIRDTIRELEEIVKRLKEDNDRSVRELERILEELREELER

SEQ ID NO: 7383 - protein, 185 aa, Artificial Sequence; identical to SEQ ID NO: 7382
  Synthetic

SEQ ID NO: 7384 - protein, 175 aa, Artificial Sequence
  Synthetic
DSDEEVRRVLEKVEEDVRRLAKDIRDSVRRSEERIDELVKKLEKSIDESRRRVETTADNVEELKKIIKDSKEELKKVVKTVRKVLEDSKRELEKVLEDVKRTIKDLKDEVRKMREEGRVDERLLEEIEKVVEDLRRKAEELIEKNERLLRRLEEVAKELDKRNKELLEELIRRNE

SEQ ID NO: 7385 - protein, 175 aa, Artificial Sequence; identical to SEQ ID NO: 7384
  Synthetic

SEQ ID NO: 7386 - protein, 175 aa, Artificial Sequence
  Synthetic
SEADKVREVLKRVKEEIDRLVEEIEKVNRDSRREVEKLVEKLRKSLKESKDRIARDLDRVDEVRKILKDSKERLEKVIREVRKAIKDTHEELRKRVEDVERELKRLVEEVEDMIRRGNVDEELLRKIEEVLRRLTEDAKRLIRRNREILKELRELAKRLDEENKELLDELIKKAR

SEQ ID NO: 7387 - protein, 175 aa, Artificial Sequence; identical to SEQ ID NO: 7386
  Synthetic

SEQ ID NO: 7388 - protein, 182 aa, Artificial Sequence
  Synthetic
SMIEKVREVLKEVADRVRRLLEENKKSIDDSARALEELIKRIRESLRKSEEDLKREVRGEEERRKVRRLLEESKRKIDEDEKRVEKRLRDSEKSSRDLAEDLRRVLEDIERKIEEVAKRLKDDSEFVKRILDEVDEILKRLERRVKEHSRKNREELEKIRKEAEEILRENEELLEKIVRDAR

SEQ ID NO: 7389 - protein, 182 aa, Artificial Sequence; identical to SEQ ID NO: 7388
  Synthetic

SEQ ID NO: 7390 - protein, 182 aa, Artificial Sequence
  Synthetic
EMVERLEESIDRSRKELDRLIEENKKVLEEVEERVRRLIEKLKRSIEESEERLRRKVRGEELAREVKKLLDDSRRRLEELKERAERVLRELKKSSEDLARDVKRLLKESREKLEELARKLKDNDEVVRRLNEENKKLLEDIRRRAKDHSRRVREILEDLEREVEKMNEENKDLLERIVRRAK

SEQ ID NO: 7391 - protein, 182 aa, Artificial Sequence; identical to SEQ ID NO: 7390
  Synthetic

SEQ ID NO: 7392 - protein, 182 aa, Artificial Sequence
  Synthetic
SMIEALKENIRRSEEEIRRLIEEWRKVSEDIEREVKKLIKELEESIDESAKRLREKVRGEEELTRVEKLLRDSEEELKRLAEELEEVLKRNKDKVKEEVERARKLLDDSRRKLEKAERDLKDDSDFVRKLLEENNELLKEIKKRVEKVLEESKELLKELREKIRRLNEKNKKLLEEIVRRAK

SEQ ID NO: 7393 - protein, 182 aa, Artificial Sequence; identical to SEQ ID NO: 7392
  Synthetic

SEQ ID NO: 7394 - protein, 178 aa, Artificial Sequence
  Synthetic
SEIEKVVKDLRERLKELRESVKRLDDKNRELLERLEREVEEMDRRNEKLLRDLKRQDRDEKDLRRVIEKSKEDLRRLEEKLKEVIKRSEEELEEHVKRTRDVIERLKRRVEKLARDLDKEELLRTLEKVLREIAEELERLNRKVRESIRESARRLKRLIEKLERSIRRSAEELRKRAK

SEQ ID NO: 7395 - protein, 178 aa, Artificial Sequence; identical to SEQ ID NO: 7394
  Synthetic

SEQ ID NO: 7396 - protein, 178 aa, Artificial Sequence
  Synthetic
DEIDKIVKKLRDILREIEKRAKEVNKRNKELLDELRERVKDLDRTNEELLRELKDSDRDKKDMERVIRESEDRLRKLEEELRRVIERSERELRRLEKEARDVIEEMERDVRRIAKDLDSDKLLKKLKDVLDEIAERIKELIRELRESIKKSAEELKRLIDRVRRSIEESAKRLEDRAR

SEQ ID NO: 7397 - protein, 178 aa, Artificial Sequence; identical to SEQ ID NO: 7396
  Synthetic

SEQ ID NO: 7398 - protein, 178 aa, Artificial Sequence
  Synthetic
SELEKILEKLRRIVEELAKSVRKLNEENKELLKRLADSVKKLDDDNKRLLTDLRRRDNDEKDAKRVIDKSRDDLRKHVERSREVIEDSKRKADKHVEDTKRVIETLKREVDEIARELDSEELLRTLEDVLRKIAEDLERMNRELKRSIKKSADDLKRLNEKVKRSIERSAEELRKRRT

SEQ ID NO: 7399 - protein, 178 aa, Artificial Sequence; identical to SEQ ID NO: 7398
  Synthetic

SEQ ID NO: 7400 - protein, 178 aa, Artificial Sequence
  Synthetic
DEIKKIVEEIKKTLEEIDKSVRELIRRAREILRELEESVRELIRRNSKLLEDLRRQDRDEKDARRVIEESRRELEEHRKRSEDVIRKLREEVEKHVRETEEEIKRIEDEIRRLKEKLDKDELLKELEDVLKEVAEEIKRLNERLKKVLEEIERTLRELNRRLEENIRRSARALEETRR

SEQ ID NO: 7401 - protein, 178 aa, Artificial Sequence; identical to SEQ ID NO: 7400
  Synthetic

SEQ ID NO: 7402 - protein, 178 aa, Artificial Sequence
  Synthetic
SEVEDLLRRIEKILEDLRRSVEELLKRIEDALRRLEEEIRKVTEESKRLLEDLTRRDTDEREAREMIKENEKKLRDLEKKLRELIKRLKEEVDKHVKDTRDVLTRIREEVRKMAEKLDKRELIEEVEKVVKRVEEALKRLNDRVRETLDEVRKRLEDAIRRWREESERIARELEKRTT

SEQ ID NO: 7403 - protein, 178 aa, Artificial Sequence; identical to SEQ ID NO: 7402
  Synthetic

SEQ ID NO: 7404 - protein, 178 aa, Artificial Sequence
  Synthetic
SEADEIVRRIEELLKELEREIRKVIRDSERLLKELEDSVRELLKKIRDVLDELTKSDRDEKEARDVIRKLAKEVEDHLRRSKEVIDRNRKKLEDAEEKLKELIERIKREIDEIKRRLDSEELLRKLEAVLDKVKKDLKKMIDDWRRVSERIARELEKLNRRVKEELDRVKEALDERTR

SEQ ID NO: 7405 - protein, 178 aa, Artificial Sequence; identical to SEQ ID NO: 7404
  Synthetic

SEQ ID NO: 7406 - protein, 178 aa, Artificial Sequence
  Synthetic
SEIDEVVERIKRTLEEAEKRVKKASEDHKRRLDELRKKVEKLIEDNERTLEAVARRKIDEELLKELEKESEDRLRKLKRDAEEVTREMKKTSDELAEELKRLKDEIRKELERLEREGIEERLLRKLRKVVKDVDDRLKELLEENRDVVRRIKEELEKLLEKVRRSIEESRRRMRETRR

SEQ ID NO: 7407 - protein, 178 aa, Artificial Sequence; identical to SEQ ID NO: 7406
  Synthetic

SEQ ID NO: 7408 - protein, 178 aa, Artificial Sequence
  Synthetic
SEVDEVLKDIRRILEEARKRVEELDRENKRILDEVREKVKELNERNKEILRAAEERKIDDDLLRKLVEDSRRLLKELEEELRRLTERSKKLLKELAEEMDRLVKEIEDKLRKLREDGIDEKLLRDAKRVVEEVSKALKDLLKEVEDSVRRSKREMEKLLEELRESVKRSEEELRRTSK

SEQ ID NO: 7409 - protein, 178 aa, Artificial Sequence; identical to SEQ ID NO: 7408
  Synthetic

SEQ ID NO: 7410 - protein, 182 aa, Artificial Sequence
  Synthetic
DEVEDLLRRNEELLKRLLEEIKKLTDEHREELKRLAEDVKKVVEDVRRLLKELEEMVRRGELDEKTLDEARRRLEKLLKELKEKIDRVKEEMEKSNRKLEKKIRDAKRTTEEILKRLKDKGVDEKLVRKLEESVRRSTEELEKALKRNNDVIRRIAEALDDLLRRLEKVIREIEKKLRDDTR

SEQ ID NO: 7411 - protein, 182 aa, Artificial Sequence; identical to SEQ ID NO: 7410
  Synthetic

SEQ ID NO: 7412 - protein, 182 aa, Artificial Sequence
  Synthetic
DRVEEAVKDIERLLRELKRDVERLVRENEKILKDAKREVDELTKDHRRKVEELDEMVKRGELDKDTVDRVKKEMKETNEDLSRKATEIKKRSEDILRRLEEKIREVRKRLEKLLEELRREGVSEDLLRKLEKVVRDVEKKLRKLLEDLKRSIDRSTRELEKLNEKNNEVIRDIERRLDEAET

SEQ ID NO: 7413 - protein, 182 aa, Artificial Sequence; identical to SEQ ID NO: 7412
  Synthetic

SEQ ID NO: 7414 - protein, 178 aa, Artificial Sequence
  Synthetic
SEIEKLIEEIRRVVKEIKREVERAIRENEKLLRESKRRNDELIKEIERVVEELKKRNVPEEDVRKVLADLEKKLEELHREDRKLIKESEELLKRLMEEAEKILEELKRRLDELIRRRGRDRLIEELEKVLRDVEKVARDVLRKLRRSIEESRRRSEELNKTVKKVLEDVARTATERSR

SEQ ID NO: 7415 - protein, 178 aa, Artificial Sequence; identical to SEQ ID NO: 7414
  Synthetic

SEQ ID NO: 7416 - protein, 178 aa, Artificial Sequence
  Synthetic
REIEEAIKDVERVLRESEERNRRLIERIKRMLKKSEDENRKFIEDNKRLADDLRRRNVPEEDVRRTIERSRRELEKLVKRDEDLLKRLEEELRKLHEDDRRLLEELERKVEDIIRKRGRTEDVERLRKVIEEVKRRMKELNERLKEELREVAKRSRDLNKELRESIEESADRARRRRK

SEQ ID NO: 7417 - protein, 178 aa, Artificial Sequence; identical to SEQ ID NO: 7416
  Synthetic

SEQ ID NO: 7418 - protein, 178 aa, Artificial Sequence
  Synthetic
DEIERLREDIKRVLEESTRRNKKLLDEIRKALDESRRKNEEAIRRNEEVVRDLKDRKVPDKKVKEVIDRNRRMLEELVRDDKDLLKRLEERVRELHETDRKLIKDLRELLRRIIEKRGETDKVRTLRRELEEVARALEELNRRVEEELDEVRKESERLNKELEDSIRKSAEDAKRTTK

SEQ ID NO: 7419 - protein, 178 aa, Artificial Sequence; identical to SEQ ID NO: 7418
  Synthetic

SEQ ID NO: 7420 - protein, 174 aa, Artificial Sequence
  Synthetic
DEKDKAIEDVRDLLRRNEEVARRMDKRLKDLLDTIRKKAEDLDRELKRLLEEAERLVREGTTEELVKKLKKELDDSRRRLEKLIEELRKRLRDSIRELEEHLKRSEEELRRLLEEVKDVKELEKVLEEIRRRSEELLKHHAEVIERIERDVERLRRHHEDTIRKIKEKVDRDRK

SEQ ID NO: 7421 - protein, 174 aa, Artificial Sequence; identical to SEQ ID NO: 7420
  Synthetic

SEQ ID NO: 7422 - protein, 174 aa, Artificial Sequence
  Synthetic
DEDREAIKEVEKLLRDNERVARRLDEEVKELLDEMRRRSEEMDRELERLLEEAKRLADKGTREELVKELEKRLDESHDRHRKLVEELEERLERSIEELRKHLDDSRRRLKELEDRVDKVEELKEVLREVDKRSKELLKHHKRRIEEVRKRVRELNKHHEDVIRKIKKKVREDRK

SEQ ID NO: 7423 - protein, 174 aa, Artificial Sequence; identical to SEQ ID NO: 7422
  Synthetic

SEQ ID NO: 7424 - protein, 174 aa, Artificial Sequence
  Synthetic
KEAEEAIKRVEDLLRRNKEVAERIIREIRRLLREADETSKRMDEDLRRLLREAEDLVRRGTTEEVLEELKERLKESHKEHKKKVDELIERLRKLLEDLERHIRKSDRDLDRLREEVKDVRELDKVLERVKRESDRLLKEIEKVVREVEERLRRLNEHHEKVIREIEKKLEDDRR

SEQ ID NO: 7425 - protein, 174 aa, Artificial Sequence; identical to SEQ ID NO: 7424
  Synthetic

SEQ ID NO: 7426 - protein, 174 aa, Artificial Sequence
  Synthetic
DEDREAIERVRRLLDENRKVVEELDERLKELLRDAEEKSRRVIKTLRELLKEIEDLARRGTDREVAEKLRRALEELHRRHREMVKELKERLERSIKRLEEHIRKSKEDLDDLRRKVDKVDELRKVLEDVERASKELLDHHRDVIRRIEEELKRLNKELEKVIREIERAVEELER

SEQ ID NO: 7427 - protein, 174 aa, Artificial Sequence; identical to SEQ ID NO: 7426
  Synthetic

SEQ ID NO: 7428 - protein, 174 aa, Artificial Sequence
  Synthetic
DEDRDAIRKVEDLLRRIEEIVRRLIEEVKRLLEDNRRKSKRFIERVDELLKEMEKLVREGTDAEMVRELKDRLRRLHEEHADHVRDSARRLDELLRELERKIKELEDRLRDLEEKVKDVKELEELLRRVEREVEKLLTDLRRLLREVKETSKRLNEELKRRADEVEKKADEDRK

SEQ ID NO: 7429 - protein, 174 aa, Artificial Sequence; identical to SEQ ID NO: 7428
  Synthetic

SEQ ID NO: 7430 - protein, 181 aa, Artificial Sequence
  Synthetic
SSKDRIRKVLEEVRETLDRLAKRIEKSLRDSAKRVEDLAEENRTSLKETKERIDELIKRRKDRDRAEEVKKRLDESRRHVEEDEKRVREDLRRSADEARRVLDELRKTLEKLRKEVEDVIREGKLGEELIRRIEEELKRIEDTVEKIIRKDEKLLEDIERESERHIREDKELLKELEKEER

SEQ ID NO: 7431 - protein, 181 aa, Artificial Sequence; identical to SEQ ID NO: 7430
  Synthetic

SEQ ID NO: 7432 - protein, 181 aa, Artificial Sequence
  Synthetic
SSDKEIEDVLRKVKDELDKLARALDESLKRSEKDIDRLEEELKESHDRTREEIRKLIEERNVDKLAEDMKRKLKESLKEAREVVDEVRKRLERSRREIEKMIKKLEEDLRTLERKVREVIKRGRLGDELIREIKKVLDRIREEIERLLREDEELLERLREDAKRILDKNKELLDELRRRVK

SEQ ID NO: 7433 - protein, 181 aa, Artificial Sequence; identical to SEQ ID NO: 7432
  Synthetic

SEQ ID NO: 7434 - protein, 181 aa, Artificial Sequence
  Synthetic
SADRKLEEVLKKVEDDIRDLERRLKRSLDESKREVERLERENRRVLEEVEKKVRADNVDEERLREIKRVVDEAKESLRELVRRMRKVLEDSTREIEELRRRLREVLKEIRKEVKEMRDRGESEETVKRIIEKIERILRKLKRDAERILDKDRKLLKKLEEESRKHIEDVKRLLEELERRTR

SEQ ID NO: 7435 - protein, 181 aa, Artificial Sequence; identical to SEQ ID NO: 7434
  Synthetic

SEQ ID NO: 7436 - protein, 181 aa, Artificial Sequence
  Synthetic
ELEEKLKRSLEDSRRRVEELRRTNEEVLREVEEEIRRLIKENEDSLRESKKRVDDRNVEREKLEKAKKVLEDSERSLRKLAKEARDVLREMRETLRKLEEKMERVLRESEKEIRRVATRGESKETVDKILEDDKELLRRLEEESKRHIDEVRKILEDLERRSRRHIEEDKKLITELEKETK

SEQ ID NO: 7437 - protein, 181 aa, Artificial Sequence; identical to SEQ ID NO: 7436
  Synthetic

SEQ ID NO: 7438 - protein, 181 aa, Artificial Sequence
  Synthetic
DLDERLRRSLKRSKEEVERLRKENEEVLRRSKETTKELIKTNEKVLEDVERLVRESNVDEERLRKAKEVLDRLRESLKKLAEESRRLNKRLEETLRKLVRDMEEVLRRSEEKIKEVDTRGESRETVEKIIKEDEDLLRKLKEESDRHIKDVERVARENERESKRHIEEVRKVLDELREETR

SEQ ID NO: 7439 - protein, 181 aa, Artificial Sequence; identical to SEQ ID NO: 7438
  Synthetic

SEQ ID NO: 7440 - protein, 181 aa, Artificial Sequence
  Synthetic
SAEEKLEEVLKRVAERIEELIRRNRRVLDRVREEIKRLVEENRKSLDESERRVRERNVSREKLERAKELLDRSKDSLRRLEEELRERLKDLERTLKELEERAKRKLEEIKKEVKDVADRGESEETIERIIKKIEDILRKLEEESERHIRRVEEELKEMEKRSREHIEEDKRLLEELERRTK

SEQ ID NO: 7441 - protein, 181 aa, Artificial Sequence; identical to SEQ ID NO: 7440
  Synthetic

SEQ ID NO: 7442 - protein, 181 aa, Artificial Sequence
  Synthetic
SAEDELRKVLEKVREDIDRLADENRKVLKRSKDETKRLIKENREVLERVEEIIRRDNVDRKDLEEARRVLEEARRSLEELVERSKRLNDRLEETLRELIKEAKRVLEEAEREVREVATRGESEEAIERIIRRIREILERLRKKSEEHIRRVEDVARRNEEESREHIKTVEKILEELKRKAD

SEQ ID NO: 7443 - protein, 181 aa, Artificial Sequence; identical to SEQ ID NO: 7442
  Synthetic

SEQ ID NO: 7444 - protein, 179 aa, Artificial Sequence
  Synthetic
SEVEELIKRLKKVLKELVDKVRKVIEDTKELLERLKRRSEDHIRKLREVLKEAKDQPIDDEELKEILDRLRKTLEELEEELKKALEDDREEAKRLVDDARRVLKELEEEVREIRERRKEVEELDRRIEKVLKEIEEKIREVIKEWERVHREVNELLKRLIDENRKVLDEIRKLLEEKSK

SEQ ID NO: 7445 - protein, 179 aa, Artificial Sequence; identical to SEQ ID NO: 7444
  Synthetic

SEQ ID NO: 7446 - protein, 179 aa, Artificial Sequence
  Synthetic
SEAEDLIRRLKEVLDELKKKADDLIRDTKRLLDEIRKKSEDHIKRDKELLKDLKRRDTRKDEAKRVLEESERTLRELERDLERLLEKDRRDMEEMVKELRRVLEELRREVERLKEERKEVDRALREIEKVLKEIKELIEKVIRDWKRVHDEVNEELRRLIEKNRKSLKETADELDRKRK

SEQ ID NO: 7447 - protein, 179 aa, Artificial Sequence; identical to SEQ ID NO: 7446
  Synthetic

SEQ ID NO: 7448 - protein, 179 aa, Artificial Sequence
  Synthetic
SEVEKLIKEDKELLERLKRDVERLIEELRRTLKELKKESEKHIEDDKRLLDDLRDRDTDDKVAKDALRRSKETLEELVEKLKRVLDELRKKVKELMDRARRVLEESRKRVEELKERRKEMDKLITDIRRSLDETRRRIEKLIREIEKVLREIEETLRELEKRNRESLERTRETLERKSK

SEQ ID NO: 7449 - protein, 179 aa, Artificial Sequence; identical to SEQ ID NO: 7448
  Synthetic

SEQ ID NO: 7450 - protein, 183 aa, Artificial Sequence
  Synthetic
SEVDELIERDKKLLRDVERDVRRLNKEVRDILDEIRKDVEDALKENKELLDRLREMVKRGEADERTAEELRKTSEDLLRELEKRAREIEERLRRTLEELAKRLERVIRESRKLLEDLRRRRREMREVLKRLEDSSKDTTDKLRELLRSHKKVIDEVREKLKELLDRYRKVSDEIREEIDRARK

SEQ ID NO: 7451 - protein, 183 aa, Artificial Sequence; identical to SEQ ID NO: 7450
  Synthetic

SEQ ID NO: 7452 - protein, 183 aa, Artificial Sequence
  Synthetic
SEVEKLIEDDRKLLEDAEEEVRRNNREIERILDKAREDVKRIIKEIEDLLREADEAAKRGEVDEDVVREVAKRIRDLLEELRRRAEEIKRRLDRSHEELRRALEEVDKRSKELLDDLRRRKKDAEEAKRRIKKSIDDSRRELKRLLESNRKVIEEVKKTLEELIRTLEEVVRRVEDRLKKLAD

SEQ ID NO: 7453 - protein, 183 aa, Artificial Sequence; identical to SEQ ID NO: 7452
  Synthetic

SEQ ID NO: 7454 - protein, 185 aa, Artificial Sequence
  Synthetic
DSVEELLKRLRDLLEESKRRAERLIREIERLLRESEKRVRELNRRLEELLREAEDRVRKEGPTERLEELVEELKRRLKRSSDELKKHLDESRKRLKEIIEEVERHIERSVREMRRILEELRKEGAPEDALRKLEKVIREIEREHRRLLEEIRRVLKEVDKRHDEVRKSHEDVIRRIEERLERLKK

SEQ ID NO: 7455 - protein, 185 aa, Artificial Sequence; identical to SEQ ID NO: 7454
  Synthetic

SEQ ID NO: 7456 - protein, 185 aa, Artificial Sequence
  Synthetic
DSVERLIEEIRRLLKRSEEIARKLIRDAEKLLEEHRRRVEELNREIERKLEELDEKARRRGPTEELKDTVRKLREDLDRSLEDLRRHSERLKEELDRLLKELEEHIERSKKRLDEIEEEVRKEGVPREALEKIRKVIKEVKDTHRDLLRRVRDVIRRIREASKETERSHREVIERVRKRLDELTK

SEQ ID NO: 7457 - protein, 185 aa, Artificial Sequence; identical to SEQ ID NO: 7456
  Synthetic

SEQ ID NO: 7458 - protein, 185 aa, Artificial Sequence
  Synthetic
KSVDDIIREIRKLLEDHKRRVDELLERLKKLLEDHRRTVDKLIKDLERLLEELARRVKREGPTERVRKLVKEAEDRMRELTKRLEEHSKKLKDDLRRILEDLRKHSDDLRRRLEKLLREVEEEGVPREALERIREEVRRVEEASERTLRELEKVVRRIERESEKLKRELEKVVEDAKRTLEKLIE

SEQ ID NO: 7459 - protein, 185 aa, Artificial Sequence; identical to SEQ ID NO: 7458
  Synthetic

SEQ ID NO: 7460 - protein, 185 aa, Artificial Sequence
  Synthetic
SSIEKLLEELKELAKRHEDEVKKLIRELEDLARKHKERSEKLNEEIKKLLKELADRVRERGTTEEVEEMIKEVRERLERSHDDHRRHSERLERELRRLLKELREHSDRLRRELERILKEVDEEGADERVRRRLRKVVEEIKERSDRTIREMEKVIREIKEESRRLNKSHEEVIRDVKRRADELRK

SEQ ID NO: 7461 - protein, 185 aa, Artificial Sequence; identical to SEQ ID NO: 7460
  Synthetic

SEQ ID NO: 7462 - protein, 185 aa, Artificial Sequence
  Synthetic
SEVEDLLRDLERLLEEHRERVERLIKRLRELLERHKRTVEKLNRDVKEKLRKLKKEAEDKGPTEELEELVKRVEEDLRRSLKELREHSERLKRELKELLDRLRDHSRELEERLRRILKKLEEDGAPEEALRRLKRVVEEIKRRSDRLIEKAEEVIRDIEEKSEETLKSHREVLERVKKILTDLRK

SEQ ID NO: 7463 - protein, 185 aa, Artificial Sequence; identical to SEQ ID NO: 7462
  Synthetic

SEQ ID NO: 7464 - protein, 185 aa, Artificial Sequence
  Synthetic
DEIDRLLEDLRRLLEEAERRVTEIIKRIKKLLEEHERRVRELNKDLRRLLEEAEDVVRRKGPTEELEDLARKLKETLEESLRRLEEHSRRLEKELRDLIDELRKLIKEVKDRLEEILREVEKRGVPEKARRDLERVVTEIDRELKRLEEDIRRVLEEVKRRSEDLRRSHRRVIEDIKRRLEELRR

SEQ ID NO: 7465 - protein, 185 aa, Artificial Sequence; identical to SEQ ID NO: 7464
  Synthetic

SEQ ID NO: 7466 - protein, 185 aa, Artificial Sequence
  Synthetic
KEVEDIIREIRKLLEDHERKVKELIDEIRRLLEEHERTVRDLNRRIKKLLEEAKEFADRKGPTEEADKLIKELTERLKKSLEDLKRHSDELKKTLEEILERVREDSERLEKRLREIEDKIRRDGVPKEMIDRVRKVVEEVKKRSRETLERIRKVIEEVKARSKELIESHEEVIKRVEETLKRLKD

SEQ ID NO: 7467 - protein, 185 aa, Artificial Sequence; identical to SEQ ID NO: 7466
  Synthetic

SEQ ID NO: 7468 - protein, 177 aa, Artificial Sequence
  Synthetic
SLEEEIKKLLKEVRDVNDRLKETIEDLAEKIERLAKRMIERIEEILREVDRLVKEVNLPEEMKKRVRDLLERIRRELEELLKELRKLLKRIRERHDELKKRSEENIKRIEDELRKTGEEDVIREILKEIRKHLRDSEEENKKTLDTLRKILEDLTKAAEDILEEIRRELDRLRKEAT

SEQ ID NO: 7469 - protein, 177 aa, Artificial Sequence; identical to SEQ ID NO: 7468
  Synthetic

SEQ ID NO: 7470 - protein, 179 aa, Artificial Sequence
  Synthetic
SELEDILRRLREEVKRLREESRKLLEDNRRLVEEVKRESDKVLKRLKDKADRLKELAERGDLDEEMAERVERELRRILEEHKRKSKEIEDESEKLDREHKESTREVVERIKKELDDARRRGIPTREIKTVIDELTRELERLNREHEDLTRKLREELKKLNKRIKDLIDTLKKLLEDLKK

SEQ ID NO: 7471 - protein, 179 aa, Artificial Sequence; identical to SEQ ID NO: 7470
  Synthetic

SEQ ID NO: 7472 - protein, 171 aa, Artificial Sequence
  Synthetic
SEEEKLRELVKEVEKRTRELNENLRRSIEEVERDTEELDKNLEKSIREVKKVLDDLNLSDDDVRKVEEDLRRLHEEHRRHVERSRRRLEELYRRHERHARESKKELKELEDRGEPAEDVLRRIRELLERNEEVNRRLDEASKRLLEENRRKNKKLDDDSKELLKRLTERAK

SEQ ID NO: 7473 - protein, 171 aa, Artificial Sequence; identical to SEQ ID NO: 7472
  Synthetic

SEQ ID NO: 7474 - protein, 171 aa, Artificial Sequence
  Synthetic
REKERLEKVIRELETKARELNKNLKKSIDDVRRETERLNENLKRSVDELRKRLKDLNLSRDDVERLDEELRKLEREHHEHVERSDRELKKLYDRHEETIREVEERARELKERDEPAEEVLKELRKLVEELERRNRELDKRSKDLLRENRELNKDLDRKSRELMERVERKTR

SEQ ID NO: 7475 - protein, 171 aa, Artificial Sequence; identical to SEQ ID NO: 7474
  Synthetic

SEQ ID NO: 7476 - protein, 171 aa, Artificial Sequence
  Synthetic
SEEEKLERLIEDLERKLKELNDNLKESIDRVRKRTEELNRNLRESIKRVKEELERQNLREDTVRDLEEKLRELHKRHEDHARRSDKRLKELHKEHEDLIREVEKRLRELRRRGEPAEEVLRELEKLVEDLERENRRLDKESKDLLEENKKVNKDLDDESKRLLEEVSKEAK

SEQ ID NO: 7477 - protein, 171 aa, Artificial Sequence; identical to SEQ ID NO: 7476
  Synthetic

SEQ ID NO: 7478 - protein, 178 aa, Artificial Sequence
  Synthetic
SDKEDVTRLLEEVSRASERSRKRWKDSSDEVKRTSEESIRRLRELLERLRERIERVIREKKDDDLRRKLERLLERLERIIRELEKRSKELNDKNEEDAERVTRESKELNDRLKKEIDRDITDVDELRKKIEEIVKRDEDLVRRLLEDSKRLAEEDRRLLEEVKREIDEIRKRIDEEVK

SEQ ID NO: 7479 - protein, 178 aa, Artificial Sequence; identical to SEQ ID NO: 7478
  Synthetic

SEQ ID NO: 7480 - protein, 182 aa, Artificial Sequence
  Synthetic
DEIDELVRRIEELAERHHRRVDEIVKRNEEVLKELDERARRLVRENEEVLKRLEETVRREGPRDELAERVEEHLRDSERRVRELERRLEEHIKRSEEELDESTKRLEDELRKVAEELKRRNMEERAEKRLRDVLEKLRRDVERNREEIKKSAEDVRREVKRVTDELKESIERVRKRVKELKD

SEQ ID NO: 7481 - protein, 182 aa, Artificial Sequence; identical to SEQ ID NO: 7480
  Synthetic

SEQ ID NO: 7482 - protein, 181 aa, Artificial Sequence
  Synthetic
EAERKVKTVVDELRRIVDELAKELEESLKRTDETIKRLARELERVDRELEEIIKELERKGLSEEEVRKLRETLKKLHEENRRVIEELEREVRESEETLRRVIEEIKKRLEDLRRKLDKLAKDGRVDDEVVRKVEEEAERIKKRIKDLVRRDEKLVEDMRRRIKRLVEKNRKVAEKMRTDTD

SEQ ID NO: 7483 - protein, 181 aa, Artificial Sequence; identical to SEQ ID NO: 7482
  Synthetic

SEQ ID NO: 7484 - protein, 185 aa, Artificial Sequence
  Synthetic
DLEELLRKVLEELRKIVEDARRENEKSLRESEKIVREVEELNKKVLEEVEKKIREVIEEKKEDKELVDEMRRVLKELEDRSRKLTDETRKKLKESEEKSRKLTEETKKVLEDLRRKLKEVADRGESEETIKRIVDEIRKEAERLLRRHRKSVKEDKDLAKKIREDHKKSVEDIERTLEELEKRAK

SEQ ID NO: 7485 - protein, 185 aa, Artificial Sequence; identical to SEQ ID NO: 7484
  Synthetic

SEQ ID NO: 7486 - protein, 175 aa, Artificial Sequence
  Synthetic
SEIEELVKEIKKVADEVRRRHEKSVREIERKLEELDKKVKDLVDEDKKLADELRRRNEDKETLDRVLKESEEKVRRLARDLERVLRESREESRRLVEDTRRLLEELEDKVRRINAGDRVRRELERVLRDVERIIRDVKRTNKRVDDDVERRIRELRKELEDSLRRSKRIVDEVRR

SEQ ID NO: 7487 - protein, 175 aa, Artificial Sequence; identical to SEQ ID NO: 7486
  Synthetic

SEQ ID NO: 7488 - protein, 175 aa, Artificial Sequence
  Synthetic
SEIERLVEEIEKLLRKMAEEHKRSVERDERLARKLKRENEEHIKTDEELVDRLRRRNEDEKRLKEVLDRSEKSMKELKDRNKKVLDESKKESEDIKRRTEKLLEEIEERIRRINAGDRVLRELKRVLDEVKKIIEDVAKENEDSDRRSKKIIEDVVRENKESLDRSREEIERVRK

SEQ ID NO: 7489 - protein, 175 aa, Artificial Sequence; identical to SEQ ID NO: 7488
  Synthetic

SEQ ID NO: 7490 - protein, 175 aa, Artificial Sequence
  Synthetic
KEIEELVKRIEDEARRLKEEHKKSVREIEELLKRLTEEVRKLVERDKKLAEDLKDRNEDEKRLTEVLRESEERIRELVKRAKEVLEESRKRSEDLARENRKVLEDLRREVERINVDDEMLRLLEKVLRDWEEIVRRVKEANDDVNRRVEETLRDLKRKLDRSLEDSERIIREVAT

SEQ ID NO: 7491 - protein, 175 aa, Artificial Sequence; identical to SEQ ID NO: 7490
  Synthetic

SEQ ID NO: 7492 - protein, 184 aa, Artificial Sequence
  Synthetic
SVEDELRKVIKENEDVLREVEERVETVIKRNREVIEEVAREVERVIEETRRLLKEIEKAGVDEDELRKVEERVRKHAEELRKILEDLRRSSRKLAEEARDILRDLKRTSDELRKEAEKVTKDGDSEESIKRLLEKIRKHSEEVKETIRRLLEKIEEHTERVKREIDKMLRSNEDLMRRIKEEAE

SEQ ID NO: 7493 - protein, 184 aa, Artificial Sequence; identical to SEQ ID NO: 7492
  Synthetic

SEQ ID NO: 7494 - protein, 184 aa, Artificial Sequence
  Synthetic
SIKEKLDEAIERNERVLRRVEEEVRKSNEKNKEVLRRVSEEVRKVIEELEDLLRKIAEKGVEEEKLKRLRDELDKIRRELEKRLEDLERSTRDLVRKLERILEELKRTSDELRKEVEEVDKRGTSDETAERLLRKIEKHSREVDETIRRMLEEDERHIKEVEDTIREMLERLKRLIDEAEKDAK

SEQ ID NO: 7495 - protein, 184 aa, Artificial Sequence; identical to SEQ ID NO: 7494
  Synthetic

SEQ ID NO: 7496 - protein, 182 aa, Artificial Sequence
  Synthetic
DEVREVLKKIRELIKTNREHVTRLLRTIEELSRRSEEMIRRILEEIEKLIKDVRRLTEEGELTEEKAEKLRRDVEEIVKEAEKRLRDSNEEVKRLVDEHREVNKDLERRLEDEKRRLKEENLPEEMEKLLEEAIKEAREDSRRSDREVEEVLRKHKKVNDRVREEIERVLRKLEELLKKDRT

SEQ ID NO: 7497 - protein, 182 aa, Artificial Sequence; identical to SEQ ID NO: 7496
  Synthetic

SEQ ID NO: 7498 - protein, 182 aa, Artificial Sequence
  Synthetic
SEVDEIVRRLEELIRRNTEKVERLLERHERLIRELKERVKELLRKHEELAKEITELTKRGESTDEVIEEIRKRSDELNRRLEETLKRIRDDSRRTLEDLKRHSEKSRKDLEELLRDAERKGTGKEARDRIRKVLEELKKKNKELEERIRKVSKELEKVLEDVKRESEKVSKELRERLERSKT

SEQ ID NO: 7499 - protein, 182 aa, Artificial Sequence; identical to SEQ ID NO: 7498
  Synthetic

SEQ ID NO: 7500 - protein, 185 aa, Artificial Sequence
  Synthetic
SELERLEKEARDIVENLKRVLEELAKDVKRLLKESDELLKDLREKVREILERIEELARRNISEELVKEVTKRVRDEVERLRRRLEKVHRDHERTVKRIDEEIRRHVERSEEEVKRVEDEVRRRNMDETAKRELERLVKELRDVHREVEKRLKELAKELREVNKRIKDDLDRLVEALEEVLDRVRR

SEQ ID NO: 7501 - protein, 185 aa, Artificial Sequence; identical to SEQ ID NO: 7500
  Synthetic

SEQ ID NO: 7502 - protein, 184 aa, Artificial Sequence
  Synthetic
SELEELKRRIDELLKENEEILRELEERVRRLNKENRDLLRKLEEEAKRLVEEVRRVAEEGRSEEVLDALRRELERIVEEVRRRIEESLKKVEDLLRRAEEVIRETHEKLRKVAEEVREELKRRRVTEVKERIEKVLKDLERRNRESEKEVRRLLKELKESIDDSRRRVDELVKRLRKVLEDIRR

SEQ ID NO: 7503 - protein, 184 aa, Artificial Sequence; identical to SEQ ID NO: 7502
  Synthetic

SEQ ID NO: 7504 - protein, 177 aa, Artificial Sequence
  Synthetic
SAEETLEKLIRDLEKSIRKSAEDLERLIRELEKSVRDSAKLLRDLIREVRDVVRDVVRAKGDREEVKEIRDRVEKAVEKLERVIKESEDRLKELVDRARKVIEDSKKELDEAVKELERRKADKDVAERVKELDKRNKDLLKRLEEEVRRLIKENERLLRELAKEVKELLERIKRAAG

SEQ ID NO: 7505 - protein, 177 aa, Artificial Sequence; identical to SEQ ID NO: 7504
  Synthetic

SEQ ID NO: 7506 - protein, 177 aa, Artificial Sequence
  Synthetic
SAEDKLRELEKKLRKSIKESADRLRKLNEELRRSVRESAERLKELIREVEEVLRDVVRKRGRTEEVERLEEEVEKLRRELEKVIEDSERELEEHVKRTKEVIDDSKRLLEEMVEELKRRKATEEVEDEVRRLDEENKKLLEDLKRSVDELIERNKRLLEELTKRVKELLDKIRKTAE

SEQ ID NO: 7507 - protein, 177 aa, Artificial Sequence; identical to SEQ ID NO: 7506
  Synthetic

SEQ ID NO: 7508 - protein, 177 aa, Artificial Sequence
  Synthetic
SMEDSLRELIRKLRESVKRSAEELRRLNKRVEDSIRDSARKLRELIRRVEEVVKEVVETRGRTDKVDRIKKKVDDLREKLERLIRESEELLERHVEKTRRVIERSKEELDKVEEDLRRREARERVEDDVRRIDDENRRLLEELKKSVDELDKRNEELLRRAEKEVRDLLREIREAMR

SEQ ID NO: 7509 - protein, 177 aa, Artificial Sequence; identical to SEQ ID NO: 7508
  Synthetic

SEQ ID NO: 7510 - protein, 178 aa, Artificial Sequence
  Synthetic
DAEEELERLLRESERVSRDSARRLRELLKKLRRSVERSRREIDRLLKELEDVIREVIKRKKEVRELVKKLRDDLEDLTRKLKELVKRSEDLLRKLEEDIERLIETSRKRNKELEDRIRERKADKDLAREVEKVVKEDEDILRRAEEEVERLIETNRDLLRKVEREVKELVEKVEEDER

SEQ ID NO: 7511 - protein, 178 aa, Artificial Sequence; identical to SEQ ID NO: 7510
  Synthetic

SEQ ID NO: 7512 - protein, 182 aa, Artificial Sequence
  Synthetic
SELEELKREVDELTEEHKELLKRLTERVKELSERHKELLERLRERSERLVRRIRELAKRGEPKKDLVRELEELLKENNKLLEDVDREMKKTNDELREEIDRVRRRMEKTNKELEKTIKEVNLDDEVLRKAEELLRRNNRVIEEIEKRLRELLKENNDVIKEIRERLEKSNKELRDVAREVAK

SEQ ID NO: 7513 - protein, 182 aa, Artificial Sequence; identical to SEQ ID NO: 7512
  Synthetic

SEQ ID NO: 7514 - protein, 182 aa, Artificial Sequence
  Synthetic
SELEELKKKVDDSIRENERLLRELTEDVKRLSKEHKDLLKRLEDKVEELIRRARELAKRGEPKRDLFDELRKLLEKLRKDIEKAKREMERTNTELEKKIRDALRRTTELDKELEETIRRVNLDDDMLEKAKKVHDEHRKSVEESTERLKELLRRNNEVIKDIARRLDELLRKLEKVVKEIAK

SEQ ID NO: 7515 - protein, 182 aa, Artificial Sequence; identical to SEQ ID NO: 7514
  Synthetic

SEQ ID NO: 7516 - protein, 182 aa, Artificial Sequence
  Synthetic
DELRELEEEVRKSIETNRELLERARERVERLSEEHRKLLEKVKEDSDRLVEEVKDLERRGEPKTDLARRLDDLLRKNNDILRRLKEDMKRTNKELEDLIRELVKTTRDLDRRLKKLIDDLNLDDEVLRRARTLHDEHRRSVEESERRLKELLERNNEVIKDIERKLDKSNKELKDEAEKVKK

SEQ ID NO: 7517 - protein, 182 aa, Artificial Sequence; identical to SEQ ID NO: 7516
  Synthetic

SEQ ID NO: 7518 - protein, 182 aa, Artificial Sequence
  Synthetic
SELEEIEKKVRELTKRHRELVERVRKTVKELIETNRRLLETLTERIKRVLEEVRDLERRGEPKRDLKKRLEDIIRRLAEDIERVKRETDKLLEELKRIIEEVEKEMRETNKELDKEIKDANLDDKALEEAKRVLRENNEVIKDIKRRLDELLKELEKSVRESEERLRRLLEEVKRVIEEVAT

SEQ ID NO: 7519 - protein, 182 aa, Artificial Sequence; identical to SEQ ID NO: 7518
  Synthetic

SEQ ID NO: 7520 - protein, 182 aa, Artificial Sequence
  Synthetic
SSDREVEERVKRLTDRHRELLKRVEEEVKRSIKRNKDLLDELRKESEKLVKEARDLARKGKPKRDLARELRKLLEDNNRKLEEVDRETDELDKRLKERIEELEREAKKTNDELRELIKRLNLDEDVLRLAEKLLKDNNKVIDEIRRRLDRLHEEHKKSVDDSREELKKSNKKLEEVVREIEK

SEQ ID NO: 7521 - protein, 182 aa, Artificial Sequence; identical to SEQ ID NO: 7520
  Synthetic

SEQ ID NO: 7522 - protein, 185 aa, Artificial Sequence
  Synthetic
DDLREVEKEIRRIAEESKKLLEEIERAVEKILRDSRRVLEELARRAKRLLEELDKLKKNGLDKEDLERKLRELERRLEELLEELERISERTKEELKRLEEKLKKFSEDSDRRLRKILEDLERRGVDEDVRREVKRLVDELREVDRKIEEDLRELVRELEKVNREIRKRIEELVRRIKEVADEVRR

SEQ ID NO: 7523 - protein, 185 aa, Artificial Sequence; identical to SEQ ID NO: 7522
  Synthetic

SEQ ID NO: 7524 - protein, 184 aa, Artificial Sequence
  Synthetic
DMEEKMRRITEEWRRVTEEIERRHREVIKKWRDVSREIAETHRRVIDELRRVLERIAERNPSEDLLRKLKKEIEKLERDNRKLIDDDRRLLERVERKNERLIREDRERLKEAEKRIKEVEDRGIDKDIVDKELERLREEIRTSKKESDEVVKENEELIRDSKRKSEKVVRDNKRVIKEAEEKAK

SEQ ID NO: 7525 - protein, 184 aa, Artificial Sequence; identical to SEQ ID NO: 7524
  Synthetic

SEQ ID NO: 7526 - protein, 182 aa, Artificial Sequence
  Synthetic
DEIEELLKEIKKLVDELRKRIEELAREHKRLADELRKKIKKLKDEHDRLVRELEKLAEKGRSDDKVLKKIEDDSKRTREDLERAIREAEDRSRRTSEDLERAIKEAEDRLRKLAEDLKRRGGGKEVKDKLDKLREELKRVADKLRDDLRELHKRLKEVADRLRKLLEDANRTLREVLKETKR

SEQ ID NO: 7527 - protein, 182 aa, Artificial Sequence; identical to SEQ ID NO: 7526
  Synthetic

SEQ ID NO: 7528 - protein, 177 aa, Artificial Sequence
  Synthetic
SAEESAKRLKEELKKSLDRSREELDKLRKDNEKVLRDVEERLRRLIEELKKVLEDIKKDKGRTEEVEKLRKKVEDMARELKERLKDLERSLRELEKKLRRELERSEEEIRKLERDLDREEVREELEKRVEKLLRDDKRRLDELRKESEDHIREIEDTLRRIEEEVKRLLKEMRDKLK

SEQ ID NO: 7529 - protein, 177 aa, Artificial Sequence; identical to SEQ ID NO: 7528
  Synthetic

SEQ ID NO: 7530 - protein, 185 aa, Artificial Sequence
  Synthetic
SELETIARRVEKLNEDVERLLREAKKEADRLIKENEDLLREAERKVREIIERIRRLAERGEPKRDLLKEIEELLRELKETVERLIKTSRDLLKRLAELVEKVKRELEDSLRKLKKEAEDLIRKNDDKEVKEKLTRLLKSHEDVIREVSRRLKELLDRYREVSDRIRKTLEELLKELRRVVEEVRK

SEQ ID NO: 7531 - protein, 185 aa, Artificial Sequence; identical to SEQ ID NO: 7530
  Synthetic

SEQ ID NO: 7532 - protein, 185 aa, Artificial Sequence
  Synthetic
KDLEEIERKVRKLNEDDKKLLDDLRKEVEKALRRNEESLRKSREDAKKIIKEIEDLARRGEPKRDLLRKLEEDLKRVEDEVRKNEKRSRDLLDRLRRILEDLIRESERSADELRRDMKRLIDDKDDKEMKDALRELLRSHRKSSEDTKRELERLLREYEKVSRDVKRDHEKLLREIREVIEEVKK

SEQ ID NO: 7533 - protein, 185 aa, Artificial Sequence; identical to SEQ ID NO: 7532
  Synthetic

SEQ ID NO: 7534 - protein, 185 aa, Artificial Sequence
  Synthetic
SELDEIRRRVEELIETDKDILRRIAEEVRKALEDNKKSLRESEEEVRRLLEEIKKLADRGEPKRELLERLERLLEELRKKVEENERRSKKLARELRERAKEIKKRSDDLNRELRKRMKELIDRIDDEEMKKLLEDLLRKSEDSTRETRKRLKELLDRYEEVSKKIKKRHKELIEELRKVIDDVRR

SEQ ID NO: 7535 - protein, 185 aa, Artificial Sequence; identical to SEQ ID NO: 7534
  Synthetic

SEQ ID NO: 7536 - protein, 182 aa, Artificial Sequence
  Synthetic
RVEETLTRALKEIEEVIRRVDEESKRTIRSHREVIREVDEIHTRLLERLKKVIDDIRRRNVPDDDLRRILRELEEHIKRSKEELEKSLRDLERHSDELRRRLRELLERLRKIVEELDRAKSDDDRLLKEARDEVRKIIEEIRRLLEEHERTVKKLNEDIRKRLEESERTVEELLKRLRDRAR

SEQ ID NO: 7537 - protein, 182 aa, Artificial Sequence; identical to SEQ ID NO: 7536
  Synthetic

SEQ ID NO: 7538 - protein, 182 aa, Artificial Sequence
  Synthetic
SMEEELKRLLESHEKVIREVRKTSEDTLRSHRKVIEEAKEEHKKLLEEIKRVVERVRKRNVPDEDLKRILEEVRRHVEESKKRLRDSFEELRRHSEELERRLRESKKRLERLVRELEREDSRDETVLREARKEVEKLNEDIRRLLEEHKRVVDELNKELRRLLEESRRRVKELIRRIEEEAR

SEQ ID NO: 7539 - protein, 182 aa, Artificial Sequence; identical to SEQ ID NO: 7538
  Synthetic

SEQ ID NO: 7540 - protein, 182 aa, Artificial Sequence
  Synthetic
SVEERLRELIESHRRVIEKVERDSRRTIRSHEEVIKEVKKISEDTLREIRKVIEEAKKRGVPDDELRELLKRLKEHSEELKRRLEESLKDLKRHSDELRKRLEESLRRLKKLIEELRRADSRDETLLRDAERRVEELNEEIRRLLEKHVRDVDRLNKEIRDLAREHKERAEEIIKRIEEKAR

SEQ ID NO: 7541 - protein, 182 aa, Artificial Sequence; identical to SEQ ID NO: 7540
  Synthetic

SEQ ID NO: 7542 - protein, 186 aa, Artificial Sequence
  Synthetic
SEMERLERRARELLRRNEELMDDLRRKAEELLKRNDRLVKEIEKKVREVLRRIEELKRRGEPKREVARKIEEILRRLEETLRRIKEESDRLDEELKRELERVKRESEELDRELRKLIEDVERRVTDSKRLEELLRRLNEEHKRISDELRKLLDEALERHRELSRRLEEELERLLREIERLVEEVTR

SEQ ID NO: 7543 - protein, 186 aa, Artificial Sequence; identical to SEQ ID NO: 7542
  Synthetic

SEQ ID NO: 7544 - protein, 186 aa, Artificial Sequence
  Synthetic
DDMERLEEEIKEILDRLRRLLERNRRVNKEIDERSKELVKRLEEKARRLLEELRRLKDRVTDKETLERRLRELLRELERLIREVEERLKKLHEDHKRHIERSDEEMKRLLDELRKRIEDVKRKLERVKELEKKAEDVLREVKKVIDEVRTDSKRLNENLRESIKDVKREAERVLREVEEAIREVER

SEQ ID NO: 7545 - protein, 186 aa, Artificial Sequence; identical to SEQ ID NO: 7544
  Synthetic

SEQ ID NO: 7546 - protein, 186 aa, Artificial Sequence
  Synthetic
REAEELKKEVDRILEELKKLLKENEDLNRDLDRKSKELLKENREKVERLRKELRELKDKVTDKDKLAKRLEELLKDLADHVERSRKKLEDLHREHEDHIRKSEEELKRLLKEVEDLIRELRERKKDVKELEDEAKRLKDEVEKLIEEIKRKSDELNKNLRDSIRRVEETTRDLLRKIKKLIDEIKK

SEQ ID NO: 7547 - protein, 186 aa, Artificial Sequence; identical to SEQ ID NO: 7546
  Synthetic

SEQ ID NO: 7548 - protein, 171 aa, Artificial Sequence
  Synthetic
SIEEALEDLARRIKKILDDLRREAERLLREVEELLKRVEEANRRLRRTIEEALKRLARDKKKADEIRRRHEELEKRSKENLDKIREDLERLKKRLEDELKRIEEELRKLREEGVEVETAEREIRRILEEIRRLAEEARRRIEEVLKRIKKHLEESKRRNEESLERIEREAR

SEQ ID NO: 7549 - protein, 171 aa, Artificial Sequence; identical to SEQ ID NO: 7548
  Synthetic

SEQ ID NO: 7550 - protein, 179 aa, Artificial Sequence
  Synthetic
SVEETVDELKKRIEKILREIKRVNEELAKRNEDVNEEWRREVDKMIKDIERILRDVLRKEDSEDLRRRVEEVKRHLKRNKDEVEKKSKENKDRVRTSHERLRDLLRRIRERLEELERRLKDLDIEKLKRDAERILEEIKRAVDTSREESERTLKELRDMVKESRKDAEEVLERIDRDKR

SEQ ID NO: 7551 - protein, 179 aa, Artificial Sequence; identical to SEQ ID NO: 7550
  Synthetic

SEQ ID NO: 7552 - protein, 179 aa, Artificial Sequence
  Synthetic
SVKETLEDLIKKIRDLLKRVRDENKRLAEDNERLNREVEKRNRELIKRIEDELEEVRKREDSERVRKIIEDVKRRLDRSHEEVKRISEKNRRDVKRSTEELEKLAEDAERRLDELDKLLKDLDIRDLKREIEKILREIKKALEDSRRKSKETLDRIREVLKTSEEDIKRILKEIREAAR

SEQ ID NO: 7553 - protein, 179 aa, Artificial Sequence; identical to SEQ ID NO: 7552
  Synthetic

SEQ ID NO: 7554 - protein, 178 aa, Artificial Sequence
  Synthetic
SREEVVKEIEKRVEELNRRLEETVRRVIEEMKRLNKESKEVSKKIVDEVRKLLDDVRREKGETEELKRLEERIREAEKTSKKLNDDHERESRKLARRLEELLERHKRETRRIIEEMRRAKLEEDELRRLLERIEKTVRELKREIEKILEDATRTVEDLKRKNEELLRRLKKLADDVKK

SEQ ID NO: 7555 - protein, 178 aa, Artificial Sequence; identical to SEQ ID NO: 7554
  Synthetic

SEQ ID NO: 7556 - protein, 184 aa, Artificial Sequence
  Synthetic
RVEEILRKASKENKEVIDRDRRLAEEATELNKRVVEEDRKVMKEVTKELEDVLRRAREEGLDEEKLRRLEEELRRLTEEWREEIRKDEKTVEELRKKWEDVSRELERRHRELERELKKSLDDGNTDKLLRELEERSKKVLEESKKTSEDLLRESEKHVRDWREKSRKLEEKVKRLVKKVKDTTD

SEQ ID NO: 7557 - protein, 184 aa, Artificial Sequence; identical to SEQ ID NO: 7556
  Synthetic

SEQ ID NO: 7558 - protein, 184 aa, Artificial Sequence
  Synthetic
RAEDIIRELKRRNEEVLERDRELMERAARELREVLERLKDIAREASKELKRVLDELRKRGLDEEDLRRLEKELRDLEREIDRTLKEIEKRLRKLKREWEKVSDDLRKKHEDLIKKLKDDLRRGTSDEVVERLARESERVLRESEETSKDLKRKVDEELRRIEDTIRRLLKRVKDLVKKIEDTSR

SEQ ID NO: 7559 - protein, 184 aa, Artificial Sequence; identical to SEQ ID NO: 7558
  Synthetic

SEQ ID NO: 7560 - protein, 184 aa, Artificial Sequence
  Synthetic
RLREIIEKLRRDNEKVIEEDRRVAEEVRKALEKVLREDRKMADEVTKELERALKELEDRGLDEKKLEELRRRLRKLVEDWKRVSERVEKELRELTEEWEKVSRDLEKRHRDLVRKLEDDLRKGTTDEVIKELEKRSKDVLDESRDESRKLLERVERLLKKIREDSERLLERVEELLREAEETAR

SEQ ID NO: 7561 - protein, 184 aa, Artificial Sequence; identical to SEQ ID NO: 7560
  Synthetic

SEQ ID NO: 7562 - protein, 184 aa, Artificial Sequence
  Synthetic
SVEEIIRKLEEDNRDVLRRDREVAKKVEDENRKVAEEDDRIVRRVAEELKRVLKELEDKGLEKRELDRLRKELKELVERLEDVSRRMKETVKRLRDEWEKRSRELEKTVRELVKKLRDELRKGISEKVIEELKDESRKHLEELEKDSKRLEDESKKHLDDWRRTSEKLLEDVERRVREIEEESR

SEQ ID NO: 7563 - protein, 184 aa, Artificial Sequence; identical to SEQ ID NO: 7562
  Synthetic

SEQ ID NO: 7564 - protein, 179 aa, Artificial Sequence
  Synthetic
SSEEVVRELDKEIRKSIEDLKRIVRENEEENKRSVEDVREKAKRNEERLRKVLKEADERKRDEDLERKLRTVKRELERSIEELEKHIEKSNRDVKKSAKELEDHLRDSKRRMKELAERLKDVDIRELAKRVKRIVDENKRVAEEHHRKVERIVRENEKLLKEHHDRVEELVRRIKEEVE

SEQ ID NO: 7565 - protein, 179 aa, Artificial Sequence; identical to SEQ ID NO: 7564
  Synthetic

SEQ ID NO: 7566 - protein, 179 aa, Artificial Sequence
  Synthetic
SEEEEVRRVLEELEKKVKRLTEEHRRRLDELRKKVKDHSRKNKELLERLREEIKRIKGAPSEDIDRIEEEARRRLEESERSSRELKKDLERTLEKLRRDSKRLVEEMERVLRELRKRGGSEEAKRVLEEVEKRVRELVKTNEDVLREIEEDVRRLVKENEDSIKESKDRLRELLERLKQ

SEQ ID NO: 7567 - protein, 179 aa, Artificial Sequence; identical to SEQ ID NO: 7566
  Synthetic

SEQ ID NO: 7568 - protein, 181 aa, Artificial Sequence
  Synthetic
DEVEEIRKILEELAREAEKVVRETRKLLEDIRKEVEELNDRNRRLLEELERRVRDIKRRGTSEEKLKELEDRVEKAIRESREELKRLEDKIRKRIEEDRRKIEKLERKVKKVIDEIRKRTRRDEIRRVVEDVERRLRELLDRWRKVSEEVEKRLKELIDELRESIERSADRLRKLIEELKR

SEQ ID NO: 7569 - protein, 181 aa, Artificial Sequence; identical to SEQ ID NO: 7568
  Synthetic

SEQ ID NO: 7570 - protein, 181 aa, Artificial Sequence
  Synthetic
REVEEIKKTLEDIRREAKELLDRTRELLDRLRKSVEELNRDNERLLREAKDEVEKVKRDGTSKEVVDELMRKLKRLIEESKRKLDEHVKRTKEVIERDREELKRLKRKLDDTIRKIRSRTREEEIKKVVERVEREIEDLIRRWEEVSRDVEEKLKDLNKKVEESIRRSAKDLRELLREVEE

SEQ ID NO: 7571 - protein, 181 aa, Artificial Sequence; identical to SEQ ID NO: 7570
  Synthetic

SEQ ID NO: 7572 - protein, 175 aa, Artificial Sequence
  Synthetic
SRAEKVLKRVTDLIRELLRTVTELVRRNREVIEELLRRVAKLHRDNRELNKKVLEDVRRDGPDDRLVETLKRHNEEVTKTLERLKRELEKHLEKSARDVEKLKKDLRRVAEEVRRELGDNEVVDELRRRIREVEKTLDRLLEESEERARRVLKELDRLLEESRKSSREVIEEAKR

SEQ ID NO: 7573 - protein, 175 aa, Artificial Sequence; identical to SEQ ID NO: 7572
  Synthetic

SEQ ID NO: 7574 - protein, 180 aa, Artificial Sequence
  Synthetic
SVEELLKKLEKENRDVIREMKKLLDELEEENRRVIEEWRRITKELEDRNRRVREEIPESDELRKLVEELKKHLEDDKRRAEKAARDLKDHLRRLEETIRKMEEELKRHLDKLRRDIERGTDEEIIRRLVKHNKELVDEIRKTIERLREHNRKLVEKVREDVKRSTKHNRDLVKEVRDRAK

SEQ ID NO: 7575 - protein, 180 aa, Artificial Sequence; identical to SEQ ID NO: 7574
  Synthetic

SEQ ID NO: 7576 - protein, 180 aa, Artificial Sequence
  Synthetic
SLEELLDRLRKLNETVIRDMERVLKELEERNRKVIKEDRDVLEELARRNEKVKRDIPPDDELRKLAEDLERHLRDWEDKSRKLEERLRRHLKEVKETIEKIEEELKEHLRDVERKIREGTDEEIAKELVKHNEKKVREIKKTIDDLRKHNEELVKEIRETSERLREHNERLLREALRRAK

SEQ ID NO: 7577 - protein, 180 aa, Artificial Sequence; identical to SEQ ID NO: 7576
  Synthetic

SEQ ID NO: 7578 - protein, 184 aa, Artificial Sequence
  Synthetic
DLEEVVKDLERKLRDVARKDRKLVEDSRKILKDVVDKDRELVERSRRILEEVLERIRRRGTDETTVKDIKRRLDEVLKENDDDSKRATEELRKLLEDNKRKSDEARRRIKKILDEIKDETRKGTSRDTARKLLEDVADELRRWLEDSERLHKENKDTIEKWLRRSRKLHEENRKLIEDLLRTVT

SEQ ID NO: 7579 - protein, 184 aa, Artificial Sequence; identical to SEQ ID NO: 7578
  Synthetic

SEQ ID NO: 7580 - protein, 184 aa, Artificial Sequence
  Synthetic
SLEDVLRELKERLERSHRKLRELVRRLEEDLKRVLRELEKIVDEVRKINEDVRREVERRGVDEDTLRRITKLSEDSLREAEELLEDIRRVVEKIKRELEKMLEEHRRTLEKIEKELDEVRRRGEDEDIVRKLLEDVRKLVEELDRRAKELEERVKKVVDELLEKARRLLEKNRRTVEKILRDVK

SEQ ID NO: 7581 - protein, 184 aa, Artificial Sequence; identical to SEQ ID NO: 7580
  Synthetic

SEQ ID NO: 7582 - protein, 182 aa, Artificial Sequence
  Synthetic
SEVEKLLREVEDRDRRILKKVKELLDEVRRLIEDHLRRSEDALRRVRKRIEELKELVERGDLDEETLKKVKDELRRLIEELRKHAEELKRRLEELERTLKEELDEWKKELDKLLEDLRKDEKSERLEEMLRRLKKSIEDSVREVRKVLKEAKDIARKVIEDTKRLLEELKRIMKKVLDELRK

SEQ ID NO: 7583 - protein, 182 aa, Artificial Sequence; identical to SEQ ID NO: 7582
  Synthetic

SEQ ID NO: 7584 - protein, 182 aa, Artificial Sequence
  Synthetic
SEIEELVERVKARDEKHLRDSEKLLEEVKRRDRKLEEDSKKLLKDVKDLLRELEEVAKRGEVDEETVKDLERRVREMLKESRDRTKKWADELKELVERLRRHIEEWRKELKRELERLEEESDDERLRKLLDDLRKSIEESRKRSEEILREAEDTMRKSVETNERLLEELERELRRVVEELRR

SEQ ID NO: 7585 - protein, 182 aa, Artificial Sequence; identical to SEQ ID NO: 7584
  Synthetic

SEQ ID NO: 7586 - protein, 182 aa, Artificial Sequence
  Synthetic
DEIERVLEEVERIDRELLKRSEDLLREVRERDKELEERSKRLLEKARRLIETLRDMARKGEIDEETAKRVEETLRREVEKSREDTRRWEEELKELLKRSKEETDRWKEELRKKVERLEDKDKKERVKTIIDEARKSIDDSVRENKKVLDELKETIERSKKKNEDILREIEKILEEVREELRK

SEQ ID NO: 7587 - protein, 182 aa, Artificial Sequence; identical to SEQ ID NO: 7586
  Synthetic

SEQ ID NO: 7588 - protein, 182 aa, Artificial Sequence
  Synthetic
KDVDELLERVKRRDEELERKVEKLLKRVRDLIREHDEKVKELEDEVRDRIKKLLEMAERGEVDEETVKDLKRRLKELLDKLRKETEDLKRDLEELIKTLEEEIRRWKEKLEEDAKRLRDKEKSEELERVLRELKRSIETSTRRLRKILEELRRILEESERKVEEVLKELERIAREVEERLRT

SEQ ID NO: 7589 - protein, 182 aa, Artificial Sequence; identical to SEQ ID NO: 7588
  Synthetic

SEQ ID NO: 7590 - protein, 182 aa, Artificial Sequence
  Synthetic
SDIEDVVRKVEEEVRDHNRRVEELLKRVERRDRRLEETVEELLKEIEDKLRRLKEMAERGEVDDKTVKDLKEELERLLRRLEREIREWEKELRRLVRELERETKELEDRLRRLIEELRRRERSERLEKLLRELEETLRRSKERVKEVLEDLKRTITESKRRLKKILDEIRKRLEEVERDLKR

SEQ ID NO: 7591 - protein, 182 aa, Artificial Sequence; identical to SEQ ID NO: 7590
  Synthetic

SEQ ID NO: 7592 - protein, 184 aa, Artificial Sequence
  Synthetic
SLEEVVDKLRRDSEESLKKNETVLRRVTKELTELLKRWREASERLKEELREVLERVRKKGLEEREVRKLEDRLRRLLEEDKRLLDEVKRRIEDLRKKWEDETRKVKERHEDLLRKIEEVRKRGTTEDTLRKLAEEVKRVVRDDEEKVKRLEEEVKEEVKKLEDDLRRSEERVERTIREIEKRAK

SEQ ID NO: 7593 - protein, 184 aa, Artificial Sequence; identical to SEQ ID NO: 7592
  Synthetic

SEQ ID NO: 7594 - protein, 184 aa, Artificial Sequence
  Synthetic
SVEDLVREVERRLKTVLDEDEEVLKRVEDESRESIKENEEVLREVSERLDKVLKDVRRRGLEERLVRDLERKITELRRKWDEDTKRAKEEHEKLTREWRKRSEELRKRIEDLLRELRERLKEGTSEEDLKRLEDRVEEEVRRAKRESDELLKRVRRTVEDDKRRLRELREEVKDLLERIREAEK

SEQ ID NO: 7595 - protein, 184 aa, Artificial Sequence; identical to SEQ ID NO: 7594
  Synthetic

SEQ ID NO: 7596 - protein, 178 aa, Artificial Sequence
  Synthetic
SEVDEVRKRSEKVVEENERRIEESERRIAKLVKEVRDVIEDAKRRVEEILRRLEEEMRKGIDEKTIKDLKEEIKKVLEDLERRIREIEKKLRKVTEDDRRTLKKVREDNKRLLDDIRRKLRSKDVLEEMRKTHERVIKEWERAHKEVNEKLEKIIRELEKVLEEVEDEAREVIRRLET

SEQ ID NO: 7597 - protein, 178 aa, Artificial Sequence; identical to SEQ ID NO: 7596
  Synthetic

SEQ ID NO: 7598 - protein, 179 aa, Artificial Sequence
  Synthetic
SASEDLERVLRELAKEVEKLLRESEKLLKELEDLARELLERDRKLLKELEEKVKRLKERRADEDKIRTLEKEMRDVLRESEERIRRLEETVKRVLDENKKRTDDLKKKLEDILEELERRNSAEERVLDDVRKRIEDLVRELKKVNEDIEKKVRELIERLRRSLEKSKEDIRRLVEELRR

SEQ ID NO: 7599 - protein, 179 aa, Artificial Sequence; identical to SEQ ID NO: 7598
  Synthetic

SEQ ID NO: 7600 - protein, 179 aa, Artificial Sequence
  Synthetic
DMSEELEEILRRLEEESRRHLRTDEELLRELEEKIRRLLREIEEILERLKKRIDEVKTRNTSEETIKKLIEDAKRVLEEIEEKVKRLVDEAREVLDTSRKTLRELVEKMRETLDRARKRNSAEERVLKRVKDRIDELIRRNEESLERTRDEIRKLIEELKKVLDRVKEEIEKLVEALKK

SEQ ID NO: 7601 - protein, 179 aa, Artificial Sequence; identical to SEQ ID NO: 7600
  Synthetic

SEQ ID NO: 7602 - protein, 179 aa, Artificial Sequence
  Synthetic
EMTERLERVLEELKRKSDEHIKTDEELLRRLEKKSRDHLRELEEILRRLEREAREVKRNRTSEEVIKELAKRLRESLERLRKTLDELVKDMERVLRTSERTLEELVRDLERILKELKDADSADREALKKVEDAIDKLRRDNERSLERTKREIERLIRENKDVLDKIEKRIRELIEELER

SEQ ID NO: 7603 - protein, 179 aa, Artificial Sequence; identical to SEQ ID NO: 7602
  Synthetic

SEQ ID NO: 7604 - protein, 179 aa, Artificial Sequence
  Synthetic
SADEKLDKILREMKKRSDDHIREVEKILRDLDREVKEILKKDEKLLRDLDRRVKDVKRRRSSEETIDKLIKEAEKVLRDSEDEVRRVVEKMEKVLRDLERTLKELIERLEEIVKRLKEERSADDEVLKRVEETVRRLVEENKKVLDRVREEIRKLIEELRDSLRRSEKRIRELADELRR

SEQ ID NO: 7605 - protein, 179 aa, Artificial Sequence; identical to SEQ ID NO: 7604
  Synthetic

SEQ ID NO: 7606 - protein, 182 aa, Artificial Sequence
  Synthetic
DLEDILREIARLIERLIDENRKVLEEIARRLKELIEELKKSLKRSEELLRRLEKELKDSGKKTEELTEKLKRILDESRKEIETLEEKLRRVLKKLKESLDKLVEEMKRTLEDLERKIRRDGPDKDLLRTLEKVAEDLKRRSERHIRELRRTLEDLERDVRRLLREDEEKLKRAAEEVKEAIK

SEQ ID NO: 7607 - protein, 182 aa, Artificial Sequence; identical to SEQ ID NO: 7606
  Synthetic

SEQ ID NO: 7608 - protein, 182 aa, Artificial Sequence
  Synthetic
DLEDVLRDIERLLRDLIRRNKEVLDRIRELIKKLIDENRKSLKRSKEELERLIRELAKSGKRDDRVLEKLKKVLDDSRKTLEELAKKAKETLDRIKKSLEELAKKLEDVLRELEREIRRDGPSEELLRRLREVLERLKRESEKHLEELKKILEDLERESRRHIEEDKRLLKELKEEVDERIR

SEQ ID NO: 7609 - protein, 182 aa, Artificial Sequence; identical to SEQ ID NO: 7608
  Synthetic

SEQ ID NO: 7610 - protein, 182 aa, Artificial Sequence
  Synthetic
SLEEVLKRIEDELRRLIEENKESLERSERLIRELKKRLEEVLRRIKKLLEELIRRLEESGKRDDRVRKKLKDVLDDLERRVREAVERLKKVLDDSRRSLEELVKKLKKELDRLRERVKRDGPDKKLLEDLKRTLDELRRESEEHIRRDERLAEELAREVEKLLKDMERILRELAKEVEDRIK

SEQ ID NO: 7611 - protein, 182 aa, Artificial Sequence; identical to SEQ ID NO: 7610
  Synthetic

SEQ ID NO: 7612 - protein, 172 aa, Artificial Sequence
  Synthetic
DASRRVEEKLKEVEERVRKLLEEDRKRLKDSKRKVEELIERDKTELKKVKDRADGGVPKDEARDELRKLKEKSRRDLERLADDLRRLNEKSKEDLKKIKREAEKLLEELEREKGADKKVIDTVRKRLKELLDELKKSVEDTHRENRRVLKELEESHKRTNERLDDLLRELER

SEQ ID NO: 7613 - protein, 172 aa, Artificial Sequence; identical to SEQ ID NO: 7612
  Synthetic

SEQ ID NO: 7614 - protein, 185 aa, Artificial Sequence
  Synthetic
SLEDVVRRVREELERLLRTHEEVIRRVEEELRRLLEEYRKVSKEIEEDLRRLLKEVRDRNIEDEKLRRLEKKLRELIKRSRELLEELRRRAEEIVRRLRDSLRRLKEDIRRIVEKIDKDREDGRPVEDLLREIKKELEDVKRKVDKLNEEVERILKKAKDEVKEAIKENRDRLRRLRDEVRRLKK

SEQ ID NO: 7615 - protein, 185 aa, Artificial Sequence; identical to SEQ ID NO: 7614
  Synthetic

SEQ ID NO: 7616 - protein, 185 aa, Artificial Sequence
  Synthetic
GLEDVVRRVEKRLEDLLRRYKKVSERLEREHRRVLDEYRKVSEEIDKILRDLLKEVRDSNIDEKKLRRLEEELRRAREESKKLLRELEEDIKDNLRKSEKLLEELRREAERLREEIEELRRRGEPVEELLKEIEKLLKDIERTVEKALKENKDSIRRSKEKVDRMIKRNRELAKELEDKVRELKR

SEQ ID NO: 7617 - protein, 185 aa, Artificial Sequence; identical to SEQ ID NO: 7616
  Synthetic

SEQ ID NO: 7618 - protein, 180 aa, Artificial Sequence
  Synthetic
SIEDILRELADTIRRLTEESEKILRKAEELLRRLTEEWRKSLKDLEDLIRKLIEEIRRRGLPEKDVRKIEEELKRLIEENKERLDRITRKLEEILKELRTSSDRLREELEKLLRDLKRLKDRDGEEEIKKLMDEIRKKVEKHLREVEKVLREVEEEVKRELRKSEELARRIEEKIRREKK

SEQ ID NO: 7619 - protein, 180 aa, Artificial Sequence; identical to SEQ ID NO: 7618
  Synthetic

SEQ ID NO: 7620 - protein, 180 aa, Artificial Sequence
  Synthetic
SEVEEALRRMEETIRRVREKLKKSLEDMRREIERIRRELEKSLEEFERDIERITRDIRRRGPGDKELDDIRKELEKKREEHHRRLDEIRRKLEEDLRRHHKDLDDIRRELEKRKEDLRRAKLVSDDALRKIEELVKRLDRELREVNKEIEKVVRELKEELKRVDDEIERLVRELRKEAER

SEQ ID NO: 7621 - protein, 180 aa, Artificial Sequence; identical to SEQ ID NO: 7620
  Synthetic

SEQ ID NO: 7622 - protein, 185 aa, Artificial Sequence
  Synthetic
DEIDEIRKVAERLEKEARELVKENEDDLKRHKERVDEIVKKIEEKVRRLEETARKLKEERRDSEELERVIKRLRDELRKLKEEVRREIKRLEDNHKELRDDNKRKNEELKKKVDDLEREVRRLPETEELKKVLEDLRRVLEKVHKLNREVLDKHREIVKRLSDKIKTVLRKLEEILKRAEEELRR

SEQ ID NO: 7623 - protein, 185 aa, Artificial Sequence; identical to SEQ ID NO: 7622
  Synthetic

SEQ ID NO: 7624 - protein, 179 aa, Artificial Sequence
  Synthetic
SIEELLEEVERVVREVERRLDELLERNRRVIEEVRRRDDKLTKENEDVIRDVRRAGNISDKATDELRRSHEAERRRSEEDKKRLDDSHKELEKEVEKTKRRIREELKKERDKARRSRRPEEDLIREVEKRLEDIKDLLRRMKEEVERHSREVEDRLRRSEERWRDHSKKVKERLDRATT

SEQ ID NO: 7625 - protein, 179 aa, Artificial Sequence; identical to SEQ ID NO: 7624
  Synthetic

SEQ ID NO: 7626 - protein, 173 aa, Artificial Sequence
  Synthetic
SLEEEVRRLLEEIKRLADENRDYVRRSLETNKKTNKDNRDEIRKALERIKRLAREIERIRKEDLDRTIEKLKRELKKLREDNEKRSKENEKSDRDVTEENKRRAKRIRDELRRTGVDEKLLREVEELLRRVEEEHERLHRENRKLNDKDRETLERLIREVDDLLRKLEEEARR

SEQ ID NO: 7627 - protein, 173 aa, Artificial Sequence; identical to SEQ ID NO: 7626
  Synthetic

SEQ ID NO: 7628 - protein, 174 aa, Artificial Sequence
  Synthetic
RVDELLEEVRKLVKDVHDTTEELLKEVERRLDEVKKRVDRSNEEVKELVKEAVKRSGETEEIRRLDEELRKAIEKDKRDLEKIEEDLRREADKIRRENEELKRRLEEEEDKIKKRPTDDTKIEELLRRIEKYMRESKERIDRLLERIDEVLEKNERDVRKLLEDIRRMIEKDDT

SEQ ID NO: 7629 - protein, 174 aa, Artificial Sequence; identical to SEQ ID NO: 7628
  Synthetic

SEQ ID NO: 7630 - protein, 185 aa, Artificial Sequence
  Synthetic
DTIERLLEDIKRILDKNRRDARRVLEEIKRSNEKNREDIKRIEEEIDRLLKEIKKKAEEDRSGEEAKREEEKLKREIERLERELEKIERENRKKMKEIRDDLDRLRRDNERRRREKKKEMDRRITNKDVVKEVEELLKRVEETHRKLNKEVEELLERDERDLRRLIDDVRRLLEEVRKTLEDLRR

SEQ ID NO: 7631 - protein, 185 aa, Artificial Sequence; identical to SEQ ID NO: 7630
  Synthetic

SEQ ID NO: 7632 - protein, 182 aa, Artificial Sequence
  Synthetic
RELEEARERIKELLEEIKDEVRRWREKIKRLLEDSRRKAERLKEDIKRLLEEIKKLSDDGRLDERIEERLRRELERIKRELEKYRKELEEDTRRDEERLRKIKEDLDERMRDIRRELKERVTDEDALRDIERLLREVDDAFRRLVEELRRLNEEVHRTTDELIREVEDMLRKVEEALKREKD

SEQ ID NO: 7633 - protein, 182 aa, Artificial Sequence; identical to SEQ ID NO: 7632
  Synthetic

SEQ ID NO: 7634 - protein, 178 aa, Artificial Sequence
  Synthetic
EEIERVLEEIKRTADEIRKEIERVLEKSKKLLDDHHEEVKRMLERIRDKAKKVTDRGGGSRELDKIKKDLEDELRRLEEKSRREHEEHKKELDKIKKKLRDTERDLERKLKEITDRDGEDKVVEELRKILERLKDLVRDLERKLDELNKRVRDRVEENRKELEKLLREARDRIRELER

SEQ ID NO: 7635 - protein, 178 aa, Artificial Sequence; identical to SEQ ID NO: 7634
  Synthetic

SEQ ID NO: 7636 - protein, 183 aa, Artificial Sequence
  Synthetic
SLEDRLREVLKRYEDRSRDLERELKRVLDEYDDSSRKVAEELKKVLDEIRETVERIKKDVDEKDLRRIKELLKRLEEEVKRTVDENRREAEEIKRKVKKETDENRREADERRRDLERRKGKPRREKEVADLVKKLEDDLRRTSDKVRRVVEEIKRRLEELERRYKALVKKLRDKLREIKEEVR

SEQ ID NO: 7637 - protein, 183 aa, Artificial Sequence; identical to SEQ ID NO: 7636
  Synthetic

SEQ ID NO: 7638 - protein, 181 aa, Artificial Sequence
  Synthetic
DVEEELKKVDDKVEELVRKVIEDIRRALERVRELVERVRRKLEETNKKLKKLVEDIVRKKGRRKELEETLRRNHERLTRATERLKELEERLRKSVEEIERTLKERLDRHHRELDKVREDNGPSEKVEELLRKSEELAKRIEDDVRRVLRKLEDTVRRIKEEIDRLLKDNERIIEEVKRRAD

SEQ ID NO: 7639 - protein, 181 aa, Artificial Sequence; identical to SEQ ID NO: 7638
  Synthetic

SEQ ID NO: 7640 - protein, 181 aa, Artificial Sequence
  Synthetic
SVEEIIEDMLRKVRELVRRVRELLREVDEKLKKLVEDVRRRLEKTNKELKDLVEDIVRRSGERKELKETMKRNHEELTKVDKELEEEKEKHHRELERADKELEDIIRRLEEEVKDLKDKKGGSEEAKRVLDKLRKTAEDIKRTIDELLKRSEETIKKIEDKIDKLVKKNKELVKRIEDEAR

SEQ ID NO: 7641 - protein, 181 aa, Artificial Sequence; identical to SEQ ID NO: 7640
  Synthetic

SEQ ID NO: 7642 - protein, 186 aa, Artificial Sequence
  Synthetic
SLRELLDEVRRAVEESNRELERLLEEVDRSNRESHRELKRLLEKIKKLAEEVERELERKGTSEDEKKKLDDEKEKLDRLLRKLEEESKEAKERNDERMRRLRKESEEVKRTLEEIERRLEKQGDVSEEEVKKAVEDLKRLVDTHKKRVEEVIDELRKHSEKHSEEVRRVITELARRLEELLDEIRR

SEQ ID NO: 7643 - protein, 186 aa, Artificial Sequence; identical to SEQ ID NO: 7642
  Synthetic

SEQ ID NO: 7644 - protein, 179 aa, Artificial Sequence
  Synthetic
SAEEKVEDELRKHHEEVKRLLEEIEKTMRDHHREVEETLKDSRRELKRIEEEARKVKERRVREEELKKIEEDLEREHREHEKRLRDLRRESEKKVRELKEKLDRFRDTSRKRTEDLRREGSASEDILRKLEEEVRRNDKELRDLLEELKDLVRRNDEELRKLNEEVRKRVEELIEELRR

SEQ ID NO: 7645 - protein, 179 aa, Artificial Sequence; identical to SEQ ID NO: 7644
  Synthetic

SEQ ID NO: 7646 - protein, 179 aa, Artificial Sequence
  Synthetic
SIEEMLKRVKEESKRSNDKIRDVLRKVEETSRRSKERIDKLLRDVERTVEEVIRDVKADESIVRDLKRILEKLREDVERTKRRDDERLEKLKRDVKREEDRDREDNERLERETRKSRRPEKDVLDRLRRYVEENRRRVEKLIRDLEDAVRRNEDDARRVAKEIEDVVREIKDRVDKTRT

SEQ ID NO: 7647 - protein, 179 aa, Artificial Sequence; identical to SEQ ID NO: 7646
  Synthetic

SEQ ID NO: 7648 - protein, 178 aa, Artificial Sequence
  Synthetic
SEVDKKLEDIRRRLEKLERETEESLDRVRKELEDLEKESRESLKRLREDLERVKKTKLDERTLDDKIEEMKKRNEEHRKKSEDSARELEKRNREHTKRLEDVERELREELERLDRSGVDKKKADELRRVIEEIIRRLRELDEKHRRLVEEIIRRLEELNREHSKVVEEIARELKKTAK

SEQ ID NO: 7649 - protein, 178 aa, Artificial Sequence; identical to SEQ ID NO: 7648
  Synthetic

SEQ ID NO: 7650 - protein, 177 aa, Artificial Sequence
  Synthetic
SLLEELKRSIEESIRTLKELLDRLEELIRRIAEEIRRLLEEHSRKTEEVIRRAEKAGVPREDLEELADRLRKNNKRLEELVKELIDRLRRLLEDLKRRIEKYAEDLKRELAELRRVKDEKVIEELKRKLEEENKRLKKVVEEIAKTLKDLLDEVRRRIEDSLRKLEELLERVERKTR

SEQ ID NO: 7651 - protein, 177 aa, Artificial Sequence; identical to SEQ ID NO: 7650
  Synthetic

SEQ ID NO: 7652 - protein, 177 aa, Artificial Sequence
  Synthetic
SLLEKLEKLIRDIKRTVDKLLEDNEETIRRIIRDIERLLKRHSDETREVVRTLKERGVPDRRLEEVKRRLEKNNRDLEDEIRRVAEELKRSLKKLKEDIERLAKKLEDDLRELRRVQDKDVIERIERELRELLKKLKEDADRHNEDAERKLRRLRDTIRRSLKKLEEDLRRLSKEAE

SEQ ID NO: 7653 - protein, 177 aa, Artificial Sequence; identical to SEQ ID NO: 7652
  Synthetic

SEQ ID NO: 7654 - protein, 186 aa, Artificial Sequence
  Synthetic
SRVEETLKRLEDELKRIEEEVRKLLDELRRHLEENRRRTEKLLRELREELERVRERVEKGDRSEDELREELERIAKKLDDELRRHNEHLERSKKRLEDILRELEERIREVARRMEKTLEDLRREGVDEKLLRRLERLVREIKRRLEELLKRLADLVRELKKEHERLNRELEELVRRIKERLKEAEK

SEQ ID NO: 7655 - protein, 186 aa, Artificial Sequence; identical to SEQ ID NO: 7654
  Synthetic

SEQ ID NO: 7656 - protein, 178 aa, Artificial Sequence
  Synthetic
EEEERIKERLDRSVEELKKSADKMREEIERSEKKLKESADRVRKEIEDALRRIREEDRDKKELDEEIKRLRDRLREHERETEEENKRLRKRLEEHVRETEKNNERLRRELEKVERNGLEEDVVRRVEELLRRHEEVTKTINREIEELIKTHERSTRELNKEIKELIERLEETIKERTR

SEQ ID NO: 7657 - protein, 178 aa, Artificial Sequence; identical to SEQ ID NO: 7656
  Synthetic

SEQ ID NO: 7658 - protein, 178 aa, Artificial Sequence
  Synthetic
KDAEELERRLRKSAEDLKRSAEEMKKRLDKSREDVKRKVEEAKKIVEDLEEDLKKRDTDDELLERTLKTLEKILDELEKDLRDNNKRLREDVERHKKETEENNRRLRREVEEVERKGLSEEMVKRLRELLRTHEEITERINRKIEKLLREHEEETKRLLDDLRRLLEELRKKIEEEKR

SEQ ID NO: 7659 - protein, 178 aa, Artificial Sequence; identical to SEQ ID NO: 7658
  Synthetic

SEQ ID NO: 7660 - protein, 178 aa, Artificial Sequence
  Synthetic
DEEERIEEELRKSTEKLKESLDRMRRDIEKSAEDLRKSVEDVERDMRRLLEDIEKRDTDESELRDRIRRAEEDVRRHLRETRENNERLREKLEKHVEDTERNNERLRREVEKVERNGLDKDALERVRRLLERHERETRRINEEIERLIRRHVEETKRVNKRIKRLLDELKRRIEEKSK

SEQ ID NO: 7661 - protein, 178 aa, Artificial Sequence; identical to SEQ ID NO: 7660
  Synthetic

SEQ ID NO: 7662 - protein, 178 aa, Artificial Sequence
  Synthetic
SEEEEIKKRIDDARKELEESTREVRERLRDSMRRLDESLKRVEEEIRKLADDIRRREVDEELLKDTIRRARERLKRHERETEKNNKRLKEEVERHVEETKRRIDRLREEVEKLERNGLEEEVVRRVRELLKRLKEEVDRINDEIRKLLEDHKKRTEEVNETIKRLIDRLEEELRRRRE

SEQ ID NO: 7663 - protein, 178 aa, Artificial Sequence; identical to SEQ ID NO: 7662
  Synthetic

SEQ ID NO: 7664 - protein, 186 aa, Artificial Sequence
  Synthetic
SEVEKIIEKIRREEDRNRREVEEKLKRIREHVRRNEEDTRRIIRELRELLKEALDRLRRGDRSKEVLKRLVEKIVEDVKRLLDRHREHSERSVRELRKILEELRKHIKKTVDDLRKILRDVREKGADEKLLRELEELIRRVKKRHDELLKEVADLVKEVEDRHRKLNEELERVAREIEETLKRELD

SEQ ID NO: 7665 - protein, 186 aa, Artificial Sequence; identical to SEQ ID NO: 7664
  Synthetic

SEQ ID NO: 7666 - protein, 179 aa, Artificial Sequence
  Synthetic
SEVETLLDKIRRDNEDLNRRVREELERIRKADEDVNREIEKVLRDIEEAIRKLKRDRLDKDKLKKTLDDLRRRVKEIEDKLREHIKRLEDRLRKIKEDAERHIRELEKRIRDFKERRKEADELVRRLEKILREHEENIKRIVEELERLLEEHKKNLEDLKRRLRDILRKVEEELDRTRK

SEQ ID NO: 7667 - protein, 179 aa, Artificial Sequence; identical to SEQ ID NO: 7666
  Synthetic

SEQ ID NO: 7668 - protein, 179 aa, Artificial Sequence
  Synthetic
SETEELVKKIDKRDKEVKERAKRVVDEIKERDKRVNEEIEKVLRDIERTIKKVREDRLDEDELRRVLEELERRIREIEDRLRRHIEELKRKIDKTKRDLEKHIKDIEDELREVKEKRKEAKEMVDRLRELLERHEKTIRDLVRTLEELLERHRKNIEDLVRELRELLDRAREELKRTAD

SEQ ID NO: 7669 - protein, 179 aa, Artificial Sequence; identical to SEQ ID NO: 7668
  Synthetic

SEQ ID NO: 7670 - protein, 182 aa, Artificial Sequence
  Synthetic
SDIEEALKKIKKMTRELREEIKKTEEESERRAKELEKEVRDYLRKVEEEAKRLKDTKASTEELRRTLERSREESEEILRRLEKTHRDHKRKLDEIKKKLKDVNEKIEREIRKILKDKGEDEDIRRVLEELKKVLEENNRVIEELARRLDELNKKLRELLERIKKTLDDLNKRLEKLIRDTEK

SEQ ID NO: 7671 - protein, 182 aa, Artificial Sequence; identical to SEQ ID NO: 7670
  Synthetic

SEQ ID NO: 7672 - protein, 182 aa, Artificial Sequence
  Synthetic
SKIEKMLRDIEKKTKELEDEIREALKRLREIAEKLKDEVEKYIRELRELLKRLAETKSSDEDLKRELKKSEDRSREIVKKLERVIEKVEREVREIKKKLETTNREIEKEIREILKRDGEDEKIREALERLRKILRENNEVIRELVERLRKVLEDLKRTVKTIEDRLRKVNEDLKRLIEELER

SEQ ID NO: 7673 - protein, 182 aa, Artificial Sequence; identical to SEQ ID NO: 7672
  Synthetic

SEQ ID NO: 7674 - protein, 179 aa, Artificial Sequence
  Synthetic
SEAEKLIEDIKKLIEDHKKRTKELIDEIEEDIKKHREDVERLLRDIERLIEELERENSKDDRVVEEVEDSLRKIKRTLEELVKEHRKKLKEIKEDLKRDLDRVEEVLKRVEDDLRRRDTSEEVERKVREAVKDVRRVLDESRRRLDTAIRKVEEDLRKSREDLERAVKKLRDVLEELKR

SEQ ID NO: 7675 - protein, 179 aa, Artificial Sequence; identical to SEQ ID NO: 7674
  Synthetic

SEQ ID NO: 7676 - protein, 179 aa, Artificial Sequence
  Synthetic
SEVEKLERKTEKILKDLKDEVKRAEEETRRILEELKKMLEDMEKRTREILKRIRDLARDGRSRREDLERILRRHNDEIRKIKERLEEKLERHNRKIKRIDDELKKTDDEHNRELDEAKKRGVSEKKLRELNTELTRLIDEIRKRLEELNERLRKLVEEIEERLRRLNEELKRLVEEIRR

SEQ ID NO: 7677 - protein, 179 aa, Artificial Sequence; identical to SEQ ID NO: 7676
  Synthetic

SEQ ID NO: 7678 - protein, 178 aa, Artificial Sequence
  Synthetic
KELEDTAEESKRELEKIRDEVRKEEEESEKLLRKIEKELREYAEKTRRILEKLRRDQLDKDELRRTLEEHRRETKELRDRLERTLERHEKRSEDIREKLKELLRRHEEKSEDELRKRPDEEVARLLKKLNDELRRLIREIEERLRKLNDDLRELIERVEERLRRLNEELEKVIRELET

SEQ ID NO: 7679 - protein, 178 aa, Artificial Sequence; identical to SEQ ID NO: 7678
  Synthetic

SEQ ID NO: 7680 - protein, 178 aa, Artificial Sequence
  Synthetic
DEVEDTERRSKKKLEELEEELRRTATESKRTLEELKRRLEDEERRSRDALRRLKEANLDEDKLRKVLEEHRKRSKELKERLEEDLRRHRKKSKELKDRAEEALKRHREESKRRLDERPDEEVKRRLERLNEEIEKLIRDIERTNRELNKELEDLIKEIEDRNRKLNEDLRRLIDELRK

SEQ ID NO: 7681 - protein, 178 aa, Artificial Sequence; identical to SEQ ID NO: 7680
  Synthetic

SEQ ID NO: 7682 - protein, 182 aa, Artificial Sequence
  Synthetic
SELEEIAREVKETSKRHEEHVRRSEEEVKKTLKRLKEHVDKSSEDAERTLEELERRLRRDGKDERLEEELDKTIKRLEEHVKDNIRKLRETLDRLRRHIDRNRKESKRLLEELKKRIDEVRKRNVRDDELRRLKEELKENIERAEESHKELADRLRELIKRIKERHEELLRRLRKLLEEIRK

SEQ ID NO: 7683 - protein, 182 aa, Artificial Sequence; identical to SEQ ID NO: 7682
  Synthetic

SEQ ID NO: 7684 - protein, 178 aa, Artificial Sequence
  Synthetic
SAEEDLERLIRALKKVLDDHERLLRELLRRLEEVVRRHKELLKKLNRDLEEVLKDIKEKKRDKRELEEELKRRLERHRRESEKSKERVERALREVKKKLEKSIRKLEEELRKVEEKLRKDGATDETDKEVRDTIRRIRKHSREVAEEVRKIIEELRRHSKKMADDSKRTIDELRERAK

SEQ ID NO: 7685 - protein, 178 aa, Artificial Sequence; identical to SEQ ID NO: 7684
  Synthetic

SEQ ID NO: 7686 - protein, 185 aa, Artificial Sequence
  Synthetic
KVEEELDRLLKEIEKIIEEHRKKNKKLNDDIRRLIEEHERDLRELLKELEKLIRDLKKDLRDVEKLKRELEEILKRLAELIEESKRRLDDELRRHEKRSRDSVEKLERELKKLEDELRRLKEEGIDDRAVEEVRKRIEEILKRIRDNSKRVEEETRELLERIRRNSERLRRDVERLARELEEKKR

SEQ ID NO: 7687 - protein, 185 aa, Artificial Sequence; identical to SEQ ID NO: 7686
  Synthetic

SEQ ID NO: 7688 - protein, 178 aa, Artificial Sequence
  Synthetic
SDEERLEEKLRRVEREVEKKLKRLKEELEEYARRVKEMSDRHREEVERFEEEVRRRGGGGEDLDRRIRTLKKRSEELLRESEKRSEEIIRRLEKTLRDLEREVDKIRRELKEELERKDDDTLRKLMEKIKRALEELLKRLEDLVRRIEEELRRLNEELRKNIREAEERLRKLKEDAER

SEQ ID NO: 7689 - protein, 178 aa, Artificial Sequence; identical to SEQ ID NO: 7688
  Synthetic

SEQ ID NO: 7690 - protein, 180 aa, Artificial Sequence
  Synthetic
SADEILKEIEDTIRKLIEDNKRTLEEHERRTRKLIRELRELLKRHKTESRRLAEELKKDGDKDLSEEIRRIIEKLKKDNEKLERDVRRLEKKMRDDNRKLKEDNKRVAEEMKKTLDKLKKDRVSGEEVRKRLEELKKKVERENRRHREHLKKVAKEVKRTLDEIRRHLEEVKERVKRARD

SEQ ID NO: 7691 - protein, 180 aa, Artificial Sequence; identical to SEQ ID NO: 7690
  Synthetic

SEQ ID NO: 7692 - protein, 172 aa, Artificial Sequence
  Synthetic
SEEEELKRRVDEVRKRTKEIIEELKRHVDRNERTVREIIKRLEEEVRRVAEKVKRGELDREELRELIKRIDEKLKKTLDDVRKHLEDSLRRIEDILRRHEEESKKIEDDMRREVKNSKVVEDVRRTLKRLNDELRKVVKDARELHERLLRDLKRVIDRIRERLKRLLDEAEK

SEQ ID NO: 7693 - protein, 172 aa, Artificial Sequence; identical to SEQ ID NO: 7692
  Synthetic

SEQ ID NO: 7694 - protein, 180 aa, Artificial Sequence
  Synthetic
DEVETLAREVKKSNDDDRRKTKKTADDVEKKLEDLKRRDEEVRERVEEDLKRLREKVKGDELRRIVEEIAREVKELLDRSKDLSRRVAEELRRLLRESKEIVDRVARKTEELLKEVRKDDKKEVLDRVADEIRRLNKETNDVDRDVRRRIDKLVEDVKRVTEEVSKEIKRLAEEVDRRIT

SEQ ID NO: 7695 - protein, 180 aa, Artificial Sequence; identical to SEQ ID NO: 7694
  Synthetic

SEQ ID NO: 7696 - protein, 180 aa, Artificial Sequence
  Synthetic
DEVEELKRKVRESNKRDEDETRRTEERVEREVRRLEEEVKDVKRKVERELERIAREIKGDELRRIVEEVAKRIDDLIRRIDEIIKRVRKEVKRLLDESRKIVKDVARETEKLLRDLERDDKREVVKEVEDRIRKLNRETNEVDKEVRKRVDDLIRDLERVLREVKEEVDRLVRKVEEDAK

SEQ ID NO: 7697 - protein, 180 aa, Artificial Sequence; identical to SEQ ID NO: 7696
  Synthetic

SEQ ID NO: 7698 - protein, 187 aa, Artificial Sequence
  Synthetic
DEVEELVKRAEDILERLKREVDRLIKESEDLNRRIRKHVEDTIKEVRKRLEELRKEVEDRATEEVRKVVDELRKEVERLVRESREVVKRSLEISKRLAEEAKEVLERLRELVKKLVDELRKKKDDERAKDLLKEVVERVTRVAKAVKEKLDEVVRESREVIKRVEEKNRRVLEEVERVARELKKAID

SEQ ID NO: 7699 - protein, 187 aa, Artificial Sequence; identical to SEQ ID NO: 7698
  Synthetic

SEQ ID NO: 7700 - protein, 187 aa, Artificial Sequence
  Synthetic
DEVEELVRRAEEELKRLRKHVEETVERSKKLNDEIKKHVDRTVKEAKDELRRLREEVKKRGDERVEKVVEEVDKLVEELVRTSKEVVRDSLRKSTELAKRSRDLVDEVRRLVEELVKELRDKKDREEAKKLLEDVARRVRKVAEELKKKNKELLETSDRVIEKVRKKNEDLKRTVDEVARRLEEAIK

SEQ ID NO: 7701 - protein, 187 aa, Artificial Sequence; identical to SEQ ID NO: 7700
  Synthetic

SEQ ID NO: 7702 - protein, 178 aa, Artificial Sequence
  Synthetic
SEVDEVVERLRRISEELDRRVKKLVKDARRISKELEEAVRRVVKTAKDANKELRKEVRERRTDESVVRENHKTIEDVVRELEKVLEEDRKTVEEVVRAARKVVEDDEKTVEDIVRLAKAGVDVDTLAEDAKRSARETEEILRRLVKKLEESARDTKRIIDELDKELKDSNEEVRRRLK

SEQ ID NO: 7703 - protein, 178 aa, Artificial Sequence; identical to SEQ ID NO: 7702
  Synthetic

SEQ ID NO: 7704 - protein, 174 aa, Artificial Sequence
  Synthetic
DEAEEVVKDVEREVRRLEKENRDLVERSKRLVERLEKESRDLVRKSREDVKRLREKGVPEDVVRKLEEVSRDSARRLKESNDESRRVSDESKKKLEESLEETRRVVDRVRKLLREGVDEEELRKDVERVVKKDEDITDEVRKENDEVVKKNEDIIDELRKKNEEVLRRVDEEAR

SEQ ID NO: 7705 - protein, 174 aa, Artificial Sequence; identical to SEQ ID NO: 7704
  Synthetic

SEQ ID NO: 7706 - protein, 174 aa, Artificial Sequence
  Synthetic
SEVEDVVRKVRELVKRLRDESRRLVEESRRLVEELEKRSRDLVKTAEDIVRELKEAGVPEEAVDKLRKVVETLKDELRRSNEKSERASRESKDRLKKSNDESERVVREVEKLLRAGVDKDELDKEVKEAVKKNREIIRRLEKRNRDVVEENRKIIEDIEKKVRDVVREVRREAK

SEQ ID NO: 7707 - protein, 174 aa, Artificial Sequence; identical to SEQ ID NO: 7706
  Synthetic

SEQ ID NO: 7708 - protein, 184 aa, Artificial Sequence
  Synthetic
SSLEEVAERVKKLVRELEESTKTVEELVRRLVTELRKSTEKVRRDVDKLVKELEEIIRDVKDKRELERVIREVMKRIEEILERNSRLIDEVMRRLEKILREDEKLIEDVARRAREIAKRLLDERDTREVKRLVEEVEKLIERLRRESRRLIERVRREARELKEESRRLEEEVRKKIEELARRVK

SEQ ID NO: 7709 - protein, 184 aa, Artificial Sequence; identical to SEQ ID NO: 7708
  Synthetic

SEQ ID NO: 7710 - protein, 184 aa, Artificial Sequence
  Synthetic
RDLEEVKKKVDKLVRELEESSKKVRKDVEDLVKELEDTTRDVKRLVEELVTRLKRIIEKVDRKKDLRKVIEDVAEELTRIARRDKELIDRVAEELEEILKRNTDLIKKVADELRRILDELLRKRDTREVKKIIEDVEREMERLERDSRRIVKEVREEADRLRKESKRLEEDVKRKLKELRERVN

SEQ ID NO: 7711 - protein, 184 aa, Artificial Sequence; identical to SEQ ID NO: 7710
  Synthetic

SEQ ID NO: 7712 - protein, 184 aa, Artificial Sequence
  Synthetic
DELERVKEKVDKLVAELEKSTDDVKKKVEDLVRELERSSEKVKKDVDRLVKELEDIIRRVKDKDRLLRTIREVAKTLEKILEDNKRLIREVARRLRRILEEDKKLIEEVMRRLEEILKDVIRKRDTREVKKVVEDVRREAKRLKERSKKLEDEVRDLLRELEKRSDEITKRVREEMKRLEDEVK

SEQ ID NO: 7713 - protein, 184 aa, Artificial Sequence; identical to SEQ ID NO: 7712
  Synthetic

SEQ ID NO: 7714 - protein, 184 aa, Artificial Sequence
  Synthetic
DELEDVKRRVEKLVRELEESSKEVRKRVEDLVRELERTTEEVEKLVRDLVRRLEDIIRRVKDKDDLRRVIERVMKELERILKEDKDRIRKVMEDLKRILEENDRRIKRVAEEIRKILEELLRRRDTEDIKRLEEDVERKLRRLEEESRRIVEEVKKEAERLKERSERLTKEVRELADRLAREVD

SEQ ID NO: 7715 - protein, 184 aa, Artificial Sequence; identical to SEQ ID NO: 7714
  Synthetic

SEQ ID NO: 7716 - protein, 184 aa, Artificial Sequence
  Synthetic
RELEEVKRRVERLVRELEESLRRVRKEVEDLVRDLERVSKEVEDTVRELVRRLDEVIRRVKRKEDLLRLIDKVAKELEKILKKSLDDSRRVMERLEEILERNSRLIKKVMKEAEDILKELIDRRDTREVKTLVEEVRRLLEELERRSRKLVKEVRDEAERLKREDEEIIREVRELLKELERKVR

SEQ ID NO: 7717 - protein, 184 aa, Artificial Sequence; identical to SEQ ID NO: 7716
  Synthetic

SEQ ID NO: 7718 - protein, 181 aa, Artificial Sequence
  Synthetic
DELEEVKRTVEELLERLERVNKDVKRKVKELLDRLREVDDRVKKEVKRLIEEVKNVDTDKKDVEKIVKEVEKTLKDLVRRVEEINRRVAEDLRRLLEEVERINDEVRRRLERLIEELLKDRDTEEIKKLADRVRRELKRSEDHTKRLAEEVRKDLEESRKHTKELEKEVEEELRRLKKEVR

SEQ ID NO: 7719 - protein, 181 aa, Artificial Sequence; identical to SEQ ID NO: 7718
  Synthetic

SEQ ID NO: 7720 - protein, 181 aa, Artificial Sequence
  Synthetic
SELEEAAKAVEKLAREAEKSSEDARRAVERLAREAKRANDEAEKAVRELAERARRADRREEEADRIAEEAAKEAERLAKEAKEINDRAAEEARRLAEEDREVAERAAKEAERLAKELRDTRDAKEAKKLAKEAREIADRLRRESEEIAREAEKIAKELADHTRELAERARRIADKLKKDVK

SEQ ID NO: 7721 - protein, 181 aa, Artificial Sequence; identical to SEQ ID NO: 7720
  Synthetic

SEQ ID NO: 7722 - protein, 178 aa, Artificial Sequence
  Synthetic
SAEDLIREVRRRVKELERKLEEILKRSEDLTRRLREEAERILKESRDRVRKLEEDARREAREDKDLVEKVIRELEKAIRHDEEVVRRVEELLKKVNKEVRDVIRKIRKLLKEVDKELEKRGESKEVIKKIRDILRRLSEELEKVLEDSERILRRLEDELRESLKRTEEILRELRRELK

SEQ ID NO: 7723 - protein, 178 aa, Artificial Sequence; identical to SEQ ID NO: 7722
  Synthetic

SEQ ID NO: 7724 - protein, 176 aa, Artificial Sequence
  Synthetic
SVDEVLKEIEDALRRLKEEVERVLKENEDELRRLEEEVRRVLKEDEELLEELKRKVREIDEVDRVVDEIRKLSREILEKVKKVVKEIRDSLETVKRRVDDVVRRLKELLDEIKRDNDEKKIRDVAKEIRDRLKELEEEIEEVTRRNKKLLDDVEEEIRRVHEKTRRLLETVLRRAT

SEQ ID NO: 7725 - protein, 176 aa, Artificial Sequence; identical to SEQ ID NO: 7724
  Synthetic

SEQ ID NO: 7726 - protein, 175 aa, Artificial Sequence
  Synthetic
RLEEVVEEMERLIRDLEKKVEDARERNERLVRESRKKAEELIKELRKLLRELEEEIRKGSKKVVDEIRRVVEEVVKEIKKLLERNEEVSREVEERLRRLVEEIKRVVEEAIKLLREGIDVETVLKRVREVIRRVEETIKRLDDRNKESSEDVERRLRELLREVREIIKRVREKTR

SEQ ID NO: 7727 - protein, 175 aa, Artificial Sequence; identical to SEQ ID NO: 7726
  Synthetic

SEQ ID NO: 7728 - protein, 175 aa, Artificial Sequence
  Synthetic
RLEDVVRESKKLVEESERRVREAIRRNEELVKDSEREAREVIEELKELLRRLEEELKKGSEEVVEEIRRKIKKVVEDIKRLLDRNREVSEKVVRDLERLIREIREINRRAVELLKRGVSVEDLLREVRRVDKEANEKIEELDRRNKKSSDDVKKKIRDLKREVKKVIDEVRERTR

SEQ ID NO: 7729 - protein, 175 aa, Artificial Sequence; identical to SEQ ID NO: 7728
  Synthetic

SEQ ID NO: 7730 - protein, 181 aa, Artificial Sequence
  Synthetic
SELEKVLTESRDVVRRATKRLREVHKKTKEVVDRLREKLKRVEDEVRKAVRELEEKVRDEDVVRDVARRLEELLKELERVVREIERELERVIRETEEVIKTIDELLKRVNERVRKVIEEKKDKRLEDVLKESKKLTDDLRKDAKRVLDEDRRLVEELKKELDEARKRVEDLVREVKDRARR

SEQ ID NO: 7731 - protein, 181 aa, Artificial Sequence; identical to SEQ ID NO: 7730
  Synthetic

SEQ ID NO: 7732 - protein, 185 aa, Artificial Sequence
  Synthetic
DEVEEVRKRVEEVIRRNEERIEDVRKKVEDVIRRNEKLVDDVRREVKEVLDKLRELLERRKERVKDVVTEVEKRIRKLLDELRRSSEEVKRLIDELLRRAEKSSREVKETIDRLIEDLKRKLKDDKETVDEVAERLKKLLEESERRVKRVLDEARKLVKRSEDRSKKVLDELEELLRRVRKEADK

SEQ ID NO: 7733 - protein, 185 aa, Artificial Sequence; identical to SEQ ID NO: 7732
  Synthetic

SEQ ID NO: 7734 - protein, 188 aa, Artificial Sequence
  Synthetic
RELEELLEEARRSSEEVKKILKKLKKEVDESSERLERIIEKLLRDAKRVADEVRDILEKKREDRDVVRKVIDELRKVIEEIVKRLRDAVRENEKSIRDVIRKAEKVVEENERVIEEIVKKAKRDLKDDEERVKRVIDELRELLRRSREEVKRVVEELKKELERSKREVERVIDELRRLLETVEKEIRD

SEQ ID NO: 7735 - protein, 188 aa, Artificial Sequence; identical to SEQ ID NO: 7734
  Synthetic

SEQ ID NO: 7736 - protein, 188 aa, Artificial Sequence
  Synthetic
SELEDLKRRIRKSSEDSKKSLEDSDRTIEESSRDSSRTARESERKLEKVLREVDDILKKVKDDKDVVRRVLERLRRIIKRLVDENKRSVEENKRSIDELVERNKRSVEENERVIKEIVDRAKRDASSNEEDVERIVRELEELVRKSREDHKRVIDALREKLKKSREEHRRVIDKLRRELKRVEDEIRR

SEQ ID NO: 7737 - protein, 188 aa, Artificial Sequence; identical to SEQ ID NO: 7736
  Synthetic

SEQ ID NO: 7738 - protein, 188 aa, Artificial Sequence
  Synthetic
SILEKLEREVRKSSRESRESAKKSLREIEESSRRVEEELERLLREVRRVAEEVLDILRRKKEERETVKKVLEDLKRIIDKVVEDAKRVVEENRRVIEEAVRKNEESVRENEEVIDRVVKKARRDLDKRREEVKRIIERLRKLLEDSKRDHEEVIKELRKLVEDSRRRVEEVIRRLRELLKRVADELRR

SEQ ID NO: 7739 - protein, 188 aa, Artificial Sequence; identical to SEQ ID NO: 7738
  Synthetic

SEQ ID NO: 7740 - protein, 189 aa, Artificial Sequence
  Synthetic
DELEEALRRLKKIVEDLARRNEELLKELRRDSKRLKDEIKRVVDELRDIVRRLKEELDRVKEREEVARRILERLERVIRRLVEILKALVDHNKKSIERVVEEAERSNEEVERVVREVVDEARKRTRDERLERRVREIIRRAEELLERSRKRSEEIAREAEKSNRELEDAVRRIIRELEELLEKLERDAR

SEQ ID NO: 7741 - protein, 189 aa, Artificial Sequence; identical to SEQ ID NO: 7740
  Synthetic

SEQ ID NO: 7742 - protein, 189 aa, Artificial Sequence
  Synthetic
DEVDKVTRELREIMRKLKEDDKEVLDRLREDSERVERTNREVEKRLEAIIRDLEEKLRRKREDKDLVKRLLDELRRVVEEVRREVEELNEHNERSIRDAVRKSRELVERIRDVVREVDERLKRLTRDERLKEKVDRIREEAKRLLEELEKHVRDSEREAEDSNRRSRETSEEIIRRLRKKVKELEDKVR

SEQ ID NO: 7743 - protein, 189 aa, Artificial Sequence; identical to SEQ ID NO: 7742
  Synthetic

SEQ ID NO: 7744 - protein, 189 aa, Artificial Sequence
  Synthetic
SEVDKVEEELERIVKELKDRDREVLKRLRDDSERLVRELKKVAEELRKIAKDIDERLKEKKEDKDFVEKLVEELKRVIEEVVRRLEELVKHNNRSIEEVVRISERLVEDLERVVRRVEDTLRKLTRDERLKDRVDKIREKARKLLEELKKHVDDSIEEAKRSNEELRKTVEKIIREAEKLLRDLKEAVK

SEQ ID NO: 7745 - protein, 189 aa, Artificial Sequence; identical to SEQ ID NO: 7744
  Synthetic

SEQ ID NO: 7746 - protein, 189 aa, Artificial Sequence
  Synthetic
SEAEKVERELDKIIRELKETDKKVLEDNRRVVEKIEREMERVLRELERIMKELKEELDRKREDKEVLRRLVETIRKVVEEVEETLRRLLEESKRSSEAVERISKKLLEELREVVERVVRRLEELRRDERLKEKVDEIRKRAEELVKELARHVEKSIRESRELDKRLEEKVKEIIRRARELLEDLRRKAE

SEQ ID NO: 7747 - protein, 189 aa, Artificial Sequence; identical to SEQ ID NO: 7746
  Synthetic

SEQ ID NO: 7748 - protein, 179 aa, Artificial Sequence
  Synthetic
SEAEKVRREVEDLIRTLEEVVRKSSEEIKELLRRLREVVERIRDTTRRLIEEIEKKVKSRKADEIRRLVKKAVDEDEEVIRRVEELVRRVLEKNKEVVRRVEELLRRVVEKIEDVRRRGGREDLERVLKEVREIVKRLLKRLEESLRDVRRIAEELREMLKRSLKRSEEIIRKLLEDVR

SEQ ID NO: 7749 - protein, 179 aa, Artificial Sequence; identical to SEQ ID NO: 7748
  Synthetic

SEQ ID NO: 7750 - protein, 180 aa, Artificial Sequence
  Synthetic
DEVDTVDEKVKRLAEELRKRVRESKERTKKLARDLREAVKESLKDSERLAEDLRRKVRDEELKRRVEEVVRESRRLNEEIRRIIEKVVEDMKDSNRRIEEIIEKVVREVKELLKRVRDDDTREKLERVEREIEKLVREVEKILRDIHRDNERVVREVERRLEEITRRSRELAKRVEDETR

SEQ ID NO: 7751 - protein, 180 aa, Artificial Sequence; identical to SEQ ID NO: 7750
  Synthetic

SEQ ID NO: 7752 - protein, 180 aa, Artificial Sequence
  Synthetic
DEVDEVARKVERDAERLEDLNRRSEETSRRLAEELRRLNERSERETERLAEELRREVREERLRKLVEDVVREVRDTNRRSKEISEDVVRKSERLNRESKRITKEVRREVKKLLDEVRKDDDKKKLEDILREIEKLIRRVEEISRRILEESKRLADEVRKITKKLHDDNKRLADRVKEETR

SEQ ID NO: 7753 - protein, 180 aa, Artificial Sequence; identical to SEQ ID NO: 7752
  Synthetic

SEQ ID NO: 7754 - protein, 180 aa, Artificial Sequence
  Synthetic
REIDEIKERVDRLAEKLRRDMERSTRESRKLVEELKERAKRSKEETTKLAEELRRRVRDEEVRRIVEEVVEKVRTTNEEVRRIIEEVVKRLKETNDRVREIIEDVVRRVDRLLKEVRKRDEKEELERILREIKRLMDEVKRILEELLKTNKKLIDEVRKRLEELHKRNRELVEEVARRAN

SEQ ID NO: 7755 - protein, 180 aa, Artificial Sequence; identical to SEQ ID NO: 7754
  Synthetic

SEQ ID NO: 7756 - protein, 183 aa, Artificial Sequence
  Synthetic
SEVEAVEKEARELVREDERRDDEIEEDLRRLLEENRRKDDKVEKEVRELLKRLRDKVDDRADERLRELVEDVARKVKRLLDESRRSSEEVAERLKRLLDESRKTSKEVMEILKELLERLRRVSDKRDVKRVRDTVRDISRKNNRTTEELLKRVRDISRRNKEITEELLRRIREIAEDLARKLD

SEQ ID NO: 7757 - protein, 183 aa, Artificial Sequence; identical to SEQ ID NO: 7756
  Synthetic

SEQ ID NO: 7758 - protein, 183 aa, Artificial Sequence
  Synthetic
SEVEKVEEEVKRLVEENERRVRESSREVEKLLREDAERDERASRELKKLLEKLKRAVDKRADERAEETVRDVARKLEDLVRRSKRSSDEVAKALEKLVRDSDKSSKEVAKRLEDLLRELRKVSDKRAVEKVLRTARKISEDNKRKNDEISERLRRISERNNRESEKLLRDLEKIIEDVERKLE

SEQ ID NO: 7759 - protein, 183 aa, Artificial Sequence; identical to SEQ ID NO: 7758
  Synthetic

SEQ ID NO: 7760 - protein, 183 aa, Artificial Sequence
  Synthetic
REVEEVEKKARELVERDERTDERIRKELEDLVRENKKEVKRVRETIERLLRDLKKAVDERGDEDVRRTVDKVAREVEELIKEVDRTSKEVEELLRRLLKRSEETSREVMEILRRLLEELRRVSREEDVKRVEKTVEDISRKNNEITKRLRDTVRRLSEKNRRDLEKALEDLKRIVDDVRRKIT

SEQ ID NO: 7761 - protein, 183 aa, Artificial Sequence; identical to SEQ ID NO: 7760
  Synthetic

SEQ ID NO: 7762 - protein, 183 aa, Artificial Sequence
  Synthetic
SEVEEVEKEARELVKRDEDRDKEIEDKLRELVERNRRLVRKSSEELKKEIKRLKDEVDRRADERVEDTVRKVMEELKRLVEESRKTSEDIARKLDELVKRSKKTSKEVMKTLRDLLERLRRVTEKEKVEKVLKEVRDISRENNKTTDTLEKEVRRLSEENKRRNEEVTRRVRKILEDVERKAR

SEQ ID NO: 7763 - protein, 183 aa, Artificial Sequence; identical to SEQ ID NO: 7762
  Synthetic

SEQ ID NO: 7764 - protein, 183 aa, Artificial Sequence
  Synthetic
KEVEDVEEEVKKLVEENKKAVDDSREEVRKLLEENKKAVDDSRKEVEKLAKKLKEAVDRRADEDARREVEEVVRRARELLETSRETSDRVAKELKKLVDESEESSKRVADELRRLLRELRDVEGKEKVKRVLDEAKKISDDNKRKNEEVSKELEKISRDNLKLNEDITREIREIVERVDERLE

SEQ ID NO: 7765 - protein, 183 aa, Artificial Sequence; identical to SEQ ID NO: 7764
  Synthetic

SEQ ID NO: 7766 - protein, 183 aa, Artificial Sequence
  Synthetic
SEVEKVEKDLRKLIKDNRDSVRRVKEEAEKLVEENRRSVEEVRRTIKELLERLEKLVRDRGTEEVKKTVEDVMRRVEELLRRVRETSEEVARRLEKLVEDVRRTSEDVMRRLKKLLEELRRVSDKRLVDKVRRELEKILRDDNRIIKEVLDTVRRLSEDNLKKVKDVLEELTRIAEEVRERAR

SEQ ID NO: 7767 - protein, 183 aa, Artificial Sequence; identical to SEQ ID NO: 7766
  Synthetic

SEQ ID NO: 7768 - protein, 178 aa, Artificial Sequence
  Synthetic
SKVEDLLEKLERELEKNRKRTKELLKRAEESSEDIREKVRELRERLERLIEELERRGVPGEVVEEVERVVRRIDRELREVVRKNNEVVRKIVELLKRSDEKVKEVVKRIADLLEEKRDDDKLLEDLERLVRRVLDEARKINEELDKRVKDSVREVEKRLRELEEEVKRIIEEVEKKAQ

SEQ ID NO: 7769 - protein, 178 aa, Artificial Sequence; identical to SEQ ID NO: 7768
  Synthetic

SEQ ID NO: 7770 - protein, 173 aa, Artificial Sequence
  Synthetic
EELERLARIVDEAHKRSRDLLETSKREVEDAIDEIRARLEDSRRLVEEVTDEIRRIDKREDVRRLLEELKDHNRRVVEDVERLLRELERRNEEVVRRSKELLDDLERIIDSLDDSERLKELKKRLRDLIEENDRRAKESTKKIRDLAKELRERARRTEEEIKTLMKELEDRMK

SEQ ID NO: 7771 - protein, 173 aa, Artificial Sequence; identical to SEQ ID NO: 7770
  Synthetic

SEQ ID NO: 7772 - protein, 173 aa, Artificial Sequence
  Synthetic
KELEDLRREVEEIHKTSERLLRESDKLVEEAIRRIEELLERSKDTVTKAADEVRKADKREDAERLAKELLEINEKVVRDAERLVTEVRRHNTEVVERSKELVETIERRIDSLRDDERLKKLKEDVKRLIEENRKRAEDTKRKIEEEIRRLKEEADRTSEEIKKRADDLRRRAD

SEQ ID NO: 7773 - protein, 173 aa, Artificial Sequence; identical to SEQ ID NO: 7772
  Synthetic

SEQ ID NO: 7774 - protein, 177 aa, Artificial Sequence
  Synthetic
DELEEVDKLVKKVHEDSRKLIEDVDRKVREVVERSDRIIETVEELVERVITEVEDMLRKGESDEKVRKLAEELKRILEESMKTSEDLVRKLREIVRKSVEDSKRLVDELRDLIRRLRKDDRLRKVEKRIEDLARENEKRNRDLERKIEKLADESRKKNEDLKKRIEDLAKRLKDEAD

SEQ ID NO: 7775 - protein, 177 aa, Artificial Sequence; identical to SEQ ID NO: 7774
  Synthetic

SEQ ID NO: 7776 - protein, 177 aa, Artificial Sequence
  Synthetic
SSLETVREEVRRVKEESDRIIKEVRDRVEEVHKTSKRIIEEVEERVERVIREVREMLRRGETEEKVEKLVREVEKILEDSRRESERLAEEVRRILKESMDRSDELVRRLEELLRRLEKDERLDRVVEDIRRLAEESRRKNEELRKEVEELVKRNKELNEKLKKKVKELAKELRDEAK

SEQ ID NO: 7777 - protein, 177 aa, Artificial Sequence; identical to SEQ ID NO: 7776
  Synthetic

SEQ ID NO: 7778 - protein, 177 aa, Artificial Sequence
  Synthetic
DDLETVKRLVDEVIRTSEELIDTVRRLVEEVHRESERILKEVKKEVERVIREVEKLRRKGEDETKVRRLVEELEKILEEVVRRSRELVERLERIVRKSLEDSKRLVDDLRRLIAEMRKDKDLERVRKRIEDLAKELERRNRELEEDIKRLAKENEELARELKKEIETLAKRLEDEDR

SEQ ID NO: 7779 - protein, 177 aa, Artificial Sequence; identical to SEQ ID NO: 7778
  Synthetic

SEQ ID NO: 7780 - protein, 177 aa, Artificial Sequence
  Synthetic
SSLEEVDRRVKEVHKESDKIIREVDKRNKEVNRRSEEIIEEVEKTVEEVAKTVDDMLRRGEDERKVEKLVEELERIVEDSVRKSEELARRLKEIHKRSVEESERLAKELRDLIRRLEKSRELKRVKEEIDRLVEEDKEKNERSDKRAKETVDKNKKLNDDLEEKIRRLAEELRRRKK

SEQ ID NO: 7781 - protein, 177 aa, Artificial Sequence; identical to SEQ ID NO: 7780
  Synthetic

SEQ ID NO: 7782 - protein, 184 aa, Artificial Sequence
  Synthetic
SSLKEVERLAKELHEKSERIIREVEKLSRELHKTSEKIIRDVARRVKKLIDDVREVITRSGDEEVVRDVRRLVEEVVKEARDILDESLRVSEDLAEKSRRINRRSLEESKKIAEDMREILRRVEPDEELEKLRKRVEDLVRRNEEENKRTLRESEELVKENRKRNKELRDRVEKLVEELRRELK

SEQ ID NO: 7783 - protein, 184 aa, Artificial Sequence; identical to SEQ ID NO: 7782
  Synthetic

SEQ ID NO: 7784 - protein, 184 aa, Artificial Sequence
  Synthetic
KKLEDVKELVERLHRESEEIIRDVERRSRELAETVKKILEEVRRLSKKLVDEVREVIKRSGTDEVRDDVRRLVEEVADRSRKINKRVEEVVERVVKRSKEINDTSLKRSEEIARELKELLKRVDKDKDVDRVDREVEELVKENRERNKDTKRESERLAEKLRRDVEKSLRDSERLVKELRDRLR

SEQ ID NO: 7785 - protein, 184 aa, Artificial Sequence; identical to SEQ ID NO: 7784
  Synthetic

SEQ ID NO: 7786 - protein, 184 aa, Artificial Sequence
  Synthetic
KKLEDVKRLVDKLVTESEDIIRRVTEESRRLVEESRRVIEEVKKLSEELVRRVEKVIREKGEERVAKDVREEVERVVKTSRDINRETTELSKDIVRRARKINEDSLRVSEEIARELEKLLEDVDKDERVKKVKRDVEKLVRDSRELNKRTREESERLVEESERLNEESRKESERLVRELREKLR

SEQ ID NO: 7787 - protein, 184 aa, Artificial Sequence; identical to SEQ ID NO: 7786
  Synthetic

SEQ ID NO: 7788 - protein, 184 aa, Artificial Sequence
  Synthetic
SKLEDVERKVRELVRRSKRVIKEVERLVRELHKRSEDVLRKVKKDSRDLAREVKDVIRRKGTEEVAKEVRDLVEDVVRKSRKINDDVRKISEEIVKTLEKILKESLDLSEDIADKLRRLVDSVDKDKDVDKVRRDVEDLVRESRELNKRLKREVEELAKENRRRVEESRRESEELAKELRERLK

SEQ ID NO: 7789 - protein, 184 aa, Artificial Sequence; identical to SEQ ID NO: 7788
  Synthetic

SEQ ID NO: 7790 - protein, 187 aa, Artificial Sequence
  Synthetic
SSIEKVLRELEDIVRKIEERNKKSHDEVRRVVEEIKRRVKKSHEDVRRVVEKIDEDIKRKKDDKRVLKELLDTVKRVVERSKETSERLLREAEKAVRESKERSERSLRELEEMVRRATKRLVDERGKDDDEIRRVKERLDELIRRLEELIRRNVTELKRLIDDLRRLVEENVRRLKELIDKLREDVK

SEQ ID NO: 7791 - protein, 187 aa, Artificial Sequence; identical to SEQ ID NO: 7790
  Synthetic

SEQ ID NO: 7792 - protein, 187 aa, Artificial Sequence
  Synthetic
SEIERVLEELKKIVRRIKEKLKESHERVREVVERLKRRNEKSHRDVRRVAERIRREIEKKKSDKDVLDKLLDTIRRVVEESKKDSKKSLDELRRVVKESKETSDTLLEELERAVDKVRKILVRERGKDDKDIREVKKEADRLIKELRDLIETNEREMKKLIDELEELIRDNARRLEELIKRLEEEVR

SEQ ID NO: 7793 - protein, 187 aa, Artificial Sequence; identical to SEQ ID NO: 7792
  Synthetic

SEQ ID NO: 7794 - protein, 187 aa, Artificial Sequence
  Synthetic
SELEKVLEEAKRVVDEIKKKLEESHKDNRRTVEEIKRRNKESHERLKEAVDKLKAEIEKKRSEEEVLRELLKELERVVRTSEELSRRSLDELRKSVERSKRTSKRLLDELRRVVDEVKKILVKKRGKDDDRIREIAEELDKLIRELEKLVKRNADESDKLLDELRKLVEDNEREAERLIKELEDEAR

SEQ ID NO: 7795 - protein, 187 aa, Artificial Sequence; identical to SEQ ID NO: 7794
  Synthetic

SEQ ID NO: 7796 - protein, 187 aa, Artificial Sequence
  Synthetic
SEIERVLRELEKIVEELKRENEDVHRRVREVVKKLKDENRKSHEEVKRMVDKIREEIKRIRKDKEMLRRLLETLKRVVERSERESEESLKELRRVVEESKKRSEESLERLRRVAKRVKERLVEERGKDDDDIRRAAEKVDKLIKELEDLIRRNAEELRKLIEELEELIRRNRERLKRLIEDLKRAVE

SEQ ID NO: 7797 - protein, 187 aa, Artificial Sequence; identical to SEQ ID NO: 7796
  Synthetic

SEQ ID NO: 7798 - protein, 177 aa, Artificial Sequence
  Synthetic
SEMERVEEEIRRLLKELDKKARDVHEADKELVKENRKLADEVERDLRRLLEELRRDVNVEEVLKKVEEVIDKVRKVVEEIEKLSKDSNEKTKRVIEKVKEDLERVLRRVEEIARNNVDKKAIEDVLRKIKKLVEDLKRRIEEVLRESEALNEDTKRLIEEVLRDVRRTIDRLKKEAK

SEQ ID NO: 7799 - protein, 177 aa, Artificial Sequence; identical to SEQ ID NO: 7798
  Synthetic

SEQ ID NO: 7800 - protein, 177 aa, Artificial Sequence
  Synthetic
SDMDRVEKELEELLRENEELAKDIHRRDKELLEENRELVRRAEEELRRLLEELARDVNKEEIKETVERVIRDLKRVAREIEEESRRSNEETKELVKRVLEKTRKVIEEVRKVAKDNVGKEVIKDVLRKVRKINKETKELLRTVLEKSEKLNRDTKKRIKDVLEKIKRLIDELRERAR

SEQ ID NO: 7801 - protein, 177 aa, Artificial Sequence; identical to SEQ ID NO: 7800
  Synthetic

SEQ ID NO: 7802 - protein, 172 aa, Artificial Sequence
  Synthetic
KEREDIEDRVRKLIEELEESVRRSNETVKKLLRELEKLLEDSNRSVEELARDLRRKVKSELMEKVERLVKDLLRLSDTVAKKIRDVVKRLLEKSNESVKEIKKLLEKLEKEIRDDGDEKVLRKVEKVVEDLKRHNRKVNEEIKRVAEKLKRELEEVNKDIRRMARKLEEEVR

SEQ ID NO: 7803 - protein, 172 aa, Artificial Sequence; identical to SEQ ID NO: 7802
  Synthetic

SEQ ID NO: 7804 - protein, 172 aa, Artificial Sequence
  Synthetic
SEAEKIAEDVERLARDLERLLKESNDTVRTLIEDLRRSVEETAKEVRDLIEDLRRRVKSDKARKVEEVVRDLLRIVEESAEEIRRVLERLLEISNTVAKEIRRVVKELKEIVERRGTEEVLKELKKVADELRRILEDVNRRIRKVVDDAREHNKKVVEDVRRVAKEARDRVR

SEQ ID NO: 7805 - protein, 172 aa, Artificial Sequence; identical to SEQ ID NO: 7804
  Synthetic

SEQ ID NO: 7806 - protein, 181 aa, Artificial Sequence
  Synthetic
DEVEELERRIEKLAREVKKEIKDALRRNKRLIDEVKKIIEDVNRENRRLMEEVKRLIDAGVPKEEITEIVERVVEEVRRSDEKVARIVEDVADKIRRTNEDLERIVRKVVDEVRKMLERLPRGDELRRIAKRVEDLAEELKRLLDKSRETSERLVDELRKLLRESNETSKELVKRLDDRRK

SEQ ID NO: 7807 - protein, 181 aa, Artificial Sequence; identical to SEQ ID NO: 7806
  Synthetic

SEQ ID NO: 7808 - protein, 181 aa, Artificial Sequence
  Synthetic
SEAEKLLKEAKRLADEAKKIIKRAHEENKRAADEAKKIIEEANRENEKLAREAKKLIDAGVPKKEAADIAKKAADEARRSDEEADRIAEEAARRAKETDERAEKIARRAAEEAKEAAKKASRSDEAREIEKRVRELAEELKKLARESNEASKELAKELKELAERSNKTSEDLAKELEDRAR

SEQ ID NO: 7809 - protein, 181 aa, Artificial Sequence; identical to SEQ ID NO: 7808
  Synthetic

SEQ ID NO: 7810 - protein, 181 aa, Artificial Sequence
  Synthetic
SEVERLLEEIKELAKRVKDIIKEVNKENKRLVDEVKDRIRKINEDNNRLVETVKELIRKGVPKEEIADIVRRVVKTAEDSNRKILRIAEEVVRTARESDERVREIVRRVVEEVRELLKRLPPGKELERIEREVERLADELRKLLEESNESTERLAEELERLVRESERDSRRLAEELKRRLD

SEQ ID NO: 7811 - protein, 181 aa, Artificial Sequence; identical to SEQ ID NO: 7810
  Synthetic

SEQ ID NO: 7812 - protein, 181 aa, Artificial Sequence
  Synthetic
SELEKLKEEIKKLADDVKRIIKKVLDENRKLVDDVKKIIKKVTEENRKLVREVAELIKAGVPKKDIERIVREVVKKMEKSDKEVAEIVEEVVRRMRTSDREVKRIVEEVVRRVKEILKEAKPGKELEEIDKDVDRLIEELKRLLEDSNRDTERLAKELKDLLDESNKDSRRLAEELKRRTD

SEQ ID NO: 7813 - protein, 181 aa, Artificial Sequence; identical to SEQ ID NO: 7812
  Synthetic

SEQ ID NO: 7814 - protein, 181 aa, Artificial Sequence
  Synthetic
REVDELRKEIRRLAKEVKDIIKKATERNEELVRRVKEIIKEVNRRNRKAAEEVKELIRAGVPKEDIRRIVERVVREVRRTNDDVRRTVEEVVKDAERTDEELKRIVDDVVRRVRELLKELPRGEDLERIRKEVEELARELEKLLEESNRETKRLARELEKLLEDSRRSTEELAKELEEAER

SEQ ID NO: 7815 - protein, 181 aa, Artificial Sequence; identical to SEQ ID NO: 7814
  Synthetic

SEQ ID NO: 7816 - protein, 173 aa, Artificial Sequence
  Synthetic
REAEEVDKEIKKIVRDVRERIRKLNEDNRRIAEKVKREIEELNKRNRDTAKEIEKRGDKDLVDKVVKDVKKSNEDVKEIVKEVAKRAKESNDEAEKIVRDVVRRAKELLRRLPPGDELREIERDVDRLVEELRKLVEDSRRTTKRLVEELDELVETSDRETEKLVRKLRERER

SEQ ID NO: 7817 - protein, 173 aa, Artificial Sequence; identical to SEQ ID NO: 7816
  Synthetic

SEQ ID NO: 7818 - protein, 173 aa, Artificial Sequence
  Synthetic
SDLERVLREIKKEVDDVKRLIRELNERNRTIVEEVKKLIEKLNRDNERIVREVKKRGDEKLVEEVVRTMKKSNDELRKIVEEVARRAKRSNEELEKIVREVVRRVKELLKEVREGEEVKRIEDEVRKLVRELEELLKRSDDDTERLVEELKELLKRSEKKTRELAKELRDRRR

SEQ ID NO: 7819 - protein, 173 aa, Artificial Sequence; identical to SEQ ID NO: 7818
  Synthetic

SEQ ID NO: 7820 - protein, 173 aa, Artificial Sequence
  Synthetic
SEVDEVLKRIKEEVDRVKEEIKRLNKENNDIVRKVKKEDRDIVETIRKIAEDVKRRGDRDFVREVVKEVRRLLRESREIVKEVVKRMEDSNRRARDIVRRVMERAKKLLEDLPEGDELREIDERVEKLVKELEETLRESEKDTKRLVEELEKSLKETEDDVRRLVKELKDRDD

SEQ ID NO: 7821 - protein, 173 aa, Artificial Sequence; identical to SEQ ID NO: 7820
  Synthetic

SEQ ID NO: 7822 - protein, 173 aa, Artificial Sequence
  Synthetic
SKLEEVLRDIRRIVEEVKDEDRRIVEEIRKIAKDVKEKIKELNRENNRIVREVKERGDEDMVRKVAEDAKKSNEDVKRIVDKVVEDVKRLLERSRKIVDDVVKRAKELLERLDPGDELRRIDEEVEKLVKELEKSVEDTKREVDRLAKELEDLVRDSKRDTDRLVKELKDRTD

SEQ ID NO: 7823 - protein, 173 aa, Artificial Sequence; identical to SEQ ID NO: 7822
  Synthetic

SEQ ID NO: 7824 - protein, 174 aa, Artificial Sequence
  Synthetic
REVEEAADDLRRLIEENERSVRESKRTLEELIKENEDSVRRSEKSLRDLIRELEEEGVRERVVEELKRIVEKIVRDSRKSVDELRRIVEEVVKESKKSVEELERIVREVIRLLEEGAPVEELLKRVRDVSEESKRLDRKLNEDVKEVSKDSKRRDRELNERVRKVAEDVKETER

SEQ ID NO: 7825 - protein, 174 aa, Artificial Sequence; identical to SEQ ID NO: 7824
  Synthetic

SEQ ID NO: 7826 - protein, 174 aa, Artificial Sequence
  Synthetic
SEVEEAAERAKRLIDKLKESADRSEKTARDLIRDLNRSTEEIAREARKLIEELKKAGADSKAVKEAAEIAKRAIDAARKSDEDAARIAKRAAEASREAVKRAAEIAERAIRAAEKGADVKKALEEVRRAAEEAEKADRKLNKEVKEAADRARELNKKLADEVRKAAKEAKEKAD

SEQ ID NO: 7827 - protein, 174 aa, Artificial Sequence; identical to SEQ ID NO: 7826
  Synthetic

SEQ ID NO: 7828 - protein, 174 aa, Artificial Sequence
  Synthetic
SEVEEAAKEAKRLIEELNRSTEKIARDAKKLIEELRKSAKESADSARKLIEELKKRGAEEEAVKRAADIAKEAIDRSRKLVKEAEEIAREAIKKAERTDEEAARIAKRAIEAAEEGADVKKALEDVKRAADKAKEDNKKLLKEVEDAAREAKRADRELNKRVKEAADKAKEEAN

SEQ ID NO: 7829 - protein, 174 aa, Artificial Sequence; identical to SEQ ID NO: 7828
  Synthetic

SEQ ID NO: 7830 - protein, 185 aa, Artificial Sequence
  Synthetic
DELEEVRERIERLIRRSEELNKKVEKENKELVDRSREINRRVLDEIRRLIREVERILEEEGGETERVDRMVKEVVKRIEKLLKESKDVTEKIARDMRDTDRKSKEATDRVVTEIKRLLEEISRTVREEEVRKLEEEVRELIKKLERSNRELNKETEKLVEDLKRSNKELEEDVERLARKLEEELR

SEQ ID NO: 7831 - protein, 185 aa, Artificial Sequence; identical to SEQ ID NO: 7830
  Synthetic

SEQ ID NO: 7832 - protein, 185 aa, Artificial Sequence
  Synthetic
KELEEVEKRIEELARRVEERIKKVIEDNRRLVEESEKINEEVRREVKRLIDEVKEIIRRKGGETEEVRRVVEKVVKEIRDLLKRSRDVTREIVERMRRTDERLREEVERVVEDMRRLLEEIRRTVEEREVRRLEERVEELARRLEELLKESNTRSEKLARDLEKSNEDLEREVEELAKRLEEELK

SEQ ID NO: 7833 - protein, 185 aa, Artificial Sequence; identical to SEQ ID NO: 7832
  Synthetic

SEQ ID NO: 7834 - protein, 185 aa, Artificial Sequence
  Synthetic
DSVREVAERIDRLVKESERINREVIETNRRLFKESEKINDKVRKEIEDLIRRVKEIIDRDGGETEEVRKLVEDVVKRLEELVRESKRVTDEIVRRMEKTDEESKRVTDEVVKTAKDLLEELRKTVREEDLRRLKKKVDDLARKLEESNRRSNEDSKRLARELEESNKDLKRRVDELARELEERLK

SEQ ID NO: 7835 - protein, 185 aa, Artificial Sequence; identical to SEQ ID NO: 7834
  Synthetic

SEQ ID NO: 7836 - protein, 185 aa, Artificial Sequence
  Synthetic
DELKEVEERIERLIRESKRVNEEVKETNRRLVRESKEINKRVHDTVRRLVEEVRRIIDERGGETEDVKRVVEEVVRRARELSRRSDEVTKDIARKMRDTDRESEEITRRVVEELRRLVEEIRKRVDEKEVRRLREEVEKLAKELKRSNDESNKESERLVEDLKRSNTENSKAVEDLARELKERLK

SEQ ID NO: 7837 - protein, 185 aa, Artificial Sequence; identical to SEQ ID NO: 7836
  Synthetic

SEQ ID NO: 7838 - protein, 183 aa, Artificial Sequence
  Synthetic
RSVEELKKKVEDLVRKLEELVKDSKRESKELVDDSERLVKELEDDVRRLVRELRERVRRRRGEELEKIVDEVVRRAERLLEEVKKSSKKVADELERTNREVEEIVRKVVEDARKLLEELKRVDDERIIKRIEEEIEELIRRVEEIIRKVIKENRELVERDREIIKTVLERIRELIKEVTDRIE

SEQ ID NO: 7839 - protein, 183 aa, Artificial Sequence; identical to SEQ ID NO: 7838
  Synthetic

SEQ ID NO: 7840 - protein, 183 aa, Artificial Sequence
  Synthetic
SEVEKLEEEVERLVRDSERLNKRLEDRVKKLVEDSERLVRELEKTVRDLVKKLKDDVRRRPGEDLDKIVRKVVREAEELLKEVKKSSEDVADTLRRLLEESKKSSKRVAEEARRLLEELKRVDDERIIRRIRKEIKDLFDDDKRISEEVERRIERLFKEDKKIIEDVEREIRRLIKEVEDRIR

SEQ ID NO: 7841 - protein, 183 aa, Artificial Sequence; identical to SEQ ID NO: 7840
  Synthetic

SEQ ID NO: 7842 - protein, 183 aa, Artificial Sequence
  Synthetic
DDVERLERRVRELIKESEKLVDDLRKDVERLVKKSRDLNERLREDVERLVKELEDRVRKRRGEELEKIVKDVVDRARELLERSRRSSKEVAERLKELLERLKKSSEDVAREMERLLEELKRVDRKEIIDKVRKEIEDLVRKDKEIIDEIRKEIRRLVEEDEEISRRVEETIRRLIREVAERIR

SEQ ID NO: 7843 - protein, 183 aa, Artificial Sequence; identical to SEQ ID NO: 7842
  Synthetic

SEQ ID NO: 7844 - protein, 182 aa, Artificial Sequence
  Synthetic
SEVDELRKRVEELVRRSRKLVEEHRRKVRELVEESRRLVEELRRDVERLVKKLRDELREVREVVKRVEEELEKLVREVKRSVEESKRRLEDLDRRLRETTKEAEDLLRELLKRVEDLKDDERARDLIEEVRERADRVAKKDEDVIRKSEEDTERVVREDKKIIDRVRKDVEEVIRRVEEETR

SEQ ID NO: 7845 - protein, 182 aa, Artificial Sequence; identical to SEQ ID NO: 7844
  Synthetic

SEQ ID NO: 7846 - protein, 184 aa, Artificial Sequence
  Synthetic
STLERLTEDVKRVIREVEEVIKKLKEEVDKSLEDVRRKIEESRKETKRVIDEVKRRIKDKRKDKEVLKELVDRVVRVLEEANRTLEKVVKEHEDSLERVDRTLKKVVDDARKKLERVIERLRDENVSRVEELAKRLEELIRRLEELVDRLRKELKESIEEIRKRVRDHKEESKRLIRELDEEVK

SEQ ID NO: 7847 - protein, 184 aa, Artificial Sequence; identical to SEQ ID NO: 7846
  Synthetic

SEQ ID NO: 7848 - protein, 184 aa, Artificial Sequence
  Synthetic
STLERLDEDVKRVAREDTELIKESEERTKKSADDVRKKIEDSRRTTDKVVTDVEDIIEKKREDKRVLKEVVDELRRRLEELNRRLREVVEEHKDSLRKANRDLEESSRRSEERLRRVIETLRRNNVSRVEELAEKLKELLKDSERRVDEHRRKSEESTREIEELVKRHEDRSRELIKRLDEEVR

SEQ ID NO: 7849 - protein, 184 aa, Artificial Sequence; identical to SEQ ID NO: 7848
  Synthetic

SEQ ID NO: 7850 - protein, 184 aa, Artificial Sequence
  Synthetic
SLLEKLRRRVDEVIKRDDELIEESKRRTDEALKRVEERIRKSLEETKEAVDRVRDIIRRVRDQKEVLAKVVKELERIARELNRRLKEVVEELRRILEKLNRDLKKSSEDSKRELDRVIEALERGNVSRVDELRERLRKLLEDSEEKVKRHKDESDKLIKDIEDKVKRHEDESRRLIRELREELK

SEQ ID NO: 7851 - protein, 184 aa, Artificial Sequence; identical to SEQ ID NO: 7850
  Synthetic

SEQ ID NO: 7852 - protein, 176 aa, Artificial Sequence
  Synthetic
SEADELRKKLEETNKDIKRRVEELKRRLEESNERIEELVRRNEKKSKDLLDDVRRRGVDEKVLKKIEEVVDRNRKLLKEALDVNKKVVDEIEDRLRRVLDKNRKVVEEVERELRDSSEEVLKRLDKKLEDSRRDVERVEKEVEELLRESEERVKRVVETVDKTDEEVKKDVDDKRR

SEQ ID NO: 7853 - protein, 176 aa, Artificial Sequence; identical to SEQ ID NO: 7852
  Synthetic

SEQ ID NO: 7854 - protein, 176 aa, Artificial Sequence
  Synthetic
SEAEDLEKKAEDTNREIKKIAEELKKHAEDTNREIEKKVEDLRREAERILREVARKGVDEDVLRAIEEVIKTIEDLARKVLEDNRKVVEDVERLVEEVLKRNAKVVDEVREKARDSSEEVLERLERKLRESKREVDRLAEKIKKLNDDSRKRVDEVVERVRRLLEDVKRKVDEARR

SEQ ID NO: 7855 - protein, 176 aa, Artificial Sequence; identical to SEQ ID NO: 7854
  Synthetic

SEQ ID NO: 7856 - protein, 178 aa, Artificial Sequence
  Synthetic
DEVERLEEDVERSIRDSEKVVRDSERRVRESNEEIRRLIEESDKDVKRLIDEATKKSGESADLLRELREVVERVKRLNEKLLKENREASEEVRKINEDLVREDRRVVKEVKETVRRVDKREVIRELKERLKEISDRLKKRSEKSVRDLDDISRKIVRRSEDTVRKLREIARRLDERTK

SEQ ID NO: 7857 - protein, 178 aa, Artificial Sequence; identical to SEQ ID NO: 7856
  Synthetic

SEQ ID NO: 7858 - protein, 178 aa, Artificial Sequence
  Synthetic
REKDELEEAVRRSNKRLKDILEKSRKDVEESIKRSEELLKRSDDEARKLIEEMTRKSGEEADVLRTLREVARRAKELNKKLLEDDREVIRRVEEINRELLERNTRVSDRVREIVERTTDRKVIEDVLRELKKITDEIEKESRRSLDELRRISKELEDDSRRTLEELKKIVKELKDRET

SEQ ID NO: 7859 - protein, 178 aa, Artificial Sequence; identical to SEQ ID NO: 7858
  Synthetic

SEQ ID NO: 7860 - protein, 178 aa, Artificial Sequence
  Synthetic
DEDRRLEEEVRKSIEESERVIERSEEEVRRLIEEARTLLEDSRRKVEDLLREMTRRAGDKADLLKELKRVIEEVKRLNEKLLKELEDVIERVIRINKRLLDEDRRVVERVIRIVRRTTDREVIEKVLRELREISERLKRESERSLRELEEIARDLLRRSRRTVEELRRIAEELVKRAK

SEQ ID NO: 7861 - protein, 178 aa, Artificial Sequence; identical to SEQ ID NO: 7860
  Synthetic

SEQ ID NO: 7862 - protein, 187 aa, Artificial Sequence
  Synthetic
DELEEVLERIEREIRRVSERSEELSRRNEKIIREVEEESRRILEEIKREIDEVKKRAERVDKDTLRRIVETVVRRAKELVDRSKKITTKVVEELKRSMEESRKISEEVARRAKKLVDELRDRLRSEEAKKLVREVEETVRKLVEELREMNKRHEDKNRELSDRLREIDKRLEDEVRKLVEELRKKVE

SEQ ID NO: 7863 - protein, 187 aa, Artificial Sequence; identical to SEQ ID NO: 7862
  Synthetic

SEQ ID NO: 7864 - protein, 187 aa, Artificial Sequence
  Synthetic
DELEEVEKEMERIIREVERKLREVNERIKEIIERVIRESKEILDELKRIIDEVKKRAERVRKDELKRDAERVVKRLKDLVDRSRRITEKVVREAEKLNEDLHRDLERVVRTLKKLLDDLRRRLDSEDAERLVRELRKKVEELKRRLEELNRDDKRTIDELVKTLDKIDRELRKTVEDLVRDLERDVK

SEQ ID NO: 7865 - protein, 187 aa, Artificial Sequence; identical to SEQ ID NO: 7864
  Synthetic

SEQ ID NO: 7866 - protein, 173 aa, Artificial Sequence
  Synthetic
SKVDEVLKDVRRISEESERRIRELNDRSRKISKESEDRIRELLRRLEEIVERLKRTNDRDAVRKVVEVLRRVLEEVRRSVDEVRRLLEESLKEIERSVREVEKRAKTVLEEVKDDEKAEELRKEVERLIRENEELVERHRKTVEELRRRNEELVKRLEDTVRKLEKELKEEAD

SEQ ID NO: 7867 - protein, 173 aa, Artificial Sequence; identical to SEQ ID NO: 7866
  Synthetic

SEQ ID NO: 7868 - protein, 173 aa, Artificial Sequence
  Synthetic
SELDRAADRLRKISKRSEEEIRKLNEEVKKISKESEEKIRRLNEEVKRIVEEVKRRNDERVVKEVERRLERSLEEVEKSVREVKEVLERSLRKVEDSVRKVEDVLRKVLEEVKSDEKAKELAEIVEKLIRDNRRLVEEHEESVRRLEDRNRKLVEDHERTVRKLIKELRETRR

SEQ ID NO: 7869 - protein, 173 aa, Artificial Sequence; identical to SEQ ID NO: 7868
  Synthetic

SEQ ID NO: 7870 - protein, 173 aa, Artificial Sequence
  Synthetic
SELEKLLRDLEEIARKVEEEIRTLNEDVKRISKESKERIDRLKEELKKIVDDLKKRRIKEAVDEVKKRLEEVLREVEESVERVEREAKRSLEEIERIVRRLEKDVKKVLEEVKSDERAEDLRREVERLIRELRKLVREHERSVRKLIEENRRIVRELEELVKKLRKELEDTLR

SEQ ID NO: 7871 - protein, 173 aa, Artificial Sequence; identical to SEQ ID NO: 7870
  Synthetic

SEQ ID NO: 7872 - protein, 173 aa, Artificial Sequence
  Synthetic
SELEEAERRLREIVRKVEEDSRKLNEELKREVDEVRRRSEELNKRVRDEAERVRKENKRELVRKLEDEVRRSVEESKKISEDLKRRLEESVKESERISEELRKRLREVLEEVKKDEKAEDLARIVKKLVEDLKRLNKRHKESVDELVRRLEELDREHERTIRRMIEELRETER

SEQ ID NO: 7873 - protein, 173 aa, Artificial Sequence; identical to SEQ ID NO: 7872
  Synthetic

SEQ ID NO: 7874 - protein, 179 aa, Artificial Sequence
  Synthetic
KEVEKLLEDLKEVARRVSEEIKRLLKELKEVSKRSEDRIRTSLERVKKVVEDVLREADEFRSDKERLREVVERLEEILDRANKEVRDSVKDLEKILRDVVKEVEKLVKDLEEIVRKIIEDVKDVRELKEEIEKLLRRLRKLVKELKEEIKKIVDRNRKLVREHEARSEELKEEIRREVE

SEQ ID NO: 7875 - protein, 179 aa, Artificial Sequence; identical to SEQ ID NO: 7874
  Synthetic

SEQ ID NO: 7876 - protein, 179 aa, Artificial Sequence
  Synthetic
SEKEELLKRVAEVSKKSKDRARELNERLKKVVDEVLETIRKLNEDLKRVVERVKEKIKDKKDDKRVVKELVDKLERILERSIEETERLLRELKKILEESNRELEKSVEELKRIADRIIEAVDKVKELRKEAKRNVDENREVVKENKRTTEKLLRDLDRILKENKRTVEKLVRELREEVR

SEQ ID NO: 7877 - protein, 179 aa, Artificial Sequence; identical to SEQ ID NO: 7876
  Synthetic

SEQ ID NO: 7878 - protein, 179 aa, Artificial Sequence
  Synthetic
DEKERLLEDVKRASEDSERRIRELNDRVRRVSEESERRIRKLNKELRDEVEKVLREIDRIRKDKDVLRDLVRRLEEKLRRSNEEVRKSVEELERILRESNERVRKSVKELKERAERVIEAVDKVDELREEIEKNLRRNEELVKKNKKDSEDNKRDNDRLVKENEKTTEDLLRRAKEEVD

SEQ ID NO: 7879 - protein, 179 aa, Artificial Sequence; identical to SEQ ID NO: 7878
  Synthetic

SEQ ID NO: 7880 - protein, 178 aa, Artificial Sequence
  Synthetic
DETETVEKKLRDVLERVKKDSEDSREELKRVHKRSEELSRRSNKELDDVLDEVRRIIERSTDKREVEKVVRELREVAKRIKDKNRKSLKESEDVVRRVTERNAKAVKELEDVLRRAIEEVKDVEELKKRLDEMRKTIEKLLEDTKEELRELIERNKKLLDDTARRAEEIIKEIEDRSK

SEQ ID NO: 7881 - protein, 178 aa, Artificial Sequence; identical to SEQ ID NO: 7880
  Synthetic

SEQ ID NO: 7882 - protein, 178 aa, Artificial Sequence
  Synthetic
SREEKVLEDLDRVLKRVTDLSKESLDEVERVHEESERLIRDSNRVLRDVLEKVREIITKSTDKSTVKKVVEDLKRVLDEVKKKNEESLRRSEEVVRRVIEKNRKAVEELRKVVEEAIRRVKDVKELKDRAREVIRRIEKLVEDTERALRDLIRKNEELLKRTEEELKRAEEDIRRKSK

SEQ ID NO: 7883 - protein, 178 aa, Artificial Sequence; identical to SEQ ID NO: 7882
  Synthetic

SEQ ID NO: 7884 - protein, 186 aa, Artificial Sequence
  Synthetic
SDAERVLREIERLLEELKELVERVVRKSEELLRRAKRVNEEVNREIKKLADELEEVIRRKGGESEEVERTLREVTKEIRRLVRESEKLAEDIVRTSDKLVEDLREMLERVVREARKLVEDVERRGVPKEVVDTLRRVVEEITRELEELLERLRRVSEEIRRTLEELLERTRRLVEEIERKLREALK

SEQ ID NO: 7885 - protein, 186 aa, Artificial Sequence; identical to SEQ ID NO: 7884
  Synthetic

SEQ ID NO: 7886 - protein, 186 aa, Artificial Sequence
  Synthetic
SELDDVRRKIKRLIDELKRVNEKVNKDSEDLVREVERVNRDVNRRVKELLEELKRVIDERGGETEEVRRILKKVVEEARRLVEKSEDLARKVVKRSNELVKESKDLAKEVVERIRRLVEKVERDGVPEEMVERLRREVEKLERELRELLRRTEENSRRAKERLEDLLRRTRELVKRIEERLREELR

SEQ ID NO: 7887 - protein, 186 aa, Artificial Sequence; identical to SEQ ID NO: 7886
  Synthetic

SEQ ID NO: 7888 - protein, 183 aa, Artificial Sequence
  Synthetic
SDVERLKKRVDELAERLKRLDEELKKEVDRIETELRELLKRHEDRNRDISRRLAELLKDARERELEEIVREVVERSERTLREVEEIVRRVVEDARRLVRDSERISKEVEERMKRLVEEVKDVDKKEIVERILEELDRLMEKVERVSREILKTIEKLARDIKKRIEEVTRESERLAREVEEALR

SEQ ID NO: 7889 - protein, 183 aa, Artificial Sequence; identical to SEQ ID NO: 7888
  Synthetic

SEQ ID NO: 7890 - protein, 183 aa, Artificial Sequence
  Synthetic
DEVETLEKRVRELERRLEELNKELREEVRKIVERAKELDKRHKDDNERIEKELRELLRDVRDERLKEIVRKVSDESRKTLEDSRRISDRVKKELDKLVRTSEEISKRVADRMRELVDRIRRVDKDEIAKRILDEIDRLMEEAEKVTRDILRKVEELLRRVEDASRRVTKKSRELLKKVKEDLR

SEQ ID NO: 7891 - protein, 183 aa, Artificial Sequence; identical to SEQ ID NO: 7890
  Synthetic

SEQ ID NO: 7892 - protein, 183 aa, Artificial Sequence
  Synthetic
SEVETLEKAVRDIVERLKDLNRRLEKEVRDAVKRLRDLLREHEKRNREIAKDLTDKLRKATREELKRIVERVVEASKETLEEVDEIVRRVVREAKRLVDESERISREVVKRLEDLVREAKDVDRKEAATDILRKAEELADEVRRATEEIAKEIRRLVKEVEEVIKDVTRKSDELLKRVADAAK

SEQ ID NO: 7893 - protein, 183 aa, Artificial Sequence; identical to SEQ ID NO: 7892
  Synthetic

SEQ ID NO: 7894 - protein, 187 aa, Artificial Sequence
  Synthetic
DELETLADVVRKLIERSRDLLRRHEKRNDEIKKRLDELDRELKERAEEIKKRLEELLRRRDEDEIREVIRELEERLEKLLEDSRRVSKEVAERLDRTVKDVRKTIEESEKLLRELLEEVERKKDDERAEDVVRDVLRKAEKVVEEDERLIRRVTEESDRVLDRVEKETKKIVDEAKRMLREVEERIR

SEQ ID NO: 7895 - protein, 187 aa, Artificial Sequence; identical to SEQ ID NO: 7894
  Synthetic

SEQ ID NO: 7896 - protein, 187 aa, Artificial Sequence
  Synthetic
SLIDELRERVKEIKKRSEELLKRHEDENRRIVKRSRELLKKLRDVVRDIIRELRKELEDDKKEEIERVIRELKKRLEELVKEVERSSKELEKTLKRTLEEVRKTSKEVEETLKRLLKEVDDKKKDERAEEVVRRVLKEAEDLLRKDEKILRDVTRRSEKALREDEELAKRVLDEMRKVLEDVKRKSK

SEQ ID NO: 7897 - protein, 187 aa, Artificial Sequence; identical to SEQ ID NO: 7896
  Synthetic

SEQ ID NO: 7898 - protein, 187 aa, Artificial Sequence
  Synthetic
EELERLAESVRRIKERLKKLDREHEERNKRIVETSRKLLEELEREVRKIEEDLKRLLDERKDDEIRRVVEEVVRRARELVERIDRSSREVEKKLRETVKESRRVTEEVARRADKLLEDLERKKDDERAEEVVRDILRRLEELMRRAEEVTKKLTDDSRRLLKEDEDLVREIEERLRRLLKEVKERVD

SEQ ID NO: 7899 - protein, 187 aa, Artificial Sequence; identical to SEQ ID NO: 7898
  Synthetic

SEQ ID NO: 7900 - protein, 179 aa, Artificial Sequence
  Synthetic
DEDRDVKREVKKVHEDSARTVEKLDREVEKVHEESERTVRKSEKEAKEVLDRVKDIVKKKKDDKKVLKEVVEKLKRDLEELNKELRRSVKELKERLDKVKKDIRDSVRRLDEALKRVVKDNDKVEELKEDLKRILKENEDLVRELEKKLDDIMRENEELVREHEEKSKRIVRELEEEVR

SEQ ID NO: 7901 - protein, 179 aa, Artificial Sequence; identical to SEQ ID NO: 7900
  Synthetic

SEQ ID NO: 7902 - protein, 179 aa, Artificial Sequence
  Synthetic
EEKERADRKLEEVHKESKKTVEDSDEALERVHRESKRTVEESRKTLEDVVREVKRIVEEKREDKDVLRKVLEDLKEIVERLNRELEKSVEKLERVLEKLNRELEESVRRLKELLERVIRENSDVKELRRKVEEILKRNEEEVRKHKEKSKKIVEDNRRLVKRHKEESEEVVRDAAREVK

SEQ ID NO: 7903 - protein, 179 aa, Artificial Sequence; identical to SEQ ID NO: 7902
  Synthetic

SEQ ID NO: 7904 - protein, 179 aa, Artificial Sequence
  Synthetic
DEDREALKEVEDVHRRSEEKVRESRRRAEEVHKESKKIVDELRRRSEESLKRVEDEVRKKRSDKDTLRDLVRRHRDSNRKIIETIRRSVKEVKKLLKELDEELEKSVRELEKTLKRVVDDNDKVEELKDELRKIVETNRELVRRHHETVKKIMEENERLVRELEKRLEEADRKLEEEVR

SEQ ID NO: 7905 - protein, 179 aa, Artificial Sequence; identical to SEQ ID NO: 7904
  Synthetic

SEQ ID NO: 7906 - protein, 184 aa, Artificial Sequence
  Synthetic
SLEEEVRRIVDDIRRTNKELLDRSARRAEEIERRLEELLRRSRERADRIREEMRRMLEKAGDSERVRKLVEDVEKVLKEDIRTNEELLRRVRKVLEEDIKINEDLLRESEEVLKKVIEDVARTTDKKTVDDVLKRLKEENDRSREEIKRSNEESDRVLDEVRKRSEDSNRRLDKIVDEAKKELK

SEQ ID NO: 7907 - protein, 184 aa, Artificial Sequence; identical to SEQ ID NO: 7906
  Synthetic

SEQ ID NO: 7908 - protein, 177 aa, Artificial Sequence
  Synthetic
DELEEVLERLREIAERVIKESKEINDELKRSSERSKRESDKVNKRMREIMKELKDRGDKEVVDRVIKELEELVRRTEEILDRDNKELERLVRRSEEIARRVIEELKKLVEDVERGGIDEEDVRRIRKLVEDIARRLKEIIERNRESVRKSREENKKSIEENRRSVKKIADEAREDAR

SEQ ID NO: 7909 - protein, 177 aa, Artificial Sequence; identical to SEQ ID NO: 7908
  Synthetic

SEQ ID NO: 7910 - protein, 169 aa, Artificial Sequence
  Synthetic
EETERLIEAVKRIAEEVRKTIERLMERVEKTTRESEELNRRLNRELDREVEEVERANKEEAVKRLKEILERVLEESKRIVEEDNEEAKRVVEEVERIVRELKKFAKKVVDDRRSEELEKVVREVAERLDRLLKALRDLVEESARRNKRLIEETDRRIKEIAERLKRTSD

SEQ ID NO: 7911 - protein, 169 aa, Artificial Sequence; identical to SEQ ID NO: 7910
  Synthetic

SEQ ID NO: 7912 - protein, 184 aa, Artificial Sequence
  Synthetic
SEAERLLEELERSTRESAKRIRDLADKLRRSSEESVKDIERLTKELEEAVRRVLDKIRKKKSDKDEVRRLVKELTDILRESHKRVKESIDRDREILEEVIRRVKESIKEDKRRLDDVLAKLRKAPEEVVRRLAKVVEESRRTNEKLLRDLEKLVEDSKRRNDELLEKNARRIKEVEDELKRETK

SEQ ID NO: 7913 - protein, 184 aa, Artificial Sequence; identical to SEQ ID NO: 7912
  Synthetic

SEQ ID NO: 7914 - protein, 184 aa, Artificial Sequence
  Synthetic
KDAEDLLRRLRESTKRSEDLVRKLLEELERSSRESEKLIRELTDRLDKVVKDVERRIREKREDKEAVERLVRTLREILERSHRDVERSIREDRKIVEKVIEDAERLVREDKEELRRVLEEIRRVPEEVVKRLEKAVKESEDRNKELLDRLRKRVEDSKRRNDKLLKENRKRIEEIKRRLDELLR

SEQ ID NO: 7915 - protein, 184 aa, Artificial Sequence; identical to SEQ ID NO: 7914
  Synthetic

SEQ ID NO: 7916 - protein, 184 aa, Artificial Sequence
  Synthetic
SKAEKLLRDLEKSTEDSERRIRELLERLRESSRTSEELAKRLEEEVERATREVADKIRKKREDEKTVRELVEELRKILEEVIKDAKRLVEEDKRILEEVIRAVERSIKEDRDILEKVLEDIREVPKEVVDRLREIVERSREKNRKLLEDLRRAVEESKKRNEEVLRKLKKKVEEIEEELKERLR

SEQ ID NO: 7917 - protein, 184 aa, Artificial Sequence; identical to SEQ ID NO: 7916
  Synthetic

SEQ ID NO: 7918 - protein, 184 aa, Artificial Sequence
  Synthetic
SEIEELLKTLKRSTEKSEEDARRLLEELTRSSEESVKRLRDLTERLKEVAKEVIERIRRRKEEKETVEELIKELEKRLRDSHEEVRRLIEEDRKELDRVIEAVDRSVKRDKRILEEVLKEVRRADKKVVDRLKRMVDESRKRNEELLKRLEKRVRESRKRNDELLEENKRVIDKIREELERLRK

SEQ ID NO: 7919 - protein, 184 aa, Artificial Sequence; identical to SEQ ID NO: 7918
  Synthetic

SEQ ID NO: 7920 - protein, 188 aa, Artificial Sequence
  Synthetic
SLLEEIEELVRRAIDTVRRSSEELKRLVDRVNETNKRSTEELRELAERVDRRLDKLLKEIKEGKMVDKLRKLIETIRRVAEEVIRLSEEADRRDSELAKRVLDESRKLLREIERVAEEVRRVVTENDKSRELVEKLKRELRRILEEVRRLNEELMKEIRDTNRKSEKLNRDLKEEIKKILEDVEREVR

SEQ ID NO: 7921 - protein, 188 aa, Artificial Sequence; identical to SEQ ID NO: 7920
  Synthetic

SEQ ID NO: 7922 - protein, 183 aa, Artificial Sequence
  Synthetic
DEAEKLKERLKRVLRRVREINRKLLDELRKSNEKVRRINKRLKEELKRVLDEVEKRVREDKNKSRVKEVLKELEEVLRTVDEMSKRSLKENERSLKEVIKRSEKSLKELEDVLRKVEKDVESIDEKLVREIEEMVRRLKEEAEKLSEEIRKIVRESRETLKKLSDEVRRLVERAEEKARKDTK

SEQ ID NO: 7923 - protein, 183 aa, Artificial Sequence; identical to SEQ ID NO: 7922
  Synthetic

SEQ ID NO: 7924 - protein, 178 aa, Artificial Sequence
  Synthetic
KEDDDLRREIERLLRELEKMNRKVLEDARRLLEELRRVNKEVAERIKDLERRLKDVVEKKGGKTEEVERILRTVLKEIRDLVRRVAEENKRAVKEIEDLVRRVEELNKEVVRRIEDLVRKRLDERVKEEVDEIRDRLRKSNETLREIVRRIEEDLRKSDRELEELVERIEKRLRELVR

SEQ ID NO: 7925 - protein, 178 aa, Artificial Sequence; identical to SEQ ID NO: 7924
  Synthetic

SEQ ID NO: 7926 - protein, 188 aa, Artificial Sequence
  Synthetic
KLVEEVKRLIEESARKNEELIKEVEKEIRRSRKRDKELIEEIERLIREVKKRLEELLTEKKDDDRVREVVRRLEERLKRLLEEVEEVARRNNEILERLLKEVEDVVRTNRERMKELLEEVKTKKDREEAEELVRRVKEEIKRSTTESEKLVKEVKDRARKSHEDSERLAREVLKEIRRLLEEVEKDVR

SEQ ID NO: 7927 - protein, 188 aa, Artificial Sequence; identical to SEQ ID NO: 7926
  Synthetic

SEQ ID NO: 7928 - protein, 178 aa, Artificial Sequence
  Synthetic
KEVEDVKELIKKVNEEIKKIHERSNEEIKRVNEELRKIIKKVKDDLRRVLEEIERLSREGTDEKEARKLLERVERIVRKVKDELKKLNDELDETVKDVARKSKELNDRLREIVKKLVKGEDLLREAEKLVEDSRRSSEELVRRDKKLVKESRETSERLVRDLERLLREIEKRVREEAT

SEQ ID NO: 7929 - protein, 178 aa, Artificial Sequence; identical to SEQ ID NO: 7928
  Synthetic

SEQ ID NO: 7930 - protein, 178 aa, Artificial Sequence
  Synthetic
SEVETVAELIKDVNRRIREEVEEVKRRIEELNDRNRKIAEEVKERIRRVEDEIREARKRGESEERAKRLLEELRKIVKEVMRRVTESNRRLEETVRRVVERLKRLNDTLRDIVRRLVKGDELLTRIDRLVKDSERSSRKLVRELEELVRRSEEETEKLVRELERLVTEVARKVDEEAT

SEQ ID NO: 7931 - protein, 178 aa, Artificial Sequence; identical to SEQ ID NO: 7930
  Synthetic

SEQ ID NO: 7932 - protein, 184 aa, Artificial Sequence
  Synthetic
KDVEEALETLKRILDRVAKDNEDLIRELRDINRKITKENEDLIRDLERILREVEEEVKRRRDEEVLRELVKEVRRVLREILERSKESVKRSEDALREVLKRSRDSVKEVERVLEEIKRILDKSGGDELRRRLEALVEDVRRTLKELIEKTEKVVKEVEDNLRRLLKRTEEVVREVEKKLEEDRR

SEQ ID NO: 7933 - protein, 184 aa, Artificial Sequence; identical to SEQ ID NO: 7932
  Synthetic

SEQ ID NO: 7934 - protein, 184 aa, Artificial Sequence
  Synthetic
SEVEKVLEDLKRILEEIARRNEELNERLERINEEITRRNEKSNEETKRVLDKLADDVRKRKDKEVLEELVKDAERVLREDEKRSRESVERSEEALEEVKKRSEDSVREAKKALDEIRKIVKKRGGEELERTLEKLVDEVRKRLKELLDRSRELVKRVRENLERLEEDTRRLVERVRRELEKLRK

SEQ ID NO: 7935 - protein, 184 aa, Artificial Sequence; identical to SEQ ID NO: 7934
  Synthetic

SEQ ID NO: 7936 - protein, 185 aa, Artificial Sequence
  Synthetic
DEAEKVKRDIEEILKRVAEELKRVLEEIRRSSEEVERRNKEVLETLKRILEEVKERLKRIDKRRAAEELKRVLEEVERLVEELHRINRESIKRTKELLERVKRKLEAVIEEVRRLVEEVVKRRGEEAELVRELRELVRRIEEELRKLTEEARKLLEDNRRRLEELDRELKELVDRIREELERARK

SEQ ID NO: 7937 - protein, 185 aa, Artificial Sequence; identical to SEQ ID NO: 7936
  Synthetic

SEQ ID NO: 7938 - protein, 185 aa, Artificial Sequence
  Synthetic
DEAEKVLEDIKRSSEEVTRRNEKVARDSRKLSEDVEKKNRDVAERIKEIVDKVRRDLSRIDKKEAEKKLREVLKKVEELVKRLHEENRRSLEKSRELVERLHEINRKSEEDIRELVKDVVRKRGREAELVERARELVETNKKRLEDLDRELEELVKENEERLKRLDERLKELVDDIRRRAEEARK

SEQ ID NO: 7939 - protein, 185 aa, Artificial Sequence; identical to SEQ ID NO: 7938
  Synthetic

SEQ ID NO: 7940 - protein, 184 aa, Artificial Sequence
  Synthetic
REAEELLKDLERSSEEVDRRVKESNKESEKVSRDVEKKVKDSNKELREITREVAERAKRTDKDMVREIVERLRRTVEDVLRRNREIVDRSRKRSEDLLRRNRKIARENERLLETVLKKVTDDGIDEKMIKRAAELLKTSEDRLRKLIKESEDSIRENEKKLRELIRESEETLREIRKRLEDLER

SEQ ID NO: 7941 - protein, 184 aa, Artificial Sequence; identical to SEQ ID NO: 7940
  Synthetic

SEQ ID NO: 7942 - protein, 184 aa, Artificial Sequence
  Synthetic
KEAEDLMEELKKSSEDVERRVRESNKRSKEVSDRVAEEVKKLLERLKKILEEAARKRDRVDKEVLTKIAEDVVREVERVLREVEKILRESVRLSEKLMKENEEIVRKNKELLDRVLEEIKRRGVDEKVIRTIERLVRTSEKKLRKLLDDSRKSVEENRKRVTDLKKEARDLVEDIKRRLEEERR

SEQ ID NO: 7943 - protein, 184 aa, Artificial Sequence; identical to SEQ ID NO: 7942
  Synthetic

SEQ ID NO: 7944 - protein, 178 aa, Artificial Sequence
  Synthetic
REEEKVLKDLDDVLKEVTERVREDLRTNEDVVRRAEEEVTRLHEELKRSNDRAKEEVDRKKEDKDVLKKVVEENRRSLERILRRTEEVVERIKKVSEENRRSVEEIVKRLEEVLKEAIRRNDTEEVRKLVRELKEMLKRLEEDARRLVETTKKRLEDLKRTTDKLVKELEKTLEELRR

SEQ ID NO: 7945 - protein, 178 aa, Artificial Sequence; identical to SEQ ID NO: 7944
  Synthetic

SEQ ID NO: 7946 - protein, 178 aa, Artificial Sequence
  Synthetic
SDRERVAKKLRDVLKEVDEEAKKDHDTNKTVVKKVREDIERILRRLKEVLRKVKEEAERKKKDKEVLDRVLKELEKVLRDARRDVRRIIEEAKDVSRKNLDSSRKVVEKLKKVLDEVLEENDVEELRKLVKELRDRLRELEESSRKLVEDTRRDLERLREEIDRLVEELERRLEELRR

SEQ ID NO: 7947 - protein, 178 aa, Artificial Sequence; identical to SEQ ID NO: 7946
  Synthetic

SEQ ID NO: 7948 - protein, 187 aa, Artificial Sequence
  Synthetic
SDAETVLREIRKLNKEVNDASRETLERIEELNRRVERIVREVLKDIERLAREVEEVVRREGGKSDRVVKIAKDVLREVKELVERVVRVLRKVNKDVRRLVEELKRLAKEVNERVRRLVEEVARRLKGKEELIRRLEEIVKESEDNSKENVDRNDRIVRESERSSKELEDELRRIVKKLAREVDELIR

SEQ ID NO: 7949 - protein, 187 aa, Artificial Sequence; identical to SEQ ID NO: 7948
  Synthetic

SEQ ID NO: 7950 - protein, 187 aa, Artificial Sequence
  Synthetic
DDVERVLERIKELNRRVEEIVRRVLKTSRDLNKELNDISREVLKRIKDLMREVEEVVRRDGGESKDVEDILRRVLEEVKRLVDEVERLAREINEESRRLSERVKRTAEEVNKEVKRLVERVVEKLKGKEELIRELERIVEESKRTSDKLAKELDKLNEDSERNSRKNIEDLRRLVEELARKAEELIK

SEQ ID NO: 7951 - protein, 187 aa, Artificial Sequence; identical to SEQ ID NO: 7950
  Synthetic

SEQ ID NO: 7952 - protein, 188 aa, Artificial Sequence
  Synthetic
SLVEELEKLVEENERNMRELDKENRDIVEKNRENVERNERELRKLVERLERRIREVVRTKSDSEELKRIAEEVIRRVRELVKEVKRIAEKSIRDTDRLVKEVSEVNKKSIEDVKRLVDTVRRVTSDERLEEIVREVKERIKRSNDEANKENKRTLDEIRDSNRDVNRVSKEVLDEIRRLLKELEDAAK

SEQ ID NO: 7953 - protein, 188 aa, Artificial Sequence; identical to SEQ ID NO: 7952
  Synthetic

SEQ ID NO: 7954 - protein, 188 aa, Artificial Sequence
  Synthetic
SLIETLEELVDRNRRNLEKLDEENKDMLRKNEEDVEKNERDLRKLVKELRDEIRKLIEEKDKVEDLKRIAEEVIKEVDELVKRVTDILRESIKETERLIREVSKVNEDSIRTVEDLVRRVAEVKDDERLEDIVREVIKRIEESNRRVNKRNRETLERSKKSNKDVNEASERVLRRIKELLDELRERAK

SEQ ID NO: 7955 - protein, 188 aa, Artificial Sequence; identical to SEQ ID NO: 7954
  Synthetic

SEQ ID NO: 7956 - protein, 188 aa, Artificial Sequence
  Synthetic
SLEEELRRLVEELEKRLRELDKRNKDLLRENERNVEKLARDLEELVKKVRRVVEDVVTKKPDSEELKRIAEDVERRVEKLVRDVRRILEESIRDTKRLIDEVSDVNRKVIKEVEELVREVSKVTSDERLEDIVREVLKRVKDLLERAEEENKKTLDDSRKSNEEVNREVEKVIRRIEELVKRLEEAAK

SEQ ID NO: 7957 - protein, 188 aa, Artificial Sequence; identical to SEQ ID NO: 7956
  Synthetic

SEQ ID NO: 7958 - protein, 188 aa, Artificial Sequence
  Synthetic
DLVERLEELLKKIKRELEENIKRNRELLKKLEENLRRNEEKNRKLLEEIRKRLEDLLREKSDVEEVRKVAKEVEDKVRKVLEDSKRVVDTLRELAREHLKHSEDVVRELEERLKELLDEVRRKKDREEAEELVRRVEERMKEMVKRVHEVSEKNLRDIKKWLEDVNRISKETLDRLRELLKEAERRVR

SEQ ID NO: 7959 - protein, 188 aa, Artificial Sequence; identical to SEQ ID NO: 7958
  Synthetic

SEQ ID NO: 7960 - protein, 188 aa, Artificial Sequence
  Synthetic
SLREELEELLKRIKERLKRLIEENRRLLEDLRRNLEENIRRNERTVEELKRDVKRLLDEKSDVDKVREVIKELEKRLEEILRRSREVVEELRRRVEEHLRHSERVVKELEKRVTELLREVERKKDEERAEELVRRVKEEMERAVEEVKKTSEENLKAIKTWLEEVNRISEETLRRMREVLKELREDAK

SEQ ID NO: 7961 - protein, 188 aa, Artificial Sequence; identical to SEQ ID NO: 7960
  Synthetic

SEQ ID NO: 7962 - protein, 188 aa, Artificial Sequence
  Synthetic
RLVEELEKLLKDSHDKDRKLIRENEELLKELKRNLDENIKTNEELVDRIRKRVEDLLREKSDVDEVRKVIEDVERTVRRLVEESKRVVETLRELARRHLEHSRKVARENNERLKRLLEEVRRKKDEERAEDLVRRVEKEARDSSDESRRISEENLKEIKKWLDEVNEISKRTLEDAKRLLEDLERKAT

SEQ ID NO: 7963 - protein, 188 aa, Artificial Sequence; identical to SEQ ID NO: 7962
  Synthetic

SEQ ID NO: 7964 - protein, 184 aa, Artificial Sequence
  Synthetic
DLEEELKTVLDRARKDVKRLKEELERILEEVKRMVEELDKRLEDLDEEVREKVKRLIDEKKDVEEARKKLKEVLEDSRRLSEEAHRINRKVLKDVEKLIRDVERILEEVIRRVEKLIEEVKRITDERDVKRVLREAEELLKRVRDLVEKVLREIKRILEEVEELNRRIIRTSREILKRVEEEVK

SEQ ID NO: 7965 - protein, 184 aa, Artificial Sequence; identical to SEQ ID NO: 7964
  Synthetic

SEQ ID NO: 7966 - protein, 184 aa, Artificial Sequence
  Synthetic
SLEERLDKVRRRVEEEIKRLEDRLEELDRRVAETVKRLDDEARKLDEELRERVKDIIRKKDKVDDARRMLEEVIKRSEELSKKAHDINKRVLDESKRLSDEVRKILEEVRERVRELIERVKRITEEEKVKRVIEEMEEIVKEVRKRVDEVIKTSEEILRRVRELNKEILKESEDLAEEVRKKAT

SEQ ID NO: 7967 - protein, 184 aa, Artificial Sequence; identical to SEQ ID NO: 7966
  Synthetic

SEQ ID NO: 7968 - protein, 184 aa, Artificial Sequence
  Synthetic
KLEDELRKILEENRRIVKELEERMKRLDEAVRKAVEDLARSNEESNKRVKEVVDDLIRKKPDDEDAKRMLERVLRESKRLSDDSKRILERVLEESKRLSERVKRILERSIREAERLVEEVKRIDKEEDVKKVLDDIKESSDRVRREIEEVLKESEERLRRVEKKNEDIDRRSEEILDDVRRKAK

SEQ ID NO: 7969 - protein, 184 aa, Artificial Sequence; identical to SEQ ID NO: 7968
  Synthetic

SEQ ID NO: 7970 - protein, 183 aa, Artificial Sequence
  Synthetic
SLEEKARDVLRRSKELNDENRERAERMLDTNRRIADKLREEVERILREVEETVRRLIDEKKDSKRVRDLLRKLEEDVRKVLEDIERILKKSIEVSRRILEDSDKILKENLDLAREVLERVRRVSEDVVERLLKEVEDSSRRVHKRSEELLRESREISERVRETVKKLLEDVERLLRKVTKEVK

SEQ ID NO: 7971 - protein, 183 aa, Artificial Sequence; identical to SEQ ID NO: 7970
  Synthetic

SEQ ID NO: 7972 - protein, 183 aa, Artificial Sequence
  Synthetic
SLEDELREVLERSREKNERLRREAKKLLDTDRERVREILREAEKVLEEVKRTVEDLVREKDKVDEVRELLKRLEEAVRDVLRRLAELLERSLRVSEEVLRDVERILKENLELVKRVLERVRRVEEKVVEELLKRVEDSSKKVEDDVRRLLKEVEKISTELEELAKELVEEVRRIVKEVADRVK

SEQ ID NO: 7973 - protein, 183 aa, Artificial Sequence; identical to SEQ ID NO: 7972
  Synthetic

SEQ ID NO: 7974 - protein, 183 aa, Artificial Sequence
  Synthetic
SLEERAEKILRDSKRTNEKNEEDVRRLLERNERRVRKIEEEAKKVLEDVRREVERLIREKKDDKRVRDILARVIEEVERVLDEVRKLLEESLEMSERVLRESKKILKENLDLVKKALDDLRRVEEDVVRKLLDEVRESSERVHRKSEELLRRVEEISRTVEREVKKLLDRVRRVLEEAEKEVR

SEQ ID NO: 7975 - protein, 183 aa, Artificial Sequence; identical to SEQ ID NO: 7974
  Synthetic

SEQ ID NO: 7976 - protein, 179 aa, Artificial Sequence
  Synthetic
DESRELVERVERVVRKVEKDHERLDRANKESTDRVREAVRRLDEENREVVRKVEDEVKKVQDKKEVVKELVRDLERLSREVLRRVEELLRRNDEISRRLLEESRRLVKELEKILEDVLRAVPDSKEAERLLDDVRRKLEELVRNAERSLEESRKTNEELEKRVRESLKEVERVLRELEK

SEQ ID NO: 7977 - protein, 179 aa, Artificial Sequence; identical to SEQ ID NO: 7976
  Synthetic

SEQ ID NO: 7978 - protein, 179 aa, Artificial Sequence
  Synthetic
RETEEVIKTLEEVVKEVEERVRRLDEENKESTERVKKTVDDLDEENKRVVREVERRVKEVQDKKEVVTDLVRRLEEISRRVLREVEKLLKRNDEISKEVLERVKELVRRLKKIVKEVLDRAPDSKRMEEVLKRVDERLKELERKVTDSLRRSREVNKRLRDKVEKSLREVEKVLEDLKR

SEQ ID NO: 7979 - protein, 179 aa, Artificial Sequence; identical to SEQ ID NO: 7978
  Synthetic

SEQ ID NO: 7980 - protein, 184 aa, Artificial Sequence
  Synthetic
SLEERLREILKRNKEDVEDIRRRLEEILKRNKEEIDRLREELRRILEEVKREVKELIKRKSTDERLIRIAEDVIRRVKKLVDEVDDIARKSHERVRRLVEEVKRILKESHDTLRRLVRKVREDNDEKTAEEVIERIKKLTEDVRRDVERVIREIEKSSDDLRKVVKDVIDDIKRLLKELREEIN

SEQ ID NO: 7981 - protein, 184 aa, Artificial Sequence; identical to SEQ ID NO: 7980
  Synthetic

SEQ ID NO: 7982 - protein, 184 aa, Artificial Sequence
  Synthetic
SLEERLRKILTENERVIRKLERDLEENLERNKKTVKEIEDRLRKLDEDVERLVRELLRRKSTSKDLKKEVEDVLRKSRKLTREVEEILRRSIKRSAELVKRVRDIVRESHKELRRLVEEVRKDNDKDTAEEVIKEIEELTRRLEEEVRRVNERSDKSNEDVRRRVKEVEDESRDLARRLAERVN

SEQ ID NO: 7983 - protein, 184 aa, Artificial Sequence; identical to SEQ ID NO: 7982
  Synthetic

SEQ ID NO: 7984 - protein, 188 aa, Artificial Sequence
  Synthetic
SLEERLRKILEKVKRTVDESRKRSKRLLEENRETMDRLREEAEEILERVKEKIKELVDRKKDSERVKEVVRRVLEEVERLLEEVERVLRESIKTSEDLLRENEEMLKKLEDRAKKLVDEVRTKKDREEAEKLVEEVIRDLDRVADELRELSKRLSDRSRESNERVRRTVKEVIKEIKRVLKELEEKVK

SEQ ID NO: 7985 - protein, 188 aa, Artificial Sequence; identical to SEQ ID NO: 7984
  Synthetic

SEQ ID NO: 7986 - protein, 188 aa, Artificial Sequence
  Synthetic
DLRERMEKLLKEVKDEIDKSEKKSEDNLRTNKKDVDEIRKRLKRILDEVKEELRKLIDEKRDSERVKEVLKRVIETVADLLRRVDEVLRRSIKISKELLEENKKVLEEAKEEVDRLLKEVEDKESDERAEELVDRVAKRIRRVVEDVKRKSEDLNRKSNESNKRVRDLVERVKEEIDKVRDELRKSVK

SEQ ID NO: 7987 - protein, 188 aa, Artificial Sequence; identical to SEQ ID NO: 7986
  Synthetic

SEQ ID NO: 7988 - protein, 181 aa, Artificial Sequence
  Synthetic
SEEERIRELLERVRRRLEESKKKSKDVADEVKETNDESRERSEKLLREVEERLRELLRELDEERVKKLLKELKDRVKELLERDDKVLRENEKSVRDVLRTDEDVVRKLEEKLERVLDVVRKGEKDVEELRKEVEEVVERVRRISERLTEELRRSSERVKRISERLLEDLERVVRDVARRVK

SEQ ID NO: 7989 - protein, 181 aa, Artificial Sequence; identical to SEQ ID NO: 7988
  Synthetic

SEQ ID NO: 7990 - protein, 181 aa, Artificial Sequence
  Synthetic
SEEERIRELLERVDRRLKESEKRSTDVARRVREENKELEKAARKILEDARRELEKLLREIDDEEVRRVLRELEKIVREVLRRVEELLKRNEESVERVLREDKKVADDLRRELKKVLDVVRRGEKDVEELIKRVEDMVREVEKTSRKLIEELKRSSDEVRKMVEELLRRLERVLEEVKKRVK

SEQ ID NO: 7991 - protein, 181 aa, Artificial Sequence; identical to SEQ ID NO: 7990
  Synthetic

SEQ ID NO: 7992 - protein, 181 aa, Artificial Sequence
  Synthetic
KDEETVTKLLEDVERKNRESEKDSRKIVEDVKDENRKLEDEARKSLEDSERKLERLERDVDEERVRTVVRDLERISEEILRKIKEVVERNRKSLEDVLKKDKEVADRNRKTLKDVVELLKRGEVDVRELAKRLRESTERVEEISRRLIKELEDSSDKVRKVVEDLLRENKEAVRRVAEEAT

SEQ ID NO: 7993 - protein, 181 aa, Artificial Sequence; identical to SEQ ID NO: 7992
  Synthetic

SEQ ID NO: 7994 - protein, 186 aa, Artificial Sequence
  Synthetic
SELEKVEEDIRRLVERVKKIAEDVERLTRELVKEVRKSTEDSVRDIERLMKELREIARDVSDKEELIRRLEEVVKRVEESVRRDVDLLKRVVERSEDISRELRKEAEEVVKTVRRIVEELIRRRDKDKDAKKRLEDLLDTLRKIVEDVSRRLKELNDRLRKLVEDSKRRNEELLRRLREIVKEIAK

SEQ ID NO: 7995 - protein, 186 aa, Artificial Sequence; identical to SEQ ID NO: 7994
  Synthetic

SEQ ID NO: 7996 - protein, 186 aa, Artificial Sequence
  Synthetic
DSDKEVEKRIRELMKEVKDSTKESEDKIRESNERVKESSKRSEDEIRKLMEELDEIAKRVKDKKDLEELLRRVEETVKKLVDDDKETLRKVLEENRKSVEDDDRRLREVVERVERIVRELIRERDKDEDATRRLKKLLDDLKKEVDDSRRRNDELIKETERLIRESAKRNDKLLEDLKKRVDEIRK

SEQ ID NO: 7997 - protein, 186 aa, Artificial Sequence; identical to SEQ ID NO: 7996
  Synthetic

SEQ ID NO: 7998 - protein, 186 aa, Artificial Sequence
  Synthetic
DEREEVEKRIRDLAEEVRRIVKRVEDETRRLVEEVKKSSDDSRRTIEKLARELKEITRRVKDKRTLIEILRRVVEEVEELVRDDVDKLRRVVEESERISRRLEEKLEEVVKRVEEIVRRLIKRRKDDKEAKDRLEDLLRRLREEVKRVKEKLKKLNDDLRREVEKSKEDNERLLKKLRDEVRKSAT

SEQ ID NO: 7999 - protein, 186 aa, Artificial Sequence; identical to SEQ ID NO: 7998
  Synthetic

SEQ ID NO: 8000 - protein, 171 aa, Artificial Sequence
  Synthetic
DEVEKVLREIEKLIKEIREINKRINDRIEELIRRLRERVKKVSRESEELIRDLRRDGKEELVKEVLKRSEDLARRVKEEVKRVLEEVRELVERSVRIAEEVLREVRELVRKKLKDERKAREIIKRVEKVLEEVRRSLETSEKRVRDALREIEERLKENKRRVREVLEEIRK

SEQ ID NO: 8001 - protein, 171 aa, Artificial Sequence; identical to SEQ ID NO: 8000
  Synthetic

SEQ ID NO: 8002 - protein, 179 aa, Artificial Sequence
  Synthetic
DEKEKLIKEVEDSTETVKRLVEELSRRSKKITEDVERLVKKLSDESKKILDEVRDLVRKRGGRAKDVEEILKRVTRISEELVKRVEEILRKSNKVSRDIVKEVREILKEDEDLVRDVVRKLRNSEEADKLRKRSEDMVRRIEEHLKKNLKENKDALDKIRKELRENIETTKKTVDDIRK

SEQ ID NO: 8003 - protein, 179 aa, Artificial Sequence; identical to SEQ ID NO: 8002
  Synthetic

SEQ ID NO: 8004 - protein, 179 aa, Artificial Sequence
  Synthetic
DEKDKLIEELDKILEDVRRRVEELSRRSKEITETVKELVKRLSDESERILREVDDVVRKRGGRAEDVDRILKEVLRFSKRIVEEIERILRESNKVSKEIVDEVRKILEKLERDVEDVVRKLRDSEKAREVRRKVKETVERIEEELRRNIEENREMVERVEREARKNIKDTRKRVEEIRK

SEQ ID NO: 8005 - protein, 179 aa, Artificial Sequence; identical to SEQ ID NO: 8004
  Synthetic

SEQ ID NO: 8006 - protein, 187 aa, Artificial Sequence
  Synthetic
RVEEKLEKIKRDIEKLVEDMKESNTRSKRKLEKLVEEMRRNNEELTRRVEELVKKIEDDVRGKKLEEVKRLAKELREIAERSRKLSEELARELEKSVKDSLDESRRLARELEEVVRDVLRKIRKERENEDLVRRLLEEIRRILEEVRRTDKELLDENERILREVEKLNRDLVKEIEEILKKVEDDVR

SEQ ID NO: 8007 - protein, 187 aa, Artificial Sequence; identical to SEQ ID NO: 8006
  Synthetic

SEQ ID NO: 8008 - protein, 182 aa, Artificial Sequence
  Synthetic
SEVEKAIEEIEKVIKEVRDKNRRVLEESKKLIRTVEETNKRNIEEIEKWIKTLDELTDRNSDKKVIEKVLKELEDEVRRHVEHSERVLREAIKISEELVRRSEEVLKEVTERVERIVRKVVRTEDAAKKAKEIIDKLRTLVEEVKRTNDKSLRDTREVVRRVEETLRRVEEKVKKRVDEIRK

SEQ ID NO: 8009 - protein, 182 aa, Artificial Sequence; identical to SEQ ID NO: 8008
  Synthetic

SEQ ID NO: 8010 - protein, 182 aa, Artificial Sequence
  Synthetic
SEVEEVIRRIEEVLKELRRKNEEVLRESERANDEVRRVNEKNIRDIKKWLEDVKREVDNNRDKREIEKVLRELEKRVREHVEHSKRVLDELRETSRRLVERSEELLRRVRKEVKELVDKVVRSEDARRRAEELERRVDKVVREVEKTNKESEEESKKLVDDVRRTLREITERVKDAVEKTLR

SEQ ID NO: 8011 - protein, 182 aa, Artificial Sequence; identical to SEQ ID NO: 8010
  Synthetic

SEQ ID NO: 8012 - protein, 186 aa, Artificial Sequence
  Synthetic
SRDEEVARRVERVLEESEKLSKEVAEENEKVLREAREILEDVRKKVEDVARTLRELAKKVEDKDDLVRKVKKLVDEVEEILKDVIRRVRKLVKDLHDKNRRSLEESRRLVEEVEEILKDVIREEDKNEEAKRRLEDLRRKLEELVKRNEKKLRDLDERLKELVERIERAAEKLLRDLRDLVRKITK

SEQ ID NO: 8013 - protein, 186 aa, Artificial Sequence; identical to SEQ ID NO: 8012
  Synthetic

SEQ ID NO: 8014 - protein, 186 aa, Artificial Sequence
  Synthetic
RELEKVEKEVEDVLRDIERSSDEVRRENKRVAREMEESSRKVAEDVERVLRTLEELAKKVSDKDDLLRRVKKLVDEVRRRLEESIKRSEDLVRELHEINKRSIEETEKLLRDVEEILKDVIRKKDKNEEAKKRAEELVRRLEELLERNRETLERLDKELKDLVEKNKRTAEKLVKELEELVERIRK

SEQ ID NO: 8015 - protein, 186 aa, Artificial Sequence; identical to SEQ ID NO: 8014
  Synthetic

SEQ ID NO: 8016 - protein, 189 aa, Artificial Sequence
  Synthetic
DELERVRREVKRLADESEKVSREVEERVRDTNRKSEEISRRVEKLARELLKKVEEVERRSGTEEALRDVIRELKKVLETVKKIVEDSVRTSEKLLKENERIVEESRKTSEDIVRRIREIVEELVRRRDKDEDLKRTLDELRKTIEKLVKDNRETLERLIRESEETIKRNREKLEELKRRLETLLRRVRK

SEQ ID NO: 8017 - protein, 189 aa, Artificial Sequence; identical to SEQ ID NO: 8016
  Synthetic

SEQ ID NO: 8018 - protein, 189 aa, Artificial Sequence
  Synthetic
DELEDVRRRVDELVEELERVSRRVAELVKRIIDESRDISRRVARRVEELLRRLREVTKRSGTEEAREEVERTVERVLEEVERILRESVEISRRLVERIREIVRESLERSREVVKTIREIVKRLLEKRKDDDELRKRLEDLKRKIERLLEDNRRKLEELIRRAEKVVEENERTMRKLKEDAKRLLEEIRK

SEQ ID NO: 8019 - protein, 189 aa, Artificial Sequence; identical to SEQ ID NO: 8018
  Synthetic

SEQ ID NO: 8020 - protein, 177 aa, Artificial Sequence
  Synthetic
SVEDLVREVEERVRKVEKDLRELLDRLRRENEDAVRRSRESLRRNEEENKRVVDELRKDGVPESLVRELEESVKRVKEISDELLKRSKRSLEEVEEIIRRLEEDLKRVLDEIRKVATDGDGREEVVKKVREVLERVKETVKRVVDRNREVVKRLEDENRKVSEENKRVVEKVKEDAR

SEQ ID NO: 8021 - protein, 177 aa, Artificial Sequence; identical to SEQ ID NO: 8020
  Synthetic

SEQ ID NO: 8022 - protein, 177 aa, Artificial Sequence
  Synthetic
SVEELVRRIAEKLRKVLDEIERLVDELRKENEEVVRDIERLVEDNEREVRDVLRKLEKDGAPRSLLKTLEESSREVRKRIKKLVEDSRRSVKEVEERIRKLKEELKRVLEKIKKLAEDGDGSEDLVRDAERVLKRVTDEVRRVVKENKDVVRKVREEVERVSEENKRVLEKVTRDTK

SEQ ID NO: 8023 - protein, 177 aa, Artificial Sequence; identical to SEQ ID NO: 8022
  Synthetic

SEQ ID NO: 8024 - protein, 185 aa, Artificial Sequence
  Synthetic
DEVETLKREVERLNKEVLDRVRKVIKEIKELDDRVRRENERVIREVERLIEEVRDRVRKNSDVKELVKRLADELRRVVKESKRLTEELVRLSEEVNKRLEEEVRRLVEESKRVLREAKRVLDEDRDRRAEKIVKELREHSDEVVREMRELVERSKRHSTKVVEELKKSNKELEEKVRKVVRELEK

SEQ ID NO: 8025 - protein, 185 aa, Artificial Sequence; identical to SEQ ID NO: 8024
  Synthetic

SEQ ID NO: 8026 - protein, 185 aa, Artificial Sequence
  Synthetic
SEVEELRERIKELNKRVLDTVRRVLERVKELNEEVDRRNKEVIKEVERLLEEVKREVTREKDSKKLIDDLAKRLEDIVRKSKKDTRELVKRSKRINDEAEKLVRKLVEESRKVLEDAAEVLKKDRDRRAEKIVDDIRRHSEDVVRRMRKLVEDSRRHSKRVVEEMERSNRELEERVKRVVEELKR

SEQ ID NO: 8027 - protein, 185 aa, Artificial Sequence; identical to SEQ ID NO: 8026
  Synthetic

SEQ ID NO: 8028 - protein, 185 aa, Artificial Sequence
  Synthetic
SEVEELIKEIRRLNEEVRRRNKKVIEEVKKLNEDVKRKNDKVIEDVERLLREVKKRVEDESDSKELIKKLAKELEDVVRESEKETRRLADESRKINKESRDRTKKLVEESKEVVDRAARVIEKDRDRRVEEIVRTIEKHSRDVVREMERSNDESEKHSRKVVREMEKSNKELKKKVEKIVRDLEK

SEQ ID NO: 8029 - protein, 185 aa, Artificial Sequence; identical to SEQ ID NO: 8028
  Synthetic

SEQ ID NO: 8030 - protein, 185 aa, Artificial Sequence
  Synthetic
SEVEKLKREVERLNEEVLRRVRKVIEDSKRLNEEVRKRNEDVLKELKDLIREVKRRVEEEDKVKELVKKLARRLEEVVKDSKRRTKKLVEDSKKVNDEIRKLVRELAEESKTVLEEVRKVLKKDPDDRMRKIVEDLRRHSEEVVREAEDLVRRSEEDSRRVAREMEKSNEEIEKEARDVVRELER

SEQ ID NO: 8031 - protein, 185 aa, Artificial Sequence; identical to SEQ ID NO: 8030
  Synthetic

SEQ ID NO: 8032 - protein, 185 aa, Artificial Sequence
  Synthetic
SEVERVVKEAEDLSRENNKRVKEVVRRAEDTNRRVEDENRKLLKEIKDLLREVKETVKRIPKREAVKIAEKVLREVRELVKRSREIAKKVLEDNADLVRRVKESSEKVLKDVEDLVRELLDRKRDVERVRRLLEEVLRRVAEDVRRSEEELDKVLRDSAESLKRSDKSLRDIVREVEKVLDEIRK

SEQ ID NO: 8033 - protein, 185 aa, Artificial Sequence; identical to SEQ ID NO: 8032
  Synthetic

SEQ ID NO: 8034 - protein, 176 aa, Artificial Sequence
  Synthetic
SAEDLLRKLREDVERVMRELRKSNEESRKRVEEVVEEAERILKESRERSEELVRRLNVDRLAEELRDVDRRIDKDVKKAVEDLRRSVDRSLKDTEDLVRELREVLKRVADVVRKTRVEEVLRKLAEDVKRVLDKVKEENKRLLEENDRMLEEVRRLLKKLLEESEKVLEEVERKAR

SEQ ID NO: 8035 - protein, 176 aa, Artificial Sequence; identical to SEQ ID NO: 8034
  Synthetic

SEQ ID NO: 8036 - protein, 183 aa, Artificial Sequence
  Synthetic
DLREEIRKLREDAKRVIDESRKSVKENEKRNKKLLDESEKSVRENEERNKELIKRVKDRGVPEDIVREVKELLDRSIKKLREVTEEIERTLKDSIKKLKDVTREIERLAREVIKRLEEVERANVREVLRKVKEELRRVLEKLRRLNEEASRENERILRELRKKNRDMNEDNRRILEELDEKAR

SEQ ID NO: 8037 - protein, 183 aa, Artificial Sequence; identical to SEQ ID NO: 8036
  Synthetic

SEQ ID NO: 8038 - protein, 183 aa, Artificial Sequence
  Synthetic
DMEREVEKLERELRELIKRIRKIVDENRRRNEELLERSRESVRRNEEENRKLLEEVKKSGVPEEIVERIRKLLEDSIRKLRKVTKEIEEELRRSIEKAERVVEEVERLAEEAIRRLRDVLKANVEKVLREVKEEVRKLLEEIEKTVRDVSRENKRILDELRKKNKRADEENREILKKLREDVR

SEQ ID NO: 8039 - protein, 183 aa, Artificial Sequence; identical to SEQ ID NO: 8038
  Synthetic

SEQ ID NO: 8040 - protein, 183 aa, Artificial Sequence
  Synthetic
SMEEEIRRLEEDVRRLVDKSRKSVKENEERNRKLLEESKESVRDNARRNEKLIRDVRRKGVPEDIVREVEELLRDSIRDLKRVTDEIRKKLEESIKKLREVTERIERLLRKLITEAREVLRANVREMLEEVLRRLEDALRRLEEENKRVSEDNERILEELRRKNEEADKRNRDILDDLRRRAD

SEQ ID NO: 8041 - protein, 183 aa, Artificial Sequence; identical to SEQ ID NO: 8040
  Synthetic

SEQ ID NO: 8042 - protein, 183 aa, Artificial Sequence
  Synthetic
DMEDKVRKLERDVRELIKEVEKIVRDNADENRRVVEESEKSVRELADRARRLIDEIRKGGVPDEIVRRVEKALREVIKRLRDVTDEIRKLAKDSIDRLKKVVEDIRRELERAVKLLREVLSANSEDVLREVKERVEEVLDRVRKKVEKVSRENKEIVKEVRKKNEDAVREAEELLKKIREEVR

SEQ ID NO: 8043 - protein, 183 aa, Artificial Sequence; identical to SEQ ID NO: 8042
  Synthetic

SEQ ID NO: 8044 - protein, 186 aa, Artificial Sequence
  Synthetic
DEVEEVVRRIEELIKEVEDVDRDIERRVKELDEELRRVDDEIRRRAKKLLDDLEKRVREISDKETVVRIAREVLKEVKRLVEESRKIATDVLRENERLAKESTDIVREVKRRVEDLVKKLTDTKKDSERVRRILTELRKRVEKVVRDSEKTLRESVERSARLLKESKESLEELERRAREVVERIKK

SEQ ID NO: 8045 - protein, 186 aa, Artificial Sequence; identical to SEQ ID NO: 8044
  Synthetic

SEQ ID NO: 8046 - protein, 186 aa, Artificial Sequence
  Synthetic
DELEEAEKKVRDLIRRLREMNERALRESERLIRRLREVDEEIVRRIEDLLKKLREEVEREKDKETVKRIVEKVREDVRRLVKTSEEIVRRVLEEDKRLIKESKDIADRMLEEVRRLLREVLETKKDSREVRKTLKDLEDTVKRVLEESEESARESEKRSRDVLRESERSLRELEKKVRKLLEEVKK

SEQ ID NO: 8047 - protein, 186 aa, Artificial Sequence; identical to SEQ ID NO: 8046
  Synthetic

SEQ ID NO: 8048 - protein, 181 aa, Artificial Sequence
  Synthetic
SDVDKVAKEIDDALKDVRRKVDKVRKDNERVNREVEERVRRVTERNRDVIEEVKRRVEEVKEDKDRLDELLKEVKRSTDRVEETVKRLLERSEESVKEVVEILRKLLKDLERVVKEVRDRIGEKVSELVREIERRLEELVKELRKILDELRKRNEDTRRRLEEALKRNREEAERLEREIRK

SEQ ID NO: 8049 - protein, 181 aa, Artificial Sequence; identical to SEQ ID NO: 8048
  Synthetic

SEQ ID NO: 8050 - protein, 181 aa, Artificial Sequence
  Synthetic
KDVDEIATELDEVIDRIRKKVKEVVERDEKVNRDVNDEVDKLTERNRRVLDKVLKDVTRRKEEREVVEELLERLKKSTDDVRKTVKKLLRESEESVERVRETLERLLEEVDRVLKEVEERIGRKVDRLVDELRKRVEDAKREIREILEKLKRDNDESKKRLERLLKENEDALREILERLRK

SEQ ID NO: 8051 - protein, 181 aa, Artificial Sequence; identical to SEQ ID NO: 8050
  Synthetic

SEQ ID NO: 8052 - protein, 181 aa, Artificial Sequence
  Synthetic
DDVEKAVREVEEMLKRVDKEVERVSRENKRVSDEVRKKVKEVERKIKEVLDRIKDEVDRVKDDKEVLRELVERARDVVRKVREELRKLLKEDRESSEDVDRIVTELLRRLEEVLDDVRRRIGEKVDELVKRLEDKMRRVKEKLKRLLEKNREDSERSERELREILKKITREVEELAKELEK

SEQ ID NO: 8053 - protein, 181 aa, Artificial Sequence; identical to SEQ ID NO: 8052
  Synthetic

SEQ ID NO: 8054 - protein, 172 aa, Artificial Sequence
  Synthetic
EEVKKLLEEVRDLLRRVLEEVERSSDEDRKLNERVNEAIEKSIREVEELLRRIDREVDGGEEAVRRLRKVVKESRDLSEELVRRLEESLRDSRRRSKELVERLEKIVEDAERAGVREELVEELKRRVDEVKRRAEEINRENDERNKESKRRLEELNERLEERVRRLEEKLKK

SEQ ID NO: 8055 - protein, 172 aa, Artificial Sequence; identical to SEQ ID NO: 8054
  Synthetic

SEQ ID NO: 8056 - protein, 172 aa, Artificial Sequence
  Synthetic
DEVEDLRRRVEKILEDVKRTVETASKRDRELNEEVNRLLRESVERVDRLLDRIRREADGGEEVVRDAERIVKESEKLSTDLVRRLRDSLRRLEELVERLVRELERVVKEAEEAGVRKEIVDRLRKAVEEVSREARKILDENRRRNEESEKRMREINKRLEDKVREVKKELEK

SEQ ID NO: 8057 - protein, 172 aa, Artificial Sequence; identical to SEQ ID NO: 8056
  Synthetic

SEQ ID NO: 8058 - protein, 172 aa, Artificial Sequence
  Synthetic
REVDKLREDVRRLLEELLRALRESSKEDEKLNRKVNREVDRVLKEVDDLLEDIKKRVDGGKEAVEELERVVRKVEDLVRRLVEELEKSLRDSERLSREVVKKLEKIVEDAERAGVREEIVKRLEEEVREIVKEIKEINDKNRKKNEDSARKADEKVKELEERVRRVVKELRD

SEQ ID NO: 8059 - protein, 172 aa, Artificial Sequence; identical to SEQ ID NO: 8058
  Synthetic

SEQ ID NO: 8060 - protein, 172 aa, Artificial Sequence
  Synthetic
KEVEDLVRRVEKLLRDIDRELKRSSDEDRELNERVNREVDRVLREVDRLLKEIRETVRGGKEAKETLERVVEKVERLARKLVEELRRSVEKSRKLSEKVMRDLEKVVDDARKAGVEERIVRTLEKRIRDLVRKAEEIDRENEKRNKESSDRMERLVRELRKRVKRLVEELER

SEQ ID NO: 8061 - protein, 172 aa, Artificial Sequence; identical to SEQ ID NO: 8060
  Synthetic

SEQ ID NO: 8062 - protein, 172 aa, Artificial Sequence
  Synthetic
DEMRRLLREVERILEEVERVLEKSVRDDERVNREVNRRLDEVLRRVEDLLRRIEKEVRGGREAVELLKEVVDRVRRLVEELVKLMEDTLRRSRELSERLVREARRVVEELRAGGVEERLLERVRREVEKVRERADRIDKRLEDTNRRSKDRAEELVRELEKRVEDLKEKAEK

SEQ ID NO: 8063 - protein, 172 aa, Artificial Sequence; identical to SEQ ID NO: 8062
  Synthetic

SEQ ID NO: 8064 - protein, 172 aa, Artificial Sequence
  Synthetic
DEVRKLEEEVDRILREVKEMVEDSIRRHKEVNDEIRRRVERVLEEVKTLLDLIREKDRGGKEAVDRLRKVVTDVERTARELVRRSEKTVRESEELSRRLVERLEKVVEDAERAGVRKEIVDELRKRVEDVSREAKKLDDDLRENVKRLSEEMKKLVDDLRREVDRLEKERRK

SEQ ID NO: 8065 - protein, 172 aa, Artificial Sequence; identical to SEQ ID NO: 8064
  Synthetic

SEQ ID NO: 8066 - protein, 172 aa, Artificial Sequence
  Synthetic
DEVEELRRKVEEILRRIREDVRKSIEDHRDVNRRVLEAVRRSTKRNKDVVDRLRDEDRGGEEAARTLERTLKRSEELSRELVERSRKTVEESRRRSKRLVDELKRVVKEVKDGGVEERIVKRLEDEVRKLVDEMRKLDEELTRNVDEVRREAERLDKENRDENRKLKEELKK

SEQ ID NO: 8067 - protein, 172 aa, Artificial Sequence; identical to SEQ ID NO: 8066
  Synthetic

SEQ ID NO: 8068 - protein, 179 aa, Artificial Sequence
  Synthetic
SEMEKVVTDAKELLERLDRELERVIRESDKILDELRRKIEEVIKRSDELLEELDRRIKENKESKDLVEEIVRAAEESDKDVERVVDEIRKEVEKVNDEVRRLIKEIVDRLKDMLKKVRDAGVREELIERVRRLVEELIEKAKKLLEESERKSARLIEDLERLLEESRRKSDKLIKKARK

SEQ ID NO: 8069 - protein, 179 aa, Artificial Sequence; identical to SEQ ID NO: 8068
  Synthetic

SEQ ID NO: 8070 - protein, 179 aa, Artificial Sequence
  Synthetic
DEVEEIRKEIEDILRRLRDLLRRVIEDSRRLLDELRERNERVIKESEDLLRDLEDKIRKRKESEDLVREIVKRARESDDKSRRVSKESADRARRSDEKVERVIREVVERLRRVVKKAEDAGVDKEIVDRLRDEVRKLEEEAKELLRESNELTRELIDRLEKLNRDSNRKSRELIERLRK

SEQ ID NO: 8071 - protein, 179 aa, Artificial Sequence; identical to SEQ ID NO: 8070
  Synthetic

SEQ ID NO: 8072 - protein, 185 aa, Artificial Sequence
  Synthetic
SELEEVEERIKKELDRLEKKMEESIKRDKEINRELNEMLKKSIKDSDDILRELRKEIEDDKDSKDVVERVKRRLEELIKRDREVIEEVERRLDELIRHNEEVVREVKEELDRLIEEARDVLRKEQDKRAEEIVKKLEKEVEDLVRKAKKLVDELRKENEESKKRARELLRRSEEKVKKLVREAEK

SEQ ID NO: 8073 - protein, 185 aa, Artificial Sequence; identical to SEQ ID NO: 8072
  Synthetic

SEQ ID NO: 8074 - protein, 169 aa, Artificial Sequence
  Synthetic
DSEELVRTVKKELEDIIRESRKLVEDVARALEKIEKEIEEIVRTTDKELRKLIEEAKDVEELKKLVDDLRRENERVLRELKKTLTDLKRKLEESTRRSEDVVRKLIKELEDRGTEEVVKKVKDLLRELEKHNRTVLEEVKKALDELRRRLEEVHRRSKETLDRIRRDAT

SEQ ID NO: 8075 - protein, 169 aa, Artificial Sequence; identical to SEQ ID NO: 8074
  Synthetic

SEQ ID NO: 8076 - protein, 169 aa, Artificial Sequence
  Synthetic
REDELVDTVRKRLKELIEESERLLEEVKKKLEEIKRRVEKILRETEKELRDIIRKNKDVDELRRVLTELEKRNREVLERLEKLVRELLKEAERSLEKSRRAVTRLLEELRRDGDDKVLEKVRKVLEDLKRENKEVVERVDRVLEDAKRKLEKVHKDSRDALKKLDEDAK

SEQ ID NO: 8077 - protein, 169 aa, Artificial Sequence; identical to SEQ ID NO: 8076
  Synthetic

SEQ ID NO: 8078 - protein, 169 aa, Artificial Sequence
  Synthetic
SEKELLDRVKEKLKKIIDDVEEILRRSKKELEKIIRESEKLVEEVKRDLRRLIEENREVDELERLVRDLERILKESTEKSRRAVEELERINREVLERLRDALRKLEERARREGSEKVVEEVERVLEKLLRDVERVHRRTKEVLDELRKENKKVVEDVRDVLEKARERAR

SEQ ID NO: 8079 - protein, 169 aa, Artificial Sequence; identical to SEQ ID NO: 8078
  Synthetic

SEQ ID NO: 8080 - protein, 179 aa, Artificial Sequence
  Synthetic
EEVEDVARKIEKLLEDVRRIDKEISDRNRELLKEVRKIDEKILREIEKLLEELRDTATKDSDKRAVTEIVTRVVERVEKLLKESEDIVREVEERVRRSLKESRRILEEVVRRVKELLERKLGNTEEAERIKRELDRIRKESEETVKENEERLRRIKEESRRSVERARTELKRIEDEVRK

SEQ ID NO: 8081 - protein, 179 aa, Artificial Sequence; identical to SEQ ID NO: 8080
  Synthetic

SEQ ID NO: 8082 - protein, 182 aa, Artificial Sequence
  Synthetic
KVEDELRKLREEVRRSKEEVEKKVKELDEEVKRSKRESEKKLRDLREEVKRLEDDAERSNDDEVRKIVKEVKDRVEKLLKEVEESSKEVEERVKKLLDEVRKSSDRVREEVERLLKEVADENREKFLEEVRERVRKLLDENHKILKEAERRVEELLRRNHKILKEALDRVRKLLKELRDRTR

SEQ ID NO: 8083 - protein, 182 aa, Artificial Sequence; identical to SEQ ID NO: 8082
  Synthetic

SEQ ID NO: 8084 - protein, 186 aa, Artificial Sequence
  Synthetic
SIEEILRELREHVKENMERSEEIVRDLTRKVDESTRDSERILEKLKKDVDKLEEDAKRANSERVKKVIKEAKKRVKELLEELKKSSDDVRRTVEELVKEAKESSKRVKDEVERLLEDLERKKDREEAEELLREVRERVERVSRRNEELLKRVERDVERVLRENHELLKRVAEEVERVLKEVRERTK

SEQ ID NO: 8085 - protein, 186 aa, Artificial Sequence; identical to SEQ ID NO: 8084
  Synthetic

SEQ ID NO: 8086 - protein, 186 aa, Artificial Sequence
  Synthetic
SIEEILEKLRREVEESEKDSRRSAEELRKHVRENEKRSEDIVRKLTEDVERLERKARSRNDRRVEDLVRRVKRLVTELVKKAKESSDKLREDVERHIRHSEDSSRRVKETVERLLKRLEEKKDREEAKELVREVAERVEDVLRKNHEINKTNAEAVKKWSEDNRKLLEDVRREVERVLKELEKEMT

SEQ ID NO: 8087 - protein, 186 aa, Artificial Sequence; identical to SEQ ID NO: 8086
  Synthetic

SEQ ID NO: 8088 - protein, 177 aa, Artificial Sequence
  Synthetic
DEVRKLVEELRKINEDDKRRSDKNFDDNRKLAEDVKRVLERNVEENRKMAKRLEEVLRNNSPSKDLAELIKRWEELIKKSEDDLRRLLKEWEELIRRSAEDSKRSLDDLRRLLERIRRDGLDEKLLKEAEERIRRNAEENRKLLERSKKALEEVERRARKLLEESRRALEELKKRAD

SEQ ID NO: 8089 - protein, 177 aa, Artificial Sequence; identical to SEQ ID NO: 8088
  Synthetic

SEQ ID NO: 8090 - protein, 177 aa, Artificial Sequence
  Synthetic
DEVRELVKELRELNKRDKKRSKELRDKLEEANREDEEKTRKNKEDNERMAREVERVLRDDSPSEVVRKLLEDWKKLIKDSEDDSRKSLEELKKLLRELAEDSKRSLEELRDLLRKIAEAGLEERLLKEAEELIRRNEEENRRILREVEERIKKNEDDNRRVLKRSREELERVEREAR

SEQ ID NO: 8091 - protein, 177 aa, Artificial Sequence; identical to SEQ ID NO: 8090
  Synthetic

SEQ ID NO: 8092 - protein, 177 aa, Artificial Sequence
  Synthetic
DEVDKLRKELEDANARDREKSKENKDENDKALKELEEVLEKLKRELEEIVRRVKEVLDKNSPSEVVKRLLDDARRVLKKLADDLRRLLDEWRKLLRKSAEDSRRSLEELERLVKRIAEAGLEEEILKKIEKEIRTNREENERLLKESEDELKRLEDEMREILERIKRLIEEVEERAR

SEQ ID NO: 8093 - protein, 177 aa, Artificial Sequence; identical to SEQ ID NO: 8092
  Synthetic

SEQ ID NO: 8094 - protein, 177 aa, Artificial Sequence
  Synthetic
DEVRELVKELERINKEDRDKSRENFKRNADIAKEVEDNLERNEEENRKVEEEVRKVLRDNSPSKVIRELEEDWKRLIKESEDDLRRMLKRWEELIEESRKDSEDSLRALERLLEEIARAGLEEDLLRDAKRKIDENKEENERLLKESRKLLERVRKRAEELLRKSRKALEDLKEEAK

SEQ ID NO: 8095 - protein, 177 aa, Artificial Sequence; identical to SEQ ID NO: 8094
  Synthetic

SEQ ID NO: 8096 - protein, 177 aa, Artificial Sequence
  Synthetic
SEVDKLEKEVRDANERDRRNSERNRKENEEMLRRVERVLRELKKKLEEAIRRARKVLDDDSPSEVIKELLKELKRLLEEIARTLKRLLDEWKKLLDDSAEDSKRSLDELRRLLEKIRRDGLDERILERIEELIRDNAKRNEDLLRRSKEMLDELRKKAKEILDRIRKLIKEVEDKAR

SEQ ID NO: 8097 - protein, 177 aa, Artificial Sequence; identical to SEQ ID NO: 8096
  Synthetic

SEQ ID NO: 8098 - protein, 178 aa, Artificial Sequence
  Synthetic
DEVERVVEKLKTLIEEWKRLTEEIEKKNEELIRRIEKVLEDLFRENEKLARDIKREIDELRTDKKMVDDLRRRLEESLRRSEEAIRKLDEDLERSLRETEELSRRMLERLKRILDEARERNVDEELLRRIEEDIERLERTDREVLKRSEKKIRELRERAKELLKRSEEIIKKLEDEAR

SEQ ID NO: 8099 - protein, 178 aa, Artificial Sequence; identical to SEQ ID NO: 8098
  Synthetic

SEQ ID NO: 8100 - protein, 178 aa, Artificial Sequence
  Synthetic
SKDDELKRKIDELIDRWRRLTEEIKKKNDELVKKWEKLTKEVTDHSRDLNRKIREELERLRTSREVLKKLLEDLRDDLRRAEELSEKMTRELERSLEETRKLSEEARKRADEILDEIRKNRLDERLLEEIEERIEKLERDDKKVLDDSRKKIDDLRKRDEEVIRRNRESIDRLRREAD

SEQ ID NO: 8101 - protein, 178 aa, Artificial Sequence; identical to SEQ ID NO: 8100
  Synthetic

SEQ ID NO: 8102 - protein, 179 aa, Artificial Sequence
  Synthetic
DEVETVDDRVKKVIRKLEELLRELAKLNKDIVDDIRRRLKEVEERNRKLAEDIERLLEEGGEDTKRLLREVEEIARRLHEENERVLREIEKLARELHKLNEKVLRDIDRLLRELEEELRRTGVDEDVIKKVRDEAERIRREVRRLDEESRKTVKRLLDEVRELNRRSEEELRELRRRIE

SEQ ID NO: 8103 - protein, 179 aa, Artificial Sequence; identical to SEQ ID NO: 8102
  Synthetic

SEQ ID NO: 8104 - protein, 178 aa, Artificial Sequence
  Synthetic
SELEEVRERLRKLIEDLKRLNEESLKENREIIKALRELNERSLRENKELIKRLEDSNLTSEDAKRLVKRVEDESRKSAKRNEDVVRESRERSKRSAERNKRVVREVEERVKKLAEDIDEGDEARTIIEEIKRRVDELRKHIEESIKEVKKLNDEVEKHIRESIKESEEDLKRLKDRID

SEQ ID NO: 8105 - protein, 178 aa, Artificial Sequence; identical to SEQ ID NO: 8104
  Synthetic

SEQ ID NO: 8106 - protein, 177 aa, Artificial Sequence
  Synthetic
KDDEDVDEKIRRAIKKNEELSREIEDKIRRILKKHEDLTRDLAREIREVVRKLRELSKRGGGKEMADKVLKEAKEVIEKIERTSRKSLKEVKDLIDRLAERSKKSLDELREVIERLRERGVSEELLRKVEELLRRLEEENRKILKEVDERLKDLEKKDRDLLEEAKKLLEDVERELR

SEQ ID NO: 8107 - protein, 177 aa, Artificial Sequence; identical to SEQ ID NO: 8106
  Synthetic

SEQ ID NO: 8108 - protein, 182 aa, Artificial Sequence
  Synthetic
SELEKLIKELRDLVRESEERLRELVRKVKELIKRSEDEVERLLDRSRELAKELEEEIRRKGLEERLLREIEKELRELLKRNRDSLRRLKELYRELLRRIRKLLEDIRRKYEEVLRRLEEAPDRREVLDKLKKDAKRVNDDSERIIKRADEEVKRVNEESKRMLEENEKMNRDLVRRIRERIK

SEQ ID NO: 8109 - protein, 182 aa, Artificial Sequence; identical to SEQ ID NO: 8108
  Synthetic

SEQ ID NO: 8110 - protein, 177 aa, Artificial Sequence
  Synthetic
DLEEMLTEVERLARELEEESKKIRKEVERLARELEEESKEINKRIKDKADDLKEKLKDVREVDKLLKEIEEELRRVTEESRKVLDDVRRDLDRVHEETRRKLEELKKRAEEVRRSNVDREIIKRLVDEVKKVIDELMKKNRKLLEDVERILTELSERNRDLARKVDKLIRDLEKRAR

SEQ ID NO: 8111 - protein, 177 aa, Artificial Sequence; identical to SEQ ID NO: 8110
  Synthetic

SEQ ID NO: 8112 - protein, 182 aa, Artificial Sequence
  Synthetic
SKLEEVKERVKKLSKRNLDVAKRVLDEIDKLIKEDLKKTEDALRRIKELLDRLREMKRRGEIREEEVKRVIDDVRRLLEDIERHNREVRKRVEELLKRLKEHTEEVARRVERLLEELKKDDDDERIRRIVKEVRELVRRNDEEVDKIVEEVKRLLERSSRENEKVVREVEELLKRLEEEARK

SEQ ID NO: 8113 - protein, 182 aa, Artificial Sequence; identical to SEQ ID NO: 8112
  Synthetic

SEQ ID NO: 8114 - protein, 182 aa, Artificial Sequence
  Synthetic
DDVERLLKRVKELIDDDLRKTEKALREIEKLSRDNKKRTEDVLREIEERLRRLEEATRRGEIREEEVEKVIREVRELLKDSTRHTEELVRRVRRLLEEIKRHNTELRKEVRELLDDVRRKEDSERVRKIIRDVERLLEESTRRNEEAVKRVERLLEENKKRNEDVVREVEKELRRLREEARK

SEQ ID NO: 8115 - protein, 182 aa, Artificial Sequence; identical to SEQ ID NO: 8114
  Synthetic

SEQ ID NO: 8116 - protein, 182 aa, Artificial Sequence
  Synthetic
SDIEKVLEDIRRLSKKNVDDSKRVLDEIRELSKRNLELVKEVLERIRRLLKKLEEARRRGEVRKEAVRTVEEDIRRLLEELKRHTEEVDKRVRELLERSTRHTEEVAEEVRRLLEKLKERTDTERIRKIVEDVKELLDRNREENERIVREVEKLLDENRKEVEKILREVERLLEELEKRERD

SEQ ID NO: 8117 - protein, 182 aa, Artificial Sequence; identical to SEQ ID NO: 8116
  Synthetic

SEQ ID NO: 8118 - protein, 182 aa, Artificial Sequence
  Synthetic
KEVEDLLKRIRDLLKRVEETSREVLEEIKRLIDRDRKHSKEVLDEIKELLKRLIEAAKRGEIREEDVKRVARKVEKLLERNKKHNRDVEERVKELLKDSTRVLKEVEKRIRELLEDVRRREDSERVRTIIREVEKLLKELEDKNDEIVRRVEELLRKSHEDNRRIAEEVREMLKRLEDEMRR

SEQ ID NO: 8119 - protein, 182 aa, Artificial Sequence; identical to SEQ ID NO: 8118
  Synthetic

SEQ ID NO: 8120 - protein, 185 aa, Artificial Sequence
  Synthetic
SSLEKVEKDIRKLNDDSKKEAKRVTEENRKSNEDVERELRKIVEEVRRLIKDVEDKIRKDGTDEDVKRLVDEVKKRVEDLERKAKELIDRDDKKSEDLARKLRELLKDDARKVDKLIRDMDRETRTERVKRIVDELRKSLRKLEEDVKELIKENKESNDRLRERVERILKELRELLRELEEKVKT

SEQ ID NO: 8121 - protein, 185 aa, Artificial Sequence; identical to SEQ ID NO: 8120
  Synthetic

SEQ ID NO: 8122 - protein, 185 aa, Artificial Sequence
  Synthetic
SEVERLVEEVRKSNKKWEEESRELTERNKKLNRETTKRAEDLLERVRELVRTVTEIIKREGTDEKVEELVRRVKKALRELIETLKDLVRRDDEKSRKLIEDDRKILKEDEERVEELIKDLDRKRRDERLKRIVEEIRDSVRRLKEKSEELVRRNEESNDRLRRRVEEIAKEARDLVRRLEEEVRR

SEQ ID NO: 8123 - protein, 185 aa, Artificial Sequence; identical to SEQ ID NO: 8122
  Synthetic

SEQ ID NO: 8124 - protein, 185 aa, Artificial Sequence
  Synthetic
SEAERVLEEVRRLNDKSKKTAEKLTEENKRLNKRTTDFLKEVLERIEELVRRVEDRIRKEGTSREVKELVDRLKDRVRELIKEARKMVKEDDRRSEELVERLKEIIERDRRTVEKLIEDLKRKSDDKRVKDIVREIRDSVRKLEEEVRKLIRENEKSNKDLRRRVRKIEEDIKRIIRELEERVRK

SEQ ID NO: 8125 - protein, 185 aa, Artificial Sequence; identical to SEQ ID NO: 8124
  Synthetic

SEQ ID NO: 8126 - protein, 185 aa, Artificial Sequence
  Synthetic
SELEKILKDIEDLVRKWLEESKDLLRKLKKLNEDTTERLRRLLDELRKLIKDLLDKIRKDGTDDRVRKLVEDITRKLEELIKEARELVREDKRRVDELIRRDEEIAKEVEKEVRRLIRDMKEKRDDKRVKDIVKKIEELVKKAKEESKKIVEEVRRSVKRLEEEVRKIEKDIKDLIDELRKKVTT

SEQ ID NO: 8127 - protein, 185 aa, Artificial Sequence; identical to SEQ ID NO: 8126
  Synthetic

SEQ ID NO: 8128 - protein, 175 aa, Artificial Sequence
  Synthetic
SEVEDLRRELEEINKEWNKRTKDLVKEVEEVNRDINKKIRDLLREARRLVDEIRRLIEKGEPKEELIKTLRRVVEEIEKDIRRLEERLAAIHKKVKDDDKKLADELREMHKRVEDRVKNEEVIKELRKLLEESERRAREMNKRLDRLLEESKKDVDRVREEIKRLVDEIEDRARK

SEQ ID NO: 8129 - protein, 175 aa, Artificial Sequence; identical to SEQ ID NO: 8128
  Synthetic

SEQ ID NO: 8130 - protein, 175 aa, Artificial Sequence
  Synthetic
DEIEEVLKRLEEIVKTWDERTKRLTERVRTVNREVNERHKKLTRDLRELAREVLDLVRQGKDKDRLIKRLEDMIRDIVRRAREINKRLAEIHKRVEDEDRKLAEELRDVLDKVRRKLRSREMLRELEERIRTVEDKVRRVNEELRELLKTSNRRSEEIEKELEKILREIRERARK

SEQ ID NO: 8131 - protein, 175 aa, Artificial Sequence; identical to SEQ ID NO: 8130
  Synthetic

SEQ ID NO: 8132 - protein, 175 aa, Artificial Sequence
  Synthetic
DEVRKVLEDLRKIVREWEERTERLLRDLKRINEEINRRVEKLTEELRRLVKEIKKLTDDGKDKKKLITELEEVARRIVETLKDLLRRLAEVHKKVVREDEKLLEDLKRFLEDLKRKMKNEDVLREADKIIEDVEREARRVNKELKDLLDESAERIERIIREIERLVEKIKRDADR

SEQ ID NO: 8133 - protein, 175 aa, Artificial Sequence; identical to SEQ ID NO: 8132
  Synthetic

SEQ ID NO: 8134 - protein, 175 aa, Artificial Sequence
  Synthetic
SEIEKVLDELREINRRINETAKEILRRLKEINERTKKEIDRLLDELRKLLRRVEELRKEGRDTEELIKRLRERVDEIRRDIKRLIDEDRKRVEDVERELERLAEELRRMHEDAKRKMKSEEALKDLERLLRESEKRIREIIKRIRESVEKLERDVRRVIDEIRRRLEEIERRLRK

SEQ ID NO: 8135 - protein, 175 aa, Artificial Sequence; identical to SEQ ID NO: 8134
  Synthetic

SEQ ID NO: 8136 - protein, 171 aa, Artificial Sequence
  Synthetic
KEVEEALEELRRILREWEEVTKRLEERVEEINRRSLEELRRLKEEVEEIAKRIRDTDKADTLLKELRRLLEEIRKRSEDSLRRDEELFERIHRTDERAARELKKVLEDIARKIDRKEVLEELDKLVKDIKRKVDEVNEKWKESSKRLEDEHRKVIKELEELVKRVEEELRR

SEQ ID NO: 8137 - protein, 171 aa, Artificial Sequence; identical to SEQ ID NO: 8136
  Synthetic

SEQ ID NO: 8138 - protein, 171 aa, Artificial Sequence
  Synthetic
KEVEDALKKAEDILRRWEEVTKKLKDEARKINEDSRRKLKRLKEESREIVERIKKTDPSDELLKRLRDLNRRIAEESKKSLRRDEEVFRRIHEIDKEMADRLAELLKEIADKIDREEVLRRLEKLVEDIKRKVAKVNDEWRKSSEDLEREHRKVHRESEKLIRDVEDRLRK

SEQ ID NO: 8139 - protein, 171 aa, Artificial Sequence; identical to SEQ ID NO: 8138
  Synthetic

SEQ ID NO: 8140 - protein, 171 aa, Artificial Sequence
  Synthetic
SEVEEVRREVKRVVDDWRRVTKKLLDDIRRISEESKKIIRDLKEAAKTMIREVERTRPDETLLDRLRRLLERIAREAKRSIEDIRRLLEELHKTDKKIAEELKRLLDRIAEEIDREEVLKELEKLLEDLRREVEEVNERLKRLLDENEKRIREVLRELKKLLRDLDEKLRR

SEQ ID NO: 8141 - protein, 171 aa, Artificial Sequence; identical to SEQ ID NO: 8140
  Synthetic

SEQ ID NO: 8142 - protein, 184 aa, Artificial Sequence
  Synthetic
DELERVREEVKKLSDTSREKLERALKKARDLLEENERRLRELKKEVEELIRRIEEKLKDRKDEDLIRKIERDLDRVLRKVEKLVEEVRRRHEKVLRELAKLVKESKEELDKVLRDVEKLIRDRESEELRKVLTDIERLLRENKKELDEVLKEVEKLSREADDKNRKVLKEIKELLDELKKRAKD

SEQ ID NO: 8143 - protein, 184 aa, Artificial Sequence; identical to SEQ ID NO: 8142
  Synthetic

SEQ ID NO: 8144 - protein, 178 aa, Artificial Sequence
  Synthetic
SEVERMLEEVERISEESKRKLEEVLRRVEEIIKAIERTLEKVLKDDEEIIRRIEDTLRRRNTEEVSKRIEELSERSRRKIAKVLRDIDELLKEAERELDKLKKESRKLAEDVRRALKEINVRREVVKTIDDLLRENERRVDEALEEIEKRARDLREKVKELEERLDRTNRKLKKKVED

SEQ ID NO: 8145 - protein, 178 aa, Artificial Sequence; identical to SEQ ID NO: 8144
  Synthetic

SEQ ID NO: 8146 - protein, 182 aa, Artificial Sequence
  Synthetic
KEVEDIIEESRKLDKELEDEIRRIIEESRRLNEELEEIARRIDEEIKELLERLKRRDKDARELLRELEEVVKEVRKRMEELLKRSRDVSREHEKTLRKLLEESRRMTEKHRDDLRKLEERNGVKEDVERLVRSNREVARDVREKLKRLLEHNKEVVDRVREELKRLLDEARRVIEEVRKKAD

SEQ ID NO: 8147 - protein, 182 aa, Artificial Sequence; identical to SEQ ID NO: 8146
  Synthetic

SEQ ID NO: 8148 - protein, 184 aa, Artificial Sequence
  Synthetic
DELERIDEKIKRDVEEHKRETKRILDESERLNREVKKRLEEIRERIRRLAEEIRKEIERDKGKERLEKKVRDLEKTVRDLIRELEELVREVHERDRRLIKELREHLRRLEEDLRRLIDELRREVEERKLEKVMEDVKRLIDEARKENEDVARRMERSNKELKRKLDEIRREVEELIKELRERTK

SEQ ID NO: 8149 - protein, 184 aa, Artificial Sequence; identical to SEQ ID NO: 8148
  Synthetic

SEQ ID NO: 8150 - protein, 184 aa, Artificial Sequence
  Synthetic
DDLERAREEVADLIRKHEEKTRRILEESRRLNERHRELSKRILDEIRKLAERIEELIKRERGKDELRRKVEDLERRVEDLIRRLEEHLRRVHDKDRRLIEDLRRHLKRVVEELKRLIDELRRKVPKEELDRIEEELKRLIDTLREKNREVEKRARDSNRDLKRTNDEIAKEVRELIKKLREDLK

SEQ ID NO: 8151 - protein, 184 aa, Artificial Sequence; identical to SEQ ID NO: 8150
  Synthetic

SEQ ID NO: 8152 - protein, 184 aa, Artificial Sequence
  Synthetic
RELETIADRIRKLSRENSEVLKEIARRIERLVEEHRKESERILKEIKELADDITRLIREDKGKERLKRKVEELEKRLRELIERLKEHLKEVVKELERLIKEMRDHSERVVEEAKELIDRLRSKVPKEELDKVEEEVRRLIRTNREILRTIEKRVRDLIEELKRRNDEIARRVEELIKRLRRETD

SEQ ID NO: 8153 - protein, 184 aa, Artificial Sequence; identical to SEQ ID NO: 8152
  Synthetic

SEQ ID NO: 8154 - protein, 184 aa, Artificial Sequence
  Synthetic
SELEKVADELRKLIKDDNDLLDEILDRIRKLSKENEKRLREILKEIRKLMDEISKLIKKDRGKERLKKKVDELRETVERLIKEARDHSREVAKEIKELIREAEEHTKDIARKLRKLIEELRRRVPKEELDKIREELERLIKRNKEKLDEIRREVDELIKKNEETLKRIEEEVRKLIEDLKEELR

SEQ ID NO: 8155 - protein, 184 aa, Artificial Sequence; identical to SEQ ID NO: 8154
  Synthetic

SEQ ID NO: 8156 - protein, 184 aa, Artificial Sequence
  Synthetic
SDLEKIEKEIEDLVKRDNEVDKKVMREIRELSKENKERLRKILEDLRREAKKIKDDIERETGKEELEKKVREIEKRARELIKEAKRHSEELAKTAKDLIRRTTKHTKDVEEELRRLIEELDRTVDKEKLKRVEKKVRELIKRNRDHNERTREDVEKLIRDNEDTLRRIEEEIERLIEKLKRDTK

SEQ ID NO: 8157 - protein, 184 aa, Artificial Sequence; identical to SEQ ID NO: 8156
  Synthetic

SEQ ID NO: 8158 - protein, 174 aa, Artificial Sequence
  Synthetic
KEVEDAVKELEDLLRKNEDKTRKIVEDMRRSNKDLEDHSRKSEEEVRKLLDDLRRAGVPRDSLKRLAEDVERVTRESRELLERVHRADRELIERLKESNERLRRAIEEIRKAIKAGKDIKTLLDRVRKLAEEDNERLDRLRRESEELNERVRRVDKKLLEEIRRKAKKVEDDTR

SEQ ID NO: 8159 - protein, 174 aa, Artificial Sequence; identical to SEQ ID NO: 8158
  Synthetic

SEQ ID NO: 8160 - protein, 174 aa, Artificial Sequence
  Synthetic
DEVREVDRRLKELLRRLKETIDEIRRRMEESNRRLEDHSRKSEEEARKLLEELERKGVPRDTLERLREEIERVIEESRRLLEEVHRRDRKLIRDLEKLLEDVRRTVEEVRKKIDDGSDLEELLRRLEELAERAERKLEKALRDSEDLNRKVTEVDRRLLKEIRDLVEKVERERR

SEQ ID NO: 8161 - protein, 174 aa, Artificial Sequence; identical to SEQ ID NO: 8160
  Synthetic

SEQ ID NO: 8162 - protein, 174 aa, Artificial Sequence
  Synthetic
SEDEKVRKEAEDLLRELEKHSRDTERRARKSNRDNNEHSKESVKDLRRLLERLRKAGVPRDTLKTLEDMIRRIIEESERSNERLHREDKKLVEESRKLVKDVLKRLEDIERAIKAGSDIRKLLEEVRKLVDDLRKRDEEIMKTSERLNEEDNRKDRRLVEDVKRLADEVEKKTR

SEQ ID NO: 8163 - protein, 174 aa, Artificial Sequence; identical to SEQ ID NO: 8162
  Synthetic

SEQ ID NO: 8164 - protein, 174 aa, Artificial Sequence
  Synthetic
SKVDDVKRRIRKLLEDSKKRSRESIERVERSNRRLEKHSRDSARRAKELLDKLREEGADERVIKELEEIVREIKKRSEELLEKDKKDSEEIVRRSRKLNDELREVIRKVEEMLRGGSDIDELLERLKELAKRIKELDDRLLRELEEINKTTEKLDRDLLKEIKERIDELRKREK

SEQ ID NO: 8165 - protein, 174 aa, Artificial Sequence; identical to SEQ ID NO: 8164
  Synthetic

SEQ ID NO: 8166 - protein, 174 aa, Artificial Sequence
  Synthetic
DKVERVKKEVRDLLRRLEKHSEDSVREIDTSNKRLEEHSRRSKEELKRLLRKLKEAGLRREVIEEVEKRIRDVERESEKLLEDDKRKSERIKEESKRILKEVRDRIREIEKLLDSGADIDRVLEEVRKIIRRIEEEDRRLLKEIRDINETTERLDRKLLDELRKVVKDIEDRER

SEQ ID NO: 8167 - protein, 174 aa, Artificial Sequence; identical to SEQ ID NO: 8166
  Synthetic

SEQ ID NO: 8168 - protein, 188 aa, Artificial Sequence
  Synthetic
SELEEVKKKVEKLIRDVEKVSEDTRREVERLIREVEEATKEHLDRVRRLIEELREVRKAGSRKEELRELLKRVADKVKRLIETNREVLKEIEDRVRKLIEENRRVIEEVAKTLKKIIDDLRRRLREDRLRERLERLAKEIEDLLRRLREISRTIEERARRLLEELKKRSEDLRKTAEELLKEIDEELK

SEQ ID NO: 8169 - protein, 188 aa, Artificial Sequence; identical to SEQ ID NO: 8168
  Synthetic

SEQ ID NO: 8170 - protein, 175 aa, Artificial Sequence
  Synthetic
DEVETIKKKAEDLLRDSKRKTDELTKRMEELLERSKEDSERLIRRLRELLERLRRRGLPEEVLTRIEKTIRDIERELEKVDRDLKREIERLKKELEEVNRRLEEEIRKLVELLRRGDVREEDVDREVKRLVDESKKIIERVEEDVKRLIRESEKKSRDVERRVEELERKAREDER

SEQ ID NO: 8171 - protein, 175 aa, Artificial Sequence; identical to SEQ ID NO: 8170
  Synthetic

SEQ ID NO: 8172 - protein, 181 aa, Artificial Sequence
  Synthetic
SEVEKIKREMEKLLEEHKKLVDDIRREAERLHEEHRRLSDKIREDLKRLLEELRRSGIDKKLLDEIEEVVKEVDERSKKLDKELREIIRKVVEDSRKLHEELERIIRTVERRMEELEKRGGDRKELDRLRREVEKVVRELKERNKELLKRLEEAVEELKRRNRKLLEDARRVVEEIKERAR

SEQ ID NO: 8173 - protein, 181 aa, Artificial Sequence; identical to SEQ ID NO: 8172
  Synthetic

SEQ ID NO: 8174 - protein, 181 aa, Artificial Sequence
  Synthetic
STVERIDEELKRLHTEHKKLSDDIKREAERLHEEHRRLSEEIRERLERLLEELRRRGIDERLLREIERVVEEVERTSEKLDRDLEEVIKRVEDTSRDLNRRLKEVIDEVRERLKRLEDKNGVEEDLDKILRDLERTAKELKDRNRRLLEEVERVVRELKRRNKELLKTVERVAREIERRAE

SEQ ID NO: 8175 - protein, 181 aa, Artificial Sequence; identical to SEQ ID NO: 8174
  Synthetic

SEQ ID NO: 8176 - protein, 181 aa, Artificial Sequence
  Synthetic
REVEEIDKELRRLHEEHRRLVEDIRRKLKKLHDEHRRLSEEIKRRLEELIRKLREDGASEKLLKELEDALERVKETSEKLDEDLKRIIDTIERRSRESNRELKEVLDDVRRRMEDLERKNGVREELTKLLEEVKRVVDRLKEENKRLLKEVKEVAERLKRENERLLEELRRVAEEVRERTR

SEQ ID NO: 8177 - protein, 181 aa, Artificial Sequence; identical to SEQ ID NO: 8176
  Synthetic

SEQ ID NO: 8178 - protein, 181 aa, Artificial Sequence
  Synthetic
KEVEEIREEAKRLHEEHRRLSKRIDDELKRLHDEHKRLSDEIRKELERLIEELKKGGVSEELLDRLRRELEKVDRESKKLNEDLKRILDDVRRRSERLDRELRKVIETVSRLLEDLERKGGDRDKARKLLEEVRRMVKRLKEENKRLLEEVRKVVEDLKRRNKELLEKLKREAERVKEEAK

SEQ ID NO: 8179 - protein, 181 aa, Artificial Sequence; identical to SEQ ID NO: 8178
  Synthetic

SEQ ID NO: 8180 - protein, 181 aa, Artificial Sequence
  Synthetic
SEVDEIRKRLEDLHREHRELSREIEERLKKLHDEHRRLVEEIIRRARELLEDLRREGIDKSLLDRIREVVEKVRKESEDSNRDLKRVIDEVRDTSRKLDEDLKKVIEEVERELKKLEDNGGDRDKVERLLREVKKVVDKLKKDNEKLLRDLKRVVDELKEKNKRLLEEVKRVVDDIRRRAK

SEQ ID NO: 8181 - protein, 181 aa, Artificial Sequence; identical to SEQ ID NO: 8180
  Synthetic

SEQ ID NO: 8182 - protein, 177 aa, Artificial Sequence
  Synthetic
DEVREVERKIDKLAKDLKDELRRLLKEYEELVERLEELLERILRESEKLAEELKEELKRRKTEDVVRKIEKELRESHEAIKELIKRIDELHERANRKIDELDKRIEEVLRRVKEEVDRKNLDDKVRKRIEELVKELKDILEEIKRRVEELDERSKRILKEIADRNRKLVDELRKTLE

SEQ ID NO: 8183 - protein, 177 aa, Artificial Sequence; identical to SEQ ID NO: 8182
  Synthetic

SEQ ID NO: 8184 - protein, 177 aa, Artificial Sequence
  Synthetic
SEVEKALEDVRRLVEELKKELKEILERYKRLVDKLKKENREDHERSKELAERLKDLLRKSRTEDVVREIEKELRKSHKHSRDLARRVEKLHKELNEELDELVRRIRRVLEEILRDLDRRNVDEKVRDTLRKLLEELDDLVRRIKTTLRKLVEESRRSLRKNEEDNRKLVEELREEAR

SEQ ID NO: 8185 - protein, 177 aa, Artificial Sequence; identical to SEQ ID NO: 8184
  Synthetic

SEQ ID NO: 8186 - protein, 177 aa, Artificial Sequence
  Synthetic
DEVREVLREAREVVKRLKDRLRRILEESRRVVDELRDKNRKDHETYRKVVEELKKRLEERKTEDVMRDIRRVHEELNRHSEELAKEAEEVARETHKKIEKLAREIRKVLKELLKKVDEANLPEEVRKDIERLFKELEDILKEIKEDNRRLVEDIKRSLEKNKRDLEKLVKESEDEER

SEQ ID NO: 8187 - protein, 177 aa, Artificial Sequence; identical to SEQ ID NO: 8186
  Synthetic

SEQ ID NO: 8188 - protein, 177 aa, Artificial Sequence
  Synthetic
DEVRKVLEDARRLVEKLERDLEKVLEDYKRLVDELKERNERSHRESRRLAEELKKELERERSREVVETIRETVERILRKNEELARRAEDLHRRVNEELERLVEEIKRRADDLRRRVEEAKLDDEVKERIDRLVKRLEDLARRIKEELDKLVKESRESLERNKTEVKKLIRELEETVR

SEQ ID NO: 8189 - protein, 177 aa, Artificial Sequence; identical to SEQ ID NO: 8188
  Synthetic

SEQ ID NO: 8190 - protein, 177 aa, Artificial Sequence
  Synthetic
SEVEDVLTKIEDVVRKLEEENKRSHDESRKLADELKKENKEDHDRYRKEVERLKKELEERRTKDVVTRIREVHKKLNKHSEELVRRIEDVLRRMLEKNRELVERIKETLKRLKEEVDKANLDDKVRKRVEELVKEIEKSARDNEEAVKRLAEELRDSARRNKEELEKLVKESDDELK

SEQ ID NO: 8191 - protein, 177 aa, Artificial Sequence; identical to SEQ ID NO: 8190
  Synthetic

SEQ ID NO: 8192 - protein, 177 aa, Artificial Sequence
  Synthetic
RETEEIEKEIRRLVKELRELNDEVEDRVRKLIKELKELNDRSERTLRELADELRRSGAPEEDVRRVIDRARKLHRRNKEHSKRVMTEIDKLIKTNRRHTERVERELEDLLRKLRRSTDDDVVRKVLERAERLVREDKKHTKEVLERIKELVDRDKKHTRDVNEEVKRLVEEIKKKTK

SEQ ID NO: 8193 - protein, 177 aa, Artificial Sequence; identical to SEQ ID NO: 8192
  Synthetic

SEQ ID NO: 8194 - protein, 177 aa, Artificial Sequence
  Synthetic
SEIEEIEKRIEDLARELKELNKEVEERVKKLIEDLRRLNEESRESTDRLMDELRKAGAPREELEEMIKRLKRLNDENTRHSEEVMDTARRLIERNKEHTERVIRRIEELLEKLRRSDKDEVVRRVLEEIERLVRRDKEHTERVLRTIEKLVREDEEHTKRVNEEIRKLAKEIEERAR

SEQ ID NO: 8195 - protein, 177 aa, Artificial Sequence; identical to SEQ ID NO: 8194
  Synthetic

SEQ ID NO: 8196 - protein, 177 aa, Artificial Sequence
  Synthetic
REIEELRKEIETLIRENEELNRRSKETSEELIRRLKKLNRDVEEEVRRLVKDLRDRGAPEEDVRRAEERVKKLIEDNKRHSDEVAKTDKKLNEDSERHTRRVEERLRELLDRLSRSDKDEVVRRVAEEARRLSKRNKDAIREVNETSRRLATRDAKHTRDVLREIKRLADEIRERTR

SEQ ID NO: 8197 - protein, 177 aa, Artificial Sequence; identical to SEQ ID NO: 8196
  Synthetic

SEQ ID NO: 8198 - protein, 177 aa, Artificial Sequence
  Synthetic
SEIEKAEEDVKRLIKENEELNRRSEETSRKLVEENERLNKEVEDRVRKLIKELEDNGAPEEKLRRAMERIKKLVEDSKEHSRKVAKEDRDLNEESKRHTDRVAEEIKRLIDDLRRSTDDDVVRRILKRIEDLSRKNKRDIEEVNKESERLSRENKKKIKDVLEEIRRLVERIEREVR

SEQ ID NO: 8199 - protein, 177 aa, Artificial Sequence; identical to SEQ ID NO: 8198
  Synthetic

SEQ ID NO: 8200 - protein, 181 aa, Artificial Sequence
  Synthetic
SEIEKVLEDLRRLADRHRKRVEEILREAEDSNRKTKKKHREVEKEVKELADKLKDEIRRDRNKEELTKKVKELMDRLRELNDETRRVLEEVARRNRELLERSRRHLDEVRKTVDDILRKLEKDRRLDEVEKDLRRLIRELKRLNEEVEKRVRDLIKENEELNKRIHDDLRRLIKELEDETR

SEQ ID NO: 8201 - protein, 181 aa, Artificial Sequence; identical to SEQ ID NO: 8200
  Synthetic

SEQ ID NO: 8202 - protein, 181 aa, Artificial Sequence
  Synthetic
SDIEKVLDDLRKLAEEIERAHEEVAREVRELSKRNKEVIKDILRRAKELAERIKELIDRSDRKEELRKKIEELARELEKLLKELEDHSRDVVRRLRELNDETRKMVEDLERRVRDILRKLRPDDDLRKVEETLRELIRKIRKKNEEIRRDLRRLIEENKELLERVRREVERLIEDIKRKLK

SEQ ID NO: 8203 - protein, 181 aa, Artificial Sequence; identical to SEQ ID NO: 8202
  Synthetic

SEQ ID NO: 8204 - protein, 181 aa, Artificial Sequence
  Synthetic
SEIEKMLEELRRLSERNKRTTEEIEKRLRDSNRDTKRKHEEALRTIKELIDRIKRAIREEKDKEKLRKKVEDIERKARRINEETRRTLARAERTNEKLNKDNSDHSRKVEREMEEILRKLRPDDKLRKAADDVRRLIEENRRLDERLHEEVKKLIEENRKLNEDINERVRRLIEELRRETK

SEQ ID NO: 8205 - protein, 181 aa, Artificial Sequence; identical to SEQ ID NO: 8204
  Synthetic

SEQ ID NO: 8206 - protein, 181 aa, Artificial Sequence
  Synthetic
EEIERALREMRELSRTHKELVEKILRDIAELAKTHERINEDILRKIKKLIDEIADEIRKEDKKEELKRKIDELRRRAEELLKESKEHLKRLEDTVRELIERLKETLKKVEEDLKRILEKLEKSRELDEIAKDVKRLIDENRELLKRVEDEVRRLIRKLEELNRRTEEEVKKLIKKLEDDLK

SEQ ID NO: 8207 - protein, 181 aa, Artificial Sequence; identical to SEQ ID NO: 8206
  Synthetic

SEQ ID NO: 8208 - protein, 174 aa, Artificial Sequence
  Synthetic
RELEELEKELRELLRELRRLSEESRKELKKLLDELEELSRRSAKKLKDLLDDLRRRGVPEDELRRVAKRVEDLIRTSKRLNDETRRKVEEVERESKKLNEDTEETLRRVTELLKAGKDIDEVRERLRELIERDKKLNKKLTDDLRRLAERDKRENEKLSKELEDLARKLREDAR

SEQ ID NO: 8209 - protein, 174 aa, Artificial Sequence; identical to SEQ ID NO: 8208
  Synthetic

SEQ ID NO: 8210 - protein, 174 aa, Artificial Sequence
  Synthetic
SEIEELEKRIDELLKELRDLSRRIAEEVKRLLEELKKLSKDSEDKLRELLERLKRKGVPEEELRRVEEEVERVVRESRKLNKETEDELRRLLEEIKESNDRVEKRARELKKLLRDGKDVEEVLRRLEKLVREDKERLKKVLKDARDLIKKDKDLNEKLSRELEKLVRELEERAR

SEQ ID NO: 8211 - protein, 174 aa, Artificial Sequence; identical to SEQ ID NO: 8210
  Synthetic

SEQ ID NO: 8212 - protein, 174 aa, Artificial Sequence
  Synthetic
SEIEDLERRIRKLLEENRKLVDDVAKKLRELLRELRKLSEESRKRLEDLLRKLRKDGVPEEILRRVAEEVRRLEEESKRLNDETEKELRRLLEELKRSTEDLEKKADDVRKLLRAGKDVEEVLRRLEKLSRENKDLIRRIDERIEKLIRDDKRRNREISERARELARKLEDEAR

SEQ ID NO: 8213 - protein, 174 aa, Artificial Sequence; identical to SEQ ID NO: 8212
  Synthetic

SEQ ID NO: 8214 - protein, 174 aa, Artificial Sequence
  Synthetic
KESEELEKEIRRLLRELREISRKIEEDARRLIEELRRLTEESERELEELLEKLKRDGVPEEELREVLKDLKRLIEESRRSNEEVERRVREVLKRARDSNKKVEDRAREVKKLLEDGKDVREVLERLKKLVEEDKRRLKELLDRIRELMERDKRKNKEISERVRKLIKELEDKAR

SEQ ID NO: 8215 - protein, 174 aa, Artificial Sequence; identical to SEQ ID NO: 8214
  Synthetic

SEQ ID NO: 8216 - protein, 174 aa, Artificial Sequence
  Synthetic
DEEDRLREELRRLLEELRELSERSRDEVKKLLEDLERLTRESEEKVRRLLEKLKRDGVPDEELKKVIDKLRKLIKESRDSNRRVKEELKKLIDDSKRSNDRVEEAVREIDKLLRAGKDVKRVLEELRRLVEEDKKLNEEITEDARRLIEEDRRLNKKISDEAEKLARELRERAR

SEQ ID NO: 8217 - protein, 174 aa, Artificial Sequence; identical to SEQ ID NO: 8216
  Synthetic

SEQ ID NO: 8218 - protein, 174 aa, Artificial Sequence
  Synthetic
DELRDVKRELDRLLRENEEIVERIAETVRRLLEELKKLTKELAEELRKLLEELRKRGVPEKELKEVADTLRKLLKDIERSNKEVEDRLRKLLEEIKESTDRLREELEEVEKLLRGGKDVETVLRRVRELSRDNKRRMRRVLEEAKRLAKEDKERIDKIRKEIEELIKRLKDKAT

SEQ ID NO: 8219 - protein, 174 aa, Artificial Sequence; identical to SEQ ID NO: 8218
  Synthetic

SEQ ID NO: 8220 - protein, 174 aa, Artificial Sequence
  Synthetic
DEEEDLERRIKKLLDENRELLKRIAEELRRLLEELRRLTEESADRLRRLLKELKDRGVPEKDLRDVAEKVKKVLKESEDSNRDVKRKLEKLLRDLERSTERLEREARKVRKLLRDGKDIETLLRELEKLSRDNKELLKKIEKEIRDLIKEDKERNRELSERLRKLVEELKKKAT

SEQ ID NO: 8221 - protein, 174 aa, Artificial Sequence; identical to SEQ ID NO: 8220
  Synthetic

SEQ ID NO: 8222 - protein, 174 aa, Artificial Sequence
  Synthetic
REIEEAAKDLDRLLEENKKLVKEVEEELRRLLKENRDLVKESEDRIRKLLEELRRRGVPEEELKEVEERARRVIEESRRSSKELEKRLRELLEELRRSTKELEDRLREIKKLLRNGKDVEEVLRRVRKLSRENKEKIRKILEDVKKLSEDNKRRNEELSRRVKTLVDEIKKRAT

SEQ ID NO: 8223 - protein, 174 aa, Artificial Sequence; identical to SEQ ID NO: 8222
  Synthetic

SEQ ID NO: 8224 - protein, 174 aa, Artificial Sequence
  Synthetic
SRIEELEKRIRELLKENRDLVKESEDRVEELLRRNEELVRRSKEKVERLLEELRRKGVPDEELRRVEERLRRLLEESKRSSDELRERAEKLVRDSRRSTEELEERAKRVLELLRAGKDVDEVLRRLKKLSDDNKELNERLTRTLEELSRRNADINKKLSDEAEKLIRDLEKRAT

SEQ ID NO: 8225 - protein, 174 aa, Artificial Sequence; identical to SEQ ID NO: 8224
  Synthetic

SEQ ID NO: 8226 - protein, 174 aa, Artificial Sequence
  Synthetic
KEIEDAERELRRLLEELKRLLDDVAREVKRLLDENKRLVEKSEEDVKRLLDELREEGVDEKILRDVAREVKRVVEDSRRSSKELEERAKRLLDELKKLVDKIREKLERVRKLLRAGKDVEEVLRRVRETVERVKKKIKDVLKEIEDLSRENKKLNRDLSERLKKLADDLREKAR

SEQ ID NO: 8227 - protein, 174 aa, Artificial Sequence; identical to SEQ ID NO: 8226
  Synthetic

SEQ ID NO: 8228 - protein, 174 aa, Artificial Sequence
  Synthetic
DELEELSREIKKLLEENRRLVRESEEDLRRLNEENRKLVEDSERRVRELLKDLRDRGVPEELLRKLEEDLRRLIEESRELLDRLTKRDEELTKRSRDSTKELEDRAKEVREKLKAGSDIEEVRERLRKLSKENKDLNRELTKRSRELNARTKERNEEISRRAEELARKIREDAR

SEQ ID NO: 8229 - protein, 174 aa, Artificial Sequence; identical to SEQ ID NO: 8228
  Synthetic

SEQ ID NO: 8230 - protein, 174 aa, Artificial Sequence
  Synthetic
DEKETLARKLDELLRELEKLVRDSAREVEKLNEENRRRLEESRDRLRKLLEKLKRDGVPEKDLREVKKEVEKVEEESKKLLKELHDEDRRLIEESRRLLKELADEVRRVRKLLEDGKDIERVDRELKRLAEEIKELNKRITDESRKLNEDTKRVNDKLSRDLEELARDLERRAT

SEQ ID NO: 8231 - protein, 174 aa, Artificial Sequence; identical to SEQ ID NO: 8230
  Synthetic

SEQ ID NO: 8232 - protein, 178 aa, Artificial Sequence
  Synthetic
SEIERIERENDRLNEENKKITEDIERELKRLLEENRELSRTIEEELERLLRELRKRNGGREEVLKEVEDRLRRIVEEIRRSDKRLEDIAREVKKRIRESDEELRRVSEEITRRLRKVRDEKTLRELLKRSEELSKENKDRLKKLLDDLREVSKKNKEDLKRLLREVREVARKVKERAN

SEQ ID NO: 8233 - protein, 178 aa, Artificial Sequence; identical to SEQ ID NO: 8232
  Synthetic

SEQ ID NO: 8234 - protein, 178 aa, Artificial Sequence
  Synthetic
DDIERILREMERLLEENKEISDEIRKELKRLLDENRKLSEDVVKALEDLLRDLERRKGVEEEVLKRVREVLERIKRELDRSDDELRKVAERILRDAERSNDELRKVIEEIEEELRKVRDKDTLRELARKIRKLSEENKERLKELLRELKKLSDENKERIKKLLKDAEKIIEDVRRRAK

SEQ ID NO: 8235 - protein, 178 aa, Artificial Sequence; identical to SEQ ID NO: 8234
  Synthetic

SEQ ID NO: 8236 - protein, 178 aa, Artificial Sequence
  Synthetic
SEIERIDEDNKRLNDENRKLSDRVRRENERLNKENRELSKRVEETLKRLLDELRRRGGGDDRVIKTVEDIAREIKKRLDDSDDRLRRESKRILEAAKESNEELRDFSRRIVDTMRKTRDKRTLTELLKESRELSKRNKDKIRELLRRSEKLSRENKKRIEDLLRELRRVVEKIKREAD

SEQ ID NO: 8237 - protein, 178 aa, Artificial Sequence; identical to SEQ ID NO: 8236
  Synthetic

SEQ ID NO: 8238 - protein, 178 aa, Artificial Sequence
  Synthetic
KEIEDLRRDLDRLLRENRELTREVKEELEKLNRELEELVRRIKRTLDELLKDLERRNGADKKLLDTIRRALEEATKEIKELLDDHKRLTDEVVKELEDSDRELEKRLREVKRELERTRDREEIERLREELRKLSEDNKDRIRRILERLRKTVEEIKKRLEDILRRLTEIAKEIEERAR

SEQ ID NO: 8239 - protein, 178 aa, Artificial Sequence; identical to SEQ ID NO: 8238
  Synthetic

SEQ ID NO: 8240 - protein, 182 aa, Artificial Sequence
  Synthetic
SELEKLLEDLRRLSERSERELRRLRKELEEIIREIKKKMEENLERNRKVIDEIDKVIKDDSKSKELEELLRRLEKLIEESKRDLERLLRELEELIRRIDDDLRKSLKELRDLIEDIRRKLGDESEEAKRLKEDAERLLRENERRIDELRKEADELIKELKKRIEDLVKESRRLLEELDRRAK

SEQ ID NO: 8241 - protein, 182 aa, Artificial Sequence; identical to SEQ ID NO: 8240
  Synthetic

SEQ ID NO: 8242 - protein, 182 aa, Artificial Sequence
  Synthetic
EELERLEERLDRLIEEAERRLKDNLKKNEDMARKWEEDTKRNEKRNRDLIRRIRKVIKDDSKSEELERLLEELRRLIEESKRDNERLLRELRELVERSDRDLRRLLREIEKLIKEITDRLGEEDRKVKELKRRARELLERLARLIDELRRRSEDLIRRLAEKSERLERESRKLLRDIAEKTT

SEQ ID NO: 8243 - protein, 182 aa, Artificial Sequence; identical to SEQ ID NO: 8242
  Synthetic

SEQ ID NO: 8244 - protein, 184 aa, Artificial Sequence
  Synthetic
RELEELKKEAEKVSKESKDLIEKVIRDNEDVSRRSEELIRELMREVKEVIDRLRELIERRNDEEVKKRVEDVLRELREKIKKIEKDSRELLERLKELNKRLEETSRDLARRLREKLKRLEEAGVPEDKVRRIKEELERLIEENEKLLEESKKRSEDNARRNEELLERLRRELERLARELEEELR

SEQ ID NO: 8245 - protein, 184 aa, Artificial Sequence; identical to SEQ ID NO: 8244
  Synthetic

SEQ ID NO: 8246 - protein, 176 aa, Artificial Sequence
  Synthetic
REKEELKKDIERMVEELKKLNKESRDRTRKLIKELEDLVKESDDDTERLARKLEKEVKDDEDLLRKVKKIIDELKKSNEDVERTVRTIAEDLKRSNDEDHRRIEEIIRRIEKLLREGGDRVEDLLREARKLIEELKRHTEEVIKRNKKLIDELKEIIEDVIRRNRKLVKELEDTAK

SEQ ID NO: 8247 - protein, 176 aa, Artificial Sequence; identical to SEQ ID NO: 8246
  Synthetic

SEQ ID NO: 8248 - protein, 176 aa, Artificial Sequence
  Synthetic
SEKEDLKRRLDKLAEDLRRLNKEVDDEVKELARRLRKLNKDSRKRTEDLIRELEKRVKDNKELLEKVKKIAEDMKRSNDEDHKLIEEIIRRIKKLLKEDHDLIEEIIKRAEDLIRKGGDRVDELREEIKELIDRLRKHTEEIIRRIRRLFEELRKHSKKVIDDNKRLFDELEKTAR

SEQ ID NO: 8249 - protein, 176 aa, Artificial Sequence; identical to SEQ ID NO: 8248
  Synthetic

SEQ ID NO: 8250 - protein, 176 aa, Artificial Sequence
  Synthetic
KEKEDLKRKVDELDKELKKLNEDSRRKTKELIKRLKDINKRLREELEKLADELRKKVKDDEDLVKKVEDIIREAEKLLEEDHELIERIAERMRRSNDRDHELIKRIREEIERLLREGGDRVEELDREITELIKELRRHTEEVIRRNEKLARELEKHSRDIMETIRELIRDLERTAK

SEQ ID NO: 8251 - protein, 176 aa, Artificial Sequence; identical to SEQ ID NO: 8250
  Synthetic

SEQ ID NO: 8252 - protein, 176 aa, Artificial Sequence
  Synthetic
SEKERLEKRLREVVRELEKLNEDLDRRLEELARDLERLNEESRRESRKLAEDLKREVKDDEELLEKVKRIIDEDRRLNDEDHKLIRDIIRRAKELLEEDHKRIREIIKRAKELIDRGGDRVEEVEERIERLIRDLKRHTEEIKKTIEELMKELREHSREIIKRSRDLFKELKDTTK

SEQ ID NO: 8253 - protein, 176 aa, Artificial Sequence; identical to SEQ ID NO: 8252
  Synthetic

SEQ ID NO: 8254 - protein, 182 aa, Artificial Sequence
  Synthetic
SELEKVIEEIREISERSLEKIKRLMEKIKELSDRTAERLRRVLEEIRKIIEEIKELRDRGELRREKVKKLVEELERKLDELRKESEKVIETIRRLIETLMKESEDLIRELEERLRDLLRKKDKKELAKKITEDLKRNEERNRRAIEELERTLRKLEEENRRLIREAEDTLRRLVEELEKKDE

SEQ ID NO: 8255 - protein, 182 aa, Artificial Sequence; identical to SEQ ID NO: 8254
  Synthetic

SEQ ID NO: 8256 - protein, 185 aa, Artificial Sequence
  Synthetic
SELEEVLKEAKRLIDEIRKHTRDVSERSKRLLEEDLKHTEEVIKEIRKLIKEILDRIRARETSEDLRRDIERATREIRKLLEDNTRESRRVIEESERLARDNKEKSKRVIDELRELVKDIARRDKSEDDLRRLKETIERLAKDLERLNREHDETNKKLAKDSEDLNRELKKRVEELEEELRRALK

SEQ ID NO: 8257 - protein, 185 aa, Artificial Sequence; identical to SEQ ID NO: 8256
  Synthetic

SEQ ID NO: 8258 - protein, 185 aa, Artificial Sequence
  Synthetic
KELEDVLKEIRDLARRIEEHSKKVLREIEELIRRLEEENREVLRRMREEIKKIKEDIRNREPDKELEKKIEDVIRRLKELVDTLHERNRRVIKEIEDLLRDNSRKTEEAIERVRRLVEDVARRDRDKRKLDELRRDVRRLERRLERLNETLKERIDRLAERLEEVDRRLDEELKRLAEELKEELR

SEQ ID NO: 8259 - protein, 185 aa, Artificial Sequence; identical to SEQ ID NO: 8258
  Synthetic

SEQ ID NO: 8260 - protein, 186 aa, Artificial Sequence
  Synthetic
DKLDEIKERIERLVETDLRVIKRILEEADELIKENEKLIEKILRDNRRLIEEVEEIIRRDRDKRRLERIVEEVERRLDESTKELKKSSDRLTERLEELLERSRRHSERIDRTAKRLTEELRDKVVQDEKKLRELKKRVDELREESKDLNDKLEKRIRDLKRELKKLNDRHEEELRKLKERLRRATK

SEQ ID NO: 8261 - protein, 186 aa, Artificial Sequence; identical to SEQ ID NO: 8260
  Synthetic

SEQ ID NO: 8262 - protein, 186 aa, Artificial Sequence
  Synthetic
DELDEILKTADKLAEDDLDTIRRLLEEVRDLVRKDKEVIKRILEEIDRLIKEVEDIIRRDRDKERLKEIVREVVERARELLRRSKKHSKEVAETLDELLKRLREHSREVVEELKRLLEELRRRVVQDEKKLKELEDRVRELKRRSEELLKKVEETLRRLKEESRRLNEELERTIRELEERLRRATK

SEQ ID NO: 8263 - protein, 186 aa, Artificial Sequence; identical to SEQ ID NO: 8262
  Synthetic

SEQ ID NO: 8264 - protein, 174 aa, Artificial Sequence
  Synthetic
SKEDRAREELKRLKEELEKLLEEHRKTLEDLNRELKRLVDEHEKSIRELRKELKDSNVEERVVREIARDAERSLKELRDLVREVHERDRKTHEDLRRLIKRVKEKLEEVEKLIRDGEDIDDVIRRVRETIDEVVRRIEELLEENRKLIEDLEEKIRRLNERLKRLVEEIKERDR

SEQ ID NO: 8265 - protein, 174 aa, Artificial Sequence; identical to SEQ ID NO: 8264
  Synthetic

SEQ ID NO: 8266 - protein, 174 aa, Artificial Sequence
  Synthetic
SERERVREEVRKLLERLRELLERHRRKLEKLNRELEKVLEDHRRTLERLKEELERSNVDEKVVREAKRRLDETHKKLRRLIEEVKERDKRSHDELRELIREVEEKLREILELLERGKDIDTVLEEARKLIEKAERDIRRLAKENEKTIEEVKERLKKLMEENKRLIEEIKERTR

SEQ ID NO: 8267 - protein, 174 aa, Artificial Sequence; identical to SEQ ID NO: 8266
  Synthetic

SEQ ID NO: 8268 - protein, 185 aa, Artificial Sequence
  Synthetic
SEIEDLLRRLKEVADEIKERLKKLSEESEELVRRVKRRIEELNKENREVMKEIKRRIDSGQPEESLERLVREADKRLRDSIKEVEDLLRELEEMLRRTNEKARRLVDEIRRRLERVLEEVKKRGAPEEDVRRLAEDIRRLLEEIEKLLKEHEEKNRKLKKELEDLVRRHRKSVEDLKREIRERSR

SEQ ID NO: 8269 - protein, 185 aa, Artificial Sequence; identical to SEQ ID NO: 8268
  Synthetic

SEQ ID NO: 8270 - protein, 177 aa, Artificial Sequence
  Synthetic
DDEERLEETLERLERELKKIADEHRRRNEELRDTLRRIAEELRKTHKDLLERLEEENIPEEARKRVEDHVRESDRLLRELKKELEELHERVDRVAKDLLKKLKDIVREVRKLLKETKEKRVVEEVERKLRRLMDRIREELKRLTDESEDLVTKILDTVRRIVESIKKLVDELREERK

SEQ ID NO: 8271 - protein, 177 aa, Artificial Sequence; identical to SEQ ID NO: 8270
  Synthetic

SEQ ID NO: 8272 - protein, 181 aa, Artificial Sequence
  Synthetic
DEAERLLERVDKAHERSEELLDRVLKENRKVLEEIRKLADDLRKLLDDIMRRIEDLVRKENSEEVVKEARRLLEELKEMIDRLVRRVEELLRDTNRKNKRVVEESKKLLDEVREEIKKLNVNDRDLREIERRLKEIEEENRKLVKRLEDENRKIAREVEKLVERLERRLREIARRVEESVR

SEQ ID NO: 8273 - protein, 181 aa, Artificial Sequence; identical to SEQ ID NO: 8272
  Synthetic

SEQ ID NO: 8274 - protein, 174 aa, Artificial Sequence
  Synthetic
REKEELKKSIERVKRELERLLEEHRKRSEELKRRLEELLKDHKRRTDEVLKEAKDKNVPEDLLRDIKRRLDELNKRLAEILKDWTDKSRKLNEDLERIIRKVAKELDKILKDLEAGKDVDTLEEEIKDIIRDVKRAVKESLEEDDRLAKEVEDMVRKSKEEVERLIEKVKRDTD

SEQ ID NO: 8275 - protein, 174 aa, Artificial Sequence; identical to SEQ ID NO: 8274
  Synthetic

SEQ ID NO: 8276 - protein, 174 aa, Artificial Sequence
  Synthetic
REKEELEKEIERIKREIKKMLDELKRHSEELKRRAERLLEEHRRETERIIREMRESNVQREILEEVEKKLRRLNEELARILEDWERKSRRLLEDLKRVVEEVERRLDEILKLLEAGSDVKTLLEEIRKILKEVEDRIREILREDKRLADELEKAVRDSLREVKRILDEVREAVR

SEQ ID NO: 8277 - protein, 174 aa, Artificial Sequence; identical to SEQ ID NO: 8276
  Synthetic

SEQ ID NO: 8278 - protein, 174 aa, Artificial Sequence
  Synthetic
DEDKRLADEIKRVLDELKKSVKEHRDHSEELLRRAKELLKRHEDETRKIEEEARRNRVPEDLLREIVKRLRKLNEELKEILKRWKKRSDELDEENRRIVDDIRRKLEEILKLLKAGKDVETLKREIEELIRRAKKVNKESKEDDRRLADEVRKVVERSEETVKRLRDEVTERVR

SEQ ID NO: 8279 - protein, 174 aa, Artificial Sequence; identical to SEQ ID NO: 8278
  Synthetic

SEQ ID NO: 8280 - protein, 174 aa, Artificial Sequence
  Synthetic
REKEELEKELRRIKRELEKILEEVRKRSKELLDRLRELLRRHEAETEKAIEEMERANVRKELLEEIKRRLEELNERLRKIIEDWERKSEELNEELKRIVDEITRRLEEILRRLEAGKDVDKLLRDVREIAREAKRVIRRILKTDEDLARELEEIVRRSLKKVEDLIRKVKEDAR

SEQ ID NO: 8281 - protein, 174 aa, Artificial Sequence; identical to SEQ ID NO: 8280
  Synthetic

SEQ ID NO: 8282 - protein, 180 aa, Artificial Sequence
  Synthetic
SEEEKLEEIIRRSRKRLKELIDRLRELVKKIDDDLKRLLDEHRRRLEESERRAEELLKKVRDERIKDLVRRHREELRKSHEELEELAREVRRRLERLLRELEKILERHAEELDEIRKMIRAGKDVEKVLKELEESSRRVVELIKKLMRELEKLLRDVEERAKDLLRKNTRSSEELEKRIE

SEQ ID NO: 8283 - protein, 180 aa, Artificial Sequence; identical to SEQ ID NO: 8282
  Synthetic

SEQ ID NO: 8284 - protein, 180 aa, Artificial Sequence
  Synthetic
SEEEKLKKLLDESEKRLREILKRHEEIVRDIKRRLEELLKRHKELLDRSLKRLEELLKENRDEELERLIREHKRKLDESHKTLARIVTTLKKKLDETHRRLEELVRRHKRLLDEIRKLVRAGADVEELLERVKKSSEDVAREIRKLARDNERLLEEVKRLIRKLLEENRESSKDVEDKIR

SEQ ID NO: 8285 - protein, 180 aa, Artificial Sequence; identical to SEQ ID NO: 8284
  Synthetic

SEQ ID NO: 8286 - protein, 180 aa, Artificial Sequence
  Synthetic
SKEEELRDKLRKIRKRLEELLERLAREIDRIRRALEDLLRRHKEELDRSRKRAEELLKEIRDEDLRRLIKKHEEDLRKSHKELEDLARRVKEEADRILRRVEELVRTLEERLREIEKLVRDGSDVDRVLEELDRLLKEVEETIRDLARKLRELLKRVEDTLRKLLKENKDSSRRLEEEIR

SEQ ID NO: 8287 - protein, 180 aa, Artificial Sequence; identical to SEQ ID NO: 8286
  Synthetic

SEQ ID NO: 8288 - protein, 180 aa, Artificial Sequence
  Synthetic
SKEEELARMIEESVKRLKKLLDDLRKVIKESKDRLKELIDDHRRILEEIRRELEELLKKKRDERLEKVIRELEKRLRDSHEELKRIVEEHVREAEKVLREVEKLLRDHRKELEDILKLVRDGADVDKLLKEIEDSSRKLAEEIKKLIDEIRESSKEVIERVRRLLERNKELVRKVKEEIR

SEQ ID NO: 8289 - protein, 180 aa, Artificial Sequence; identical to SEQ ID NO: 8288
  Synthetic

SEQ ID NO: 8290 - protein, 184 aa, Artificial Sequence
  Synthetic
SEVEKLEEEIKKINDEIRRLSDKNLEDLKRILEEIEDLSRRNLKKTKDILREIEEEAKRRRTEEVVRRVRELIRRSKEHSRRVAEEIKKLIKESKDHSREVSERAEKLNREMEERVRRVIERTRLDEFAERLKRSLEDSKRTSKELVDENRKLNEELERTVRKLIEDNKRLNDRVEKRVKELAD

SEQ ID NO: 8291 - protein, 184 aa, Artificial Sequence; identical to SEQ ID NO: 8290
  Synthetic

SEQ ID NO: 8292 - protein, 176 aa, Artificial Sequence
  Synthetic
SLEDEIRRLIEEIKRKLKELLERLKEEIDRIREELKKSNRKLDELSRRIEEEARKRVGDDKEVEKVLTESKRSLDENRELDKRSLERIEDLLRKLEKIAREVERRLERLLEALKDGDEEKIERVLREMEKLLRELERIAREVLKEIEKILRENKKHNEEVMERNKRLAKELKEKAD

SEQ ID NO: 8293 - protein, 176 aa, Artificial Sequence; identical to SEQ ID NO: 8292
  Synthetic

SEQ ID NO: 8294 - protein, 176 aa, Artificial Sequence
  Synthetic
DLEREIDELIKDIARRLEESNRELEKLVRRIEEELRRSNKELEDLSRRIKTELRKEVGDQKEVEEVERDSRRSLEENKKLDKESLDRIRELLERNRELDERSKDRLRKLLEALKDGDEEKAKRVADEIRKILRENEEHNEEVARRIEEILRRNKKHNKEVADKNRELLKKLKEEAR

SEQ ID NO: 8295 - protein, 176 aa, Artificial Sequence; identical to SEQ ID NO: 8294
  Synthetic

SEQ ID NO: 8296 - protein, 178 aa, Artificial Sequence
  Synthetic
KLVEEIRKSAEDNRRRLEKLVRESKKSLDDNERENRKLVDELRKIATKIKEDLERDNIDEEVKRRLDRLIEEIRRVLKESHDHTRELAKRIKEVHERLNEHSKRLVDRLEEVLERLKNVKEAVDKLEEENKRDHDEYKKVVDELKKENKEDHERSRKLAEDLKRLLEDIRRRIKETRR

SEQ ID NO: 8297 - protein, 178 aa, Artificial Sequence; identical to SEQ ID NO: 8296
  Synthetic

SEQ ID NO: 8298 - protein, 182 aa, Artificial Sequence
  Synthetic
DEVEKLIEDLKEVTKKHAKRVEETNRHNEDVLRKVAKEVKRILDDVKRVVDEVKKVVDAGGPIDELMKRLEEVLKEVEERLDRLVEEAERVSKEHEDDNKRLADHNEEVLREAKERLERKGVDDKAKKKLEDVLKRSREEIERLKDDSRKSVDETRERLKKLKEDLKRLLEEVRKEVEKLKR

SEQ ID NO: 8299 - protein, 182 aa, Artificial Sequence; identical to SEQ ID NO: 8298
  Synthetic

SEQ ID NO: 8300 - protein, 182 aa, Artificial Sequence
  Synthetic
SEVEKLIKELRDVLKKVAEDVEKTNRDLEEVSKRSAEKVKKLEDELEKVLREVEELVKNGEDIDRLLEKLKEDLKRVRETIEDLIRENERVLREVKERNKKLVKELEDVLKEVEDRLRERGVDRKAEEDLRKVLTEIRKRAEELRRESDESVKRSRKELERLLREIEKRVEEIEDRARKAKK

SEQ ID NO: 8301 - protein, 182 aa, Artificial Sequence; identical to SEQ ID NO: 8300
  Synthetic

SEQ ID NO: 8302 - protein, 172 aa, Artificial Sequence
  Synthetic
EEVERIIEEIRDEVKKAAEKVEKVLKESREISKRAEDEVRRVLDEIRKLDETLRDARRSDEELKRVLDRIREEIKKLAEEMDRLNEESKRLTKTLAEELEEILRRIKEKIERVNGDREKLRKVLDEIRREIERLKERLDRLDEESDRKSEKLKEDLERLLREIEKRIRDERR

SEQ ID NO: 8303 - protein, 172 aa, Artificial Sequence; identical to SEQ ID NO: 8302
  Synthetic

SEQ ID NO: 8304 - protein, 172 aa, Artificial Sequence
  Synthetic
DEVRKVLEEIKELLKRLAEKVKKLIKESREISKRAAEKVKRLIEKSRRLLDTLEKANLDKDELRKALEDSKRETEEVVEELKRLNEDSKRKTEELERELREALKELERKIREINGDKDTLKTVLDTIKKKIEELVKELREVDEESKKRSKELKEEMDKVDEDIKRAIERRTR

SEQ ID NO: 8305 - protein, 172 aa, Artificial Sequence; identical to SEQ ID NO: 8304
  Synthetic

SEQ ID NO: 8306 - protein, 172 aa, Artificial Sequence
  Synthetic
DEVRKVLEDIKRDLDRLAKRVKDVLREIEELTKEAARTVKKVIEESRRLLRKLKEANLEEKDLRRALEESKKKSKEAKEKLDKIDRDIERKIRKLKEELERLLRELEKRIRTINGRREDLTELLKRIEEKIKRLVEELERLLKRSREESKRLVEEMEKVNREIEEEIKKRAT

SEQ ID NO: 8307 - protein, 172 aa, Artificial Sequence; identical to SEQ ID NO: 8306
  Synthetic

SEQ ID NO: 8308 - protein, 186 aa, Artificial Sequence
  Synthetic
EEVERLLKEIKDLLDEVARENKEALKRSKELLEEVAEDNKRVLREIEKLLEDVERKVKDEKGDEEVERKLKKVIEEIDKLVKEVHEKNRRLHERSEELIRRLHERNRRVIERMEKLIRDLKERKKEAKELLKELEDLLRKARKTVEDLDRELEELNEEIRKALEELDKELERLVREIRKRLEDARR

SEQ ID NO: 8309 - protein, 186 aa, Artificial Sequence; identical to SEQ ID NO: 8308
  Synthetic

SEQ ID NO: 8310 - protein, 186 aa, Artificial Sequence
  Synthetic
REAEELLKEIERLLREVERENKKALEDSRRLLEEVAEEVKKVLREIEELLKTLEELVRKEKGDKEVAERLDKVLKDVEKLIKDVTDRLRDMHRRSAELIKELHDRNRKVIEEVEKLIREVKERKKEMEELLRELKRLLEEIERRVRELDEELRKLNEDIKRELERLIRELEELLKRAEETLRRLKD

SEQ ID NO: 8311 - protein, 186 aa, Artificial Sequence; identical to SEQ ID NO: 8310
  Synthetic

SEQ ID NO: 8312 - protein, 186 aa, Artificial Sequence
  Synthetic
SEVEDALRRLKELLRRVAEENRKVLEESKKLVEDARRKNEEVLKEIEKLLEDVAREVKDRKGDDEVLERLKEVLKRIEDLIRKVTRDNEELHKRSKKLIEEVHKRNRELIERAEKIIREIKERNKEMEELLRELKKLLEEIKKSVEDLDRELKKLNDEIRDESRKSKEELERLLEDIERALRELAR

SEQ ID NO: 8313 - protein, 186 aa, Artificial Sequence; identical to SEQ ID NO: 8312
  Synthetic

SEQ ID NO: 8314 - protein, 186 aa, Artificial Sequence
  Synthetic
SEAEEVLRRIEELVERATRTVEKLAEESKRLLEKLAEENKRVLEEIKRLLDEVADKVRKKKGDKEVLEELKKVLDEIRELLERVHRENKRAHDESKKLIDDLKKELDRVREEIKRLIDEVRERLKEMKELLDELKTLLDEITKRLKDLTDKLERLNDKIRRELERLDEELRELLERIREEMEKLTR

SEQ ID NO: 8315 - protein, 186 aa, Artificial Sequence; identical to SEQ ID NO: 8314
  Synthetic

SEQ ID NO: 8316 - protein, 183 aa, Artificial Sequence
  Synthetic
DLEEELKELLERIRKAHEELIKELEDLTEKIERDHEKLIKRLEDLLKRIEDEMRKLLEEIDRDELKKLLEEVLREAEELVKRLRKTSEDNIRESRESNKEARKTSEDNIRDIARLLEELKRRTDSRTVKEILKRIEDSLRRAAKKVKDLAEENKDSLRRVAEKVERILEELKRLLEEIARRVK

SEQ ID NO: 8317 - protein, 183 aa, Artificial Sequence; identical to SEQ ID NO: 8316
  Synthetic

SEQ ID NO: 8318 - protein, 183 aa, Artificial Sequence
  Synthetic
SLEEKLEDLIRRLKESNERLKRELERLIEELRKNNERLLKELDDLVEEIERALRDLLREKDDEELRRLAEEVKREVERVKREVKKLSDDDKKILDDLLREVERLSREDERTLDKLKKDVSRLTDSRKVEKILKDAKDSNKKVADTVREILKRARDSNKRVAERVKDLLRRLRELLKELAERVK

SEQ ID NO: 8319 - protein, 183 aa, Artificial Sequence; identical to SEQ ID NO: 8318
  Synthetic

SEQ ID NO: 8320 - protein, 183 aa, Artificial Sequence
  Synthetic
DLEEELKELIKRIRDAHRELKERLDKLVEEIKRNNEKLSDDVRRLVREIEKELRRLLEEIKDERLKRLADDVRRKVEELLRRLRKLSEEDKTRVDEIRKELEEISRRNEEELKKLEEDLRRLTDKEKVKKLLKELEESLKRVADEVKRLLEELERSNREVEKRVRELLEEARRLLKDLADKVR

SEQ ID NO: 8321 - protein, 183 aa, Artificial Sequence; identical to SEQ ID NO: 8320
  Synthetic

SEQ ID NO: 8322 - protein, 185 aa, Artificial Sequence
  Synthetic
DLERELRELIKRIEDDIRKNVKRNEESIRKTEDELRKNVRENERLIEEMRKELEKLRRRNRDKELVRRVEELVDTVMKESRRIIEEAEKRVRDSAKRSKEVIERVKRELERVVKKIEDLVRKLDKVEEVARKLLDELREIKKRINDTSRTTLEDNKRLAKEIHDSSKESLKRLKKILDDIREEAR

SEQ ID NO: 8323 - protein, 185 aa, Artificial Sequence; identical to SEQ ID NO: 8322
  Synthetic

SEQ ID NO: 8324 - protein, 185 aa, Artificial Sequence
  Synthetic
RLAEELRKLIDKVRRDLDRNRETNRELIKRAKDELRKNEEENRRIIDEIRRALEDLTRKNKDEELVKRVEREVEKVEEESRRLIEDLKRKVDEVKERSDRVIRELEERVKKAEKKVEDLIRELDKVEEAVRKVKKEIEDIVREIHKLSKRTLEELERIVEKIHEDSKRMLERVKKLLDKIRRDAE

SEQ ID NO: 8325 - protein, 185 aa, Artificial Sequence; identical to SEQ ID NO: 8324
  Synthetic

SEQ ID NO: 8326 - protein, 185 aa, Artificial Sequence
  Synthetic
SLAEELRKLIKRVEDEIRRLAEENKDLIRKARETIRKNEETNREVITRIRREIEKLEKDNRDRKKVEEVKKELEELADRSRRVIKEVKEKLERLMRKSEELIERVERLLEEVRRKVEELIRDLDKVEEVVRELLKEIRKVLEDIRRESKTSLDDIRRLLKEINDLSEETIREAEELLDRIRKKAT

SEQ ID NO: 8327 - protein, 185 aa, Artificial Sequence; identical to SEQ ID NO: 8326
  Synthetic

SEQ ID NO: 8328 - protein, 185 aa, Artificial Sequence
  Synthetic
SLREELKRLIDESRKSLRENEERNKKSIDDTRRLLRENERRNRETIKELKKTLDELRRRSKDKDLLRTIEKLIREAERESRELIKKIEEDIRRSEERSKRAIDDLRRKNDELEKEVRTLVRDLDKVKEAVDRLLERIRRINEEINRTSEKTLEENDRLVKELHERSERLLRKLEELLRKIDETIR

SEQ ID NO: 8329 - protein, 185 aa, Artificial Sequence; identical to SEQ ID NO: 8328
  Synthetic

SEQ ID NO: 8330 - protein, 185 aa, Artificial Sequence
  Synthetic
SLAEELRRLIEEVKKRLKELEDRNRKLIKEARDELKENEETNRKTIEDIERTLEKLERDNKDKELVRRIREEIDKVREESERLIKRVREKVKKVEEESEELIKEIRKEIKRLEDEVEELIKRLDKVEEAVRDLLRRIRELLRDLERLSEESLRKLKEIVEDIHRKSKTMLDKLRKMLEELRREAT

SEQ ID NO: 8331 - protein, 185 aa, Artificial Sequence; identical to SEQ ID NO: 8330
  Synthetic

SEQ ID NO: 8332 - protein, 185 aa, Artificial Sequence
  Synthetic
SLAEELKRLIEESRKSVEELERRNRKLIEDARRDLERLARENRKLIEEIRRRLKDLAKDNKDERLVRRVARLVDKAMKESEEVLDRIRRKIDKVAKESEKIIRDIKRENDDLERKVKELIDRLSDVEEVVRRLLEEIKRLNDEAKRKSKESLDRLREILKEIRKTSERTLEKLKRILDRIREEAT

SEQ ID NO: 8333 - protein, 185 aa, Artificial Sequence; identical to SEQ ID NO: 8332
  Synthetic

SEQ ID NO: 8334 - protein, 188 aa, Artificial Sequence
  Synthetic
SEIEELLERIRDLMRRINKKSEDHLRELEKILREIRRLAEKSNEEIERLLRELEDLAEKRRTDEVRKEVRRILEEIERRSKEVIDEIRRLLDDLRKTVDKVEREVREILKRIEEEVRDLTRKLKDDKDMKDLKKTLDDLLDELRKDIERNVKENRDTLKRIEDDIRRLAEENKKLLEEVRKKIEELET

SEQ ID NO: 8335 - protein, 188 aa, Artificial Sequence; identical to SEQ ID NO: 8334
  Synthetic

SEQ ID NO: 8336 - protein, 188 aa, Artificial Sequence
  Synthetic
SEIEELLRRLEDILRRIEELIRKVLKELRDLVEKSNDLSRRHLEDAKRILKEIEEEVKRRNTEEVRTRIRKLLEDIKRTLDEVTKEDRELLDRARELAERIIRRIRKLLDDARREVEKLARELKDDERVEELRRRLRKILEDIRKRIEELVEELRRLLKEWEEESKKNDETNREVLKRIEDRIRELER

SEQ ID NO: 8337 - protein, 188 aa, Artificial Sequence; identical to SEQ ID NO: 8336
  Synthetic

SEQ ID NO: 8338 - protein, 177 aa, Artificial Sequence
  Synthetic
DEAEEIKERIKKVVEDLERKVRELLRRSEKLAEDLHELSKENIERMKRLLEELEDLVRKRRTEEVIKTAEKVLRDSRRSSKEVADRADRVLEESKRLTREVTEEMRRVLEKLRDEVRRANLDEEIEDLLRKVEERIRELEEELRRLNKKIEEEVRRNKDENRRVNEEIERRIRELAR

SEQ ID NO: 8339 - protein, 177 aa, Artificial Sequence; identical to SEQ ID NO: 8338
  Synthetic

SEQ ID NO: 8340 - protein, 177 aa, Artificial Sequence
  Synthetic
DESKEILDRIRKVNEDLRRLAEELLKDSRRVVEEAHKLSEDNIRRLEELLKEIEKEVRRRRTEEVIRRLEEVLKRSRESSEEVVRRLERLLERSRRLTEEVAERVREVNERLKEEVDRANLDDKIRKLLEDSKKTSDELKEELDRLNEEIERSVRDNKRRNEEVNKRIEDEIRKLAT

SEQ ID NO: 8341 - protein, 177 aa, Artificial Sequence; identical to SEQ ID NO: 8340
  Synthetic

SEQ ID NO: 8342 - protein, 177 aa, Artificial Sequence
  Synthetic
SEAETILEKIRRANEELNRLSEENIRKSRKVVKELHELSKENIKRARDLLREVKKLVEKRQDERVIKTLEDVIRDSKRSSKKVAEELEKVLEDSKRSSERVAREMERVLRELEEEVRRANLDESIKELLKEVEDDVRKNKEENKKVNKEAEDEVRENKERNTRVNKEMEEEIKRLAK

SEQ ID NO: 8343 - protein, 177 aa, Artificial Sequence; identical to SEQ ID NO: 8342
  Synthetic

SEQ ID NO: 8344 - protein, 182 aa, Artificial Sequence
  Synthetic
SERERLERLVREAAKELKRLLEELERLHKKIDEDLKRSNDRLRELHERIKKDIERLLRRIGDDEKLERLRRIAEEVKKRSRESLEEHRKRNEDSKRRSRKSLEDVERTMREVRRRIEDLLRKGGDRVEEILKEIEDILRKVKEDVKRVLDENRRVLEENKEHAERILRENKRMLEELRREAK

SEQ ID NO: 8345 - protein, 182 aa, Artificial Sequence; identical to SEQ ID NO: 8344
  Synthetic

SEQ ID NO: 8346 - protein, 182 aa, Artificial Sequence
  Synthetic
DSEERLRKLMREAREELKELLRRLRELHEEIRKRVEELLRRLEELSDKLRRDLERLLREIGKDEKLKDLAKLVKEVLERSRESNDRLRKIIEKVLTDSKKSLDDVARIADEVIRRIEKLLRDGGSRVEELLKTIKELVDRLRRIVEKVLDENRRLLKRLEEEIKRVLDENREMLDRLRKAAE

SEQ ID NO: 8347 - protein, 182 aa, Artificial Sequence; identical to SEQ ID NO: 8346
  Synthetic

SEQ ID NO: 8348 - protein, 182 aa, Artificial Sequence
  Synthetic
SKEETLEKLVREVKDRLKKLLEEVRRLTEELERELKKLREELEELSKELEKDLRRLKKRVGDDEKVKDLDRRLREVLRRSKKSLDDLRRIAEDVIRRSRKSNRELEEEARRVIEEIEDILRRGGERVEELLKRIKELLEELERRVEEVLRRNRELLKRLEETIRKVLEENKKLLKEVREDAK

SEQ ID NO: 8349 - protein, 182 aa, Artificial Sequence; identical to SEQ ID NO: 8348
  Synthetic

SEQ ID NO: 8350 - protein, 182 aa, Artificial Sequence
  Synthetic
DKEEELRRLVEEVEKRLRELEKELEDLTDKIEKRLRESNERIKKLSDDIRRRLEDLLRKVGDDSRLDDLRRDLKRVLDESEKSMRDHAERNKKSLERSKRSLDELRDIARRVLETIKRILEKGGERVEELLKRIRDILKRVEEIVKEVLERNRKVLEDNERHAEEVLRRNKRLLEELEKRAT

SEQ ID NO: 8351 - protein, 182 aa, Artificial Sequence; identical to SEQ ID NO: 8350
  Synthetic

SEQ ID NO: 8352 - protein, 182 aa, Artificial Sequence
  Synthetic
SKEDDLRKIVKEIEEEVRKLLKELEELTKELEDRLRESNKTLKELNERIKRRLEELLRRIGKDEKAEELKRSVEDVERKSKETLDRHEKKNRDSLKTSRDLNERLREILREVLETIRDILRRGGSRVEEVKKELEDLLRRLREEVKRVLDDHRRILKENEDHAREVLKRNKELLRKLEEEAK

SEQ ID NO: 8353 - protein, 182 aa, Artificial Sequence; identical to SEQ ID NO: 8352
  Synthetic

SEQ ID NO: 8354 - protein, 182 aa, Artificial Sequence
  Synthetic
SKEERLKKLVDDVRKTAEKLKRDLERLTKEAEETLERLKRELDRLNREIAEEIKKILDRVSEDEKVKELKKLADDVLRKSKETLDELKRILERVLEESKRLNDELRKDLERVLKDIERILREGGEDVETLLEEIERKLREVEKRIREVLKRHRELLRRLRETIKRVLERNKELLDRLREAAR

SEQ ID NO: 8355 - protein, 182 aa, Artificial Sequence; identical to SEQ ID NO: 8354
  Synthetic

SEQ ID NO: 8356 - protein, 182 aa, Artificial Sequence
  Synthetic
SKEETLKKLMDRAEEELRRLKRELEELNDRIREALKKLNEDLRRLHEKIKEDIRKLLEEVDKDEKFEELKRLAEDVLRRSRENLRDHERVNKESLEESEKSLRELEKTLDKVRKDIRKILEDGGERVEELLETIERILEEVRRRIEKVLEENKRLLDENKKHAEESLKKNKELLKRLRDAVK

SEQ ID NO: 8357 - protein, 182 aa, Artificial Sequence; identical to SEQ ID NO: 8356
  Synthetic

SEQ ID NO: 8358 - protein, 185 aa, Artificial Sequence
  Synthetic
SEVDEVRERLERLLRTVERVVERILRELKRLNDELRKIAEDLLRENKDLLRELAERVRKGLEKRELERLLKELRKRSKESNEELRRVAEKAKEDHRRLLDELRKILKTIEDEIRRLLEDLRRRGVPSEALKDIEKLVRKIKEELKRLLKEVAETLERSERSLDKLIEDHRRLVEDIERALKELRK

SEQ ID NO: 8359 - protein, 185 aa, Artificial Sequence; identical to SEQ ID NO: 8358
  Synthetic

SEQ ID NO: 8360 - protein, 185 aa, Artificial Sequence
  Synthetic
SEVEKVLETIKDLLRKLEEIVKKILDEDRKLMEKVTKIVEDLLEENKRLLEELERLAREGQPKEELTKLAEELERRSTKSNEDLKRVVEDWERRSEELLRRAEDVLRKIERTVRELLKELEKRGMPSELLKRIRELVKEVKDRLRRLREELEESVRRARKTLEDLERRHRKLLKDIRETIKELIR

SEQ ID NO: 8361 - protein, 185 aa, Artificial Sequence; identical to SEQ ID NO: 8360
  Synthetic

SEQ ID NO: 8362 - protein, 181 aa, Artificial Sequence
  Synthetic
DLDREIERLVEELERRLRELLRRNEELVKRVEDELEKLKRESEKLLRELRKKLEEAKKSKELDDLKKRLEDLADKIRRVHERLNRELKELVERSRRLLKKVEEELKRLVEEIRKVLERLKNVKEAVDKLLKELKDILKKLEELSRKSMEDIKDILRRYEKLVKELLDELKKILDELDRADK

SEQ ID NO: 8363 - protein, 181 aa, Artificial Sequence; identical to SEQ ID NO: 8362
  Synthetic

SEQ ID NO: 8364 - protein, 181 aa, Artificial Sequence
  Synthetic
DLKDEIEELVKRARERLERLREESEEIVKELEKVLRDLEKENRDLARRLRDELRKIEPSDKLRELRKRLEELLKESEKLLRKIAEEVKRLVDDIRRVHEELNKRLEELVRDIRRVLEELKDSEEAVRRLKDELRRILEEYERVVEELKKRLKDLLREAERLSKESLDELKRILRKLKEDAK

SEQ ID NO: 8365 - protein, 181 aa, Artificial Sequence; identical to SEQ ID NO: 8364
  Synthetic

SEQ ID NO: 8366 - protein, 184 aa, Artificial Sequence
  Synthetic
SLEDELRRLVEEDERNIRKLNDENRKSVRKLEELLRRLNKRNRETIERIKRLLDRLREESTDEDLLRKIEERIDDVRRKLEELDRRLEEVIRRLEKKVKDLDDKWRRLSEEIKKELERLAREGADKEEIDRILRKVERLSRKAHEDVRRINEELEKLLEKLKREVKRENDRVEEEAKRLADEVK

SEQ ID NO: 8367 - protein, 184 aa, Artificial Sequence; identical to SEQ ID NO: 8366
  Synthetic

SEQ ID NO: 8368 - protein, 182 aa, Artificial Sequence
  Synthetic
REVDELVKRIEELLREMKKKNDESLKDSRDLLRELEKRVERVIEEIEKLLRDLEELVRKEKGDDEVRKKLEDVLRKIEKLVRDLARELEEALRRSKELSDRNRKDNEDLLRDVERLVDKAKKDGLDEKRLKKLLDELRDMSRKADRALRELNKDVARKIEELRRRLKKLLDEVKERADELTK

SEQ ID NO: 8369 - protein, 182 aa, Artificial Sequence; identical to SEQ ID NO: 8368
  Synthetic

SEQ ID NO: 8370 - protein, 186 aa, Artificial Sequence
  Synthetic
SEAEKLLEDLKRLVEDLRRKNKKLNDDNERLTTELEKTSRKLLEELKRLLEKVADDVRRTRDKKRLKELAKELRDRVRKVEKDNRDLLRELEERSRRLLEESKRLLKELLDRARKLVRELERDNKEEGELKERLDRLLEEVKKTIRELEKRNRESHKRTKDVARRSAEETKRVLEKIEDDLRKLDK

SEQ ID NO: 8371 - protein, 186 aa, Artificial Sequence; identical to SEQ ID NO: 8370
  Synthetic

SEQ ID NO: 8372 - protein, 186 aa, Artificial Sequence
  Synthetic
SEAEKLLKEIKDLVDELRKRSKELIDENKRLTEEVEERARRLLTELRKLLKRLEELVRREEGKEKLDELLKDVDRKVKEVLKELEDLAEELRRRSRELLKRNDDLLRELEKRVKELLDELKERNKEEGELEERIRRLLREIEKEAKRSRDRSREVHRRTDEELRRLEREIKEILKEIKRKLDELRR

SEQ ID NO: 8373 - protein, 186 aa, Artificial Sequence; identical to SEQ ID NO: 8372
  Synthetic

SEQ ID NO: 8374 - protein, 182 aa, Artificial Sequence
  Synthetic
SDVDRLLKENRDVSKKVEDDVRRLLEELKRISEEIARRVKRLLEELRRILREIEELVKKGEDIDELLTRLEEALRRVEETLKRLVDESRKVSKEVLTDLRRLIEESKEISRRLLERLERRGISDELRRRAEKSIEDNERKLRKLEEDAKRIIDDNERILRDLERRAKDVIREVRKALEDLKR

SEQ ID NO: 8375 - protein, 182 aa, Artificial Sequence; identical to SEQ ID NO: 8374
  Synthetic

SEQ ID NO: 8376 - protein, 183 aa, Artificial Sequence
  Synthetic
DEAEKLLEEVKEENRRVNEDIKRVIEEIKKLIDESRRLMEKIIRDVEALLTRIRDVVEKLKTSEEVLERLKREIEDIDRRAKELLDDSRRKTRELIERVRERIEELRRRHDDLIRRLEERLKDDEDVRREIERIMRELKKNLDRLEEEIRRIADELRRVNTRLEEEIKRVIDEARKTLEELRR

SEQ ID NO: 8377 - protein, 183 aa, Artificial Sequence; identical to SEQ ID NO: 8376
  Synthetic

SEQ ID NO: 8378 - protein, 178 aa, Artificial Sequence
  Synthetic
SKEERLEEILRRHKKSLDEIRKELRKLLEDHRKSIEDLIRKLRELLERLKELLERLERSGVSDEARKRLEEIIDEVRRLVEKITKELEDTLKELEDLVRTITRELEKTLRELEDLVRKGGEDVDRLITEIKRINEELRESVRRLLERAKRIDEELRRTAEELVKTIEKLAKELEETVR

SEQ ID NO: 8379 - protein, 178 aa, Artificial Sequence; identical to SEQ ID NO: 8378
  Synthetic

SEQ ID NO: 8380 - protein, 187 aa, Artificial Sequence
  Synthetic
DEIEEVVERIRRIDKELNKRAEEVIRRNKELDERLNREIERVKEEIRRLIKRLEEVTRRDLKDKETLDRTARRVLEEIEKLVRDLERKMRESLKRSRETVKRVKDRLDETRERVRRLLDELRKRNTDLEEAKKKLEDLLEEHERNLRKIERDLEELNERHERNLRKLKRELEEILKRAKEVLDELRK

SEQ ID NO: 8381 - protein, 187 aa, Artificial Sequence; identical to SEQ ID NO: 8380
  Synthetic

SEQ ID NO: 8382 - protein, 187 aa, Artificial Sequence
  Synthetic
SEIEKVLREIEEIDKRLNKEVEDVLRENRRVDEELNRHSERVREEIERLVKRLDDVAREELKDKETLRRTLDEARRRIEKIVRDNKRELERSIKRSRETLDTLERRAERTKEEVKRLVEDLRRKKQDKEEMKKTLEKLLREHEENIKELKRRLEELNEEHERNIRRSEETLKKLLKEAEDRLREIKK

SEQ ID NO: 8383 - protein, 187 aa, Artificial Sequence; identical to SEQ ID NO: 8382
  Synthetic

SEQ ID NO: 8384 - protein, 182 aa, Artificial Sequence
  Synthetic
EEAERVLKRIADLIEELKRHSEEVSRRSKKLLDDLSRHTEKVSKESEDLLRRLEELARRGEIRDEVLKTVLEDSKRLSKEDKERLEKVTRESKKLSDDDRKKVEEVEREIEKLARDVKRKRDEREIEERLRTLRRRLERMVEEIERLNEENLRRVEKRVRELEKENEDNLREAKKLLDEIRR

SEQ ID NO: 8385 - protein, 182 aa, Artificial Sequence; identical to SEQ ID NO: 8384
  Synthetic

SEQ ID NO: 8386 - protein, 182 aa, Artificial Sequence
  Synthetic
SEVEEVLKDIERLIKELREENKRSLDRSRRLAEDLERRNRESLRRIEKLLRELEKIARDLRDKDELRRILKELREEVERISEEDERLAEEVLREHEKINDEDRKKLRALLDTVRKLIEDVIRTEEVRKRAEDVLRRLEEVIKELEKTNEDAKRELKRLIDELRRTNEEVNKRLEERLDKIRE

SEQ ID NO: 8387 - protein, 182 aa, Artificial Sequence; identical to SEQ ID NO: 8386
  Synthetic

SEQ ID NO: 8388 - protein, 182 aa, Artificial Sequence
  Synthetic
SEVERVLKDIERLLKELEERNRRSLEESAKSTRKVEEDNKRSLDKSTELLKRLEEDAKDDRDKDRLRKRADELLETHRKINRDDDELLKKNHEDHERINRRDDELLRDVERKIRDIIRRVIRDEEVRKRAEDVRRRLEEILKRLKETNEDMKRENKRVLDELRKTNEDAEKKLRDLIRKLRE

SEQ ID NO: 8389 - protein, 182 aa, Artificial Sequence; identical to SEQ ID NO: 8388
  Synthetic

SEQ ID NO: 8390 - protein, 182 aa, Artificial Sequence
  Synthetic
SEVEKVLKEIDELIKDVERTNRESLEESERLLEKLKRENERTVERSERLAEELERLARELKDKDSLEKLLEEVERTHRKLNEDDRRKLEDILRRHKKINEDDERLLREVLKRVEDIIRRVIRTEEVKDRADKLLRRLEEMVEKIRRTNETLLRALEKLIRDLKRNNEEVEKRLREIAKKIRD

SEQ ID NO: 8391 - protein, 182 aa, Artificial Sequence; identical to SEQ ID NO: 8390
  Synthetic

SEQ ID NO: 8392 - protein, 186 aa, Artificial Sequence
  Synthetic
SEVDELLKRLKKLLEDDKRLAEELLKTIEKVNDDTRKRSEELLRRLERALEELEKLVRKVRGREELEKVLKDIEEELRTLLEDNERLLREDDKVVKDLIREVEKLNRETEEEVRRVVEEVKKKLKDVEEVKRRLEEVLREIKRLVDETRKELRRIDEESKRLAEKSRRDSRRVEERLRTLLEELRK

SEQ ID NO: 8393 - protein, 186 aa, Artificial Sequence; identical to SEQ ID NO: 8392
  Synthetic

SEQ ID NO: 8394 - protein, 186 aa, Artificial Sequence
  Synthetic
SEVEKLLEDMERLLKEDEELVRRLSKRSEEIVRDDRRRNKEILDEIRKLLEELKRLADRLEGREELEKLLKELEDRVDKLIKESEELNEESERRNKKLLDDLERLNRDTERKIEEIVKKVRDRLDKVKDVEERLRRAEERIRRAVERTRDHARRNHEKLKELVKETRESNDRLKKEIRKLLEELRK

SEQ ID NO: 8395 - protein, 186 aa, Artificial Sequence; identical to SEQ ID NO: 8394
  Synthetic

SEQ ID NO: 8396 - protein, 180 aa, Artificial Sequence
  Synthetic
EEEERIREVKKRSEDLLEELKRSNERVERESDKLAEEIRRKLEELARRADEVIRRLRARKETEELKKLADELRKLVDEVRKRAERLIREDKRMVEEVKRRSRELIERDKRVVETIERLLRAGEPTEKLLEDLKRINKETERLNRELLRDLERINEETRERIDRLLRELERMIDELRKRVD

SEQ ID NO: 8397 - protein, 180 aa, Artificial Sequence; identical to SEQ ID NO: 8396
  Synthetic

SEQ ID NO: 8398 - protein, 180 aa, Artificial Sequence
  Synthetic
SERERAEEIRKRSEDVVREMRESNKDVSRKSEELAKKLREDLKRVEKKVRELLEEIKREKRTEDIERLIEELKRVVEEVAKTLEELIKEDRKVVEDIIRRSEKIIRDNEKLVREVIELVKAGEPTEELLKRLEEISRRSRELNRRLLEDLKRINKETKERADKLLEDLERLLEDIKRRVD

SEQ ID NO: 8399 - protein, 180 aa, Artificial Sequence; identical to SEQ ID NO: 8398
  Synthetic

SEQ ID NO: 8400 - protein, 180 aa, Artificial Sequence
  Synthetic
DEDERLKEVEEESKKVADELRDRLRRLMEESRRRLKRLREEAEEIKRELDTIAEDLKREKDTEEIKKIITDLKRIIEKVRRDLERLIREDEEASKELKDRLEKIIEDNERVVREVKKLIKKGEPTEEILRRLEEISEESERRVEKLLRENKEINEETDRRVKELLERLKEVLERIERRVK

SEQ ID NO: 8401 - protein, 180 aa, Artificial Sequence; identical to SEQ ID NO: 8400
  Synthetic

SEQ ID NO: 8402 - protein, 180 aa, Artificial Sequence
  Synthetic
DERERLREVLERSRKLAEDLRRSNEELERRSRELAKELRKTNKELEKRLKDKADDLRREKNTKEIEDIIRRLEEELERVIRDSEDLIKKDEDISEEIKRRSEEIIRRNEKFVKEVEELIEAGEPTERLLEELERISEESKRRNDELLEKNERVNEETRRRNEELLDELRRLLEEVERRVK

SEQ ID NO: 8403 - protein, 180 aa, Artificial Sequence; identical to SEQ ID NO: 8402
  Synthetic

SEQ ID NO: 8404 - protein, 187 aa, Artificial Sequence
  Synthetic
DIEERIREVLRKARRVLERSEERSRELVERLRRVLEDSRRRTKRLTEEAKELLDEVRKRLDKDEAREKLRKLEELIKRLKEKLDEVDKRLADKVRRLSEMAKEVNDRLRKKIEDVERKLDEVRRRGGDKKLVEDLLREIEKIIKEIEDTTKRVVDELRRLLEEIKRTSDELEKEVRKLLEEIKRATD

SEQ ID NO: 8405 - protein, 187 aa, Artificial Sequence; identical to SEQ ID NO: 8404
  Synthetic

SEQ ID NO: 8406 - protein, 177 aa, Artificial Sequence
  Synthetic
STREALKELIDRLRDLVRRIRDKHRKLLEEIKRVLDESERRHRELIKRVEELLRDLARRVSEDILRELKRVLEELTKLSKKNIDDIRDVVRRLEELLRDNIRRIDEVLKRIRELAERGGEDVETIIRRAEEALKRLEDSSRKVEETIRKVLEDLRRSSEEVAERVRRVLERLEEKAQ

SEQ ID NO: 8407 - protein, 177 aa, Artificial Sequence; identical to SEQ ID NO: 8406
  Synthetic

SEQ ID NO: 8408 - protein, 177 aa, Artificial Sequence
  Synthetic
SSEERLRKVIEDLKRLAEESRKRHKELIDELRKAVERIERRHKKLLDEIKKVVDDIRRRVSEELLKRIEEVLDEIRKELEENIKRIRKVLDELRRTSEENIRRIEKVLRELEDLVRKGGEDVDTIIEEVKRVLEELKRSTEEVEKRVRDAIEELERSSEELARRIKEVLKRLEEETR

SEQ ID NO: 8409 - protein, 177 aa, Artificial Sequence; identical to SEQ ID NO: 8408
  Synthetic

SEQ ID NO: 8410 - protein, 181 aa, Artificial Sequence
  Synthetic
SAEEKLDRLRKEVERLSDETRKELERILKKVEDVIRETRRRAKELEEELRRLIRDIEEKLKDDERLKEALRRISEELRKLLEDLERINEKTRRDVERLIRELEKINEETKRRVDDIIRLVEAGVDIETVIREIERLLEEDRKAVEEILRRIEKLIEDDKRAVDRIVKEIKDILDKLREETR

SEQ ID NO: 8411 - protein, 181 aa, Artificial Sequence; identical to SEQ ID NO: 8410
  Synthetic

SEQ ID NO: 8412 - protein, 188 aa, Artificial Sequence
  Synthetic
DIEDELRKLEEEIRRVIEKWKRLTEENRRENERVIRKWDKLSKDLADEIRRVIEDARRKLKDERLKRKLEKLVRDLERILKKDKETVDKVRKELDDLDRRDEETMRRLEKELRDILKEVKRVIEEKKDIKELVKELVDRVKRLIREIEKEARRTSEENKDLLKKIEDDAKRSEDELRELIKEIKKRID

SEQ ID NO: 8413 - protein, 188 aa, Artificial Sequence; identical to SEQ ID NO: 8412
  Synthetic

SEQ ID NO: 8414 - protein, 188 aa, Artificial Sequence
  Synthetic
DIEDTLRKLAEDIKKVERDMEESNRRNREKNREVIEKWKKLSDDLERELEEVIEDARRKLKSRDATRKLEELVKELKDILREDRETVKKVKEELDKLDRESEELVRELVERLRKILEDVRREIEKKDKIRELVRKLIEDVRRLIEEIRRENKESSDRNKRLVEEIDERAKRSADELKRLLKEIRDRID

SEQ ID NO: 8415 - protein, 188 aa, Artificial Sequence; identical to SEQ ID NO: 8414
  Synthetic

SEQ ID NO: 8416 - protein, 188 aa, Artificial Sequence
  Synthetic
DIEEALDEVRKEIEEVIRRWKKLTRENEEENRKVIEDIRRRLDELRREIEKVIRDARRKLKSRDAKEKLDRLEEELRRILKDVERVIRELEERLKKLDEDDRREMERVVRELKRALDEMRKVIRDKTDIRELVKKLIDDIRKLIDEIRRDAERTSRDNKRLVEEIERTIEKLIREVKELLERIKEEID

SEQ ID NO: 8417 - protein, 188 aa, Artificial Sequence; identical to SEQ ID NO: 8416
  Synthetic

SEQ ID NO: 8418 - protein, 188 aa, Artificial Sequence
  Synthetic
DIEEILKKVEDDAREVIKEMRKSNEDNKRKNKKVIEEIERTLKKIEDDARRVIDEIEKKLKREELKKRVEELREELKEILDRMRREIEKLAEELKKLDEESDRLVKKLEDELKKVIDELEETIRRKDKSRELVKKLDDELKELIKKIRTDNKRSSERNDELVKEIRKRIEKLVREAKELLKRIREDID

SEQ ID NO: 8419 - protein, 188 aa, Artificial Sequence; identical to SEQ ID NO: 8418
  Synthetic

SEQ ID NO: 8420 - protein, 188 aa, Artificial Sequence
  Synthetic
SIEETLDELRKKIEEVIRRMKKSNDDNEKENREVIDRIRRTNEEIRKRAERVIEDARRKLKSEELTRVLKKLAERLEKILRESEKRVRELAEELKRLDEESKRLVEELVRELETILRELEKEIRRKRDVKERVDKLIREVEDLIRRIEEENKKSSEENKRLVRRIEKDNEDSIRELEKLIEDIRRTID

SEQ ID NO: 8421 - protein, 188 aa, Artificial Sequence; identical to SEQ ID NO: 8420
  Synthetic

SEQ ID NO: 8422 - protein, 185 aa, Artificial Sequence
  Synthetic
SLEELLEKVKREIDKVLERIERIVRKNAKENERVIREDERLLRELVKEIKEVEDRIRKRGLDKKDVDKLKEDLKRIIEEWKRLSEKLKRDSEKSLEELKELLKRIAETLKRVIDELRRVLREKKEDGDLMRKLLEEVKELIKRLEEEIEKASREDRRLVEEAKEKSKELAKRIKEELKRIEDEVR

SEQ ID NO: 8423 - protein, 185 aa, Artificial Sequence; identical to SEQ ID NO: 8422
  Synthetic

SEQ ID NO: 8424 - protein, 186 aa, Artificial Sequence
  Synthetic
DEVDDIIRKLKELIKELREKSKRISEENKRLVRRLEELSRRIIKEIKDLLEELKDRARKDRDKETLRKILREIEERVKRLAEESRRLSKTVTDESKKLMDKSRETSRRLEETVERLIRDLEEKLKDVEEVKDKLRRIKEEADKAIKDNEDLLRRNERENREAVKRNEELLKEVRREVEEVIRRTRK

SEQ ID NO: 8425 - protein, 186 aa, Artificial Sequence; identical to SEQ ID NO: 8424
  Synthetic

SEQ ID NO: 8426 - protein, 186 aa, Artificial Sequence
  Synthetic
SEVEEVIKRIKKLNKETEDAVREVIKRIEDSNEKLLRDVEELIKKIEKALRDLEDKARRVREREELERLLRELEEALEEIERRIRRLLEEDKRRLEELVRRVEKMLDDDRREVERLEKEVRERLKNVREVEELLRRVKRHTEEVVRRVERELRRIAEHVKEVEKTVRELVRRIREKIREVVERVRK

SEQ ID NO: 8427 - protein, 186 aa, Artificial Sequence; identical to SEQ ID NO: 8426
  Synthetic

SEQ ID NO: 8428 - protein, 178 aa, Artificial Sequence
  Synthetic
DEARELVKELEDLIREITKTVRRLLEESEELIKRIDDAVDDLRRRDEDLNREIKEEIEKRKRKEKLEKLIERLKESLERVKRTIEKLIRDLERLNEKLRRDVERLVAELEKILKKIKDAGLEERILRELEERVKELEKEAREILKRSEDETDKLREKAERILEDLERKNRRTMDEARR

SEQ ID NO: 8429 - protein, 178 aa, Artificial Sequence; identical to SEQ ID NO: 8428
  Synthetic

SEQ ID NO: 8430 - protein, 178 aa, Artificial Sequence
  Synthetic
SEVEELVERVKRLIDEIRKRVTDSVEESKRLIKEIKEEVDRLAEEDKRLNERIKETIRRRKEKEILERLREELDKSLERVEREIEKLIRRLEKLNKESKDRSEELVRELEKLLEKVKTDGLEERIVKKLEEEIRKIIKEIRELNKRSEDETKKIVDEARKILEDLRRENEDTKRKITE

SEQ ID NO: 8431 - protein, 178 aa, Artificial Sequence; identical to SEQ ID NO: 8430
  Synthetic

SEQ ID NO: 8432 - protein, 178 aa, Artificial Sequence
  Synthetic
SEVEDLAKRIEDLIRRILRENERSLEESKRLIDEIRKRIEDLLRRSKELIDRIREEVRERKREELLRKLKEDLDRANREVEERIKKLIKDLEDLNKRSKDESRRLIEELERILEELERRGLEKRILDELRKAVKKLEDDSRRLNRESEERTKKLKKELDELLKKSKDETKKLVEDLRT

SEQ ID NO: 8433 - protein, 178 aa, Artificial Sequence; identical to SEQ ID NO: 8432
  Synthetic

SEQ ID NO: 8434 - protein, 172 aa, Artificial Sequence
  Synthetic
SEVEKLLRELEDVIRRLREDVKRIVEEDERLNKRLNDELRRLSEKNDRLNDRIRREVTDKDKAMKALDDSNKELEKVIREILELLKRSLDKARKVLEDIEKTLRDILRELEKRLEDKEKVKRLRELVKKVIEDMERILRRLEKANRESAERAKDVLRRNHKKDEDSKRELER

SEQ ID NO: 8435 - protein, 172 aa, Artificial Sequence; identical to SEQ ID NO: 8434
  Synthetic

SEQ ID NO: 8436 - protein, 172 aa, Artificial Sequence
  Synthetic
DRVREIVERVERVIRDILRTVEKLSEENKDLNRRLTEKIRDLERRDRELNKRLRDEVTDKDEAKKRLEDSLKRAREVVERIRKTLEDSNEKIRKVIEDLVRRLEELLDRARKELSVKEIVEDLRRKVEKVKRDAEKLLEDNHRRDRRNLREIEKIVEELKRRNEKTLRDLTK

SEQ ID NO: 8437 - protein, 172 aa, Artificial Sequence; identical to SEQ ID NO: 8436
  Synthetic

SEQ ID NO: 8438 - protein, 172 aa, Artificial Sequence
  Synthetic
SEVEKLEEEVKEVIERLLRTVRDLSRRNEELNKRLTEDNERILKEDEDLNEELERRVTDADDAERLLRDSIRRWRELSKRIKDKLDRSNEELRRVIEEIKRELERILEELRKRVEDKDVLRKLKKEAEDAIKEAEDILRENHEKDKKNKEDSEKLLRDLERRNEETLRRLRK

SEQ ID NO: 8439 - protein, 172 aa, Artificial Sequence; identical to SEQ ID NO: 8438
  Synthetic

SEQ ID NO: 8440 - protein, 182 aa, Artificial Sequence
  Synthetic
RIEEILETLREELRTVLKKSKEILDELRKENKESIDRSKEILDRLRDEIRRILREIREKRVSRADEIERKLREAIKRAERLHEESKKRSEKSIRELEKLHEETRRRLKEAADELEKLAREGIDDEELKRAADKVKKLIKELDEENKKARDDDKRLNKKLNKDNDDLRREVEELLKRLRDEAE

SEQ ID NO: 8441 - protein, 182 aa, Artificial Sequence; identical to SEQ ID NO: 8440
  Synthetic

SEQ ID NO: 8442 - protein, 184 aa, Artificial Sequence
  Synthetic
RIEDLVRDNKRKNDENTKRHERIVERLEEELRELVKRHEEDVRRLRKELEDLKRDAERKGIDERVLRKIEKLIREIEERLRRSNETLRKLAEDLIRELEKSNRDLRTLSERLKERLDELRRNNADDKKVEDLDRDNERLNRELTRHLEDLVRRVKELLRRMEEHLRELAERVKKLLDELRKEAT

SEQ ID NO: 8443 - protein, 184 aa, Artificial Sequence; identical to SEQ ID NO: 8442
  Synthetic

SEQ ID NO: 8444 - protein, 185 aa, Artificial Sequence
  Synthetic
SDVEELAERVRRLSEEHAELVKRIVETSKRLNDDLRRMVKEIADRVRRLLEDIERKVREDRDKDTLKKLVDELEERIRRLIDELRRLVRKVEELDRRLAEELRRTLEELIRRVRELLEDLKRRVDTEDVRKIIEDLRRHLEENRERVERIIRELRRLTEKTKKELEDIARELEKLVDELREEVRR

SEQ ID NO: 8445 - protein, 185 aa, Artificial Sequence; identical to SEQ ID NO: 8444
  Synthetic

SEQ ID NO: 8446 - protein, 185 aa, Artificial Sequence
  Synthetic
SEVEKAEEDIRRLLKEVKDMDKKIVDDDERLNRELERTVRELAKEIEKLIRDLEERVRKERDKRTLDDVLRKLEERLREILERIKKAVEDVKRASEKLERESKELVDRLRKEVERIVKEIRDRVDDKDVKKIIKELEEELEKIAKESEESIKRLRKENRDSEERLRKILEKLKKDLEDVKRELER

SEQ ID NO: 8447 - protein, 185 aa, Artificial Sequence; identical to SEQ ID NO: 8446
  Synthetic

SEQ ID NO: 8448 - protein, 185 aa, Artificial Sequence
  Synthetic
SDVEDVVRKIRELIRENLKRSKEIADENRRLNTENRERSKTLEEEVRRLLEEVKERAERLRGREEIKRLVDELRKAVEDVVKRIEDIDRRSEEESKKLEERIRRLDEESERRLRTLIEELKKREDREEVRRILEKLRDDLRKLNETNRRIIKELRERNEKSNRDNRKILEELKDRLKKLEDELRR

SEQ ID NO: 8449 - protein, 185 aa, Artificial Sequence; identical to SEQ ID NO: 8448
  Synthetic

SEQ ID NO: 8450 - protein, 179 aa, Artificial Sequence
  Synthetic
DEVDEVDKRSKETLKKIEDDARRVLEEYERTLEKIKRDVDRVLKESEETVRKLRADGRLKEEVADTVRRVHEKAKRKIEEAKKDSERVLEEVKRTIERLKEELEREHTRVREEIKAGRSEKELEDLVRELEEINKRLEEELRKLVEELRRHLEELRDELRKLVEELRKINEELEDRLTK

SEQ ID NO: 8451 - protein, 179 aa, Artificial Sequence; identical to SEQ ID NO: 8450
  Synthetic

SEQ ID NO: 8452 - protein, 188 aa, Artificial Sequence
  Synthetic
SEMEDLKRVSDEVKKELEDLNRKSAKVSKEVEEEAKRLNRESREVVRRLKEELEKLERDRASEEELKRVIDKVKEVLDDLKRKHEDLNRRNRELLRKLEKEHRDLNEKNKELLERLDRKVKEGNLKKEVADELKKILDTHRKVDKEAKDRSEKLVRDHREVDKDVKRESDEILKRAKDTLDEIRERLR

SEQ ID NO: 8453 - protein, 188 aa, Artificial Sequence; identical to SEQ ID NO: 8452
  Synthetic

SEQ ID NO: 8454 - protein, 176 aa, Artificial Sequence
  Synthetic
SELEKILKEIEEELKRVKERLERLHREHERLLRDVTRKLRKLLRDHREVLERVREELRRRRKDVREVEERNRKTHEDLEREVRKAERELEERNERLKRELDDIARKLEEELEDLKRRNLPREDLERTLRRIKEEVRKVERKAKEVLRETREKLKRLLERAREVLDENKKRLDDVAT

SEQ ID NO: 8455 - protein, 176 aa, Artificial Sequence; identical to SEQ ID NO: 8454
  Synthetic

SEQ ID NO: 8456 - protein, 184 aa, Artificial Sequence
  Synthetic
SLEDIRRRLRELVRRLEEELRRSHEELERLVRDLERRLRESLRKLEELVDRLKKEIEKRGRDRRELEKIERDIKKILDEYRERLKELVTRLRDLLRRHRERLEELRKRIEELLRRIEEELRRGTDDDTARRLLEEAKKELDRIKEENERALRKIKDVIRKIDEESKRLNKEVADLVKKIEDRIR

SEQ ID NO: 8457 - protein, 184 aa, Artificial Sequence; identical to SEQ ID NO: 8456
  Synthetic

SEQ ID NO: 8458 - protein, 184 aa, Artificial Sequence
  Synthetic
DLEDIVREIEKLLRDLERKAREIHERDERLARDLERKHRDIIREIERLLDELRERVERLPVDDELRKEIRKRLEDIKDLLRRSTEKLKKLKRESEEKNKKLIRELKKVLDDIRREVEDIRRKPVDRKKVEEELERVRRIIKELERRLRELHKENKKLLDEILEESKRLAEEVRKTIEDIKRKIK

SEQ ID NO: 8459 - protein, 184 aa, Artificial Sequence; identical to SEQ ID NO: 8458
  Synthetic

SEQ ID NO: 8460 - protein, 183 aa, Artificial Sequence
  Synthetic
SEVEDLLRRDRELNREHKRLLEEASKKNKEELERVLEKVKELLERVKKRLDEAKEALERGEVDDEVLKALEEELRKLLKELKDTLRKLNDDTKKLIDKLKEHNKELEERSRELEKRLRDKTGDDERLERVLRESRKLNKESHETLKELIDRNRKLNKELEEAVKKIEEEIKKLLKELKEEKDR

SEQ ID NO: 8461 - protein, 183 aa, Artificial Sequence; identical to SEQ ID NO: 8460
  Synthetic

SEQ ID NO: 8462 - protein, 183 aa, Artificial Sequence
  Synthetic
SEVEKLLREDRELNKRHVEKVRELSERNKELLERHEEKLKKVAKEIEDRLRRLEEMLRRGEADEKVLKDLAKRIRDLLRDLTRHNKELNEETERLLRELEDHNRRLKETSDRLRERLRRKTGDTDRLKRVEEESEELNKRSHETLRRLVEENKKRNKELHERVERIKRRLEKLLRELEEEIRK

SEQ ID NO: 8463 - protein, 183 aa, Artificial Sequence; identical to SEQ ID NO: 8462
  Synthetic

SEQ ID NO: 8464 - protein, 183 aa, Artificial Sequence
  Synthetic
SEVEELLDEDRKLNEELTKSAKRLTDENKKLLEDMKRKAEELKKRVDELLKEVTDVLRRGELDEEKLKTLADEIKKLLDKLREDLKRLDERSEELLKRLREEVERLERRSKELAKRLEDKTGKTDRLERVLRESRKLNEDSKKRLEELIKENKDDNDRLREDLERIVRELEKRLDKLRKDTET

SEQ ID NO: 8465 - protein, 183 aa, Artificial Sequence; identical to SEQ ID NO: 8464
  Synthetic

SEQ ID NO: 8466 - protein, 184 aa, Artificial Sequence
  Synthetic
KELEDLLRRIKRLIDENRRLSKEVLEEVRKLSEKHKKEVEDILKEIKELIEEALRRIERDGPREELLRRLAERVRKLTEELRRSLKELRKRIEDLERDLDRLDKESEKELRKIEEKARRDNSVPKERLDRILKTLRELLRKLREDNERIRREIREIVKRNSDELARIEEELRKLLDDLAKKAEE

SEQ ID NO: 8467 - protein, 184 aa, Artificial Sequence; identical to SEQ ID NO: 8466
  Synthetic

SEQ ID NO: 8468 - protein, 184 aa, Artificial Sequence
  Synthetic
KELEDVLKEVEELSRRHKRRAERVSEENRKLLRRLKEEARKILEDIRRLLKKLEERVRRDGPRKEELDEARKRLKDLARRLKELLDRLDRTTEELARDLERTLRELEERIRRIAEDLRRRQSVDRERLKRILDEIRRIVEKNKRDLERLLRENEELNKRLREELRRILEEIEELLRELEERLRK

SEQ ID NO: 8469 - protein, 184 aa, Artificial Sequence; identical to SEQ ID NO: 8468
  Synthetic

SEQ ID NO: 8470 - protein, 176 aa, Artificial Sequence
  Synthetic
SEAEEALKELKETSDRHKEDLDRLHEEDRRTNEEVEKELRKLVDEAKKKLDRVREIVEEGRGREELLKKLREDLRRIEEEIKRTLDELKRKSEEIEERVKRTTRELEKKLEDLERANLVDEELLRRLEEIVRDNKRRVEEILERNRRLNEESEKKVRDIIKKLRDDLERLARELEK

SEQ ID NO: 8471 - protein, 176 aa, Artificial Sequence; identical to SEQ ID NO: 8470
  Synthetic

SEQ ID NO: 8472 - protein, 176 aa, Artificial Sequence
  Synthetic
SEAEEALKELKRTSDEHRKRLEDLHRRDKKLNDDSKRRLDELLKRDEDTNRTVLDIARQGKAREELLKELKERTRRLHEDNKRLLRELEKRSKEIEDEIRDTLEKLKRKLDELRKANVVDEELLRTLEKIVEDNAREVTEIIKKNRKLNDDSRREHERINDESRRLNEETEKRLRD

SEQ ID NO: 8473 - protein, 176 aa, Artificial Sequence; identical to SEQ ID NO: 8472
  Synthetic

SEQ ID NO: 8474 - protein, 183 aa, Artificial Sequence
  Synthetic
DELEEILRRVDELIKTIEEELKKIEKRVKELLETHRELNKRLLDDHRRLAEEVKKANLDRRDAERLMREMEKKNEEVRKRLEESLERVKDTLRKIEKKLRELAERLRRELEKLRDDLRRRGSDRDRVEDVLRKIAEKIKRLEDRIKEVLDKLRKLAKELEDESRKVLDDSNKLIERVKRELKR

SEQ ID NO: 8475 - protein, 183 aa, Artificial Sequence; identical to SEQ ID NO: 8474
  Synthetic

SEQ ID NO: 8476 - protein, 185 aa, Artificial Sequence
  Synthetic
DTERVVTEIKKTNDELKRRHEKVVEDDRRLLEELRRRHERVVREVERLLRELKERVDRRAKDKRELKKRLKELKDRIRKELEDLTRKHEDLDRRVEDEHRKLSEEHEKVHREIRERLEDIRRKKVPREVLKKLLDDNRKIIEDLTRKNEKLHEDSKRIIEKIDDENREILRRVEEIVRRIEEELN

SEQ ID NO: 8477 - protein, 185 aa, Artificial Sequence; identical to SEQ ID NO: 8476
  Synthetic

SEQ ID NO: 8478 - protein, 180 aa, Artificial Sequence
  Synthetic
SAEDVKRRIKESADRIRKRLREALERAKKLHTDNEEENKRVNDEIKKRVEEIRRRIPDGEKAKELEDRLRKLLEDSKRDDDRSRKESRELIERTREVLERLARLLDELERRLDEVRKKPTDEKLLRELERDVRRLEREITEVVKRLEDEHKRASERNKRLLEEIKDRVRKLIEEAEERRK

SEQ ID NO: 8479 - protein, 180 aa, Artificial Sequence; identical to SEQ ID NO: 8478
  Synthetic

SEQ ID NO: 8480 - protein, 178 aa, Artificial Sequence
  Synthetic
EEVERVRRTIDELSKENEKALKEVEERIKKLSDENEKAVRKAEEDNERLNRTAERLKRSNVSEDTLRRILEEVRRATEDLRRKLEDINRELRERVKRLIEEIREINKRLDDELRRIEEEGVDEKVLRDIRKKIKENHEKNERVIREIERLLKENEERNEEVIRRIKESNRKTEKDLTD

SEQ ID NO: 8481 - protein, 178 aa, Artificial Sequence; identical to SEQ ID NO: 8480
  Synthetic

SEQ ID NO: 8482 - protein, 178 aa, Artificial Sequence
  Synthetic
SEVEEVERRIDRLSKENRRVLEEAKRRIKKLSDENKRMLEEARKRNEKLNREVKKLKKSNVDEETLRRKLKEVKERTDKLRKEIKEINEKLAEDVKRIEDEIREINERLDRSLKKIEDDGVDEKVLRDIREKAKRNHDANEKVIREIRDILRRNNEENKRVIEEIDKSNKDTEDELRK

SEQ ID NO: 8483 - protein, 178 aa, Artificial Sequence; identical to SEQ ID NO: 8482
  Synthetic

SEQ ID NO: 8484 - protein, 178 aa, Artificial Sequence
  Synthetic
REVEEVKKEIKKLSDENKEVLERARKRIEDLSRENEDVLRRLKERNEDLNRRVRELKERNVSEDELEKILRELEKKTEELADEIRRINEDLDRKLREIEKEIEEINEKLKKKLEEIERRGVDEEVLRDIRRELKENHDENRKVIEDVRRIAEENHRRNKRVIDEIRRSNKETVDELRK

SEQ ID NO: 8485 - protein, 178 aa, Artificial Sequence; identical to SEQ ID NO: 8484
  Synthetic

SEQ ID NO: 8486 - protein, 184 aa, Artificial Sequence
  Synthetic
RAEELRKEIEEIIKKNKKENEDVLREDRRRLKELKEEIEKVVREDRRTLEELEERLRRSGLPEEEVERIIRELRDEHRRVEERAEELRRKLDERHKEVEEESERLRKEVRDDKRRLDERLKRNSTEEVLKEIRERVEKLSEKNKRALEKWKRDSERLSREVERELEEWKKRSKRLAEEVEEATR

SEQ ID NO: 8487 - protein, 184 aa, Artificial Sequence; identical to SEQ ID NO: 8486
  Synthetic

SEQ ID NO: 8488 - protein, 186 aa, Artificial Sequence
  Synthetic
DLEELEREVEKKLKELEDRVRKVIEESKTELKKLEEELRENSREVRDILRRLEEDVRRKVKDDEDLKRKLRKLKEDMERVNEEVEKRFRDLARELRKHARDLEREAKRLKEEVEETLRRVRKKNVEDKRLLEELRRRLDRVRKEVERLIKEHRETTDELRKRVEKLSEDHRREVEKLAKTVKDELK

SEQ ID NO: 8489 - protein, 186 aa, Artificial Sequence; identical to SEQ ID NO: 8488
  Synthetic

SEQ ID NO: 8490 - protein, 178 aa, Artificial Sequence
  Synthetic
SRAEKIREDIRRLRKENEDRIKEIEDEFRKLLEEHERKNKEIEERVRRLVKRIEDEIRRKNVPKDEVKRIRDDIRRLEKRAKEVHERSKRRLDELRERFKRLEKRLREIHEEIERELRKRGLTDELAKRVREVSEDVNRRLDKIMKDLRRVIKELDEESKRLLEEIKRRMEEILEELR

SEQ ID NO: 8491 - protein, 178 aa, Artificial Sequence; identical to SEQ ID NO: 8490
  Synthetic

SEQ ID NO: 8492 - protein, 180 aa, Artificial Sequence
  Synthetic
SEEEKLAKDNERLVREHEEESKKLLKTIRDLSEEHKRDLKRAMEENKEKVDRLRDMLKRGEVDDRVIEELKRDSERLLEELRKRSKELKDEIKKRLEDLKKHLDDLKRDSRRLLKELVDKKKRRPEEIATKSEELHKELEETNERIAREVEKLEKENDEILEEIADRSRRLHEDLDRERK

SEQ ID NO: 8493 - protein, 180 aa, Artificial Sequence; identical to SEQ ID NO: 8492
  Synthetic

SEQ ID NO: 8494 - protein, 178 aa, Artificial Sequence
  Synthetic
DELEEVLRTIEKLVEDHNRELERVLRRVKELADRHREESERVAREIKKLVDDARRLVEERGPDEEVLRDLERRVRELVDRLRRHLEELEKELDKLKKDLKRSLEELERRVKEIADRLPETDEVRRIRERVKELLDRNRERLERIEREIDRLLEDLKRKNEKIEREVRRLLAKLKEEAR

SEQ ID NO: 8495 - protein, 178 aa, Artificial Sequence; identical to SEQ ID NO: 8494
  Synthetic

SEQ ID NO: 8496 - protein, 178 aa, Artificial Sequence
  Synthetic
SELEKIVEENRRLVKEHNERLKRILDELRELAKRHEDRSRKAMKENEELVRTVLELMKRDGPDERVLRELRKRSKDIVDDLRRHLKELSDTARKLIEEIRKSLEELERRTKKLADDLPETEKVRKIREESKRLHETNRRRVEKIEEEIRRLLKRLEDTNRDIERRSKKLHEDLEREAR

SEQ ID NO: 8497 - protein, 178 aa, Artificial Sequence; identical to SEQ ID NO: 8496
  Synthetic

SEQ ID NO: 8498 - protein, 178 aa, Artificial Sequence
  Synthetic
SELDKVMRDNDRLVKEHAEVSKELLDRLKKLAEDHKKRSEEVLRENKRLVDEVRRLAKERGPRDEVLDTLRKESKKIKEELEKHLEELSREAEKLIRELEEHLKKLREETKRLRDALPETEKVRKIARRSDDLHRELKERNDRIKREIERLLEELKRTNDKIVEDSKRLHDDLEREAR

SEQ ID NO: 8499 - protein, 178 aa, Artificial Sequence; identical to SEQ ID NO: 8498
  Synthetic

SEQ ID NO: 8500 - protein, 178 aa, Artificial Sequence
  Synthetic
DELEEIRKTIEELSKENKKKLEEVMKEVEELARRHEKRSRDLLRRLKKLVDELRDRVEKTGPDKDDLKRLEDELRRLKEDLKRHLTELEKRLRRLSEEMKKHHEELEKRVRDLERALREEERVRKISEDVRKLLEDNKRIAERIDERIKELLKRLEDTNRRIEEEIDRLLEELKREAD

SEQ ID NO: 8501 - protein, 178 aa, Artificial Sequence; identical to SEQ ID NO: 8500
  Synthetic

SEQ ID NO: 8502 - protein, 179 aa, Artificial Sequence
  Synthetic
DELDDLLRRAKETSDRHKETLKKILDEMREEVKRHNRDLERILEEVKRLIDEVRKANSKDETLIRELRKRIEELRERIERSLRELRRKLEELERRIRDTLRKLEETLRRLEEELDRRGVPREDVKRIKETMKKLLDENRTEVEKIKREADRLLEENRRLVKEIEDTIRELLKRLEDERR

SEQ ID NO: 8503 - protein, 179 aa, Artificial Sequence; identical to SEQ ID NO: 8502
  Synthetic

SEQ ID NO: 8504 - protein, 178 aa, Artificial Sequence
  Synthetic
SKKETIKKDAEEALKRSKKKLDELKERLRKVMRETEERLRRLEKELRDLAREIREKIKKRRVDEDKVKKIEERLKRLEDKLREVEKRLREKYRELEKEVDKVVEKLERDYRRLKDKLEKEPADDRLRKEVEDLNRETDKVIEKLREDIDRLDKESEEVIRRLKDEIRRLFEEIDRRLR

SEQ ID NO: 8505 - protein, 178 aa, Artificial Sequence; identical to SEQ ID NO: 8504
  Synthetic

SEQ ID NO: 8506 - protein, 183 aa, Artificial Sequence
  Synthetic
SELEEVKERVDRLIREVEKMNRDSERRVKKLIDDVRRENRRTEEDVRRLVKRAEEIVRKDGKIDEKVLRELEERLRRLKEENDKLLTELEKRLRKLKRENDELLRELKKRLEDLKRELDKDGLEKEKVDRLKKEADDLLRKIKEDNERITEKVKELLERLRKNNEEIKREADRLLEELRRRVK

SEQ ID NO: 8507 - protein, 183 aa, Artificial Sequence; identical to SEQ ID NO: 8506
  Synthetic

SEQ ID NO: 8508 - protein, 176 aa, Artificial Sequence
  Synthetic
SELEELDKRITELSEEIKRRLEELLRRNEDLSRRIEEAIRRILKRNEDVIRDIKRKNKKDERLLRELKKLSDENRKRLEELHRRHAEHVKRTEDELRELHREHKEAVDDIRRRMGREDKKVRDIEEKIERLNRELEKIAKEIRERTERLNKRLEELIREVDERNRDLLRRLEEEVK

SEQ ID NO: 8509 - protein, 176 aa, Artificial Sequence; identical to SEQ ID NO: 8508
  Synthetic

SEQ ID NO: 8510 - protein, 182 aa, Artificial Sequence
  Synthetic
KDEEDARRKLEELRELARRDIERNKRELERLRREIEKDEEDNEEVIKRLRERVEELRRRQTDKDRAREVLEELKRLIDELRRRNEETKEKLKRIIDEIRKRNEEMEERLRRIIEEIEKKLGREDESLKRLKEELEKLLRDYKKKLDDSDKELRDLLAEYDDRLTRSDKRLRDLLKEAREKSK

SEQ ID NO: 8511 - protein, 182 aa, Artificial Sequence; identical to SEQ ID NO: 8510
  Synthetic

SEQ ID NO: 8512 - protein, 186 aa, Artificial Sequence
  Synthetic
DTAERAEEELERSDRELKETLRRAEEELKRSHKELERIVERARRELRRLAEELEEVIRRKKLDEKEVRKLEEILKDVERRVDELLDTLRKISKELEDRMRELDKELKKDSDDIRRRLDELKKREKEEETLRRKLERLLERHKKVVDDVERTLRDLLERHKEVVERVREKLTDLLRKLKKVIDDVRR

SEQ ID NO: 8513 - protein, 186 aa, Artificial Sequence; identical to SEQ ID NO: 8512
  Synthetic

SEQ ID NO: 8514 - protein, 179 aa, Artificial Sequence
  Synthetic
SELETIKKRAEELSKESEDILRDIERKLRKLSEESKDILRRLKEELEKLHKELVDKKGRETERIRELKKRNRENLERLRDELRKLNEELERKLREIEERLKELNRKLEKKEEELRRRPTDEELEKELEEVLTEYREVVERLADELRRLLKKYEDDVRRLEEHARRDLEKLDRDIKEEER

SEQ ID NO: 8515 - protein, 179 aa, Artificial Sequence; identical to SEQ ID NO: 8514
  Synthetic

SEQ ID NO: 8516 - protein, 179 aa, Artificial Sequence
  Synthetic
SKLDDLLRKIERLVTESLRRLRKTNEDAKRLLERSVRELEKSNKEIRDLVKEIKERNSKDERLLREAERVLDELRKRHEENHRRLEEELRKLLEDHEKNHRELKKVLDKIDEDVKADGVDKKKVDELRERLRELLKRHRDAVEKNRRDLEKLREDHRRLVEKNKRDLDKLKEELDRTKK

SEQ ID NO: 8517 - protein, 179 aa, Artificial Sequence; identical to SEQ ID NO: 8516
  Synthetic

SEQ ID NO: 8518 - protein, 179 aa, Artificial Sequence
  Synthetic
SELDELLKRLEELVREIIKRLRDSNRRAKEVVDRSVKRLEESNRTLRELIKDVKDKNEEDERLDRELEERVRELEEEHKENHKRLEETLRKLEKEHRDLLREAKEMLKKLEEELKKRGAPEEKLRRIKRRIDELEKTLRKIIKDNTDNLRKLTEDHRRLVEKNKRDLEKLEEELKRRRK

SEQ ID NO: 8519 - protein, 179 aa, Artificial Sequence; identical to SEQ ID NO: 8518
  Synthetic

SEQ ID NO: 8520 - protein, 179 aa, Artificial Sequence
  Synthetic
SKLDELLERIREEVKRSVKRLEDSNKEIKRLMEESADELRRSNKELRDAVRDLKRKNSKDETLTRRLEKLIEDLERRHKRNHEELKRVLDELAEEHKRNHKELERVLREIKERVKADGAPEEKVRRLDKVLEDLRREHEKIVRDNEENLRRLLERHKRLVDKNKEDAERLLRELRETVR

SEQ ID NO: 8521 - protein, 179 aa, Artificial Sequence; identical to SEQ ID NO: 8520
  Synthetic

SEQ ID NO: 8522 - protein, 183 aa, Artificial Sequence
  Synthetic
SELEELLKRLRDLIERIVKRLRELSKESEDLIRRIERTIEKLSEDSERAIEEILRRIDKGTSEDTARRLLERFKELNKRSEDELEKLKRELEKLDKRSDDELREIKEELRRMVREVRERVRKVTEDRLREVEEEAKKLEKRIEDMIRKHKETNKRLKEELDKLVKEHKDRNRKLLEELKKRAT

SEQ ID NO: 8523 - protein, 183 aa, Artificial Sequence; identical to SEQ ID NO: 8522
  Synthetic

SEQ ID NO: 8524 - protein, 178 aa, Artificial Sequence
  Synthetic
SEIEEVIERLDDTMRRIEERIRDTNRRLKKVIDDSKRRNERTNREVRKTIEKLTRELERDGRGGELAKRIREVLEELKRRSEELEKENRRLLDELRKESEDLADEIRKTERKLEDDLRKADAREEVKRRLEELRRRIEKMLEEHRESLRRLEEELEESHKRHKDTLRKLSKELEEKLK

SEQ ID NO: 8525 - protein, 178 aa, Artificial Sequence; identical to SEQ ID NO: 8524
  Synthetic

SEQ ID NO: 8526 - protein, 182 aa, Artificial Sequence
  Synthetic
DEVDEVLKRVDELLKRHEETNKRLEEEIRKIHEENKRTIEELLKEVRKRAEEVERLVRRDGPREEEIRKIEEALKRLLRELEKHLDRSRKRLKKLLDENRRHLRELERELDKIEEDLRRNRVPEEELKRVKERLKEIRKRAKESHDRLRETVKELIDRNRKLLRELEEELRKIEEKIREDAR

SEQ ID NO: 8527 - protein, 182 aa, Artificial Sequence; identical to SEQ ID NO: 8526
  Synthetic

SEQ ID NO: 8528 - protein, 173 aa, Artificial Sequence
  Synthetic
SEEDELRETAKRIREEVKKSIEENRELAKRITDEVRELLERNKRRIEEVKERLERSGVDERVLREAERVLRELKKRHEDLLEELKKAIKRLEDKHRKVLKELEDEIRELERLSKRKDEDDLRRRLEELLKRLRDESRKVNEDLKRLVDELRRLSKEMNEELKELEDRVREKER

SEQ ID NO: 8529 - protein, 173 aa, Artificial Sequence; identical to SEQ ID NO: 8528
  Synthetic

SEQ ID NO: 8530 - protein, 182 aa, Artificial Sequence
  Synthetic
SEEDEVREDNKRIVEEVERLLKEIEDNNREITREAEELLKRLEEEARRLMEEIRRSKSGDKRLLEELIERLKEVLTELERRLRELKEENEEVLTRLRREVEKIKRENKELLDRVRELRKKVRDEELLRRLRDMNRRSKERADRLIEEAKKENDRSSKRVRDLIREVDEILKEVKKRVEDVTT

SEQ ID NO: 8531 - protein, 182 aa, Artificial Sequence; identical to SEQ ID NO: 8530
  Synthetic

SEQ ID NO: 8532 - protein, 177 aa, Artificial Sequence
  Synthetic
SEAEKVVEELKKLLREVEKKIRDHTEDVKRILEELERRLRKHSEEVRRTAKELKDKNSDDDTVRKVKEELDRSHEKLREELRKVAKELKESNEELERDLKRLVEEAEDRLRRLKDRVSEKVLRELEKILEDIKRTLDKLLRENRETLKRIEDRLRELLEENRKLLEKIERELRERSR

SEQ ID NO: 8533 - protein, 177 aa, Artificial Sequence; identical to SEQ ID NO: 8532
  Synthetic

SEQ ID NO: 8534 - protein, 177 aa, Artificial Sequence
  Synthetic
SEVEDVIRKLRRKAEDLTRRLKEHTDDVKRLMEELSKDIKDHTREVKRIAREAKEKNRDRETLRRILEELRRSNEELKRRLDEALEELRKSNEELRERLERVLRDMRRLLEELKDRVDEEVLRDLERVLRDIERRLRELLRRNEEVLDRIRRTLEDLHRKNEEVLREIERDLRERER

SEQ ID NO: 8535 - protein, 177 aa, Artificial Sequence; identical to SEQ ID NO: 8534
  Synthetic

SEQ ID NO: 8536 - protein, 177 aa, Artificial Sequence
  Synthetic
SEVEDVIRRLKKKLRELVERIREHTKRVRDLARKLEEEIKRHTEEVKRIADEAKKRRSDEETLRRIEEELKKSNEKLERKLRKVVKELAESNKRLREELKKVVDELRKEVESLRDRVSDELLKRLEDVLRKIRKDLEELLRKNNRDLEEIKKRLEELHRRNRETLERIRKDLEEDER

SEQ ID NO: 8537 - protein, 177 aa, Artificial Sequence; identical to SEQ ID NO: 8536
  Synthetic

SEQ ID NO: 8538 - protein, 182 aa, Artificial Sequence
  Synthetic
SEIEEVLERIKKLLDELRKESRKLLEDHKKRAEELEEKARRLSERHKELLDRLKEVVDRDGPRDETLERLRRESEKTKKEMEDTIRRVEEESEETIRRHRRSVREVRERLKELRRELDKANLPEEMLKRAEDLLRRIDEELKRSHEELKELSDRIRERLERLLRTLEELSKEIDKRADDLRK

SEQ ID NO: 8539 - protein, 182 aa, Artificial Sequence; identical to SEQ ID NO: 8538
  Synthetic

SEQ ID NO: 8540 - protein, 182 aa, Artificial Sequence
  Synthetic
SEIERVLEELRKLLEELRRESKKLLDELRKLLEDARRESEKLLRELKDLLRRAEELVKRDGPDKDTLDKVRKRMEELHRTHEKILRELKRRADELREDHRRKLETIEKRLKEIEDELRKANLPEKVLDELRRELDKIREDLKKSHRELEELIKKIRTELDKSNRKLEELLKRIEERLDEMRR

SEQ ID NO: 8541 - protein, 182 aa, Artificial Sequence; identical to SEQ ID NO: 8540
  Synthetic

SEQ ID NO: 8542 - protein, 182 aa, Artificial Sequence
  Synthetic
SEAEKVLEELKKLLRDLEETSKRVLREIRELLKEAREKSKRLLDRLRKLARDLKELVRRDGPVDEAIRRVKEELERLSREHRKMVEEIKRRLEELHKRHKKKLEDIRKTLDDIKKELERTNLPKEVLDRIKRLLEEIERELERSNKELEDLLRKIEEDLERSHRELEKLIREILKELEDARK

SEQ ID NO: 8543 - protein, 182 aa, Artificial Sequence; identical to SEQ ID NO: 8542
  Synthetic

SEQ ID NO: 8544 - protein, 177 aa, Artificial Sequence
  Synthetic
DAEERLRKLLDDIRRELKRLTEETRKSLEKIKRDNDELEKKLRKLNEDSDRRLKEANVDERIKEEMERSRRELEEKNRRSRKRIEDMARRVEETHKRIEDDLRRLAERIKELEARGIDEKTIEDLLRELEKALRDLEKEVREINKELKRVLDEIAKTHEDLLKKHEELLRRVEERAR

SEQ ID NO: 8545 - protein, 177 aa, Artificial Sequence; identical to SEQ ID NO: 8544
  Synthetic

SEQ ID NO: 8546 - protein, 178 aa, Artificial Sequence
  Synthetic
DLERELEKLLKDIKEELDKLIRTNEETLKEIEREVRKLLKRNKELLDRIREEVRKTGTDEDEAEKLLRDLKRSVEKLEREHREVRREIEEKLERLRRLHEEIRKRIRDLLEDAKRRKVPKEVVDRILKEARELLERIREENRRTLEDLRRILEDLRRRNKRHLDELRRVLKELRDKRK

SEQ ID NO: 8547 - protein, 178 aa, Artificial Sequence; identical to SEQ ID NO: 8546
  Synthetic

SEQ ID NO: 8548 - protein, 178 aa, Artificial Sequence
  Synthetic
SLEERLEKLLKEIRETVKKNIEENRDLLRRVEEDLRRLTERNKRLLEKIRDALRKAGSGKDRVRKLDEDMERTLRELRRRVEEVRKKLEESLRRLEEELKRILERIERLIERIRREKVPEEVARRLMDDLRRLLEKIDRLSREHLERVRKILEDLRRLSEKHLKELEDLLREAEEEAR

SEQ ID NO: 8549 - protein, 178 aa, Artificial Sequence; identical to SEQ ID NO: 8548
  Synthetic

SEQ ID NO: 8550 - protein, 178 aa, Artificial Sequence
  Synthetic
SLEERLEELLDEIRKMLKRLEDENRRLLKEIEKRVRENTRTNRELLKRIEDRIRKAGSDEKDADEVRRRLEKTVEDLERELRRLLEEIRRSLDKLRRDLERLEEKIERLIEEIKRRKVPEEVVRTLLRELEKILAEAEDLSRRHLERLRDILREAEDLSRKHLEELKKVLEELERRAK

SEQ ID NO: 8551 - protein, 178 aa, Artificial Sequence; identical to SEQ ID NO: 8550
  Synthetic

SEQ ID NO: 8552 - protein, 179 aa, Artificial Sequence
  Synthetic
SDVERLLRELEDLLRRLEERIRELNKRHEELVRRLKEEVKRLSREHNEVVADVARKNDKDEKLDRDLRRLNEKVRRDVEKLIEDAKRVNDEVRKTVERLKEEAKRTLDEVKDRIDKRRVPKELRDRLRDVVRRLEDELRRLDDELRKNSEEVKKVLDDLRRHLEENSKRAEDTLRELRR

SEQ ID NO: 8553 - protein, 179 aa, Artificial Sequence; identical to SEQ ID NO: 8552
  Synthetic

SEQ ID NO: 8554 - protein, 179 aa, Artificial Sequence
  Synthetic
SEVEKLLRELEKALEDLRRTNEKLDREHDAVVKEVKKIAKDLSREHRDVVEDVKRKNSKDETLERDVRRRTERIREEVKRLADDVKRRNDELKKRLDELKKRLEELLREAERRIDENRVPEELRDELRRVVEDVEKKLDDLRKRNEENSRKVKEVLEKLTRELDKNREEVERTLEELRR

SEQ ID NO: 8555 - protein, 179 aa, Artificial Sequence; identical to SEQ ID NO: 8554
  Synthetic

SEQ ID NO: 8556 - protein, 179 aa, Artificial Sequence
  Synthetic
SEIEKLLEEIKESLERLKKTAEDLLEELRRLLEELERRVKELSDEHRRLVKELKDRNSKDDTVVERVRKRSTEIRKELRELLEDVRRKLEKIREELEELSKRHKETLEEIDKEMDRRNISEELKKRVEDVLREIKRAHDDLRRRLEKILRDIEKTIEDLERHMKENHDDAERVIEELKR

SEQ ID NO: 8557 - protein, 179 aa, Artificial Sequence; identical to SEQ ID NO: 8556
  Synthetic

SEQ ID NO: 8558 - protein, 176 aa, Artificial Sequence
  Synthetic
SEEEALERVLRELRRSLEELEEELRRAIRKLEDNLRRLREALETILKKLDDLLDDLRRRKPRETLEEIRRRLEELKEKIKKILTDLEKAYRDLKKKLDEILKRLEERYRELEEKVRRNGFDDKLKKEADDLDRRSRKTIKEVLDEIKELDDRSNERIEEVIREIEDEARRLAREVD

SEQ ID NO: 8559 - protein, 176 aa, Artificial Sequence; identical to SEQ ID NO: 8558
  Synthetic

SEQ ID NO: 8560 - protein, 176 aa, Artificial Sequence
  Synthetic
SEEERLREIRERLKKSLEDLKRELEEILRELERSLDKLRRDLERLLEDLRRLLDELRRRKDTESLEEIERRVRELEEELKKIDKDLEDEYRRLEEELKKVTKELKREYDELEKEVRKRGVREELEKKARELNERSKEKIKRLLEKLRKLDKESKDEIKRVLDKLRELAKRIKEEMD

SEQ ID NO: 8561 - protein, 176 aa, Artificial Sequence; identical to SEQ ID NO: 8560
  Synthetic

SEQ ID NO: 8562 - protein, 176 aa, Artificial Sequence
  Synthetic
SEEERLRRVIEEYKRVLDELSERLKRLLDELRRSLKKLEEDLKRLLDELKRTLDELIRRVEDDRLRELREEVKKAAEEIKKILKKLRELYTELEKELDRAHKENEKELRKLEEEVRRKGFSEELEKKLREALDTVRRLYEALIKKARELDKRSKDEIKRVVDKLKKLVRDIEERVR

SEQ ID NO: 8563 - protein, 176 aa, Artificial Sequence; identical to SEQ ID NO: 8562
  Synthetic

SEQ ID NO: 8564 - protein, 182 aa, Artificial Sequence
  Synthetic
DDIEDVLRRIEKLIRDLRDHSRKLVEEIEKLIEDHTRHSRKLERDIKELLKRLRELRRRGDLTEELLRKAKEELKDLLRRHEEVSERLKRRLDKLETDHDRVIKELEDRLRRIAEELERRDTSEEVKKRLDEARRKAEKVVKESRDTLRELKDKVRENLDRSRKELKKLEEELEEVLREARE

SEQ ID NO: 8565 - protein, 182 aa, Artificial Sequence; identical to SEQ ID NO: 8564
  Synthetic

SEQ ID NO: 8566 - protein, 182 aa, Artificial Sequence
  Synthetic
SDVERVAKTIEDLIREHTEHVKRSAERVERLIKEHTDHVRRSLTRIEDLLRRLEEMRRRGDSTEEVLDTVRRELRKLLKENEDRSRELEKELRELLERNEKKTKELEDELKKILRELERKPTSEDVERKARELERKVRENVRKVRDDHRKLEEKFRDNLRKVKREHEEAERKMRDLLREARR

SEQ ID NO: 8567 - protein, 182 aa, Artificial Sequence; identical to SEQ ID NO: 8566
  Synthetic

SEQ ID NO: 8568 - protein, 182 aa, Artificial Sequence
  Synthetic
KDVDKVEEDIERLLADLRRHNEKLHRDIERLLEELRRHNDKLRKTLEDLLKKLKELAERGDNEERELKRAKEEVDKLIRDHEEVLRRVEEEIEKLIRDHEKKLEDVRRTLRDILRKLEKKPTSEDVKRRLEDLERKARRVLEESRKDLEEAKKKVDELMKRARDSLRELTRRLEELVRRIRK

SEQ ID NO: 8569 - protein, 182 aa, Artificial Sequence; identical to SEQ ID NO: 8568
  Synthetic

SEQ ID NO: 8570 - protein, 182 aa, Artificial Sequence
  Synthetic
SEVEEVMKEIERLIEELRRHNEELARRLEELIKDHTRHNEELHKTIEDLIKELEDLARRGDLDEETLKRVARDLDELLERHERRSREIEERIRRLLERHEEELERIAREVKKILDELKRKPTSEEVEKRLRELKEKLDKVLDELRETLKRLEEKARENLKRSRDDLETIKRKLKKVMDEARR

SEQ ID NO: 8571 - protein, 182 aa, Artificial Sequence; identical to SEQ ID NO: 8570
  Synthetic

SEQ ID NO: 8572 - protein, 185 aa, Artificial Sequence
  Synthetic
SDVERLIEELERLLDELRKKTEEIIRRIKKLIDELRRKTEEVIKRLEKLARDLTRLTERGSDKEEVDRILDEIKKRVEKIERELEETHKKVRRRLEELETEMEKLHKELKERIEKLSKELEDKGTSEEARRRIDEIRKKAEEVNKESRDRLRRLKEEVDKVDKDSKRRLDELREELRRLMEESKR

SEQ ID NO: 8573 - protein, 185 aa, Artificial Sequence; identical to SEQ ID NO: 8572
  Synthetic

SEQ ID NO: 8574 - protein, 176 aa, Artificial Sequence
  Synthetic
DAARELRERLKKAIEDHRRLLERAARDVERLNKELEDILRRMAEDMKRSIEELKRVSEEGRVDDEIARRHEEDNKRLEEELREVAKRLEDKHRKVKEENDRSAEELKRRIDKLRKDKLLDEKDLRRLEEEIRKEIRRSNETLKKLKKKTEDSLRTIKRRLEELHEEAKKVLDDLRR

SEQ ID NO: 8575 - protein, 176 aa, Artificial Sequence; identical to SEQ ID NO: 8574
  Synthetic

SEQ ID NO: 8576 - protein, 178 aa, Artificial Sequence
  Synthetic
REDETLKRLEEENEEVNKRSEETLRKLLEDNRRLLERIEERLRELLEELRRLLEKIRKDRRLPEEMIKRLRDLLRRLEEELRKALEEAEKSLRELEREIEELRRRSRESSKKVKDELRERRDKDELTERVKRHIEENKKLTEDVARKSEKHLRDLEELLERLRKLVEDLLRRLEEEAR

SEQ ID NO: 8577 - protein, 178 aa, Artificial Sequence; identical to SEQ ID NO: 8576
  Synthetic

SEQ ID NO: 8578 - protein, 185 aa, Artificial Sequence
  Synthetic
SELEKVRKESERNLRSNEKLLRELDELSERNLDKLRRFVEEVRELVREMLERLDSVRRRNVSEDELRKLAREVEEILKRIKERLERLAKESEDLLRELKKRLEKHEEDSKELAKRLRDELRDRRVSEEVKRDVERNEKENKELLDRTRRKVEENAKRNKKLLEDIREDLKRLATELRRKLEEIRR

SEQ ID NO: 8579 - protein, 185 aa, Artificial Sequence; identical to SEQ ID NO: 8578
  Synthetic

SEQ ID NO: 8580 - protein, 177 aa, Artificial Sequence
  Synthetic
DKEETVKDLERRYRDLLREIEKRLRELVRRNDKLLEEIKKAIEDLIRENEKKIKEIKERRGRTKEVEEIEKSLEELRKEHERVVREAEKSVEELRKRHEKAIRDSRRHLEELKDELEKRRIDDELRRRAEEALERNKRLLEELKKENDDHLKRLKELLEELKKRNEDHLRRLDEEER

SEQ ID NO: 8581 - protein, 177 aa, Artificial Sequence; identical to SEQ ID NO: 8580
  Synthetic

SEQ ID NO: 8582 - protein, 182 aa, Artificial Sequence
  Synthetic
KELEEIKRAVDESLKRAKELMDRHRREVEKSLEEMKRLAEDHKRRADRLLKELKRLADEGRPREDLERKLDELKRDLERHSTELKKELEKNHRELEEHSKKLKEDLKRNHEELDRLVKSRKKSDEVRRAVKELKDRHKELLDRIERESERLREEHRRLLEKIERTSEDLIRRLEKLIRDIRR

SEQ ID NO: 8583 - protein, 182 aa, Artificial Sequence; identical to SEQ ID NO: 8582
  Synthetic

SEQ ID NO: 8584 - protein, 182 aa, Artificial Sequence
  Synthetic
DEVETVEEEVKKSLEELRDLARKHEKKVRESLKRLEESLRRSEEKVKDIIRRLEELKKRGEPKKDLERDIDELKKRLDETAEKNDEEMRRNHRELEEHSRRLKKKLEDNHKELEDRLRSEKKSEEVKKRLEDLRKEHEDTLRDIERRSRELLKRHKDKVDEIRKAHERLIRELEEIARRIKK

SEQ ID NO: 8585 - protein, 182 aa, Artificial Sequence; identical to SEQ ID NO: 8584
  Synthetic

SEQ ID NO: 8586 - protein, 182 aa, Artificial Sequence
  Synthetic
SEEEELKKKLEKSLDELRRSLKKSAEDVRRILEELKELMKRHKEVVEEIARELDELRKRGEPEEDLERRLRKLLEEARRHSRELEKRLRELEEEVRRIAKENRDRMKRNHEELEKELRSTKKSEDVERSLRDLRRKHKELVDRIDEEHKRLEKELRDIIEEIERRSRKLLKELEDIIRETRR

SEQ ID NO: 8587 - protein, 182 aa, Artificial Sequence; identical to SEQ ID NO: 8586
  Synthetic

SEQ ID NO: 8588 - protein, 184 aa, Artificial Sequence
  Synthetic
SLEEELKRVMKEVRDLAKEHSDRSRDVMREIRELSEENERRLRRVLEEAKRLADDLRRDRRKELLEDLERKLRKLVEDARRHHKKLEDDVKRITDELEKHLRELEKRLRDLTRRLEELLRREKVEERLKDILRRIREDIERLLDELRKLNEKIKRDVDRLLKENKETLDDIERRIRKLLDDERR

SEQ ID NO: 8589 - protein, 184 aa, Artificial Sequence; identical to SEQ ID NO: 8588
  Synthetic

SEQ ID NO: 8590 - protein, 181 aa, Artificial Sequence
  Synthetic
SVEELITRVERENERVARRDEELLRENEKRNRDVTREDRDLLKKLKEEVEEVLKRIREEGKEREEIAKRLKEILDRLKKESDDVEERSKELLEELERSSREAKARMDEHLRDLRRRVKGGVSEETVKELVKHNEDLLRKWEKKSEDLSRKNEEALERWRRKSKKLAEELKKTLEDIRREVT

SEQ ID NO: 8591 - protein, 181 aa, Artificial Sequence; identical to SEQ ID NO: 8590
  Synthetic

SEQ ID NO: 8592 - protein, 179 aa, Artificial Sequence
  Synthetic
DVEDKIRRLKERIKEVTERDRKLLEELKREAEEVLRRDKKSLEEVEREIEEILKDAERKGKRDERIEKTLRDLVERYRREHKRAAEDVERLKEEYERKHRDAKRKIDELERKLEDKLRDKKRGGDELIREVEKVLEDWKRKVDELNRRLKKVLKEWEDTVRKLNEELKDVLDKLREELD

SEQ ID NO: 8593 - protein, 179 aa, Artificial Sequence; identical to SEQ ID NO: 8592
  Synthetic

SEQ ID NO: 8594 - protein, 174 aa, Artificial Sequence
  Synthetic
DMEDKLRKIKEAIKKVLDEIRKLLEDIRRRLKRVREEIEEIHKRNEEENDRVKKELNVTEDLLREIEEVDKKLKEDSEDHKKKVDEVRKRLEDKLETLRKRAEDLAKKIDDDLRKDGVTDELIKKIRELLEELKDELRKLLEEAEEVLERLKRSVEELSRRNKKLVEDLDRKTR

SEQ ID NO: 8595 - protein, 174 aa, Artificial Sequence; identical to SEQ ID NO: 8594
  Synthetic

SEQ ID NO: 8596 - protein, 174 aa, Artificial Sequence
  Synthetic
SVEEKARDILEKLKRVVEKIKEIADRNRRENEDADREIKRLIEENKKRNEDLLRRLNVTEDLLRELEEADKESEKTFKRLDEDVETKNRDSDKKVRDIEEKIRDVLRKIKDELDKKGVTDELIKRIKEIIETLEKEVEDLSRENKKKVEEILDKVRKVSTRNREKLDELDKKVR

SEQ ID NO: 8597 - protein, 174 aa, Artificial Sequence; identical to SEQ ID NO: 8596
  Synthetic

SEQ ID NO: 8598 - protein, 182 aa, Artificial Sequence
  Synthetic
SDEEILRELEKRLEENVRRVEKRHEELEREVRDNLRRAEEKHRELEERVKRVIEEVIRTKGDEGEEARELSKTLRRLSEKHRRDTEKLLRDLKELSDRHRDRTRKIREELRRKLEEARRANSSEEMVRKLVEDVDRLITDHTRSLEDVDRKVKDVIRRHTDSLRKVEEDVKRIIEELRKKAE

SEQ ID NO: 8599 - protein, 182 aa, Artificial Sequence; identical to SEQ ID NO: 8598
  Synthetic

SEQ ID NO: 8600 - protein, 182 aa, Artificial Sequence
  Synthetic
DDEEILKKLREDVERVIKKIEDSLRELRKRLKDNVDRAEELHRRLEERAKKLIDEIIKKRGDRGERLDELRRRLEELSDRHRKETTKLERELEELMKRLREELKKALEELEKLLEDIRRAKLDREFVRRLAERVKKLLKELEDRLRELEERVKEVITRHTRSLEEIVRRVERVLEEMERAAK

SEQ ID NO: 8601 - protein, 182 aa, Artificial Sequence; identical to SEQ ID NO: 8600
  Synthetic

SEQ ID NO: 8602 - protein, 178 aa, Artificial Sequence
  Synthetic
SETEEAKKEIDEIIKRIEEETKRLRETYKRIIEEIERVSKRLEDEYRKLIEELERAKREGRSEKELTDLEKRLKEEDDRTREDSRRLEEEVKEKNKKSKKESDDLARKVREDLDRLRKGGVKTEELDKLRRRLEEILKRHEESNKKLSEDLERILEEHRRENERLHRELREILERLRR

SEQ ID NO: 8603 - protein, 178 aa, Artificial Sequence; identical to SEQ ID NO: 8602
  Synthetic

SEQ ID NO: 8604 - protein, 178 aa, Artificial Sequence
  Synthetic
SIEDILRELEKELRESSKRSREILERLREELRDSSRRSEEILERLKRKVKRVKEEIEPRESVERVEEELRRLEKELKDLNEKLERDHRRLEEELERLNKELKDEHEKLVRRLEEEGNVDDKRVREVAERLRRLNERYNREVKRLEKEARRLNEEYNRLVERLAREVEKLIRDLKEEAR

SEQ ID NO: 8605 - protein, 178 aa, Artificial Sequence; identical to SEQ ID NO: 8604
  Synthetic

SEQ ID NO: 8606 - protein, 184 aa, Artificial Sequence
  Synthetic
SLEDLVREIRKRLDDMEREVKKVDDESRKRLDEARKRVEKINRESEKRLKEVADELSELKDDELKKRLEDLRRELRKLHERADRELEELTRRLEEKHKEAKRELDELKRRMEEILRDIERKNSSDEKLARDLRREVRKLEKRLEELLKELKETTEKILRELERLLKKLEDDTRRVLEEIKELKR

SEQ ID NO: 8607 - protein, 184 aa, Artificial Sequence; identical to SEQ ID NO: 8606
  Synthetic

SEQ ID NO: 8608 - protein, 173 aa, Artificial Sequence
  Synthetic
DEEREVKRKYREDLDDIRRHSEEVLKRYDEAVKKLDEDLKKVVEEYERALEEIVRRAGEDEELRREVEENRKRNEDKARTKREDHKRNSKRYKDEHDRLEKEHRENEKRKDDENSSEEEMSKDLERELRRSRRENERLAKELEDALRKSEEDIRRLVEENKERLERLERELSR

SEQ ID NO: 8609 - protein, 173 aa, Artificial Sequence; identical to SEQ ID NO: 8608
  Synthetic

SEQ ID NO: 8610 - protein, 186 aa, Artificial Sequence
  Synthetic
SEAEKVEEEVKELVKRNREKHDEIRRRIEKLKEDLKRTSERSERKIKRLVEKIDDTLRKKGPDTDKLKRIRKRLEDKERKMKEDHRRLEEELERADKERKERTDKSDKKLRDDTEKTKDDLRKRGPGEDELKRMADTIRDEIRKDNERLRRTLEKAKREADEYRERDKRKLEDFEREIRRIEEETR

SEQ ID NO: 8611 - protein, 186 aa, Artificial Sequence; identical to SEQ ID NO: 8610
  Synthetic

SEQ ID NO: 8612 - protein, 178 aa, Artificial Sequence
  Synthetic
DEREEIEKTIRELMRENDDLVRKIRREIEESLRENRRTLEKIKKEIEELTRKAKRDVRPDEELDRDAKKIREEMERRERRYEEEAKKIRDRDREKKERSEEEKRETEEREEDLKRKNADEETLRKRLEEVKRKSDEHKKELEERLREVRRRSERVNEELKKTLEEVRKKIRELIERDR

SEQ ID NO: 8613 - protein, 178 aa, Artificial Sequence; identical to SEQ ID NO: 8612
  Synthetic

SEQ ID NO: 8614 - protein, 174 aa, Artificial Sequence
  Synthetic
SEEEVARRVEERVEELDRRLREIVKDLRDHNRRMKEKLEEAVERVRRRDKELDDILRETSLDERVEKEHRDRHKKEDDETRKDDEDNKEKEDRVKKEEDDLRKETEEERKRLEEDRSTSEELRKKLEDLRRKIDEKVKKVTKEHRDSAKKIRDDVRRVKEENKKANRELAEKRR

SEQ ID NO: 8615 - protein, 174 aa, Artificial Sequence; identical to SEQ ID NO: 8614
  Synthetic

SEQ ID NO: 8616 - protein, 173 aa, Artificial Sequence
  Synthetic
SREEEVEEEYERLLEEIRRRVKEVEKEYRDLLKKIEDDVREVRKEYEKLVEDLSRKAGRVEDEERKLEKNRRDNDKKEEDKRRRHERNADDFRRRADEMEKRHKRNRDEERKRNVEDEDASRRLRDIARRSREELEEEVKRLRTEIEKSERELRETTKENRKIIEDVRRRLEK

SEQ ID NO: 8617 - protein, 173 aa, Artificial Sequence; identical to SEQ ID NO: 8616
  Synthetic

SEQ ID NO: 8618 - protein, 173 aa, Artificial Sequence
  Synthetic
SEKEEVEREYRELLKEIEKRIDEVIKEYRDLLRDIRREVKRVLREYAELVKELKKTTGPVREEKKKLEDNDRKNKEEAKRLEDEHKENDERNKRRKDTLKKEHDENEKRERDEDRERDEAARELRKKAEDSKRELEKLEEENRRIIKRSRERLKKIEEDNRRIIKEVLDRARK

SEQ ID NO: 8619 - protein, 173 aa, Artificial Sequence; identical to SEQ ID NO: 8618
  Synthetic

SEQ ID NO: 8620 - protein, 174 aa, Artificial Sequence
  Synthetic
SKEELVKKARDELRRVLEELKRAVDELRKRDEDYERKSEDVVRRLRKIDKDVREVLRRGELDERTLEEIERRLREIHRRVREDSKRTEDELKERHDALRDRMKKLKEKLREERERLDLDEEVEEEIRREAKRIDDELEKVEEENKRTLDRAKKHNEEVEKENRDTLREIDKERE

SEQ ID NO: 8621 - protein, 174 aa, Artificial Sequence; identical to SEQ ID NO: 8620
  Synthetic

SEQ ID NO: 8622 - protein, 180 aa, Artificial Sequence
  Synthetic
SIEEEAKEIIDKVRKEVEDIVRRLKETNDEVRERLERILRRLEEVDEEAKRRVEELRERKRTLEKKTVKDIEDKLERDSERVKRETREETKELEDRSRDLTRRTREELERIRRELEDRDRRLRIDDRLREELEKLARDVERRTRELEKHHRELMKRAKEETERLERHHDELAKRVREKLK

SEQ ID NO: 8623 - protein, 180 aa, Artificial Sequence; identical to SEQ ID NO: 8622
  Synthetic

SEQ ID NO: 8624 - protein, 182 aa, Artificial Sequence
  Synthetic
DEIETVLDEVRRLHEDAKRRLEEMIDEVRKLNEESVRELARVVEEVERLLRTVKEEVERAGLDKGKLEELEERLERVREDVERILREIKRRNEKTLEDSERILEENKERNRTVLKKLKELRDRGSDAREALKESRKVVEESRESVRRVLEKNRRVVEESKRLAEELLRRVKKVVDEIRKRVE

SEQ ID NO: 8625 - protein, 182 aa, Artificial Sequence; identical to SEQ ID NO: 8624
  Synthetic

SEQ ID NO: 8626 - protein, 182 aa, Artificial Sequence
  Synthetic
DELEEVVRRVRELSRTVKEELREVIERVRELSERVKKKLRKVLREVAELHREVMKRVRDSGLDKSKLEKLEDESRRVLDKSREILRKNEEDNRRLNKELEEILKKNEDDNEDVRRKVDEVTRKGKDAEEVLREVEKVVEDSRRSAKDALKRVEDRVRESDKSVRELLEENRKVVEDIKRRVD

SEQ ID NO: 8627 - protein, 182 aa, Artificial Sequence; identical to SEQ ID NO: 8626
  Synthetic

SEQ ID NO: 8628 - protein, 174 aa, Artificial Sequence
  Synthetic
EELERILDKVRKVIEEVRKRLRDDLRTVEKVLKETEEVLRRAAERAKRALERVEEAARRGRDRREIKEELKKVLDDLRELLRALEEKNRRVNKENEDSLRKIEEDLRDVLRKLEEEIKGREVLRKVRELLRTIREEVERVLRKSNELSTRIKKRIDDVLETLERLLKELDDKLR

SEQ ID NO: 8629 - protein, 174 aa, Artificial Sequence; identical to SEQ ID NO: 8628
  Synthetic

SEQ ID NO: 8630 - protein, 174 aa, Artificial Sequence
  Synthetic
KDVEDVEREVDEVVKRSDDTVEENLRRAEDVVRDTDRIVKEMKERIDRVVERVEEVVRRGRDKREIEDELRRVLEELKRLADEVEKKNRDVNRRSEKLLRDDEKELRDVERELRKKIRGEEVLRKVTRLLREAKRRTEESHKKVNDLSRRVKERVDEVLERVKRLLEEVKRKVK

SEQ ID NO: 8631 - protein, 174 aa, Artificial Sequence; identical to SEQ ID NO: 8630
  Synthetic

SEQ ID NO: 8632 - protein, 176 aa, Artificial Sequence
  Synthetic
DEAEKVLKESKDTVDKIRRDVERLVDESRKTVDRIRELVDKAVKDSKDSVDRLRDVMRRNTNDKKELEKISRDDRKRLDEVRKRLKDLLREDNERLKKVLKEMRELLKRDNERLKRANVDEEVLRRIEKVNRDVARRVEEVFREAKEVNKKVDREVEDVIRKVKRVNEKVDEELKK

SEQ ID NO: 8633 - protein, 176 aa, Artificial Sequence; identical to SEQ ID NO: 8632
  Synthetic

SEQ ID NO: 8634 - protein, 176 aa, Artificial Sequence
  Synthetic
SEAEEVVRRSRETVTRNVRMLEKVVRDSEETVKKIVRDVERLLEESKKSVDDLRRLKEENRVDDRELKRISEKDEEDLRRALKDLEEKLKRDNERLEKVLEDSKRTLDEDNKRLDEANADEKVLREVKEVNERVRETSRDIADRVREVNEDVKRKVKKVIDDIRRVNEKVKRELEK

SEQ ID NO: 8635 - protein, 176 aa, Artificial Sequence; identical to SEQ ID NO: 8634
  Synthetic

SEQ ID NO: 8636 - protein, 182 aa, Artificial Sequence
  Synthetic
DEAREVVKRVKDLVRRLRRLSEKSLEDDKRLIEEVNKRSKDILDKVKKLVDDLRDMVRRTRDKDTLRKLVKEVKDRADDLLRRLEEIDKRIRDRSEENLRRNKEISEDVKRRAKELLDDARRRKLEEEVIKEIERVVRKVLEESREVHERIRETVKEVNDRNRKVLREIREVVKKVFEDARR

SEQ ID NO: 8637 - protein, 182 aa, Artificial Sequence; identical to SEQ ID NO: 8636
  Synthetic

SEQ ID NO: 8638 - protein, 179 aa, Artificial Sequence
  Synthetic
SDAEEVVRENRELVERIVREVEKILRDNEELVKRLVELVETSLRRNEKMVDELKKLVDRNKDKERLLEDAKRRSEKNERELEEILERLKRESDKSLKRIKEVLDELRKESKRLDDELRARRVDSRVIKEIRDTSKDAVRKVEEVLRRIEETVRDAERKVKEVIKRIRETSKEVLDRVRK

SEQ ID NO: 8639 - protein, 179 aa, Artificial Sequence; identical to SEQ ID NO: 8638
  Synthetic

SEQ ID NO: 8640 - protein, 179 aa, Artificial Sequence
  Synthetic
DAAERALRRSEEVVRESVEEVKTWVDENRRSVERLREELRKDEERVRRVVERIRKLVEDGEDKRELRKDLTRVLEESKESVRRIKEDLKRDTDKTEKLLDENRRKNEKSRRELEEIVRKGLVSEEVLKRVRKTNDDSDKEVKRLIDEARKLNDDVRKEVEEVLERTTRILDRVRKEVEK

SEQ ID NO: 8641 - protein, 179 aa, Artificial Sequence; identical to SEQ ID NO: 8640
  Synthetic

SEQ ID NO: 8642 - protein, 178 aa, Artificial Sequence
  Synthetic
DEAREVERRVREMVKELKRRLEEDVKESDKSVKDLERIAKEDVDRSRESVKELRDRVRRRRDEDVRRELREKLKKDNDESRKSKKELDDISREDEKRSRDSLRDLERLLRELERELREAKVEEEAVRRVKRIIEEVRKVLEDVFRESERLNREVREKLKRMFETSKELNKRVEEALRE

SEQ ID NO: 8643 - protein, 178 aa, Artificial Sequence; identical to SEQ ID NO: 8642
  Synthetic

SEQ ID NO: 8644 - protein, 179 aa, Artificial Sequence
  Synthetic
DSRRELEDDVRRIVETNRRLLEELERRVKKILEENRRLVEELRKENERIVRELTDRVRRDGKDDDLRRKLKEILDEIRKRNEDVLRESRKSLKDLARLIEEVRERSRESLEEIKKRLREANVEEDVVRTVEKLIRDLEEESRRVLEEVRRLLDEVRKESEEVHKRVNEIVKRVEDEIRR

SEQ ID NO: 8645 - protein, 179 aa, Artificial Sequence; identical to SEQ ID NO: 8644
  Synthetic

SEQ ID NO: 8646 - protein, 178 aa, Artificial Sequence
  Synthetic
SSKDEIRRRVEEVVERSDEIVKRSREHVKTVVDELDRVVKELERKVREVVKKLDKIRKDGGSEETLKRVLDELREILKELKEEVKKVKRKLEKVVKENRDTIREVEERNRKILDELRKRGVEERALREVEEISRKSEEKLRRVLKESEDIAKEAEDRLKTVLERVERIADEVLKRLTK

SEQ ID NO: 8647 - protein, 178 aa, Artificial Sequence; identical to SEQ ID NO: 8646
  Synthetic

SEQ ID NO: 8648 - protein, 178 aa, Artificial Sequence
  Synthetic
SKVKEVEDRVREVVKESERVARESLEHVRRVVRKTEDVVRRLKEKVRKAVEDLKEIKRRGGSEETLEEVERRLKKILDELRKEVDDVEKDNERALRDNRRKIEKVERENRDELEKLKKSGIGEEVLKKVEEISERSRRELRRALKESDKISEESLRRLRKVLREVEEIVRRVLEELRR

SEQ ID NO: 8649 - protein, 178 aa, Artificial Sequence; identical to SEQ ID NO: 8648
  Synthetic

SEQ ID NO: 8650 - protein, 178 aa, Artificial Sequence
  Synthetic
SKVEKLEEEIARLVERSRRLVEELKKEVTKVKEKVDEIVERSRRHVKKVVEKLRDIKRRGGSEEVLRRVTEELKKVLEDNRRVIEEVLRDLERILEELKRKAEEVTKRNRDDLKRLRDSGVDEEVLRRVEETSDRSEKELRTVLRDVTEDIKRIAEELKKALEDSTEIIRRAEDELRT

SEQ ID NO: 8651 - protein, 178 aa, Artificial Sequence; identical to SEQ ID NO: 8650
  Synthetic

SEQ ID NO: 8652 - protein, 176 aa, Artificial Sequence
  Synthetic
DSDRKIDDEVRKVVETSERSLRENIKRIEKVVRKLEEEVRKDLEEVRRVVKELREIVKRNKEKKEDLERLIREVKKKSEKSLEDLRREIKKVEDESRKNLEENKRLLEKVKERLDRANVDEEALRKVEEDLRRLDRRVEEVVTRSKEILDEARKSVEEVVRRSDEILRRVEEDLRR

SEQ ID NO: 8653 - protein, 176 aa, Artificial Sequence; identical to SEQ ID NO: 8652
  Synthetic

SEQ ID NO: 8654 - protein, 177 aa, Artificial Sequence
  Synthetic
DEVEDILRKVEEIVKKSITDARRLLKEAREIVEESIKTAEELLRRNEDIVRKLSEDVKRTTDEEKKKKLEEESRRVLEKTKRDLDRTKDDNRKALEKIRKRVKETEEENREVVDRVRKAGVDKRVLEKIKKVVDDSVRVNREVLKRVEEVLEESKRVNEKVEEDVRRVHEEVRKEIK

SEQ ID NO: 8655 - protein, 177 aa, Artificial Sequence; identical to SEQ ID NO: 8654
  Synthetic

SEQ ID NO: 8656 - protein, 177 aa, Artificial Sequence
  Synthetic
DRVEKLLEDAKKIVEDSKRTAEKLLRENEKIVEKIKREADKILEDNKKIVDELAEAVKRTTDKDKKEELKRRSEKVNKESEDLVRRLRKESEEVLERTERVVRETEKRNDEMRKRIEEGGVDRRVLEEVKRVIDESRRVNKRVEEEIRKVHRDVERRLEEVLKRVRDTSEDVRRKIK

SEQ ID NO: 8657 - protein, 177 aa, Artificial Sequence; identical to SEQ ID NO: 8656
  Synthetic

SEQ ID NO: 8658 - protein, 177 aa, Artificial Sequence
  Synthetic
SEAEKLLRDVEREVERVIEDADKLLREIEEIVKRSEDKAREILKENEKIVRELKEAVRRTTDERKKEELKRRSEKVNRKSRKLVEDTKKENEDVLREIEKRLRDLDRRLKEVEDRIRKAGVDEEVLRRIKKVVDDVRERLREVEKRIRDVIDRSRRVNERVLREAERTSREVERAID

SEQ ID NO: 8659 - protein, 177 aa, Artificial Sequence; identical to SEQ ID NO: 8658
  Synthetic

SEQ ID NO: 8660 - protein, 175 aa, Artificial Sequence
  Synthetic
DEAEDVLRKVRERVKESERHVEKVLEDVRRVVKKSIDHARDVLRKVKEVIDRVRELVERNERDKKELEEDLKRLRERVEEMIRTNEKENRDLERDVERAIEENRRRNDKVEDDVRKSNIDERVEREIRRVLKRSKERLEEVVKEIRELSEKSRRVLEEVKKRIREVLERVRKDVE

SEQ ID NO: 8661 - protein, 175 aa, Artificial Sequence; identical to SEQ ID NO: 8660
  Synthetic

SEQ ID NO: 8662 - protein, 175 aa, Artificial Sequence
  Synthetic
REAEEVLKEVRKAVEDSIRHVEEVLEEVKKVVEESIRHIRDSLRDVRRVIEEVDRLVKRNERDKKELKERLERALRKDERVVEENEDTNRRLIEKVEKAIRENEKRNDDVKRKVDELNVDKRVKEEIDRVLDESKRVLEEVVTRIRKVSDDSEKEVRRVHKESKRVVEEVERTVD

SEQ ID NO: 8663 - protein, 175 aa, Artificial Sequence; identical to SEQ ID NO: 8662
  Synthetic

SEQ ID NO: 8664 - protein, 175 aa, Artificial Sequence
  Synthetic
DEAEDVLRRVREMVERSIEHVRRVLKEVEDVVRESIKHVEDVVREVREVIREVEELVDRNEVDKKELRKRLKELEDKVEKRTRENEERNKELNKKVKDADDENRKRNEKVRRDVRRSNIDKRVEEEIDKLLRESKRELDEVRKRIEDLSRESERRLREAVEEIRRLVKKVAEKVN

SEQ ID NO: 8665 - protein, 175 aa, Artificial Sequence; identical to SEQ ID NO: 8664
  Synthetic

SEQ ID NO: 8666 - protein, 175 aa, Artificial Sequence
  Synthetic
KEAEDVLDEVRKAVEESIKHVKRVLEEVEEIVRRSIKHARDSLRKVKEVIDKVRTLVRRNEVDKKELEEELKRLEDEDRKMVKDNRDDNREANRKVDKMVKENEDRNRRVEEKVRELNIDERVRREIKRLLDESREVLKEVTKRIRKVSRDSERVVEKVHRDSKDVLDKVREDVR

SEQ ID NO: 8667 - protein, 175 aa, Artificial Sequence; identical to SEQ ID NO: 8666
  Synthetic

SEQ ID NO: 8668 - protein, 178 aa, Artificial Sequence
  Synthetic
SSLEKAEDEVRELLRDVERVLKEVRDRIEELNRKVNEVLRRVIEESERLLREVLERVRGRREVTELLKEVKKRNDKVRKDIRKESEEDKKKVEETVAEIKKELDDLRRDVRRVAEENGPSEKVRRLVDKVRETVTDIVRRVTRLLEESEESVRRLIEKVKKLNEESRRIVEKIEKDAR

SEQ ID NO: 8669 - protein, 178 aa, Artificial Sequence; identical to SEQ ID NO: 8668
  Synthetic

SEQ ID NO: 8670 - protein, 178 aa, Artificial Sequence
  Synthetic
SELERVEEDVKRVNKEVNDTLEKVIRDSKRVLDEVEERTRKVKRDSERLLERVERAVEGLKELKELLDRLREENREVVKDSERLLREWERENREVKKRIEDESEEDKRRLEEVARRNGPEEVVERVLEESRRSVETLIRDVERVNKKSREAVERNIRRSTAANERSKKIVKEIIDTAK

SEQ ID NO: 8671 - protein, 178 aa, Artificial Sequence; identical to SEQ ID NO: 8670
  Synthetic

SEQ ID NO: 8672 - protein, 174 aa, Artificial Sequence
  Synthetic
DEAEDVVRRVREEVERLIRRSREVAEESKRTVDKLRRELEELLRRSRETVERIKKLIDEGVDRREIEKLNRDNEEEVRRMEEKARRINTENRDRVRKVHEESKRELERIKEEVRRVDIDDKVREDIERVLREVEEVDKEVKERVRKVDEDSKKEIKEVKDEIRRVDEESRERAE

SEQ ID NO: 8673 - protein, 174 aa, Artificial Sequence; identical to SEQ ID NO: 8672
  Synthetic

SEQ ID NO: 8674 - protein, 177 aa, Artificial Sequence
  Synthetic
DEAEKVLEKARDLVRRNIERSRRVLEENKKSVDDLIRRNEETNRRNEKSVDEVKKLVDNGGSEEAVRTVAERDEKSLEENREENERILKRDEDTLEKAKRESDKSLAELKKLLDDAKRKGVDDDVLREVKRVLDEARRVSEEVEKESRRVLEEAKRVAEEVHKRSKKVVDDVKERAR

SEQ ID NO: 8675 - protein, 177 aa, Artificial Sequence; identical to SEQ ID NO: 8674
  Synthetic

SEQ ID NO: 8676 - protein, 180 aa, Artificial Sequence
  Synthetic
SELEDVKRRIDKVVREVEEVVREVSERSKKVLEEVRRSAERVNREIERVLREAKDEVRRRTRDDKIRKKVEEVERRVRKLIEDNRRINEEVERRVERLNEELRRLVEKVRKELEELKKDIKDKDAKRVLEEARKIVDRLRKIVEEVVRRSEELIRRLKKINEDSLRRVEELVKDLIREVS

SEQ ID NO: 8677 - protein, 180 aa, Artificial Sequence; identical to SEQ ID NO: 8676
  Synthetic

SEQ ID NO: 8678 - protein, 181 aa, Artificial Sequence
  Synthetic
KEAEEVVERVRELIERLRRRVTEMLRESKRLVEENIKRSEDALKESERLVDKLRELVKRTRDKETLKKLLEEIEREIKKINKRTEDILRESARRVEEINKRTKDILEEIARRITRIREEARRRNVDDKVLRTIEKLLDDVKKEVEKVNEDSKRLLRDVERVSKEVNDESRRVLEEVKREAK

SEQ ID NO: 8679 - protein, 181 aa, Artificial Sequence; identical to SEQ ID NO: 8678
  Synthetic

SEQ ID NO: 8680 - protein, 181 aa, Artificial Sequence
  Synthetic
SELEKIVEKIKRIIDESRRTVEESVRKSEKIVEEVKKRLEELVEEVRKIVEEIVRIIRNGDRREEVEEKARRTAEELRRRLEELRKRLEDLVRKDLRENEENLKRTEDLVREVKDELEKLPRNEELEKVKRMVDKVVDDVRKVNDTSRKRSKETLEEARRKVEEVKRRIDKVLRDVKREID

SEQ ID NO: 8681 - protein, 181 aa, Artificial Sequence; identical to SEQ ID NO: 8680
  Synthetic

SEQ ID NO: 8682 - protein, 177 aa, Artificial Sequence
  Synthetic
DEVEEVVKRVKEVVEKIVRELEKLVEESKKIVEDAVREDERLVEKIERVVRRLVEEVRRSTDEKKLEDLEKELEDVRKDIERVLEDNKRKLEEAHEKSKDKARRLREELERALREVEETGVSEEVKKLVDEVVKEVEEVIKRVEDLDRRVLEENRESTRDVERRVREVVKRVREALK

SEQ ID NO: 8683 - protein, 177 aa, Artificial Sequence; identical to SEQ ID NO: 8682
  Synthetic

SEQ ID NO: 8684 - protein, 176 aa, Artificial Sequence
  Synthetic
SDAERVVREVERLVDTTRKLVKKVVEDIRRVVETAKRDLDRVVKRSEDVVREVKKLIEEGVREEEIKKILDEIRKETKDVERKIKKILDDIRKKVEKVTEEIKDVNRKTKEIVDRAKDRIDDRVIKLVRKLNKDSERKLREVRDRVERVIEEVEKRLREVKERSKETIEDVERARK

SEQ ID NO: 8685 - protein, 176 aa, Artificial Sequence; identical to SEQ ID NO: 8684
  Synthetic

SEQ ID NO: 8686 - protein, 177 aa, Artificial Sequence
  Synthetic
DEAEKVVEEAKRRVKEVVERLREVADRNRRSIEELVKELRAVVEDSRKSVEDLVRRVRNGGSKETVEEIDRRNEDKLRELEKRVRKIIEENKRSLEKLKRDIERIERRLEELLERVDRNNVSEEVKKLVEDVIEEVRKVVKEVEDISRRVIEDLKRVLEEVEKRSRKLIKEARDETR

SEQ ID NO: 8687 - protein, 177 aa, Artificial Sequence; identical to SEQ ID NO: 8686
  Synthetic

SEQ ID NO: 8688 - protein, 181 aa, Artificial Sequence
  Synthetic
DELREVVKRVRRLIEEVRRLVKELVDRVRKVIEELKRRSEDSARESERVVREIKKLVEERKDKEELLKEAEKKVEKIHRDNKKLLRELEEKIERIREELDRVLRDLERRLRELKEELKRGPKNEELEDVDRDIERVREEVKRVVDEVRKRIRDVLEDARRESKRVLDRSRESLREVREAVR

SEQ ID NO: 8689 - protein, 181 aa, Artificial Sequence; identical to SEQ ID NO: 8688
  Synthetic

SEQ ID NO: 8690 - protein, 181 aa, Artificial Sequence
  Synthetic
DELEELVKRVEDVIREIEERVRRLVRESERVVKEILKKSRKSVEKVKEVVDRAVDLVRKRKDDKRALEELRRVAEEIKEENERLLRDAEEKVKKLDRELEKLLEDLRREIRRLLEELRRGPDDERLKDVEREIRRVLRRAEKVVDEALKRSRDTLREVRKVSKEVREDIERVVKEADEAAR

SEQ ID NO: 8691 - protein, 181 aa, Artificial Sequence; identical to SEQ ID NO: 8690
  Synthetic

SEQ ID NO: 8692 - protein, 177 aa, Artificial Sequence
  Synthetic
SVVDRVREELEKVLRHSKKVVEDVKREIDKVLKRSEDALRRVEEESKRVLEEVERDGISEELEERLRRIHRESRERLKRLKEENERIAEELRKRLEDLTRENEKIIRDLDRELKKTRDKDTLKKLVEEARKVSEDSRRRLERIVEEMRRVSEDSRRRLEEIVRENRKVVEEVRRRAT

SEQ ID NO: 8693 - protein, 177 aa, Artificial Sequence; identical to SEQ ID NO: 8692
  Synthetic

SEQ ID NO: 8694 - protein, 177 aa, Artificial Sequence
  Synthetic
SVVERVREEIKRVLENSKRAVDKVREDIKRVLDESRKAIKEVEDEIRKVLEEVERGGIDEELRKELKRIVDELRAELKKLLDENEEAVKELEERLKKLTRDNEEIVERLERRLKKTTDSDTVRRIVEEIEKVSRESVKRLEDIVREMKKISEESKETVDRIVEKIREVVKRLLEAAK

SEQ ID NO: 8695 - protein, 177 aa, Artificial Sequence; identical to SEQ ID NO: 8694
  Synthetic

SEQ ID NO: 8696 - protein, 177 aa, Artificial Sequence
  Synthetic
SAVETVRKTIEDVLRNSERVLKKVREDSKKVLENSERVLKEVEDRSKEVLKEVEDGGIDERLREELEDIHRRSKKRLDELREENKRIHDRTEEELKRLLRENEKIVEDLARRLDKTTDKKELDEIAEEIKRVSEDSVRKARELAERNKKVSDESVKRVKKIVRENEKVVEELLKAKK

SEQ ID NO: 8697 - protein, 177 aa, Artificial Sequence; identical to SEQ ID NO: 8696
  Synthetic

SEQ ID NO: 8698 - protein, 177 aa, Artificial Sequence
  Synthetic
SEVDEIVRRIKEISKRSVDDLEKLARDNKKAVEEVLEELRKLLEENEKMVREVLEEVRRSTDEDRLAKLRKRVEDVNRRTRRVLDEIRKKVEEVHDRTRRRLEELKRRNDEVLRKIASKPIDERLDRMLKEVIKHSEKVVRDVEETSKTVLKEIEDALKKVEEASKRVVDRLEEATR

SEQ ID NO: 8699 - protein, 177 aa, Artificial Sequence; identical to SEQ ID NO: 8698
  Synthetic

SEQ ID NO: 8700 - protein, 177 aa, Artificial Sequence
  Synthetic
RRVDEIAKKIKRISEESVKTLDKIMEDARKIVKDVLDELRKLAEDNKRVVREVLERVRRSTDEDTLKKLDDKLRDVHRRTKEVLDKLTDEVRDVKRRIDELLEKLKEENERVLREIESEDIDERLRRTVERVIRHSREAVKRVKDEVEKVVKELEDVVRKVKEDSERVVKEVEEAKR

SEQ ID NO: 8701 - protein, 177 aa, Artificial Sequence; identical to SEQ ID NO: 8700
  Synthetic

SEQ ID NO: 8702 - protein, 181 aa, Artificial Sequence
  Synthetic
SEAEDVVRRSKRSVERLKKELDDVVRESKESVERLVRRNDEVVKRSRESVDELTEAVKRGLRREDIERILRENRRLLEEAHKENKKILEENKKLLDDLRRRVREILERNKRLLEELKRRLKDKDLVERVERTVRTTLKELEDALREVKRMVEDTLKKAEDVNRRVAEEVKKSEKRLRDVAK

SEQ ID NO: 8703 - protein, 181 aa, Artificial Sequence; identical to SEQ ID NO: 8702
  Synthetic

SEQ ID NO: 8704 - protein, 181 aa, Artificial Sequence
  Synthetic
DEVDDVVRKSEKSVEELVRKLETVVKRSEESVRELLEKNREVVERNERSVRELLERLEKGLSEKEVEDILREDEESLKKLHEDNKRILKENRDLLRRLEEEVRRINRENERLLDDLRKKLTDKDLLKRVEDTARRVNREIEEALDRVRKAVEKTLKKLKDVNDEVRKESEKVLKELRDATK

SEQ ID NO: 8705 - protein, 181 aa, Artificial Sequence; identical to SEQ ID NO: 8704
  Synthetic

SEQ ID NO: 8706 - protein, 177 aa, Artificial Sequence
  Synthetic
SDEDRVREMVRTVIEKLDRVLEEVERDSAKTDRDNKKSAEDVRRESKRTDDELKDVVRKAGRELEKIRDVVDKNRRLVEKLDKENRKTLEENRRLLEELKKLADEVKEELERLRKEIKDKDVDEVVERAKKLVKRLEDRLREVVKESRRLVRRVVERNREVAERSKDLVRRLVEDTR

SEQ ID NO: 8707 - protein, 177 aa, Artificial Sequence; identical to SEQ ID NO: 8706
  Synthetic

SEQ ID NO: 8708 - protein, 177 aa, Artificial Sequence
  Synthetic
SKEEEVERRVEEVIKELEEVLRRVEEEIKRVIDDNRRSARDVEEKSKRTDEELKDVVRKAGRRLEEIERIEEENKKLVDELRKSNEKTEEELKKLLEELREMVREVKERLKDLLDKIKDRDVDEVARRVKEMVERLRKLAEEVVREAERVVREVVDENRKVVEESKRLVKELLERVK

SEQ ID NO: 8709 - protein, 177 aa, Artificial Sequence; identical to SEQ ID NO: 8708
  Synthetic

SEQ ID NO: 8710 - protein, 177 aa, Artificial Sequence
  Synthetic
SDEERVDEEIKTVIEELKRSLKEVEDTIRKVIKENKDSAKRVKETSEKTDREIEDVVRKAGRELEDIKKVKRDNKELVKRLDERNRETEKELRELLDRLRKENKESEDRLRKLRDEIKDKDVDTVAKEVRDLVRENVERNKEVVKRAKKVVDDVVRENRKVAEDSKKLVKEVKDRVR

SEQ ID NO: 8711 - protein, 177 aa, Artificial Sequence; identical to SEQ ID NO: 8710
  Synthetic

SEQ ID NO: 8712 - protein, 177 aa, Artificial Sequence
  Synthetic
DDEERVKELIKEVIRELEESLRRVKEDSKRTDEKNKKSMEDVERKIERVRRRLDEVVKEAGRDLEDIKRIDKELEELLRKLREENERTRETNEELVRKLDEENRKSKKELEKLLREVKDKDVDEVAKRATDIVKRNAELNKEVVDESRRLVEEVVDRNEKVAKRAEEIVDELERRTR

SEQ ID NO: 8713 - protein, 177 aa, Artificial Sequence; identical to SEQ ID NO: 8712
  Synthetic

SEQ ID NO: 8714 - protein, 185 aa, Artificial Sequence
  Synthetic
DEFKEVVDRVKRLVTENVRENRRVVEESERLVKEALKRLEDLVRRAKEIVDRLDDLVRKIRDEDTLREVVDRIEKILRELEEEAKRVARRIKEESKRLNDEVKEINDRSRRKLTELLKRLDESRVPKDLLKRVRDSIETVKKELDDSMKKVSDDDERSKKELEDVLEEVRKRIEKVMKELRDTSR

SEQ ID NO: 8715 - protein, 185 aa, Artificial Sequence; identical to SEQ ID NO: 8714
  Synthetic

SEQ ID NO: 8716 - protein, 185 aa, Artificial Sequence
  Synthetic
DEVREIVREVKRLVEENVRRNDDVARKSRKLVKENKDRNKEVVDRLRELVKRALDEVRRIKEEEELRRVVKEIRDELRRLRKKLKDINDDSERKSRELNKLVKDINKKSEEELEKLRDRVRRLRVPEKLLKEVEDMIRTVKKELKDSARRVSEEDKRSKEDLKRSAKEVEETIKDVLRKLDTETT

SEQ ID NO: 8717 - protein, 185 aa, Artificial Sequence; identical to SEQ ID NO: 8716
  Synthetic

SEQ ID NO: 8718 - protein, 185 aa, Artificial Sequence
  Synthetic
DEAEEVVRRVERLVKENVKLNKEIVKRSRDLVKELEERLREIVKRVEEIVKRAKDLVEEIKDKDTLKEVVDRIRRELERLLEEVERIARKIIEESKELNKRMREINKKSKEDLKRLLDELDKSRVPKDLLKRVREVIERVDRELDKSMKEVHDENEKSVRRLREVLERVKKRIKDVTKELEDRTR

SEQ ID NO: 8719 - protein, 185 aa, Artificial Sequence; identical to SEQ ID NO: 8718
  Synthetic

SEQ ID NO: 8720 - protein, 185 aa, Artificial Sequence
  Synthetic
SLVEEVVRRVEDLVRKNVRLNEEIVRRSEDLVRRNVELNEELVRRAEDLVRRIEELVKKIKDRRELERVLREIRRTLRELKRELEEINKRSKDESRRLNDEVRRINEKSEEELKRLLDELRKRPVDEELLRKVEKMIERVVRELKKSAKRVHDENRRSDEDAERSMERVERVIERVERDIDRRLR

SEQ ID NO: 8721 - protein, 185 aa, Artificial Sequence; identical to SEQ ID NO: 8720
  Synthetic

SEQ ID NO: 8722 - protein, 185 aa, Artificial Sequence
  Synthetic
DEAREVVTEVKRLVRENEERNKEVVKRSKKLVEDLKDLARKLVDRAKKLVDTLRDLVRKIRDKDTLKEVVERIRRELDKLRKELEEILKRVHEEDKRLRDEVDEINKRSEDELRKLEDELRKSRVEERLLEDVERKIETVIRELRKSMEEVKESSRRSNEELKKVADDVERTIRKVERELEKEST

SEQ ID NO: 8723 - protein, 185 aa, Artificial Sequence; identical to SEQ ID NO: 8722
  Synthetic

SEQ ID NO: 8724 - protein, 175 aa, Artificial Sequence
  Synthetic
SDAERVVDDLERRVRENLEDLRRAVREVREVVKKNLETITRVLEEVERVVDRLSKLVKEGTDRKDLEKELRDLEEKIKRISEESRRHLDELRRKVEEINKRSRDHLRDLARRLKEEIGRVREVDKVLKDVARKVEEANEKSRRVLEEVEELVERVNRELHETLKRVAERVKRDAT

SEQ ID NO: 8725 - protein, 175 aa, Artificial Sequence; identical to SEQ ID NO: 8724
  Synthetic

SEQ ID NO: 8726 - protein, 177 aa, Artificial Sequence
  Synthetic
SDEERVTKVLEEVKERIERANRTLEKRVREVTDRVREVNERSDKVNRDSERKIREIIKRLTDKDLVRKLEKLLEEDRRRSEEALEESDRLVKEAKRRIDKALKESEDSLRDMEREVRERPKLEKLVRDLRKIVEENERKNRDLLRKIEKIVEEIERRNRDVVRRSKESVERLREEVR

SEQ ID NO: 8727 - protein, 177 aa, Artificial Sequence; identical to SEQ ID NO: 8726
  Synthetic

SEQ ID NO: 8728 - protein, 181 aa, Artificial Sequence
  Synthetic
DADRELRRVAKEVTDRSRRVLEDSERVVRESHEKSKRVLEDLRRVVKEVAERIDEVLKRVRGEDLERLERIKERIKEEVDRVDERSKRTVEENKRRVDEVRKESKKIVDDMRELLERAKDLTEEVARDVVRKLKRIVTENLKKNTKVVRDSEDLVRRDLEEVDRVVKKVKKDVDEIERDVK

SEQ ID NO: 8729 - protein, 181 aa, Artificial Sequence; identical to SEQ ID NO: 8728
  Synthetic

SEQ ID NO: 8730 - protein, 181 aa, Artificial Sequence
  Synthetic
DEVREVVKELKRIVDELLDELRKVVEELEKIVTDDLRRIEEAVKRSKDSVEDLERRLKSGGSEEMVKKIKDENKELLKKVREESKRSNDRSKEVLDRVKKRVEDIIERLRRELKRVTKDIEDKDLLRELEEVARRVEEKIKKAVRELEKVMREVNRKSTEVLKRLEKVVRDSEKRIDDATR

SEQ ID NO: 8731 - protein, 181 aa, Artificial Sequence; identical to SEQ ID NO: 8730
  Synthetic

SEQ ID NO: 8732 - protein, 181 aa, Artificial Sequence
  Synthetic
SDVDEVVKEVKAIADDSTRLNKESAEKSRELVDRDTKKNKRSVEELRRLVTEILKVVESGGPGKVVEEAKKRLDRLLERDEETNRDSERKDRELLRTDEELNRETDKRLKDLLDRVRRRISNDELLRKLEEVVEKVRRDDERSHRESERVSRESTKRSRDSHRESREVVTEVKKEVDRAAK

SEQ ID NO: 8733 - protein, 181 aa, Artificial Sequence; identical to SEQ ID NO: 8732
  Synthetic

SEQ ID NO: 8734 - protein, 185 aa, Artificial Sequence
  Synthetic
DEAEEVVDRARKLVKESEDLNRRSVEESEKLVTTSTELNKRTVDRLREIVEEVKDLVRKTRDEDTLRELVRRIEERLEKLLRDDREINKETNKESRRLNEEDKRINDESRKKLDELKKEIDKRGLPEDVLRKVKKTLEEVKRRDDEAMRRSHKKDDDSRKRDEESMRRSDEVVREVIEEVREAER

SEQ ID NO: 8735 - protein, 185 aa, Artificial Sequence; identical to SEQ ID NO: 8734
  Synthetic

SEQ ID NO: 8736 - protein, 187 aa, Artificial Sequence
  Synthetic
DEIEDVVRKVEEMVKESKDRVDRNVEESRRIVTESREKVKDSVRRVEEVVKEIKKLAEQGRSEEELKRILDEAEKTLRENRRRNKKVHEETRRRLEESDRHLKKVHEDTKRLLDALKEELKRLKEKIDDKVVKKVDDALKRVEKKDRDAIREVERVNREVEKDDERVLRDSERVLEEVRKRVEEVTT

SEQ ID NO: 8737 - protein, 187 aa, Artificial Sequence; identical to SEQ ID NO: 8736
  Synthetic

SEQ ID NO: 8738 - protein, 187 aa, Artificial Sequence
  Synthetic
SEIDEVVERVRKAVEDSRKVVEDLIKTVEDAVREHERLVRRVVEEVDKLVEDIRKLLERGESEEMLKRILEDAERRLKELKEELKRSNEDIERILRELKKELKKVHDRTRKILEELKRRLDELRKDIDERMLRKVDEVIKRVAREDERVVKKLEDVLRDVKRRVDEASKEVDRRLKEVKKRVEKEAE

SEQ ID NO: 8739 - protein, 187 aa, Artificial Sequence; identical to SEQ ID NO: 8738
  Synthetic

SEQ ID NO: 8740 - protein, 187 aa, Artificial Sequence
  Synthetic
KEAEEAAKRAEEAAKRHEDLAREAAKEAKRAADESRKAAEEAAKRAEKAARDIADLARKGLDEEALDRAAKRAKELLDELRKELEKVHRDTERLLDELRRRLERSDEEIEEILRRLKDELDKARERIDEKAARKAEDALRRAREIAKKASEDAKRALDEARKADEDAARKAEKALKEAEDAAREARR

SEQ ID NO: 8741 - protein, 187 aa, Artificial Sequence; identical to SEQ ID NO: 8740
  Synthetic

SEQ ID NO: 8742 - protein, 184 aa, Artificial Sequence
  Synthetic
DEEEELKEVVREVAERVEEVNRKSERELDKARKDSERALEKLERVLREVAERVKRVLDEASKRVPEELIKRIKEELEKMKREIEKILTDNRRKTEEMEKKIRKINEDSRDHLRKVEREVERVKDEGKDVKDVIRELEEVVRRNTDLVRKVEEEIRKVVEESKRSIEEVIKRLRKLVDDIRKAIK

SEQ ID NO: 8743 - protein, 184 aa, Artificial Sequence; identical to SEQ ID NO: 8742
  Synthetic

SEQ ID NO: 8744 - protein, 184 aa, Artificial Sequence
  Synthetic
DEREKLAEVVKRVAEDVKRMNKESREALKRVKEEVKRVNEKSEKVTREVKKEVERVIEEAKRTIPEELLKRIRDKLKKVEEDSRRTNEESKRHLKEAEDRIREINKRSEDHLREVIKKVEEVMTRGKDVEDVIRELEKVVEDNKRLVEKVVRDARKVVEDNKELVDRNVKRLEEVVREITKEIK

SEQ ID NO: 8745 - protein, 184 aa, Artificial Sequence; identical to SEQ ID NO: 8744
  Synthetic

SEQ ID NO: 8746 - protein, 186 aa, Artificial Sequence
  Synthetic
RDVDELVRELRDVVRKVLETARDSVRELKRIVTESLRRAEDLVKEITDVVREVLDAVRRARDKDTLKKLKDDAERVLERLERRIRELHERSRRVSEESEKLVRKLEEDAERVIRKVEDALRKRLKDNREVVKKLRDVIREVKEDVERVLKEVRDVNREVNKIDKEAVERIRRVLDEVRKRVDEAAR

SEQ ID NO: 8747 - protein, 186 aa, Artificial Sequence; identical to SEQ ID NO: 8746
  Synthetic

SEQ ID NO: 8748 - protein, 174 aa, Artificial Sequence
  Synthetic
KEIDDVVRELKEIAKRDEDKVRRVVEDLERVAREDLRKVREVVKELRRVVKTLLDLVRRGVDKRELKKILEELEKRVREVHDESRRTLEELDKKIKKVKEESERTLREAEKRARDIEKDKRLDDVLREVADIIRRSIRDLERVLEEVKRIIETSNDELRKVLKEVRETITEAER

SEQ ID NO: 8749 - protein, 174 aa, Artificial Sequence; identical to SEQ ID NO: 8748
  Synthetic

SEQ ID NO: 8750 - protein, 174 aa, Artificial Sequence
  Synthetic
SEIDEMVRKLKEMARRDLETVRRVVERLRKLAEDDLRRVRKVVKKLKELAKDIVRLVEEGSREEELEEILKRIEEEVRKVEEESKKSLREIREEVEKVKRESERTLEDIERKAEEIEESERLRKVLKEVKDIIRKSNKELDEVLRDVERIIRESIEELRRVLEEVKKIIKEARD

SEQ ID NO: 8751 - protein, 174 aa, Artificial Sequence; identical to SEQ ID NO: 8750
  Synthetic

SEQ ID NO: 8752 - protein, 181 aa, Artificial Sequence
  Synthetic
DEVDEAVRRLEEIVTRIEKDVDDVARRSEESAKEVEKAVRKVVEEHKKVAEDIRKLVEDGGDERELRKILEDLRKTSREVERALEEILRENDRLLTEVRRKLERILERLDELAEDVKRRVRGREVKERLKKVLDKVRKRIKRVVERLEEAARKSRKIIRDAKEELERVSREVEKVIRDVRR

SEQ ID NO: 8753 - protein, 181 aa, Artificial Sequence; identical to SEQ ID NO: 8752
  Synthetic

SEQ ID NO: 8754 - protein, 186 aa, Artificial Sequence
  Synthetic
EEVKELVERLRDLVRESEKRVDEVVKRLEDLVRRNEELNRELVTRLRDLVRKLEEKVKDTKDEETLRRLAEEVRKRLDELRREMEKINRDSERELDRLDREVERISETTERRLRELEKKAKDDIKDDKEMVREIKRVVDEVRKRDKEALDRLKKVIEEVRRKVKRSEDEARRVVEEVKRIVDRVET

SEQ ID NO: 8755 - protein, 186 aa, Artificial Sequence; identical to SEQ ID NO: 8754
  Synthetic

SEQ ID NO: 8756 - protein, 186 aa, Artificial Sequence
  Synthetic
REVDDLVRRLEELVRRNEKKNEDVVRESKELADRSRKLVKELVKRLRELVKTVVRLVEETKDEDTLRRLIEEVEKRLRDLKREIEEISKETKKRDEELLRKAEKINKDSKDRIEDLLREAKRRIKDDKELVRKLKKVVDEVRERIDRSTEEVRRVSKESKDIDKRAKEEIEEVLRDVEKKLRETAT

SEQ ID NO: 8757 - protein, 186 aa, Artificial Sequence; identical to SEQ ID NO: 8756
  Synthetic

SEQ ID NO: 8758 - protein, 186 aa, Artificial Sequence
  Synthetic
DEFRDVVRKLEKLVEDITREAEEVVKISKALAEENKRLNDELVDRLRRLVEEVRKKVEDTKDEETLDEELRRVKETLKRLLEEVERINKESREKDRKLKEEVRKRIEEVEERLRTLLEEVKKRLKDDKEVVKRVKDVVDRVRDEVRRVAEKVDRVSKESKRIIDESTKRAREVLERVRKRVEDERK

SEQ ID NO: 8759 - protein, 186 aa, Artificial Sequence; identical to SEQ ID NO: 8758
  Synthetic

SEQ ID NO: 8760 - protein, 186 aa, Artificial Sequence
  Synthetic
SEVDDIARKLRDLVRRNKELNDEVVRRSEKLVKENKELNEELVRRLKELVDRLEDEVRRTKDKDRLREIIREVRERLKRLLDTIKRINDESRKEDKRLLDEAERINRESRKKIDKLEKDAEKDIKDDKEMVKKLRKVVEEVRREIDDSMRKVKKVSEDSKRRIERSTEEIEEVAKRVADKVTDVER

SEQ ID NO: 8761 - protein, 186 aa, Artificial Sequence; identical to SEQ ID NO: 8760
  Synthetic

SEQ ID NO: 8762 - protein, 178 aa, Artificial Sequence
  Synthetic
RELEEVVRELRKLVTEDLDRVRKSVEESERVVREDERRVDESVKRTREIADEVRRLKEEGVDESRLRELLKRVEDMNRESLKRSEDSLKRLHERNRKSLKESRDSLEEAERRVEDVRRRGVDEEELKKVLKEVRKVVTDSERRDKEANRKVEEVIRRSKKKDEDAHREVRKVVEDVRT

SEQ ID NO: 8763 - protein, 178 aa, Artificial Sequence; identical to SEQ ID NO: 8762
  Synthetic

SEQ ID NO: 8764 - protein, 176 aa, Artificial Sequence
  Synthetic
SKDEKLEKVIREVKRVIERVSKESEDVLRKVRKVIEDVSRESRRVLEDSRRVLERVAREGKRDERIKEVEDRSRRTLERLEELNDTVRRLLEEVVRRLRELNKDVERRLRDLARKLKDLDVDEVVDRARRIVDDVDRLNREVVKRLKDLVEDLRRLNEEVVRRNKELADTVRKDVR

SEQ ID NO: 8765 - protein, 176 aa, Artificial Sequence; identical to SEQ ID NO: 8764
  Synthetic

SEQ ID NO: 8766 - protein, 176 aa, Artificial Sequence
  Synthetic
SEDEKLKEVVDEARKILEDADRELKRVVKEVEDVIRDVSKKSTEVRKEVKEILKEAADKGDEDERIREVEKTVEDLLRKLEEMNRRIEETLKKLAEEVHRRNREVEKEVEDLARRVKELDVDKVVDDLRKLAEDLLRENKEVVDKLRELVERVKKLNEDVVREARRLADEVLKRVT

SEQ ID NO: 8767 - protein, 176 aa, Artificial Sequence; identical to SEQ ID NO: 8766
  Synthetic

SEQ ID NO: 8768 - protein, 179 aa, Artificial Sequence
  Synthetic
SEVERLEERLKRIVEDIKRLVKKSVEDSRKIVEEIRKLVKDSVEKNKRSVEEVEDIVRKDKDVKERLEELVRRDEEVNKKTKEDIKELLDRVREINERTNEKIERLLRELKKEIDDVRRRGVDEERVKRVLREVEERVKEVKKENEKAHEEVRKDVERVLEDDDRALRESRERAERVKK

SEQ ID NO: 8769 - protein, 179 aa, Artificial Sequence; identical to SEQ ID NO: 8768
  Synthetic

SEQ ID NO: 8770 - protein, 179 aa, Artificial Sequence
  Synthetic
TEVDELLDSLRKIVTEIEKLVEESEKRLREIVKTIEKLVKDSVRTLKKIAREIEELAKDRKEVEDAIRKLLKEVEDIVRETNKTSEELARRIRKLVKEVNERTDKLRREVEREVEEVKKNGVNEERVEKVLREVRDRVKKVNKRNEDALREVDKKVKDVNKENEDVLEEARRVVEEVRR

SEQ ID NO: 8771 - protein, 179 aa, Artificial Sequence; identical to SEQ ID NO: 8770
  Synthetic

SEQ ID NO: 8772 - protein, 174 aa, Artificial Sequence
  Synthetic
REDEKIKKVVEEVRKKLEDVDKNSRDAIEDDKRVNKEVDRNSERAFKENEDEIRKVKEAGVDEKKLKESRDNSKRVLDRSKELLKRSEENTRRLAKESKELLKEVRDRLEDLRRRVKNADEVVKELERIVAEVEKLSREVVKRLKENVKRVRDLSKRVVEYLKEDADRLKEDVR

SEQ ID NO: 8773 - protein, 174 aa, Artificial Sequence; identical to SEQ ID NO: 8772
  Synthetic

SEQ ID NO: 8774 - protein, 174 aa, Artificial Sequence
  Synthetic
DEERKIRKAVEDVRRVIKEVEENSKRVFDENKKVIDDVRKEVEKVLKENRDVIKEVRDKGVDEKLLDESRRNSERVVTKITKLLKDSEDNSRRLLEESKRLAEDVRRRLEELRKDVSNADEVLKELKKLVEELEKLSREVVKYLREDAKRLKDLVRKVVEYLKEDARRLDEEVR

SEQ ID NO: 8775 - protein, 174 aa, Artificial Sequence; identical to SEQ ID NO: 8774
  Synthetic

SEQ ID NO: 8776 - protein, 186 aa, Artificial Sequence
  Synthetic
SVVEKLLEDARRVVEKVREAVERNLKKVRDLVKKLREDVKRSKDHLEEVVRKLEEAKKTTDEKVLRDLKREVEEVLKRNEDLTRKLKEEAERINKESKDHLERLREEIERIIEDLRRKLEEAKDRVSEEVERRVEEVIRDLERVLREVRERVRRINEESRRMLEDVERESRKALRDLEEVLDRVRR

SEQ ID NO: 8777 - protein, 186 aa, Artificial Sequence; identical to SEQ ID NO: 8776
  Synthetic

SEQ ID NO: 8778 - protein, 186 aa, Artificial Sequence
  Synthetic
SVVEELRKRVEDVVDEVREVVERNRDLMRRVAEESKKIVDDSLRHIKEVVDEVRRAKNTTDEKVLDDLRKKVEEMLRRNEETTKRVSEKSEKINKESEDHLRELRKKIKKIIEDLEDRLRKAKDTVDERVKKRVRDVLRKLREVLERVAEEVKKVNKRSREVNKRVEEKSEEVLRDLERVLREVET

SEQ ID NO: 8779 - protein, 186 aa, Artificial Sequence; identical to SEQ ID NO: 8778
  Synthetic

SEQ ID NO: 8780 - protein, 178 aa, Artificial Sequence
  Synthetic
SEVEEVVERLRRKAEEDLRRVEEAVKEHRRVVKEDLDRVRDAVERHREVVETIRKLKEDGGDEKELKKIEEDLERSSRKVKEESDRTLERLEETSRKVDKESKETLDRLREEVKDVARRGGDDEKLKRVLKEVEEVVRESKERLREVHEEVRKVIEDSKRILKTVHDDVRRVIEEVKK

SEQ ID NO: 8781 - protein, 178 aa, Artificial Sequence; identical to SEQ ID NO: 8780
  Synthetic

SEQ ID NO: 8782 - protein, 178 aa, Artificial Sequence
  Synthetic
DDVERVLKELDELLKRDETEVREVEKRHREVLETIERRVREVIERHKEMLRRLAELVRSGGSEETLKEILDRLRRTSEELKKELEKILRDLERTSREVEERSERTLREIEKRIEDLRRKGGDVEELKKVRDKVRRVIEESKRRLEELHEEIRRLITELKRRLEEVTEEIKRAIDELRR

SEQ ID NO: 8783 - protein, 178 aa, Artificial Sequence; identical to SEQ ID NO: 8782
  Synthetic

SEQ ID NO: 8784 - protein, 178 aa, Artificial Sequence
  Synthetic
DEVEDVVRRLRKIVEDIRRDVERVVEEHDRVVRKLKRRVEEAVEEHRKVLEEIKKVKENGGSERELEEIAKKMEESSRRVEEEIERIARELDRTSEEVKKRLEKLLRDVREEVKKVAKDGGDREDLKRVLKEVEDVVREVDKILTDATERVKRVITEVKDILRRVHEEVREVIKRVKE

SEQ ID NO: 8785 - protein, 178 aa, Artificial Sequence; identical to SEQ ID NO: 8784
  Synthetic

SEQ ID NO: 8786 - protein, 178 aa, Artificial Sequence
  Synthetic
DEVEEVVRELREILKRDLDEVRKAVEDHERLLREITKDVKRVADRHRDLLRKIRELKENGGDEKLLKKIEDELRRTSEEVKRRLDEILKRIRDTSEEVKERSKETLKRLEDRVREVAREGGDDEKLKRVLKELEDVIRESEEILERVTRKAERVIERVRKILEEATKEVERVIREVRR

SEQ ID NO: 8787 - protein, 178 aa, Artificial Sequence; identical to SEQ ID NO: 8786
  Synthetic

SEQ ID NO: 8788 - protein, 172 aa, Artificial Sequence
  Synthetic
EEDERIEKVTEEVKKVIEDVTRLTETVMRESEKVIEDVTRDSDRVRKEVKKVLEKVRKSEELDDVARKLEKLFRDLARTNKKVKDDSKRTIERLREKNEKVKRDVDRLRKKVKSEDVDEVVKRLKELVTRLAEENKRAVDTNRKLAEDLKELNRKAVEELKELLRRVDERDR

SEQ ID NO: 8789 - protein, 172 aa, Artificial Sequence; identical to SEQ ID NO: 8788
  Synthetic

SEQ ID NO: 8790 - protein, 172 aa, Artificial Sequence
  Synthetic
SEDEEIDRVDKDVKRVSDTSNKILDDVEKEVDKVIREVTAESKKVLDEAKKVLDKVREDERLKEVATRVKELFDRLREENKRVRRRLREIVKRVRELNRRSEEEIRRIKEEAKDRDVEEVVRRLEKLVDDDRKLVEKVVKELRELLKELRDKNKEVVDELRRLAKTVDEEDR

SEQ ID NO: 8791 - protein, 172 aa, Artificial Sequence; identical to SEQ ID NO: 8790
  Synthetic

SEQ ID NO: 8792 - protein, 177 aa, Artificial Sequence
  Synthetic
SAEEIAERVLRELRKVTKEVAEEDERVLREDEKVTDEVRKEDKRVLDEARKVIDDVRKKGIPEEVLRRAEEVLERLRRKSEEILKESKKSTETSRRESEKVLRDSEDSIRELEERAKKTKVDEEVVKRVRENVKRTRELSKRSVEKNEENVRRTREMSKRTVKEIRDVVKELRDRVK

SEQ ID NO: 8793 - protein, 177 aa, Artificial Sequence; identical to SEQ ID NO: 8792
  Synthetic

SEQ ID NO: 8794 - protein, 177 aa, Artificial Sequence
  Synthetic
SKREKAEEVLKEAKKVIDDVREKDRRALEEDKRVTDEVARIAEKVLKDLRDVIEEVRERGIDKRVLDTIKELLERLEKELRDVLKRSKESTEESKRKSEEILRRAEEVLKRLEEELERTRADEEVVRRVRKVVTELEELSRRSVEENRRNAEETERLIREIVERARRVVETLKETVR

SEQ ID NO: 8795 - protein, 177 aa, Artificial Sequence; identical to SEQ ID NO: 8794
  Synthetic

SEQ ID NO: 8796 - protein, 181 aa, Artificial Sequence
  Synthetic
SVEDILRKVAKEAEDVAREVTRILEEANRRVEEVVKRVKEENERANEKVERVVREVKARGLNREELEKILRKIHEENKKMKKRHEDILKRIHEENKRVLEELKRILEEVKELLKEVAKRVRDEEVVRRVVETVKDIVKRLRDIVREVLKKNERIVEELKKTSDESKKRNDDIVRELDERAR

SEQ ID NO: 8797 - protein, 181 aa, Artificial Sequence; identical to SEQ ID NO: 8796
  Synthetic

SEQ ID NO: 8798 - protein, 181 aa, Artificial Sequence
  Synthetic
SVEEILEEVLRRAEKIVKEVKDLDRRALEENKKAIKEVADELRKVDEEVKKVVDEVRREGFNDETLDDILRRIHESNKRVKEKSDESLKRSAEKSEDSRRRLEKITKEVRDTLREVRKRVRDEDVVRKVVRDVEDIVRRMREEVRRSVEDLKRNADENRDEVRKVVKENKDIVREMRERVR

SEQ ID NO: 8799 - protein, 181 aa, Artificial Sequence; identical to SEQ ID NO: 8798
  Synthetic

SEQ ID NO: 8800 - protein, 174 aa, Artificial Sequence
  Synthetic
REKEKLEKAVRDARRVIERVERKDREALKEVERVVRESHKTLEDVLREIRKVATEVRREGLDREKLKKLLDDVEDVIRKAHELSERILREVEDVSRRSKEALKRIEEEIEDLVRKLDDVDKLMKTIEDLLRRVEELVDRSVKELKRLLDENRKLVKRVLEEIRRILKELRDEVK

SEQ ID NO: 8801 - protein, 174 aa, Artificial Sequence; identical to SEQ ID NO: 8800
  Synthetic

SEQ ID NO: 8802 - protein, 174 aa, Artificial Sequence
  Synthetic
DEEEKLRKVKKEADDVIRRSHEEDERVLREVEKVVRESHEELKRVADEIRRVVEEVKTRGMDREELERLREEVRRLLEEVHEKSKEIEEEIKRRSEESHRRSKELKERVADLERKLSDVDKVMETIRRLVTKNRELVKRSVDELRDLVDKNRKLVERVVERIEEIAKKARDDVK

SEQ ID NO: 8803 - protein, 174 aa, Artificial Sequence; identical to SEQ ID NO: 8802
  Synthetic

SEQ ID NO: 8804 - protein, 182 aa, Artificial Sequence
  Synthetic
KVVEEIEKEVRRSVEELERLVTEDLRKVKEVVKRAEEVAEEDERKVDEVVKELKRAAKEGRDKRELEEEVRRVHEDSKRTLEELRRDIKRVNEDSRRSLEEIDKLSRDVKKRLDEMVRDLVRTEEMERRVREVLKRNEDVTDEVKKKIEESNRDLEDALRKVEKKIRESNERLRRVLEEVRK

SEQ ID NO: 8805 - protein, 182 aa, Artificial Sequence; identical to SEQ ID NO: 8804
  Synthetic

SEQ ID NO: 8806 - protein, 175 aa, Artificial Sequence
  Synthetic
KEVEDVLDDVRRVVEKLEREVKKVEDTNERVVETLDEIVKEIRDRNRKVVETLKEIMKSNKESKDELKRILDEVHEDNRRILEELKDLLRKVHTENRDIKRRLDKELDEVRRRIEKVGTSDKLRKAEKDLRDVAKEVRDKIRRADERLKRVIERVADEIRKVNTDLKRVADEVRK

SEQ ID NO: 8807 - protein, 175 aa, Artificial Sequence; identical to SEQ ID NO: 8806
  Synthetic

SEQ ID NO: 8808 - protein, 174 aa, Artificial Sequence
  Synthetic
SEVEDVEREIEEVVEELRKIAEDDLRRNDTVVKEVRELVKRDREKNRKSAEELKKLKEEGRDKTKLEEIFRRDEEENERSRRELKKLLDDVERENRKTLRDLERILRRVKKRLDEFRDSEELKRVMEKITRVVEKVKEDVDRSKKKAEEVIREVEERLKRSLDESRKVLEEVKK

SEQ ID NO: 8809 - protein, 174 aa, Artificial Sequence; identical to SEQ ID NO: 8808
  Synthetic

SEQ ID NO: 8810 - protein, 174 aa, Artificial Sequence
  Synthetic
REVEEVKKRVDEVVKRLRKLAEDDDRKNKESADRLRAIVDRDKKENTRSMETLRRLRERGEDRDELRKIVKDDREKNERSEKELKDILREDHKENKKSEDTLEELLRRAAEELKAVDRSERLEDAKKKLEDVIDEVRRRLEESNKRSRDVMEEVRKEVRRSLRESEEVVKDVEK

SEQ ID NO: 8811 - protein, 174 aa, Artificial Sequence; identical to SEQ ID NO: 8810
  Synthetic

SEQ ID NO: 8812 - protein, 174 aa, Artificial Sequence
  Synthetic
DEVREIKRLVDELVKRLKELAERSRRLVDEVAKRSKELAKENLDLNEDIVRRLDEVAKRGEDRKVLEELRDRIRKINEESKRRDDRLLEEIRRISEETKRRLKKLRDEIRELIERIRDTKELKDVAREIERVLKEVEEEDDDALRKIEEVSKRSKEIIDESMEKVKKVMEDVTR

SEQ ID NO: 8813 - protein, 174 aa, Artificial Sequence; identical to SEQ ID NO: 8812
  Synthetic

SEQ ID NO: 8814 - protein, 174 aa, Artificial Sequence
  Synthetic
SEVETVKKLIEDIVRESRRLVRENEELNKDVIRRSEELVRRSKEAVKRLVDKLDELRKRGSPEDDLERLLREIERISEETKRRDKKLLDEIEEINERSKREDDKLLTTVREIVKAVRRARELERAVEEIERVSRDSKREIKRSTEEVRKASERSRKEDEELERRARRVVEEVKR

SEQ ID NO: 8815 - protein, 174 aa, Artificial Sequence; identical to SEQ ID NO: 8814
  Synthetic

SEQ ID NO: 8816 - protein, 175 aa, Artificial Sequence
  Synthetic
SELEKVVEEVEEIVRRSERHVTEVVKTSKKSVEDSNRHVAKVVEDVKKKVTELIEAARENRVDKRELTREAERVEEELRKVLRTNEKLAEEDKRRLEKVARDNERLIDEVRRELDKVRKDKVLERVKRELKKAADRSRDIIRRVARETEEALRTSREIAKRVEDELRRVLEEVRK

SEQ ID NO: 8817 - protein, 175 aa, Artificial Sequence; identical to SEQ ID NO: 8816
  Synthetic

SEQ ID NO: 8818 - protein, 175 aa, Artificial Sequence
  Synthetic
KELEDVVKRVREEVRRSLEHVAKAVKESEDSVRELKEEVDRVVKESEDIVRELEKLKRENRVDEKELEKIAKENVDRNDTVREELERRVEEDERRLEKILRENEEEVERVERELRKVRDDKRLKEVDKELKRALEESRKIIKKVKEETKDVLRRVRDILRRSVRTSEKVLKEVKD

SEQ ID NO: 8819 - protein, 175 aa, Artificial Sequence; identical to SEQ ID NO: 8818
  Synthetic

SEQ ID NO: 8820 - protein, 178 aa, Artificial Sequence
  Synthetic
SKVERVVEESRENAKRDLDRVDKVVKDSRRSVEEDLKEVRDVVKEVDDMLREAEELMRRGEDEREIERILEEIERRLREVEKKSEKSFREDEERLKRVREESERNLREDRKRLEEVRKDNVDEKVIREVAKESEDAFRESERRLREVLKRSAEALKRSRDILKTVRERVKRVIDEVRR

SEQ ID NO: 8821 - protein, 178 aa, Artificial Sequence; identical to SEQ ID NO: 8820
  Synthetic

SEQ ID NO: 8822 - protein, 178 aa, Artificial Sequence
  Synthetic
REVEEVVKRSEKSVKEMEDKSRETVKKSRKSAKEDIDKVEEVVRRVEKVLREAKKLADDGEDRRTIEKILRDIEEELRRVEEESRRSLKKDREDNKKSLKELEELFDRDRRELEEVAKRNVDKDVIEEVRKKSDEVLKRVRKINKEVTEESERAFDESRRILETVAREVKRVIDEVRR

SEQ ID NO: 8823 - protein, 178 aa, Artificial Sequence; identical to SEQ ID NO: 8822
  Synthetic

SEQ ID NO: 8824 - protein, 179 aa, Artificial Sequence
  Synthetic
DAVEREVRKAEKIVEDDLRRVAKVVDESRKSVEKNEEDVRRVVEELRKILEEIDRLKRNGGDDESLERIARELEDLIRRVKERSDENVEENERLLRRVEEESKDSLKKLREALKRIRDNNVVDERVLRRVKKKLEDAVEDSRRILTELAEEVKTVVERSKRILDTVRDELKKALERVKK

SEQ ID NO: 8825 - protein, 179 aa, Artificial Sequence; identical to SEQ ID NO: 8824
  Synthetic

SEQ ID NO: 8826 - protein, 182 aa, Artificial Sequence
  Synthetic
DEVDEVVEKLRRLLEDTIRLVREAVDYLRRNLEDLRRKIREIVERLKRLLEELRKLVKDTRDEETLKKIIEDVRRTVEELLKELEEILRRSEENVKRVLKRLEEILKKSSDDLRKELKRVREAGLDEKRVRDAADEVRRMNEEVKKIIDDARKELERVHRDVKREIDRVARELDEEIRRVEK

SEQ ID NO: 8827 - protein, 182 aa, Artificial Sequence; identical to SEQ ID NO: 8826
  Synthetic

SEQ ID NO: 8828 - protein, 182 aa, Artificial Sequence
  Synthetic
DEVREMVKTLTDLLRRNRELVKRVVEELRKLLEETRKLVEDMVKELEDLLRELEKLARDTEDKDTLRELIERAKRKVEELRKRLEEILRRSHEELRRLEERVRKIDEESKKRLRELEEEAKRAGLDEKVVEEVARKVARANEDSNRILDEARKEVEKVNEEVRRIIKEVTDRLEKKVREVEK

SEQ ID NO: 8829 - protein, 182 aa, Artificial Sequence; identical to SEQ ID NO: 8828
  Synthetic

SEQ ID NO: 8830 - protein, 178 aa, Artificial Sequence
  Synthetic
SKAERLDEEVDKIVRDLRRLVDELEKRIEKIVRDNRELVKRVRESNKRIVETLRRLKENRGDKRVLDKIARDIHEENKRALERSEKSAEDVERELKKVKDELKEIVDRVKKTLDEARRAGVDKREVDKIEKKLRDVVREVEEIVTRVDKRLKDVLKESREILKEVNDETKKVLDEVKT

SEQ ID NO: 8831 - protein, 178 aa, Artificial Sequence; identical to SEQ ID NO: 8830
  Synthetic

SEQ ID NO: 8832 - protein, 178 aa, Artificial Sequence
  Synthetic
SEAEKVVRDVREIVERLRDIVRKVVEENEEIVKRLRKLVTDLVEENKRTVEALRDLKRRRGREEELEKIAEDDKRRNEEVRKDLERIAKEVHDRNREVLKTIKRILDEVKERLDDVRRRGVDEEILRRVEEEARRAAKEVEERIRTVNRRTEKVLEEVRKIVKDATDTSEKALREVRE

SEQ ID NO: 8833 - protein, 178 aa, Artificial Sequence; identical to SEQ ID NO: 8832
  Synthetic

SEQ ID NO: 8834 - protein, 176 aa, Artificial Sequence
  Synthetic
SRVEEVLRKVEEIVKRNEDLARKVVDESRKTVDKLRTLVEKVLRESRETVKRLIDLVRRNEVDKRRIEELAERDKERLKRVLEEIEREAREDERRLTDVVRRSEESIRRLKEDLDRANAREDLLTRVTDVLRKLRDRSREIIKRVVDETRRVLEEVKELIKRVLEETERVLREVRR

SEQ ID NO: 8835 - protein, 176 aa, Artificial Sequence; identical to SEQ ID NO: 8834
  Synthetic

SEQ ID NO: 8836 - protein, 178 aa, Artificial Sequence
  Synthetic
SEVDEVVDRSRKTVKKMIDDVREVLERSRKNVKEDIERVRKVVRESEETVKTARRLKEEGADDREIKRLIDEDRERLRKVLKESEDNLRENKRENDDMRRRIEKLKRDDERRLDRVEEEGVDEEVLRRVREVTERATREVEELLKRSDEESERALKTSTDVLREVLERSDKVEEEVKT

SEQ ID NO: 8837 - protein, 178 aa, Artificial Sequence; identical to SEQ ID NO: 8836
  Synthetic

SEQ ID NO: 8838 - protein, 182 aa, Artificial Sequence
  Synthetic
KEVEEAVRRVEESVRRLEEEVDRVVKENRKLVKDLIELAEEVVRRVKELVDRLRETVRRAKDKDTLDKLIREVADRARRLVERIDEILKEIKKRSEESLERIRDSLRKHHEELKRLIKEAEDRGLDKDVVTEVKKRAEDVDRRVERVIEEAEEVSREALKRVRDIIDTVRKVAETVLKEVKD

SEQ ID NO: 8839 - protein, 182 aa, Artificial Sequence; identical to SEQ ID NO: 8838
  Synthetic

SEQ ID NO: 8840 - protein, 177 aa, Artificial Sequence
  Synthetic
KEKEVMDEVERVLEKVKEDNRRVVREVEDVLRRVEKENKEIVDEVKDVARKVLEEVRRRGIPEEVLKELEDILRELDKKVRESNKRTRDIIERLRRDVERSNKELKDIVRELRKELRDTRVDERVLEKVKDVVRRSRDIVRRILEDAKDVVRKSREIAKKILEEVTEVVKRAREKVK

SEQ ID NO: 8841 - protein, 177 aa, Artificial Sequence; identical to SEQ ID NO: 8840
  Synthetic

SEQ ID NO: 8842 - protein, 175 aa, Artificial Sequence
  Synthetic
SKLEELLKRSEKSVREAKRLVEELKRRSEETVRRNKELAERLEDESRKTVELLKRIVDSNKEVRETIEDIVRRDREKLEEMRRRSEKSLDEDRRRLEEMRKRIEELLRRDEEDLRRVEPDKLLEEVEKESRKVVEDVRRVIEDVKRRSDEALKESEDIIRDVRRKSEKALRDVEK

SEQ ID NO: 8843 - protein, 175 aa, Artificial Sequence; identical to SEQ ID NO: 8842
  Synthetic

SEQ ID NO: 8844 - protein, 175 aa, Artificial Sequence
  Synthetic
SELEDLLRRSKESVDRLRELIRRLEDESRKTVETLRDIVKKLKEENKKTVDDLRDIVRRRKDDEETIEKIFKEDKERNEEATRRIETILTRDREKLEKVLREAEKLIRDDKRRLKEIEKDELLERVREVSDKVLEELKKIIDEIRKRSEKVAEEVKDVIRKVNELSKKVLKDVKK

SEQ ID NO: 8845 - protein, 175 aa, Artificial Sequence; identical to SEQ ID NO: 8844
  Synthetic

SEQ ID NO: 8846 - protein, 175 aa, Artificial Sequence
  Synthetic
RKLEELLKRSERSVEELRRKVTRLLEENDDTVRRLRELVTKLTDDSRKTVTRLRDIVRKDKDVTEEIKRIVEEDRRRLEKVKRDIDKLLREDRKRNRDVEEELRELLERDRDELRKVEPDKLLEEVTKVSEKVAEEVRRVIKTVNDKSTEVLREVKRVIETVRRESEDVLEKVEK

SEQ ID NO: 8847 - protein, 175 aa, Artificial Sequence; identical to SEQ ID NO: 8846
  Synthetic

SEQ ID NO: 8848 - protein, 175 aa, Artificial Sequence
  Synthetic
SKLEDLLRRVTEIVKRLEEIVRKLEERSRRTVKRLEELVDTLRKENEDTVRRLEKIVRDRKDDTDKIRDIAEKDRRRNKEVKDRVKKLLDDDRELLERVRREIEEIVERVREELDRVEPDELLKEVRDVLETVVKRVREIIEKVRKESEDALRKVDKDIREVNRRSEKALEDVKT

SEQ ID NO: 8849 - protein, 175 aa, Artificial Sequence; identical to SEQ ID NO: 8848
  Synthetic

SEQ ID NO: 8850 - protein, 175 aa, Artificial Sequence
  Synthetic
SEAEKIEREVDKVVEDHRRLVRADLERVERVVEEHRRLVKEDLDRVDEVVKRLRKLKEDGTPKEEIRRLIEEVERRSRESLKEIKRTTDEVRKESKKSADRLRETTERAKKRLDEANVREDVLRRVRELLKTVHEEVKKVIKTSDDILRTVHDEVRKVIKTSEKILREVAEEVER

SEQ ID NO: 8851 - protein, 175 aa, Artificial Sequence; identical to SEQ ID NO: 8850
  Synthetic

SEQ ID NO: 8852 - protein, 175 aa, Artificial Sequence
  Synthetic
KELEDATREVETVADEHRRVLEEDKRDVKEVVERHRRLLEDLRRKLEKVVRDLRKLLKDGVPKEELKKLVDDLKRTIDRLLREAEKTTREVDKKSERSVRELERTSKEMKERLDRLNLREDVLRRIEKKLKDVTDDLRRVIKESKDRLTKLHKEVEDALRRLRDRLRELEDEIRR

SEQ ID NO: 8853 - protein, 175 aa, Artificial Sequence; identical to SEQ ID NO: 8852
  Synthetic

SEQ ID NO: 8854 - protein, 182 aa, Artificial Sequence
  Synthetic
RELEEAVKEVEKKIRELRERLKEVVERSTKKMDDLRKENEKVMRESSELVTELVKEIKDRASDKDKARRVIEELEKVNRELKKEHDKTVKELEDVNRRIERKAREVERELEEVLRDIERLIREGVDLKDLRKKVDDVARKVDKILEDLERESDTVLDRVKKVLERSRRDSEDVARRVEEKVR

SEQ ID NO: 8855 - protein, 182 aa, Artificial Sequence; identical to SEQ ID NO: 8854
  Synthetic

SEQ ID NO: 8856 - protein, 183 aa, Artificial Sequence
  Synthetic
SELDELRKMVKEVLDRVRDLLKKLEDEARKVAEDNKRLLERNKREIEAALRRVEEIIRRRRTEDVRREVEKILEELIRESERSVRESKKHLDDVKRRVEEIVRRIKKELDDLLREAKRIVDEKEDKRVREVLREVEKRIKELEDLVRKVLDKIRELIERLKRETDKVLEESKKLIKELSERLE

SEQ ID NO: 8857 - protein, 183 aa, Artificial Sequence; identical to SEQ ID NO: 8856
  Synthetic

SEQ ID NO: 8858 - protein, 183 aa, Artificial Sequence
  Synthetic
DELEDVRKEIEDVRKENEDTVRESKDEIRRLEDTNRKTLKESRDDIEKARERVKKERRDSDKRVLERVAEELRRIVKRIREKDKEVIERSRKILDENRRRNEEVIKKTEKRLEEIRDRLSRVENEKDVRKVLKEVEEEARELVKLNRDVLEELRRRVRKLVEDNKDVTREVEDILKKLEEELK

SEQ ID NO: 8859 - protein, 183 aa, Artificial Sequence; identical to SEQ ID NO: 8858
  Synthetic

SEQ ID NO: 8860 - protein, 176 aa, Artificial Sequence
  Synthetic
SMDETIRKLAEDNRRRSDETVERIERLAKKLDEDNRRVVEKSERLAKEVADKVRRVKNTTDERELKEVMEELERILKRIAEDHEKVIRDSEDILRRIEKLVERSIRESRKSLKRIRELKVDERVIKEVEDISRDLERKNKEVVERARRIVEKVKETNKRVLEEVEKIVRKLKEELK

SEQ ID NO: 8861 - protein, 176 aa, Artificial Sequence; identical to SEQ ID NO: 8860
  Synthetic

SEQ ID NO: 8862 - protein, 184 aa, Artificial Sequence
  Synthetic
SVEEVVEEVRRVAEKVEEDVTRVIKEDEDIARELEKRIDDVIKESKTVADELLERLRRAGADRRLLEEVRRLMEEVTRRHEELRREVEERVKDSKRRHDESRKELEDLLREVEERARDVRRRGGIEEELERLLREVEELIERVKERHKRLVEDSKRLLDEVDKRLKDSNREVRERIEEIKRRVD

SEQ ID NO: 8863 - protein, 184 aa, Artificial Sequence; identical to SEQ ID NO: 8862
  Synthetic

SEQ ID NO: 8864 - protein, 175 aa, Artificial Sequence
  Synthetic
DELEKIREEVREIVERSKREAKELLDRNKEIVKDLERKAREILRENRDRVRRLAEKTNEDEKTVRELLERNKKVARDVEDKVRKLIEDNERVARESEKRIRESEKKNRDVLRELEKRVDSEVLDELRRIIETSEKLNRDVLRESKEVNRDLTRKLEEVLRRSKEDNKRLSEKIKE

SEQ ID NO: 8865 - protein, 175 aa, Artificial Sequence; identical to SEQ ID NO: 8864
  Synthetic

SEQ ID NO: 8866 - protein, 175 aa, Artificial Sequence
  Synthetic
DELEAIKDEVRRIVRESEERAKKILRDVERMLDEIRKKLKEILDRNREVVDELKRQINEDKETVERLLRDNKRVLDRVEDSARRLEEELKRVLDEVEERVKRSLDRNDEVLKELEKRVDSEVLKELRRIIEESKRRNKRVLDEIRKRAEDLRRVIKEVLDRSREINKRLSDEIRK

SEQ ID NO: 8867 - protein, 175 aa, Artificial Sequence; identical to SEQ ID NO: 8866
  Synthetic

SEQ ID NO: 8868 - protein, 175 aa, Artificial Sequence
  Synthetic
DELEKIVREVREIVKESKEEARRILEENKKIVEELRRRLRKILEENEDMVRKLEKKTNEDKDTVRRLLEENKRVAKEVEDKVRKLIKENEDVMREVEKKVEKSLRDNKRVLDDVRRRVDSRVLEELERIIRESEEANKKVLEDSRRVNKKLSEELKRVLDESRRRNEELSKRIKD

SEQ ID NO: 8869 - protein, 175 aa, Artificial Sequence; identical to SEQ ID NO: 8868
  Synthetic

SEQ ID NO: 8870 - protein, 185 aa, Artificial Sequence
  Synthetic
DELRDLEREIRRIVEESERHLKEVLERNHEASKRNRDDLKRMVDDIRRKVEEVRKLREEGTDKEKLKEELERALRKVEKIARDSERHLDKVLKESREAIERNERENRRLLEEVKRTIEELRRRTDAETVDRVLEKLKRIVEDSERRVKEVLKELEENSKRIKDETKDVLRKVEEIVERLRKEIER

SEQ ID NO: 8871 - protein, 185 aa, Artificial Sequence; identical to SEQ ID NO: 8870
  Synthetic

SEQ ID NO: 8872 - protein, 185 aa, Artificial Sequence
  Synthetic
DELEELKEEVKRAVDENRETNKRALDRNHEISKDSEDHLRESSERIRRRIEELARLVEAGEDKRRLEEDVKRLLEESKKLIKENKDRNREVVRRSEKIAEDSKRHLDAVLEKVERTIRKLREETDRETVKKVLKELREEIERVKRESEKVVKAVRDNSKRSEEKVEEVLERNKRIVDDVLRKIKK

SEQ ID NO: 8873 - protein, 185 aa, Artificial Sequence; identical to SEQ ID NO: 8872
  Synthetic

SEQ ID NO: 8874 - protein, 185 aa, Artificial Sequence
  Synthetic
DELKEAEDRVREVVRENEERLRKALEENHKISRDSEKHLRDLERTIKEIVKRVRDLRRRGTDKEELKKELERVLDKVRKDITDNLRTNEEVLKRSERIAEESERHLDKVLKDLEDIARKLKDKTDKDTVEKVLRDLRRIIKEVKERSREVLKRVRENSDRSLKKVEEVLKRLEDIIRTVKEEIKK

SEQ ID NO: 8875 - protein, 185 aa, Artificial Sequence; identical to SEQ ID NO: 8874
  Synthetic

SEQ ID NO: 8876 - protein, 179 aa, Artificial Sequence
  Synthetic
EDAERALKKIEEIVRRLTEELKRVLDANRESVDRLRRELEEVLKRNRELVRKLEKILEERKDDQDTARKVIEDSERHIKELEERVERVIRENKKTVDDALKRVKDVVERLKEEVKRLEDRGVDREVVERLKKIIADLDRVVEEVIRTSRKVIKELEDTVRRVIEELKRVSDELKKKVED

SEQ ID NO: 8877 - protein, 179 aa, Artificial Sequence; identical to SEQ ID NO: 8876
  Synthetic

SEQ ID NO: 8878 - protein, 178 aa, Artificial Sequence
  Synthetic
DKLEELLKRVEELVERLKEESERVLRRNHELSEKLRRILEEILKRNHDLSRDLEDRLRKLKDKKEVDDLVREVLKRSKETVETLRRIVEEIKKRSEDSSEENRRRVKEALDELDRLVKRIEGDEVVKRVEDIIEKVREDLERSDEKLNDNVRRLEREVREVLKAVEDNARRLAEKTKT

SEQ ID NO: 8879 - protein, 178 aa, Artificial Sequence; identical to SEQ ID NO: 8878
  Synthetic

SEQ ID NO: 8880 - protein, 178 aa, Artificial Sequence
  Synthetic
SEAEKLLEEVKDLVRRLKKDLERVLRDNHRLSEELRRRLREILEENKKLIDTLREIREKLSDRDKLEKIVEEIVRRSEETVRRIKRVVEEVEKRSKESVEDLRRRVKTVLDRLKELVDRADGKEVAEKMRKIVEELRKEVEEVLKALKENLDRLRREVEKVVERIEDTLRELKKRATD

SEQ ID NO: 8881 - protein, 178 aa, Artificial Sequence; identical to SEQ ID NO: 8880
  Synthetic

SEQ ID NO: 8882 - protein, 182 aa, Artificial Sequence
  Synthetic
SEAEKVLEEVKRLVEDIERKLREMLRRDNEISRKVRDDLRKILEENNELSRRVEEEIRRIKDKDTLKKVVDEVRRELERTLERVRKLVEEVKRTSRKTLEDIKRIVETIKREMDRLLKEIEDRGLREEVVEALEKVVRDVARRLEDVIRRVAENAKRLEDDLRKVEEELKENADRLEERAKK

SEQ ID NO: 8883 - protein, 182 aa, Artificial Sequence; identical to SEQ ID NO: 8882
  Synthetic

SEQ ID NO: 8884 - protein, 175 aa, Artificial Sequence
  Synthetic
SEVEKLLEKLRELVERVEREARRILEENKELIKESLKRIRDLLEDNKRLIREVKEILRRGDKDERLLKDVRRRVKESKEELKKLLETNHRLARETVKKLEDVVRKLEELIRDIERKIDDKDVVKRIRDIAEKVRRDLKRVIDAVRDTSRESDRRLRDVIREVDESSRELVREIER

SEQ ID NO: 8885 - protein, 175 aa, Artificial Sequence; identical to SEQ ID NO: 8884
  Synthetic

SEQ ID NO: 8886 - protein, 175 aa, Artificial Sequence
  Synthetic
SDMERLLRELEELVKELRERLRRLLEENKDLIRRSLDRARKLVRRIEELVRKVKEDLDRGDNDERLLRKLEEDARRVLDELRRLLEENHELMKETIRKLEELLKEVTERAKDIRRKVEDEDVLRKIEETARRLVKEIEDVIREVERTSRESDKKLEDVIDKLRKIVRKVLEELRT

SEQ ID NO: 8887 - protein, 175 aa, Artificial Sequence; identical to SEQ ID NO: 8886
  Synthetic

SEQ ID NO: 8888 - protein, 175 aa, Artificial Sequence
  Synthetic
SEVEDLVRELERLVREAKKALDDLRRKLEELVRDSLRKAEELLKENHDLSREVKKLLEDGANDERLLREATERVKRSLERLKRLLEENHKLVRTVIKEIRELLDRVRKKARDIEEKIKDKKVADELRRIAKRLVEELERVIRELEKIAKESDERLKEVIDRLRENVERLVRELRR

SEQ ID NO: 8889 - protein, 175 aa, Artificial Sequence; identical to SEQ ID NO: 8888
  Synthetic

SEQ ID NO: 8890 - protein, 188 aa, Artificial Sequence
  Synthetic
KELEDLDRDVRRVVEELREELRRLEEEDKRSVEENEERLERLERRLRKKVKELEEKRKRIREKEKKEELKEEIKKVLREAEKIIEDSKRHIDENLKKSEEEIKRLKRKVEELEKKVEDIARELAEKRDREEVRRVLEELREKIKRVLEEIEEVLRRSREINKRLRDRTRTVAKRLKEIVDDVLRKVET

SEQ ID NO: 8891 - protein, 188 aa, Artificial Sequence; identical to SEQ ID NO: 8890
  Synthetic

SEQ ID NO: 8892 - protein, 188 aa, Artificial Sequence
  Synthetic
RELEELLKEVEKAVRENTKLLKDLLDKDKKSVKENEETLRDLERKLREVVERLKRELKDIRDDRMKKKLADKIETVRRDIKRIIDESEDHIRKNLEESKKIADDSRKHLDRVLEKAEDLIRKLKDKRDEKRVRDVLKRLREIIDTVKKVTKEVMERSEEINRRLLKRTKDVLRELEKIVKTVLDEVRK

SEQ ID NO: 8893 - protein, 188 aa, Artificial Sequence; identical to SEQ ID NO: 8892
  Synthetic

SEQ ID NO: 8894 - protein, 177 aa, Artificial Sequence
  Synthetic
SEVDKVREDVKRLIEDAERVSDDVDRRVKRLAEALKETSDKVKEDVERLVRDIKREIDKEEVKRRVDDALREIKEILERSKRHIDEVLKRVKDRLRESKRHLEEVLRRVKEILDRTTDEETLRRVLRKVEDVIRRNKEDNEKVLKDAKRVVEEDKRENEKALERIERIVRKLKEDTR

SEQ ID NO: 8895 - protein, 177 aa, Artificial Sequence; identical to SEQ ID NO: 8894
  Synthetic

SEQ ID NO: 8896 - protein, 177 aa, Artificial Sequence
  Synthetic
SEAEEVVRRVEKLAEDIKRVIDKSLEDVERLVRDAKRRSREVLREVEKLVEDITRRIRDEEVKRRVEKVLREIRRIIRESEKHLDKVLDDIEKILRKSKKHIDDVLREVKEIIDRVRDEEILRRALEKVERVITENKKENEDALRDAKRKIDKDKEDNKKVLDDVRRIIEELKEETR

SEQ ID NO: 8897 - protein, 177 aa, Artificial Sequence; identical to SEQ ID NO: 8896
  Synthetic

SEQ ID NO: 8898 - protein, 183 aa, Artificial Sequence
  Synthetic
DEVDRVAEEVKKLIDDVKRVSDEMLKRSEDLIREVKKTSDDVLETVERLIRDVERKVEERVDKEKARRLRKKLRELLEEVRKAIERSRKNLEDLLRKSKRSVERSREDLERIRREVEEVRKMKDDEVLKRLLDKIREDAKRNKDDNKRNLDESKKEVDRNKDENRRVLEKVKETVKRLKDEVK

SEQ ID NO: 8899 - protein, 183 aa, Artificial Sequence; identical to SEQ ID NO: 8898
  Synthetic

SEQ ID NO: 8900 - protein, 183 aa, Artificial Sequence
  Synthetic
KEVEEMLKEVKKLIEKVKRRSDDVLRRSEELARDLKKMSDDVLREVKKLIDDVKRTVDERVDKEKARRLREDLKRVLDEVREVVRESREDIERILRESKRSVEESRKNLEKLKTDVERASSVKDREFLKEVLDRVRERVEENERRNDENLKKSKKRIDENKEKNERVLRKIREIARRLKEELR

SEQ ID NO: 8901 - protein, 183 aa, Artificial Sequence; identical to SEQ ID NO: 8900
  Synthetic

SEQ ID NO: 8902 - protein, 183 aa, Artificial Sequence
  Synthetic
SEVDRVLKTVEELIRRVKRISDRVLTEVKKLVDDVRRVVEKSRRDVEELVKEVKRSVDERVDSTDAERLRRKLEKLVREVEEVAKRSEDDLERILRRVEEVIKRSRDNLEKLLRKVEEVSKIKDKEMLERALKEIKEEVKRNEDDNRRMLREIEELAKRNKEENKRVLDEVRDIVRRLAEEVK

SEQ ID NO: 8903 - protein, 183 aa, Artificial Sequence; identical to SEQ ID NO: 8902
  Synthetic

SEQ ID NO: 8904 - protein, 183 aa, Artificial Sequence
  Synthetic
EEVERVREEVDKLLKTLKEVSDRVLKASKDLLDRVKEIVEKSLRDVKRLIDDVKRKVDERVDKEEARRLREELEKVLREVEKVVEESKKDLERILEKSKRSVERSRKNIEELREEIERASRVERKEVLERLLKKAEEIIRKNKKENDDNLEESRKEIEKNEEDNRELVKRIEDEVRRLKKEVE

SEQ ID NO: 8905 - protein, 183 aa, Artificial Sequence; identical to SEQ ID NO: 8904
  Synthetic

SEQ ID NO: 8906 - protein, 183 aa, Artificial Sequence
  Synthetic
SEVEEVLRRVRELIERVKRIVDESEKEVRRLIEEVKKIVEESLKRVEELLRDVKRRVDERVDSTDAERLRRKLEKLLREVEEVVERSKRDLERLVRKVEEVVKRSRKNLEDVRREVERMSRVEDRKMLREVLEKIKKIVKDNEDDNRRALTEVRERVRENVEENKKVVDRVRKIAEDLRKEVE

SEQ ID NO: 8907 - protein, 183 aa, Artificial Sequence; identical to SEQ ID NO: 8906
  Synthetic

SEQ ID NO: 8908 - protein, 183 aa, Artificial Sequence
  Synthetic
SEVERVLEEVKKLIEDVKRVVKESEEEVEKLIRDVEREVERSKRTVDELVKDVKRAVDRDVDKEKAERLRRKLEELKREVEKVAERSKENLKRLLTRVREVVRESREDLERLLKKVEEMSRVKDREVLTKVLREVEEAVRRNKERNKRALEEVKKTVDRNREDNKRMVDKVRETAKRLKDEVR

SEQ ID NO: 8909 - protein, 183 aa, Artificial Sequence; identical to SEQ ID NO: 8908
  Synthetic

SEQ ID NO: 8910 - protein, 176 aa, Artificial Sequence
  Synthetic
SSIEKVREDVKELIRDVERAVKRVKEESKKLVDDLRRAVKRVEEESRKLLKDLERNKRREEVDKILKDNEKSLKELKDEVERILKENEDLLEKLEREVKRILDELKKRLDDADKIEGDDDVRRVLREIERIVKEVKDDLKRVLEESERSIRRVKEELRRVLEDNRRLLKEVKDRAR

SEQ ID NO: 8911 - protein, 176 aa, Artificial Sequence; identical to SEQ ID NO: 8910
  Synthetic

SEQ ID NO: 8912 - protein, 178 aa, Artificial Sequence
  Synthetic
SEVEAVLREVEERVDRVRKESEKTLREVERLVREAKRRSKKSLDDVKKKVEEVKKKIRDIKDEETLRRLIKRIEEELKEIVERNKKTVEEILRRLEEIIARDRRRIDKIVKDLRRIVEEVKDAEEVKREIEKLVEDVRRVSDRVVEEIKELVKDVERMSRKVVEDIKRLAEDVRREAE

SEQ ID NO: 8913 - protein, 178 aa, Artificial Sequence; identical to SEQ ID NO: 8912
  Synthetic

SEQ ID NO: 8914 - protein, 178 aa, Artificial Sequence
  Synthetic
DEVERVLEEVKERVDRVKRESEKSLKEVEKLVRTNERLSERTLKEVRDLVEDAKKKIDDIKDKETLKRLVDEIVKRLEDILRENREIVERVLKKLEEIVEKNERDITEIVERLRRIVEEVKDAEEVRREIEKLVEDVKRVSDKVVEDIRRLAEKLRRDNKRAEDEIRKLVRDVERRAK

SEQ ID NO: 8915 - protein, 178 aa, Artificial Sequence; identical to SEQ ID NO: 8914
  Synthetic

SEQ ID NO: 8916 - protein, 178 aa, Artificial Sequence
  Synthetic
DDLERVLEEVRKLVKELKERSRKSLEDVRRSNERNETESRRTLREVRELVKKVKEVIDRTKDKETLKKRVEEIVRELDKIAKRNKELVERVLEVNKKLVRDNTEEVRRILKELEDIVRSVKDAEKVKEDIRRLVEEVERVSREVVERIKKLADESRKKNKKVIDEIKELVKRVRDRAK

SEQ ID NO: 8917 - protein, 178 aa, Artificial Sequence; identical to SEQ ID NO: 8916
  Synthetic

SEQ ID NO: 8918 - protein, 178 aa, Artificial Sequence
  Synthetic
REMEEVLKEVEKRVRDIEDESRKTLERVDKLVKKNKRDSERTLKEVEDLVREVKKEIRRIKDKKTLKERIDKILEDLKRIADRNRRLMKKVLDELRKIIEEDRERIKEILKRLEDIVREVKDAEEVKREIKKLADRVREVSERVVREIEKLVRDIKRRNEEVIDEIRKLVEDVKREAK

SEQ ID NO: 8919 - protein, 178 aa, Artificial Sequence; identical to SEQ ID NO: 8918
  Synthetic

SEQ ID NO: 8920 - protein, 178 aa, Artificial Sequence
  Synthetic
KEVEDVLEEVKELVKELKRVSEETLRRVEKSNRENEEKSKTTLKEVEDRVERVKEEIKKTKDKETLKRLADDIVERLKAIVEKNKRILEEVERTNRELVEEDKRMVEEILRRLKKIVEEVKDAEEVKREIKKLVEEVRRVSEEVVREIKKLVDKSRRVNEKVIEDIKELAKEVEEAAR

SEQ ID NO: 8921 - protein, 178 aa, Artificial Sequence; identical to SEQ ID NO: 8920
  Synthetic

SEQ ID NO: 8922 - protein, 186 aa, Artificial Sequence
  Synthetic
SELEEILERVRKMAEDAERISEETLRRSEELIRRVKDLSRESLERVERLIRKVKKEIEEIKDDDTLRRLLEEVEKEIRKILKEDEEALEDVARKVKKINRDNERLLEELRKIAETLLKDILTKKGEESEEVLRVIKAIEDLLRRVERVSREASKTSEELLKDITRVSEKSKEDIKRLLDDVRRKVK

SEQ ID NO: 8923 - protein, 186 aa, Artificial Sequence; identical to SEQ ID NO: 8922
  Synthetic

SEQ ID NO: 8924 - protein, 186 aa, Artificial Sequence
  Synthetic
SELDEVLKTVEELVRRIKEKLKEILDRSRKLVEEARKLSEDSLREVKRVIDEIKREAERQKDDETLRKILEDVERIIRELLKRDDEVVRRVVEELRKLNDDIRRLVTEIKDRIRKIEEDIKTKKGESSEEVLKLVEDVRRLVEDVDRTVERMSRESKKLAEDIKRVSEKSKRDIERLLADVERTVR

SEQ ID NO: 8925 - protein, 186 aa, Artificial Sequence; identical to SEQ ID NO: 8924
  Synthetic

SEQ ID NO: 8926 - protein, 186 aa, Artificial Sequence
  Synthetic
DELDEVLKEVEELIKRVKRESERTLKENRDMVREIKRRSEESLREVRELIERVKDELRRTKDDDTLRRILERVRRRIKELLDRDKKLLKDARETSRKTIEDNERLLREVRRRIEEILKDIKRKKGESSERVARVVRRVEELLEDVERRSREVLKEMDKTAKEVKKASEKSEEDIKRLLEDVERTVR

SEQ ID NO: 8927 - protein, 186 aa, Artificial Sequence; identical to SEQ ID NO: 8926
  Synthetic

SEQ ID NO: 8928 - protein, 186 aa, Artificial Sequence
  Synthetic
KEAEDILKEVEDIIREAKKLSERTLDENRKVIRKAKEDSRRSLEEVRKIIEDVKEELDRIKDKETLDRILERVRKEIKELLDRDRDLLRKVEEISKKTIDEDREVLKKVTEEIDRLLKDLLRKKGESSERVLRVIREIEKLLEDVKRVSERSVKEMKKTLDDVRRASKRSEEEIERLLRDVERRVT

SEQ ID NO: 8929 - protein, 186 aa, Artificial Sequence; identical to SEQ ID NO: 8928
  Synthetic

SEQ ID NO: 8930 - protein, 186 aa, Artificial Sequence
  Synthetic
RSLEEVLKEVEELIRRAKEESKRTLDDVRKLIEEVKRESERSLRDVREMIERAKDRIRRIKDEETLRRILEEIKRIVEKLLEEDRKLLEDVTEEIKRILEENRKVLKEIKDRIARILERIKEEKGKDSEEVRKVVEDVERLLRDVERMSKEVEKRIRELLDDIRRVSERSRREIERLLEDVERTAR

SEQ ID NO: 8931 - protein, 186 aa, Artificial Sequence; identical to SEQ ID NO: 8930
  Synthetic

SEQ ID NO: 8932 - protein, 186 aa, Artificial Sequence
  Synthetic
DELEEILKRIEDRIREIKERSKKTLDDIRKVAERVEERSRESLKEVREVVEEIKDRIRRIKDDETLKRLAERARERIKELLDRDRKILEEVRKTVEKLLREDKRLLEEIAREVTELLKDILRKKGEESREVLKVIRDIEELLREVAEVSERSRREIEKLLEDVERVSREAIKRIKDLLRDVERTVK

SEQ ID NO: 8933 - protein, 186 aa, Artificial Sequence; identical to SEQ ID NO: 8932
  Synthetic

SEQ ID NO: 8934 - protein, 177 aa, Artificial Sequence
  Synthetic
KEIEELLDEIRRLMERSKENVRRSLKKSKDLIEEAKRRLEKSLEDSRELIRRIEDRIRRIKERDALKRVLDEIKKRVEEDIKRNEEILEEIRKLVEEDIKYNKDNLKRSEDLVRELEERVKSKEVLEEIRRLLEDLRRMNEKSIEDSKRLLEDVARAVKRSIDESRKLLEKIERDVD

SEQ ID NO: 8935 - protein, 177 aa, Artificial Sequence; identical to SEQ ID NO: 8934
  Synthetic

SEQ ID NO: 8936 - protein, 177 aa, Artificial Sequence
  Synthetic
KEMEDLLREAEELIRRSVENVKRSLEESEKLIRESKKNVERSLRRSEELAKEIKDEIRRIKERDEIKRVLDEAEELVRRDIDYNRRNLEETEKRVREDIKYNKDNLDESRDRVRKLEERVKSERVLREIRRLLRELEEINEKSIRDSKRLLEEIERVNRDSIRRSKELLEDVERTVR

SEQ ID NO: 8937 - protein, 177 aa, Artificial Sequence; identical to SEQ ID NO: 8936
  Synthetic

SEQ ID NO: 8938 - protein, 177 aa, Artificial Sequence
  Synthetic
SEVEDLLRRAEELIRRAKERLERSLRRVEKLIDDVRRKLERNNETVKRLVEEIKEKIKRIKERDMLKKVLEEAKKLAKESEEHLRKLLDDIRKKIEKDIEDNKKILEEIRRLVEDIRRKLDKEEMLKEIERLLEDIERVVRETIDTTRRLLEKIEREVREVIKSNRELVADLERTVT

SEQ ID NO: 8939 - protein, 177 aa, Artificial Sequence; identical to SEQ ID NO: 8938
  Synthetic

SEQ ID NO: 8940 - protein, 177 aa, Artificial Sequence
  Synthetic
DEVERLLEEVKRLIDRAREELKKSLDRVRRLVRENEEAVRKNNEDVADLIRKIKEKIEKIKEDEMIKKVLEEIKRRVEESLKHNKDLLREIRERAKKDIDDNKALLDEITELIKRVEDRVKMKKVLDDIRRLLKDIKDIVDKTIRDTKELLRDIEEKNRRATKSNKDLLEEIRETVR

SEQ ID NO: 8941 - protein, 177 aa, Artificial Sequence; identical to SEQ ID NO: 8940
  Synthetic

SEQ ID NO: 8942 - protein, 181 aa, Artificial Sequence
  Synthetic
DEVEKLLRRVEKEVDRIKRELEDNLRRVEKLVKEIHEENEKLMRKARKLVEDIKRIIDRGDKDSRVLDEVRKLIRTVEEEIKESVERAERLIRESEEHLKRVLEEAKETIRRLEEKVRRDVKSEEVKKAEKEIRRLLDELRRVVEEVTKKTKELLRRLKKSSDELRKTIKELLRELEEKVR

SEQ ID NO: 8943 - protein, 181 aa, Artificial Sequence; identical to SEQ ID NO: 8942
  Synthetic

SEQ ID NO: 8944 - protein, 181 aa, Artificial Sequence
  Synthetic
KEVDEILRELEELVKEIKKRLEELTREVKRLVDKIHKDNEDNLRDMARLVEEIKEIIRRGNKSSDVLKDIEKKAEESKKHLDESMKEARDLIRELEEKVKEILKEAERLIRRVKDLIRKTVKSKEVERVERDVERLLDELRRVVKEVLDRIRRLLEELERSSKRVKEETERLVKEVREAAK

SEQ ID NO: 8945 - protein, 181 aa, Artificial Sequence; identical to SEQ ID NO: 8944
  Synthetic

SEQ ID NO: 8946 - protein, 181 aa, Artificial Sequence
  Synthetic
SEVDKILEDLRELVERIHKKNKRIVEEDRELVKEIHRKNEENLKTMERLVEEIEKIIRRGDKSSKVLEDARRLAEESKKHLDRSMEEATKLVRESEERLDETVREAKKLIDEVREVIKRDVKSEEVKRVRKDVDRLLKELEDSSREVKERSRRTLEELERSSREVKERTERLLRKLEKAVE

SEQ ID NO: 8947 - protein, 181 aa, Artificial Sequence; identical to SEQ ID NO: 8946
  Synthetic

SEQ ID NO: 8948 - protein, 181 aa, Artificial Sequence
  Synthetic
DRLEEILKELRELVETIHRRNEEIVRKVAELVKRIHDHNEENTRRVEELVRRIKDIIRRGNKSSEVLKRAEELIKRSEEDLRRSVRDAERLIRELKEEVKKTVEDAKRLAKRVKEMLDRTVDSEDVERAKRDVDRLLKELEESSERVLRTIEKLLKELRESSKRVRDETKRLLDELREAVR

SEQ ID NO: 8949 - protein, 181 aa, Artificial Sequence; identical to SEQ ID NO: 8948
  Synthetic

SEQ ID NO: 8950 - protein, 181 aa, Artificial Sequence
  Synthetic
SELDEILKRLEKLVEDIKRKLEKLVRDLERLVKRIHDHNEENLKTVKKLVDEIKDIIRRGNKSSKVLEDARRLIEESKRDLDRSVEEVKEEAERVRREVERILREAEKLIRDVKKELDETVKSREVDRVREDVRRLLEDLKRVAERVKRDIERLLKELKESSDEVKKRTEELLEELERAVR

SEQ ID NO: 8951 - protein, 181 aa, Artificial Sequence; identical to SEQ ID NO: 8950
  Synthetic

SEQ ID NO: 8952 - protein, 181 aa, Artificial Sequence
  Synthetic
DEVDDILRRLRELVERIKKHLEDNLRELEELVKRIHDHNKRNVEEVKKLVEEIKKIIADGRKSDKVLRDARRLIKESKDDLDRSERKIERLVTESLKDLDDLLREAEKLIEDVKRELDKRVKSEEVRRVKEEVERLLEEVRRVVRKVKEESKRLLEELRRSSDRVKKETERLLEELERAVK

SEQ ID NO: 8953 - protein, 181 aa, Artificial Sequence; identical to SEQ ID NO: 8952
  Synthetic

SEQ ID NO: 8954 - protein, 174 aa, Artificial Sequence
  Synthetic
SEAEALVEEVKRIVEESKRRLEKVVEESRKLVEEVKKRLRDMLKTIEDLVKEVKELLDNGADEETVDRMIKRLKRLLEELRREVEEAIKTNEELLRRLKRESERTIKELEDLLRELKDNEEVKRKVERLLEEDRRVLEEVKESAKRTSKEVRDELREVSKRVEKLLKDVRDAAR

SEQ ID NO: 8955 - protein, 174 aa, Artificial Sequence; identical to SEQ ID NO: 8954
  Synthetic

SEQ ID NO: 8956 - protein, 174 aa, Artificial Sequence
  Synthetic
DEAEDLVRRVRDIVRKSREELKRVVEESDRLVEEVKRRLKKVVEDSKRLVDEVRKLREGGADERVVKRVIDENRRLLKELKETVKRVIETDRKLLEDLRDTSRRTIEELKELLDRLKDNEEVKREVERLLEDDERVLREVAKRSRETLETVRKVLEEVERRSRKTLEEVEKTAR

SEQ ID NO: 8957 - protein, 174 aa, Artificial Sequence; identical to SEQ ID NO: 8956
  Synthetic

SEQ ID NO: 8958 - protein, 174 aa, Artificial Sequence
  Synthetic
SEMDELVDRARRIVEESRRLLEEVVKRSKDLVKDVKKKLEDALRRVEEIVRRLDEELKGGADEERVKKIIRDLKELLKKLREEVAKVIRDNERLLRELDERSRKTLKELEDLLRSLKDNEEVKDEVRKLIEEDKKVLDDVRRKSERTLREVEDVLRRVEEEVEKLLRKVEESAK

SEQ ID NO: 8959 - protein, 174 aa, Artificial Sequence; identical to SEQ ID NO: 8958
  Synthetic

SEQ ID NO: 8960 - protein, 174 aa, Artificial Sequence
  Synthetic
DEAEKLVEDVRRIVEKIRKELEDVVEESRELVERIRRELERVVEESERLVEELRKELEKGGDEEIVKEIERLNKRLLDELKKRVEEAIREDKKLLEDLEERVRRVIERLKELLDRLKDNEEVKEEVKKLLEEVRDVLRKVKKASEETLRDVRRVLEEVKRRSEETLKRVREEAT

SEQ ID NO: 8961 - protein, 174 aa, Artificial Sequence; identical to SEQ ID NO: 8960
  Synthetic

SEQ ID NO: 8962 - protein, 182 aa, Artificial Sequence
  Synthetic
SEVEDIVRDVKRLVEENHRRNEEIVRRDEDLVRRNNELNKRILEEVEELVRRLEDVARKIRDKEELKRRVDEIERRLEDLLRKVEEANRKSLEDSKRLVRTVTELNRESVETLKKLVDDLRKDRSDVEEALRTAEELIKRLEDSLREVKDRSKRSLDEMKKSADDVRREIERLIKRVRDTTK

SEQ ID NO: 8963 - protein, 182 aa, Artificial Sequence; identical to SEQ ID NO: 8962
  Synthetic

SEQ ID NO: 8964 - protein, 177 aa, Artificial Sequence
  Synthetic
SEVEKIVREVEEVVERIRKKSEDSLREVRRLVEEIKRRSEKTVEDDEKLVKDAKDELRRIKDKETLARLVEEILDRSRKSLEKNKRLLDEIRRRLETILKRNEDLLRRAEEELKRLREELDKEDAKRRIEELMKEVRDVSRRALKEIKDLLREVEEVSKKALKRSKDTVDEVREEVR

SEQ ID NO: 8965 - protein, 177 aa, Artificial Sequence; identical to SEQ ID NO: 8964
  Synthetic

SEQ ID NO: 8966 - protein, 177 aa, Artificial Sequence
  Synthetic
DEVEEIVKEVARVVDEIRRLSKESLDRVRKLVEDIERELRKIVKTDRDLVEEAKRVLKDIKDKDTLREVLERIKRLSEESLREADRLVTEIVEDLKRILDENRRLLEEILKRAKDLLDRVEKREVEKEIRRLVEEVKEVSRKVRKEIEELMRRVEEVVKTVKEESKKTVREVEETAR

SEQ ID NO: 8967 - protein, 177 aa, Artificial Sequence; identical to SEQ ID NO: 8966
  Synthetic

SEQ ID NO: 8968 - protein, 177 aa, Artificial Sequence
  Synthetic
DEADEIVKRVEEVVRRAKETLERILKRVEEMLDRIRKESEKTVREDEKLVEEVKDRLRKIKDKDTLRKLLDEVKKRSEESLERNKRLLEEIKRIAEKLLREVRELLERIRRTLDKLLKEVDSERLLREIKRLLKEVEDEVRRVEKAIKELVDRVKEVSDRALERSKRTVREVEERVR

SEQ ID NO: 8969 - protein, 177 aa, Artificial Sequence; identical to SEQ ID NO: 8968
  Synthetic

SEQ ID NO: 8970 - protein, 181 aa, Artificial Sequence
  Synthetic
SEVEEVKEDSKRTLKELKDVAKKVDDDSKRLLEELERVARKSIEDSKRLLDELRERGVPEDILRRAEKLVEEDIRRNEEIVRRIADRIREMNEDNRRLLDEVAKEVEKSIREVDEAAKRGVDEKELRRLVEDDRRLVEEVKRDSERLLDEIRKLVEEIKERLRRSVEELRRRVEEIKKTTT

SEQ ID NO: 8971 - protein, 181 aa, Artificial Sequence; identical to SEQ ID NO: 8970
  Synthetic

SEQ ID NO: 8972 - protein, 181 aa, Artificial Sequence
  Synthetic
SSVEKVKRDSERTLREVEKVIEKVDRDSERLLRDVERVITEADERSKDLLRRLEESGVPKDIVDRARRLIEELNRRNKALAEEIRELVERVNERNKRLLETIEKLVRDSIRRVDELAKRNVDDTDLRRLVEEDRKLVTRVKEESKRLLEELRRLVETVRKRSEDLLREIKKRVDEILRRTK

SEQ ID NO: 8973 - protein, 181 aa, Artificial Sequence; identical to SEQ ID NO: 8972
  Synthetic

SEQ ID NO: 8974 - protein, 174 aa, Artificial Sequence
  Synthetic
DEIKEVIDRITKVLEDNERVVRKLSEENKKVLDDIRRRAEEIIRRNEEVLRRIKELAKRNTDRRKALEELRKISEESKKDLDRLLKEVEEISRRSEKENRRLNKESEDVARELKKRIDNEELKKALDDILRRLEESNRKNIEDSRRILEDVERIVRRVVEVSKDIVRKAEEDVR

SEQ ID NO: 8975 - protein, 174 aa, Artificial Sequence; identical to SEQ ID NO: 8974
  Synthetic

SEQ ID NO: 8976 - protein, 174 aa, Artificial Sequence
  Synthetic
SEVEEVIDELRKVLEENKRRVEELSRENDDVLRRIEERLKKIEDELEKILKDVRDLKDNNVDSKTLLERVAERVKEAATRLRELLRELEEISEKSIRENDRLNKESEDMARDLRRRVDNERLKEEITRILEELTRINEENKRRSEEILDRVRKDVERVLKRVEDILKEIEDELR

SEQ ID NO: 8977 - protein, 174 aa, Artificial Sequence; identical to SEQ ID NO: 8976
  Synthetic

SEQ ID NO: 8978 - protein, 185 aa, Artificial Sequence
  Synthetic
SSVEELEERLRRVLERSERHLRKLEKKVEEVLDESRKNLTRLLRDVERVLRDVEETVRREKSKSVADEIRKEVKRLLDKVKKILKENRDKTKRMLEEVKEVLDRNEEETKRLEERVDKALRDEIKDERKARELKRTVKRLAEESRKILREVEEKVRKVAEDSERILEEVERTVKRVVEEIDRTVR

SEQ ID NO: 8979 - protein, 185 aa, Artificial Sequence; identical to SEQ ID NO: 8978
  Synthetic

SEQ ID NO: 8980 - protein, 185 aa, Artificial Sequence
  Synthetic
SKVEKLLRELEEVLKDSERHVREDSDRLRRVLEDSERHVRKVLRDVEKVLREVEDMVRKRKDRDVIDKIRDKVERLREKVERALERNKRKLDKALEDSNRSDKKNEDKLRELKRRVDEVLRDDIKDEEKARRLEERVEEIVRESERTSRENNKKSRDIIKTSEDILREAADRVREVVERIRRTLT

SEQ ID NO: 8981 - protein, 185 aa, Artificial Sequence; identical to SEQ ID NO: 8980
  Synthetic

SEQ ID NO: 8982 - protein, 184 aa, Artificial Sequence
  Synthetic
KEVEEVIERSKKSNEENERRLRKILEEARRINEENEKLLRKILEEAKRVVEEVRRILKDNKEKKERIKELLERLEELLRKVKEDVERSVRELAKLLKKVAEEVRKSLEDNKRTADRVVERIGEEKKEELDKLREESKKILRHSERLLKEVEEEVKRILEHSEELLRRVEDKVRRLLKEIEDALR

SEQ ID NO: 8983 - protein, 184 aa, Artificial Sequence; identical to SEQ ID NO: 8982
  Synthetic

SEQ ID NO: 8984 - protein, 184 aa, Artificial Sequence
  Synthetic
DEVEEVEKKVDKIDKENEDLLRKVIRDAERINEENTRLLEDILRKAKKMVDDVREILKDRKDAKEDIDRLLKELKKLLEEVAEEVKKSLEKLKELLEKVKREVDESLKRLEDELRDVVRKIGKDLEEEVRRVAERVKEVVKHSRELLKRVEDMVRRIVEHSKRLLDEVRERVKDLLRKIAEARK

SEQ ID NO: 8985 - protein, 184 aa, Artificial Sequence; identical to SEQ ID NO: 8984
  Synthetic

SEQ ID NO: 8986 - protein, 181 aa, Artificial Sequence
  Synthetic
DEVREVVRRLEEIVRDVNKKNRESVREAERLVDRLREILEETSRRLKELVDRVKELIKGGTDSRDVRRVDRELEKIITDSDDTVRKIREELKRKVEDDLRRTAEIIKKLKDTVARVSERISNEKEARELEDAVRKLIERLKRSAEEVKKRVEELDEEIRRVVEEDRRTIKELKEEIDRADK

SEQ ID NO: 8987 - protein, 181 aa, Artificial Sequence; identical to SEQ ID NO: 8986
  Synthetic

SEQ ID NO: 8988 - protein, 181 aa, Artificial Sequence
  Synthetic
DEVEEAVKRIEDLVERLRELLEKTSREIEKILKESEDKLRESSDRIRRLLDELKKLIENGADDELVRKMLKDIKDILEESERTSKETLDRIREILKKSEDLVREVLERIERLLEDVARRITDEEKLRKAEDTVRRVIKDVRKMLEDDRRTVEEVIRRDREALEKDRKTVDDVIEDVKRVAK

SEQ ID NO: 8989 - protein, 181 aa, Artificial Sequence; identical to SEQ ID NO: 8988
  Synthetic

SEQ ID NO: 8990 - protein, 181 aa, Artificial Sequence
  Synthetic
SEVDEAVEEIKRILEESKKRLDETSEEIKRILEDSERRLRESSKRIRELVKELKKRIDGGTDDREVEKVEKEIEDILRESEEISKDTEDKIREILKRSREISETTIREIRRLLEDIERRITDKDKLTRIREVVDKVVKEDEDALREDERTVREVIKRDRDLLEEDRRTVEDVIRKVRETAR

SEQ ID NO: 8991 - protein, 181 aa, Artificial Sequence; identical to SEQ ID NO: 8990
  Synthetic

SEQ ID NO: 8992 - protein, 181 aa, Artificial Sequence
  Synthetic
SDAEKVVKRIKEIVEDSTRKVRDTSRDIRRILDESRKMLEDVVREIKDLVRRLEELIRGGVSEETVEKVLREIEELLKELKKTSERTLKEIEDILRRSEEESRRTIREIEELLRRLEERITDKDTLDKVREDAERVLEEDKKVADDDRKTVEDVIREDKRLLKRVEEEVKRVIKEVDDAAK

SEQ ID NO: 8993 - protein, 181 aa, Artificial Sequence; identical to SEQ ID NO: 8992
  Synthetic

SEQ ID NO: 8994 - protein, 181 aa, Artificial Sequence
  Synthetic
SEVDRAVETIRRILEESEKIIRKVVREIEEILDRSRRLLEKSSEEIEDLVRRLKELIEGGTDETSVEEVLRRIEEILKESERTSTETLKTIEDLLRELERISRKTLEEIRRLLEDVKRRITDERLLREAEKDVRRVVEEDEKVLRDVARRVEEVIKADKKLLREDEKTVREVIERVKETAR

SEQ ID NO: 8995 - protein, 181 aa, Artificial Sequence; identical to SEQ ID NO: 8994
  Synthetic

SEQ ID NO: 8996 - protein, 181 aa, Artificial Sequence
  Synthetic
DEFREAVRRIKEIIDDSRRKLEKNVKENEELLKRSDDELRKSSEDIKKLLEELRRLIEGGADERIVKRILEEIEDILRKSEKRSRETLEESKESLRRSEKTSRETEKRIKELLEELAKRIKDEKSLREVEERVERLLEDDRRLLEENARRVEDLIRKDKEALDRDRKTVEDVKREVEKDAR

SEQ ID NO: 8997 - protein, 181 aa, Artificial Sequence; identical to SEQ ID NO: 8996
  Synthetic

SEQ ID NO: 8998 - protein, 181 aa, Artificial Sequence
  Synthetic
SEVDEVVKRIAEIVKTSKDELREAVKRIEDIVRRSEKMVRDNLRENERLVRELDKLAKGGADERVVEEIKRRSEDSLRKSEELSKKTLDEIRKLLDDVRKRSKETLDRIRELLERIKKKIKDKEKLDRVTETVRRLIEEDKRALEDVERKVEDVIRRDREVLERNRREVERLIKEIEDKRR

SEQ ID NO: 8999 - protein, 181 aa, Artificial Sequence; identical to SEQ ID NO: 8998
  Synthetic

SEQ ID NO: 9000 - protein, 181 aa, Artificial Sequence
  Synthetic
KDAERAVEEIRKILEDSKEKMERNVRENEKLVRDSRRKLEENVERNEKLVRDLKRLKEGGADDEIVRRIKEESKKSLKESEKTSKKTLEESERSLRESEKVSKKTIDEIRRLLKEIRERITDKDTLKRVTDEVRRVVEEDKRVLEENRRRVEKLIEEDKRALDENRERVRKLIEDIDKDAT

SEQ ID NO: 9001 - protein, 181 aa, Artificial Sequence; identical to SEQ ID NO: 9000
  Synthetic

SEQ ID NO: 9002 - protein, 181 aa, Artificial Sequence
  Synthetic
DEVEDAVEKLKRLVDELERLLREAVRRIEKILEDSTRKVRKNLEENKELVKRLRELIKNGVPEDSVRKVLRESKESLRRSEETSKETLERIKRLLDEVRELVERVKRELDRLLRELEKRIKDKDLLRKVAEVVRRLEEEIRRLLEEAKRVVDEVIKKDRTVMERNREEVERLIREIEETAR

SEQ ID NO: 9003 - protein, 181 aa, Artificial Sequence; identical to SEQ ID NO: 9002
  Synthetic

SEQ ID NO: 9004 - protein, 181 aa, Artificial Sequence
  Synthetic
SEVDEVVERIRRIIKKSKEELDKAVRDIEEILRRLEKELRDNVRENEKLVEDVRRAIEGGMDRKDVKRVLKESEDSLRESEKRVEEVLRDIKRRLKEVRETSRRTIEEIERLLREIARRITDKDKLERVSREAKRVLKEDEEALRDVEKKVTDVIEAVKKMLEDNRDRVRRLIEEIKRRAT

SEQ ID NO: 9005 - protein, 181 aa, Artificial Sequence; identical to SEQ ID NO: 9004
  Synthetic

SEQ ID NO: 9006 - protein, 184 aa, Artificial Sequence
  Synthetic
DEIREAVKRIRRLLEESHRENKEIVDRLRKLVEESHRKNEKLKRELEELVKKLKEIIDKDKDKDTLTKIVEDIKRRLDEILKRADEENERINRKLREILEEVRRRNEEVNKEIKDLLDDIRRRVDSEDLKRAEEEIRKVSEDNKRSVDRVREVVKRLSDENRRSLEEVREVVKRLIREVEEARR

SEQ ID NO: 9007 - protein, 184 aa, Artificial Sequence; identical to SEQ ID NO: 9006
  Synthetic

SEQ ID NO: 9008 - protein, 184 aa, Artificial Sequence
  Synthetic
DEIRKVVKEITDLLKKSNDKNRKVVEEIRDLLRKSKKLADELVERLRKLVEDLRRRIDKLSDKRTAEDIVRRIIEELKRILKEIEDLARRINREIERLVEEVERDNRDVNRKIEELLKDIARRVDSEDLKRVEERAREVSRRNEESMRRVKEDADRVSEKNKEVLDRVREEVKRLIEEVRETLR

SEQ ID NO: 9009 - protein, 184 aa, Artificial Sequence; identical to SEQ ID NO: 9008
  Synthetic

SEQ ID NO: 9010 - protein, 184 aa, Artificial Sequence
  Synthetic
DRIRDVAREIRELLKRSNDENRKVVEEVRRLLKESNDTNKRVVDEVRELLERLKEIARRLKDKDTLKKEVDKIIRELERVMEDVKRKNDEINERLKKLLEDVKRKNDDVNRKIDELLKTIEREVDSEDLKRIRREVEKVSEDNKRSAKEVEDEARKVSEDNERSVRDVKEKADRVIKEVEDEDR

SEQ ID NO: 9011 - protein, 184 aa, Artificial Sequence; identical to SEQ ID NO: 9010
  Synthetic

SEQ ID NO: 9012 - protein, 178 aa, Artificial Sequence
  Synthetic
DEERKIKRVLDEVDKHSKRVIAEAKRVVDEVLREVEKVVRRNKEVLDEILREVKRILDEGKITEEVLKEAEKRLRDNKRRLEELLRDAERRLRDIKRELERLLEESRKVVEDVERKVRKDGAREELIKTIRKVNKEIEDRVRDLIKTVRDILRRIEEEVRKSIEDSKRLLRELEARAE

SEQ ID NO: 9013 - protein, 178 aa, Artificial Sequence; identical to SEQ ID NO: 9012
  Synthetic

SEQ ID NO: 9014 - protein, 176 aa, Artificial Sequence
  Synthetic
SVVEDLKRTVEEVVKKSEEILKEDRKTVEKVVEEVKKSDKEDRDDVDRVVKEVRKRIRDKRLEDELKKALDTNRKLVRESTEKLKKLLEDNERANKRNKEELDRLLDEVREVLRMDKKDLADKVKKDAEEVLKRSKEHVDRSIDRTREILKRLRETNEESIKRTRDILRKIAEEAR

SEQ ID NO: 9015 - protein, 176 aa, Artificial Sequence; identical to SEQ ID NO: 9014
  Synthetic

SEQ ID NO: 9016 - protein, 176 aa, Artificial Sequence
  Synthetic
SVSEELKKKVEKVARDVERSLERDATEVTKVVEEVKKSDRKDEETVKRVVKRVDELIRDERLKEELERALRDNERLVRESTKNLEDVKRKNEKILREIRKKLRELLEEVAKALRSDKREVAEKVIRDAEKVLDDIRRMNEESIRDTRRVLEENKRKNEESIRKTEEILRRIEEESR

SEQ ID NO: 9017 - protein, 176 aa, Artificial Sequence; identical to SEQ ID NO: 9016
  Synthetic

SEQ ID NO: 9018 - protein, 184 aa, Artificial Sequence
  Synthetic
SEVDEVLKELERINRENHREVEELLRRLERILRESKKHIKEVIEDLRRRLKELEDEVRRRKDEDVRRRLRELVERIEREVERVIRRNDKLVKEAEERVKEAVKRLERSAEELRKKVTRVVERLSDEKKVRELEEEARRVKRSTEEVIKRLRDSVEKLVKDSERVLRELKKEVERVVEEIDKMIK

SEQ ID NO: 9019 - protein, 184 aa, Artificial Sequence; identical to SEQ ID NO: 9018
  Synthetic

SEQ ID NO: 9020 - protein, 183 aa, Artificial Sequence
  Synthetic
DEVEKALEESKKSNEENHRKVKKVLESAKDINRRNHDLVRDVIRKLEEILRRIEKVVREGRDKREIKRIEEEIKKTVKKVVEDLRKSLDDLRKEVTKVLEDLKESLKRNEDRMRDVVEKIGRDFDKEVTELRESSRRSIESTREAVRTLEEAVREVIKSTDEAVKRLEATVKRIEEEIRKSMK

SEQ ID NO: 9021 - protein, 183 aa, Artificial Sequence; identical to SEQ ID NO: 9020
  Synthetic

SEQ ID NO: 9022 - protein, 183 aa, Artificial Sequence
  Synthetic
DDVERVLKKSRDSNRENHEKVKRVIEKSDRSNEDNHRLVEDAIRKAEEILEEVERLVTAGEDKRKAEEIVKELRDLVREVKRRLDESLKRNEEEIRKVVEELERSLDKNRKEIREVLERIGRDFKEEVDELRKSSEDSIRSTEDVVRKLEETSKRSIRSTEDVARKLEEAVRRIERRIRERTR

SEQ ID NO: 9023 - protein, 183 aa, Artificial Sequence; identical to SEQ ID NO: 9022
  Synthetic

SEQ ID NO: 9024 - protein, 183 aa, Artificial Sequence
  Synthetic
SEVEEVLKRSKESVERVDRDVRRVLRELEDLNRKNHKRVEEVIRDAERILREVEDMVRRGVEKEKLEKIVRDLRRTVEKVLKELRDSLREIKRKVDEVLERLERIIRENEELIRRALERIGRDLDKEVDELRKSSEKSVEDIKRVVDRLRDSARKIIKSTEDVVKELERRVREVIKRIKEEAT

SEQ ID NO: 9025 - protein, 183 aa, Artificial Sequence; identical to SEQ ID NO: 9024
  Synthetic

SEQ ID NO: 9026 - protein, 187 aa, Artificial Sequence
  Synthetic
SEIEEIIKRIEKLLRDDEKKIRDSIKRSEDLLREANRENKESIDRVRELLEKVKRLRERIDSEEVRERVERVLREIERLLEEDRKRNEDISRKNEKLLRETEDESRKSIETIKRLLEKVRTDSGDKKAEEEVRRLEKRVRDVLRELEKTLKRVTEVHKETTKENEKSARRVKREVEKVIEEVERTRT

SEQ ID NO: 9027 - protein, 187 aa, Artificial Sequence; identical to SEQ ID NO: 9026
  Synthetic

SEQ ID NO: 9028 - protein, 187 aa, Artificial Sequence
  Synthetic
SEIEEIIRRIEELEERLKRELDRSIRTSEKLLEDAREINKESIRRVEKLLEEIRRVVDKIDSEEVTRLVEKVLRDIERLVTEDEERNKRMTKRNEDLLKRIEEEVKRIIREIEETLRKVKEDSGDKKAEERVRALEKAVKDVLESLKRLLDEVRKRHKESSEDNERSLKRSKEEAEKVIKAVEDERR

SEQ ID NO: 9029 - protein, 187 aa, Artificial Sequence; identical to SEQ ID NO: 9028
  Synthetic

SEQ ID NO: 9030 - protein, 187 aa, Artificial Sequence
  Synthetic
SEIEDIIRRIRKLLEEDKEKIERSIRESRRLLEEAKRINEKSIEDVKRLLREIEDVVDKIDSREVEDLVRKIEEEVKRLVDEDRKRNEDMTRKNEELLKDVTEKSKKSIRDIEKLLEEAARRSGDEKMREKVERLREDVDRVRKELEKTLETVTRSHKRSSEENKRSLEESERTARKVIEDIRRRDR

SEQ ID NO: 9031 - protein, 187 aa, Artificial Sequence; identical to SEQ ID NO: 9030
  Synthetic

SEQ ID NO: 9032 - protein, 187 aa, Artificial Sequence
  Synthetic
KDIEEVLKRIKDLLEDIRRRLKESEERSRKLLEEAREINERSIERVRRLLEEIRRLKEEIDSKDVRELIEKVLKEIEDLLRDDKRKNEDMTRKNEELLKKLKKEIEDVLREIKELLDRARKRSGREEMERKVRELERAVREVIKEVEKLLTDVARKHKKVSRDNKESLRRSEEEARRVIRAVEETDR

SEQ ID NO: 9033 - protein, 187 aa, Artificial Sequence; identical to SEQ ID NO: 9032
  Synthetic

SEQ ID NO: 9034 - protein, 176 aa, Artificial Sequence
  Synthetic
STLETVEKKVEEVIRENEKSMRESEEKVDRSTKRIEDVLRRLEETIRKTSDDIAKDVKGERVKEVLEENRRLLEEAKKLVDEVLETNKKLLEDDKRLNEEVSKTLKKLLEEIKRVDTREDATRVIEEAKRILDEARKLNEETIRRSEELVRRIERVIEEIIKRSEKLLEDVRRESK

SEQ ID NO: 9035 - protein, 176 aa, Artificial Sequence; identical to SEQ ID NO: 9034
  Synthetic

SEQ ID NO: 9036 - protein, 176 aa, Artificial Sequence
  Synthetic
SVLDDVRKKVEEVLDRNRELADRSRRTVEEVLRENERVMEESKRTVDEVIKRVAEKLKGEKVEEVIRRLEKLAEEDRRRNKEVTEELKRLLEELRRKNEEVTERLKRLEEEIKRVDVREDAERMIERLKRILDRVEEENRRAIEELREVLERVRDDNRRTIEELERILKRVEEESR

SEQ ID NO: 9037 - protein, 176 aa, Artificial Sequence; identical to SEQ ID NO: 9036
  Synthetic

SEQ ID NO: 9038 - protein, 176 aa, Artificial Sequence
  Synthetic
STVETVREEVERVLKHSDDLIKEVEDVNRRVEEEIKRVIRELEEENERLVREVRKKVKGEILKEIEKRLRDNSEKVREVAERAKKLLEENTRRVKDILRESRKLVKDLLDEVERVTREEEAREIIKRLREVNKRTKEKLDELIKHSEEVLERVKRLIDELRKHSEEVLEDLRRRAK

SEQ ID NO: 9039 - protein, 176 aa, Artificial Sequence; identical to SEQ ID NO: 9038
  Synthetic

SEQ ID NO: 9040 - protein, 176 aa, Artificial Sequence
  Synthetic
DEVERVAKEVEDVLREVEKLIRDVRRKVEEVLKHSEEVAKRVRDTNRELVKEVERDIKSEELKEARKALEDNSRKVKEILDESEKLVRELLRRVEELLKKVRKEIEDLLRKVKDVKDEKELRDIIRRLKEVLDKLKKDLEDIIRRLEEVNRESERLAREAIRHSEEVLDKLRKDSK

SEQ ID NO: 9041 - protein, 176 aa, Artificial Sequence; identical to SEQ ID NO: 9040
  Synthetic

SEQ ID NO: 9042 - protein, 175 aa, Artificial Sequence
  Synthetic
REVEEVKKRIREALEESERVIRENKKKNEELLDRVRKEIERNKKKNEEVLKRAKEVTKAGRPKSRVLEEIRRIVEESRRHLDKVLEDVERILRDSKRHVDEVNRKSETIARELKKKVKDVEDVKRKIDRMVEESRKLVEDLKRESDRVEEEVRKLVKTIKDEITRSLDEVRKDAE

SEQ ID NO: 9043 - protein, 175 aa, Artificial Sequence; identical to SEQ ID NO: 9042
  Synthetic

SEQ ID NO: 9044 - protein, 175 aa, Artificial Sequence
  Synthetic
SEVDEVRKDIERILRKSERDIRRNKEENKRLLDEVRRRIEENRKENEDLLKRIEELRRAGRPESEVDEEVRKIIEKSKEHVDRVLEEIEEELRRSKEHLKRVNEESEEIAKELKKRVKDVEEVKKEIDKAVEDSKRLVEDAERVSDEVRERVRRLVERLKEESDRVEREVEKRTT

SEQ ID NO: 9045 - protein, 175 aa, Artificial Sequence; identical to SEQ ID NO: 9044
  Synthetic

SEQ ID NO: 9046 - protein, 185 aa, Artificial Sequence
  Synthetic
SEVEEVLRRAEKLSEDNKRENDESLERLRRIVEKVREENEESVKTLEKILKEVEEVVRRNKEVQEELRKIVEELRDLIDKDLRRTDDIIRELRKRIEEDLKRSKDIVKEIRDTIREVVERLKKDDKKEVIKRLEDEVRRLEEDNKRSIKKSEDEIRKLVERLKRSAERSDEVIRKLEKDAEDLIR

SEQ ID NO: 9047 - protein, 185 aa, Artificial Sequence; identical to SEQ ID NO: 9046
  Synthetic

SEQ ID NO: 9048 - protein, 181 aa, Artificial Sequence
  Synthetic
DEVERILEDSKRLVDELRERVERVIEESKRLLDDLRRKVEEVVRRLEKIVEDLKRMIEGGVDREVVRKVERDLKELVREVERRIEKVSKENTELLDRVEKEIRKVVRTNSELAKEALRRIGDEDKVRELKETADRSNEEIKRVLEKIKRMIEDTNRKIKKLLEEIRDVARRVLEEVREVAR

SEQ ID NO: 9049 - protein, 181 aa, Artificial Sequence; identical to SEQ ID NO: 9048
  Synthetic

SEQ ID NO: 9050 - protein, 181 aa, Artificial Sequence
  Synthetic
KEVEDVLRESKRLVEDLERRSERSIEESKRLLKELEDLVEEVIRRSEESIDRLRELIKGGTSEEAIKEVKKTNERLIKEVERLIREVSKRNTDLVEENRKLVEKVVRDNSRLLEELARRIGDEKKVRDAEREARDSNDKIRRSLEKVERVVRETNRRIKELLEKIERVIRDTDRKIAEEAK

SEQ ID NO: 9051 - protein, 181 aa, Artificial Sequence; identical to SEQ ID NO: 9050
  Synthetic

SEQ ID NO: 9052 - protein, 181 aa, Artificial Sequence
  Synthetic
SEVEKIVRDSEKLLEDLKRELEKVIKDSDDLVRELKKRVTEVLERLRRIVEELRKLIEGGASEEVLERVLRRLEELIRRVEEEIRRVVEENSKLVEELKRRIEEVSRRNTELVKDAARKIGDEEKVRRLEKEARRTNEEIRKLLEKVDEVARRSNERIKAVLEEIKREIEKLKREVEKDAK

SEQ ID NO: 9053 - protein, 181 aa, Artificial Sequence; identical to SEQ ID NO: 9052
  Synthetic

SEQ ID NO: 9054 - protein, 181 aa, Artificial Sequence
  Synthetic
SEIEEVLKKSKKLVDDLRKEVEETIRESKKTVDDLDKEIKEVVRRSEESLDRLKKLIDGGSSEETIKKVVRDNERLVKEVLKSIEEVLKRNKKLNDDSNERAKRVSDTNTRLVEEVVRRIGDERKVDEIRRAVEETNEEIKRVVDEDNKAVKRSLEEIERVAEEIKRVAEETLKAIEDARR

SEQ ID NO: 9055 - protein, 181 aa, Artificial Sequence; identical to SEQ ID NO: 9054
  Synthetic

SEQ ID NO: 9056 - protein, 182 aa, Artificial Sequence
  Synthetic
DEVEELVRRLEELVKRSRDTNRKIIKEIRELSERLKRELEKIARELEKLVEDLKEEVKRLKDKDTLRKMIRDVEEKIRRLLEKVERLVRESLRRHEKLLDDVRRTNKEISDRLKTLLDEIRRRNVDVEKIEDVVRRLLEENERVLRRTEEEARRVLETNRDLLRKIREVVDRLEKEIREAEK

SEQ ID NO: 9057 - protein, 182 aa, Artificial Sequence; identical to SEQ ID NO: 9056
  Synthetic

SEQ ID NO: 9058 - protein, 182 aa, Artificial Sequence
  Synthetic
SDADRVAEELKKLVEDSRRENERVIEESKRLVKENEDRNRELIERLKKLVDKLRDILEKEKDKKTLDDIVREILERLKRLLEKVEDENRKSHEENKRLLEDVKRKNKRISDELKRLLEEIERRNVDVDKVRETVKRLLEENKRVMEKTEEVAKKSSEDIKRVADETRRRAEELLKEVDELRK

SEQ ID NO: 9059 - protein, 182 aa, Artificial Sequence; identical to SEQ ID NO: 9058
  Synthetic

SEQ ID NO: 9060 - protein, 182 aa, Artificial Sequence
  Synthetic
SEADEMLRRLKELVDRSRDTNRKILKRSEDLVRDSKKKNDDIIRELRRLLEELRELARRLKDKDTLRKIVEEVKERIRRLLEEVERTNREVTERNRELLREVEERNRRISKELKDLLREAEERNVKTDDVRREVERLLRDNKRVLDETRKAAEESTRRNKKVLEESREVVKDVLKKIEDTDR

SEQ ID NO: 9061 - protein, 182 aa, Artificial Sequence; identical to SEQ ID NO: 9060
  Synthetic

SEQ ID NO: 9062 - protein, 182 aa, Artificial Sequence
  Synthetic
DEVREVAERLRRLVDESRKRNEEVIKESEALVDRVRKTNEEVMKRLRELIDKLEKDIRRLKDKKTVEKIIREVLKKIDELLKRVERTNREISKENKRLLDEVRKTNEEISRRLKKLLEDIRRRNVDVETIERVVRELLEENKEVLRKTEEMVKRSTETNKRLLERSKEVADRLRERIKEAAK

SEQ ID NO: 9063 - protein, 182 aa, Artificial Sequence; identical to SEQ ID NO: 9062
  Synthetic

SEQ ID NO: 9064 - protein, 182 aa, Artificial Sequence
  Synthetic
DEVDELLKRLRKLVDEVRKENDKMVKESKRLVEDLKRKIDEIIERIERLLEELEKILKDTEDKDTLRKIVEEIKRRLRRLLEELKRIIEKALRDNKKLLDEVRKRNKEISDELRRLLEEIRRRNVRVEDIEREAERLLRENEELLRRSEEVIRRSTEKIKKVLRDAEERAREILKRVEDAAK

SEQ ID NO: 9065 - protein, 182 aa, Artificial Sequence; identical to SEQ ID NO: 9064
  Synthetic

SEQ ID NO: 9066 - protein, 184 aa, Artificial Sequence
  Synthetic
DEVEEVKKKLREIVKRDRDLIERVREELKEILDRNREINRRAIEDLKRILEEVDELVKRGTDKKDLEKILRDIERLVEEVRRRSRELVERAKRLIEKVVTDSKKTVERIRRDVEKVLDDLRRKNKEELIRDVERVVREVLRRIEKSIRDLDRVIRDVLDKSRELIKRSEDVAKRVVDTLREKAR

SEQ ID NO: 9067 - protein, 184 aa, Artificial Sequence; identical to SEQ ID NO: 9066
  Synthetic

SEQ ID NO: 9068 - protein, 186 aa, Artificial Sequence
  Synthetic
DEVETVKKELKELADEVKERNERSIRDSERLLEEVKRRNEKSIRDLERLVEELEDVLRKRGSEDEDVKRKVEEVDRRIDKLAEDDKRINEKVLKENSDLVKRDEDINRKILEDVRRLVEKVRREIGDEKKVKEVTDEVKKVLDEIRELDKRSRDAVRRTNEEIKRLDKESKDVVDRVKKKVEDAVR

SEQ ID NO: 9069 - protein, 186 aa, Artificial Sequence; identical to SEQ ID NO: 9068
  Synthetic

SEQ ID NO: 9070 - protein, 186 aa, Artificial Sequence
  Synthetic
REVEEIIERLKKLLKEIAERNTESIKELEELVRRIAEDNKRIIEELRRLLEELADVVRKKGSESREVEEKVREVLRRLEKLLEDVRRINEDALRKIEELVKRDADENRTVLKRLEELVRDVARRIGDEKKVREVRKVAEEVLRAIEELDKRSRDAVRRVTKRVKDLDEETKRVVEDVLRRIEELMK

SEQ ID NO: 9071 - protein, 186 aa, Artificial Sequence; identical to SEQ ID NO: 9070
  Synthetic

SEQ ID NO: 9072 - protein, 186 aa, Artificial Sequence
  Synthetic
SRVEEIIEDLRRLLEEIRKENEDSIRRSKELLDRVKEINDTIIKELERLLKDIEKEVREKGSESEEVKKALRRVLEELEKLLRRVAEINEEVLRRNSKLVEEDERRNREVLKELKRLVEELMREIGDEDKVRKVREVAEKVLRDIDKLDRESKEAFRRTNEEIRKLDEDTRRVAERVKKAIEDLAK

SEQ ID NO: 9073 - protein, 186 aa, Artificial Sequence; identical to SEQ ID NO: 9072
  Synthetic

SEQ ID NO: 9074 - protein, 186 aa, Artificial Sequence
  Synthetic
SEVEEIIRRLEELVREVAKRNEDIIKRSRDLIRKVKEDNRRSEEELRDLSRRIADIVRKKGSESEEVKRELDKALRRLEELIKRDAEINEKVLRENSTLARRVEEINERILRELKKLVDDIARKIGDERKVREVRRVAKKVLEDVKTLDDKTREVARRTNEDIKRLDEKSRKVIEEVRREIEELKR

SEQ ID NO: 9075 - protein, 186 aa, Artificial Sequence; identical to SEQ ID NO: 9074
  Synthetic

SEQ ID NO: 9076 - protein, 186 aa, Artificial Sequence
  Synthetic
SEVDEIIKELERLLREIARENERIIRESRKLADEVRKRNEDAIRKLEELVRRLADMVRRKGSESEEVKKLIEDVLREIERLLKRIEEENREVVKRNSELVERVRRINEEILRRVKELVEKIARDIGDKDKVTKVKKVADDVLREIKKLDDETRRVIEDTNKKIKDLDKKTRDVVRKVLEEVKKLEK

SEQ ID NO: 9077 - protein, 186 aa, Artificial Sequence; identical to SEQ ID NO: 9076
  Synthetic

SEQ ID NO: 9078 - protein, 186 aa, Artificial Sequence
  Synthetic
SDVEDVIRKLETLVDDLRRKVERIKERSRELIKRIAEENRKVIEELERLLEELADVVRRKGSESEEVDRTAEEVRKKVKELLDRVARSNEEILKENSKLLDDIRREIEEVERRIKELAKDIARKIGDEKKVRDVRRVAEKVLREVRRLMEEVERVARKTNRDIERLDEETRRVVEKVRKEIEDLRR

SEQ ID NO: 9079 - protein, 186 aa, Artificial Sequence; identical to SEQ ID NO: 9078
  Synthetic

SEQ ID NO: 9080 - protein, 176 aa, Artificial Sequence
  Synthetic
SAKDKIAEVAKRVLTENKKLLEESEEVARRTSEESKRLLKESEDVVRRVLDEIRREIKGEKAKKVLDTLKEILDRDRKLNEESHERNKRLLDEVRRMNEEVSKELRRLLEEVREIRDERLIEEVIRRLEELLKEVKKKNEEVIRRSKELIDRDRDLNRRSIEELERLIREVRKESK

SEQ ID NO: 9081 - protein, 176 aa, Artificial Sequence; identical to SEQ ID NO: 9080
  Synthetic

SEQ ID NO: 9082 - protein, 176 aa, Artificial Sequence
  Synthetic
SAKEKIKEVAERVEKRNKELLEESERVIKEVSERSERLLDESRKVVKRSTEEIRDKIKGEEAEKVLRDNEDLLREDEELNKTSHERNKRLLDEVRKRNKRVSDELRKLLEEVSRIDDEELIREVIERLKELVDRVEKENRKAIETSRRLLKEDEDLNRESIKRSEELVKDVRRRST

SEQ ID NO: 9083 - protein, 176 aa, Artificial Sequence; identical to SEQ ID NO: 9082
  Synthetic

SEQ ID NO: 9084 - protein, 176 aa, Artificial Sequence
  Synthetic
DARKELEEVVRRVEEEIRRLLKDIEDVAREVNRRSEKLLRETEEVIRRSTEEIKRDVKSELVKEILERNEELLRRVKKLNEEVNEELRRILDEIRRLVEEVEERIKKLLEEAKRVNERERVKEIIERLRRLVEELKKLVDEVRKRLEDVVRELKERNKKVIDDSKDLVRRAREESR

SEQ ID NO: 9085 - protein, 176 aa, Artificial Sequence; identical to SEQ ID NO: 9084
  Synthetic

SEQ ID NO: 9086 - protein, 182 aa, Artificial Sequence
  Synthetic
DFSERLDEVLRKVRTDIKKLVEKVRRVVEDSRRRVEKLVEDVRRSSEEVLKTVKELLDRGLIEERVVEDVKRIIEETKEKLDRALEKAERDLRDSERHLDEVLKEIEKIIEEIREEVERLGGTDEVVRRLEKRLRDALKEAEDKVRRDEERNREVLERLEKIVRDLHRENEKAVEDVADRAR

SEQ ID NO: 9087 - protein, 182 aa, Artificial Sequence; identical to SEQ ID NO: 9086
  Synthetic

SEQ ID NO: 9088 - protein, 182 aa, Artificial Sequence
  Synthetic
DLSEEVKRVIEEVRKRIEELVDEVRKSTEEVIKRVRRLVEEVERVVEDSRRKVDKLLKEGRITEEVVKRAEKILRDSKKHLEEVERKVRDDLRRSEEEIRRVLKEIEDRLRELKKKIDKLGGTEEVVRRLKEELEKALRDAERIVKELHEENRKVLEDVKRMVDEDKKKNERVVDEVRRDAK

SEQ ID NO: 9089 - protein, 182 aa, Artificial Sequence; identical to SEQ ID NO: 9088
  Synthetic

SEQ ID NO: 9090 - protein, 182 aa, Artificial Sequence
  Synthetic
SLSEEVKKVIREVEEDVKRLVRELRESSERVLKEIKKLVDEVRRVLEESKERVKKLEREGKITDEVVREVEEEVKKSKENLDRVLEEIRKILERTKEKVDRVLEEIRKILKDIEDRIEELGGTDEVVRRLKKRLKEALDRLRDIARKLDKENKEALDEARRIVEENKRRNEKVVEDVERRAE

SEQ ID NO: 9091 - protein, 182 aa, Artificial Sequence; identical to SEQ ID NO: 9090
  Synthetic

SEQ ID NO: 9092 - protein, 185 aa, Artificial Sequence
  Synthetic
DEVEELKKDLKRVLEEVRKIVEDIHRTNEEVLREVEKIVEDIHRENKEVLEKVEKIMRELKDVDEALRRLKEEVERVLKRSEDKIKDLLDKVEKVLEESERRVRRLLREVERALRRVAEEVRKIDDEELVREVKRVVDELEKEVRDLLRRLKESTDKLREDVRRLAERLRDSLREMERDVREKTR

SEQ ID NO: 9093 - protein, 185 aa, Artificial Sequence; identical to SEQ ID NO: 9092
  Synthetic

SEQ ID NO: 9094 - protein, 185 aa, Artificial Sequence
  Synthetic
DEVERLKRELETVLRDVERIVEEIHRENKKNLDKVKKIVEEIHKENREVLEKVRKIMEELKDDDETLRRLLEEVDEMLDRSRRKIEELLRESKESADRSRKKVRDLLERVKEVADRVREEVKRIDDKKLVEEVEEVVKRVEEAVEELARRLEKSTRDVVEESKKLARELEKSLEEVKEEVRKLIT

SEQ ID NO: 9095 - protein, 185 aa, Artificial Sequence; identical to SEQ ID NO: 9094
  Synthetic

SEQ ID NO: 9096 - protein, 185 aa, Artificial Sequence
  Synthetic
KELEELIKRLKRVLEENRDIVRKIHEDNERNLDELRKIVERIHKENKRVLEEVKKIFEELKDDDKVLRELLEKVKRVADESRERVKRALERSKESVRESEERVKEALERSKKMLDDVREDVRRIDDERVVREVERVIKKLEDDSRKTVRDLEESTKEVEKRSKELADELEKSIEDLERRVDEDTK

SEQ ID NO: 9097 - protein, 185 aa, Artificial Sequence; identical to SEQ ID NO: 9096
  Synthetic

SEQ ID NO: 9098 - protein, 185 aa, Artificial Sequence
  Synthetic
REVEELKKELERVLKKVADLVEENERRNRKNLEDLRRIAEEIHRRNEEVVKRVRDTLERLRDVDEVLKRLLDEVEEVLKESEKRVRDALRRSEESVKKSEEDVKRILDEVKERLDRVREKLKRIDDEKLVRDVERVVEKVERDVKRLADRVREVLKESSDRSRELVERLRESLRKAREEVRKAIE

SEQ ID NO: 9099 - protein, 185 aa, Artificial Sequence; identical to SEQ ID NO: 9098
  Synthetic

SEQ ID NO: 9100 - protein, 186 aa, Artificial Sequence
  Synthetic
KDVDEVLKRLRELIDELRKTNERVKRELKKLVEDLERKNKDVERRLRELIRTLEEIARKTKDKETLRKILKEILDRIEKLLREAEETNRRAKEEIERLLKKAHDKNRKIEKEIDKLLKDITRRAKDDKDMVKKVRDVIEDLKREVERLDRETKEVVERVKRKIEKTNRDSKKVIDDLRREVERLRK

SEQ ID NO: 9101 - protein, 186 aa, Artificial Sequence; identical to SEQ ID NO: 9100
  Synthetic

SEQ ID NO: 9102 - protein, 186 aa, Artificial Sequence
  Synthetic
SEAERIVEELRKLIEDLRRKNEEVKERLKRLVREDEKRNEEVLKELEDRADELRKLVEKLSDKDTLKKILERAREEIKRLVKEIREENKRSVEKIEELLKRARDTNETILRRIEEEVRKAEKDLKDDKDVVDRLRRVIEDLKRTVEKSNEDSDRVIKEVKKRIDDSLKRVEDVIRRVKETIDRLEK

SEQ ID NO: 9103 - protein, 186 aa, Artificial Sequence; identical to SEQ ID NO: 9102
  Synthetic

SEQ ID NO: 9104 - protein, 186 aa, Artificial Sequence
  Synthetic
SDVDRVAKDLEKLIRDLEKINRDVSRENKELIEKDKKINEDVLRELDRLVEELERLVRELSDKETLKKILEDAVKEIRRLLEEIKERNDRSLERSKELLRRAEETNRDIERKIKDLLKRITDRIKDKKEMLEKIRKVAERLRREVERSNEESKKSADEAEKTIRKSLKEVEERIREVEKKIRDLKR

SEQ ID NO: 9105 - protein, 186 aa, Artificial Sequence; identical to SEQ ID NO: 9104
  Synthetic

SEQ ID NO: 9106 - protein, 186 aa, Artificial Sequence
  Synthetic
SEVDRVLKELDELIRTLEELNKKVSRENRELIKEDKKRNDEVVKRLEDLIRELKERVDKLKDKKTLKDMLRRMKEEIDKLLKEIRERNEESLKESDRLLREVHKLNRDIKKEIEDLLRDIERKIKDDKDALKKVREVIERLKEEVERLDRETKKSADEAKEAIKRSLEEVEDVVRKIREKIKKAEE

SEQ ID NO: 9107 - protein, 186 aa, Artificial Sequence; identical to SEQ ID NO: 9106
  Synthetic

SEQ ID NO: 9108 - protein, 186 aa, Artificial Sequence
  Synthetic
DEVERAKEELEKLVRKDEEDNDRVRKRLEELIRRLKEENDRVLEELRRLSEELDRLAKELKDKDTLRRRLEEARKEIEKLMREAHEENKRILEEIEKLLRDIEERNRESVERIERLLKKIEKDIKDDKEALDEVRRVIEEVKREIERSLRESREVIKELKERVKELDERTREVVRKVKEEIDELER

SEQ ID NO: 9109 - protein, 186 aa, Artificial Sequence; identical to SEQ ID NO: 9108
  Synthetic

SEQ ID NO: 9110 - protein, 186 aa, Artificial Sequence
  Synthetic
SEVDDVLRRLDKLVKDDKRTNDRIVTRDRETVKRVKEVNREIVERLERLVDRVREIVERLKDKDTLKKLVDEARKDIERLLKEAHDMNRESIERNRESVREVREINEDSVRKIRKLLREIETRVKDDEDALRKVREVIRRVEEDIKRSLRDSERVIEEVVTRNEKVDRETKKVVDEAKREIDERAK

SEQ ID NO: 9111 - protein, 186 aa, Artificial Sequence; identical to SEQ ID NO: 9110
  Synthetic

SEQ ID NO: 9112 - protein, 185 aa, Artificial Sequence
  Synthetic
SELEKLIEELERVLKRIEEVSRELDKELETVLDEIRRASKRLNDELRRALEEIARAATENKDIKELLEKLLREAKRVLDEVRKRSEELLRKLEEVLERVRKKSDDLLKELEEVLDRVKRTIERDIKSKLLERAEDVIRRVREALEELVRTNRESLERVERAARELNRRNEESLERARREVEKLRR

SEQ ID NO: 9113 - protein, 185 aa, Artificial Sequence; identical to SEQ ID NO: 9112
  Synthetic

SEQ ID NO: 9114 - protein, 185 aa, Artificial Sequence
  Synthetic
DEVRELIDRLRKALEEITRESRRLDEELRKVLEEVERRVEELSRRNKEMLDRVREKVTRRKDDTELLKEIERELKEILKRSDDEAKRILREVEEILRRVEEDSRRLLEKVRRVLKEVEERARRDVKSRLLEELKRVIDEVRREVERLNKKNKESLDRARRRVEDLLRRLEESVRRVEEELKKLST

SEQ ID NO: 9115 - protein, 185 aa, Artificial Sequence; identical to SEQ ID NO: 9114
  Synthetic

SEQ ID NO: 9116 - protein, 181 aa, Artificial Sequence
  Synthetic
SELERVIRESERTVEESHKHVREVIRKLRDIVRRSHEHVREVIERSKESVERVRDLVRRGVPREELKRILDEDKKRVDDVLRTNEELVRRIKEDVKRVLDENRKLLDEDRKRVKEVIDRITDEELVRRLKKVLDESEKAVTRNIEEIKKVLEDVVRKAEKNIREIAEVLERSTRAAKKDTD

SEQ ID NO: 9117 - protein, 181 aa, Artificial Sequence; identical to SEQ ID NO: 9116
  Synthetic

SEQ ID NO: 9118 - protein, 185 aa, Artificial Sequence
  Synthetic
ELEKRIDEVLKRVEDEIRKSIRENEEVLKDVERAVKELIKENERVLEEVREEVRKIIERVKEDKDLVRRLEEVAERIKRRVERTSRELDRMLKEVRKEVRRSSEESKRSLEEIRRKVEEAKRRIRSEDIVREVEKELEDILRDNRRLVRESIESLKDVVRRVAELVERSIRELKKMVDEIRKEAE

SEQ ID NO: 9119 - protein, 185 aa, Artificial Sequence; identical to SEQ ID NO: 9118
  Synthetic

SEQ ID NO: 9120 - protein, 185 aa, Artificial Sequence
  Synthetic
KLEERIEKVLEDAERDVRRSEEEIRRVLKEVEDRVRRLLRENEDALRRVEEEVKKIIDRVKDDERLVRDLKRTLDEIRERVKESNKRLEELLRRVEKTVREVLKRSRDSLRKVRTLVEEAKKRVRDEKIVKRVIETLRELLKENRKLVKDVIEDLKRIVKEVEELVRESIERLKDMVRRISEKAK

SEQ ID NO: 9121 - protein, 185 aa, Artificial Sequence; identical to SEQ ID NO: 9120
  Synthetic

SEQ ID NO: 9122 - protein, 180 aa, Artificial Sequence
  Synthetic
KEVEEIIETLKRLSEDLERKVREIIERLKRLSERLERENKEVIKELERLIDELRKLVEDGEDSSMVRRVEKKLEELLRRVKKLNEDVKEESKRLVEEARKVIEKVLRESKELADDARKKVDSEDLRKLDRVVKESERTIRDLLRKLDEVAKRSDDTIERVNDETAKVIERVKRKIEELEK

SEQ ID NO: 9123 - protein, 180 aa, Artificial Sequence; identical to SEQ ID NO: 9122
  Synthetic

SEQ ID NO: 9124 - protein, 180 aa, Artificial Sequence
  Synthetic
REVEEMIKELEELLKDLKEKNERASKRNRELVRRLEEENKRVIEELKKLVKELEDLVRSGEDEKVLREVLKRLEEVLERVRKLNERVLEKIEKSLEEVKRSNERVKRRLKELLEEAERRVDSEKLKELRDVIKEVKKRIDELDEYTRESIRRAKKEIERLNRETKKVIEEVVKRIEEERK

SEQ ID NO: 9125 - protein, 180 aa, Artificial Sequence; identical to SEQ ID NO: 9124
  Synthetic

SEQ ID NO: 9126 - protein, 174 aa, Artificial Sequence
  Synthetic
SEKEEVRRVIEELRRILKRVLEDLRRVVKENEDRLRELKKENEKSLRELEERARRIDIDEKVLRRIEKMIKDSEENVRESVRRNERLLEESKKHMKEVADRVEKILRELRDLVEKGVDVEDLKREIDRVAKEVEEVLEENRRRNEKSVEELRRDSKRNHERNEEVVKEAEDAAR

SEQ ID NO: 9127 - protein, 174 aa, Artificial Sequence; identical to SEQ ID NO: 9126
  Synthetic

SEQ ID NO: 9128 - protein, 174 aa, Artificial Sequence
  Synthetic
SEEERVRKALEELKRELDKVHENNKRSLRENEETLKKLLEDNERSLRELEEEMRRVDIDEKVLREAKRKLDESRKNVERSAKENKDLVDESRKHSDKVRREVEKILRDLEELVRRGVDVEELIKTLRRVAKEVRERSEENDRRNKKSVDELREDSKRNHDENDKVLKKLEKAAE

SEQ ID NO: 9129 - protein, 174 aa, Artificial Sequence; identical to SEQ ID NO: 9128
  Synthetic

SEQ ID NO: 9130 - protein, 178 aa, Artificial Sequence
  Synthetic
DEVEKLEEDSERSLEELRKTVEEVKKRSEDSLRDLERKSRENEKESRRTLRELREKDQDKRLIEELMRRDVEHIKRSLREHERILEEDLRRLKKVLEDLERRIREDLRRLEEVLKRQTDERVRKRVKDAAEKSRRVIEDLLREIKRVADDSRREAKRLLDRNKEVLERSKETADREKK

SEQ ID NO: 9131 - protein, 178 aa, Artificial Sequence; identical to SEQ ID NO: 9130
  Synthetic

SEQ ID NO: 9132 - protein, 178 aa, Artificial Sequence
  Synthetic
DEVEKLAEDSKRSLEKLRREVEKVKRESRESLKRLKEESEKNVRDLRRLLEELRRRPEDKKIIREEVEKALRHLEDSLRRHEEEMRKDVRRLEKVLEKLKKIITEDLRRLEEVLKRLTDERLLKRVKDVMDESRKVIRELLELIKEVIRESKETVKRLLDENKRVADEVRKVVDELRK

SEQ ID NO: 9133 - protein, 178 aa, Artificial Sequence; identical to SEQ ID NO: 9132
  Synthetic

SEQ ID NO: 9134 - protein, 184 aa, Artificial Sequence
  Synthetic
SEVEEVEREVKEVIEELDEIVKRVKEENDDSVRKSKRSLDEIEAEVRRVLKELTDRVTKRKTEDVRRELEKEIDRVRRKLEKILEDNRKKAEEDLTRTRKIAEELRKKIEDVVRRLEEIVKRLDKEEVLERLTRLIEKLKDVIRRLRERLKKSADDSRDVIRRTLEAIKEIIERLKEVIDRLDK

SEQ ID NO: 9135 - protein, 184 aa, Artificial Sequence; identical to SEQ ID NO: 9134
  Synthetic

SEQ ID NO: 9136 - protein, 181 aa, Artificial Sequence
  Synthetic
DEIEKLREDVKKTLEESRKSVEDLERRSEDSIRRSRESVERLKREVKEVIDRLRDARRRGTPEEKIEELLKRVRDRIEEVLRRNERLVEENKKEITRVLDTNRRLNEESNRELKRVLDKTRDKRVLDEIKKLADEDNKTVTDSLKRIRDSAKKVDEVVRESLERIRKVAEEITKVVEDVKR

SEQ ID NO: 9137 - protein, 181 aa, Artificial Sequence; identical to SEQ ID NO: 9136
  Synthetic

SEQ ID NO: 9138 - protein, 181 aa, Artificial Sequence
  Synthetic
SELETLEKSLRDVLKESRDSVEKLRKEVEDTIKESEDSVTKLLKEIEDVIRRLEDLRRRGVPEEAIKKLVREVAEAVKEVLRRNRELNKRSNERAKEVVDRNRKLAEDLLDEIRKVLAKVTDEDVLRRIRRAAEEVRKVAKESVDRIRDLAARDNEVVERSLKKIEEVLRRIKKVADDVAR

SEQ ID NO: 9139 - protein, 181 aa, Artificial Sequence; identical to SEQ ID NO: 9138
  Synthetic

SEQ ID NO: 9140 - protein, 181 aa, Artificial Sequence
  Synthetic
SEIERLEREVREVIKESEESVRRLKKRVDDTVRENEELVKRLEDRVRRMKERLEDARRRGRPEKDIEELLKTIAKEIKDVLEESRESNERSNTDIKRVLEENTKLVKDVLRRIERVLDKSTDDDVKRKIRKVMEEIKKRADDSRRKIEDVARKDNKAVERSLRRIERLLEEITRVVEEIKK

SEQ ID NO: 9141 - protein, 181 aa, Artificial Sequence; identical to SEQ ID NO: 9140
  Synthetic

SEQ ID NO: 9142 - protein, 181 aa, Artificial Sequence
  Synthetic
SELEKLDKESRDSIRKSEDSVRRLEEESEESIERSKRLVEELKRLADEVIRRLEDMARRGTDKTKIRELIKRLKELAEEVVKRNSELVERNRRRIEEVERTNEELVRRNEETIKEVLKKTRDEDVLRAIEESMKRARKAVEDSLRRIRESLEKVKEEVRRSNEKIKKIVKEVREVVERIAD

SEQ ID NO: 9143 - protein, 181 aa, Artificial Sequence; identical to SEQ ID NO: 9142
  Synthetic

SEQ ID NO: 9144 - protein, 181 aa, Artificial Sequence
  Synthetic
DELEDLEREVREVIEESKRLLEELEKRVKEVIKTSRDSVRRLKERVDRVIKELRDAKRRGEPREKIRELVERLKREVEKVERENDDLLRRVAEEIERVVEENSRLLEEVKRRIEEVLARTRDEDVLRKIRELLEEIRRVIEETNRRIKKLLEEIKRVADDSRRRIRKVAREVEEEAKEIEK

SEQ ID NO: 9145 - protein, 181 aa, Artificial Sequence; identical to SEQ ID NO: 9144
  Synthetic

SEQ ID NO: 9146 - protein, 181 aa, Artificial Sequence
  Synthetic
SVRERIDELEKKIKRVVEKVLKENKDSLKRVEERVRRLLEENKRSLDEVREAVERVLSEVRDKRELLEKLRRILRENEKRNTESLREHERILEENKRRNEESLKRHKDLLDEVKELIDRARDLEDVEKLERDVEKVIEDARRTSEEVKRENDKALKDLDRLSEEVEKENRKALEDLKRTSD

SEQ ID NO: 9147 - protein, 181 aa, Artificial Sequence; identical to SEQ ID NO: 9146
  Synthetic

SEQ ID NO: 9148 - protein, 181 aa, Artificial Sequence
  Synthetic
SVRETIDKALKKIRDVAEDLKRRNDELLKEIEEVARDSSEKIRRALEEVERRVREVLKRVKDRRELLRTIEELLKEIRKEVEDVHRRNKRLLEEIRKIVKRSKDEHERLLKEVKETVDRMRDLEDVEKLKKDIERIIRELEELSDRLKKIIEEVIKKSEDLVRRLRESLERVLREIDKTTK

SEQ ID NO: 9149 - protein, 181 aa, Artificial Sequence; identical to SEQ ID NO: 9148
  Synthetic

SEQ ID NO: 9150 - protein, 181 aa, Artificial Sequence
  Synthetic
SVREEIDRILREIEEVVKTSSERIKRLLEKIEEVVKRLIEENRRVLKRTDEEADRLLKEVKDDKDLLRELRDLLKKARELNTEITERLKRLLDRIRELIEKVHRENEKLLREIRERIKEARELEDVDTLRKEVKEVIDTSEDLVRRLEEEVRKAAKRLKDLVDDSRRLNTEILRTLRERRR

SEQ ID NO: 9151 - protein, 181 aa, Artificial Sequence; identical to SEQ ID NO: 9150
  Synthetic

SEQ ID NO: 9152 - protein, 177 aa, Artificial Sequence
  Synthetic
DDLKRLEEDVRRIIEENDRIVKDIAEKSKKSIEDNRRLLKRLRDESERTIDDIRRLKEEGQDRRRLEEVLEEDHRLVKEINERSKKILDEDHKLIEEINKRSKDLLDRIRRLAEKAAEKRDVEEIRRLLKEITDVVRESNRRIKRINETAHEVVRRSNTETTKVNKKAHDVVEEVKR

SEQ ID NO: 9153 - protein, 177 aa, Artificial Sequence; identical to SEQ ID NO: 9152
  Synthetic

SEQ ID NO: 9154 - protein, 181 aa, Artificial Sequence
  Synthetic
SLIEKIREIVKEIIKRSDDSVEEVKRRNEESIRRSEESVKDNRRRIEDIIRKLKRLKEEGRDRRDVEDLVRRIVEESKKTLRENEKLLEDDRRINEKILEDNKRLLKKAREDLKRVLEKTTDDDMLRKIEALAREVTEVSKRALEEIRKLMEESTEVSKRALERIEASVEEVRRVAEEVKR

SEQ ID NO: 9155 - protein, 181 aa, Artificial Sequence; identical to SEQ ID NO: 9154
  Synthetic

SEQ ID NO: 9156 - protein, 181 aa, Artificial Sequence
  Synthetic
SLLEEIEKEVREIIKRSRKSLEEVKRRNDDSIRKSEKLVEDNKREIEEVKERARKLKEDGTDRKRIRELMERIERSSEETLKENSRLVTRDREINEEVLRRNRKLLEEIRRRLEEVLRRTTDKRVLEEIDRLAKDVKRVSDEVLEEIKRLAKESKEMADRSNEEIKKSVEEVRRVVEEVEK

SEQ ID NO: 9157 - protein, 181 aa, Artificial Sequence; identical to SEQ ID NO: 9156
  Synthetic

SEQ ID NO: 9158 - protein, 181 aa, Artificial Sequence
  Synthetic
DEIEELEKLIRKAIKDSRDLVRKLEEENKRSIDTSRELLKELERMLDEVRRRLEDLKRKNGSSEELRDLLRRIKERAKRVHEKNEELLRRDDKRNRDVHRRNEELLREVEKLVRDVARKIDKEELLREIKKLLDTIRRVIEESSERIKKLAEDSREVVKESSTEIKRLLETITEVVDRVTK

SEQ ID NO: 9159 - protein, 181 aa, Artificial Sequence; identical to SEQ ID NO: 9158
  Synthetic

SEQ ID NO: 9160 - protein, 181 aa, Artificial Sequence
  Synthetic
DEVEEAEKLIRKVIKDSEKLLRDLADLNRKSIRRSEKLVEDDRRANEDVIRKLEELRRNNGSEEELRRLLKEVEDTNRRSHETNKRLLDEDRRLNKEVHDRNEKLLRDIKRLVEEVEKRIDKEELLRRIKKLLDEIKKAIEDSSREIKRLLEESERVAKRSSEDIKRTLDDTRRVVEEVRR

SEQ ID NO: 9161 - protein, 181 aa, Artificial Sequence; identical to SEQ ID NO: 9160
  Synthetic

SEQ ID NO: 9162 - protein, 183 aa, Artificial Sequence
  Synthetic
DVEETVRKLIEDVKRVMERVRKSNTDLIRRSKEVLKDARRLHEELTKEVKDVLRRLEEEVKDEDTLREIRKKITELLKENERVLRDVERNVREDVKRLKENLDDNKRKAEEVIKDLERVMSSDKREVVKRVEEDVRKKLEESTKDSKRVERESEENLRRAKEKSKRVLKKLKDDLRRLEEESR

SEQ ID NO: 9163 - protein, 183 aa, Artificial Sequence; identical to SEQ ID NO: 9162
  Synthetic

SEQ ID NO: 9164 - protein, 183 aa, Artificial Sequence
  Synthetic
SVKETVKDLEREVREVLKKLRDDVRKLIEESDKALKRLKKIHDDLSRDVRRVLEDLRRRVKDEDTVREIERKARELDKKNRDVARDVERNVREDIKRLEDELRKLEDEIRRLEEELREVSKIEDKKMIDDVVRRVRKKLKEIDEKVKDVERKSRENLKRLKEKSDRVAEDLKKILDELREEVR

SEQ ID NO: 9165 - protein, 183 aa, Artificial Sequence; identical to SEQ ID NO: 9164
  Synthetic

SEQ ID NO: 9166 - protein, 183 aa, Artificial Sequence
  Synthetic
SVEETITELIKEVRKVAEEVKKSNKEVIEESEEALKELERTHTELSEEVRKVLRELEEEVKDEDTLRRIRKAIRDLDEENKRVLERVRKNVKEDIERLRENLKRNEELARRVIRELEKVMRVDKKEVVTEVVKEVKKRLEESKDDSRRVMEESRRNLKKLREESKRVVEELRRELRRLKEEVR

SEQ ID NO: 9167 - protein, 183 aa, Artificial Sequence; identical to SEQ ID NO: 9166
  Synthetic

SEQ ID NO: 9168 - protein, 183 aa, Artificial Sequence
  Synthetic
DVEETVRKLIEKVKRVLERLEEEHKRLSDDSRRVVKKLKDDVEDLIRRVEEVLKELERRVKDEKTLKDIRKKIEELIRELREVAKRLEDNAREDDKENREVLKRVREEIRRLIEKLKDMMRVEDRKAVDEVRKEVDRRLEELKRDSERVVKKSEENLRRLEEEVRKVEEKVRRTLKRLKEEAK

SEQ ID NO: 9169 - protein, 183 aa, Artificial Sequence; identical to SEQ ID NO: 9168
  Synthetic

SEQ ID NO: 9170 - protein, 178 aa, Artificial Sequence
  Synthetic
DKLEKVLEEIKRRLEENERLLRKVERDLKRLSKENEDRLRKMLEDLRKLSEDLLRSVEKDKDLKEEIRDVIEKLRRLNDELRKDTERSLKRLRELNEEARKRSEDSARRLRELIKELKRDRDVEKVDELLKEVEEIIDRSRKEIDRTRKDNERSVKRSEDAIRKTLDENEKSLREATR

SEQ ID NO: 9171 - protein, 178 aa, Artificial Sequence; identical to SEQ ID NO: 9170
  Synthetic

SEQ ID NO: 9172 - protein, 178 aa, Artificial Sequence
  Synthetic
SDVEEMEKRIRDRLRENRRIVEDVAKKLRDLSRRLEEEVKKVAEELRRLSDELRKRVTRRKELRRDIEEVLKRLRELNKRLREDVDRAMRELRELNKELDKRSEESLKRLEELARDLARRKDVERVKDLLREVKRVIDESKKTIRDTLEENEDSIRRLRERIDETLKENEKSIKELKD

SEQ ID NO: 9173 - protein, 178 aa, Artificial Sequence; identical to SEQ ID NO: 9172
  Synthetic

SEQ ID NO: 9174 - protein, 178 aa, Artificial Sequence
  Synthetic
SSVEEVKKELDKILEELKEKSERSKEEVERVLKKLREKSDRVEREVRKAEERLRRKVKDIREDELKEELTKEVKEVLEKNEEIAKELTREVKEVNRKNEKILDELRREVERVEEKIRRRLEDDETVERLLKKLKDVLEELRRRHEEVSKRLEKVLKELVDRHKKVTEDLKRVLDELRK

SEQ ID NO: 9175 - protein, 178 aa, Artificial Sequence; identical to SEQ ID NO: 9174
  Synthetic

SEQ ID NO: 9176 - protein, 184 aa, Artificial Sequence
  Synthetic
SLEETLKKLIEEVEEVLRRSEEIAREAIRRSERVLEELERRHKKVTDEIKEMLRELRERIDDKDTLKKVTDKIRELLRENEDVLRRVREEVRRDVEELRRALEDNKRKVERVIEELEEVLKKLKREELVERVLDKVRRDLEDSRRHLEEVKRKSEESLKKLKKETKDALDTIREKLKRIADELR

SEQ ID NO: 9177 - protein, 184 aa, Artificial Sequence; identical to SEQ ID NO: 9176
  Synthetic

SEQ ID NO: 9178 - protein, 184 aa, Artificial Sequence
  Synthetic
SMEEKVKRIIKKVDDVLKDSERRITELIKKSRDVLRELEKRHEELTKRVKDVLDDLRRKIRDKDTAKKVEDDVRRLLEENKRVLEEVRESVKRDIERLEEVLRRSRKHIEEVKERLDRVLKKVTDDRAVDTVRKEVEKALEENRKTVRDVEEESDRSLRRLREKTDEVRRRVEEILKRLKERVD

SEQ ID NO: 9179 - protein, 184 aa, Artificial Sequence; identical to SEQ ID NO: 9178
  Synthetic

SEQ ID NO: 9180 - protein, 184 aa, Artificial Sequence
  Synthetic
ELEERIKELIKKVRDVLRKSKEEVDKVIRKSEEVVRETEKLVEDIIRRVEKVLDEVRKRIKDKDTLKEVKELAETVIRKLEKILRDNKELVDRDIERLKKVARESEKHIREVERELEEVLKKLKTKELVRTLERRVEEVLRRNEELVKRVREESDRSIDRSRRSLERAEEDVDRVLKEVKDRTT

SEQ ID NO: 9181 - protein, 184 aa, Artificial Sequence; identical to SEQ ID NO: 9180
  Synthetic

SEQ ID NO: 9182 - protein, 184 aa, Artificial Sequence
  Synthetic
DLEKKVEDVIREVEKVLRELRRRHEELTKRSEDAVKETKDRVKEIEDEVRRVVDKVRKDIKDKDTLERVERKAEEVIRRLRRILEENKKSADRDVRRNEDMLRRVEKTVRDVKRKLERVLKDLKTDELVKELKRDVERVLKRLKERSDEVRKESEKSIKKSKDSLEKAEREVREMLRDLDRETK

SEQ ID NO: 9183 - protein, 184 aa, Artificial Sequence; identical to SEQ ID NO: 9182
  Synthetic

SEQ ID NO: 9184 - protein, 184 aa, Artificial Sequence
  Synthetic
SMEERVKELIRRVRKVLEDTERRAKEIIEDVERVLEELKKRHEDLTRKVDKVLKELKKEIRDEDTLREVEKTVRDVLRKNETVLREVEETVRRVIKRLEEILRRNRKKIEDVERELDKVLKKVTDEKLVTKVEEDAERALRESEESLRKVEREVKRVLEELKRKTEKVARELDKILKELKDRTR

SEQ ID NO: 9185 - protein, 184 aa, Artificial Sequence; identical to SEQ ID NO: 9184
  Synthetic

SEQ ID NO: 9186 - protein, 184 aa, Artificial Sequence
  Synthetic
SLEDELRKLIEDVKRVAKETEDRVREILKRSKDVLDELKKEHDKLTREVERVLDELAKEIKDKDTLREVKKRVDDLLKRNEDVVREVEKIVEEDLDRLRRILEENKRLAEEVIRRLEEVMKKLKTEELVKKVKKEVEDVLRRSKESLKKAEEDSRKSLEELKKKTEDLKREVKEILDRLKERVR

SEQ ID NO: 9187 - protein, 184 aa, Artificial Sequence; identical to SEQ ID NO: 9186
  Synthetic

SEQ ID NO: 9188 - protein, 184 aa, Artificial Sequence
  Synthetic
SELEKLKREVDEVLKRNKELVDELRKRVRKALEESRRSVEEVERRVEEVLKRLEDDLRREKSKEVIDKLRKLVEDLIRELEDLLRKNKEKAERLLEELKKLLDESRRHIEELEKELKKLLDRLDKEELKEKVRRILKEVRRVLDESRRDVERVLREVEKVMRESIKKARDAIRKVEEVLRELER

SEQ ID NO: 9189 - protein, 184 aa, Artificial Sequence; identical to SEQ ID NO: 9188
  Synthetic

SEQ ID NO: 9190 - protein, 184 aa, Artificial Sequence
  Synthetic
RELDDARRKVEEVLKTNKDLVDKIRKEVEETLERLDRSSRKVREIVRRVLEELTRRATERKTEDVERELAEVVDRVIKELRRIVEENRKLSEKSIKELRELLERSERHIKRVIDELKSLLDRIRTEELKRLVEKLIKEVEDVLEESRKAVEDVIREDKRRMEESKREADELIREVKKVLDDLRK

SEQ ID NO: 9191 - protein, 184 aa, Artificial Sequence; identical to SEQ ID NO: 9190
  Synthetic

SEQ ID NO: 9192 - protein, 184 aa, Artificial Sequence
  Synthetic
KELEDLEREVREVLKRSDESLKRLEEEVRRVLDENDKEVKRVKEKVKKVLDELREIVTRRKTEDVKRKVKEDVTRLLDELEKELRRSEDHIRRLIERLEKELRKNRERIKELKERLKSLLSRLDKEELKREVERLIREVEEVLKKSEEAVRRLIEEVDRALKRSREEFTKAREEVKKVLEDART

SEQ ID NO: 9193 - protein, 184 aa, Artificial Sequence; identical to SEQ ID NO: 9192
  Synthetic

SEQ ID NO: 9194 - protein, 182 aa, Artificial Sequence
  Synthetic
DEIDKARKDIEDMLRRLRDLVRKLEDLNRKVVEELKDLVRKDRKLNEDIVRRLERLVRERPDVQEDIERLLKEVRKMNKDTLRKIRELLEKIKDLNRRIEEEIKRLLKEARELVRDVEKRIDDEEVKRRIEELLRRVDKVADEVRREVERTNRESEEVVREVEEDVRRSLEEIDKVIKDVRT

SEQ ID NO: 9195 - protein, 182 aa, Artificial Sequence; identical to SEQ ID NO: 9194
  Synthetic

SEQ ID NO: 9196 - protein, 182 aa, Artificial Sequence
  Synthetic
SEIDELRKRVEEVLRRLDELVKRLKEENDRVVKKAEDLIRRLEETNREILKKLRKLVKDDKDNQEAIDKLAKDAHKTNRDILREIRELLKRIHEKNREMVERIRKLLRDVERMLRKVEKEIDDRDVLEKIKDLLRRVKEVADEVEKKIRELNKKTEDVVRELEERVRKLDEDVKRVIEEVKR

SEQ ID NO: 9197 - protein, 182 aa, Artificial Sequence; identical to SEQ ID NO: 9196
  Synthetic

SEQ ID NO: 9198 - protein, 182 aa, Artificial Sequence
  Synthetic
SELDEIRERIERIEKDLERLVEEVKRVNDTIVERIKKLIDEVRKENEKVIKTLRDLVREVPELKEKIRELLKRAHEVNRRVEKTIEDLLREVEKVNDEIRREIEKLLETATRLLDEIRRRIDDEKVEREIRRLLERVKEVIERVKDRVRRVDKKSRDVVREARRAIEEVDRRVRKVVREAEK

SEQ ID NO: 9199 - protein, 182 aa, Artificial Sequence; identical to SEQ ID NO: 9198
  Synthetic

SEQ ID NO: 9200 - protein, 182 aa, Artificial Sequence
  Synthetic
DEIKKLEDEVKKILDDLRELIRKLEETNRDVERRLRELIAELRKRNDEVVKRLRDLVRRSKDSKEEIDRLAEEIKKENEDILRKIEKLLEEARETNERILRRIDELLKEAKRLIDDVLRKIDDEDVKRKIEEILRRVEEEIRRLKKEVERLDRESKRVIRELREDVKRTNTDVKRVVDEVRK

SEQ ID NO: 9201 - protein, 182 aa, Artificial Sequence; identical to SEQ ID NO: 9200
  Synthetic

SEQ ID NO: 9202 - protein, 181 aa, Artificial Sequence
  Synthetic
SLVERLEERVKRIIDELRRILEENRRRVKKVSDENRDLLRRLEEENKKIIEDLRDLKRKGRDRKEVKRLVDRVRKTNERVLETVDRTATRLREKSKESLERLRKTVREVVEEIRDVMRKVDDEKAKDKLRRLEEEIRKVAKEVEDELRRSTEYVKKSLEDAKRKLEELTKRTEDVAEEVER

SEQ ID NO: 9203 - protein, 181 aa, Artificial Sequence; identical to SEQ ID NO: 9202
  Synthetic

SEQ ID NO: 9204 - protein, 181 aa, Artificial Sequence
  Synthetic
DLVERVEEKVEDIKRKLRRILEEVDRRNKEVSKENKELLDRLEEENERIIRELEKAKRDGTDRRKLKELIDRLRRINEDVRRKVDRTVKELKKINKKILEELEELVRRVKEEIKRVMDEVQDDRAREKLKRLVEDIDRVAEEVKRTLEELSRYTDKSLEDAERSLERLTKETDEVLKRVTT

SEQ ID NO: 9205 - protein, 181 aa, Artificial Sequence; identical to SEQ ID NO: 9204
  Synthetic

SEQ ID NO: 9206 - protein, 178 aa, Artificial Sequence
  Synthetic
SIVERLKKLAEDVIRRLERLSKELAKRNKEVIERLKELSKRLEDKNRRVIEELRRTKDEEEIKRLLEEARRTNKKVLDDSKKLLDEVRETNRTVAETSKDILREIEEVVKRVLDEVRELEEVKRAIEELRDRIRKVIEDSERTIRKLNDDTRKVVEDSRRTIEELNRTTDKVIEEVRR

SEQ ID NO: 9207 - protein, 178 aa, Artificial Sequence; identical to SEQ ID NO: 9206
  Synthetic

SEQ ID NO: 9208 - protein, 178 aa, Artificial Sequence
  Synthetic
RKVDELRKEVKRVIDELRELSERLRKENERVIKTLEDLVRRLEKLLERVERELERTKGKEEVRKIMKRIEDVARKVLRELEELLRRAEKINKDVLDRSREIAKRARDILKKVLDDVKDLEEVKKEIDRLRRELDRVIKESEDTIRRLNDETRKVIEKVRRAIEELLRRIEEVIKKVEK

SEQ ID NO: 9209 - protein, 178 aa, Artificial Sequence; identical to SEQ ID NO: 9208
  Synthetic

SEQ ID NO: 9210 - protein, 178 aa, Artificial Sequence
  Synthetic
SIVEELRELVKEAIKRLKKLSDDLRRKNEEVIRTLKELLDRLKRKNEEVIKRLEDTKGKEEVDRLMEEAKELNKRVEDTLRELMDRARRTNEEVERRSKELLKEIEKVLRDVLRRVSTLEEVKREIEKLKRDVERVIEDSRRTIEELNRKTEEVIERVRRTIERLNEETKKVIDRVRT

SEQ ID NO: 9211 - protein, 178 aa, Artificial Sequence; identical to SEQ ID NO: 9210
  Synthetic

SEQ ID NO: 9212 - protein, 178 aa, Artificial Sequence
  Synthetic
REVDELRKRVEEVIRELEKLSEDLAERNRRVSERNKELVETLARLNKRVIDELRRTKDKEEVDKLLKEVRELNKRVEEEIDKSLEEARRVNEEVVERSKRILERAEKILEDVLRKVKDLEEVKKAIDDLRRELEEVIKRSKKTIDDLNRYTKKSIEDVREAIKKLNKETDDVAREVKK

SEQ ID NO: 9213 - protein, 178 aa, Artificial Sequence; identical to SEQ ID NO: 9212
  Synthetic

SEQ ID NO: 9214 - protein, 178 aa, Artificial Sequence
  Synthetic
SIVEELKKLVEEAIRKLEKLLEELEEKNRDAIRRLKELSDELRKKNEEVIERLKRTKDKRELERLADEARRTNEEVVRRSDKLLEEIKRTNEKVKRELDELLRRIEKIVKDVLDRVRELEEVKRMIEKLRRDVEKVIREVRDEIRRLNDTTRRVIDKSRKTIEELNRTTEEVIERVKR

SEQ ID NO: 9215 - protein, 178 aa, Artificial Sequence; identical to SEQ ID NO: 9214
  Synthetic

SEQ ID NO: 9216 - protein, 176 aa, Artificial Sequence
  Synthetic
DEEEVMRELKKEIDEALERSKEINDRLRKEIRDVLEKLERIVREVKERSERVLEDVRRKVDSKKLERVEKIIRESEKHVDEARKEIEKRIKELEDRVRENTERVKRIIEELRDRVRKLGGVKEAVDEIRRILREALEEDKKSVEDIRRDLDKIEKDVKKVLEDNERLLKRLREEVK

SEQ ID NO: 9217 - protein, 176 aa, Artificial Sequence; identical to SEQ ID NO: 9216
  Synthetic

SEQ ID NO: 9218 - protein, 176 aa, Artificial Sequence
  Synthetic
DEEEVMKELEDRIREVDKKIEDRLRELKERSDRVLDRSRRINKKLKDEIEDALRRVRRDVDSKDARDVDRIIEELKRRVEENSRRVEEIIRRSRKHVEDLLRRAKEIIKKLEDEVRKLGGIKEAVDTIERKLRKLEEDLKKVERDNKKLLDDMERDDRRSLEEIKRILDELLEKVR

SEQ ID NO: 9219 - protein, 176 aa, Artificial Sequence; identical to SEQ ID NO: 9218
  Synthetic

SEQ ID NO: 9220 - protein, 176 aa, Artificial Sequence
  Synthetic
REEEVMKELDREIEEVLERSREIVERLRREIEEVLKENKKIVETLKREIKKVLREVREKVDSKDARRAEEIIERLERRVEENEKRVKEIIDELRKLVKRALEESEKSIRELKDRVRKLGGSEEAVKRIRDILEKDERDVREVVRRIREILKASLEDSERSVEEIRRILDELRKEVE

SEQ ID NO: 9221 - protein, 176 aa, Artificial Sequence; identical to SEQ ID NO: 9220
  Synthetic

SEQ ID NO: 9222 - protein, 176 aa, Artificial Sequence
  Synthetic
REEEVMERLRREIEKALRESHEIDDRLRKRIEDVLRDSERKLEELRRRIKKVMDDVRRDVDSERLREVEKIIKELEERVDDLRKKSRDSARRLKELVDESNKRSRDIARRLKEEVDRLGGSEEAVRKIREELERMKEENDRVLKEIDKDLKDDDRKIEEVVERIERILRELRERVR

SEQ ID NO: 9223 - protein, 176 aa, Artificial Sequence; identical to SEQ ID NO: 9222
  Synthetic

SEQ ID NO: 9224 - protein, 176 aa, Artificial Sequence
  Synthetic
DEKEVADELERKIDEALKESHEIDKRSDDHDKEVLKKSEKRLRELDEEIKDVLRKLEKKVDSELLKRVRDIITKLEKEVRDLLEESRKSIEDLHKHNRESNKDSRDIIRELRDRVRKLGGSREAVETIERILKRMIERNRAVVETNKKLNKEDEDKIREVVKRIREKLRKADEEVR

SEQ ID NO: 9225 - protein, 176 aa, Artificial Sequence; identical to SEQ ID NO: 9224
  Synthetic

SEQ ID NO: 9226 - protein, 181 aa, Artificial Sequence
  Synthetic
ETEDKVRELLKRIRDVAEKAREKVEELVRRNEEVLKRARETVERLVRKNEEVLREVAERARSRKLDEIRREIEKTIRDHKRIVEEVRKEIKRSIEEHRRKVEKVIRELEEVLKTIERIMRRKERDKKELEDTVRKVLEDLERKLERLEEESREVERRVKKVLDELKRKSEESEKRLEEAAR

SEQ ID NO: 9227 - protein, 181 aa, Artificial Sequence; identical to SEQ ID NO: 9226
  Synthetic

SEQ ID NO: 9228 - protein, 181 aa, Artificial Sequence
  Synthetic
DAEEVVRKLEEELKRLIDKLRKVMEESLKRVKESMDRSRKRIEELVRRLEKILRDLKRDREEIEEVIRELREIIERLKDKIKKDLDTSRRIADENRKDIEDVVRDLERIAEELRRIAARDGREDVLRKLKETVERVRRKVEEVIKKSRESVKRVEETNTRSLRELEETVREVEKRVREESR

SEQ ID NO: 9229 - protein, 181 aa, Artificial Sequence; identical to SEQ ID NO: 9228
  Synthetic

SEQ ID NO: 9230 - protein, 182 aa, Artificial Sequence
  Synthetic
SEVEKLLKDLKELLEEVKRRAEESHRDLRRLLEEVRKRVEDSNRELERELRRAEDLVRRGNKSSDLVEELRKIIEEMEKKHKDLVDELRELIKKVIDDHEKLIRDLERLIRRVEEELERKTRDRKMERVVEEIRREVKKVLEDLRRILKESEDAARKVLRDLERLVKHSKDTAREVLKRLKK

SEQ ID NO: 9231 - protein, 182 aa, Artificial Sequence; identical to SEQ ID NO: 9230
  Synthetic

SEQ ID NO: 9232 - protein, 182 aa, Artificial Sequence
  Synthetic
SEIEKLLRDLERLLEEVKRKAEKTNRDLEKLLEEVKRKVEDSHRKLKKVLDEVKDLVRRGDKSSELVRRLEEIVRRAREEHERLVRELEELIKEVERRHEEIIRELEELIREVDDRMRRTTKDERVKRLVEDVRRRVKEVLDDLRRIIEHSRRRAEKVLRELEKLVRESETKAREVLKDLKK

SEQ ID NO: 9233 - protein, 182 aa, Artificial Sequence; identical to SEQ ID NO: 9232
  Synthetic

SEQ ID NO: 9234 - protein, 176 aa, Artificial Sequence
  Synthetic
SEAERLLEDSKRVLDEIREDLKRLLKESEDVMREIEKTLEKLVRDVERVLDEVRKSRDDKKKVLDELRKILEEVEKRAKDLNEENKRIMDKVRREVEELIKRNEDIMREVEERAKRDNVDERVLRTIKDLHRRLSEEVKRVLDEAEELHRRLSERVREVLEDIRRLVEELIEEVRK

SEQ ID NO: 9235 - protein, 176 aa, Artificial Sequence; identical to SEQ ID NO: 9234
  Synthetic

SEQ ID NO: 9236 - protein, 176 aa, Artificial Sequence
  Synthetic
SEAEDLLRRSKERLDEVRKRLDELRRRSERVVEEIRRLLKELLDDVERVRKEVKEARDDKKKVLEELRRILKRVEDEVRDILRKNEDAAREVAKEVKRIDDDNERILRRVADKARKDKIDDRVLRTIEDTHRRLSEDVKRVLKEAEELHRRVTEEVKDVLRKIRETAERLEEEVKK

SEQ ID NO: 9237 - protein, 176 aa, Artificial Sequence; identical to SEQ ID NO: 9236
  Synthetic

SEQ ID NO: 9238 - protein, 176 aa, Artificial Sequence
  Synthetic
KEAEELLDTSRRVSEEVEKRLEKLLRESERVAEEIRKRLEELLRRVEKVLDELRKARDDKRKVLEEVTRALEDVERRVEEINRENKEEADRVRRDVERIDEENKRAAEEVKERARKRGIDEKVLKTIEDEHRRLSESVERVLRTAKRLHDEVSKEVRDVLEEIRRTVEKIIREVRT

SEQ ID NO: 9239 - protein, 176 aa, Artificial Sequence; identical to SEQ ID NO: 9238
  Synthetic

SEQ ID NO: 9240 - protein, 184 aa, Artificial Sequence
  Synthetic
SVEEVLKTLEDLARESSEEVRRVAEEIERSNRRVVKEVEKVLREIEELNRKILEEVERDLDSKDVDRLRREIERSLDESRKIIEKLRRDIEEVNKKSRKTIKDLEKENRDVVRKVRDIARKEDKMEEVLRELLKEVAKVVEDTRRKLEELLKENEEMDRDLKRKLDELLERNREVLERLKRKVD

SEQ ID NO: 9241 - protein, 184 aa, Artificial Sequence; identical to SEQ ID NO: 9240
  Synthetic

SEQ ID NO: 9242 - protein, 184 aa, Artificial Sequence
  Synthetic
SVEEVLKELEKLVRDSSREIKKVLEEIDKSNTDLLREVEDALRRIEERVKEALESVDRTVRSEDARRLKEELEELLKRVREIIERIKREIERVNERSREIIERLREDNDRVRKEVKKIIDKEDRVREMLERLLDTLRRRLEETRKELERLLTENKKKDDEVKEKLKRAEEELEDVRRRLEEKLR

SEQ ID NO: 9243 - protein, 184 aa, Artificial Sequence; identical to SEQ ID NO: 9242
  Synthetic

SEQ ID NO: 9244 - protein, 185 aa, Artificial Sequence
  Synthetic
SAEEVLRRLKEAIKRLIRDSERVLEEIRRTNEELIKRTEEVLRRVREKAERLIDDVRRRLSDDKRVKEVIDELKEMLERLEKKIREDIEELERNLRRNEKRVRDDIRRLEEMLKELERKISEVRGIDEALRRIEKEVRDVEKRSKETLEDSKRDSERVRKKSEDTLREIETRVEDVRRKAEEEVR

SEQ ID NO: 9245 - protein, 185 aa, Artificial Sequence; identical to SEQ ID NO: 9244
  Synthetic

SEQ ID NO: 9246 - protein, 176 aa, Artificial Sequence
  Synthetic
SESDRIRAIVKKVVDESKESLKRLKEETERVKRELDRVLKENKDKVRRLKEKAEEMKKLEDRKALKKVVDELRDALRESEEHIRKVLEDNERVLRRVEKEVKDDIRRLEKILEDIERELRSDVLREVAERVTRLIRDSERVLEELAREHEKASRKVKKVLDESKKIVDDVIRRVDR

SEQ ID NO: 9247 - protein, 176 aa, Artificial Sequence; identical to SEQ ID NO: 9246
  Synthetic

SEQ ID NO: 9248 - protein, 176 aa, Artificial Sequence
  Synthetic
SESEEIERTVEDVKRKSDKSLEESRRNVERLKEESEESLERNKDLVRRVAEKVEEVKRDSREEALRKVVRELEEALKRSEDHVRTDIKRLKDNLDRNRKKIEDDIDRLRRILEDIERRIRSEAADRVREEVTKVIKKSEDVLRDSERLHREVIKTSRDVLDKSRRLVEEIIRRVRR

SEQ ID NO: 9249 - protein, 176 aa, Artificial Sequence; identical to SEQ ID NO: 9248
  Synthetic

SEQ ID NO: 9250 - protein, 181 aa, Artificial Sequence
  Synthetic
SDVERVLREVEEIIRKARDRSREWLERVKKIIEKVKEDSKRWLDEVRKLIRDVEDIRRRGKADDKTVEKITREARKRDEEHKREVEKVAKTIEDLNRKHEEEVKDILRRVKELLEDLRRRSDTERVREVIDRIRKLLKDIIDEARDVNKKVRDLLKRIVEEVTEVNKRVKELVEEIVRRIK

SEQ ID NO: 9251 - protein, 181 aa, Artificial Sequence; identical to SEQ ID NO: 9250
  Synthetic

SEQ ID NO: 9252 - protein, 181 aa, Artificial Sequence
  Synthetic
DELREALKRVADIVRTIEEAVRKSLEDSKRIVDDIRRASKEALEEVEKIVRTLVEIVRNGRADEKVVRKIATDAEDLSRKHKEALDRILDELKKLNEENRRALEEILRRVKRLLEELKKDVDRKEVRDVIREVEKLLREVEKIVRDVNRESERLAKEVRDDATEVNERVKELLKRAEAAVR

SEQ ID NO: 9253 - protein, 181 aa, Artificial Sequence; identical to SEQ ID NO: 9252
  Synthetic

SEQ ID NO: 9254 - protein, 179 aa, Artificial Sequence
  Synthetic
SVVEELRRTVKELLDEIKRRDDRLLKEVEEVAREVERKDDELRKKVEEILRRIKELRDRGRVDKRDIDRIVEELRRISEEHKKEVERLKDDIRRRSREHEKEVRRLLEEAKEVLKRAKEENRVDDRVLKELKELMDEAKKNSERVNKKVEDLLRRLDESSRRVNEEIEKRLTELLKAVE

SEQ ID NO: 9255 - protein, 179 aa, Artificial Sequence; identical to SEQ ID NO: 9254
  Synthetic

SEQ ID NO: 9256 - protein, 179 aa, Artificial Sequence
  Synthetic
SVVEELLKRVRERLEDVDRVLRTWLEEVERLAEEVKRLDRELEKDVKRILDTIEELKRQGRVREEDIKRILTEAEKRSREHEKRVRDLLERLKREDDRVNEELKRLLEELKDELRKAKEENNVDDKALEDIKRLLEELRKRVEDVSRRVNKLLRDLEENSKRVNDELRKRVETLVERVR

SEQ ID NO: 9257 - protein, 179 aa, Artificial Sequence; identical to SEQ ID NO: 9256
  Synthetic

SEQ ID NO: 9258 - protein, 175 aa, Artificial Sequence
  Synthetic
REIEKVLKELRDIVRELEKLLEDVVRKIRKIVEETRKLLEDVVRESDKIHRDAKELMERAGVDERLVRRLDKHAKDHKKDVEDIIRENEENLKKLDKEVRDIIRELRELLKELEKANIREDELRKRIAELAERVKRMVKKLDEHAKRDFRRVEEEVRRLRENVKRVKDEVDEAVR

SEQ ID NO: 9259 - protein, 175 aa, Artificial Sequence; identical to SEQ ID NO: 9258
  Synthetic

SEQ ID NO: 9260 - protein, 175 aa, Artificial Sequence
  Synthetic
SEIEKVLEELRRRVEELEERLKTVVDELKKIARRTEEKLDKVREEIERIYREAKDLLRRAGVDERLLKRLDEDLKRLEKKVRDVKKENRDNLKRLEDRIREIIEELRRRAKRLEEANVRSDELRKAIAELERRVDKMLKELRDHITRDEDRVRRILEELRRHVERSLKRVREEVN

SEQ ID NO: 9261 - protein, 175 aa, Artificial Sequence; identical to SEQ ID NO: 9260
  Synthetic

SEQ ID NO: 9262 - protein, 181 aa, Artificial Sequence
  Synthetic
SELEKVLEDVERRLRELKERNDRVLEEITKIHEDAKRENDEVLKEISRAHKEATEELERKIGDKKRLEELKKELEKHNKEIEDSVRELKKKLRKHNEDLRKSVEEMKEELERALKEVREVIRDSSLEELRRKLKELEERSERHLEELRRSAETVLRESREHLRRLEDSLRRVRKKVKEETD

SEQ ID NO: 9263 - protein, 181 aa, Artificial Sequence; identical to SEQ ID NO: 9262
  Synthetic

SEQ ID NO: 9264 - protein, 181 aa, Artificial Sequence
  Synthetic
SEIETVLRDVKDKLEKLKRDNDKVLDEITKIHEEAMRRNDKVLEDIRRALEELKKRLEEKIGDKEELKELKKELDDALRRLKESVDKVKKELRDHNKTLEESVRRVKEKLDRVLEEVRKVAETARLEELKKELKKLEDESRKHLEELRRSLEEVTRRSDKHLKELKDRLEELRRKVEAATD

SEQ ID NO: 9265 - protein, 181 aa, Artificial Sequence; identical to SEQ ID NO: 9264
  Synthetic

SEQ ID NO: 9266 - protein, 181 aa, Artificial Sequence
  Synthetic
SELEKVLEEIRRELEKLERANKKVLDDAKRIHDKAKEDLRRVLEEIKRRLEELEKRLEEAIGDDKRLEELRKKLRKVLEELEKRARDVERELDEHNDRLRDSVRRMKRRLEEALKRIARVIETSRVEELRKELEDLRRESEEHLERLRDSARRVLEKVRRILKELRDRLRELAEEVKRATD

SEQ ID NO: 9267 - protein, 181 aa, Artificial Sequence; identical to SEQ ID NO: 9266
  Synthetic

SEQ ID NO: 9268 - protein, 181 aa, Artificial Sequence
  Synthetic
DELETVLKRVEDLLRRLAEELRRVLEEARETLERLKAANEKVLEEITRTHEEAKRRLDRDIGDKKELEELKKKLDRHNEEIRRSVEEVKKRNEEMLDTIRRKVETVKRKLDEALKRVAELIKTSRVEELDKEAKDLVKEVDEILKRIREELKKLKEDNDKHLEELKESLKRVKDEVDEARR

SEQ ID NO: 9269 - protein, 181 aa, Artificial Sequence; identical to SEQ ID NO: 9268
  Synthetic

SEQ ID NO: 9270 - protein, 181 aa, Artificial Sequence
  Synthetic
SELEDVLRDAERIIREAKEDNERVLRRLKETVEKLIKDNDEVLKKLTESHKKLTKELKDAIGDKKRLEELKKKLDEHNRRLKESVERVKRKNKKVLDELRRSVEEAKKENDRALDRLRRAIETSRVEELKEEIKDILRRNREHLEELKRRIDELRKENEKHLRDLEESIKEVEKEVRESRR

SEQ ID NO: 9271 - protein, 181 aa, Artificial Sequence; identical to SEQ ID NO: 9270
  Synthetic

SEQ ID NO: 9272 - protein, 181 aa, Artificial Sequence
  Synthetic
SEIETVLEDAERKIRELKKRLEDVLRRLAEIYTRAKELLKRVLDELRKIYEDLKKKLEEKVRDEKRLRELKRKLDEALRRHEKNIRDISKRLDDELRRHEEHIKDIMRKLDEILEELRRLAEKVRVEELKKRLDEVARRVEKVLRENEEEIKESLKEVEKMLRRNRKEIKDSEKEVDDEVK

SEQ ID NO: 9273 - protein, 181 aa, Artificial Sequence; identical to SEQ ID NO: 9272
  Synthetic

SEQ ID NO: 9274 - protein, 181 aa, Artificial Sequence
  Synthetic
DELERVLEDAETKIRDLKRKLKEVLDKLRRIYEELEERLKRVLEEIEEIYRRAAEALRRKVKDEDKLRELVKELKRMLDEHRDNIRRIKEDLRRRLKEHEDDIERAKEELDRILERLRRLIDKVRVEELKRELEEVAKRVEEILRRNEEEIKKSEEKIRKVLRDNREKAKRSLDRVREALK

SEQ ID NO: 9275 - protein, 181 aa, Artificial Sequence; identical to SEQ ID NO: 9274
  Synthetic

SEQ ID NO: 9276 - protein, 181 aa, Artificial Sequence
  Synthetic
DELKKVLDDARETSDRLKKENETVFRELEEIYRRLEKELRRVLRELEEIYRRAEDKLTKSVRDEDKLRDLRRRLKEELDRHRDNARRIVEKLKEMLDRHREDLERIREENDRLLEELERLIDDVDVSELDKRIRELERRNRESVKENRDRLKESADDVKRALDRNREELEESERRVKKAVD

SEQ ID NO: 9277 - protein, 181 aa, Artificial Sequence; identical to SEQ ID NO: 9276
  Synthetic

SEQ ID NO: 9278 - protein, 181 aa, Artificial Sequence
  Synthetic
SELEKALRDAEEIIKKAKKLLKEALDEAEKIYREAAKLLDDALREAEKIYREAADALDKKVKDEKRAREAKEELKRALKEHRDDAKRAKDELRKALEDHRRNIDKARRELDEIAKELRKLIKDADAKELRDRAKEAADRAKRAAEENRKKARESLERAKRAAEDNRKKAEESLKRAEETAR

SEQ ID NO: 9279 - protein, 181 aa, Artificial Sequence; identical to SEQ ID NO: 9278
  Synthetic

SEQ ID NO: 9280 - protein, 181 aa, Artificial Sequence
  Synthetic
SEIEDVLRRAKEISDRLKRENDRVLDELRRSYEDLERELEEVLRKLEETYRRAKEELRKKVRDKDKLKEIMKRLDEELKRHEEDIRRIVEELRERLDRHRRNIDKLKKENDDMLRELEKLVDKVDVSELRERIERLKERNRKSLEKNKRDIARSEEEVRKALERNEDEIRRSEEEVKKALK

SEQ ID NO: 9281 - protein, 181 aa, Artificial Sequence; identical to SEQ ID NO: 9280
  Synthetic

SEQ ID NO: 9282 - protein, 181 aa, Artificial Sequence
  Synthetic
RELEKVLEDIREISERLEKRNRDVLKELEDIYREAKKRLDDVLRKLKETYDRAEEELRRKVRDEKKLRDIVRELRDLLRRHEEDIRRIKKELDDELRRHEEDIERIRRRNEEALRELTKLIDKVDVSELRKDLRKLAEDNRRSLEENKKEITESLKEVEKVLERNKDEIRKSKERVDKALE

SEQ ID NO: 9283 - protein, 181 aa, Artificial Sequence; identical to SEQ ID NO: 9282
  Synthetic

SEQ ID NO: 9284 - protein, 181 aa, Artificial Sequence
  Synthetic
SELERVLDEMRKIIERLEEELRKVLEDLRRIYEELKRKLDDSLRESERRVRELKEELDRKVRDKDKLREVKERIDDALRRSRKRIEDIKRKLDDALRRHAEDIERIIKELRDILEELRKLIDKVRVEELKDTIDKVKKRVEDALEKNRRDIDESRKEVDDELRKDEEKAERLAREVEKAKE

SEQ ID NO: 9285 - protein, 181 aa, Artificial Sequence; identical to SEQ ID NO: 9284
  Synthetic

SEQ ID NO: 9286 - protein, 178 aa, Artificial Sequence
  Synthetic
SSDETVKEKVKKVARDVDRHVEKLRKALEEMEREVREHVKRLEDELRRMDEEVKRVREEPVDEERLKRITDRLREELRKLHEDSKDTIRKLREKLEKLKKETEDTKRRLRKKLEDLRREKGADEKVLRDAERIVRELERKLDKVDTEIAETVKRLEDTIRDVNRKIKDRVDKLRKELE

SEQ ID NO: 9287 - protein, 178 aa, Artificial Sequence; identical to SEQ ID NO: 9286
  Synthetic

SEQ ID NO: 9288 - protein, 178 aa, Artificial Sequence
  Synthetic
DSDEKVKRVLEELRKEVKEHVERLRARAEDMSREVKDHVRKLKEDLERMERDVERVKRKPTDEKTLKEIADRLRKILEDLERETEETKKRLEEKLRKLHKETEESKKRLEDKVDTIRKEKGASEEVLERVRTEVERLKRELDKVNEDIRKRVEELKKELDEVDDEIRKEVDRLEEALK

SEQ ID NO: 9289 - protein, 178 aa, Artificial Sequence; identical to SEQ ID NO: 9288
  Synthetic

SEQ ID NO: 9290 - protein, 178 aa, Artificial Sequence
  Synthetic
SSDEEVKKKLEEVKEEVKRHVERLKRALEKADRDVKDHVRRLKEVLKRMADEVEKVRREPVDEDRLEKVVRDLERKAEKLKRETEETAKRLRDILKELKDRTEKTKKRLRDKVREIRKEKGADEKVLKDVEEKIRRLEKELDEVNEDIERKVRELEKELRAVDEEIKRIVDRLRKELE

SEQ ID NO: 9291 - protein, 178 aa, Artificial Sequence; identical to SEQ ID NO: 9290
  Synthetic

SEQ ID NO: 9292 - protein, 178 aa, Artificial Sequence
  Synthetic
SSSERVKTELDRMRKEVKRHVEELEKELKRLTEKVKRHVEESKKNAEEITRKVEDVRRKPTSEEDLKRIIEDLRRNLKENRDRTERTKEDLRREVERLKKETEDTKRELERKLKRLREEKGASEEVLREVTREVTRLREELDEVNKRVEKRLEELERELDRSDEEVTRIVEELVDELR

SEQ ID NO: 9293 - protein, 178 aa, Artificial Sequence; identical to SEQ ID NO: 9292
  Synthetic

SEQ ID NO: 9294 - protein, 178 aa, Artificial Sequence
  Synthetic
SSEEDVRRKLEKMRKEVDEHVRKLEEDLKRLAEEVKRHVEDLERVAKEVADRVEEVRRQPTDKDELRKIVEELRDTLKKLRDRTEESKKRLEKLLRDLKKETEETKKRLRESLRKLEEDKGADKKVLDTARDILRKLEKKLDDVDEKIERIVEKLKRELDEVNKRATETVERLIRELK

SEQ ID NO: 9295 - protein, 178 aa, Artificial Sequence; identical to SEQ ID NO: 9294
  Synthetic

SEQ ID NO: 9296 - protein, 178 aa, Artificial Sequence
  Synthetic
RSDEELEKKLKELKEEVDEHVKRLEETARRLDKEVRRHVEESKRNLEEMDREVKEVRRRPTSEDELREIVKKLEDNLRRNRERTERSKERLERELDRLRRETEETKKRLRDKVKEIRDEKGADDKLLERAERTVRELERRLDEVNDRIRRIVEELKRKLDRSNEEVTRKVRELSKELE

SEQ ID NO: 9297 - protein, 178 aa, Artificial Sequence; identical to SEQ ID NO: 9296
  Synthetic

SEQ ID NO: 9298 - protein, 178 aa, Artificial Sequence
  Synthetic
DELERVVEEVRKRIERLKEELRRVHERSREIVDRLRKELEKSLEEVRRIVEDLKRKLRERGVPEEMLTRLERKLEEDEKRVKDIIRELERKLEEIAKTDKEIIDRLDEKLRELEERLKRGLREEDLERMADKLRKDVERAVRKNETDADKLRREVEEVVRRNKKTAKELEDEVRKELT

SEQ ID NO: 9299 - protein, 178 aa, Artificial Sequence; identical to SEQ ID NO: 9298
  Synthetic

SEQ ID NO: 9300 - protein, 178 aa, Artificial Sequence
  Synthetic
SEREKVAKEATDIVEELKKTLKDVHRRSKEIVERLVKKLADVNKDSRDKAEELKKRLDDRGVDKRVKKELEDRLRKLHRDDERIIKRLRDELKRIEKEDRDIIRRLDKELKDLARLLDKGLREEDVKRIAKKLEEDVRRVVRKNEEEIKKLAEEVDRVVEDNKRLVEELKRRVDEALK

SEQ ID NO: 9301 - protein, 178 aa, Artificial Sequence; identical to SEQ ID NO: 9300
  Synthetic

SEQ ID NO: 9302 - protein, 181 aa, Artificial Sequence
  Synthetic
DADDELRKIVEEADRRSKESVREIEELLRKLEREVEDIVRRIKKLSDDTRKRIDDLRKEGKTEELKKRVEKELRDNKEELKKILEEVRDRARRAREVLKEMEDRSREVVERIRKVLEDLRRKGVVSEEVLKRVEEIIKRLEEENRKVLEELERSVRKLEEDIRKVLEDNDRVVKELARRID

SEQ ID NO: 9303 - protein, 181 aa, Artificial Sequence; identical to SEQ ID NO: 9302
  Synthetic

SEQ ID NO: 9304 - protein, 181 aa, Artificial Sequence
  Synthetic
SAVEKLEELVERVARRIDELVKKIKELLDDVERKSEKTVRDLERLSEETKRSIDDLRREGKTEELLERVRREAKKNREKVKRVEERSRDLVRRVREMLKKIKREVDELLREAEESLKELKDRGVVSEEVLKRVRETLERLERKIKKVLDELKKRVEELRKKNEDVVRRNEEVVKKLVEDIR

SEQ ID NO: 9305 - protein, 181 aa, Artificial Sequence; identical to SEQ ID NO: 9304
  Synthetic

SEQ ID NO: 9306 - protein, 184 aa, Artificial Sequence
  Synthetic
SVEDVIRDLRRVITESRELSERVLERIEETTRRSKEESKRVADKVKKSSDDLREAVERIRTPEEEKDRLEKELRKLVEENRKSLEESKRDLDDLLRRNRKTVEESRRELDELRDRVEKVLKRGVSDEKAKELLRRVKEVVDRNKEKLDRDLERNKRRIDENRRKLEEDLRRNRKVVEELRKRLE

SEQ ID NO: 9307 - protein, 184 aa, Artificial Sequence; identical to SEQ ID NO: 9306
  Synthetic

SEQ ID NO: 9308 - protein, 184 aa, Artificial Sequence
  Synthetic
SVEDVAREIREVLRRLEESVRKVAEDNRRNNEELRRLVEEVLKRIRDSSDRLRKVVEDIDVPEEKKKELDKRLKKLIEDNEDSIRRLREKIERSIRENEERLKRITDRLRKLRKEVEDVLRRGVSDEVLERLLRRVREAVKELEDELERSSREDNRRSRELEEELKKDLKRNEDEIRDVERALK

SEQ ID NO: 9309 - protein, 184 aa, Artificial Sequence; identical to SEQ ID NO: 9308
  Synthetic

SEQ ID NO: 9310 - protein, 184 aa, Artificial Sequence
  Synthetic
SVEEVLRRAEEILTRSKEESRRVFEEIRETTERSKEVSKDVARRNKEILDDLKRKIEEVDVPKKDLERLEKRLRELEEHLERFLRESKRELDELLRKNEDTLRKSKRKLDELRKEVKEMADRGVSDDVLRRLLEKIEEVVRDNERELKEDLDRNRKVIEENRKKLEDHLRRTEEEVDDIRRKLK

SEQ ID NO: 9311 - protein, 184 aa, Artificial Sequence; identical to SEQ ID NO: 9310
  Synthetic

SEQ ID NO: 9312 - protein, 184 aa, Artificial Sequence
  Synthetic
KVEEVSKKLKDVLRELEELVERVLERNRENNERLRDKVRKVLEENKEVLDRLKKEVDDIDVEERKLRKIKRELEELERHLRETARRLEKKIRDSIEKNERDAERLRRDLKRLDEELKEVEARGVDEEDLRRLLEKIKREIDRLAKELEDSSRDDNRISRELDEELKRHLEETRRAVREISEKLR

SEQ ID NO: 9313 - protein, 184 aa, Artificial Sequence; identical to SEQ ID NO: 9312
  Synthetic

SEQ ID NO: 9314 - protein, 172 aa, Artificial Sequence
  Synthetic
SRAEEVLKKVEEEVKKLEDELRRSSERNNRESRRLEDELKKVLDKNRKLVEDLRRARLDEEDVRRTLEESEEENREIDKRARDELRKMEEENKDVLRKAREKLERIRKEIEEANLPKEVVDELRRVLERLRRVIEDVIRRNKEDTDRLEREIERVRKELKDINKKLEEDVRR

SEQ ID NO: 9315 - protein, 172 aa, Artificial Sequence; identical to SEQ ID NO: 9314
  Synthetic

SEQ ID NO: 9316 - protein, 179 aa, Artificial Sequence
  Synthetic
DEAETLLRDVERKVEELKRRSEKLLRDVEELVRRLLRSNEESLKKVKEDLKRLKDLVRRGDVDEETVKEVKKRLKEILDEDKKELREVIERAKEISKRHKEEVEKAVEDLKRILEDMARKGVRDEVLREVDRVIDDVRRALKKVNEEIEEVIRRLKRESERVNKEAEEIIRTLEDALRK

SEQ ID NO: 9317 - protein, 179 aa, Artificial Sequence; identical to SEQ ID NO: 9316
  Synthetic

SEQ ID NO: 9318 - protein, 172 aa, Artificial Sequence
  Synthetic
DDLERVLEEIRREIERIRRELEESNEENKDIVRRIEEELKELLKDNKRIVETVTKANLDRDDVRRVLEESKRKNRRVLERLERLIRESERRNKELLDRAREKIDRLRKRLEEANLDREVLERLEKELDRLRKDIERVADENRKINDTLRKRIEEVMARLDEINTDLKDRVET

SEQ ID NO: 9319 - protein, 172 aa, Artificial Sequence; identical to SEQ ID NO: 9318
  Synthetic

SEQ ID NO: 9320 - protein, 177 aa, Artificial Sequence
  Synthetic
SSDEVLKEIEEIIRRLEEEVRRVNKEVNKSTEDLRREVEEVLRRTNELIEELERRVTRTEELKRVIDELRDRDRKVRRRVERVIEESKKRDDESRKRLTRAVEKLRKDLKKLADDNVPEEALRKAIKDVRDIVKKVKDELKEWRDRNKELVDRLSEELKEWLKDVERVLKELTDKDR

SEQ ID NO: 9321 - protein, 177 aa, Artificial Sequence; identical to SEQ ID NO: 9320
  Synthetic

SEQ ID NO: 9322 - protein, 177 aa, Artificial Sequence
  Synthetic
SLEEVLERIKRIIDELKREAKRVLDETNTLIREVKKRLEDVNRDVNRLIEELRERVTDTEELKRVIERLRREDEKSKREIEREVETLKKRDDEVRKKLDDVAKKLRDDLKEAAERNVPEDMVRDLERRIREVVKRLKEDLERWKKEVEDEIKRLEDRLKEWLDRVREMLEKLREEDR

SEQ ID NO: 9323 - protein, 177 aa, Artificial Sequence; identical to SEQ ID NO: 9322
  Synthetic

SEQ ID NO: 9324 - protein, 177 aa, Artificial Sequence
  Synthetic
SSEEVLKTIKDIIDELRKEAEEVLRRTNESTKELEERAEEVNKRVNDSTRELAKKVTDTEELKRIIEESKKKDEDSRREVKKVLDESRKRDEEVRRSLKKIIEDLEKELRDLARKNVPEEMLDEVKKRAEKVVEDLRRELRKWLEDNKRLVEKLEKELRDWLKENKELVKELEDRDR

SEQ ID NO: 9325 - protein, 177 aa, Artificial Sequence; identical to SEQ ID NO: 9324
  Synthetic

SEQ ID NO: 9326 - protein, 177 aa, Artificial Sequence
  Synthetic
SSEEVLDTLRKLIEDLRRRAEEVLERTNRSTDELRKRVEKVLEETNRLIKKVEDDITRTEEAKTIIDKLREDDERVKRRIERVLEESKRKDEEVRKRVKDVLDRLREELKRLREENVPEDMLREALERIKEIIDRLERELEEWIKTNEDLVRRLTEDLERWLRTVAEILKRLKDEDD

SEQ ID NO: 9327 - protein, 177 aa, Artificial Sequence; identical to SEQ ID NO: 9326
  Synthetic

SEQ ID NO: 9328 - protein, 181 aa, Artificial Sequence
  Synthetic
DELERVEEEIKKLSDDSRRVIEEVRRRLEESNKDLERRLREVEKRLKELTDDIKRTAERNNVDKTLEKKLRELNERNRKSKEDLKRRSDETRERNDETIRESRKENDELERRVEEASRRGLDRELLRKLLDDVRRVVERNKRKLRKDLEDNKREIERVKREADKDLEDHERVIRKLKEDIR

SEQ ID NO: 9329 - protein, 181 aa, Artificial Sequence; identical to SEQ ID NO: 9328
  Synthetic

SEQ ID NO: 9330 - protein, 181 aa, Artificial Sequence
  Synthetic
DELERVVEEIRELSRDSERAIEEVRRELKRTNDENRESAKRVAEELKKLTDKIKEEADRNNVREDLDRELRRLNEDNKRSIRENEERLKKTKRENERTIEESKKRNKELEDEVEKAIKDGLDRELLRELLKEVRRVVEENKRRLEEDLKKNRKKIDDSNKELRKDLEDHRRVIEKLEREIR

SEQ ID NO: 9331 - protein, 181 aa, Artificial Sequence; identical to SEQ ID NO: 9330
  Synthetic

SEQ ID NO: 9332 - protein, 175 aa, Artificial Sequence
  Synthetic
DELEKVKEDIKRLLDDVRREVEKVNRDSRRLLEDLRRVVKEVSDRSKELAEDLERKVGRDEDVERVKRELEKLNRELERILEEAAREVKRLNKEHDDKLKKAEDDVRKLLEELERDNLPVEDVLREVKRLAEEVKKETKRVLDEIKKLVEDVARELERILEDSERLIREVEKRAT

SEQ ID NO: 9333 - protein, 175 aa, Artificial Sequence; identical to SEQ ID NO: 9332
  Synthetic

SEQ ID NO: 9334 - protein, 175 aa, Artificial Sequence
  Synthetic
DEIEDVLRRAKKLLDDLRRVVKKANDDSRRLLKKLKDKVEEVSRRSRRLAEDLERTVGRDEDVERVARELERLNRKLEDELRRVATEVRDLNDKHRRLLEKAEREVKRLIDELRERKLPVEDVLREVRKIIEDVKRASEKILEESRKLIEDVERRLEEILKRSEDLIRTVKERKR

SEQ ID NO: 9335 - protein, 175 aa, Artificial Sequence; identical to SEQ ID NO: 9334
  Synthetic

SEQ ID NO: 9336 - protein, 185 aa, Artificial Sequence
  Synthetic
DELERVLEEIKRLLDDVHRESKRVNEESERLVKKLHDDSRRVLTEIKKLLDDVRRVVEELPKTDELRRKLEEAERRIRELLEELKRRDKELEERAKRLNEKTKEDDKDAARKVEDLLRRLKDENGTREKVEEILRRVRELVKKWKTELERALEENEREVERWKRDLDRILEEVRRVVERVEREIR

SEQ ID NO: 9337 - protein, 185 aa, Artificial Sequence; identical to SEQ ID NO: 9336
  Synthetic

SEQ ID NO: 9338 - protein, 180 aa, Artificial Sequence
  Synthetic
DELEKLLEDIRRELKRVREDDKRHNDKVKETLDRVRELIKRLLELIKKVADEIRSLKRRVPREEIRKRLKELEKRLEDLRRTIDKLLKDLEDTSRRWNEESKKRLEELRRRLEKAERDVPRTREVEEVKRRIEEILKEAEETNRRSHEKAKRVLEELKDIVRKVLEELRRLLRELEEEVR

SEQ ID NO: 9339 - protein, 180 aa, Artificial Sequence; identical to SEQ ID NO: 9338
  Synthetic

SEQ ID NO: 9340 - protein, 180 aa, Artificial Sequence
  Synthetic
EELERLREEIKKILDEARERDETLLREIRREHEKNKRADEEHNRRVEETLERIERLAERVPREEIKKRLEELKRRSEKWNRDSERSLDEIRRRLKKWNDESRERLERAKRRLEKARRDVPDTEEVRAVERELRKILDEIRKTNKEVHDRIRELLERSKRSNDESHKKVEDVLRELKKRVD

SEQ ID NO: 9341 - protein, 180 aa, Artificial Sequence; identical to SEQ ID NO: 9340
  Synthetic

SEQ ID NO: 9342 - protein, 181 aa, Artificial Sequence
  Synthetic
SETDEVRKELRKLLEDSRRAVEEVKKKLDDSNKEVRDRVRRIREELKKLEKEVREIKRKNSDEKELADVVRRIREKAKELKKELRKILEDLDKKYKDLKKENKDILDDLDRRAEELKDRLRKNNVEEELLKELEEVLKRLRELHKRTIDEVEKSAREVKDEIRRLEEELDRVLKKLEDALR

SEQ ID NO: 9343 - protein, 181 aa, Artificial Sequence; identical to SEQ ID NO: 9342
  Synthetic

SEQ ID NO: 9344 - protein, 181 aa, Artificial Sequence
  Synthetic
SLDEDVERLIKELKDEARKLNEEMKEYVRDSERKVRRLNEEIRRLIEELKRKAEELKRGNLRRDDLKRRLDELREEVKEIKRRIEKVSEDLKKENDEAKRRLEEVSEELKKKVEEIKEELERRNVDDRVKERLERVLDEAEKSNEETLRELDDVSRRIEESNRRTLAELEKVLRDIEKDVT

SEQ ID NO: 9345 - protein, 181 aa, Artificial Sequence; identical to SEQ ID NO: 9344
  Synthetic

SEQ ID NO: 9346 - protein, 173 aa, Artificial Sequence
  Synthetic
SELEKLVEDLRRAAKESHERNEKLLDESRKTVEDVKRKLEEILRRSEEVVREIKKKKKDIDKEKVKRDLDELHKRTRDLLEKLKRELDELHKRSKEELEDNKRRLEELLEKVERDGADEEVRRRVEKLIEENRRSSRRVEEEDKRLLKELKDAIKRVEEEDKKLVEELRRSEK

SEQ ID NO: 9347 - protein, 173 aa, Artificial Sequence; identical to SEQ ID NO: 9346
  Synthetic

SEQ ID NO: 9348 - protein, 173 aa, Artificial Sequence
  Synthetic
KEVEDLVKEVKERIEESHKENKRILDKARRVVERVETDLRRILEESKRTVEDIERRKERIDEREVEKRLEELHRETKKLADKLRDELRKLLEDIERELRENEERLRRLLEKVERDGVDEEMKKAVDELIERNKRSSDRVREEAKKLIDRLEEVIEKVERDDEKLVRDLEEELR

SEQ ID NO: 9349 - protein, 173 aa, Artificial Sequence; identical to SEQ ID NO: 9348
  Synthetic

SEQ ID NO: 9350 - protein, 185 aa, Artificial Sequence
  Synthetic
SSLETLEKIARDLLREVKETLDRVREESRRLLEEVRRVAEESRKEVERLLKELEEVIRREVRDEKKVEELKRKLEELKRRVDEEHKKSDKRLKEILEENERTLKEVEDRLRELEKRVEDDLRRGLDDELLRELAERVRRVVKKIKDELRDDLRRTREEVERLKERHKELVKRVKEAVDKIREEIR

SEQ ID NO: 9351 - protein, 185 aa, Artificial Sequence; identical to SEQ ID NO: 9350
  Synthetic

SEQ ID NO: 9352 - protein, 179 aa, Artificial Sequence
  Synthetic
KEVEEILRDVARLVEDNRRVLERILREVEKLIRDNEERLKEILERSKDLVRRIEELIRRGEVDEDTVREIIERSEELNRRLEKHARDSERRLEKLAEDLRRHAKRSLDELKRLLDELEKRRSDVEEVRRAIEELLKDVERAYEEVVRRIEKLLDDLRRKYEEVKKENERLNRRVEEAAR

SEQ ID NO: 9353 - protein, 179 aa, Artificial Sequence; identical to SEQ ID NO: 9352
  Synthetic

SEQ ID NO: 9354 - protein, 179 aa, Artificial Sequence
  Synthetic
DDVEDILRDVERLVEENRRRLEEIVRESEDKVRKNDETLKKILEDVKREVERVERAIERGEVDEETVERIKKKLEELLEELRKHMRKSREESKDLNRRLREHAERSLRTLEELVRDLKRRRSDVKDVVRAIEELLKDVEEKYRRVSERNKELNKRVEDTYREVMKEIRRLLERVDRRAR

SEQ ID NO: 9355 - protein, 179 aa, Artificial Sequence; identical to SEQ ID NO: 9354
  Synthetic

SEQ ID NO: 9356 - protein, 175 aa, Artificial Sequence
  Synthetic
TEVERLVERVKEIVEEHRKKLEELARRSEELVERHEKKLRDLLRESRELVERAKKENSKDRTVLKELRDLVRELNKRSKELSEETRRRVAKTNDDSRKTSKRTREEIERLLRELERDDARDEIKERLKELLREAEEVSRRVNKRNEDLLRRLEKVSREVNERNEDLLEELDRTVN

SEQ ID NO: 9357 - protein, 175 aa, Artificial Sequence; identical to SEQ ID NO: 9356
  Synthetic

SEQ ID NO: 9358 - protein, 175 aa, Artificial Sequence
  Synthetic
DEVERLVEEVEKLVEEWIRDLERILDESRRTVEEWKKELKRLLDRSKRLVEDAKRKNSKDERVLRELDERVRRINEESKRRNDEAKKESERSLREIEKRNKEVADRVRDILEELRRKDAKKDIERRLERLMEELHRVSKEVLDADRELLKELHDVSREVNKRNEELLDELRKTVT

SEQ ID NO: 9359 - protein, 175 aa, Artificial Sequence; identical to SEQ ID NO: 9358
  Synthetic

SEQ ID NO: 9360 - protein, 175 aa, Artificial Sequence
  Synthetic
DEVEETVKRVREEVERWKEELKRIADEVRRLVEKVKDDLRRLLDESRKLVEEVRRENSRDDTVLKRVRDEVRKINEDSKRLLEEAKRRVEKIRREIKKRNDELEERARRILRELDRRDAKSEIKRRLEELLKELHKVSKDLDKILEELLREVEEVVRRVNETNKKLLKELDETVR

SEQ ID NO: 9361 - protein, 175 aa, Artificial Sequence; identical to SEQ ID NO: 9360
  Synthetic

SEQ ID NO: 9362 - protein, 175 aa, Artificial Sequence
  Synthetic
SEVEELVKRAAELADEARKRLERIMEEVKRLVDEWEKELKKLLDESKELVEKVRRENSKDERVLREVKKKIEEINKRSREENKKVAEKVREIEERIERLLEELKELIKRIEDKARREDLKEKVREDLRRLLDTLRKVVEELKRRLRELLKKLHDVSRKVNEENERLLRELEETVR

SEQ ID NO: 9363 - protein, 175 aa, Artificial Sequence; identical to SEQ ID NO: 9362
  Synthetic

SEQ ID NO: 9364 - protein, 175 aa, Artificial Sequence
  Synthetic
DEAEKLVDEVRELVRRHKETLKEILERVKELVKRWKDTLDKLLRDSEELVRRVKEENSKDERVLRKARKEVRDINEESKERNKELEKRMRRLEREIERVDRETEERIRRILDDARRKDLRDRVKEELKRLLKELKEMSKRLTEELRRLLKELHDRSREVNERNKRLLEEVDRTVK

SEQ ID NO: 9365 - protein, 175 aa, Artificial Sequence; identical to SEQ ID NO: 9364
  Synthetic

SEQ ID NO: 9366 - protein, 181 aa, Artificial Sequence
  Synthetic
DEIREVEERNRRSNEEMKKAVREVEKDIERVAREIRKRAEEVSKRNEDINREIRKTLRDKKKLTDILRESKELNRKLEELVKRIKDELDKLLEDLRREVRKIEEESKRTNEDLKKKAKDGTSDETLRRVIRKSEELLKRLKDRLDEVRKRVEEILKRAEERLREVIKRSEELLEEVKRESD

SEQ ID NO: 9367 - protein, 181 aa, Artificial Sequence; identical to SEQ ID NO: 9366
  Synthetic

SEQ ID NO: 9368 - protein, 177 aa, Artificial Sequence
  Synthetic
SLLEEVEKTLRKIVEDSDREIKRVSKKNKETVKRLEELMREVNRRSTEIVKRIRDSDLRTEELKRLEEEARKLNDESREILERVTRESERLDRELKKHADESRERAKDLIRRLKKLGDKEMLDRIIEEAKRLHEENKRKLEEVERRSEELLKELKRRLEELIKRNDDLLREVEERKR

SEQ ID NO: 9369 - protein, 177 aa, Artificial Sequence; identical to SEQ ID NO: 9368
  Synthetic

SEQ ID NO: 9370 - protein, 181 aa, Artificial Sequence
  Synthetic
DEVEEVIRRAEELVKEVKKRLEELIRESEALLERVKRRLERLIEESRRRLEEVKKKVSSGLDEKTLKEVLDRLRRDVERINEESKRVLDEVEKEIRRTNKKIKEILDRIRKKVEDLEKELRDRGAKDEIKKRLRKLLEEIKKVVDDVRETNKRTLERLEELARRVNEENKKILDDLEEAVR

SEQ ID NO: 9371 - protein, 181 aa, Artificial Sequence; identical to SEQ ID NO: 9370
  Synthetic

SEQ ID NO: 9372 - protein, 181 aa, Artificial Sequence
  Synthetic
KEVDEVVKRAEDLLREVKKRLDEVIEDSERLLREVRKRLEEIIRESEKLLEDVRKVVERGLREDELKKLLDDIRKKIRETDEKLKKTLEDLRRAADEINRRTEDILRRIEEKVKRLRDELRTRGAKKEIEKRLEEILREIKKLVEEVNRRNEDILRRLEREVEKVRRVNEKTLERIEETVR

SEQ ID NO: 9373 - protein, 181 aa, Artificial Sequence; identical to SEQ ID NO: 9372
  Synthetic

SEQ ID NO: 9374 - protein, 185 aa, Artificial Sequence
  Synthetic
SLVEDIRRDVKRILKEIDKLVKDIEEENRRASRESERLVETIRREVKEVLDRIRKLVRDVPLDEKTLRRIEERIERLRDSIEKMERRMEELNKEHERRVEKILREIEKLLRELDKELEDVAKEPGDRKLIEEIRRRLKKALEDIRRLIEESRKRVEESLTRSRKLAEDIRRELEDVLRKVDEDAK

SEQ ID NO: 9375 - protein, 185 aa, Artificial Sequence; identical to SEQ ID NO: 9374
  Synthetic

SEQ ID NO: 9376 - protein, 177 aa, Artificial Sequence
  Synthetic
SRVKEVADRVRDIVRRIKDEIKEHVDRLRDVIRRIKEKLEEHSRRLREIVERIRASNLDKDEVKDKLDKMKKNAEEVHEDIKRKLEDAKRRTEKTKRDIERKLEKLERDVRRAADTVDEELLKRLEDIIRKLLEDIKRVVKELEEVSRTLLREIEELLEENRKSMEKLLRDIEEEAR

SEQ ID NO: 9377 - protein, 177 aa, Artificial Sequence; identical to SEQ ID NO: 9376
  Synthetic

SEQ ID NO: 9378 - protein, 177 aa, Artificial Sequence
  Synthetic
SKVDEVVKRLEDAVREIKKEIDKHSKELADEVEKIKKELKDVSDRNREVVRRIREANLSEKDVTETVKEAEKRNRDIEKRIREELKRLEDNVRDMHRKLDKKLKELKRTVEEMRRSVDEKKAEELRKRVDDLLEEIRRLLEENKRTVDKLLDEIKRVLEDHRRSVEELLREIDKDAK

SEQ ID NO: 9379 - protein, 177 aa, Artificial Sequence; identical to SEQ ID NO: 9378
  Synthetic

SEQ ID NO: 9380 - protein, 175 aa, Artificial Sequence
  Synthetic
SEVDEVLREAKRIVDEVHKDNERATEESRRLVKKVHEENEEMVKDIERIVKEVKDANIDEKLVTEILKEIEEALKEAARRNKEVKDRLRELSRRVSERNREILEELKERLDRVRERRKDVKELEREVEKLLKRIEESLRRHRKENKRLLEELDRSLRELAKIVKEVLDEIRERTR

SEQ ID NO: 9381 - protein, 175 aa, Artificial Sequence; identical to SEQ ID NO: 9380
  Synthetic

SEQ ID NO: 9382 - protein, 175 aa, Artificial Sequence
  Synthetic
SEIEDAVRRIEKRVEEVHRENKKLTDESRKLVREVDEENKKVSRESKKLVEDARRRNADEDIIRELLKELKRRSEEVSKRNEKILKELDDKSKEVAKRNKRVLDEIKRTLKEVLDRRKDARELSEKVREVLEKIKKSLEDHRKANEDLLREIRDSLKKHRDENRRLLKELEETRK

SEQ ID NO: 9383 - protein, 175 aa, Artificial Sequence; identical to SEQ ID NO: 9382
  Synthetic

SEQ ID NO: 9384 - protein, 175 aa, Artificial Sequence
  Synthetic
SDLDRVAKELTEIVERIIRELERLTEKSRDIVRKVHKENEDAVRKIRKIVEEVKRKKIDEDTVREILRRIREELKRLKERNEEILERIKEESERVERTIRKVLEEMKRKLDRVRERRPDARELEKRVRDLLRRVEEALRRHKEENRKLLEDIKRSLEEVAKEVERVLKEIKDTAR

SEQ ID NO: 9385 - protein, 175 aa, Artificial Sequence; identical to SEQ ID NO: 9384
  Synthetic

SEQ ID NO: 9386 - protein, 175 aa, Artificial Sequence
  Synthetic
SEMDDVLKKLAETVKRIIERLKKLTDDSRRLVEEVHRRNDKLSKESREAVRKAEERNIDEKDVRKLLEDLKKKSEEVAERNKRILDTLREISKRAEDEVRKVLKELEKTLKELEDRRPDVRELSEEVKKLLDEVRKALKRHKDENDKLLKEIEDSLRRHKEENDRLLEKLKESTR

SEQ ID NO: 9387 - protein, 175 aa, Artificial Sequence; identical to SEQ ID NO: 9386
  Synthetic

SEQ ID NO: 9388 - protein, 175 aa, Artificial Sequence
  Synthetic
DEAREILKEIRDIADELRKRLERLTERSERIVREVDKENRRVVEEIREIVERVKKAKIDEDTVRKILREIEEKLDRVAKRNEKILKKIEDDSRRVAKEVREILKKIEDILDDARRKRKDVRELKKEVERVLEEIRRLLEEHERANRKLLKEIRDSLRELKKRVEEVLREIKEATK

SEQ ID NO: 9389 - protein, 175 aa, Artificial Sequence; identical to SEQ ID NO: 9388
  Synthetic

SEQ ID NO: 9390 - protein, 175 aa, Artificial Sequence
  Synthetic
SEAEEMLERIKRRVEEVNKENKKMTDESKKIAEDVDRDNREVLREIKRIVDEVRKRNIDEDTVRKIEREIEKTLEDVRRRNDEILKDIRRLSEEASRRNKEILDTIRETLKRVRERRKDVKELEKEVERVLKEIKDSLRRHRKENEDILREIKESLDELDKEVKRVLKEIRDTAR

SEQ ID NO: 9391 - protein, 175 aa, Artificial Sequence; identical to SEQ ID NO: 9390
  Synthetic

SEQ ID NO: 9392 - protein, 175 aa, Artificial Sequence
  Synthetic
SELEEVAKELRKTLEDSTRENKKHTDDVRRIVDEVDKRNRKAVEDIRKIVDEVRKRKIDEDLVREILRRIAEKLRRLREENRRILEEIKKSLRDMERRNEKINRETKEKLDRVKERRKDARELEEIVKRLNERDKEVLEKDAEDVKRVLEEIKESLERVARDVERVLEDIKRATD

SEQ ID NO: 9393 - protein, 175 aa, Artificial Sequence; identical to SEQ ID NO: 9392
  Synthetic

SEQ ID NO: 9394 - protein, 181 aa, Artificial Sequence
  Synthetic
SALEDLERKVEELIRRLDELLREHRETLERLIRELDKLLTDHHRRNRELLERIKDVVRKAGRELEDIREILERLKKLNEESADIVRRVKEELKRILEKSEKEVRELKETLRRTVEEVKRVKDEDKLRKIVEELERLVDEVRRSLEKASKRLKDLVKEVKKRLEDITRESEELVRRVEERTR

SEQ ID NO: 9395 - protein, 181 aa, Artificial Sequence; identical to SEQ ID NO: 9394
  Synthetic

SEQ ID NO: 9396 - protein, 181 aa, Artificial Sequence
  Synthetic
SALEELKKEIKRVIEELKRALERHHKENEELRKRIDEVLKEHHDANRRLLEEIKELVRRAGRDLEEIRRIEEELKELDKESEERVRKIKEELKKLNEDSRKKVEDLKKELEDDLKRVDKVKDEEKLKEIVKEIRKKVEELKDDLRRMSEESRRLVEELEERLRRLTERSKRLVEDVRRRVT

SEQ ID NO: 9397 - protein, 181 aa, Artificial Sequence; identical to SEQ ID NO: 9396
  Synthetic

SEQ ID NO: 9398 - protein, 172 aa, Artificial Sequence
  Synthetic
SEKEELDRKIEDVRKKVEETSRKLKRVNDESKKEVKRTSDELRKKSKEVNEAVEREGVREEILKEITDLSREMEERSEKLNREVDRLVKESRKRSKELNDEAERLLRDLARKKELDVEEAIRRLKETLDRHREEVEDLIRKSREVLKRHEERVRELIKRHEDTLRELKKRAK

SEQ ID NO: 9399 - protein, 172 aa, Artificial Sequence; identical to SEQ ID NO: 9398
  Synthetic

SEQ ID NO: 9400 - protein, 178 aa, Artificial Sequence
  Synthetic
SEVDELMKRLKDEAEDIKEKVERLIREWEEAARKIAERVEKLVRDWERVIETLRDLKKRVDKEELKKRLKDLEEEVKREDKKSKDDLRRLEERVERENKKSEDRLEELRKRVKDNENEDKDLAERLRRVLREVERLVRTVNKKHREVLEEIRKEVERVNDEHRRVLEEIKRRVEKDVK

SEQ ID NO: 9401 - protein, 178 aa, Artificial Sequence; identical to SEQ ID NO: 9400
  Synthetic

SEQ ID NO: 9402 - protein, 184 aa, Artificial Sequence
  Synthetic
SAEEKLDTEVRRIAEEVKRIIDELRKVTEEVEKRIREINKTSEDTSREVKKTIREVLKRLTDEETVRRVEEKLRKLDKESRDTLRRSEETLRELKRRSDETIRRLERILEKLEEEVEDMKRKPLDEDTVEEVLERLRRALEKADKLVKDHIKRLKDVLRAIEEDHRRHLERLRRMLEEIKKEVT

SEQ ID NO: 9403 - protein, 184 aa, Artificial Sequence; identical to SEQ ID NO: 9402
  Synthetic

SEQ ID NO: 9404 - protein, 184 aa, Artificial Sequence
  Synthetic
SVEEKLTREAERLLKRIEEVIRRLRDANRRSADRIRRIDEKTRREVEKLKKKIRELAKRVKDEEVLRRIEKLLRDLKREVEEVSRRNEEILRESNKRLREVEEKLREILRRLKERLDRVREKGIREDLVEKVIKTMRKIVEDLERDVRKVIRDDEELVERLRRENEEVIKKLREIVKRLEDETR

SEQ ID NO: 9405 - protein, 184 aa, Artificial Sequence; identical to SEQ ID NO: 9404
  Synthetic

SEQ ID NO: 9406 - protein, 184 aa, Artificial Sequence
  Synthetic
SLIERLREVAEDLKRRIRKVLEDLRRANEESAKRIRDIDRRTREANRESNERIKEIAKRVDDKRVLDELKKIVEDSNDEVRRVSERNEEILKRSNEDLKRVEDDIKRVLDELEKTLEEVDRKDIKEEKVKKVIDDMERIVREIEEKIKRVIERDKKLVKKLEEDNRRVIKKDKDLVRRLEERTR

SEQ ID NO: 9407 - protein, 184 aa, Artificial Sequence; identical to SEQ ID NO: 9406
  Synthetic

SEQ ID NO: 9408 - protein, 177 aa, Artificial Sequence
  Synthetic
SLKERLRDDAKRLLDEDRKVLEDLERRAKEINDRNEEIVKKLRDKVREILERIDREVRDKDEVTRVKRKIEEILRTLEDRIKKVNDRTREILDRVRKKSEDSLRELKRLLDEVRRVDKEEVIRRILEELRELVERSERTVRDIERELDELIDKSRRDVEEIIKDLERELEELKRKTK

SEQ ID NO: 9409 - protein, 177 aa, Artificial Sequence; identical to SEQ ID NO: 9408
  Synthetic

SEQ ID NO: 9410 - protein, 177 aa, Artificial Sequence
  Synthetic
RVREELEKAAEEVRRRDRRVLEELEKEVRRINEDNKRVHETSREVVERILETIDRRVRDKDKVREVKRDVERILEELEEINKKVNEDTKRIRDTVEKISEESERRLKRLTDEVRRVTDEDVIRKIVRELEELVRESKETVDDIIRRLEELIRKSREDNRKIVEELKKLLDDLTREEK

SEQ ID NO: 9411 - protein, 177 aa, Artificial Sequence; identical to SEQ ID NO: 9410
  Synthetic

SEQ ID NO: 9412 - protein, 177 aa, Artificial Sequence
  Synthetic
SLKETLEEVVKRVLETDKRLLEKNDRTVREVNERNRRVHEESRRAVERILEEIDREVRDDKRVREAKTRVREILRRLEEENREVNKRTKRSLEESRKTSKKSLDDLKRLLDEVRRVTDEDTIRRIAKEADDLLEDSRRKVEDNSRRLKRLLEESKKSNEEIVRRLEDLLRRLKKESE

SEQ ID NO: 9413 - protein, 177 aa, Artificial Sequence; identical to SEQ ID NO: 9412
  Synthetic

SEQ ID NO: 9414 - protein, 177 aa, Artificial Sequence
  Synthetic
SLKEELEEDVKRINDRNEEVLKRLREVAKKLLDDDRKLLKELKKVVEDVLRDVDREVRDKDKVKEVKERIKKILKEAEEMSRRSLEELKRILAEVERRVAELNKETKRILDEARRVKDAEVIKKILEELEKLIKDSEDTAREIIKELKELVERSKRKVEEILKELEDLLEELKRRAD

SEQ ID NO: 9415 - protein, 177 aa, Artificial Sequence; identical to SEQ ID NO: 9414
  Synthetic

SEQ ID NO: 9416 - protein, 178 aa, Artificial Sequence
  Synthetic
SMEEKAEEVIKEVDEENKRLIEEAEKVIEDVEREDRRLVDELRKVIEKVERTIERDLKDLKELLEEARKRLREVEDRLRRLHERTRREVEEVRKRLKELLDESKRNLDKVREDLERTGDKDVIEEIIERLRRHVEDSEEKIRRIIRRLEEVLKRSKEDIERIIEELERLLDEMRERAR

SEQ ID NO: 9417 - protein, 178 aa, Artificial Sequence; identical to SEQ ID NO: 9416
  Synthetic

SEQ ID NO: 9418 - protein, 178 aa, Artificial Sequence
  Synthetic
DMDRKLKEEIKRAERRDKELVKDIERVIEEVLRANKELIERIEKVIDDVRREIEKRLKDLKELLKRAKDELDKVRKDLKRLLEESKKNADRVREELKKLHEKSKEDMERIKRELDETGDKDVIEEIIERIKDILRESEREIRRIIKELREHLKKSADRIEKIRRELERLLEKLEDDAR

SEQ ID NO: 9419 - protein, 178 aa, Artificial Sequence; identical to SEQ ID NO: 9418
  Synthetic

SEQ ID NO: 9420 - protein, 182 aa, Artificial Sequence
  Synthetic
SEIEKILRELEEHIKDSEREHRELVERLRDHIRRSKEEHRDLIRKLEERIREVERRVRKDGKADERLREDVERLLRDIRRELKRNEDNVKEVNDRIRKRVEDNERDVDRENKRIKDELARSDNKELKDRLKRVSEEHKRRIEDLLRRTKRVSERHREEIRKLLETTERAIKKARETIERLRK

SEQ ID NO: 9421 - protein, 182 aa, Artificial Sequence; identical to SEQ ID NO: 9420
  Synthetic

SEQ ID NO: 9422 - protein, 182 aa, Artificial Sequence
  Synthetic
SEIDRLLERLEDHIRKSAKRHRDLVEELREHAERLKRDIERLLEELEKTVRDIEKEVRERGKVDKRIEDRMREVLKRLEDRLRELREDVRRVNEEIKREVRDNEEDVKRVNRELRERLKDSDDEDMKRKLEKVSEEHERKIKELLDRTKRASEEHDERVKRLLDELRRVLKEAEERLRELKR

SEQ ID NO: 9423 - protein, 182 aa, Artificial Sequence; identical to SEQ ID NO: 9422
  Synthetic

SEQ ID NO: 9424 - protein, 182 aa, Artificial Sequence
  Synthetic
ERIDRIIKELEDLVDESRKRNDDLVRELKKHIKESKDEHDRLVEELDRFVEEVRKRVEKDGKLDDRMEKEVEELLREVEDRLRRNKKNVDEVNTKIKEDLERNREEAERALKRLEDDLKDSDDEDAIRKLEDVLRKVRETHERLLDKSRDVSRKHREDIKELLKKTKTVIDRVRKRIKELRK

SEQ ID NO: 9425 - protein, 182 aa, Artificial Sequence; identical to SEQ ID NO: 9424
  Synthetic

SEQ ID NO: 9426 - protein, 182 aa, Artificial Sequence
  Synthetic
SEVERIEEELRREIEKVDRDNKKIVDEARRSIDELRKDVEDILRDLRRLVDEVEKMARRGEVDEETVKEIERRLEKLLREIEEKSRRHLERLEERLRKVHKENREVEKRLKERLEEVRRRGLSEELLKRVEDVVDEVRKRLERIDEKTRKAVKEVTDRNDELLKRVREVVKEVRARLEEIRR

SEQ ID NO: 9427 - protein, 182 aa, Artificial Sequence; identical to SEQ ID NO: 9426
  Synthetic

SEQ ID NO: 9428 - protein, 173 aa, Artificial Sequence
  Synthetic
SEKEKVDKVVKKVAKRIKDLLDEIKRVADESNERLERLLRRLEEASKRSKKKLKDDNLPEDLLKEVTERNERLLREARKVIKRVKEENKRLADEVKEEIDRVRETLKTLRDLVDERDVDTLIKELEDRIDEVEKRIRELIERDKRLVEEVERRIAELIRRDERLVEELKKREE

SEQ ID NO: 9429 - protein, 173 aa, Artificial Sequence; identical to SEQ ID NO: 9428
  Synthetic

SEQ ID NO: 9430 - protein, 173 aa, Artificial Sequence
  Synthetic
SEKEKLKDVVRDVERLIKELMERLERVHERTNREITRLLEDARRAMERSNKKLTDLNLDEDELREARKRNKELLREVERIIEEVRRRDEELRRRNKKTIDDVRRELKRIEEEADEKDVDDLLRRLKELIERVRKLIEDSIKELRDIVKEVKDRIKTLIERDKELVKRLEDRAR

SEQ ID NO: 9431 - protein, 173 aa, Artificial Sequence; identical to SEQ ID NO: 9430
  Synthetic

SEQ ID NO: 9432 - protein, 180 aa, Artificial Sequence
  Synthetic
SEVDKLVRDLERHIEEAKRRVEELLKEIKKLVEDTKREAKKLLDTLRKKVEDVERENSKDRKDVKKVEEDLARVREEIEKLLRDDERLLREIEERAKKEVDKVRKDNERLREDVERRLKDLEEMLRKMREVSERHKKTIDELRKELKKVLDEWRRRSEKIFEELDEVLKRVEERVKEVER

SEQ ID NO: 9433 - protein, 180 aa, Artificial Sequence; identical to SEQ ID NO: 9432
  Synthetic

SEQ ID NO: 9434 - protein, 180 aa, Artificial Sequence
  Synthetic
SEVDELVRRLREHIRRAKERVEELIKRIKTLAKETTDRARKLIEDLKRHIDDARRKNSKDERVLARVREDNDRLEEEIKRLLKEDRDRLEEIKREIDKDVKKVKDDNDELEKRVRKDLKDLREVLKKIKEVSDEHRKEIERLRKRLEEVLREWEDTSREVLERLKEVSKRHRDEIREVAR

SEQ ID NO: 9435 - protein, 180 aa, Artificial Sequence; identical to SEQ ID NO: 9434
  Synthetic

SEQ ID NO: 9436 - protein, 180 aa, Artificial Sequence
  Synthetic
SEMEDLIRRLREHIEDVRRKVEELIRELEDHIRRAEESVKKREDDLRRHIEEVRKRNSKDEDDRKKVEEDNRRLDEDIKREVRKVEEDNRRLMKRVEDLVREVEKNNEELRKRVEDRLKDLKEVLDEARRVSKEHKDTLEKLLRKAEEASERHKREIERLLKELKEVSEEHRRRIDEVRR

SEQ ID NO: 9437 - protein, 180 aa, Artificial Sequence; identical to SEQ ID NO: 9436
  Synthetic

SEQ ID NO: 9438 - protein, 178 aa, Artificial Sequence
  Synthetic
SEVEELIEDLKRHLKEVADRVEELERELRKHLEEHHRRVREIIRRLEDLLRKAEETRTDEKLKEDLERMLREVEREVRDSERHAKEVNKRVREKVRRIEEHVKRRNKDVEEKVERDVRREDLKRRIEKVSRDHERTVEKLVRDLERVSREHERTVKENKERIKKVLDDARKRVDEVKK

SEQ ID NO: 9439 - protein, 178 aa, Artificial Sequence; identical to SEQ ID NO: 9438
  Synthetic

SEQ ID NO: 9440 - protein, 173 aa, Artificial Sequence
  Synthetic
SEVEKLVRELEDVLRKIERKVRELSKDNKRVLDENKKRVEDVSRDNERAMREIEELRRKVDAKDIRERLKEIRDKNRRINEESKRLLRELEKKNEKMLREIEEDLRRLADEARKKTRDEELKKVLEDVKREVEKLLEEIKRSLEEARKTVKESNDEIRESLERLEEKVRRIEK

SEQ ID NO: 9441 - protein, 173 aa, Artificial Sequence; identical to SEQ ID NO: 9440
  Synthetic

SEQ ID NO: 9442 - protein, 173 aa, Artificial Sequence
  Synthetic
DEVKDLVKRLEEVIKRIDEVVKEVDRRNREVLERNRELVERSIRELREVLDRIRRRKKDVDRKDIEKILKELEDKSRKINEESKELLDRLRKENEKILREIEERLRELEDEARKKRRDSELDKVLEDVKRKVEEILRRIKRSLDEVERDVRRSNEENKKVTKEVREAAEEIKR

SEQ ID NO: 9443 - protein, 173 aa, Artificial Sequence; identical to SEQ ID NO: 9442
  Synthetic

SEQ ID NO: 9444 - protein, 173 aa, Artificial Sequence
  Synthetic
DEVEELVRRLREVLEEIRELVERVNDRNRRVLEENRELVTRSIEELRRALERIERLSKDVRREEIRKILEELEKRSRDINRESEELLRRLAKENKEILDRIKKILDDLREEAKRKTRDEKLKKVLEEVERRAKKLLRDIEESLRRVAREVERSNEENKKVTKEVADAVREIER

SEQ ID NO: 9445 - protein, 173 aa, Artificial Sequence; identical to SEQ ID NO: 9444
  Synthetic

SEQ ID NO: 9446 - protein, 174 aa, Artificial Sequence
  Synthetic
DEEKKARDVLERWRKRSEDLLRKAEDVLREWRERSERSFKRLRDVLEEARKRVEELNVPEEILREIRRRLEEMKREIEKLLKEDRDALKELADRIRKIVEDDRRKLRRIEKIVRETKIDDELVREIEEVVKETEKRVEELIKEIREMVKKNEREVREIERRLEETLEKIDRDRK

SEQ ID NO: 9447 - protein, 174 aa, Artificial Sequence; identical to SEQ ID NO: 9446
  Synthetic

SEQ ID NO: 9448 - protein, 171 aa, Artificial Sequence
  Synthetic
SEEEEIEKALRDWREELKRLLETIERLLREWKRRVEELKKRIEEALKELKKILDDKGVPEEVRKEIEERIRRLRRRVEEDEETVDREIRKIEEHVKRDATEVDKLIRELKKRREDVEEVKKKLEKEIKKNRENVDRLRRRLEEEVKRNERSVEEIKRRLDEIARELDERKK

SEQ ID NO: 9449 - protein, 171 aa, Artificial Sequence; identical to SEQ ID NO: 9448
  Synthetic

SEQ ID NO: 9450 - protein, 171 aa, Artificial Sequence
  Synthetic
SEDEEIKEALKEWRDEVRRLEEKIRRVLEKWERDVRRLKEEIKKSNEDLRRRLEEKGVPEEVRERIKERSERDKKKVKEDEEEVRRRKREIEEHLERDKRRVEKLIDDLRKRRDDVEEVKKRLKRLIEENRKNVKRLEERIREAVKKNEKSVEDSERENRDIARELDEKRK

SEQ ID NO: 9451 - protein, 171 aa, Artificial Sequence; identical to SEQ ID NO: 9450
  Synthetic

SEQ ID NO: 9452 - protein, 182 aa, Artificial Sequence
  Synthetic
EEVERLKERLERLSERSKEIAKRVHEENKKLSEESRKLVEDVHRENEEAAKRLEDVARRNELPEEVLRKELDDVRKRNKEILDTLREISKEVEKRNRKILEEIRKRSEEVRREVEEVERRLRGRELLERLRRVLEEHREVNERILEEIKRSLDEHKDTNRKLLEEIEKSLRDLEEIVRRLEK

SEQ ID NO: 9453 - protein, 182 aa, Artificial Sequence; identical to SEQ ID NO: 9452
  Synthetic

SEQ ID NO: 9454 - protein, 182 aa, Artificial Sequence
  Synthetic
REIEEIEKEVRDVSKESEDIVRTVHDENRRASERSRELVKRVDEENRKAVEDLERVARENREPKEALDKRLEDLKRRNEEIEKRLEEISREVSRRNEEIKKTIEKLSREVAKRLKEAEDRLKGDELLRRVRKLLEDHKRVNERLLEEIEKSLKRHREENERLLEEIRKSLEDVERVVEEIKR

SEQ ID NO: 9455 - protein, 182 aa, Artificial Sequence; identical to SEQ ID NO: 9454
  Synthetic

SEQ ID NO: 9456 - protein, 182 aa, Artificial Sequence
  Synthetic
SELEELEKRLRKAVRDLEEIVDRVRKDLERASDDSRRIVEEVHRENRKVAKELKEVRDRNEEDRTVLRDKLRRVAKRNEDILRKIKEDSKDVKRRARKILKEMADLLDTVRKEIEEVAKDLKGEELLEALERLLRELEKIVRKLLRELEEMLRRHEKTNRELLERIRRSLEELAKIVEDLET

SEQ ID NO: 9457 - protein, 182 aa, Artificial Sequence; identical to SEQ ID NO: 9456
  Synthetic

SEQ ID NO: 9458 - protein, 182 aa, Artificial Sequence
  Synthetic
DEIEEIKKELDELSKRSEKIVRDLERELREASKESERLVRKVHDDNRKALEELRDVRRRNDEDDKVLEDRLRKVEEENKRIKDELKKRSEDVAKRIEDILRDIERRSKEVAERAKEMEDRLKGDELLKEVRRALEEHERVNRELLERIRRVLEEHKRVNEELMREIDRSLKELAEIVKRLKD

SEQ ID NO: 9459 - protein, 182 aa, Artificial Sequence; identical to SEQ ID NO: 9458
  Synthetic

SEQ ID NO: 9460 - protein, 182 aa, Artificial Sequence
  Synthetic
DELEELRKELKKMVDEIEEIVRRVDKENRDASRESEELVERIVEEVRKAVTELKELKKRNESDRKELEKKLKEVAKRIKDLLRRLKEISDRVAEKNKRILEEIEKRLRDVEERIKRIEDELEGDELLKEVRKALERLKEEVKRVLEDIRRSLEEHRKVNERALRRIEEVLRDLERIVEEVKT

SEQ ID NO: 9461 - protein, 182 aa, Artificial Sequence; identical to SEQ ID NO: 9460
  Synthetic

SEQ ID NO: 9462 - protein, 182 aa, Artificial Sequence
  Synthetic
SEVERLKDELRKASEELKKEVEEIEKRLREMSERSRKLVEELKRTLKEIEKELKDIVRKDKEKKEELKRIVEEADRLVKEIEDRLRRLNEKSEEDAKEVDDRLKRKLDESRKRIKEVEKDLKGDRLKEEVERVLREHEKSLERLRERLKELLERHHKTNEELLREIKEALERLEKIVKDLTD

SEQ ID NO: 9463 - protein, 182 aa, Artificial Sequence; identical to SEQ ID NO: 9462
  Synthetic

SEQ ID NO: 9464 - protein, 182 aa, Artificial Sequence
  Synthetic
DEVEDAERRLREMSERIEDLVRRVEERLRRMSEESKKLVEDVKRENDKSVEELDRIVRRDKEKKEALRKIVEDDERRVKEVKERLEELNRRSEEDVRRVKEEAKRLLEESDRIAKKLRDDLKGDRLKERLEKLLRDHRRSVEEVIKKLDRLLKEHHKVNEKLLRDIDKSAKEVKKVVEDKTR

SEQ ID NO: 9465 - protein, 182 aa, Artificial Sequence; identical to SEQ ID NO: 9464
  Synthetic

SEQ ID NO: 9466 - protein, 182 aa, Artificial Sequence
  Synthetic
SEVEEAEKELREMSKTSTRLVEELEERLRRASETLKKLVDDVKRELDKRLEDIDRRVARNKEKKEELDKELEEVDDRARKVKRTLEDILRESKRLVEKIEEDLKKLDEDSRRSVDDVRRRLKGDRLKERVDRLLEEHHKVNKRLLERIEEVLRRHETTLRELIKEIDKLLRDLKKRIDDVKK

SEQ ID NO: 9467 - protein, 182 aa, Artificial Sequence; identical to SEQ ID NO: 9466
  Synthetic

SEQ ID NO: 9468 - protein, 182 aa, Artificial Sequence
  Synthetic
DEVREVKKELKKIAEELRKLIEEVREELRKMSKRSEELVRELKKRNEKSVRDLERIVRKDKEKKEELDKIVKEDKDDVRRIKKELKDLNDESRKRAEEAKRELERIVDRVRERVEDVRRKLEGDKLKEELKEALKDLERELKELIEELKRLLDEHHKRNEDLLREIDKSVRKVEEDVRRLKK

SEQ ID NO: 9469 - protein, 182 aa, Artificial Sequence; identical to SEQ ID NO: 9468
  Synthetic

SEQ ID NO: 9470 - protein, 185 aa, Artificial Sequence
  Synthetic
SEVDEVRKELERLVREIKKLVEDSKRNLDRLSKELEERVRDLERDARRLVKELRDLLKENRDEKTVKELIETLKDRVRRTLERIKREVDENRRYLERNKRELERLIRELKKRLEKLLRDVEREIKDKEVRDDVRRLIREVDEELKKAKEDLDRAHEEHEKSTERLRERIKEVVDRVREDIERTKN

SEQ ID NO: 9471 - protein, 185 aa, Artificial Sequence; identical to SEQ ID NO: 9470
  Synthetic

SEQ ID NO: 9472 - protein, 171 aa, Artificial Sequence
  Synthetic
DEERRIEKVLKEWEKRTRDLARELERVNREHKKTSEDVLKKLEEINREVRRVVKEENLPEDALRELEKRLEEDHERIEREFRKDKKRLEEDHRRVREEVERSRKKLEELRRRVKDVEKLRRLIEEVIREDERRVERVKRNNKRLSEETEKLVEDVRRNNERLVKEVRDRSR

SEQ ID NO: 9473 - protein, 171 aa, Artificial Sequence; identical to SEQ ID NO: 9472
  Synthetic

SEQ ID NO: 9474 - protein, 171 aa, Artificial Sequence
  Synthetic
SEEEEIKKVLDEWRRRTEELRKDLDRVLEEDRRSVEEVKRRLDKVNEELRRRIDELNLPEEEVRRLRDTLKKDHDRIREEIKRSRDNTRRLREEVEREVKKSRDRLEELRKRVTDVERAKEEIKKVIKEDEDLVRRVRKYIEENSDELRRLVEEARKNNTRIAKEAEDTSR

SEQ ID NO: 9475 - protein, 171 aa, Artificial Sequence; identical to SEQ ID NO: 9474
  Synthetic

SEQ ID NO: 9476 - protein, 171 aa, Artificial Sequence
  Synthetic
SEKEEIDKVLKEWEEMTRRLVEELKKSHDEDRESVKRLLERLRDVNRELKEIIDRANLPEESVRRLEEKLRRDHKRVERAVDESRKNTERSEEEVRRAVERSKEKLEDLRRRVTDVEKAKETVRKVIKEDRDLVREFKKYNEENSDRMRKLVKDIKENNRRIVEEARERSR

SEQ ID NO: 9477 - protein, 171 aa, Artificial Sequence; identical to SEQ ID NO: 9476
  Synthetic

SEQ ID NO: 9478 - protein, 174 aa, Artificial Sequence
  Synthetic
SKEEKLREALKKVRKDVKDLERHIDRSVKRNKEEVDKAKRELERSLEELRRRLEELRRTEELDRELKRLEEKNKEMLKRIDESLKESKKRNDKVKRELREELKRLEEEIRDAERKGLPVEELLERLERTLRRMREKVRKLDKENKDHTEKVKEDVKRVHDENDKVREDVDRKDK

SEQ ID NO: 9479 - protein, 174 aa, Artificial Sequence; identical to SEQ ID NO: 9478
  Synthetic

SEQ ID NO: 9480 - protein, 185 aa, Artificial Sequence
  Synthetic
REVEELVKEIERVLEETKKRSEDTKREVEKVLEDTKRLVERLRKTLEELLRELDKRVRSGLDEETLERVLREVRKKLKELADEARRVSEEDEKRLRKLEEDSKRLSDEDRKKLEKLEDEARKKVDGEELRRTLEKVLREWRDVNRKVNDTDRKVLEDWERVNRTVNEELKEVLERAKEDIDRVAT

SEQ ID NO: 9481 - protein, 185 aa, Artificial Sequence; identical to SEQ ID NO: 9480
  Synthetic

SEQ ID NO: 9482 - protein, 185 aa, Artificial Sequence
  Synthetic
DEVERLVEEIKKRIDETRKLLEELKKRIRKVLEETKDLVRRLLKRLRELLKELEERRRRGLREDELKRVLDDARRKIRKIEEDAKKMSREDRKKLRDLAEEAKDINRKDEEDLRRTEEELRRRVDGEELRRELKRVLDEWKKANDEVRRAMEEILKEWEEVNRKVNKDLRDVLEEVKERLREVAK

SEQ ID NO: 9483 - protein, 185 aa, Artificial Sequence; identical to SEQ ID NO: 9482
  Synthetic

SEQ ID NO: 9484 - protein, 185 aa, Artificial Sequence
  Synthetic
SEVEKLKKRLRDLLEELKRLSRRTKEDVRRVIKETRDRSKKTKEELEKLLREIRELRKRGLREKELKEVLDDARRKIEELARRSEELNRRDEDKLRKLAKESEELLRRAEERLRRLKKEVEEKVKGEDLRTEIKKILEEVKREIDRVRETDEKVLRDWKKANDEVRETDREVLRKIREDLKEVAR

SEQ ID NO: 9485 - protein, 185 aa, Artificial Sequence; identical to SEQ ID NO: 9484
  Synthetic

SEQ ID NO: 9486 - protein, 174 aa, Artificial Sequence
  Synthetic
RERETIEKVLDENRKSLEEVTETVKRVLDRWDETLKRLEEEVRRVNDKTRKVLEDLLREDKDLARRVKEELEKNLREVEDDKRRAEERMRELKRDVERVRKENEEELKKLRELLEKIDVKELKKRVKELSEKLREVLEELERRVREIVKRNKETVDESRKRNEELIKRAEDAAK

SEQ ID NO: 9487 - protein, 174 aa, Artificial Sequence; identical to SEQ ID NO: 9486
  Synthetic

SEQ ID NO: 9488 - protein, 182 aa, Artificial Sequence
  Synthetic
SEIDEVRKRVEKHSRDAKRLVDELREKNDRAIKTLERLLRELEKRNKKVIRDLEDVRTKNTEPEESLRRILKTVHDENRKVEEELRDILRRVEEENRRVIEELDRSLRESRKDLAEIEKRITDEDMVRELRRVLKENDESVRRLKREIEEVHKETERVVKEVLEEIRRVDEELKDVARKVET

SEQ ID NO: 9489 - protein, 182 aa, Artificial Sequence; identical to SEQ ID NO: 9488
  Synthetic

SEQ ID NO: 9490 - protein, 182 aa, Artificial Sequence
  Synthetic
REIEEVIKELKRHSEELEKELDRLRRENKEAIRTSKKLVEDLRRENTRAKEELEDVKRENRRDRTELRKLLERVHKRNEEVRETNRRLTERVARRNEEVKERLKRSLDESRRRVREVERRITDERALERLRRVVRENEESVERVLKKIDDIHEETKRVSDRSEKEIEDVDRDLKRKVEEVEK

SEQ ID NO: 9491 - protein, 182 aa, Artificial Sequence; identical to SEQ ID NO: 9490
  Synthetic

SEQ ID NO: 9492 - protein, 184 aa, Artificial Sequence
  Synthetic
REREKIKRILDELRKRVEELNRRNEELLRRLDKVVRDVNRTNKRLLEKLRKVADDVRRKLKDEPEEVLRTLDEILKKVEKEIKDTNDKTRKILEDARRLAEEVNRTSKKILEEVEREVKEVERENDREVDKVERTVEEIEKELTRLVEESEKEVKRIIEELKELLERSRKSVEDIIREVRKLAE

SEQ ID NO: 9493 - protein, 184 aa, Artificial Sequence; identical to SEQ ID NO: 9492
  Synthetic

SEQ ID NO: 9494 - protein, 184 aa, Artificial Sequence
  Synthetic
SEEEKLDRLLEELKKVAEEVNRENEKLLEDLERVVRDLNEKNKAALKKLEDAVRRLKEAIKDKPEDVLRTLEDDLRKVRKKVEDVNRESKEILDRVRKEIKETNEESKRILDRVEREADRIRRDKDDSVDRVEERLREIIKTLRKLLEDSKESVRKIIEELKRLVDRSIEDLERIIKELEDKVR

SEQ ID NO: 9495 - protein, 184 aa, Artificial Sequence; identical to SEQ ID NO: 9494
  Synthetic

SEQ ID NO: 9496 - protein, 184 aa, Artificial Sequence
  Synthetic
DRERRIETVLRKLKKVVEEVNRRNEKLLDDLRKVVTRLLEEDRRLLEKLRRAAERLKEELKDGPEEVLRTLEKILRDVERRSRESLKRLKEILDRAEREVREVNRTSREILERVKKEAERVKRDQDDDVTRVKEKIEKIIEELKKLLKDSKKRVEEIIRELEKLVDDSRREVEEIIKELKDRSR

SEQ ID NO: 9497 - protein, 184 aa, Artificial Sequence; identical to SEQ ID NO: 9496
  Synthetic

SEQ ID NO: 9498 - protein, 185 aa, Artificial Sequence
  Synthetic
DMREELERILKTLRDVSRESRRELKRLLDENEKTIREVKKRVDEILEKLRKVIDDVRRQGNDERAEDELRKILERVKKIADELKDRLRDSLKKSKEDIDRVARENEKLLRDAEDRIRRVAEADSRSKKVVDEVDKEIRELIRKDEEIVKEVAERVKKNSEDLRRLLEKARREIEEIIKELEERRR

SEQ ID NO: 9499 - protein, 185 aa, Artificial Sequence; identical to SEQ ID NO: 9498
  Synthetic

SEQ ID NO: 9500 - protein, 181 aa, Artificial Sequence
  Synthetic
DEDEIVRDVIRRLDEVLKKLEKTNTELDEELKRVVEELRKVNRTVDEELKRVLDELAKRIEDEDKVRRLEDRATKLIKKNEDHLRELEKAVEELEERNKRHLDRLREEAEKLKEEVRKVREDGRANDKLVKDLKRVLDKLEESSRRMLKKLSDALRELEKSSDKVVKDLRKVLKELREEVK

SEQ ID NO: 9501 - protein, 181 aa, Artificial Sequence; identical to SEQ ID NO: 9500
  Synthetic

SEQ ID NO: 9502 - protein, 181 aa, Artificial Sequence
  Synthetic
DEDERVEELLRELEEVLDRLAKLNKKLDERNKEVAEESKRLNETVDRELKEVLKRLEEKLEDKDKLRELKKKAEKLVRENRKHLEESERRHRKTAEDNKRHLERLEESARKLLEDLRKVKEDGRANSELVERIRRELERLKRSSEEVVKKLTEELKKDKKSSEEVVKDLRRALRELERAVD

SEQ ID NO: 9503 - protein, 181 aa, Artificial Sequence; identical to SEQ ID NO: 9502
  Synthetic

SEQ ID NO: 9504 - protein, 174 aa, Artificial Sequence
  Synthetic
SELEKVKEDIRRLLKRLKEDIKRIKDEIDRLLEELKRHLKEVEEEVDRILEELKDLKRRGTTEDTLRRVREEIKRLIKESEEALEKVKREIEEIKKRSEEKLKRARTEIKKIKDNVPRREKLERVKEDVERVLEEYRKRSEDLARRVEKVLREYKKRSDELEKRVEDVIKEVAD

SEQ ID NO: 9505 - protein, 174 aa, Artificial Sequence; identical to SEQ ID NO: 9504
  Synthetic

SEQ ID NO: 9506 - protein, 174 aa, Artificial Sequence
  Synthetic
KELEEVARKIDEELKKLDKNIRDIADEIRRILEELEKDLREIEKRIRDILRRLEDLKRRGTDERTVKRAEREIREIAKDSRRKLEEVRERIERIMRRSKKTLDDVKRRIEEEAKNVPRTDELKTVEDKVRKALREYEEKTRKVKKDVDEVIKKYKTDSDRVLDEVEKALREVER

SEQ ID NO: 9507 - protein, 174 aa, Artificial Sequence; identical to SEQ ID NO: 9506
  Synthetic

SEQ ID NO: 9508 - protein, 181 aa, Artificial Sequence
  Synthetic
RVEEKLKRVSDELKRAVDESNKKIEELLERLKRVHDETNKEITEILRELKEVVDKAREDGLDDERLKRILDEARDVIRRVRETDDDLRRRNKEMVDRLKDLNRKLEKRAEELIREVKDKIRTDELVEDIERKIEELIRRDDDLVRRAEEEVEKSIRELRRLVDEVRKEIKKIVKKIEDDVR

SEQ ID NO: 9509 - protein, 181 aa, Artificial Sequence; identical to SEQ ID NO: 9508
  Synthetic

SEQ ID NO: 9510 - protein, 181 aa, Artificial Sequence
  Synthetic
SREDKARELLRELEKVDDDHRRRVRELLERLKKVLEDHRRAVKDIIKRLDDELKRIKEEDDKGDKIEEILRRVRKKIRELEEHVKKTNEDIRRKIEELRRHLDETNKETNRKIERLRRELKEKKIDEEVAKEVKDIVREVEDHLRRVEEEVRRIIREVEEHIRDLERRVRELLEELKRRSK

SEQ ID NO: 9511 - protein, 181 aa, Artificial Sequence; identical to SEQ ID NO: 9510
  Synthetic

SEQ ID NO: 9512 - protein, 181 aa, Artificial Sequence
  Synthetic
SEEEKVRRLKEELRRVIEKHKKDVKEIEDRLREVDDRHRREVKKLIEELKKVLEDAKRRKREGKDMEKRLDELREIIKKLMRHAEKFNRETNKKIEEEKRHLEEANKELEKEIRDLEREVKETKIDEEVAKRVKEIIEKVERHITEVKKRAEELVEEVERHIRELKKRVEDLVEEIERDTK

SEQ ID NO: 9513 - protein, 181 aa, Artificial Sequence; identical to SEQ ID NO: 9512
  Synthetic

SEQ ID NO: 9514 - protein, 180 aa, Artificial Sequence
  Synthetic
DEKETAEELLRRIEKVIKRLEDTMRKLNKKLKEAIERHHRTAKKLLDDIERVIREVEKDRGDDRDVRRVLEDIKRKLDELRKRIEDVDKEVEDHLKRNHDKVRKILEDLKKLLDELRRLLDELRREELEDDVRRIIEEIDRLLRESEEDHEDLIRRLKRSLEELKRLAEDIIRKLSEDRK

SEQ ID NO: 9515 - protein, 180 aa, Artificial Sequence; identical to SEQ ID NO: 9514
  Synthetic

SEQ ID NO: 9516 - protein, 180 aa, Artificial Sequence
  Synthetic
REKEAAKRILDRIEKVIRDHHREAKRLNDELEKVIREHHETVKELLKRIKEVIDKFKKDKGDDRDVERIRKRLEELLKKLEDDARRVDKRLRDVLRRNHKEVREVNEEMRELLKRLADLLDELSVEELEETARRIIEKLKKSLEDSKRDHERLKKEIEDSLKRLTELVKKIIEEIERDRK

SEQ ID NO: 9517 - protein, 180 aa, Artificial Sequence; identical to SEQ ID NO: 9516
  Synthetic

SEQ ID NO: 9518 - protein, 180 aa, Artificial Sequence
  Synthetic
DEDEEARRLLEEIRKVIEEAEEEAKRLNERLRRVIKEHHRKVKELLDEIERVIEKVLRARGDDRDVRRIIKEIRERLERLREEAERVDRKLKEHLERNEKKVEEMRKRITKLLDDLRKRLKELSVDELRERVREIKEKLRKDLKDSEDDHRRMEEEIKKSLERLERLVREIIKDLEEKLR

SEQ ID NO: 9519 - protein, 180 aa, Artificial Sequence; identical to SEQ ID NO: 9518
  Synthetic

SEQ ID NO: 9520 - protein, 180 aa, Artificial Sequence
  Synthetic
KDEERAKRLLDEIERVIRRHHKTARDLNRELERVLKEHHDTARKLLEDIKKAIDDLKRTRGDDRDVDRILRDLERLLRELEKKIREVDKRAKEHIKENERRVKKVNDELRELLERLARLLRELDAKELEDKVKEIIDRIEKSLEESDKNHKKLIRELEKSLDDLRREAKEIIDDAREKAK

SEQ ID NO: 9521 - protein, 180 aa, Artificial Sequence; identical to SEQ ID NO: 9520
  Synthetic

SEQ ID NO: 9522 - protein, 179 aa, Artificial Sequence
  Synthetic
SAAERAEEVLRKLRESLERHKKVNKDLLEEIERSLREVAKDVDRVLKDIKRVLDELKRRRRDLEEVEERVRRILRTIEKLLKELEDDNRRILEELKRKSEEVAKRNEDIARELKDRLRKDKGARDEVEELVRRVHRENEKFSKESEDLVREVHERNKELVKRIRKILEDATRELEKAAK

SEQ ID NO: 9523 - protein, 179 aa, Artificial Sequence; identical to SEQ ID NO: 9522
  Synthetic

SEQ ID NO: 9524 - protein, 179 aa, Artificial Sequence
  Synthetic
DMKEEAEEVLKEIEEVLKEHRDINRRLLEEIKKSLEDLSREVERVLDEIRRLLKRAVEERPDVEELEEDVRRILREIEERLKDVRRRNREILERIKEESKRVSEEVKKILEEIKKRVTETQGADEEVRKIVEDLKKRLKELSEKSERIVRKVHRDNERVVREIRDIVRRLKKRLEDATR

SEQ ID NO: 9525 - protein, 179 aa, Artificial Sequence; identical to SEQ ID NO: 9524
  Synthetic

SEQ ID NO: 9526 - protein, 179 aa, Artificial Sequence
  Synthetic
SAKEKVDEVLRRIKELLDRHKKVNEEILEEIRRSLEEHREVNERLLETIDRLLKELKRSRKDLEEVEKRVRDILRRIKELSDEVAEENKEILKELRERSERVEKRVREILKEIKDRVTKDKGAREEVEEIMRRAEEELRKLSKESRELVKRLHERNEEMSRRSKKIVDEAKKELEDAER

SEQ ID NO: 9527 - protein, 179 aa, Artificial Sequence; identical to SEQ ID NO: 9526
  Synthetic

SEQ ID NO: 9528 - protein, 182 aa, Artificial Sequence
  Synthetic
SAEEELDRLEKELDKLLKEHHEENKRLLEEIDRVLKEHEETLRRLIKELREVLKEVKEKLRDKRKVDELDKRMRELEERLKAILEDSKRKVREIKERLKELNRESEKRVKEVKDTLRDLLRRNSEKVEKLREDVERVKRELEDLTRKSEELVKRLKDTLRRVSEELKRRVDEAKKEAREVER

SEQ ID NO: 9529 - protein, 182 aa, Artificial Sequence; identical to SEQ ID NO: 9528
  Synthetic

SEQ ID NO: 9530 - protein, 182 aa, Artificial Sequence
  Synthetic
SAEEELKRLLEENERVTEEHHKRNRDLLRRIDEALRRHEKTLEDLIRELDRVLRELERRLKDKEKVDRIRREVEKVKEELKRILEESRDIVRRAKETLKKLNEDSERESEKVLKRLREIVDKVSEKVDDLRRIIEESRRRHEELTKESEKLVREVEDILRRLSEELAELVKRVKDKLDEDAK

SEQ ID NO: 9531 - protein, 182 aa, Artificial Sequence; identical to SEQ ID NO: 9530
  Synthetic

SEQ ID NO: 9532 - protein, 182 aa, Artificial Sequence
  Synthetic
SAEETLKRLAERIRKLLEEHRETVKRVIDRLDKVLRDHHRENKRLLEDIDRVLRRLEESLKDEEKVKEIRRRVEEIKDTLRRLDERSRDRVRRVKKEAEDRLRRSEEEIRRILRELEEIVRRNKEKVEDLDRRVKEVERRLREMSKTIEKLVKDIERELKEASEESRELVERMKRELTEAEK

SEQ ID NO: 9533 - protein, 182 aa, Artificial Sequence; identical to SEQ ID NO: 9532
  Synthetic

SEQ ID NO: 9534 - protein, 182 aa, Artificial Sequence
  Synthetic
REIEEILKEIEKSLRDLEEEVRRILEEIKKSLEDLRESMERIVEEVDRRLRTLKEVFDRGELDEEKIKRVEDTMKKILDDVKEEIKRHHEDLRRILKEAEERIKEHHDRLRETLERLKDKTTDDRVRRIIEKLEEDLRRVNKKIKETLEEAAKRLEDADREIEKILRDLARKIRKVLEEIKK

SEQ ID NO: 9535 - protein, 182 aa, Artificial Sequence; identical to SEQ ID NO: 9534
  Synthetic

SEQ ID NO: 9536 - protein, 182 aa, Artificial Sequence
  Synthetic
SEVEEIERRIEKSLKELRERLEEAEKRHEELLERLEREIDRIEKELRKDLKRLRDMTRRGEVDEKTIDEEEERLRRKLEELKKIVEKVRKENEDLLRKWKRDIDEHHRELRETLKRAKDKTKTERVKKEIDRLEKRLEEVNEEIKKRLKELAERSRRVLERIKDRIRRAAEELKRVLDEVRT

SEQ ID NO: 9537 - protein, 182 aa, Artificial Sequence; identical to SEQ ID NO: 9536
  Synthetic

SEQ ID NO: 9538 - protein, 182 aa, Artificial Sequence
  Synthetic
SEIEEILKRLKELLKELKERNEDILRRVEKSLKDLRKKLEEIVRDLRRLLEELREMVKRGEVDEETIKKVMRDAEKILEDLRREIEEHHKKLRKILEDSKKENEDLEKRLREELKRVKDKTTDDRVREIIKTAEKELEKALRTSEDIDRRLEERLEKVNKEIREELRRAEEEIKRVLEEVKR

SEQ ID NO: 9539 - protein, 182 aa, Artificial Sequence; identical to SEQ ID NO: 9538
  Synthetic

SEQ ID NO: 9540 - protein, 185 aa, Artificial Sequence
  Synthetic
DELDRIRKEVKRISDKNRRHVERLDEEVRKLLEELRKHLEDLTREVERLLRELKEVKKEGKDEETVRRVLRELEERIRRLKKHADEANKELKDKIDELEKHIKKANEDSKKEIDELEEDLKRKTRTEEMRTKVEELRKRLEESLEEHKRAADELRKRLKKVLEEHEKRVRELEEELRRVLKEAED

SEQ ID NO: 9541 - protein, 185 aa, Artificial Sequence; identical to SEQ ID NO: 9540
  Synthetic

SEQ ID NO: 9542 - protein, 185 aa, Artificial Sequence
  Synthetic
DELEELRKLVEEISRENREHLKKLKKLVEDLSRENEKHLRDVDKRVKELLEDLERLTRRGLDEETVRRVLERVEEEIRRTKEHLDKFNEDSERKARELKRHAEKFNEESKKKIDDLEDDARRKTRTEDVERELRRLKKELDKSLKEHRTTLERLEEELRKSNKEHRDRVKELREELEKVLRDAKR

SEQ ID NO: 9543 - protein, 185 aa, Artificial Sequence; identical to SEQ ID NO: 9542
  Synthetic

SEQ ID NO: 9544 - protein, 182 aa, Artificial Sequence
  Synthetic
SMLDEARKEVKELKDRVERASEKLEDNARRNVEKLERVSEELEREVKRLLDEIEEVKRRNGDEELLERVVRRLKRELEKLKEKSDEISKDSERNLDEIRKESERIKKELEKALRDLKKRADDDLIDEETLKELERRIREVLKKHDKTLRDLERRIREVNKRHKDVSDRLAERIKKVIRELER

SEQ ID NO: 9545 - protein, 182 aa, Artificial Sequence; identical to SEQ ID NO: 9544
  Synthetic

SEQ ID NO: 9546 - protein, 182 aa, Artificial Sequence
  Synthetic
DKEKELEREVDELLKRLEEHSKRVDKTVEDVHRRNEEALRDMERKVREVVEKLKEVKERTKTEEVMRRLERDVEKIKEDLRREVERVKEENKRVLDEIRRSLEESEKRVRDIEKKLDEEVRKAGRRLEEVDRLRRELREVLKRNRESVERAEEKLKKSVKELDERVKELEEELDRALDELRK

SEQ ID NO: 9547 - protein, 182 aa, Artificial Sequence; identical to SEQ ID NO: 9546
  Synthetic

SEQ ID NO: 9548 - protein, 182 aa, Artificial Sequence
  Synthetic
SEVEKLERDVRELHKDNKRHSDELDREVKKLLEELRRALEELKEKVERLTRRLEEVKRRTRTEEVLKRLEDEAREMIEELKKSLRELEKRVEDVEKRLEESLKRSREKNEKMKEDLDRELKKAGRRLKEVEELKRRIDRSVEENEDSIRRLKEEIKRIVDEVRRVVEKLIKEIKDAVKKLRD

SEQ ID NO: 9549 - protein, 182 aa, Artificial Sequence; identical to SEQ ID NO: 9548
  Synthetic

SEQ ID NO: 9550 - protein, 182 aa, Artificial Sequence
  Synthetic
DELEELKRRVEELEERNKDHSRKMRETVERVKERLDRHSKEMEKEVRKVVEDIKDVKRKTKTEEVLKRLKEKIEKIKEDLRRSLDESRKEVEKIKEDLRDSARKSHEENKDVKRKLEDDLRKAGRELREVDELKKEIERADKENKDSIEELERELDRVLKENEKSIRELEKELDDVLDEADK

SEQ ID NO: 9551 - protein, 182 aa, Artificial Sequence; identical to SEQ ID NO: 9550
  Synthetic

SEQ ID NO: 9552 - protein, 176 aa, Artificial Sequence
  Synthetic
SEAEKLLEENRRELEKVKRDAERLNDEIRERLKEIEDKLKTLNDEIRKLVKEMEDRNDRDKTVEEELRELIETLRRRYEELKRELEELIKELKRRYEELLDRLRRLSEESKERADRDLIDEEILRTIADDNRRVLEEIKKIIKHSRDELERVKRDIDRIVKHSVKLLEDVLRRLRK

SEQ ID NO: 9553 - protein, 176 aa, Artificial Sequence; identical to SEQ ID NO: 9552
  Synthetic

SEQ ID NO: 9554 - protein, 177 aa, Artificial Sequence
  Synthetic
DEEEIVKRIEDDARRIIEEVKEVLRRIRDLNERILREAEEVLKEIREINRKVLEDLRRDGLPSDEIRKAEEESEKNLRELEEIIKTVEKRSRESVEEIKELIKRAEDLLRELIRELRETRVDERVLKRLRDELDKLREDLERILRRNKKLLDELRELLERSRRENEKLVEELKRKAK

SEQ ID NO: 9555 - protein, 177 aa, Artificial Sequence; identical to SEQ ID NO: 9554
  Synthetic

SEQ ID NO: 9556 - protein, 178 aa, Artificial Sequence
  Synthetic
SEAERIEEEVKKLLKDVKKKLEELKESSKRVVEELDKVLKELKESSDRLAKEIKKALDDNRSEEDIKRLLRENKEHLRELDERVRELKKKNKKHLDDLKREVDELRKRLEDALRRIEERVRVKDVLEKLRELVKRLIDDLRRVVEELEETNERLDRKLEDVLKKLRETNEKTLRELRK

SEQ ID NO: 9557 - protein, 178 aa, Artificial Sequence; identical to SEQ ID NO: 9556
  Synthetic

SEQ ID NO: 9558 - protein, 181 aa, Artificial Sequence
  Synthetic
SVREDLKRVVEDIRRIVKEVHERNREASKRSEDLVREVHERNERIARELKKIVDDLRRVKEEEKLKEIEKKLEEDLERAARENRRILEELKKISEDVARENKEVLDRIKERLDRLAKDVEDRNAERRVLEEVRKEVEKVLREIEKSLRDHERENKRLLEDIERSLRELEKTVEKLKRDIRR

SEQ ID NO: 9559 - protein, 181 aa, Artificial Sequence; identical to SEQ ID NO: 9558
  Synthetic

SEQ ID NO: 9560 - protein, 181 aa, Artificial Sequence
  Synthetic
SAREALKEAVKEIERIVREVHDRNRRASERSEKIVRDVHRRNKKLTDESKDLVDKARRIKEKEKLDELLKELEERSKKVAKENEDIRREIEKLSEDVSRENEKVLEKIRRDLERLRKDVRDRNVDKRVLEEVAKRVEEVLKRIKDSLEEHRRVNDKLLKDIEKSLRDHERANEKLLEDLRK

SEQ ID NO: 9561 - protein, 181 aa, Artificial Sequence; identical to SEQ ID NO: 9560
  Synthetic

SEQ ID NO: 9562 - protein, 179 aa, Artificial Sequence
  Synthetic
DELEELLKRIEDVIRRVEELLDELLERHRKVSKESNERLEELLRRHEKVSEEVKRENAGDERFKRTVDRLNDELRKKVKKLKEDDEKRNKELADDVKRLKEELRETLDRIRKEVEKLEPTEEVEKRVREVLKEIEDRAREVEKRARDSVRRNREELERLERDVRRSLKKLRDDLERMRR

SEQ ID NO: 9563 - protein, 179 aa, Artificial Sequence; identical to SEQ ID NO: 9562
  Synthetic

SEQ ID NO: 9564 - protein, 183 aa, Artificial Sequence
  Synthetic
SKVEKLLEDIKKLVKEVSDKIEELLKRLHEVVREIAKAVRDLIRENKRVVDDIVKKVRERGVPEEDLKRLEDRVEKSIRDLEEKLRDLKRRHDESTKRLKERLERAERRVKKLLDKLERRGDNGKEAEDDARRIIEEIERLLREVKKYIEEHIKRLRTVLKKLAEDSKKHLDELRELLRRLEK

SEQ ID NO: 9565 - protein, 183 aa, Artificial Sequence; identical to SEQ ID NO: 9564
  Synthetic

SEQ ID NO: 9566 - protein, 186 aa, Artificial Sequence
  Synthetic
SELETLLTDVERLLDESRRVAERVLKEVKELLDEWEKRHKELADRIRELLRRVEEEMKRANLDEEMKKRLEDELRRVDEKIKERDEDVKREKRRIEEKLERIKERSDREEKRVRKRLEDLRRRDLKDEEVRREATDLRREIKEHTDEVEKKLEELAREIEELLERSERSAEELRKEIEKLLEEIRR

SEQ ID NO: 9567 - protein, 186 aa, Artificial Sequence; identical to SEQ ID NO: 9566
  Synthetic

SEQ ID NO: 9568 - protein, 178 aa, Artificial Sequence
  Synthetic
SEIEKLLEDFKKRIEDIKRRLERYLEEVRKRVEKVKRELERALEESKRTVDEVKKEIDRAPPTEELRERLRRLKEEHRRRIRELEERLKEENRKNEERNRELEKELEDEARKVEEAEKRANASDEVRKEIRKLLDDIRRVVEKVKRDNERLNRDLNRRVREVIRESEKLNKRLEEAVR

SEQ ID NO: 9569 - protein, 178 aa, Artificial Sequence; identical to SEQ ID NO: 9568
  Synthetic

SEQ ID NO: 9570 - protein, 174 aa, Artificial Sequence
  Synthetic
SESETLEKELKELKEEADKLIEDIRRRLEEVARRVERNVTESERTLEELLRRAREKKKRRPQDREVEKELTEYRKELEKNREKSERDIRRVKEKLDEIEDRLRERLKRVKDRLDKVDVDRRVKEEVKRVLEEIERALRTVLKEVRDLLKRLEELHREVLDKNRRVLKAISDEAK

SEQ ID NO: 9571 - protein, 174 aa, Artificial Sequence; identical to SEQ ID NO: 9570
  Synthetic

SEQ ID NO: 9572 - protein, 174 aa, Artificial Sequence
  Synthetic
SEDEKVKKDLDELRDRVRKNIERIRRKLKKLLDEARDNVRRSEETLRRLARRVEKIKKDKPRDEEVREELERYEEELKRNKEESDRKLEKVREDLKKNLEESERRVRDFERRLRELDIDRSVKEELRRVLEDLKRLHEEVSKRVEDALREMKELHDRVLKRNKDVLRELKERAQ

SEQ ID NO: 9573 - protein, 174 aa, Artificial Sequence; identical to SEQ ID NO: 9572
  Synthetic

SEQ ID NO: 9574 - protein, 178 aa, Artificial Sequence
  Synthetic
SLEEIVKDILRRIKTKADEIKEKVDRSLREIEELVKEIKKEVDDSLRDIERVAEELRREGREDEKMRRKLEKDEERNKRTLDEIERKVRKLNRDNEEKNRETKEEVDELEKEVREIERKANLDERLLRDVRRILEELRDLVRRLHEDNKRLDEDLNRKVEKLKRDNEDLNKKMRDRAE

SEQ ID NO: 9575 - protein, 178 aa, Artificial Sequence; identical to SEQ ID NO: 9574
  Synthetic

SEQ ID NO: 9576 - protein, 179 aa, Artificial Sequence
  Synthetic
SEKEEADKKLKKVMDDLREILRRLLETLKRVIERSEEVLKRLDDRNREVLEEIKRAIERLDRREDEIRTVEEELRRNDERVKEDLTRHKRELEETEKEVRRTLTKVDEELKKIEDEIRRGDRDEKEAEETVRRMKELVDRIRKKAEEDVKKLREDSKRTADRSKKNVEDLKRRLDELAK

SEQ ID NO: 9577 - protein, 179 aa, Artificial Sequence; identical to SEQ ID NO: 9576
  Synthetic

SEQ ID NO: 9578 - protein, 178 aa, Artificial Sequence
  Synthetic
SEIEELVRRLERKLEEHKKMVDKYREDLKRTLDRVNELSKDYIKKLRDILEKAERLVRRGELKEEVVKKIEDELKKLNEEYEKRVRDVERELRKLNDDVRKLHEELEKDLRREEEDVERKGTSEDLRRIAERVLREAHRTAKDLHRDSERVREEIKKSVDRVHEESERVLREIRKLKK

SEQ ID NO: 9579 - protein, 178 aa, Artificial Sequence; identical to SEQ ID NO: 9578
  Synthetic

SEQ ID NO: 9580 - protein, 183 aa, Artificial Sequence
  Synthetic
SIEEEVRKIVDDIRRSSEELEKSVKRVVEEIAESSKEEKDRVKRNIEEIRKEIDKLRRDGADERVKEKLDRNLEESRRRLEEYEKKLRDELRKAKKELDDYKRDLDRRLKEAEERLRDVKDRIDKDVLEKLKRLLDKVVRDSEDVIRKLEERLKKVVDESKEVLKELEELHERVMREVEETIR

SEQ ID NO: 9581 - protein, 183 aa, Artificial Sequence; identical to SEQ ID NO: 9580
  Synthetic

SEQ ID NO: 9582 - protein, 183 aa, Artificial Sequence
  Synthetic
KIEEDIRRELTKILDKLRKLLEKAKKNVEDIERSSRDLKRRVDETIEKIKDELRKLERDGDTDEMERRLRKKLREVEEELKKYEEELRENLKRSEEELRKVKKDLEDELRELEDRLEKIRDRIDEEVLERAERELRRVMKEVEKVLREIEELHRRVAETSKRVIDELRRLLEKVFKEFEDAVR

SEQ ID NO: 9583 - protein, 183 aa, Artificial Sequence; identical to SEQ ID NO: 9582
  Synthetic

SEQ ID NO: 9584 - protein, 182 aa, Artificial Sequence
  Synthetic
SEVDEDLKRLEDRVREYEDRVREDIRRLEEDLKRLRKRIEDSIEEMRRTLEEVKEDVRREGPDDRLREELRERNERHRDELRREAERVEKKLRDMKRKLERSHEEVKKELEEVRKKAKKDNLDRDRLTKLREVLERLEKRIREIDEEIKRVLERVEKEIRDALRKIEKVNEDVEKALRDILR

SEQ ID NO: 9585 - protein, 182 aa, Artificial Sequence; identical to SEQ ID NO: 9584
  Synthetic

SEQ ID NO: 9586 - protein, 181 aa, Artificial Sequence
  Synthetic
SLEEEIEKVIRKLKEVVERINERNKRALDKLRKVVEEVKDALRRTNEELKKVVKEVERRGAVDERVREETKREEERSEDKLREEDEKLKRVEETNRRDDKRTRDELKRVRERLEEKKRRGGDKDDVRRLKREIEELIKRIDDKIRKLIRRHEELVREIREELKKHEERVKDVLRKLEKLAE

SEQ ID NO: 9587 - protein, 181 aa, Artificial Sequence; identical to SEQ ID NO: 9586
  Synthetic

SEQ ID NO: 9588 - protein, 171 aa, Artificial Sequence
  Synthetic
SEVEKLKKEADEESERNKDEVRKLEKESKENADRIRRHLEEHLKRSDENVKRVKDAKLPKERAREELERHLRRTEDNLRRIKEHLKRHLKKSEEDLRRSDKRLRELKKELEDRIKSEEMLRRLEELLRENKKRNKEVLDRDRELLRELDEEVDDVLRRDKELLEELERRLK

SEQ ID NO: 9589 - protein, 171 aa, Artificial Sequence; identical to SEQ ID NO: 9588
  Synthetic

SEQ ID NO: 9590 - protein, 182 aa, Artificial Sequence
  Synthetic
SEVDEVLERIERLADDNRRKAETVLRKIARLLEELKKHSEDVNRKIKELVKELEDEVRRAGVPRDDVERVLREIEELSKRHREEVKRNEERIRRELEKLERETRKLLEEIRRELDKLKKRNLDRELLERVLRRVEKKSEDHKRKLEEAERRVDKNREDHERRNEELLRRVEERVEDVKRRIK

SEQ ID NO: 9591 - protein, 182 aa, Artificial Sequence; identical to SEQ ID NO: 9590
  Synthetic

SEQ ID NO: 9592 - protein, 185 aa, Artificial Sequence
  Synthetic
DEVKEVLKRIKDLLDELRRHSEKVNRDVERLLEELARNSEKVNREIRRLLDDLRRLVEEKSTDEEVEDELRRAEKEVEEKNKRHKEELERNRETVKRKNEKHRDEVRKVEEDVRRTLEKIERDQLGRDDLERILREVDKKIKDLKRENERMLEEVERNAKEHKDRDREELKRVKEDLDRLRERLR

SEQ ID NO: 9593 - protein, 185 aa, Artificial Sequence; identical to SEQ ID NO: 9592
  Synthetic

SEQ ID NO: 9594 - protein, 178 aa, Artificial Sequence
  Synthetic
KDAEELEKEVERESRKNEESIRRIREEVDKLSKDNDRKLKEIEKEVEDLRRRVDERRKRPGGEEFARKLIKELRDRLKEIAERIEKTNRELKEKLERIAKEIEDLKKRNREELKRLEEEKRGDEKLLDKIRKVVKENEERMDKLLEDIERVVRENIKKNKEVLERARRVIERLEEKIK

SEQ ID NO: 9595 - protein, 178 aa, Artificial Sequence; identical to SEQ ID NO: 9594
  Synthetic

SEQ ID NO: 9596 - protein, 178 aa, Artificial Sequence
  Synthetic
DEDKKLEKDVRDKSEDNKRRLEEIKKKVEDASRENERKIEEIKRRVEEKAEEVDRARKRPGGEKRLKDLIDDLRKTLKEIEEEIEKLKRDNEERLKDIRREIEEINKKLEDDLERIRRAKKGSEELLKTATELVTRNRTENERVLREAERVVKENLRRMDELLKDIRRVIEELERRIK

SEQ ID NO: 9597 - protein, 178 aa, Artificial Sequence; identical to SEQ ID NO: 9596
  Synthetic

SEQ ID NO: 9598 - protein, 175 aa, Artificial Sequence
  Synthetic
EEVERSLKKLEDDIRRIERELEEMVRKSKREIDKLVRDLEEMLKDSRRKLEKLRKDNITSEEARRSLEKHNRELEKVLEDLERRSRRHKEEVDKLLKDLKKKLDDLRREIEELRRRGVSEEAIRELERLLEELLRKIEEVIKDLRRLNKELDEEIKRVIDEARRLNKELEDDLRR

SEQ ID NO: 9599 - protein, 175 aa, Artificial Sequence; identical to SEQ ID NO: 9598
  Synthetic

SEQ ID NO: 9600 - protein, 178 aa, Artificial Sequence
  Synthetic
SKVEKILKDIKRLLDELRKKLKEVKDRLDEINEELRETLKRSLDRNRKINEELKDKLRRRNAPEDVDEESKKHLEDVKRKIDEIRKRSEEHRKRVEDEIRELEERLKELLKRARDVVREGRVGDEVLKRVEEEIRRLEEELDRTLERSKREVEKIKREIERTNRESERAVKEIDDRER

SEQ ID NO: 9601 - protein, 178 aa, Artificial Sequence; identical to SEQ ID NO: 9600
  Synthetic

SEQ ID NO: 9602 - protein, 178 aa, Artificial Sequence
  Synthetic
SKDEEVLKTLRRILEELRDVHRRNLEDNKRITDRLREIHERNLRDNRRITKELEEVARRDGASKEEVDRLRERSEEYLRRLEEHLKRLEEKSKRYLDDLKRHLEEVDKRVRELEREIEREGAGDEKREEVKKEVDETRERNERKNRRSREDVKRVEDRNRDANRKSRKEAEDVKRRLT

SEQ ID NO: 9603 - protein, 178 aa, Artificial Sequence; identical to SEQ ID NO: 9602
  Synthetic

SEQ ID NO: 9604 - protein, 178 aa, Artificial Sequence
  Synthetic
SKVEEVLKRLREILKELEEVHKENKDDVKRILRDLEKTHKDNLDDNRRITEKLKRVVERDGLGEEVKEDLERRSREYLEDLERHLRELKRRIEEYEKELDEHLERLREEVKRIEEEIKRRGAGDEEREKVERRAKEARDRNKRKNERVKEEVKRVKDRNKKKNDESKETVRKIEEDAT

SEQ ID NO: 9605 - protein, 178 aa, Artificial Sequence; identical to SEQ ID NO: 9604
  Synthetic

SEQ ID NO: 9606 - protein, 175 aa, Artificial Sequence
  Synthetic
SDSERILKDIEDKLREIKKRSDDNRRRLEKENREVEKRVREILRRIEEENKDVEREDKRRDEVLRRLERRYDDLRREIRETLERLEKRYRDNEEELERLLEEVERRVKKILKELDEKGVEEKVKRDLEEALKTLRKVAEDNKKSLRESLETVKKLLEDLERELRKSAESVRRKMK

SEQ ID NO: 9607 - protein, 175 aa, Artificial Sequence; identical to SEQ ID NO: 9606
  Synthetic

SEQ ID NO: 9608 - protein, 175 aa, Artificial Sequence
  Synthetic
SESEELLKRAEDEVRKVEKKSRDNERRLREKLKKAKEDLDRIDEDIKRLNKELEDRNDKDSRVLKRARDEYRRIRREIEKLLEDLERDVKRNEDDLKRDLDRLEESIRKLKEDMDKAGLEERLRRELERILEELRELVRRNEEELKKIMKRVREEVEKLLRKLEKSLESVDRKVT

SEQ ID NO: 9609 - protein, 175 aa, Artificial Sequence; identical to SEQ ID NO: 9608
  Synthetic

SEQ ID NO: 9610 - protein, 180 aa, Artificial Sequence
  Synthetic
SRDEKAERMVREVEKKIKELIDRNRRVTEKVKEDIKRLIEDLERVTRDVSRAIKELARRLRDTDLRRLEEELRRIEKSSRDVLRKLEEELRRLSRTSEEYLRRLKERLDELRKEVEDIKRKKDIKEEDDKRIEEDLRKLEEDSRRYDEDLKRELERLRKEVEEYKKRMREELRRLKEEAD

SEQ ID NO: 9611 - protein, 180 aa, Artificial Sequence; identical to SEQ ID NO: 9610
  Synthetic

SEQ ID NO: 9612 - protein, 180 aa, Artificial Sequence
  Synthetic
SELERATKVVKRVADRIAELIRENARVTKRVADESRKLLEETETVTREVMRAIEELLKRLRGERAKKLKKLLEDIRRSSEEVLRKNKKDSEELKRTSDEYLERLRRKLEKLKDEVRKIKAENSIREEDLKKLEDDLKRAADESKKYDDDLRRKLDELRRRHEEYKERLKEMLKRLEDETR

SEQ ID NO: 9613 - protein, 180 aa, Artificial Sequence; identical to SEQ ID NO: 9612
  Synthetic

SEQ ID NO: 9614 - protein, 180 aa, Artificial Sequence
  Synthetic
SELEDARRVVKRVADRIKRLIEENERVTKEVKEASEKLLKDTKDATRRLAKEVKELVKRLRGKDVEELKRRLEEIKRSSDKVEEDNRRESERLRKTSEEYVDELRKELERLEREVKEIEERNNIDEKDKKRLEEELERLRESSERYDERLKRELERLEEEHRRYIRRLKEELDKLREDTD

SEQ ID NO: 9615 - protein, 180 aa, Artificial Sequence; identical to SEQ ID NO: 9614
  Synthetic

SEQ ID NO: 9616 - protein, 184 aa, Artificial Sequence
  Synthetic
SEVEELIKDIRRHNTRLEKRMREILEDLKRHLKRSEDKMRKLVKELKELLDRLRDIARDGELKEEVLRRVREELRRVEEELKRTLERNKEKLEKVREDLERELRRDRKKNEELRKEIEKVRKDIDEKLLKELEDVIRENEKRSRDIARTLEKALEELRKASKELIDTARDILRKVLEDVDRLRQ

SEQ ID NO: 9617 - protein, 184 aa, Artificial Sequence; identical to SEQ ID NO: 9616
  Synthetic

SEQ ID NO: 9618 - protein, 179 aa, Artificial Sequence
  Synthetic
SEVETSAERLKREVEKHHKEVEEYIRRLEEELKKMTRDVERALEKIKEDVDRLRKEQKSKDELDETVRDLERKIEELKRKLEKKLEDIERSSREVLDRTRRKLEELEREVKKLEDEINTDEELLKRLRDVLEEVSRRIKDNLEELKKVSERLKRRIEELIRRLEKVMRDVRRSAEEIKR

SEQ ID NO: 9619 - protein, 179 aa, Artificial Sequence; identical to SEQ ID NO: 9618
  Synthetic

SEQ ID NO: 9620 - protein, 179 aa, Artificial Sequence
  Synthetic
KEVEEDIERLKRILEKHHKDIERAIRRLEEKLKRLEDKLRKYKRDLEEEVARLKDEQRSEELLKRSVEKIKRSSEELKKEIRRLLEEIRKEIEDLKRKTKEVLDRIRREVEDLERRINSDEKVLRRLKEVLREIEERIRRNKEELDKALERVKRTIERLIRELEKLSERLKRIADEIAR

SEQ ID NO: 9621 - protein, 179 aa, Artificial Sequence; identical to SEQ ID NO: 9620
  Synthetic

SEQ ID NO: 9622 - protein, 179 aa, Artificial Sequence
  Synthetic
DEVDEIVRRLRETVDRHHKRIKEAIEKLKEEVKKHHREIEEYIRRLEEEVKRLADEQKDKDSLTEELKRIEKSSKELEDKSRDKLRKVREEIEEMKKRTEDTLKRLKEEVEDAKRRINTDRKLLEKLDRVLKKLEEDIRRNKEALDRALREAEKSLTDNIKELRDVSREIAERIKEITR

SEQ ID NO: 9623 - protein, 179 aa, Artificial Sequence; identical to SEQ ID NO: 9622
  Synthetic

SEQ ID NO: 9624 - protein, 175 aa, Artificial Sequence
  Synthetic
DEKEKVIEDIKELLKELEKKLEDIIREIEKELKRNDEENEESRRRIEDMLRRLEELKRRSDVEERVKKEVEDTLRKLKREYDERDRENRERLKRILEEMREDVKDLREKLRKLRKDLKGTEDVDRVLREAERRVREILKELEEVLRRAEERSEENLRSAEKVLREVEKRLKELTD

SEQ ID NO: 9625 - protein, 175 aa, Artificial Sequence; identical to SEQ ID NO: 9624
  Synthetic

SEQ ID NO: 9626 - protein, 175 aa, Artificial Sequence
  Synthetic
SEEERIIKRIKETLEDLKRKLDRIREEIERDIRRNNKKNEDSIRDIERMLRELRRLFEESEVKEKVVEDVRRRLKRLKEEYRKTDEENKERLKRILEEMEELVKRLRDELEDLRRKIRGTKELKEVLEEAKKTVDKILRDLEELLRRAEEESRRNLREAEEVLKKVREDLERLAT

SEQ ID NO: 9627 - protein, 175 aa, Artificial Sequence; identical to SEQ ID NO: 9626
  Synthetic

SEQ ID NO: 9628 - protein, 175 aa, Artificial Sequence
  Synthetic
SEEEEVIKEIKDALRDLRRRAEELMKELRELIRENNERNKESEREIRRLLDRLRDLKRRSEVKEEVVKTVRKELEKLKREYEKLNEDNERKLREVAEAVRKLREDLERILDRLRKELEGTEEVKRVLDDAKRAVEEILARIKELLDEVRKASKENLERAEELLRDVERELDRLTK

SEQ ID NO: 9629 - protein, 175 aa, Artificial Sequence; identical to SEQ ID NO: 9628
  Synthetic

SEQ ID NO: 9630 - protein, 178 aa, Artificial Sequence
  Synthetic
SEVERLIEDIRRANEELNRKSERKSRESKKENDRLNRESDKKSRDSERVLEELRRRNITSKDLRKKARELREDHRRYLERLKRALEELARDHERYLRELDEALRRLLTRVRETERRITDEELVRRLDELLKESETNVRDNKRRVRDNLRRTEENARRNLEKVKKNVRKIDKVIKEIET

SEQ ID NO: 9631 - protein, 178 aa, Artificial Sequence; identical to SEQ ID NO: 9630
  Synthetic

SEQ ID NO: 9632 - protein, 178 aa, Artificial Sequence
  Synthetic
SEVDETARKLDEDLKRLEEEVRRTSKESEDENRKLNETSKRESDESKRRLDELRRKNITDKDLREDLKRLEDRHRKYKEDLDRELRRLEEKHKEIIKKLRRSAEELERRMRELARRITDERVLRKLKDLVEKVKRVIEKLVKELEDNVKKTKDNARRNKREIEENARRIREEIKKLED

SEQ ID NO: 9633 - protein, 178 aa, Artificial Sequence; identical to SEQ ID NO: 9632
  Synthetic

SEQ ID NO: 9634 - protein, 178 aa, Artificial Sequence
  Synthetic
SEVEKEADEVRRTNEELNRRSEETSRRSEEDLRRLEEKVRRASKKSEDDLRRLKRENITDKELDKSLDELRKEHEKIIKELEDTARRLKEEHRKYIEELDKALKELDDRAKESERRITDEEMVKRLRDVVKRSRENIEENKRRIEDNLRRIDEVIRRLIEELRRNMRRIEEEIERIRR

SEQ ID NO: 9635 - protein, 178 aa, Artificial Sequence; identical to SEQ ID NO: 9634
  Synthetic

SEQ ID NO: 9636 - protein, 184 aa, Artificial Sequence
  Synthetic
SEVEREIERLEEDLDRLRREVDEAHKRSKKKLEELRKEVEDYEERVKEELRRLEKLVREGRVDERDLKRVRDELHESSKRVLDRLKRALEKLEEEYKKLLEKLRRSLDKIREEVERLERELKDSPEEVRERLERALRKAEKDVKRLEDELKRSLKEVRETVRELEERLREVNERVEELLDRLRK

SEQ ID NO: 9637 - protein, 184 aa, Artificial Sequence; identical to SEQ ID NO: 9636
  Synthetic

SEQ ID NO: 9638 - protein, 186 aa, Artificial Sequence
  Synthetic
RVEDRVRDLIRKHDETSREIEKRIRDSIKRLADVLDKIRKAIDDLIRKLREAVEDLLRKIGKDDEDKARELKEEVDRAIERLRRELERLKREVERIIEKNEEILRRLREESERVKRELDEARRRKLSEKEVEDLARKIEKLNEDLRRRLEKLDKENKDVIRRLEDALRRLAEEIKRLIDELRERAR

SEQ ID NO: 9639 - protein, 186 aa, Artificial Sequence; identical to SEQ ID NO: 9638
  Synthetic

SEQ ID NO: 9640 - protein, 171 aa, Artificial Sequence
  Synthetic
KDEDRLRDDIRRAIEEIEEKLKRLKDRNKEHIERLKKRNEDLNRRNRDVVRRLRERDTDEKEIEEAMRRTRKEHKKALDDNRKSLKESEDELRKAEEDLRKTLEDLDRKLRAEPRTEELEKLREDLRRVIERVEREIRRSSEENRRVVKKSVDNIRDSLRKNEDVIRKLRK

SEQ ID NO: 9641 - protein, 171 aa, Artificial Sequence; identical to SEQ ID NO: 9640
  Synthetic

SEQ ID NO: 9642 - protein, 181 aa, Artificial Sequence
  Synthetic
DVEKKIKDLARELREVIDDARRKNRKLHEDAREVSERHEKAVRDLTEELKRVIDELRKRNIDEDTLRERRKRIEEEIRKVEKDNEDILREIKEDNEEIDRKLDEELKKLEEDIKDLERRKVPEDMLREVEKRVKEEIKRIKDDLDEVRKRHEKKVRDIRKHLKELEDRIKKTEKDLREEAR

SEQ ID NO: 9643 - protein, 181 aa, Artificial Sequence; identical to SEQ ID NO: 9642
  Synthetic

SEQ ID NO: 9644 - protein, 181 aa, Artificial Sequence
  Synthetic
RVEEEIERLSRDLKRVIEKAKRDNDRLHKEVRKASEDHKRENKRLHEDVKRVIEELRKRNIDEETLRKTMEDIERKNREVDKRNEERLREIERENREIDERLKEKEERIRRRIDDARRRKVEERMLKKLEDEIEETKKDIEREIREIDKRHKDAVKELRDHIRELAREHEEEKKRLEETAR

SEQ ID NO: 9645 - protein, 181 aa, Artificial Sequence; identical to SEQ ID NO: 9644
  Synthetic

SEQ ID NO: 9646 - protein, 181 aa, Artificial Sequence
  Synthetic
RVEEEIRRLLEESERVHKELEDINRRLHEKVDRVSKKHREENKRLHEKLKRAIDRLREKNIDEDTLRRKEREIKKRNDRVDEENRRTKKEITDKNRRIDEEIKRNLDENRKRIEDVKRRNIPEEALKKLEKEVKDNERKLREEARRVEEEHEKTVRDLKKHLDELREEHDRILEELERTRK

SEQ ID NO: 9647 - protein, 181 aa, Artificial Sequence; identical to SEQ ID NO: 9646
  Synthetic

SEQ ID NO: 9648 - protein, 173 aa, Artificial Sequence
  Synthetic
SDMEKRKRDIKRKLDESNKKSEEAVREVERKLDESNKEVKKKEERVEDELRKLEEKRRRGSGEELLRRVKELEDDLRRKLKEVRDRHDRLRRELEKILEKLKEDHKRIVDELKKGPDDEKLKDIERELRENLKRNEDIVREILKKLEDNLRRVEKLAEDIRRKLEKVADDLRK

SEQ ID NO: 9649 - protein, 173 aa, Artificial Sequence; identical to SEQ ID NO: 9648
  Synthetic

SEQ ID NO: 9650 - protein, 171 aa, Artificial Sequence
  Synthetic
SELEEDKKRIEETLRRLEETAKEYHRRSREELRRLEEEAKRYHEESKETLDRLRRENITSEELRDTIRRLEDRNKKLLEKLKKDIDEHKRRNEELMRRLRKTIEDLKRELDKGPDDKKLKDIKEEVERVMKKLEDLVRRDNEESEKVLEKLKRLVERNNEDIKRALEELRK

SEQ ID NO: 9651 - protein, 171 aa, Artificial Sequence; identical to SEQ ID NO: 9650
  Synthetic

SEQ ID NO: 9652 - protein, 171 aa, Artificial Sequence
  Synthetic
SEDEERLRRIEEELRRLEEEAREYHERSREELKKLREKAKEYHERSRRELEELRRRNITSEELRKKIEEHRKRNEDLLRELKRTIEELEKRNRELLKKLREDIKRLRDELRKGPDDKRLKEITRKVEEVMKKLEKLVRDNNEEIRKVMEELKKLVEDDNEESDRALKELET

SEQ ID NO: 9653 - protein, 171 aa, Artificial Sequence; identical to SEQ ID NO: 9652
  Synthetic

SEQ ID NO: 9654 - protein, 171 aa, Artificial Sequence
  Synthetic
DEMETRLEDVRKKLDDSRRETRKVEEDIRRTLEELRREAKKYHEDSKEELDDLRRRNITSEELKETIKRLEDRNRKLLEDLERKIREIEKTLEDYLRRLEERIDKLRRELDKGPKDEKLKEIKERIEKVLRENRDVVKKIKEDVRRALKELEELVRKNNEDIKRLLDELRR

SEQ ID NO: 9655 - protein, 171 aa, Artificial Sequence; identical to SEQ ID NO: 9654
  Synthetic

SEQ ID NO: 9656 - protein, 172 aa, Artificial Sequence
  Synthetic
SRVEEVERRVRDKSRKSKEKLRKLEEDVRRESETSRDRLRKLAEEVKTKVKELKDKRVPKEEVEERVRRIERRLEETLKDLRRRYEEVERRLKKALEDLRREHEKVKDELRRGEIDSEDLKRLAKEIEDNLEELERKIREIRKELRRSLEEVEKTVEDLKRELKKVLDELRK

SEQ ID NO: 9657 - protein, 172 aa, Artificial Sequence; identical to SEQ ID NO: 9656
  Synthetic

SEQ ID NO: 9658 - protein, 179 aa, Artificial Sequence
  Synthetic
SDIEEAKERLERKLEKLLRKVEEYLKEIADEIRRLEEELEEYNRRSKERIDRVLEVKERGEADRRVIEEEIRRMKRRNEDLERKVEKKLRELEKRNEEVKRDLEEAKKKIKKEIDELRERGVDESVLKELEELLKELEDRIRKILTESTELLRRLEKRVRDSLRRNTEELDELLDRLEK

SEQ ID NO: 9659 - protein, 179 aa, Artificial Sequence; identical to SEQ ID NO: 9658
  Synthetic

SEQ ID NO: 9660 - protein, 179 aa, Artificial Sequence
  Synthetic
SEVEKSEKKLRDEIERLVRENEKYLERIKELVEELLRELEKAVRELEKEVTEIEEVKRQGNVDKRLIEDLIRRIRKKIEDLRRKVKKAVTDLKRANDEVRRKSEEDLRRIEEEIKRLEDRGVEERVLKKLRDLVKEVVDRSKRSLDESTKVLDTLEKEVRKVLEALKDILREALERLDK

SEQ ID NO: 9661 - protein, 179 aa, Artificial Sequence; identical to SEQ ID NO: 9660
  Synthetic

SEQ ID NO: 9662 - protein, 181 aa, Artificial Sequence
  Synthetic
SREEIIKKLKEEVERLLRESAKVLEELKRRLEALLRESEEILRELRELVRTLLEKLERDGLDRRDIDKIRRDIERREREWEKETEDTRREIEELERRWRRRLEETRKRLEDIEERLKKEEISEKDLKKTEDDLKREADEHRKAVEDELRKVKKRLEEHRERVRKRLEDIEKTLRDIDREVR

SEQ ID NO: 9663 - protein, 181 aa, Artificial Sequence; identical to SEQ ID NO: 9662
  Synthetic

SEQ ID NO: 9664 - protein, 181 aa, Artificial Sequence
  Synthetic
SSVEDLLRKAEEVVRRAEEKSRDSHEKTKDVLRKVKRKSEELNKHNRESIKKVEEVRRRTDDKRVLEKVLEDIERNSRDAVRKHKRVLEELREVVRRSEETNRKILKEVRRVVEEVIRRLREEGAPEEVLKTIEDLLRKLERKVRETIETDRRLLRKVEEELKRSIEDSRRLVDELKKRVT

SEQ ID NO: 9665 - protein, 181 aa, Artificial Sequence; identical to SEQ ID NO: 9664
  Synthetic

SEQ ID NO: 9666 - protein, 181 aa, Artificial Sequence
  Synthetic
SSKDRLRDEIRRVVERVREISERVNKHNRDSVKRVEEESRRINKEIRKVVEDVDRMRRRVTDERVVKELVKTLRDVVRKVVEKHKKAVKEVRDNSKEAEEIHKKALDELREVARRVIEMLRKDGVPEEVLREIEKLVRDVEREVRESIERSKRLVKELEERVKKSIDEIKKEVDDVERKLK

SEQ ID NO: 9667 - protein, 181 aa, Artificial Sequence; identical to SEQ ID NO: 9666
  Synthetic

SEQ ID NO: 9668 - protein, 181 aa, Artificial Sequence
  Synthetic
KEVEDLKEKVKRVVEEVEKISRELNKHNRDSVRRAEKTSKELNDHNKDSIRKVREVLKRTTDKRLLEKVLRDIKENSDDMVRKHEKVLDEVRRNSDDVVTKHKKALEDLKRMAEEVERELEKAGAPDKVLKDIKKLLKDVEKKVRESIKESKELVKRLKDKLEESIRRSKKDVEDLKREVD

SEQ ID NO: 9669 - protein, 181 aa, Artificial Sequence; identical to SEQ ID NO: 9668
  Synthetic

SEQ ID NO: 9670 - protein, 181 aa, Artificial Sequence
  Synthetic
SSVDKLRKEIREVLRRVERISEESHKHNEESVRKVKERSERLNKHNRDSARDVERVLREVTDERILRTILRKVTENSKRAVEDHERALEEVRRNSEDVERKNRKALKELEDVVREIEDRLRKEGAPEEVLEEIRRRLEEVEERVRRDLEESKKLVDELRKRVEKSIRESRKLVDDLRKRVT

SEQ ID NO: 9671 - protein, 181 aa, Artificial Sequence; identical to SEQ ID NO: 9670
  Synthetic

SEQ ID NO: 9672 - protein, 181 aa, Artificial Sequence
  Synthetic
SSVDKLKDEVRKVVETVKDLSRRLNETAKRVADRVRKISRETHEEVRKVVEDVKDVRRRTNDKRKLEKVLDELREVIKEAHKKNEEVLDELRRVVKRLEDEHRKALEDLERVIRRVIKELRREGADETVLEELKRLLDKVREDVRRSIEEIRELLKTVEKEVRDDSRDLERLLKRVEEETK

SEQ ID NO: 9673 - protein, 181 aa, Artificial Sequence; identical to SEQ ID NO: 9672
  Synthetic

SEQ ID NO: 9674 - protein, 181 aa, Artificial Sequence
  Synthetic
SSVDRVREEIERVARRVRKLSEDSHREVEKVLKEVEEISKRTHEEIDKVVKEVEKVIRDTTDKRELRKVVDDLRKVAEEAHKKNEDALRKLEKVVREVMTKNRKVLEELRKVVKEVIEKLEREGAPEEVLEEIRRLLETVEREVKTDIDRLREELRRVEEAVKKDSEDIRRKLKRVEDDVK

SEQ ID NO: 9675 - protein, 181 aa, Artificial Sequence; identical to SEQ ID NO: 9674
  Synthetic

SEQ ID NO: 9676 - protein, 183 aa, Artificial Sequence
  Synthetic
REAEDIVRRSHELVERAREKLRRLNKDSERLVDEVEKELREVVERVAELIKRAKDEIGTEDDKVRKAVELLERVLREVKKVVEELLRKIRKVLRDDHESVREVKERVDDADRKVKKVVDEVGSVEEVLEKVLRDSERVLKELEEKLRKSLEDVKRVIDEVKKVLEDVKRKVEEVLKRVRDKRR

SEQ ID NO: 9677 - protein, 183 aa, Artificial Sequence; identical to SEQ ID NO: 9676
  Synthetic

SEQ ID NO: 9678 - protein, 183 aa, Artificial Sequence
  Synthetic
SRAEKVERESHELVRTLKEELDRVVEKVERLVRRVEEELKRVNKESAELVKELKDRIGTEDEKAVEIVKRVEELLKEDHDTVRDLLRELREVLERVRELIDRLRRRVETVDDEVRKLVRDVGELDEVLTKLVKSSRDVIEEIREDLKRVLKEAEEVIRRVKKRLEDSLEKVKEVLRELLRAAK

SEQ ID NO: 9679 - protein, 183 aa, Artificial Sequence; identical to SEQ ID NO: 9678
  Synthetic

SEQ ID NO: 9680 - protein, 183 aa, Artificial Sequence
  Synthetic
SSAEDVVRRSHELVRRLEEELDKVNEDSERLVREVEERLKRANEESKRRVEDAKRRIGTEDEKVKRLVELLEKVLREDTDTVRRLREDLRRVLEKDTRSVEDIKRKLRTVDKEVKKFVRDVGSLEEVLEEVLRRSREVLKKLKEDLKRSLDDAERVIRRVREDLKRSLKRVREVLEEVRRRTK

SEQ ID NO: 9681 - protein, 183 aa, Artificial Sequence; identical to SEQ ID NO: 9680
  Synthetic

SEQ ID NO: 9682 - protein, 183 aa, Artificial Sequence
  Synthetic
SSVDRIVEESHTRVRKLMKDLEDVNDESRRRVERLRERLEEVVKEVEKLVEELRRRIGEERREARRIVERVERALERVRDVVKKLLEELERVLKKDTESVERLKEELDKVDKEVKDLLRRVGSLEEVLKTILERSREVLDRIRKELERSLKEVEDVLRRIEKDLKKVLDEAREIIKRLLDEAK

SEQ ID NO: 9683 - protein, 183 aa, Artificial Sequence; identical to SEQ ID NO: 9682
  Synthetic

SEQ ID NO: 9684 - protein, 184 aa, Artificial Sequence
  Synthetic
SRLETVLERAKELIDRIRKLLEDVRRKVKELIDRIRRLNEEANRESEELIRRIEEELRKGKDAEEVVREVKERLERLLRRSEEVSKKSRKDLEDLVREAEKVIRDLARLLREVVREVEEVVRRDNTEDARRILEEVRKLVKELEEELRRALKEVRDLAKEVDEDSKRALDRNEKLIRDLDRKVE

SEQ ID NO: 9685 - protein, 184 aa, Artificial Sequence; identical to SEQ ID NO: 9684
  Synthetic

SEQ ID NO: 9686 - protein, 184 aa, Artificial Sequence
  Synthetic
RELEEAKKKVEDLLRRILEENERAHEESKKLIEEIRRLLKKMNEESEELRERIRKKLEENSTSDKVVREVRKEIDRLVERSERVAKRLKEELDRLLERSKKVSDDSRRKLKELLEEVEKVIRTLNSEDVERALDDVRRLLREVERRSEELLRTDEEAIRTLKKEIDKVLKENKDKADRLKEEVN

SEQ ID NO: 9687 - protein, 184 aa, Artificial Sequence; identical to SEQ ID NO: 9686
  Synthetic

SEQ ID NO: 9688 - protein, 184 aa, Artificial Sequence
  Synthetic
DELETVERRVEKLIEDIKRELRKVHEESKKLIREIKKELEDANRESERVIEEIKRELDRDKDSERVVERLEEKLRKLVRRSEEVIKELKKKLDELVKESERVARELRRKLEELVREVERVVREVNSEDARKMLEDVKKRAKDVEDEIEEVLRRDRELIKELKRELDEALRENRRLIEDLKRKIK

SEQ ID NO: 9689 - protein, 184 aa, Artificial Sequence; identical to SEQ ID NO: 9688
  Synthetic

SEQ ID NO: 9690 - protein, 184 aa, Artificial Sequence
  Synthetic
SEAEEALKRVKKAIDDARKLLEEANRKDKKSIEEAEKLLREAHERSKKAIKEAEDALDKAKTDEKAVERAREKADRAVKESEDAARRAKEIADKSLEDSERAAREAKKLADEAVDEARDAARKANSEDAEKALRDAKRLADDLKRTADEVLKENKRTAEDLKRKADEVLERDKKLAKELKEKAT

SEQ ID NO: 9691 - protein, 184 aa, Artificial Sequence; identical to SEQ ID NO: 9690
  Synthetic

SEQ ID NO: 9692 - protein, 184 aa, Artificial Sequence
  Synthetic
SELEDVKRKVKRLIEDIERALTEANKEDEKSIEETERLNRTVHEESKELVERLKDELRKRSTDKKVVEKVKKKLDDVLRRSKEVSERSKKILKDSVRRSAKVAEELKRRIDKLVEDAEKVIRDLNTEDVDEALKEVRDRAKKLKDKIKKVLDDNRRTVEDNERKSDELLKTDKELVREVKERTE

SEQ ID NO: 9693 - protein, 184 aa, Artificial Sequence; identical to SEQ ID NO: 9692
  Synthetic

SEQ ID NO: 9694 - protein, 183 aa, Artificial Sequence
  Synthetic
RELEKVRKEVERLIKEIKDLNKRAHDETKTRIDRIREKNEKVHEESKRLIREIEELLRRKGGESEEVVREIEKILDRIRRESERASEESRKELEDIKRRSKEASDRSRKILEEIRRTIEEVLREGAVTEEVIKEVEKRLDELRKESKKLLDDDRRLIEKLKEESRRLLEEDRRLIKELKEKVK

SEQ ID NO: 9695 - protein, 183 aa, Artificial Sequence; identical to SEQ ID NO: 9694
  Synthetic

SEQ ID NO: 9696 - protein, 183 aa, Artificial Sequence
  Synthetic
SAAERAAEEVKKLIDEARKLLERAHRETKKLIDEARKLNKRALDEVRRLIEEADRLLRRDGGEADEALKRAEEIAKRALDLAKRASEESERIAREAIKLSEDAARKAREIAKRALDLARKALKDGAAREEVAERARRLAEELKKEADDVLRKDRDLARRAREESEEALKEAEKLARDLRRRAK

SEQ ID NO: 9697 - protein, 183 aa, Artificial Sequence; identical to SEQ ID NO: 9696
  Synthetic

SEQ ID NO: 9698 - protein, 178 aa, Artificial Sequence
  Synthetic
KEAEDIKRKVEKVAREITEKSRKSHEELRKVVKEARDKSEKSLRDVERVLREIEELLRRRRKEDVLREVKERIEEILRTNKKVLEEVKERVKRIVDKNRRMLEEVEKRVREILKELKRDRPDSKDLIEEIKRRLDEVRRRSEDNLKKMEEELKKVEEDSRRVVERIRTELKRVEDEAR

SEQ ID NO: 9699 - protein, 178 aa, Artificial Sequence; identical to SEQ ID NO: 9698
  Synthetic

SEQ ID NO: 9700 - protein, 178 aa, Artificial Sequence
  Synthetic
SEAEKIRKDVEKVIREVREDSKRTLERSRKVDEEIRRKSETSHRLVEEVIRRAEELLRRERREEVVEEVKRRIKEIVDRNKEALDEVRKRNEDILRENDRVLERIKRLVEKILRDLKRDRDKDEELIEEIKKALEDVKRESEKVKEESRKSLEDVERDSDRNLKDMERLLREVTERAK

SEQ ID NO: 9701 - protein, 178 aa, Artificial Sequence; identical to SEQ ID NO: 9700
  Synthetic

SEQ ID NO: 9702 - protein, 178 aa, Artificial Sequence
  Synthetic
DEVEEIRKEVERVIREVEEKSKETLRRSEKVDREAKKKSDDSRRKVEKVADEIRRLLETRRDDRVLEEVARRVEAILRENEEVAREVEKRNREILKTNADVLDEIRKRVEEILKELKRDRPDDKDVIEEIRRLLDEVRRRSEKVIRDSERSAEEVKERSERVIEELKRLLEKVAREVK

SEQ ID NO: 9703 - protein, 178 aa, Artificial Sequence; identical to SEQ ID NO: 9702
  Synthetic

SEQ ID NO: 9704 - protein, 178 aa, Artificial Sequence
  Synthetic
SSVERVERDVARVAREIRKISRDTKEESKEVDRRIDEISKRTNEDVRRVAEEIKRLKEKRRRDEMLREISRKAEEIVRENEEVLEKVKRLNEEILKKNEDVLRKVAKDVTDILRRLKRERPDDKDVIKEIEDRLREVEEESKKAIEESKTSLKRVKEKSEKNVEDMKKLLEKVREDVR

SEQ ID NO: 9705 - protein, 178 aa, Artificial Sequence; identical to SEQ ID NO: 9704
  Synthetic

SEQ ID NO: 9706 - protein, 181 aa, Artificial Sequence
  Synthetic
SEVEKVLDEIRRLLKEVEERSKENNDRNEELARRNTRRSEENIRRIEELLRRVREEARKDRVPREVLKELEDRVREVLERNKEVLERLRRLHEEISRKNEEVLREVKREVEKVLEKLRRIDDEKFLREVRREIEEIIRRIKEASEKTHKEAKEVVDRINELSRKSHETIKEIIKRVRDRAK

SEQ ID NO: 9707 - protein, 181 aa, Artificial Sequence; identical to SEQ ID NO: 9706
  Synthetic

SEQ ID NO: 9708 - protein, 181 aa, Artificial Sequence
  Synthetic
REVDEVLDEIRRLLERVREESEKNNRDNEKLMRDNEDRSRKVIETIKRLLEDVKDRATKKNVPEKVLKEIEDLVREVLEENKRVLDTLRELHKEVSDKNKKVLEEVERLVTEVLKKLRDIDDEKFLREVRREIEEIIRRIRELSERTHREAKEIVDRINELSKRTLDKAKEMLDRAEEKAK

SEQ ID NO: 9709 - protein, 181 aa, Artificial Sequence; identical to SEQ ID NO: 9708
  Synthetic

SEQ ID NO: 9710 - protein, 181 aa, Artificial Sequence
  Synthetic
DEVEKVLRDIEKKLEDVERRSKEVIDEIRKLLKEVEEESRRNVKKIREELKKVVDDVRRKNVEREVLEEVKRLVDEILKKNEDVLREVTDLVRKVLRKNEEVLRTVKELIERVLDELRKIDDEKFLRDVKRMVDEILDTARELSRRTLEEIKRIIARIRERSEKSHEEARKALRDVEEKAR

SEQ ID NO: 9711 - protein, 181 aa, Artificial Sequence; identical to SEQ ID NO: 9710
  Synthetic

SEQ ID NO: 9712 - protein, 181 aa, Artificial Sequence
  Synthetic
DSVREVLKKIEDELERVKRDNKDVNRKNEELMRRNEERSRRVVEDIKRKLKELVDDVRRNNVPDDVLRELKELVERILRKNERVLEELKKLHKEVSDKNEDVLRRIEELVREILRKLREIDDEEVLKRVDEEAEKVLRENEKLSKKSLDEAREIVREINRLSEDTRREADEILERVKEKVR

SEQ ID NO: 9713 - protein, 181 aa, Artificial Sequence; identical to SEQ ID NO: 9712
  Synthetic

SEQ ID NO: 9714 - protein, 181 aa, Artificial Sequence
  Synthetic
DEVETVLEKIERLLRKLEKDSREVIKKIKRLLDEAKKESRKNIEEIKKLLEEVKREVDRRNVDDRVLDDVRRRVTEVLEENKRVLDELEKLVKRVLEENKRVLDEARKLVKEILDKLREIDDERFLREVEKELEDMLRRVRKLSEDTERKIREILERIKRLSDDSNRKAKEILREIRKRAE

SEQ ID NO: 9715 - protein, 181 aa, Artificial Sequence; identical to SEQ ID NO: 9714
  Synthetic

SEQ ID NO: 9716 - protein, 172 aa, Artificial Sequence
  Synthetic
DELEKVKEEIRRLLRRIEEDVKRSEERNKELLRRITEEVKRSERRNEELLKEIKDKVDSEILRKVEKAVEDSLRRLREVLRKVKEVVERVLETNRRILEEIKEVVERVEKLLDERDLKKVREDLERMLRRVEEELKRSNEESERAIEEVRRELEDIDRESRKAIEDVLREEK

SEQ ID NO: 9717 - protein, 172 aa, Artificial Sequence; identical to SEQ ID NO: 9716
  Synthetic

SEQ ID NO: 9718 - protein, 185 aa, Artificial Sequence
  Synthetic
SEIDEVLTRLRKISKDLNETSDRVNERARKIIDDIKKESKRVNDEAREIVERLKREIDKTRDRDVLRRILKEIEDVARRVKEINEELLRRVEKVVREVEEINRELVKRSREAVERVKRLLDERVSDKDKVERVVREVEKLHEEDRKRLEESTRSVRKLLEELKRELEKSTRSVKKLVDELRERVR

SEQ ID NO: 9719 - protein, 185 aa, Artificial Sequence; identical to SEQ ID NO: 9718
  Synthetic

SEQ ID NO: 9720 - protein, 185 aa, Artificial Sequence
  Synthetic
DEVDEMLKRAEDRIREISDTSRKVNEDARKIVEDLKRDSERVLRELRKRIEELRREIERDRDEDVVRRVERKVEKVVREVHERNKELLDRVRKVVEDVEDINRRLAEEVRRVAEEVRRALRRDADDEKRVREVAEEVKRLVKELEERLRRSTESVKRLLEDVERAVKESSDEVEKLLRRLREELE

SEQ ID NO: 9721 - protein, 185 aa, Artificial Sequence; identical to SEQ ID NO: 9720
  Synthetic

SEQ ID NO: 9722 - protein, 185 aa, Artificial Sequence
  Synthetic
DEIEEVLRDAKRISDELNRRSEEVNRELREIIKELTKRSRKVLEELKKIVRDLEKKIKDTRDKKDLDRIREEVTDVVRKVHEINKRLLEEVRRVVEEVKRINDKLVRDSERAVEKVRRLLERDVDDREKAERVLRTVEELHKEDRDRMKESTDSVKRLLEELKRRAEKSSRTVEELLRRLEEKIR

SEQ ID NO: 9723 - protein, 185 aa, Artificial Sequence; identical to SEQ ID NO: 9722
  Synthetic

SEQ ID NO: 9724 - protein, 185 aa, Artificial Sequence
  Synthetic
SEIDELLERAKKRSKELNDTSKEVLDRARRIIEEISKTSEEVNKDLERIIRELAEEIKRTRDRRVLDRIRREVRRVVKEVKEINERLLREAERVARDVHRINEELVRRSEEVVKEVEDVLRRKVDDEKRVREVLKEVRRLHEEDRKRMKESSEDVERLLTELRKRMKESTDSVEKLLKELEDRVR

SEQ ID NO: 9725 - protein, 185 aa, Artificial Sequence; identical to SEQ ID NO: 9724
  Synthetic

SEQ ID NO: 9726 - protein, 185 aa, Artificial Sequence
  Synthetic
SSLEKLLEDVRRRSEELNRRSRKVLEDLKDIIRRLKEESKRVLDEAKKKVDDVERKIDKDRRRETVKEVLERVEKVVTDVHRINEELLRRITEVVKEVHERNKRLVEESRRVVKEAEEVLRRDVDDSDKVRKALEDVRRLHEEDKRRVDESSKEVERLLRELREDMKRSSEEVERLVKRVRDRLK

SEQ ID NO: 9727 - protein, 185 aa, Artificial Sequence; identical to SEQ ID NO: 9726
  Synthetic

SEQ ID NO: 9728 - protein, 185 aa, Artificial Sequence
  Synthetic
SEADELLKEVKRISDELNDTSRRVLEELREISRRLNEDSKRVLKELEDILEEIRERIDRTRDREVLKRLLERVAKVVKEVHDINRDLVRRSREAVKRVHDINRRLVEESRKVVKKAEEMLRERVSDEERVRELVERVKELHEEDKRRMDDSSRDVERLHKEDADSARDSSRKVRELLEELRRRVE

SEQ ID NO: 9729 - protein, 185 aa, Artificial Sequence; identical to SEQ ID NO: 9728
  Synthetic

SEQ ID NO: 9730 - protein, 182 aa, Artificial Sequence
  Synthetic
KELEDVLRELKRILEELEKLSREADERSKEIVKRLVEETTRSLKEVKEIVERLKELDDAGKDRREVEKRLRDAHRKNEDTLRRSSEKLDRVLKESERVVRDSSTKLRKVLKDAEDVVRDKVEDEKRAREVRETVRKLVEDVKKKNEESERRNRELVKEVRKRNKEVRDRSRKLVKELEDKLR

SEQ ID NO: 9731 - protein, 182 aa, Artificial Sequence; identical to SEQ ID NO: 9730
  Synthetic

SEQ ID NO: 9732 - protein, 182 aa, Artificial Sequence
  Synthetic
SSLEKVLKDLRKILEDLRREIKTVLDDLRRILEELKRETERVDKKSKEIIETLSELRKAGTDSRDVDRRVKEVLEESRRAVERSSRKVKKVLEDAREVVRRIEEAADKVLKDARRVLREKVEDKKKVDEAIREVEKLIEELRRDLDRVRKTVEKLVRDLERRNEESKRRNEKLVRKLEEELR

SEQ ID NO: 9733 - protein, 182 aa, Artificial Sequence; identical to SEQ ID NO: 9732
  Synthetic

SEQ ID NO: 9734 - protein, 182 aa, Artificial Sequence
  Synthetic
DELETVLRKLEKLVRDLKKRSTDVLRRLEEIVKELTDETKRVDDESRDILRRLKELRDRGVDSREITKRVREALKESRRVIKKSSEDVERAIDEVRKMIEKSSRDVDEVLREVREVLRDKVENKEEADRVITTVEELVKELRRRNEEVKERVEKLARELRRRNEESIKTNEKEVRELEKRLK

SEQ ID NO: 9735 - protein, 182 aa, Artificial Sequence; identical to SEQ ID NO: 9734
  Synthetic

SEQ ID NO: 9736 - protein, 182 aa, Artificial Sequence
  Synthetic
STLKKVLDENRKSIKELLDMSRRVLEKLREILRRLEEETREVDEKSERIVTTLEELIKAGTDKRRIKEELDRALKESEDMVRDSSRKLEEVLEEARRVVEDSSRKLRRSLEELKKVVRDKVEDEDKAKKVIDEVRKSVKRLEEENERVLRDVERLVREVEKKNRESEKRNRKLVEELRRKLK

SEQ ID NO: 9737 - protein, 182 aa, Artificial Sequence; identical to SEQ ID NO: 9736
  Synthetic

SEQ ID NO: 9738 - protein, 182 aa, Artificial Sequence
  Synthetic
SVLEEVLKKLEKILRELKREIEEVLKKLRRILEELVRETEKSLEKVDRIIKELEKLIEAGRDKRDVEREVRRVHRENEETLRRSSEKVDRVLKEVEDVVRRIDRRVKEALREAREVVRDKVEDEKKAREVTKTVEKLIRELRKTLEDVKREVRKLVEEVKRRNKDVERKSRELVKKLEERLR

SEQ ID NO: 9739 - protein, 182 aa, Artificial Sequence; identical to SEQ ID NO: 9738
  Synthetic

SEQ ID NO: 9740 - protein, 182 aa, Artificial Sequence
  Synthetic
STLEEVLERNKESIERLRKESEDSHRKLKEIMERLKRETERSLEEVEEIVKRLKELTDEGRDKREVRKRLEEVHRKNEKTVRESSEKVERVLKENKESVERIVEKAEESLRRLAEVLRDKVDDKEKVKRVIEKAKKSVEDLERRLREDEEAAREWVKKLRTENEKVRKRSEELVRELEERLR

SEQ ID NO: 9741 - protein, 182 aa, Artificial Sequence; identical to SEQ ID NO: 9740
  Synthetic

SEQ ID NO: 9742 - protein, 182 aa, Artificial Sequence
  Synthetic
STLEKVLRDLRKILEELLRMSKKVLEELKRLADRLKEEIKKSLDKVKKIIDELRDLTRKGKDKREVEERVKRVHDENEKTLRKVIEDVRRVLKEVRDVIKESSDRLREVLERARRVVRDKVEDEDKARKVIEEVTREVRRVEEENKKVERTVEKLVEELEETVREARERSERLVRTLEEELR

SEQ ID NO: 9743 - protein, 182 aa, Artificial Sequence; identical to SEQ ID NO: 9742
  Synthetic

SEQ ID NO: 9744 - protein, 182 aa, Artificial Sequence
  Synthetic
SDAERVEKEIREVLKRVEDLLRRVNEETKKVAKEVRELLKEVDDRSREIMKRVAEKLRRISDKKTAKEEVDRVLKEIEKTLRDLKRTVEEVLKRIEDLSKKLHEDVRRVLEEVEELLRRLLERRKDDKDVAREVEKLLRELEKKLEEVNRHDKKLLEELEERLKESEERNRRLLEELKRRLD

SEQ ID NO: 9745 - protein, 182 aa, Artificial Sequence; identical to SEQ ID NO: 9744
  Synthetic

SEQ ID NO: 9746 - protein, 182 aa, Artificial Sequence
  Synthetic
REVEEVLKRIEELIRRSEEETREVNERTKKLAEDVRRLLEEVDRRSKKIADEVRELLERIDDKDTARELVDRVVKKIERTARELRKTVEDVLREIKRLSEELHKRNRTSVEDIRRLLKDVVDKRKDSKDLVRTVEELLKRNEEDLRRVNEHDKKLLEDLTRSLERSEERNKTILEKLKEDLR

SEQ ID NO: 9747 - protein, 182 aa, Artificial Sequence; identical to SEQ ID NO: 9746
  Synthetic

SEQ ID NO: 9748 - protein, 182 aa, Artificial Sequence
  Synthetic
SDAEKVLDEIRKRIEESEKRTKEVNDRTREVLDRVRKLLEKVNKESRKVAEDVREAAERIKDKEELRKTVEEVLEEIKRISERLHERVRRVLEEIKRLSDELHKRNRESVKEIRELLRELLERRKDDEEVRKDVERLLRENERSLREVNRHDEALLRELEKRLEEVNRHDDKLVKDLRERER

SEQ ID NO: 9749 - protein, 182 aa, Artificial Sequence; identical to SEQ ID NO: 9748
  Synthetic

SEQ ID NO: 9750 - protein, 178 aa, Artificial Sequence
  Synthetic
DEVREILEDVKRINKEVEDELRKIEEEIREIVKTVRDESRKTLEELERILRKVEDDLRKDRREEILKTVKELVKKIIDDDRRIVERVLRELERLVEEIKKVVDEVKRLNKELIDRLKTRNPEVEEAVKDNERLAKETEDKVREVVKRIRKIIEEVERTARESERRLRKLLKEVEDRAR

SEQ ID NO: 9751 - protein, 178 aa, Artificial Sequence; identical to SEQ ID NO: 9750
  Synthetic

SEQ ID NO: 9752 - protein, 178 aa, Artificial Sequence
  Synthetic
EEIERILEELRRIAKKVEEDSRRTLETVRRLNEEVKRRLREILEEIRRVAEDVRRKLDEKRSDEEAVRRVLEDVKKKVEDVKRRLEEVLREVEKKNRDVTETNKKILRDLEKKVRDVIRRVKSEDVKRELERILEEVRKKSREALEKNKRLLEDTRRVVEEVKRELEKILRDVKRKVD

SEQ ID NO: 9753 - protein, 178 aa, Artificial Sequence; identical to SEQ ID NO: 9752
  Synthetic

SEQ ID NO: 9754 - protein, 182 aa, Artificial Sequence
  Synthetic
SVVEELRDELRRAEEENRKIVEDTTRRLEDMIRRDEKINEEVERRLEEVTRRVEELRKQGRDKDEIVDELRRVVEELEKILRDALKDSTRVVDELRKVNEDATRISREVVRRLRKLLKDRVDDERKAREMEKEVTEILRRLEEENKRDLDRIKKLLDELRKKNEDTLRRIRRLLEEVRERLR

SEQ ID NO: 9755 - protein, 182 aa, Artificial Sequence; identical to SEQ ID NO: 9754
  Synthetic

SEQ ID NO: 9756 - protein, 177 aa, Artificial Sequence
  Synthetic
SSLDEVLERLRKLLKEIEDKVRRINEEVKKSSEDVERELKRVVDELKRRVERLKEEVRLERLIRELERILDEIKKKLDRLAEENRKILKRVNDESKRILDELRKILRELEERLRRITDERELEKILRDAERVVREIEKRHRDLLEELKKANEDTRRALDEIRKEAERVLERVREEAK

SEQ ID NO: 9757 - protein, 177 aa, Artificial Sequence; identical to SEQ ID NO: 9756
  Synthetic

SEQ ID NO: 9758 - protein, 177 aa, Artificial Sequence
  Synthetic
DEVEEVLKRLRESSEESKRRADDVTRRAEESSRRVHKRSREVVERLKKLVEEVERRVRLRELLETLRRILERLKERLEKLNEENKRILEKVKRDIEKLKRDNEEILREVEERAKRLRDRRELEKLEREMRDVDRRTDEALERLLRTLEEVNKRTDEENKKILEDLKRVVEEVEERDR

SEQ ID NO: 9759 - protein, 177 aa, Artificial Sequence; identical to SEQ ID NO: 9758
  Synthetic

SEQ ID NO: 9760 - protein, 177 aa, Artificial Sequence
  Synthetic
SEIEKVIEELRRSSEESHKRSRKVEEDARRSSDEVHRRSREMLRKLREEVKDVERKVRLEDLLRKLREILKRVEDDARRLNEENRRILKELEERLEKLNRDNKKILEDVERRLRRITDRRDLRRLREEMRRVDERTTRENEKILRELEEVNKETIKENERLLRDLKRVVDRVREEDR

SEQ ID NO: 9761 - protein, 177 aa, Artificial Sequence; identical to SEQ ID NO: 9760
  Synthetic

SEQ ID NO: 9762 - protein, 177 aa, Artificial Sequence
  Synthetic
RRIEEVIKEARKSSRESHEESKEVMERLKRSSDDSHRKSEEVLRRLRKLVEDVERRVRLRELLEELRKILKRLEEKARRLNEENKKILERVKRLLEELNDRNERILRRVEDDLRRITDDRELKKLRDELKRVDDETRKANEEILREMEEVDKRSKEANDRLLEELAKVVKRVDDEDR

SEQ ID NO: 9763 - protein, 177 aa, Artificial Sequence; identical to SEQ ID NO: 9762
  Synthetic

SEQ ID NO: 9764 - protein, 177 aa, Artificial Sequence
  Synthetic
KDIEEVIRRLRESSKESTKRLRDVVEDLKRSSKEVHDESEDVLRRLEELVRRLKKKVRLRELVKRLEEILEELRRRAKELNRRNKEITEELVKELEELVRRNEEILRDVERKLRRITDKRLLKELEDRMRRVDERTDEELEKIRKRMKEVDDRSRDVNRKLAEDLKRAIKRVDDEEK

SEQ ID NO: 9765 - protein, 177 aa, Artificial Sequence; identical to SEQ ID NO: 9764
  Synthetic

SEQ ID NO: 9766 - protein, 182 aa, Artificial Sequence
  Synthetic
DEVREVLRRDEELHRELKERIDRILEELERLHRDLKRKIDRVLEELKRLHEDVKRELDKRGGIEELKERSDRVLTKSARIAEELKKTSDDVLRKTREIVKEIKRKLDDNLRRVREIVEKLKNVEEALRKLHEESKKSVRDVEKELEELRRENKKVIEDLEDELRRLLEENKRAADELRKRAE

SEQ ID NO: 9767 - protein, 182 aa, Artificial Sequence; identical to SEQ ID NO: 9766
  Synthetic

SEQ ID NO: 9768 - protein, 182 aa, Artificial Sequence
  Synthetic
DEVEKVKDDVRKLVEKVKRDAKRAHEDNERKHRKLKKELDDALRELKKRHEELKRRIDDRGGDKDLKKRSDDVLRKSEEIVRRIKKELDENLRRHRERVERIKRKLDELLKKIDDIVEKLKDVDEALRRLKEELDKMIEDVRKELRKLNEDSDDSIRRVKKRLKELRDENEKVIRDIRRETE

SEQ ID NO: 9769 - protein, 182 aa, Artificial Sequence; identical to SEQ ID NO: 9768
  Synthetic

SEQ ID NO: 9770 - protein, 181 aa, Artificial Sequence
  Synthetic
SELEKVRKKVEDISRESEKHLREVKKENDRIIKEIEDELRKLLTDVEREIREVEKRIREERSEKVREEIKKRLERLLEEVRKAIEDLKRKSDEVVKETEKAVRENEEKLEDLRREVAEADDRREKAKRVFEEIERIVRRNKEELRRILKELRELHEEVKEKIKKVLEDVKRLVDELLERAK

SEQ ID NO: 9771 - protein, 181 aa, Artificial Sequence; identical to SEQ ID NO: 9770
  Synthetic

SEQ ID NO: 9772 - protein, 181 aa, Artificial Sequence
  Synthetic
SELEKVLRDVREAIKRNEDLLRRVHEESRRISEESEKNLRRVHERSRRIAEDVRRVLRERRDEDVVRKLRKKLEDLLEESTRAVKENVDELRRALERSEEVVKRSEEHLRDVLRRVEEADDRREEAEKVAREAKKLVDDLKRKNDEVLDEDRKEVERNERELERVLREDKKLLEDLEREIK

SEQ ID NO: 9773 - protein, 181 aa, Artificial Sequence; identical to SEQ ID NO: 9772
  Synthetic

SEQ ID NO: 9774 - protein, 181 aa, Artificial Sequence
  Synthetic
DFAKKLEDEARRVSEESRRHLEDLLRRSKESIDALKRKLEDMLRRVREVIKRIEDELRRERSESVAKSVRDLLREVRDEVRRVRETLKKESEEDRKRVEEVLRRNEELLKRVDERLKEVLRRGEISERVIERIKELLDRNRKELEDVARDAERLNRELNERVDRVLKEVEERLKELEDRVK

SEQ ID NO: 9775 - protein, 181 aa, Artificial Sequence; identical to SEQ ID NO: 9774
  Synthetic

SEQ ID NO: 9776 - protein, 181 aa, Artificial Sequence
  Synthetic
DKAKELEEEIRKIIREIEELLRRMEETSRKSSKESEKHLRDAHEDSRRIAERIKDLLRKEKSEKVREEVERLLRDLERRTREVIKTNRKLSEDDKRRVDEVLKRATELLEELRKKIREVLERGEVSEDVIRELERLLRELKKRIEDVVRRIKELNEDNNRKVEKIREDDERLLEKVRRDVK

SEQ ID NO: 9777 - protein, 181 aa, Artificial Sequence; identical to SEQ ID NO: 9776
  Synthetic

SEQ ID NO: 9778 - protein, 181 aa, Artificial Sequence
  Synthetic
SAAEDVLRKVEKIIKEIEELLKRALEESRKSVKELEKILRDAHEKSRKIAREIEDALRKRKDEDVARKVEDLLRRLKEDTERVIREIERLSEEDKRRVEDVLRKAEELLERLRKAVREARERGEVSDEVVEEIKRLLEELRKKIEDVADEIRRLNEEVNKKLDDLVKTDTKLLEDVDRKVK

SEQ ID NO: 9779 - protein, 181 aa, Artificial Sequence; identical to SEQ ID NO: 9778
  Synthetic

SEQ ID NO: 9780 - protein, 181 aa, Artificial Sequence
  Synthetic
SAAEEVRKKNEKISRELEKLNRKALEDSRDSIRKLKKILDDAHKDSREIIKEIEDLLRKRRDEDVRKRVEELLRRLEERTRKVIKEIRERSKEDEERVKEVHEENKKISEDVKREVKEVRDRGEVSDEVVEEIKRSNDENNERSKKVLDEIKKLNKEVNDRVEELLERDKRELERVKRDVD

SEQ ID NO: 9781 - protein, 181 aa, Artificial Sequence; identical to SEQ ID NO: 9780
  Synthetic

SEQ ID NO: 9782 - protein, 181 aa, Artificial Sequence
  Synthetic
DEFRDIEERAKELAEENETINRRVLTEHKKLIDELREILERVLREHEKRLKDLKDLVRKIDSEEVKKTITDALKRLRETSKELADEVKRVEDELRKTTEELERENKKLLDEVRELLKKVKRDGVVSEEILERIRKLLEDVEEKVKKSVEDSRRLLKTIREEVERVLDTSRKLLKRLEDDVR

SEQ ID NO: 9783 - protein, 181 aa, Artificial Sequence; identical to SEQ ID NO: 9782
  Synthetic

SEQ ID NO: 9784 - protein, 184 aa, Artificial Sequence
  Synthetic
SDLEEVEKRAEEIIRRNKEELEKVLRESKDIIDKNRKLNKESLDEVKRIIERLEDLLRKDGRSERVEELVRKVDREIREVIKRNRELNERSVRELEKLNRESEKLDRESKKELDDLIRDLERRSDTEEVRKVAKKIRDEAKKSHDESKKLNDTSRDLVRKSKEEAERIDEEMKKLLKEIKDKVR

SEQ ID NO: 9785 - protein, 184 aa, Artificial Sequence; identical to SEQ ID NO: 9784
  Synthetic

SEQ ID NO: 9786 - protein, 181 aa, Artificial Sequence
  Synthetic
SEVEEILKRIEDLARTLLKLNEDSLRRNEEIIRTIKELNEKTLKENKEIIDRLRELLRRTRDKDTLEELLKKVEEELRRSNEEDKKLLETAARLVKRSNEEDKRLLEEAAKRVEELLDEARKRNLDERVLKEIEDLLREVADRSRKFNERSERLLREVEERSREVNDRSKKLMDTIAKEVK

SEQ ID NO: 9787 - protein, 181 aa, Artificial Sequence; identical to SEQ ID NO: 9786
  Synthetic

SEQ ID NO: 9788 - protein, 181 aa, Artificial Sequence
  Synthetic
SEVEKALERVKKLAEDLERLDKESLERVEKVIRDAERLDKTSREEVKKIADEADDLRRRAKDKDTLRKLLEDLKRRAEELNRKNEELLRRVAEAIRRISEDNRRLLEEVARRVEDLLREARERNVDEEVLRRIRRLLEEVRKKVEDSNRELKRRLDELEKRVRDSNKEIRELVKEVERKVN

SEQ ID NO: 9789 - protein, 181 aa, Artificial Sequence; identical to SEQ ID NO: 9788
  Synthetic

SEQ ID NO: 9790 - protein, 181 aa, Artificial Sequence
  Synthetic
SRLEEVLRRIRKLLRDNKETAKRVLEEIERLLREADKRNREALKEIEKRMREVEDKLRKARLPEDVVRELRRRITELLRRLEEITRRSRERVKEILERLKEVVERTERKIRKIERELSEIKREKDLEELRRRVKEVSDESRKLLEDLLDEARKVLEENRKLVEEILREAKKVIDEIEEKLR

SEQ ID NO: 9791 - protein, 181 aa, Artificial Sequence; identical to SEQ ID NO: 9790
  Synthetic

SEQ ID NO: 9792 - protein, 181 aa, Artificial Sequence
  Synthetic
SELEKVLREIRRLLDEARKRNEEFLRRIEELLRRNEEEVRRVLEKIERKVERVKRDLERRRVPEEVVRDAERRIDEIRRKIEEILERTKRDVERLLKELRDITRETERRVKELEDELSRVRREEKLERILRTARKVVEDNERLVREVLKKVKRVSDESRRLLEEIDREVDEVIKRLEERAK

SEQ ID NO: 9793 - protein, 181 aa, Artificial Sequence; identical to SEQ ID NO: 9792
  Synthetic

SEQ ID NO: 9794 - protein, 175 aa, Artificial Sequence
  Synthetic
SEAEEIRRRLEEISRRSVEHLRKVLEEIKRISERSKRHLDRVLEENKRRLEELRELLERGRDKRELLEDLKRVHDESRKVIEKNKEENDRALKRAKEVIDENRERNKRVLDEVRKGGLPEEVLRELEELLKESEERIKRIEEEIKKIIDKSREDIKRVLEEIERLNKKAADDLRK

SEQ ID NO: 9795 - protein, 175 aa, Artificial Sequence; identical to SEQ ID NO: 9794
  Synthetic

SEQ ID NO: 9796 - protein, 175 aa, Artificial Sequence
  Synthetic
DEVREVLEELKRISDDSIRHLEEVLRRLREIIERLKATNDDVLRELEEIIRTLLDLDRQGVDKEELKKALDDVLRRIEDIHRETKRRLDEVLKEAEEAADRNRERNERAVEKVRRGGLPKEALDTLERTVEESKKRIKEILDRVKELIDKAREDSKRSVEEVRRRIEKARRDLDR

SEQ ID NO: 9797 - protein, 175 aa, Artificial Sequence; identical to SEQ ID NO: 9796
  Synthetic

SEQ ID NO: 9798 - protein, 175 aa, Artificial Sequence
  Synthetic
SKVDELLKRLEDIIRKLDKENEKVLRELEEISKRSVDHLKRVLEENRRILEELERLLEGGTDKEELLRRLEEVHRRSRRMVEENKKRNDDVLRRVTEVHKETKDRLEKALKDVKDGGLEERVLRDLKRLVDEARRRSERSLEEVKRIADESRKEIERILREIEEENRRAKDKLRR

SEQ ID NO: 9799 - protein, 175 aa, Artificial Sequence; identical to SEQ ID NO: 9798
  Synthetic

SEQ ID NO: 9800 - protein, 175 aa, Artificial Sequence
  Synthetic
SRAEDLLRRLEKIIRDSLRHLREVLKRLERIIDELRKTNERVKEELERIIDTLRKLKDNGVDKRRLEDELRKVDERIKRIHKKTVEDLERVLKEVEDVARENKKRNDEVLKEVEDGGLPEEILRRARELVDESRRRLEKVVKEVRDVIRTLKKDSDKSLRDLEEEVRKAEEDLRK

SEQ ID NO: 9801 - protein, 175 aa, Artificial Sequence; identical to SEQ ID NO: 9800
  Synthetic

SEQ ID NO: 9802 - protein, 175 aa, Artificial Sequence
  Synthetic
DEVRELLDTLRRIIERSVKHLEDVLRDLKRIIDKLREDNRRVLEENRRRLEELDKLRKEGTDKEELKRRLDEVHKESRDIHRDTRRRLKEVLDRVKEVAKRNREENDKATDDVRKAGLPEEFLRDVERLAEESRRRLEAVEREVERLITEAEKESKKSLDEVERLNRELKERLKK

SEQ ID NO: 9803 - protein, 175 aa, Artificial Sequence; identical to SEQ ID NO: 9802
  Synthetic

SEQ ID NO: 9804 - protein, 183 aa, Artificial Sequence
  Synthetic
DVEDILRTIRDLIRRVDEKSRKTLEENRRAIEEVLRRSDETLRRNKKLIEDVEEEVRRTVKDEKLLREVKRRLEELLKENKEMADRTREKLERLLRENERVVKETKRTLKEILDRAEEAARVERREFMETVLRKIKEDIERLEERNREVHEKSREEIRKLEEENEEVHRKSRKEIDEIRKELK

SEQ ID NO: 9805 - protein, 183 aa, Artificial Sequence; identical to SEQ ID NO: 9804
  Synthetic

SEQ ID NO: 9806 - protein, 183 aa, Artificial Sequence
  Synthetic
DVEEILKEIRKRIEDVKRESEKTLKEIRDLIKKVAEDIERSVKENRELIDKVRRELERDVRDEDLLRRLKEKLDRLLKRSEEVAERLRRKLKRLAEEVERVAEDTKRKLEKLLDDAEKMSRMDDRKVLTDVLKEIERRIDELRRRNEEVVEKIKREIKKLEDESKRVNDESREIIKRIKEEVD

SEQ ID NO: 9807 - protein, 183 aa, Artificial Sequence; identical to SEQ ID NO: 9806
  Synthetic

SEQ ID NO: 9808 - protein, 183 aa, Artificial Sequence
  Synthetic
DVEEIIREIRKLIEKVLRDVRRSAEENKKLIDEVKRRVEEMLKRNRDMIKKVLDDVRREVRDERKLDEVRKELEELLKENERVAEKVDRRLRELLERSKRAIRELERKLEELLKKVEEAKKVERREFLKKVLDEIREIIERLRRESEKVNEDSKREIKDIERELREVHKKSRRIIRRIEEKLR

SEQ ID NO: 9809 - protein, 183 aa, Artificial Sequence; identical to SEQ ID NO: 9808
  Synthetic

SEQ ID NO: 9810 - protein, 183 aa, Artificial Sequence
  Synthetic
DEAREVLERLKKISEEDKRRSDKVNEETRRIIKEAEERSRKVNEETKRIIEKLEEDLRDRPKTKELLDELRDILRRAKERSDEVLKRLREILDRIRKRSEKVFKESREINEELRRRVEDVVRKGVISEEILRELREILRENTERVERSLRDNRRLLDELRKKVERSAEENERLLREAEEKLRK

SEQ ID NO: 9811 - protein, 183 aa, Artificial Sequence; identical to SEQ ID NO: 9810
  Synthetic

SEQ ID NO: 9812 - protein, 175 aa, Artificial Sequence
  Synthetic
SEVDKVLDDSRKSAEDLRREIETVLKRNKELIDENRKRLKEVLDRNAKLADDLRRERKKGTDEKMVEDVDRTSKKTIEDLKRESEKSLRDSEESIRRLRERARENIERNRKLVEDVRIEERVVRTLEKLIEEWRKAVEDVLRTLEKLTEEAKRESERILEELKRITKELRDEERR

SEQ ID NO: 9813 - protein, 175 aa, Artificial Sequence; identical to SEQ ID NO: 9812
  Synthetic

SEQ ID NO: 9814 - protein, 183 aa, Artificial Sequence
  Synthetic
SEVEDVLRRLEELLRRLEKKSRESLEELRRRLDEVRKDSERSNEDSERLIRELEEIRRKLEDEETVRRIVERVLEELERINRENHEKAKRVVEELEKIIEENHREAKRVTETLEELIKRLKERNPELKEFLDTMRRIVEELKKRLKEVNDRIKDIVRRAEEELKRSNDENKERIERAEKKVRD

SEQ ID NO: 9815 - protein, 183 aa, Artificial Sequence; identical to SEQ ID NO: 9814
  Synthetic

SEQ ID NO: 9816 - protein, 183 aa, Artificial Sequence
  Synthetic
SELEKVLEELKKLLEELERESDTSVKELRTLLERLEEESKESNERSKRLAEELERRLKDEKDEDTVDKIVRDVLTKLDKLNKDNEKRAREVLKRMDEIIKRNHKRARDVIKRLREIIDDVRRRNPEAREFLETMERIIEELEKRLREVNEDLKRIVRTVAERLKKSNRDNRELIRTLKDRVRT

SEQ ID NO: 9817 - protein, 183 aa, Artificial Sequence; identical to SEQ ID NO: 9816
  Synthetic

SEQ ID NO: 9818 - protein, 183 aa, Artificial Sequence
  Synthetic
SEVEDVLRRLEELLRRLKEKSKKSNEESKKLIKELKEESDKSRRDLERLLEKLDRDLKRLKDKETVKKIVDEAEKRLRRIIEENHRTAEEALRELKKINERNREMAEEVVKRLRELIDELRKRNPEVREVLERMRELVEKLKEDLERSNKENKDLIDKVKRDLEEVNRRLEKIVREVKERVRT

SEQ ID NO: 9819 - protein, 183 aa, Artificial Sequence; identical to SEQ ID NO: 9818
  Synthetic

SEQ ID NO: 9820 - protein, 183 aa, Artificial Sequence
  Synthetic
SEVEDVLRRLRELIEELRERSERSNEESKRLADELEKRSEESLRRLAELLRKLEEDLRRLEDKDTVDKIVEDVKRKLDKIIKDDHDTAREMEKRLEKINEENKREAERVLREAKRLIDELRKDNPEMREVLTTIAKIVTDLERELRKSNEENKKLIDELRKRLEDSNKRVKEIVKRLEEEVRR

SEQ ID NO: 9821 - protein, 183 aa, Artificial Sequence; identical to SEQ ID NO: 9820
  Synthetic

SEQ ID NO: 9822 - protein, 182 aa, Artificial Sequence
  Synthetic
KDVEEALKELERVLEELKRLSKELLDRLRELADRIRRISKELLEELKRLLKDIKETVDRIKDKDTLEEVVRRLVKELEDILRTHKRLVDDIIERLKKILEDHRRLVERAREELERLLKELEDRGVDEDVLRRLRELIEKVKRDLDRTDETLKELIKTLEDELRKSNETIEDLIRRLEEALRK

SEQ ID NO: 9823 - protein, 182 aa, Artificial Sequence; identical to SEQ ID NO: 9822
  Synthetic

SEQ ID NO: 9824 - protein, 182 aa, Artificial Sequence
  Synthetic
SDLERLLDELRKLLDDLRRKSEELLRRLDTLAKKIEREAEKITKDNKELIDRLRDRLRRIRDEDTLREVVKEAVKRLRESLRDHERLVDEIRRRLEKILEDHRDLKRRIEETAKKILDDLRRRGVEERMLRTLERLIEKLKEELKRTDKELERLIRELKKRLDDNNRRNEELIKRVEDELRK

SEQ ID NO: 9825 - protein, 182 aa, Artificial Sequence; identical to SEQ ID NO: 9824
  Synthetic

SEQ ID NO: 9826 - protein, 179 aa, Artificial Sequence
  Synthetic
SEAETVLEEMKEVSKRTEEKNKKVEDDDKRSIDELRKKLEKVLREDRRSIEDLERRLKENKGSDKVLRELKERLRRNKDRSEKVVEDLKRELDKNLEDSKKISEETKRENERALEKARRANVEEEVLRTIERLSRENKKKDEDTLRKSKEEHERVREELERVLETSRREHEKVKKRLED

SEQ ID NO: 9827 - protein, 179 aa, Artificial Sequence; identical to SEQ ID NO: 9826
  Synthetic

SEQ ID NO: 9828 - protein, 180 aa, Artificial Sequence
  Synthetic
RVEEMLERLRRLHEEVKRRIDEVLRELEEESKRNEERIRRVLERLRDEHRKLKETLDRRNADDDLRRTLEENRRKVEEIIRRLEELNERARKELKKIVDELRKKLEENLKRVEDVIREPVDEEELERLERKSRESIERLKDTLRELKERLKRISDRSDEKLREAEKRSRESIEEVKKRAK

SEQ ID NO: 9829 - protein, 180 aa, Artificial Sequence; identical to SEQ ID NO: 9828
  Synthetic

SEQ ID NO: 9830 - protein, 180 aa, Artificial Sequence
  Synthetic
EVEDVMREARKLHKELEDKIRDAARRIRETIDRVKKEDDDSLRKLRKLHEDLKRELEKRNVDRTLEEKLRRNLDEVEKASKESRRHLEELERDVERIIEALKETLRRNLKKVEDVVKKPVDRDELRKLLEDSKRSIEKVEDDLRKLEEKIKRVIDDNRRKNKELEEKSRKSIRDLEEEVR

SEQ ID NO: 9831 - protein, 180 aa, Artificial Sequence; identical to SEQ ID NO: 9830
  Synthetic

SEQ ID NO: 9832 - protein, 180 aa, Artificial Sequence
  Synthetic
EVEDVLRELRKEHDDLRKEITDVLRRLEKLHRELDEEDERSVKRIRELIEEVMRELRKRNAEERLEEELKRALEDVERVSKESKDHLRENLRRVEEIAKRLRDLLKENLKKVEEVLREPVDRKDLKALKEDSKRSIDDIRRKLEEARRRSERSIDENRKLNKRVIEKIREIIRRLEEKTK

SEQ ID NO: 9833 - protein, 180 aa, Artificial Sequence; identical to SEQ ID NO: 9832
  Synthetic

SEQ ID NO: 9834 - protein, 180 aa, Artificial Sequence
  Synthetic
EVEDVLREAERLHRTLLKEIRDALRRLRKLIEDVKRKDDESLKRLREKLERLKESLERNKVEEDLKRTLEKVREELERASERSKRHLEKVLRELEKIIKELEDRLRENLDRVRRVVDKPVDREELKKLLEDSKRSLDELRRRLKEVEDRVREAIKKNEDENRKLERRLDKIIEDLERRVK

SEQ ID NO: 9835 - protein, 180 aa, Artificial Sequence; identical to SEQ ID NO: 9834
  Synthetic

SEQ ID NO: 9836 - protein, 181 aa, Artificial Sequence
  Synthetic
SEAEKILKEIRDISDRTREELKKVKDEHKTLIDRLREILERALREHDRLAKELEDIKRKIDSEDLRREAERVLETLKRTSEELDEIVKKVERELEDTTRRMEESLRDMNRRLRELLDKLRKDGVPEEVLREISKIIKDNHDEVTEVLKESEELIRRLRKEVEDVRRTSEKLIRELEERVRE

SEQ ID NO: 9837 - protein, 181 aa, Artificial Sequence; identical to SEQ ID NO: 9836
  Synthetic

SEQ ID NO: 9838 - protein, 181 aa, Artificial Sequence
  Synthetic
SEVDDVLRRLEELIKTLEDINRKSLEDIKKLIDDLRKILEDALRKHEKLIRELREMKKRIDSREAEEIAKRVLEELKRTSDDLRKKVERVDEDLRRLLRENHERNKKILRDLERLLRDAARRGVPKEFLDRMREEIRRLEEESRKSDETIERLIRELRRRVEEVLKTSTDLIRELEEEVKK

SEQ ID NO: 9839 - protein, 181 aa, Artificial Sequence; identical to SEQ ID NO: 9838
  Synthetic

SEQ ID NO: 9840 - protein, 182 aa, Artificial Sequence
  Synthetic
SSVERVLEAVKELAKKLAEDIRRSLEHIRRLLEEVEKKHRDSKEHVRKLLKDLRDIAREKGAGEELVRDADRLAEEIKKYHDENVDRIRRAVEELAEAHKRLLEEAEKLVRTIEDRLRKVGSDDKELKKILDELRKLIRKVLEALRELNKRAKEILDRVAENVKEVNERLERLVRRIAEEIR

SEQ ID NO: 9841 - protein, 182 aa, Artificial Sequence; identical to SEQ ID NO: 9840
  Synthetic

SEQ ID NO: 9842 - protein, 182 aa, Artificial Sequence
  Synthetic
SSVERVKEEVEKLLEKLEREIRKSLKTIRELLRELKRKHEESKEHVRRLLEKAEREARRRGVDERLVRELRKLVEDIERYHDDNLRRAEEVVRKVEEDHRRLLEDARKLVEEIKRRLEEVRSDDKKLEEILRRAKELIDRVLEELKKLNEELRRIIEEIVRNVKRVNEKLEKLLRDIKRRID

SEQ ID NO: 9843 - protein, 182 aa, Artificial Sequence; identical to SEQ ID NO: 9842
  Synthetic

SEQ ID NO: 9844 - protein, 182 aa, Artificial Sequence
  Synthetic
SSVEEVLRRVKELLKTLKKKHEDSKRTVKELLDDLRKKHEDSKRHVRKLLEELEKRARERGVDKRLVDELRELMKRIEEYHDRNLKRVEDLIKEIERYHDRNLAELEKLARRIEERLKTVRSDDKELKRILEEVKELVKRVLENVERVNREVRERLKEVSRNVERVNKEAKELVDEVEERAR

SEQ ID NO: 9845 - protein, 182 aa, Artificial Sequence; identical to SEQ ID NO: 9844
  Synthetic

SEQ ID NO: 9846 - protein, 182 aa, Artificial Sequence
  Synthetic
SSVEEVRKRVRDLIKRYREEVEKIKKDVRRLLDELREEVKRSLDHVRKLMEELRRKIKRDGVDRRLVEEADELVKTIEDRHEKVKRTAEKLVEDVEREHDELKRKVEELVKEIERRLEEVRSDDKELKRILDELKERLERAKRENEDSVRKLRKLIEEILREIRRLNKEAEDLIREIEERAR

SEQ ID NO: 9847 - protein, 182 aa, Artificial Sequence; identical to SEQ ID NO: 9846
  Synthetic

SEQ ID NO: 9848 - protein, 182 aa, Artificial Sequence
  Synthetic
KDVEEVLTRVRELLRRVEEEIRRSEEHIRRLLEELRRKHEESKDSIRKLLEDLEEKVRRRGADERLLREAKRLVEEVERYHEKNLRDAEEMVRRVEEKHRRLLEEIRRLAKRIVDDLRRVRSDRKDLEEILREVEKLVEEVERRLRKLNEELKEILRTIVENVERVNRRLEELIRDIKRRVK

SEQ ID NO: 9849 - protein, 182 aa, Artificial Sequence; identical to SEQ ID NO: 9848
  Synthetic

SEQ ID NO: 9850 - protein, 175 aa, Artificial Sequence
  Synthetic
SEVEKIVEEVKKIVEEVERLHRKLLEDLRRVVEEVEDRSRRINEEAKKIVEDLKRRGNEDEDTVRKILEDAERVLDRLRKEHERLLRELEEVLRRLHEESKKIIRRLDRVLEEVRRAGVDEEVLKEIEDRLERLRRRAEEVNDTARKIVREVEESLKRSVESLKKLVDELRETLR

SEQ ID NO: 9851 - protein, 175 aa, Artificial Sequence; identical to SEQ ID NO: 9850
  Synthetic

SEQ ID NO: 9852 - protein, 175 aa, Artificial Sequence
  Synthetic
DEVERLLEEAKKIVEEMKRLHEEILREVEEIVRELDEKHDKLLRDAEEIVKELKKEGNEDKRTVEEILRRLEKVLKELREEIEKINREIKKVVEEARKKSEDIIRRADKVLEDLDRAGVREEMRRRLEKLVRDLREKSREVNERIDKLLEELHEKSERVKKTIDDLVEEVKDTLT

SEQ ID NO: 9853 - protein, 175 aa, Artificial Sequence; identical to SEQ ID NO: 9852
  Synthetic

SEQ ID NO: 9854 - protein, 175 aa, Artificial Sequence
  Synthetic
KEVEDILREVKKIVDELLRRHRELLERARRIIKRLKEEHDRLLKELEEIVRDLTRKGNEDEDTVREISKRAKEVIERLETESRKLIRTIDEVLKELHKESRKIIKELEEVVKRVREAGVSEEILRRIEELLKRLRDDAKRVNDELKRLVEELRKRSKEVNDELRRLLKELEDRLR

SEQ ID NO: 9855 - protein, 175 aa, Artificial Sequence; identical to SEQ ID NO: 9854
  Synthetic

SEQ ID NO: 9856 - protein, 175 aa, Artificial Sequence
  Synthetic
SEVEEILKEVERRVDELTRRHEELLRKADEIVKDIRRKLEEINKRLKDIADDVRRKGNEDERTVRELLEELREAVKRARELHKRLLEEVKEVLERLREESKKIIEELRRVLEKVRRAGVDEEILRRIETLLEELERRSKRVNDELEKLVRELKEELERSKRSIDEILKKVSKDLK

SEQ ID NO: 9857 - protein, 175 aa, Artificial Sequence; identical to SEQ ID NO: 9856
  Synthetic

SEQ ID NO: 9858 - protein, 175 aa, Artificial Sequence
  Synthetic
DEVERLLEDLREKVKRLVKKHEDILREVEKEVRRILRTSEEINREAEEIIRELDKRGNEDEETVRRILRTIEEVLKELEKRHRDLLKELEEVAKRVKEKSDELIKTIDRVIEKLRRDGVDEDVLRDVDRLLRELREKSKEVNKRIKELLDKLKTDLERSKEHLERLVKTLKDKLR

SEQ ID NO: 9859 - protein, 175 aa, Artificial Sequence; identical to SEQ ID NO: 9858
  Synthetic

SEQ ID NO: 9860 - protein, 175 aa, Artificial Sequence
  Synthetic
DEVEDLVRKLKKRVDDLLAEHKRLLDEAEKIVREVLKKSRESNERNKKVSKEVRERGNEDKDTVKRLTDELEKVMRDNKETHDRLARELEEAVKRLKEESEKIKRDLDRVLEKIRRDGVSEEVLKTLDRLVEELRKASEDVNRELDKLLKDLEKKLRDSIRHLEENHKDVRRALE

SEQ ID NO: 9861 - protein, 175 aa, Artificial Sequence; identical to SEQ ID NO: 9860
  Synthetic

SEQ ID NO: 9862 - protein, 178 aa, Artificial Sequence
  Synthetic
DEVEKVLKEIRKRVEDSLRHLEKVNKEAREIVEKVREELRESNERLREIVKTIRDRLEKLKGNDEMLKRLKDELDEALRRHREILDRLRRELDKVRRRLEELHRENKEDNRRVLKKAEEDGVEEDVRRTVEELVRRSEKAIEDSRRSIEDLVRRLKEDIERSLRSVEKLVEELTEAIR

SEQ ID NO: 9863 - protein, 178 aa, Artificial Sequence; identical to SEQ ID NO: 9862
  Synthetic

SEQ ID NO: 9864 - protein, 178 aa, Artificial Sequence
  Synthetic
SEVEKVLEELRRIVTKSARHLDESNERLKEIIRRLDEKNKEALKRAEDIIRDIDDKLKKLKGDKRVLDELARRIEEVLRRLRRIVEESRKELDEALKEHDRALRENERENREALRDAEEKGVDKKVKDEVKKLIDDSREKIKRSRESVKRLVEEHRRRSEEVRKTLEKLAREITERIR

SEQ ID NO: 9865 - protein, 178 aa, Artificial Sequence; identical to SEQ ID NO: 9864
  Synthetic

SEQ ID NO: 9866 - protein, 177 aa, Artificial Sequence
  Synthetic
DELEEVADEVRKIIEDLERRLREVVKTSEKLNKENRRRTEDVEKEVEKILRELEEKLRGDEKVRKIIEDLRRELKKAKDESEKSNREIRETTRRLEEEVKKIEDELRKILEEAKDIRADEDIRKVLKELREIIKEVEDMLKEVLDRNRKLIEDNLRRLKEVLDRLRKKVREIEEEAR

SEQ ID NO: 9867 - protein, 177 aa, Artificial Sequence; identical to SEQ ID NO: 9866
  Synthetic

SEQ ID NO: 9868 - protein, 177 aa, Artificial Sequence
  Synthetic
SEIEEAEERVRRLIERNKRETDRVAEEVKRINDENRRATEKVKRDVKRILDDLRRKLEGLDEVREILDRIRRRLEKLERDSKKSNEELERRLKKAIDRSRKTDEDLKEILKKAKDLEKDKLLRDVLRDLERLVRKNLEELKRVLDELKRLMEDNLRRLEKVLEELERLVREIVERAR

SEQ ID NO: 9869 - protein, 177 aa, Artificial Sequence; identical to SEQ ID NO: 9868
  Synthetic

SEQ ID NO: 9870 - protein, 177 aa, Artificial Sequence
  Synthetic
EELERVAKKVRDINRRNKEETKRVEDEVRRLIKENEDTSREVVRRNEEILKDLERKLGGLDEVRKILKELEEETRRLLKRSEDSNRRLEELLRRAKKESEDTNKRLEEILKEAERLEKRDVVREVLERLKELVKRNLDKLKRVLDEIRRLIEENLDELRRAHEEHRRIAEDIRRKAK

SEQ ID NO: 9871 - protein, 177 aa, Artificial Sequence; identical to SEQ ID NO: 9870
  Synthetic

SEQ ID NO: 9872 - protein, 177 aa, Artificial Sequence
  Synthetic
ESLERVKEEVKKILEKNRRTSEEVARRVKELIDRNREKSKDVARKNEKILEDLERKLRGDKDVKKILDELEKRTRDLLRDSERSNEELRDLLRKLLEESKRTNDEIKKILDEMDKLRSEEEVERVLRRLRELVRENEKRLKEVLDEIRRLIRENEEKLEKAHREHKKLAEEVERRKR

SEQ ID NO: 9873 - protein, 177 aa, Artificial Sequence; identical to SEQ ID NO: 9872
  Synthetic

SEQ ID NO: 9874 - protein, 181 aa, Artificial Sequence
  Synthetic
DDVERVLKEVRELVERANEEIRKVLERDRKSNEDANRKIREVLRRVEELVDRIDKIRRELSDKKTVRETVEDILRRIEELLKELKRISDETLKRNEDSARELRERSERTLRRIEDLLRELKKRKASDEVVKKIKELLDRHRKTTEEVLERIRRSLEKHRRDSEEVMKELRRLVKELEDRTR

SEQ ID NO: 9875 - protein, 181 aa, Artificial Sequence; identical to SEQ ID NO: 9874
  Synthetic

SEQ ID NO: 9876 - protein, 181 aa, Artificial Sequence
  Synthetic
DEVRELLRTIEELVRDANRKIKEVLDRDRESNDRANKTLEEILKRDKRSNEDVEEKLKKLTDKSKVKEIVDRVRKENEDSLRKLEETSRKTLEDNKESLKELKKLSEKTRREIERLIDEARKRNVDKKVEKKIRDLLKKHEEDSRKALEDIKRSLERHRERSEEVLKRIRDSLRELDKKTK

SEQ ID NO: 9877 - protein, 181 aa, Artificial Sequence; identical to SEQ ID NO: 9876
  Synthetic

SEQ ID NO: 9878 - protein, 181 aa, Artificial Sequence
  Synthetic
DSVEEILKRVKELVDKANEKIKEVEERVRRSDEELKKILEEILREIEKLVREVEEIARRLSDKETVRERVERIEKRLRELADTIRRIVERVLRENERLLRELKKLSDKTLEDIKRLLDKADKDKVSDEVKKKIKDLLEKHERDSRKVLRKLEESSKETEDRAKEVLERIEKLLEDLRRETK

SEQ ID NO: 9879 - protein, 181 aa, Artificial Sequence; identical to SEQ ID NO: 9878
  Synthetic

SEQ ID NO: 9880 - protein, 178 aa, Artificial Sequence
  Synthetic
KDAEELLKRVRDLLKRSLESLEKILRDSKELADRWRKKLEDLLRESEELVDRAEKILRRGDNDKRVLDKIAEEVRRTNDDSRRLDEELHRLSRDTLRKLEENLRRTEKEVREMDKRAAERGVDERVREELKKLLTRVEEEHRKVLETDKKLLKELHKESKEVNDRDRELLERLEESVR

SEQ ID NO: 9881 - protein, 178 aa, Artificial Sequence; identical to SEQ ID NO: 9880
  Synthetic

SEQ ID NO: 9882 - protein, 178 aa, Artificial Sequence
  Synthetic
KDAERLLRELKKLLEESLKSLKELTDRIRDEVRRVKKRLRDLLRESEELVKRAEDILRRGDNDKRVLDELRKEVERTNRKSEDILREAKELIEKVERELERNLEETEKLIKRIREEMKRRGVREEVEETAKKLLDEVRRAHEEVLKEIRELLRDLERTVREVNEEDKKLLRKLEEDVR

SEQ ID NO: 9883 - protein, 178 aa, Artificial Sequence; identical to SEQ ID NO: 9882
  Synthetic

SEQ ID NO: 9884 - protein, 174 aa, Artificial Sequence
  Synthetic
SEAEKVRKDLKDIADDLHRVSERVLREDERLLKRLHDVSRDVRERDREIVEDLRRGGISKTLLKEVERLSEESKRKLDKLNEEVRRLSEESRKRLKDLNDELREIVRRVKETVDSGDDREEVLDRARKEVDEIKKKHKKVLDESRKLVAEAERKHEEILKESEDLAREIKERER

SEQ ID NO: 9885 - protein, 174 aa, Artificial Sequence; identical to SEQ ID NO: 9884
  Synthetic

SEQ ID NO: 9886 - protein, 174 aa, Artificial Sequence
  Synthetic
SRAEKVREDLDRIEEDLRRVHREVLKEVERILKELHDTSKRVRDEVEKIVRDLRRAGIPKDLLKRAEDLIKEIKDKLDRLNERAEEIFRDIRRYIEENEERSKRLVDEVRKRVDDGDDREKVLEDARKLVRESKENIRRVLEDLKRIVKKLKEDHKRILDELKKLVDKIKEDAR

SEQ ID NO: 9887 - protein, 174 aa, Artificial Sequence; identical to SEQ ID NO: 9886
  Synthetic

SEQ ID NO: 9888 - protein, 174 aa, Artificial Sequence
  Synthetic
SRAERVREEIDKILEDLHRVSERIKRELTKLMEDLERTHERIKKAIREILADLRRRGVPKSLLKKAEDLVKRVEDYVRKNLEDSRDDIRKVREEVEELNKRAEDLVREVKKIVDSGDDREEVLKEAKKLVDDLKEKHKEVLTRVERLVEESKKNLKRVLDELRDLVRRVKEEAK

SEQ ID NO: 9889 - protein, 174 aa, Artificial Sequence; identical to SEQ ID NO: 9888
  Synthetic

SEQ ID NO: 9890 - protein, 174 aa, Artificial Sequence
  Synthetic
SEAERVREELDKIVEDLHRTSEDVKRRDEELLKDLERRHKEVKEEDEKILKDLRDSGIPKDLLREITKLSRDSKKYLEENLRRSRKLSRDSKEKLEELNRRARDVIRRVRETVDSGDDRERVLEELRKTVTEMKKRHRDILRESEELARESKENVDRVLEESRRRAEEIKRRAK

SEQ ID NO: 9891 - protein, 174 aa, Artificial Sequence; identical to SEQ ID NO: 9890
  Synthetic

SEQ ID NO: 9892 - protein, 174 aa, Artificial Sequence
  Synthetic
DERERVKEELDKLLRDLERVHDKVREDDKRLLDDLRRVHEKARRDDKRILDELKRAGIPEDLLREVEKLSRESKRYLDENLRRSEELSERSRKYLDDNLERSRRLMEDVKRKVESGDDREEVLERAKELVKRSKENVERVLRDSERLAKESKENVRRVLEESKRRVEEIEERAR

SEQ ID NO: 9893 - protein, 174 aa, Artificial Sequence; identical to SEQ ID NO: 9892
  Synthetic

SEQ ID NO: 9894 - protein, 174 aa, Artificial Sequence
  Synthetic
SEAERVREELKRILEDLERVHREVEEAIERIVEELEDVHRRARERVERILRELERRGIPKDLLERARKLIEDIKRYLDENLKESRRLAEDVKRKIRENLKRSREIVERVIRIVDSGDDREEVLKEIEKMVKESRDTVRRILEELRELVERSKRNVEKVLRDLERAVEKIERDAK

SEQ ID NO: 9895 - protein, 174 aa, Artificial Sequence; identical to SEQ ID NO: 9894
  Synthetic

SEQ ID NO: 9896 - protein, 174 aa, Artificial Sequence
  Synthetic
KEAEDARRRVDEILEELRKLHDEVRKTDKELLDDLEREHERVKREDDKILDTLRRQGIPKSLLEEIKRLSEDSKRYLEENRKESRRLSEESKRKLDENLERSERLAKEIRERIDSGDDREKVLEDLERLVETSRKTVRDILEESKELVKRSKENVRRVLERSKELVKRVSERAK

SEQ ID NO: 9897 - protein, 174 aa, Artificial Sequence; identical to SEQ ID NO: 9896
  Synthetic

SEQ ID NO: 9898 - protein, 184 aa, Artificial Sequence
  Synthetic
SDVDEARKTVKKILDESEETLERVRRELERILRDSERTLKRVEERVRRILRDLERELRKLPEDDKLKELERRVREATKDVERMLDEDRKRNDKARRELKKVLDENRRKNKKVMDDAEKILRETTDREEIDKVLKEIRERVERSKKHLEDVLDRLRKIIEESKRHVEKVLEKLEKIVKELKDELK

SEQ ID NO: 9899 - protein, 184 aa, Artificial Sequence; identical to SEQ ID NO: 9898
  Synthetic

SEQ ID NO: 9900 - protein, 184 aa, Artificial Sequence
  Synthetic
KDIEEVEKRVREILEDSRRMSKKDEESTRRILEESRRVSEEDKKSTEEILKELKDELRKLPERDKLERLRREIEKVVEENRDVNRRDNRRNEEAIRENKELNKEDNDDNEKVLEDAKRILDETTDRDTIKKMLEEIKRRVDESKRHLRESNKRIRDIAEESKKHLEDSNKKVRDRADELKKRLK

SEQ ID NO: 9901 - protein, 184 aa, Artificial Sequence; identical to SEQ ID NO: 9900
  Synthetic

SEQ ID NO: 9902 - protein, 184 aa, Artificial Sequence
  Synthetic
SDLERVKKAVEDILRDSERTLRRARERLKRLLEELRRTSEEDKKSTDEILERLKRELEKLPPDRKLERLDDLIRRLVKRNKEINDRVNEVVERMMREAEDRLRRDKERNDRVVREAEEIIRRVTDRDELRKLLEEIRRRAEESKRHIEEVLKRLEEIVKRLKEELKRSNDEIREIVRRLEEELK

SEQ ID NO: 9903 - protein, 184 aa, Artificial Sequence; identical to SEQ ID NO: 9902
  Synthetic

SEQ ID NO: 9904 - protein, 180 aa, Artificial Sequence
  Synthetic
STLEEMEKEVEKLNRDSRRTLREVAERVEELNRDNERTSKRVEDAVRELNKRLRDEVRRREVEKVIKESRDSLERLKERSKRSNEESKRTLDELKKKVEDVNKRSKESLDRLREAVKNKAPEEELRKVLKENEELARELKKELERALEENRRLHEENKEDLRRVLEENERLHRKLRKDAK

SEQ ID NO: 9905 - protein, 180 aa, Artificial Sequence; identical to SEQ ID NO: 9904
  Synthetic

SEQ ID NO: 9906 - protein, 180 aa, Artificial Sequence
  Synthetic
DTLERVAEAIRRLNEDLKRTLEKVERAVREILKRLAETLKRAEEEVRRLNRDLERKVRRDEVEEVIRRSRESLRRLKEEVKRALDRIKRLLDELKKRVREVNERSKRSLEDLKRLVENNASEEEIKKVLDDNKKLAEDLKRELKRVLEEIRKLVKELEDIVREVLKTNKELHERLKRRAD

SEQ ID NO: 9907 - protein, 180 aa, Artificial Sequence; identical to SEQ ID NO: 9906
  Synthetic

SEQ ID NO: 9908 - protein, 180 aa, Artificial Sequence
  Synthetic
DTLERAAEEVKKLNEDNKRTSKRVEDEVRRLNRENEEMSKRVKDTVKKILDDLRRKVDRDEVDEVLRRIEELLERLERESEKSNERSRETLRRLKRRSEESNKRLEELLRELDKLVKDNADEKEIERVLRELERIARENKKELEKVLRENRELHERNKKLLEKVLRDIKRLAKTLRDRTR

SEQ ID NO: 9909 - protein, 180 aa, Artificial Sequence; identical to SEQ ID NO: 9908
  Synthetic

SEQ ID NO: 9910 - protein, 180 aa, Artificial Sequence
  Synthetic
RELEEARERVKRLNEENKEFSRRVAEEVKKLNEENERTSKKVEDEVRKLNEDLRKKVDRRDVKRAIERSKELLKRLKEKSEESNKTSEKTLRDLERKSRESNKELKRLLEELEELVKNNADEETIKRVLEELTRIMDRNRKDLRRVLEENKKLHDENRKELKRVLDENRRLHEEVKKRAK

SEQ ID NO: 9911 - protein, 180 aa, Artificial Sequence; identical to SEQ ID NO: 9910
  Synthetic

SEQ ID NO: 9912 - protein, 180 aa, Artificial Sequence
  Synthetic
SELERVKTEVEKLNRRNREATERVKEEVKKLDEENKKSSKRVEDEVRKILDELRKKVDRDRVEKALREIEKLLEDLKRTSDKSNRESEELLKELEERSKRSNDTTKKLLEELEELVKNNADREELERMLKRLKEIIERNEERLKEVLDRIRELIERNKELLRRVLKRIRDLVKELKERAD

SEQ ID NO: 9913 - protein, 180 aa, Artificial Sequence; identical to SEQ ID NO: 9912
  Synthetic

SEQ ID NO: 9914 - protein, 180 aa, Artificial Sequence
  Synthetic
RELEEVERRVRELNEDNRRKTEEVKREVKRIDDDNRRASERAAREVKKLNKDLKDKVDDDEVDRVIEESRRLLRELEDKSKRSNDTSKRLLEELEKRSKDSNRRTKELLERLKELVDRNADEKTLEDMLRRLKEIIKRNKDELEKVLRDIKKLVDDNKRDLERVLRRNEELHRELLERAR

SEQ ID NO: 9915 - protein, 180 aa, Artificial Sequence; identical to SEQ ID NO: 9914
  Synthetic

SEQ ID NO: 9916 - protein, 180 aa, Artificial Sequence
  Synthetic
DELERAKEEIERLNDELKKSLEEVEKEVEKLDDDNRRTSRRVSEEVKRLNKELEDEVRRDDVERAIRESEELLRRLEESSERSNEESRRLLKELAKTVREVSKTSKKSLEELEKLVRDNADRDTIRKVLKENEDLIRKLEEILKKVLDEIRRLIEDNKRELEDMLRKNKELHDRLRERAR

SEQ ID NO: 9917 - protein, 180 aa, Artificial Sequence; identical to SEQ ID NO: 9916
  Synthetic

SEQ ID NO: 9918 - protein, 180 aa, Artificial Sequence
  Synthetic
SELEEVKKEVEKLDERNKRLSKRVEEEVRKLNEENKRATERIKREVEKILEDLRRKVRRDDVDRVLDTIRRLLKRIEEESRKSNKETRKLLEELKEDSKRSNEETKKLLEDLEKLVKDKADREELKRMLDRLRRIIEENERKLKEVLDRLRDIIRKNKEDLKRALERIKKLVEDLKRRAT

SEQ ID NO: 9919 - protein, 180 aa, Artificial Sequence; identical to SEQ ID NO: 9918
  Synthetic

SEQ ID NO: 9920 - protein, 185 aa, Artificial Sequence
  Synthetic
SDLERVLDEIRRLAKEVKDTLRRMLEKNEELSKRDEDKTREMLKEIERLVKELEEIADKLSDEKTVREIVRRIEEDIKRLLEEVKEKNERSIRKSKKTLDDAKRIVDKILEEIRRLLEELRKRVKDDDRLRKAEEEIKEIERDLKRTLDEVAKEVKRTIDRNRETSKRAAREVEKLLEKLREKTR

SEQ ID NO: 9921 - protein, 185 aa, Artificial Sequence; identical to SEQ ID NO: 9920
  Synthetic

SEQ ID NO: 9922 - protein, 185 aa, Artificial Sequence
  Synthetic
SDLERMLREIRKLVEDDKRRTREMLRDNERLSREDKKKTDDVLRRLEELVRRLEEILKKLKDKDTVRKIVKEIIEELEKILKELEDTNRKSIEDSRRTLREVREINKDSIKKLEDLLKEVAERVDDDKRLDDIRRAIEEIIRDLRRASKKASEDVERTIERNERTSEEAKRRIEELIERLRRTDK

SEQ ID NO: 9923 - protein, 185 aa, Artificial Sequence; identical to SEQ ID NO: 9922
  Synthetic

SEQ ID NO: 9924 - protein, 185 aa, Artificial Sequence
  Synthetic
SDLEEALKRVEKLVRDDKEKTKRMLERNRELVKRNKEKNKRMLDEIRRLVEELEDILRRDKDRDTVRRIVEDIKRRIKKLLDDIRETNERSIRESEETLKRVEDLNRESLRTIEELLREIKERVEDDKRLKEVEDAVREILKDLKRTSERAKEEIERTIRDNERVVRRLEEEARKILEDLERRDK

SEQ ID NO: 9925 - protein, 185 aa, Artificial Sequence; identical to SEQ ID NO: 9924
  Synthetic

SEQ ID NO: 9926 - protein, 182 aa, Artificial Sequence
  Synthetic
SRIEELLKTVEKLVDEVKKALRKLLEENKDLARKSKESLERLLDEVRDLVRRLEEILDRGDNDERVLREIEKRVKDAKDRVRDNLREVHRLDEESKRRLEDLLRRVKELAEDVKKKLKDDVDDKDKLERVMRTLDEILKDLERTVERVKRALDESNRDLRREHERIKKELDKILDRLREKAR

SEQ ID NO: 9927 - protein, 182 aa, Artificial Sequence; identical to SEQ ID NO: 9926
  Synthetic

SEQ ID NO: 9928 - protein, 178 aa, Artificial Sequence
  Synthetic
SEVERLKEELDKLHKENREVLEDSKRSLDKILDDVRKLAEDVKKRLDDILKELRDRGVPEEALKEAEKVITDLKRRIDELLDRVRKIVEELKRRHDRLLEEHKRIIDDIKDKLEKNKTDRDLLRRLLREAERVSEETKKESKKLNDEIRKVLERLRDELRKIEDEIRKVVRRIRERAN

SEQ ID NO: 9929 - protein, 178 aa, Artificial Sequence; identical to SEQ ID NO: 9928
  Synthetic

SEQ ID NO: 9930 - protein, 178 aa, Artificial Sequence
  Synthetic
DEVETLKKRLDKLHEDNKRDLERSKRSLEELLKELEEVVRRSEKTLDELLKKVEDQGAPRELLEELKRIMDELKRKHRELLKRAKEMLEEVKRRHDRLLEEHKEIVERIKREVERNKDDRKLLKELEDTIRKVSDDTRRKSEELNEELKTVAEEIKKRSRELNEEAKDVLEKVERRTT

SEQ ID NO: 9931 - protein, 178 aa, Artificial Sequence; identical to SEQ ID NO: 9930
  Synthetic

SEQ ID NO: 9932 - protein, 178 aa, Artificial Sequence
  Synthetic
DEVERAKEKLDKILEDLRDVVRRSKENLDRLHEENRETLERSKKNLDRLLEKVKKDGVPEELLKELERIIRDLKRKHRKLLEDHRKIIEELKREHDRLLKEAEEIVRRIKDELEKRKDDRRDIERILRELEKVLKKLTDESERLNREVERVSRDTKKKSKELNEELKRVLDEVKRKAD

SEQ ID NO: 9933 - protein, 178 aa, Artificial Sequence; identical to SEQ ID NO: 9932
  Synthetic

SEQ ID NO: 9934 - protein, 182 aa, Artificial Sequence
  Synthetic
DEVREVLRELKKVVDDSKRDLDRVLREAERVVKESKDDIKRLLEETERVARDVERKIRENKGNKEVVDRIRKEVKEVHERSERILKRNEEKNRTVLKKAEDMIERNLRENKKVADKIKRVVEELKIDETLDKEVKRLLKESKRAADELRERIKRLIEESKRLLDTVRREDKKILEKIERDLK

SEQ ID NO: 9935 - protein, 182 aa, Artificial Sequence; identical to SEQ ID NO: 9934
  Synthetic

SEQ ID NO: 9936 - protein, 183 aa, Artificial Sequence
  Synthetic
DEIEKILEDLRRISEDTKRKHEEILRELEEILRELEERHRRILREVEEVARRLEERLNEDKRVVEELKKEAEEAIDEVRKRSRRINEELKRVLEEVRRKSEELNKRTEKVVRDVKRKIEETVTDEEKVKEVEREIRRLLKENEDASREVERLIEELKRRLDKISEDVERVLKKILERIDRATK

SEQ ID NO: 9937 - protein, 183 aa, Artificial Sequence; identical to SEQ ID NO: 9936
  Synthetic

SEQ ID NO: 9938 - protein, 177 aa, Artificial Sequence
  Synthetic
RSVEEAEKVLEELKRRNERLNEEHRREVEKVREKNERLNKRHREDVERIKRELDKEPVPEEVKRKLEEAIKKLERIDEESEEETKRVIDRLREMDEDTRRKTEKAIRELRKFLEDTTDDETIKDVLRKIKKISDETRKTLEDTLRELREISEKTRRRLDESLKELEEILRRLKEETR

SEQ ID NO: 9939 - protein, 177 aa, Artificial Sequence; identical to SEQ ID NO: 9938
  Synthetic

SEQ ID NO: 9940 - protein, 177 aa, Artificial Sequence
  Synthetic
REAEEIRKEVEKLLRDLKRALDEHRETSRRLVEELKDILRKNREEVERLVREIREVIKRVKDREVVEEVKKRLEDLVRDIEKVLRDTERIIEKLKEDSEDVLRRLDKIAKDIERDVERREPTRELIEEITRIVEKAKKELREVSKRLREIVKKIKEDNDRSNKRLREIAKEIKDRLT

SEQ ID NO: 9941 - protein, 177 aa, Artificial Sequence; identical to SEQ ID NO: 9940
  Synthetic

SEQ ID NO: 9942 - protein, 177 aa, Artificial Sequence
  Synthetic
SEREEARERVKDLSRKLKEINERSEKHLRDLAKENRDANRRTREEVERLLDKIRKVIKDVKDREVVEKVRELVERLREEVERVNEKSERILREVEKRVRDVLDETRKIVRKMEEEVERREPTEELIRELEKIVRDAEKKNRDVNREVRKILEDSKRELEKVLRDLERKVREIEKELK

SEQ ID NO: 9943 - protein, 177 aa, Artificial Sequence; identical to SEQ ID NO: 9942
  Synthetic

SEQ ID NO: 9944 - protein, 178 aa, Artificial Sequence
  Synthetic
RELEEVLKKLKEDAERLKRILEEATRELEKILERLHRLNEKSTEELRRIVKDLKEELKRRGRDEEVDKKVKDIIRELEKKSTKNLEDSRRIAEELRKTSRETVERVRKDLEELRKRVEELTRSEEVEKTVRKLEEDLKRAIEKHEEDSRRLVKRLKESNDEHEKESRRLVRELEKEIE

SEQ ID NO: 9945 - protein, 178 aa, Artificial Sequence; identical to SEQ ID NO: 9944
  Synthetic

SEQ ID NO: 9946 - protein, 185 aa, Artificial Sequence
  Synthetic
DEVREVIKTVRKLLEDLHRTNREVIERVKRTSEETHRKNEDMLRRLRKLVEDLKETLDRLEDKDTLRRIAEEIEKRIRKLLEEAEKINREALEEHKDLLRKLEEENKRILEELKRLLDKLRKDVEDEKSLRDAEREVKKLLEELKRSLDKLREDVERLLRENKESLDRLREEVKKIERELREKTR

SEQ ID NO: 9947 - protein, 185 aa, Artificial Sequence; identical to SEQ ID NO: 9946
  Synthetic

SEQ ID NO: 9948 - protein, 185 aa, Artificial Sequence
  Synthetic
SDVDRVLEELRKLVEELHRRNRKIIEDLRRASEKTHRKNRDLLEKAKKLADELREIAERLEDREKLREIAREILERLKKLLEDVAKTNTDALREHEEALRRLKEENDDIKEKIKRLVDRVRERIKDKDELRRLEEAAKKILDDLEDSLRKLEEAVKDLKRKNKKSLDDLAEAAKDILRRLAETAR

SEQ ID NO: 9949 - protein, 185 aa, Artificial Sequence; identical to SEQ ID NO: 9948
  Synthetic

SEQ ID NO: 9950 - protein, 185 aa, Artificial Sequence
  Synthetic
DEAEEVIKTVKRLLDELHRRNEEAIKEDRRLVEELHRTNEKVLREVEELVKRLAEILRRLKDKDTVRKIVEDIKRELDRLLDELRKTNEEIRKRSDDLNRKINRENEEILRRLDDLLRDLEAKIRDKETLDRLRERAEELKRRLEKSLRDLNRDNERTKRELRESLRKLEETARRLKEEIDRRTK

SEQ ID NO: 9951 - protein, 185 aa, Artificial Sequence; identical to SEQ ID NO: 9950
  Synthetic

SEQ ID NO: 9952 - protein, 184 aa, Artificial Sequence
  Synthetic
DEADDLIRRVRELVKRVKEALEDLLRRNKDVLRKVKEELEKITRRNRDKVRRVEEELKRIKDRETLRRLVEKVKRELDESHKEVERLIEKVNEISKKTLRDVEKLVTEVKKRLDDIKDELDKRVKSRKLEELRKEVEKLKEELDRVLEEARKEVEKSNRELKEVLERHAEDNERIKRRLDEARR

SEQ ID NO: 9953 - protein, 184 aa, Artificial Sequence; identical to SEQ ID NO: 9952
  Synthetic

SEQ ID NO: 9954 - protein, 185 aa, Artificial Sequence
  Synthetic
SELERLLDEVDRIVREIEERLRDILRKNRELSEDSERKLRELLREVRDLVRRIMDELRRTKERDVIEEVVRRIRELLKRIEDRLRKIADDSHKLDEESVRRLEDIARRIKKRVDEILEEVKRSGVPREKLEEARRRIDEIRRRLEELLKRAREDSDRSNKRNKDLLREIEEELKKLKRELDEETR

SEQ ID NO: 9955 - protein, 185 aa, Artificial Sequence; identical to SEQ ID NO: 9954
  Synthetic

SEQ ID NO: 9956 - protein, 181 aa, Artificial Sequence
  Synthetic
SLKEKVKKVIEDLKRAIDDLLRKVREESKKSNDHIRKLLEDSERTLRDLARRIKKLKDDGDLDERLLKEAKELLEELKRRSEEIIKEVEKLNEESDRVIDKLLEDLARLLKRIDDRIEKITDARLIKEVIEEAERLLREIAKRIRKVIEEDRDLNRRIAKKLDELNRRAEELLKRIADRAK

SEQ ID NO: 9957 - protein, 181 aa, Artificial Sequence; identical to SEQ ID NO: 9956
  Synthetic

SEQ ID NO: 9958 - protein, 181 aa, Artificial Sequence
  Synthetic
SSKETVKDVLRKITKRIRDLVRESKKTSDESNKHIKELLERSKKTIDELERRIEDLRRRGDLDDDLLREAKELLERIERESRRVFKEAEELNKRSDDETRRIVKEAEDLIRTVEERLKRIEDEELLRRLIKELEDLMREIERKLRELNERDKRLNEEIAKKLEKLNRDARKLVEEIERRAR

SEQ ID NO: 9959 - protein, 181 aa, Artificial Sequence; identical to SEQ ID NO: 9958
  Synthetic

SEQ ID NO: 9960 - protein, 181 aa, Artificial Sequence
  Synthetic
KLREDLEEMLRRSEKHIRDLVKRSEETSRDSNRHIEKLLKDSRKTIEDLKRKIEDLARKGKLDEKLLEEVRRLLEEIRKRSEKVIEDARRLNKRSDEETKRIVREADELNKEVKDRADRIRKRELLERLIRELKRLNEEIAKKLEDLNREDRRLNEEIAKRLRDLNEELKKLVEDIERRAR

SEQ ID NO: 9961 - protein, 181 aa, Artificial Sequence; identical to SEQ ID NO: 9960
  Synthetic

SEQ ID NO: 9962 - protein, 181 aa, Artificial Sequence
  Synthetic
RSKEEVDKMLERLRERIEKLVEESRKTSKESNEHLEKLFRESEETIKELKKRIEDLRRKGLLSDELLEEVKRLLDRIREESKKVLDEARRLNEESNRKTEEIVKEVRKLLEEVKRRADEIRDEDLLEKLIRELEELIRRIEKKLRDLNREDRELNKRIADEIERLNREARRLIEEIRKRAE

SEQ ID NO: 9963 - protein, 181 aa, Artificial Sequence; identical to SEQ ID NO: 9962
  Synthetic

SEQ ID NO: 9964 - protein, 181 aa, Artificial Sequence
  Synthetic
SLEEEVRREIERSRRHIEKLVRDSERTSKESNKHIKKLLDESKRTLDEIRKRIEDLARKGKLDEDLLKEARDLIREIEKKSRDVIREAKKLNEESNKRTEDIVREARELNERVKRRVDEIREREVLKELIRELRRLNEEIRKKLEKLNDEDRRLNEEIRRKLEEINEELRRLVREIEERAR

SEQ ID NO: 9965 - protein, 181 aa, Artificial Sequence; identical to SEQ ID NO: 9964
  Synthetic

SEQ ID NO: 9966 - protein, 181 aa, Artificial Sequence
  Synthetic
SLEETVEEVLRRLRRKIEKLVTESEETIRRSKKHIEEVLEKSKRTLDKIKEDIDRLRKEGTLSDEILTELDKLIKDVEKKSKELIDEARKLLEDTKRETDRIRREVEELLRRLEKEVKRIREREVLKELIDRARELIERIARKLTELNKENRKLNEEIARRVEELNKELKRLLKEIEDRAR

SEQ ID NO: 9967 - protein, 181 aa, Artificial Sequence; identical to SEQ ID NO: 9966
  Synthetic

SEQ ID NO: 9968 - protein, 181 aa, Artificial Sequence
  Synthetic
STKETVARELERSRKHLEDSFREAERAIKESEEHIRELLERSRRTLKEIEDRIRDLRRRGDLDDRLLEEVKELIDRVRKRSEDIFRRAEELLRRTRERVKRSLDRARKLNDDVERRMREITDERLLRELIEELRRLNRKIHEDNRRLIEDNKRLNEEIKRELDKLNRELERETEEIKKRAD

SEQ ID NO: 9969 - protein, 181 aa, Artificial Sequence; identical to SEQ ID NO: 9968
  Synthetic

SEQ ID NO: 9970 - protein, 178 aa, Artificial Sequence
  Synthetic
SVRETLREVLKESKKHLDDLVRRVKEEIERSKKHIDDLIRRNKESLDDIRRTVEEKIKGREILRKIEEALKRNEDELRRIATEAEKVHRDVEKTIREIVKELRDVHREIEDAIRKKQDDSDLVRELIKRLKEINDRVAERIKDIIRKVREANKDLERKLRELNKRSRDVLEEVVRAEE

SEQ ID NO: 9971 - protein, 178 aa, Artificial Sequence; identical to SEQ ID NO: 9970
  Synthetic

SEQ ID NO: 9972 - protein, 178 aa, Artificial Sequence
  Synthetic
SAAEEAEKASKDSEKHIKDLIRRLREVSEESRRHLRRLIEENKRSLEEIEKEVRKKVKGEEIRREIEEALRRNEDKLKKIEDEMEEVNKKSEEDVRRLEKEVKDVNDRSSDTIRDNKDDTELIKRIIDRNREINRRVAEAIKKIIKDNRDINEDLERKLRKLNEESKRVLDDVVRREK

SEQ ID NO: 9973 - protein, 178 aa, Artificial Sequence; identical to SEQ ID NO: 9972
  Synthetic

SEQ ID NO: 9974 - protein, 178 aa, Artificial Sequence
  Synthetic
SVEERLKDELRKSEEHLRRLIRELEKALEDSKRHADRLIKENRDSLRRIEDKARKKIRGDEILDTIRKALKDNRDELEKILREVEEVDKESKRRLEEILRTMREVNEESKDRLRKKDKDDETVKRIIEENRRINEDLARKIKEIIRDNKRFNEEVEEKLKRLNDTSEEILRRLVRRDE

SEQ ID NO: 9975 - protein, 178 aa, Artificial Sequence; identical to SEQ ID NO: 9974
  Synthetic

SEQ ID NO: 9976 - protein, 178 aa, Artificial Sequence
  Synthetic
SVDKELEEVIRRSKDHLEKLIKEAEDALKRSEEHLRKLIEEVKRRLEEVEKRVREKVRGEEILREIEKVLKEVEESLERILKELEDVNRRSREELKRILREMERVDEETKRELDRRTDDSELIKRLIKENKEINEKLAREIEEIIKENKRINDELKKRLEELIERLERILEEVERRER

SEQ ID NO: 9977 - protein, 178 aa, Artificial Sequence; identical to SEQ ID NO: 9976
  Synthetic

SEQ ID NO: 9978 - protein, 178 aa, Artificial Sequence
  Synthetic
SVDRTLEEVIKDSRRHVKELIDRLEKVIKESEENVKRTVDDNERSLKEIADTVRREIKGREILEEIKRVLDDNRRAVEELEKEAREVHRDVREKLKRILEELKRADDETERRLRERTDDSEDIKRLIDTNRKINRDVAETIKEIIKEVRKINKEIDDKARELNKESRRVLEEVVRAER

SEQ ID NO: 9979 - protein, 178 aa, Artificial Sequence; identical to SEQ ID NO: 9978
  Synthetic

SEQ ID NO: 9980 - protein, 178 aa, Artificial Sequence
  Synthetic
SVAETLRKVLKESEENVKRTVDRAEEELKKSEEHLRRLVERLKEVLEDVRRRVEEEVKGRELLREMDEVLKRIEEEIRKILRRLEEADKRSREALDKLEKDAKRVHDEVRDRLEKRTDDDERVERIIRELREVNERLDREVERLIRENREINRRLAEEIKDLIRRLREILREVVERAK

SEQ ID NO: 9981 - protein, 178 aa, Artificial Sequence; identical to SEQ ID NO: 9980
  Synthetic

SEQ ID NO: 9982 - protein, 178 aa, Artificial Sequence
  Synthetic
SIAEKVEKVLKESKENLDETIRRAEEDLKRSRDHLRKLIEENKRSLDRIKEEVDRRIKGREILKEIEEMLKRNDDRLKEILREVEEADRRSREELKRILDEAREVHKEIRRKIDERRDDSDAIEKLITDLRKINEEADRKVKEIIKRNRDINKKVEDDLRELNKESTTVLREVVERER

SEQ ID NO: 9983 - protein, 178 aa, Artificial Sequence; identical to SEQ ID NO: 9982
  Synthetic

SEQ ID NO: 9984 - protein, 178 aa, Artificial Sequence
  Synthetic
SELEKIIEDARRVLEEDERRNREVNRKLRKILEDNERLNREVNKRLREILKRLKEELKRLKGDKKAVEEVRKKVEEALRDVERVLEESRRDIERVLREVEEMLERSRKHIEDVLRELERRDLDEEAKRALDKIREDVRKILEDTKRELEDVRRRVEEILRETREELKRVEDDVKRAED

SEQ ID NO: 9985 - protein, 178 aa, Artificial Sequence; identical to SEQ ID NO: 9984
  Synthetic

SEQ ID NO: 9986 - protein, 178 aa, Artificial Sequence
  Synthetic
SELEDIIRKLDEILKRNEEENRRVIRRLRELLEEDERRNRKAIEDLERIITKLKDDVRKLKGDEKVLRELEETVEKVIRELRKILEDSRRHIEKVLREIEKILRESERNARKVVEDLRSKPLDRDAERRIREVEEEVKRILEETEEVLRDVKRRVDEILKTTEDRIREIEEEIKRTVK

SEQ ID NO: 9987 - protein, 178 aa, Artificial Sequence; identical to SEQ ID NO: 9986
  Synthetic

SEQ ID NO: 9988 - protein, 178 aa, Artificial Sequence
  Synthetic
DELRDIIRELRDILRENKKRNEDAIRKLRKILKENEKKNRDAIRELEDILEKLRKEIEDLKGDERVLREITKRVRDALERIKRILEESEDDIRRVLEEIEEILRRSKKNIDDAVRKLRSKDLDRKVEEDIKRVEEEVKKILDKTDEELKEVERRVRKILRETEEELKRVEDEVRRAKT

SEQ ID NO: 9989 - protein, 178 aa, Artificial Sequence; identical to SEQ ID NO: 9988
  Synthetic

SEQ ID NO: 9990 - protein, 177 aa, Artificial Sequence
  Synthetic
REEEKARRVMEKLKRDVDRINTRHRDILKKIEDEVRRIDEEHKTEVKKIKDRAEEIIRRIDDEKTVREARDIVRKIEEEVRRSNKTTEEVLRRAEDRVRKSNETTRRLLEKLERELREREPDKDLIREVEKILKDIEDLVRESERELREILKDIKRMVDESLKRLEDILRELEERTR

SEQ ID NO: 9991 - protein, 177 aa, Artificial Sequence; identical to SEQ ID NO: 9990
  Synthetic

SEQ ID NO: 9992 - protein, 177 aa, Artificial Sequence
  Synthetic
REEEEMRKVVKDLEDAARELDRDHETKLRRIEEEVKKLNEEHKRELERIARRIKEIIDRIEDEKVVREIRKILEEVRKRAEDSNKETEDILRDVRRRAKESNDRSREVVREARKEVREKRPDKDLIRRLEEILRRIARELEDSLRKLEKILEEIKEIVKKSLDELRRIVDELEKRVR

SEQ ID NO: 9993 - protein, 177 aa, Artificial Sequence; identical to SEQ ID NO: 9992
  Synthetic

SEQ ID NO: 9994 - protein, 177 aa, Artificial Sequence
  Synthetic
SEEEEVRRVLKRIAEEVKRLDEDHRRILEEIRKKVEKSSRDHKRELDKIKRDADEIIRRISDEKVVREIKRIVEKIEKDAEKVNRETKRILDELARRVEESNKRSEDVLRELEKEVRDKEPSKDLIKKLEEILEEIRRLLEESLRELEDILKKVHDRNARTLERLREILKEIEDRAR

SEQ ID NO: 9995 - protein, 177 aa, Artificial Sequence; identical to SEQ ID NO: 9994
  Synthetic

SEQ ID NO: 9996 - protein, 177 aa, Artificial Sequence
  Synthetic
DEKRKVDKRLKEIEETIRRLLEEHRRELDEIRKRIEEISRRHRKELEDIEREVRKIISRIDDERTVERIREELKRVKEDADEVNRKLKEILERIEKRARESDEKVKRILDEIRKKVRDREPSEDLIRDVERVMREVKRDLERSLEELRDVVRRAEEEVRATLRKLREILKKVEDETR

SEQ ID NO: 9997 - protein, 177 aa, Artificial Sequence; identical to SEQ ID NO: 9996
  Synthetic

SEQ ID NO: 9998 - protein, 177 aa, Artificial Sequence
  Synthetic
SEEETMRKVVKEIREKVRRISERHKEELERITDALRRSSKRHEDELREIEKAVREIIRRIDDDKTVKEIKKILDDARDRVKKVNDKTDDDLKKIKKDAERVNRELERELRKAEEDARRREPSDKLIRELEEILERLEREVRKSLDRLRKILEDIHRTNKDTLDRLREILKKVEDRTR

SEQ ID NO: 9999 - protein, 177 aa, Artificial Sequence; identical to SEQ ID NO: 9998
  Synthetic

SEQ ID NO: 10000 - protein, 185 aa, Artificial Sequence
  Synthetic
SEVEEVIRRLEELVDRLHKINKRAIEENERLNRELHEKNRDIIRKLKELVERLRDIKEKLSDKETLRRILEEIKTRIEDLTRRARETNEEIKRRSDKTLKDIRKINRDIKEEIKKLVREIEERITDKETADRARDEVRRIEKELDDSLRELEKRVRDSKRHLDRSLEELEKVVDEIRKELEDLAK

SEQ ID NO: 10001 - protein, 185 aa, Artificial Sequence; identical to SEQ ID NO: 10000
  Synthetic

SEQ ID NO: 10002 - protein, 185 aa, Artificial Sequence
  Synthetic
KEVEEVIKRLRELVDRLEKENRDVNEDNKRLNEELHDRNRKMIEELRRLVTELEDIRRKLKDKDTLEEIIREILKRIEDLLKRIREINKKILEESRRTLEEAKKRNEEIRREIKRLLDELRKRITDKDLLKRVEDEARKIEEKLKRIHEETKKVADDSERHLRKSLRELEKVAREIKKRLEEERK

SEQ ID NO: 10003 - protein, 185 aa, Artificial Sequence; identical to SEQ ID NO: 10002
  Synthetic

SEQ ID NO: 10004 - protein, 185 aa, Artificial Sequence
  Synthetic
DEVREIIKDLRRLLKELEERNREINDRNKKLNDTLRKELEDIKRRLEKLLRELEKIVRELSDEDTLREIVERIKKRIRDLLEEVRKRIEEIKRRSRETLKRIKEINEEIKKRIRELLEEIARRITDEEVLRRVEEEVRDIERRLDKIHEDTRDTAEKSERHLDALLRDLERVAREIEEALDRLKD

SEQ ID NO: 10005 - protein, 185 aa, Artificial Sequence; identical to SEQ ID NO: 10004
  Synthetic

SEQ ID NO: 10006 - protein, 185 aa, Artificial Sequence
  Synthetic
SEVEEVIRRLRELLRTLEEENRKMIRENERLLEELKKRNEDIERELRKLVTELAKIADKTRDKDTLEKILREIEREIDRLLDEIHKINREIIKRSRDSLREAHKRNKEIKERIEKLLRDLEARITDEKLARELREVAERIKKRLDEIDETTRRMVTESIKRLEEIDKRTTERAREIKKELRDRAT

SEQ ID NO: 10007 - protein, 185 aa, Artificial Sequence; identical to SEQ ID NO: 10006
  Synthetic

SEQ ID NO: 10008 - protein, 185 aa, Artificial Sequence
  Synthetic
SEVEDLIRRLEELLDRIRRDNERIIKELEELLRELEETNKRLIERIRKLLEDLRDTVRKLSDKDTLRKILEEIRRTIDKLLKEIHDTNKRIKDEIERLLREIHRDNERIKDEIRRLLEDIARRITDEKLMREAKEAVDRIKKRLDEINKRTEDVARRIRKRLDEIDERTKEEAKRIKEELDKEEK

SEQ ID NO: 10009 - protein, 185 aa, Artificial Sequence; identical to SEQ ID NO: 10008
  Synthetic

SEQ ID NO: 10010 - protein, 185 aa, Artificial Sequence
  Synthetic
SEVEELIERLKELLERLEELNRRVNEENRRLNEELERRIRKAIEDLKDLLRRLDDIRRRLKDKDTLRKILEKIKRDLEDLIRKLRETLRRIKEESERTLKEIAEMNKKIKDELERLVREIEERITDEKKLRELKEVVDRLKKEIKRIDEETRKEAERSKRNLEKILRDLEREAKRLKEEIDKKAR

SEQ ID NO: 10011 - protein, 185 aa, Artificial Sequence; identical to SEQ ID NO: 10010
  Synthetic

SEQ ID NO: 10012 - protein, 182 aa, Artificial Sequence
  Synthetic
DEIRDLLRRLRELNKRIADRIRKLNEENKKLNKEVADKIRKLNREAREIIKTIAEIIKSGNRDRRVIETIEKLLRDVLKRSEDLLREAEKLDKDSLDRSKKIIKEAEDLNREILERIKKAGVPKEVLDRAKEEVDRSRKHLKELLDRSRETSDRSRRHLKDLMRRSRETIRKLDEELKRLEK

SEQ ID NO: 10013 - protein, 182 aa, Artificial Sequence; identical to SEQ ID NO: 10012
  Synthetic

SEQ ID NO: 10014 - protein, 182 aa, Artificial Sequence
  Synthetic
SEIEKLIREAERIIEEIAKEIKDLNEENERLNREVDKRLTDLNRRAKELLEEVKRIIDRGDRDKRVVDEVRKRLEDLLEESKRLIKEARDLDRETLEKSERIIDRIRELLRDVLRRVEEAGVDEEKLRDARREIERLRRELEKLLEDSRRTSEESRRNLERSLDESRKTIEELIKRLDDAER

SEQ ID NO: 10015 - protein, 182 aa, Artificial Sequence; identical to SEQ ID NO: 10014
  Synthetic

SEQ ID NO: 10016 - protein, 182 aa, Artificial Sequence
  Synthetic
SEIEKLIEDAKRILEEVARRLKKINEDNDRLVRKIADELRRLIEEAKKILDEIKKIIEDGDRDDRVIREAEELLKRILERVKKVIEDARRLDEETLRRSKKLVEEVEELLKKALDDVEKAGAPEDVLREVRKVIKKLRDELEELARRSRKTSEDSRKRLDDLLKRAREVIEELKKRLEDLRR

SEQ ID NO: 10017 - protein, 182 aa, Artificial Sequence; identical to SEQ ID NO: 10016
  Synthetic

SEQ ID NO: 10018 - protein, 182 aa, Artificial Sequence
  Synthetic
KDIEKLIKDLEKLNRDIAKRIRDLNETNKKLVRDVAEEIKRLNEELKKLLEDIRRIIERGDRDRRVTETARELLERVRKESRRLFEEIRKLDEDTLRESERIIKEAKDLNEEVRERLERRGAPEEVLKRAREMVKRSKEHLDELLKRSEDTSRESKRRLEKLLKESEDTIRRLEEELKKAEK

SEQ ID NO: 10019 - protein, 182 aa, Artificial Sequence; identical to SEQ ID NO: 10018
  Synthetic

SEQ ID NO: 10020 - protein, 182 aa, Artificial Sequence
  Synthetic
KEIEELLEEIERILREIKKDLERINKENEKLNREVKKKIEDLIREVRKIIEEIRRIIERGDRDKRVFDEIRKLLEEILKRAEDLLRRARELDKKTLDESEEVIDRVRKLLERILKTVEDAGVEERKLKEVRDTIEELKKRLEKLAKESRDTSRRSRENLERLAREFREEIKRLKKELEEART

SEQ ID NO: 10021 - protein, 182 aa, Artificial Sequence; identical to SEQ ID NO: 10020
  Synthetic

SEQ ID NO: 10022 - protein, 182 aa, Artificial Sequence
  Synthetic
SEIEKLIRDAEKILEEIAELIKRLNEENKELNERVAKRIKDLNEELRRLLKEIADIIRRGDRDERVIRTAEKLIEDVLRRSERLFEEAKKLDEDTLKKSKDIIRRAEELLRKILKELEDAGVPREELEKVRKVIDKLREELKRLERESERTSEESRRNLERLLRESRKTVEEIKKRLDELRK

SEQ ID NO: 10023 - protein, 182 aa, Artificial Sequence; identical to SEQ ID NO: 10022
  Synthetic

SEQ ID NO: 10024 - protein, 182 aa, Artificial Sequence
  Synthetic
SDIERLIAELEKLNKEIEDKIRELNRENRRLNKEIDEEIERLIEEARKIIEDIREIIRRGDRDDRVIKKIRDLLEDILDKVEKLLRELEELDKRTLDESERIIDEAKKLNKEVEDELERRGVDRKKVEEARKKIEDSKRHLEELLRDSRRTVKESNDNLRRSAEKARREIKRLEEALKELRR

SEQ ID NO: 10025 - protein, 182 aa, Artificial Sequence; identical to SEQ ID NO: 10024
  Synthetic

SEQ ID NO: 10026 - protein, 181 aa, Artificial Sequence
  Synthetic
DEVEKVVRELEEVLRRNKELLEKTKKETKEALDRNRELLEDTKRKTREILERLKKVIKEGRDRREVRETVKKAEKENEEANRRSRKHVREVKERNKRMNEESRKHVDRVVRKIAEVEKRLTDEEVVKRLRDILRRVKEAAEELHRDDERELRRVEKELEELHKDDRRVVEEVKDDVRKAEK

SEQ ID NO: 10027 - protein, 181 aa, Artificial Sequence; identical to SEQ ID NO: 10026
  Synthetic

SEQ ID NO: 10028 - protein, 181 aa, Artificial Sequence
  Synthetic
SDAERVVRELRKILKEIEDTIRKSKKETKEMLDRNRELARKVKEELKEILRRLEKMKRDGKPDEEVEKLVREAKKRVEDVIEESRKHVEEVEKRNRDINDDTRRKLETVERKLREVEKRLDDERLLRELRRIVEEVKRAVEELNRDDRRTLERVKREAKKIHEDLRRVVEKLERDVEEARR

SEQ ID NO: 10029 - protein, 181 aa, Artificial Sequence; identical to SEQ ID NO: 10028
  Synthetic

SEQ ID NO: 10030 - protein, 185 aa, Artificial Sequence
  Synthetic
DEVEKLKRELDKILEDLERLHRRLEEELRRIHEENRDLSRRTKEELDRILKRIEELLRERRDKSVVDEVRELLKRAEERVRKANEDSKRLSKEVADTVREASRRSKEILDELKKRVEKAEKDLTDDEKVLEELRRILRRVEEAVRRLNERSEEVLRDVERRDEELNEDNKRRLEEVKKRVEDLLR

SEQ ID NO: 10031 - protein, 185 aa, Artificial Sequence; identical to SEQ ID NO: 10030
  Synthetic

SEQ ID NO: 10032 - protein, 185 aa, Artificial Sequence
  Synthetic
SELDELKKSLEEIHRRDREKNRKLKEDLKRILDEIRKRLEESKKRLEEILREIERLLRERKDDSVRREIKKLLEEIKERVKKVDKETEDLLREAKKEVRRLEEDDKRSLKELTDEVRDAERRLTDDEKALKELRKILEDVARANEELNRDTRRTLERVEEEVEKLNRDHKRVLEKVERDVRRLTK

SEQ ID NO: 10033 - protein, 185 aa, Artificial Sequence; identical to SEQ ID NO: 10032
  Synthetic

SEQ ID NO: 10034 - protein, 185 aa, Artificial Sequence
  Synthetic
SEVERLKEELKRILEEIKKLVDDSKKDLERIHREDKKKNEDLKKRAEEILREIRDLLTKRRDKDVRKRIRELLEKLAREVEDMSRKDKESLDELEKRARDVNRRLKELLKRAAERIRKAEEDLTDDEKLLRDLRRVLEEVKRAVDEISKDHKRMLDAVKKANEELNDDSRRVLERVDREVKKAEK

SEQ ID NO: 10035 - protein, 185 aa, Artificial Sequence; identical to SEQ ID NO: 10034
  Synthetic

SEQ ID NO: 10036 - protein, 185 aa, Artificial Sequence
  Synthetic
SELDRVREEAKRIDDENRKRSEDSVRDSERLLREIEELHRETKERSEELLKRVEEIVRDRGNDEEVTKDLKRILDELRETHKRVLEESKRLLEEARRRHEEVIRRLEESLERLKRKVDEVKKRLKGDRLLEELEKVLRESARRNERIITENRRTMKRVSEEVEKLNRDDKRRMEELEKRAREIIT

SEQ ID NO: 10037 - protein, 185 aa, Artificial Sequence; identical to SEQ ID NO: 10036
  Synthetic

SEQ ID NO: 10038 - protein, 185 aa, Artificial Sequence
  Synthetic
SELERAVEELEKLLKELEDLHRKSKEDSKDMLRRVEELHRRTKEKSKRILEEIERRITEEGRDEDVERKIREVVERARKLHEEVLKRSKDILEEIKKLHEDVERRSKKLLDDLRKRVEDVKRRLTGDELMRKLEEILKRVAEAIKRLIDDDRRVLKRVAEEVKKLNEDDKRVADEVSERIKERLT

SEQ ID NO: 10039 - protein, 185 aa, Artificial Sequence; identical to SEQ ID NO: 10038
  Synthetic

SEQ ID NO: 10040 - protein, 185 aa, Artificial Sequence
  Synthetic
DELEEAEERLREIDKRNEDLHEESRKESKRLLDELRKLVEDVKRELEKILEEAKDIVRKRGKDKDVEKTLEDILREVETRVKEVIKDIERILKEIRETHRRVIERSKRSLEAVKDLVRRVEKDLTGKEKLEKLRDVLRESERRNRELIEEDKEVMRRVSEEVKKLIDDLRRALEKAARDVEKIRR

SEQ ID NO: 10041 - protein, 185 aa, Artificial Sequence; identical to SEQ ID NO: 10040
  Synthetic

SEQ ID NO: 10042 - protein, 185 aa, Artificial Sequence
  Synthetic
SELEDAERRAEEIDRRNKRTVERVEEELEKILREVEELHRRTEEKSKRILDEIRRKIRDRGKDEDVKREIREMVERAKKLHKDVIDESRKILEDIRRKVEKVIRDLERSLEELKKEVKEVEDRLKGKELADKLRDVLRRSAEENKKIIDRLRKILEDVARAVEELIKRDKRVMEEVKKEIDKLLT

SEQ ID NO: 10043 - protein, 185 aa, Artificial Sequence; identical to SEQ ID NO: 10042
  Synthetic

SEQ ID NO: 10044 - protein, 184 aa, Artificial Sequence
  Synthetic
SEVEEIKKRARKLLEEVREIVDRVKKLHERLLREIEKTNREAKREHKRVLDTIRDIFRRIDSEDVKRILRELEERLDKTTKDLEEINRRALEKVDETSKRVKRELERILEELDRLAKDIKAKLDEAETVADLDREIRRLKDELRRILEDLRRVSEEVKKELEKLTRDTRRVSKEVKDELKKVEK

SEQ ID NO: 10045 - protein, 184 aa, Artificial Sequence; identical to SEQ ID NO: 10044
  Synthetic

SEQ ID NO: 10046 - protein, 184 aa, Artificial Sequence
  Synthetic
REVDEIKKRLTEMLETVRKIVEEIRRELEKLLEDVREINERVKEEHERILKDIRDVARKIDSEDARKILTDALRDLDRTTRDLERKNREILKRLDDLVKEIRRRLTEILDRARKLVEDIERKLDDGETMEDLKRRVREVEKRLEEILRRLDDVVRKIKEELKKLTDDTRRVSKRVKDDLERTRT

SEQ ID NO: 10047 - protein, 184 aa, Artificial Sequence; identical to SEQ ID NO: 10046
  Synthetic

SEQ ID NO: 10048 - protein, 184 aa, Artificial Sequence
  Synthetic
SRVEEIKKELRRLLEEVRKKNEESKERDRRLNDTIRRELEEIIRRLRKLLEEIRRLRERIDSEEVRKILRDLLKRLDDLVRTITERLKRINEESNRLAEEDVRTLEKILRDLEELAERVERELDEARTVEDLRRVVEKVLRDIKRSIDDVRRENKKSNEDARRWLEELKREVKRLKDELREIEK

SEQ ID NO: 10049 - protein, 184 aa, Artificial Sequence; identical to SEQ ID NO: 10048
  Synthetic

SEQ ID NO: 10050 - protein, 181 aa, Artificial Sequence
  Synthetic
SEVERIKRELERLLKEVKDANKRVKDTLRKLLRDVEEMNRRVKRENHELLRRLDELVKAGRDEETIKKVKRESRELLRELAKVNRDVKERIEELLREVKKLNEDVKRKLRELLKELEERIRDEELLKDVRKVAKEVEEELKKLHDDTKRVADKVKEDLDRLHRDSERNARRSEEEMDKRRK

SEQ ID NO: 10051 - protein, 181 aa, Artificial Sequence; identical to SEQ ID NO: 10050
  Synthetic

SEQ ID NO: 10052 - protein, 181 aa, Artificial Sequence
  Synthetic
DRVREVKERLKKLLEEVERTNREVMERNHRLLEDVERKNRRVKEENHRLLEELKRLREDGKGDEAVKRVLEESKKLLDDLSEENKRVKEESDKLLDEIRKKNEDVKRKIRELLDRIRKEIEDERLLEDVERTAERVERELDRLHEETKRNADRSREELEKLHRDSEKNARDSAKELEKIRR

SEQ ID NO: 10053 - protein, 181 aa, Artificial Sequence; identical to SEQ ID NO: 10052
  Synthetic

SEQ ID NO: 10054 - protein, 181 aa, Artificial Sequence
  Synthetic
DEVERAEEELERLLRELKKLHEDAKERARELLKRIEDVNRKVKEELKRLLDTIRKLREAGRDESTVKEVKDRIEELLKELERLNREVKERIRRLLEEIHKLDEEVNREIERLLREVTRRIKDKDLLEKVKRVVEEVHKRSRELNEDTRRVIDKVEKDLDELHRDSRRVVETVKEELEKLRK

SEQ ID NO: 10055 - protein, 181 aa, Artificial Sequence; identical to SEQ ID NO: 10054
  Synthetic

SEQ ID NO: 10056 - protein, 181 aa, Artificial Sequence
  Synthetic
KEVEEVKRRLREVLKRLKEMHERVKRELEKLLKKVEDFNRDVKRKNHDLLRRLEELKKAGEDEKALKEVIDTSRKLLKDLAEVNEEVRKEIEELLKEAHRVDREVNEELRKLLEDITRRIRDKDLLEDVEREARRLHDESRKLNEDTKRVVDTVTEELKKLHRDSERNAKRSEEEMDKRRK

SEQ ID NO: 10057 - protein, 181 aa, Artificial Sequence; identical to SEQ ID NO: 10056
  Synthetic

SEQ ID NO: 10058 - protein, 181 aa, Artificial Sequence
  Synthetic
DEVERVKETLDKLLDDVRKLNEEVKKRLEELLEKVERDNRKVKEDNHRLLEEVKDLKRRGKDESALEEVKRRSDKLLEDVHRVNRTVEEEIKRLLDEVRKLNEDVKRKIRKLLEDIRRKIKDKDLLEDVERRAKRVEEELDKLHEDTRREADRVRRDLRRLDEDTKRNVDESRKELEKTRK

SEQ ID NO: 10059 - protein, 181 aa, Artificial Sequence; identical to SEQ ID NO: 10058
  Synthetic

SEQ ID NO: 10060 - protein, 185 aa, Artificial Sequence
  Synthetic
SEVEEVIRRIRALVEEIARKNEDILRKNRKLLEDLRELVERVIKEIKELIDRLADEVRRVKDKETVKKLIDDIRKRVEKLAEDLTRLIKEIKDRSRKTLEEAHKLNRDIIRDIRRLLEELRKRVKDDRVRKEVEEVLRDVEERIRRLDEEVRRRAEESERELERLREKVEDMIEKVKRALEELRR

SEQ ID NO: 10061 - protein, 185 aa, Artificial Sequence; identical to SEQ ID NO: 10060
  Synthetic

SEQ ID NO: 10062 - protein, 185 aa, Artificial Sequence
  Synthetic
SELEEIIKKLRKLVEDVARRNEELIKKLEETNKRLEDEVRELIEEIKKLIDELAETVKRIEDRRTLEDLIRKIKEEVEELLRRIRERVKEVDKEDKDLIKRIHDDNREILKRLEELLRRAEDKVKDEEMKKRLRDVAEKLKEDVRDLDRKVKKVAKESHERNRRILKELEEVAARVTERLEELRR

SEQ ID NO: 10063 - protein, 185 aa, Artificial Sequence; identical to SEQ ID NO: 10062
  Synthetic

SEQ ID NO: 10064 - protein, 173 aa, Artificial Sequence
  Synthetic
DEDERVDEVIKKVREDLRKLLEDSERVVKRSKEELDRWRKKVEDVMRDSDRRLEELRRDKRLEEIKRRSEKTLKEAEDLIRTIKRISEKTLEEDRELIKRAEEEVTRIEEEAKRGDNREEVIKELKKLIDKLREDSKKTIEENKKMNKDAADEIEKIIEDNRRLIKRIEEEDR

SEQ ID NO: 10065 - protein, 173 aa, Artificial Sequence; identical to SEQ ID NO: 10064
  Synthetic

SEQ ID NO: 10066 - protein, 173 aa, Artificial Sequence
  Synthetic
SEDERVEEVVKRIEDKLRRLLEESKRVVDDSKRRLDEWRKEVEKVVKKSTDDLEKLRRDKVLEEVKKISKETLDEARKLIDDARKRSDETLKRDERVIREADKKVKEITKRARDGDNREEVIKELEELIERLARISKKTIEEDRRVNKELAERIKEIIERNRRVIEEARERLR

SEQ ID NO: 10067 - protein, 173 aa, Artificial Sequence; identical to SEQ ID NO: 10066
  Synthetic

SEQ ID NO: 10068 - protein, 182 aa, Artificial Sequence
  Synthetic
KELEELIEELERLNREINERAKELIKKLRKLNEEVARRHERLIEELRRILEELKELLERGNRSDELLKRIRTMVEKVRKDNEDSLRELKELTDRVMRELTELLKEAKKLTDEIADRLRRIPLDEELRRRAKRVLEESKRNIEKVAEDVTRVLRESEESLERLRERSERVLREVEKTIRDMAR

SEQ ID NO: 10069 - protein, 182 aa, Artificial Sequence; identical to SEQ ID NO: 10068
  Synthetic

SEQ ID NO: 10070 - protein, 182 aa, Artificial Sequence
  Synthetic
SEVERLIEELDELNRRINEKHKKLRRELEELNKRVAERHEELIRRLRKLLEDLERLARRGNRSSKLLEDIKRLVDEVRERNRESLDELRRLTRTVAERNKRSLEEARELTERVRKKAEDVPLSEELRKRVEDALRRSKENIKRLEEESREVLRRSEKSIDELRRESERVLKEVKEEIERVRK

SEQ ID NO: 10071 - protein, 182 aa, Artificial Sequence; identical to SEQ ID NO: 10070
  Synthetic

SEQ ID NO: 10072 - protein, 182 aa, Artificial Sequence
  Synthetic
SELEELIKELRDLNRRINKRVDDLADELRRLNERINRRHEELIKELRRLLEDLKRKFDRGDRSSDLIREARELLKRIEERNRDSLRELEELSRRVEEDARRLLDELRRLTEEVKKRAEDVPLSEELKKRADDVLRESKENIERVERKIRRVLEESEENIEDLRRRSKEVLDEVRKRIEDIRR

SEQ ID NO: 10073 - protein, 182 aa, Artificial Sequence; identical to SEQ ID NO: 10072
  Synthetic

SEQ ID NO: 10074 - protein, 182 aa, Artificial Sequence
  Synthetic
SELEELIRRLKELNKDVNEKHKRLIEELEKLNRDINERHKELIEELERLLRRLEKLLRDGNRSSELMERIRRLIERVRDENRKSLETLKRLSDDIERKNRESLKRLKELTDEARKRLEDIPLSEDLRREAERVLRESEENIKELEDRSRDALRRSEENIRRLKKESEDVLREARREVERLER

SEQ ID NO: 10075 - protein, 182 aa, Artificial Sequence; identical to SEQ ID NO: 10074
  Synthetic

SEQ ID NO: 10076 - protein, 183 aa, Artificial Sequence
  Synthetic
SLEEELDKVLKESRDNVRRVEEELEEVMEKSERAAEKLRRDLDRVLEELEKMIRDLKRRGVPKDEVDRVLEELRRLADKLREDLDRVLKESKESIDRLRERVKEVKEESEELARRLKEKSRDIDREDIKRVIDTLRKLNERLNREVKEVIKRNEELVRRLAERVKKVVEDLRRLVKRLDDEVR

SEQ ID NO: 10077 - protein, 183 aa, Artificial Sequence; identical to SEQ ID NO: 10076
  Synthetic

SEQ ID NO: 10078 - protein, 183 aa, Artificial Sequence
  Synthetic
SLEETLKEVLRKSEENAERLKRELEKVLRKLEEDLRRLDERLDEVLKRSRDEARKLREADVPKDDVDRVVEESERSIRELKKEIKKVEDDLRKLATDLERRLEEVKERSRELVDRLRKKAKDIDREVIKRVIEDLDRLNDELNKEVEEVIRRLEDIVRELEKKIREVIKRNKELVDRLEEKVR

SEQ ID NO: 10079 - protein, 183 aa, Artificial Sequence; identical to SEQ ID NO: 10078
  Synthetic

SEQ ID NO: 10080 - protein, 183 aa, Artificial Sequence
  Synthetic
DLEKRLRDVLKESDENIEELRRELREVLKESEDNVKKLAEENKEVTDRLREEIKRLKEEDVRKDLVEEVRRRLERISEENKKTLDDVKKESKKLVDEVEKTLRDVKRESERLARDLERKKDKISKEEIERVIRELKDLNRRLNEELKRAIKRIKELNKRLNELSKRSIDELRRLVEELERRVK

SEQ ID NO: 10081 - protein, 183 aa, Artificial Sequence; identical to SEQ ID NO: 10080
  Synthetic

SEQ ID NO: 10082 - protein, 183 aa, Artificial Sequence
  Synthetic
SLKEKLEEVLRRSEENVERLRKENEDVAKKNREAIEEIKKRLDDVLRELRERIERLKKEGVPGKDVERVREELEKLVTELRERVKKVAKELEELHRRLDRELEKVKETSKRLVEDLDRKSKDIPEEVIDRAVEELKKLNDDLNRTVKKVIRESEELTETLRKDVKRVVDDLRRLVEELARRVK

SEQ ID NO: 10083 - protein, 183 aa, Artificial Sequence; identical to SEQ ID NO: 10082
  Synthetic

SEQ ID NO: 10084 - protein, 183 aa, Artificial Sequence
  Synthetic
DLEEELKEVLKESEENIERLKRENDRVVEKNKKAVDDLRERNKRVTERLREEIERLKRRGVPGKEVDDVRRRLEEISKRNKETLDDVLRKLEKLHRDLDEDLKEVKKTSRKLVEELRRKRKDIDKKDIKRVIDELRKLNEDLNRRVKEAIKTSEKITDDLRRMSEESEKELRELVRRLEERVR

SEQ ID NO: 10085 - protein, 183 aa, Artificial Sequence; identical to SEQ ID NO: 10084
  Synthetic

SEQ ID NO: 10086 - protein, 186 aa, Artificial Sequence
  Synthetic
SEVEEIIRRIDELIKRLAETVKEIVDRLRKLNKKLNDENREIIKEIRDLIRELAKEVKRIKDRDTLEKVLEDIEREVEKLMKRSRDLNEEVLRTSEKLADDARRTLKEIEDRVRELVKEAEDRIRSIEEVRERLERVLRRVEEVIKRLKEELKKVLDESRKNVEDVTRENEKVLDEVRKTIDELRR

SEQ ID NO: 10087 - protein, 186 aa, Artificial Sequence; identical to SEQ ID NO: 10086
  Synthetic

SEQ ID NO: 10088 - protein, 186 aa, Artificial Sequence
  Synthetic
SEVEELIKTIERLIKELEKLNEEIIKRLRDLNKRLNERNEEIERTLRKLITDLARMVREVKDRETVERVLDEIRKEIERLVKESKDENDRALDRSDELVRRSERKNEKIEDEVRKLAKDITDKVKDIEEVLRRLEEVLDRVKKKIKTLTDKNREVLERSRENVKKVTEDNERVLRKLKEDIERLRK

SEQ ID NO: 10089 - protein, 186 aa, Artificial Sequence; identical to SEQ ID NO: 10088
  Synthetic

SEQ ID NO: 10090 - protein, 186 aa, Artificial Sequence
  Synthetic
SELEEALKDIKRLIDKLRKDNEDIIRRLRETNDELRKLNKKIIDEIRDLIRRLEEVAKRIKDEKTLEEVLKRILDEVRKLAEESKRLNDKVREENERLVEKSRRTNKEILERVERLAREITRRIKDDKDLKKRLEDVVKRVREEIEKLTRDNERVLEESRRTLEKLTRENEKVLREVKKKIDDLRK

SEQ ID NO: 10091 - protein, 186 aa, Artificial Sequence; identical to SEQ ID NO: 10090
  Synthetic

SEQ ID NO: 10092 - protein, 186 aa, Artificial Sequence
  Synthetic
SELEDVEEKIKRLIDRLRELNKKIEDDLRKLAKELADLNKKIIREIEELIRRLAEVVKRISDKDTVRRVLREILKRVERLVRESKKKNDDVRRELEELVKRSEDANKEVLKRVRELAEEVRRRIKDVEELKRRLRKVLERVKREVEKSSERNREVVERLRKELERLTRENEEVLKRVKKEIERLEK

SEQ ID NO: 10093 - protein, 186 aa, Artificial Sequence; identical to SEQ ID NO: 10092
  Synthetic

SEQ ID NO: 10094 - protein, 186 aa, Artificial Sequence
  Synthetic
SEVDEVIKRLDELIEELRKRNDDIIREIEKLIKRLEEENKEIVDRIRELIKRLEDMVRRLKDKKTVDDVLKEIEDRVRELAKRSRERNEEVLRRVERLVRESRKTNERILRRIEELFDRIRRRMKDDKDVLDRLREVLDRLRKEIERLTRKNEEVLKDVRRRVKRSSEENEKVLKEVRERIERLKK

SEQ ID NO: 10095 - protein, 186 aa, Artificial Sequence; identical to SEQ ID NO: 10094
  Synthetic

SEQ ID NO: 10096 - protein, 186 aa, Artificial Sequence
  Synthetic
SDVDEVIKRLRELIRENHKRNKKIVDEIRELIRELKERNKKIVDEIRELIKRLKDIVRRLKDRDTVRRVLKEILDRVEKLVRKSKKDNERMLERVEKLADDSRKINRDSLRKIEKLIKELEDRIRKDEEVLRRVEEVLRELREAIKRDDEENKKVLEEARKTVEDSSRENKRVLEEVRRRLDEERR

SEQ ID NO: 10097 - protein, 186 aa, Artificial Sequence; identical to SEQ ID NO: 10096
  Synthetic

SEQ ID NO: 10098 - protein, 175 aa, Artificial Sequence
  Synthetic
SEKERAEEVFRESKKNIDDVKRKLERVLEDSKRTLDELRKEVEKVLKESEDELRKLARSEGEEVKRIVDDLRRLSEKSFEEVRELLERIERVSRKIARDLEEILKDAKRKTDELRKEGMTEELIREIRELNKRLNDTIEDVIRRMKDLNRRLAEVIKEIIERNKKLIEDAARRIK

SEQ ID NO: 10099 - protein, 175 aa, Artificial Sequence; identical to SEQ ID NO: 10098
  Synthetic

SEQ ID NO: 10100 - protein, 175 aa, Artificial Sequence
  Synthetic
REKERLKEVVEKSRRNLEKLREDSERVLEKSRRTLERLKKEVEEVLKESEERLRELARSEKEEVEKIVRELKRLSEESMDEIRRLLDTARKLSEKIFEENARILKRLDELTKELEKEGVTEELIKTIEDINRRANEESKRTEKELEDINRKLEEDIKRIIDRNRKMIEDAARKIK

SEQ ID NO: 10101 - protein, 175 aa, Artificial Sequence; identical to SEQ ID NO: 10100
  Synthetic

SEQ ID NO: 10102 - protein, 175 aa, Artificial Sequence
  Synthetic
REEERLEEVLRRAEEILKRLEDEVRKVVEDSKKNIEDVRREVEEVLKKSEDRLRKLARDSGEEVKKIVTELTERSKKSVEDVKKLLDDLRELTKELERRARELLKELRERIKRLEDEGVTEELEKRLKEILDRAAEEIRRIIRELEELNKEANDRIRKIIKENEDLIREAEERTR

SEQ ID NO: 10103 - protein, 175 aa, Artificial Sequence; identical to SEQ ID NO: 10102
  Synthetic

SEQ ID NO: 10104 - protein, 180 aa, Artificial Sequence
  Synthetic
ELEERIKKANEDSKRTLRELMERVRKANEDSKRKLEEIREKVERANRESKKILDELRKAGIDKRLEEELRKVNEETRRTLERLAEKVEAVNDKTRKILAELEKEVREVNKKIRDDLSKPVDEKVIRELIKELKDVNRALEKKAKELIDELEEVDKDLEDKVRELIRKLKEVNEDLKRKAD

SEQ ID NO: 10105 - protein, 180 aa, Artificial Sequence; identical to SEQ ID NO: 10104
  Synthetic

SEQ ID NO: 10106 - protein, 180 aa, Artificial Sequence
  Synthetic
SLKERVKKVLEESERNLEENKKDAKRVNDETRKKLKELEDRADRVNRETERALRELEDNGVSDEIKERMKEVNKKHREILERISREVKRVNEEHKEEVDRLEKEMRDVNKKVKEELSEDRDEKVVREVIEELKRVNDKLNDASRRLNERLKRVVEDVERRVRDLNKELEDVVEELKERTR

SEQ ID NO: 10107 - protein, 180 aa, Artificial Sequence; identical to SEQ ID NO: 10106
  Synthetic

SEQ ID NO: 10108 - protein, 180 aa, Artificial Sequence
  Synthetic
ELEERIKRVIDELRRRLEELRRELKRVNDKTEEDLRRLEDNARRVNDTSRKMLERLEDGGVDEKIAKEVRDVNEKHKEDVKRISDEVREVNKRHKEIADRIEEKVRRAEEEIRKKLSKPTDETVVREIIRELEKVIEELEREVRELNRELREVVERVAKKVRDLNRELEEVIRDVKRKVD

SEQ ID NO: 10109 - protein, 180 aa, Artificial Sequence; identical to SEQ ID NO: 10108
  Synthetic

SEQ ID NO: 10110 - protein, 181 aa, Artificial Sequence
  Synthetic
SLEDEARELRRKSEKTNDELRRAIEELEKKVRDMIRRSEEHVRDLVRKVKRVIEKLEEDGAPRELLEELRKLLRDVEERAKELHKTLKDLLETVKRRAEDILRKNKELLERISREVERVNSDRKDLEELIKELKKLNDESREEIERLIRELEELLKEIEDRNRKLAETLKRLLEEVEKRAR

SEQ ID NO: 10111 - protein, 181 aa, Artificial Sequence; identical to SEQ ID NO: 10110
  Synthetic

SEQ ID NO: 10112 - protein, 181 aa, Artificial Sequence
  Synthetic
SIEEEIKELKDRSKKTNEELKKEIDELKEDSERTNRESRKHVKEVLDRLREILERLRREGAPEELLRELEKLIRDIKDRAEELHKRNEELIRRVEKKAREILKENEDLVREIERRMKEVNSDRKEIKRLIDELTELNKRSKELIKRLIEELKKLNDDSRKENKRLVREVERLAEEVDRRVK

SEQ ID NO: 10113 - protein, 181 aa, Artificial Sequence; identical to SEQ ID NO: 10112
  Synthetic

SEQ ID NO: 10114 - protein, 181 aa, Artificial Sequence
  Synthetic
SLEEKAKRLKEESDKTNKKLRELIERLERESRRTNEELRKKIRELLEDARRELDRLRKEGAPEELLRELDELIKTIVRRLEKILKENADLLKEVKDRLEEILKENEDLVRRVERELRKVNSDEKKVEELRRDLERLDRESEKKIRDLIKTLDELNKESDRKIRKLEEELKRLLEEVEKRVR

SEQ ID NO: 10115 - protein, 181 aa, Artificial Sequence; identical to SEQ ID NO: 10114
  Synthetic

SEQ ID NO: 10116 - protein, 181 aa, Artificial Sequence
  Synthetic
DIEKKIEDLRRKAKKVIDDLRKRSDELKKRSKDTNDRLREELKKLEEDVRRVIEDLRRRGAPEELLDELRRLLDEVKKRAEELLRRNKKLMEEIDRRNKKSLEDLKRLLDEVEEEAKRVNSDDKDIEKLIRDLEKLLRDVEERHEDLRRKAEELDRDTKEKVDRLIKELKDLLKEVRDRVR

SEQ ID NO: 10117 - protein, 181 aa, Artificial Sequence; identical to SEQ ID NO: 10116
  Synthetic

SEQ ID NO: 10118 - protein, 181 aa, Artificial Sequence
  Synthetic
SLKEKLDDLVRKSDDTNKDLEEKARRLVEDAKRVLKELEDKSRRLVEEARKVLKRLEEEGIDKRLLEELERLIDEVRKKNKESLDRLRKLIDDVRKRLEEILERNRRLVKEVEDRARTVNSDDKKIKELIEELEDLDRRSKKAVEDLIKELKKLIDEVREIHDRLEEELRRLIKTVRDKAR

SEQ ID NO: 10119 - protein, 181 aa, Artificial Sequence; identical to SEQ ID NO: 10118
  Synthetic

SEQ ID NO: 10120 - protein, 182 aa, Artificial Sequence
  Synthetic
SLEDKVRKLEEEIKKVLKEIREEVERLLEEDRRTLEDLKRRHRESDRESKEVLDEIAKKVDSEKLKRLEEEVEKLNRENKEAVKRLEEKHRRTLEKLRKVLRELEEEARRLLEELRDMSRMRDDKVIKEVIDTLRKRLEELKRRLEDVIREVRKANEDSERESRDVIRKLKELLERLKEKVK

SEQ ID NO: 10121 - protein, 182 aa, Artificial Sequence; identical to SEQ ID NO: 10120
  Synthetic

SEQ ID NO: 10122 - protein, 178 aa, Artificial Sequence
  Synthetic
SEEEKLKEVKDRIREVLRKLEEHTDKVKKEVEKVLRDIRRTTDELKKEVRAMLERLRRKKKDAEDLLRELEKIIEEIERELDRVLEENDKMAEEWKKLLDKVLDDNRKSIRDIEKELDDREPTDELVTEVEKLLRDDEETNRDVVKKVREAVKKDADTNRKVIEEVKKVLEDAARRLD

SEQ ID NO: 10123 - protein, 178 aa, Artificial Sequence; identical to SEQ ID NO: 10122
  Synthetic

SEQ ID NO: 10124 - protein, 178 aa, Artificial Sequence
  Synthetic
SEEEKLERVERRLEKVLDEIRRHTEDVKRKDEENLDRLRKKIEKLKRELEKVLRDLEEKRKDAEDELRKLRRRAEEAKRRLDEVKKRLEEISRRTKELLDDVLRRNKESVDRIRREIREKRPTDELVKKLEELLEEDKDTNRKVVKEIEDANRRVNEELDRVIEELKRILEELERRLR

SEQ ID NO: 10125 - protein, 178 aa, Artificial Sequence; identical to SEQ ID NO: 10124
  Synthetic

SEQ ID NO: 10126 - protein, 186 aa, Artificial Sequence
  Synthetic
SEVDEVRKTLEDLLRRLDEENKDIIRRNKELLDDLDRKVREAIERLKRLLDELRKILEKLKDRETLTRIIEEIEKRARELIKRLRDEIRKIEEESKKSIEDSRKRNDEIRKRLEELIKDLRDKIKDSEELARRITELEKRVREVIERLKEKNKRLEDDSRRVITELRKKLKDLEDRVREEIEELRK

SEQ ID NO: 10127 - protein, 186 aa, Artificial Sequence; identical to SEQ ID NO: 10126
  Synthetic

SEQ ID NO: 10128 - protein, 186 aa, Artificial Sequence
  Synthetic
SEVERVKEELKRLLEDLDRKNKRMIDEDERLNKELNEENERLIRELEELLKRLKEIRDKLTDRDTLKKIIDEIDKRLKELIERSRRRNREILEESKKLIEESKRTNREIERRAKKLIDDLRRRVREKEEVKREIDKLREEIREVIERLDKKNEDVLRKSEKNVRDLNRENEEVLRRATEAVRELER

SEQ ID NO: 10129 - protein, 186 aa, Artificial Sequence; identical to SEQ ID NO: 10128
  Synthetic

SEQ ID NO: 10130 - protein, 186 aa, Artificial Sequence
  Synthetic
DEVDKVTRTLEELLKRLEEENRKMIEDDKRLNEELNKENRRVEETLRKLLKELEDIRKDLKDKKTLDEIIKRIKERVDKLIRDSERLNDEIKKRSKKLIDDSRERNEDILRKAEELIKRLREKVREKKEVKEKIDRLEKRIRDAIRELNERNKKALDDSERNVRELNKRNERLREEVERKIRELER

SEQ ID NO: 10131 - protein, 186 aa, Artificial Sequence; identical to SEQ ID NO: 10130
  Synthetic

SEQ ID NO: 10132 - protein, 186 aa, Artificial Sequence
  Synthetic
SEVDEVAKRLRDLLRELEEKLKRAEDRDRKLNDDLNKTNKKLIKELEDLLRKLEEIARRLKDKDTLKKIIDEIERELKRLIDESRRTNKEILDESRKLVEEIEETLRRAKKEAEDLIRRLRERFKDDDEVRRKIDELEREIKEVVDRLRRRLEELLRRSKENVDRLNRENDRVLEEAKRKIRELEK

SEQ ID NO: 10133 - protein, 186 aa, Artificial Sequence; identical to SEQ ID NO: 10132
  Synthetic

SEQ ID NO: 10134 - protein, 186 aa, Artificial Sequence
  Synthetic
SEVDEVADRLEKRLKENRDKNKRVEDEDKRLNKELNDTNRRMEEELKRLLTEIDDIRRKLKDKDTLDRIIERIRREAERLIDESRKSNKRIVEESEKLIRRSRRINEETLERLKKLIKDLRARFKDDEEVRKKIDELERRLKEVIDDSKRRNDELERESRENVRELNRRNKELEDEARKEVERAKK

SEQ ID NO: 10135 - protein, 186 aa, Artificial Sequence; identical to SEQ ID NO: 10134
  Synthetic

SEQ ID NO: 10136 - protein, 186 aa, Artificial Sequence
  Synthetic
SRVDEVIERLERLLRELDKINRDMIEDDKRLNTELNKENKEVEDRLRRLLEELEEIRKKLSDEKTLEEIIERVERRLEELIERSKRRNREILERSKELIERSKKTNEEILRRAEELIKRLREEVKDIKEALDKIRRLEERARRVIEELDEKNRRALERSKENVKRLDERNERLRKELEEKVRRLRK

SEQ ID NO: 10137 - protein, 186 aa, Artificial Sequence; identical to SEQ ID NO: 10136
  Synthetic

SEQ ID NO: 10138 - protein, 185 aa, Artificial Sequence
  Synthetic
DVEEKVKKVIRELREVLKEIEERVRRVLERNKRSLEDLKRKHKESIDRAKEVLDEIRKDRVDEEKLRRIAEKVKRVIDENERIAKEIKEEIKRVNEKSREILERIADELRKVEEEIKDILAKLRDVEEALKRLEDKLREKLRDLRRKLDELRKENEKVNRDLEDKTRRVIEKLKRVITKLKEEVK

SEQ ID NO: 10139 - protein, 185 aa, Artificial Sequence; identical to SEQ ID NO: 10138
  Synthetic

SEQ ID NO: 10140 - protein, 181 aa, Artificial Sequence
  Synthetic
SEIEEVEKRLEDVLRKVNKKTEDLMRSVKEIIKRSREHLEKVIRDLEEILKELRELRKRGKDKKELEDRARKALEDLDRALKRNKEMHDKSDDESREVNERLNRTHKEVLDRLREILKRVKDEDVKRRIEEVEERLKRDNERNNKKIEDVNRDNRRVAEELRRRVEDVKRKIEKVLRELKK

SEQ ID NO: 10141 - protein, 181 aa, Artificial Sequence; identical to SEQ ID NO: 10140
  Synthetic

SEQ ID NO: 10142 - protein, 183 aa, Artificial Sequence
  Synthetic
DVEELLDRVTKRVEKALRELRKKVRELKEENRKSVEELEETSKRLKKEVDDVERRLEAGNVDEEVLKRLRDILRDIRRKLKEVTDRNRDSARRSREELERVLEDVERIIREAKRRLEEVRRIKDREKLKKVLEEIEKILKEIEDKVRRVIEKSRRINEENKETNRRVIEDVRRLLKKAEEDLR

SEQ ID NO: 10143 - protein, 183 aa, Artificial Sequence; identical to SEQ ID NO: 10142
  Synthetic

SEQ ID NO: 10144 - protein, 183 aa, Artificial Sequence
  Synthetic
RVEERLDEVRKKIDEVLKRLRDTTKELEDENEESLRKLKKEVDEVRKKIEEVLKRLEDANAPKEVLDELRRIVEDIKRRLEEVLEELKRIIDRSKEELKKVLRENEDSARRLKERLKEVERIKDEEKLEKVDREIEEILRRNKRTNEKVAEESRKINREAEERLRRVIEELEKILKEIEDRLK

SEQ ID NO: 10145 - protein, 183 aa, Artificial Sequence; identical to SEQ ID NO: 10144
  Synthetic

SEQ ID NO: 10146 - protein, 183 aa, Artificial Sequence
  Synthetic
SVEKKLKDVEDEIRKVLRELEETSKKLDKEVDDMLKKLKDSTEEVKKEIDEMLKRLEERRLPERVLTELKKIADEARRRLEEVNRRNEESAKEIKKELEKVTKENRDSIEDIKRKLEEVARIKDDEKLDKVVKDLRKLLEDDKRTNKEVIDRVRRKLEENKETNEKVIKELRDILREIEERAR

SEQ ID NO: 10147 - protein, 183 aa, Artificial Sequence; identical to SEQ ID NO: 10146
  Synthetic

SEQ ID NO: 10148 - protein, 185 aa, Artificial Sequence
  Synthetic
SEIEDVARRIRKLLEELRRRIRKIAEDSRRLNRRLEERNTEMEKEIKDRLRKLEEELKRKEDGETVTREIKEAADRLRELLKESKDENEDVARRSEKLLRDAEETLREITERLKDLLKKLRDRTRTEEVKEKIDRLEKEIRDMLKELRERIKRLKDENEKSLEDLRRRNTELEEEVRRVIRELEK

SEQ ID NO: 10149 - protein, 185 aa, Artificial Sequence; identical to SEQ ID NO: 10148
  Synthetic

SEQ ID NO: 10150 - protein, 185 aa, Artificial Sequence
  Synthetic
SELEKVAEDIRRLLKRNEEINREMIKRSRELNEELRERNREVTERIRRLLERLKEERKRTTDGETVERRIREVARRARELLKRSEEMNKEVARRSKKLLDDSKKINDDSRRRLKRLLDELRKRRRTDELEKKLRDLEREIRKVLREAKRLNDELRKENKESLERLKRENDKLRKEVETVIREAEK

SEQ ID NO: 10151 - protein, 185 aa, Artificial Sequence; identical to SEQ ID NO: 10150
  Synthetic

SEQ ID NO: 10152 - protein, 185 aa, Artificial Sequence
  Synthetic
DEIEEVIRRIKRLLDENRKKNEEMSDRSRKLNERLRKIIKKIIDEITELLKRLEDRARTVTDGETLRREIKEIADRAKRLLDEIRKILEDIRKELEELNRRSEEMNKESKEEADRLLEELRKRSRDRKVDKKIEDLRKEIEDVLKELAERNKENKDRNKKSADELRKEIEDLERKVREVIRELTR

SEQ ID NO: 10153 - protein, 185 aa, Artificial Sequence; identical to SEQ ID NO: 10152
  Synthetic

SEQ ID NO: 10154 - protein, 180 aa, Artificial Sequence
  Synthetic
RVEDEIRRLEEEARRVLRELEDLLRRLKKKNDESNKEIRERIERVRRKAEKVLRELERRGVPDEVIRELEERLRRMEKRAEELNKRSKELSDDIVRRLRELIERLKRLIEDVLRKLDRVRDERVIERLIRELRRLLEDVKRKAEDLIRKSEDLNEKWRKELKKLEREIERLLKEVADRVK

SEQ ID NO: 10155 - protein, 180 aa, Artificial Sequence; identical to SEQ ID NO: 10154
  Synthetic

SEQ ID NO: 10156 - protein, 179 aa, Artificial Sequence
  Synthetic
EAEKELKRVEDRDKESNDRTKDILRRIEKEVRESNKRSKEILDEIRKRVRDVIEELRRKRSDLEEVIRELEKILREVEEAVDRINRDNERILEELAERAKRLNDENKKISDDVRRRMNEDEETVRRLKDELEEVNERTERAVRDLLRKARKVDDESRRRVEALLRKVEEVLREIKRRVD

SEQ ID NO: 10157 - protein, 179 aa, Artificial Sequence; identical to SEQ ID NO: 10156
  Synthetic

SEQ ID NO: 10158 - protein, 181 aa, Artificial Sequence
  Synthetic
SFKETLDEIRKRVKEVLDKLEKILRDIARRVEKVNKENEDRLREINRRNEEVLRRLKKKGVDETLLERNRRANERTNREVKKSNDETREVLKEAKKAIEKLLEELRRVLKEVEDRADKKRDDEDKLRELLERLERLLRELERRVEKIEEDLKRILDEVRKRTKELLERNERILEKLERDAD

SEQ ID NO: 10159 - protein, 181 aa, Artificial Sequence; identical to SEQ ID NO: 10158
  Synthetic

SEQ ID NO: 10160 - protein, 183 aa, Artificial Sequence
  Synthetic
SIEDIVREIRERNKDAKRKVEDIVRRNREEIDKVLKRVEKILRDNEKRIREVKEELKERVKSRDLERVEEKLERLLRESKEVFKEVEDRLRDLMRKSDEVARRAEENIKENIRRVEDVARKRLDEKDLDKVRKESEDNLREILRTLKEVHERSKETLKRIEDTLRRVHKKSEDELRRLREEVR

SEQ ID NO: 10161 - protein, 183 aa, Artificial Sequence; identical to SEQ ID NO: 10160
  Synthetic

SEQ ID NO: 10162 - protein, 183 aa, Artificial Sequence
  Synthetic
SIEEIAKTIKEEIKEVMDRVREIVERDEREIKKVKEEVDRIAKRNEDEIRKVKDELDKKVKSDRLERLRDKLRKVEEDSRESLKDVRRKLEEVRRESDEVVRDVERRLEEVLREVEDVLRKRLPEEAMKEVADRVRKKLEEIERTLEEVHRKSRKVLTEIIKKLKENHDRSKELLDRIREEVK

SEQ ID NO: 10163 - protein, 183 aa, Artificial Sequence; identical to SEQ ID NO: 10162
  Synthetic

SEQ ID NO: 10164 - protein, 182 aa, Artificial Sequence
  Synthetic
SEVEEVLKEIKDLLRRLEEIVRRVLKENRRLLEEDVRRTEEILEELERLLDELRKDIKRLDDRDKVEEIVRRAIKELEDLLRESEERNKRSREESEKLLRDLRETIERIRRRLEELLKRLKDRGAPEELLKRIEDEVRRVEDKLRKLIKRSKEESDKVAEELERLNREARKRIRDVMEELKR

SEQ ID NO: 10165 - protein, 182 aa, Artificial Sequence; identical to SEQ ID NO: 10164
  Synthetic

SEQ ID NO: 10166 - protein, 182 aa, Artificial Sequence
  Synthetic
DEAEEILRRLKKLLEDAKRISDRTVEKNREMLKKIEEDSKRSLERNRELLKRIKELAKDIRDDKTLEEMLRELKERLDRSHDENRRLVDRIRDISRRTNEENRRVIKEVEDRLRELLEEAERRGLPREIIERLKEEVDRLLKELRDSNRELKRESDEVVEKLRELNKRSKEEADKVEKDLRR

SEQ ID NO: 10167 - protein, 182 aa, Artificial Sequence; identical to SEQ ID NO: 10166
  Synthetic

SEQ ID NO: 10168 - protein, 182 aa, Artificial Sequence
  Synthetic
SEVDEVLKRLRKDLDKVRKDSKKSLEELRRVLEEVERLSDESVKRLEEVLKRLEDLIKDIKDDESLRRLVDEARKELEAINKRNEELIRRVEEELKEILKRNEEIIRRVEEKLRRILREAERRGVPREIIKKLADEVREVLERLKELNRRLEKEARDAKRRLEESNDRLRRKVEEVIKELRR

SEQ ID NO: 10169 - protein, 182 aa, Artificial Sequence; identical to SEQ ID NO: 10168
  Synthetic

SEQ ID NO: 10170 - protein, 179 aa, Artificial Sequence
  Synthetic
SEVEKLLDESRRVVEENRRANKKLAEESRKAVRRNREESKRLNEELREVVERARRKVTERDKDKDLLRRIIKELRDILERVAEDHRRLIEEHRKIADEVREKVKDLNRRHKEIMERVAREVKKEESLRRIKRTHEETEKESEKTLRDLEDEHRKTIEELERSLKELRDRIKKVLDELRK

SEQ ID NO: 10171 - protein, 179 aa, Artificial Sequence; identical to SEQ ID NO: 10170
  Synthetic

SEQ ID NO: 10172 - protein, 171 aa, Artificial Sequence
  Synthetic
DEVEEVLKKARKDIERWREETRKVKEENKRNIDRIRKKLEEVLRDLKRAIDEIRKSNLDREEVDRVLERLEEKLREMKRRLDENDKRDKERLKKKNKEMEEERRKIEKELEDAGARREVLEEIRKLLRDIKETDRKVHEELERSNEKLRREIEKILRDLEDELRKLRRERE

SEQ ID NO: 10173 - protein, 171 aa, Artificial Sequence; identical to SEQ ID NO: 10172
  Synthetic

SEQ ID NO: 10174 - protein, 171 aa, Artificial Sequence
  Synthetic
SEVEEVLRRAEKAIREWEEETRRAKEENEKNIKKVADDLRRLLEDARRTIEEIEKRRADEKTVEKVLTDLEKKVRDVAKRLKENNDEDRRRLEDINRKVEERLEKLRDELRKAGASEEVLKEIKKLIDTARRKDEKVHKELEDTNRDLDRAIEEVIREIKKLLDDLREKAR

SEQ ID NO: 10175 - protein, 171 aa, Artificial Sequence; identical to SEQ ID NO: 10174
  Synthetic

SEQ ID NO: 10176 - protein, 181 aa, Artificial Sequence
  Synthetic
SEKEDVLRRIKELLERLHEENREVLTRIEKLLKDNKERNDDVLRRITELLKEVTKRAKDRGKPRDDLERLIRELERTLKELAERVKKLDEDLKKTVDDLRREVERLNEELERMLRELTKLADRVGTEEVRKRVEDVVRKNKEVARELLDRVRKLSERNKRAIDKLLEEVKRVLEEVERALK

SEQ ID NO: 10177 - protein, 181 aa, Artificial Sequence; identical to SEQ ID NO: 10176
  Synthetic

SEQ ID NO: 10178 - protein, 171 aa, Artificial Sequence
  Synthetic
DEERDVRREIRKLLRDAEEHSKKLNEESKKTNKRNEEENRKALEDNKRLLKEVEDRIPKTKDLERIKRRNKELNERHKRTLERLKEESRRLNEKHKEDLKKLAEDVERLERAGLPVTELRERIKRLIEEIERLNREFKKKNEELSKKNKELVERSRTESKKLVDEARERAR

SEQ ID NO: 10179 - protein, 171 aa, Artificial Sequence; identical to SEQ ID NO: 10178
  Synthetic

SEQ ID NO: 10180 - protein, 178 aa, Artificial Sequence
  Synthetic
DSEEEVRKRVKDLSEENKRLVKTAEKRVRELSKENKELVERLKREVDRIKKEIEELKRRGTTEDADRELRERLEKLKRELEDLNRTLNRRATELEKEVKRLSDELRKRAEELEKKVRRENKVDEKVLREIREIVKKNKRENEEVLRRIRELVKENNDENKRVLDEIEKLLKEIEDESR

SEQ ID NO: 10181 - protein, 178 aa, Artificial Sequence; identical to SEQ ID NO: 10180
  Synthetic

SEQ ID NO: 10182 - protein, 185 aa, Artificial Sequence
  Synthetic
SEMDEVRKKLRELVERLKKEAERSRKSHREILKKVRDDLKRSEESHKELLDRLEEVLKRTVRDERKVREIRKELDEHHKRYREELKRLEEELRKHHEKYKEVLEDLKRRLDKLLRELEEVLKKKVSEDKLRRLLEEAAEVIKRLLDEVKRLNEHAKRMAEKILEDVKRLNKHAEDKVRDVEEKVK

SEQ ID NO: 10183 - protein, 185 aa, Artificial Sequence; identical to SEQ ID NO: 10182
  Synthetic

SEQ ID NO: 10184 - protein, 185 aa, Artificial Sequence
  Synthetic
RELEEVARRLERLLDELRKKLRESERSVRRLLEELKKELEKLRKRHEDLLRTVKKKLDDTVTDERKLEELTRRLEKHHREVKKRLEDLDRELEKLDEEYKRVLEKLERELEELRRRLEEVRKRNISEEELKRLLEEVEKAIRELLERVERLNRRLEEEIRRVLEDLERIIRHAEEDLRRIEEEVK

SEQ ID NO: 10185 - protein, 185 aa, Artificial Sequence; identical to SEQ ID NO: 10184
  Synthetic

SEQ ID NO: 10186 - protein, 185 aa, Artificial Sequence
  Synthetic
RELEEVKKKLEKLAKDLRDTLERSARSVEELIKRLEDELRRSEESHKELLERLEDTLRKRATDEEKVRRLKRRLEKHHEEYRRTLDRIRKELKRLRDEYERELRRIEKELEDLERRLEEVLKRNISEEELRKLLKDATEEVRRIAEEVKKLNDELRRAVEEVLKEVRETNKHVREMIETVREEVE

SEQ ID NO: 10187 - protein, 185 aa, Artificial Sequence; identical to SEQ ID NO: 10186
  Synthetic

SEQ ID NO: 10188 - protein, 185 aa, Artificial Sequence
  Synthetic
SELEEVAKRLKELVDDVRRALKESDDSHKELLKRLKEKLDEVRKRLKKLVDDLEETLKRTLRDEDKMRDIKRRLDEETERLKRKLEKIEKELRDHHKRYKETLDRLEEELERLLRELEKVLRKNISEEELERLVREVERVIRKLKEDVKRLNDHAREKVKRVEEELRREEKRVRDEVERVKEEVR

SEQ ID NO: 10189 - protein, 185 aa, Artificial Sequence; identical to SEQ ID NO: 10188
  Synthetic

SEQ ID NO: 10190 - protein, 185 aa, Artificial Sequence
  Synthetic
SELERVEDEARKLADDLRRMLEESRRSHEKILREVEEELKKSEESVRRILERVKEVLDRKLTDEETLRRLERRLAELLRRYEEELTRLREELRRHHEEYEKRLRELEERLRKLEEDLKRVLDKNISEDELRELLDRLRKAIKKLLDDVKRLNDHVKELIERIRDEVRRLNRRLEEEARDVERRVE

SEQ ID NO: 10191 - protein, 185 aa, Artificial Sequence; identical to SEQ ID NO: 10190
  Synthetic

SEQ ID NO: 10192 - protein, 185 aa, Artificial Sequence
  Synthetic
DELETVREEIERLARELEKELKKSEDSVEKLLRELKERLKEVRKRHKELLDRLRDRLRKTVKDKDKLEKLERELKKHHEDVDKLLRELEDKLRELRERYKRTLDKIREDLEKLKRDAEEVLKRNISEEELRRLVEDVKRVVDEVLERVKELNKRLEEAIRRILEELKKIEKNVKDFIEDIDRRVK

SEQ ID NO: 10193 - protein, 185 aa, Artificial Sequence; identical to SEQ ID NO: 10192
  Synthetic

SEQ ID NO: 10194 - protein, 185 aa, Artificial Sequence
  Synthetic
RELEEVKRRLEELLERLRKELERSDKSHKELAKKLRDELERVEREHERLLRELEDTLRKTLTDKKKADELRRELEKHHEEVKELLKKIEEDLRRHHKRYRERLKEIKERLEKLRRELDEVAKKNISEKELTDLLREAKRRVEEVLKEVRDLNRNVKETVDRVLKELEDILRNVEEMIKEIKDKVR

SEQ ID NO: 10195 - protein, 185 aa, Artificial Sequence; identical to SEQ ID NO: 10194
  Synthetic

SEQ ID NO: 10196 - protein, 172 aa, Artificial Sequence
  Synthetic
SDAEDILRKVEDLIRRLAEKHRDLLRRSKENAERIKREHDDHHRDIRRVIKEIEDNNLSEEEVKRLLDELKRKSEETHRRSRKNLEEDKRRVEKIHEDSRRDLERIERDVRKKIKDDRELLKTVRDLLETLREINDRVREELRKIHEDVERRNKEVLDRNKKLLEELERKRR

SEQ ID NO: 10197 - protein, 172 aa, Artificial Sequence; identical to SEQ ID NO: 10196
  Synthetic

SEQ ID NO: 10198 - protein, 181 aa, Artificial Sequence
  Synthetic
SELEDIERKLKELEDEDRELNRKLNDDTRRLDERNRRLNEELTKKLREVEEEAKELRKRDNDERTVEKIKDRLRRIADELRKELEKITKELEDMSERVKRELEKIRKRTEDVERELRREMEENRVDERVREKIERIAKKLEDDNKESEDRHRRINEENRRRNDKNREDIERILRRLDEELR

SEQ ID NO: 10199 - protein, 181 aa, Artificial Sequence; identical to SEQ ID NO: 10198
  Synthetic

SEQ ID NO: 10200 - protein, 181 aa, Artificial Sequence
  Synthetic
KELEEVDDEVRKEAEEVKRYIKESKEKLDRLRREDERLNDRVREKVEDVRRRVEERRSEDNDEETVRELLERLRREAEKLERELEEIKKKTEDMLRRLRKENREMERRLRERSRKLKEKAKKDRVDERVKRKVDKIERELEDAIRRANEEHTKIEEDLRRRNKESKDEIRRILEELEERTR

SEQ ID NO: 10201 - protein, 181 aa, Artificial Sequence; identical to SEQ ID NO: 10200
  Synthetic

SEQ ID NO: 10202 - protein, 181 aa, Artificial Sequence
  Synthetic
REIETVRREIEKILDDLRRTVKRIEDEVRKIHEDLRRSLEDSKRNIEEILKDLERAARRDNLDKKVEDDMRKLVEDLKRKHDKLRRDNERVTKELKDRLKKLEDDLRRAIEELRRRLDKGLDKKDIDKLLKELRDLVEKIKKDLKELLERYEEIVRRIKELLKDLNREAEEVVRRLKEELR

SEQ ID NO: 10203 - protein, 181 aa, Artificial Sequence; identical to SEQ ID NO: 10202
  Synthetic

SEQ ID NO: 10204 - protein, 182 aa, Artificial Sequence
  Synthetic
DEEERAEREIKKLLDDLRRTLEEVKEAIRRILEDNRRTTKRINDEDRKINDDLRRTLERRNISEDLERDVRRIHKENKELNEKLNEDNKRIMDEIEEKAKRLEDRIREIIKRIKKLLEEMRRDGLDVDKVLKEVEETIDRVKKDIRRALREVEETSKEDKKRLREVLERSKDLARRLKEKLK

SEQ ID NO: 10205 - protein, 182 aa, Artificial Sequence; identical to SEQ ID NO: 10204
  Synthetic

SEQ ID NO: 10206 - protein, 182 aa, Artificial Sequence
  Synthetic
SREEEAERRIEKLLRELEKTNRDIHEEIRKILERLRRTLKKVNDEDEKLNRDLEDTLRRRNVSEELADEARKLHEENRRVNERLNREVEEIIERIKRLVDELHKRTEEIKETIKRIVDEMRREGRPVEDVLRRVKEIIDRVKEEHKRMLEEVRKIAKDLEEKIRAVLEESKKLAEDIKRRLT

SEQ ID NO: 10207 - protein, 182 aa, Artificial Sequence; identical to SEQ ID NO: 10206
  Synthetic

SEQ ID NO: 10208 - protein, 182 aa, Artificial Sequence
  Synthetic
REEEKAEEDIRRILRDLKETNRRIHEEIKKLLDDNERTLRRINEEDKKLNEDLRRTLEESRADEELRRKVREVHERNRKKNEDLNRRNERIKEELKRKVDELHERTKEIMERIKRLIEEMKREGRPVEEVLKTVEDIVRKVKREHEELLKEIEDLSRENKKDNERMLEESRRLARKLKEELR

SEQ ID NO: 10209 - protein, 182 aa, Artificial Sequence; identical to SEQ ID NO: 10208
  Synthetic

SEQ ID NO: 10210 - protein, 182 aa, Artificial Sequence
  Synthetic
SEEEKMEEDIERLLDRLRRINKRLHDEHKKLNEDNERTVRRIDEEDKRINEDLERTLRESNVDEELKKELEEAHRRNRKLNEDLRRRNKRIHDENRKRVRELHERTKEIIERIRKLLEEARREGRDVRKVLEDVERIIRRLEEEHRRALEESRKRSEENKRENEEMLERSKELAERIKRRLK

SEQ ID NO: 10211 - protein, 182 aa, Artificial Sequence; identical to SEQ ID NO: 10210
  Synthetic

SEQ ID NO: 10212 - protein, 182 aa, Artificial Sequence
  Synthetic
SEEEKAREDIKRLLEDLRRTNKKIHEDIEDILRELKETLKRVNDDDKRINDDLDRTLKERNIDEELKKRVDEAHRRNRRKNEELDRRAKRLLEEIRRLVEELHRRTERIEREIKRLLDEMSREGRDVEEVLRTVEKIIEDVKKEHEDLLKRVKDIVKKIKEEIEKVLRESEKLAREIKEELR

SEQ ID NO: 10213 - protein, 182 aa, Artificial Sequence; identical to SEQ ID NO: 10212
  Synthetic

SEQ ID NO: 10214 - protein, 182 aa, Artificial Sequence
  Synthetic
SEEDELRKRVADILKRLREVNKRLHDEVKRLLKENRDALKEVKDKIRESNRELDEVLKRRRIDEDLERRAREINERDKKMLEELEKESRDLLKELEDILRELHKRVREIEKELEDTLRKVERDREPVEEVLERLKEIVRKAEEEHKDVLRRLKEISDRHKRRLEEAERRNEKLLRDLKEELR

SEQ ID NO: 10215 - protein, 182 aa, Artificial Sequence; identical to SEQ ID NO: 10214
  Synthetic

SEQ ID NO: 10216 - protein, 182 aa, Artificial Sequence
  Synthetic
SRLEEMLKRAEDLSRESEELLRRVLEEVKDLSRKHEEALREILKRVKDLVDTVRDLLRRGKADEKVLRRIKEELRKLKEEAKRISDELEDRLRKLKERIDEILERLERRYRKLKKEIEDELPETEEVRKLEEELKRLLEENRRLAKELRDELRRLTKRNKDVVREVERRLEEIMKEIDKEVR

SEQ ID NO: 10217 - protein, 182 aa, Artificial Sequence; identical to SEQ ID NO: 10216
  Synthetic

SEQ ID NO: 10218 - protein, 177 aa, Artificial Sequence
  Synthetic
SEDERIKKELRKVEREVDKLLKEHEKILEDLKREVDKLIETHRKILEELKRRVDELKRRGSDKRDFKRLKDENKEALDKTREDADKLRRDNERKLEETKRRARELEEKVKREKEELDREGSKERIRRELEEVLKDIRRKLKELKERNDKVNRDIEELLRELEERNTEVDKEIKKKAD

SEQ ID NO: 10219 - protein, 177 aa, Artificial Sequence; identical to SEQ ID NO: 10218
  Synthetic

SEQ ID NO: 10220 - protein, 171 aa, Artificial Sequence
  Synthetic
DEEKEAEDLIEEHRRRSEEIARRADKLSEDHKRKVDEIAKTVEKLIRTLKEIVDRKPPDDELRKILEDVRRRAEDLDREVRKTNEEMRRRLRKIEADVEREMRETERRVREKIKDNKELKDRVERVLEESRELLERLRKKLEDNSKEVEDILRKLRKEVEDVVRKIRKRAE

SEQ ID NO: 10221 - protein, 171 aa, Artificial Sequence; identical to SEQ ID NO: 10220
  Synthetic

SEQ ID NO: 10222 - protein, 171 aa, Artificial Sequence
  Synthetic
RDEDEVRKLITRHEKLSRDIAERLKRESKKHRDDVERIAKENEELNRRLREIVKKKPPDKELEDILREARERTERLKERVRKINRELKKRVKEIEDTVERLMDETREEVERKIERNKELKDDVRRVLKKSRDELKRLREELKRNSEEVERILKKLDEDNRRVLKEIRERLT

SEQ ID NO: 10223 - protein, 171 aa, Artificial Sequence; identical to SEQ ID NO: 10222
  Synthetic

SEQ ID NO: 10224 - protein, 180 aa, Artificial Sequence
  Synthetic
DKEREVRRRVEELKKDSEDVLRRNREEVEKLHDENRKVNEESDRTAKELVEEAERMLREARKKIPEELLRRVREILKKLEDEVRRVKKTNEDEDEKLKREVEKVEEEHERKLRELDEEVKRRKKTEELLKELKKELDRLREENERSNRRLRKMLEELKRKNEEVNRELRKKLREIKERLR

SEQ ID NO: 10225 - protein, 180 aa, Artificial Sequence; identical to SEQ ID NO: 10224
  Synthetic

SEQ ID NO: 10226 - protein, 178 aa, Artificial Sequence
  Synthetic
SEEERLERTVEEVEKALKKLADDLRRDMDRSRKSHEDLLDKLRKELDRVLEEIRKKTTPEEDAKRLLERVEREIRRIKEELRRHHEEYKKRLEDIEKELKDLEDEMRRRLKELRDRIRREGVTEEVEKRLRELLDEARREVERILKDLRELNEHVRRRVDEVRRRLEELLERLDRETR

SEQ ID NO: 10227 - protein, 178 aa, Artificial Sequence; identical to SEQ ID NO: 10226
  Synthetic

SEQ ID NO: 10228 - protein, 174 aa, Artificial Sequence
  Synthetic
DEKREVEKELKRVDDEIKRLLRELEEALRRDKEEVDRLDKEVKDALDEVRERIERAGLDKELLERAEKALRENEDRHREAAKKYEKALRELKKRVDDEAERLERALRKIREDLDKTDVGEKVKEDLKRLLEEVEKAVRKVVEDSKRLHDEAKEAVDRNKEHLRRLLEDAKRRAK

SEQ ID NO: 10229 - protein, 174 aa, Artificial Sequence; identical to SEQ ID NO: 10228
  Synthetic

SEQ ID NO: 10230 - protein, 175 aa, Artificial Sequence
  Synthetic
SEKERAEEEIERSKRNLERLLEEAKREIDRSRENLKRTLTKVEEVLRKIKEDLKRLNVREDLVKKIDELLKDLERKLRELKKKAEDLHEEVDRALKELVRRARELHKRVEERIEEEKKAVEKLIRELRELNKRLAEEIKRLIDELRKLNKELDDEVEKIIRRAEDLLRDLERETR

SEQ ID NO: 10231 - protein, 175 aa, Artificial Sequence; identical to SEQ ID NO: 10230
  Synthetic

SEQ ID NO: 10232 - protein, 179 aa, Artificial Sequence
  Synthetic
SEVEKVIRDLEEINKRLLEEIKRSIEENKRTNEEAERKVKEVIDRLRKLLEDLKRTNSKDDRVVEEVKRRLKRIDEELKKLLRDVERKDEENKRKLEELDRRVKEEHRKIEEDLRRANVDEDRLKRVEDVLRESVKNLKRLVDEVRKANRESNEHLKDLARKVEKVIREIEEEVDRTRT

SEQ ID NO: 10233 - protein, 179 aa, Artificial Sequence; identical to SEQ ID NO: 10232
  Synthetic

SEQ ID NO: 10234 - protein, 186 aa, Artificial Sequence
  Synthetic
SELERLVEELRRALEKHKRRLEELKKELKKALDDHRREVKRLIDELKKTLDDVRKASRIDDEEALKKIEEDLKKLLRDIKERLKESTRRMEELLRRVKKDIRESHERLRELLKKIEKELKDLKKDQDERLLEDVKRILDEVRREVEKLDTDADRRLREVKEEVERINREVEKTLRDVEEDLDRLKK

SEQ ID NO: 10235 - protein, 186 aa, Artificial Sequence; identical to SEQ ID NO: 10234
  Synthetic

SEQ ID NO: 10236 - protein, 186 aa, Artificial Sequence
  Synthetic
SEVEKLKEDLKRALDEHRKRLEELKKELEDVLRRHEEKVRRLKEKLKRILDEIRRLSRIRDEEALRKIVEDARRLLEEIERRMRESHKEVERLLKRVEDDIERSTRELRKLLEEIRDRLDKLRKDLDERLLEDLDRALDEVRKEVEKLNRDAKRTLDKVREDVKRLDDDLRRTLKRVKEEIDKLTK

SEQ ID NO: 10237 - protein, 186 aa, Artificial Sequence; identical to SEQ ID NO: 10236
  Synthetic

SEQ ID NO: 10238 - protein, 186 aa, Artificial Sequence
  Synthetic
DEIEELKKRLRKILEEHRKRVEDLKKENEDLNRRAEETLERLKRELEEMLREIAERSRIRDDKKLEELVDRARELLKRVRDELERLFKELEDRHRRIEEDLKRSTEELERLIREVEDELDKLRKDQDERILEDLKRVIERVEREVRRLNKDLKRALDESRKRIEDWLKELDDVIKRVKREVEKIRT

SEQ ID NO: 10239 - protein, 186 aa, Artificial Sequence; identical to SEQ ID NO: 10238
  Synthetic

SEQ ID NO: 10240 - protein, 186 aa, Artificial Sequence
  Synthetic
SEAEKLKKELEEVLERARRRLTELKEENKDANRRHRRRLEELKKRLEDVLKKVKDDADIRDEEMLERLREELERLLREVEEDIRESTKRLRDLHRRIREEIEKLREELEKRLKEVEEELDRLRKDLDERILRRLEEVIRRVDRDIKELIKDAREVLERSKRDVERWNREMKKVLDEVRKRVEEIRT

SEQ ID NO: 10241 - protein, 186 aa, Artificial Sequence; identical to SEQ ID NO: 10240
  Synthetic

SEQ ID NO: 10242 - protein, 174 aa, Artificial Sequence
  Synthetic
SEDEDAKRELRRVKEEVDKTLEDSKRVHDESRKRAREWLEDSKRVHREVKERLKELDVTEDLLRDIERLIKESEEKNKRIEEEYRKLLRESEKRNKENKERVEKILRELDDRLRKEGATEELKRELERVLEEHRRSLEKNKRDVERINEELKRRLDRNKEELRKILEDVERRRR

SEQ ID NO: 10243 - protein, 174 aa, Artificial Sequence; identical to SEQ ID NO: 10242
  Synthetic

SEQ ID NO: 10244 - protein, 174 aa, Artificial Sequence
  Synthetic
SEEERLRREVKRVEDENRKLLERLREIAERVHRENKRLLDESRRIADKVRRDLDRLPKTEELKKLIDDLRRSLEELERRNRKVDKEIKDRLKRVEEENRKVDKELKDRVKEFEDRKEPLEEVLEELERVLKRLEEEHRRVVKELRDLLRRIKEDHDRLVEEAEEILREIDERAK

SEQ ID NO: 10245 - protein, 174 aa, Artificial Sequence; identical to SEQ ID NO: 10244
  Synthetic

SEQ ID NO: 10246 - protein, 174 aa, Artificial Sequence
  Synthetic
SEEEEADKAIRTIAKAIEDLVRDLERALKESKRNIEELAKDLKRANDRIEEELEKANVPEETLRELRKRSEDSNREIEKALRELTKAHEDIEREIRRTLEELRRRLKELREEARKTRVDKELADRLRDLLRDAKRVVDRIKRALEELNKEAKKLVERAKKKHDDLLEDVKRDTK

SEQ ID NO: 10247 - protein, 174 aa, Artificial Sequence; identical to SEQ ID NO: 10246
  Synthetic

SEQ ID NO: 10248 - protein, 174 aa, Artificial Sequence
  Synthetic
SEEEDAKRVLDEIREELKKLNDDVRRALKESKENIDRIIEDLDRTNKRIEEELDRLNLDEEELRRLKEKSRTSNEELRRLLKELEDRHRENKRTHEEVEKELEKELRRLAREARETRVDEELKERLKRLLERVREEVKRNKEHLERLNKKVKEDVDRLKKRHKDTLDEVDERRK

SEQ ID NO: 10249 - protein, 174 aa, Artificial Sequence; identical to SEQ ID NO: 10248
  Synthetic

SEQ ID NO: 10250 - protein, 183 aa, Artificial Sequence
  Synthetic
KLDEDLEKVIKEVKERLKESLDRHKEVAKRLEEEVKRSEEEHRKVLEEAKRKLEEIKTKTRKDEEMKRVEEELDEIARRSEDILRRIREELKRIHEESERELRDVEREIDKRTEDLRRLRKDIDDRTVRKVERELRDLIRRLEKRNEELIRRVKEIVERMEKTNRDLIRRIRELIKKVEDDVR

SEQ ID NO: 10251 - protein, 183 aa, Artificial Sequence; identical to SEQ ID NO: 10250
  Synthetic

SEQ ID NO: 10252 - protein, 180 aa, Artificial Sequence
  Synthetic
SEEEKLKRVLDEFRRAVKELLEDLERANERAKDEVRRLLEDLDRAHERIRRAVEKLKERVKDKGPEKVLEELDRELKKLAEENEKSKEEVERTVRRVHEKNEKIKEDLRRTVERVEEEVRKTRPDKDLEKRIRDTLREIKKRVEDVKRDNKRVLDELRKKIEENKKRNEDVLKEMEDKTE

SEQ ID NO: 10253 - protein, 180 aa, Artificial Sequence; identical to SEQ ID NO: 10252
  Synthetic

SEQ ID NO: 10254 - protein, 185 aa, Artificial Sequence
  Synthetic
SDAERVKKESKDLLDTTKRLADRLKELLERLNKETRDRVREVIKEIERLVDEVEKEARKGLDEETKKRVIDKIRKTLEDIKRKLDKLLEEHKTENDRIKKEADELLKEHRDRLEELRRKLDERNLREDIRTDLEDVLRRNKEALEEIRKDIERVNRKDREELREIARTLEKVLRDARRRLEELRR

SEQ ID NO: 10255 - protein, 185 aa, Artificial Sequence; identical to SEQ ID NO: 10254
  Synthetic

SEQ ID NO: 10256 - protein, 181 aa, Artificial Sequence
  Synthetic
SIEDDLRRVLERSKRSLEELKRKADRVLEESKKNVRDLERELKRVLEKIKETIDKLRKDGRLDEKLKKEIEDLLREAKERVDRLKKELRDLHEEVKKALEDLERRARDTHRRLKERVDKGLDKEEVERLIRELDRVNEELAREVERLIRELEEVNRRVNEDLKRLIRELERALKELDERVR

SEQ ID NO: 10257 - protein, 181 aa, Artificial Sequence; identical to SEQ ID NO: 10256
  Synthetic

SEQ ID NO: 10258 - protein, 178 aa, Artificial Sequence
  Synthetic
DEVDELIKRLEERNEELNRKAKRIIEKLKKENDDLNRKLDEIVRKAREDIEDAERRVNDDKVIEEIKKLIEELRKRIEEELKKAKEAHERIEEEIKEALKRARELNKKLEEELRRRVRGKDLEDKLEEVLRRSKKNIEDVEKELRDVLRAAKKNLDDLRRKLEDVLRRLRDEIRRKKK

SEQ ID NO: 10259 - protein, 178 aa, Artificial Sequence; identical to SEQ ID NO: 10258
  Synthetic

SEQ ID NO: 10260 - protein, 178 aa, Artificial Sequence
  Synthetic
SDVDRIITELRDINREVNRRVKRLIEELEELNRRLNEKAKRDMDEIRRLIEEAAKKLRDDRKLEELEKRLEEIRKRLEEELEKAKRLNEELKKRLDDEARDVERKHKELEDELRRRVRGEDLKRKLEKVLKEARDNLEEVKKRLKEVLERSEENLRRLEEELRRVLEEVREMLKRKKD

SEQ ID NO: 10261 - protein, 178 aa, Artificial Sequence; identical to SEQ ID NO: 10260
  Synthetic

SEQ ID NO: 10262 - protein, 173 aa, Artificial Sequence
  Synthetic
KDEEKIKRVLDDVERVLKENEDRNRELLKRVRERLEESRDHLRRVLEDVKRVLEELKLDEKTAKELEDTIRRIADELRKILKRTEDELRKIEKKSREKLKRAREELRKLEKKSKDVDVDELVKRIKDLLKRLNEISRRIAEEIKELLRTHDELNERVVRKLRDLLRKAREKRR

SEQ ID NO: 10263 - protein, 173 aa, Artificial Sequence; identical to SEQ ID NO: 10262
  Synthetic

SEQ ID NO: 10264 - protein, 173 aa, Artificial Sequence
  Synthetic
SEEEKLKRVLEDVERDLRRNKRENEKSLEESKKVNDDNRRRNKEALDEVKKVLEDLNLPEDTLTDLEDKLRKIKRDSERENERHKEELDRSEEESRRTLKRAREKLEELRKTSKDKSDEELVDEIRKLLERLNEISERIHRRNKELDDELNEISKRIRERIEDLKRRAEERAR

SEQ ID NO: 10265 - protein, 173 aa, Artificial Sequence; identical to SEQ ID NO: 10264
  Synthetic

SEQ ID NO: 10266 - protein, 177 aa, Artificial Sequence
  Synthetic
SEEDEIRRLLKENEDSTRRVEEDNKRLNDENEKSTKRVEDDIRRILERVRRELDDLRRRGAVDEELDKEVERVEREIEETLKRLRERNEESKKRNEEKVKKMKEENKKTKDDIRDLKDRVRREEIEREVREDNKRLEELLERSEREVREDNKRLDEALKKIEKEARELVKRMREKAK

SEQ ID NO: 10267 - protein, 177 aa, Artificial Sequence; identical to SEQ ID NO: 10266
  Synthetic

SEQ ID NO: 10268 - protein, 177 aa, Artificial Sequence
  Synthetic
REEEEIRRLLKENEESTRKVEEDNKRLNDENRRSTEKVSRDLEDLNRDTRRVMEEAERRGAVDEDLKREVEEVERRNKELLKELRERNRESLERNRKKVEDLKRRNTETRERIKDLARRVRLEEIKREVEEDNERLKELLKRSEKEVREDNKRLRDVLEKSREEHERLKKRLEEAAK

SEQ ID NO: 10269 - protein, 177 aa, Artificial Sequence; identical to SEQ ID NO: 10268
  Synthetic

SEQ ID NO: 10270 - protein, 177 aa, Artificial Sequence
  Synthetic
SEEDEIRKLLEKNEKSTEDVERENERLNDENRKSTEDVKREIDRLLKELREVLDEARKKGAVDEDLDRRVKKIEEDIKRRKDELRKRNEESLERNKRKLDDLRRRNEESKRRIEDLKDRVRLDEIRKTVEEDDKRLKDALERSKREVDDDNRRLKKVLDEIRKTVRTMIEEIKKAEK

SEQ ID NO: 10271 - protein, 177 aa, Artificial Sequence; identical to SEQ ID NO: 10270
  Synthetic

SEQ ID NO: 10272 - protein, 181 aa, Artificial Sequence
  Synthetic
SEKEKADDLRRKSKESNDTLRKRLDELKKRSEKNNEELERRLRALLKRLEDVLREITKRTGRDTELDKLKDEARELLERLEKRARDLLKEHEDLKREVEEKARRLLKEHEDLERELERRVRKDGVTDELVKEVEDLNRELEEKVKRLIEEMEELNKRLNDKVKELIEEVERLIKELEDRVR

SEQ ID NO: 10273 - protein, 181 aa, Artificial Sequence; identical to SEQ ID NO: 10272
  Synthetic

SEQ ID NO: 10274 - protein, 185 aa, Artificial Sequence
  Synthetic
KDIDELIKRSEDLTRDLERKNKEVVDKIEELLREHEKTNREVVKELRRLLDEVRERVERRGRTREAKEELRRLRELLEEIVRRLEELLRRTRETLTRIKERLDELHEEYKRKLEEIKREVDRRPTSEDLERKVRKAEEDNKRAVERSKTHVDEVRKEVERVLRESKRHAEKLAEDVERMIRELER

SEQ ID NO: 10275 - protein, 185 aa, Artificial Sequence; identical to SEQ ID NO: 10274
  Synthetic

SEQ ID NO: 10276 - protein, 175 aa, Artificial Sequence
  Synthetic
STLEKLKKDLDDIDRDLERILDELRRRVERIDEELRKIVERLHRRNKEIIERLRKAKLPREELRKVAEKSRKELEEVKRELEDMHRRSREELERVRKRLEEVHKESKERIDEAIRRDGETREIREAEKKHKKVLDDLRRKLEEVEKRHREVEKELRDRLEESRREHEKVIREETE

SEQ ID NO: 10277 - protein, 175 aa, Artificial Sequence; identical to SEQ ID NO: 10276
  Synthetic

SEQ ID NO: 10278 - protein, 178 aa, Artificial Sequence
  Synthetic
RELEELEKEVRKRLKEAEERVRDLAKKSRDLNRELKDRLRRIVEENRDVNRKVKEKKDVDKEKLARELEDINRRTEDRFRRLDEELRRVNKDLKRRIRELVEELKEILKRLRDKVRRDKAGRDEDLRRVEEEIRRVIERLKRLLERVEEENRKSRKELRETLERLHRENEKSLREKET

SEQ ID NO: 10279 - protein, 178 aa, Artificial Sequence; identical to SEQ ID NO: 10278
  Synthetic

SEQ ID NO: 10280 - protein, 184 aa, Artificial Sequence
  Synthetic
SLKERLDRVEEKIRKVLEELDRSTSRVEKKVEEVLRELKRSNDEVRKEIKKVLDELRKRGLDEEMKRRLEEIAKELEKILRENEERIKRIADELKELLKRARDRHRRIAEELKKELRKIEKRNIDEKVVDEVAKRMTEELKKLDKENKEIEKEVDDILKRLKDEDKKTVDTLRKILKELDDDAR

SEQ ID NO: 10281 - protein, 184 aa, Artificial Sequence; identical to SEQ ID NO: 10280
  Synthetic

SEQ ID NO: 10282 - protein, 183 aa, Artificial Sequence
  Synthetic
SEIEEVEKEMDKLAEESNKLNEEALRRVRKLLRDSNELVRELERRVRELIKRAKDLKREGDKDEEKILEDLERSIKRLMDEARKLLEEYKRRLDELKKELDKLHEEYEREVERIIRKLEREPNSEEVRRKIKEIKDRSEENIKRSRDSVREIKKESDENIKRLKRELERIKKRLEEVLRDLKR

SEQ ID NO: 10283 - protein, 183 aa, Artificial Sequence; identical to SEQ ID NO: 10282
  Synthetic

SEQ ID NO: 10284 - protein, 179 aa, Artificial Sequence
  Synthetic
KDEEDLAREVKRVIDELEKLNEELNRAAEELIKRAEEINERVNRKVEKVERDLDKLKKRGELDDELLKEIKKRLEEEEKKAEDAHRKLREELKRALDTAREKNKEIEKRLEEVLKDAKDKTGESETLRKLRDDLRKALKKSEDNIEDVRRRLEEVLERARRNLERVRRRLEEVLRKLKE

SEQ ID NO: 10285 - protein, 179 aa, Artificial Sequence; identical to SEQ ID NO: 10284
  Synthetic

SEQ ID NO: 10286 - protein, 179 aa, Artificial Sequence
  Synthetic
SAAERLEKAVRDLIEELKRLNEELNKAVKEIIRRLRELNKKLNEDAERLIRKADELKRRGSSEEVLERLRREAERLAREADKLDRKVKRELEKLEEDIRKLNEEVRKKLRKLEEDARRENKVDKEILDKLREELKRALEESEENLRRLRRELTEVLRESRENLERLKEEVERVLKRLAD

SEQ ID NO: 10287 - protein, 179 aa, Artificial Sequence; identical to SEQ ID NO: 10286
  Synthetic

SEQ ID NO: 10288 - protein, 180 aa, Artificial Sequence
  Synthetic
SVVEDLEEKVKRLIERIERENRRLNKDADRLVRELDELNERLNRAIRRLIRKAEEARKRDLDEKDKRKTLKEIRDEIEELKRRAEEDHKRLEEAIKRLVEEARRANEDLRRKLKELEERAQGVEERELERLKRELEKVLRESEKNLEDLERKLKEVLDRSRENAKRLEDELREVLERLRK

SEQ ID NO: 10289 - protein, 180 aa, Artificial Sequence; identical to SEQ ID NO: 10288
  Synthetic

SEQ ID NO: 10290 - protein, 180 aa, Artificial Sequence
  Synthetic
SVVEDLAKKVEELIRRLEELNKELNKRVRDLIEKLRDINRKLKREVERLIEEAEEVRRRDLDEKDKRRVLRRLEEVLKDLVRRAKKVNRDVAEEMKKLVEDVKRSNEEVKKTLEKLKEDAKGVDKDELKKLEERAREVLRKSEENLKRVEDELREVLRESEETLKRLEEELRRVLDELRK

SEQ ID NO: 10291 - protein, 180 aa, Artificial Sequence; identical to SEQ ID NO: 10290
  Synthetic

SEQ ID NO: 10292 - protein, 178 aa, Artificial Sequence
  Synthetic
DEEKKAEDDIRRIHRRNEDLLRRHREITEEIEKRIRELLREHREITKRLERRLRELKKEGSDERVLDKIRKEMEKRLEDSERKLEKIEREARKTLEDTKRELKKSEEEAKKTIDDVRRKTGDTEELKRIKKRLDESLREVEEDLKRSEKRLRELLKRVKEDLDRSRKRLKEILDELRR

SEQ ID NO: 10293 - protein, 178 aa, Artificial Sequence; identical to SEQ ID NO: 10292
  Synthetic

SEQ ID NO: 10294 - protein, 178 aa, Artificial Sequence
  Synthetic
DEVRKLEEDVERLRREVEEENRRLEEEVERLRKEVKERNRELNERVKTLIETAKRLKEAGSSEDVLKKLEETVRKLNEDHKKLTKELEDRARALLEDHRRKLEELKERMDRLREDVRAKRLPEEMLRELEKRLKRLADETRRSNKELKERLERLKDESRDNNRELKERADRLLEKLKE

SEQ ID NO: 10295 - protein, 178 aa, Artificial Sequence; identical to SEQ ID NO: 10294
  Synthetic

SEQ ID NO: 10296 - protein, 175 aa, Artificial Sequence
  Synthetic
SEEEELRKLERRLEELMKEYKEALDKLREEHEKTLREYEKRVEDLEREHKKVLKKLVDDRGREDDKVRRYKEEVDRLKDHSRKAKETYEKKVRDLVRHSKEFLDELRRKVKELKDRLTDLDDLRRKVDKLRKEVEDHVRELEKKSRKLVEELKDHLRKLEEESRRLNRELEERSR

SEQ ID NO: 10297 - protein, 175 aa, Artificial Sequence; identical to SEQ ID NO: 10296
  Synthetic

SEQ ID NO: 10298 - protein, 175 aa, Artificial Sequence
  Synthetic
SKEDLRRELDRVNEESKKHLDKLRKEAEEVLERLDRANKKIIEDAEEILRRIEKKVRTREDERRKTEEDARRAKEDNDDANRRRKEDAKRRRDKEREDEKRDEDDKRRSDKESKDDTQTRERIKREIEENRKRNEEIARKIKEDIERARRDLERLRKKHEEELEKLKKRVEDADR

SEQ ID NO: 10299 - protein, 175 aa, Artificial Sequence; identical to SEQ ID NO: 10298
  Synthetic

SEQ ID NO: 10300 - protein, 178 aa, Artificial Sequence
  Synthetic
DEDRIRKELEKAHKETREESEKLNRDVERVLREVRKASKDLNDKFEEELRKLREKVERDLPPDDEERRDEEEAKKTRDEARREHEKTEEEARRLREEAERRHRRYTEKEKRIRDKIRKDGVDRDKVEEDLRRSRKELEDYARDLEDAIRRIEDRLRRYARKLEEDIKRLARKLEERER

SEQ ID NO: 10301 - protein, 178 aa, Artificial Sequence; identical to SEQ ID NO: 10300
  Synthetic

SEQ ID NO: 10302 - protein, 183 aa, Artificial Sequence
  Synthetic
SRTERVKEELKRLVEEYKKRSDDSRRRNEKLTRDYREDSRRVEEELKRIKEDVERELRRRDVERKEELKETEKRMKELEERLREEKKKSKEREDRLRKRNEEEDRRSEKETREIEKETRDRGLRDEEAKKDLKRVRDALDRLTKRNEEKDKENEDRLRKMLRENRERLKEVRERAKRIKEELK

SEQ ID NO: 10303 - protein, 183 aa, Artificial Sequence; identical to SEQ ID NO: 10302
  Synthetic

SEQ ID NO: 10304 - protein, 181 aa, Artificial Sequence
  Synthetic
KEKEEIRKALKELLDDLERTLERLKREYDKLRKDLEDTDERIAREHKKIADDLDRTLKEARKKLDERELDKLRKEVEEHNKRVKRRRDEIRKETEKNTKRNEDEERKKREELERKKRDLERKDSESERVLEEVKREVDRIKEELRRTLEENRRRIEEIKKRLEDILRESRERARELKEKLR

SEQ ID NO: 10305 - protein, 181 aa, Artificial Sequence; identical to SEQ ID NO: 10304
  Synthetic

SEQ ID NO: 10306 - protein, 172 aa, Artificial Sequence
  Synthetic
SEAETILRRVRRRVEEILDRIRRKLEESKREVEKHRRDVKKVLDDVRRTVKRIKERGRTEERVEKEVEKMMREIKKELDDRHRETKKRSEEFERDLKRTEERVREEEDDTRKKVPNREEVDTRLKEISKELEETLRRVTEEHKRLNRELEEVDRRAEKEVRKILKELRDTTK

SEQ ID NO: 10307 - protein, 172 aa, Artificial Sequence; identical to SEQ ID NO: 10306
  Synthetic

SEQ ID NO: 10308 - protein, 187 aa, Artificial Sequence
  Synthetic
SKEEELREVLRRIERELERVNEELREENKRIDKELEEVNRELEERNKRINDTVEDLVRERGDNSKEVEDEARDERRRNDEKNKKYKEEDDRNRKRNDDENKRYEEEVKENKRRLDEEEKEVEARGDVKREELRKIAEKLKKNLEEHKKRVREYLKRLEENLKRHRERVEKYARDLKRDLDRLRERLR

SEQ ID NO: 10309 - protein, 187 aa, Artificial Sequence; identical to SEQ ID NO: 10308
  Synthetic

SEQ ID NO: 10310 - protein, 187 aa, Artificial Sequence
  Synthetic
SEEEKLEKKAREIEEALRRVNEELKRRNKEIDERLEEVNRRLEKDLKKIEEDARKLVKDKGDTSEEDKRRLEEIRRELRKREKDYRDDAKRNRDENEEANRRYEKEAEDNDRELKKEEEETRRKGEVDEDELREIIERLERNLERHKRRVDKYLRDLEKNMRDHKRKVDEVVKTLEETLRRLEEEVR

SEQ ID NO: 10311 - protein, 187 aa, Artificial Sequence; identical to SEQ ID NO: 10310
  Synthetic

SEQ ID NO: 10312 - protein, 179 aa, Artificial Sequence
  Synthetic
SEEERLREKVKRVEDDLRRLNEEYKEKHKRSEERNKKLLKDLKEVHDRVKKAVEDILRDTPLEEEKLRTIREDLKRVHEENKEAEERIRKRHEELNEESRRDHKRHKEKLDRLKEEEEKSDRPEEEVEERIRRALKESREEIDRLERRNEEEDKKSEETVRRMMERNDRVLKEVEERAR

SEQ ID NO: 10313 - protein, 179 aa, Artificial Sequence; identical to SEQ ID NO: 10312
  Synthetic

SEQ ID NO: 10314 - protein, 179 aa, Artificial Sequence
  Synthetic
REEEELRRLVKTVEDEVEKLLRRYRDESEKVKRTLEELNKDLERKHKEVLDRIRDILRKVPLDEEKLRRLDKKLKDLHERNRDEHRKHEKETRDLDEDSKRAERETRKKLKEVRDKRRDSDRPREDVERELEETLRDVARKIERLLEKNKRDLDRSKKRVEEMVRRNEKALKDVEDEIR

SEQ ID NO: 10315 - protein, 179 aa, Artificial Sequence; identical to SEQ ID NO: 10314
  Synthetic

SEQ ID NO: 10316 - protein, 179 aa, Artificial Sequence
  Synthetic
SEREDLKRTVDEVKKRLEELIDDYRKTSEEVERRLEELLRRLREDHKRVAETIDDILRRVPLDEKKLTRLREELEELHERNKRKEEKIKKEIDDLREKSERDEKRIRDEIKKLEEEEKRSDRPTEEVKERIRRDLERVKRKIEELKKKNEEDLRRADKKVKDMLEENRRTLEKAKRKAD

SEQ ID NO: 10317 - protein, 179 aa, Artificial Sequence; identical to SEQ ID NO: 10316
  Synthetic

SEQ ID NO: 10318 - protein, 178 aa, Artificial Sequence
  Synthetic
SKEDEARKEIKRIEDEIERLRKELEDAHRKLREDLKRLRDENKKVLEDIKRRLKELEKDTDVREEDLRRLRKEVRELDEKSKEEEKRTEKRARDLHETNKRDDKRAEDETRKLKKEADDEPVDDRVRKKLEDELRRLKRTVDELKKRNEKALRDVKRDSERHKEELRRALRKAEEDAR

SEQ ID NO: 10319 - protein, 178 aa, Artificial Sequence; identical to SEQ ID NO: 10318
  Synthetic

SEQ ID NO: 10320 - protein, 186 aa, Artificial Sequence
  Synthetic
SLKEELDKAIRELKERHKRINEDLERVVRESRKNHEDINRRLKKLLEELEKRVEEIVRREQTDRDRTEEIKREEDKTRKSDKDKEKKSRDEKREYDRREEEDRRKSERDEERVDEEARDFERKNREEDRVIREIKKRLEDLLRRTEERAKEVKDENRKRNEDTREEVRRVEEELKELLRRIEERER

SEQ ID NO: 10321 - protein, 186 aa, Artificial Sequence; identical to SEQ ID NO: 10320
  Synthetic

SEQ ID NO: 10322 - protein, 181 aa, Artificial Sequence
  Synthetic
DEVREIIRELKERIDKIAKEIDDENREHRERLKEIAREVKELIKENRKELKRIADERKDRDRSELKKRVDELRDKNRRDNERTKERAKKIKDDNRERNERTDERVKRIRDETKKRKDDIDLEEEIRKRLDEATKRAEDELRKLKEKNKEVLKELDDRLRKLEDEHRRVREEVDKRLDELRK

SEQ ID NO: 10323 - protein, 181 aa, Artificial Sequence; identical to SEQ ID NO: 10322
  Synthetic

SEQ ID NO: 10324 - protein, 182 aa, Artificial Sequence
  Synthetic
DEREKIEKRIRELLKEDKEHTRRNEEKIRRLLDTNRRLLEEIAKKIEEIARELKERKKENRTRETKDRKRRETRKKIEDLREEIERLSRKAEKDTERLERENKDASRRNEERLRELEKRIRDKGLNLEEIRKLVEDYRREHEKLKRRNDELLERYRRAHEEIKKRIDELVERLEEILRKLAE

SEQ ID NO: 10325 - protein, 182 aa, Artificial Sequence; identical to SEQ ID NO: 10324
  Synthetic

SEQ ID NO: 10326 - protein, 182 aa, Artificial Sequence
  Synthetic
SEKETIEKRIRDKLKDDEDHTKRNEERIRRALKEDEDRLRKIEEEIRRTLEELEREKRSNRTREEKEERRRRREDRDRRRRERIKRESDKNKRREDERKKKNEEKSRRNDKERREERKDIKRRGLDAEDIERLEERYRREHERLKRRNEDLSREYEERHERLKREIDKLEEDLKRETERAAR

SEQ ID NO: 10327 - protein, 182 aa, Artificial Sequence; identical to SEQ ID NO: 10326
  Synthetic

SEQ ID NO: 10328 - protein, 182 aa, Artificial Sequence
  Synthetic
SEKEKIKKEIEDARREDEKHTEKNKRDIERDERRDEETLKEIEERIRRTLRELEKDRESNRTREEKKKKREETERRRRKLREDIERKKEENKKKEREREERNKEFNRENKRRAEERKRDIERRGLNAEDIERLEREYEKDHKRLKDENDDLTEKYRRRHREIDERIKDLERELDRRIKEIDR

SEQ ID NO: 10329 - protein, 182 aa, Artificial Sequence; identical to SEQ ID NO: 10328
  Synthetic

SEQ ID NO: 10330 - protein, 187 aa, Artificial Sequence
  Synthetic
DVRDRVRELRRRLEEETKKVDDENRKIHEELKRVADESRKNNERLNRELRKEIRRVEKDLGEVREEKRRRVKKTTDDTEKEDEDRNREYDREEKEVEERDRKKNKERKDRKEEVDRRTEEEERRRKPDEEALRRLEETLKEVKDELKTELDDSRREVEEVKRSNKEKNERSERRLKEVRDRLREERK

SEQ ID NO: 10331 - protein, 187 aa, Artificial Sequence; identical to SEQ ID NO: 10330
  Synthetic

SEQ ID NO: 10332 - protein, 183 aa, Artificial Sequence
  Synthetic
SLEDSAREIEKRLRDLHRRYREDHERIREDLERLKTEYEKAHRDIKRELDRLREELERANRVREKEKEDTKREEEERHREVEEDKKRKDEELRRAHEEVKKKEDENKERDDRFKEETKRSDRPEKEMLDRLEEHVDRNEKDIKKALDENRKRLDDIRRKIKKALDENREELKRIERRIRELKK

SEQ ID NO: 10333 - protein, 183 aa, Artificial Sequence; identical to SEQ ID NO: 10332
  Synthetic

SEQ ID NO: 10334 - protein, 180 aa, Artificial Sequence
  Synthetic
SAEETTEDLKRRLKELDEKVKEVLKRNEDRVRELEEDVRRNLKKNEDDAREVEERLKTSGGGDEEELRKRSEEYKKRMEEVKKRLEDESKKYKDEVRDVKRRLEEERKEVEDRTRTTDVKGEELLKEVEDRVREIIKRIEEKLKRLNDRTREFIERIRRELRKVNEETKKMIKELKEEED

SEQ ID NO: 10335 - protein, 180 aa, Artificial Sequence; identical to SEQ ID NO: 10334
  Synthetic

SEQ ID NO: 10336 - protein, 175 aa, Artificial Sequence
  Synthetic
SKAEKVLEKAREVVETIKRLVEEVLRHSEDVVRRITDLVRRLLEENERVVREIKRLADEGSRGESEVKKLSDDMRKRNRDVEREVRELSERDREELRKVKEEIKERLDRIREELERSEVDERVIKKIEDLLKKVDDEAKKMLEEVERLNKEVNDRLKRVLEEAERLHEEVNRRVK

SEQ ID NO: 10337 - protein, 175 aa, Artificial Sequence; identical to SEQ ID NO: 10336
  Synthetic

SEQ ID NO: 10338 - protein, 174 aa, Artificial Sequence
  Synthetic
KELEDVIEEVKKLLKTVNEESRRVAEEVRKLIREVSEELTEVIRRVERLVEEVATRVDRKEDLDRVRKRIEELVRRVEEVNRRSKRRIEELEDELRKVDEESRETIERLIDLLRRGLDLDTVLRRAEDIVRKNRKLAEEVLRRVKKIVEENRKIAKEVLDDVRKLVEDVLRRAT

SEQ ID NO: 10339 - protein, 174 aa, Artificial Sequence; identical to SEQ ID NO: 10338
  Synthetic

SEQ ID NO: 10340 - protein, 174 aa, Artificial Sequence
  Synthetic
EELERVIEEVRKLVEEAEKKSREVIKTVKELMDDVNRKSKKVLDDVRRLIEKVRREVTNEEELRKLTETIRKLIEDLKRMDEKSEDEIRRLVEELRRLNEKSKRDIERLIELLKRGLDADDALRRVKEIVERNEEVVKELLKRAEDIVRTNEKLVKDVLDTVRKLVKKVKDDED

SEQ ID NO: 10341 - protein, 174 aa, Artificial Sequence; identical to SEQ ID NO: 10340
  Synthetic

SEQ ID NO: 10342 - protein, 177 aa, Artificial Sequence
  Synthetic
SEAEDALRKAKRLADEDRKAAKRALEEAKKSAEEVKKAAKRALEEAKRIAEDVKRAADEGRDEEDARRILEEARRAIEELAKRLKKILDDNERETKRLAEELRKINEDTKREIERLEKDARGEEAAREAKKLAKDAADVSRKAAKDAKDLSKEAADVARKAAEDARRLAEEAARKAK

SEQ ID NO: 10343 - protein, 177 aa, Artificial Sequence; identical to SEQ ID NO: 10342
  Synthetic

SEQ ID NO: 10344 - protein, 182 aa, Artificial Sequence
  Synthetic
SDAEDVVRKVKRLVDELRRHSKELLKEVEDLVRDLVRHSEEVVKRVEDLVRRLEELVRRGDAREEVLRKVEEDVKRLNKEDKDRVEELRRRVKKLSEDNEKLLEEARERVTRLIEDLRRRSDTEEVRRVLREIREVLKKVAEDSRKVNEDIRRVLEEAKKTSDKVNTDSEEVLRTVARRFED

SEQ ID NO: 10345 - protein, 182 aa, Artificial Sequence; identical to SEQ ID NO: 10344
  Synthetic

SEQ ID NO: 10346 - protein, 182 aa, Artificial Sequence
  Synthetic
SRAERLLEDVRRLLEESLRNSERVLEEVRKLIEENLRHSRKVVDEVRRLLEEVLRVVERGDIRREDVKRAEKEVEDLNDENRRHSDDVRKTVEKLDEDNKKLLKEVKERVEKLIKDLKDEVDREDVRRVLEAIKEDLKRVEDANREINRRSEELLREAEKRSRDIDKESRDLVRKVKKDLEK

SEQ ID NO: 10347 - protein, 182 aa, Artificial Sequence; identical to SEQ ID NO: 10346
  Synthetic

SEQ ID NO: 10348 - protein, 182 aa, Artificial Sequence
  Synthetic
SRAEEVLKDVKRLVDENRRHSERVVEEVRKLVTENKRHSERVVEEVRRLVEELERARRRGDIREEDLERVKREVEKLNRDNKDHSRKLKRRVDELNKRDKEHSDDLKRRVERLLDELRKESDDKDVRKVLKDIREVLERVEEDSERVNRESKKVLDDVKKESDEADDESRRVLEEVDRKARK

SEQ ID NO: 10349 - protein, 182 aa, Artificial Sequence; identical to SEQ ID NO: 10348
  Synthetic

SEQ ID NO: 10350 - protein, 182 aa, Artificial Sequence
  Synthetic
DRVEELLKTVEKLVRDNEKHSRDVVKEVRRLAEENERHSERVVREVRRLVKELEDMKRRGDIREEELKDAERKVKELNKRNKEHSDDLRRRVEELNRDNRRHSEELEETVRRLLEELRKESDRREVREVLKRIEEILKDVKRKSEEVNRESERVLREVEKRSEDADRESKKVLDDVKEKARR

SEQ ID NO: 10351 - protein, 182 aa, Artificial Sequence; identical to SEQ ID NO: 10350
  Synthetic

SEQ ID NO: 10352 - protein, 177 aa, Artificial Sequence
  Synthetic
SEEEVLKEIDEVSRDLERKNKTINEEIKKVSDRVAEEVRRVLEDIKRTSKDAVDDVRTRGLDETDIERHRRTSKRLLDELRRLLEEHKRKSERISREDKKILDEHRKFSEEVRKLIKDGADLEKVVREVEESVKESEERSRRLLEEVRRSVKKLEEDVTRLLEENKKSVDDIKERAR

SEQ ID NO: 10353 - protein, 177 aa, Artificial Sequence; identical to SEQ ID NO: 10352
  Synthetic

SEQ ID NO: 10354 - protein, 177 aa, Artificial Sequence
  Synthetic
REEEVLEEIRRVVEEVRRENERINKEIRERSEDLRRKVKRILEKAKKVLDDVDERAKREGLDEKVIRDLRRRVEELLDRLRKRVEEHEKFSREISKRDRDIIEELKKTVERIEKLLKDGMDVDEVLKEVEDLVRESVRLSEDLLREVRESVERLVDEARKLVREIERLVKEAVDTVR

SEQ ID NO: 10355 - protein, 177 aa, Artificial Sequence; identical to SEQ ID NO: 10354
  Synthetic

SEQ ID NO: 10356 - protein, 177 aa, Artificial Sequence
  Synthetic
KEEEVLKEAEEVSRRAEEKNRRINDEVRRVVRRVEETVTRVLEDVERTSKEAKERVERAGLDRKDIRRHEELSKKLMEDLKELLRDARRKVTRLSEEDKEIIDRHRDKSRKIRKMIKDGSDLDTVVEEIKDSVRKSVERSRELLERVERIVTELEKRVDELVRENEDSVRRIDERVR

SEQ ID NO: 10357 - protein, 177 aa, Artificial Sequence; identical to SEQ ID NO: 10356
  Synthetic

SEQ ID NO: 10358 - protein, 178 aa, Artificial Sequence
  Synthetic
SEAEKIVEEAKRLADKARELAERSVRHSEKLARDSEKAAREAVKEAKDLADKARDLAAKRRDEDLLRKIKEDLERAARKIKRLLEELKKRHERDNRESKKLLDKIREDLERALEKAERRAKAKEALDTARKILRDAEEAAKEAHKEANRLNKEAEEAAKRAADEARKILKKAEEDARR

SEQ ID NO: 10359 - protein, 178 aa, Artificial Sequence; identical to SEQ ID NO: 10358
  Synthetic

SEQ ID NO: 10360 - protein, 184 aa, Artificial Sequence
  Synthetic
DDLEEIVKRVRRIVEEIRRLVEELVRRDKRIVDEIKRLLEEDKRKVDEIVKEIEEVVRRGGDDKDKLKRRVEELLKDVERHTEELRKEVERLLDESRKLNKEVRDTVEKLLEDVRREIETISREEEEVRRVLKEVKDILKTVRDEVEEANEDAKRLNEEVREEAERVLRDTKRILDEVRKEADK

SEQ ID NO: 10361 - protein, 184 aa, Artificial Sequence; identical to SEQ ID NO: 10360
  Synthetic

SEQ ID NO: 10362 - protein, 178 aa, Artificial Sequence
  Synthetic
REKEVLEEVRDIVRRASERSKEALDESREILKTVDDEVRRVLEDSRRLLEEVRKRVEDNNVDEDIRRRVKEVEDRIRESLERTKRTVDKVKEEIRKSLEDTKRANEEIVRRIEELIKRREGDAREIVERVRRLVDTSRRLVEEDVRRVREVVKELRKLLREDVKRVRDVVEELAKEAT

SEQ ID NO: 10363 - protein, 178 aa, Artificial Sequence; identical to SEQ ID NO: 10362
  Synthetic

SEQ ID NO: 10364 - protein, 176 aa, Artificial Sequence
  Synthetic
SEMEDAKRKIEDLVRRVKDSLRDAERRIREVVERVERSLKEVEDRSRELLEDVKREGDTEEVKKLVRESERLIDELRRRNEDIKRRIKELIDELRKRNDDIVRRIEKLIEDLKRSTDDESVRDAVREVEDLIRRLTEDNKRLVEEVKRLVDRASEENKKLNDTSKKVVDEIREREK

SEQ ID NO: 10365 - protein, 176 aa, Artificial Sequence; identical to SEQ ID NO: 10364
  Synthetic

SEQ ID NO: 10366 - protein, 176 aa, Artificial Sequence
  Synthetic
EELERVKEEIDKLVKEVRRSLKDVERRSAELLKEVEKSLEEVERESKKVLDEVRKAGQTEEVKKLVDRSKKLIDDLRDKNRKIVDTSRKLIEDLKRRNEEIEKEIRDRIRKLSRTTDDKAVKTLLEDVRRLVREATEDNKRVNDESRELVERASRDNRRVNKESRDIVRRLEERTK

SEQ ID NO: 10367 - protein, 176 aa, Artificial Sequence; identical to SEQ ID NO: 10366
  Synthetic

SEQ ID NO: 10368 - protein, 176 aa, Artificial Sequence
  Synthetic
SELEEVERRVEKVVKEVRDSLKKVKEDIEKVLRESHKRLRDVEREVRRVLEKVRRRGDTEEVRKLEKEIRELLDELRKKNEEIRKEIEELIKTVKRINEEIEKEIRKLLEDLKDSTDDKTVRDVLRRVRKLVEDATRANEKALDDVRKLVEKSRKLVEDVLERVRRLVKELEERTT

SEQ ID NO: 10369 - protein, 176 aa, Artificial Sequence; identical to SEQ ID NO: 10368
  Synthetic

SEQ ID NO: 10370 - protein, 186 aa, Artificial Sequence
  Synthetic
DEVEDVVRKVRDLVRRVREAVRRLLEENRDLVRKLIEDSERLVREVEKLIKEVEDTVKDRKDDEELTRILEELKRRVDKLVEDDKKINKEIDDESKRLVEELEELLREVRREVEELVEDLRRKGGEEREELERVIKEIKDVVREVTKVVEKVIREAEKLNEDVNRRSEEVNKRIKKLVEDVARRVE

SEQ ID NO: 10371 - protein, 186 aa, Artificial Sequence; identical to SEQ ID NO: 10370
  Synthetic

SEQ ID NO: 10372 - protein, 174 aa, Artificial Sequence
  Synthetic
DEAEEVKKLIDKVLREVEEVVRRVNKRDKDLLREVEKVVRDVNREDKRVLEEVERSGVSEEVVKELRKLSKETHDESRRLLKELKELSEKTHKESRDLLRTAEEIVRRLKKVLDDGGPVEEIVREIEKVAEDIMRRNEELVKESEDVVRKIVRDNERLAEDSKRVVEEAVRREK

SEQ ID NO: 10373 - protein, 174 aa, Artificial Sequence; identical to SEQ ID NO: 10372
  Synthetic

SEQ ID NO: 10374 - protein, 182 aa, Artificial Sequence
  Synthetic
SAIDRVRKTLEKLVERLERVLEESSKAVEDVKEKVERLLRELRERTKRIVDEVEDMVRKANKPDDEVRDRIRRVEKENEDLVREVEDIIRKLEEKNRRLNEEIRRLIEEIRRELKELADRGVDEEELDRLVKKVEDLVRRLEELARKSLKDIKKLLKDIEDRLRKSVEKSRRLAEEIKERLR

SEQ ID NO: 10375 - protein, 182 aa, Artificial Sequence; identical to SEQ ID NO: 10374
  Synthetic

SEQ ID NO: 10376 - protein, 179 aa, Artificial Sequence
  Synthetic
DKADEAVKRVKDLIDDLKRRIDEVVKRSREVVRDIEKHAEDVVKESRRVVDEIKKLVTRGDIREEDVRRLVKRLEELNRRHEERSRRLVEELKRLNDKLNEEVRRIKRRIEDLVRRLREEGVIREEVEERVREVLRRVEKRVKEVNEESERTIRELERVSRRVNEESRRSIEEAKRAAD

SEQ ID NO: 10377 - protein, 179 aa, Artificial Sequence; identical to SEQ ID NO: 10376
  Synthetic

SEQ ID NO: 10378 - protein, 181 aa, Artificial Sequence
  Synthetic
DAVERAKEESKRVLEDAERVVRRVEEEVRKMERKAEESLKDVRRKSEEVIRKVEEVVRRKGAPREDIKEVEDRNRKLIEDNERHLREVVRELRELLKRLRDELERMKRRNKKLLDELDRVESDKEVREVVEDSRRSVRRVEELVEKVVRDVKKLIEDHERRNRESVRESERSIKELEEKVR

SEQ ID NO: 10379 - protein, 181 aa, Artificial Sequence; identical to SEQ ID NO: 10378
  Synthetic

SEQ ID NO: 10380 - protein, 185 aa, Artificial Sequence
  Synthetic
DDLERVLREVKRLVEENEKKVRRIVEESRELVERNKELLRRVVEEVRRLVKEVRDILRNVRGDDELERVLRRVEEEIRRLLTDLRRSNKRVAEELKRLNEELERSNREVERRIRELEERLREKVRDEDKLREVRERIKRLLDRSHEAVRRASEKSKRSLEESHRAVREVEKRLKELLEDVREDVR

SEQ ID NO: 10381 - protein, 185 aa, Artificial Sequence; identical to SEQ ID NO: 10380
  Synthetic

SEQ ID NO: 10382 - protein, 185 aa, Artificial Sequence
  Synthetic
DRLEEVVERVERLVRENVKRLEKVAEENRELVERNKRRLEEIVRRVRELIERAKRIVRDNTGDEELREVLRRVADEIRRLLEELDRSNKEVAKRSKESIEDLRRSNKKVEEDIRRLLEKLRRDVRDEDKLRDVERRAKELLEESHRVIRTVEERSKTVLADSHRVIEDVRRRLEELLREVAEEVR

SEQ ID NO: 10383 - protein, 185 aa, Artificial Sequence; identical to SEQ ID NO: 10382
  Synthetic

SEQ ID NO: 10384 - protein, 181 aa, Artificial Sequence
  Synthetic
DEADEVVKEVEDRVRKLVRRLEESAKKSKELVERILKRVEDSVRRSEELVERIKREVERRRDEELKKRVKELLKKSTEDNDRLRKDVERLLRESNKENRDLVRDIERELEEIKRTLEDLRRRGKVTEKVEEMLRRVLEEVRRAVRKSSEDNKRSVEEVKRVLEKAEEDNRRVVEEVDRELK

SEQ ID NO: 10385 - protein, 181 aa, Artificial Sequence; identical to SEQ ID NO: 10384
  Synthetic

SEQ ID NO: 10386 - protein, 183 aa, Artificial Sequence
  Synthetic
SKLEEVEKMVRKVIEDSRRVNEEVNRRSEEVVRELEKVHREVNDASRRVVEKARRVLKEGEDERLRREVERIIEEIRELNERDRKRVEEIRKEIEDLNRDLNRRSKESEDRLRKLLEDATRNNVTKEADEVVERAERISEENKRRVEDVARKSKELVEDVRRHSEEVVRRVEELVKEVEERVR

SEQ ID NO: 10387 - protein, 183 aa, Artificial Sequence; identical to SEQ ID NO: 10386
  Synthetic

SEQ ID NO: 10388 - protein, 183 aa, Artificial Sequence
  Synthetic
SLLEDVKRTVREVVRESRRVHKEVNDDSRRVLKRSDEAHERVNRDSRRVIERIREVLSRGEEERLKKKVEDVEREIKKLNDEDRKTVEDSKRRIEELNKRDKEKVEDSERKLRRLLEEIERRNVTEEVRELAEDARRISEDNRRNSKRVVDRVREISKENEDNSRRVVDRVRKLAEEVEREVR

SEQ ID NO: 10389 - protein, 183 aa, Artificial Sequence; identical to SEQ ID NO: 10388
  Synthetic

SEQ ID NO: 10390 - protein, 183 aa, Artificial Sequence
  Synthetic
DDLERVKETVKKVIKRSRDSTKKVADTLREVVRESERVHREVNETSRRVEEEAKRVASRGDDERLKEDLKRVVDRIRKLNKEDKDRVDKSRRDIEKLLKDLEDKNRELEREMRKLLEEIERRNVTEEVDKLADRARRLVAKSEEDNKRVMKEVTDISKENEDNSRRVVDEVRKLVEEVRRRLE

SEQ ID NO: 10391 - protein, 183 aa, Artificial Sequence; identical to SEQ ID NO: 10390
  Synthetic

SEQ ID NO: 10392 - protein, 177 aa, Artificial Sequence
  Synthetic
DKVERVVEEIRDLMRRVEELIKKAADDNRKLVKEVEDLIRDAVRDSERLVAEVEKLLTKERSEDLVRTIRELLKRNHDRLRKLEEEIKEMLKRLNEETRTLVEKIERDLKRVEEKVERTGVSDEVRKEVKRVIKAVEKVIEDVERTSEEARRRVEKVIKEVEEKNREVIKRVEDRIR

SEQ ID NO: 10393 - protein, 177 aa, Artificial Sequence; identical to SEQ ID NO: 10392
  Synthetic

SEQ ID NO: 10394 - protein, 178 aa, Artificial Sequence
  Synthetic
SEADKLVEEVKDVVREDKRRVKEIVETVRELVRRSRETVRRIVETVEEVVRRLLELLRKGEPKEELEREARELLEELRERLERLHKRSKEVLKRLRDRLRKSLRETEELLRRIKEELEKRNLEEKVEEVLRRVKRESEKVIEDVERELKRVEDDDRRVIEEVKKRLKRVLERVRTESK

SEQ ID NO: 10395 - protein, 178 aa, Artificial Sequence; identical to SEQ ID NO: 10394
  Synthetic

SEQ ID NO: 10396 - protein, 178 aa, Artificial Sequence
  Synthetic
READELVDRVKKVVEEDKRLSKELVDEIERVVDELEKVSRELVERVRDLVRRLLEVAAKGEPREELLDRAKKVLDKNREDDKRLNDEARKVLDDNRKKDKKSNDDTKRTLDKIRKDLEDRNAEDKVEKVLKRVEEESREASERNERVIERVERRVDEASKRNEDEIDKVRKEVERVAT

SEQ ID NO: 10397 - protein, 178 aa, Artificial Sequence; identical to SEQ ID NO: 10396
  Synthetic

SEQ ID NO: 10398 - protein, 178 aa, Artificial Sequence
  Synthetic
EEVKELVERVRRVVDDLRKKLEKIVEEVRDVVRKDEERSRKLVEDVKDLVRKILEVLRKGEPREELKERVDRELKKNREDDKRSNEDTERLLREIKERLDRLLEDARRLLKEIEDEARKDNLDDDLRRVLKEVDEEVRKVIEDVARVLEEVKRRSDRASRENEEVIKRVTEEVKRVVK

SEQ ID NO: 10399 - protein, 178 aa, Artificial Sequence; identical to SEQ ID NO: 10398
  Synthetic

SEQ ID NO: 10400 - protein, 184 aa, Artificial Sequence
  Synthetic
DRVEKLVEEVKRHVTEVLKTVEDLARRIRDHVRKVEDTSRELVKEIKRLVEEILDRVRKKKDKRELLKELLDRLKKAVKKIRDTNRELNKSNEKLVRDIRDTLRKLTDSNRRLLEDIDKKLEEAPEDVVRELRRVLRESNEKLKEVVDRLRKVLEESTKRVEDASRRVERVLEKVEEDVKREAT

SEQ ID NO: 10401 - protein, 184 aa, Artificial Sequence; identical to SEQ ID NO: 10400
  Synthetic

SEQ ID NO: 10402 - protein, 184 aa, Artificial Sequence
  Synthetic
SEVEELKERIREIVERIEETVRRLAKRVEDHVREVEKDSKRLADEIRDFVRRITDEVRKKKDDKDRLDKLKKDLDRLLEEIRRRNEELNKSNEDLLREIKERLDKLREELKETVKEIEKKLKDVEKRLVDKLRKVLEEVREEVERVVRELEEVLRRSTKRVEDASRELERVLKEVKETLEREVR

SEQ ID NO: 10403 - protein, 184 aa, Artificial Sequence; identical to SEQ ID NO: 10402
  Synthetic

SEQ ID NO: 10404 - protein, 184 aa, Artificial Sequence
  Synthetic
DRVEALVDEVKRHVTELLKTAERLADEVREHVDDVRKKSKELVDEIRRVVEKILDEVRKKKDDKDRLKKLKEDLKRLVEEIRRTNKELNESNKKLLDRIRETAKKMEESNRRLLEEIEKKLKDAPEEVVRELRRVLRESNEELKKVVTELEERLKDSNEEVKKASAEVRKVLEEVRADVDREVK

SEQ ID NO: 10405 - protein, 184 aa, Artificial Sequence; identical to SEQ ID NO: 10404
  Synthetic

SEQ ID NO: 10406 - protein, 178 aa, Artificial Sequence
  Synthetic
SLVEKLRRVLEEVRRTSEKVIRDVKEVNKRSEDKTREIVRRLEEVNKESKERLDRAGVPEKLKKDLTDLIRKSEKLLRENEKRNRDLIRESERLIEKNKRDNDRLIKEVEDVIERKKDKKELAEKLAREVKRLVDESKKNMDKSVEDSRRLVRESEENVRKSVEDSRRLVKRAVEETK

SEQ ID NO: 10407 - protein, 178 aa, Artificial Sequence; identical to SEQ ID NO: 10406
  Synthetic

SEQ ID NO: 10408 - protein, 183 aa, Artificial Sequence
  Synthetic
RVDEDLRRVLKEVKERNEEVVRRSKEETDRVEEDIERVIRDSERVSEEVKRRVDKAKKDVDEEEARKLEKEMKDIIDEDKELLDRLREALERLKKEDEDLIEESERKTKELEREVKKLEDEGISEELAKEVVKRVRELVDRSRRLMTESVRKVRELVEDIRRRVRESVEKLRRLVEEIERRIR

SEQ ID NO: 10409 - protein, 183 aa, Artificial Sequence; identical to SEQ ID NO: 10408
  Synthetic

SEQ ID NO: 10410 - protein, 184 aa, Artificial Sequence
  Synthetic
KEVEKLVKDVERMVEESLKENERLVKKSDELVKESEKRNKELAERSRRLVKEITDRLAEERTEEVEKRIRELLKRSHEEVRRLVETDEKLLRDSHKEARDLVRTDERLAKRVREEVDKLAKKISDEDVLRDLRRVVEEVTEKIKEVNRRSEEANKRSKDRIEEVNRRSEKVNEDVEREIERALR

SEQ ID NO: 10411 - protein, 184 aa, Artificial Sequence; identical to SEQ ID NO: 10410
  Synthetic

SEQ ID NO: 10412 - protein, 184 aa, Artificial Sequence
  Synthetic
DELEKAVERVKDIVRKSLELLKRLADRVRDIVREILDEVRRNVEEVRRIVKEIVEEVRRRKDEEVRRKVEEVLKRVRESNEELERRVREKLRKVEEEVKRIKERSDKLLRDVERELEDVRRRLDDEEALKRLERVVREVAEESDRANKELDRVVEEVKERVERVLRESNKVVKEVEDRVREETR

SEQ ID NO: 10413 - protein, 184 aa, Artificial Sequence; identical to SEQ ID NO: 10412
  Synthetic

SEQ ID NO: 10414 - protein, 177 aa, Artificial Sequence
  Synthetic
SVKETVEEEVRRVSDEDRRINRDVERVSEESNRRLDKVHKELEEVVKEVLKELDDTGLQRDLVERVKEILKRLLDEDREKVKKVKREDEELLKRLREFSKRVNDTLKELLDRLRRSTDEETARRVVEEARRIVAESKELVKEVVRRSDELVRDVEKHSRDVAKTVRKIVTDVARRTR

SEQ ID NO: 10415 - protein, 177 aa, Artificial Sequence; identical to SEQ ID NO: 10414
  Synthetic

SEQ ID NO: 10416 - protein, 181 aa, Artificial Sequence
  Synthetic
SAEETLEKVIRDVEEEDKKAHEDSRRVIETVKEEIDRVHKDSKRKIDEVKERIRREVRDEETMKKVEEELEKLLKEDRDIIKEIKERLDELLKDDKRISDESRKRLKELLDRLREVSRRENLEERVRRIVKEVREIVKRSKERSDEIVKEVKRIVKEALDLSREIVERVERIVREVVERAR

SEQ ID NO: 10417 - protein, 181 aa, Artificial Sequence; identical to SEQ ID NO: 10416
  Synthetic

SEQ ID NO: 10418 - protein, 181 aa, Artificial Sequence
  Synthetic
EADERLRKRLKEVNERDKKAHEDSKRAIDRVREEDKRVLDTVREEIKRVKDEIRRALRDEEMVKKVEEELDRLLRELERLSEKSDKDLRELLETDRRISEESHRRSRELIRRVEEVSREPELERLVREVVRENEELVTRSEELSRRIVEEVKRIVDESRKRAKEIVDEVRKRVKELVDTDK

SEQ ID NO: 10419 - protein, 181 aa, Artificial Sequence; identical to SEQ ID NO: 10418
  Synthetic

SEQ ID NO: 10420 - protein, 181 aa, Artificial Sequence
  Synthetic
DVREKLEKVLREVERRVEKASRESKETLDRVRKRLKDVSDESKRELERVKKRVDDADKRREELRRIVEEAEKKLRELLKRDKDSNDELEKRLRDLLEKDKESLKELEKRLRDLKRRADEIDDKKVIEELVEEVRRLVTEHERLSRELVDRVEKLVARHEELSKKLVTDAERIVKEVEERAK

SEQ ID NO: 10421 - protein, 181 aa, Artificial Sequence; identical to SEQ ID NO: 10420
  Synthetic

SEQ ID NO: 10422 - protein, 181 aa, Artificial Sequence
  Synthetic
SALERLREVLERVLRRVKKVTDDARRVNERVNRKVDRVSEDSERELRRVLKRVREASKDREELRKIVKKVEEDLKRLLEEDRRSNKELRERSKKTLDDLRRSDKKLEDDLKRLKEEAERVDDEEVLRELVERAKKLVDDHLELVERLVRESEKLVEDHLRRSKKIVEDVKRIVEDVERRVK

SEQ ID NO: 10423 - protein, 181 aa, Artificial Sequence; identical to SEQ ID NO: 10422
  Synthetic

SEQ ID NO: 10424 - protein, 181 aa, Artificial Sequence
  Synthetic
DEVDKARKEVDRVVKESRKLVEKNVREVEEVVKTVEKLVEDVIRRVEDVVREVKELVTRGDGREERLTRIKEELRDLLRRLKETIDKLKEELERSNEELKRRLDDLNRKLKELLEDLSKRVDEELLDRVRKVVEDVSRKSKKALDESHEVVKRVKDRADEVLDKVRRAVEEVERRIETEAR

SEQ ID NO: 10425 - protein, 181 aa, Artificial Sequence; identical to SEQ ID NO: 10424
  Synthetic

SEQ ID NO: 10426 - protein, 181 aa, Artificial Sequence
  Synthetic
DEVEKAVKEVERVVREVKELVDRNIDEVRKVVEDSKRLIDELVEDAKRVVKRVKELRDRGDGREEELRDIIRRLRKKLKELAERLEKLNRDLEKSNRELKKRIDELKRRLDELLKDLAKRVEEELLDRVRRVVEEVKKEADRLLEESHRVVREVSERSKRALEEVKRVVDEVTERIKKDKD

SEQ ID NO: 10427 - protein, 181 aa, Artificial Sequence; identical to SEQ ID NO: 10426
  Synthetic

SEQ ID NO: 10428 - protein, 175 aa, Artificial Sequence
  Synthetic
STKEKLDDVLRRVEEKAREVVEDNRRADRDVHRKARKVVEELRRVDEEVHETVKRVDAKEELRRELKKLLEDSNRLTKEVEDRIEKLLRDSNRSTKENEKRIRELEKEMRDLAREGGRRVDEVVDRLRRLVEEVLRHSKKNSRESDEMVRRVTEEVREVVKESKERVDDVLKRVE

SEQ ID NO: 10429 - protein, 175 aa, Artificial Sequence; identical to SEQ ID NO: 10428
  Synthetic

SEQ ID NO: 10430 - protein, 181 aa, Artificial Sequence
  Synthetic
KKVEEIMERLRRVAKEIKERVDRLVEKNRKSAKDLLDTIEDIVRKNRDLAEKIKDLARRRRDEKLKREVEEILKELHDRNRKLLEDVRKKLRENEEETEELKKRIEDILRRVADEIRKIEEDGVDKEKLRRVLREVEEVVRRVKKKLDDSVRELREIIRRAERELREVDEEVRKVVEDVKR

SEQ ID NO: 10431 - protein, 181 aa, Artificial Sequence; identical to SEQ ID NO: 10430
  Synthetic

SEQ ID NO: 10432 - protein, 180 aa, Artificial Sequence
  Synthetic
RVREELKKVEEEVREVVRRAKEKTRRVLEEMRKVVKDVDDESKRVVDEVKKVLEEVRARGLDTEELKEIEERIKRKLEEINERNRDLLRRVERLVREDERRIDEILTEIKRTVDEIRDLTEEEVVKKVVDDIRKLAKDMDDHSKEVVDRIREVARRIEELNRELVRDLKDEVRRVKEKAK

SEQ ID NO: 10433 - protein, 180 aa, Artificial Sequence; identical to SEQ ID NO: 10432
  Synthetic

SEQ ID NO: 10434 - protein, 180 aa, Artificial Sequence
  Synthetic
SVRETLKTVEEEVKRVIDRARKRDERVVREVERVLRDAMRKDEDVNRDVERVLRDVVRRGLDTEKLKRIKEEIDKLSTENRKRIEDLLREIRKLSEESDRRLKEVEKEIRERVEEIRRRTDKDVFKRVVEELRRLVKRVEELVTRTVEEIDRIAKEVTRHSEETVRRLKKLVKTVTDEAN

SEQ ID NO: 10435 - protein, 180 aa, Artificial Sequence; identical to SEQ ID NO: 10434
  Synthetic

SEQ ID NO: 10436 - protein, 185 aa, Artificial Sequence
  Synthetic
SSVREVVKEARDIAKENLERVKKTVKENRDLARKVAEDVKKSVEELRKLAEDVEEIARKATGDEDLERVLREVEERIEDLHRRSEEIAREVRKRSRESHERTKEITTDSRRRIEELLKKVKDEGVEEELEKELRTVVREVEEVLRRSEEDDRRVHKEAEDVIKKVEEDDKEVVDRVKKVIRDVRT

SEQ ID NO: 10437 - protein, 185 aa, Artificial Sequence; identical to SEQ ID NO: 10436
  Synthetic

SEQ ID NO: 10438 - protein, 185 aa, Artificial Sequence
  Synthetic
SEVEKIVKEAEDLVREVKRRVEDTVRKNRELADRVRKEVDKSVRELRELVKRVLDIAKDLTGDEELERVLRTVRERIKELHERSKKIIEDVRRKSEDSHRKTKKIADDVRRKLDKLRRDIERRGVSEELRRELERVIKKVEEVIRKAEEDDRTVHRELNKIIKDVEDKDRTVVEEVERVIEEAER

SEQ ID NO: 10439 - protein, 185 aa, Artificial Sequence; identical to SEQ ID NO: 10438
  Synthetic

SEQ ID NO: 10440 - protein, 185 aa, Artificial Sequence
  Synthetic
SEVDEVVERARRIAKENLDRVKKIVRENRELVEKVRKDVEDSVRTLKKLVDDVTEIARKLTGDEELKRVLDEARERIKRLHDESKKIAEEVRKRSRDSHETLRKITDDSRREIERLLRKVEEDGVSDDMRRKLETVVKEVEDILRRSREEIRTVNEEVEKVIEEAEREDERVVREVEEVIKRVEK

SEQ ID NO: 10441 - protein, 185 aa, Artificial Sequence; identical to SEQ ID NO: 10440
  Synthetic

SEQ ID NO: 10442 - protein, 185 aa, Artificial Sequence
  Synthetic
SSVEDVVRKMRKIVEDNKREVEKIVRENRKMAKDNEDLVKESVKDLKRLAKELEDLAKDDTGDETLERIAREVRKRVEELHRRSKEITDRTEERSRRSKRRLDEITKESRREIERLREEVEREGVSEDLERTLRTVVKEVKEVLDRSRDLVRRVNEEVKRVLDRSREEDERVVREVEEVIRRVET

SEQ ID NO: 10443 - protein, 185 aa, Artificial Sequence; identical to SEQ ID NO: 10442
  Synthetic

SEQ ID NO: 10444 - protein, 185 aa, Artificial Sequence
  Synthetic
REVDEIVDRLRRIAKENKDRVRELVERNRKLAEEVRRRVEESVKRLRDLVRTIEELARRETGDKRLEDIVRDLREKLRRLHETSKRILEELEERSRRSNDELREITERSKKRVDDLLEDLKRKGVEEDLERKIREVVREAEEVLRESKREMDTVNKEVREVIEDVRKRDEDVIREVEKVIREVEQ

SEQ ID NO: 10445 - protein, 185 aa, Artificial Sequence; identical to SEQ ID NO: 10444
  Synthetic

SEQ ID NO: 10446 - protein, 185 aa, Artificial Sequence
  Synthetic
SEVDEIVKEIREIARKNKEDVRRTVEDLRRLVKEVEKRVEDSVRTMRDLVRRLEETARRVTGDEELTKVIEDVRRKIEELHRRSKKILDEVREKIEELHRRTKKITEESRERLKKLEKDIRDRGVSEELERKLKTVIDEAEKVLRESEEDDRRVVEEVERVIKKVEEEDRKAVREVEKVLEDVRK

SEQ ID NO: 10447 - protein, 185 aa, Artificial Sequence; identical to SEQ ID NO: 10446
  Synthetic

SEQ ID NO: 10448 - protein, 181 aa, Artificial Sequence
  Synthetic
REVDELLKRIKEVADDIKRLSDENVKEIEKLAREVEKLVRDVVRENEEVAKEIEDLARRRKDEDVERRAEELLERVHRANEEIKKRIEELLRRVNERSKEIVRRIEDLLRRVAEEIKRAEEAGVDKKKLRDVLRELEKVVRDVAKEDEDANRRLKEVAERVKREIDEVDKKLKKVLDDVRK

SEQ ID NO: 10449 - protein, 181 aa, Artificial Sequence; identical to SEQ ID NO: 10448
  Synthetic

SEQ ID NO: 10450 - protein, 179 aa, Artificial Sequence
  Synthetic
REEEKLRKVLEDAKKVSKEVNEEDDRVNKEVEDVLREVKKEIDEVLKRATETVERVKRENKDSEELKKTIDDIRRKIKKEIDDVKREIDELLKDARRHSKEVKDEDKRINDEIREILRRRELPVDEIVKRIKELVDRSRKLSEENVRRLKKIVKRVKERVKELLDRIKEMAKEIEDRVR

SEQ ID NO: 10451 - protein, 179 aa, Artificial Sequence; identical to SEQ ID NO: 10450
  Synthetic

SEQ ID NO: 10452 - protein, 179 aa, Artificial Sequence
  Synthetic
DEEKKLKEVLDRATKVVKDVAEELDRVLEDVERVSRDVNRRDEKVNRDADRVLREVKDENKDSEKLKREIDEIKKDVERHSREVSEEDRRINKEIREKLRTVKEILEDLRRKIEETLRRKELPVEEIVRRIEEVAKTLREIVRRVLEELKEVVKESERLSRENVRRIEKLAEEIRRRVK

SEQ ID NO: 10453 - protein, 179 aa, Artificial Sequence; identical to SEQ ID NO: 10452
  Synthetic

SEQ ID NO: 10454 - protein, 179 aa, Artificial Sequence
  Synthetic
DEDEKLRKVLEELRRVVEEVKRRSDKALEDAERVLRRVKKEDRDANKKAEDELRRVIDENKESEELIREIERLLKEVREHSKEVEDRIDELLKRIEEHSRKVKKDIERLLEEIDREVKRKERPVDEILKRIEELMKEIRKLVKEDVDRIRDLVRRIDEESKENVKEIERVADEIRERIR

SEQ ID NO: 10455 - protein, 179 aa, Artificial Sequence; identical to SEQ ID NO: 10454
  Synthetic

SEQ ID NO: 10456 - protein, 180 aa, Artificial Sequence
  Synthetic
KEVEDVLREVEKVVEKIKRDVEKIVKDSKELAKRVEELVKESEDRSKEIVDRVEKLRREGTKDVERIIDRLLEDDKRLSDKTKEDLDRIAREDEKLLDELRRRIDEILKRLEELVKELRRAGAEEEKVEKVLRKVRDVVRRVKEKVEEVHRRSREMLKRVEDRDREAHERSRKVAEDVKR

SEQ ID NO: 10457 - protein, 180 aa, Artificial Sequence; identical to SEQ ID NO: 10456
  Synthetic

SEQ ID NO: 10458 - protein, 180 aa, Artificial Sequence
  Synthetic
SEVDEVLETIERIVREVKKLVKRSVEESERLVDEVEKLVEKSVREIKEIVDRIRDMKTKGGKDLEKLLDTMLEKVERLSRKTETEIEKIERDDRELSERTKRELEKLRETVKRLVDELRRAGAEREKVERVLEEARRVIEEVEREDDDAHRKSKEVLKRVLEKDRKALEDAKKVVEEVKR

SEQ ID NO: 10459 - protein, 180 aa, Artificial Sequence; identical to SEQ ID NO: 10458
  Synthetic

SEQ ID NO: 10460 - protein, 183 aa, Artificial Sequence
  Synthetic
KEVEDLERRNKELVERVDKLSRENVERNKKLAKELKEISEENVRRNRKLAEELKEVADRGDSRLEELIRRIEEESKDSDRKSEELLRRIKKESEESDRESKDTLEKILRTSEELLRDMERKGLDEDLRRRVKKSHDEVERELRRVDREDETSHEELRRVLEKVKREDRKSHEEVKRRLDEVRR

SEQ ID NO: 10461 - protein, 183 aa, Artificial Sequence; identical to SEQ ID NO: 10460
  Synthetic

SEQ ID NO: 10462 - protein, 183 aa, Artificial Sequence
  Synthetic
SEVDEIVKRNDDLAKEVKRLSTENVKRNKELADRVKRLSTENVKTNEKLAKDLERVVRRGVSRLKDLIRKIETDSRKSDEESERRLREIEKESRRSDEESRKRLKEILDRSKKLLEELERRNLDERLRRKVEKSHRDLREVLERVRREDERSHEEANKVLEDVKREDEKSHRDVKKRLDDVRR

SEQ ID NO: 10463 - protein, 183 aa, Artificial Sequence; identical to SEQ ID NO: 10462
  Synthetic

SEQ ID NO: 10464 - protein, 183 aa, Artificial Sequence
  Synthetic
SEVDRLLEKLEELVRKVRRDVEENVKKNDELAKEVERLSKRNVERNEELAKEIEDLARRGDSRLEDLIKEIEKESRDSDRRSKEELRRIKEESKRSDDESEKKLKEIEDEVRKLLKDADDRGLSEELKEKVKRVMEKVKRVLDRVREEDEKSHRKADRVLREVEKRDRDSHERLRKVLDDVRR

SEQ ID NO: 10465 - protein, 183 aa, Artificial Sequence; identical to SEQ ID NO: 10464
  Synthetic

SEQ ID NO: 10466 - protein, 183 aa, Artificial Sequence
  Synthetic
DEVREIVERNERLAREDKKIAEENVRRNEDLVRRLRELSRKNVEDNRRLAKELEEVAARGDSRLDELIEEIERRSEESDRESRKRLDEIREESERSDRRSKEESDKINEDSKKLLEEADRRGLSEELKKRVKDSHDKLREVSKRSEELDRKSHEDLKEVLKEVRERDDRSHEELRRVLEEVKR

SEQ ID NO: 10467 - protein, 183 aa, Artificial Sequence; identical to SEQ ID NO: 10466
  Synthetic

SEQ ID NO: 10468 - protein, 183 aa, Artificial Sequence
  Synthetic
DEVERILERIDELVKRVKELSRRNVERNKELVERVDRLVKDNVDRNRRLAEEVDRLKKEGDSRLKDLIREIERESRESDKRSEELLKRIEDESRESDRDSERKLKEIDDEVEELLKRARERGLEEELTKKVEKVVKDAKKTLEEVKREDEDSHKKANDVLRRVRELDKRSHDELKRVLDEVER

SEQ ID NO: 10469 - protein, 183 aa, Artificial Sequence; identical to SEQ ID NO: 10468
  Synthetic

SEQ ID NO: 10470 - protein, 183 aa, Artificial Sequence
  Synthetic
SEVEDVLKKLDDIAKEVTERVKRVLDRNEEIVDEVEKLVEEVVRRNKEIVKEVKRLKDEGLSRLDEALDRVKKESKKSHDTAKDVLDKVRRKDEESRREVEKRLRELEKKLKDLLDEVRKRGINGDLEREVRRVIREVEKVIDDVRREVERSIRKSEKDIREVEKRVEDVNREVEEAIRRVRT

SEQ ID NO: 10471 - protein, 183 aa, Artificial Sequence; identical to SEQ ID NO: 10470
  Synthetic

SEQ ID NO: 10472 - protein, 184 aa, Artificial Sequence
  Synthetic
REVEELVKKLKELAERSLTAVERIVEENERLLKRLEDESKRNVDDIERLARELLRRVEEEKTKEVKDTARELVERLKRHSERLIKEIRRLLEELNRKNRKLVEDSNRKTDEVRKEVEDLRQKIDDERVERILTKVIEDLERVDKAAHDILREVNERLREVMERVEKTNRTVNRRLEEVLKEIER

SEQ ID NO: 10473 - protein, 184 aa, Artificial Sequence; identical to SEQ ID NO: 10472
  Synthetic

SEQ ID NO: 10474 - protein, 185 aa, Artificial Sequence
  Synthetic
DEVEEIAREMREIVDRVLKLSEKTVRENRESVERLLRLSEETVRRIRDLVRRLEELARDDTGDKDLKKVLDEIRKRVEELLERSKRVSDENRERSERSLRESERIIKELKERVDELVERLERRGTSEEMKEKVERAVEEVKRVLDRVRETDKRVNEEVRKVNEEAERIDEKVVREAREVLKRVRD

SEQ ID NO: 10475 - protein, 185 aa, Artificial Sequence; identical to SEQ ID NO: 10474
  Synthetic

SEQ ID NO: 10476 - protein, 185 aa, Artificial Sequence
  Synthetic
RVAERLEDVLRELDRTLKDVARKLEEANRDNKRVLEEVAEILKRVLDDLRRVLDEVAKRLKDEEKLRELKKRAEELERDIERLLREAEKSSREDSKRSKKLLDELERRVRELKKKIKKLLDDKKNVEKVVDDIVKEVRELAERIKEVVTESVKHSKKNVDEMRKLVDDVVKKVKKLVEDVRREIK

SEQ ID NO: 10477 - protein, 185 aa, Artificial Sequence; identical to SEQ ID NO: 10476
  Synthetic

SEQ ID NO: 10478 - protein, 185 aa, Artificial Sequence
  Synthetic
SVAEKLRKVLEELRDVLRRVKEISRRSLERLKKVLKELADRLKELNDKLRKTLEELRKDVDDKDLLADITRKAKELSDRSRKLLEDAEKEVRDAAEKNRRLDTELEKAARDLEKKVRELLKDKKDVEELVEEIVKEIKKLAKEVAETVDKVAKENEKLAKEAKEKVEESERDVERLLEELKREAD

SEQ ID NO: 10479 - protein, 185 aa, Artificial Sequence; identical to SEQ ID NO: 10478
  Synthetic

SEQ ID NO: 10480 - protein, 175 aa, Artificial Sequence
  Synthetic
DEEKILEDVLRELKKVLDEVRKTNEDANKRLKDVDDKSHEILKRVEERLREVVKRVNVDSEKFKRIKKLVEDAKRELKEIVDDSNRKTKKVNEESRRDIRRLEELVRTVEEELRRRDVRVEDVVRRVRKVAEDVRRSSEETVKRIEDVVRRSEETVRELVKRVEDLVREMEEEAK

SEQ ID NO: 10481 - protein, 175 aa, Artificial Sequence; identical to SEQ ID NO: 10480
  Synthetic

SEQ ID NO: 10482 - protein, 175 aa, Artificial Sequence
  Synthetic
SDEEKLRKVERELEEADKESHEINRTVNEDLRRVDRESKEILDRVRKELEEVKDKINVDSDKMRKVEELVRRLEKELERIREESNRLTKKVNEESRRDLEESNKLTDEVREELKRREVRVEDLVRRVRKVAEDSRRSSEDTVRRVERVVRESKRLVDDLVRRARRVVEEIKRTAK

SEQ ID NO: 10483 - protein, 175 aa, Artificial Sequence; identical to SEQ ID NO: 10482
  Synthetic

SEQ ID NO: 10484 - protein, 175 aa, Artificial Sequence
  Synthetic
KEDEILKTVVDELRDALREVEERNRTVNEELRRADKESEDRLRKVVRELTEVMKRVNVDSRKMEEIKKLVKEVRERLKKILEESNKLTEDVNRESREDIERLRKLARDVEDELRRRTVPVEELVRRVREVVKRVRDSSRETVERVKRVVERSRRLVERLVRKVEEVVREVEERAR

SEQ ID NO: 10485 - protein, 175 aa, Artificial Sequence; identical to SEQ ID NO: 10484
  Synthetic

SEQ ID NO: 10486 - protein, 183 aa, Artificial Sequence
  Synthetic
SDVDRFLREVERLVERARKLSERDERETRKVVKEVRDSSRKSVEDSKRVVEKLEEEARRGGDDKETLKRRVETLLKEVEDMHRRDKEEIDRLLEEVKRNHERSKKEIEDLLDDVRRKLEEIRKKGVEKEKLDKVLEDLRRVVEEVKRRNDEVLKRLKEVVDEVTKRNRKALEDAKERLKKVTE

SEQ ID NO: 10487 - protein, 183 aa, Artificial Sequence; identical to SEQ ID NO: 10486
  Synthetic

SEQ ID NO: 10488 - protein, 183 aa, Artificial Sequence
  Synthetic
SEVDEVAKRVREIVERLRDLVRKVVEDNERIAREVKRSSDETLKEIRDIVRKAKEVADRGGDDEDRLREELERLLREVHKKSEDDRRRLEKLLRDVHEKNKEVKKELKRLLDEVRKEVERIKERGVDERKIDKVLKELEEVITDVRRTLDDVDRKLREVVKKVEEINRRANEELERVIREVRR

SEQ ID NO: 10489 - protein, 183 aa, Artificial Sequence; identical to SEQ ID NO: 10488
  Synthetic

SEQ ID NO: 10490 - protein, 183 aa, Artificial Sequence
  Synthetic
DDVERLLKKVEDIVRELRESSRKSVEEIKRIVKEVKRLVDEVVKENERIVEEAEDVMRRGGDDKDKLRRRLERLLEEVHRRNKDVKDRIRELLKEVHDRSKRDKEEIRKLLEELERDIREIKKKGVEREKLDEVLKRARDVLREVEKENDKANKELEEVAERVKKTLDDVDKKLEDVMRKVTK

SEQ ID NO: 10491 - protein, 183 aa, Artificial Sequence; identical to SEQ ID NO: 10490
  Synthetic

SEQ ID NO: 10492 - protein, 181 aa, Artificial Sequence
  Synthetic
KEEEIVERVREKIKRVLDEVREIDKRAHDELRRVLKEVEDIVRKVHEDLKRVLEEVRREVKGDKRIDDELREIEERSRRSVEDAKRLLKEIEKRSRDSEKRSEDVLREIEERITRLEDLLRRGLDVKTVVETVDKIAKEVRDLSRRSVEENRKLAREVREVVRKVVEDNRRLAREVRERVR

SEQ ID NO: 10493 - protein, 181 aa, Artificial Sequence; identical to SEQ ID NO: 10492
  Synthetic

SEQ ID NO: 10494 - protein, 181 aa, Artificial Sequence
  Synthetic
DEDEKVEKVTREVEKALDEVRKIDEEAHRRLKRVLDEVRRIDETVHRDLKRVLDEVRERVRGVRELEERLKRIEEESRESLRRSEELLKEIEDRSRESLERSKKLLRDVERTIDRLRELLKRGLDVETVVERLRRLVEDIRRKSRESVERNRELVKEAKDVSRKSVEENKKLVRDITREAT

SEQ ID NO: 10495 - protein, 181 aa, Artificial Sequence; identical to SEQ ID NO: 10494
  Synthetic

SEQ ID NO: 10496 - protein, 184 aa, Artificial Sequence
  Synthetic
SVDEIVERVERELKRVLDEVREIHDRARDELRRMHERSERIIRKVEEELERALKEVRDRGVPREVLKRIEEIVKRVKDKLRELLKRSKELVERIERENREVLRKIEETARKVEEELERLRREGVDDKVVREAVREVERVVTELLEESRRSVEKTERLVRRSEELIRKIVKEVKKVAREIREEVR

SEQ ID NO: 10497 - protein, 184 aa, Artificial Sequence; identical to SEQ ID NO: 10496
  Synthetic

SEQ ID NO: 10498 - protein, 184 aa, Artificial Sequence
  Synthetic
SVDEILRKVKEELDRVLEEVTEIHRKAKEELDRAHDTSERIHREVKRELDRVREEVERQGVPEEVLRRIEEIVRKLKEENDKVLDDSRKKVEKLKRENDRVLEEIKEIVDEVKKRLDELRERGIDEKVVKEVVDEVRKVVEEIRKKSKDSVDKTKRVVEESIRTSDEVVKKTEKLVREIEKEVR

SEQ ID NO: 10499 - protein, 184 aa, Artificial Sequence; identical to SEQ ID NO: 10498
  Synthetic

SEQ ID NO: 10500 - protein, 184 aa, Artificial Sequence
  Synthetic
SVEEIVRKVTKELRDAHRRTEKILRDVDKELKEVLDRVRKIHRDVKERLEKVLDDVRKRGVPKEVLDEIRKLVEDVKRENDKLLKEIKKIVEDLHRKNRDLKRKSEELVRRVEEELRELRRRGVDEEVVTRAVERVKRAVKKSEDDVRRIVDENRKLVKEIEDRSRESVKKTEELIERIRKRVE

SEQ ID NO: 10501 - protein, 184 aa, Artificial Sequence; identical to SEQ ID NO: 10500
  Synthetic

SEQ ID NO: 10502 - protein, 183 aa, Artificial Sequence
  Synthetic
NVEDILRKAEEEVRRMLAENERIVEEAKERAKRMLDESRKRLEEVLRRAREVLEEVDKRKKDERLKETIKEVEDRVEKLLREVEKHSKDVKREVEELLRRNKKKLDELRDEVRKLLEEVKRSTSEDVVRAVVEELRRLLEESIRHVRKVVREIEKLLREDIELVKEVVRRIERLLRELDKEVR

SEQ ID NO: 10503 - protein, 183 aa, Artificial Sequence; identical to SEQ ID NO: 10502
  Synthetic

SEQ ID NO: 10504 - protein, 181 aa, Artificial Sequence
  Synthetic
RKVDELRKEVRRVVKESRDKAKRVVEEVKRLVEKSRRDVKRVVDENRRVVEEMRRKVKDRRTEDVKREIRETLEDLERKNRKLLEDSEREARDLKRRIDELLERSREEVKRLKDEIKELRDRGLGDKEVKDAEDELDKAHEDTKKILDEVKKELDDAHDETRRILEEVNKESETVLEEVER

SEQ ID NO: 10505 - protein, 181 aa, Artificial Sequence; identical to SEQ ID NO: 10504
  Synthetic

SEQ ID NO: 10506 - protein, 181 aa, Artificial Sequence
  Synthetic
SLARRVEEEVKRVVDESEEKVRRVVKVNKEMVDDVRRLVKEVVDENEEVVKEVRDTVTKRKTEEVKERIERLIREVRKKNEEILRRIERLVEDVERKNREILRDSERTVRELEKRIKELEDNGLGREDVRRVEEELKKAHDDTKKILDDVDERSREALDEVRKELDRVNKRSDKALKDVRK

SEQ ID NO: 10507 - protein, 181 aa, Artificial Sequence; identical to SEQ ID NO: 10506
  Synthetic

SEQ ID NO: 10508 - protein, 181 aa, Artificial Sequence
  Synthetic
SKAEELVKRVKEVVDKVRKLVEEIEEKVKRVVEKSRRDVTEVVKKNREVVKRVKDTVRRRKTEEVKTRIKKEVDDVRKENEDLLRESKKRLDEVKDEIRRVEEEVEELVRRLEKRIDELRKNGLGEEIVRRAREELERVLDEAKRILEKVTRELDEAHKETEKILRDVNRESDKALEEVER

SEQ ID NO: 10509 - protein, 181 aa, Artificial Sequence; identical to SEQ ID NO: 10508
  Synthetic

SEQ ID NO: 10510 - protein, 178 aa, Artificial Sequence
  Synthetic
SEDEKLDKVRKRLERAHEESKKISDKSEKDTRDAHRKTEEILDRVRKEMEEVLKRVRDRGISEELLDRADKVVEDVRRTLKKVLDDSRELLKKLEKLNRDVEDRSRRLLERVKEKLDRKEEPAEEIVKDVERVVKESEDLVRRIVEINERIVRESERLVKEVKDRVRDMVRRLAEEAR

SEQ ID NO: 10511 - protein, 178 aa, Artificial Sequence; identical to SEQ ID NO: 10510
  Synthetic

SEQ ID NO: 10512 - protein, 182 aa, Artificial Sequence
  Synthetic
SVEDIIRKVEKEVEEVVEKVERILDTVRRRSEKVLRENKEILEEVKRRADKVLRDVERNSKDKDLERVLEEVKRRVEELLDRNRKVLEEIEKRNRDLLREVEESIRRLKKEVDDLSEEVRNKPEEVAKRLEDRVREIVRTLEDLVREIVRRSEESVRRSRESAKRVVDTVKRIVDELEKRVR

SEQ ID NO: 10513 - protein, 182 aa, Artificial Sequence; identical to SEQ ID NO: 10512
  Synthetic

SEQ ID NO: 10514 - protein, 182 aa, Artificial Sequence
  Synthetic
DVEEIIRRVSDKARKVLDRNRKILEDVKRRSEEVLEENKRIVDEVDEIIDEVLKRVKKRSKDERLEKLLEDIRREVRRLKEENRKVLEEIKRTNEKLLEENDRKLKRIEEEVRELEERVRDKPREVVDRAVKRVEELVKRSERSADEVRKRSTESVKESKRSAKKVVEDVRRLVEELERRVR

SEQ ID NO: 10515 - protein, 182 aa, Artificial Sequence; identical to SEQ ID NO: 10514
  Synthetic

SEQ ID NO: 10516 - protein, 180 aa, Artificial Sequence
  Synthetic
SEEDIIREAERIAREALKRARKIAEDARRISEKALEDARRIAKEAHDISKKALEDAARKRRREDVERALEDVERKDRKLLRELEEALKRVARESEESLKELKRLLEKVEEDIRRLADAARRGLDAKRAAEEAKRLAEEAEEAAKRVADRNRKLAKEAADLAREVAKRSEELAREAAKKAQ

SEQ ID NO: 10517 - protein, 180 aa, Artificial Sequence; identical to SEQ ID NO: 10516
  Synthetic

SEQ ID NO: 10518 - protein, 180 aa, Artificial Sequence
  Synthetic
REDEKIEEVKRRAEEVLKESKKIIEDVLKKSEEVIKEVREILEKAHRISAKVLDEVRKTRDDKSVEDILREVEKRDKDLERELERVIEEVKRRSDTSVERVKRENDRSKREIEKLDDLVKRGLDVDEVVERVERIVTKNLRLAERVVEENEKLVEDLRRLVADVVRTSKKLVDDVRERVR

SEQ ID NO: 10519 - protein, 180 aa, Artificial Sequence; identical to SEQ ID NO: 10518
  Synthetic

SEQ ID NO: 10520 - protein, 180 aa, Artificial Sequence
  Synthetic
SEDEKVDEATKEAERVLREVRKIIKRAHDRSRDAEREVKRTLDEVRRETKRVLEDVDRTRRDETIRKLLEEVERRSRKSAEDLKRVLERLRREDEKLVKDLEDALRELKERIDRLRDLLKRGLDVDEVVRRVKEIVRRLEELAKEIERRSDEIVEEIRRLVKKVVDENRKIVKKAEEDAR

SEQ ID NO: 10521 - protein, 180 aa, Artificial Sequence; identical to SEQ ID NO: 10520
  Synthetic

SEQ ID NO: 10522 - protein, 180 aa, Artificial Sequence
  Synthetic
DEDEIIDEAKKRADEVLKRSEDILRRAREEVEKVLEEVRKIIEDVHRRSRKVLEDVRRKAKREDVEKAIEDVEREDKRLVEELKKVLEEIRRTIERLAEELKRVNDESRDRIRKLEELVKRGLDVETVVRRVDEIVKRNEELARRLVEEAKKIVDDLRRLAEEIVKRSEDLVEKLKEDAR

SEQ ID NO: 10523 - protein, 180 aa, Artificial Sequence; identical to SEQ ID NO: 10522
  Synthetic

SEQ ID NO: 10524 - protein, 177 aa, Artificial Sequence
  Synthetic
SIEDVLRDVARKLRTVVDEARKILDEVDKATEKVLREAERVIREVAKRDKKVVDEVRKGGLPEDVVRRIEKLSEDNAERLTRLLKRVEELVREINKRNRDIAREIEELVRKVEEELERKKVAEDLLKLVEDVVRRIRKLAEDVKRENDKLVERIREVAEDVLRHSEETVEEARKAAE

SEQ ID NO: 10525 - protein, 177 aa, Artificial Sequence; identical to SEQ ID NO: 10524
  Synthetic

SEQ ID NO: 10526 - protein, 177 aa, Artificial Sequence
  Synthetic
SSEEALKEVERRLEDVRREVKRVAEEIKKKDDKVNDDAREKLERVNRETKRVLEELAREGLPEEVVKELKELVDKINTDNRRIEKRIKELSDENKRDIDRLEKRAEELLARIKEELEKRDVVEELKDKVRRLLEELKRLLEELDKHSARTIKEIRDLIETLRRINEKVIEDMKRRRD

SEQ ID NO: 10527 - protein, 177 aa, Artificial Sequence; identical to SEQ ID NO: 10526
  Synthetic

SEQ ID NO: 10528 - protein, 184 aa, Artificial Sequence
  Synthetic
SELDEAKRLVDEVVRRLEELLREDKKLVAEVEREVRELLERNARLLKEVADRIRRLKEEGGDNREELTRRLEKLVRDVEEHSKEVKKRIERLIREVEKHTDEVLERVKKLVEDVKRELEKLRNEDEKVVREIERLLRELEKALEDVERELRRSKDRLRKLAEEVKKVLDDSRRELERLREELRT

SEQ ID NO: 10529 - protein, 184 aa, Artificial Sequence; identical to SEQ ID NO: 10528
  Synthetic

SEQ ID NO: 10530 - protein, 179 aa, Artificial Sequence
  Synthetic
KDIEDAVRDVRRKVKELIENSERVVRTVEKLVRELIDHSRKVVREVEKLAKELIELKRRGDIREEDLKRVKKRVRDLNERNKEEVEKLKRTVKKLNDDDKRKVETLKEDVDREKKRLRERGVDEEVLKEVDRVLREAEKRSKEINEESKRVLDKAERDSRRIDRKSEEVVKRAEEEVRT

SEQ ID NO: 10531 - protein, 179 aa, Artificial Sequence; identical to SEQ ID NO: 10530
  Synthetic

SEQ ID NO: 10532 - protein, 179 aa, Artificial Sequence
  Synthetic
EEIERVLRRVTERLKELERHSEEVLREVERLVKEDEDLAREVVKRVEELIRTLRELKKRGDAREKVLKEVKETVKKLLDELEEHTRRVKEKVERLNRDNERVVRELRKEVEELLDELRKRGVDRRVLEEVREVVDRAEKKIKELDDRSREVLKEVEKRSRDIIREIEEKLKDVEERVKD

SEQ ID NO: 10533 - protein, 179 aa, Artificial Sequence; identical to SEQ ID NO: 10532
  Synthetic

SEQ ID NO: 10534 - protein, 179 aa, Artificial Sequence
  Synthetic
SKAEEVAKRVEDLAREDIKLAERAAREVERLARENIKLAREVAKRVEELARRLIEAARRGDAREEVAKRAADTVRKLLEELRRENKKSAERAKELAERARKHTEEALREVKKLLEDARREGADEKALKDAEDAARKAAEDSERAIERAERAAKDALKKSEDAAEEAKRAADKALEDAAR

SEQ ID NO: 10535 - protein, 179 aa, Artificial Sequence; identical to SEQ ID NO: 10534
  Synthetic

SEQ ID NO: 10536 - protein, 182 aa, Artificial Sequence
  Synthetic
DEVRDLVRRVRELSEELIRRVRTLLREVEELSRRLIEESERLLREVRKIVEELIRRVERREPEEVLRELIDRARRKLEKLAEDVKELNKRHEDRLRELEKRIKDLNKKHKDALDEIKKRVREAGVEERVVKEAEEVVERANRESEKLLEDVKRVVEEANKTSEDILRAVEEIVRRVLEELKK

SEQ ID NO: 10537 - protein, 182 aa, Artificial Sequence; identical to SEQ ID NO: 10536
  Synthetic

SEQ ID NO: 10538 - protein, 182 aa, Artificial Sequence
  Synthetic
SSKEVLERVAEKLKEVNERLKDVLRRVAEKLKRANEENKKVLERVRDILREVLRRLREKVTDKDKIRELETRIKKLLDDLERSSKDDSRRSKDLLRKLEELVRDLSKRSKELLKELEDLVRRGDGSVEEAERVVEKSVEEARRLAERVKEEVDRSVKHSEDNVREMRRLVEEIVKRVEEAAK

SEQ ID NO: 10539 - protein, 182 aa, Artificial Sequence; identical to SEQ ID NO: 10538
  Synthetic

SEQ ID NO: 10540 - protein, 182 aa, Artificial Sequence
  Synthetic
REKEVLDRVEEILRDANRRNEKVLREVAEIIRTVIEDNKRVLKEVADELRRVLEELRDKVKDKDRIKKLEEEIRKLLDELRRSSDKVTKESEELLRRLEESSRRDSEKSKRLLDRLEELVRRGDGRVEEMEDVVRRSLDHSRRNVEEAKKAVTKVVEDNKDNVRRIKEVVARVVEKAREEAR

SEQ ID NO: 10541 - protein, 182 aa, Artificial Sequence; identical to SEQ ID NO: 10540
  Synthetic

SEQ ID NO: 10542 - protein, 181 aa, Artificial Sequence
  Synthetic
SEVEEVLRRSRESAKKSKEHSRELLEKVKRIIDDVKRLVREVLKRSRDSIKRVEDLTRRGDIDEDTVRDVVRRNKRLLDELRRAVEDAVRKIDEELKRNERDVERVVRENEELLKDLLRRRDTEKVKEAVKESRDLLRKVEETNRRVNDEVRKLLEDIRRDVERAVEESERLLEDIVRKVK

SEQ ID NO: 10543 - protein, 181 aa, Artificial Sequence; identical to SEQ ID NO: 10542
  Synthetic

SEQ ID NO: 10544 - protein, 175 aa, Artificial Sequence
  Synthetic
SDVERVLTEIRKLVEDIKRDVERVVDESRKLVEEAERDVERVITEVEKLVERIKREVRDDDLRRLAEEVAERVKRIVDKNRENVRKSAEDNKELIKENRRHAKEVEDRVREALERGGERARELLKRVRELIKEHNRLNRESLKTSRKNIEDHHEDNKRSLEEARRIIEEVREAAR

SEQ ID NO: 10545 - protein, 175 aa, Artificial Sequence; identical to SEQ ID NO: 10544
  Synthetic

SEQ ID NO: 10546 - protein, 180 aa, Artificial Sequence
  Synthetic
KELEDVEKEVEEVAKRVEDSIRRNREVVEKVKDEVRRLLDRNDELVDRVAKEITEAIKKGKDDREVEKRVTEVKKHSEDLLRDVERLVEEVKRHSREVTKRNRDLVTDVRRKLEEVVRRRDEEKVKKVLEDVRRRLEELIKRSEDSAREVEKRLEDLRREVEESLERVERTLEDLVRRVK

SEQ ID NO: 10547 - protein, 180 aa, Artificial Sequence; identical to SEQ ID NO: 10546
  Synthetic

SEQ ID NO: 10548 - protein, 186 aa, Artificial Sequence
  Synthetic
SELERLEERVRRIEEEVKRLLEEHREVSDRVAKENRRSNEESKREVRRIEEEVKDLSRKGGDDRRRILEEVKRLVRELEKLLEEDITKSRKSVEDVRKHAEELLRTVRKLVRDLEKLLKEVLDRMGNSEEVKKVVEDVKRRLDDLIRKAEKVVRDSERELKKLVDHSKEVVDRVRERLKELIEEAR

SEQ ID NO: 10549 - protein, 186 aa, Artificial Sequence; identical to SEQ ID NO: 10548
  Synthetic

SEQ ID NO: 10550 - protein, 186 aa, Artificial Sequence
  Synthetic
SEVEDLERRVKRILEESDELVKRHEEKSRKIVKDLEDLLRRNEDTVEKILRELEKRIRDGGDDKETLLRTVRERVKDLERHSKEVRDRVRELLERLDRDAKRVEEEDDRLVDELEKDLRRVLEEMGNSERVTRVVEKVRRLLEESKRRSKEVVKRSKDLLKEAEDRADESVRELRRKLKELEEKAE

SEQ ID NO: 10551 - protein, 186 aa, Artificial Sequence; identical to SEQ ID NO: 10550
  Synthetic

SEQ ID NO: 10552 - protein, 180 aa, Artificial Sequence
  Synthetic
SELEDIRRLLEKLDREVKELLKRSRDLAKEMEERVRKLVKESEDELRKLAEKVDRIKKNGGSEEMVEKLIREAEKLVEDSRKKSKDLIDELRELVRKSRRDSERLIKRARDLVREIAKRVTEDEAREVLKDVRRKVEELRKELTKVDKEIEEIVRELEKRLREVNERVRTIVDELAKRLK

SEQ ID NO: 10553 - protein, 180 aa, Artificial Sequence; identical to SEQ ID NO: 10552
  Synthetic

SEQ ID NO: 10554 - protein, 176 aa, Artificial Sequence
  Synthetic
SMLEELDKEARELLKEVRRLVEDNDRLLEELLRRARELLERNDRISEKVADEVRKIDDEKRVRELADESRKISREILEEVRRLVKELKDDSKRILDEVRKRVTDLDERVRRLLAERPTERMREVAKKVKDILKRAEEEVRESLERVRRELERVIRELEDSLRRNDKTLRDLIEERR

SEQ ID NO: 10555 - protein, 176 aa, Artificial Sequence; identical to SEQ ID NO: 10554
  Synthetic

SEQ ID NO: 10556 - protein, 176 aa, Artificial Sequence
  Synthetic
SDLERLDELLKRVLEKARKLVKENDEHSEEVRKTVEKVVRDNDKLAEDLADKVEKIRDEDTVRKLAEDLKRISEKLLREVEELVRRNDELSKKILDDVRKLVERLIREAEDLLRKKDEERVKEVLDRVDEILKRVIKAAEESLKRSHEINRRLIKAAEDSLRRVKKILDELEERVR

SEQ ID NO: 10557 - protein, 176 aa, Artificial Sequence; identical to SEQ ID NO: 10556
  Synthetic

SEQ ID NO: 10558 - protein, 176 aa, Artificial Sequence
  Synthetic
STLDKLRELLRRVEETVREVLERNDEHSKEVKRRVDKLLRENDEHSKELADLVRKIKDEDTVKKLVEENKRRSEELLKTVEELVRRNDELSKKLEEDVRRLVRELEERAKRALDRRPTREMEKVLTDARRSLRRLEERVRESLERSHRINRKLRKDVRESLERSKRILDKLREEVR

SEQ ID NO: 10559 - protein, 176 aa, Artificial Sequence; identical to SEQ ID NO: 10558
  Synthetic

SEQ ID NO: 10560 - protein, 176 aa, Artificial Sequence
  Synthetic
SVLEELRKLVEKVLREVDKLLKDNNRHSEEVEKTVKRLLDENDRLLEELADRVEKIKDEDTVRKLVKELDDRSKDILREVKKLLKENDDLSKRLLDEVKKLVDRLEERVRDALRKDDKEEAKKVLTEVRRTLEELERRVRKSLKDSHDINRKLEKEVRDSLKRVKDRLDELIKRVR

SEQ ID NO: 10561 - protein, 176 aa, Artificial Sequence; identical to SEQ ID NO: 10560
  Synthetic

SEQ ID NO: 10562 - protein, 177 aa, Artificial Sequence
  Synthetic
RKAEEVLKRAKKIVDEVDKKNRESLERTRKIVEDVNEENREVLDRLRRRAEELKKEVDDERVKRMLDEILKEVKKRIEEVVRRNEAVIEESRRLVEELSERNRELVKRLEEVVRREDSDDVVRRIEEVIEKARRENDESVRRDEKLMKEVKDENKKTVDDIRRLLKDIEDKVREAKR

SEQ ID NO: 10563 - protein, 177 aa, Artificial Sequence; identical to SEQ ID NO: 10562
  Synthetic

SEQ ID NO: 10564 - protein, 177 aa, Artificial Sequence
  Synthetic
SKLEEVVKRLEEIVRRVKRADEESLKRTRKIVEEVNRDNRRSLKESRDRVDELKKRVDDDDVVRRLDRLIEESEKLVRDVERDNKRIIEESEELVRRSAEMNRKTLEEVKDLVRKSDTDEVVKRIEEVAKRNEELNRETVKRDEDLVREAKRRNEETVERDKRLVEKITKEVDETKK

SEQ ID NO: 10565 - protein, 177 aa, Artificial Sequence; identical to SEQ ID NO: 10564
  Synthetic

SEQ ID NO: 10566 - protein, 176 aa, Artificial Sequence
  Synthetic
SLIETIRDLAKKLKEESDKSVETDKRLVEELRRRSKKTVDDIDELVKRLERMVEDDKRKEALKKKLEDLIRTIETILEKSRRDLKELIDRSRRLLEESRRLVEEVERRVRELLKDKDTEDAKRVLEELKRIIEDLLRKNKKSLDDTEREVRRLIKENETVVRKLEEIVKRLEEKIR

SEQ ID NO: 10567 - protein, 176 aa, Artificial Sequence; identical to SEQ ID NO: 10566
  Synthetic

SEQ ID NO: 10568 - protein, 176 aa, Artificial Sequence
  Synthetic
SLLEEIAELVERLRRESKESVKRDEELVDELKKRSEETVKEDKRLAEELDRLAKKIPDKDTLKEKADRVREESKRLVKESRDLLEEVRRRSEDLIRRSRKLVTDVIREVERLLAERPVEEMKKVLDDLRREIKKLEEENERSLERTRDIVRKLDRTNEESARESEKIIREVVKEVK

SEQ ID NO: 10569 - protein, 176 aa, Artificial Sequence; identical to SEQ ID NO: 10568
  Synthetic

SEQ ID NO: 10570 - protein, 176 aa, Artificial Sequence
  Synthetic
SLLERIKEEVEKLRKESEESVETDERLVEELKKEVKDLVEKDRKLAEDLKDEVDKDKRTEALDKRLKEVIRESEEILKRLREKLKELIRRSEKLLEDSRRLLDKLRREVEELLKERDEERAKEVLRDLRRTVKELTDENEKSLERTRREVEKLIRELEESLRESRRRVKRLLEKVK

SEQ ID NO: 10571 - protein, 176 aa, Artificial Sequence; identical to SEQ ID NO: 10570
  Synthetic

SEQ ID NO: 10572 - protein, 176 aa, Artificial Sequence
  Synthetic
SLLEEIERRVEELEDRSRKSVERDKELAKEVDDRNEESVRTDEELAKRLADLVRKRDRDEELRKKLEEVIRESERLLEELHRENERVIRESKRLIEESKRLLEKLDRDVARLLEERPTERMEEVLKRLKEIVKELEERNRESLERTRRILEEVDRKNEESLKRSREIVRELDERVR

SEQ ID NO: 10573 - protein, 176 aa, Artificial Sequence; identical to SEQ ID NO: 10572
  Synthetic

SEQ ID NO: 10574 - protein, 176 aa, Artificial Sequence
  Synthetic
SLVEEIERRVEKLAEEVKRLVERDRKEVEKLEKESRDTVREIEELADRLRDAVEKERDEDSLRKKLEELIRTIEEILKESRRLLEELIRTSTEILKRLKEKLEELIRRVEELLKRNPDDEMRKVLTRLREEVRRLLDELRRSLEDTKRTVEDLERKNKTVVDELRKTVAELERRAR

SEQ ID NO: 10575 - protein, 176 aa, Artificial Sequence; identical to SEQ ID NO: 10574
  Synthetic

SEQ ID NO: 10576 - protein, 188 aa, Artificial Sequence
  Synthetic
SIDEVLKRIREISDDAKRKIKEVVEEIKKNADRLRREIERVLDEIRKVIRELLERIKRVEAPEEKVREILRRVERILEEVEKEIDRIRKRVEELTKRHVDEAEKLVKHNEEVLRDVERRIKELKDRGGVDEDLERLLREVERRTRRHEEELERLLRHNNKVSKEVREELKRLLDRVREMLEDVDRKLK

SEQ ID NO: 10577 - protein, 188 aa, Artificial Sequence; identical to SEQ ID NO: 10576
  Synthetic

SEQ ID NO: 10578 - protein, 188 aa, Artificial Sequence
  Synthetic
SVEEVRKEVKRISDEAREEIERVLERIKENAKRLIEDIRRVLEEIEEIIRRLEDEIRRVELPEERVRELLERVRDILRRVAEEIEKIEEEVKELTKRHEDEIRRLLKENKDVLDEIEERADDLRKKGGVDEDLEELLRRLERISRESRKRLEELLKHNNKESEEVRKRLKELLDDVRRVVEEVRRKLK

SEQ ID NO: 10579 - protein, 188 aa, Artificial Sequence; identical to SEQ ID NO: 10578
  Synthetic

SEQ ID NO: 10580 - protein, 188 aa, Artificial Sequence
  Synthetic
SIDEVLEELKRISTEAVERIRRVAERNRKSVEEVRKRIEEVAKRIREIATRLLERIRRVELPEKDVERLLREVEEEVRRVEDTIERLLEENEEIMRDSVRKIEKLVEDNRRVLEELTRRIERLKDNGGIDEELKKLLDELEKISRDSDERLKESTKKVRDVNRESDKKLKELLKRVEDVLEKVDRELK

SEQ ID NO: 10581 - protein, 188 aa, Artificial Sequence; identical to SEQ ID NO: 10580
  Synthetic

SEQ ID NO: 10582 - protein, 188 aa, Artificial Sequence
  Synthetic
SVDEVLERIRESAETILEEIRRVLERNKRSAETILEEIRDVARKIEKRIRDVLKKIEDVELPEEKVRELLEELREILERVKKAIEDLLRRNEEVMRDSKRKIEKLLKDNKDIMERVTREIKRLKDEGGVDEELRKLLEEVKKINDDSRRKLEKSTRDVKKVNDDSRRELERLLRKVEEVIRRVDEELR

SEQ ID NO: 10583 - protein, 188 aa, Artificial Sequence; identical to SEQ ID NO: 10582
  Synthetic

SEQ ID NO: 10584 - protein, 184 aa, Artificial Sequence
  Synthetic
KLEELVEEVEKVVREVKKELEDVVRTVREVVKRSKDDLREVVKEVERINRELEERLRRLATDERVEKTIRELIKRSRDSLRRAKDEVKKNLDENERLLREVEKRVEKLMRELEELLRRVREVVERNRDLTELLERVKTLIKEIRDRLRRLLEEVKRLVEESKKDLKRLLDENKRLVDEATKTAK

SEQ ID NO: 10585 - protein, 184 aa, Artificial Sequence; identical to SEQ ID NO: 10584
  Synthetic

SEQ ID NO: 10586 - protein, 184 aa, Artificial Sequence
  Synthetic
SLEELLKEVEKVIRDVKRELEKVVRDIEENVRRSAKRLREAEEEVERINRRLEEELKKKTTREEIKELVRKLIEDSRRSLEKARRDIAENEKRNKESLDRAKRTVEKLLEDLERLLREVEKVARNNRDLTELLKRVRDLIRRIRETLEKLLKENHDLSKRSKEDVERLLKENADLVKELTDRAE

SEQ ID NO: 10587 - protein, 184 aa, Artificial Sequence; identical to SEQ ID NO: 10586
  Synthetic

SEQ ID NO: 10588 - protein, 184 aa, Artificial Sequence
  Synthetic
SLEDLLREVKRVIEEVKRELEEVVRRVKEIVERSVRDLRRVVDEVRRINTELEERLRRLTTEDRVRDKAEKLIRESEESLRRAEKRVRENIRENERLLEKVKRTVEKLLRDLEELLKRVKEVADRNRDLTELLRRVEELIKEIRKELKRLLDEVKDLVDKSKENAKKLLEDNKRLVEKIARDAT

SEQ ID NO: 10589 - protein, 184 aa, Artificial Sequence; identical to SEQ ID NO: 10588
  Synthetic

SEQ ID NO: 10590 - protein, 184 aa, Artificial Sequence
  Synthetic
KLEELVREVEKVVDDIRKELEEVVRRVEEVVRRSKRTLEDVVRRVKKINDDLEKELRERSKDEEVRRKVEELIRESKKSLDEVRRNAERNAEENRRLLREVEETVKRLLEELEKLLDKVRKVVANNRDLTELLEDVKRVLDEIRETLERLLRKVEELVERSKRNAEELLKRNEDLAKKVRDDAK

SEQ ID NO: 10591 - protein, 184 aa, Artificial Sequence; identical to SEQ ID NO: 10590
  Synthetic

SEQ ID NO: 10592 - protein, 178 aa, Artificial Sequence
  Synthetic
DVEDVLRKIEEIIRRVLEEIKTVLDEIRKNNEKLKEDVDRVLAEIEKDSEDLKRKIKDIEDLIRELDESTDRVRKLAKRIKEKSEKSLRDAERLVKRLEEELKRILEEVEDLVRKKKESGELAETILRRVEELVEEIRRRLKEILDRDHELSKRLKEELKKILDDNHKLSRDAAERAR

SEQ ID NO: 10593 - protein, 178 aa, Artificial Sequence; identical to SEQ ID NO: 10592
  Synthetic

SEQ ID NO: 10594 - protein, 178 aa, Artificial Sequence
  Synthetic
SVEDVLREIKETSDDAARKADEVLKEIEKNNRRLKKEIDRVHEHTKEDSRRLKEEIKDIEELIRELDKSTDKDRKLVEKAKRDSEESLRDVERLAREVKEKLKRSTDDVRRLVEEKKESGDLMREMLERNRKLIEDLKRELEDILRRDHRLSKELLARLKESNEENHRLSKEIRERRK

SEQ ID NO: 10595 - protein, 178 aa, Artificial Sequence; identical to SEQ ID NO: 10594
  Synthetic

SEQ ID NO: 10596 - protein, 178 aa, Artificial Sequence
  Synthetic
RVEDVLRKVEEIIRRLKEEIDRVLEKIRETSERAVKDIRDVLRRIREDSKRLKEDIKDAKDAIRTLDRSTEEVEKLVKEAEKELKRSSDEVEKLARDLKRKLKEILDRARRLVREKRESGEDAERIVEEVRKLVEEIRKELEDILRKNEKLIEDLKRELKKILEENHRLSREIRERRR

SEQ ID NO: 10597 - protein, 178 aa, Artificial Sequence; identical to SEQ ID NO: 10596
  Synthetic

SEQ ID NO: 10598 - protein, 178 aa, Artificial Sequence
  Synthetic
SAEDVLREITKTSERAREDIKRVLDEIKRTSDEAVKTVTDIHEHTRKTSEDLKRKIKDIRELIRRLEESTDKDRRLVEEVKRRLEDSSRRAEELARRAEKRLKESTEKVKDLVDKKKEAGEVLRKILEENRELIERLKKELKELLDRNRKLIEDLLREAEKSNEDNKELIKKAEEDAR

SEQ ID NO: 10599 - protein, 178 aa, Artificial Sequence; identical to SEQ ID NO: 10598
  Synthetic

SEQ ID NO: 10600 - protein, 177 aa, Artificial Sequence
  Synthetic
SVEKVLEDITRELRRADEESKRALDHSAEVLKDLERRVKEVLDESREIIKELERRLRELKEVKDVLRRLEEENKELVRDIRRLLEEAIKENTELSKRSRETLDKIEKDVKKIVDDGVSDEEAKRVLDEVEKLVRELKKRNDELNEKTERLVRDLRRRLKDSLDKSRDLVRRLEEKAK

SEQ ID NO: 10601 - protein, 177 aa, Artificial Sequence; identical to SEQ ID NO: 10600
  Synthetic

SEQ ID NO: 10602 - protein, 177 aa, Artificial Sequence
  Synthetic
SVEEVLDEVRRIIEELLRLSEEMLRHSEEVIRDLERVSREVLERSKRIIDELLRELKDLDEVRKTLEDLIRKNTELSKTSKKVLDDARRENKKLSDDSRRVLRKLEEDIRRLVEEGVSDEVAKRAVEDVRRVVEDLERRNRTLNEKTKRLVEKLTRDNERSLKESKKVVDELREEAR

SEQ ID NO: 10603 - protein, 177 aa, Artificial Sequence; identical to SEQ ID NO: 10602
  Synthetic

SEQ ID NO: 10604 - protein, 177 aa, Artificial Sequence
  Synthetic
SVEEVLDEIRKRIEDLKREVDEVLDRSRRIIETLKERVDRVLKHSRELIKRLKDKLRELEEVKKTLDEIIRKNEELVRDIRKELKRALDKNKELVKEIRRELKEIIEEVKKLVDKGARDEEMKRALEEVKKLLDRLREELKRSLDESRKLVEELERRLRESNEESERLIRKLEREAD

SEQ ID NO: 10605 - protein, 177 aa, Artificial Sequence; identical to SEQ ID NO: 10604
  Synthetic

SEQ ID NO: 10606 - protein, 177 aa, Artificial Sequence
  Synthetic
SVEDVLREVEKIIRELDRKSEKVLEDSKRVIEDLKRKVEEVLRHSETLIRDLERRLKELEEVKRVLDKLRRDNERLVEDVKRELDEIIRKNKELSERSKRELERLRKAIEDLVRAGASDELAKEMVDRVRELVKKLEEENRRSLEESKKLVEELARRLERSNTESKRLIDKLREEAR

SEQ ID NO: 10607 - protein, 177 aa, Artificial Sequence; identical to SEQ ID NO: 10606
  Synthetic

SEQ ID NO: 10608 - protein, 177 aa, Artificial Sequence
  Synthetic
SVEEVLKDIEKKIRDLDRKVKEALRHSEEVIRRLEEEVKRVLDDSERILRDLKEKLRDLEDVKRELDRLLEENKRLVDDIRRVLEELERRNRELVDRIREVLKRIIEEVEKLVRDGASEELMRRIVEKVEELVKELDKRLRESNEDSKRLVEDLSRRAKKSLEESRELVRELKKRAK

SEQ ID NO: 10609 - protein, 177 aa, Artificial Sequence; identical to SEQ ID NO: 10608
  Synthetic

SEQ ID NO: 10610 - protein, 177 aa, Artificial Sequence
  Synthetic
SVEEVLDRIRKIIKELLDRSEEALRHSEEVIKDLERKVEEVLERSREVIRELLERLKELREVKKVLEELLRRNKELVDRIRKDLKKAIDENKKLSDESRRVLEEVRKKAKKLVDDGVDDEELKTMLEEVKKVVEELLRRNRKSNEDSKELVKELTRRLRKSLEDSKELVRKLEEEAR

SEQ ID NO: 10611 - protein, 177 aa, Artificial Sequence; identical to SEQ ID NO: 10610
  Synthetic

SEQ ID NO: 10612 - protein, 177 aa, Artificial Sequence
  Synthetic
SVEDVLREIEEILRRLEKESDDALEHSRRVIKRLEEESDRVLEESRRVIEELERKLRDLEEVKRELEKLIRKNEKLSKDSKDVLKKLIEENRRLSETSKEVLRELRKRVEDLVRAGADDEEMKKLLEDVKRLVDDLRRKNEESNRRSKELVDKLDKENKDSLKESRELVEKLEREAR

SEQ ID NO: 10613 - protein, 177 aa, Artificial Sequence; identical to SEQ ID NO: 10612
  Synthetic

SEQ ID NO: 10614 - protein, 180 aa, Artificial Sequence
  Synthetic
SVEEVVREVEEKLRKLIDDVRRVVEENRRNTERLRKRVTEVVKRNEDILRRLEEDIRRVERAEEAKEVLKRLKEETDRLLERVEEVVRRTKKKTEDLLRDVERLLREIKKELEDLLRNNVSEEVAKTALRKVEDLLKKLKERAEDSSRDNHRISKELTEELEESSKRVKTLVDELRKTVK

SEQ ID NO: 10615 - protein, 180 aa, Artificial Sequence; identical to SEQ ID NO: 10614
  Synthetic

SEQ ID NO: 10616 - protein, 178 aa, Artificial Sequence
  Synthetic
SVEEVLKESREISTRLAEEVKRVLDEIRRILERVKRINEKVNKDIEEILRRVKKTVGEKKRELVKKLEDEVRKILETNKRLSEELEERVRRLLEELERLLRKVVKENEDTVRDLARIEDERVAEKILKEDRDTVERLRKRVEDLLRDVRRLVEDSERKSRDLLRRVEELVRELKKRVD

SEQ ID NO: 10617 - protein, 178 aa, Artificial Sequence; identical to SEQ ID NO: 10616
  Synthetic

SEQ ID NO: 10618 - protein, 178 aa, Artificial Sequence
  Synthetic
SVEEVLKESKRVSEELNELNKKVNDDIRKILEKVNRENKKVNEDIERELRKLEEEVGRKKEELLREVVKEVRRLLKENERLSEKLRKEVEELLKRNEELSKRVVDDNKRTVDEARRIDDEEVAREILRDDKRTVEESKRESKRLLERVKKLVDRSAEESKKLLEDVKRLLEELRERAR

SEQ ID NO: 10619 - protein, 178 aa, Artificial Sequence; identical to SEQ ID NO: 10618
  Synthetic

SEQ ID NO: 10620 - protein, 178 aa, Artificial Sequence
  Synthetic
RVDEVLDESKKVSDRLHESIRRVLEKIEEILRRVNEENRRVNEEMKRILDELARTVGEKIREELEKVKKRAEDLVKTNEELSEDLKRRVRKLLKELEDLLRKVNEENKESLDRLKRIEDERVAREILKADRETVRRLEKRAKDLLDEVRDLVRESEKRSRELLKEVEDLVRKLTEEAR

SEQ ID NO: 10621 - protein, 178 aa, Artificial Sequence; identical to SEQ ID NO: 10620
  Synthetic

SEQ ID NO: 10622 - protein, 178 aa, Artificial Sequence
  Synthetic
RVEEVLKRMRDILRRVNEINRRVNRELERSSREILERIREILDRIRRILERLEERVGDKKKEEVDRVKDEARKLLRDLEETLKRDHDRDRKMLKENEDLSREVEKRVEELVRDLARIEDEKVARDLLREVEELVKESEELSEELLRRSRRSNEESLRKAEKLLETVRRLVEELEKKTT

SEQ ID NO: 10623 - protein, 178 aa, Artificial Sequence; identical to SEQ ID NO: 10622
  Synthetic

SEQ ID NO: 10624 - protein, 182 aa, Artificial Sequence
  Synthetic
SEAEAVEEEVRRLVEESEKRSKELLEDVERLVEESERRSKKLLDDVRKLVDDLKKELRRVRDRETMKKLLKELEDRVRRIIERLAELSKEVEDRVREIIKTNEEISDRLRKKVDELLEELKRRGVDDRVIERLKRILKEAHDKNKEVSDRIRKILEELHRKNRKVLEDIKRILDDVRREVER

SEQ ID NO: 10625 - protein, 182 aa, Artificial Sequence; identical to SEQ ID NO: 10624
  Synthetic

SEQ ID NO: 10626 - protein, 182 aa, Artificial Sequence
  Synthetic
KEAEDLLREVEKLVRESKKLSEDLLREVRKSNERSKRESERLLREVERLVRELKDLRDKVRDRRTLEKLLEDLERTAREIIKEIEKISRDDKKDVERIIRENERISEELEKRVREILEKIKRDGLDDRIIERIKRILEKVHKINREASKRIKESLDRAHETNKRVLDRIRKIVDDVRREVER

SEQ ID NO: 10627 - protein, 182 aa, Artificial Sequence; identical to SEQ ID NO: 10626
  Synthetic

SEQ ID NO: 10628 - protein, 173 aa, Artificial Sequence
  Synthetic
RLEEVKEELKRIATKLKEEIKENIRRLEESVEKIAKELAENIKRLEDILRDVKRKLRDERIVKTVEDIARRVVEDNERIMEEDKDVVRRLVERNEEIVRRVDETVKKIVELIDRGEPGEELVERLRRVVEEVRERLKDSSRELRKINEDSRKKVEDSSREVKKVVEELERRDT

SEQ ID NO: 10629 - protein, 173 aa, Artificial Sequence; identical to SEQ ID NO: 10628
  Synthetic

SEQ ID NO: 10630 - protein, 174 aa, Artificial Sequence
  Synthetic
KELEDVARKVEDLLRRIEKTNRDAIRESERLVRELKREVEKVEEESRRLLEEVERRIRDEDVIRRLREISERSKRELKKLLETITRISDKSVKDNEKLLRDTREVVRRVDEVLKNNGDAKKLLDEVRKVIEDNRKRSEELLEENRKVVEDVSRTLERILRENERVADEVDKEER

SEQ ID NO: 10631 - protein, 174 aa, Artificial Sequence; identical to SEQ ID NO: 10630
  Synthetic

SEQ ID NO: 10632 - protein, 174 aa, Artificial Sequence
  Synthetic
DELERVTEEIDKLSKDLERRVREVLEESRRLVEDVERVVREVLEEARRTAKDIADKVKNERILDEVREMTKRHEEELRRLLEELKRISEESKEELKRLLKENREAVEKVRRELENKGDVDKLLEEVRKISEDSKERLKEILKRNEEVARRVKRELKRLLETNREIIRRVEERER

SEQ ID NO: 10633 - protein, 174 aa, Artificial Sequence; identical to SEQ ID NO: 10632
  Synthetic

SEQ ID NO: 10634 - protein, 178 aa, Artificial Sequence
  Synthetic
RELEELLDKVRKIVEESKKRNEDLLREVREIVERSKEKIKKVLDEVRKIIETVRKSRLSDEKVRRLLEELRRKVEKLLDDDRKLAKELRDRLRELKKTNEDLARRLREELERILRDKPDVKEVEKVLRDVEELIRDSERASDRVLKDVEELIKDSERMSKKAEEDVDRLLRELDKDVR

SEQ ID NO: 10635 - protein, 178 aa, Artificial Sequence; identical to SEQ ID NO: 10634
  Synthetic

SEQ ID NO: 10636 - protein, 183 aa, Artificial Sequence
  Synthetic
DSVERVAEEVRKLLEDIKRVSDEVTKRLRDLLEDLKRVSDKVRKDIERLLEDLEREVRRKGGEELKKKVDKVTRELEELLRRNEEKVKEVERRVRDLLRRNNEKVKRAVKELRDLLESLRRIEEDRVLEEALRRVEELARRIKEHSKRVLETVRRLVEEIKKHSRKVLEEVRERIKRIKDELR

SEQ ID NO: 10637 - protein, 183 aa, Artificial Sequence; identical to SEQ ID NO: 10636
  Synthetic

SEQ ID NO: 10638 - protein, 183 aa, Artificial Sequence
  Synthetic
SEVEKAEKDVRDLLKDLRRVSEKVKRAVEDLLRDLKRTSDKASEDAKRLLDDLRRKVEERGGDRLRDEVREAEKEVEKLLRENNTEVDKVRKELEDELRRNEEMVRTVERRLRELLERIKRIEEDRVVKEILDEVEKLIREIKKHSEDLLRKVRKDIKRVKDHTKRVLDRIRKLIEDIKRRLE

SEQ ID NO: 10639 - protein, 183 aa, Artificial Sequence; identical to SEQ ID NO: 10638
  Synthetic

SEQ ID NO: 10640 - protein, 181 aa, Artificial Sequence
  Synthetic
DEVKELLDRVREEIRRDKERVKKLLEDSKRLNERDKREVKRLLEEVRELIKRLEDIIRKSDKDDELEKIVREIERRLRRVIEESEEHVKRTVDTDRKLLEDSKRHAEESARRLKEVLEDAKRKGLEEEVVKDLERLLRDLERVNDEVEKRLRDLTEDSKRFNDEVAREIEKLLEDVARTVK

SEQ ID NO: 10641 - protein, 181 aa, Artificial Sequence; identical to SEQ ID NO: 10640
  Synthetic

SEQ ID NO: 10642 - protein, 181 aa, Artificial Sequence
  Synthetic
REAEELLKRVEDLIRRLKDMIRKLLEDSKRLNERDVETVKRLLEDVERTIREIKDEVRRDKDKDRLRDLVRRVEERLRELLERSKDHVRRTAETDRELLDRLRRLVEKVERELRDMLRELEERGADERIVREVEKLLEKIKRDVDRVRRELERLTEESKRINDKAVRDIEELLEDLKRAVK

SEQ ID NO: 10643 - protein, 181 aa, Artificial Sequence; identical to SEQ ID NO: 10642
  Synthetic

SEQ ID NO: 10644 - protein, 185 aa, Artificial Sequence
  Synthetic
DELERLLEDVERVSRETKKLLKKLLDDAKRVIDKNREDSRRSLEEVERVIREAKELLKDGQEKEKLLRDVERIVKEVIEKNREVVDRVRDIVREIVERIERLVRKNKEDVDRVRREAEKRSRTKDTERRVRDVVKKIRELSEDVEREAKKVIDRLKELLEDIERENRRVEEEIKKLLEDVERTAR

SEQ ID NO: 10645 - protein, 185 aa, Artificial Sequence; identical to SEQ ID NO: 10644
  Synthetic

SEQ ID NO: 10646 - protein, 182 aa, Artificial Sequence
  Synthetic
KLVERLVKEAEDLTEEHKERLDRLLKENEKISRESKKRLKEILEENERVVEEVKKLLRDGQPKEELVKTVRKISEDSKRRLEELVRRNRKVSKESKERLDEILKTNEDMVREVEERLKREVDDRKKVDEVRRRLEELHKELEKVVRDVKRTSEKLVRDSEDMARKVVKTSEDLLRELEEEAR

SEQ ID NO: 10647 - protein, 182 aa, Artificial Sequence; identical to SEQ ID NO: 10646
  Synthetic

SEQ ID NO: 10648 - protein, 182 aa, Artificial Sequence
  Synthetic
SRAEDLVRRVEEMTRKHKKDLDDLLRENEEVSRRSKERIRKLLKDIKDVVDDVERVLRAGDDKKRLVEEAEKVARDVERDLRRLVKENRDISRTSKERLDDILRTNREVIERVDDALRREVSDRDKVEEVRERLKKLHTELEKRVREVKRDSERLVEDSERTVEELLRRVRKLLKEVRDSVK

SEQ ID NO: 10649 - protein, 182 aa, Artificial Sequence; identical to SEQ ID NO: 10648
  Synthetic

SEQ ID NO: 10650 - protein, 182 aa, Artificial Sequence
  Synthetic
SEAERLVEEAERVTREHKKRLDDLLKEVRRVSEDSKRKLEKILKENEDVVEEVKELLKAGDDKDKLLEKVRKISEDSRRRLEKLVEENKEMADRVRKALDDILDTNRRVVEEVKRRLEREVSDKEKVDRVRRELDRLHKELAEVVERVKRAVDKLLRDSEEEVKRVEERSERLLKEVADALR

SEQ ID NO: 10651 - protein, 182 aa, Artificial Sequence; identical to SEQ ID NO: 10650
  Synthetic

SEQ ID NO: 10652 - protein, 182 aa, Artificial Sequence
  Synthetic
SDVDKLVDDVRRETEKHKKTARDLLDELRKVSEESRRRLKRLLEEITEVVERIKRVLEAGRDKDELLERIEKVVREVREKLKELVKRNEDVVREVKRRLEELLRTNKKIVDEVKRMLDERVSDEEEVRRAKEELDRLHKEVEDVVRDVTRELDRLLKRSREVVERVREEADRLLEEVERTLK

SEQ ID NO: 10653 - protein, 182 aa, Artificial Sequence; identical to SEQ ID NO: 10652
  Synthetic

SEQ ID NO: 10654 - protein, 182 aa, Artificial Sequence
  Synthetic
SEVDELVERAERISRESKKTIKKILEDNERVSKRHKDELKKLLDELKRVVDEVRKVLERGTPKEELVKEVEEVVRRVKETLKRLLDTNHKISKESKERLRKLVEDNKRVVETVKKLLEDRVSDKEKVERALRELDRLLEESKRVVDEAEKTSDKLNKEVEEMARRVEEEVDRLLKEVRDDAK

SEQ ID NO: 10655 - protein, 182 aa, Artificial Sequence; identical to SEQ ID NO: 10654
  Synthetic

SEQ ID NO: 10656 - protein, 182 aa, Artificial Sequence
  Synthetic
SEADELVKEIEDVSRRSKEELTRLLEEAEKVSREHKKTLEELLRRIEKVVRDIKEVLRGGTPREELLKTIRKLVEDVRRELERLLRTNHEVVRRVEDRLRKLVEDNERVARKVKDELRRRVSDEKKVREVEKLLDKLLEESRKRAKEVLRALRELNREVAEVVRRVEERLRRLLKEVEEAVR

SEQ ID NO: 10657 - protein, 182 aa, Artificial Sequence; identical to SEQ ID NO: 10656
  Synthetic

SEQ ID NO: 10658 - protein, 182 aa, Artificial Sequence
  Synthetic
SDVDKIVEEIERISRDSERRIREIVERNKKVSEDHKRELERLLKEMEKVVEDVKKVLKDGDDKKKLKDEARRVVERVKDDLRKLLETNHEISKRSREELRKLVEDNERVVRKAEKDLKDRVSDKKKVDEARKKLRDLLERSKEVVKEAERRLEKSNRDVRREAERVRKALDDLLKEVDEAVR

SEQ ID NO: 10659 - protein, 182 aa, Artificial Sequence; identical to SEQ ID NO: 10658
  Synthetic

SEQ ID NO: 10660 - protein, 182 aa, Artificial Sequence
  Synthetic
SRADELVERAKRMTDEHKKTAEDILRENKRVSDEHKKTLEKILRENEKIVDEVAKLLEEGRDKEELVRRVEKVSRDSKRRLKELLETNHRISEESERRLRELLRTNREVVEEVRKRLKDEVSDKDKVREVEEELKRLHKEVEDVVDTVRRTSEKLNDEVRKVVETVTRRSEELLEELRRRAK

SEQ ID NO: 10661 - protein, 182 aa, Artificial Sequence; identical to SEQ ID NO: 10660
  Synthetic

SEQ ID NO: 10662 - protein, 182 aa, Artificial Sequence
  Synthetic
KEVEKLVTEIREMTERHKRTLEELLKEAEEVSRRHKEDLKRLLDENRKIVEEVARVLEKGEPKEELEKRVREVSKRSEETLRTLLETNHRVVKRVEDELKRLLETNRRMVETVKDLLRKTVSDKDKVERVLREADRLHEEVRKVVEKVREELRRLNEEVRKVVEEVRRDSERLVREVEERAR

SEQ ID NO: 10663 - protein, 182 aa, Artificial Sequence; identical to SEQ ID NO: 10662
  Synthetic

SEQ ID NO: 10664 - protein, 182 aa, Artificial Sequence
  Synthetic
SRVDELVDRARKMTEKHKEELKRIVEENRRVSKEHKERLEDILRRNAEIVERVKEVLKRGTPREKLVKDVREVSRDSKRRLDDLLRTNHKISEESKRRLRELLRTNEEFVRTVEDLLRREVSDEDKVRRALEELKKLHDELAKEAKRVEELLDKSNEEVEKVVRDVREASERLLEELERTAK

SEQ ID NO: 10665 - protein, 182 aa, Artificial Sequence; identical to SEQ ID NO: 10664
  Synthetic

SEQ ID NO: 10666 - protein, 182 aa, Artificial Sequence
  Synthetic
DEVKKLVDDARRLTEKHKTDLERLLDEARKVSEEHKKRLEELLREIAEVAKEILKVLRKGEDRERLVKEIEKVVRDVKRKLDELLKTNHDVVRRVEDELRRLLKTNKEVVDTVRDELERRVDDREKVKRVEETLERLHKEVEEVVRRVKKALRDLNDEVRRVVDEVRRRLEELLKRVEEEAR

SEQ ID NO: 10667 - protein, 182 aa, Artificial Sequence; identical to SEQ ID NO: 10666
  Synthetic

SEQ ID NO: 10668 - protein, 187 aa, Artificial Sequence
  Synthetic
REVDEVEERVTRLLKKVRDVAEESRRRSEELLKKSRDVVEEVKKEVDKLLEEVRDMVRRVKDKGVEEKLRKLIRDAEKILKELRKRLEENIRENEELLRRNEERLERLIRELEDLLTKLRKMLKDNAEGRVLKKLVEEVKKLADEIERELERTSKEIEELSRRSEEDLRRLVRKLREVVRKIEEDLR

SEQ ID NO: 10669 - protein, 187 aa, Artificial Sequence; identical to SEQ ID NO: 10668
  Synthetic

SEQ ID NO: 10670 - protein, 187 aa, Artificial Sequence
  Synthetic
REVERVERELERLLEEVREVAERSERESKKLLEDTRRVVRKVKEDVRRLLEEVRDVVRKVKDKGVEEELRKLIKELEDLLRRLDETLEKNIRDNERVLEDNRRILEELIRELEEMLRRLKKSLEDNAEGDVIRRMVEEVEKLARRIKETLERTVRRLEELVRRSEKNLRTLVEEVRKAVERIKETLR

SEQ ID NO: 10671 - protein, 187 aa, Artificial Sequence; identical to SEQ ID NO: 10670
  Synthetic

SEQ ID NO: 10672 - protein, 187 aa, Artificial Sequence
  Synthetic
SEAERVEEDVRRLLKRVEEVIKRSEERSRELLKKTEDVVREVRKRVKKLLDEVKDTLDKVRDKGVEEEARRLIEELKEILERLERNLRKHIKDNRTLLRKNKEDVTRLKEELEKIVEDLKRLLDDNVGGEVLDRLVEELRKLVEEIERDLERTVREIEKLVKDSDRNLEDMVRELRRVAERIKEELR

SEQ ID NO: 10673 - protein, 187 aa, Artificial Sequence; identical to SEQ ID NO: 10672
  Synthetic

SEQ ID NO: 10674 - protein, 187 aa, Artificial Sequence
  Synthetic
REVDEVRRRAEELLKEVRDVVTESEKESRRLLEDTRRVVEDVKRRVDRLLEEVRDLLREVSEKKVEEEARKLIRELERIVEDLERKLDRDIRENERLLEENKRRLEKLIRELEEILRDLDRKLRDNAEGDVLRELVKRLEDVAREIKKRLEDTLRKLEEVSRRSKENLRELVERLRRIADEIRERLR

SEQ ID NO: 10675 - protein, 187 aa, Artificial Sequence; identical to SEQ ID NO: 10674
  Synthetic

SEQ ID NO: 10676 - protein, 186 aa, Artificial Sequence
  Synthetic
DEVDRVREEIERLLREVEEVLERSERESRRLLREVEEMLERSDEEVRRLLKEVEEVLRDELTDEDLMRKIRETLKKILEDNEELVRRIKRRAEEALERDREVVEEIRKRAEKVLEEVERLLRDKKESGEVLEEILRRAKEEVEKLKRELERTVERLAELVEELKRELERSTREVRKTVEELKRRIK

SEQ ID NO: 10677 - protein, 186 aa, Artificial Sequence; identical to SEQ ID NO: 10676
  Synthetic

SEQ ID NO: 10678 - protein, 186 aa, Artificial Sequence
  Synthetic
DEAEDLERRARELLEEVERVLEESIRRSEETVKEVEDMLRRSTEEVERLLKRVEDVLREELSDEKRLEEIKRKMEEILKRNRELVEEIRKELEESLRRNRELVERAKRTLERIVRKVEKVIREKKDDGELLKRLIDEVRRLAEKIKEELKESSKRDEEKVEKLKKELKDSTDAVRELVERLEREIK

SEQ ID NO: 10679 - protein, 186 aa, Artificial Sequence; identical to SEQ ID NO: 10678
  Synthetic

SEQ ID NO: 10680 - protein, 174 aa, Artificial Sequence
  Synthetic
DEVEELVKEVEERIKKVHKENEDVLRESEELMKRLHEENERLLREVEELVRRIRELRKRGDLREEDVKRVLKRIEELVERARRENKKASDRNRDLIRRVKKTNDDVLREIEELVKEIDVREARERIRRLLTESRKSVEEVEKRLRELSKRSEESVERVERTARRLLKELEDMTR

SEQ ID NO: 10681 - protein, 174 aa, Artificial Sequence; identical to SEQ ID NO: 10680
  Synthetic

SEQ ID NO: 10682 - protein, 174 aa, Artificial Sequence
  Synthetic
EEVKRLVEKVRKLIEDSKRRNRDVLRRVEELVRRVHRRNEEVLRRVEKLVEDIKELLRRGDLREEEVEKIKRRLRELAREVEEENRRVAEDIRRLLDEVRRENERVLREIRELLKEIPVEEAEREIERLLEESKRSVEEVEERIRRLIRESEESVREVKERIDELLKDADRATK

SEQ ID NO: 10683 - protein, 174 aa, Artificial Sequence; identical to SEQ ID NO: 10682
  Synthetic

SEQ ID NO: 10684 - protein, 174 aa, Artificial Sequence
  Synthetic
REVEELVKDVERLMREVHRRNEKVVEEVEALIRKSKEDNERVAREVERLVREVEKMLRRGDIREEDIKRVLKEIEDLLEEVERRNRRVLEEIERLLREVTEDNREVVRKLERLAEEIPDREAKERIKDLVRKSRDSVREVRERIRRLLEDSKRSVDDLARRIRELLRKAAEKAR

SEQ ID NO: 10685 - protein, 174 aa, Artificial Sequence; identical to SEQ ID NO: 10684
  Synthetic

SEQ ID NO: 10686 - protein, 174 aa, Artificial Sequence
  Synthetic
DEAEELVDRVRKLAEDVHKKNEDVLRESDALVKDSDRRNREALRRVEKLVEDVEELLRRGEIREEEIDKVLKEIARLLDELRKENKDLSRRNEELIERVERENRRVLTEIDKLVKEIPVEEVKRRIKELLKRVEESVRTVEEELRRLSKESEESVKRVEDRIRELLKRLRDAAR

SEQ ID NO: 10687 - protein, 174 aa, Artificial Sequence; identical to SEQ ID NO: 10686
  Synthetic

SEQ ID NO: 10688 - protein, 174 aa, Artificial Sequence
  Synthetic
DEAEDLVRKVRKLIEESKKENEDLLREVRELVARVHEENERVLREVEKLVEDIRRLLRRGDLRREDVRRVEEEIKELLKEVRRINKEVLEEVKRLVDEVKRRNEDVLRKIEDLVRRIPVREVKKAIEDLLKESEDSVREVEEEIRKLLKDLEKSVRDVERAIEKLLDELRKDTK

SEQ ID NO: 10689 - protein, 174 aa, Artificial Sequence; identical to SEQ ID NO: 10688
  Synthetic

SEQ ID NO: 10690 - protein, 174 aa, Artificial Sequence
  Synthetic
REVEELVREAEELVRRVHKRNEDALRRSKKLVEDVHRKNEEVLKRVERLVERIEELLRRGDLREEDVERVLREIKKLIEEVEEDNERVSRENKELVDRIREENERVAKRLEDLVREIPDKEAAERIKRLIDEVRKSVEEVERRAEELSRELRRSVKEVRDALKRLLDDLRRATT

SEQ ID NO: 10691 - protein, 174 aa, Artificial Sequence; identical to SEQ ID NO: 10690
  Synthetic

SEQ ID NO: 10692 - protein, 174 aa, Artificial Sequence
  Synthetic
REVEELVKEVRRRVREVHERNRRVLEDSERLVREVHKRNEEALRRSEELIKRVEDMRRRGDLREKDIERISETNEKLVKEIKDENEEVSRRNEKLVDEVRRRNEEVLKELEKLLRDIPDERAEREIRRLLEEVKKSVEDLTRKARKLSRDLERSVREVEERARDLSRRLREKTR

SEQ ID NO: 10693 - protein, 174 aa, Artificial Sequence; identical to SEQ ID NO: 10692
  Synthetic

SEQ ID NO: 10694 - protein, 174 aa, Artificial Sequence
  Synthetic
SEVEKLVKDVEDLAREVHKRNKELVDEVRDRVRRVEERNKRVVDEVREEVKKLIDLLRRGDLREKDIRRMLERAKELIDRVKEDNDRVARTLEDLVRKVKEENEKVLTDIERLVEEIPDEEAKDRIRELLKRVEESVEKVKRDIERLIERSKESVRRLEERIKELLRELEEAAR

SEQ ID NO: 10695 - protein, 174 aa, Artificial Sequence; identical to SEQ ID NO: 10694
  Synthetic

SEQ ID NO: 10696 - protein, 174 aa, Artificial Sequence
  Synthetic
SEVEDLVRKVKKLMEDSDRENKRLVDEVRERVEEVKKRNKEVVDEVRERVKRLEEMLRRGDLREEDIKRVEKEIEDLVKEVKDTNKRVADELRKLVEEVKKRNRDVAERIKELVKEIPDKDAAEAIKDLIRKSEKSVDEVRREIERLIKESEDSVKRVTDEIRKLLKRLRDTTT

SEQ ID NO: 10697 - protein, 174 aa, Artificial Sequence; identical to SEQ ID NO: 10696
  Synthetic

SEQ ID NO: 10698 - protein, 181 aa, Artificial Sequence
  Synthetic
SELEEILKTVKKLVDDHKRLSEEILRRVRKLVEEHKRKSEEILKRVTDLAEDVKDKIRKDRSKEDLERIVREARERVRRMLEEDRENLERIVRTIEKVLRDDKEHLKDVERRIRKLLEDARRRGLPREVEKELDRLLKELERVSRESEKELRRLLKELEEASRESEERLRRLLRDVEEALK

SEQ ID NO: 10699 - protein, 181 aa, Artificial Sequence; identical to SEQ ID NO: 10698
  Synthetic

SEQ ID NO: 10700 - protein, 175 aa, Artificial Sequence
  Synthetic
DEIETVKEELKKLLERLEESSRKVERDLEDLLRRSEESTREVEKRLKELLEDVRRKLREKKELVREVEEEVRKLLEESRRSLEENRRLIEKLAKESRDSLREVEKRVRELLKKLDDGADVKEVLDRVRELARTHHELNRELLREAEESSREHHRLNEELVDRVRKLVKEVEDRAR

SEQ ID NO: 10701 - protein, 175 aa, Artificial Sequence; identical to SEQ ID NO: 10700
  Synthetic

SEQ ID NO: 10702 - protein, 175 aa, Artificial Sequence
  Synthetic
SEIERVKKALRKLLEDSRKSSEDLARELKRLLEESRKSTEKVERDLTDLLREIEEKLRDAKETVEEAKREVDRLLEESRKSLRDNERLVERLIRESERSLRENEDEVRRLEELLDRGKDLDTILERVERSSREHHKLNERLLETLRRSSEEHHKRNEELVRRVERLLEEVERRRK

SEQ ID NO: 10703 - protein, 175 aa, Artificial Sequence; identical to SEQ ID NO: 10702
  Synthetic

SEQ ID NO: 10704 - protein, 175 aa, Artificial Sequence
  Synthetic
SKIERVKEEIRRLLDTLKKSSETVIREIEKILKESRESSKKVEDDLRRLVREVEKKVREKKELVEKLKRVVDKLAEESRRSLEDNERRLTELIRDSERSLEEVKRRAEEVEKLLEDGKDVDKVLRDLEDLVRRHHERNKELLDRVRKSSEEHNRTNEELLKEVERLARKVIKDTT

SEQ ID NO: 10705 - protein, 175 aa, Artificial Sequence; identical to SEQ ID NO: 10704
  Synthetic

SEQ ID NO: 10706 - protein, 175 aa, Artificial Sequence
  Synthetic
DEIEEVKRRARELLREATESSKEVAKALDELLERDRDSSRRVKEDLKRLLEEVRRKLRKDKKTVEEVERRVKKLADESDKISEENERRVDKLKKESEESLRRLRDKVRKLEKKLEDGKDLEKVLRDVEKLMREHHELNRELLKRVEDSSRTSHELNKRLVDTVRKLVTDAAEKAK

SEQ ID NO: 10707 - protein, 175 aa, Artificial Sequence; identical to SEQ ID NO: 10706
  Synthetic

SEQ ID NO: 10708 - protein, 175 aa, Artificial Sequence
  Synthetic
SEIEEVDERIKALLKRSTESSKRVEDEARRLMKEDKDSSKEVEDRLRDLLRKVREKLRDSKETVEEVERRVTELAERSRRISRENAERLKDLLRKSKESLERNRRDAERVRKLLRDGMDLKKVLDDLKRSSEEHHRLNEELLKRAEDSSRTSHRLNRKLVEEVRRLVEKVLEEVR

SEQ ID NO: 10709 - protein, 175 aa, Artificial Sequence; identical to SEQ ID NO: 10708
  Synthetic

SEQ ID NO: 10710 - protein, 175 aa, Artificial Sequence
  Synthetic
DEIEEVKKTLKKLVEELEESTRRVEEELKKLLKESEDSTRRVEDELRRLLEEVERKLRDDKKTVRDVEEKVRRLAEESRESLRRNREEVKRLLEESRKSLEDVKRTIERILKLLDDGKDLDEVLKDVERLVKEHEDLNKELLKKVEKSSRDHHELNKELVRRVEELVREAIKKTT

SEQ ID NO: 10711 - protein, 175 aa, Artificial Sequence; identical to SEQ ID NO: 10710
  Synthetic

SEQ ID NO: 10712 - protein, 175 aa, Artificial Sequence
  Synthetic
DEVEKVKEEIRRLLKRLEDSTRDVERRLEELLRESTESSKEVEERLKRLLDEVRKKLKDKKDDVRRVEEEVRKLAERSRESLERNRRRVEKLMKESRDSLREVEKRAKEVEKLLDDGKDVKKVLEELRELVRKHEELNRKLLEEVRESSERHKKLNKELVDEVKRLAEKITEEAR

SEQ ID NO: 10713 - protein, 175 aa, Artificial Sequence; identical to SEQ ID NO: 10712
  Synthetic

SEQ ID NO: 10714 - protein, 175 aa, Artificial Sequence
  Synthetic
KEIEDVKRALEKLLEDDKRSTEELKDRLARLLEDSKRSSDKVIEDLDRLLKEVRDKLREREESVKEVEDRVRKLAEESRDSLRKNEDLVRKLLEESKKISDDNRKKVKRALELLERGADLDEILKRVEDSSRESHKKNEELLRRVRRSSEEHKRLNEELLREVEELVKEIVKEAK

SEQ ID NO: 10715 - protein, 175 aa, Artificial Sequence; identical to SEQ ID NO: 10714
  Synthetic

SEQ ID NO: 10716 - protein, 175 aa, Artificial Sequence
  Synthetic
SKIEEVKKALRRLLEDLKRSTDRVKEEAKKLLDESRKSSEEVKRELERLLEEVTRKLRDKKEVVKEVRERVKRLMEESERSLRENEETVKRLLEESEKSLRRVEEEVRRLEKKLEDGADADKMLRDIERLVEEHKRLNEKLLREVRESSKRHNEKNEELVKTVKKLVEDAEERAK

SEQ ID NO: 10717 - protein, 175 aa, Artificial Sequence; identical to SEQ ID NO: 10716
  Synthetic

SEQ ID NO: 10718 - protein, 175 aa, Artificial Sequence
  Synthetic
SEIETVKKELERLLDESRRSTETVEREVEDILRKSTESSEEVKDRLDKLLKEVRDKLRELKETVKKVEDEVRKLAEESKDSLRKNRETAKELLRRSRESLDKNRRDVEKAKKLLEDGKDLREVLERVRKSSEDHKELNKELLERLRRSSKEHNDKNKRLVDEVRRLVEEVIRRAT

SEQ ID NO: 10719 - protein, 175 aa, Artificial Sequence; identical to SEQ ID NO: 10718
  Synthetic

SEQ ID NO: 10720 - protein, 175 aa, Artificial Sequence
  Synthetic
REIEEVKERLKKLLKDVTDSTDKVRKDLEKLLEDDRRSSRKVEEDLRRLLKDVRDKLREEKELVKRVEEDVRRLLEESKDISRENEKTVKRLAEESRRSLEDLRRRIEEIIKKLDDGMDLEKVLREAEKLAREHERTNEKLLKDVEKSSRDSHKRNKEIVDRVKKLAEDIIRKTK

SEQ ID NO: 10721 - protein, 175 aa, Artificial Sequence; identical to SEQ ID NO: 10720
  Synthetic

SEQ ID NO: 10722 - protein, 175 aa, Artificial Sequence
  Synthetic
SEIERVKKRLEELLREVEESTRRLEERLKRLLEEAKRSSEEVEKELRRLLEEVRRRLRRDKKLVRELERRVKELLEDSRRSLEELKKRVRKLAEDSKRLLEEVKREVEKLKKKLDDGMDLDDVLRRVEELAKRAHDENERLIREVEELVRRHNKRNKELVDEVKRLVEKVIEEER

SEQ ID NO: 10723 - protein, 175 aa, Artificial Sequence; identical to SEQ ID NO: 10722
  Synthetic

SEQ ID NO: 10724 - protein, 175 aa, Artificial Sequence
  Synthetic
DEIERVKEELERLAKEDKDSTDTVKRELERLLEESKRSSDKLREDVERLLREVRERLRDKKEKVRDVEEKVKRLLEESEESLRENEKTVRKLAEDSERISRENERRIRDALRLLDAGADLKRILEEVKRSSEESHKLNEELLDEVRKSSEEHNKLNEKLLRDVERLVRKVLTETK

SEQ ID NO: 10725 - protein, 175 aa, Artificial Sequence; identical to SEQ ID NO: 10724
  Synthetic

SEQ ID NO: 10726 - protein, 188 aa, Artificial Sequence
  Synthetic
DELDKLLRDAEEVVRRVKEENKRLVKRDEEVVRRIHELNRKLLEDIRKVVEDVKEEIKEGRPDKELKRLLDDLKRKAEEVVRRSRELLKELEKLSRDVIRTSRELLERVKKIVEDLIKKLEDDMTSEDAKRKVKRVKDELKRLVEEVEEVSRRSEERSRKTLEDVRDSSRRLEEELRKLVKEVEEAVR

SEQ ID NO: 10727 - protein, 188 aa, Artificial Sequence; identical to SEQ ID NO: 10726
  Synthetic

SEQ ID NO: 10728 - protein, 188 aa, Artificial Sequence
  Synthetic
DELEKLLEDIRDVVRRIKETLEKLVKEDRDVVEKVKEDNKRLLKEMEDVVRKVKEEIRSGLPREVLERVLERVRRIAEEIIRRSRKIVKDVEKKSTDLKRRLDEILKEAKERVEEIAKEVKKKVTEERLERRAEEMEERLRRLVEEVREVVERVKEESDRTVEEVRRSSDRVEKEVERLVREVEDKVR

SEQ ID NO: 10729 - protein, 188 aa, Artificial Sequence; identical to SEQ ID NO: 10728
  Synthetic

SEQ ID NO: 10730 - protein, 178 aa, Artificial Sequence
  Synthetic
EELERLMRRSEESLKRSEDTVRELIREAREILKRIKEELKRLLEEAERILEEVKKTVRDLRDKKEVLRKLLEDLRRLVEEIERRLKKLLDELREVVREIKERLKKLNDDHRELIKEVAAEVDSKDLIKTARDTLRESERVSKELEERLKKIVEEVERLVEEVKKELERIVKDAERDVK

SEQ ID NO: 10731 - protein, 178 aa, Artificial Sequence; identical to SEQ ID NO: 10730
  Synthetic

SEQ ID NO: 10732 - protein, 178 aa, Artificial Sequence
  Synthetic
DELRKLARDAEEILKRSEEEVRKLKKRSDDSLRRSREEVKKLEDEIREIVDRIKKRVEERPEAKEELRKLLKELEDLVREIEERLETLNREHKKLIEEIERRLEKLNEDLDRVVKDLARKVDVEELKRTLEEIVERSKRVSDRLRERLKRTLDDSRRISDDLRRRLKKLVDDIRREVK

SEQ ID NO: 10733 - protein, 178 aa, Artificial Sequence; identical to SEQ ID NO: 10732
  Synthetic

SEQ ID NO: 10734 - protein, 177 aa, Artificial Sequence
  Synthetic
KEIEDVKEELKKVLEEDRDSLRKVEKEHRRLAEEVKRKVRELEESLKRIVEEVERIAREAKKGEVLKELRKRIRDLLEELKRVLKEVEDRARESIERNRRVSEKSERDIEKIMKELEDGKDLETVIREVRRILEESKRLNDKSREEVRKLVEELKDIVRRIEETVRRLLEEAKERLR

SEQ ID NO: 10735 - protein, 177 aa, Artificial Sequence; identical to SEQ ID NO: 10734
  Synthetic

SEQ ID NO: 10736 - protein, 183 aa, Artificial Sequence
  Synthetic
DSVDRLRRRVDEVLKTVEDALRRNKKDAEDLLRRIEEVLERLERRSEKLLKEIDEVLKRVPEKLVRDARRRLEELREHSKRLVDDLRRDLRRILEKNRELNDKIRKDLKRLKDKVEKLAKDGVSDEILTRAVEEIDELLRKLKRELDESTKESRKRVEELEKRLRDNTKRVKKDVDDLKRRVS

SEQ ID NO: 10737 - protein, 183 aa, Artificial Sequence; identical to SEQ ID NO: 10736
  Synthetic

SEQ ID NO: 10738 - protein, 178 aa, Artificial Sequence
  Synthetic
SSIERLEEESRKNIKELEDSVKELKEEVDRLVEELERSVRELAKIVEDVVRELKKRARKREKEVKEVVERARKLIDEVRRENERVIEEMRRLLKEVEDDNRRVVEESKKLIEEVKNGDDDEEVKRVLEESHRLVREVHERNKRVAERVRDLVRRVHEENERVAEEIRDLVRRVEEEVR

SEQ ID NO: 10739 - protein, 178 aa, Artificial Sequence; identical to SEQ ID NO: 10738
  Synthetic

SEQ ID NO: 10740 - protein, 186 aa, Artificial Sequence
  Synthetic
SEIEDVVKKLRDLSERNVRDIDRLVKEIDELLKRDKEEIKRVVDDIKRRVREIKKIIEEDRDKEKLRELVRKVEEDLEEIVKEVKRHSDELAKRLREIVERVKRHSEEVIKTLRELVDRVRKRVREEKEMLDRLRKVVDELVKENKKAVEDLKKRVEDVIRESKRVVEEARRVVDELKKELRDELK

SEQ ID NO: 10741 - protein, 186 aa, Artificial Sequence; identical to SEQ ID NO: 10740
  Synthetic

SEQ ID NO: 10742 - protein, 188 aa, Artificial Sequence
  Synthetic
SEIEKLVEEAKRLVKEAEDRLRKLSKESEESVRRVVKTLKDLVRELERLVEEVRKIIERNEGKEELEELVDRAKRKLEEVLKRVTELVKRHHEKNEKSLRDVEDLARRVKRKLEDILREVRERVTSDEMRKRVKELEEAVKELTKEIKEVVDRHRETVERSSRKVKTVLDDLRRVVEEILRRVEDAAR

SEQ ID NO: 10743 - protein, 188 aa, Artificial Sequence; identical to SEQ ID NO: 10742
  Synthetic

SEQ ID NO: 10744 - protein, 188 aa, Artificial Sequence
  Synthetic
KKIEDLVEEIKRLSDENRRRVERLSEDSKRSLEENKKKLKELVERIKKLLEEVSDKIRKDEDKDRLRELVKRLKEKLRELLEEARESSERHHRENEKSLKEVEDSSREVRKTLEKLVEDVRRDSTSEEAEERLRRAEDTVRRLVERNREVLEEHERTLRRSSEESKRALKEVERVVREVLKRVDEELQ

SEQ ID NO: 10745 - protein, 188 aa, Artificial Sequence; identical to SEQ ID NO: 10744
  Synthetic

SEQ ID NO: 10746 - protein, 188 aa, Artificial Sequence
  Synthetic
DELEKLVRDLEKRVKEVKDELKRSSEESERSLDEVRKTLKKLVEEMRELLKEVKRIIERNEDRDELKKLVEEAERRLREVLERVRKLVEEHHRRNEELVRRSRELVDDLRRELEELEKDVRDKSTSEEARERLERLRKRVEELLREVEKALEDDEKTVRESSKRIKKVLKELEDTARELVKEVRETAR

SEQ ID NO: 10747 - protein, 188 aa, Artificial Sequence; identical to SEQ ID NO: 10746
  Synthetic

SEQ ID NO: 10748 - protein, 188 aa, Artificial Sequence
  Synthetic
SELEKLVRDLERLSEDNKRRLKESSKESKESLDRVRETIKRLVEEAEELLKRVVDTIRRTEDKEKLDKLVEELKRRLEKLVRELKELVDRHHKRNEELLERSRRSSEDVKKKLKEVLEDVARKSTSEEARERLERLREKVEELARDNERALREDERTVRESSERLRKVLEEAKDRIDKLVKAVEDAAR

SEQ ID NO: 10749 - protein, 188 aa, Artificial Sequence; identical to SEQ ID NO: 10748
  Synthetic

SEQ ID NO: 10750 - protein, 188 aa, Artificial Sequence
  Synthetic
SELEKLVEEAKRLSDKNEEDLRRSSRESRESLKENKERIERAVKRLADLVRDVKEKIKRTESKEDLKRLVDELRERLKRLLEKVRKSSEEHHRENERLLRESTKSSEDVVRRLDEIAEEVARRSTTEEMKERLERLRDTLKKLKERNKEVLREDRETVTDSSRRSEEVVREAEERVERLLREVEEAAR

SEQ ID NO: 10751 - protein, 188 aa, Artificial Sequence; identical to SEQ ID NO: 10750
  Synthetic

SEQ ID NO: 10752 - protein, 188 aa, Artificial Sequence
  Synthetic
DELEKLVRELEELVKRVKEELERSSKESEDSLRDVKKKIEDLERKLDKLLKEVTDEIRRNESREDLKRLVEEARRTLEKVLDDIRKLVEEHEKKNKKLLDDSRELVERLKERLEEVEKDVRDKSTDDEMRKRLEDLERKVRDLARRVEKALEEDERTVRESSKRIRELLKRLEDKVRKIEKDVDDARR

SEQ ID NO: 10753 - protein, 188 aa, Artificial Sequence; identical to SEQ ID NO: 10752
  Synthetic

SEQ ID NO: 10754 - protein, 188 aa, Artificial Sequence
  Synthetic
SELERLVREVRELSDDNRRKLERSSRESERSAKEVERTLEKLVKELRELVERVKRDIERVRDESRLKELVDRARKTLEDVLRDVKRLVDEHRERNRELLERSEKSSRDVEERLKDVVRDVREKSTTEEMKERLKELEKEADDLRRENEELLDRDRRTVEESSKRVEKALRDLEREVRRILREVEETMR

SEQ ID NO: 10755 - protein, 188 aa, Artificial Sequence; identical to SEQ ID NO: 10754
  Synthetic

SEQ ID NO: 10756 - protein, 188 aa, Artificial Sequence
  Synthetic
SKLERLVEELKRLSDENVKDLERSSRESEESLKRNKEEIERVVERLRELLEKVVRDIKDDEGRERLDKLVRDLEEALKELVKRVRKSSEDHKRRNEELLRRSEESSRRVEEVLRRVLEEVTRDVTSEEAKERLDRLREAVEKLREDNKRALDRDRETVERSSKKSEDAVRRAEEDVRRLTETVRRAKK

SEQ ID NO: 10757 - protein, 188 aa, Artificial Sequence; identical to SEQ ID NO: 10756
  Synthetic

SEQ ID NO: 10758 - protein, 188 aa, Artificial Sequence
  Synthetic
SEIEDLVRKLRELLRDVKKKLKESSKRSEDSLRRVKEEIDKLVEELKKLLDEVKKEIERTEDKDELRKLVEEAARTLKRELDRIEEEVRRHDELNKKLLDESRKLVEDAARELEKLVEEVRRRSTTEEAEKKMRELEEEVKKLLEEVDRALKDDERTLRKSSKDIKKVLDDLRRTVKKLKEDVEETMR

SEQ ID NO: 10759 - protein, 188 aa, Artificial Sequence; identical to SEQ ID NO: 10758
  Synthetic

SEQ ID NO: 10760 - protein, 188 aa, Artificial Sequence
  Synthetic
DEIERLVEELRKLSERNKRELDRSSEESRESLKRVKEELKKIVEELRRLLEEVKDRIRKDESREDLERLVKELEERLRKLLDEVRELVERHDERNKKLLDESRKSSKEVKDELRKLLEDVERKTTSEEARERAKRLEKEVRDLAKENEKALEEDERTVRRSSEEIADLLRKVEKVVRELLEEVRRAAK

SEQ ID NO: 10761 - protein, 188 aa, Artificial Sequence; identical to SEQ ID NO: 10760
  Synthetic

SEQ ID NO: 10762 - protein, 188 aa, Artificial Sequence
  Synthetic
SSLEDLVRRARELSDRNREKLKRSSDESRESLKRNEEEIRRLVEELRELLERVRDLIRKLEDKDTLTELVERLKRELERVLEEVKKSSEEHDRRNRKLLEESRRSSKRVKEELKKLVEDADKEVTSEDAKRDLDRLRREVERLIRDNERLAEEDARTVEKSSRDSKKLVEDLEREVEKLRREVERDRK

SEQ ID NO: 10763 - protein, 188 aa, Artificial Sequence; identical to SEQ ID NO: 10762
  Synthetic

SEQ ID NO: 10764 - protein, 188 aa, Artificial Sequence
  Synthetic
SSIEDLVRRLRELSKRNTEELKRSSEESEDSVREVEDRVRELVKRLRELLKRVEDLIRKIEGKEELEKLVRDAKKTLDDVLKEITDLVKEHNDRNRRLLEESEESSRRVKEKLKKVLEDVRRESTSEEMEKRAKELEEEVRDLTRRNEDALRRDRDTVKRSTERVDKVLKDLEREVRDIKRRVDEATK

SEQ ID NO: 10765 - protein, 188 aa, Artificial Sequence; identical to SEQ ID NO: 10764
  Synthetic

SEQ ID NO: 10766 - protein, 188 aa, Artificial Sequence
  Synthetic
RELDELVKELRKLVEEVKDELRKSSKTSKELVEEIKERLERLVRELKRLVDEVRKTIRRLEGEKELRDLVRKAKKRLEDLTREVEKLVREAHERNKKLLEESERLVDRLRERLEELARDVATKSTSEDARRKLEELKETVRELLREVEKALDEDRETVKRSSEEVEEMLKDLRRRVTELDERVEREAT

SEQ ID NO: 10767 - protein, 188 aa, Artificial Sequence; identical to SEQ ID NO: 10766
  Synthetic

SEQ ID NO: 10768 - protein, 188 aa, Artificial Sequence
  Synthetic
DEIEKLVEDAERLSRENEKRVRKSSEESKKLVKEALDELKKLVEELEKTVRDVDREIERNEDRDELRRLVEDVRRRLEELLRDVRRLLEEVHRTNEKLLEDSERSSREVKKDLKRLVEDVRRKSTTEEAKKRMEDMERRVRELEKRNKKVLDEDRETVRKSSKDLEDAVRELEERVRRLAKKVKESAD

SEQ ID NO: 10769 - protein, 188 aa, Artificial Sequence; identical to SEQ ID NO: 10768
  Synthetic

SEQ ID NO: 10770 - protein, 188 aa, Artificial Sequence
  Synthetic
RELEELVKRLRELSRENEERLRRSSDESRKLLERNKERVKKVVDDLRRLVEEVKKEIERDRDRKRLEELVRRAKEVLERLLRDVRKSSEEVHDRNRKLLEDSRRSSKRVKEDLERVRRDVAEKSTSDDARRRLKELEEEVKRLAKRNEDLLREDERTVRESSRRSEDVVRRAEEMVRRLLEEVERARK

SEQ ID NO: 10771 - protein, 188 aa, Artificial Sequence; identical to SEQ ID NO: 10770
  Synthetic

SEQ ID NO: 10772 - protein, 188 aa, Artificial Sequence
  Synthetic
SELEKLVDELRKLSDENRRRLEKSSRDIEKLLKEIRDRIEELKKEIEDLLKEVKERIERLEGRDELRRLVDELRDRLRRLLEEIKRLVEEARKRLKEVLDRSEKSSRDVKRTLRKVLEDARRRSTTEEAEELLRRLEKRVEELARENEEMLKRDEDTVEEVRKRVTDVLRELKRVVEEVRRKVEEEAK

SEQ ID NO: 10773 - protein, 188 aa, Artificial Sequence; identical to SEQ ID NO: 10772
  Synthetic

SEQ ID NO: 10774 - protein, 188 aa, Artificial Sequence
  Synthetic
SKLEKLVKDAEELSRRNEEELRRSSDESRKLLEKNKRRVERLVEELRKLVKKVRDDIRRERDEEKLRKLVEDVKRRLRELLEEVRRSSEEVKKRNRELLERSTKSSKEVEDVLRKVLEDAARDSTTREAEELLRRLEEMLRRLTKKNRELLRRDEETVRRSSKRSEEVVRRAEEEVERLVKDVEDTRT

SEQ ID NO: 10775 - protein, 188 aa, Artificial Sequence; identical to SEQ ID NO: 10774
  Synthetic

SEQ ID NO: 10776 - protein, 174 aa, Artificial Sequence
  Synthetic
KDEERAKKVVEEIKKRVTEIVRRHHKTNEDLVRRVRESSEKHHRRNEELKERVTRKIRKEELLRKLKKLLDESSERSKRLVDELEKEVRKSSEDLRELLKRLTDRLEEVKKLIEDGADIETLVRELEELLKRLEDEVRRLTKRSKEVIDRIHKLNEDLTRESERVLKEVEDRDR

SEQ ID NO: 10777 - protein, 174 aa, Artificial Sequence; identical to SEQ ID NO: 10776
  Synthetic

SEQ ID NO: 10778 - protein, 174 aa, Artificial Sequence
  Synthetic
RETEEVKKELDKLVEEAERAVREHHKENDRLVKRLEEVIRRHEKSVRELVEKVRREVRDESVVRELEEVAKESLERLRKLLEELVKRAEDSSREVEKLLRDLRRDVEELKKMVENGVDLEKIVRRARELVERLKERLKELTRRSEELVKDLERKIERLSRELARIVKEVLDRDK

SEQ ID NO: 10779 - protein, 174 aa, Artificial Sequence; identical to SEQ ID NO: 10778
  Synthetic

SEQ ID NO: 10780 - protein, 174 aa, Artificial Sequence
  Synthetic
SREEEAKKRLEELLREVEKVVRDHHRENEKIREEVERVVEKHKKRNRELVEAVRKRIRDKDVVKEAEDLLRKSSKDLEELLRTLEELIRRASERLREILERVERVVRELKKLVESGMDVREAVERLKEIVERVRRKVEKLTEDSRRVLEELKRRIEKLTRDSERVLKEIEDRTR

SEQ ID NO: 10781 - protein, 174 aa, Artificial Sequence; identical to SEQ ID NO: 10780
  Synthetic

SEQ ID NO: 10782 - protein, 174 aa, Artificial Sequence
  Synthetic
SDKEEVKKEIKKLKEDIKRAVDEHRKVNKRILEEAEKSSREHEKENRDIVRRVREEVEKREVVRTLEERIRRSSDTSRELLRELKERLEDSTRKVEELLRRAEKVLDEALKLIEAGEDIKEVVKELKKILEKLKRELEDLSRKSEDVLRRLHELNKRLTDDSRRVLDEVREDTK

SEQ ID NO: 10783 - protein, 174 aa, Artificial Sequence; identical to SEQ ID NO: 10782
  Synthetic

SEQ ID NO: 10784 - protein, 185 aa, Artificial Sequence
  Synthetic
SEVDRLLKELEDVLKKVEDDIRRHIKRNEDILRESKKLADKLITEIEDMLRKVEEMIRNNSSEDTLRELLERLRDLVKKIRDRVEESDDRLRKLVEESRRNLEELLERLKRLVEKIKEDLERTVDDEEAVKRLEDTARRVEEEVRRLIRELEDTSRRVLEESRKISKELDERLRRVIEEVEKAAK

SEQ ID NO: 10785 - protein, 185 aa, Artificial Sequence; identical to SEQ ID NO: 10784
  Synthetic

SEQ ID NO: 10786 - protein, 185 aa, Artificial Sequence
  Synthetic
SELEKLIKEIRDILKESEDAIKENLDRNEEALKRVAEEIKRLIDELRKMLEDVKRMIRDDSSEETLKKLLDDLRKLVEEIRRRLKRLLDELRRLVEESREDLERLDEELKRIVDRIDKDAEEKVDDRRAVERVREELEKVIRDSRKLSRDLEEASRRVEEDVRRLIEELERRLKEVIKAVEDAAR

SEQ ID NO: 10787 - protein, 185 aa, Artificial Sequence; identical to SEQ ID NO: 10786
  Synthetic

SEQ ID NO: 10788 - protein, 185 aa, Artificial Sequence
  Synthetic
DEVEKLAEELREILKRSEEMIRENLKRNRDLLRRSKEEVDKLKDELEEMLRRVRRVIEDNSSEETLKRLLEELKDLVRRIREELKRSDDELRKLVKESKDNLRDLDRRLREVVEEIRKRLEDEVDDRELVKDLERKAREVIRTSEELSRRLAKTSEEVLEESERVVEELERRAERVEEEITKAAK

SEQ ID NO: 10789 - protein, 185 aa, Artificial Sequence; identical to SEQ ID NO: 10788
  Synthetic

SEQ ID NO: 10790 - protein, 185 aa, Artificial Sequence
  Synthetic
SEVEDLLRKLEEILRRSKENVERNVRENREMLKKVEKTIRDLIRRAEKLLREVEEAIRNNSSEETAKKLLEDLEREVKKIRDTLKKLLDDLKKLVEDSKRDLEEVDKRLEDVVRKIKDELRRRVDDEDAVRRLEKELERVIKTSRDISERLERESRRVEEEVRKLIEELSRRLEEVRERVKEATR

SEQ ID NO: 10791 - protein, 185 aa, Artificial Sequence; identical to SEQ ID NO: 10790
  Synthetic

SEQ ID NO: 10792 - protein, 185 aa, Artificial Sequence
  Synthetic
REVEEALKDLERILKESEDNVRRNIKKNEDLLRRVEERIRELLDEARRLLERVKEVKKDNSSEDELRELLERLKKAVEDIERELKKLLEDLDKAVRESIEDLKKSDRDLEEVVKKIKEDLRDRVDDKDLVERLKEELERVTRDSRRVVDELRKRSEKVREDVRRLIEDLRRRLEKVIRDVEEDAR

SEQ ID NO: 10793 - protein, 185 aa, Artificial Sequence; identical to SEQ ID NO: 10792
  Synthetic

SEQ ID NO: 10794 - protein, 178 aa, Artificial Sequence
  Synthetic
DETERIIRDLERVLEEIARLAKKNIDDSRRVLKELAEKLKRDSERAKKLLEDVEEIIRRNEKDKRDVVREVEKVLKESKKSSEDVARELKDVLRKSRKSAKDLERTVKKVLEDMKEKVDRRLDEDVDRVVRKVLEDLRRLLEEVKKVNDDSEKEVRRLLEENERKNRRVEEEVKKLLK

SEQ ID NO: 10795 - protein, 178 aa, Artificial Sequence; identical to SEQ ID NO: 10794
  Synthetic

SEQ ID NO: 10796 - protein, 178 aa, Artificial Sequence
  Synthetic
SELEDIIRRIEEVLKRNEELNRKNIKESRDLLEEIRRKAKEDSDRVKEVLRRLEDEVRRNELPKEELERKLKEVLDRSKRSSEELKRDVERVLEDSERSVREVVKRDEDSLREIEKLVKERADEEVKRKVDKVVEDIKRVSEESTRANDESRRALEKVVKENEDTNREVVKRVRDAEK

SEQ ID NO: 10797 - protein, 178 aa, Artificial Sequence; identical to SEQ ID NO: 10796
  Synthetic

SEQ ID NO: 10798 - protein, 178 aa, Artificial Sequence
  Synthetic
SELEEIIDRIRTVLERNRELNERNIRESKRLLDEIKKRVEDDNERSKDIVRRVETEVRERRLPEEELRRKLAEALERSKDSSRKLAETLRRLLEDSKRSAREVVERDRKSLEDIKKLVEDRADERVDEVVEKVLDEMRKVSRTSEESNRKSEEEVRKVLKENNDMNRESVERLRRTEE

SEQ ID NO: 10799 - protein, 178 aa, Artificial Sequence; identical to SEQ ID NO: 10798
  Synthetic

SEQ ID NO: 10800 - protein, 186 aa, Artificial Sequence
  Synthetic
DEVRRVIEELERLLEENRRHSKEDNERSKKINKENHDHSKESTDRAEKLLREVEKLIRETEDKDTIKKIIEEIIRTAEDLVRRNERKAERSIEELERSLRRNATLSEKIIRDARRLIEELVKRKGKDTDRVRDVDRTVKRVVKESRRSTRENEKTNTDVVRSTDESLKEDKKEVDRVIEELDRAVR

SEQ ID NO: 10801 - protein, 186 aa, Artificial Sequence; identical to SEQ ID NO: 10800
  Synthetic

SEQ ID NO: 10802 - protein, 186 aa, Artificial Sequence
  Synthetic
SEAEKVIEDAKRLLKENEDHSKEDNDRVRELLEEVKRHSEESTRRAEKILEEIRELVEKVSEKDKISEEVERVIEELRKLVDENRRRIEKIIRDSEKSVERNRRLSEEIIRRLEELIRDLIRKKGKDTEEVKRVEDEVRKLVKASRESTERNERTNREVAERLKKSLEEDRERVRKVVEDLRRAEK

SEQ ID NO: 10803 - protein, 186 aa, Artificial Sequence; identical to SEQ ID NO: 10802
  Synthetic

SEQ ID NO: 10804 - protein, 183 aa, Artificial Sequence
  Synthetic
DELRKVLKESEDSLERLRRTLEESIKRSRDSLRENTELVKDSLRRSEESLERVEKSNTDSEEAKKIADDVVRENRELVKRVRKHSKDVVDTNRKLVDDVRKIVDRVVRENEKVLREVRRDMRENKEMLKRLEDEIRRSIEELRKALRRVEEEHRKVIEASKDLVRRLEEAHKEVIDRLKEKLR

SEQ ID NO: 10805 - protein, 183 aa, Artificial Sequence; identical to SEQ ID NO: 10804
  Synthetic

SEQ ID NO: 10806 - protein, 183 aa, Artificial Sequence
  Synthetic
DEIERVIEESRKSLDDLRRKAEESIRRSEESLREVEERLKRSIREAEESLKKVENSNKDSKELKDLVEKVVRDNRKLVEEVKRIVEKVVRDNERVVDEVRRRVEEVVKENRKRLEEVRRELKDNDEVVRELKKMIDKSERDLEELLDRVRRKHERVIEELKKLLKRVKDAHERVIRELEKTRK

SEQ ID NO: 10807 - protein, 183 aa, Artificial Sequence; identical to SEQ ID NO: 10806
  Synthetic

SEQ ID NO: 10808 - protein, 185 aa, Artificial Sequence
  Synthetic
SEVEDLIRRVRKSNKESEDVLRESIERSEESNERSERTARRIIEEAERILEEMEESLKKGLPEKDLKKIADELRERLKRLLERVKRVVDEDRRTNEELVRRVEKIVKEDEDRLKELLDEVRRLDLPEEVVRRLEEEVKRVAEHTRKLLKDVRKKHEESIRHSEEVLDRLEKKLREIMKRVTERTK

SEQ ID NO: 10809 - protein, 185 aa, Artificial Sequence; identical to SEQ ID NO: 10808
  Synthetic

SEQ ID NO: 10810 - protein, 185 aa, Artificial Sequence
  Synthetic
KEVEDIIEDVKRSLEESKRMADKSITDSRRSNEESKRIVEEIKRKIDEILERIERKARKGEPKEDLDRIVKELKEELKRLLEEVTRVLEEDADRNRKLLKEVEKIVKEDRERLEKLLDEVRKLDLDEKVVRELEKRVKEVVKTTEDVLREVERTHRESIKHSEDLVRRLEERLRRVAKEVERTRK

SEQ ID NO: 10811 - protein, 185 aa, Artificial Sequence; identical to SEQ ID NO: 10810
  Synthetic

SEQ ID NO: 10812 - protein, 185 aa, Artificial Sequence
  Synthetic
SEVEKAIKEARDSLRESKRLLEESIKRSEDSLEESRRVVEEIKKRLEELLREVKESVDQGQPEDDLRKIVEEAKRRLKELLDRVREIVERDERRNRELVKEVRKIVEEDLKRLEDLLRRIRNLDLDEKKVRDLERMVKRVMEETEKALEDVERRHEKSIRDTRRVLKELEDTVRKVLKEVDRERQ

SEQ ID NO: 10813 - protein, 185 aa, Artificial Sequence; identical to SEQ ID NO: 10812
  Synthetic

SEQ ID NO: 10814 - protein, 185 aa, Artificial Sequence
  Synthetic
SKLEKVITEVRDSLRRSRKMAEDSIRRSEELLKELEDLLKKVRDTLRKILKDIEDLARKGLPKEELTRIVDELEKRLKRLLDEVDKALKRLVKENERLVEEVREIVERDKKTLDKLLEDIERLDLPKELVDDVRREVEKVVEDTRRVLEEVERTHKESIDRLRKLVERVRREIEEIARRVKETRD

SEQ ID NO: 10815 - protein, 185 aa, Artificial Sequence; identical to SEQ ID NO: 10814
  Synthetic

SEQ ID NO: 10816 - protein, 183 aa, Artificial Sequence
  Synthetic
SVVEKLKDEADKLVKRNEDLARRLEEVSKDTIDRLEDVLRKLREVLKRLRRRLEEVLKRVDREELKRDVEEVEKELEELVRKIEKEVKDVVRTSRELVERVKRTLEDDIRRMEDLARKLSRLTDREKFEEVIKRLRDSSKRSEDKIRKVLKDSRDLLEDVRRKIEDVIRRMEKLIKEVEDRVR

SEQ ID NO: 10817 - protein, 183 aa, Artificial Sequence; identical to SEQ ID NO: 10816
  Synthetic

SEQ ID NO: 10818 - protein, 181 aa, Artificial Sequence
  Synthetic
SVVEELERVMRELKKRNEELSRENHESVKEAEKRNKRLSEELEKVSRDVIKDLERVVEEVEEVKDEVKRVIDESKRSLEEVKRHSERVVKRLRDLNKDSEDHSREIVRTMEKLLEDARRLTDEREIRRIIEELKRLSDENEERIRRISEEIKDLSRRNEETVRRVIEENRKLLEDATRRTK

SEQ ID NO: 10819 - protein, 181 aa, Artificial Sequence; identical to SEQ ID NO: 10818
  Synthetic

SEQ ID NO: 10820 - protein, 181 aa, Artificial Sequence
  Synthetic
SLREKLKEVIRRLEEENRRVSEENHRSVREVEEENRKVSDELRKVAEELKRRLEEVVRRVREVEELVRELVERMERILRRVEDHSRRVVEELRKLNEESERHSRDVIRKLRELLERAKRLTDSREIEDIIRRVKKLSKENKETIERISREIRELSKRNEEEVRRVIRRLEELLEELERTAK

SEQ ID NO: 10821 - protein, 181 aa, Artificial Sequence; identical to SEQ ID NO: 10820
  Synthetic

SEQ ID NO: 10822 - protein, 181 aa, Artificial Sequence
  Synthetic
RVIEKAEEVVDRLKKRNKEVLKENHDSVREVEKENRELLEKAEKVVRELEERLKEVVEEVSEVTEDIRRVREELKKILEDVARHSKETIDLLRKLNKESEKHSEKTMRDLEKLLEELRRLTDEREIERIIKEAEELSKRNEEVIDEISKRIKELSERNRERVEKVIEEAKELVKRVTDKVK

SEQ ID NO: 10823 - protein, 181 aa, Artificial Sequence; identical to SEQ ID NO: 10822
  Synthetic

SEQ ID NO: 10824 - protein, 178 aa, Artificial Sequence
  Synthetic
KDEEKAEDVVRRLTEEVRRVHEKTRDVVRRVTERSNDVSRRSKEEVRELLERADDLARKGKISEELVRRVKEELERVVREDEELNEDLKRKLDDLLRRDEKLVREIERRLEEVVKLVRDGMSVEDLIRELKRLVDELRERSEDLIRKAERVLERLEEESRRLLKELRDLLEDVTRKAE

SEQ ID NO: 10825 - protein, 178 aa, Artificial Sequence; identical to SEQ ID NO: 10824
  Synthetic

SEQ ID NO: 10826 - protein, 178 aa, Artificial Sequence
  Synthetic
SETEKAREVVRELEKRNDEVHKETRDVVRRLEETSDEVSKDSERKVDRLREEVKKVRDDGKVDDKLVKDVEDKLKKVTDEDRRLNEEAKKELRRVVEEDRRSVEESRKRLEEVVRLVEDGKDVEELIRRMEKLTEDNERRSRKLIEELKRLLEDLREKSERLIRELERLVKELRDRAE

SEQ ID NO: 10827 - protein, 178 aa, Artificial Sequence; identical to SEQ ID NO: 10826
  Synthetic

SEQ ID NO: 10828 - protein, 178 aa, Artificial Sequence
  Synthetic
SEKEKAREVVKKLKKRVDEAHKKTKDVVEELRKRNRDVHRTTREVVRDLLKKVKDVERRGEVSEEVVRRVEERLREVVEEDEKSVRESERVLDEVEKDDRRLVEEIRRRLEDVVRMVEAGKDVETLIERLRELIDELRRRSEKLIKELREVTKRNKERSDRLIKELEDLVKKLKDDAT

SEQ ID NO: 10829 - protein, 178 aa, Artificial Sequence; identical to SEQ ID NO: 10828
  Synthetic

SEQ ID NO: 10830 - protein, 186 aa, Artificial Sequence
  Synthetic
DEVEKLIEDLKRIVERDEREIRELIKELDDHVRKDEKIARDLERRLKEILDEVRKMVTDNSSEETVTRLLREVEELVRKIEKDARDSLESNRELAERIKERAERSLRELEKRVTEIEERLKERLREKKELLEKVKRVLEEVRRRSRETLERLREVLERSIRDSERTLEKVREMLERVRKEIEKLRK

SEQ ID NO: 10831 - protein, 186 aa, Artificial Sequence; identical to SEQ ID NO: 10830
  Synthetic

SEQ ID NO: 10832 - protein, 186 aa, Artificial Sequence
  Synthetic
SEVEELDKRLRDHVRRDEEIVERLIRELKRHVERDREEARRLIEELRRLLEEVKRMMEDDSREDDVRRLLEEVRELVARIIERAEDSLRSNEDLVRKIEERLRRSLKSNRDLVKEIKKILDRDLREDRKLVRDVEKSLEESIRRSEETLKTVKDVLDKSKEDSKRTVEDVERVLREAEKEAKRATD

SEQ ID NO: 10833 - protein, 186 aa, Artificial Sequence; identical to SEQ ID NO: 10832
  Synthetic

SEQ ID NO: 10834 - protein, 186 aa, Artificial Sequence
  Synthetic
SEAEKLIKELEDHVKRVEDRARELIDELRKHVEEDERRARKLIEELRRLLKEVKRMVDDNSSEEVVKRLLEEVRRLVEEIERRARKSLESNKELVKEIRERVTRLLESNRELVRRIEEVLDRDLREDEDLVRRVRKVLRRSEEDVRRLIEEVERVLKRSEEESRRTIREVEEVLKEVERAVEELAR

SEQ ID NO: 10835 - protein, 186 aa, Artificial Sequence; identical to SEQ ID NO: 10834
  Synthetic

SEQ ID NO: 10836 - protein, 180 aa, Artificial Sequence
  Synthetic
SLEDRVREVVERSERDLRRSTDEIRRVVEEAEKALRRLVREVEEVVREVKERLERVVREGRVDRETVRRVIEDIERALDEVRETVRKIIEDLRKILEDVRRHSERVIRENRKLLEAARNGDEDTVRKVIEDSDRSLEENKRLVKKVIDEIKERLKEMKKRAEEIIERLKKLLEEVEERAR

SEQ ID NO: 10837 - protein, 180 aa, Artificial Sequence; identical to SEQ ID NO: 10836
  Synthetic

SEQ ID NO: 10838 - protein, 180 aa, Artificial Sequence
  Synthetic
DLTKRVEEVVRRSRERLERSTRDIKRKAEEVKERLKKSSKEVEKVIREVETELERLRREGKVDEDTVREVLERIRRLLEEVKEHSKRVLDDIERLLRDLEEHSKEVVRRNERLLREIKDGDEKKVEEVLRRSEKSVRDNKKRVEEVAETLKKILTDNRRLVKRVKEELDKLIRDVEERAR

SEQ ID NO: 10839 - protein, 180 aa, Artificial Sequence; identical to SEQ ID NO: 10838
  Synthetic

SEQ ID NO: 10840 - protein, 179 aa, Artificial Sequence
  Synthetic
SEKEDVERVVERVKREADELLKENHKSVKDVDERVKETVERNHRSVRKAEEDVKRVEREDKRLKELVEELRRRLKELNDRSKKLSRESAERLKKLNKESEEVIREVKRRAEEIVEMVKRGDVEVREVAKELEDIVRRIKELVERSNRELKKIVEDNERVVEESDRRIKEILERITEASR

SEQ ID NO: 10841 - protein, 179 aa, Artificial Sequence; identical to SEQ ID NO: 10840
  Synthetic

SEQ ID NO: 10842 - protein, 179 aa, Artificial Sequence
  Synthetic
SEKETVEEVVDKVRRDLDKSLEDNHKSVEEVRRRVEKTLRENHESVERARKRARDLEREDRELKEMVERAEEELEKLNRESADISRRSEERLEELNRRSKRLTDESKRKLEEIKDVVRRGDIEVREVVERAKRILEDNKKKIDESNERLERIVRENKEMVERSDRRIEEIVERIERETR

SEQ ID NO: 10843 - protein, 179 aa, Artificial Sequence; identical to SEQ ID NO: 10842
  Synthetic

SEQ ID NO: 10844 - protein, 179 aa, Artificial Sequence
  Synthetic
DEKEEVEKRAEEVRKKVDKLLKENHESVEDARRRVDKTLRENHESVEEVKRRVDEVRREDERLERVVREIKKRLKKLNDESKKLSDDSKERLKRLNEESEKVARDIKRELKRIVELVRRGDVRAEDVMEELDRLVEDLRRKVEDSNRKIKRIVDENKREVEKSNRKLRELLKELEDRAR

SEQ ID NO: 10845 - protein, 179 aa, Artificial Sequence; identical to SEQ ID NO: 10844
  Synthetic

SEQ ID NO: 10846 - protein, 179 aa, Artificial Sequence
  Synthetic
SKKEDAERVVREVTREVRRLLKENHDSVREVLKRVDETVERNSRSVKEVLRKVREVEREDRRLREVVKEIEKRLRDLNERSKKLSKESKEELKKLNDESRKVVEEIERRLKELVDLVRRGEVDLKEVVDRARDLIRDLTRKVKESNERLEEIVERNEREVRKSDEDLKRLADDLERKAT

SEQ ID NO: 10847 - protein, 179 aa, Artificial Sequence; identical to SEQ ID NO: 10846
  Synthetic

SEQ ID NO: 10848 - protein, 179 aa, Artificial Sequence
  Synthetic
REKEEVERVVEDVRRRLDESLERNHKSVRDALREVDRTVEENSRSVEKVRKRLKEVEREDKELEDLVRKIKEDLDRLNEESRRLSEDSKRRLKDLNRKSAKITRDSKEELRRIVEAVRRGDVEVREVKKELEKIVRDNERVVEDSNDKIRRIVTKNTEDVKRSDETLERIVEEIERRAR

SEQ ID NO: 10849 - protein, 179 aa, Artificial Sequence; identical to SEQ ID NO: 10848
  Synthetic

SEQ ID NO: 10850 - protein, 179 aa, Artificial Sequence
  Synthetic
KEKEDVERKVEDVKRDVDRVLEENHRSLKEAEERSNKLSDTSRRVAKRVVDDVRRLKREDERLVRLVEELKKELKRLVEEDKKINDEIREELRRLNEDSKRVVDDLKRRLKEIVDAVRRGDIDVKEVVDRLEKIVRDIRKEIERSNRDVERLVRTLEEVSKRIIDTLERIIDKIREDTK

SEQ ID NO: 10851 - protein, 179 aa, Artificial Sequence; identical to SEQ ID NO: 10850
  Synthetic

SEQ ID NO: 10852 - protein, 178 aa, Artificial Sequence
  Synthetic
SEAEELIEELERIAEEDRKLVEDSIRKLRKILDEDRKIMKRLAEELDRILEDVKRKVDKGLSEKELKDVVKEVEDKLREVLRRAEESVRESEERLRENEERNKESVERSRERLDRVIEDVDKVKELEEVVRKVKRESDRTLEKSKKVVDEVRRRSEETLEKLRRVVERVRKRVDEASK

SEQ ID NO: 10853 - protein, 178 aa, Artificial Sequence; identical to SEQ ID NO: 10852
  Synthetic

SEQ ID NO: 10854 - protein, 178 aa, Artificial Sequence
  Synthetic
DRADELRERLKEIMERDRRIMKELEDELRELVERDERIIRELERRLEEIVKDVERKAKSGQDEESLKRVVEEAERVVEEVEKRVRESVKKTKDALDELIRRAEDSVRRSREELEDLIRKVSDVDELRRVVEEVEKDSERTLKELRRVVKEVEERVEKTLRDLEEVLERVKERVKRLKD

SEQ ID NO: 10855 - protein, 178 aa, Artificial Sequence; identical to SEQ ID NO: 10854
  Synthetic

SEQ ID NO: 10856 - protein, 178 aa, Artificial Sequence
  Synthetic
KEAEDLMREVEELVRRDEEIIKRLADELEEIVDDNRRKVEDLVRRLEEILRRVEESMRKGLSEEELRRVVEDVERRLRELIREAKRSVEESRRRLEEVRKRVEESVERTKRELDRLIEEVKDVKELREVIERARKRVEETLRELERKLEEVRKTSEDLLRRLEEVVKRVKEEVEKLEK

SEQ ID NO: 10857 - protein, 178 aa, Artificial Sequence; identical to SEQ ID NO: 10856
  Synthetic

SEQ ID NO: 10858 - protein, 178 aa, Artificial Sequence
  Synthetic
SEMDELRKELEDLARDDKRRVEESIRRLEKIAEDNERLARESIKRLRRLVTELEKLARKGLSEEELERVVRRIDEELKRNEEENRRSVEKSERDLRRNEEENKRSVDETEEVLRRLIEEVKDVKELKEVVDRVREIVKKTLEESREVVKKVREDSKRLLEESKRVVEEVKKRVEELKK

SEQ ID NO: 10859 - protein, 178 aa, Artificial Sequence; identical to SEQ ID NO: 10858
  Synthetic

SEQ ID NO: 10860 - protein, 175 aa, Artificial Sequence
  Synthetic
DEVEEVKEELKRTSRDDERKVEEIRKRLEESTRRLRELAEELKDELRKSSRDLERLRRENKDLTDVLRKNEELVKRIDDKLKKVLEDNKRLVDEIRKTAEKSVRDNEEVVRRIKEELKDVREVERALERSLKRSDETVKEVEELLRRSLEDSKKLLEEVREALERSKKRSDELRR

SEQ ID NO: 10861 - protein, 175 aa, Artificial Sequence; identical to SEQ ID NO: 10860
  Synthetic

SEQ ID NO: 10862 - protein, 175 aa, Artificial Sequence
  Synthetic
KEVEDVKEELRRSSKKLRELAERLKKLLEDILDEDRKLAEEIKKRLEDSSRKIEELKRRNRDLTDILRENRELVERARRRAEESLKKVKELLDKIREAIREVLERNKELVDEIRKRLKDVDEVERMLKESDKESKRLLEEVDRMLKEVIKASKKSLDDVDRVLRRSERESEKRRK

SEQ ID NO: 10863 - protein, 175 aa, Artificial Sequence; identical to SEQ ID NO: 10862
  Synthetic

SEQ ID NO: 10864 - protein, 175 aa, Artificial Sequence
  Synthetic
SEVEKVKEELRESSRALRKLVEKIRRILRETSERDRDTVREIADRLRKSSRRVEELKRNNKDLTDVLRDNDRLVKEIEKRLKDSLDENKRVVDKLREEAKRALEENKKLVTRIEKDLKDVDEVRRVLEESERRSKKLLDEVEELLRRSERTSRESLKEVKERLRKSLEESERRAR

SEQ ID NO: 10865 - protein, 175 aa, Artificial Sequence; identical to SEQ ID NO: 10864
  Synthetic

SEQ ID NO: 10866 - protein, 183 aa, Artificial Sequence
  Synthetic
SLVERLKKVVEDAERELRRLTKETEDVLREAEETIKRLSERLKKANEDTERKIRRLAKENRDEKVIKKLEDVVRRSTKLVEDVHRDNERVLDEVRKLVDEVRKTNEDVLREVRRLMEELARLTDEKKIDDAIKRIRDLIERVEEINKEVVDRIKELIERVEEINETVIRDSERLIKEVEDEVR

SEQ ID NO: 10867 - protein, 183 aa, Artificial Sequence; identical to SEQ ID NO: 10866
  Synthetic

SEQ ID NO: 10868 - protein, 183 aa, Artificial Sequence
  Synthetic
SLEEDLRRVLEEVKRELKELSKRSKEVNRKTEETARRLSEKSEKVNRETKKRVEDLMRENRDEKVIRELRDAVRESTRLLEELKEDNRRVVERSTDLVRKVDRINREILKEVEELVRRLSRLTDEKAIRDAIRRLKELVERVKRTNEEVVKESEELIERVRERNDDAVRKSRRLIERLTEKVK

SEQ ID NO: 10869 - protein, 183 aa, Artificial Sequence; identical to SEQ ID NO: 10868
  Synthetic

SEQ ID NO: 10870 - protein, 183 aa, Artificial Sequence
  Synthetic
SLKETLEEVLKEVKRRIEDLSRRLEEVLRRAREELKRLSDDSRRVVEEAEERVRRLMEENRDEDVIRKLREALKEVRRLLEEVERRNRALMKEVEDLVRKVNKDNRRVLEEIKRIVEKLSRLDKKEEIKRVIDELRRLIEEVEKRNREVVEEIKRLIKEVADDNRRALERIRRLIRKLEEEVK

SEQ ID NO: 10871 - protein, 183 aa, Artificial Sequence; identical to SEQ ID NO: 10870
  Synthetic

SEQ ID NO: 10872 - protein, 183 aa, Artificial Sequence
  Synthetic
SLTERLREVLKKVEDTLRKLSERLRDVLRKAEKTIEEISRRSEEANRETKERAERLMEENRDERVIRKLEEVVRRSTKLVRDVDRRNKKVLRDVRELVKKVNEENKKVLKEAREKVDELSRLTDKDRIEDVIRELDRLLEEVRRINEEVLRRIEELIKRVKEENDRVMETSRRLIETVKEEVK

SEQ ID NO: 10873 - protein, 183 aa, Artificial Sequence; identical to SEQ ID NO: 10872
  Synthetic

SEQ ID NO: 10874 - protein, 183 aa, Artificial Sequence
  Synthetic
DKVRKILKEMRDLVRRNKEEIDRSIRKIEELIERNKREIDKSIEELKRLLDEVRKIVKDERDKEKLRRIVEEVDKRIEKIHKENEDHSRRSSEEVEKIHRENKEHSDRSSEDIRRLLEELRKDGLEMVRDVARVVKEVHDDNRRLTEKSERVVREAHRRNEEIVKASEEAVREAKRRLEELRR

SEQ ID NO: 10875 - protein, 183 aa, Artificial Sequence; identical to SEQ ID NO: 10874
  Synthetic

SEQ ID NO: 10876 - protein, 183 aa, Artificial Sequence
  Synthetic
DKVREILKRLEDLVRTNKERIDESIEELERLADENRRRIKKSIDDLRRLIEEVERIVKDRRDDRTLDKIVTEAKETVKRIHEENERNSKRSSETVKKIHDENREHSKRSSEEAKRLIDELRKDGLEVVRDVERVLEEVDRANRDLVRRSKEVVDKVHETNKKLVEESKEAVDRVTELLERARK

SEQ ID NO: 10877 - protein, 183 aa, Artificial Sequence; identical to SEQ ID NO: 10876
  Synthetic

SEQ ID NO: 10878 - protein, 183 aa, Artificial Sequence
  Synthetic
DEVEELVKKLEKVLREIEEMSERLSDENRKVLEKIKEDSKRLNEELERVLRRIREASRDKREEVLRKLVEELKKVLEEVRERSEDLLKEAKDIARESRKRSEELVRRLEEVLREVKRAAERDVKSELLERLREVLEDVKRKLDEIHRRNEESLERLEREVKRLNEDNRRSLKTVDDRLRETKR

SEQ ID NO: 10879 - protein, 183 aa, Artificial Sequence; identical to SEQ ID NO: 10878
  Synthetic

SEQ ID NO: 10880 - protein, 179 aa, Artificial Sequence
  Synthetic
SEKEKLDAVLREVEEAAKKNIDKNRRSLEEVAEVVRELVKENRKSLEEVKEMIERIIREIRNKEDLVRKAREVLKEIERLVRESIKELERLLKEIEKLVEESVRRSRKLVKEIEELVKKGGDDVEKIVEDLKRVLEESHKLSEDVDRLIKRVVEEAKKLSRDVNEDVKRVVKEVKDEAD

SEQ ID NO: 10881 - protein, 179 aa, Artificial Sequence; identical to SEQ ID NO: 10880
  Synthetic

SEQ ID NO: 10882 - protein, 179 aa, Artificial Sequence
  Synthetic
SEKEKLDDVLRKVKDTLAENIKNNKESLDRVREEIERNIRRNEESLDRARRTVEKIIEEIREDEDLVRRAEEMVRRVADLVRKSVERSRELLKRLEDLVRKSVEDSKDLLRRVEKLVREGGDDVEKLVEELRRLLKESHELSREVNDRLRRALEESHELSKEVNETLRKLLEDIRREAK

SEQ ID NO: 10883 - protein, 179 aa, Artificial Sequence; identical to SEQ ID NO: 10882
  Synthetic

SEQ ID NO: 10884 - protein, 179 aa, Artificial Sequence
  Synthetic
KDEERLKKVIDEVRKRVEENIRTNEDSLRKAEETLKRNIRKNEKSLEDARREIEELIREISDDEDLVRELEDVVRKIAELVKRSVEESERLAKELRDLVKESVDRSRKILEDLERDVERGGKDVEKLIKKLRDLLEESHRLSEEVNRTLKRALDESHERSKEVDKRIEEMVERVRRKVK

SEQ ID NO: 10885 - protein, 179 aa, Artificial Sequence; identical to SEQ ID NO: 10884
  Synthetic

SEQ ID NO: 10886 - protein, 179 aa, Artificial Sequence
  Synthetic
SEREKLEKVLEEARREIERLAEENRRSLDRARKEVKRLIDNNRKSLDDVRKRVDKLVKDISDDERLIRELERVVKDIEELVRDSERKAREMVKRVERLVRESIRRLEDVVRRLEDLVRKGGDDVEKLVEELKKVLDDVRKESERVNRTLKKLLEDIERLSREVNKRIKEMVRKATEDVR

SEQ ID NO: 10887 - protein, 179 aa, Artificial Sequence; identical to SEQ ID NO: 10886
  Synthetic

SEQ ID NO: 10888 - protein, 179 aa, Artificial Sequence
  Synthetic
SEKEELDKVLKEAEDKIEENIRDNERSLRDVERAVRRIIENNRESLEELDKAVKEIVRRISDRKELITRLDKAVKDVKRLVDRSVEEAKRIVDEARELVRRSVEESRRLVERLKKLVDDGGDDVKTLVEELRRALEESHKLSEDVNRALKKVLEEIADLSRKVNDKLRELLKRLEEEAR

SEQ ID NO: 10889 - protein, 179 aa, Artificial Sequence; identical to SEQ ID NO: 10888
  Synthetic

SEQ ID NO: 10890 - protein, 179 aa, Artificial Sequence
  Synthetic
SKEEKLDKKLKEAERTIRENIKENRESLERARKTLEENIRNNEDSLRRVEEEVRRIIEEIRDDEELVRRAEDVVRKLRKLVEDSVRDSERIMEEIERLVRDSVRKSEELVERIKRLVEEGGEDVDDILRRIEEILRRSHRLSKEVNKRIKELLDRSHELSKRVNDELDKVLKEIRREAK

SEQ ID NO: 10891 - protein, 179 aa, Artificial Sequence; identical to SEQ ID NO: 10890
  Synthetic

SEQ ID NO: 10892 - protein, 179 aa, Artificial Sequence
  Synthetic
DEDEELKKVLDRAKKRVDELVRNNEESLERVKRAVDRLIEKNERSLERAEDELRKLVKEISDDEDLIKKIRDAVEEVRRLVEESRRRAEEVVKRAKELVERSIRELERVVKRLADLVREGGDDVEKLKKELDDMLRKLEELSRRVNRTLEELLRRIEELSREVDERIKKVLKEIKDRVK

SEQ ID NO: 10893 - protein, 179 aa, Artificial Sequence; identical to SEQ ID NO: 10892
  Synthetic

SEQ ID NO: 10894 - protein, 179 aa, Artificial Sequence
  Synthetic
SEKEELDDVLRRVEEKVRRNVRKNEDSLKKVEDEVRRNIRNNEKSLEDAERDVRKLAKDVSDDEDLIRRLKEVVDEIRKLVEESVRRSKRLLEEIRKLVEESIRRSEDLVRTVEDLVRKGGDDVKKLLKELEDLARESHKLSRDVDRKLEDALRRSHRLSREVNRKIEEMVRKLREDTR

SEQ ID NO: 10895 - protein, 179 aa, Artificial Sequence; identical to SEQ ID NO: 10894
  Synthetic

SEQ ID NO: 10896 - protein, 179 aa, Artificial Sequence
  Synthetic
KEEERVTDALRRVRETAKKNIEYNRRSVERVERTLKELVKNNTRSLERVRKAVKELVERIRDKEELIRELERVVKELEKEVRDSIKRIEEAVKRSKDSSETHVKTSEDVVRRLEDEVRKGGDDVDKLIERLERVLEKSHRDLRRNSKDNKRILDEIKKESEEVNRRLEEVLRKIKEDVE

SEQ ID NO: 10897 - protein, 179 aa, Artificial Sequence; identical to SEQ ID NO: 10896
  Synthetic

SEQ ID NO: 10898 - protein, 186 aa, Artificial Sequence
  Synthetic
DKVRELEKTLRDLLRENHRISEDLNKKLKDMARRNKKHSEDVIEKIKRLLDRLREIVKRDGGEDKRVVEELRRIVEEVRRLLREDEKENERSLEEVEKLVRESEKRSKKILEDAKKLVEDLERDNIDDELVRRVREVLREVEERLRDNIKDNRRSLDDHRRVIEETRRESKRAVERAEDEVKKLED

SEQ ID NO: 10899 - protein, 186 aa, Artificial Sequence; identical to SEQ ID NO: 10898
  Synthetic

SEQ ID NO: 10900 - protein, 186 aa, Artificial Sequence
  Synthetic
SKVEDLIRRLKTLLDDLRRISREVDEKIKEILKEVERHSKEVIDRIKDILRRVEEIVRRKGGEDEEVVEELRRVVEEVERLLREDVKEIDRVVKEVRDLLRRSVEIIEEIVKRVRDLVEEIKRDNIDKRLVERVEKVAREVEEAVRKLIEKNKESVERAEETARRLIERSKRAVDEARRKIEELRR

SEQ ID NO: 10901 - protein, 186 aa, Artificial Sequence; identical to SEQ ID NO: 10900
  Synthetic

SEQ ID NO: 10902 - protein, 186 aa, Artificial Sequence
  Synthetic
SKVEELIERIERLLEEVRRISDKVDEDLERLIRENEKHSKKIIKELEKLLKELEDIVRREGGEARRVVEILKKIVEDVRDLVRRDEKLNRDSAKTAEDLVRTSEEDLKRVLEEVKRLLEEIERDNIDKRLVERLRKVVEDAEREIRRLIEKNKRSLERHKRELERTIKESRDVLKKVEDRVRELAR

SEQ ID NO: 10903 - protein, 186 aa, Artificial Sequence; identical to SEQ ID NO: 10902
  Synthetic

SEQ ID NO: 10904 - protein, 186 aa, Artificial Sequence
  Synthetic
SKVEDLERRIRKILREVEEISERVNRALKRLLDENRKHSEKIIRELEELLRRLEEEVRTKGGEAREVVEAIKEIVERAKRLVDEDRRLNEESRKRAKELVDESRKTLEEVVKEVRKLAEELEKDNIDKSLVDRVRKAVEEAEERIRRLIENNERSLRRHEEAIKKTIEESDKVLEDVRRRAEELLK

SEQ ID NO: 10905 - protein, 186 aa, Artificial Sequence; identical to SEQ ID NO: 10904
  Synthetic

SEQ ID NO: 10906 - protein, 186 aa, Artificial Sequence
  Synthetic
SKVERLIERLKELLDENHKISERVNKELERLARENDKHSKDLIRDIERILREVEEIVRRDGGEAEEVVRRLREVVKEVRDLLKEDADRNRESAKEAEKLVKDSEDTSRDILREATELVERIERDNIDRRLVEEVRRVLREVREAAKENIRNNRESLKRHKDALRKTIEDSARVVKRAEERIRELER

SEQ ID NO: 10907 - protein, 186 aa, Artificial Sequence; identical to SEQ ID NO: 10906
  Synthetic

SEQ ID NO: 10908 - protein, 186 aa, Artificial Sequence
  Synthetic
SKVDELVERIERLLRELTKHSKEIIDRLKKLLEDNERINRDVIRRIEEILKEVKRIVERDGGEDERVVRTIEEMVKRLAELVKRVEEINDESAKTVTKLVEDDMRELRRIVEEVEKLAEDLERDNIEEELVRKVREVVDRARERVEELIRRTEDVLKKHREELKKLIEESRRVLEEAKKTADELKK

SEQ ID NO: 10909 - protein, 186 aa, Artificial Sequence; identical to SEQ ID NO: 10908
  Synthetic

SEQ ID NO: 10910 - protein, 185 aa, Artificial Sequence
  Synthetic
DEVRKLKEDLRRLLKENKEKVEKVIRENEKLLRENKKMVEDAERDLRRLLKELEDLVRKRGTDEDLAETAKRVKEEVDRILEELRRHSKRSSEESRRSVEEVERHSRESSERVDKIIRDAEARGLPKELVDEVRRVARRVKEENKRLLDEVRKVSEEVERTNRELVRRVEEVVREVRERIDELLR

SEQ ID NO: 10911 - protein, 185 aa, Artificial Sequence; identical to SEQ ID NO: 10910
  Synthetic

SEQ ID NO: 10912 - protein, 185 aa, Artificial Sequence
  Synthetic
SEAEDLERRIEKLLEDNTRLVERVIEENEKLLRDNAEHSKEVEDRLRDLLRRLEEVVRKRGTDEELKKLADEVVKRVRDILRENKKHSDDSSRRSEKSVDDVRKHSKESSDEVKRILDDIRRRGLPEELIKRVEEVVRKAKKTNEDLLREVEKVSREVKKANEDLLRRSKEVVDEVEKDIERLKR

SEQ ID NO: 10913 - protein, 185 aa, Artificial Sequence; identical to SEQ ID NO: 10912
  Synthetic

SEQ ID NO: 10914 - protein, 185 aa, Artificial Sequence
  Synthetic
DDIERIIEKLKELLERNKRHTEEVIKELERLLRENERHSREVKKRLEELLKRLEDVVRREGTDERLKKLAEDVLREVRDILRRNEEHSRDSSEKVREIIERNEEHSRRSSDTVDKILEEVRRKGLPEEVIRRIEEAVREVKEANKDLVRESRRVARRVEEENKRLVEESRRVVEKVEKRIRDLLR

SEQ ID NO: 10915 - protein, 185 aa, Artificial Sequence; identical to SEQ ID NO: 10914
  Synthetic

SEQ ID NO: 10916 - protein, 185 aa, Artificial Sequence
  Synthetic
DEIDEARKELEEILRENREKVDEVRKRLEKLLRENEEVVKEIIRRLKELLKELERVMREEGTDERLKELVREVMDRVRKILEEAEKHSRDSSREVDKILKEVEKHSRDLVRRVREIIRRLEAKGLPEKLVREVRKDAERAERELRRSVEDIRRVVERVKRENERLLREVEKVVEEVKEELRKIET

SEQ ID NO: 10917 - protein, 185 aa, Artificial Sequence; identical to SEQ ID NO: 10916
  Synthetic

SEQ ID NO: 10918 - protein, 185 aa, Artificial Sequence
  Synthetic
DEIERVIEELKKRLDENRRVLEEIIRRLEELAKRNKRHSEELEKRLREELDKVRKRLEETGTDEEVEKILRTVKREVDKILRENEEHSRKSSEDVKKILDEARKHSEDVVRTVEDILRDVARRGLPRELIERMREVVEEVERALRKSLKDVEDVVREVEKKNKELLEKSKKVVEDVRRTLEKLRE

SEQ ID NO: 10919 - protein, 185 aa, Artificial Sequence; identical to SEQ ID NO: 10918
  Synthetic

SEQ ID NO: 10920 - protein, 185 aa, Artificial Sequence
  Synthetic
SEVEEAIKTLKKLLDDNKRHTEEVIRRIEELLKRNEEHSRKVIEDLERLLRKLEKMVRDRGNDERLKKLVRDVLERVKELLKRNEEHSRRSSKRVEEILRENEEHSRRSSRTVKEILKDVRRKGLPEEVVRRMEEAVRRAEETNKDLVRRSREVVRRANETNKKLLEDSKRVVERVEKRLEELLR

SEQ ID NO: 10921 - protein, 185 aa, Artificial Sequence; identical to SEQ ID NO: 10920
  Synthetic

SEQ ID NO: 10922 - protein, 185 aa, Artificial Sequence
  Synthetic
SELEEIERELEELLRENKKLVDRVREELKKLLDELRKHSERVIREIERLLEELERVVRKRGTDERLKELVEKVKEDVKKILRENEALAEEVDRRVDKILRDVEEHSRDSSRRVEELLKDARDRGLPEELIKRLTDVVRKVKEDNKRLVEEARRVVEEVKREIKRLLEESREVVRRAERRLEELRR

SEQ ID NO: 10923 - protein, 185 aa, Artificial Sequence; identical to SEQ ID NO: 10922
  Synthetic

SEQ ID NO: 10924 - protein, 185 aa, Artificial Sequence
  Synthetic
SEIEDAERKLKKLLEDNTDMARRLIERLRKILEENKRHSERVKRELEEILKELEDLLRRKGTDEDVARKVEDIERRVRDLLRRNREHSRRVLEEVRKILEEAERHSRESSREVKRILDDLRAKGLPEELVKRVEDVVRKVDEDNKRLVEEVRRVVEEVRKTLEDSLRESERVVREVKKRLEDLKR

SEQ ID NO: 10925 - protein, 185 aa, Artificial Sequence; identical to SEQ ID NO: 10924
  Synthetic

SEQ ID NO: 10926 - protein, 178 aa, Artificial Sequence
  Synthetic
SEREKMEKVVREAKKDLDRSLKRVKEVAEEVKKELDRSLEEVKRVSEENKKEVDRIRKKGDVDDEILRRNKERSDRSLEEAKEITDRTKRKVEELLKTIEEVSRRSKRKVDRISEEVDRGKDVDTLVRRLEKILEENRRIVKEIEDRLRKLLEDNKRVVDEIIKRNEDSVRDVERRAK

SEQ ID NO: 10927 - protein, 178 aa, Artificial Sequence; identical to SEQ ID NO: 10926
  Synthetic

SEQ ID NO: 10928 - protein, 178 aa, Artificial Sequence
  Synthetic
SEREKVEEVVREAKERLDESVKRVEEVSRENKKEIDRLLEEVKKVIEEAKRRLEELRRRGLVDEKVVREVEEELKRLLEEIRKVVEENKEESDRSLKEVEDISRESKERVDRILKRVDDGSDVDEVLKELRRILRDNERMVKEVIERNRKSVEDLERIARRIIEEIERLLKELTDRAR

SEQ ID NO: 10929 - protein, 178 aa, Artificial Sequence; identical to SEQ ID NO: 10928
  Synthetic

SEQ ID NO: 10930 - protein, 176 aa, Artificial Sequence
  Synthetic
SEDEEVEEAADRHRRSVEDSSRDLKKVLDEDRRTVAESSRKLKEILREVEREVKRVEDDGSVSDEEVRRMLDELRKLVERHHRENERLLRESEKLVKKHHDDNERSLDEVRKLVEDREGDVEELKKRLKELSDESRKSLERVKRKLEETSRRSEESLRRVKKDAERLVREIEKRAK

SEQ ID NO: 10931 - protein, 176 aa, Artificial Sequence; identical to SEQ ID NO: 10930
  Synthetic

SEQ ID NO: 10932 - protein, 176 aa, Artificial Sequence
  Synthetic
SEDEKVKKVLDDVRRKAEDSSRRITEVLRRHEETVRRSSEKLKKLLDELREDADRVRRAGKVDEETVRKLVEDVDELVERHHRRNEESLKRVKELVEEHHKLNEDLLRRVEELVRAKKGDVKDLERKARDIVRKSEESLERVVRELERLSRDSERSLKKVKEDLERVVEEIRRRAD

SEQ ID NO: 10933 - protein, 176 aa, Artificial Sequence; identical to SEQ ID NO: 10932
  Synthetic

SEQ ID NO: 10934 - protein, 176 aa, Artificial Sequence
  Synthetic
SEDEEVEKVLREDEESVKRSSDEIRKLLEDHERTVRESSDELKKALDEVRKRLDELKRRGQVSEETVRELVRRVEELVKDHHRKNEESLKRAEDLVREHHKENERLLEESRELVRRREGDVEDLKREAERTSEESRRSLEEVRRRLEELSERSRESLKRVKDELKRVVEEIEERAR

SEQ ID NO: 10935 - protein, 176 aa, Artificial Sequence; identical to SEQ ID NO: 10934
  Synthetic

SEQ ID NO: 10936 - protein, 176 aa, Artificial Sequence
  Synthetic
SEDEEVKRVLDELRKRLKESSDRLREVLKRDKRTLEKSSEDIDRALKKVERALTEVLKEGKVDEEAVDRVLRDVRRLVREHHELNRKLLEESKKLVEDHHRLNEKLLRDVEELVRRREGDVKELLDTLRKLVEESEESLREVVERLDKTSEDSKESLRRVIETLDRLVKDIDEKAK

SEQ ID NO: 10937 - protein, 176 aa, Artificial Sequence; identical to SEQ ID NO: 10936
  Synthetic

SEQ ID NO: 10938 - protein, 185 aa, Artificial Sequence
  Synthetic
SELEKLKKEIDDLSRDLDRILKELKKRVEELTRRSEKVLEDLRKTLEDIVKTLEDLARGGLDKEELRRRIKEVKDRVEEELKRLTEEIRRVSEELERLLREVEKVVEKSKRDLDELLKRLEERGLPSELVKRAADVVEKHRRSLERLLRTVTKIVKDHHERNEEIVDEVRKVVERAKERLEEIRK

SEQ ID NO: 10939 - protein, 185 aa, Artificial Sequence; identical to SEQ ID NO: 10938
  Synthetic

SEQ ID NO: 10940 - protein, 185 aa, Artificial Sequence
  Synthetic
SEVDELRRRVKKLSDDSKRVLDELSRRLKELSERLAEIVKEVHRRNEELVDRLRRLKDKGEPKEDLDRMVRELLKTSKKILDEVTKRLRDSLEEVKKLLEDLRRLIEESSRTLEKLLEDLERRGLPSELVEEVKRVVEKHHEDNKRIVEALAEMVKDHKRTIDELRRRLEESVKDAEKKLRDVSR

SEQ ID NO: 10941 - protein, 185 aa, Artificial Sequence; identical to SEQ ID NO: 10940
  Synthetic

SEQ ID NO: 10942 - protein, 185 aa, Artificial Sequence
  Synthetic
SELEELERRLKELSDESRRVLRELLERLKELSKDLERILEDLKEKVKKIEKDLRELKKRGLPKEELKREIDKLVKDVRDLLRRAKKRLEDSLREVEDLLRELEKRITEVSDEVRKLLEDLRARGLPSDLVREVARVVKEHHDENEDIVRRVKEAVDEHRETIERLRRAVERVVKEVERRLKEEAR

SEQ ID NO: 10943 - protein, 185 aa, Artificial Sequence; identical to SEQ ID NO: 10942
  Synthetic

SEQ ID NO: 10944 - protein, 177 aa, Artificial Sequence
  Synthetic
SKDEELERVVKEVREVLDDVNREVTKVSDDVKKRLDELLEEVRRVSDEVRKRLDEVLRERDEEEIRKILEEVRETSKRLNEEIDRAIRTVDKRSKELNETNKRAVDEVKKTVDRLRKEVKDVEEAKRRLEKLVRDIRRLTEEHKKRHEDLVREVEEIVKKLKDDHRRLVEDIERAIR

SEQ ID NO: 10945 - protein, 177 aa, Artificial Sequence; identical to SEQ ID NO: 10944
  Synthetic

SEQ ID NO: 10946 - protein, 184 aa, Artificial Sequence
  Synthetic
SVLDELREKAKKNIKESEELLRRNEDHSRRDTERSKKLLEDLERRVKEVVREAERIKKKGMPEEEVRERLERLLRELREDIKRIIEELRRSLDENRKLSEEIIRRLKKSAEDLTRDVRELLKRLDKDVVRDLERVVKEVEDSNRKVADDSRRSTEDNKRKNEKVERDARELLKEIEEIVRRLEK

SEQ ID NO: 10947 - protein, 184 aa, Artificial Sequence; identical to SEQ ID NO: 10946
  Synthetic

SEQ ID NO: 10948 - protein, 184 aa, Artificial Sequence
  Synthetic
DSLERLREIVERIVREARRLLRENEEHSERDTREVERLLEEVERRLRRVVEEAEKIKKRGSPKEEAMKRLDDLLRRVKEEIDRIVRESKESVDRNRRLSEEIIKTLEKLIEDMEREVDKLVKRLEEDVVREARRIVDELRKEVKEIVERSRKSTEDNERRNRKVIEDLKRLVKELEDRIREIKK

SEQ ID NO: 10949 - protein, 184 aa, Artificial Sequence; identical to SEQ ID NO: 10948
  Synthetic

SEQ ID NO: 10950 - protein, 184 aa, Artificial Sequence
  Synthetic
DFEERLKEVLKDAERVVDENKKENKKVLDKAKKVVDENRDRNRRVLEEVEREIRRLIDEIRKDKDLVDRLRRVLEEIEEKHRDAVRRTEELLRKVKEDHERVVRESERLLEEIRRKLDDLRRKGLTKEVEEVLKEIKDILRESSKTSKDLVRRTEEILEESSRDSDRVAKESKKLLEEVKEEVR

SEQ ID NO: 10951 - protein, 184 aa, Artificial Sequence; identical to SEQ ID NO: 10950
  Synthetic

SEQ ID NO: 10952 - protein, 184 aa, Artificial Sequence
  Synthetic
SFEEKLDKVVREVEDKIRRLVKRNRDAVKRVADEIRKLKDRNEEVVDRAREKIKRLIDEIRRDEDLVRRLKKVLEEVERRHKELVRRAEKALEEIRRSHERNIRELERVLEEIKKEIEDVKRKRVTKEVEEVLTRLKEKLKRVEESSEKVVRDSERLLEKIKKLSKDVEDESRKLLERVEREVR

SEQ ID NO: 10953 - protein, 184 aa, Artificial Sequence; identical to SEQ ID NO: 10952
  Synthetic

SEQ ID NO: 10954 - protein, 183 aa, Artificial Sequence
  Synthetic
SEVERLLKELKELLEELKKKVDDVLKDLEELLKRLEDHTREVVKRSEDLLRELEEMKRRGDLREELLKRAVEESSKLVRDDRERLRKALEEVEKRIRDVKRELEKAVKEIEEKVRDLERKLKDKEEVVRELRRVLEEVRRTAERLLEKLDTVLKKVEDKIRELLKESTRVNKDAKREIDRLRK

SEQ ID NO: 10955 - protein, 183 aa, Artificial Sequence; identical to SEQ ID NO: 10954
  Synthetic

SEQ ID NO: 10956 - protein, 183 aa, Artificial Sequence
  Synthetic
SEVETILEDLRRLLEELKKHSDEVVKEIKDLLREIEKHTREVVKTSKKLLKELEELRKRGDLREEELERAVEESSKLVEDDEREIRKMLKRIEDLVRENKDKLRRAVEEVERKVRELKRRLKDKEELVRKIEKVLKEVRETIKKIAEDSDRVLEEAKEVAKRLKDESDRVNEEVRKRIEELKK

SEQ ID NO: 10957 - protein, 183 aa, Artificial Sequence; identical to SEQ ID NO: 10956
  Synthetic

SEQ ID NO: 10958 - protein, 183 aa, Artificial Sequence
  Synthetic
SDVDRVLEEIRKLLEDLKRHSEKVSEENEDLLRKNTELNKRVSEDNERLLEELKRLRERGDIREEDLKRALDRVRKTVETVKEENKRSLEDVRRTVETNKRKLERVVEEIKKLIEDAKRRLKDKEELKKKLDEVLERAKRTIDRLLETSDRSLEKVERDLRRLNEELDRSLERAERTIRELAK

SEQ ID NO: 10959 - protein, 183 aa, Artificial Sequence; identical to SEQ ID NO: 10958
  Synthetic

SEQ ID NO: 10960 - protein, 183 aa, Artificial Sequence
  Synthetic
SEVDEVLERIKRLLERLAEHSDKVVRDIEKLLDDNRKENERLLDKLRRELKRLEEMRRRGDLREELLERVVREVEKEIRDIKRKNKRSVETVEKLVRDDRKELKRALEDVERLIRELETRLKDKEELRRKLEKVLREAEKVIDELLKKTDEVLKRARETIEDLNRKLDKVLKEVRDKLDRLRD

SEQ ID NO: 10961 - protein, 183 aa, Artificial Sequence; identical to SEQ ID NO: 10960
  Synthetic

SEQ ID NO: 10962 - protein, 185 aa, Artificial Sequence
  Synthetic
SSIEKVKREVDEVIKTSKKSSEDSEKLVRDVEERLRKLVKDVRDRVKRVIEEMERLVRERKDKDVRKELRELVRDVEREVKRVEDEMEKLLRDIEEEVRRDIKRSRELVDEVRRRVADVIRKDGEESELVERLKEVLKRLEEVSEESERRNREVVRRLEDTARKLTEELRRVLTELRDVLRRLEK

SEQ ID NO: 10963 - protein, 185 aa, Artificial Sequence; identical to SEQ ID NO: 10962
  Synthetic

SEQ ID NO: 10964 - protein, 179 aa, Artificial Sequence
  Synthetic
KDEETLKRLLEKAKEVVDRLKDENEKVTRDNHESVKKAKDANKRSNEKSERVARDAIRRVREAKEVVDTAEKLLRDNHEHSRDTVKKARELNETSRRHSERIVEKIEEILEEVERTLRENRGDVRELAKKVEKAIRELEELSRENREAVKRISDEIKRLSDENAKDSERIIKEIDDRVR

SEQ ID NO: 10965 - protein, 179 aa, Artificial Sequence; identical to SEQ ID NO: 10964
  Synthetic

SEQ ID NO: 10966 - protein, 179 aa, Artificial Sequence
  Synthetic
SDDETVTKLLKEAEKVVRELTKRNKELLRKNHESVREAKKRNEDLSRKLEEVVRRLIEEIREREDVVRELEKLLEDAKRHSERIVREMEDLNRKSKKHSKETVDRLKDLLRKVEETARARKGDVKDLAKKIEDVIREMEELTRRNEKRIEEISDEIRRLSDTNRREIERIREELRRRAK

SEQ ID NO: 10967 - protein, 179 aa, Artificial Sequence; identical to SEQ ID NO: 10966
  Synthetic

SEQ ID NO: 10968 - protein, 179 aa, Artificial Sequence
  Synthetic
REDERLEEIARKIKKVVDELVERNKKLTEDNHESVRRAEKRNRELSRELEEVAKRAIERIRSDKKVVDEVKKLLEDAKKHSKEVIDELRRLNEESKRSSEDTIRRMRKLLRELEETVKAKKGDVEDIERKVEDIIRRLEDLSRRNEEKVRRISEEIKKLSKDNERTIKEIIKEIEERVK

SEQ ID NO: 10969 - protein, 179 aa, Artificial Sequence; identical to SEQ ID NO: 10968
  Synthetic

SEQ ID NO: 10970 - protein, 185 aa, Artificial Sequence
  Synthetic
DELDRLREEIKALIKESRESLKRLEEESRRLAEELRKLIRELKERIERIIEEARRLAKEIKDKDELRKRLEDLLRRVERLVEEVRRRLKEVVDRDRKLVEDNRRLLEELVRRVEELVRDLDAKITDDDVRKKVEDVLEEARRRITDDEDKTKKVHDESRRVVEEVRERVKRLLDKARTVVKEIEK

SEQ ID NO: 10971 - protein, 185 aa, Artificial Sequence; identical to SEQ ID NO: 10970
  Synthetic

SEQ ID NO: 10972 - protein, 185 aa, Artificial Sequence
  Synthetic
SEVEDLERKIEELIERAKRLVEELEERSRRLIRELEELSKKNEEDIERLIKEAKKLAEDIKDKETLRKLLDEVLKRVRDSVERSKEELERVVREDRELNKRVKDTLRKVLEDVERLVRDIEKKLTDEEMRRRVRELLKKAEEVVRRLEKDSDRVSKESEDMVRELLRRNEEALRKAEEVVREIKR

SEQ ID NO: 10973 - protein, 185 aa, Artificial Sequence; identical to SEQ ID NO: 10972
  Synthetic

SEQ ID NO: 10974 - protein, 185 aa, Artificial Sequence
  Synthetic
KDIDELRKRIETLIREAKKLVDDVRKRSEDLIERLKKLSEDNARDIERLLREAEDLARKIKDKEELERRLRKVLKEVEDSVRRSRKELEDVVREDEELNRRVKRALEEVLKTVEKLVRELEKKIDKREVKERVRRLLEKAADVVRRLIEESNRVSDDSRRVVKELLDRNKELLDRARKRVEEIRK

SEQ ID NO: 10975 - protein, 185 aa, Artificial Sequence; identical to SEQ ID NO: 10974
  Synthetic

SEQ ID NO: 10976 - protein, 185 aa, Artificial Sequence
  Synthetic
DDIERLKREIERLLKEAEKISRDNEERSKELLDRLRKLSEDNKRKIDKLVEELKRLADKIKDKEELTRRLKEVVDRVEKSVRDSERMLREVVREDEESVRRSKTKLEDLLRKVEELVRRLEKKVTDEKVKRDAREALRKAKKKVDELKRKNDEVHRRSREEVKRLLEENRKLLEDLRRMVREITQ

SEQ ID NO: 10977 - protein, 185 aa, Artificial Sequence; identical to SEQ ID NO: 10976
  Synthetic

SEQ ID NO: 10978 - protein, 176 aa, Artificial Sequence
  Synthetic
RKVEEVEKHSRESIKEIERLVEEVRKHSKDSIRRIEKLVEDVERHSRKVIEELERDKIDEKAKRLLEEDEKLVREIKERIKKLSRENEERVKDIARRIRELSKRNEETVRAIARKIDKDMVRRLEKILKEDKEVVKKAEEELRELLKEDREVVKRAEEELERLLKETEDVVRKVET

SEQ ID NO: 10979 - protein, 176 aa, Artificial Sequence; identical to SEQ ID NO: 10978
  Synthetic

SEQ ID NO: 10980 - protein, 176 aa, Artificial Sequence
  Synthetic
SALEEVKRHSEESIKAIEELVRRVEKHSRESSKRNEELIREVEDHSRRVIEELKRKKADREARELVKEDERRVKEVAEESRRLSKRNEELVRRIAREIERLSEENERLVKAVLRTLSEDVVRAAEKLLEEDRDAVRRAKEKLDELLKRDRDSSREAIRELERLLKETRDVLREVER

SEQ ID NO: 10981 - protein, 176 aa, Artificial Sequence; identical to SEQ ID NO: 10980
  Synthetic

SEQ ID NO: 10982 - protein, 184 aa, Artificial Sequence
  Synthetic
SEIEKILKDVDKKLKDSSRESEESVKESRDLLRESSERSERSVRETRKRVDDLLRLVDERKDEKLIREIEERARRIADKNRRIVEESKRLVEEAVRKNEDIVRKSAELVERIIRELEDLLRKRNEEDMKREIDKLVEKLKKVLRDNKRLHEKVIRELEEVVTRNEELHRRVIKEAKEVVDRVRK

SEQ ID NO: 10983 - protein, 184 aa, Artificial Sequence; identical to SEQ ID NO: 10982
  Synthetic

SEQ ID NO: 10984 - protein, 183 aa, Artificial Sequence
  Synthetic
SEVEEVLRRIEELLREDKRHVEEVVREIRELLKRNKDMVDEVLKRIEDLLREIDEARKRGDLREKAVEDLLRTVEELVRRAEEHTERLLERVERLLERNKEHSERVLEEVKRLIDDVKRKVKDVEEVIRKLDDILRKVKRVSEDNKRETDKVREEVAEVVKRSKDKLDKVRKDVKRVIERVRT

SEQ ID NO: 10985 - protein, 183 aa, Artificial Sequence; identical to SEQ ID NO: 10984
  Synthetic

SEQ ID NO: 10986 - protein, 183 aa, Artificial Sequence
  Synthetic
DEVEKAAEDVERRLREDEDHARKVVKRIRELLEEDTRTVDKVLREIEKLLKDITDLRRRGDIREEDIDRILRKVERDIERIEEHSKRVLEEVKRLVDRNRKHSKDLLDEVRERAKDVKRKVKDKKELTEKLDRLLERVEEVSKRNEDATRTVEKEVEEVVRRTKKKLDDILERVERVARELKR

SEQ ID NO: 10987 - protein, 183 aa, Artificial Sequence; identical to SEQ ID NO: 10986
  Synthetic

SEQ ID NO: 10988 - protein, 184 aa, Artificial Sequence
  Synthetic
ELIKKARKDVEEVRERSERLVDELRKRNKKLADESRRLIDKLRKDVEKVLREIEDLLRKRRTKDVLKEIEDLVRELERELRRVVKESSDKVRKLIRENEKVVEESSRLFRDLVEKLRRVVEERNDKKLMEEVERLIKRLEDVNEKSERDVREINKESERVNEETEREVEDAIRKLREVLRRAKK

SEQ ID NO: 10989 - protein, 184 aa, Artificial Sequence; identical to SEQ ID NO: 10988
  Synthetic

SEQ ID NO: 10990 - protein, 186 aa, Artificial Sequence
  Synthetic
KEVEDLERRVKEILDRMKRLIDENRKKIEKSIRELERLIDENRKEVERVKKELKDLKREGGDDARTLRERVRKIIEDVEEHSRRSTEEVRRIHKENKEHSERSSDEIRELLRRVEELIEEVKRRLRDKEMEKKLEDIVRRVREVVRRAHETNERLVDRSRKAVEKAERTNRRLVEEIRKVAEEVRK

SEQ ID NO: 10991 - protein, 186 aa, Artificial Sequence; identical to SEQ ID NO: 10990
  Synthetic

SEQ ID NO: 10992 - protein, 186 aa, Artificial Sequence
  Synthetic
DEIRELEERVRRILDELRRLVERNREVIERSIRELEKLLDRNRRKVEEILRRIDDLTRRGGDDKKTMLDDVRRLLREAEDHSRRSSETAKRIHRENEEHSKDSSRKVRKLIEELRELAKKVEKEITDERVKEAIKELVKDVDRVMREVDRANRELTKTSKKVLEDVDRTNRRLVKEVRDVVERARK

SEQ ID NO: 10993 - protein, 186 aa, Artificial Sequence; identical to SEQ ID NO: 10992
  Synthetic

SEQ ID NO: 10994 - protein, 186 aa, Artificial Sequence
  Synthetic
KEVEDLERTVRTILKRMRELITRNEEEIRRSIEELKKLLKENKDTVRRILEEMKELKKEGGDDKKRLVEEIKRLLDELRENSKRSSDRAKEIHERNKRHSEESSRTIEKLLKELRDLVRDVERKLRDEDAKRKLDELTKRVEKVVREADERNKRLTKRSKEVLDEVHRANEEALKEVEEVVRRVTK

SEQ ID NO: 10995 - protein, 186 aa, Artificial Sequence; identical to SEQ ID NO: 10994
  Synthetic

SEQ ID NO: 10996 - protein, 186 aa, Artificial Sequence
  Synthetic
DEIEELRKKAEEIIRRMEDLVRRNTETIKRSIETLKKLIDENRRRVRKIIETMKELKRRGGEDKETLLRRIDELLRRVEKHSKDSSDTVKRIHEENEKHSRDSSRKIEELLKTLRDLAEDVKRKIDKEEVKEAIERLVRRVEEVVRKVREENKRLNEESEEVVRRADRTNREILKRVRDAVREVRR

SEQ ID NO: 10997 - protein, 186 aa, Artificial Sequence; identical to SEQ ID NO: 10996
  Synthetic

SEQ ID NO: 10998 - protein, 181 aa, Artificial Sequence
  Synthetic
DAEDTLRDITRKVRKVLEEHRETIERTIRKNRESLERVKRAIEELIERSRRALEEVTRSGIEERVVKKAEDLVRRDEKTLRKVVDELKKLVDESEEINKDSLRKVEKLVRDAEDTLRKVPPRDEMLKRVEDIVKKLIEDLREMAKRNRDISKEVDDRLKKILDEVRKHSEEVIKRLKDEER

SEQ ID NO: 10999 - protein, 181 aa, Artificial Sequence; identical to SEQ ID NO: 10998
  Synthetic

SEQ ID NO: 11000 - protein, 181 aa, Artificial Sequence
  Synthetic
SAEETLERLAREVRKVLEEHARKIKKTIDDSRRVLEEHRKTIKRTIDESRKVIKDVRDDGIEEEAVKRADELLRRDEKLNKESLDTVRELVKRDVEENEKSLRDVERLVEEIKERLERVPPDEEVLRRVTEEVKELIERIERLLKENRKHSKKIIDRLRELLEENRRHSEELRKRLEDERR

SEQ ID NO: 11001 - protein, 181 aa, Artificial Sequence; identical to SEQ ID NO: 11000
  Synthetic

SEQ ID NO: 11002 - protein, 182 aa, Artificial Sequence
  Synthetic
SSLDEIRRKVREAIERLERLLEENRRKVEEVKRRNERLLDRNREVVDEVIKRLEEMRKDDEAVKRVRKILEEVRKHSRESTEESKKTVDEVRKHSEESSKRVKEILDELRKSAEDIERKNREKREVDEELKRLVEEVKKVVDDVRRENKRLLEEVERVSEEVKKTNEKLLERVKRVVEEAER

SEQ ID NO: 11003 - protein, 182 aa, Artificial Sequence; identical to SEQ ID NO: 11002
  Synthetic

SEQ ID NO: 11004 - protein, 182 aa, Artificial Sequence
  Synthetic
SSLDTAREHTRDVIKKIDDILRRNEKLVDDVIRELERLLRENAEVVERVIDRLRRLKKDKEALEEVEKILREVEKHSRDSTREVRRILREVEEHSRKLLEEVKKILDDNRKLIEDIKRKNREKREVVEELKELRKRSEEVVDRAEKALRRSVRKAEKVVEEVERANKRLLERVKKVVDDMRR

SEQ ID NO: 11005 - protein, 182 aa, Artificial Sequence; identical to SEQ ID NO: 11004
  Synthetic

SEQ ID NO: 11006 - protein, 185 aa, Artificial Sequence
  Synthetic
EVRERVKEVIERSEKSVRELERIVEELARRLRESVEDLERKIRELSKELRRVVEELVRTRGESSEEIKKVEETVREVDKELKELVERVREENERAIKRMRELLERVERENRRVVKEAKDLVDKRGDEEVVRRIEELLKEVHKENKRVADELKKLVEDLHDRNRRVKEEVKRRVDEVRRKAEEVAR

SEQ ID NO: 11007 - protein, 185 aa, Artificial Sequence; identical to SEQ ID NO: 11006
  Synthetic

SEQ ID NO: 11008 - protein, 185 aa, Artificial Sequence
  Synthetic
EVDERIRRLVEESRKSVEDLARIVDELVERLRRSVRDLEEKSKRNKEELEKVLRDLARTRGDKSEKVKRIADIIRRVEEESEKLIDRVRKENKKVIEDMRRLIRKVEEENKRVIDDLRRLVKERGTEEVVERVERLIEKVHRDNRRVAEKLREDVRRVHEDNKDVARKSHKLVKEVRDTVREVRR

SEQ ID NO: 11009 - protein, 185 aa, Artificial Sequence; identical to SEQ ID NO: 11008
  Synthetic

SEQ ID NO: 11010 - protein, 178 aa, Artificial Sequence
  Synthetic
DVLKEVEEDSRRNHERNRRVAEKVTDDSRRNVKRLEEVAEEIKDDSRKNKERLDKLRGDDEVVRRLAENVKRSARKLEEELKRLTRNVERTVKEVEEIIRRSRKNVDDTRKKLETEITDKEIEKILRDVLKENEDSLRELKEILERLLEENRKAVEKLKRILEELLRRNDEMLKRVRT

SEQ ID NO: 11011 - protein, 178 aa, Artificial Sequence; identical to SEQ ID NO: 11010
  Synthetic

SEQ ID NO: 11012 - protein, 178 aa, Artificial Sequence
  Synthetic
SVDEEVRRDSKKNKEDLDRVAEKVKRDSEENMRRLEEVARKVTEDVKRNKKTLEDLRGDEDVLRRLKENVERSREELEEIIERLERNVRRTVEEVERIVKKLRENVERTKKEVEERITDEEIRRILKELLERNERALEELKKRLRKVLEENKTVLEELRRRLEELLRRNKRMVDEARR

SEQ ID NO: 11013 - protein, 178 aa, Artificial Sequence; identical to SEQ ID NO: 11012
  Synthetic

SEQ ID NO: 11014 - protein, 179 aa, Artificial Sequence
  Synthetic
DEVEKLVEDVARVNKKSLDEVRRLLEELEKVSRDHRREVERSLREAEKVLEDLKREAEKTRDKDTLKKLLDELKRILEEIKDRHRRLTEHNKKVLDEVRETIRRIIERNKEVLDELLKRIGEEDDEIRKVKKHNEDVLRKVRKILKDAERISKRALDENERILKEVEKRVRDVIRELER

SEQ ID NO: 11015 - protein, 179 aa, Artificial Sequence; identical to SEQ ID NO: 11014
  Synthetic

SEQ ID NO: 11016 - protein, 179 aa, Artificial Sequence
  Synthetic
DEVDDVVRRLEEENRKSEERAKDTLRKAKKVLDELKKRVKESEDRVKEVLDDVEERVRRTTDKETLRKLLEELRKILKKVEEDHKRLTKTLRDLLKRVKEEHDKLTDENRKLLEEVLRRLGKDDKRVRDALRHNEDVLRRNDEIVDELRKRVEDVLKKNEDDVRRVAEEVRRVIEELRK

SEQ ID NO: 11017 - protein, 179 aa, Artificial Sequence; identical to SEQ ID NO: 11016
  Synthetic

SEQ ID NO: 11018 - protein, 179 aa, Artificial Sequence
  Synthetic
DRVEEVVKRAKDENRKSEEEVKKSLKDLEDLSREHEKRIRDLLKEVKEILDRIREEVEKKRDRKTLEEIVKKLADVLKRVDDEVKELLKHNKEMLEELRKRHKKLTKDNRDVLEELRREIGEEDDEIRKLERHNEEVLKKNETIARDLEKRSREVVKRLEDILRKVEREVEKALEEVRT

SEQ ID NO: 11019 - protein, 179 aa, Artificial Sequence; identical to SEQ ID NO: 11018
  Synthetic

SEQ ID NO: 11020 - protein, 182 aa, Artificial Sequence
  Synthetic
SVEEELRKLKEEIDRVLEENKKIIDDIRKELDDVNRENKKIIDDIRKEIDDVLERVRGEDKDRMREIEEVARRAKEKLDRLLEKSTRLIEKLKEELDDLVRRSAELAKEMKDRLKELKDNNVDEKDLKKLLEEVRELLERSRRASEELLREVKRLLDESRKESKRLADDVRRLLEELERRTK

SEQ ID NO: 11021 - protein, 182 aa, Artificial Sequence; identical to SEQ ID NO: 11020
  Synthetic

SEQ ID NO: 11022 - protein, 182 aa, Artificial Sequence
  Synthetic
SVEDIIRKIEKELDDVNRENEEIIRRIKKELDDVNRRNEKIARDSKKRVDDVLRKVTGEDKDKVDEIRRIAEEAKRSTDELLKESTELIERLKKRLEELLRESSRLIEELKKRLEDLLRNNVPEEVVKKIREEVRKLLEESKRRSDELAKEVRELLKRSEDKSRRNLEEVEKLLKEVEDRTR

SEQ ID NO: 11023 - protein, 182 aa, Artificial Sequence; identical to SEQ ID NO: 11022
  Synthetic

SEQ ID NO: 11024 - protein, 179 aa, Artificial Sequence
  Synthetic
KDLEDVLDKVRKDLERSKKHSDDVVKTIRELLKESEKHSEELVKRVEKLLEELRRMTTRGDAREEKVDRVLEEVDKLLKENRDESRRVKDEVRKLAKRNRDVSKELLDRVKEEIERLRRRGVDESILRELERRVKKVVEENDEITRRVEREVEKVDKKNKDITDTLRTRVKKAVDEARK

SEQ ID NO: 11025 - protein, 179 aa, Artificial Sequence; identical to SEQ ID NO: 11024
  Synthetic

SEQ ID NO: 11026 - protein, 190 aa, Artificial Sequence
  Synthetic
SDIERLLREVEKVIRDSEEETRKLLEEVEKALKDSRDSSEDVKRKVDDILRKLRELRRRNELPKEELTRRAEEEVRKIDRLLEENYKRSKEVVDEIKKKLDEVIKRSDELVRRLEEELRRVLERVKEREDMERIERLLREVRKRVEEAAKRNKDVIKEIEERVRTVHDENRRLLEEIAKRVRDVLEEVRT

SEQ ID NO: 11027 - protein, 190 aa, Artificial Sequence; identical to SEQ ID NO: 11026
  Synthetic

SEQ ID NO: 11028 - protein, 171 aa, Artificial Sequence
  Synthetic
KVEEELEKEVRRALEESKRLLDRLTEHSKRVLDELRELLERVERDVRRVLEELKRERDDEKATRIIEEVRKRLKDVVDRIRELVERNKRELDKAVKDSTRLVEEIKELLREKLEDKDVVDRLEKELKKVNDEARKRIEELLRESDRVLEEVKKKMRELERELKKVLKEVRD

SEQ ID NO: 11029 - protein, 171 aa, Artificial Sequence; identical to SEQ ID NO: 11028
  Synthetic

SEQ ID NO: 11030 - protein, 171 aa, Artificial Sequence
  Synthetic
DEVEDADRKVRTVLEDLRRRLEELKKHSDDVSRRNEKLLRELKEHSDRLVEEIKRDKKVERVEELVRRNEKKLEDAVREVEKTVRDNKEKLKRVVEKIEEDIRRVEEELKRDVRDKRVVDELLKKLRDVLEEVRRTVDELVKRSEESLRRAREVIRRLLEKTREVLEEVRT

SEQ ID NO: 11031 - protein, 171 aa, Artificial Sequence; identical to SEQ ID NO: 11030
  Synthetic

SEQ ID NO: 11032 - protein, 173 aa, Artificial Sequence
  Synthetic
STEDVLRKIKEDVKRVIDDNRRILDEVRRTSKRVLDDLRRNLKHIAEEVERVLREVDKEEVVRELKKILDEIREEHRRLIRTNEKVLEDIERDHRRISEELKRILDEVDELLRAGKPSKELLEKAKRVVDEIKRLAEESLKRLEDLSRDHKRRAKELNDEIRKVVDELRKRAT

SEQ ID NO: 11033 - protein, 173 aa, Artificial Sequence; identical to SEQ ID NO: 11032
  Synthetic

SEQ ID NO: 11034 - protein, 173 aa, Artificial Sequence
  Synthetic
SLEEVLDEIRKLVERALRDLERNLRHVTRTSEEVLRRNEEILRRIEEKVDRVVRNVKTEEVVREMRKILKELRERHKRLTETNREALKRIAERHKRLIEEVKRILDEVAEVIKKGEPSKELLDEIRRVLEEVKRRVEELNKELKDLSDKHKEKAKRTDETITDVLRKAEERER

SEQ ID NO: 11035 - protein, 173 aa, Artificial Sequence; identical to SEQ ID NO: 11034
  Synthetic

SEQ ID NO: 11036 - protein, 180 aa, Artificial Sequence
  Synthetic
SVEELLREVAELVKRVDEDLRRLLEEVRRSNEEVIRRLEEILKRIEEENRKVVEELRRRGVSEDLVRESKRLVDESRRVIEKLVKESRDSVERTRETVDRLREELKRLVEEIKKMVEDNSSEETVKRLLDELRELLERLKRTIEELLKRNRDLLRDAEEKARRLLEENRKLLKKARDTAT

SEQ ID NO: 11037 - protein, 180 aa, Artificial Sequence; identical to SEQ ID NO: 11036
  Synthetic

SEQ ID NO: 11038 - protein, 180 aa, Artificial Sequence
  Synthetic
SLEELVRDVERLVKESIEELERVVEDVRRLNTELKEKLERVAREIKKRNDDLVRELRTAGTEDRLIKESRELVRRSEDTVRRLIERSEEIARRTEKNVKRHVKENKDVVEKIREVVTKNSSEEVIDRLRKELEDIIRESRKNLEDLLRENKRLVEEVERTLRELLRTNKELLERIREEVR

SEQ ID NO: 11039 - protein, 180 aa, Artificial Sequence; identical to SEQ ID NO: 11038
  Synthetic

SEQ ID NO: 11040 - protein, 180 aa, Artificial Sequence
  Synthetic
SVEEMLEKIRRRATESVKRLRKILKEIKERNEKAIRDDRRLLEEIERRIREVVKRLRDAGVSEDLVRRLEEILKRVKEAVEKSVRESKKLVDDTKRNVEKHIEDNKRVVDRVEEAVRRNSSEETVKRLEEEVEKIVRDSERNAREMLERNRRLIEESKKRTKDLLKEVEDEVRKLEEEVR

SEQ ID NO: 11041 - protein, 180 aa, Artificial Sequence; identical to SEQ ID NO: 11040
  Synthetic

SEQ ID NO: 11042 - protein, 184 aa, Artificial Sequence
  Synthetic
SVEEIVRRIREELKKVEEDSERIVRTVEDVLRKVLETVERIVRESEKRSRDAVRRIREKLSDKEKLKEIEDEARKSVEELRKLLEDVERRVRELVKKARDLHRRSKEVVDEIRKKVEKLLKDGGSDEVATRLLKEVKEELDRLREENERLLRELKETVEKLKRDAEKVVEDDERLVRELEKRVD

SEQ ID NO: 11043 - protein, 184 aa, Artificial Sequence; identical to SEQ ID NO: 11042
  Synthetic

SEQ ID NO: 11044 - protein, 183 aa, Artificial Sequence
  Synthetic
DIEELLEEIRRRAEEAHRRNEDLLRKIKELVKKARKDNEKVVRDIERRLREVLERVRKKITDDRLREEIERLVDEVRKLLEDVKRESEKLVREAEKLLKDLERRSKEVLDRIEKLLRDVSRSTDREEVKEVLKRVEDLLRTSEEETKELLKRVEDELRRSKEDSEDVLRKVEELLERIDRRVT

SEQ ID NO: 11045 - protein, 183 aa, Artificial Sequence; identical to SEQ ID NO: 11044
  Synthetic

SEQ ID NO: 11046 - protein, 182 aa, Artificial Sequence
  Synthetic
KEIEEILEEVKRLLDKLKEDSDRILERVRELLERSKEKSREILKRVEDLLRELEKLVRDDRDEDTLRDLLRELEERVKELLKELDKTSKDVLDEVRKLLEENNRLLDELTKRVDELLRRISEDEELRRVLEEIRRLLEEVRRKIEEASRRLKEDADRVHRKNEEILKRIEELIEEVKRRVEK

SEQ ID NO: 11047 - protein, 182 aa, Artificial Sequence; identical to SEQ ID NO: 11046
  Synthetic

SEQ ID NO: 11048 - protein, 182 aa, Artificial Sequence
  Synthetic
KEVEDILREVDKLLKESKRKSEEALKRVKRLLDELKKTSKRILREVEKLLERLRRLKKDDRDKDRLREELKKLLKTVEDLLRDNDRLLREVEERAKKILKDVRETSERLLRTVKKLLEEIPKDKDLKKIVDDIRRKIDKVDKDNERLIKELEDRVRKAREDIRDISRRIRELVKRVVDEVEK

SEQ ID NO: 11049 - protein, 182 aa, Artificial Sequence; identical to SEQ ID NO: 11048
  Synthetic

SEQ ID NO: 11050 - protein, 182 aa, Artificial Sequence
  Synthetic
DEVETILRDVKRLLEESRRESERVLEEVRRLIEELKKRSRDIMEEVKKLLEELREIVRRDRDKETLRKLLEELEREVRKLLKRNNELLEELLRRARKLIEEVERTSRELFKTVEELVRRIEPDEEARRLLEEADRLVREVDKENEDILRRIEESVREVEERIRRISRAIEESIRRVKEEVER

SEQ ID NO: 11051 - protein, 182 aa, Artificial Sequence; identical to SEQ ID NO: 11050
  Synthetic

SEQ ID NO: 11052 - protein, 182 aa, Artificial Sequence
  Synthetic
KEVEDLLREIERLLKESRERTKKVEEDVKRLLDESRKTSEDVLREVERLIRELEKIVREDRDKDRLEELLRRLKETAKELLRKVEELSRRLKETVDKLLRDLEEDSKKLLEDVKELLDRIPPDDKARKLVEEAKRRLDTVNEENKDVVRKIKEDLERVDEENRDVLRRIKRIVERVEEEVRR

SEQ ID NO: 11053 - protein, 182 aa, Artificial Sequence; identical to SEQ ID NO: 11052
  Synthetic

SEQ ID NO: 11054 - protein, 180 aa, Artificial Sequence
  Synthetic
DEAERLLRRIEEILKRSKDVSDKLLEDNEKLVRDVKRRLDEHLRKNREALKKLREELKRNRDERDLERLIRESKKLLDDSEKNIRKLVKESDRLLEETERENRRLIKELRDIVKEIAERIGKDDDEVVRRIEELVKKLEEDNKRVVEEIKKLNDDLRREVKRVLDEARKLNKEIVDELRK

SEQ ID NO: 11055 - protein, 180 aa, Artificial Sequence; identical to SEQ ID NO: 11054
  Synthetic

SEQ ID NO: 11056 - protein, 180 aa, Artificial Sequence
  Synthetic
SEVDELRRRVEEVERRSEENSRKHLEDNEKMVDDLRKNLERHLKENKELVERVRRVVEDNTSEELLKRLIDESEDLVRRSEENIRDMIRRSRELAKRSKDNNEEVIRRLKKLIEDIVRTIGKDVDRVVEDLKRRADELVRRNERAAEEVRRLNEEVVEDLKRVVKEVKDLNDELVKEVRR

SEQ ID NO: 11057 - protein, 180 aa, Artificial Sequence; identical to SEQ ID NO: 11056
  Synthetic

SEQ ID NO: 11058 - protein, 183 aa, Artificial Sequence
  Synthetic
SVEEVLKEIEKEHRRSEEEVKDVLRKARKINEEVERRVKEVVDRIRETIARVRKEVKDRNGERLEELERRLERILREVERLAKELIDRLRRTVEDSERLVKRLVEENRRVLEDVRRLVRELDKVKDVLKKLLDRSRRLVEKVRDDLRKAEEKNRRVAEEIKETLKRMEDRVREELKEIKKKAK

SEQ ID NO: 11059 - protein, 183 aa, Artificial Sequence; identical to SEQ ID NO: 11058
  Synthetic

SEQ ID NO: 11060 - protein, 183 aa, Artificial Sequence
  Synthetic
SVEEVLKEIEDLHKKSIDEVREVLKEAEDLNRRAVKEVEDALRESEELNRRVTKEVRDENGKDLEELEKELRENVRRVRETVRDLKRKLEETVRESREDVERLVRENERVVKEVRDLVRKLDKVKEVLDRLLEKSEKLARDVRKRLKEVLDKNRKVVEEIRKVLEELLRHSERKLERIRERLK

SEQ ID NO: 11061 - protein, 183 aa, Artificial Sequence; identical to SEQ ID NO: 11060
  Synthetic

SEQ ID NO: 11062 - protein, 184 aa, Artificial Sequence
  Synthetic
DVEDVVRELKKLLDEITRRSEEVVKRLHDRNEEAKEEVRRVVKEVRERLKKVVDDVRRELKDSEKLERVEEKIEEAVRRLDEELRRLEEELDRSSDRLRKLHETTRRLIEEAKRRIKELLDRNGDREVLRKLKKEIKDLLDRIEELNKKVLDESEKLIKEIREDLRRVKEEIKEELKRIREEVR

SEQ ID NO: 11063 - protein, 184 aa, Artificial Sequence; identical to SEQ ID NO: 11062
  Synthetic

SEQ ID NO: 11064 - protein, 184 aa, Artificial Sequence
  Synthetic
SVEEVVRRIKEKLETVVDESRRVVKDLHDKNKEIVEESRKVLRESEKVDEDVVEEVRRRLGNSEKLREAEKKIEKSTEENRRLHKKTADEIKESSERLRELHERTRREIEKAMERVERVLRKGGSDEELEKLLREIEDLLRKIRKLNKEVLDRSRKLLEDIRRLNKRALERNRKIAKEIRDEVK

SEQ ID NO: 11065 - protein, 184 aa, Artificial Sequence; identical to SEQ ID NO: 11064
  Synthetic

SEQ ID NO: 11066 - protein, 172 aa, Artificial Sequence
  Synthetic
DSAEKLERDVRRALERIRKRLEENDRRVEEILERIRRRLREDLETSREVLERLRKENVREDEVRDLARRVKENTDRTLEEVKRLIEEAKKHSKDVLDDVKRDAERLKEEIRRVPVDESVIEKLERLLDELLEEVKRVVETSEKKLDELLEEVKRVVEESKKALDDLLREVEK

SEQ ID NO: 11067 - protein, 172 aa, Artificial Sequence; identical to SEQ ID NO: 11066
  Synthetic

SEQ ID NO: 11068 - protein, 183 aa, Artificial Sequence
  Synthetic
DKVDEVLRRVRELLERLRKLLEDNKKTTDELLEELRRILKEDEDRTRKLLKRLRDVKREEIKDKDTLTKTAEEIAKRLEDSNRTSKEIVERIVKELRESNERLERIADEIRERVERLLKKAKEEGVDDRMMKRLKEELERIRKKVREVLERSSRAVERIEREVDEVVKRSSDTVKRILDEVRK

SEQ ID NO: 11069 - protein, 183 aa, Artificial Sequence; identical to SEQ ID NO: 11068
  Synthetic

SEQ ID NO: 11070 - protein, 183 aa, Artificial Sequence
  Synthetic
SEAERVRRRVEELLRELREHSRRVLEEVKRLLEKLREDNERSLRRIKKLLDELRRVRERDLQDKDELRKLLRELKEDVKRIIEENDKIVKKLLEDAERLARENEEMLKRLKEEAERLIRDLRRKGVEEEVLRDIERRVREIEKEVREVTRAIEESVKKIEKESRDVLRAIAETIRKIEEEVKK

SEQ ID NO: 11071 - protein, 183 aa, Artificial Sequence; identical to SEQ ID NO: 11070
  Synthetic

SEQ ID NO: 11072 - protein, 183 aa, Artificial Sequence
  Synthetic
DEAEEVLKTVKKLLDDLRRRNEDSLRRIEELLKRLRDHSKRVLEEVRRLLEELRRVKERDLKDKEELERLLERVLREAERLLKENEDLLEELERRVRDILRRNREMVEELRRRAKRLLERLRERGVREEVLRKIKKDVEKIVRDSERVIKTIEEKIDRIKKEVKRVTDEIRKRVEEIAEEVRR

SEQ ID NO: 11073 - protein, 183 aa, Artificial Sequence; identical to SEQ ID NO: 11072
  Synthetic

SEQ ID NO: 11074 - protein, 181 aa, Artificial Sequence
  Synthetic
SELEDVLRRSRDLLRRLKELLERLLETVRKLIEEAKELLKKILEDSRKLIREVEEMVRRGDIDDDTLRRIKEENRRLNKELRDRVKKLEEDIRRLIKKLEDEVRKAKEDNERLLKKLRDDEDSEEIRRVIKESKDLSRALEETVRRVERKIEDLLRRIKEEAERVIKESEKLIEDAERATK

SEQ ID NO: 11075 - protein, 181 aa, Artificial Sequence; identical to SEQ ID NO: 11074
  Synthetic

SEQ ID NO: 11076 - protein, 177 aa, Artificial Sequence
  Synthetic
DEDEEVERELKKIKDKSKKVLDKSRKTIDELRKEVERTLRRWTKRSKDLLDKVEAAKRRNVREEELKRLVDEWRKEVDKVREEVERLKKKLKDELRRLEREHRELVREIEEELKRLAERGVPEEVLRKVDTILKEIKRRNEKVLKELRDIIDDLAKKLDEVLRRDEELAKKVTEELK

SEQ ID NO: 11077 - protein, 177 aa, Artificial Sequence; identical to SEQ ID NO: 11076
  Synthetic

SEQ ID NO: 11078 - protein, 177 aa, Artificial Sequence
  Synthetic
SEDEDARRTLREMLEESRKHLKEWEDTSRELEKKSREVLKETRKTIAKLADRVRKAKENNVDEKSLEDLTREAEETLRKLAEDHKRLVKEWREVIERLRKTVEDLVRKIREILKRLAEKGVSEEVLEDIRRKVEKLEEDNRRVMKKDEDAVRRVEEENRKVLKELKERIDRLAEELK

SEQ ID NO: 11079 - protein, 177 aa, Artificial Sequence; identical to SEQ ID NO: 11078
  Synthetic

SEQ ID NO: 11080 - protein, 177 aa, Artificial Sequence
  Synthetic
DEDREAEETIKRLLDRSRKTLEESRKTSEDLRRKSEKVLRETRKSLEDSLRKVREMKKRNVSEELLEKLRKELEDNLRRLERKHRELVKEWRKVTEDLERKHRELIKEIERILKELREKGLDEKVLRDLEEIVRRAAKANKDVLDEDRRVMEEAREENKRVIDEYRKILKEATDELR

SEQ ID NO: 11081 - protein, 177 aa, Artificial Sequence; identical to SEQ ID NO: 11080
  Synthetic

SEQ ID NO: 11082 - protein, 177 aa, Artificial Sequence
  Synthetic
SEDEEAKKTLDELLKKAEELVKKIKETSERLLRKSDKLLEETKKTIKELDDEVKEVKKRNVSEEDLKRLAEKLREILKRLEDRHRKLVEEWEKVTRELAKELEDLRREVKRILDELRKRGVSEEVLRRIEEIIRRVTELLKKVLKEDREVVEEARKKNEEVLDRLKKIIEEAEERLR

SEQ ID NO: 11083 - protein, 177 aa, Artificial Sequence; identical to SEQ ID NO: 11082
  Synthetic

SEQ ID NO: 11084 - protein, 177 aa, Artificial Sequence
  Synthetic
DEDEKAKRMLEEAEKKSKKHVDEVRETSKRLLEESKKLLEETDRSLRKSLERVDRVKKNNVDEKDLKRLLEELEKNLRDLARRHEKLKRDWEEVTRRLEETAKKLVEEIRRILEELRKEGVDKRVLDDIKTKVERLEERNKKVLDDDREMVTRAEEENRRVIKKYRDILEEARKRLK

SEQ ID NO: 11085 - protein, 177 aa, Artificial Sequence; identical to SEQ ID NO: 11084
  Synthetic

SEQ ID NO: 11086 - protein, 177 aa, Artificial Sequence
  Synthetic
SEDEDLDRVAEKLKREHKKSVEEIKRVLKRADEESKKLVRDTERVIEEIKREVEEARRRNIDEELVERLKKKIEDILRTLEERHKKLIKELREILKRLSDESRRLAEETEKVLEDLERKGVDEEVLKKLREIVRRVKEENRKVNEEVEKRLRELEEENKKVIEDLKKTVEELVERLR

SEQ ID NO: 11087 - protein, 177 aa, Artificial Sequence; identical to SEQ ID NO: 11086
  Synthetic

SEQ ID NO: 11088 - protein, 188 aa, Artificial Sequence
  Synthetic
DDLEDIKRRLDEMREEVKRHVKRLKEVAKEIEDEHKETVRRNKEVAKKLAREIDDARRRNRNEEELERIIRRLRETLKRLTDRNKEVIDRSREKLKRLKERSEETIRRLRRKLEEIRKDIERVKKAGADKDKVDKVLREVTEEVKRLEEEIKKVDKEIEEIVRRVERENEEVVRDIARIVEELERKLR

SEQ ID NO: 11089 - protein, 188 aa, Artificial Sequence; identical to SEQ ID NO: 11088
  Synthetic

SEQ ID NO: 11090 - protein, 188 aa, Artificial Sequence
  Synthetic
RELEEVIKRIEKTVTDNERANKESVDRIREIVDRLKKEIEESVRRMRDSVKKLEEEIRRRGASEEVKETVERLMRELEKHIRESEREIEKLAREAEEHIKRSNERVKKSVKELRDLLETVKRLKERGNEEELIRRLEKVLKEHHKRVEEIVKENEDVARDLDRRIKEIVERNRKVLEDLRRRIKELKK

SEQ ID NO: 11091 - protein, 188 aa, Artificial Sequence; identical to SEQ ID NO: 11090
  Synthetic

SEQ ID NO: 11092 - protein, 179 aa, Artificial Sequence
  Synthetic
SEIEDALRRAERVSRESAKKLEDALRKYEKVSRDLKRRLDEVLKRYEDTSRKIAKDLRDNGVDEETVRRLVETSKEDLKRLERELRELARRSDEDLKRLDRELKELVERSKELLKEVERRNIDEETIERLIEKNKREVDKLLKKIEEVIKRNKDEVDKLLKKIEEVIDRNRRAMEEIAR

SEQ ID NO: 11093 - protein, 179 aa, Artificial Sequence; identical to SEQ ID NO: 11092
  Synthetic

SEQ ID NO: 11094 - protein, 184 aa, Artificial Sequence
  Synthetic
SIEDELRKIVEDIEREIKKLEDDLRRVSKDHRDEVRRILEKLKEHIERLEEDADRLKKAKEPKEKLDERVERLKEHSKKVVKEARDRLRELEERNRKIDRELEEELKKLEKRVREEVKKVRTRKDTETVREMIKRLEELVRRVKRRIEDVIRRNREVVDESRRRIEKAIEDNERVLKKIEEEVK

SEQ ID NO: 11095 - protein, 184 aa, Artificial Sequence; identical to SEQ ID NO: 11094
  Synthetic

SEQ ID NO: 11096 - protein, 184 aa, Artificial Sequence
  Synthetic
SIEEEIKKVVKELEDEARKLLKKIEEHSEDLKRKLEDLLRKVEDHIRRLREEIERIKRENLDEERVKRALDKLEESSRRVVEELKKKVKELRDSSEELKKEVRKKVEELRDRVEKEIEEVKKRKKTETVKKAIKELRDLVDKIEEDLKRVLDENERVLREIARKIDEIIEKNERELRRVLEEIR

SEQ ID NO: 11097 - protein, 184 aa, Artificial Sequence; identical to SEQ ID NO: 11096
  Synthetic

SEQ ID NO: 11098 - protein, 172 aa, Artificial Sequence
  Synthetic
DEAEELERRLREEVKRVETDLRRTTRELEREVEEVRRRLEKTSRENNDRSEKAEREDSRDKRLEEELKRESDRLEKEHRDLIKKLRDSLEKMRRDHKRLIDELRKRLEDLERKIKDKEVVDRLREIITDLVRKLEENVKRLEEIIKRLEEELKRNVDRLRENSKRLAERLRT

SEQ ID NO: 11099 - protein, 172 aa, Artificial Sequence; identical to SEQ ID NO: 11098
  Synthetic

SEQ ID NO: 11100 - protein, 172 aa, Artificial Sequence
  Synthetic
SEAEKVLEEVRRLIEEIRRRLKETTDDVRRLVRELKEEAKRLLEEDKRLVDDLRRRNAKDETLTRRLRRHAEETKKTIEELIRALEEALDRLRKRHEELLRELDETLRRLEERIEVKEVVDKIRKVAEELKKELKDNADRVRRIAERLKEELKRVAEKSDRIIRTLEEELKR

SEQ ID NO: 11101 - protein, 172 aa, Artificial Sequence; identical to SEQ ID NO: 11100
  Synthetic

SEQ ID NO: 11102 - protein, 172 aa, Artificial Sequence
  Synthetic
SEVERLVREVEKDLERERRRLEKTVRDSERLVRELKETLDRLLKRDKDVVDDARRKNSKDERLRKRLEEHLRRTKEELRRLKEENRDVARKLREEHKRTEERLDERLEDLERKISDKSVVDRLREIVKELKDRNRKVVKELEDIHRDSDRELDDVVRRSDEIIRELVERLKT

SEQ ID NO: 11103 - protein, 172 aa, Artificial Sequence; identical to SEQ ID NO: 11102
  Synthetic

SEQ ID NO: 11104 - protein, 181 aa, Artificial Sequence
  Synthetic
DLEEIIKTIREINERLNRRVREVEERLRRTSRELEERIRDVVRKLREINDRLRKEVEARGLDKGKLEEAERESERTERENEKLLKRIEDSLRKSEEEIRRVIKKLEDESRELEKRLEDLLREGRVDERLVRENEEAVKRLTKELDDLLRKNEELIRRLEEEAKRVLERNEKIARDVREELK

SEQ ID NO: 11105 - protein, 181 aa, Artificial Sequence; identical to SEQ ID NO: 11104
  Synthetic

SEQ ID NO: 11106 - protein, 181 aa, Artificial Sequence
  Synthetic
DLEEIIRKIREINRELNETVKKVVRELEEDTRRVKRRIEEIVKELERTTRELDKRVKDSGLDKSELDRIRKELRDSEEELKELLKEIEERLRRSNDKLRRVEEKIRKRSEELKKRLEEALREGRVDEKLVEDNRKEVRDLEEEARKLLRENHELTKRLIEEAERILKKNEELIRKIEEEER

SEQ ID NO: 11107 - protein, 181 aa, Artificial Sequence; identical to SEQ ID NO: 11106
  Synthetic

SEQ ID NO: 11108 - protein, 181 aa, Artificial Sequence
  Synthetic
SLEELLEELERILREVEERIKEVVRRLEEDTRRVEEEIRRIVEELKRINRELEELVRRTGLDKSELDRLRRESEETEKRNRRLEEEIKKRLEESNRRIKELLDRAKERLKKIADDIKKVFDDGRVDERLVKEVRDTVKELEDELKELLDRNHELTRRLEEEAKRLLEENKKRADDVKEELR

SEQ ID NO: 11109 - protein, 181 aa, Artificial Sequence; identical to SEQ ID NO: 11108
  Synthetic

SEQ ID NO: 11110 - protein, 184 aa, Artificial Sequence
  Synthetic
RLDEVIRRVEEVIRDVERRVAEVVKRLRDSSKTVKEKIETVIRRNKEINKRLEDLIRESGVPEEVKRKAEEVLERSDRENEKLLREADRRLRESEKKLDDLRKEIEDTVRRLRERLKDVARRGVPEDDLRRTLEEVKRTIDKLKEDAERLLEENKDLIRRLEEELKESSKRNDTLVKKLKKELK

SEQ ID NO: 11111 - protein, 184 aa, Artificial Sequence; identical to SEQ ID NO: 11110
  Synthetic

SEQ ID NO: 11112 - protein, 182 aa, Artificial Sequence
  Synthetic
REMEEALKRNNELSERLRRELKRVLEENHRLSRDLEKKLRDLLERVRELVERLDRMKEEGKADEDTLDKLRREVEDLLRRLEELLREIKRKSEELLERLKRLLDELRKESRKLLEDLRRKSDTEEVRRVLEEIRRDTEELEKDARRVLTELRRNLERLRRKVEKVLEEIRRILEELERRVRK

SEQ ID NO: 11113 - protein, 182 aa, Artificial Sequence; identical to SEQ ID NO: 11112
  Synthetic

SEQ ID NO: 11114 - protein, 175 aa, Artificial Sequence
  Synthetic
DKLEKLEEKLEKDVRRWDDELRRDLEDSKRLVDTIRKRLEKLLRDHRELVRRIRELLRDGRVPEKLMKELEDFNRRVAEEVKKLRDDLRRKLRESAERHKKIAEELRRELKRIEDEVGRNEVVRRLEEEVRRLEEKVKEVLRRNEEEVRRLEKDIERVLRESTKIVEDLKDEVRK

SEQ ID NO: 11115 - protein, 175 aa, Artificial Sequence; identical to SEQ ID NO: 11114
  Synthetic

SEQ ID NO: 11116 - protein, 184 aa, Artificial Sequence
  Synthetic
SVEEVVEELERIHREVKREIDEVVDRLREINEEVRREIKEVLDKIREDLERLKEEIDRDLKDKKTADRLKEEIDRLLREVEETVERLERRHEDAKRRTRERVEELKRRHDKVLDEIRELIRRGVSDDILREMLRKSEELVRESREDLKRLLEEHRKLVEESRRELERLKKEVKDAVEEVRRRLK

SEQ ID NO: 11117 - protein, 184 aa, Artificial Sequence; identical to SEQ ID NO: 11116
  Synthetic

SEQ ID NO: 11118 - protein, 184 aa, Artificial Sequence
  Synthetic
SVEEVVEELKKIHEDVKRKIDEVLKRLKRINDELRKRIREVLERLRREAEKLMEAIRRDARDRDTVKKLEEELRRLLKRLEDTARELVKRSDKLLEDTERTARKLKEDHDRVRKKIEDLVREGVSDDILREMLKESKELVKRSEKTLRELEKRHRDLVREVEETLKELEREVERKVREVERRVR

SEQ ID NO: 11119 - protein, 184 aa, Artificial Sequence; identical to SEQ ID NO: 11118
  Synthetic

SEQ ID NO: 11120 - protein, 184 aa, Artificial Sequence
  Synthetic
SVKEVLDEIRKINDDARRRLEEVLKDLKRINDELKERVDRVHDRNRRLLEELKKEIRTKLKDKRKADELERRLKELLEESKKLADEMKKRSDDVLRETERTARELTERHRKLLEEVKRLVEAGVSDDILREMLERNKELVKESKKVLEELEREHRELVREVKKRLDDSTEKIKTEVDKVKKELD

SEQ ID NO: 11121 - protein, 184 aa, Artificial Sequence; identical to SEQ ID NO: 11120
  Synthetic

SEQ ID NO: 11122 - protein, 184 aa, Artificial Sequence
  Synthetic
SVEEVIKEIEKIIRDLKEELKKVLTELEKRNEELKRRVEEVHEESRRLLDTIRKEIERKLKDKKEADRLEEELRRALKKDEELVREVIKRSEDLLRETRKRAKELSDRLEELRKRVEDVARAGISDEVLEELLRRVKKTVKEVREDLDRLRKEHEELVDRVREELERSLREIKERLERIKRRLD

SEQ ID NO: 11123 - protein, 184 aa, Artificial Sequence; identical to SEQ ID NO: 11122
  Synthetic

SEQ ID NO: 11124 - protein, 180 aa, Artificial Sequence
  Synthetic
KEAEELLEKVRKLVKEIEDRLRKSSEENRELVKRVEDELRETTKKNKKLVDEIKERREKSDKDKKKVDDDIRKELEDVSRENKEILKRIEDESRKSEEKNKKLADDVKRELDEMRREVREKVKDEDVLRRIEEILERVERAVREVLRRNKEINDRLRERVEDVVRKNEDILRRVLDEVRK

SEQ ID NO: 11125 - protein, 180 aa, Artificial Sequence; identical to SEQ ID NO: 11124
  Synthetic

SEQ ID NO: 11126 - protein, 180 aa, Artificial Sequence
  Synthetic
DEVERLIEEVDKLVKTIEEELRRSSEKNKDAVRRVKRRLEKSNEDNREVVRRVDKERRDSDKDRKKVRDEIEERSRRTEEENKRLLKELKEESERLEEENRRLLEEVERRLERMEEEVRKKVKDEDVLRTIKEILRELRERVEEVAKRNKEINDRLNEDVERVVRENKELNDRLRERVDR

SEQ ID NO: 11127 - protein, 180 aa, Artificial Sequence; identical to SEQ ID NO: 11126
  Synthetic

SEQ ID NO: 11128 - protein, 180 aa, Artificial Sequence
  Synthetic
DEAEKLIEEVKRLVEDLERKLDESSRRNEETVKRIDKELKDSNKKNRDTVKKVTDTAKDSDKDREEVLRRLKKRSEETKEENKELLKRVRERLEKVKEDNDRLLEEITRALRELEDKARKTIKDEDVLRTIKKILDDLERRVEEVVRRNREILKDLERKVRRVFEENEKLNRELEERVKT

SEQ ID NO: 11129 - protein, 180 aa, Artificial Sequence; identical to SEQ ID NO: 11128
  Synthetic

SEQ ID NO: 11130 - protein, 178 aa, Artificial Sequence
  Synthetic
SKADEVEKDVDRKLKEVKKRLDETRESVRRKLEEVRRELEESEKSVETVLREVKKTKDRGTSEEALKDIKRRLREHNKRLTEKHEKIKRELDKHNKELTDDHERIKEELKEKVRKLEEDGLEEEVLKKLKDIATELRERLDRNNKELTDIHRELKERLDRNNTKLSEIHKRLEEELDK

SEQ ID NO: 11131 - protein, 178 aa, Artificial Sequence; identical to SEQ ID NO: 11130
  Synthetic

SEQ ID NO: 11132 - protein, 178 aa, Artificial Sequence
  Synthetic
SEVDEARKRVRDVLEEVRKALEETEKSVRRTLEEVEKRLKESEDSVRKVLEDVRRELERGTSEEVLKKIEEDLRRHNKRLTETHKEIEDRLRDHNRKLTDLHRRLKKELDRLLKELKDKGLDEEALRELEEIARRLERELEKNNKDLTDIHETLRRRLEDNNRKLSKIHEDLARELRK

SEQ ID NO: 11133 - protein, 178 aa, Artificial Sequence; identical to SEQ ID NO: 11132
  Synthetic

SEQ ID NO: 11134 - protein, 182 aa, Artificial Sequence
  Synthetic
KEAEDMLREVKRLIDRIKKVLEDVLKAIEELIRRLEDIHRKVNEDSERLTEDLKRTIGTERDEAREVLKRLEDLNREIRKRSEEVKRELRKVLEDARKRLEEIERELEEMLRRLEREVEKGTSKEKIEELLRRVEELIRRIEEEVRKLLEDVERKIRESVKEAEELLRRSKKEIERVKREDT

SEQ ID NO: 11135 - protein, 182 aa, Artificial Sequence; identical to SEQ ID NO: 11134
  Synthetic

SEQ ID NO: 11136 - protein, 182 aa, Artificial Sequence
  Synthetic
SEAERVIRESERLTDELRKELEKALRRSKKLSDELRKIHEDANREVRKLIEDLKRTIGTESEEARDVLRKLEKELDRLRRESERVEKESEDLNREIKRRLDELLRRSEELNERIRDLLRKGTREEILKKLLDESRDTVRRVEDTVRKLVRRSEEFVRKSKERVKRLLDDVRRKIEDVKRKTK

SEQ ID NO: 11137 - protein, 182 aa, Artificial Sequence; identical to SEQ ID NO: 11136
  Synthetic

SEQ ID NO: 11138 - protein, 178 aa, Artificial Sequence
  Synthetic
DEEERLLREAEEMHERNKRLIDKLRREVEESLKEVEREIRRLLTDIARLVRRVEELKKNNIDRKEVEDLLRRIEEELEKIERELRKILRDDERKLKEAEDRLRRMLEENKRVLRRIKEENKEAEEVLREIRKLVEESRKILEKVIRDWRRITEELKDRLRRVLEELKKLVDELRKTLT

SEQ ID NO: 11139 - protein, 178 aa, Artificial Sequence; identical to SEQ ID NO: 11138
  Synthetic

SEQ ID NO: 11140 - protein, 178 aa, Artificial Sequence
  Synthetic
SDRERLLEEIKDLNRRNKEILERILRRSEELLKKAEDLLDKIKRDSDRAARKVEELKRRNISEELVKELLKELEDINRELKKEIERLLKEWEKDSRELEDEIRRVLEENRKKLRDVKEENKELEEVLRRLEKIVRDSERELRRVREEDKKVADEIREKLKRVHDESERIVRELKETLR

SEQ ID NO: 11141 - protein, 178 aa, Artificial Sequence; identical to SEQ ID NO: 11140
  Synthetic

SEQ ID NO: 11142 - protein, 181 aa, Artificial Sequence
  Synthetic
KELEDVKKRVDDLLRENERVVRELLESSKRLNEENEEAVRRLDESSKELAKRVKEIKDRGTSEDAVRKVDEELKEHLKEVKKRLEDLVRKNEEHLRRVKETSDRMKKKNDEELDRLRTKDGDDRDVRRVLEFVKEVIKEIERIHKKVNDDNRKLIEESIRRLKKVLDDNKRVIDELRKTLK

SEQ ID NO: 11143 - protein, 181 aa, Artificial Sequence; identical to SEQ ID NO: 11142
  Synthetic

SEQ ID NO: 11144 - protein, 179 aa, Artificial Sequence
  Synthetic
DEEEEVKKRVEELLDELRKSIKKSVDDSKRVLDEARKSVERSREELEKLLRALEDILRKGNKTGELLERLKRLLDKLREDADRWRKELEKLVEDLKRHADEWTKELDRLIRELRKRLEAREDDLRRLEEEAKRLVEEVRRRDEEHLKRSEELLKEVEERDRELLKRARDLFEDVRRKIE

SEQ ID NO: 11145 - protein, 179 aa, Artificial Sequence; identical to SEQ ID NO: 11144
  Synthetic

SEQ ID NO: 11146 - protein, 179 aa, Artificial Sequence
  Synthetic
SEKEEVAKRLEEALKRLEDTIRKVSEENERVLRTLEDRARKSAEKVERLLEELRKRLEDSNNQGELLETLERLIERLRRETEDLKRKLKELVTDSRRRTKELEDKLKERAKELRKEIKADKLDLEELKKRVEELTREVEEEIRRLKETSKRLEEEVKRLIEDHDRRVRELKDEVERRIR

SEQ ID NO: 11147 - protein, 179 aa, Artificial Sequence; identical to SEQ ID NO: 11146
  Synthetic

SEQ ID NO: 11148 - protein, 177 aa, Artificial Sequence
  Synthetic
DEAREVIKTLRKLLRDSAEILTRVTEEDREVLRELAEIIKKVTDEDRRVLEEARRELDDERVLDELEKLSRDIEKELEKLLRDLTKRSEDIRRDVERLLTDTERDIRRLIRELERRQGDRILEELLERIKRLHEENKKAVDRWREESKKLKEEVKKKVKEWKDTSEELLRRVKERAR

SEQ ID NO: 11149 - protein, 177 aa, Artificial Sequence; identical to SEQ ID NO: 11148
  Synthetic

SEQ ID NO: 11150 - protein, 177 aa, Artificial Sequence
  Synthetic
KEVEEVIKTLRRLSEKLAREHKKVIDELRDLLRRSEEELKRVAKADEDLLDEIRRKVQDRSVLEELRKKSETMKRELKKLLDDTRKKIEDIERTNERVLREHRKKTEDLIRELDKRRGEEILEEVKERIDRLVKENKEIVDRSRELAKELHDRNREMLTKWLEDSKRLVEEAEKKAR

SEQ ID NO: 11151 - protein, 177 aa, Artificial Sequence; identical to SEQ ID NO: 11150
  Synthetic

SEQ ID NO: 11152 - protein, 177 aa, Artificial Sequence
  Synthetic
DKEKEVTDELRKAKRDNDEVVKEIEKESRRLLEEVKETVKRDKKVLRELEEEVKEAKKKNVSEDLVEKLLRKWEKVSKELKDRHRRLIEEWDKVTKELEKKSRKIIDENRKILKRIADRGVDKKVLDEIRKVLTEAKKMHDDVLRRDREVLETARKLSEDSKKENEDVLRKVAEELR

SEQ ID NO: 11153 - protein, 177 aa, Artificial Sequence; identical to SEQ ID NO: 11152
  Synthetic

SEQ ID NO: 11154 - protein, 176 aa, Artificial Sequence
  Synthetic
DEERDLERKLEEVIRRAKETSERLNRELERVIEEVRRRHEEAKRRAEEVIRRILKRLGTEREEAKDVVRRLEEILRELDDHVRRSEETAKEILDRSRKKSEELERKLREVLRTLREARLDKDEVDELVERLKRDIDRWAEDVKKLIEDLRRMVERNLREIDKLLKDLKRVVDETKK

SEQ ID NO: 11155 - protein, 176 aa, Artificial Sequence; identical to SEQ ID NO: 11154
  Synthetic

SEQ ID NO: 11156 - protein, 179 aa, Artificial Sequence
  Synthetic
SEADKLLDEVRKRVEDMERRLEELVREDRKLVEDHHRDNKRLLDRVKKLAEDMERLIDRGEVDEEVIKRLEEELKKLLEDNKRHLDELKRRSTELLRELRKLLEELEKTLKDLLREKSGRSEKAEDVRRRLKELAERVRRVVRRVEEESKRTLKELEKSSKELAKKLRDLVETVERRLR

SEQ ID NO: 11157 - protein, 179 aa, Artificial Sequence; identical to SEQ ID NO: 11156
  Synthetic

SEQ ID NO: 11158 - protein, 179 aa, Artificial Sequence
  Synthetic
SRVDDLLREAERLAEEHHRLNKKLVDEDRELVRRHHETNRRVLEEVKRLVEEAEKLIRRGDVDERVIRELKERLRDLLRKNREHLRRLEETSKDLLRRNEEHLKRLEETLEDLLKRFSGRSEEAKRVAERVRRLLERLRESSKRVKETSKETLERLRRSSEKVEEDLRKLIEDVERAAR

SEQ ID NO: 11159 - protein, 179 aa, Artificial Sequence; identical to SEQ ID NO: 11158
  Synthetic

SEQ ID NO: 11160 - protein, 179 aa, Artificial Sequence
  Synthetic
RELEELVKRDREEVRKHHELNKELLDRARKLVRDHHERNKRLVREDEELVREAKELIERGEVTEEKIEELMRRSKDLLRDNRRHLRELEDTLRRLLEENKRHLDDVRRRSEELLRDKSGRSDEARKAKRESERTLKELEESSREVEKELRRLLKELRESSKKVEDDSRKSLERVERALR

SEQ ID NO: 11161 - protein, 179 aa, Artificial Sequence; identical to SEQ ID NO: 11160
  Synthetic

SEQ ID NO: 11162 - protein, 179 aa, Artificial Sequence
  Synthetic
SKADELVKKDREKVEEMERRLRKILREVEELVKEHHERNKRVLDEVKKRVDDAKELIKRGEVTEEVIRKLEEELKDLLRRNEKHLRELEETLKKLLEEATRLVKKLEDDSRRLLKDDSGRSRKAEEVEKDSRRTLERVKDVLRKVEETLRELLDRLRESSERVTEALKRLMEEVREALR

SEQ ID NO: 11163 - protein, 179 aa, Artificial Sequence; identical to SEQ ID NO: 11162
  Synthetic

SEQ ID NO: 11164 - protein, 185 aa, Artificial Sequence
  Synthetic
SKLEALVKEVEELVKKAKKDLDRLVEEDKKLAEEHHDRNRKLVDTVRELVERAKEDIDRRGKTEELEELLRRLAEEIERLKRENEKHLRELERTSRELVRRLEELLKRLAERIKKIIDDAERDVSDKKELEEVVKELRRLLKELEEVVRRVARESEKSLEEVRRSSEEVKKALDKLLKELEDAVR

SEQ ID NO: 11165 - protein, 185 aa, Artificial Sequence; identical to SEQ ID NO: 11164
  Synthetic

SEQ ID NO: 11166 - protein, 183 aa, Artificial Sequence
  Synthetic
SELERIVEEVKKLVEDHKKKLKDIVEEVEELVRRHEKKLEDILRRNEKRVRELKEEVRRRGKLEEELVKDAERESRKNKEEIRRSNEEIHRRLKELKERIKESNDKLHEDLKRLTDDIDRRVRDRKKAEEVKRRLEELLKEANKASEEVKRTLDKLLEDVNRESERVERASDELLKRLRDDAR

SEQ ID NO: 11167 - protein, 183 aa, Artificial Sequence; identical to SEQ ID NO: 11166
  Synthetic

SEQ ID NO: 11168 - protein, 183 aa, Artificial Sequence
  Synthetic
SELEELVKTVKKLVEDHKRRLKELLERARRSTEDLKRKLEKLVRDVRKLVEDAKDAIRKSGKADERLLETIKRALEELKRRARDLLRRHKEEIDRLIKDIRRSNEELHRAAERLRDELRKRVRDKDELKKVEDALRRLLEELNEVSEEVERALRELHREVEEAIRRVEKELDRLLKEVEDAAR

SEQ ID NO: 11169 - protein, 183 aa, Artificial Sequence; identical to SEQ ID NO: 11168
  Synthetic

SEQ ID NO: 11170 - protein, 182 aa, Artificial Sequence
  Synthetic
RELEEILKESEKSVEDIKRELEKIKKKSKTDLEKWKDDLRKIRKEIADLVRKVTREVEDGRSDSRLRDLERRLREVVRRIEEELERMIKTHEDRVRELEERLRKIIDDHRRKVEDLLRKIGSEDEKVKRVLDELKRSLEEVRRALEEVREVLRESLKRLRDLAEDLKRELRELLKELEERAR

SEQ ID NO: 11171 - protein, 182 aa, Artificial Sequence; identical to SEQ ID NO: 11170
  Synthetic

SEQ ID NO: 11172 - protein, 177 aa, Artificial Sequence
  Synthetic
SEKEDVERRIRRLIERLRRMIEELRRRNTDILRKVRELVEEVKKADERSIREVEKLLRDVDEELKKRIKTLIDRSREETEEMDRDVEKLIRESEKRTDELEEELRRLARELEKVVTRDVTDLDELIERAERLVREIERKLRKAIEDSKDLLRRIEERLRRLIEKSEKLLRDIKREVD

SEQ ID NO: 11173 - protein, 177 aa, Artificial Sequence; identical to SEQ ID NO: 11172
  Synthetic

SEQ ID NO: 11174 - protein, 182 aa, Artificial Sequence
  Synthetic
SEIEKLVKEIEDHLRRLKEEIEKSSRELKKHLDELERRADKIVRDLRRLVEEIKDTIRREGPRDELLRRLEEALRRIEETLERLRRDHKRLLDRSEDKLRELEEDHDRLLEEVRERLRKSELPREAVERLRKALKESKERLKKALEDNRRTLKKSEEDLKKVMEEVKETLDRVKKEVERALD

SEQ ID NO: 11175 - protein, 182 aa, Artificial Sequence; identical to SEQ ID NO: 11174
  Synthetic

SEQ ID NO: 11176 - protein, 182 aa, Artificial Sequence
  Synthetic
SEIEKLARDAEEHLRRLLEELRKSSDDLRRHLEELKKKLKEIVDRLKELVDRIKDTIRREGDAREIEKALEKVLREVEETLRRLLEDHKRLLEESKKRLKELLKNHEDLLRKLEDDLRKAELDKKVIDDLRRILEESARRLKRAAERNDETLKESADRLRRAIDRLREVAEKLSRDVRRAAK

SEQ ID NO: 11177 - protein, 182 aa, Artificial Sequence; identical to SEQ ID NO: 11176
  Synthetic

SEQ ID NO: 11178 - protein, 182 aa, Artificial Sequence
  Synthetic
SEIEDIARRLREHLEDLKKKIKDSSDELRKHLEEVKRRIERTSEKLTDDVRKIEEKIRKDGPREKIEEDLKEALTRSRTELKKLLDDHRRLLKRSDELLKKLLENHKRTLDRIKEELDRSELPEERIRDLEKILEDSERELRDMARKNRETAERSERELRKVLRENDRTAKKLTDDVRRTAK

SEQ ID NO: 11179 - protein, 182 aa, Artificial Sequence; identical to SEQ ID NO: 11178
  Synthetic

SEQ ID NO: 11180 - protein, 182 aa, Artificial Sequence
  Synthetic
DEIDKLVEDVERHLEKLLREIERSSEELKKHVEDLREKLRDLVRRLKEVVDEIRKTVRDKGPREEILEDLKRILEEIDDTLRKLLANHDELLKRSDDLLRELIADHERLLKRVEEELKRSELPKEDVDRLREMLERSRRRLKRAADENRRTAEKSRKELKEVAERVRRALERMRREVEEELR

SEQ ID NO: 11181 - protein, 182 aa, Artificial Sequence; identical to SEQ ID NO: 11180
  Synthetic

SEQ ID NO: 11182 - protein, 182 aa, Artificial Sequence
  Synthetic
SEIEEIAKKLEEHVKRVVEEIRKSSEEAKRHVEDVKRKIEELVRELARLVKEIKEAIRRDGPRDELEERLKKVLDEVRKRLEELLRNHEELLKRSDDRLKELLKNHEEELRRVEDELRRIELPKERIDELREIAKRSRDKLKKVADENRRTLEKSLRDLARAVEELRRRAKRLEEEVRRERT

SEQ ID NO: 11183 - protein, 182 aa, Artificial Sequence; identical to SEQ ID NO: 11182
  Synthetic

SEQ ID NO: 11184 - protein, 182 aa, Artificial Sequence
  Synthetic
SDIERLVEEVEKHLKELEDEIRKSSEELKRLAEEISRDIRRTSEELKKLIEDIKDTIRRDGTRDEIERRLEEAIRRSRERLERLKERLDRSVKESRKKLKRLEENHRELLKRLEDRLREIELPKEKIDRLRKILEESEKRLEELARENERTVKEVKKEIDDMVRENEETAKRLLDEVRETLR

SEQ ID NO: 11185 - protein, 182 aa, Artificial Sequence; identical to SEQ ID NO: 11184
  Synthetic

SEQ ID NO: 11186 - protein, 172 aa, Artificial Sequence
  Synthetic
DELEKLLEDLRRKIRKIKEDLRKTSKENRDELRKSKKRLEDLVREVRRLVEEIRKLKEQDRREVEKTLRDLRKKIEDAIRESEERSKKLLDDNKKTADDIRRDLKRTEERLRKEGISEEVEKTLRELIKEIEKVLEDDERTVRELIERNKELLDRLAKEVDRLIEEIKREAD

(The sequence listing continues in the following parts.)
